United States Patent Application Publication US 2018/0305689 A1 - sequence listing, part 145

SEQ ID NO: 2027419 - RNA, 19 nt, Artificial Sequence
  Description of Artificial Sequence: Synthetic oligonucleotide
  Antisense strand to SEQ ID NO: 2027418
ccuucucuuagaguauucc

SEQ ID NO: 2027420 - RNA, 19 nt, Artificial Sequence
  Description of Artificial Sequence: Synthetic oligonucleotide
  Sense strand starting at position 724 of SEQ ID NO: 1881219
ucugcugguccucgaauuu

SEQ ID NO: 2027421 - RNA, 19 nt, Artificial Sequence
  Description of Artificial Sequence: Synthetic oligonucleotide
  Antisense strand to SEQ ID NO: 2027420
aaauucgaggaccagcaga

SEQ ID NO: 2027422 - RNA, 19 nt, Artificial Sequence
  Description of Artificial Sequence: Synthetic oligonucleotide
  Sense strand starting at position 820 of SEQ ID NO: 1881219
uuuguagugaauugugaac

SEQ ID NO: 2027423 - RNA, 19 nt, Artificial Sequence
  Description of Artificial Sequence: Synthetic oligonucleotide
  Antisense strand to SEQ ID NO: 2027422
guucacaauucacuacaaa

SEQ ID NO: 2027424 - RNA, 19 nt, Artificial Sequence
  Description of Artificial Sequence: Synthetic oligonucleotide
  Sense strand starting at position 843 of SEQ ID NO: 1881219
ucuugauuaaauugcggua

SEQ ID NO: 2027425 - RNA, 19 nt, Artificial Sequence
  Description of Artificial Sequence: Synthetic oligonucleotide
  Antisense strand to SEQ ID NO: 2027424
uaccgcaauuuaaucaaga

SEQ ID NO: 2027426 - RNA, 19 nt, Artificial Sequence
  Description of Artificial Sequence: Synthetic oligonucleotide
  Sense strand starting at position 848 of SEQ ID NO: 1881219
auuaaauugcgguaaagau

SEQ ID NO: 2027427 - RNA, 19 nt, Artificial Sequence
  Description of Artificial Sequence: Synthetic oligonucleotide
  Antisense strand to SEQ ID NO: 2027426
aucuuuaccgcaauuuaau

SEQ ID NO: 2027428 - RNA, 19 nt, Artificial Sequence
  Description of Artificial Sequence: Synthetic oligonucleotide
  Sense strand starting at position 856 of SEQ ID NO: 1881219
gcgguaaagaugggaaaca

SEQ ID NO: 2027429 - RNA, 19 nt, Artificial Sequence
  Description of Artificial Sequence: Synthetic oligonucleotide
  Antisense strand to SEQ ID NO: 2027428
uguuucccaucuuuaccgc

SEQ ID NO: 2027430 - RNA, 19 nt, Artificial Sequence
  Description of Artificial Sequence: Synthetic oligonucleotide
  Sense strand starting at position 913 of SEQ ID NO: 1881219
ccauuacgagcuuaggaaa

SEQ ID NO: 2027431 - RNA, 19 nt, Artificial Sequence
  Description of Artificial Sequence: Synthetic oligonucleotide
  Antisense strand to SEQ ID NO: 2027430
uuuccuaagcucguaaugg

SEQ ID NO: 2027432 - RNA, 19 nt, Artificial Sequence
  Description of Artificial Sequence: Synthetic oligonucleotide
  Sense strand starting at position 1111 of SEQ ID NO: 1881219
gcuucuggaguuuaacacu

SEQ ID NO: 2027433 - RNA, 19 nt, Artificial Sequence
  Description of Artificial Sequence: Synthetic oligonucleotide
  Antisense strand to SEQ ID NO: 2027432
aguguuaaacuccagaagc

SEQ ID NO: 2027434 - RNA, 19 nt, Artificial Sequence
  Description of Artificial Sequence: Synthetic oligonucleotide
  Sense strand starting at position 1143 of SEQ ID NO: 1881219
aaagguuucuaagaggaau

SEQ ID NO: 2027435 - RNA, 19 nt, Artificial Sequence
  Description of Artificial Sequence: Synthetic oligonucleotide
  Antisense strand to SEQ ID NO: 2027434
auuccucuuagaaaccuuu

SEQ ID NO: 2027436 - RNA, 19 nt, Artificial Sequence
  Description of Artificial Sequence: Synthetic oligonucleotide
  Sense strand starting at position 1197 of SEQ ID NO: 1881219
ccguauaaacauugauaca

SEQ ID NO: 2027437 - RNA, 19 nt, Artificial Sequence
  Description of Artificial Sequence: Synthetic oligonucleotide
  Antisense strand to SEQ ID NO: 2027436
uguaucaauguuuauacgg

SEQ ID NO: 2027438 - RNA, 19 nt, Artificial Sequence
  Description of Artificial Sequence: Synthetic oligonucleotide
  Sense strand starting at position 1293 of SEQ ID NO: 1881219
gcagucaaauguccaaauu

SEQ ID NO: 2027439 - RNA, 19 nt, Artificial Sequence
  Description of Artificial Sequence: Synthetic oligonucleotide
  Antisense strand to SEQ ID NO: 2027438
aauuuggacauuugacugc

SEQ ID NO: 2027440 - RNA, 19 nt, Artificial Sequence
  Description of Artificial Sequence: Synthetic oligonucleotide
  Sense strand starting at position 1381 of SEQ ID NO: 1881219
agccaucgggcucaucaau

SEQ ID NO: 2027441 - RNA, 19 nt, Artificial Sequence
  Description of Artificial Sequence: Synthetic oligonucleotide
  Antisense strand to SEQ ID NO: 2027440
auugaugagcccgauggcu

SEQ ID NO: 2027442 - RNA, 19 nt, Artificial Sequence
  Description of Artificial Sequence: Synthetic oligonucleotide
  Sense strand starting at position 2265 of SEQ ID NO: 1881219
ggagggaaauccgcgagaa

SEQ ID NO: 2027443 - RNA, 19 nt, Artificial Sequence
  Description of Artificial Sequence: Synthetic oligonucleotide
  Antisense strand to SEQ ID NO: 2027442
uucucgcggauuucccucc

SEQ ID NO: 2027444 - RNA, 19 nt, Artificial Sequence
  Description of Artificial Sequence: Synthetic oligonucleotide
  Sense strand starting at position 2266 of SEQ ID NO: 1881219
gagggaaauccgcgagaag

SEQ ID NO: 2027445 - RNA, 19 nt, Artificial Sequence
  Description of Artificial Sequence: Synthetic oligonucleotide
  Antisense strand to SEQ ID NO: 2027444
cuucucgcggauuucccuc

SEQ ID NO: 2027446 - RNA, 19 nt, Artificial Sequence
  Description of Artificial Sequence: Synthetic oligonucleotide
  Sense strand starting at position 2269 of SEQ ID NO: 1881219
ggaaauccgcgagaagcua

SEQ ID NO: 2027447 - RNA, 19 nt, Artificial Sequence
  Description of Artificial Sequence: Synthetic oligonucleotide
  Antisense strand to SEQ ID NO: 2027446
uagcuucucgcggauuucc

SEQ ID NO: 2027448 - RNA, 19 nt, Artificial Sequence
  Description of Artificial Sequence: Synthetic oligonucleotide
  Sense strand starting at position 2674 of SEQ ID NO: 1881219
gguucuugcuucucugaga

SEQ ID NO: 2027449 - RNA, 19 nt, Artificial Sequence
  Description of Artificial Sequence: Synthetic oligonucleotide
  Antisense strand to SEQ ID NO: 2027448
ucucagagaagcaagaacc

SEQ ID NO: 2027450 - RNA, 19 nt, Artificial Sequence
  Description of Artificial Sequence: Synthetic oligonucleotide
  Sense strand starting at position 2691 of SEQ ID NO: 1881219
gauggccugaguggugaau

SEQ ID NO: 2027451 - RNA, 19 nt, Artificial Sequence
  Description of Artificial Sequence: Synthetic oligonucleotide
  Antisense strand to SEQ ID NO: 2027450
auucaccacucaggccauc

SEQ ID NO: 2027452 - RNA, 19 nt, Artificial Sequence
  Description of Artificial Sequence: Synthetic oligonucleotide
  Sense strand starting at position 2887 of SEQ ID NO: 1881219
ucauucugaugccuguaaa

SEQ ID NO: 2027453 - RNA, 19 nt, Artificial Sequence
  Description of Artificial Sequence: Synthetic oligonucleotide
  Antisense strand to SEQ ID NO: 2027452
uuuacaggcaucagaauga

SEQ ID NO: 2027454 - RNA, 19 nt, Artificial Sequence
  Description of Artificial Sequence: Synthetic oligonucleotide
  Sense strand starting at position 2890 of SEQ ID NO: 1881219
uucugaugccuguaaaugu

SEQ ID NO: 2027455 - RNA, 19 nt, Artificial Sequence
  Description of Artificial Sequence: Synthetic oligonucleotide
  Antisense strand to SEQ ID NO: 2027454
acauuuacaggcaucagaa

SEQ ID NO: 2027456 - RNA, 19 nt, Artificial Sequence
  Description of Artificial Sequence: Synthetic oligonucleotide
  Sense strand starting at position 3145 of SEQ ID NO: 1881219
uuuccuucuuugucuggaa

SEQ ID NO: 2027457 - RNA, 19 nt, Artificial Sequence
  Description of Artificial Sequence: Synthetic oligonucleotide
  Antisense strand to SEQ ID NO: 2027456
uuccagacaaagaaggaaa

SEQ ID NO: 2027458 - RNA, 19 nt, Artificial Sequence
  Description of Artificial Sequence: Synthetic oligonucleotide
  Sense strand starting at position 3146 of SEQ ID NO: 1881219
uuccuucuuugucuggaau

SEQ ID NO: 2027459 - RNA, 19 nt, Artificial Sequence
  Description of Artificial Sequence: Synthetic oligonucleotide
  Antisense strand to SEQ ID NO: 2027458
auuccagacaaagaaggaa

SEQ ID NO: 2027460 - RNA, 19 nt, Artificial Sequence
  Description of Artificial Sequence: Synthetic oligonucleotide
  Sense strand starting at position 3147 of SEQ ID NO: 1881219
uccuucuuugucuggaauu

SEQ ID NO: 2027461 - RNA, 19 nt, Artificial Sequence
  Description of Artificial Sequence: Synthetic oligonucleotide
  Antisense strand to SEQ ID NO: 2027460
aauuccagacaaagaagga

SEQ ID NO: 2027462 - RNA, 19 nt, Artificial Sequence
  Description of Artificial Sequence: Synthetic oligonucleotide
  Sense strand starting at position 3279 of SEQ ID NO: 1881219
auaguuguugcaugggaag

SEQ ID NO: 2027463 - RNA, 19 nt, Artificial Sequence
  Description of Artificial Sequence: Synthetic oligonucleotide
  Antisense strand to SEQ ID NO: 2027462
cuucccaugcaacaacuau

SEQ ID NO: 2027464 - RNA, 19 nt, Artificial Sequence
  Description of Artificial Sequence: Synthetic oligonucleotide
  Sense strand starting at position 3353 of SEQ ID NO: 1881219
aagugucaugauugguaac

SEQ ID NO: 2027465 - RNA, 19 nt, Artificial Sequence
  Description of Artificial Sequence: Synthetic oligonucleotide
  Antisense strand to SEQ ID NO: 2027464
guuaccaaucaugacacuu

SEQ ID NO: 2027466 - RNA, 19 nt, Artificial Sequence
  Description of Artificial Sequence: Synthetic oligonucleotide
  Sense strand starting at position 3354 of SEQ ID NO: 1881219
agugucaugauugguaacu

SEQ ID NO: 2027467 - RNA, 19 nt, Artificial Sequence
  Description of Artificial Sequence: Synthetic oligonucleotide
  Antisense strand to SEQ ID NO: 2027466
aguuaccaaucaugacacu

SEQ ID NO: 2027468 - RNA, 19 nt, Artificial Sequence
  Description of Artificial Sequence: Synthetic oligonucleotide
  Sense strand starting at position 3355 of SEQ ID NO: 1881219
gugucaugauugguaacuc

SEQ ID NO: 2027469 - RNA, 19 nt, Artificial Sequence
  Description of Artificial Sequence: Synthetic oligonucleotide
  Antisense strand to SEQ ID NO: 2027468
gaguuaccaaucaugacac

SEQ ID NO: 2027470 - RNA, 19 nt, Artificial Sequence
  Description of Artificial Sequence: Synthetic oligonucleotide
  Sense strand starting at position 3480 of SEQ ID NO: 1881219
aaugucuguucugugaaug

SEQ ID NO: 2027471 - RNA, 19 nt, Artificial Sequence
  Description of Artificial Sequence: Synthetic oligonucleotide
  Antisense strand to SEQ ID NO: 2027470
cauucacagaacagacauu

SEQ ID NO: 2027472 - RNA, 19 nt, Artificial Sequence
  Description of Artificial Sequence: Synthetic oligonucleotide
  Sense strand starting at position 3481 of SEQ ID NO: 1881219
augucuguucugugaauga

SEQ ID NO: 2027473 - RNA, 19 nt, Artificial Sequence
  Description of Artificial Sequence: Synthetic oligonucleotide
  Antisense strand to SEQ ID NO: 2027472
ucauucacagaacagacau

SEQ ID NO: 2027474 - RNA, 19 nt, Artificial Sequence
  Description of Artificial Sequence: Synthetic oligonucleotide
  Sense strand starting at position 3485 of SEQ ID NO: 1881219
cuguucugugaaugauaga

SEQ ID NO: 2027475 - RNA, 19 nt, Artificial Sequence
  Description of Artificial Sequence: Synthetic oligonucleotide
  Antisense strand to SEQ ID NO: 2027474
ucuaucauucacagaacag

SEQ ID NO: 2027476 - RNA, 19 nt, Artificial Sequence
  Description of Artificial Sequence: Synthetic oligonucleotide
  Sense strand starting at position 3567 of SEQ ID NO: 1881219
agagcuaacuguuccaaga

SEQ ID NO: 2027477 - RNA, 19 nt, Artificial Sequence
  Description of Artificial Sequence: Synthetic oligonucleotide
  Antisense strand to SEQ ID NO: 2027476
ucuuggaacaguuagcucu

SEQ ID NO: 2027478 - RNA, 19 nt, Artificial Sequence
  Description of Artificial Sequence: Synthetic oligonucleotide
  Sense strand starting at position 3834 of SEQ ID NO: 1881219
gauuauggcuuucccagau

SEQ ID NO: 2027479 - RNA, 19 nt, Artificial Sequence
  Description of Artificial Sequence: Synthetic oligonucleotide
  Antisense strand to SEQ ID NO: 2027478
aucugggaaagccauaauc

SEQ ID NO: 2027480 - RNA, 19 nt, Artificial Sequence
  Description of Artificial Sequence: Synthetic oligonucleotide
  Sense strand starting at position 336 of SEQ ID NO: 1881220
acagaauauuaugaagaac

SEQ ID NO: 2027481 - RNA, 19 nt, Artificial Sequence
  Description of Artificial Sequence: Synthetic oligonucleotide
  Antisense strand to SEQ ID NO: 2027480
guucuucauaauauucugu

SEQ ID NO: 2027482 - RNA, 19 nt, Artificial Sequence
  Description of Artificial Sequence: Synthetic oligonucleotide
  Sense strand starting at position 442 of SEQ ID NO: 1881220
ucuggagugccauacacuu

SEQ ID NO: 2027483 - RNA, 19 nt, Artificial Sequence
  Description of Artificial Sequence: Synthetic oligonucleotide
  Antisense strand to SEQ ID NO: 2027482
aaguguauggcacuccaga

SEQ ID NO: 2027484 - RNA, 19 nt, Artificial Sequence
  Description of Artificial Sequence: Synthetic oligonucleotide
  Sense strand starting at position 514 of SEQ ID NO: 1881220
ucuagauggcaucacugau

SEQ ID NO: 2027485 - RNA, 19 nt, Artificial Sequence
  Description of Artificial Sequence: Synthetic oligonucleotide
  Antisense strand to SEQ ID NO: 2027484
aucagugaugccaucuaga

SEQ ID NO: 2027486 - RNA, 19 nt, Artificial Sequence
  Description of Artificial Sequence: Synthetic oligonucleotide
  Sense strand starting at position 609 of SEQ ID NO: 1881220
uucccaauuuguuuagcga

SEQ ID NO: 2027487 - RNA, 19 nt, Artificial Sequence
  Description of Artificial Sequence: Synthetic oligonucleotide
  Antisense strand to SEQ ID NO: 2027486
ucgcuaaacaaauugggaa

SEQ ID NO: 2027488 - RNA, 19 nt, Artificial Sequence
  Description of Artificial Sequence: Synthetic oligonucleotide
  Sense strand starting at position 617 of SEQ ID NO: 1881220
uuguuuagcgaagauaaca

SEQ ID NO: 2027489 - RNA, 19 nt, Artificial Sequence
  Description of Artificial Sequence: Synthetic oligonucleotide
  Antisense strand to SEQ ID NO: 2027488
uguuaucuucgcuaaacaa

SEQ ID NO: 2027490 - RNA, 19 nt, Artificial Sequence
  Description of Artificial Sequence: Synthetic oligonucleotide
  Sense strand starting at position 686 of SEQ ID NO: 1881220
agacuaaugucccucauga

SEQ ID NO: 2027491 - RNA, 19 nt, Artificial Sequence
  Description of Artificial Sequence: Synthetic oligonucleotide
  Antisense strand to SEQ ID NO: 2027490
ucaugagggacauuagucu

SEQ ID NO: 2027492 - RNA, 19 nt, Artificial Sequence
  Description of Artificial Sequence: Synthetic oligonucleotide
  Sense strand starting at position 838 of SEQ ID NO: 1881220
uugcaaagcguguuuaagu

SEQ ID NO: 2027493 - RNA, 19 nt, Artificial Sequence
  Description of Artificial Sequence: Synthetic oligonucleotide
  Antisense strand to SEQ ID NO: 2027492
acuuaaacacgcuuugcaa

SEQ ID NO: 2027494 - RNA, 19 nt, Artificial Sequence
  Description of Artificial Sequence: Synthetic oligonucleotide
  Sense strand starting at position 843 of SEQ ID NO: 1881220
aagcguguuuaaguacaga

SEQ ID NO: 2027495 - RNA, 19 nt, Artificial Sequence
  Description of Artificial Sequence: Synthetic oligonucleotide
  Antisense strand to SEQ ID NO: 2027494
ucuguacuuaaacacgcuu

SEQ ID NO: 2027496 - RNA, 19 nt, Artificial Sequence
  Description of Artificial Sequence: Synthetic oligonucleotide
  Sense strand starting at position 917 of SEQ ID NO: 1881220
uucuacaguuuguuuaaga

SEQ ID NO: 2027497 - RNA, 19 nt, Artificial Sequence
  Description of Artificial Sequence: Synthetic oligonucleotide
  Antisense strand to SEQ ID NO: 2027496
ucuuaaacaaacuguagaa

SEQ ID NO: 2027498 - RNA, 19 nt, Artificial Sequence
  Description of Artificial Sequence: Synthetic oligonucleotide
  Sense strand starting at position 1008 of SEQ ID NO: 1881220
cuuugucuauagcuaagaa

SEQ ID NO: 2027499 - RNA, 19 nt, Artificial Sequence
  Description of Artificial Sequence: Synthetic oligonucleotide
  Antisense strand to SEQ ID NO: 2027498
uucuuagcuauagacaaag

SEQ ID NO: 2027500 - RNA, 19 nt, Artificial Sequence
  Description of Artificial Sequence: Synthetic oligonucleotide
  Sense strand starting at position 1032 of SEQ ID NO: 1881220
gcagaaugcuacgucauua

SEQ ID NO: 2027501 - RNA, 19 nt, Artificial Sequence
  Description of Artificial Sequence: Synthetic oligonucleotide
  Antisense strand to SEQ ID NO: 2027500
uaaugacguagcauucugc

SEQ ID NO: 2027502 - RNA, 19 nt, Artificial Sequence
  Description of Artificial Sequence: Synthetic oligonucleotide
  Sense strand starting at position 1037 of SEQ ID NO: 1881220
augcuacgucauuauauac

SEQ ID NO: 2027503 - RNA, 19 nt, Artificial Sequence
  Description of Artificial Sequence: Synthetic oligonucleotide
  Antisense strand to SEQ ID NO: 2027502
guauauaaugacguagcau

SEQ ID NO: 2027504 - RNA, 19 nt, Artificial Sequence
  Description of Artificial Sequence: Synthetic oligonucleotide
  Sense strand starting at position 1179 of SEQ ID NO: 1881220
gugucaagaguuugucuca

SEQ ID NO: 2027505 - RNA, 19 nt, Artificial Sequence
  Description of Artificial Sequence: Synthetic oligonucleotide
  Antisense strand to SEQ ID NO: 2027504
ugagacaaacucuugacac

SEQ ID NO: 2027506 - RNA, 19 nt, Artificial Sequence
  Description of Artificial Sequence: Synthetic oligonucleotide
  Sense strand starting at position 1180 of SEQ ID NO: 1881220
ugucaagaguuugucucaa

SEQ ID NO: 2027507 - RNA, 19 nt, Artificial Sequence
  Description of Artificial Sequence: Synthetic oligonucleotide
  Antisense strand to SEQ ID NO: 2027506
uugagacaaacucuugaca

SEQ ID NO: 2027508 - RNA, 19 nt, Artificial Sequence
  Description of Artificial Sequence: Synthetic oligonucleotide
  Sense strand starting at position 1182 of SEQ ID NO: 1881220
ucaagaguuugucucaauu

SEQ ID NO: 2027509 - RNA, 19 nt, Artificial Sequence
  Description of Artificial Sequence: Synthetic oligonucleotide
  Antisense strand to SEQ ID NO: 2027508
aauugagacaaacucuuga

SEQ ID NO: 2027510 - RNA, 19 nt, Artificial Sequence
  Description of Artificial Sequence: Synthetic oligonucleotide
  Sense strand starting at position 1234 of SEQ ID NO: 1881220
agugauaacucaggauuuc

SEQ ID NO: 2027511 - RNA, 19 nt, Artificial Sequence
  Description of Artificial Sequence: Synthetic oligonucleotide
  Antisense strand to SEQ ID NO: 2027510
gaaauccugaguuaucacu

SEQ ID NO: 2027512 - RNA, 19 nt, Artificial Sequence
  Description of Artificial Sequence: Synthetic oligonucleotide
  Sense strand starting at position 1547 of SEQ ID NO: 1881220
gacacuugauguguuaauu

SEQ ID NO: 2027513 - RNA, 19 nt, Artificial Sequence
  Description of Artificial Sequence: Synthetic oligonucleotide
  Antisense strand to SEQ ID NO: 2027512
aauuaacacaucaaguguc

SEQ ID NO: 2027514 - RNA, 19 nt, Artificial Sequence
  Description of Artificial Sequence: Synthetic oligonucleotide
  Sense strand starting at position 1757 of SEQ ID NO: 1881220
agcuuugucgccuugguga

SEQ ID NO: 2027515 - RNA, 19 nt, Artificial Sequence
  Description of Artificial Sequence: Synthetic oligonucleotide
  Antisense strand to SEQ ID NO: 2027514
ucaccaaggcgacaaagcu

SEQ ID NO: 2027516 - RNA, 19 nt, Artificial Sequence
  Description of Artificial Sequence: Synthetic oligonucleotide
  Sense strand starting at position 1795 of SEQ ID NO: 1881220
guuacauguuaaucuacau

SEQ ID NO: 2027517 - RNA, 19 nt, Artificial Sequence
  Description of Artificial Sequence: Synthetic oligonucleotide
  Antisense strand to SEQ ID NO: 2027516
auguagauuaacauguaac

SEQ ID NO: 2027518 - RNA, 19 nt, Artificial Sequence
  Description of Artificial Sequence: Synthetic oligonucleotide
  Sense strand starting at position 1828 of SEQ ID NO: 1881220
uugcgacauuuccaauaga

SEQ ID NO: 2027519 - RNA, 19 nt, Artificial Sequence
  Description of Artificial Sequence: Synthetic oligonucleotide
  Antisense strand to SEQ ID NO: 2027518
ucuauuggaaaugucgcaa

SEQ ID NO: 2027520 - RNA, 19 nt, Artificial Sequence
  Description of Artificial Sequence: Synthetic oligonucleotide
  Sense strand starting at position 1856 of SEQ ID NO: 1881220
guuuguggauuugauauua

SEQ ID NO: 2027521 - RNA, 19 nt, Artificial Sequence
  Description of Artificial Sequence: Synthetic oligonucleotide
  Antisense strand to SEQ ID NO: 2027520
uaauaucaaauccacaaac

SEQ ID NO: 2027522 - RNA, 19 nt, Artificial Sequence
  Description of Artificial Sequence: Synthetic oligonucleotide
  Sense strand starting at position 1864 of SEQ ID NO: 1881220
auuugauauuagggcagaa

SEQ ID NO: 2027523 - RNA, 19 nt, Artificial Sequence
  Description of Artificial Sequence: Synthetic oligonucleotide
  Antisense strand to SEQ ID NO: 2027522
uucugcccuaauaucaaau

SEQ ID NO: 2027524 - RNA, 19 nt, Artificial Sequence
  Description of Artificial Sequence: Synthetic oligonucleotide
  Sense strand starting at position 2693 of SEQ ID NO: 1881220
aggagauucuagccaguga

SEQ ID NO: 2027525 - RNA, 19 nt, Artificial Sequence
  Description of Artificial Sequence: Synthetic oligonucleotide
  Antisense strand to SEQ ID NO: 2027524
ucacuggcuagaaucuccu

SEQ ID NO: 2027526 - RNA, 19 nt, Artificial Sequence
  Description of Artificial Sequence: Synthetic oligonucleotide
  Sense strand starting at position 2697 of SEQ ID NO: 1881220
gauucuagccagugaaaga

SEQ ID NO: 2027527 - RNA, 19 nt, Artificial Sequence
  Description of Artificial Sequence: Synthetic oligonucleotide
  Antisense strand to SEQ ID NO: 2027526
ucuuucacuggcuagaauc

SEQ ID NO: 2027528 - RNA, 19 nt, Artificial Sequence
  Description of Artificial Sequence: Synthetic oligonucleotide
  Sense strand starting at position 2721 of SEQ ID NO: 1881220
guaagaaauaagugucaug

SEQ ID NO: 2027529 - RNA, 19 nt, Artificial Sequence
  Description of Artificial Sequence: Synthetic oligonucleotide
  Antisense strand to SEQ ID NO: 2027528
caugacacuuauuucuuac

SEQ ID NO: 2027530 - RNA, 19 nt, Artificial Sequence
  Description of Artificial Sequence: Synthetic oligonucleotide
  Sense strand starting at position 2780 of SEQ ID NO: 1881220
gugacaugacuguguacau

SEQ ID NO: 2027531 - RNA, 19 nt, Artificial Sequence
  Description of Artificial Sequence: Synthetic oligonucleotide
  Antisense strand to SEQ ID NO: 2027530
auguacacagucaugucac

SEQ ID NO: 2027532 - RNA, 19 nt, Artificial Sequence
  Description of Artificial Sequence: Synthetic oligonucleotide
  Sense strand starting at position 2781 of SEQ ID NO: 1881220
ugacaugacuguguacaua

SEQ ID NO: 2027533 - RNA, 19 nt, Artificial Sequence
  Description of Artificial Sequence: Synthetic oligonucleotide
  Antisense strand to SEQ ID NO: 2027532
uauguacacagucauguca

SEQ ID NO: 2027534 - RNA, 19 nt, Artificial Sequence
  Description of Artificial Sequence: Synthetic oligonucleotide
  Sense strand starting at position 2953 of SEQ ID NO: 1881220
uucuauauuuagggauaac

SEQ ID NO: 2027535 - RNA, 19 nt, Artificial Sequence
  Description of Artificial Sequence: Synthetic oligonucleotide
  Antisense strand to SEQ ID NO: 2027534
guuaucccuaaauauagaa

SEQ ID NO: 2027536 - RNA, 19 nt, Artificial Sequence
  Description of Artificial Sequence: Synthetic oligonucleotide
  Sense strand starting at position 2964 of SEQ ID NO: 1881220
gggauaacuuaacaacaaa

SEQ ID NO: 2027537 - RNA, 19 nt, Artificial Sequence
  Description of Artificial Sequence: Synthetic oligonucleotide
  Antisense strand to SEQ ID NO: 2027536
uuuguuguuaaguuauccc

SEQ ID NO: 2027538 - RNA, 19 nt, Artificial Sequence
  Description of Artificial Sequence: Synthetic oligonucleotide
  Sense strand starting at position 2983 of SEQ ID NO: 1881220
aagguauacuacuugugca

SEQ ID NO: 2027539 - RNA, 19 nt, Artificial Sequence
  Description of Artificial Sequence: Synthetic oligonucleotide
  Antisense strand to SEQ ID NO: 2027538
ugcacaaguaguauaccuu

SEQ ID NO: 2027540 - RNA, 19 nt, Artificial Sequence
  Description of Artificial Sequence: Synthetic oligonucleotide
  Sense strand starting at position 3050 of SEQ ID NO: 1881220
agacaugaauuggaagaca

SEQ ID NO: 2027541 - RNA, 19 nt, Artificial Sequence
  Description of Artificial Sequence: Synthetic oligonucleotide
  Antisense strand to SEQ ID NO: 2027540
ugucuuccaauucaugucu

SEQ ID NO: 2027542 - RNA, 19 nt, Artificial Sequence
  Description of Artificial Sequence: Synthetic oligonucleotide
  Sense strand starting at position 3061 of SEQ ID NO: 1881220
ggaagacaauauuaucaaa

SEQ ID NO: 2027543 - RNA, 19 nt, Artificial Sequence
  Description of Artificial Sequence: Synthetic oligonucleotide
  Antisense strand to SEQ ID NO: 2027542
uuugauaauauugucuucc

SEQ ID NO: 2027544 - RNA, 19 nt, Artificial Sequence
  Description of Artificial Sequence: Synthetic oligonucleotide
  Sense strand starting at position 3092 of SEQ ID NO: 1881220
ccaaauugaucuguagaug

SEQ ID NO: 2027545 - RNA, 19 nt, Artificial Sequence
  Description of Artificial Sequence: Synthetic oligonucleotide
  Antisense strand to SEQ ID NO: 2027544
caucuacagaucaauuugg

SEQ ID NO: 2027546 - RNA, 19 nt, Artificial Sequence
  Description of Artificial Sequence: Synthetic oligonucleotide
  Sense strand starting at position 3093 of SEQ ID NO: 1881220
caaauugaucuguagaugu

SEQ ID NO: 2027547 - RNA, 19 nt, Artificial Sequence
  Description of Artificial Sequence: Synthetic oligonucleotide
  Antisense strand to SEQ ID NO: 2027546
acaucuacagaucaauuug

SEQ ID NO: 2027548 - RNA, 19 nt, Artificial Sequence
  Description of Artificial Sequence: Synthetic oligonucleotide
  Sense strand starting at position 3097 of SEQ ID NO: 1881220
uugaucuguagauguaaug

SEQ ID NO: 2027549 - RNA, 19 nt, Artificial Sequence
  Description of Artificial Sequence: Synthetic oligonucleotide
  Antisense strand to SEQ ID NO: 2027548
cauuacaucuacagaucaa

SEQ ID NO: 2027550 - RNA, 19 nt, Artificial Sequence
  Description of Artificial Sequence: Synthetic oligonucleotide
  Sense strand starting at position 3202 of SEQ ID NO: 1881220
ggauacuugcccugucuga

SEQ ID NO: 2027551 - RNA, 19 nt, Artificial Sequence
  Description of Artificial Sequence: Synthetic oligonucleotide
  Antisense strand to SEQ ID NO: 2027550
ucagacagggcaaguaucc

SEQ ID NO: 2027552 - RNA, 19 nt, Artificial Sequence
  Description of Artificial Sequence: Synthetic oligonucleotide
  Sense strand starting at position 3534 of SEQ ID NO: 1881220
cuggacgacuuauuauaau

SEQ ID NO: 2027553 - RNA, 19 nt, Artificial Sequence
  Description of Artificial Sequence: Synthetic oligonucleotide
  Antisense strand to SEQ ID NO: 2027552
auuauaauaagucguccag

SEQ ID NO: 2027554 - RNA, 19 nt, Artificial Sequence
  Description of Artificial Sequence: Synthetic oligonucleotide
  Sense strand starting at position 3560 of SEQ ID NO: 1881220
uuauuaagacaagguggua

SEQ ID NO: 2027555 - RNA, 19 nt, Artificial Sequence
  Description of Artificial Sequence: Synthetic oligonucleotide
  Antisense strand to SEQ ID NO: 2027554
uaccaccuugucuuaauaa

SEQ ID NO: 2027556 - RNA, 19 nt, Artificial Sequence
  Description of Artificial Sequence: Synthetic oligonucleotide
  Sense strand starting at position 3563 of SEQ ID NO: 1881220
uuaagacaaggugguauua

SEQ ID NO: 2027557 - RNA, 19 nt, Artificial Sequence
  Description of Artificial Sequence: Synthetic oligonucleotide
  Antisense strand to SEQ ID NO: 2027556
uaauaccaccuugucuuaa

SEQ ID NO: 2027558 - RNA, 19 nt, Artificial Sequence
  Description of Artificial Sequence: Synthetic oligonucleotide
  Sense strand starting at position 3880 of SEQ ID NO: 1881220
ggagcugugacucacgcau

SEQ ID NO: 2027559 - RNA, 19 nt, Artificial Sequence
  Description of Artificial Sequence: Synthetic oligonucleotide
  Antisense strand to SEQ ID NO: 2027558
augcgugagucacagcucc

SEQ ID NO: 2027560 - RNA, 19 nt, Artificial Sequence
  Description of Artificial Sequence: Synthetic oligonucleotide
  Sense strand starting at position 284 of SEQ ID NO: 1881221
ccauaauauuaguugauag

SEQ ID NO: 2027561 - RNA, 19 nt, Artificial Sequence
  Description of Artificial Sequence: Synthetic oligonucleotide
  Antisense strand to SEQ ID NO: 2027560
cuaucaacuaauauuaugg

SEQ ID NO: 2027562 - RNA, 19 nt, Artificial Sequence
  Description of Artificial Sequence: Synthetic oligonucleotide
  Sense strand starting at position 387 of SEQ ID NO: 1881221
agugaauuacugcaaauua

SEQ ID NO: 2027563 - RNA, 19 nt, Artificial Sequence
  Description of Artificial Sequence: Synthetic oligonucleotide
  Antisense strand to SEQ ID NO: 2027562
uaauuugcaguaauucacu

SEQ ID NO: 2027564 - RNA, 19 nt, Artificial Sequence
  Description of Artificial Sequence: Synthetic oligonucleotide
  Sense strand starting at position 430 of SEQ ID NO: 1881221
uugguaauauugucuaaga

SEQ ID NO: 2027565 - RNA, 19 nt, Artificial Sequence
  Description of Artificial Sequence: Synthetic oligonucleotide
  Antisense strand to SEQ ID NO: 2027564
ucuuagacaauauuaccaa

SEQ ID NO: 2027566 - RNA, 19 nt, Artificial Sequence
  Description of Artificial Sequence: Synthetic oligonucleotide
  Sense strand starting at position 431 of SEQ ID NO: 1881221
ugguaauauugucuaagac

SEQ ID NO: 2027567 - RNA, 19 nt, Artificial Sequence
  Description of Artificial Sequence: Synthetic oligonucleotide
  Antisense strand to SEQ ID NO: 2027566
gucuuagacaauauuacca

SEQ ID NO: 2027568 - RNA, 19 nt, Artificial Sequence
  Description of Artificial Sequence: Synthetic oligonucleotide
  Sense strand starting at position 500 of SEQ ID NO: 1881221
auccuauaacggcagacau

SEQ ID NO: 2027569 - RNA, 19 nt, Artificial Sequence
  Description of Artificial Sequence: Synthetic oligonucleotide
  Antisense strand to SEQ ID NO: 2027568
augucugccguuauaggau

SEQ ID NO: 2027570 - RNA, 19 nt, Artificial Sequence
  Description of Artificial Sequence: Synthetic oligonucleotide
  Sense strand starting at position 511 of SEQ ID NO: 1881221
gcagacauggccuaaugau

SEQ ID NO: 2027571 - RNA, 19 nt, Artificial Sequence
  Description of Artificial Sequence: Synthetic oligonucleotide
  Antisense strand to SEQ ID NO: 2027570
aucauuaggccaugucugc

SEQ ID NO: 2027572 - RNA, 19 nt, Artificial Sequence
  Description of Artificial Sequence: Synthetic oligonucleotide
  Sense strand starting at position 542 of SEQ ID NO: 1881221
ucaacaguguugucagaca

SEQ ID NO: 2027573 - RNA, 19 nt, Artificial Sequence
  Description of Artificial Sequence: Synthetic oligonucleotide
  Antisense strand to SEQ ID NO: 2027572
ugucugacaacacuguuga

SEQ ID NO: 2027574 - RNA, 19 nt, Artificial Sequence
  Description of Artificial Sequence: Synthetic oligonucleotide
  Sense strand starting at position 688 of SEQ ID NO: 1881221
cuccuaaacuugucaguuu

SEQ ID NO: 2027575 - RNA, 19 nt, Artificial Sequence
  Description of Artificial Sequence: Synthetic oligonucleotide
  Antisense strand to SEQ ID NO: 2027574
aaacugacaaguuuaggag

SEQ ID NO: 2027576 - RNA, 19 nt, Artificial Sequence
  Description of Artificial Sequence: Synthetic oligonucleotide
  Sense strand starting at position 691 of SEQ ID NO: 1881221
cuaaacuugucaguuuacu

SEQ ID NO: 2027577 - RNA, 19 nt, Artificial Sequence
  Description of Artificial Sequence: Synthetic oligonucleotide
  Antisense strand to SEQ ID NO: 2027576
aguaaacugacaaguuuag

SEQ ID NO: 2027578 - RNA, 19 nt, Artificial Sequence
  Description of Artificial Sequence: Synthetic oligonucleotide
  Sense strand starting at position 823 of SEQ ID NO: 1881221
uggaaucagaagcauguuu

SEQ ID NO: 2027579 - RNA, 19 nt, Artificial Sequence
  Description of Artificial Sequence: Synthetic oligonucleotide
  Antisense strand to SEQ ID NO: 2027578
aaacaugcuucugauucca

SEQ ID NO: 2027580 - RNA, 19 nt, Artificial Sequence
  Description of Artificial Sequence: Synthetic oligonucleotide
  Sense strand starting at position 828 of SEQ ID NO: 1881221
ucagaagcauguuuggcau

SEQ ID NO: 2027581 - RNA, 19 nt, Artificial Sequence
  Description of Artificial Sequence: Synthetic oligonucleotide
  Antisense strand to SEQ ID NO: 2027580
augccaaacaugcuucuga

SEQ ID NO: 2027582 - RNA, 19 nt, Artificial Sequence
  Description of Artificial Sequence: Synthetic oligonucleotide
  Sense strand starting at position 831 of SEQ ID NO: 1881221
gaagcauguuuggcauauc

SEQ ID NO: 2027583 - RNA, 19 nt, Artificial Sequence
  Description of Artificial Sequence: Synthetic oligonucleotide
  Antisense strand to SEQ ID NO: 2027582
gauaugccaaacaugcuuc

SEQ ID NO: 2027584 - RNA, 19 nt, Artificial Sequence
  Description of Artificial Sequence: Synthetic oligonucleotide
  Sense strand starting at position 834 of SEQ ID NO: 1881221
gcauguuuggcauaucauc

SEQ ID NO: 2027585 - RNA, 19 nt, Artificial Sequence
  Description of Artificial Sequence: Synthetic oligonucleotide
  Antisense strand to SEQ ID NO: 2027584
gaugauaugccaaacaugc

SEQ ID NO: 2027586 - RNA, 19 nt, Artificial Sequence
  Description of Artificial Sequence: Synthetic oligonucleotide
  Sense strand starting at position 960 of SEQ ID NO: 1881221
gacucuuacggccaucagu

SEQ ID NO: 2027587 - RNA, 19 nt, Artificial Sequence
  Description of Artificial Sequence: Synthetic oligonucleotide
  Antisense strand to SEQ ID NO: 2027586
acugauggccguaagaguc

SEQ ID NO: 2027588 - RNA, 19 nt, Artificial Sequence
  Description of Artificial Sequence: Synthetic oligonucleotide
  Sense strand starting at position 963 of SEQ ID NO: 1881221
ucuuacggccaucaguaau

SEQ ID NO: 2027589 - RNA, 19 nt, Artificial Sequence
  Description of Artificial Sequence: Synthetic oligonucleotide
  Antisense strand to SEQ ID NO: 2027588
auuacugauggccguaaga

SEQ ID NO: 2027590 - RNA, 19 nt, Artificial Sequence
  Description of Artificial Sequence: Synthetic oligonucleotide
  Sense strand starting at position 969 of SEQ ID NO: 1881221
ggccaucaguaaucacacu

SEQ ID NO: 2027591 - RNA, 19 nt, Artificial Sequence
  Description of Artificial Sequence: Synthetic oligonucleotide
  Antisense strand to SEQ ID NO: 2027590
agugugauuacugauggcc

SEQ ID NO: 2027592 - RNA, 19 nt, Artificial Sequence
  Description of Artificial Sequence: Synthetic oligonucleotide
  Sense strand starting at position 1042 of SEQ ID NO: 1881221
auauauuggcaguaacucu

SEQ ID NO: 2027593 - RNA, 19 nt, Artificial Sequence
  Description of Artificial Sequence: Synthetic oligonucleotide
  Antisense strand to SEQ ID NO: 2027592
agaguuacugccaauauau

SEQ ID NO: 2027594 - RNA, 19 nt, Artificial Sequence
  Description of Artificial Sequence: Synthetic oligonucleotide
  Sense strand starting at position 1088 of SEQ ID NO: 1881221
agaauaagauuagaagcau

SEQ ID NO: 2027595 - RNA, 19 nt, Artificial Sequence
  Description of Artificial Sequence: Synthetic oligonucleotide
  Antisense strand to SEQ ID NO: 2027594
augcuucuaaucuuauucu

SEQ ID NO: 2027596 - RNA, 19 nt, Artificial Sequence
  Description of Artificial Sequence: Synthetic oligonucleotide
  Sense strand starting at position 1097 of SEQ ID NO: 1881221
uuagaagcaucaguaguua

SEQ ID NO: 2027597 - RNA, 19 nt, Artificial Sequence
  Description of Artificial Sequence: Synthetic oligonucleotide
  Antisense strand to SEQ ID NO: 2027596
uaacuacugaugcuucuaa

SEQ ID NO: 2027598 - RNA, 19 nt, Artificial Sequence
  Description of Artificial Sequence: Synthetic oligonucleotide
  Sense strand starting at position 1106 of SEQ ID NO: 1881221
ucaguaguuaauggugaua

SEQ ID NO: 2027599 - RNA, 19 nt, Artificial Sequence
  Description of Artificial Sequence: Synthetic oligonucleotide
  Antisense strand to SEQ ID NO: 2027598
uaucaccauuaacuacuga

SEQ ID NO: 2027600 - RNA, 19 nt, Artificial Sequence
  Description of Artificial Sequence: Synthetic oligonucleotide
  Sense strand starting at position 1109 of SEQ ID NO: 1881221
guaguuaauggugauaaua

SEQ ID NO: 2027601 - RNA, 19 nt, Artificial Sequence
  Description of Artificial Sequence: Synthetic oligonucleotide
  Antisense strand to SEQ ID NO: 2027600
uauuaucaccauuaacuac

SEQ ID NO: 2027602 - RNA, 19 nt, Artificial Sequence
  Description of Artificial Sequence: Synthetic oligonucleotide
  Sense strand starting at position 1387 of SEQ ID NO: 1881221
uuacucagaguuugaugau

SEQ ID NO: 2027603 - RNA, 19 nt, Artificial Sequence
  Description of Artificial Sequence: Synthetic oligonucleotide
  Antisense strand to SEQ ID NO: 2027602
aucaucaaacucugaguaa

SEQ ID NO: 2027604 - RNA, 19 nt, Artificial Sequence
  Description of Artificial Sequence: Synthetic oligonucleotide
  Sense strand starting at position 1470 of SEQ ID NO: 1881221
guggcaacaugaucagaca

SEQ ID NO: 2027605 - RNA, 19 nt, Artificial Sequence
  Description of Artificial Sequence: Synthetic oligonucleotide
  Antisense strand to SEQ ID NO: 2027604
ugucugaucauguugccac

SEQ ID NO: 2027606 - RNA, 19 nt, Artificial Sequence
  Description of Artificial Sequence: Synthetic oligonucleotide
  Sense strand starting at position 1490 of SEQ ID NO: 1881221
gcagcucucagaugacaug

SEQ ID NO: 2027607 - RNA, 19 nt, Artificial Sequence
  Description of Artificial Sequence: Synthetic oligonucleotide
  Antisense strand to SEQ ID NO: 2027606
caugucaucugagagcugc

SEQ ID NO: 2027608 - RNA, 19 nt, Artificial Sequence
  Description of Artificial Sequence: Synthetic oligonucleotide
  Sense strand starting at position 1532 of SEQ ID NO: 1881221
gcaagcagcuucucaauuu

SEQ ID NO: 2027609 - RNA, 19 nt, Artificial Sequence
  Description of Artificial Sequence: Synthetic oligonucleotide
  Antisense strand to SEQ ID NO: 2027608
aaauugagaagcugcuugc

SEQ ID NO: 2027610 - RNA, 19 nt, Artificial Sequence
  Description of Artificial Sequence: Synthetic oligonucleotide
  Sense strand starting at position 1554 of SEQ ID NO: 1881221
acuugugguagcuggauua

SEQ ID NO: 2027611 - RNA, 19 nt, Artificial Sequence
  Description of Artificial Sequence: Synthetic oligonucleotide
  Antisense strand to SEQ ID NO: 2027610
uaauccagcuaccacaagu

SEQ ID NO: 2027612 - RNA, 19 nt, Artificial Sequence
  Description of Artificial Sequence: Synthetic oligonucleotide
  Sense strand starting at position 1677 of SEQ ID NO: 1881221
auggaaagaucaguuagua

SEQ ID NO: 2027613 - RNA, 19 nt, Artificial Sequence
  Description of Artificial Sequence: Synthetic oligonucleotide
  Antisense strand to SEQ ID NO: 2027612
uacuaacugaucuuuccau

SEQ ID NO: 2027614 - RNA, 19 nt, Artificial Sequence
  Description of Artificial Sequence: Synthetic oligonucleotide
  Sense strand starting at position 1791 of SEQ ID NO: 1881221
augugugaaacuugggacu

SEQ ID NO: 2027615 - RNA, 19 nt, Artificial Sequence
  Description of Artificial Sequence: Synthetic oligonucleotide
  Antisense strand to SEQ ID NO: 2027614
agucccaaguuucacacau

SEQ ID NO: 2027616 - RNA, 19 nt, Artificial Sequence
  Description of Artificial Sequence: Synthetic oligonucleotide
  Sense strand starting at position 2043 of SEQ ID NO: 1881221
acuuguuaccuauauaugu

SEQ ID NO: 2027617 - RNA, 19 nt, Artificial Sequence
  Description of Artificial Sequence: Synthetic oligonucleotide
  Antisense strand to SEQ ID NO: 2027616
acauauauagguaacaagu

SEQ ID NO: 2027618 - RNA, 19 nt, Artificial Sequence
  Description of Artificial Sequence: Synthetic oligonucleotide
  Sense strand starting at position 2070 of SEQ ID NO: 1881221
acauaucagguguauguaa

SEQ ID NO: 2027619 - RNA, 19 nt, Artificial Sequence
  Description of Artificial Sequence: Synthetic oligonucleotide
  Antisense strand to SEQ ID NO: 2027618
uuacauacaccugauaugu

SEQ ID NO: 2027620 - RNA, 19 nt, Artificial Sequence
  Description of Artificial Sequence: Synthetic oligonucleotide
  Sense strand starting at position 2072 of SEQ ID NO: 1881221
auaucagguguauguaaau

SEQ ID NO: 2027621 - RNA, 19 nt, Artificial Sequence
  Description of Artificial Sequence: Synthetic oligonucleotide
  Antisense strand to SEQ ID NO: 2027620
auuuacauacaccugauau

SEQ ID NO: 2027622 - RNA, 19 nt, Artificial Sequence
  Description of Artificial Sequence: Synthetic oligonucleotide
  Sense strand starting at position 2078 of SEQ ID NO: 1881221
gguguauguaaauguaaca

SEQ ID NO: 2027623 - RNA, 19 nt, Artificial Sequence
  Description of Artificial Sequence: Synthetic oligonucleotide
  Antisense strand to SEQ ID NO: 2027622
uguuacauuuacauacacc

SEQ ID NO: 2027624 - RNA, 19 nt, Artificial Sequence
  Description of Artificial Sequence: Synthetic oligonucleotide
  Sense strand starting at position 2374 of SEQ ID NO: 1881221
acaugagggugguuccaua

SEQ ID NO: 2027625 - RNA, 19 nt, Artificial Sequence
  Description of Artificial Sequence: Synthetic oligonucleotide
  Antisense strand to SEQ ID NO: 2027624
uauggaaccacccucaugu

SEQ ID NO: 2027626 - RNA, 19 nt, Artificial Sequence
  Description of Artificial Sequence: Synthetic oligonucleotide
  Sense strand starting at position 2436 of SEQ ID NO: 1881221
gugacauuagugcaauuac

SEQ ID NO: 2027627 - RNA, 19 nt, Artificial Sequence
  Description of Artificial Sequence: Synthetic oligonucleotide
  Antisense strand to SEQ ID NO: 2027626
guaauugcacuaaugucac

SEQ ID NO: 2027628 - RNA, 19 nt, Artificial Sequence
  Description of Artificial Sequence: Synthetic oligonucleotide
  Sense strand starting at position 2647 of SEQ ID NO: 1881221
aucauauuucgcuguaccu

SEQ ID NO: 2027629 - RNA, 19 nt, Artificial Sequence
  Description of Artificial Sequence: Synthetic oligonucleotide
  Antisense strand to SEQ ID NO: 2027628
agguacagcgaaauaugau

SEQ ID NO: 2027630 - RNA, 19 nt, Artificial Sequence
  Description of Artificial Sequence: Synthetic oligonucleotide
  Sense strand starting at position 2755 of SEQ ID NO: 1881221
guagcuuagaaguaauaag

SEQ ID NO: 2027631 - RNA, 19 nt, Artificial Sequence
  Description of Artificial Sequence: Synthetic oligonucleotide
  Antisense strand to SEQ ID NO: 2027630
cuuauuacuucuaagcuac

SEQ ID NO: 2027632 - RNA, 19 nt, Artificial Sequence
  Description of Artificial Sequence: Synthetic oligonucleotide
  Sense strand starting at position 2765 of SEQ ID NO: 1881221
aguaauaagcuauacgaca

SEQ ID NO: 2027633 - RNA, 19 nt, Artificial Sequence
  Description of Artificial Sequence: Synthetic oligonucleotide
  Antisense strand to SEQ ID NO: 2027632
ugucguauagcuuauuacu

SEQ ID NO: 2027634 - RNA, 19 nt, Artificial Sequence
  Description of Artificial Sequence: Synthetic oligonucleotide
  Sense strand starting at position 2790 of SEQ ID NO: 1881221
aguuguuuaggaggcuaca

SEQ ID NO: 2027635 - RNA, 19 nt, Artificial Sequence
  Description of Artificial Sequence: Synthetic oligonucleotide
  Antisense strand to SEQ ID NO: 2027634
uguagccuccuaaacaacu

SEQ ID NO: 2027636 - RNA, 19 nt, Artificial Sequence
  Description of Artificial Sequence: Synthetic oligonucleotide
  Sense strand starting at position 2822 of SEQ ID NO: 1881221
uuaugugcacucuaugaug

SEQ ID NO: 2027637 - RNA, 19 nt, Artificial Sequence
  Description of Artificial Sequence: Synthetic oligonucleotide
  Antisense strand to SEQ ID NO: 2027636
caucauagagugcacauaa

SEQ ID NO: 2027638 - RNA, 19 nt, Artificial Sequence
  Description of Artificial Sequence: Synthetic oligonucleotide
  Sense strand starting at position 3016 of SEQ ID NO: 1881221
aaauguguuagagauucgu

SEQ ID NO: 2027639 - RNA, 19 nt, Artificial Sequence
  Description of Artificial Sequence: Synthetic oligonucleotide
  Antisense strand to SEQ ID NO: 2027638
acgaaucucuaacacauuu

SEQ ID NO: 2027640 - RNA, 19 nt, Artificial Sequence
  Description of Artificial Sequence: Synthetic oligonucleotide
  Sense strand starting at position 50 of SEQ ID NO: 1881222
ccaugcuaugaaugacuga

SEQ ID NO: 2027641 - RNA, 19 nt, Artificial Sequence
  Description of Artificial Sequence: Synthetic oligonucleotide
  Antisense strand to SEQ ID NO: 2027640
ucagucauucauagcaugg

SEQ ID NO: 2027642 - RNA, 19 nt, Artificial Sequence
  Description of Artificial Sequence: Synthetic oligonucleotide
  Sense strand starting at position 211 of SEQ ID NO: 1881222
gucggugcugcuccuaaua

SEQ ID NO: 2027643 - RNA, 19 nt, Artificial Sequence
  Description of Artificial Sequence: Synthetic oligonucleotide
  Antisense strand to SEQ ID NO: 2027642
uauuaggagcagcaccgac

SEQ ID NO: 2027644 - RNA, 19 nt, Artificial Sequence
  Description of Artificial Sequence: Synthetic oligonucleotide
  Sense strand starting at position 260 of SEQ ID NO: 1881222
uaaagaucagucugcaaug

SEQ ID NO: 2027645 - RNA, 19 nt, Artificial Sequence
  Description of Artificial Sequence: Synthetic oligonucleotide
  Antisense strand to SEQ ID NO: 2027644
cauugcagacugaucuuua

SEQ ID NO: 2027646 - RNA, 19 nt, Artificial Sequence
  Description of Artificial Sequence: Synthetic oligonucleotide
  Sense strand starting at position 261 of SEQ ID NO: 1881222
aaagaucagucugcaauga

SEQ ID NO: 2027647 - RNA, 19 nt, Artificial Sequence
  Description of Artificial Sequence: Synthetic oligonucleotide
  Antisense strand to SEQ ID NO: 2027646
ucauugcagacugaucuuu

SEQ ID NO: 2027648 - RNA, 19 nt, Artificial Sequence
  Description of Artificial Sequence: Synthetic oligonucleotide
  Sense strand starting at position 406 of SEQ ID NO: 1881222
gcugacauuaggcauagaa

SEQ ID NO: 2027649 - RNA, 19 nt, Artificial Sequence
  Description of Artificial Sequence: Synthetic oligonucleotide
  Antisense strand to SEQ ID NO: 2027648
uucuaugccuaaugucagc

SEQ ID NO: 2027650 - RNA, 19 nt, Artificial Sequence
  Description of Artificial Sequence: Synthetic oligonucleotide
  Sense strand starting at position 563 of SEQ ID NO: 1881222
ccaagacuuuccuccgaag

SEQ ID NO: 2027651 - RNA, 19 nt, Artificial Sequence
  Description of Artificial Sequence: Synthetic oligonucleotide
  Antisense strand to SEQ ID NO: 2027650
cuucggaggaaagucuugg

SEQ ID NO: 2027652 - RNA, 19 nt, Artificial Sequence
  Description of Artificial Sequence: Synthetic oligonucleotide
  Sense strand starting at position 619 of SEQ ID NO: 1881222
aucaauucugaauacgcua

SEQ ID NO: 2027653 - RNA, 19 nt, Artificial Sequence
  Description of Artificial Sequence: Synthetic oligonucleotide
  Antisense strand to SEQ ID NO: 2027652
uagcguauucagaauugau

SEQ ID NO: 2027654 - RNA, 19 nt, Artificial Sequence
  Description of Artificial Sequence: Synthetic oligonucleotide
  Sense strand starting at position 655 of SEQ ID NO: 1881222
caguuuaaauggguggauu

SEQ ID NO: 2027655 - RNA, 19 nt, Artificial Sequence
  Description of Artificial Sequence: Synthetic oligonucleotide
  Antisense strand to SEQ ID NO: 2027654
aauccacccauuuaaacug

SEQ ID NO: 2027656 - RNA, 19 nt, Artificial Sequence
  Description of Artificial Sequence: Synthetic oligonucleotide
  Sense strand starting at position 657 of SEQ ID NO: 1881222
guuuaaauggguggauuca

SEQ ID NO: 2027657 - RNA, 19 nt, Artificial Sequence
  Description of Artificial Sequence: Synthetic oligonucleotide
  Antisense strand to SEQ ID NO: 2027656
ugaauccacccauuuaaac

SEQ ID NO: 2027658 - RNA, 19 nt, Artificial Sequence
  Description of Artificial Sequence: Synthetic oligonucleotide
  Sense strand starting at position 979 of SEQ ID NO: 1881222
gugacagaccugcacauau

SEQ ID NO: 2027659 - RNA, 19 nt, Artificial Sequence
  Description of Artificial Sequence: Synthetic oligonucleotide
  Antisense strand to SEQ ID NO: 2027658
auaugugcaggucugucac

SEQ ID NO: 2027660 - RNA, 19 nt, Artificial Sequence
  Description of Artificial Sequence: Synthetic oligonucleotide
  Sense strand starting at position 1338 of SEQ ID NO: 1881222
gauucuauggaaugugaau

SEQ ID NO: 2027661 - RNA, 19 nt, Artificial Sequence
  Description of Artificial Sequence: Synthetic oligonucleotide
  Antisense strand to SEQ ID NO: 2027660
auucacauuccauagaauc

SEQ ID NO: 2027662 - RNA, 19 nt, Artificial Sequence
  Description of Artificial Sequence: Synthetic oligonucleotide
  Sense strand starting at position 1413 of SEQ ID NO: 1881222
ugugcugagcauuccguaa

SEQ ID NO: 2027663 - RNA, 19 nt, Artificial Sequence
  Description of Artificial Sequence: Synthetic oligonucleotide
  Antisense strand to SEQ ID NO: 2027662
uuacggaaugcucagcaca

SEQ ID NO: 2027664 - RNA, 19 nt, Artificial Sequence
  Description of Artificial Sequence: Synthetic oligonucleotide
  Sense strand starting at position 1785 of SEQ ID NO: 1881222
augauaaauccugggcgau

SEQ ID NO: 2027665 - RNA, 19 nt, Artificial Sequence
  Description of Artificial Sequence: Synthetic oligonucleotide
  Antisense strand to SEQ ID NO: 2027664
aucgcccaggauuuaucau

SEQ ID NO: 2027666 - RNA, 19 nt, Artificial Sequence
  Description of Artificial Sequence: Synthetic oligonucleotide
  Sense strand starting at position 1890 of SEQ ID NO: 1881222
gauggacaguacucuuuaa

SEQ ID NO: 2027667 - RNA, 19 nt, Artificial Sequence
  Description of Artificial Sequence: Synthetic oligonucleotide
  Antisense strand to SEQ ID NO: 2027666
uuaaagaguacuguccauc

SEQ ID NO: 2027668 - RNA, 19 nt, Artificial Sequence
  Description of Artificial Sequence: Synthetic oligonucleotide
  Sense strand starting at position 2053 of SEQ ID NO: 1881222
auuugagcuugggagaaga

SEQ ID NO: 2027669 - RNA, 19 nt, Artificial Sequence
  Description of Artificial Sequence: Synthetic oligonucleotide
  Antisense strand to SEQ ID NO: 2027668
ucuucucccaagcucaaau

SEQ ID NO: 2027670 - RNA, 19 nt, Artificial Sequence
  Description of Artificial Sequence: Synthetic oligonucleotide
  Sense strand starting at position 2328 of SEQ ID NO: 1881222
gggugcagaauauggaauu

SEQ ID NO: 2027671 - RNA, 19 nt, Artificial Sequence
  Description of Artificial Sequence: Synthetic oligonucleotide
  Antisense strand to SEQ ID NO: 2027670
aauuccauauucugcaccc

SEQ ID NO: 2027672 - RNA, 19 nt, Artificial Sequence
  Description of Artificial Sequence: Synthetic oligonucleotide
  Sense strand starting at position 2443 of SEQ ID NO: 1881222
cagaaaugaucauuguuag

SEQ ID NO: 2027673 - RNA, 19 nt, Artificial Sequence
  Description of Artificial Sequence: Synthetic oligonucleotide
  Antisense strand to SEQ ID NO: 2027672
cuaacaaugaucauuucug

SEQ ID NO: 2027674 - RNA, 19 nt, Artificial Sequence
  Description of Artificial Sequence: Synthetic oligonucleotide
  Sense strand starting at position 2446 of SEQ ID NO: 1881222
aaaugaucauuguuagaug

SEQ ID NO: 2027675 - RNA, 19 nt, Artificial Sequence
  Description of Artificial Sequence: Synthetic oligonucleotide
  Antisense strand to SEQ ID NO: 2027674
caucuaacaaugaucauuu

SEQ ID NO: 2027676 - RNA, 19 nt, Artificial Sequence
  Description of Artificial Sequence: Synthetic oligonucleotide
  Sense strand starting at position 2586 of SEQ ID NO: 1881222
uugcuugcugcggcauaaa

SEQ ID NO: 2027677 - RNA, 19 nt, Artificial Sequence
  Description of Artificial Sequence: Synthetic oligonucleotide
  Antisense strand to SEQ ID NO: 2027676
uuuaugccgcagcaagcaa

SEQ ID NO: 2027678 - RNA, 19 nt, Artificial Sequence
  Description of Artificial Sequence: Synthetic oligonucleotide
  Sense strand starting at position 2653 of SEQ ID NO: 1881222
ggacuuugccuccaacuuu

SEQ ID NO: 2027679 - RNA, 19 nt, Artificial Sequence
  Description of Artificial Sequence: Synthetic oligonucleotide
  Antisense strand to SEQ ID NO: 2027678
aaaguuggaggcaaagucc

SEQ ID NO: 2027680 - RNA, 19 nt, Artificial Sequence
  Description of Artificial Sequence: Synthetic oligonucleotide
  Sense strand starting at position 2768 of SEQ ID NO: 1881222
guaugaauauuggcaggga

SEQ ID NO: 2027681 - RNA, 19 nt, Artificial Sequence
  Description of Artificial Sequence: Synthetic oligonucleotide
  Antisense strand to SEQ ID NO: 2027680
ucccugccaauauucauac

SEQ ID NO: 2027682 - RNA, 19 nt, Artificial Sequence
  Description of Artificial Sequence: Synthetic oligonucleotide
  Sense strand starting at position 2784 of SEQ ID NO: 1881222
ggagaagcuccacaacugu

SEQ ID NO: 2027683 - RNA, 19 nt, Artificial Sequence
  Description of Artificial Sequence: Synthetic oligonucleotide
  Antisense strand to SEQ ID NO: 2027682
acaguuguggagcuucucc

SEQ ID NO: 2027684 - RNA, 19 nt, Artificial Sequence
  Description of Artificial Sequence: Synthetic oligonucleotide
  Sense strand starting at position 2878 of SEQ ID NO: 1881222
agcagaauaccauggaauu

SEQ ID NO: 2027685 - RNA, 19 nt, Artificial Sequence
  Description of Artificial Sequence: Synthetic oligonucleotide
  Antisense strand to SEQ ID NO: 2027684
aauuccaugguauucugcu

SEQ ID NO: 2027686 - RNA, 19 nt, Artificial Sequence
  Description of Artificial Sequence: Synthetic oligonucleotide
  Sense strand starting at position 2879 of SEQ ID NO: 1881222
gcagaauaccauggaauuc

SEQ ID NO: 2027687 - RNA, 19 nt, Artificial Sequence
  Description of Artificial Sequence: Synthetic oligonucleotide
  Antisense strand to SEQ ID NO: 2027686
gaauuccaugguauucugc

SEQ ID NO: 2027688 - RNA, 19 nt, Artificial Sequence
  Description of Artificial Sequence: Synthetic oligonucleotide
  Sense strand starting at position 2929 of SEQ ID NO: 1881222
uugguuauuauugaagcga

SEQ ID NO: 2027689 - RNA, 19 nt, Artificial Sequence
  Description of Artificial Sequence: Synthetic oligonucleotide
  Antisense strand to SEQ ID NO: 2027688
ucgcuucaauaauaaccaa

SEQ ID NO: 2027690 - RNA, 19 nt, Artificial Sequence
  Description of Artificial Sequence: Synthetic oligonucleotide
  Sense strand starting at position 3007 of SEQ ID NO: 1881222
gaauaaaguggcugggaga

SEQ ID NO: 2027691 - RNA, 19 nt, Artificial Sequence
  Description of Artificial Sequence: Synthetic oligonucleotide
  Antisense strand to SEQ ID NO: 2027690
ucucccagccacuuuauuc

SEQ ID NO: 2027692 - RNA, 19 nt, Artificial Sequence
  Description of Artificial Sequence: Synthetic oligonucleotide
  Sense strand starting at position 3051 of SEQ ID NO: 1881222
augguacaucccuaauugu

SEQ ID NO: 2027693 - RNA, 19 nt, Artificial Sequence
  Description of Artificial Sequence: Synthetic oligonucleotide
  Antisense strand to SEQ ID NO: 2027692
acaauuagggauguaccau

SEQ ID NO: 2027694 - RNA, 19 nt, Artificial Sequence
  Description of Artificial Sequence: Synthetic oligonucleotide
  Sense strand starting at position 3054 of SEQ ID NO: 1881222
guacaucccuaauuguaga

SEQ ID NO: 2027695 - RNA, 19 nt, Artificial Sequence
  Description of Artificial Sequence: Synthetic oligonucleotide
  Antisense strand to SEQ ID NO: 2027694
ucuacaauuagggauguac

SEQ ID NO: 2027696 - RNA, 19 nt, Artificial Sequence
  Description of Artificial Sequence: Synthetic oligonucleotide
  Sense strand starting at position 3064 of SEQ ID NO: 1881222
aauuguagauccucgagaa

SEQ ID NO: 2027697 - RNA, 19 nt, Artificial Sequence
  Description of Artificial Sequence: Synthetic oligonucleotide
  Antisense strand to SEQ ID NO: 2027696
uucucgaggaucuacaauu

SEQ ID NO: 2027698 - RNA, 19 nt, Artificial Sequence
  Description of Artificial Sequence: Synthetic oligonucleotide
  Sense strand starting at position 3065 of SEQ ID NO: 1881222
auuguagauccucgagaaa

SEQ ID NO: 2027699 - RNA, 19 nt, Artificial Sequence
  Description of Artificial Sequence: Synthetic oligonucleotide
  Antisense strand to SEQ ID NO: 2027698
uuucucgaggaucuacaau

SEQ ID NO: 2027700 - RNA, 19 nt, Artificial Sequence
  Description of Artificial Sequence: Synthetic oligonucleotide
  Sense strand starting at position 3086 of SEQ ID NO: 1881222
ggugcagcugugagaaguu

SEQ ID NO: 2027701 - RNA, 19 nt, Artificial Sequence
  Description of Artificial Sequence: Synthetic oligonucleotide
  Antisense strand to SEQ ID NO: 2027700
aacuucucacagcugcacc

SEQ ID NO: 2027702 - RNA, 19 nt, Artificial Sequence
  Description of Artificial Sequence: Synthetic oligonucleotide
  Sense strand starting at position 3151 of SEQ ID NO: 1881222
gcaagaucuggguagggca

SEQ ID NO: 2027703 - RNA, 19 nt, Artificial Sequence
  Description of Artificial Sequence: Synthetic oligonucleotide
  Antisense strand to SEQ ID NO: 2027702
ugcccuacccagaucuugc

SEQ ID NO: 2027704 - RNA, 19 nt, Artificial Sequence
  Description of Artificial Sequence: Synthetic oligonucleotide
  Sense strand starting at position 3247 of SEQ ID NO: 1881222
guguccaaauacuugaaga

SEQ ID NO: 2027705 - RNA, 19 nt, Artificial Sequence
  Description of Artificial Sequence: Synthetic oligonucleotide
  Antisense strand to SEQ ID NO: 2027704
ucuucaaguauuuggacac

SEQ ID NO: 2027706 - RNA, 19 nt, Artificial Sequence
  Description of Artificial Sequence: Synthetic oligonucleotide
  Sense strand starting at position 3295 of SEQ ID NO: 1881222
ucaucucuucuuuagguua

SEQ ID NO: 2027707 - RNA, 19 nt, Artificial Sequence
  Description of Artificial Sequence: Synthetic oligonucleotide
  Antisense strand to SEQ ID NO: 2027706
uaaccuaaagaagagauga

SEQ ID NO: 2027708 - RNA, 19 nt, Artificial Sequence
  Description of Artificial Sequence: Synthetic oligonucleotide
  Sense strand starting at position 3685 of SEQ ID NO: 1881222
uggaauccaugcuccagau

SEQ ID NO: 2027709 - RNA, 19 nt, Artificial Sequence
  Description of Artificial Sequence: Synthetic oligonucleotide
  Antisense strand to SEQ ID NO: 2027708
aucuggagcauggauucca

SEQ ID NO: 2027710 - RNA, 19 nt, Artificial Sequence
  Description of Artificial Sequence: Synthetic oligonucleotide
  Sense strand starting at position 3689 of SEQ ID NO: 1881222
auccaugcuccagauugaa

SEQ ID NO: 2027711 - RNA, 19 nt, Artificial Sequence
  Description of Artificial Sequence: Synthetic oligonucleotide
  Antisense strand to SEQ ID NO: 2027710
uucaaucuggagcauggau

SEQ ID NO: 2027712 - RNA, 19 nt, Artificial Sequence
  Description of Artificial Sequence: Synthetic oligonucleotide
  Sense strand starting at position 3730 of SEQ ID NO: 1881222
gugugugacauggaggaga

SEQ ID NO: 2027713 - RNA, 19 nt, Artificial Sequence
  Description of Artificial Sequence: Synthetic oligonucleotide
  Antisense strand to SEQ ID NO: 2027712
ucuccuccaugucacacac

SEQ ID NO: 2027714 - RNA, 19 nt, Artificial Sequence
  Description of Artificial Sequence: Synthetic oligonucleotide
  Sense strand starting at position 3845 of SEQ ID NO: 1881222
caugaacaaugcuugggaa

SEQ ID NO: 2027715 - RNA, 19 nt, Artificial Sequence
  Description of Artificial Sequence: Synthetic oligonucleotide
  Antisense strand to SEQ ID NO: 2027714
uucccaagcauuguucaug

SEQ ID NO: 2027716 - RNA, 19 nt, Artificial Sequence
  Description of Artificial Sequence: Synthetic oligonucleotide
  Sense strand starting at position 3900 of SEQ ID NO: 1881222
agaacaugguggcuaauau

SEQ ID NO: 2027717 - RNA, 19 nt, Artificial Sequence
  Description of Artificial Sequence: Synthetic oligonucleotide
  Antisense strand to SEQ ID NO: 2027716
auauuagccaccauguucu

SEQ ID NO: 2027718 - RNA, 19 nt, Artificial Sequence
  Description of Artificial Sequence: Synthetic oligonucleotide
  Sense strand starting at position 3901 of SEQ ID NO: 1881222
gaacaugguggcuaauauu

SEQ ID NO: 2027719 - RNA, 19 nt, Artificial Sequence
  Description of Artificial Sequence: Synthetic oligonucleotide
  Antisense strand to SEQ ID NO: 2027718
aauauuagccaccauguuc

SEQ ID NO: 2027720 - RNA, 19 nt, Artificial Sequence
  Description of Artificial Sequence: Synthetic oligonucleotide
  Sense strand starting at position 1 of SEQ ID NO: 1881223
uguucuggauaccuaugau

SEQ ID NO: 2027721 - RNA, 19 nt, Artificial Sequence
  Description of Artificial Sequence: Synthetic oligonucleotide
  Antisense strand to SEQ ID NO: 2027720
aucauagguauccagaaca

SEQ ID NO: 2027722 - RNA, 19 nt, Artificial Sequence
  Description of Artificial Sequence: Synthetic oligonucleotide
  Sense strand starting at position 34 of SEQ ID NO: 1881223
aguucuaguguccaggauu

SEQ ID NO: 2027723 - RNA, 19 nt, Artificial Sequence
  Description of Artificial Sequence: Synthetic oligonucleotide
  Antisense strand to SEQ ID NO: 2027722
aauccuggacacuagaacu

SEQ ID NO: 2027724 - RNA, 19 nt, Artificial Sequence
  Description of Artificial Sequence: Synthetic oligonucleotide
  Sense strand starting at position 199 of SEQ ID NO: 1881223
uggguugugcuaaggaguu

SEQ ID NO: 2027725 - RNA, 19 nt, Artificial Sequence
  Description of Artificial Sequence: Synthetic oligonucleotide
  Antisense strand to SEQ ID NO: 2027724
aacuccuuagcacaaccca

SEQ ID NO: 2027726 - RNA, 19 nt, Artificial Sequence
  Description of Artificial Sequence: Synthetic oligonucleotide
  Sense strand starting at position 351 of SEQ ID NO: 1881223
gcuagcucugcaguauagu

SEQ ID NO: 2027727 - RNA, 19 nt, Artificial Sequence
  Description of Artificial Sequence: Synthetic oligonucleotide
  Antisense strand to SEQ ID NO: 2027726
acuauacugcagagcuagc

SEQ ID NO: 2027728 - RNA, 19 nt, Artificial Sequence
  Description of Artificial Sequence: Synthetic oligonucleotide
  Sense strand starting at position 708 of SEQ ID NO: 1881223
gccuaaguucuugaaauug

SEQ ID NO: 2027729 - RNA, 19 nt, Artificial Sequence
  Description of Artificial Sequence: Synthetic oligonucleotide
  Antisense strand to SEQ ID NO: 2027728
caauuucaagaacuuaggc

SEQ ID NO: 2027730 - RNA, 19 nt, Artificial Sequence
  Description of Artificial Sequence: Synthetic oligonucleotide
  Sense strand starting at position 819 of SEQ ID NO: 1881223
agaagugucaugcauaaga

SEQ ID NO: 2027731 - RNA, 19 nt, Artificial Sequence
  Description of Artificial Sequence: Synthetic oligonucleotide
  Antisense strand to SEQ ID NO: 2027730
ucuuaugcaugacacuucu

SEQ ID NO: 2027732 - RNA, 19 nt, Artificial Sequence
  Description of Artificial Sequence: Synthetic oligonucleotide
  Sense strand starting at position 821 of SEQ ID NO: 1881223
aagugucaugcauaagauu

SEQ ID NO: 2027733 - RNA, 19 nt, Artificial Sequence
  Description of Artificial Sequence: Synthetic oligonucleotide
  Antisense strand to SEQ ID NO: 2027732
aaucuuaugcaugacacuu

SEQ ID NO: 2027734 - RNA, 19 nt, Artificial Sequence
  Description of Artificial Sequence: Synthetic oligonucleotide
  Sense strand starting at position 917 of SEQ ID NO: 1881223
aguauucuuggugaauuaa

SEQ ID NO: 2027735 - RNA, 19 nt, Artificial Sequence
  Description of Artificial Sequence: Synthetic oligonucleotide
  Antisense strand to SEQ ID NO: 2027734
uuaauucaccaagaauacu

SEQ ID NO: 2027736 - RNA, 19 nt, Artificial Sequence
  Description of Artificial Sequence: Synthetic oligonucleotide
  Sense strand starting at position 926 of SEQ ID NO: 1881223
ggugaauuaagugggaauu

SEQ ID NO: 2027737 - RNA, 19 nt, Artificial Sequence
  Description of Artificial Sequence: Synthetic oligonucleotide
  Antisense strand to SEQ ID NO: 2027736
aauucccacuuaauucacc

SEQ ID NO: 2027738 - RNA, 19 nt, Artificial Sequence
  Description of Artificial Sequence: Synthetic oligonucleotide
  Sense strand starting at position 1039 of SEQ ID NO: 1881223
ugagaaauauuugaacuuc

SEQ ID NO: 2027739 - RNA, 19 nt, Artificial Sequence
  Description of Artificial Sequence: Synthetic oligonucleotide
  Antisense strand to SEQ ID NO: 2027738
gaaguucaaauauuucuca

SEQ ID NO: 2027740 - RNA, 19 nt, Artificial Sequence
  Description of Artificial Sequence: Synthetic oligonucleotide
  Sense strand starting at position 1116 of SEQ ID NO: 1881223
agaaucaauuaugugaagu

SEQ ID NO: 2027741 - RNA, 19 nt, Artificial Sequence
  Description of Artificial Sequence: Synthetic oligonucleotide
  Antisense strand to SEQ ID NO: 2027740
acuucacauaauugauucu

SEQ ID NO: 2027742 - RNA, 19 nt, Artificial Sequence
  Description of Artificial Sequence: Synthetic oligonucleotide
  Sense strand starting at position 1152 of SEQ ID NO: 1881223
caauaaagcugggucauca

SEQ ID NO: 2027743 - RNA, 19 nt, Artificial Sequence
  Description of Artificial Sequence: Synthetic oligonucleotide
  Antisense strand to SEQ ID NO: 2027742
ugaugacccagcuuuauug

SEQ ID NO: 2027744 - RNA, 19 nt, Artificial Sequence
  Description of Artificial Sequence: Synthetic oligonucleotide
  Sense strand starting at position 1156 of SEQ ID NO: 1881223
aaagcugggucaucauacu

SEQ ID NO: 2027745 - RNA, 19 nt, Artificial Sequence
  Description of Artificial Sequence: Synthetic oligonucleotide
  Antisense strand to SEQ ID NO: 2027744
aguaugaugacccagcuuu

SEQ ID NO: 2027746 - RNA, 19 nt, Artificial Sequence
  Description of Artificial Sequence: Synthetic oligonucleotide
  Sense strand starting at position 1313 of SEQ ID NO: 1881223
gugggcuuuauggaccaua

SEQ ID NO: 2027747 - RNA, 19 nt, Artificial Sequence
  Description of Artificial Sequence: Synthetic oligonucleotide
  Antisense strand to SEQ ID NO: 2027746
uaugguccauaaagcccac

SEQ ID NO: 2027748 - RNA, 19 nt, Artificial Sequence
  Description of Artificial Sequence: Synthetic oligonucleotide
  Sense strand starting at position 1748 of SEQ ID NO: 1881223
cuauguucuguacaacuuu

SEQ ID NO: 2027749 - RNA, 19 nt, Artificial Sequence
  Description of Artificial Sequence: Synthetic oligonucleotide
  Antisense strand to SEQ ID NO: 2027748
aaaguuguacagaacauag

SEQ ID NO: 2027750 - RNA, 19 nt, Artificial Sequence
  Description of Artificial Sequence: Synthetic oligonucleotide
  Sense strand starting at position 1810 of SEQ ID NO: 1881223
auacuugaucuaggcaauu

SEQ ID NO: 2027751 - RNA, 19 nt, Artificial Sequence
  Description of Artificial Sequence: Synthetic oligonucleotide
  Antisense strand to SEQ ID NO: 2027750
aauugccuagaucaaguau

SEQ ID NO: 2027752 - RNA, 19 nt, Artificial Sequence
  Description of Artificial Sequence: Synthetic oligonucleotide
  Sense strand starting at position 1884 of SEQ ID NO: 1881223
auagcauuggacugaauag

SEQ ID NO: 2027753 - RNA, 19 nt, Artificial Sequence
  Description of Artificial Sequence: Synthetic oligonucleotide
  Antisense strand to SEQ ID NO: 2027752
cuauucaguccaaugcuau

SEQ ID NO: 2027754 - RNA, 19 nt, Artificial Sequence
  Description of Artificial Sequence: Synthetic oligonucleotide
  Sense strand starting at position 1950 of SEQ ID NO: 1881223
ugaaauucucauugauaug

SEQ ID NO: 2027755 - RNA, 19 nt, Artificial Sequence
  Description of Artificial Sequence: Synthetic oligonucleotide
  Antisense strand to SEQ ID NO: 2027754
cauaucaaugagaauuuca

SEQ ID NO: 2027756 - RNA, 19 nt, Artificial Sequence
  Description of Artificial Sequence: Synthetic oligonucleotide
  Sense strand starting at position 2047 of SEQ ID NO: 1881223
uuauaucugguguaauacu

SEQ ID NO: 2027757 - RNA, 19 nt, Artificial Sequence
  Description of Artificial Sequence: Synthetic oligonucleotide
  Antisense strand to SEQ ID NO: 2027756
aguauuacaccagauauaa

SEQ ID NO: 2027758 - RNA, 19 nt, Artificial Sequence
  Description of Artificial Sequence: Synthetic oligonucleotide
  Sense strand starting at position 2055 of SEQ ID NO: 1881223
gguguaauacuuuaauauc

SEQ ID NO: 2027759 - RNA, 19 nt, Artificial Sequence
  Description of Artificial Sequence: Synthetic oligonucleotide
  Antisense strand to SEQ ID NO: 2027758
gauauuaaaguauuacacc

SEQ ID NO: 2027760 - RNA, 19 nt, Artificial Sequence
  Description of Artificial Sequence: Synthetic oligonucleotide
  Sense strand starting at position 2079 of SEQ ID NO: 1881223
acaggaacuucuguaccau

SEQ ID NO: 2027761 - RNA, 19 nt, Artificial Sequence
  Description of Artificial Sequence: Synthetic oligonucleotide
  Antisense strand to SEQ ID NO: 2027760
augguacagaaguuccugu

SEQ ID NO: 2027762 - RNA, 19 nt, Artificial Sequence
  Description of Artificial Sequence: Synthetic oligonucleotide
  Sense strand starting at position 2113 of SEQ ID NO: 1881223
uuaggauucugaucaauug

SEQ ID NO: 2027763 - RNA, 19 nt, Artificial Sequence
  Description of Artificial Sequence: Synthetic oligonucleotide
  Antisense strand to SEQ ID NO: 2027762
caauugaucagaauccuaa

SEQ ID NO: 2027764 - RNA, 19 nt, Artificial Sequence
  Description of Artificial Sequence: Synthetic oligonucleotide
  Sense strand starting at position 2194 of SEQ ID NO: 1881223
aagugaucauguucuagaa

SEQ ID NO: 2027765 - RNA, 19 nt, Artificial Sequence
  Description of Artificial Sequence: Synthetic oligonucleotide
  Antisense strand to SEQ ID NO: 2027764
uucuagaacaugaucacuu

SEQ ID NO: 2027766 - RNA, 19 nt, Artificial Sequence
  Description of Artificial Sequence: Synthetic oligonucleotide
  Sense strand starting at position 2230 of SEQ ID NO: 1881223
caggauugugcagacuuga

SEQ ID NO: 2027767 - RNA, 19 nt, Artificial Sequence
  Description of Artificial Sequence: Synthetic oligonucleotide
  Antisense strand to SEQ ID NO: 2027766
ucaagucugcacaauccug

SEQ ID NO: 2027768 - RNA, 19 nt, Artificial Sequence
  Description of Artificial Sequence: Synthetic oligonucleotide
  Sense strand starting at position 2451 of SEQ ID NO: 1881223
cugugauagcucuacaaau

SEQ ID NO: 2027769 - RNA, 19 nt, Artificial Sequence
  Description of Artificial Sequence: Synthetic oligonucleotide
  Antisense strand to SEQ ID NO: 2027768
auuuguagagcuaucacag

SEQ ID NO: 2027770 - RNA, 19 nt, Artificial Sequence
  Description of Artificial Sequence: Synthetic oligonucleotide
  Sense strand starting at position 2622 of SEQ ID NO: 1881223
agacaucauuuguagauca

SEQ ID NO: 2027771 - RNA, 19 nt, Artificial Sequence
  Description of Artificial Sequence: Synthetic oligonucleotide
  Antisense strand to SEQ ID NO: 2027770
ugaucuacaaaugaugucu

SEQ ID NO: 2027772 - RNA, 19 nt, Artificial Sequence
  Description of Artificial Sequence: Synthetic oligonucleotide
  Sense strand starting at position 2638 of SEQ ID NO: 1881223
ucagauauccuuuguagau

SEQ ID NO: 2027773 - RNA, 19 nt, Artificial Sequence
  Description of Artificial Sequence: Synthetic oligonucleotide
  Antisense strand to SEQ ID NO: 2027772
aucuacaaaggauaucuga

SEQ ID NO: 2027774 - RNA, 19 nt, Artificial Sequence
  Description of Artificial Sequence: Synthetic oligonucleotide
  Sense strand starting at position 2642 of SEQ ID NO: 1881223
auauccuuuguagaucuau

SEQ ID NO: 2027775 - RNA, 19 nt, Artificial Sequence
  Description of Artificial Sequence: Synthetic oligonucleotide
  Antisense strand to SEQ ID NO: 2027774
auagaucuacaaaggauau

SEQ ID NO: 2027776 - RNA, 19 nt, Artificial Sequence
  Description of Artificial Sequence: Synthetic oligonucleotide
  Sense strand starting at position 2835 of SEQ ID NO: 1881223
cugagauuauuaucgauuc

SEQ ID NO: 2027777 - RNA, 19 nt, Artificial Sequence
  Description of Artificial Sequence: Synthetic oligonucleotide
  Antisense strand to SEQ ID NO: 2027776
gaaucgauaauaaucucag

SEQ ID NO: 2027778 - RNA, 19 nt, Artificial Sequence
  Description of Artificial Sequence: Synthetic oligonucleotide
  Sense strand starting at position 2928 of SEQ ID NO: 1881223
uggccacacguauauaaga

SEQ ID NO: 2027779 - RNA, 19 nt, Artificial Sequence
  Description of Artificial Sequence: Synthetic oligonucleotide
  Antisense strand to SEQ ID NO: 2027778
ucuuauauacguguggcca

SEQ ID NO: 2027780 - RNA, 19 nt, Artificial Sequence
  Description of Artificial Sequence: Synthetic oligonucleotide
  Sense strand starting at position 3040 of SEQ ID NO: 1881223
guuaacuguccuuaaauug

SEQ ID NO: 2027781 - RNA, 19 nt, Artificial Sequence
  Description of Artificial Sequence: Synthetic oligonucleotide
  Antisense strand to SEQ ID NO: 2027780
caauuuaaggacaguuaac

SEQ ID NO: 2027782 - RNA, 19 nt, Artificial Sequence
  Description of Artificial Sequence: Synthetic oligonucleotide
  Sense strand starting at position 3055 of SEQ ID NO: 1881223
auugaauuaugucugauug

SEQ ID NO: 2027783 - RNA, 19 nt, Artificial Sequence
  Description of Artificial Sequence: Synthetic oligonucleotide
  Antisense strand to SEQ ID NO: 2027782
caaucagacauaauucaau

SEQ ID NO: 2027784 - RNA, 19 nt, Artificial Sequence
  Description of Artificial Sequence: Synthetic oligonucleotide
  Sense strand starting at position 3274 of SEQ ID NO: 1881223
guuggauaguuauuuguug

SEQ ID NO: 2027785 - RNA, 19 nt, Artificial Sequence
  Description of Artificial Sequence: Synthetic oligonucleotide
  Antisense strand to SEQ ID NO: 2027784
caacaaauaacuauccaac

SEQ ID NO: 2027786 - RNA, 19 nt, Artificial Sequence
  Description of Artificial Sequence: Synthetic oligonucleotide
  Sense strand starting at position 3593 of SEQ ID NO: 1881223
ggugcauuauuacucaaga

SEQ ID NO: 2027787 - RNA, 19 nt, Artificial Sequence
  Description of Artificial Sequence: Synthetic oligonucleotide
  Antisense strand to SEQ ID NO: 2027786
ucuugaguaauaaugcacc

SEQ ID NO: 2027788 - RNA, 19 nt, Artificial Sequence
  Description of Artificial Sequence: Synthetic oligonucleotide
  Sense strand starting at position 3692 of SEQ ID NO: 1881223
ucauguugucaauaucaug

SEQ ID NO: 2027789 - RNA, 19 nt, Artificial Sequence
  Description of Artificial Sequence: Synthetic oligonucleotide
  Antisense strand to SEQ ID NO: 2027788
caugauauugacaacauga

SEQ ID NO: 2027790 - RNA, 19 nt, Artificial Sequence
  Description of Artificial Sequence: Synthetic oligonucleotide
  Sense strand starting at position 3835 of SEQ ID NO: 1881223
uaugaauuagcugaguuac

SEQ ID NO: 2027791 - RNA, 19 nt, Artificial Sequence
  Description of Artificial Sequence: Synthetic oligonucleotide
  Antisense strand to SEQ ID NO: 2027790
guaacucagcuaauucaua

SEQ ID NO: 2027792 - RNA, 19 nt, Artificial Sequence
  Description of Artificial Sequence: Synthetic oligonucleotide
  Sense strand starting at position 3845 of SEQ ID NO: 1881223
cugaguuaccuccaagucu

SEQ ID NO: 2027793 - RNA, 19 nt, Artificial Sequence
  Description of Artificial Sequence: Synthetic oligonucleotide
  Antisense strand to SEQ ID NO: 2027792
agacuuggagguaacucag

SEQ ID NO: 2027794 - RNA, 19 nt, Artificial Sequence
  Description of Artificial Sequence: Synthetic oligonucleotide
  Sense strand starting at position 3927 of SEQ ID NO: 1881223
auguauuuaucucugucuu

SEQ ID NO: 2027795 - RNA, 19 nt, Artificial Sequence
  Description of Artificial Sequence: Synthetic oligonucleotide
  Antisense strand to SEQ ID NO: 2027794
aagacagagauaaauacau

SEQ ID NO: 2027796 - RNA, 19 nt, Artificial Sequence
  Description of Artificial Sequence: Synthetic oligonucleotide
  Sense strand starting at position 3928 of SEQ ID NO: 1881223
uguauuuaucucugucuuu

SEQ ID NO: 2027797 - RNA, 19 nt, Artificial Sequence
  Description of Artificial Sequence: Synthetic oligonucleotide
  Antisense strand to SEQ ID NO: 2027796
aaagacagagauaaauaca

SEQ ID NO: 2027798 - RNA, 19 nt, Artificial Sequence
  Description of Artificial Sequence: Synthetic oligonucleotide
  Sense strand starting at position 3929 of SEQ ID NO: 1881223
guauuuaucucugucuuuc

SEQ ID NO: 2027799 - RNA, 19 nt, Artificial Sequence
  Description of Artificial Sequence: Synthetic oligonucleotide
  Antisense strand to SEQ ID NO: 2027798
gaaagacagagauaaauac

SEQ ID NO: 2027800 - RNA, 19 nt, Artificial Sequence
  Description of Artificial Sequence: Synthetic oligonucleotide
  Sense strand starting at position 15 of SEQ ID NO: 1881224
gcaugacaauagcuacaaa

SEQ ID NO: 2027801 - RNA, 19 nt, Artificial Sequence
  Description of Artificial Sequence: Synthetic oligonucleotide
  Antisense strand to SEQ ID NO: 2027800
uuuguagcuauugucaugc

SEQ ID NO: 2027802 - RNA, 19 nt, Artificial Sequence
  Description of Artificial Sequence: Synthetic oligonucleotide
  Sense strand starting at position 56 of SEQ ID NO: 1881224
ugaaacuaacucugugaug

SEQ ID NO: 2027803 - RNA, 19 nt, Artificial Sequence
  Description of Artificial Sequence: Synthetic oligonucleotide
  Antisense strand to SEQ ID NO: 2027802
caucacagaguuaguuuca

SEQ ID NO: 2027804 - RNA, 19 nt, Artificial Sequence
  Description of Artificial Sequence: Synthetic oligonucleotide
  Sense strand starting at position 57 of SEQ ID NO: 1881224
gaaacuaacucugugaugu

SEQ ID NO: 2027805 - RNA, 19 nt, Artificial Sequence
  Description of Artificial Sequence: Synthetic oligonucleotide
  Antisense strand to SEQ ID NO: 2027804
acaucacagaguuaguuuc

SEQ ID NO: 2027806 - RNA, 19 nt, Artificial Sequence
  Description of Artificial Sequence: Synthetic oligonucleotide
  Sense strand starting at position 105 of SEQ ID NO: 1881224
gccagucuccaguagggau

SEQ ID NO: 2027807 - RNA, 19 nt, Artificial Sequence
  Description of Artificial Sequence: Synthetic oligonucleotide
  Antisense strand to SEQ ID NO: 2027806
aucccuacuggagacuggc

SEQ ID NO: 2027808 - RNA, 19 nt, Artificial Sequence
  Description of Artificial Sequence: Synthetic oligonucleotide
  Sense strand starting at position 300 of SEQ ID NO: 1881224
ccgacuguuaacuauguga

SEQ ID NO: 2027809 - RNA, 19 nt, Artificial Sequence
  Description of Artificial Sequence: Synthetic oligonucleotide
  Antisense strand to SEQ ID NO: 2027808
ucacauaguuaacagucgg

SEQ ID NO: 2027810 - RNA, 19 nt, Artificial Sequence
  Description of Artificial Sequence: Synthetic oligonucleotide
  Sense strand starting at position 358 of SEQ ID NO: 1881224
uuagguguuaaauggagau

SEQ ID NO: 2027811 - RNA, 19 nt, Artificial Sequence
  Description of Artificial Sequence: Synthetic oligonucleotide
  Antisense strand to SEQ ID NO: 2027810
aucuccauuuaacaccuaa

SEQ ID NO: 2027812 - RNA, 19 nt, Artificial Sequence
  Description of Artificial Sequence: Synthetic oligonucleotide
  Sense strand starting at position 551 of SEQ ID NO: 1881224
ggacucaccguguaucuaa

SEQ ID NO: 2027813 - RNA, 19 nt, Artificial Sequence
  Description of Artificial Sequence: Synthetic oligonucleotide
  Antisense strand to SEQ ID NO: 2027812
uuagauacacggugagucc

SEQ ID NO: 2027814 - RNA, 19 nt, Artificial Sequence
  Description of Artificial Sequence: Synthetic oligonucleotide
  Sense strand starting at position 599 of SEQ ID NO: 1881224
ugagaaguauugguucaag

SEQ ID NO: 2027815 - RNA, 19 nt, Artificial Sequence
  Description of Artificial Sequence: Synthetic oligonucleotide
  Antisense strand to SEQ ID NO: 2027814
cuugaaccaauacuucuca

SEQ ID NO: 2027816 - RNA, 19 nt, Artificial Sequence
  Description of Artificial Sequence: Synthetic oligonucleotide
  Sense strand starting at position 700 of SEQ ID NO: 1881224
gaaagaagugucugggagu

SEQ ID NO: 2027817 - RNA, 19 nt, Artificial Sequence
  Description of Artificial Sequence: Synthetic oligonucleotide
  Antisense strand to SEQ ID NO: 2027816
acucccagacacuucuuuc

SEQ ID NO: 2027818 - RNA, 19 nt, Artificial Sequence
  Description of Artificial Sequence: Synthetic oligonucleotide
  Sense strand starting at position 847 of SEQ ID NO: 1881224
gucugaggagucugauaaa

SEQ ID NO: 2027819 - RNA, 19 nt, Artificial Sequence
  Description of Artificial Sequence: Synthetic oligonucleotide
  Antisense strand to SEQ ID NO: 2027818
uuuaucagacuccucagac

SEQ ID NO: 2027820 - RNA, 19 nt, Artificial Sequence
  Description of Artificial Sequence: Synthetic oligonucleotide
  Sense strand starting at position 942 of SEQ ID NO: 1881224
gucuuugaggucuagacuc

SEQ ID NO: 2027821 - RNA, 19 nt, Artificial Sequence
  Description of Artificial Sequence: Synthetic oligonucleotide
  Antisense strand to SEQ ID NO: 2027820
gagucuagaccucaaagac

SEQ ID NO: 2027822 - RNA, 19 nt, Artificial Sequence
  Description of Artificial Sequence: Synthetic oligonucleotide
  Sense strand starting at position 1077 of SEQ ID NO: 1881224
ggguguuugcugaggugug

SEQ ID NO: 2027823 - RNA, 19 nt, Artificial Sequence
  Description of Artificial Sequence: Synthetic oligonucleotide
  Antisense strand to SEQ ID NO: 2027822
cacaccucagcaaacaccc

SEQ ID NO: 2027824 - RNA, 19 nt, Artificial Sequence
  Description of Artificial Sequence: Synthetic oligonucleotide
  Sense strand starting at position 1079 of SEQ ID NO: 1881224
guguuugcugaggugugua

SEQ ID NO: 2027825 - RNA, 19 nt, Artificial Sequence
  Description of Artificial Sequence: Synthetic oligonucleotide
  Antisense strand to SEQ ID NO: 2027824
uacacaccucagcaaacac

SEQ ID NO: 2027826 - RNA, 19 nt, Artificial Sequence
  Description of Artificial Sequence: Synthetic oligonucleotide
  Sense strand starting at position 1111 of SEQ ID NO: 1881224
guuggaacuccugagggua

SEQ ID NO: 2027827 - RNA, 19 nt, Artificial Sequence
  Description of Artificial Sequence: Synthetic oligonucleotide
  Antisense strand to SEQ ID NO: 2027826
uacccucaggaguuccaac

SEQ ID NO: 2027828 - RNA, 19 nt, Artificial Sequence
  Description of Artificial Sequence: Synthetic oligonucleotide
  Sense strand starting at position 1170 of SEQ ID NO: 1881224
acaguagguccucaaucaa

SEQ ID NO: 2027829 - RNA, 19 nt, Artificial Sequence
  Description of Artificial Sequence: Synthetic oligonucleotide
  Antisense strand to SEQ ID NO: 2027828
uugauugaggaccuacugu

SEQ ID NO: 2027830 - RNA, 19 nt, Artificial Sequence
  Description of Artificial Sequence: Synthetic oligonucleotide
  Sense strand starting at position 1184 of SEQ ID NO: 1881224
aucaauacuuggucuugga

SEQ ID NO: 2027831 - RNA, 19 nt, Artificial Sequence
  Description of Artificial Sequence: Synthetic oligonucleotide
  Antisense strand to SEQ ID NO: 2027830
uccaagaccaaguauugau

SEQ ID NO: 2027832 - RNA, 19 nt, Artificial Sequence
  Description of Artificial Sequence: Synthetic oligonucleotide
  Sense strand starting at position 1211 of SEQ ID NO: 1881224
auucgaauacauuguugau

SEQ ID NO: 2027833 - RNA, 19 nt, Artificial Sequence
  Description of Artificial Sequence: Synthetic oligonucleotide
  Antisense strand to SEQ ID NO: 2027832
aucaacaauguauucgaau

SEQ ID NO: 2027834 - RNA, 19 nt, Artificial Sequence
  Description of Artificial Sequence: Synthetic oligonucleotide
  Sense strand starting at position 1213 of SEQ ID NO: 1881224
ucgaauacauuguugauaa

SEQ ID NO: 2027835 - RNA, 19 nt, Artificial Sequence
  Description of Artificial Sequence: Synthetic oligonucleotide
  Antisense strand to SEQ ID NO: 2027834
uuaucaacaauguauucga

SEQ ID NO: 2027836 - RNA, 19 nt, Artificial Sequence
  Description of Artificial Sequence: Synthetic oligonucleotide
  Sense strand starting at position 1361 of SEQ ID NO: 1881224
aggcauguaccagaauguu

SEQ ID NO: 2027837 - RNA, 19 nt, Artificial Sequence
  Description of Artificial Sequence: Synthetic oligonucleotide
  Antisense strand to SEQ ID NO: 2027836
aacauucugguacaugccu

SEQ ID NO: 2027838 - RNA, 19 nt, Artificial Sequence
  Description of Artificial Sequence: Synthetic oligonucleotide
  Sense strand starting at position 1473 of SEQ ID NO: 1881224
aaagaaauacuguguacag

SEQ ID NO: 2027839 - RNA, 19 nt, Artificial Sequence
  Description of Artificial Sequence: Synthetic oligonucleotide
  Antisense strand to SEQ ID NO: 2027838
cuguacacaguauuucuuu

SEQ ID NO: 2027840 - RNA, 19 nt, Artificial Sequence
  Description of Artificial Sequence: Synthetic oligonucleotide
  Sense strand starting at position 1483 of SEQ ID NO: 1881224
uguguacagcaaugagaaa

SEQ ID NO: 2027841 - RNA, 19 nt, Artificial Sequence
  Description of Artificial Sequence: Synthetic oligonucleotide
  Antisense strand to SEQ ID NO: 2027840
uuucucauugcuguacaca

SEQ ID NO: 2027842 - RNA, 19 nt, Artificial Sequence
  Description of Artificial Sequence: Synthetic oligonucleotide
  Sense strand starting at position 1580 of SEQ ID NO: 1881224
agagcacauucucuaugau

SEQ ID NO: 2027843 - RNA, 19 nt, Artificial Sequence
  Description of Artificial Sequence: Synthetic oligonucleotide
  Antisense strand to SEQ ID NO: 2027842
aucauagagaaugugcucu

SEQ ID NO: 2027844 - RNA, 19 nt, Artificial Sequence
  Description of Artificial Sequence: Synthetic oligonucleotide
  Sense strand starting at position 1749 of SEQ ID NO: 1881224
ugugaaguucgugaacaag

SEQ ID NO: 2027845 - RNA, 19 nt, Artificial Sequence
  Description of Artificial Sequence: Synthetic oligonucleotide
  Antisense strand to SEQ ID NO: 2027844
cuuguucacgaacuucaca

SEQ ID NO: 2027846 - RNA, 19 nt, Artificial Sequence
  Description of Artificial Sequence: Synthetic oligonucleotide
  Sense strand starting at position 1752 of SEQ ID NO: 1881224
gaaguucgugaacaagcau

SEQ ID NO: 2027847 - RNA, 19 nt, Artificial Sequence
  Description of Artificial Sequence: Synthetic oligonucleotide
  Antisense strand to SEQ ID NO: 2027846
augcuuguucacgaacuuc

SEQ ID NO: 2027848 - RNA, 19 nt, Artificial Sequence
  Description of Artificial Sequence: Synthetic oligonucleotide
  Sense strand starting at position 1792 of SEQ ID NO: 1881224
uugauacugcaaugaaaua

SEQ ID NO: 2027849 - RNA, 19 nt, Artificial Sequence
  Description of Artificial Sequence: Synthetic oligonucleotide
  Antisense strand to SEQ ID NO: 2027848
uauuucauugcaguaucaa

SEQ ID NO: 2027850 - RNA, 19 nt, Artificial Sequence
  Description of Artificial Sequence: Synthetic oligonucleotide
  Sense strand starting at position 1908 of SEQ ID NO: 1881224
gaguuaggagcucacucuu

SEQ ID NO: 2027851 - RNA, 19 nt, Artificial Sequence
  Description of Artificial Sequence: Synthetic oligonucleotide
  Antisense strand to SEQ ID NO: 2027850
aagagugagcuccuaacuc

SEQ ID NO: 2027852 - RNA, 19 nt, Artificial Sequence
  Description of Artificial Sequence: Synthetic oligonucleotide
  Sense strand starting at position 1918 of SEQ ID NO: 1881224
cucacucuugcagagaugu

SEQ ID NO: 2027853 - RNA, 19 nt, Artificial Sequence
  Description of Artificial Sequence: Synthetic oligonucleotide
  Antisense strand to SEQ ID NO: 2027852
acaucucugcaagagugag

SEQ ID NO: 2027854 - RNA, 19 nt, Artificial Sequence
  Description of Artificial Sequence: Synthetic oligonucleotide
  Sense strand starting at position 2639 of SEQ ID NO: 1881224
ccgaguccugcgucuccaa

SEQ ID NO: 2027855 - RNA, 19 nt, Artificial Sequence
  Description of Artificial Sequence: Synthetic oligonucleotide
  Antisense strand to SEQ ID NO: 2027854
uuggagacgcaggacucgg

SEQ ID NO: 2027856 - RNA, 19 nt, Artificial Sequence
  Description of Artificial Sequence: Synthetic oligonucleotide
  Sense strand starting at position 2641 of SEQ ID NO: 1881224
gaguccugcgucuccaagu

SEQ ID NO: 2027857 - RNA, 19 nt, Artificial Sequence
  Description of Artificial Sequence: Synthetic oligonucleotide
  Antisense strand to SEQ ID NO: 2027856
acuuggagacgcaggacuc

SEQ ID NO: 2027858 - RNA, 19 nt, Artificial Sequence
  Description of Artificial Sequence: Synthetic oligonucleotide
  Sense strand starting at position 3084 of SEQ ID NO: 1881224
gucugagugagaggauagu

SEQ ID NO: 2027859 - RNA, 19 nt, Artificial Sequence
  Description of Artificial Sequence: Synthetic oligonucleotide
  Antisense strand to SEQ ID NO: 2027858
acuauccucucacucagac

SEQ ID NO: 2027860 - RNA, 19 nt, Artificial Sequence
  Description of Artificial Sequence: Synthetic oligonucleotide
  Sense strand starting at position 3167 of SEQ ID NO: 1881224
ccaaauggccguugaauuu

SEQ ID NO: 2027861 - RNA, 19 nt, Artificial Sequence
  Description of Artificial Sequence: Synthetic oligonucleotide
  Antisense strand to SEQ ID NO: 2027860
aaauucaacggccauuugg

SEQ ID NO: 2027862 - RNA, 19 nt, Artificial Sequence
  Description of Artificial Sequence: Synthetic oligonucleotide
  Sense strand starting at position 3333 of SEQ ID NO: 1881224
gcucgcagucauguuccaa

SEQ ID NO: 2027863 - RNA, 19 nt, Artificial Sequence
  Description of Artificial Sequence: Synthetic oligonucleotide
  Antisense strand to SEQ ID NO: 2027862
uuggaacaugacugcgagc

SEQ ID NO: 2027864 - RNA, 19 nt, Artificial Sequence
  Description of Artificial Sequence: Synthetic oligonucleotide
  Sense strand starting at position 3469 of SEQ ID NO: 1881224
aagaaacacguguaucaua

SEQ ID NO: 2027865 - RNA, 19 nt, Artificial Sequence
  Description of Artificial Sequence: Synthetic oligonucleotide
  Antisense strand to SEQ ID NO: 2027864
uaugauacacguguuucuu

SEQ ID NO: 2027866 - RNA, 19 nt, Artificial Sequence
  Description of Artificial Sequence: Synthetic oligonucleotide
  Sense strand starting at position 3604 of SEQ ID NO: 1881224
gugaacugaccuuagcaaa

SEQ ID NO: 2027867 - RNA, 19 nt, Artificial Sequence
  Description of Artificial Sequence: Synthetic oligonucleotide
  Antisense strand to SEQ ID NO: 2027866
uuugcuaaggucaguucac

SEQ ID NO: 2027868 - RNA, 19 nt, Artificial Sequence
  Description of Artificial Sequence: Synthetic oligonucleotide
  Sense strand starting at position 3618 of SEQ ID NO: 1881224
gcaaauuugcucugccacu

SEQ ID NO: 2027869 - RNA, 19 nt, Artificial Sequence
  Description of Artificial Sequence: Synthetic oligonucleotide
  Antisense strand to SEQ ID NO: 2027868
aguggcagagcaaauuugc

SEQ ID NO: 2027870 - RNA, 19 nt, Artificial Sequence
  Description of Artificial Sequence: Synthetic oligonucleotide
  Sense strand starting at position 3631 of SEQ ID NO: 1881224
gccacuaauuugcuaguca

SEQ ID NO: 2027871 - RNA, 19 nt, Artificial Sequence
  Description of Artificial Sequence: Synthetic oligonucleotide
  Antisense strand to SEQ ID NO: 2027870
ugacuagcaaauuaguggc

SEQ ID NO: 2027872 - RNA, 19 nt, Artificial Sequence
  Description of Artificial Sequence: Synthetic oligonucleotide
  Sense strand starting at position 3635 of SEQ ID NO: 1881224
cuaauuugcuagucaagug

SEQ ID NO: 2027873 - RNA, 19 nt, Artificial Sequence
  Description of Artificial Sequence: Synthetic oligonucleotide
  Antisense strand to SEQ ID NO: 2027872
cacuugacuagcaaauuag

SEQ ID NO: 2027874 - RNA, 19 nt, Artificial Sequence
  Description of Artificial Sequence: Synthetic oligonucleotide
  Sense strand starting at position 3745 of SEQ ID NO: 1881224
gagggugggugagauuuaa

SEQ ID NO: 2027875 - RNA, 19 nt, Artificial Sequence
  Description of Artificial Sequence: Synthetic oligonucleotide
  Antisense strand to SEQ ID NO: 2027874
uuaaaucucacccacccuc

SEQ ID NO: 2027876 - RNA, 19 nt, Artificial Sequence
  Description of Artificial Sequence: Synthetic oligonucleotide
  Sense strand starting at position 3917 of SEQ ID NO: 1881224
gcaggcuuuguguucaguu

SEQ ID NO: 2027877 - RNA, 19 nt, Artificial Sequence
  Description of Artificial Sequence: Synthetic oligonucleotide
  Antisense strand to SEQ ID NO: 2027876
aacugaacacaaagccugc

SEQ ID NO: 2027878 - RNA, 19 nt, Artificial Sequence
  Description of Artificial Sequence: Synthetic oligonucleotide
  Sense strand starting at position 3945 of SEQ ID NO: 1881224
ugcaaauguagugaggauu

SEQ ID NO: 2027879 - RNA, 19 nt, Artificial Sequence
  Description of Artificial Sequence: Synthetic oligonucleotide
  Antisense strand to SEQ ID NO: 2027878
aauccucacuacauuugca

SEQ ID NO: 2027880 - RNA, 19 nt, Artificial Sequence
  Description of Artificial Sequence: Synthetic oligonucleotide
  Sense strand starting at position 77 of SEQ ID NO: 1881225
ccagcaucucgauggaaca

SEQ ID NO: 2027881 - RNA, 19 nt, Artificial Sequence
  Description of Artificial Sequence: Synthetic oligonucleotide
  Antisense strand to SEQ ID NO: 2027880
uguuccaucgagaugcugg

SEQ ID NO: 2027882 - RNA, 19 nt, Artificial Sequence
  Description of Artificial Sequence: Synthetic oligonucleotide
  Sense strand starting at position 78 of SEQ ID NO: 1881225
cagcaucucgauggaacau

SEQ ID NO: 2027883 - RNA, 19 nt, Artificial Sequence
  Description of Artificial Sequence: Synthetic oligonucleotide
  Antisense strand to SEQ ID NO: 2027882
auguuccaucgagaugcug

SEQ ID NO: 2027884 - RNA, 19 nt, Artificial Sequence
  Description of Artificial Sequence: Synthetic oligonucleotide
  Sense strand starting at position 155 of SEQ ID NO: 1881225
gcggcugagccaugucgaa

SEQ ID NO: 2027885 - RNA, 19 nt, Artificial Sequence
  Description of Artificial Sequence: Synthetic oligonucleotide
  Antisense strand to SEQ ID NO: 2027884
uucgacauggcucagccgc

SEQ ID NO: 2027886 - RNA, 19 nt, Artificial Sequence
  Description of Artificial Sequence: Synthetic oligonucleotide
  Sense strand starting at position 176 of SEQ ID NO: 1881225
aggacauugucccuggaaa

SEQ ID NO: 2027887 - RNA, 19 nt, Artificial Sequence
  Description of Artificial Sequence: Synthetic oligonucleotide
  Antisense strand to SEQ ID NO: 2027886
uuuccagggacaauguccu

SEQ ID NO: 2027888 - RNA, 19 nt, Artificial Sequence
  Description of Artificial Sequence: Synthetic oligonucleotide
  Sense strand starting at position 247 of SEQ ID NO: 1881225
uggagugucuuugagugca

SEQ ID NO: 2027889 - RNA, 19 nt, Artificial Sequence
  Description of Artificial Sequence: Synthetic oligonucleotide
  Antisense strand to SEQ ID NO: 2027888
ugcacucaaagacacucca

SEQ ID NO: 2027890 - RNA, 19 nt, Artificial Sequence
  Description of Artificial Sequence: Synthetic oligonucleotide
  Sense strand starting at position 249 of SEQ ID NO: 1881225
gagugucuuugagugcaca

SEQ ID NO: 2027891 - RNA, 19 nt, Artificial Sequence
  Description of Artificial Sequence: Synthetic oligonucleotide
  Antisense strand to SEQ ID NO: 2027890
ugugcacucaaagacacuc

SEQ ID NO: 2027892 - RNA, 19 nt, Artificial Sequence
  Description of Artificial Sequence: Synthetic oligonucleotide
  Sense strand starting at position 418 of SEQ ID NO: 1881225
agcugaguguucccucaca

SEQ ID NO: 2027893 - RNA, 19 nt, Artificial Sequence
  Description of Artificial Sequence: Synthetic oligonucleotide
  Antisense strand to SEQ ID NO: 2027892
ugugagggaacacucagcu

SEQ ID NO: 2027894 - RNA, 19 nt, Artificial Sequence
  Description of Artificial Sequence: Synthetic oligonucleotide
  Sense strand starting at position 571 of SEQ ID NO: 1881225
caaagagagccguguuguu

SEQ ID NO: 2027895 - RNA, 19 nt, Artificial Sequence
  Description of Artificial Sequence: Synthetic oligonucleotide
  Antisense strand to SEQ ID NO: 2027894
aacaacacggcucucuuug

SEQ ID NO: 2027896 - RNA, 19 nt, Artificial Sequence
  Description of Artificial Sequence: Synthetic oligonucleotide
  Sense strand starting at position 627 of SEQ ID NO: 1881225
gugagcuaacccugaagca

SEQ ID NO: 2027897 - RNA, 19 nt, Artificial Sequence
  Description of Artificial Sequence: Synthetic oligonucleotide
  Antisense strand to SEQ ID NO: 2027896
ugcuucaggguuagcucac

SEQ ID NO: 2027898 - RNA, 19 nt, Artificial Sequence
  Description of Artificial Sequence: Synthetic oligonucleotide
  Sense strand starting at position 754 of SEQ ID NO: 1881225
gcccgagcaucugcauuua

SEQ ID NO: 2027899 - RNA, 19 nt, Artificial Sequence
  Description of Artificial Sequence: Synthetic oligonucleotide
  Antisense strand to SEQ ID NO: 2027898
uaaaugcagaugcucgggc

SEQ ID NO: 2027900 - RNA, 19 nt, Artificial Sequence
  Description of Artificial Sequence: Synthetic oligonucleotide
  Sense strand starting at position 828 of SEQ ID NO: 1881225
agagucggcagggaucaau

SEQ ID NO: 2027901 - RNA, 19 nt, Artificial Sequence
  Description of Artificial Sequence: Synthetic oligonucleotide
  Antisense strand to SEQ ID NO: 2027900
auugaucccugccgacucu

SEQ ID NO: 2027902 - RNA, 19 nt, Artificial Sequence
  Description of Artificial Sequence: Synthetic oligonucleotide
  Sense strand starting at position 855 of SEQ ID NO: 1881225
aguauaagucacugugggu

SEQ ID NO: 2027903 - RNA, 19 nt, Artificial Sequence
  Description of Artificial Sequence: Synthetic oligonucleotide
  Antisense strand to SEQ ID NO: 2027902
acccacagugacuuauacu

SEQ ID NO: 2027904 - RNA, 19 nt, Artificial Sequence
  Description of Artificial Sequence: Synthetic oligonucleotide
  Sense strand starting at position 862 of SEQ ID NO: 1881225
gucacugugggucagcaau

SEQ ID NO: 2027905 - RNA, 19 nt, Artificial Sequence
  Description of Artificial Sequence: Synthetic oligonucleotide
  Antisense strand to SEQ ID NO: 2027904
auugcugacccacagugac

SEQ ID NO: 2027906 - RNA, 19 nt, Artificial Sequence
  Description of Artificial Sequence: Synthetic oligonucleotide
  Sense strand starting at position 994 of SEQ ID NO: 1881225
cuguaaggucgguguggau

SEQ ID NO: 2027907 - RNA, 19 nt, Artificial Sequence
  Description of Artificial Sequence: Synthetic oligonucleotide
  Antisense strand to SEQ ID NO: 2027906
auccacaccgaccuuacag

SEQ ID NO: 2027908 - RNA, 19 nt, Artificial Sequence
  Description of Artificial Sequence: Synthetic oligonucleotide
  Sense strand starting at position 1027 of SEQ ID NO: 1881225
gagccuugguguuggugaa

SEQ ID NO: 2027909 - RNA, 19 nt, Artificial Sequence
  Description of Artificial Sequence: Synthetic oligonucleotide
  Antisense strand to SEQ ID NO: 2027908
uucaccaacaccaaggcuc

SEQ ID NO: 2027910 - RNA, 19 nt, Artificial Sequence
  Description of Artificial Sequence: Synthetic oligonucleotide
  Sense strand starting at position 1063 of SEQ ID NO: 1881225
cacucagucugggaucagu

SEQ ID NO: 2027911 - RNA, 19 nt, Artificial Sequence
  Description of Artificial Sequence: Synthetic oligonucleotide
  Antisense strand to SEQ ID NO: 2027910
acugaucccagacugagug

SEQ ID NO: 2027912 - RNA, 19 nt, Artificial Sequence
  Description of Artificial Sequence: Synthetic oligonucleotide
  Sense strand starting at position 1072 of SEQ ID NO: 1881225
ugggaucagugccuaaguu

SEQ ID NO: 2027913 - RNA, 19 nt, Artificial Sequence
  Description of Artificial Sequence: Synthetic oligonucleotide
  Antisense strand to SEQ ID NO: 2027912
aacuuaggcacugauccca

SEQ ID NO: 2027914 - RNA, 19 nt, Artificial Sequence
  Description of Artificial Sequence: Synthetic oligonucleotide
  Sense strand starting at position 1073 of SEQ ID NO: 1881225
gggaucagugccuaaguua

SEQ ID NO: 2027915 - RNA, 19 nt, Artificial Sequence
  Description of Artificial Sequence: Synthetic oligonucleotide
  Antisense strand to SEQ ID NO: 2027914
uaacuuaggcacugauccc

SEQ ID NO: 2027916 - RNA, 19 nt, Artificial Sequence
  Description of Artificial Sequence: Synthetic oligonucleotide
  Sense strand starting at position 1155 of SEQ ID NO: 1881225
cuggcaaaguuauccagua

SEQ ID NO: 2027917 - RNA, 19 nt, Artificial Sequence
  Description of Artificial Sequence: Synthetic oligonucleotide
  Antisense strand to SEQ ID NO: 2027916
uacuggauaacuuugccag

SEQ ID NO: 2027918 - RNA, 19 nt, Artificial Sequence
  Description of Artificial Sequence: Synthetic oligonucleotide
  Sense strand starting at position 1156 of SEQ ID NO: 1881225
uggcaaaguuauccaguaa

SEQ ID NO: 2027919 - RNA, 19 nt, Artificial Sequence
  Description of Artificial Sequence: Synthetic oligonucleotide
  Antisense strand to SEQ ID NO: 2027918
uuacuggauaacuuugcca

SEQ ID NO: 2027920 - RNA, 19 nt, Artificial Sequence
  Description of Artificial Sequence: Synthetic oligonucleotide
  Sense strand starting at position 1157 of SEQ ID NO: 1881225
ggcaaaguuauccaguaag

SEQ ID NO: 2027921 - RNA, 19 nt, Artificial Sequence
  Description of Artificial Sequence: Synthetic oligonucleotide
  Antisense strand to SEQ ID NO: 2027920
cuuacuggauaacuuugcc

SEQ ID NO: 2027922 - RNA, 19 nt, Artificial Sequence
  Description of Artificial Sequence: Synthetic oligonucleotide
  Sense strand starting at position 1160 of SEQ ID NO: 1881225
aaaguuauccaguaagagu

SEQ ID NO: 2027923 - RNA, 19 nt, Artificial Sequence
  Description of Artificial Sequence: Synthetic oligonucleotide
  Antisense strand to SEQ ID NO: 2027922
acucuuacuggauaacuuu

SEQ ID NO: 2027924 - RNA, 19 nt, Artificial Sequence
  Description of Artificial Sequence: Synthetic oligonucleotide
  Sense strand starting at position 1994 of SEQ ID NO: 1881225
ggagaaacauggucccguu

SEQ ID NO: 2027925 - RNA, 19 nt, Artificial Sequence
  Description of Artificial Sequence: Synthetic oligonucleotide
  Antisense strand to SEQ ID NO: 2027924
aacgggaccauguuucucc

SEQ ID NO: 2027926 - RNA, 19 nt, Artificial Sequence
  Description of Artificial Sequence: Synthetic oligonucleotide
  Sense strand starting at position 2157 of SEQ ID NO: 1881225
ggagcuuagcaucacagaa

SEQ ID NO: 2027927 - RNA, 19 nt, Artificial Sequence
  Description of Artificial Sequence: Synthetic oligonucleotide
  Antisense strand to SEQ ID NO: 2027926
uucugugaugcuaagcucc

SEQ ID NO: 2027928 - RNA, 19 nt, Artificial Sequence
  Description of Artificial Sequence: Synthetic oligonucleotide
  Sense strand starting at position 2601 of SEQ ID NO: 1881225
agcccauguaugggagaaa

SEQ ID NO: 2027929 - RNA, 19 nt, Artificial Sequence
  Description of Artificial Sequence: Synthetic oligonucleotide
  Antisense strand to SEQ ID NO: 2027928
uuucucccauacaugggcu

SEQ ID NO: 2027930 - RNA, 19 nt, Artificial Sequence
  Description of Artificial Sequence: Synthetic oligonucleotide
  Sense strand starting at position 3079 of SEQ ID NO: 1881225
gaccucugacccugaguuu

SEQ ID NO: 2027931 - RNA, 19 nt, Artificial Sequence
  Description of Artificial Sequence: Synthetic oligonucleotide
  Antisense strand to SEQ ID NO: 2027930
aaacucagggucagagguc

SEQ ID NO: 2027932 - RNA, 19 nt, Artificial Sequence
  Description of Artificial Sequence: Synthetic oligonucleotide
  Sense strand starting at position 3165 of SEQ ID NO: 1881225
gauuguggguccugugaau

SEQ ID NO: 2027933 - RNA, 19 nt, Artificial Sequence
  Description of Artificial Sequence: Synthetic oligonucleotide
  Antisense strand to SEQ ID NO: 2027932
auucacaggacccacaauc

SEQ ID NO: 2027934 - RNA, 19 nt, Artificial Sequence
  Description of Artificial Sequence: Synthetic oligonucleotide
  Sense strand starting at position 3391 of SEQ ID NO: 1881225
auggguuguugggcagaau

SEQ ID NO: 2027935 - RNA, 19 nt, Artificial Sequence
  Description of Artificial Sequence: Synthetic oligonucleotide
  Antisense strand to SEQ ID NO: 2027934
auucugcccaacaacccau

SEQ ID NO: 2027936 - RNA, 19 nt, Artificial Sequence
  Description of Artificial Sequence: Synthetic oligonucleotide
  Sense strand starting at position 3739 of SEQ ID NO: 1881225
gaaggcugggacuauuagu

SEQ ID NO: 2027937 - RNA, 19 nt, Artificial Sequence
  Description of Artificial Sequence: Synthetic oligonucleotide
  Antisense strand to SEQ ID NO: 2027936
acuaauagucccagccuuc

SEQ ID NO: 2027938 - RNA, 19 nt, Artificial Sequence
  Description of Artificial Sequence: Synthetic oligonucleotide
  Sense strand starting at position 3779 of SEQ ID NO: 1881225
gaccaaggguuuccagaau

SEQ ID NO: 2027939 - RNA, 19 nt, Artificial Sequence
  Description of Artificial Sequence: Synthetic oligonucleotide
  Antisense strand to SEQ ID NO: 2027938
auucuggaaacccuugguc

SEQ ID NO: 2027940 - RNA, 19 nt, Artificial Sequence
  Description of Artificial Sequence: Synthetic oligonucleotide
  Sense strand starting at position 3846 of SEQ ID NO: 1881225
cuccgauucgcugucugua

SEQ ID NO: 2027941 - RNA, 19 nt, Artificial Sequence
  Description of Artificial Sequence: Synthetic oligonucleotide
  Antisense strand to SEQ ID NO: 2027940
uacagacagcgaaucggag

SEQ ID NO: 2027942 - RNA, 19 nt, Artificial Sequence
  Description of Artificial Sequence: Synthetic oligonucleotide
  Sense strand starting at position 3868 of SEQ ID NO: 1881225
ggcgaaacucuaggcugau

SEQ ID NO: 2027943 - RNA, 19 nt, Artificial Sequence
  Description of Artificial Sequence: Synthetic oligonucleotide
  Antisense strand to SEQ ID NO: 2027942
aucagccuagaguuucgcc

SEQ ID NO: 2027944 - RNA, 19 nt, Artificial Sequence
  Description of Artificial Sequence: Synthetic oligonucleotide
  Sense strand starting at position 3869 of SEQ ID NO: 1881225
gcgaaacucuaggcugaug

SEQ ID NO: 2027945 - RNA, 19 nt, Artificial Sequence
  Description of Artificial Sequence: Synthetic oligonucleotide
  Antisense strand to SEQ ID NO: 2027944
caucagccuagaguuucgc

SEQ ID NO: 2027946 - RNA, 19 nt, Artificial Sequence
  Description of Artificial Sequence: Synthetic oligonucleotide
  Sense strand starting at position 3910 of SEQ ID NO: 1881225
ggaaguugcguccguggaa

SEQ ID NO: 2027947 - RNA, 19 nt, Artificial Sequence
  Description of Artificial Sequence: Synthetic oligonucleotide
  Antisense strand to SEQ ID NO: 2027946
uuccacggacgcaacuucc

SEQ ID NO: 2027948 - RNA, 19 nt, Artificial Sequence
  Description of Artificial Sequence: Synthetic oligonucleotide
  Sense strand starting at position 165 of SEQ ID NO: 1881226
ggcuguuaaggugaaggua

SEQ ID NO: 2027949 - RNA, 19 nt, Artificial Sequence
  Description of Artificial Sequence: Synthetic oligonucleotide
  Antisense strand to SEQ ID NO: 2027948
uaccuucaccuuaacagcc

SEQ ID NO: 2027950 - RNA, 19 nt, Artificial Sequence
  Description of Artificial Sequence: Synthetic oligonucleotide
  Sense strand starting at position 253 of SEQ ID NO: 1881226
gcaugaagauuacuugaga

SEQ ID NO: 2027951 - RNA, 19 nt, Artificial Sequence
  Description of Artificial Sequence: Synthetic oligonucleotide
  Antisense strand to SEQ ID NO: 2027950
ucucaaguaaucuucaugc

SEQ ID NO: 2027952 - RNA, 19 nt, Artificial Sequence
  Description of Artificial Sequence: Synthetic oligonucleotide
  Sense strand starting at position 519 of SEQ ID NO: 1881226
cuucuugccaugugaggau

SEQ ID NO: 2027953 - RNA, 19 nt, Artificial Sequence
  Description of Artificial Sequence: Synthetic oligonucleotide
  Antisense strand to SEQ ID NO: 2027952
auccucacauggcaagaag

SEQ ID NO: 2027954 - RNA, 19 nt, Artificial Sequence
  Description of Artificial Sequence: Synthetic oligonucleotide
  Sense strand starting at position 543 of SEQ ID NO: 1881226
aucucuuucuucuugagga

SEQ ID NO: 2027955 - RNA, 19 nt, Artificial Sequence
  Description of Artificial Sequence: Synthetic oligonucleotide
  Antisense strand to SEQ ID NO: 2027954
uccucaagaagaaagagau

SEQ ID NO: 2027956 - RNA, 19 nt, Artificial Sequence
  Description of Artificial Sequence: Synthetic oligonucleotide
  Sense strand starting at position 548 of SEQ ID NO: 1881226
uuucuucuugaggaugcaa

SEQ ID NO: 2027957 - RNA, 19 nt, Artificial Sequence
  Description of Artificial Sequence: Synthetic oligonucleotide
  Antisense strand to SEQ ID NO: 2027956
uugcauccucaagaagaaa

SEQ ID NO: 2027958 - RNA, 19 nt, Artificial Sequence
  Description of Artificial Sequence: Synthetic oligonucleotide
  Sense strand starting at position 857 of SEQ ID NO: 1881226
auaugaaaggugggcuaau

SEQ ID NO: 2027959 - RNA, 19 nt, Artificial Sequence
  Description of Artificial Sequence: Synthetic oligonucleotide
  Antisense strand to SEQ ID NO: 2027958
auuagcccaccuuucauau

SEQ ID NO: 2027960 - RNA, 19 nt, Artificial Sequence
  Description of Artificial Sequence: Synthetic oligonucleotide
  Sense strand starting at position 868 of SEQ ID NO: 1881226
gggcuaauguuaucucuau

SEQ ID NO: 2027961 - RNA, 19 nt, Artificial Sequence
  Description of Artificial Sequence: Synthetic oligonucleotide
  Antisense strand to SEQ ID NO: 2027960
auagagauaacauuagccc

SEQ ID NO: 2027962 - RNA, 19 nt, Artificial Sequence
  Description of Artificial Sequence: Synthetic oligonucleotide
  Sense strand starting at position 869 of SEQ ID NO: 1881226
ggcuaauguuaucucuauc

SEQ ID NO: 2027963 - RNA, 19 nt, Artificial Sequence
  Description of Artificial Sequence: Synthetic oligonucleotide
  Antisense strand to SEQ ID NO: 2027962
gauagagauaacauuagcc

SEQ ID NO: 2027964 - RNA, 19 nt, Artificial Sequence
  Description of Artificial Sequence: Synthetic oligonucleotide
  Sense strand starting at position 909 of SEQ ID NO: 1881226
cggagagcuucagugaacu

SEQ ID NO: 2027965 - RNA, 19 nt, Artificial Sequence
  Description of Artificial Sequence: Synthetic oligonucleotide
  Antisense strand to SEQ ID NO: 2027964
aguucacugaagcucuccg

SEQ ID NO: 2027966 - RNA, 19 nt, Artificial Sequence
  Description of Artificial Sequence: Synthetic oligonucleotide
  Sense strand starting at position 995 of SEQ ID NO: 1881226
agcacucuccaauguuaug

SEQ ID NO: 2027967 - RNA, 19 nt, Artificial Sequence
  Description of Artificial Sequence: Synthetic oligonucleotide
  Antisense strand to SEQ ID NO: 2027966
cauaacauuggagagugcu

SEQ ID NO: 2027968 - RNA, 19 nt, Artificial Sequence
  Description of Artificial Sequence: Synthetic oligonucleotide
  Sense strand starting at position 1117 of SEQ ID NO: 1881226
aggaaacuauguuaugaaa

SEQ ID NO: 2027969 - RNA, 19 nt, Artificial Sequence
  Description of Artificial Sequence: Synthetic oligonucleotide
  Antisense strand to SEQ ID NO: 2027968
uuucauaacauaguuuccu

SEQ ID NO: 2027970 - RNA, 19 nt, Artificial Sequence
  Description of Artificial Sequence: Synthetic oligonucleotide
  Sense strand starting at position 1176 of SEQ ID NO: 1881226
uuaaauaaggagcgauaua

SEQ ID NO: 2027971 - RNA, 19 nt, Artificial Sequence
  Description of Artificial Sequence: Synthetic oligonucleotide
  Antisense strand to SEQ ID NO: 2027970
uauaucgcuccuuauuuaa

SEQ ID NO: 2027972 - RNA, 19 nt, Artificial Sequence
  Description of Artificial Sequence: Synthetic oligonucleotide
  Sense strand starting at position 1260 of SEQ ID NO: 1881226
ggugcaaucagcugaauau

SEQ ID NO: 2027973 - RNA, 19 nt, Artificial Sequence
  Description of Artificial Sequence: Synthetic oligonucleotide
  Antisense strand to SEQ ID NO: 2027972
auauucagcugauugcacc

SEQ ID NO: 2027974 - RNA, 19 nt, Artificial Sequence
  Description of Artificial Sequence: Synthetic oligonucleotide
  Sense strand starting at position 1261 of SEQ ID NO: 1881226
gugcaaucagcugaauauc

SEQ ID NO: 2027975 - RNA, 19 nt, Artificial Sequence
  Description of Artificial Sequence: Synthetic oligonucleotide
  Antisense strand to SEQ ID NO: 2027974
gauauucagcugauugcac

SEQ ID NO: 2027976 - RNA, 19 nt, Artificial Sequence
  Description of Artificial Sequence: Synthetic oligonucleotide
  Sense strand starting at position 1397 of SEQ ID NO: 1881226
uuuggagggucuuccauau

SEQ ID NO: 2027977 - RNA, 19 nt, Artificial Sequence
  Description of Artificial Sequence: Synthetic oligonucleotide
  Antisense strand to SEQ ID NO: 2027976
auauggaagacccuccaaa

SEQ ID NO: 2027978 - RNA, 19 nt, Artificial Sequence
  Description of Artificial Sequence: Synthetic oligonucleotide
  Sense strand starting at position 1401 of SEQ ID NO: 1881226
gagggucuuccauaugguu

SEQ ID NO: 2027979 - RNA, 19 nt, Artificial Sequence
  Description of Artificial Sequence: Synthetic oligonucleotide
  Antisense strand to SEQ ID NO: 2027978
aaccauauggaagacccuc

SEQ ID NO: 2027980 - RNA, 19 nt, Artificial Sequence
  Description of Artificial Sequence: Synthetic oligonucleotide
  Sense strand starting at position 1409 of SEQ ID NO: 1881226
uccauaugguugcuccuaa

SEQ ID NO: 2027981 - RNA, 19 nt, Artificial Sequence
  Description of Artificial Sequence: Synthetic oligonucleotide
  Antisense strand to SEQ ID NO: 2027980
uuaggagcaaccauaugga

SEQ ID NO: 2027982 - RNA, 19 nt, Artificial Sequence
  Description of Artificial Sequence: Synthetic oligonucleotide
  Sense strand starting at position 1515 of SEQ ID NO: 1881226
ggaguacgauuacuacaca

SEQ ID NO: 2027983 - RNA, 19 nt, Artificial Sequence
  Description of Artificial Sequence: Synthetic oligonucleotide
  Antisense strand to SEQ ID NO: 2027982
uguguaguaaucguacucc

SEQ ID NO: 2027984 - RNA, 19 nt, Artificial Sequence
  Description of Artificial Sequence: Synthetic oligonucleotide
  Sense strand starting at position 1518 of SEQ ID NO: 1881226
guacgauuacuacacacau

SEQ ID NO: 2027985 - RNA, 19 nt, Artificial Sequence
  Description of Artificial Sequence: Synthetic oligonucleotide
  Antisense strand to SEQ ID NO: 2027984
auguguguaguaaucguac

SEQ ID NO: 2027986 - RNA, 19 nt, Artificial Sequence
  Description of Artificial Sequence: Synthetic oligonucleotide
  Sense strand starting at position 1669 of SEQ ID NO: 1881226
uuacaugucuuccuaaugu

SEQ ID NO: 2027987 - RNA, 19 nt, Artificial Sequence
  Description of Artificial Sequence: Synthetic oligonucleotide
  Antisense strand to SEQ ID NO: 2027986
acauuaggaagacauguaa

SEQ ID NO: 2027988 - RNA, 19 nt, Artificial Sequence
  Description of Artificial Sequence: Synthetic oligonucleotide
  Sense strand starting at position 1713 of SEQ ID NO: 1881226
agaauaacuugaggagaag

SEQ ID NO: 2027989 - RNA, 19 nt, Artificial Sequence
  Description of Artificial Sequence: Synthetic oligonucleotide
  Antisense strand to SEQ ID NO: 2027988
cuucuccucaaguuauucu

SEQ ID NO: 2027990 - RNA, 19 nt, Artificial Sequence
  Description of Artificial Sequence: Synthetic oligonucleotide
  Sense strand starting at position 1751 of SEQ ID NO: 1881226
auauuacuacgucauucuu

SEQ ID NO: 2027991 - RNA, 19 nt, Artificial Sequence
  Description of Artificial Sequence: Synthetic oligonucleotide
  Antisense strand to SEQ ID NO: 2027990
aagaaugacguaguaauau

SEQ ID NO: 2027992 - RNA, 19 nt, Artificial Sequence
  Description of Artificial Sequence: Synthetic oligonucleotide
  Sense strand starting at position 1833 of SEQ ID NO: 1881226
cuaugagggcuuggauauc

SEQ ID NO: 2027993 - RNA, 19 nt, Artificial Sequence
  Description of Artificial Sequence: Synthetic oligonucleotide
  Antisense strand to SEQ ID NO: 2027992
gauauccaagcccucauag

SEQ ID NO: 2027994 - RNA, 19 nt, Artificial Sequence
  Description of Artificial Sequence: Synthetic oligonucleotide
  Sense strand starting at position 1868 of SEQ ID NO: 1881226
gggaaaggcuggccugauu

SEQ ID NO: 2027995 - RNA, 19 nt, Artificial Sequence
  Description of Artificial Sequence: Synthetic oligonucleotide
  Antisense strand to SEQ ID NO: 2027994
aaucaggccagccuuuccc

SEQ ID NO: 2027996 - RNA, 19 nt, Artificial Sequence
  Description of Artificial Sequence: Synthetic oligonucleotide
  Sense strand starting at position 1876 of SEQ ID NO: 1881226
cuggccugauuaucauaaa

SEQ ID NO: 2027997 - RNA, 19 nt, Artificial Sequence
  Description of Artificial Sequence: Synthetic oligonucleotide
  Antisense strand to SEQ ID NO: 2027996
uuuaugauaaucaggccag

SEQ ID NO: 2027998 - RNA, 19 nt, Artificial Sequence
  Description of Artificial Sequence: Synthetic oligonucleotide
  Sense strand starting at position 2124 of SEQ ID NO: 1881226
augcaaggauucuuuaaau

SEQ ID NO: 2027999 - RNA, 19 nt, Artificial Sequence
  Description of Artificial Sequence: Synthetic oligonucleotide
  Antisense strand to SEQ ID NO: 2027998
auuuaaagaauccuugcau

SEQ ID NO: 2028000 - RNA, 19 nt, Artificial Sequence
  Description of Artificial Sequence: Synthetic oligonucleotide
  Sense strand starting at position 2209 of SEQ ID NO: 1881226
gaggaauucuaauaggauc

SEQ ID NO: 2028001 - RNA, 19 nt, Artificial Sequence
  Description of Artificial Sequence: Synthetic oligonucleotide
  Antisense strand to SEQ ID NO: 2028000
gauccuauuagaauuccuc

SEQ ID NO: 2028002 - RNA, 19 nt, Artificial Sequence
  Description of Artificial Sequence: Synthetic oligonucleotide
  Sense strand starting at position 2217 of SEQ ID NO: 1881226
cuaauaggaucaccguaua

SEQ ID NO: 2028003 - RNA, 19 nt, Artificial Sequence
  Description of Artificial Sequence: Synthetic oligonucleotide
  Antisense strand to SEQ ID NO: 2028002
uauacggugauccuauuag

SEQ ID NO: 2028004 - RNA, 19 nt, Artificial Sequence
  Description of Artificial Sequence: Synthetic oligonucleotide
  Sense strand starting at position 2228 of SEQ ID NO: 1881226
accguauagccaugacacu

SEQ ID NO: 2028005 - RNA, 19 nt, Artificial Sequence
  Description of Artificial Sequence: Synthetic oligonucleotide
  Antisense strand to SEQ ID NO: 2028004
agugucauggcuauacggu

SEQ ID NO: 2028006 - RNA, 19 nt, Artificial Sequence
  Description of Artificial Sequence: Synthetic oligonucleotide
  Sense strand starting at position 2229 of SEQ ID NO: 1881226
ccguauagccaugacacuu

SEQ ID NO: 2028007 - RNA, 19 nt, Artificial Sequence
  Description of Artificial Sequence: Synthetic oligonucleotide
  Antisense strand to SEQ ID NO: 2028006
aagugucauggcuauacgg

SEQ ID NO: 2028008 - RNA, 19 nt, Artificial Sequence
  Description of Artificial Sequence: Synthetic oligonucleotide
  Sense strand starting at position 2621 of SEQ ID NO: 1881226
ccuggauuacucgaguaaa

SEQ ID NO: 2028009 - RNA, 19 nt, Artificial Sequence
  Description of Artificial Sequence: Synthetic oligonucleotide
  Antisense strand to SEQ ID NO: 2028008
uuuacucgaguaauccagg

SEQ ID NO: 2028010 - RNA, 19 nt, Artificial Sequence
  Description of Artificial Sequence: Synthetic oligonucleotide
  Sense strand starting at position 2680 of SEQ ID NO: 1881226
cagcaaugggaccguaaua

SEQ ID NO: 2028011 - RNA, 19 nt, Artificial Sequence
  Description of Artificial Sequence: Synthetic oligonucleotide
  Antisense strand to SEQ ID NO: 2028010
uauuacggucccauugcug

SEQ ID NO: 2028012 - RNA, 19 nt, Artificial Sequence
  Description of Artificial Sequence: Synthetic oligonucleotide
  Sense strand starting at position 2810 of SEQ ID NO: 1881226
gcugaucacuguccucaau

SEQ ID NO: 2028013 - RNA, 19 nt, Artificial Sequence
  Description of Artificial Sequence: Synthetic oligonucleotide
  Antisense strand to SEQ ID NO: 2028012
auugaggacagugaucagc

SEQ ID NO: 2028014 - RNA, 19 nt, Artificial Sequence
  Description of Artificial Sequence: Synthetic oligonucleotide
  Sense strand starting at position 3580 of SEQ ID NO: 1881226
uuggaaaucugauggauuu

SEQ ID NO: 2028015 - RNA, 19 nt, Artificial Sequence
  Description of Artificial Sequence: Synthetic oligonucleotide
  Antisense strand to SEQ ID NO: 2028014
aaauccaucagauuuccaa

SEQ ID NO: 2028016 - RNA, 19 nt, Artificial Sequence
  Description of Artificial Sequence: Synthetic oligonucleotide
  Sense strand starting at position 3632 of SEQ ID NO: 1881226
ucaguugggcgauauacua

SEQ ID NO: 2028017 - RNA, 19 nt, Artificial Sequence
  Description of Artificial Sequence: Synthetic oligonucleotide
  Antisense strand to SEQ ID NO: 2028016
uaguauaucgcccaacuga

SEQ ID NO: 2028018 - RNA, 19 nt, Artificial Sequence
  Description of Artificial Sequence: Synthetic oligonucleotide
  Sense strand starting at position 3713 of SEQ ID NO: 1881226
ccaguuaggaaaugaaguu

SEQ ID NO: 2028019 - RNA, 19 nt, Artificial Sequence
  Description of Artificial Sequence: Synthetic oligonucleotide
  Antisense strand to SEQ ID NO: 2028018
aacuucauuuccuaacugg

SEQ ID NO: 2028020 - RNA, 19 nt, Artificial Sequence
  Description of Artificial Sequence: Synthetic oligonucleotide
  Sense strand starting at position 3741 of SEQ ID NO: 1881226
ucaguugcuucuuuaagaa

SEQ ID NO: 2028021 - RNA, 19 nt, Artificial Sequence
  Description of Artificial Sequence: Synthetic oligonucleotide
  Antisense strand to SEQ ID NO: 2028020
uucuuaaagaagcaacuga

SEQ ID NO: 2028022 - RNA, 19 nt, Artificial Sequence
  Description of Artificial Sequence: Synthetic oligonucleotide
  Sense strand starting at position 3950 of SEQ ID NO: 1881226
uguuguuucccgcauuuag

SEQ ID NO: 2028023 - RNA, 19 nt, Artificial Sequence
  Description of Artificial Sequence: Synthetic oligonucleotide
  Antisense strand to SEQ ID NO: 2028022
cuaaaugcgggaaacaaca

SEQ ID NO: 2028024 - RNA, 19 nt, Artificial Sequence
  Description of Artificial Sequence: Synthetic oligonucleotide
  Sense strand starting at position 3957 of SEQ ID NO: 1881226
ucccgcauuuagcuuaaua

SEQ ID NO: 2028025 - RNA, 19 nt, Artificial Sequence
  Description of Artificial Sequence: Synthetic oligonucleotide
  Antisense strand to SEQ ID NO: 2028024
uauuaagcuaaaugcggga

SEQ ID NO: 2028026 - RNA, 19 nt, Artificial Sequence
  Description of Artificial Sequence: Synthetic oligonucleotide
  Sense strand starting at position 3959 of SEQ ID NO: 1881226
ccgcauuuagcuuaauauc

SEQ ID NO: 2028027 - RNA, 19 nt, Artificial Sequence
  Description of Artificial Sequence: Synthetic oligonucleotide
  Antisense strand to SEQ ID NO: 2028026
gauauuaagcuaaaugcgg

SEQ ID NO: 2028028 - RNA, 19 nt, Artificial Sequence
  Description of Artificial Sequence: Synthetic oligonucleotide
  Sense strand starting at position 498 of SEQ ID NO: 1881227
gaacucuuagagugaguga

SEQ ID NO: 2028029 - RNA, 19 nt, Artificial Sequence
  Description of Artificial Sequence: Synthetic oligonucleotide
  Antisense strand to SEQ ID NO: 2028028
ucacucacucuaagaguuc

SEQ ID NO: 2028030 - RNA, 19 nt, Artificial Sequence
  Description of Artificial Sequence: Synthetic oligonucleotide
  Sense strand starting at position 765 of SEQ ID NO: 1881227
uaaauauguguaggaagua

SEQ ID NO: 2028031 - RNA, 19 nt, Artificial Sequence
  Description of Artificial Sequence: Synthetic oligonucleotide
  Antisense strand to SEQ ID NO: 2028030
uacuuccuacacauauuua

SEQ ID NO: 2028032 - RNA, 19 nt, Artificial Sequence
  Description of Artificial Sequence: Synthetic oligonucleotide
  Sense strand starting at position 844 of SEQ ID NO: 1881227
acgaaauccugagauauuu

SEQ ID NO: 2028033 - RNA, 19 nt, Artificial Sequence
  Description of Artificial Sequence: Synthetic oligonucleotide
  Antisense strand to SEQ ID NO: 2028032
aaauaucucaggauuucgu

SEQ ID NO: 2028034 - RNA, 19 nt, Artificial Sequence
  Description of Artificial Sequence: Synthetic oligonucleotide
  Sense strand starting at position 946 of SEQ ID NO: 1881227
ugauguguaguagauccau

SEQ ID NO: 2028035 - RNA, 19 nt, Artificial Sequence
  Description of Artificial Sequence: Synthetic oligonucleotide
  Antisense strand to SEQ ID NO: 2028034
auggaucuacuacacauca

SEQ ID NO: 2028036 - RNA, 19 nt, Artificial Sequence
  Description of Artificial Sequence: Synthetic oligonucleotide
  Sense strand starting at position 952 of SEQ ID NO: 1881227
guaguagauccauaccaca

SEQ ID NO: 2028037 - RNA, 19 nt, Artificial Sequence
  Description of Artificial Sequence: Synthetic oligonucleotide
  Antisense strand to SEQ ID NO: 2028036
ugugguauggaucuacuac

SEQ ID NO: 2028038 - RNA, 19 nt, Artificial Sequence
  Description of Artificial Sequence: Synthetic oligonucleotide
  Sense strand starting at position 1342 of SEQ ID NO: 1881227
uaacauauagcuuggguaa

SEQ ID NO: 2028039 - RNA, 19 nt, Artificial Sequence
  Description of Artificial Sequence: Synthetic oligonucleotide
  Antisense strand to SEQ ID NO: 2028038
uuacccaagcuauauguua

SEQ ID NO: 2028040 - RNA, 19 nt, Artificial Sequence
  Description of Artificial Sequence: Synthetic oligonucleotide
  Sense strand starting at position 1343 of SEQ ID NO: 1881227
aacauauagcuuggguaaa

SEQ ID NO: 2028041 - RNA, 19 nt, Artificial Sequence
  Description of Artificial Sequence: Synthetic oligonucleotide
  Antisense strand to SEQ ID NO: 2028040
uuuacccaagcuauauguu

SEQ ID NO: 2028042 - RNA, 19 nt, Artificial Sequence
  Description of Artificial Sequence: Synthetic oligonucleotide
  Sense strand starting at position 1345 of SEQ ID NO: 1881227
cauauagcuuggguaaaga

SEQ ID NO: 2028043 - RNA, 19 nt, Artificial Sequence
  Description of Artificial Sequence: Synthetic oligonucleotide
  Antisense strand to SEQ ID NO: 2028042
ucuuuacccaagcuauaug

SEQ ID NO: 2028044 - RNA, 19 nt, Artificial Sequence
  Description of Artificial Sequence: Synthetic oligonucleotide
  Sense strand starting at position 1380 of SEQ ID NO: 1881227
ucccauggaggucaguaua

SEQ ID NO: 2028045 - RNA, 19 nt, Artificial Sequence
  Description of Artificial Sequence: Synthetic oligonucleotide
  Antisense strand to SEQ ID NO: 2028044
uauacugaccuccauggga

SEQ ID NO: 2028046 - RNA, 19 nt, Artificial Sequence
  Description of Artificial Sequence: Synthetic oligonucleotide
  Sense strand starting at position 1559 of SEQ ID NO: 1881227
gcagaacauggucauaagu

SEQ ID NO: 2028047 - RNA, 19 nt, Artificial Sequence
  Description of Artificial Sequence: Synthetic oligonucleotide
  Antisense strand to SEQ ID NO: 2028046
acuuaugaccauguucugc

SEQ ID NO: 2028048 - RNA, 19 nt, Artificial Sequence
  Description of Artificial Sequence: Synthetic oligonucleotide
  Sense strand starting at position 1567 of SEQ ID NO: 1881227
uggucauaaguccaucaaa

SEQ ID NO: 2028049 - RNA, 19 nt, Artificial Sequence
  Description of Artificial Sequence: Synthetic oligonucleotide
  Antisense strand to SEQ ID NO: 2028048
uuugauggacuuaugacca

SEQ ID NO: 2028050 - RNA, 19 nt, Artificial Sequence
  Description of Artificial Sequence: Synthetic oligonucleotide
  Sense strand starting at position 1612 of SEQ ID NO: 1881227
ggcuaugaugaaugaauac

SEQ ID NO: 2028051 - RNA, 19 nt, Artificial Sequence
  Description of Artificial Sequence: Synthetic oligonucleotide
  Antisense strand to SEQ ID NO: 2028050
guauucauucaucauagcc

SEQ ID NO: 2028052 - RNA, 19 nt, Artificial Sequence
  Description of Artificial Sequence: Synthetic oligonucleotide
  Sense strand starting at position 1633 of SEQ ID NO: 1881227
agaagacuauguuuauuac

SEQ ID NO: 2028053 - RNA, 19 nt, Artificial Sequence
  Description of Artificial Sequence: Synthetic oligonucleotide
  Antisense strand to SEQ ID NO: 2028052
guaauaaacauagucuucu

SEQ ID NO: 2028054 - RNA, 19 nt, Artificial Sequence
  Description of Artificial Sequence: Synthetic oligonucleotide
  Sense strand starting at position 1897 of SEQ ID NO: 1881227
augucuguaguaggaagaa

SEQ ID NO: 2028055 - RNA, 19 nt, Artificial Sequence
  Description of Artificial Sequence: Synthetic oligonucleotide
  Antisense strand to SEQ ID NO: 2028054
uucuuccuacuacagacau

SEQ ID NO: 2028056 - RNA, 19 nt, Artificial Sequence
  Description of Artificial Sequence: Synthetic oligonucleotide
  Sense strand starting at position 1915 of SEQ ID NO: 1881227
aggccuaaauuugugucua

SEQ ID NO: 2028057 - RNA, 19 nt, Artificial Sequence
  Description of Artificial Sequence: Synthetic oligonucleotide
  Antisense strand to SEQ ID NO: 2028056
uagacacaaauuuaggccu

SEQ ID NO: 2028058 - RNA, 19 nt, Artificial Sequence
  Description of Artificial Sequence: Synthetic oligonucleotide
  Sense strand starting at position 1917 of SEQ ID NO: 1881227
gccuaaauuugugucuaua

SEQ ID NO: 2028059 - RNA, 19 nt, Artificial Sequence
  Description of Artificial Sequence: Synthetic oligonucleotide
  Antisense strand to SEQ ID NO: 2028058
uauagacacaaauuuaggc

SEQ ID NO: 2028060 - RNA, 19 nt, Artificial Sequence
  Description of Artificial Sequence: Synthetic oligonucleotide
  Sense strand starting at position 2046 of SEQ ID NO: 1881227
ccauaucauccuuagggca

SEQ ID NO: 2028061 - RNA, 19 nt, Artificial Sequence
  Description of Artificial Sequence: Synthetic oligonucleotide
  Antisense strand to SEQ ID NO: 2028060
ugcccuaaggaugauaugg

SEQ ID NO: 2028062 - RNA, 19 nt, Artificial Sequence
  Description of Artificial Sequence: Synthetic oligonucleotide
  Sense strand starting at position 2090 of SEQ ID NO: 1881227
cagcaucauguggaaacau

SEQ ID NO: 2028063 - RNA, 19 nt, Artificial Sequence
  Description of Artificial Sequence: Synthetic oligonucleotide
  Antisense strand to SEQ ID NO: 2028062
auguuuccacaugaugcug

SEQ ID NO: 2028064 - RNA, 19 nt, Artificial Sequence
  Description of Artificial Sequence: Synthetic oligonucleotide
  Sense strand starting at position 2116 of SEQ ID NO: 1881227
gugaaauuaucagucccua

SEQ ID NO: 2028065 - RNA, 19 nt, Artificial Sequence
  Description of Artificial Sequence: Synthetic oligonucleotide
  Antisense strand to SEQ ID NO: 2028064
uagggacugauaauuucac

SEQ ID NO: 2028066 - RNA, 19 nt, Artificial Sequence
  Description of Artificial Sequence: Synthetic oligonucleotide
  Sense strand starting at position 2363 of SEQ ID NO: 1881227
agccuacauuaguuagaua

SEQ ID NO: 2028067 - RNA, 19 nt, Artificial Sequence
  Description of Artificial Sequence: Synthetic oligonucleotide
  Antisense strand to SEQ ID NO: 2028066
uaucuaacuaauguaggcu

SEQ ID NO: 2028068 - RNA, 19 nt, Artificial Sequence
  Description of Artificial Sequence: Synthetic oligonucleotide
  Sense strand starting at position 2433 of SEQ ID NO: 1881227
accagagguuaugcaauua

SEQ ID NO: 2028069 - RNA, 19 nt, Artificial Sequence
  Description of Artificial Sequence: Synthetic oligonucleotide
  Antisense strand to SEQ ID NO: 2028068
uaauugcauaaccucuggu

SEQ ID NO: 2028070 - RNA, 19 nt, Artificial Sequence
  Description of Artificial Sequence: Synthetic oligonucleotide
  Sense strand starting at position 2652 of SEQ ID NO: 1881227
ucuauacuucugggcuaaa

SEQ ID NO: 2028071 - RNA, 19 nt, Artificial Sequence
  Description of Artificial Sequence: Synthetic oligonucleotide
  Antisense strand to SEQ ID NO: 2028070
uuuagcccagaaguauaga

SEQ ID NO: 2028072 - RNA, 19 nt, Artificial Sequence
  Description of Artificial Sequence: Synthetic oligonucleotide
  Sense strand starting at position 2653 of SEQ ID NO: 1881227
cuauacuucugggcuaaag

SEQ ID NO: 2028073 - RNA, 19 nt, Artificial Sequence
  Description of Artificial Sequence: Synthetic oligonucleotide
  Antisense strand to SEQ ID NO: 2028072
cuuuagcccagaaguauag

SEQ ID NO: 2028074 - RNA, 19 nt, Artificial Sequence
  Description of Artificial Sequence: Synthetic oligonucleotide
  Sense strand starting at position 2699 of SEQ ID NO: 1881227
agcuuuccacagugagaag

SEQ ID NO: 2028075 - RNA, 19 nt, Artificial Sequence
  Description of Artificial Sequence: Synthetic oligonucleotide
  Antisense strand to SEQ ID NO: 2028074
cuucucacuguggaaagcu

SEQ ID NO: 2028076 - RNA, 19 nt, Artificial Sequence
  Description of Artificial Sequence: Synthetic oligonucleotide
  Sense strand starting at position 2700 of SEQ ID NO: 1881227
gcuuuccacagugagaaga

SEQ ID NO: 2028077 - RNA, 19 nt, Artificial Sequence
  Description of Artificial Sequence: Synthetic oligonucleotide
  Antisense strand to SEQ ID NO: 2028076
ucuucucacuguggaaagc

SEQ ID NO: 2028078 - RNA, 19 nt, Artificial Sequence
  Description of Artificial Sequence: Synthetic oligonucleotide
  Sense strand starting at position 2710 of SEQ ID NO: 1881227
gugagaagaaagugcaauu

SEQ ID NO: 2028079 - RNA, 19 nt, Artificial Sequence
  Description of Artificial Sequence: Synthetic oligonucleotide
  Antisense strand to SEQ ID NO: 2028078
aauugcacuuucuucucac

SEQ ID NO: 2028080 - RNA, 19 nt, Artificial Sequence
  Description of Artificial Sequence: Synthetic oligonucleotide
  Sense strand starting at position 2823 of SEQ ID NO: 1881227
agcgcuuaucuagugguuu

SEQ ID NO: 2028081 - RNA, 19 nt, Artificial Sequence
  Description of Artificial Sequence: Synthetic oligonucleotide
  Antisense strand to SEQ ID NO: 2028080
aaaccacuagauaagcgcu

SEQ ID NO: 2028082 - RNA, 19 nt, Artificial Sequence
  Description of Artificial Sequence: Synthetic oligonucleotide
  Sense strand starting at position 3040 of SEQ ID NO: 1881227
gagggaauggguuguuaau

SEQ ID NO: 2028083 - RNA, 19 nt, Artificial Sequence
  Description of Artificial Sequence: Synthetic oligonucleotide
  Antisense strand to SEQ ID NO: 2028082
auuaacaacccauucccuc

SEQ ID NO: 2028084 - RNA, 19 nt, Artificial Sequence
  Description of Artificial Sequence: Synthetic oligonucleotide
  Sense strand starting at position 3042 of SEQ ID NO: 1881227
gggaauggguuguuaauga

SEQ ID NO: 2028085 - RNA, 19 nt, Artificial Sequence
  Description of Artificial Sequence: Synthetic oligonucleotide
  Antisense strand to SEQ ID NO: 2028084
ucauuaacaacccauuccc

SEQ ID NO: 2028086 - RNA, 19 nt, Artificial Sequence
  Description of Artificial Sequence: Synthetic oligonucleotide
  Sense strand starting at position 3047 of SEQ ID NO: 1881227
uggguuguuaaugaaauuc

SEQ ID NO: 2028087 - RNA, 19 nt, Artificial Sequence
  Description of Artificial Sequence: Synthetic oligonucleotide
  Antisense strand to SEQ ID NO: 2028086
gaauuucauuaacaaccca

SEQ ID NO: 2028088 - RNA, 19 nt, Artificial Sequence
  Description of Artificial Sequence: Synthetic oligonucleotide
  Sense strand starting at position 3088 of SEQ ID NO: 1881227
gaaugaucaggugguaaau

SEQ ID NO: 2028089 - RNA, 19 nt, Artificial Sequence
  Description of Artificial Sequence: Synthetic oligonucleotide
  Antisense strand to SEQ ID NO: 2028088
auuuaccaccugaucauuc

SEQ ID NO: 2028090 - RNA, 19 nt, Artificial Sequence
  Description of Artificial Sequence: Synthetic oligonucleotide
  Sense strand starting at position 3146 of SEQ ID NO: 1881227
agcgauagucaccauauaa

SEQ ID NO: 2028091 - RNA, 19 nt, Artificial Sequence
  Description of Artificial Sequence: Synthetic oligonucleotide
  Antisense strand to SEQ ID NO: 2028090
uuauauggugacuaucgcu

SEQ ID NO: 2028092 - RNA, 19 nt, Artificial Sequence
  Description of Artificial Sequence: Synthetic oligonucleotide
  Sense strand starting at position 3346 of SEQ ID NO: 1881227
ggugaaugugugcaaagag

SEQ ID NO: 2028093 - RNA, 19 nt, Artificial Sequence
  Description of Artificial Sequence: Synthetic oligonucleotide
  Antisense strand to SEQ ID NO: 2028092
cucuuugcacacauucacc

SEQ ID NO: 2028094 - RNA, 19 nt, Artificial Sequence
  Description of Artificial Sequence: Synthetic oligonucleotide
  Sense strand starting at position 3470 of SEQ ID NO: 1881227
gcacaaaggugaucuuuga

SEQ ID NO: 2028095 - RNA, 19 nt, Artificial Sequence
  Description of Artificial Sequence: Synthetic oligonucleotide
  Antisense strand to SEQ ID NO: 2028094
ucaaagaucaccuuugugc

SEQ ID NO: 2028096 - RNA, 19 nt, Artificial Sequence
  Description of Artificial Sequence: Synthetic oligonucleotide
  Sense strand starting at position 3515 of SEQ ID NO: 1881227
uaauguguggcagagaaac

SEQ ID NO: 2028097 - RNA, 19 nt, Artificial Sequence
  Description of Artificial Sequence: Synthetic oligonucleotide
  Antisense strand to SEQ ID NO: 2028096
guuucucugccacacauua

SEQ ID NO: 2028098 - RNA, 19 nt, Artificial Sequence
  Description of Artificial Sequence: Synthetic oligonucleotide
  Sense strand starting at position 3517 of SEQ ID NO: 1881227
auguguggcagagaaacua

SEQ ID NO: 2028099 - RNA, 19 nt, Artificial Sequence
  Description of Artificial Sequence: Synthetic oligonucleotide
  Antisense strand to SEQ ID NO: 2028098
uaguuucucugccacacau

SEQ ID NO: 2028100 - RNA, 19 nt, Artificial Sequence
  Description of Artificial Sequence: Synthetic oligonucleotide
  Sense strand starting at position 3843 of SEQ ID NO: 1881227
ugguuacucuccuuuggaa

SEQ ID NO: 2028101 - RNA, 19 nt, Artificial Sequence
  Description of Artificial Sequence: Synthetic oligonucleotide
  Antisense strand to SEQ ID NO: 2028100
uuccaaaggagaguaacca

SEQ ID NO: 2028102 - RNA, 19 nt, Artificial Sequence
  Description of Artificial Sequence: Synthetic oligonucleotide
  Sense strand starting at position 3845 of SEQ ID NO: 1881227
guuacucuccuuuggaaga

SEQ ID NO: 2028103 - RNA, 19 nt, Artificial Sequence
  Description of Artificial Sequence: Synthetic oligonucleotide
  Antisense strand to SEQ ID NO: 2028102
ucuuccaaaggagaguaac

SEQ ID NO: 2028104 - RNA, 19 nt, Artificial Sequence
  Description of Artificial Sequence: Synthetic oligonucleotide
  Sense strand starting at position 3902 of SEQ ID NO: 1881227
aagggaagagucuguuuag

SEQ ID NO: 2028105 - RNA, 19 nt, Artificial Sequence
  Description of Artificial Sequence: Synthetic oligonucleotide
  Antisense strand to SEQ ID NO: 2028104
cuaaacagacucuucccuu

SEQ ID NO: 2028106 - RNA, 19 nt, Artificial Sequence
  Description of Artificial Sequence: Synthetic oligonucleotide
  Sense strand starting at position 3905 of SEQ ID NO: 1881227
ggaagagucuguuuaggaa

SEQ ID NO: 2028107 - RNA, 19 nt, Artificial Sequence
  Description of Artificial Sequence: Synthetic oligonucleotide
  Antisense strand to SEQ ID NO: 2028106
uuccuaaacagacucuucc

SEQ ID NO: 2028108 - RNA, 19 nt, Artificial Sequence
  Description of Artificial Sequence: Synthetic oligonucleotide
  Sense strand starting at position 17 of SEQ ID NO: 1881228
aauuaaguaucggcaagga

SEQ ID NO: 2028109 - RNA, 19 nt, Artificial Sequence
  Description of Artificial Sequence: Synthetic oligonucleotide
  Antisense strand to SEQ ID NO: 2028108
uccuugccgauacuuaauu

SEQ ID NO: 2028110 - RNA, 19 nt, Artificial Sequence
  Description of Artificial Sequence: Synthetic oligonucleotide
  Sense strand starting at position 46 of SEQ ID NO: 1881228
cuggaaauccugugugcug

SEQ ID NO: 2028111 - RNA, 19 nt, Artificial Sequence
  Description of Artificial Sequence: Synthetic oligonucleotide
  Antisense strand to SEQ ID NO: 2028110
cagcacacaggauuuccag

SEQ ID NO: 2028112 - RNA, 19 nt, Artificial Sequence
  Description of Artificial Sequence: Synthetic oligonucleotide
  Sense strand starting at position 82 of SEQ ID NO: 1881228
ugcugcaaucacuauggaa

SEQ ID NO: 2028113 - RNA, 19 nt, Artificial Sequence
  Description of Artificial Sequence: Synthetic oligonucleotide
  Antisense strand to SEQ ID NO: 2028112
uuccauagugauugcagca

SEQ ID NO: 2028114 - RNA, 19 nt, Artificial Sequence
  Description of Artificial Sequence: Synthetic oligonucleotide
  Sense strand starting at position 132 of SEQ ID NO: 1881228
auguaacugccguaugauc

SEQ ID NO: 2028115 - RNA, 19 nt, Artificial Sequence
  Description of Artificial Sequence: Synthetic oligonucleotide
  Antisense strand to SEQ ID NO: 2028114
gaucauacggcaguuacau

SEQ ID NO: 2028116 - RNA, 19 nt, Artificial Sequence
  Description of Artificial Sequence: Synthetic oligonucleotide
  Sense strand starting at position 278 of SEQ ID NO: 1881228
aucaauggauggcuagaua

SEQ ID NO: 2028117 - RNA, 19 nt, Artificial Sequence
  Description of Artificial Sequence: Synthetic oligonucleotide
  Antisense strand to SEQ ID NO: 2028116
uaucuagccauccauugau

SEQ ID NO: 2028118 - RNA, 19 nt, Artificial Sequence
  Description of Artificial Sequence: Synthetic oligonucleotide
  Sense strand starting at position 387 of SEQ ID NO: 1881228
acucuacacugagugaaau

SEQ ID NO: 2028119 - RNA, 19 nt, Artificial Sequence
  Description of Artificial Sequence: Synthetic oligonucleotide
  Antisense strand to SEQ ID NO: 2028118
auuucacucaguguagagu

SEQ ID NO: 2028120 - RNA, 19 nt, Artificial Sequence
  Description of Artificial Sequence: Synthetic oligonucleotide
  Sense strand starting at position 388 of SEQ ID NO: 1881228
cucuacacugagugaaaua

SEQ ID NO: 2028121 - RNA, 19 nt, Artificial Sequence
  Description of Artificial Sequence: Synthetic oligonucleotide
  Antisense strand to SEQ ID NO: 2028120
uauuucacucaguguagag

SEQ ID NO: 2028122 - RNA, 19 nt, Artificial Sequence
  Description of Artificial Sequence: Synthetic oligonucleotide
  Sense strand starting at position 525 of SEQ ID NO: 1881228
guuuauucgguauaggauu

SEQ ID NO: 2028123 - RNA, 19 nt, Artificial Sequence
  Description of Artificial Sequence: Synthetic oligonucleotide
  Antisense strand to SEQ ID NO: 2028122
aauccuauaccgaauaaac

SEQ ID NO: 2028124 - RNA, 19 nt, Artificial Sequence
  Description of Artificial Sequence: Synthetic oligonucleotide
  Sense strand starting at position 555 of SEQ ID NO: 1881228
agacgaaaguguucugaag

SEQ ID NO: 2028125 - RNA, 19 nt, Artificial Sequence
  Description of Artificial Sequence: Synthetic oligonucleotide
  Antisense strand to SEQ ID NO: 2028124
cuucagaacacuuucgucu

SEQ ID NO: 2028126 - RNA, 19 nt, Artificial Sequence
  Description of Artificial Sequence: Synthetic oligonucleotide
  Sense strand starting at position 621 of SEQ ID NO: 1881228
auuuaaagauggugaagau

SEQ ID NO: 2028127 - RNA, 19 nt, Artificial Sequence
  Description of Artificial Sequence: Synthetic oligonucleotide
  Antisense strand to SEQ ID NO: 2028126
aucuucaccaucuuuaaau

SEQ ID NO: 2028128 - RNA, 19 nt, Artificial Sequence
  Description of Artificial Sequence: Synthetic oligonucleotide
  Sense strand starting at position 770 of SEQ ID NO: 1881228
uggacaguauuauuacaua

SEQ ID NO: 2028129 - RNA, 19 nt, Artificial Sequence
  Description of Artificial Sequence: Synthetic oligonucleotide
  Antisense strand to SEQ ID NO: 2028128
uauguaauaauacugucca

SEQ ID NO: 2028130 - RNA, 19 nt, Artificial Sequence
  Description of Artificial Sequence: Synthetic oligonucleotide
  Sense strand starting at position 800 of SEQ ID NO: 1881228
uucugaaaucucugcagaa

SEQ ID NO: 2028131 - RNA, 19 nt, Artificial Sequence
  Description of Artificial Sequence: Synthetic oligonucleotide
  Antisense strand to SEQ ID NO: 2028130
uucugcagagauuucagaa

SEQ ID NO: 2028132 - RNA, 19 nt, Artificial Sequence
  Description of Artificial Sequence: Synthetic oligonucleotide
  Sense strand starting at position 801 of SEQ ID NO: 1881228
ucugaaaucucugcagaaa

SEQ ID NO: 2028133 - RNA, 19 nt, Artificial Sequence
  Description of Artificial Sequence: Synthetic oligonucleotide
  Antisense strand to SEQ ID NO: 2028132
uuucugcagagauuucaga

SEQ ID NO: 2028134 - RNA, 19 nt, Artificial Sequence
  Description of Artificial Sequence: Synthetic oligonucleotide
  Sense strand starting at position 826 of SEQ ID NO: 1881228
acugcauuagaauaagcuu

SEQ ID NO: 2028135 - RNA, 19 nt, Artificial Sequence
  Description of Artificial Sequence: Synthetic oligonucleotide
  Antisense strand to SEQ ID NO: 2028134
aagcuuauucuaaugcagu

SEQ ID NO: 2028136 - RNA, 19 nt, Artificial Sequence
  Description of Artificial Sequence: Synthetic oligonucleotide
  Sense strand starting at position 841 of SEQ ID NO: 1881228
gcuuauuuauugcagacaa

SEQ ID NO: 2028137 - RNA, 19 nt, Artificial Sequence
  Description of Artificial Sequence: Synthetic oligonucleotide
  Antisense strand to SEQ ID NO: 2028136
uugucugcaauaaauaagc

SEQ ID NO: 2028138 - RNA, 19 nt, Artificial Sequence
  Description of Artificial Sequence: Synthetic oligonucleotide
  Sense strand starting at position 945 of SEQ ID NO: 1881228
gcagaugaguucucugauc

SEQ ID NO: 2028139 - RNA, 19 nt, Artificial Sequence
  Description of Artificial Sequence: Synthetic oligonucleotide
  Antisense strand to SEQ ID NO: 2028138
gaucagagaacucaucugc

SEQ ID NO: 2028140 - RNA, 19 nt, Artificial Sequence
  Description of Artificial Sequence: Synthetic oligonucleotide
  Sense strand starting at position 950 of SEQ ID NO: 1881228
ugaguucucugaucccgua

SEQ ID NO: 2028141 - RNA, 19 nt, Artificial Sequence
  Description of Artificial Sequence: Synthetic oligonucleotide
  Antisense strand to SEQ ID NO: 2028140
uacgggaucagagaacuca

SEQ ID NO: 2028142 - RNA, 19 nt, Artificial Sequence
  Description of Artificial Sequence: Synthetic oligonucleotide
  Sense strand starting at position 995 of SEQ ID NO: 1881228
guaugaagucucuauggac

SEQ ID NO: 2028143 - RNA, 19 nt, Artificial Sequence
  Description of Artificial Sequence: Synthetic oligonucleotide
  Antisense strand to SEQ ID NO: 2028142
guccauagagacuucauac

SEQ ID NO: 2028144 - RNA, 19 nt, Artificial Sequence
  Description of Artificial Sequence: Synthetic oligonucleotide
  Sense strand starting at position 1013 of SEQ ID NO: 1881228
cuagcagugucaucucaga

SEQ ID NO: 2028145 - RNA, 19 nt, Artificial Sequence
  Description of Artificial Sequence: Synthetic oligonucleotide
  Antisense strand to SEQ ID NO: 2028144
ucugagaugacacugcuag

SEQ ID NO: 2028146 - RNA, 19 nt, Artificial Sequence
  Description of Artificial Sequence: Synthetic oligonucleotide
  Sense strand starting at position 1081 of SEQ ID NO: 1881228
auaccugggcucugauuau

SEQ ID NO: 2028147 - RNA, 19 nt, Artificial Sequence
  Description of Artificial Sequence: Synthetic oligonucleotide
  Antisense strand to SEQ ID NO: 2028146
auaaucagagcccagguau

SEQ ID NO: 2028148 - RNA, 19 nt, Artificial Sequence
  Description of Artificial Sequence: Synthetic oligonucleotide
  Sense strand starting at position 1199 of SEQ ID NO: 1881228
gagugaaauuaagcagacu

SEQ ID NO: 2028149 - RNA, 19 nt, Artificial Sequence
  Description of Artificial Sequence: Synthetic oligonucleotide
  Antisense strand to SEQ ID NO: 2028148
agucugcuuaauuucacuc

SEQ ID NO: 2028150 - RNA, 19 nt, Artificial Sequence
  Description of Artificial Sequence: Synthetic oligonucleotide
  Sense strand starting at position 1425 of SEQ ID NO: 1881228
aguaucuaucagcacuaga

SEQ ID NO: 2028151 - RNA, 19 nt, Artificial Sequence
  Description of Artificial Sequence: Synthetic oligonucleotide
  Antisense strand to SEQ ID NO: 2028150
ucuagugcugauagauacu

SEQ ID NO: 2028152 - RNA, 19 nt, Artificial Sequence
  Description of Artificial Sequence: Synthetic oligonucleotide
  Sense strand starting at position 1453 of SEQ ID NO: 1881228
ucuauauuacauugcgagu

SEQ ID NO: 2028153 - RNA, 19 nt, Artificial Sequence
  Description of Artificial Sequence: Synthetic oligonucleotide
  Antisense strand to SEQ ID NO: 2028152
acucgcaauguaauauaga

SEQ ID NO: 2028154 - RNA, 19 nt, Artificial Sequence
  Description of Artificial Sequence: Synthetic oligonucleotide
  Sense strand starting at position 1459 of SEQ ID NO: 1881228
uuacauugcgaguaucaau

SEQ ID NO: 2028155 - RNA, 19 nt, Artificial Sequence
  Description of Artificial Sequence: Synthetic oligonucleotide
  Antisense strand to SEQ ID NO: 2028154
auugauacucgcaauguaa

SEQ ID NO: 2028156 - RNA, 19 nt, Artificial Sequence
  Description of Artificial Sequence: Synthetic oligonucleotide
  Sense strand starting at position 1596 of SEQ ID NO: 1881228
acaugcuugucccucugaa

SEQ ID NO: 2028157 - RNA, 19 nt, Artificial Sequence
  Description of Artificial Sequence: Synthetic oligonucleotide
  Antisense strand to SEQ ID NO: 2028156
uucagagggacaagcaugu

SEQ ID NO: 2028158 - RNA, 19 nt, Artificial Sequence
  Description of Artificial Sequence: Synthetic oligonucleotide
  Sense strand starting at position 1627 of SEQ ID NO: 1881228
acaggaaccuaaucuaugu

SEQ ID NO: 2028159 - RNA, 19 nt, Artificial Sequence
  Description of Artificial Sequence: Synthetic oligonucleotide
  Antisense strand to SEQ ID NO: 2028158
acauagauuagguuccugu

SEQ ID NO: 2028160 - RNA, 19 nt, Artificial Sequence
  Description of Artificial Sequence: Synthetic oligonucleotide
  Sense strand starting at position 1903 of SEQ ID NO: 1881228
ccuuuaauccaguggucca

SEQ ID NO: 2028161 - RNA, 19 nt, Artificial Sequence
  Description of Artificial Sequence: Synthetic oligonucleotide
  Antisense strand to SEQ ID NO: 2028160
uggaccacuggauuaaagg

SEQ ID NO: 2028162 - RNA, 19 nt, Artificial Sequence
  Description of Artificial Sequence: Synthetic oligonucleotide
  Sense strand starting at position 1924 of SEQ ID NO: 1881228
gguaccaacucagaagaca

SEQ ID NO: 2028163 - RNA, 19 nt, Artificial Sequence
  Description of Artificial Sequence: Synthetic oligonucleotide
  Antisense strand to SEQ ID NO: 2028162
ugucuucugaguugguacc

SEQ ID NO: 2028164 - RNA, 19 nt, Artificial Sequence
  Description of Artificial Sequence: Synthetic oligonucleotide
  Sense strand starting at position 1945 of SEQ ID NO: 1881228
gugccacuuacugagagaa

SEQ ID NO: 2028165 - RNA, 19 nt, Artificial Sequence
  Description of Artificial Sequence: Synthetic oligonucleotide
  Antisense strand to SEQ ID NO: 2028164
uucucucaguaaguggcac

SEQ ID NO: 2028166 - RNA, 19 nt, Artificial Sequence
  Description of Artificial Sequence: Synthetic oligonucleotide
  Sense strand starting at position 1986 of SEQ ID NO: 1881228
ucugucuucugagucggau

SEQ ID NO: 2028167 - RNA, 19 nt, Artificial Sequence
  Description of Artificial Sequence: Synthetic oligonucleotide
  Antisense strand to SEQ ID NO: 2028166
auccgacucagaagacaga

SEQ ID NO: 2028168 - RNA, 19 nt, Artificial Sequence
  Description of Artificial Sequence: Synthetic oligonucleotide
  Sense strand starting at position 1988 of SEQ ID NO: 1881228
ugucuucugagucggauuu

SEQ ID NO: 2028169 - RNA, 19 nt, Artificial Sequence
  Description of Artificial Sequence: Synthetic oligonucleotide
  Antisense strand to SEQ ID NO: 2028168
aaauccgacucagaagaca

SEQ ID NO: 2028170 - RNA, 19 nt, Artificial Sequence
  Description of Artificial Sequence: Synthetic oligonucleotide
  Sense strand starting at position 2028 of SEQ ID NO: 1881228
aaugaacugguuuagcuua

SEQ ID NO: 2028171 - RNA, 19 nt, Artificial Sequence
  Description of Artificial Sequence: Synthetic oligonucleotide
  Antisense strand to SEQ ID NO: 2028170
uaagcuaaaccaguucauu

SEQ ID NO: 2028172 - RNA, 19 nt, Artificial Sequence
  Description of Artificial Sequence: Synthetic oligonucleotide
  Sense strand starting at position 2051 of SEQ ID NO: 1881228
aguuuacaagcuuaaagua

SEQ ID NO: 2028173 - RNA, 19 nt, Artificial Sequence
  Description of Artificial Sequence: Synthetic oligonucleotide
  Antisense strand to SEQ ID NO: 2028172
uacuuuaagcuuguaaacu

SEQ ID NO: 2028174 - RNA, 19 nt, Artificial Sequence
  Description of Artificial Sequence: Synthetic oligonucleotide
  Sense strand starting at position 2067 of SEQ ID NO: 1881228
guacauuuaugacacuguu

SEQ ID NO: 2028175 - RNA, 19 nt, Artificial Sequence
  Description of Artificial Sequence: Synthetic oligonucleotide
  Antisense strand to SEQ ID NO: 2028174
aacagugucauaaauguac

SEQ ID NO: 2028176 - RNA, 19 nt, Artificial Sequence
  Description of Artificial Sequence: Synthetic oligonucleotide
  Sense strand starting at position 2183 of SEQ ID NO: 1881228
uguauuuauuccguaguau

SEQ ID NO: 2028177 - RNA, 19 nt, Artificial Sequence
  Description of Artificial Sequence: Synthetic oligonucleotide
  Antisense strand to SEQ ID NO: 2028176
auacuacggaauaaauaca

SEQ ID NO: 2028178 - RNA, 19 nt, Artificial Sequence
  Description of Artificial Sequence: Synthetic oligonucleotide
  Sense strand starting at position 2184 of SEQ ID NO: 1881228
guauuuauuccguaguauc

SEQ ID NO: 2028179 - RNA, 19 nt, Artificial Sequence
  Description of Artificial Sequence: Synthetic oligonucleotide
  Antisense strand to SEQ ID NO: 2028178
gauacuacggaauaaauac

SEQ ID NO: 2028180 - RNA, 19 nt, Artificial Sequence
  Description of Artificial Sequence: Synthetic oligonucleotide
  Sense strand starting at position 3432 of SEQ ID NO: 1881228
gauguaaggccauaucuga

SEQ ID NO: 2028181 - RNA, 19 nt, Artificial Sequence
  Description of Artificial Sequence: Synthetic oligonucleotide
  Antisense strand to SEQ ID NO: 2028180
ucagauauggccuuacauc

SEQ ID NO: 2028182 - RNA, 19 nt, Artificial Sequence
  Description of Artificial Sequence: Synthetic oligonucleotide
  Sense strand starting at position 3439 of SEQ ID NO: 1881228
ggccauaucugacuggaag

SEQ ID NO: 2028183 - RNA, 19 nt, Artificial Sequence
  Description of Artificial Sequence: Synthetic oligonucleotide
  Antisense strand to SEQ ID NO: 2028182
cuuccagucagauauggcc

SEQ ID NO: 2028184 - RNA, 19 nt, Artificial Sequence
  Description of Artificial Sequence: Synthetic oligonucleotide
  Sense strand starting at position 3440 of SEQ ID NO: 1881228
gccauaucugacuggaagu

SEQ ID NO: 2028185 - RNA, 19 nt, Artificial Sequence
  Description of Artificial Sequence: Synthetic oligonucleotide
  Antisense strand to SEQ ID NO: 2028184
acuuccagucagauauggc

SEQ ID NO: 2028186 - RNA, 19 nt, Artificial Sequence
  Description of Artificial Sequence: Synthetic oligonucleotide
  Sense strand starting at position 3552 of SEQ ID NO: 1881228
uucuuagaauuggaagaga

SEQ ID NO: 2028187 - RNA, 19 nt, Artificial Sequence
  Description of Artificial Sequence: Synthetic oligonucleotide
  Antisense strand to SEQ ID NO: 2028186
ucucuuccaauucuaagaa

SEQ ID NO: 2028188 - RNA, 19 nt, Artificial Sequence
  Description of Artificial Sequence: Synthetic oligonucleotide
  Sense strand starting at position 256 of SEQ ID NO: 1881229
ugauuugucugaguccguu

SEQ ID NO: 2028189 - RNA, 19 nt, Artificial Sequence
  Description of Artificial Sequence: Synthetic oligonucleotide
  Antisense strand to SEQ ID NO: 2028188
aacggacucagacaaauca

SEQ ID NO: 2028190 - RNA, 19 nt, Artificial Sequence
  Description of Artificial Sequence: Synthetic oligonucleotide
  Sense strand starting at position 596 of SEQ ID NO: 1881229
ucuacauguggguagucaa

SEQ ID NO: 2028191 - RNA, 19 nt, Artificial Sequence
  Description of Artificial Sequence: Synthetic oligonucleotide
  Antisense strand to SEQ ID NO: 2028190
uugacuacccacauguaga

SEQ ID NO: 2028192 - RNA, 19 nt, Artificial Sequence
  Description of Artificial Sequence: Synthetic oligonucleotide
  Sense strand starting at position 908 of SEQ ID NO: 1881229
uuucuaacugugugaggaa

SEQ ID NO: 2028193 - RNA, 19 nt, Artificial Sequence
  Description of Artificial Sequence: Synthetic oligonucleotide
  Antisense strand to SEQ ID NO: 2028192
uuccucacacaguuagaaa

SEQ ID NO: 2028194 - RNA, 19 nt, Artificial Sequence
  Description of Artificial Sequence: Synthetic oligonucleotide
  Sense strand starting at position 1111 of SEQ ID NO: 1881229
uuaguuauacuaggaacau

SEQ ID NO: 2028195 - RNA, 19 nt, Artificial Sequence
  Description of Artificial Sequence: Synthetic oligonucleotide
  Antisense strand to SEQ ID NO: 2028194
auguuccuaguauaacuaa

SEQ ID NO: 2028196 - RNA, 19 nt, Artificial Sequence
  Description of Artificial Sequence: Synthetic oligonucleotide
  Sense strand starting at position 1122 of SEQ ID NO: 1881229
aggaacauguuguccuauu

SEQ ID NO: 2028197 - RNA, 19 nt, Artificial Sequence
  Description of Artificial Sequence: Synthetic oligonucleotide
  Antisense strand to SEQ ID NO: 2028196
aauaggacaacauguuccu

SEQ ID NO: 2028198 - RNA, 19 nt, Artificial Sequence
  Description of Artificial Sequence: Synthetic oligonucleotide
  Sense strand starting at position 1123 of SEQ ID NO: 1881229
ggaacauguuguccuauuc

SEQ ID NO: 2028199 - RNA, 19 nt, Artificial Sequence
  Description of Artificial Sequence: Synthetic oligonucleotide
  Antisense strand to SEQ ID NO: 2028198
gaauaggacaacauguucc

SEQ ID NO: 2028200 - RNA, 19 nt, Artificial Sequence
  Description of Artificial Sequence: Synthetic oligonucleotide
  Sense strand starting at position 1227 of SEQ ID NO: 1881229
ugaugcaggauuugucagu

SEQ ID NO: 2028201 - RNA, 19 nt, Artificial Sequence
  Description of Artificial Sequence: Synthetic oligonucleotide
  Antisense strand to SEQ ID NO: 2028200
acugacaaauccugcauca

SEQ ID NO: 2028202 - RNA, 19 nt, Artificial Sequence
  Description of Artificial Sequence: Synthetic oligonucleotide
  Sense strand starting at position 1335 of SEQ ID NO: 1881229
aggagugggucugcaauca

SEQ ID NO: 2028203 - RNA, 19 nt, Artificial Sequence
  Description of Artificial Sequence: Synthetic oligonucleotide
  Antisense strand to SEQ ID NO: 2028202
ugauugcagacccacuccu

SEQ ID NO: 2028204 - RNA, 19 nt, Artificial Sequence
  Description of Artificial Sequence: Synthetic oligonucleotide
  Sense strand starting at position 1423 of SEQ ID NO: 1881229
agaaaugagggcuguccuu

SEQ ID NO: 2028205 - RNA, 19 nt, Artificial Sequence
  Description of Artificial Sequence: Synthetic oligonucleotide
  Antisense strand to SEQ ID NO: 2028204
aaggacagcccucauuucu

SEQ ID NO: 2028206 - RNA, 19 nt, Artificial Sequence
  Description of Artificial Sequence: Synthetic oligonucleotide
  Sense strand starting at position 1817 of SEQ ID NO: 1881229
ucaauuggcuguucccaga

SEQ ID NO: 2028207 - RNA, 19 nt, Artificial Sequence
  Description of Artificial Sequence: Synthetic oligonucleotide
  Antisense strand to SEQ ID NO: 2028206
ucugggaacagccaauuga

SEQ ID NO: 2028208 - RNA, 19 nt, Artificial Sequence
  Description of Artificial Sequence: Synthetic oligonucleotide
  Sense strand starting at position 2102 of SEQ ID NO: 1881229
gagguuaaggucuggucua

SEQ ID NO: 2028209 - RNA, 19 nt, Artificial Sequence
  Description of Artificial Sequence: Synthetic oligonucleotide
  Antisense strand to SEQ ID NO: 2028208
uagaccagaccuuaaccuc

SEQ ID NO: 2028210 - RNA, 19 nt, Artificial Sequence
  Description of Artificial Sequence: Synthetic oligonucleotide
  Sense strand starting at position 2264 of SEQ ID NO: 1881229
ccugguuccuucccagaca

SEQ ID NO: 2028211 - RNA, 19 nt, Artificial Sequence
  Description of Artificial Sequence: Synthetic oligonucleotide
  Antisense strand to SEQ ID NO: 2028210
ugucugggaaggaaccagg

SEQ ID NO: 2028212 - RNA, 19 nt, Artificial Sequence
  Description of Artificial Sequence: Synthetic oligonucleotide
  Sense strand starting at position 2267 of SEQ ID NO: 1881229
gguuccuucccagacacaa

SEQ ID NO: 2028213 - RNA, 19 nt, Artificial Sequence
  Description of Artificial Sequence: Synthetic oligonucleotide
  Antisense strand to SEQ ID NO: 2028212
uugugucugggaaggaacc

SEQ ID NO: 2028214 - RNA, 19 nt, Artificial Sequence
  Description of Artificial Sequence: Synthetic oligonucleotide
  Sense strand starting at position 2331 of SEQ ID NO: 1881229
aaguccugccguguguaaa

SEQ ID NO: 2028215 - RNA, 19 nt, Artificial Sequence
  Description of Artificial Sequence: Synthetic oligonucleotide
  Antisense strand to SEQ ID NO: 2028214
uuuacacacggcaggacuu

SEQ ID NO: 2028216 - RNA, 19 nt, Artificial Sequence
  Description of Artificial Sequence: Synthetic oligonucleotide
  Sense strand starting at position 2374 of SEQ ID NO: 1881229
agaggagaguaagguauuu

SEQ ID NO: 2028217 - RNA, 19 nt, Artificial Sequence
  Description of Artificial Sequence: Synthetic oligonucleotide
  Antisense strand to SEQ ID NO: 2028216
aaauaccuuacucuccucu

SEQ ID NO: 2028218 - RNA, 19 nt, Artificial Sequence
  Description of Artificial Sequence: Synthetic oligonucleotide
  Sense strand starting at position 2480 of SEQ ID NO: 1881229
cucacuucccagugaugga

SEQ ID NO: 2028219 - RNA, 19 nt, Artificial Sequence
  Description of Artificial Sequence: Synthetic oligonucleotide
  Antisense strand to SEQ ID NO: 2028218
uccaucacugggaagugag

SEQ ID NO: 2028220 - RNA, 19 nt, Artificial Sequence
  Description of Artificial Sequence: Synthetic oligonucleotide
  Sense strand starting at position 2564 of SEQ ID NO: 1881229
gggcacuugaagugaugau

SEQ ID NO: 2028221 - RNA, 19 nt, Artificial Sequence
  Description of Artificial Sequence: Synthetic oligonucleotide
  Antisense strand to SEQ ID NO: 2028220
aucaucacuucaagugccc

SEQ ID NO: 2028222 - RNA, 19 nt, Artificial Sequence
  Description of Artificial Sequence: Synthetic oligonucleotide
  Sense strand starting at position 2565 of SEQ ID NO: 1881229
ggcacuugaagugaugauu

SEQ ID NO: 2028223 - RNA, 19 nt, Artificial Sequence
  Description of Artificial Sequence: Synthetic oligonucleotide
  Antisense strand to SEQ ID NO: 2028222
aaucaucacuucaagugcc

SEQ ID NO: 2028224 - RNA, 19 nt, Artificial Sequence
  Description of Artificial Sequence: Synthetic oligonucleotide
  Sense strand starting at position 2571 of SEQ ID NO: 1881229
ugaagugaugauugagcuu

SEQ ID NO: 2028225 - RNA, 19 nt, Artificial Sequence
  Description of Artificial Sequence: Synthetic oligonucleotide
  Antisense strand to SEQ ID NO: 2028224
aagcucaaucaucacuuca

SEQ ID NO: 2028226 - RNA, 19 nt, Artificial Sequence
  Description of Artificial Sequence: Synthetic oligonucleotide
  Sense strand starting at position 2642 of SEQ ID NO: 1881229
agcuuugcucaucaagaca

SEQ ID NO: 2028227 - RNA, 19 nt, Artificial Sequence
  Description of Artificial Sequence: Synthetic oligonucleotide
  Antisense strand to SEQ ID NO: 2028226
ugucuugaugagcaaagcu

SEQ ID NO: 2028228 - RNA, 19 nt, Artificial Sequence
  Description of Artificial Sequence: Synthetic oligonucleotide
  Sense strand starting at position 2702 of SEQ ID NO: 1881229
auaggaaagugguugugua

SEQ ID NO: 2028229 - RNA, 19 nt, Artificial Sequence
  Description of Artificial Sequence: Synthetic oligonucleotide
  Antisense strand to SEQ ID NO: 2028228
uacacaaccacuuuccuau

SEQ ID NO: 2028230 - RNA, 19 nt, Artificial Sequence
  Description of Artificial Sequence: Synthetic oligonucleotide
  Sense strand starting at position 2703 of SEQ ID NO: 1881229
uaggaaagugguuguguaa

SEQ ID NO: 2028231 - RNA, 19 nt, Artificial Sequence
  Description of Artificial Sequence: Synthetic oligonucleotide
  Antisense strand to SEQ ID NO: 2028230
uuacacaaccacuuuccua

SEQ ID NO: 2028232 - RNA, 19 nt, Artificial Sequence
  Description of Artificial Sequence: Synthetic oligonucleotide
  Sense strand starting at position 2736 of SEQ ID NO: 1881229
agucaucagcacuaaugau

SEQ ID NO: 2028233 - RNA, 19 nt, Artificial Sequence
  Description of Artificial Sequence: Synthetic oligonucleotide
  Antisense strand to SEQ ID NO: 2028232
aucauuagugcugaugacu

SEQ ID NO: 2028234 - RNA, 19 nt, Artificial Sequence
  Description of Artificial Sequence: Synthetic oligonucleotide
  Sense strand starting at position 2760 of SEQ ID NO: 1881229
gagauacuggguuguugaa

SEQ ID NO: 2028235 - RNA, 19 nt, Artificial Sequence
  Description of Artificial Sequence: Synthetic oligonucleotide
  Antisense strand to SEQ ID NO: 2028234
uucaacaacccaguaucuc

SEQ ID NO: 2028236 - RNA, 19 nt, Artificial Sequence
  Description of Artificial Sequence: Synthetic oligonucleotide
  Sense strand starting at position 2762 of SEQ ID NO: 1881229
gauacuggguuguugaaau

SEQ ID NO: 2028237 - RNA, 19 nt, Artificial Sequence
  Description of Artificial Sequence: Synthetic oligonucleotide
  Antisense strand to SEQ ID NO: 2028236
auuucaacaacccaguauc

SEQ ID NO: 2028238 - RNA, 19 nt, Artificial Sequence
  Description of Artificial Sequence: Synthetic oligonucleotide
  Sense strand starting at position 2805 of SEQ ID NO: 1881229
aauggauauuguuuguuag

SEQ ID NO: 2028239 - RNA, 19 nt, Artificial Sequence
  Description of Artificial Sequence: Synthetic oligonucleotide
  Antisense strand to SEQ ID NO: 2028238
cuaacaaacaauauccauu

SEQ ID NO: 2028240 - RNA, 19 nt, Artificial Sequence
  Description of Artificial Sequence: Synthetic oligonucleotide
  Sense strand starting at position 2807 of SEQ ID NO: 1881229
uggauauuguuuguuagga

SEQ ID NO: 2028241 - RNA, 19 nt, Artificial Sequence
  Description of Artificial Sequence: Synthetic oligonucleotide
  Antisense strand to SEQ ID NO: 2028240
uccuaacaaacaauaucca

SEQ ID NO: 2028242 - RNA, 19 nt, Artificial Sequence
  Description of Artificial Sequence: Synthetic oligonucleotide
  Sense strand starting at position 2808 of SEQ ID NO: 1881229
ggauauuguuuguuaggag

SEQ ID NO: 2028243 - RNA, 19 nt, Artificial Sequence
  Description of Artificial Sequence: Synthetic oligonucleotide
  Antisense strand to SEQ ID NO: 2028242
cuccuaacaaacaauaucc

SEQ ID NO: 2028244 - RNA, 19 nt, Artificial Sequence
  Description of Artificial Sequence: Synthetic oligonucleotide
  Sense strand starting at position 2847 of SEQ ID NO: 1881229
ugaguugucuucuuaaaga

SEQ ID NO: 2028245 - RNA, 19 nt, Artificial Sequence
  Description of Artificial Sequence: Synthetic oligonucleotide
  Antisense strand to SEQ ID NO: 2028244
ucuuuaagaagacaacuca

SEQ ID NO: 2028246 - RNA, 19 nt, Artificial Sequence
  Description of Artificial Sequence: Synthetic oligonucleotide
  Sense strand starting at position 2894 of SEQ ID NO: 1881229
agaagacuguuccagauuu

SEQ ID NO: 2028247 - RNA, 19 nt, Artificial Sequence
  Description of Artificial Sequence: Synthetic oligonucleotide
  Antisense strand to SEQ ID NO: 2028246
aaaucuggaacagucuucu

SEQ ID NO: 2028248 - RNA, 19 nt, Artificial Sequence
  Description of Artificial Sequence: Synthetic oligonucleotide
  Sense strand starting at position 3072 of SEQ ID NO: 1881229
acauaauuauuugguggaa

SEQ ID NO: 2028249 - RNA, 19 nt, Artificial Sequence
  Description of Artificial Sequence: Synthetic oligonucleotide
  Antisense strand to SEQ ID NO: 2028248
uuccaccaaauaauuaugu

SEQ ID NO: 2028250 - RNA, 19 nt, Artificial Sequence
  Description of Artificial Sequence: Synthetic oligonucleotide
  Sense strand starting at position 3176 of SEQ ID NO: 1881229
ucauucuaagcaugugaug

SEQ ID NO: 2028251 - RNA, 19 nt, Artificial Sequence
  Description of Artificial Sequence: Synthetic oligonucleotide
  Antisense strand to SEQ ID NO: 2028250
caucacaugcuuagaauga

SEQ ID NO: 2028252 - RNA, 19 nt, Artificial Sequence
  Description of Artificial Sequence: Synthetic oligonucleotide
  Sense strand starting at position 3302 of SEQ ID NO: 1881229
agccaaguaccaugaugau

SEQ ID NO: 2028253 - RNA, 19 nt, Artificial Sequence
  Description of Artificial Sequence: Synthetic oligonucleotide
  Antisense strand to SEQ ID NO: 2028252
aucaucaugguacuuggcu

SEQ ID NO: 2028254 - RNA, 19 nt, Artificial Sequence
  Description of Artificial Sequence: Synthetic oligonucleotide
  Sense strand starting at position 3379 of SEQ ID NO: 1881229
augugauucuaaucaguag

SEQ ID NO: 2028255 - RNA, 19 nt, Artificial Sequence
  Description of Artificial Sequence: Synthetic oligonucleotide
  Antisense strand to SEQ ID NO: 2028254
cuacugauuagaaucacau

SEQ ID NO: 2028256 - RNA, 19 nt, Artificial Sequence
  Description of Artificial Sequence: Synthetic oligonucleotide
  Sense strand starting at position 3534 of SEQ ID NO: 1881229
gagugacuggaaggucuau

SEQ ID NO: 2028257 - RNA, 19 nt, Artificial Sequence
  Description of Artificial Sequence: Synthetic oligonucleotide
  Antisense strand to SEQ ID NO: 2028256
auagaccuuccagucacuc

SEQ ID NO: 2028258 - RNA, 19 nt, Artificial Sequence
  Description of Artificial Sequence: Synthetic oligonucleotide
  Sense strand starting at position 3646 of SEQ ID NO: 1881229
caguucuuuccagagcaag

SEQ ID NO: 2028259 - RNA, 19 nt, Artificial Sequence
  Description of Artificial Sequence: Synthetic oligonucleotide
  Antisense strand to SEQ ID NO: 2028258
cuugcucuggaaagaacug

SEQ ID NO: 2028260 - RNA, 19 nt, Artificial Sequence
  Description of Artificial Sequence: Synthetic oligonucleotide
  Sense strand starting at position 3833 of SEQ ID NO: 1881229
gcauaacuugcacaaagua

SEQ ID NO: 2028261 - RNA, 19 nt, Artificial Sequence
  Description of Artificial Sequence: Synthetic oligonucleotide
  Antisense strand to SEQ ID NO: 2028260
uacuuugugcaaguuaugc

SEQ ID NO: 2028262 - RNA, 19 nt, Artificial Sequence
  Description of Artificial Sequence: Synthetic oligonucleotide
  Sense strand starting at position 3864 of SEQ ID NO: 1881229
ggguacagcugggugaauu

SEQ ID NO: 2028263 - RNA, 19 nt, Artificial Sequence
  Description of Artificial Sequence: Synthetic oligonucleotide
  Antisense strand to SEQ ID NO: 2028262
aauucacccagcuguaccc

SEQ ID NO: 2028264 - RNA, 19 nt, Artificial Sequence
  Description of Artificial Sequence: Synthetic oligonucleotide
  Sense strand starting at position 3970 of SEQ ID NO: 1881229
agucaagaauagcuauuau

SEQ ID NO: 2028265 - RNA, 19 nt, Artificial Sequence
  Description of Artificial Sequence: Synthetic oligonucleotide
  Antisense strand to SEQ ID NO: 2028264
auaauagcuauucuugacu

SEQ ID NO: 2028266 - RNA, 19 nt, Artificial Sequence
  Description of Artificial Sequence: Synthetic oligonucleotide
  Sense strand starting at position 3982 of SEQ ID NO: 1881229
cuauuauucugaccucugu

SEQ ID NO: 2028267 - RNA, 19 nt, Artificial Sequence
  Description of Artificial Sequence: Synthetic oligonucleotide
  Antisense strand to SEQ ID NO: 2028266
acagaggucagaauaauag

SEQ ID NO: 2028268 - RNA, 19 nt, Artificial Sequence
  Description of Artificial Sequence: Synthetic oligonucleotide
  Sense strand starting at position 318 of SEQ ID NO: 1881230
uggacaauuggucaggcuu

SEQ ID NO: 2028269 - RNA, 19 nt, Artificial Sequence
  Description of Artificial Sequence: Synthetic oligonucleotide
  Antisense strand to SEQ ID NO: 2028268
aagccugaccaauugucca

SEQ ID NO: 2028270 - RNA, 19 nt, Artificial Sequence
  Description of Artificial Sequence: Synthetic oligonucleotide
  Sense strand starting at position 339 of SEQ ID NO: 1881230
ucugcagaggcucagaaau

SEQ ID NO: 2028271 - RNA, 19 nt, Artificial Sequence
  Description of Artificial Sequence: Synthetic oligonucleotide
  Antisense strand to SEQ ID NO: 2028270
auuucugagccucugcaga

SEQ ID NO: 2028272 - RNA, 19 nt, Artificial Sequence
  Description of Artificial Sequence: Synthetic oligonucleotide
  Sense strand starting at position 482 of SEQ ID NO: 1881230
ucugaacccuguccuagaa

SEQ ID NO: 2028273 - RNA, 19 nt, Artificial Sequence
  Description of Artificial Sequence: Synthetic oligonucleotide
  Antisense strand to SEQ ID NO: 2028272
uucuaggacaggguucaga

SEQ ID NO: 2028274 - RNA, 19 nt, Artificial Sequence
  Description of Artificial Sequence: Synthetic oligonucleotide
  Sense strand starting at position 543 of SEQ ID NO: 1881230
gcucaaggacucuauguua

SEQ ID NO: 2028275 - RNA, 19 nt, Artificial Sequence
  Description of Artificial Sequence: Synthetic oligonucleotide
  Antisense strand to SEQ ID NO: 2028274
uaacauagaguccuugagc

SEQ ID NO: 2028276 - RNA, 19 nt, Artificial Sequence
  Description of Artificial Sequence: Synthetic oligonucleotide
  Sense strand starting at position 581 of SEQ ID NO: 1881230
cuccacucugauugggaga

SEQ ID NO: 2028277 - RNA, 19 nt, Artificial Sequence
  Description of Artificial Sequence: Synthetic oligonucleotide
  Antisense strand to SEQ ID NO: 2028276
ucucccaaucagaguggag

SEQ ID NO: 2028278 - RNA, 19 nt, Artificial Sequence
  Description of Artificial Sequence: Synthetic oligonucleotide
  Sense strand starting at position 810 of SEQ ID NO: 1881230
gaugguuauuucgcaguaa

SEQ ID NO: 2028279 - RNA, 19 nt, Artificial Sequence
  Description of Artificial Sequence: Synthetic oligonucleotide
  Antisense strand to SEQ ID NO: 2028278
uuacugcgaaauaaccauc

SEQ ID NO: 2028280 - RNA, 19 nt, Artificial Sequence
  Description of Artificial Sequence: Synthetic oligonucleotide
  Sense strand starting at position 849 of SEQ ID NO: 1881230
aacaaugugugagucaaau

SEQ ID NO: 2028281 - RNA, 19 nt, Artificial Sequence
  Description of Artificial Sequence: Synthetic oligonucleotide
  Antisense strand to SEQ ID NO: 2028280
auuugacucacacauuguu

SEQ ID NO: 2028282 - RNA, 19 nt, Artificial Sequence
  Description of Artificial Sequence: Synthetic oligonucleotide
  Sense strand starting at position 1010 of SEQ ID NO: 1881230
ucuaaugaguuucuagaua

SEQ ID NO: 2028283 - RNA, 19 nt, Artificial Sequence
  Description of Artificial Sequence: Synthetic oligonucleotide
  Antisense strand to SEQ ID NO: 2028282
uaucuagaaacucauuaga

SEQ ID NO: 2028284 - RNA, 19 nt, Artificial Sequence
  Description of Artificial Sequence: Synthetic oligonucleotide
  Sense strand starting at position 1062 of SEQ ID NO: 1881230
gagacacacuguucucaga

SEQ ID NO: 2028285 - RNA, 19 nt, Artificial Sequence
  Description of Artificial Sequence: Synthetic oligonucleotide
  Antisense strand to SEQ ID NO: 2028284
ucugagaacagugugucuc

SEQ ID NO: 2028286 - RNA, 19 nt, Artificial Sequence
  Description of Artificial Sequence: Synthetic oligonucleotide
  Sense strand starting at position 1064 of SEQ ID NO: 1881230
gacacacuguucucagaga

SEQ ID NO: 2028287 - RNA, 19 nt, Artificial Sequence
  Description of Artificial Sequence: Synthetic oligonucleotide
  Antisense strand to SEQ ID NO: 2028286
ucucugagaacaguguguc

SEQ ID NO: 2028288 - RNA, 19 nt, Artificial Sequence
  Description of Artificial Sequence: Synthetic oligonucleotide
  Sense strand starting at position 1210 of SEQ ID NO: 1881230
uuuggacuacugcaucaaa

SEQ ID NO: 2028289 - RNA, 19 nt, Artificial Sequence
  Description of Artificial Sequence: Synthetic oligonucleotide
  Antisense strand to SEQ ID NO: 2028288
uuugaugcaguaguccaaa

SEQ ID NO: 2028290 - RNA, 19 nt, Artificial Sequence
  Description of Artificial Sequence: Synthetic oligonucleotide
  Sense strand starting at position 1252 of SEQ ID NO: 1881230
uagaaugagcaaugcagaa

SEQ ID NO: 2028291 - RNA, 19 nt, Artificial Sequence
  Description of Artificial Sequence: Synthetic oligonucleotide
  Antisense strand to SEQ ID NO: 2028290
uucugcauugcucauucua

SEQ ID NO: 2028292 - RNA, 19 nt, Artificial Sequence
  Description of Artificial Sequence: Synthetic oligonucleotide
  Sense strand starting at position 1278 of SEQ ID NO: 1881230
gguagagugccaggagaaa

SEQ ID NO: 2028293 - RNA, 19 nt, Artificial Sequence
  Description of Artificial Sequence: Synthetic oligonucleotide
  Antisense strand to SEQ ID NO: 2028292
uuucuccuggcacucuacc

SEQ ID NO: 2028294 - RNA, 19 nt, Artificial Sequence
  Description of Artificial Sequence: Synthetic oligonucleotide
  Sense strand starting at position 1427 of SEQ ID NO: 1881230
caccaaguuuccucaggga

SEQ ID NO: 2028295 - RNA, 19 nt, Artificial Sequence
  Description of Artificial Sequence: Synthetic oligonucleotide
  Antisense strand to SEQ ID NO: 2028294
ucccugaggaaacuuggug

SEQ ID NO: 2028296 - RNA, 19 nt, Artificial Sequence
  Description of Artificial Sequence: Synthetic oligonucleotide
  Sense strand starting at position 1431 of SEQ ID NO: 1881230
aaguuuccucagggauucu

SEQ ID NO: 2028297 - RNA, 19 nt, Artificial Sequence
  Description of Artificial Sequence: Synthetic oligonucleotide
  Antisense strand to SEQ ID NO: 2028296
agaaucccugaggaaacuu

SEQ ID NO: 2028298 - RNA, 19 nt, Artificial Sequence
  Description of Artificial Sequence: Synthetic oligonucleotide
  Sense strand starting at position 1695 of SEQ ID NO: 1881230
auggguuccagauggugaa

SEQ ID NO: 2028299 - RNA, 19 nt, Artificial Sequence
  Description of Artificial Sequence: Synthetic oligonucleotide
  Antisense strand to SEQ ID NO: 2028298
uucaccaucuggaacccau

SEQ ID NO: 2028300 - RNA, 19 nt, Artificial Sequence
  Description of Artificial Sequence: Synthetic oligonucleotide
  Sense strand starting at position 1753 of SEQ ID NO: 1881230
uggagugcuguacaaauau

SEQ ID NO: 2028301 - RNA, 19 nt, Artificial Sequence
  Description of Artificial Sequence: Synthetic oligonucleotide
  Antisense strand to SEQ ID NO: 2028300
auauuuguacagcacucca

SEQ ID NO: 2028302 - RNA, 19 nt, Artificial Sequence
  Description of Artificial Sequence: Synthetic oligonucleotide
  Sense strand starting at position 1878 of SEQ ID NO: 1881230
uggagauacuuuccgauuc

SEQ ID NO: 2028303 - RNA, 19 nt, Artificial Sequence
  Description of Artificial Sequence: Synthetic oligonucleotide
  Antisense strand to SEQ ID NO: 2028302
gaaucggaaaguaucucca

SEQ ID NO: 2028304 - RNA, 19 nt, Artificial Sequence
  Description of Artificial Sequence: Synthetic oligonucleotide
  Sense strand starting at position 2131 of SEQ ID NO: 1881230
cgauaacaagacugucuua

SEQ ID NO: 2028305 - RNA, 19 nt, Artificial Sequence
  Description of Artificial Sequence: Synthetic oligonucleotide
  Antisense strand to SEQ ID NO: 2028304
uaagacagucuuguuaucg

SEQ ID NO: 2028306 - RNA, 19 nt, Artificial Sequence
  Description of Artificial Sequence: Synthetic oligonucleotide
  Sense strand starting at position 2144 of SEQ ID NO: 1881230
gucuuacguuuauuuagaa

SEQ ID NO: 2028307 - RNA, 19 nt, Artificial Sequence
  Description of Artificial Sequence: Synthetic oligonucleotide
  Antisense strand to SEQ ID NO: 2028306
uucuaaauaaacguaagac

SEQ ID NO: 2028308 - RNA, 19 nt, Artificial Sequence
  Description of Artificial Sequence: Synthetic oligonucleotide
  Sense strand starting at position 2176 of SEQ ID NO: 1881230
aggcaaucguauuuauagu

SEQ ID NO: 2028309 - RNA, 19 nt, Artificial Sequence
  Description of Artificial Sequence: Synthetic oligonucleotide
  Antisense strand to SEQ ID NO: 2028308
acuauaaauacgauugccu

SEQ ID NO: 2028310 - RNA, 19 nt, Artificial Sequence
  Description of Artificial Sequence: Synthetic oligonucleotide
  Sense strand starting at position 2378 of SEQ ID NO: 1881230
aucugugaggcagauauua

SEQ ID NO: 2028311 - RNA, 19 nt, Artificial Sequence
  Description of Artificial Sequence: Synthetic oligonucleotide
  Antisense strand to SEQ ID NO: 2028310
uaauaucugccucacagau

SEQ ID NO: 2028312 - RNA, 19 nt, Artificial Sequence
  Description of Artificial Sequence: Synthetic oligonucleotide
  Sense strand starting at position 2510 of SEQ ID NO: 1881230
gauaaugucugagcagauu

SEQ ID NO: 2028313 - RNA, 19 nt, Artificial Sequence
  Description of Artificial Sequence: Synthetic oligonucleotide
  Antisense strand to SEQ ID NO: 2028312
aaucugcucagacauuauc

SEQ ID NO: 2028314 - RNA, 19 nt, Artificial Sequence
  Description of Artificial Sequence: Synthetic oligonucleotide
  Sense strand starting at position 2556 of SEQ ID NO: 1881230
cagaguaauugcuccagaa

SEQ ID NO: 2028315 - RNA, 19 nt, Artificial Sequence
  Description of Artificial Sequence: Synthetic oligonucleotide
  Antisense strand to SEQ ID NO: 2028314
uucuggagcaauuacucug

SEQ ID NO: 2028316 - RNA, 19 nt, Artificial Sequence
  Description of Artificial Sequence: Synthetic oligonucleotide
  Sense strand starting at position 2558 of SEQ ID NO: 1881230
gaguaauugcuccagaacu

SEQ ID NO: 2028317 - RNA, 19 nt, Artificial Sequence
  Description of Artificial Sequence: Synthetic oligonucleotide
  Antisense strand to SEQ ID NO: 2028316
aguucuggagcaauuacuc

SEQ ID NO: 2028318 - RNA, 19 nt, Artificial Sequence
  Description of Artificial Sequence: Synthetic oligonucleotide
  Sense strand starting at position 2709 of SEQ ID NO: 1881230
ugcuuuaggccauaacaga

SEQ ID NO: 2028319 - RNA, 19 nt, Artificial Sequence
  Description of Artificial Sequence: Synthetic oligonucleotide
  Antisense strand to SEQ ID NO: 2028318
ucuguuauggccuaaagca

SEQ ID NO: 2028320 - RNA, 19 nt, Artificial Sequence
  Description of Artificial Sequence: Synthetic oligonucleotide
  Sense strand starting at position 2723 of SEQ ID NO: 1881230
acagaagucccuugauuac

SEQ ID NO: 2028321 - RNA, 19 nt, Artificial Sequence
  Description of Artificial Sequence: Synthetic oligonucleotide
  Antisense strand to SEQ ID NO: 2028320
guaaucaagggacuucugu

SEQ ID NO: 2028322 - RNA, 19 nt, Artificial Sequence
  Description of Artificial Sequence: Synthetic oligonucleotide
  Sense strand starting at position 2792 of SEQ ID NO: 1881230
cugguacgugugaguuuaa

SEQ ID NO: 2028323 - RNA, 19 nt, Artificial Sequence
  Description of Artificial Sequence: Synthetic oligonucleotide
  Antisense strand to SEQ ID NO: 2028322
uuaaacucacacguaccag

SEQ ID NO: 2028324 - RNA, 19 nt, Artificial Sequence
  Description of Artificial Sequence: Synthetic oligonucleotide
  Sense strand starting at position 2819 of SEQ ID NO: 1881230
ucauucggucauuacagau

SEQ ID NO: 2028325 - RNA, 19 nt, Artificial Sequence
  Description of Artificial Sequence: Synthetic oligonucleotide
  Antisense strand to SEQ ID NO: 2028324
aucuguaaugaccgaauga

SEQ ID NO: 2028326 - RNA, 19 nt, Artificial Sequence
  Description of Artificial Sequence: Synthetic oligonucleotide
  Sense strand starting at position 2885 of SEQ ID NO: 1881230
uuuagcaaucaggauucua

SEQ ID NO: 2028327 - RNA, 19 nt, Artificial Sequence
  Description of Artificial Sequence: Synthetic oligonucleotide
  Antisense strand to SEQ ID NO: 2028326
uagaauccugauugcuaaa

SEQ ID NO: 2028328 - RNA, 19 nt, Artificial Sequence
  Description of Artificial Sequence: Synthetic oligonucleotide
  Sense strand starting at position 2895 of SEQ ID NO: 1881230
aggauucuagagugucaua

SEQ ID NO: 2028329 - RNA, 19 nt, Artificial Sequence
  Description of Artificial Sequence: Synthetic oligonucleotide
  Antisense strand to SEQ ID NO: 2028328
uaugacacucuagaauccu

SEQ ID NO: 2028330 - RNA, 19 nt, Artificial Sequence
  Description of Artificial Sequence: Synthetic oligonucleotide
  Sense strand starting at position 3249 of SEQ ID NO: 1881230
uucugauagcauuaaucag

SEQ ID NO: 2028331 - RNA, 19 nt, Artificial Sequence
  Description of Artificial Sequence: Synthetic oligonucleotide
  Antisense strand to SEQ ID NO: 2028330
cugauuaaugcuaucagaa

SEQ ID NO: 2028332 - RNA, 19 nt, Artificial Sequence
  Description of Artificial Sequence: Synthetic oligonucleotide
  Sense strand starting at position 3370 of SEQ ID NO: 1881230
aggcuuugaugacuaccua

SEQ ID NO: 2028333 - RNA, 19 nt, Artificial Sequence
  Description of Artificial Sequence: Synthetic oligonucleotide
  Antisense strand to SEQ ID NO: 2028332
uagguagucaucaaagccu

SEQ ID NO: 2028334 - RNA, 19 nt, Artificial Sequence
  Description of Artificial Sequence: Synthetic oligonucleotide
  Sense strand starting at position 3371 of SEQ ID NO: 1881230
ggcuuugaugacuaccuau

SEQ ID NO: 2028335 - RNA, 19 nt, Artificial Sequence
  Description of Artificial Sequence: Synthetic oligonucleotide
  Antisense strand to SEQ ID NO: 2028334
auagguagucaucaaagcc

SEQ ID NO: 2028336 - RNA, 19 nt, Artificial Sequence
  Description of Artificial Sequence: Synthetic oligonucleotide
  Sense strand starting at position 3480 of SEQ ID NO: 1881230
uggagacagugcucugaca

SEQ ID NO: 2028337 - RNA, 19 nt, Artificial Sequence
  Description of Artificial Sequence: Synthetic oligonucleotide
  Antisense strand to SEQ ID NO: 2028336
ugucagagcacugucucca

SEQ ID NO: 2028338 - RNA, 19 nt, Artificial Sequence
  Description of Artificial Sequence: Synthetic oligonucleotide
  Sense strand starting at position 3482 of SEQ ID NO: 1881230
gagacagugcucugacaau

SEQ ID NO: 2028339 - RNA, 19 nt, Artificial Sequence
  Description of Artificial Sequence: Synthetic oligonucleotide
  Antisense strand to SEQ ID NO: 2028338
auugucagagcacugucuc

SEQ ID NO: 2028340 - RNA, 19 nt, Artificial Sequence
  Description of Artificial Sequence: Synthetic oligonucleotide
  Sense strand starting at position 3616 of SEQ ID NO: 1881230
guguguuucccagucaguc

SEQ ID NO: 2028341 - RNA, 19 nt, Artificial Sequence
  Description of Artificial Sequence: Synthetic oligonucleotide
  Antisense strand to SEQ ID NO: 2028340
gacugacugggaaacacac

SEQ ID NO: 2028342 - RNA, 19 nt, Artificial Sequence
  Description of Artificial Sequence: Synthetic oligonucleotide
  Sense strand starting at position 3672 of SEQ ID NO: 1881230
gguacuuuccaagaugcca

SEQ ID NO: 2028343 - RNA, 19 nt, Artificial Sequence
  Description of Artificial Sequence: Synthetic oligonucleotide
  Antisense strand to SEQ ID NO: 2028342
uggcaucuuggaaaguacc

SEQ ID NO: 2028344 - RNA, 19 nt, Artificial Sequence
  Description of Artificial Sequence: Synthetic oligonucleotide
  Sense strand starting at position 3698 of SEQ ID NO: 1881230
acggcaauaauaugggauu

SEQ ID NO: 2028345 - RNA, 19 nt, Artificial Sequence
  Description of Artificial Sequence: Synthetic oligonucleotide
  Antisense strand to SEQ ID NO: 2028344
aaucccauauuauugccgu

SEQ ID NO: 2028346 - RNA, 19 nt, Artificial Sequence
  Description of Artificial Sequence: Synthetic oligonucleotide
  Sense strand starting at position 3899 of SEQ ID NO: 1881230
aaaggauggccgcaauuga

SEQ ID NO: 2028347 - RNA, 19 nt, Artificial Sequence
  Description of Artificial Sequence: Synthetic oligonucleotide
  Antisense strand to SEQ ID NO: 2028346
ucaauugcggccauccuuu

SEQ ID NO: 2028348 - RNA, 19 nt, Artificial Sequence
  Description of Artificial Sequence: Synthetic oligonucleotide
  Sense strand starting at position 27 of SEQ ID NO: 1881231
uccagcauuuauguuccua

SEQ ID NO: 2028349 - RNA, 19 nt, Artificial Sequence
  Description of Artificial Sequence: Synthetic oligonucleotide
  Antisense strand to SEQ ID NO: 2028348
uaggaacauaaaugcugga

SEQ ID NO: 2028350 - RNA, 19 nt, Artificial Sequence
  Description of Artificial Sequence: Synthetic oligonucleotide
  Sense strand starting at position 57 of SEQ ID NO: 1881231
gcucgcuuccuguuaugag

SEQ ID NO: 2028351 - RNA, 19 nt, Artificial Sequence
  Description of Artificial Sequence: Synthetic oligonucleotide
  Antisense strand to SEQ ID NO: 2028350
cucauaacaggaagcgagc

SEQ ID NO: 2028352 - RNA, 19 nt, Artificial Sequence
  Description of Artificial Sequence: Synthetic oligonucleotide
  Sense strand starting at position 103 of SEQ ID NO: 1881231
agaugaucaucaucagguu

SEQ ID NO: 2028353 - RNA, 19 nt, Artificial Sequence
  Description of Artificial Sequence: Synthetic oligonucleotide
  Antisense strand to SEQ ID NO: 2028352
aaccugaugaugaucaucu

SEQ ID NO: 2028354 - RNA, 19 nt, Artificial Sequence
  Description of Artificial Sequence: Synthetic oligonucleotide
  Sense strand starting at position 354 of SEQ ID NO: 1881231
gcagcuuuggaucaaauug

SEQ ID NO: 2028355 - RNA, 19 nt, Artificial Sequence
  Description of Artificial Sequence: Synthetic oligonucleotide
  Antisense strand to SEQ ID NO: 2028354
caauuugauccaaagcugc

SEQ ID NO: 2028356 - RNA, 19 nt, Artificial Sequence
  Description of Artificial Sequence: Synthetic oligonucleotide
  Sense strand starting at position 362 of SEQ ID NO: 1881231
ggaucaaauuggcuuacau

SEQ ID NO: 2028357 - RNA, 19 nt, Artificial Sequence
  Description of Artificial Sequence: Synthetic oligonucleotide
  Antisense strand to SEQ ID NO: 2028356
auguaagccaauuugaucc

SEQ ID NO: 2028358 - RNA, 19 nt, Artificial Sequence
  Description of Artificial Sequence: Synthetic oligonucleotide
  Sense strand starting at position 393 of SEQ ID NO: 1881231
cagcaugacguuuaagaau

SEQ ID NO: 2028359 - RNA, 19 nt, Artificial Sequence
  Description of Artificial Sequence: Synthetic oligonucleotide
  Antisense strand to SEQ ID NO: 2028358
auucuuaaacgucaugcug

SEQ ID NO: 2028360 - RNA, 19 nt, Artificial Sequence
  Description of Artificial Sequence: Synthetic oligonucleotide
  Sense strand starting at position 573 of SEQ ID NO: 1881231
gaaauauuaggcuggacug

SEQ ID NO: 2028361 - RNA, 19 nt, Artificial Sequence
  Description of Artificial Sequence: Synthetic oligonucleotide
  Antisense strand to SEQ ID NO: 2028360
caguccagccuaauauuuc

SEQ ID NO: 2028362 - RNA, 19 nt, Artificial Sequence
  Description of Artificial Sequence: Synthetic oligonucleotide
  Sense strand starting at position 574 of SEQ ID NO: 1881231
aaauauuaggcuggacuga

SEQ ID NO: 2028363 - RNA, 19 nt, Artificial Sequence
  Description of Artificial Sequence: Synthetic oligonucleotide
  Antisense strand to SEQ ID NO: 2028362
ucaguccagccuaauauuu

SEQ ID NO: 2028364 - RNA, 19 nt, Artificial Sequence
  Description of Artificial Sequence: Synthetic oligonucleotide
  Sense strand starting at position 590 of SEQ ID NO: 1881231
ugagaaguggcugaccuuu

SEQ ID NO: 2028365 - RNA, 19 nt, Artificial Sequence
  Description of Artificial Sequence: Synthetic oligonucleotide
  Antisense strand to SEQ ID NO: 2028364
aaaggucagccacuucuca

SEQ ID NO: 2028366 - RNA, 19 nt, Artificial Sequence
  Description of Artificial Sequence: Synthetic oligonucleotide
  Sense strand starting at position 662 of SEQ ID NO: 1881231
uugauaucugcaugcauuu

SEQ ID NO: 2028367 - RNA, 19 nt, Artificial Sequence
  Description of Artificial Sequence: Synthetic oligonucleotide
  Antisense strand to SEQ ID NO: 2028366
aaaugcaugcagauaucaa

SEQ ID NO: 2028368 - RNA, 19 nt, Artificial Sequence
  Description of Artificial Sequence: Synthetic oligonucleotide
  Sense strand starting at position 691 of SEQ ID NO: 1881231
aguugaaugagguaugcau

SEQ ID NO: 2028369 - RNA, 19 nt, Artificial Sequence
  Description of Artificial Sequence: Synthetic oligonucleotide
  Antisense strand to SEQ ID NO: 2028368
augcauaccucauucaacu

SEQ ID NO: 2028370 - RNA, 19 nt, Artificial Sequence
  Description of Artificial Sequence: Synthetic oligonucleotide
  Sense strand starting at position 746 of SEQ ID NO: 1881231
gagcuuuagcaugagagag

SEQ ID NO: 2028371 - RNA, 19 nt, Artificial Sequence
  Description of Artificial Sequence: Synthetic oligonucleotide
  Antisense strand to SEQ ID NO: 2028370
cucucucaugcuaaagcuc

SEQ ID NO: 2028372 - RNA, 19 nt, Artificial Sequence
  Description of Artificial Sequence: Synthetic oligonucleotide
  Sense strand starting at position 777 of SEQ ID NO: 1881231
ugaguuaccggugaaucaa

SEQ ID NO: 2028373 - RNA, 19 nt, Artificial Sequence
  Description of Artificial Sequence: Synthetic oligonucleotide
  Antisense strand to SEQ ID NO: 2028372
uugauucaccgguaacuca

SEQ ID NO: 2028374 - RNA, 19 nt, Artificial Sequence
  Description of Artificial Sequence: Synthetic oligonucleotide
  Sense strand starting at position 886 of SEQ ID NO: 1881231
caugguaaugguuaaaugu

SEQ ID NO: 2028375 - RNA, 19 nt, Artificial Sequence
  Description of Artificial Sequence: Synthetic oligonucleotide
  Antisense strand to SEQ ID NO: 2028374
acauuuaaccauuaccaug

SEQ ID NO: 2028376 - RNA, 19 nt, Artificial Sequence
  Description of Artificial Sequence: Synthetic oligonucleotide
  Sense strand starting at position 1074 of SEQ ID NO: 1881231
gaaucuguggcuuauauua

SEQ ID NO: 2028377 - RNA, 19 nt, Artificial Sequence
  Description of Artificial Sequence: Synthetic oligonucleotide
  Antisense strand to SEQ ID NO: 2028376
uaauauaagccacagauuc

SEQ ID NO: 2028378 - RNA, 19 nt, Artificial Sequence
  Description of Artificial Sequence: Synthetic oligonucleotide
  Sense strand starting at position 1364 of SEQ ID NO: 1881231
guuuguaacccagaaguac

SEQ ID NO: 2028379 - RNA, 19 nt, Artificial Sequence
  Description of Artificial Sequence: Synthetic oligonucleotide
  Antisense strand to SEQ ID NO: 2028378
guacuucuggguuacaaac

SEQ ID NO: 2028380 - RNA, 19 nt, Artificial Sequence
  Description of Artificial Sequence: Synthetic oligonucleotide
  Sense strand starting at position 1393 of SEQ ID NO: 1881231
uaaggaauuugagaugcca

SEQ ID NO: 2028381 - RNA, 19 nt, Artificial Sequence
  Description of Artificial Sequence: Synthetic oligonucleotide
  Antisense strand to SEQ ID NO: 2028380
uggcaucucaaauuccuua

SEQ ID NO: 2028382 - RNA, 19 nt, Artificial Sequence
  Description of Artificial Sequence: Synthetic oligonucleotide
  Sense strand starting at position 1401 of SEQ ID NO: 1881231
uugagaugccauuauauac

SEQ ID NO: 2028383 - RNA, 19 nt, Artificial Sequence
  Description of Artificial Sequence: Synthetic oligonucleotide
  Antisense strand to SEQ ID NO: 2028382
guauauaauggcaucucaa

SEQ ID NO: 2028384 - RNA, 19 nt, Artificial Sequence
  Description of Artificial Sequence: Synthetic oligonucleotide
  Sense strand starting at position 1411 of SEQ ID NO: 1881231
auuauauacagaggugagu

SEQ ID NO: 2028385 - RNA, 19 nt, Artificial Sequence
  Description of Artificial Sequence: Synthetic oligonucleotide
  Antisense strand to SEQ ID NO: 2028384
acucaccucuguauauaau

SEQ ID NO: 2028386 - RNA, 19 nt, Artificial Sequence
  Description of Artificial Sequence: Synthetic oligonucleotide
  Sense strand starting at position 1476 of SEQ ID NO: 1881231
gaaggugaacauugucaaa

SEQ ID NO: 2028387 - RNA, 19 nt, Artificial Sequence
  Description of Artificial Sequence: Synthetic oligonucleotide
  Antisense strand to SEQ ID NO: 2028386
uuugacaauguucaccuuc

SEQ ID NO: 2028388 - RNA, 19 nt, Artificial Sequence
  Description of Artificial Sequence: Synthetic oligonucleotide
  Sense strand starting at position 1573 of SEQ ID NO: 1881231
acagaaugaucuguuccag

SEQ ID NO: 2028389 - RNA, 19 nt, Artificial Sequence
  Description of Artificial Sequence: Synthetic oligonucleotide
  Antisense strand to SEQ ID NO: 2028388
cuggaacagaucauucugu

SEQ ID NO: 2028390 - RNA, 19 nt, Artificial Sequence
  Description of Artificial Sequence: Synthetic oligonucleotide
  Sense strand starting at position 1749 of SEQ ID NO: 1881231
auugguauuugagaaacac

SEQ ID NO: 2028391 - RNA, 19 nt, Artificial Sequence
  Description of Artificial Sequence: Synthetic oligonucleotide
  Antisense strand to SEQ ID NO: 2028390
guguuucucaaauaccaau

SEQ ID NO: 2028392 - RNA, 19 nt, Artificial Sequence
  Description of Artificial Sequence: Synthetic oligonucleotide
  Sense strand starting at position 1811 of SEQ ID NO: 1881231
aucagauagauacgagagu

SEQ ID NO: 2028393 - RNA, 19 nt, Artificial Sequence
  Description of Artificial Sequence: Synthetic oligonucleotide
  Antisense strand to SEQ ID NO: 2028392
acucucguaucuaucugau

SEQ ID NO: 2028394 - RNA, 19 nt, Artificial Sequence
  Description of Artificial Sequence: Synthetic oligonucleotide
  Sense strand starting at position 1836 of SEQ ID NO: 1881231
uuaagaugauagcuaugau

SEQ ID NO: 2028395 - RNA, 19 nt, Artificial Sequence
  Description of Artificial Sequence: Synthetic oligonucleotide
  Antisense strand to SEQ ID NO: 2028394
aucauagcuaucaucuuaa

SEQ ID NO: 2028396 - RNA, 19 nt, Artificial Sequence
  Description of Artificial Sequence: Synthetic oligonucleotide
  Sense strand starting at position 2017 of SEQ ID NO: 1881231
ggguccaguccugggagaa

SEQ ID NO: 2028397 - RNA, 19 nt, Artificial Sequence
  Description of Artificial Sequence: Synthetic oligonucleotide
  Antisense strand to SEQ ID NO: 2028396
uucucccaggacuggaccc

SEQ ID NO: 2028398 - RNA, 19 nt, Artificial Sequence
  Description of Artificial Sequence: Synthetic oligonucleotide
  Sense strand starting at position 2027 of SEQ ID NO: 1881231
cugggagaaucagugcaga

SEQ ID NO: 2028399 - RNA, 19 nt, Artificial Sequence
  Description of Artificial Sequence: Synthetic oligonucleotide
  Antisense strand to SEQ ID NO: 2028398
ucugcacugauucucccag

SEQ ID NO: 2028400 - RNA, 19 nt, Artificial Sequence
  Description of Artificial Sequence: Synthetic oligonucleotide
  Sense strand starting at position 2111 of SEQ ID NO: 1881231
gcuacaugucaugagaacu

SEQ ID NO: 2028401 - RNA, 19 nt, Artificial Sequence
  Description of Artificial Sequence: Synthetic oligonucleotide
  Antisense strand to SEQ ID NO: 2028400
aguucucaugacauguagc

SEQ ID NO: 2028402 - RNA, 19 nt, Artificial Sequence
  Description of Artificial Sequence: Synthetic oligonucleotide
  Sense strand starting at position 2121 of SEQ ID NO: 1881231
augagaacucccuggcaga

SEQ ID NO: 2028403 - RNA, 19 nt, Artificial Sequence
  Description of Artificial Sequence: Synthetic oligonucleotide
  Antisense strand to SEQ ID NO: 2028402
ucugccagggaguucucau

SEQ ID NO: 2028404 - RNA, 19 nt, Artificial Sequence
  Description of Artificial Sequence: Synthetic oligonucleotide
  Sense strand starting at position 2530 of SEQ ID NO: 1881231
uagaauagucgcuaucagg

SEQ ID NO: 2028405 - RNA, 19 nt, Artificial Sequence
  Description of Artificial Sequence: Synthetic oligonucleotide
  Antisense strand to SEQ ID NO: 2028404
ccugauagcgacuauucua

SEQ ID NO: 2028406 - RNA, 19 nt, Artificial Sequence
  Description of Artificial Sequence: Synthetic oligonucleotide
  Sense strand starting at position 2762 of SEQ ID NO: 1881231
uuucccucugaauagguua

SEQ ID NO: 2028407 - RNA, 19 nt, Artificial Sequence
  Description of Artificial Sequence: Synthetic oligonucleotide
  Antisense strand to SEQ ID NO: 2028406
uaaccuauucagagggaaa

SEQ ID NO: 2028408 - RNA, 19 nt, Artificial Sequence
  Description of Artificial Sequence: Synthetic oligonucleotide
  Sense strand starting at position 2765 of SEQ ID NO: 1881231
cccucugaauagguuaaca

SEQ ID NO: 2028409 - RNA, 19 nt, Artificial Sequence
  Description of Artificial Sequence: Synthetic oligonucleotide
  Antisense strand to SEQ ID NO: 2028408
uguuaaccuauucagaggg

SEQ ID NO: 2028410 - RNA, 19 nt, Artificial Sequence
  Description of Artificial Sequence: Synthetic oligonucleotide
  Sense strand starting at position 3143 of SEQ ID NO: 1881231
guagccaaugaucauagau

SEQ ID NO: 2028411 - RNA, 19 nt, Artificial Sequence
  Description of Artificial Sequence: Synthetic oligonucleotide
  Antisense strand to SEQ ID NO: 2028410
aucuaugaucauuggcuac

SEQ ID NO: 2028412 - RNA, 19 nt, Artificial Sequence
  Description of Artificial Sequence: Synthetic oligonucleotide
  Sense strand starting at position 3164 of SEQ ID NO: 1881231
ggaagauuauaugcaguug

SEQ ID NO: 2028413 - RNA, 19 nt, Artificial Sequence
  Description of Artificial Sequence: Synthetic oligonucleotide
  Antisense strand to SEQ ID NO: 2028412
caacugcauauaaucuucc

SEQ ID NO: 2028414 - RNA, 19 nt, Artificial Sequence
  Description of Artificial Sequence: Synthetic oligonucleotide
  Sense strand starting at position 3170 of SEQ ID NO: 1881231
uuauaugcaguugagacaa

SEQ ID NO: 2028415 - RNA, 19 nt, Artificial Sequence
  Description of Artificial Sequence: Synthetic oligonucleotide
  Antisense strand to SEQ ID NO: 2028414
uugucucaacugcauauaa

SEQ ID NO: 2028416 - RNA, 19 nt, Artificial Sequence
  Description of Artificial Sequence: Synthetic oligonucleotide
  Sense strand starting at position 3211 of SEQ ID NO: 1881231
agugguucccuggaucuca

SEQ ID NO: 2028417 - RNA, 19 nt, Artificial Sequence
  Description of Artificial Sequence: Synthetic oligonucleotide
  Antisense strand to SEQ ID NO: 2028416
ugagauccagggaaccacu

SEQ ID NO: 2028418 - RNA, 19 nt, Artificial Sequence
  Description of Artificial Sequence: Synthetic oligonucleotide
  Sense strand starting at position 3231 of SEQ ID NO: 1881231
cuccuauuccugggagauu

SEQ ID NO: 2028419 - RNA, 19 nt, Artificial Sequence
  Description of Artificial Sequence: Synthetic oligonucleotide
  Antisense strand to SEQ ID NO: 2028418
aaucucccaggaauaggag

SEQ ID NO: 2028420 - RNA, 19 nt, Artificial Sequence
  Description of Artificial Sequence: Synthetic oligonucleotide
  Sense strand starting at position 3370 of SEQ ID NO: 1881231
agaguaucaucuguaaacc

SEQ ID NO: 2028421 - RNA, 19 nt, Artificial Sequence
  Description of Artificial Sequence: Synthetic oligonucleotide
  Antisense strand to SEQ ID NO: 2028420
gguuuacagaugauacucu

SEQ ID NO: 2028422 - RNA, 19 nt, Artificial Sequence
  Description of Artificial Sequence: Synthetic oligonucleotide
  Sense strand starting at position 3379 of SEQ ID NO: 1881231
ucuguaaaccaggacugua

SEQ ID NO: 2028423 - RNA, 19 nt, Artificial Sequence
  Description of Artificial Sequence: Synthetic oligonucleotide
  Antisense strand to SEQ ID NO: 2028422
uacaguccugguuuacaga

SEQ ID NO: 2028424 - RNA, 19 nt, Artificial Sequence
  Description of Artificial Sequence: Synthetic oligonucleotide
  Sense strand starting at position 3509 of SEQ ID NO: 1881231
caucuugggccucacagau

SEQ ID NO: 2028425 - RNA, 19 nt, Artificial Sequence
  Description of Artificial Sequence: Synthetic oligonucleotide
  Antisense strand to SEQ ID NO: 2028424
aucugugaggcccaagaug

SEQ ID NO: 2028426 - RNA, 19 nt, Artificial Sequence
  Description of Artificial Sequence: Synthetic oligonucleotide
  Sense strand starting at position 3554 of SEQ ID NO: 1881231
aguuaauuccugcagauau

SEQ ID NO: 2028427 - RNA, 19 nt, Artificial Sequence
  Description of Artificial Sequence: Synthetic oligonucleotide
  Antisense strand to SEQ ID NO: 2028426
auaucugcaggaauuaacu

SEQ ID NO: 2028428 - RNA, 19 nt, Artificial Sequence
  Description of Artificial Sequence: Synthetic oligonucleotide
  Sense strand starting at position 851 of SEQ ID NO: 1881232
agacaaaucuucugaagag

SEQ ID NO: 2028429 - RNA, 19 nt, Artificial Sequence
  Description of Artificial Sequence: Synthetic oligonucleotide
  Antisense strand to SEQ ID NO: 2028428
cucuucagaagauuugucu

SEQ ID NO: 2028430 - RNA, 19 nt, Artificial Sequence
  Description of Artificial Sequence: Synthetic oligonucleotide
  Sense strand starting at position 882 of SEQ ID NO: 1881232
gugugaaggucccugucau

SEQ ID NO: 2028431 - RNA, 19 nt, Artificial Sequence
  Description of Artificial Sequence: Synthetic oligonucleotide
  Antisense strand to SEQ ID NO: 2028430
augacagggaccuucacac

SEQ ID NO: 2028432 - RNA, 19 nt, Artificial Sequence
  Description of Artificial Sequence: Synthetic oligonucleotide
  Sense strand starting at position 883 of SEQ ID NO: 1881232
ugugaaggucccugucaug

SEQ ID NO: 2028433 - RNA, 19 nt, Artificial Sequence
  Description of Artificial Sequence: Synthetic oligonucleotide
  Antisense strand to SEQ ID NO: 2028432
caugacagggaccuucaca

SEQ ID NO: 2028434 - RNA, 19 nt, Artificial Sequence
  Description of Artificial Sequence: Synthetic oligonucleotide
  Sense strand starting at position 894 of SEQ ID NO: 1881232
cugucaugcccaugucaca

SEQ ID NO: 2028435 - RNA, 19 nt, Artificial Sequence
  Description of Artificial Sequence: Synthetic oligonucleotide
  Antisense strand to SEQ ID NO: 2028434
ugugacaugggcaugacag

SEQ ID NO: 2028436 - RNA, 19 nt, Artificial Sequence
  Description of Artificial Sequence: Synthetic oligonucleotide
  Sense strand starting at position 942 of SEQ ID NO: 1881232
cguccauccucucugcaau

SEQ ID NO: 2028437 - RNA, 19 nt, Artificial Sequence
  Description of Artificial Sequence: Synthetic oligonucleotide
  Antisense strand to SEQ ID NO: 2028436
auugcagagaggauggacg

SEQ ID NO: 2028438 - RNA, 19 nt, Artificial Sequence
  Description of Artificial Sequence: Synthetic oligonucleotide
  Sense strand starting at position 1028 of SEQ ID NO: 1881232
gcuccauugagcuagguga

SEQ ID NO: 2028439 - RNA, 19 nt, Artificial Sequence
  Description of Artificial Sequence: Synthetic oligonucleotide
  Antisense strand to SEQ ID NO: 2028438
ucaccuagcucaauggagc

SEQ ID NO: 2028440 - RNA, 19 nt, Artificial Sequence
  Description of Artificial Sequence: Synthetic oligonucleotide
  Sense strand starting at position 1390 of SEQ ID NO: 1881232
uugggagugggcugugaaa

SEQ ID NO: 2028441 - RNA, 19 nt, Artificial Sequence
  Description of Artificial Sequence: Synthetic oligonucleotide
  Antisense strand to SEQ ID NO: 2028440
uuucacagcccacucccaa

SEQ ID NO: 2028442 - RNA, 19 nt, Artificial Sequence
  Description of Artificial Sequence: Synthetic oligonucleotide
  Sense strand starting at position 1530 of SEQ ID NO: 1881232
aaagaaugcuugggaaggu

SEQ ID NO: 2028443 - RNA, 19 nt, Artificial Sequence
  Description of Artificial Sequence: Synthetic oligonucleotide
  Antisense strand to SEQ ID NO: 2028442
accuucccaagcauucuuu

SEQ ID NO: 2028444 - RNA, 19 nt, Artificial Sequence
  Description of Artificial Sequence: Synthetic oligonucleotide
  Sense strand starting at position 1942 of SEQ ID NO: 1881232
gucagagacuucuuaccuc

SEQ ID NO: 2028445 - RNA, 19 nt, Artificial Sequence
  Description of Artificial Sequence: Synthetic oligonucleotide
  Antisense strand to SEQ ID NO: 2028444
gagguaagaagucucugac

SEQ ID NO: 2028446 - RNA, 19 nt, Artificial Sequence
  Description of Artificial Sequence: Synthetic oligonucleotide
  Sense strand starting at position 2188 of SEQ ID NO: 1881232
ggguggugcuuccugagga

SEQ ID NO: 2028447 - RNA, 19 nt, Artificial Sequence
  Description of Artificial Sequence: Synthetic oligonucleotide
  Antisense strand to SEQ ID NO: 2028446
uccucaggaagcaccaccc

SEQ ID NO: 2028448 - RNA, 19 nt, Artificial Sequence
  Description of Artificial Sequence: Synthetic oligonucleotide
  Sense strand starting at position 2189 of SEQ ID NO: 1881232
gguggugcuuccugaggaa

SEQ ID NO: 2028449 - RNA, 19 nt, Artificial Sequence
  Description of Artificial Sequence: Synthetic oligonucleotide
  Antisense strand to SEQ ID NO: 2028448
uuccucaggaagcaccacc

SEQ ID NO: 2028450 - RNA, 19 nt, Artificial Sequence
  Description of Artificial Sequence: Synthetic oligonucleotide
  Sense strand starting at position 2222 of SEQ ID NO: 1881232
cccugcagccucugauaaa

SEQ ID NO: 2028451 - RNA, 19 nt, Artificial Sequence
  Description of Artificial Sequence: Synthetic oligonucleotide
  Antisense strand to SEQ ID NO: 2028450
uuuaucagaggcugcaggg

SEQ ID NO: 2028452 - RNA, 19 nt, Artificial Sequence
  Description of Artificial Sequence: Synthetic oligonucleotide
  Sense strand starting at position 2223 of SEQ ID NO: 1881232
ccugcagccucugauaaag

SEQ ID NO: 2028453 - RNA, 19 nt, Artificial Sequence
  Description of Artificial Sequence: Synthetic oligonucleotide
  Antisense strand to SEQ ID NO: 2028452
cuuuaucagaggcugcagg

SEQ ID NO: 2028454 - RNA, 19 nt, Artificial Sequence
  Description of Artificial Sequence: Synthetic oligonucleotide
  Sense strand starting at position 2241 of SEQ ID NO: 1881232
gcugcuuguuccucaaaga

SEQ ID NO: 2028455 - RNA, 19 nt, Artificial Sequence
  Description of Artificial Sequence: Synthetic oligonucleotide
  Antisense strand to SEQ ID NO: 2028454
ucuuugaggaacaagcagc

SEQ ID NO: 2028456 - RNA, 19 nt, Artificial Sequence
  Description of Artificial Sequence: Synthetic oligonucleotide
  Sense strand starting at position 2242 of SEQ ID NO: 1881232
cugcuuguuccucaaagac

SEQ ID NO: 2028457 - RNA, 19 nt, Artificial Sequence
  Description of Artificial Sequence: Synthetic oligonucleotide
  Antisense strand to SEQ ID NO: 2028456
gucuuugaggaacaagcag

SEQ ID NO: 2028458 - RNA, 19 nt, Artificial Sequence
  Description of Artificial Sequence: Synthetic oligonucleotide
  Sense strand starting at position 2320 of SEQ ID NO: 1881232
ugggcuacucauugggaca

SEQ ID NO: 2028459 - RNA, 19 nt, Artificial Sequence
  Description of Artificial Sequence: Synthetic oligonucleotide
  Antisense strand to SEQ ID NO: 2028458
ugucccaaugaguagccca

SEQ ID NO: 2028460 - RNA, 19 nt, Artificial Sequence
  Description of Artificial Sequence: Synthetic oligonucleotide
  Sense strand starting at position 2322 of SEQ ID NO: 1881232
ggcuacucauugggacaca

SEQ ID NO: 2028461 - RNA, 19 nt, Artificial Sequence
  Description of Artificial Sequence: Synthetic oligonucleotide
  Antisense strand to SEQ ID NO: 2028460
ugugucccaaugaguagcc

SEQ ID NO: 2028462 - RNA, 19 nt, Artificial Sequence
  Description of Artificial Sequence: Synthetic oligonucleotide
  Sense strand starting at position 2487 of SEQ ID NO: 1881232
gcuggcagguaucuagaga

SEQ ID NO: 2028463 - RNA, 19 nt, Artificial Sequence
  Description of Artificial Sequence: Synthetic oligonucleotide
  Antisense strand to SEQ ID NO: 2028462
ucucuagauaccugccagc

SEQ ID NO: 2028464 - RNA, 19 nt, Artificial Sequence
  Description of Artificial Sequence: Synthetic oligonucleotide
  Sense strand starting at position 2666 of SEQ ID NO: 1881232
gugugcuaguccagaggga

SEQ ID NO: 2028465 - RNA, 19 nt, Artificial Sequence
  Description of Artificial Sequence: Synthetic oligonucleotide
  Antisense strand to SEQ ID NO: 2028464
ucccucuggacuagcacac

SEQ ID NO: 2028466 - RNA, 19 nt, Artificial Sequence
  Description of Artificial Sequence: Synthetic oligonucleotide
  Sense strand starting at position 2950 of SEQ ID NO: 1881232
ugcacagaugugcaaacuu

SEQ ID NO: 2028467 - RNA, 19 nt, Artificial Sequence
  Description of Artificial Sequence: Synthetic oligonucleotide
  Antisense strand to SEQ ID NO: 2028466
aaguuugcacaucugugca

SEQ ID NO: 2028468 - RNA, 19 nt, Artificial Sequence
  Description of Artificial Sequence: Synthetic oligonucleotide
  Sense strand starting at position 3223 of SEQ ID NO: 1881232
gaugucuggcuccacuaau

SEQ ID NO: 2028469 - RNA, 19 nt, Artificial Sequence
  Description of Artificial Sequence: Synthetic oligonucleotide
  Antisense strand to SEQ ID NO: 2028468
auuaguggagccagacauc

SEQ ID NO: 2028470 - RNA, 19 nt, Artificial Sequence
  Description of Artificial Sequence: Synthetic oligonucleotide
  Sense strand starting at position 3229 of SEQ ID NO: 1881232
uggcuccacuaaugaguua

SEQ ID NO: 2028471 - RNA, 19 nt, Artificial Sequence
  Description of Artificial Sequence: Synthetic oligonucleotide
  Antisense strand to SEQ ID NO: 2028470
uaacucauuaguggagcca

SEQ ID NO: 2028472 - RNA, 19 nt, Artificial Sequence
  Description of Artificial Sequence: Synthetic oligonucleotide
  Sense strand starting at position 3305 of SEQ ID NO: 1881232
ggcugcuuccugugucuga

SEQ ID NO: 2028473 - RNA, 19 nt, Artificial Sequence
  Description of Artificial Sequence: Synthetic oligonucleotide
  Antisense strand to SEQ ID NO: 2028472
ucagacacaggaagcagcc

SEQ ID NO: 2028474 - RNA, 19 nt, Artificial Sequence
  Description of Artificial Sequence: Synthetic oligonucleotide
  Sense strand starting at position 3363 of SEQ ID NO: 1881232
gggagucuucaggacuucu

SEQ ID NO: 2028475 - RNA, 19 nt, Artificial Sequence
  Description of Artificial Sequence: Synthetic oligonucleotide
  Antisense strand to SEQ ID NO: 2028474
agaaguccugaagacuccc

SEQ ID NO: 2028476 - RNA, 19 nt, Artificial Sequence
  Description of Artificial Sequence: Synthetic oligonucleotide
  Sense strand starting at position 3387 of SEQ ID NO: 1881232
gucugaguuucagugagag

SEQ ID NO: 2028477 - RNA, 19 nt, Artificial Sequence
  Description of Artificial Sequence: Synthetic oligonucleotide
  Antisense strand to SEQ ID NO: 2028476
cucucacugaaacucagac

SEQ ID NO: 2028478 - RNA, 19 nt, Artificial Sequence
  Description of Artificial Sequence: Synthetic oligonucleotide
  Sense strand starting at position 3514 of SEQ ID NO: 1881232
gcauauagcggaugaggua

SEQ ID NO: 2028479 - RNA, 19 nt, Artificial Sequence
  Description of Artificial Sequence: Synthetic oligonucleotide
  Antisense strand to SEQ ID NO: 2028478
uaccucauccgcuauaugc

SEQ ID NO: 2028480 - RNA, 19 nt, Artificial Sequence
  Description of Artificial Sequence: Synthetic oligonucleotide
  Sense strand starting at position 3547 of SEQ ID NO: 1881232
guagguagcuguggcgaaa

SEQ ID NO: 2028481 - RNA, 19 nt, Artificial Sequence
  Description of Artificial Sequence: Synthetic oligonucleotide
  Antisense strand to SEQ ID NO: 2028480
uuucgccacagcuaccuac

SEQ ID NO: 2028482 - RNA, 19 nt, Artificial Sequence
  Description of Artificial Sequence: Synthetic oligonucleotide
  Sense strand starting at position 3641 of SEQ ID NO: 1881232
gguggcaauggcugggaua

SEQ ID NO: 2028483 - RNA, 19 nt, Artificial Sequence
  Description of Artificial Sequence: Synthetic oligonucleotide
  Antisense strand to SEQ ID NO: 2028482
uaucccagccauugccacc

SEQ ID NO: 2028484 - RNA, 19 nt, Artificial Sequence
  Description of Artificial Sequence: Synthetic oligonucleotide
  Sense strand starting at position 3642 of SEQ ID NO: 1881232
guggcaauggcugggauaa

SEQ ID NO: 2028485 - RNA, 19 nt, Artificial Sequence
  Description of Artificial Sequence: Synthetic oligonucleotide
  Antisense strand to SEQ ID NO: 2028484
uuaucccagccauugccac

SEQ ID NO: 2028486 - RNA, 19 nt, Artificial Sequence
  Description of Artificial Sequence: Synthetic oligonucleotide
  Sense strand starting at position 3643 of SEQ ID NO: 1881232
uggcaauggcugggauaau

SEQ ID NO: 2028487 - RNA, 19 nt, Artificial Sequence
  Description of Artificial Sequence: Synthetic oligonucleotide
  Antisense strand to SEQ ID NO: 2028486
auuaucccagccauugcca

SEQ ID NO: 2028488 - RNA, 19 nt, Artificial Sequence
  Description of Artificial Sequence: Synthetic oligonucleotide
  Sense strand starting at position 3644 of SEQ ID NO: 1881232
ggcaauggcugggauaauc

SEQ ID NO: 2028489 - RNA, 19 nt, Artificial Sequence
  Description of Artificial Sequence: Synthetic oligonucleotide
  Antisense strand to SEQ ID NO: 2028488
gauuaucccagccauugcc

SEQ ID NO: 2028490 - RNA, 19 nt, Artificial Sequence
  Description of Artificial Sequence: Synthetic oligonucleotide
  Sense strand starting at position 3654 of SEQ ID NO: 1881232
gggauaaucuggcccacaa

SEQ ID NO: 2028491 - RNA, 19 nt, Artificial Sequence
  Description of Artificial Sequence: Synthetic oligonucleotide
  Antisense strand to SEQ ID NO: 2028490
uugugggccagauuauccc

SEQ ID NO: 2028492 - RNA, 19 nt, Artificial Sequence
  Description of Artificial Sequence: Synthetic oligonucleotide
  Sense strand starting at position 3696 of SEQ ID NO: 1881232
gagauuuggucugggccca

SEQ ID NO: 2028493 - RNA, 19 nt, Artificial Sequence
  Description of Artificial Sequence: Synthetic oligonucleotide
  Antisense strand to SEQ ID NO: 2028492
ugggcccagaccaaaucuc

SEQ ID NO: 2028494 - RNA, 19 nt, Artificial Sequence
  Description of Artificial Sequence: Synthetic oligonucleotide
  Sense strand starting at position 3791 of SEQ ID NO: 1881232
gguggaaucccguaguucu

SEQ ID NO: 2028495 - RNA, 19 nt, Artificial Sequence
  Description of Artificial Sequence: Synthetic oligonucleotide
  Antisense strand to SEQ ID NO: 2028494
agaacuacgggauuccacc

SEQ ID NO: 2028496 - RNA, 19 nt, Artificial Sequence
  Description of Artificial Sequence: Synthetic oligonucleotide
  Sense strand starting at position 3798 of SEQ ID NO: 1881232
ucccguaguucugacaucu

SEQ ID NO: 2028497 - RNA, 19 nt, Artificial Sequence
  Description of Artificial Sequence: Synthetic oligonucleotide
  Antisense strand to SEQ ID NO: 2028496
agaugucagaacuacggga

SEQ ID NO: 2028498 - RNA, 19 nt, Artificial Sequence
  Description of Artificial Sequence: Synthetic oligonucleotide
  Sense strand starting at position 3846 of SEQ ID NO: 1881232
cauggaaguugcugucauc

SEQ ID NO: 2028499 - RNA, 19 nt, Artificial Sequence
  Description of Artificial Sequence: Synthetic oligonucleotide
  Antisense strand to SEQ ID NO: 2028498
gaugacagcaacuuccaug

SEQ ID NO: 2028500 - RNA, 19 nt, Artificial Sequence
  Description of Artificial Sequence: Synthetic oligonucleotide
  Sense strand starting at position 3849 of SEQ ID NO: 1881232
ggaaguugcugucaucauc

SEQ ID NO: 2028501 - RNA, 19 nt, Artificial Sequence
  Description of Artificial Sequence: Synthetic oligonucleotide
  Antisense strand to SEQ ID NO: 2028500
gaugaugacagcaacuucc

SEQ ID NO: 2028502 - RNA, 19 nt, Artificial Sequence
  Description of Artificial Sequence: Synthetic oligonucleotide
  Sense strand starting at position 3879 of SEQ ID NO: 1881232
aagucaaaguaguguuaac

SEQ ID NO: 2028503 - RNA, 19 nt, Artificial Sequence
  Description of Artificial Sequence: Synthetic oligonucleotide
  Antisense strand to SEQ ID NO: 2028502
guuaacacuacuuugacuu

SEQ ID NO: 2028504 - RNA, 19 nt, Artificial Sequence
  Description of Artificial Sequence: Synthetic oligonucleotide
  Sense strand starting at position 71 of SEQ ID NO: 1881233
acagacuauugugugaauu

SEQ ID NO: 2028505 - RNA, 19 nt, Artificial Sequence
  Description of Artificial Sequence: Synthetic oligonucleotide
  Antisense strand to SEQ ID NO: 2028504
aauucacacaauagucugu

SEQ ID NO: 2028506 - RNA, 19 nt, Artificial Sequence
  Description of Artificial Sequence: Synthetic oligonucleotide
  Sense strand starting at position 72 of SEQ ID NO: 1881233
cagacuauugugugaauug

SEQ ID NO: 2028507 - RNA, 19 nt, Artificial Sequence
  Description of Artificial Sequence: Synthetic oligonucleotide
  Antisense strand to SEQ ID NO: 2028506
caauucacacaauagucug

SEQ ID NO: 2028508 - RNA, 19 nt, Artificial Sequence
  Description of Artificial Sequence: Synthetic oligonucleotide
  Sense strand starting at position 184 of SEQ ID NO: 1881233
agcaaacagucacugaguu

SEQ ID NO: 2028509 - RNA, 19 nt, Artificial Sequence
  Description of Artificial Sequence: Synthetic oligonucleotide
  Antisense strand to SEQ ID NO: 2028508
aacucagugacuguuugcu

SEQ ID NO: 2028510 - RNA, 19 nt, Artificial Sequence
  Description of Artificial Sequence: Synthetic oligonucleotide
  Sense strand starting at position 212 of SEQ ID NO: 1881233
acuagaucauagguuuaca

SEQ ID NO: 2028511 - RNA, 19 nt, Artificial Sequence
  Description of Artificial Sequence: Synthetic oligonucleotide
  Antisense strand to SEQ ID NO: 2028510
uguaaaccuaugaucuagu

SEQ ID NO: 2028512 - RNA, 19 nt, Artificial Sequence
  Description of Artificial Sequence: Synthetic oligonucleotide
  Sense strand starting at position 281 of SEQ ID NO: 1881233
uuaaguugcagagaaugua

SEQ ID NO: 2028513 - RNA, 19 nt, Artificial Sequence
  Description of Artificial Sequence: Synthetic oligonucleotide
  Antisense strand to SEQ ID NO: 2028512
uacauucucugcaacuuaa

SEQ ID NO: 2028514 - RNA, 19 nt, Artificial Sequence
  Description of Artificial Sequence: Synthetic oligonucleotide
  Sense strand starting at position 284 of SEQ ID NO: 1881233
aguugcagagaauguaauu

SEQ ID NO: 2028515 - RNA, 19 nt, Artificial Sequence
  Description of Artificial Sequence: Synthetic oligonucleotide
  Antisense strand to SEQ ID NO: 2028514
aauuacauucucugcaacu

SEQ ID NO: 2028516 - RNA, 19 nt, Artificial Sequence
  Description of Artificial Sequence: Synthetic oligonucleotide
  Sense strand starting at position 377 of SEQ ID NO: 1881233
aaaugcuagugacuggaua

SEQ ID NO: 2028517 - RNA, 19 nt, Artificial Sequence
  Description of Artificial Sequence: Synthetic oligonucleotide
  Antisense strand to SEQ ID NO: 2028516
uauccagucacuagcauuu

SEQ ID NO: 2028518 - RNA, 19 nt, Artificial Sequence
  Description of Artificial Sequence: Synthetic oligonucleotide
  Sense strand starting at position 378 of SEQ ID NO: 1881233
aaugcuagugacuggauau

SEQ ID NO: 2028519 - RNA, 19 nt, Artificial Sequence
  Description of Artificial Sequence: Synthetic oligonucleotide
  Antisense strand to SEQ ID NO: 2028518
auauccagucacuagcauu

SEQ ID NO: 2028520 - RNA, 19 nt, Artificial Sequence
  Description of Artificial Sequence: Synthetic oligonucleotide
  Sense strand starting at position 379 of SEQ ID NO: 1881233
augcuagugacuggauauc

SEQ ID NO: 2028521 - RNA, 19 nt, Artificial Sequence
  Description of Artificial Sequence: Synthetic oligonucleotide
  Antisense strand to SEQ ID NO: 2028520
gauauccagucacuagcau

SEQ ID NO: 2028522 - RNA, 19 nt, Artificial Sequence
  Description of Artificial Sequence: Synthetic oligonucleotide
  Sense strand starting at position 425 of SEQ ID NO: 1881233
gugaaauugcuggacuaug

SEQ ID NO: 2028523 - RNA, 19 nt, Artificial Sequence
  Description of Artificial Sequence: Synthetic oligonucleotide
  Antisense strand to SEQ ID NO: 2028522
cauaguccagcaauuucac

SEQ ID NO: 2028524 - RNA, 19 nt, Artificial Sequence
  Description of Artificial Sequence: Synthetic oligonucleotide
  Sense strand starting at position 625 of SEQ ID NO: 1881233
gaccauaagucucuagaug

SEQ ID NO: 2028525 - RNA, 19 nt, Artificial Sequence
  Description of Artificial Sequence: Synthetic oligonucleotide
  Antisense strand to SEQ ID NO: 2028524
caucuagagacuuaugguc

SEQ ID NO: 2028526 - RNA, 19 nt, Artificial Sequence
  Description of Artificial Sequence: Synthetic oligonucleotide
  Sense strand starting at position 626 of SEQ ID NO: 1881233
accauaagucucuagaugu

SEQ ID NO: 2028527 - RNA, 19 nt, Artificial Sequence
  Description of Artificial Sequence: Synthetic oligonucleotide
  Antisense strand to SEQ ID NO: 2028526
acaucuagagacuuauggu

SEQ ID NO: 2028528 - RNA, 19 nt, Artificial Sequence
  Description of Artificial Sequence: Synthetic oligonucleotide
  Sense strand starting at position 642 of SEQ ID NO: 1881233
ugucaagaauucuucugua

SEQ ID NO: 2028529 - RNA, 19 nt, Artificial Sequence
  Description of Artificial Sequence: Synthetic oligonucleotide
  Antisense strand to SEQ ID NO: 2028528
uacagaagaauucuugaca

SEQ ID NO: 2028530 - RNA, 19 nt, Artificial Sequence
  Description of Artificial Sequence: Synthetic oligonucleotide
  Sense strand starting at position 647 of SEQ ID NO: 1881233
agaauucuucuguagcucu

SEQ ID NO: 2028531 - RNA, 19 nt, Artificial Sequence
  Description of Artificial Sequence: Synthetic oligonucleotide
  Antisense strand to SEQ ID NO: 2028530
agagcuacagaagaauucu

SEQ ID NO: 2028532 - RNA, 19 nt, Artificial Sequence
  Description of Artificial Sequence: Synthetic oligonucleotide
  Sense strand starting at position 734 of SEQ ID NO: 1881233
ccaguaguggcacauacua

SEQ ID NO: 2028533 - RNA, 19 nt, Artificial Sequence
  Description of Artificial Sequence: Synthetic oligonucleotide
  Antisense strand to SEQ ID NO: 2028532
uaguaugugccacuacugg

SEQ ID NO: 2028534 - RNA, 19 nt, Artificial Sequence
  Description of Artificial Sequence: Synthetic oligonucleotide
  Sense strand starting at position 817 of SEQ ID NO: 1881233
gcagcagucagggacauua

SEQ ID NO: 2028535 - RNA, 19 nt, Artificial Sequence
  Description of Artificial Sequence: Synthetic oligonucleotide
  Antisense strand to SEQ ID NO: 2028534
uaaugucccugacugcugc

SEQ ID NO: 2028536 - RNA, 19 nt, Artificial Sequence
  Description of Artificial Sequence: Synthetic oligonucleotide
  Sense strand starting at position 873 of SEQ ID NO: 1881233
gcuguaugcgaagcuacau

SEQ ID NO: 2028537 - RNA, 19 nt, Artificial Sequence
  Description of Artificial Sequence: Synthetic oligonucleotide
  Antisense strand to SEQ ID NO: 2028536
auguagcuucgcauacagc

SEQ ID NO: 2028538 - RNA, 19 nt, Artificial Sequence
  Description of Artificial Sequence: Synthetic oligonucleotide
  Sense strand starting at position 1244 of SEQ ID NO: 1881233
guacacuaauguguauaua

SEQ ID NO: 2028539 - RNA, 19 nt, Artificial Sequence
  Description of Artificial Sequence: Synthetic oligonucleotide
  Antisense strand to SEQ ID NO: 2028538
uauauacacauuaguguac

SEQ ID NO: 2028540 - RNA, 19 nt, Artificial Sequence
  Description of Artificial Sequence: Synthetic oligonucleotide
  Sense strand starting at position 1302 of SEQ ID NO: 1881233
gaaguuagaguuuagcaua

SEQ ID NO: 2028541 - RNA, 19 nt, Artificial Sequence
  Description of Artificial Sequence: Synthetic oligonucleotide
  Antisense strand to SEQ ID NO: 2028540
uaugcuaaacucuaacuuc

SEQ ID NO: 2028542 - RNA, 19 nt, Artificial Sequence
  Description of Artificial Sequence: Synthetic oligonucleotide
  Sense strand starting at position 1356 of SEQ ID NO: 1881233
auucuauucgcauaagaug

SEQ ID NO: 2028543 - RNA, 19 nt, Artificial Sequence
  Description of Artificial Sequence: Synthetic oligonucleotide
  Antisense strand to SEQ ID NO: 2028542
caucuuaugcgaauagaau

SEQ ID NO: 2028544 - RNA, 19 nt, Artificial Sequence
  Description of Artificial Sequence: Synthetic oligonucleotide
  Sense strand starting at position 1361 of SEQ ID NO: 1881233
auucgcauaagaugugaaa

SEQ ID NO: 2028545 - RNA, 19 nt, Artificial Sequence
  Description of Artificial Sequence: Synthetic oligonucleotide
  Antisense strand to SEQ ID NO: 2028544
uuucacaucuuaugcgaau

SEQ ID NO: 2028546 - RNA, 19 nt, Artificial Sequence
  Description of Artificial Sequence: Synthetic oligonucleotide
  Sense strand starting at position 1604 of SEQ ID NO: 1881233
ugagaaguuaaugguccaa

SEQ ID NO: 2028547 - RNA, 19 nt, Artificial Sequence
  Description of Artificial Sequence: Synthetic oligonucleotide
  Antisense strand to SEQ ID NO: 2028546
uuggaccauuaacuucuca

SEQ ID NO: 2028548 - RNA, 19 nt, Artificial Sequence
  Description of Artificial Sequence: Synthetic oligonucleotide
  Sense strand starting at position 1606 of SEQ ID NO: 1881233
agaaguuaaugguccaaag

SEQ ID NO: 2028549 - RNA, 19 nt, Artificial Sequence
  Description of Artificial Sequence: Synthetic oligonucleotide
  Antisense strand to SEQ ID NO: 2028548
cuuuggaccauuaacuucu

SEQ ID NO: 2028550 - RNA, 19 nt, Artificial Sequence
  Description of Artificial Sequence: Synthetic oligonucleotide
  Sense strand starting at position 1608 of SEQ ID NO: 1881233
aaguuaaugguccaaagua

SEQ ID NO: 2028551 - RNA, 19 nt, Artificial Sequence
  Description of Artificial Sequence: Synthetic oligonucleotide
  Antisense strand to SEQ ID NO: 2028550
uacuuuggaccauuaacuu

SEQ ID NO: 2028552 - RNA, 19 nt, Artificial Sequence
  Description of Artificial Sequence: Synthetic oligonucleotide
  Sense strand starting at position 1678 of SEQ ID NO: 1881233
caaaguggucccuagugaa

SEQ ID NO: 2028553 - RNA, 19 nt, Artificial Sequence
  Description of Artificial Sequence: Synthetic oligonucleotide
  Antisense strand to SEQ ID NO: 2028552
uucacuagggaccacuuug

SEQ ID NO: 2028554 - RNA, 19 nt, Artificial Sequence
  Description of Artificial Sequence: Synthetic oligonucleotide
  Sense strand starting at position 1682 of SEQ ID NO: 1881233
guggucccuagugaacaua

SEQ ID NO: 2028555 - RNA, 19 nt, Artificial Sequence
  Description of Artificial Sequence: Synthetic oligonucleotide
  Antisense strand to SEQ ID NO: 2028554
uauguucacuagggaccac

SEQ ID NO: 2028556 - RNA, 19 nt, Artificial Sequence
  Description of Artificial Sequence: Synthetic oligonucleotide
  Sense strand starting at position 1704 of SEQ ID NO: 1881233
ccuuaagugggcugaggaa

SEQ ID NO: 2028557 - RNA, 19 nt, Artificial Sequence
  Description of Artificial Sequence: Synthetic oligonucleotide
  Antisense strand to SEQ ID NO: 2028556
uuccucagcccacuuaagg

SEQ ID NO: 2028558 - RNA, 19 nt, Artificial Sequence
  Description of Artificial Sequence: Synthetic oligonucleotide
  Sense strand starting at position 1723 of SEQ ID NO: 1881233
acuuauaugucuucuugau

SEQ ID NO: 2028559 - RNA, 19 nt, Artificial Sequence
  Description of Artificial Sequence: Synthetic oligonucleotide
  Antisense strand to SEQ ID NO: 2028558
aucaagaagacauauaagu

SEQ ID NO: 2028560 - RNA, 19 nt, Artificial Sequence
  Description of Artificial Sequence: Synthetic oligonucleotide
  Sense strand starting at position 1725 of SEQ ID NO: 1881233
uuauaugucuucuugauag

SEQ ID NO: 2028561 - RNA, 19 nt, Artificial Sequence
  Description of Artificial Sequence: Synthetic oligonucleotide
  Antisense strand to SEQ ID NO: 2028560
cuaucaagaagacauauaa

SEQ ID NO: 2028562 - RNA, 19 nt, Artificial Sequence
  Description of Artificial Sequence: Synthetic oligonucleotide
  Sense strand starting at position 1776 of SEQ ID NO: 1881233
uuugcaguccaauaugaua

SEQ ID NO: 2028563 - RNA, 19 nt, Artificial Sequence
  Description of Artificial Sequence: Synthetic oligonucleotide
  Antisense strand to SEQ ID NO: 2028562
uaucauauuggacugcaaa

SEQ ID NO: 2028564 - RNA, 19 nt, Artificial Sequence
  Description of Artificial Sequence: Synthetic oligonucleotide
  Sense strand starting at position 1794 of SEQ ID NO: 1881233
agccacuggccauauauga

SEQ ID NO: 2028565 - RNA, 19 nt, Artificial Sequence
  Description of Artificial Sequence: Synthetic oligonucleotide
  Antisense strand to SEQ ID NO: 2028564
ucauauauggccaguggcu

SEQ ID NO: 2028566 - RNA, 19 nt, Artificial Sequence
  Description of Artificial Sequence: Synthetic oligonucleotide
  Sense strand starting at position 2224 of SEQ ID NO: 1881233
aguaguugcccugacuaua

SEQ ID NO: 2028567 - RNA, 19 nt, Artificial Sequence
  Description of Artificial Sequence: Synthetic oligonucleotide
  Antisense strand to SEQ ID NO: 2028566
uauagucagggcaacuacu

SEQ ID NO: 2028568 - RNA, 19 nt, Artificial Sequence
  Description of Artificial Sequence: Synthetic oligonucleotide
  Sense strand starting at position 2240 of SEQ ID NO: 1881233
auaggcuucgauuacagua

SEQ ID NO: 2028569 - RNA, 19 nt, Artificial Sequence
  Description of Artificial Sequence: Synthetic oligonucleotide
  Antisense strand to SEQ ID NO: 2028568
uacuguaaucgaagccuau

SEQ ID NO: 2028570 - RNA, 19 nt, Artificial Sequence
  Description of Artificial Sequence: Synthetic oligonucleotide
  Sense strand starting at position 2245 of SEQ ID NO: 1881233
cuucgauuacaguaguuac

SEQ ID NO: 2028571 - RNA, 19 nt, Artificial Sequence
  Description of Artificial Sequence: Synthetic oligonucleotide
  Antisense strand to SEQ ID NO: 2028570
guaacuacuguaaucgaag

SEQ ID NO: 2028572 - RNA, 19 nt, Artificial Sequence
  Description of Artificial Sequence: Synthetic oligonucleotide
  Sense strand starting at position 2248 of SEQ ID NO: 1881233
cgauuacaguaguuacaag

SEQ ID NO: 2028573 - RNA, 19 nt, Artificial Sequence
  Description of Artificial Sequence: Synthetic oligonucleotide
  Antisense strand to SEQ ID NO: 2028572
cuuguaacuacuguaaucg

SEQ ID NO: 2028574 - RNA, 19 nt, Artificial Sequence
  Description of Artificial Sequence: Synthetic oligonucleotide
  Sense strand starting at position 2998 of SEQ ID NO: 1881233
ucacacauuccagguacau

SEQ ID NO: 2028575 - RNA, 19 nt, Artificial Sequence
  Description of Artificial Sequence: Synthetic oligonucleotide
  Antisense strand to SEQ ID NO: 2028574
auguaccuggaauguguga

SEQ ID NO: 2028576 - RNA, 19 nt, Artificial Sequence
  Description of Artificial Sequence: Synthetic oligonucleotide
  Sense strand starting at position 3033 of SEQ ID NO: 1881233
gcagcuagucagggacaaa

SEQ ID NO: 2028577 - RNA, 19 nt, Artificial Sequence
  Description of Artificial Sequence: Synthetic oligonucleotide
  Antisense strand to SEQ ID NO: 2028576
uuugucccugacuagcugc

SEQ ID NO: 2028578 - RNA, 19 nt, Artificial Sequence
  Description of Artificial Sequence: Synthetic oligonucleotide
  Sense strand starting at position 3085 of SEQ ID NO: 1881233
gggaguaugguugaagucu

SEQ ID NO: 2028579 - RNA, 19 nt, Artificial Sequence
  Description of Artificial Sequence: Synthetic oligonucleotide
  Antisense strand to SEQ ID NO: 2028578
agacuucaaccauacuccc

SEQ ID NO: 2028580 - RNA, 19 nt, Artificial Sequence
  Description of Artificial Sequence: Synthetic oligonucleotide
  Sense strand starting at position 3138 of SEQ ID NO: 1881233
aguucugguuguucuauuu

SEQ ID NO: 2028581 - RNA, 19 nt, Artificial Sequence
  Description of Artificial Sequence: Synthetic oligonucleotide
  Antisense strand to SEQ ID NO: 2028580
aaauagaacaaccagaacu

SEQ ID NO: 2028582 - RNA, 19 nt, Artificial Sequence
  Description of Artificial Sequence: Synthetic oligonucleotide
  Sense strand starting at position 3603 of SEQ ID NO: 1881233
aagcgugugggugaaagaa

SEQ ID NO: 2028583 - RNA, 19 nt, Artificial Sequence
  Description of Artificial Sequence: Synthetic oligonucleotide
  Antisense strand to SEQ ID NO: 2028582
uucuuucacccacacgcuu

SEQ ID NO: 2028584 - RNA, 19 nt, Artificial Sequence
  Description of Artificial Sequence: Synthetic oligonucleotide
  Sense strand starting at position 6 of SEQ ID NO: 1881234
cucaguacacauggacaua

SEQ ID NO: 2028585 - RNA, 19 nt, Artificial Sequence
  Description of Artificial Sequence: Synthetic oligonucleotide
  Antisense strand to SEQ ID NO: 2028584
uauguccauguguacugag

SEQ ID NO: 2028586 - RNA, 19 nt, Artificial Sequence
  Description of Artificial Sequence: Synthetic oligonucleotide
  Sense strand starting at position 120 of SEQ ID NO: 1881234
gucagugucauuuguacau

SEQ ID NO: 2028587 - RNA, 19 nt, Artificial Sequence
  Description of Artificial Sequence: Synthetic oligonucleotide
  Antisense strand to SEQ ID NO: 2028586
auguacaaaugacacugac

SEQ ID NO: 2028588 - RNA, 19 nt, Artificial Sequence
  Description of Artificial Sequence: Synthetic oligonucleotide
  Sense strand starting at position 238 of SEQ ID NO: 1881234
gugguauguauacacacaa

SEQ ID NO: 2028589 - RNA, 19 nt, Artificial Sequence
  Description of Artificial Sequence: Synthetic oligonucleotide
  Antisense strand to SEQ ID NO: 2028588
uuguguguauacauaccac

SEQ ID NO: 2028590 - RNA, 19 nt, Artificial Sequence
  Description of Artificial Sequence: Synthetic oligonucleotide
  Sense strand starting at position 404 of SEQ ID NO: 1881234
ucucauugaaguugagagu

SEQ ID NO: 2028591 - RNA, 19 nt, Artificial Sequence
  Description of Artificial Sequence: Synthetic oligonucleotide
  Antisense strand to SEQ ID NO: 2028590
acucucaacuucaaugaga

SEQ ID NO: 2028592 - RNA, 19 nt, Artificial Sequence
  Description of Artificial Sequence: Synthetic oligonucleotide
  Sense strand starting at position 432 of SEQ ID NO: 1881234
guuucuagagcugaggaga

SEQ ID NO: 2028593 - RNA, 19 nt, Artificial Sequence
  Description of Artificial Sequence: Synthetic oligonucleotide
  Antisense strand to SEQ ID NO: 2028592
ucuccucagcucuagaaac

SEQ ID NO: 2028594 - RNA, 19 nt, Artificial Sequence
  Description of Artificial Sequence: Synthetic oligonucleotide
  Sense strand starting at position 469 of SEQ ID NO: 1881234
agaggagguuggucaauag

SEQ ID NO: 2028595 - RNA, 19 nt, Artificial Sequence
  Description of Artificial Sequence: Synthetic oligonucleotide
  Antisense strand to SEQ ID NO: 2028594
cuauugaccaaccuccucu

SEQ ID NO: 2028596 - RNA, 19 nt, Artificial Sequence
  Description of Artificial Sequence: Synthetic oligonucleotide
  Sense strand starting at position 479 of SEQ ID NO: 1881234
ggucaauagguacaauguu

SEQ ID NO: 2028597 - RNA, 19 nt, Artificial Sequence
  Description of Artificial Sequence: Synthetic oligonucleotide
  Antisense strand to SEQ ID NO: 2028596
aacauuguaccuauugacc

SEQ ID NO: 2028598 - RNA, 19 nt, Artificial Sequence
  Description of Artificial Sequence: Synthetic oligonucleotide
  Sense strand starting at position 617 of SEQ ID NO: 1881234
gauaaauaucuauggugau

SEQ ID NO: 2028599 - RNA, 19 nt, Artificial Sequence
  Description of Artificial Sequence: Synthetic oligonucleotide
  Antisense strand to SEQ ID NO: 2028598
aucaccauagauauuuauc

SEQ ID NO: 2028600 - RNA, 19 nt, Artificial Sequence
  Description of Artificial Sequence: Synthetic oligonucleotide
  Sense strand starting at position 883 of SEQ ID NO: 1881234
gaugguaguucucuacaaa

SEQ ID NO: 2028601 - RNA, 19 nt, Artificial Sequence
  Description of Artificial Sequence: Synthetic oligonucleotide
  Antisense strand to SEQ ID NO: 2028600
uuuguagagaacuaccauc

SEQ ID NO: 2028602 - RNA, 19 nt, Artificial Sequence
  Description of Artificial Sequence: Synthetic oligonucleotide
  Sense strand starting at position 1060 of SEQ ID NO: 1881234
gguagaaagcaugggauga

SEQ ID NO: 2028603 - RNA, 19 nt, Artificial Sequence
  Description of Artificial Sequence: Synthetic oligonucleotide
  Antisense strand to SEQ ID NO: 2028602
ucaucccaugcuuucuacc

SEQ ID NO: 2028604 - RNA, 19 nt, Artificial Sequence
  Description of Artificial Sequence: Synthetic oligonucleotide
  Sense strand starting at position 1150 of SEQ ID NO: 1881234
gucuuagugaugcagagag

SEQ ID NO: 2028605 - RNA, 19 nt, Artificial Sequence
  Description of Artificial Sequence: Synthetic oligonucleotide
  Antisense strand to SEQ ID NO: 2028604
cucucugcaucacuaagac

SEQ ID NO: 2028606 - RNA, 19 nt, Artificial Sequence
  Description of Artificial Sequence: Synthetic oligonucleotide
  Sense strand starting at position 1194 of SEQ ID NO: 1881234
gcaacccuggcuuaucuaa

SEQ ID NO: 2028607 - RNA, 19 nt, Artificial Sequence
  Description of Artificial Sequence: Synthetic oligonucleotide
  Antisense strand to SEQ ID NO: 2028606
uuagauaagccaggguugc

SEQ ID NO: 2028608 - RNA, 19 nt, Artificial Sequence
  Description of Artificial Sequence: Synthetic oligonucleotide
  Sense strand starting at position 1304 of SEQ ID NO: 1881234
uguagaauuccuuguauaa

SEQ ID NO: 2028609 - RNA, 19 nt, Artificial Sequence
  Description of Artificial Sequence: Synthetic oligonucleotide
  Antisense strand to SEQ ID NO: 2028608
uuauacaaggaauucuaca

SEQ ID NO: 2028610 - RNA, 19 nt, Artificial Sequence
  Description of Artificial Sequence: Synthetic oligonucleotide
  Sense strand starting at position 1314 of SEQ ID NO: 1881234
cuuguauaaguaugagaaa

SEQ ID NO: 2028611 - RNA, 19 nt, Artificial Sequence
  Description of Artificial Sequence: Synthetic oligonucleotide
  Antisense strand to SEQ ID NO: 2028610
uuucucauacuuauacaag

SEQ ID NO: 2028612 - RNA, 19 nt, Artificial Sequence
  Description of Artificial Sequence: Synthetic oligonucleotide
  Sense strand starting at position 1474 of SEQ ID NO: 1881234
guaucuauauagcuagaaa

SEQ ID NO: 2028613 - RNA, 19 nt, Artificial Sequence
  Description of Artificial Sequence: Synthetic oligonucleotide
  Antisense strand to SEQ ID NO: 2028612
uuucuagcuauauagauac

SEQ ID NO: 2028614 - RNA, 19 nt, Artificial Sequence
  Description of Artificial Sequence: Synthetic oligonucleotide
  Sense strand starting at position 1570 of SEQ ID NO: 1881234
agugaaagcagaggugaau

SEQ ID NO: 2028615 - RNA, 19 nt, Artificial Sequence
  Description of Artificial Sequence: Synthetic oligonucleotide
  Antisense strand to SEQ ID NO: 2028614
auucaccucugcuuucacu

SEQ ID NO: 2028616 - RNA, 19 nt, Artificial Sequence
  Description of Artificial Sequence: Synthetic oligonucleotide
  Sense strand starting at position 1654 of SEQ ID NO: 1881234
ucuggaagaugucuugcaa

SEQ ID NO: 2028617 - RNA, 19 nt, Artificial Sequence
  Description of Artificial Sequence: Synthetic oligonucleotide
  Antisense strand to SEQ ID NO: 2028616
uugcaagacaucuuccaga

SEQ ID NO: 2028618 - RNA, 19 nt, Artificial Sequence
  Description of Artificial Sequence: Synthetic oligonucleotide
  Sense strand starting at position 1770 of SEQ ID NO: 1881234
gugaaaggcuaauuguaau

SEQ ID NO: 2028619 - RNA, 19 nt, Artificial Sequence
  Description of Artificial Sequence: Synthetic oligonucleotide
  Antisense strand to SEQ ID NO: 2028618
auuacaauuagccuuucac

SEQ ID NO: 2028620 - RNA, 19 nt, Artificial Sequence
  Description of Artificial Sequence: Synthetic oligonucleotide
  Sense strand starting at position 1899 of SEQ ID NO: 1881234
ggaacaugcuuucuauuag

SEQ ID NO: 2028621 - RNA, 19 nt, Artificial Sequence
  Description of Artificial Sequence: Synthetic oligonucleotide
  Antisense strand to SEQ ID NO: 2028620
cuaauagaaagcauguucc

SEQ ID NO: 2028622 - RNA, 19 nt, Artificial Sequence
  Description of Artificial Sequence: Synthetic oligonucleotide
  Sense strand starting at position 2203 of SEQ ID NO: 1881234
acaguagacuauguguuaa

SEQ ID NO: 2028623 - RNA, 19 nt, Artificial Sequence
  Description of Artificial Sequence: Synthetic oligonucleotide
  Antisense strand to SEQ ID NO: 2028622
uuaacacauagucuacugu

SEQ ID NO: 2028624 - RNA, 19 nt, Artificial Sequence
  Description of Artificial Sequence: Synthetic oligonucleotide
  Sense strand starting at position 2215 of SEQ ID NO: 1881234
guguuaauuugagaaauga

SEQ ID NO: 2028625 - RNA, 19 nt, Artificial Sequence
  Description of Artificial Sequence: Synthetic oligonucleotide
  Antisense strand to SEQ ID NO: 2028624
ucauuucucaaauuaacac

SEQ ID NO: 2028626 - RNA, 19 nt, Artificial Sequence
  Description of Artificial Sequence: Synthetic oligonucleotide
  Sense strand starting at position 2274 of SEQ ID NO: 1881234
aguaaacaugagugcacaa

SEQ ID NO: 2028627 - RNA, 19 nt, Artificial Sequence
  Description of Artificial Sequence: Synthetic oligonucleotide
  Antisense strand to SEQ ID NO: 2028626
uugugcacucauguuuacu

SEQ ID NO: 2028628 - RNA, 19 nt, Artificial Sequence
  Description of Artificial Sequence: Synthetic oligonucleotide
  Sense strand starting at position 2400 of SEQ ID NO: 1881234
ggguacuaaauugguauua

SEQ ID NO: 2028629 - RNA, 19 nt, Artificial Sequence
  Description of Artificial Sequence: Synthetic oligonucleotide
  Antisense strand to SEQ ID NO: 2028628
uaauaccaauuuaguaccc

SEQ ID NO: 2028630 - RNA, 19 nt, Artificial Sequence
  Description of Artificial Sequence: Synthetic oligonucleotide
  Sense strand starting at position 2401 of SEQ ID NO: 1881234
gguacuaaauugguauuau

SEQ ID NO: 2028631 - RNA, 19 nt, Artificial Sequence
  Description of Artificial Sequence: Synthetic oligonucleotide
  Antisense strand to SEQ ID NO: 2028630
auaauaccaauuuaguacc

SEQ ID NO: 2028632 - RNA, 19 nt, Artificial Sequence
  Description of Artificial Sequence: Synthetic oligonucleotide
  Sense strand starting at position 2526 of SEQ ID NO: 1881234
cuuggaguuguauagguau

SEQ ID NO: 2028633 - RNA, 19 nt, Artificial Sequence
  Description of Artificial Sequence: Synthetic oligonucleotide
  Antisense strand to SEQ ID NO: 2028632
auaccuauacaacuccaag

SEQ ID NO: 2028634 - RNA, 19 nt, Artificial Sequence
  Description of Artificial Sequence: Synthetic oligonucleotide
  Sense strand starting at position 2688 of SEQ ID NO: 1881234
uucucuaauugacugugaa

SEQ ID NO: 2028635 - RNA, 19 nt, Artificial Sequence
  Description of Artificial Sequence: Synthetic oligonucleotide
  Antisense strand to SEQ ID NO: 2028634
uucacagucaauuagagaa

SEQ ID NO: 2028636 - RNA, 19 nt, Artificial Sequence
  Description of Artificial Sequence: Synthetic oligonucleotide
  Sense strand starting at position 2711 of SEQ ID NO: 1881234
ggauuccugcaacaauguu

SEQ ID NO: 2028637 - RNA, 19 nt, Artificial Sequence
  Description of Artificial Sequence: Synthetic oligonucleotide
  Antisense strand to SEQ ID NO: 2028636
aacauuguugcaggaaucc

SEQ ID NO: 2028638 - RNA, 19 nt, Artificial Sequence
  Description of Artificial Sequence: Synthetic oligonucleotide
  Sense strand starting at position 3198 of SEQ ID NO: 1881234
agagucaaauaguuuauga

SEQ ID NO: 2028639 - RNA, 19 nt, Artificial Sequence
  Description of Artificial Sequence: Synthetic oligonucleotide
  Antisense strand to SEQ ID NO: 2028638
ucauaaacuauuugacucu

SEQ ID NO: 2028640 - RNA, 19 nt, Artificial Sequence
  Description of Artificial Sequence: Synthetic oligonucleotide
  Sense strand starting at position 3200 of SEQ ID NO: 1881234
agucaaauaguuuaugacu

SEQ ID NO: 2028641 - RNA, 19 nt, Artificial Sequence
  Description of Artificial Sequence: Synthetic oligonucleotide
  Antisense strand to SEQ ID NO: 2028640
agucauaaacuauuugacu

SEQ ID NO: 2028642 - RNA, 19 nt, Artificial Sequence
  Description of Artificial Sequence: Synthetic oligonucleotide
  Sense strand starting at position 3254 of SEQ ID NO: 1881234
ggcaaaucuccacaugguu

SEQ ID NO: 2028643 - RNA, 19 nt, Artificial Sequence
  Description of Artificial Sequence: Synthetic oligonucleotide
  Antisense strand to SEQ ID NO: 2028642
aaccauguggagauuugcc

SEQ ID NO: 2028644 - RNA, 19 nt, Artificial Sequence
  Description of Artificial Sequence: Synthetic oligonucleotide
  Sense strand starting at position 3322 of SEQ ID NO: 1881234
guaggugucaaauaaccag

SEQ ID NO: 2028645 - RNA, 19 nt, Artificial Sequence
  Description of Artificial Sequence: Synthetic oligonucleotide
  Antisense strand to SEQ ID NO: 2028644
cugguuauuugacaccuac

SEQ ID NO: 2028646 - RNA, 19 nt, Artificial Sequence
  Description of Artificial Sequence: Synthetic oligonucleotide
  Sense strand starting at position 3354 of SEQ ID NO: 1881234
gggaauucuuuccuaugga

SEQ ID NO: 2028647 - RNA, 19 nt, Artificial Sequence
  Description of Artificial Sequence: Synthetic oligonucleotide
  Antisense strand to SEQ ID NO: 2028646
uccauaggaaagaauuccc

SEQ ID NO: 2028648 - RNA, 19 nt, Artificial Sequence
  Description of Artificial Sequence: Synthetic oligonucleotide
  Sense strand starting at position 3450 of SEQ ID NO: 1881234
acugaauacuuuccaagug

SEQ ID NO: 2028649 - RNA, 19 nt, Artificial Sequence
  Description of Artificial Sequence: Synthetic oligonucleotide
  Antisense strand to SEQ ID NO: 2028648
cacuuggaaaguauucagu

SEQ ID NO: 2028650 - RNA, 19 nt, Artificial Sequence
  Description of Artificial Sequence: Synthetic oligonucleotide
  Sense strand starting at position 3458 of SEQ ID NO: 1881234
cuuuccaagugguugauaa

SEQ ID NO: 2028651 - RNA, 19 nt, Artificial Sequence
  Description of Artificial Sequence: Synthetic oligonucleotide
  Antisense strand to SEQ ID NO: 2028650
uuaucaaccacuuggaaag

SEQ ID NO: 2028652 - RNA, 19 nt, Artificial Sequence
  Description of Artificial Sequence: Synthetic oligonucleotide
  Sense strand starting at position 3505 of SEQ ID NO: 1881234
gguuacagcagauaaguuu

SEQ ID NO: 2028653 - RNA, 19 nt, Artificial Sequence
  Description of Artificial Sequence: Synthetic oligonucleotide
  Antisense strand to SEQ ID NO: 2028652
aaacuuaucugcuguaacc

SEQ ID NO: 2028654 - RNA, 19 nt, Artificial Sequence
  Description of Artificial Sequence: Synthetic oligonucleotide
  Sense strand starting at position 3684 of SEQ ID NO: 1881234
gcaguaguaacugagauug

SEQ ID NO: 2028655 - RNA, 19 nt, Artificial Sequence
  Description of Artificial Sequence: Synthetic oligonucleotide
  Antisense strand to SEQ ID NO: 2028654
caaucucaguuacuacugc

SEQ ID NO: 2028656 - RNA, 19 nt, Artificial Sequence
  Description of Artificial Sequence: Synthetic oligonucleotide
  Sense strand starting at position 3696 of SEQ ID NO: 1881234
gagauugcuuagucuaaua

SEQ ID NO: 2028657 - RNA, 19 nt, Artificial Sequence
  Description of Artificial Sequence: Synthetic oligonucleotide
  Antisense strand to SEQ ID NO: 2028656
uauuagacuaagcaaucuc

SEQ ID NO: 2028658 - RNA, 19 nt, Artificial Sequence
  Description of Artificial Sequence: Synthetic oligonucleotide
  Sense strand starting at position 3726 of SEQ ID NO: 1881234
gaaguaggugauugguaga

SEQ ID NO: 2028659 - RNA, 19 nt, Artificial Sequence
  Description of Artificial Sequence: Synthetic oligonucleotide
  Antisense strand to SEQ ID NO: 2028658
ucuaccaaucaccuacuuc

SEQ ID NO: 2028660 - RNA, 19 nt, Artificial Sequence
  Description of Artificial Sequence: Synthetic oligonucleotide
  Sense strand starting at position 3733 of SEQ ID NO: 1881234
gugauugguagagguuaaa

SEQ ID NO: 2028661 - RNA, 19 nt, Artificial Sequence
  Description of Artificial Sequence: Synthetic oligonucleotide
  Antisense strand to SEQ ID NO: 2028660
uuuaaccucuaccaaucac

SEQ ID NO: 2028662 - RNA, 19 nt, Artificial Sequence
  Description of Artificial Sequence: Synthetic oligonucleotide
  Sense strand starting at position 3788 of SEQ ID NO: 1881234
auuugagaguccuacaaga

SEQ ID NO: 2028663 - RNA, 19 nt, Artificial Sequence
  Description of Artificial Sequence: Synthetic oligonucleotide
  Antisense strand to SEQ ID NO: 2028662
ucuuguaggacucucaaau

SEQ ID NO: 2028664 - RNA, 19 nt, Artificial Sequence
  Description of Artificial Sequence: Synthetic oligonucleotide
  Sense strand starting at position 26 of SEQ ID NO: 1881235
cagguuuacggaggagagu

SEQ ID NO: 2028665 - RNA, 19 nt, Artificial Sequence
  Description of Artificial Sequence: Synthetic oligonucleotide
  Antisense strand to SEQ ID NO: 2028664
acucuccuccguaaaccug

SEQ ID NO: 2028666 - RNA, 19 nt, Artificial Sequence
  Description of Artificial Sequence: Synthetic oligonucleotide
  Sense strand starting at position 59 of SEQ ID NO: 1881235
augggaaugucuccaaaug

SEQ ID NO: 2028667 - RNA, 19 nt, Artificial Sequence
  Description of Artificial Sequence: Synthetic oligonucleotide
  Antisense strand to SEQ ID NO: 2028666
cauuuggagacauucccau

SEQ ID NO: 2028668 - RNA, 19 nt, Artificial Sequence
  Description of Artificial Sequence: Synthetic oligonucleotide
  Sense strand starting at position 455 of SEQ ID NO: 1881235
uacgguugauaggucaaau

SEQ ID NO: 2028669 - RNA, 19 nt, Artificial Sequence
  Description of Artificial Sequence: Synthetic oligonucleotide
  Antisense strand to SEQ ID NO: 2028668
auuugaccuaucaaccgua

SEQ ID NO: 2028670 - RNA, 19 nt, Artificial Sequence
  Description of Artificial Sequence: Synthetic oligonucleotide
  Sense strand starting at position 492 of SEQ ID NO: 1881235
uuguauagucuacaagcua

SEQ ID NO: 2028671 - RNA, 19 nt, Artificial Sequence
  Description of Artificial Sequence: Synthetic oligonucleotide
  Antisense strand to SEQ ID NO: 2028670
uagcuuguagacuauacaa

SEQ ID NO: 2028672 - RNA, 19 nt, Artificial Sequence
  Description of Artificial Sequence: Synthetic oligonucleotide
  Sense strand starting at position 553 of SEQ ID NO: 1881235
aaagaauauuccgugacau

SEQ ID NO: 2028673 - RNA, 19 nt, Artificial Sequence
  Description of Artificial Sequence: Synthetic oligonucleotide
  Antisense strand to SEQ ID NO: 2028672
augucacggaauauucuuu

SEQ ID NO: 2028674 - RNA, 19 nt, Artificial Sequence
  Description of Artificial Sequence: Synthetic oligonucleotide
  Sense strand starting at position 554 of SEQ ID NO: 1881235
aagaauauuccgugacaug

SEQ ID NO: 2028675 - RNA, 19 nt, Artificial Sequence
  Description of Artificial Sequence: Synthetic oligonucleotide
  Antisense strand to SEQ ID NO: 2028674
caugucacggaauauucuu

SEQ ID NO: 2028676 - RNA, 19 nt, Artificial Sequence
  Description of Artificial Sequence: Synthetic oligonucleotide
  Sense strand starting at position 555 of SEQ ID NO: 1881235
agaauauuccgugacaugu

SEQ ID NO: 2028677 - RNA, 19 nt, Artificial Sequence
  Description of Artificial Sequence: Synthetic oligonucleotide
  Antisense strand to SEQ ID NO: 2028676
acaugucacggaauauucu

SEQ ID NO: 2028678 - RNA, 19 nt, Artificial Sequence
  Description of Artificial Sequence: Synthetic oligonucleotide
  Sense strand starting at position 673 of SEQ ID NO: 1881235
agaguugaauagguacuaa

SEQ ID NO: 2028679 - RNA, 19 nt, Artificial Sequence
  Description of Artificial Sequence: Synthetic oligonucleotide
  Antisense strand to SEQ ID NO: 2028678
uuaguaccuauucaacucu

SEQ ID NO: 2028680 - RNA, 19 nt, Artificial Sequence
  Description of Artificial Sequence: Synthetic oligonucleotide
  Sense strand starting at position 693 of SEQ ID NO: 1881235
gggauaguaucaucuaaca

SEQ ID NO: 2028681 - RNA, 19 nt, Artificial Sequence
  Description of Artificial Sequence: Synthetic oligonucleotide
  Antisense strand to SEQ ID NO: 2028680
uguuagaugauacuauccc

SEQ ID NO: 2028682 - RNA, 19 nt, Artificial Sequence
  Description of Artificial Sequence: Synthetic oligonucleotide
  Sense strand starting at position 728 of SEQ ID NO: 1881235
uagcuagugcuuuacagaa

SEQ ID NO: 2028683 - RNA, 19 nt, Artificial Sequence
  Description of Artificial Sequence: Synthetic oligonucleotide
  Antisense strand to SEQ ID NO: 2028682
uucuguaaagcacuagcua

SEQ ID NO: 2028684 - RNA, 19 nt, Artificial Sequence
  Description of Artificial Sequence: Synthetic oligonucleotide
  Sense strand starting at position 771 of SEQ ID NO: 1881235
agacaaaccuggguuguga

SEQ ID NO: 2028685 - RNA, 19 nt, Artificial Sequence
  Description of Artificial Sequence: Synthetic oligonucleotide
  Antisense strand to SEQ ID NO: 2028684
ucacaacccagguuugucu

SEQ ID NO: 2028686 - RNA, 19 nt, Artificial Sequence
  Description of Artificial Sequence: Synthetic oligonucleotide
  Sense strand starting at position 773 of SEQ ID NO: 1881235
acaaaccuggguugugaaa

SEQ ID NO: 2028687 - RNA, 19 nt, Artificial Sequence
  Description of Artificial Sequence: Synthetic oligonucleotide
  Antisense strand to SEQ ID NO: 2028686
uuucacaacccagguuugu

SEQ ID NO: 2028688 - RNA, 19 nt, Artificial Sequence
  Description of Artificial Sequence: Synthetic oligonucleotide
  Sense strand starting at position 871 of SEQ ID NO: 1881235
cuccaagucagugaguuau

SEQ ID NO: 2028689 - RNA, 19 nt, Artificial Sequence
  Description of Artificial Sequence: Synthetic oligonucleotide
  Antisense strand to SEQ ID NO: 2028688
auaacucacugacuuggag

SEQ ID NO: 2028690 - RNA, 19 nt, Artificial Sequence
  Description of Artificial Sequence: Synthetic oligonucleotide
  Sense strand starting at position 873 of SEQ ID NO: 1881235
ccaagucagugaguuauau

SEQ ID NO: 2028691 - RNA, 19 nt, Artificial Sequence
  Description of Artificial Sequence: Synthetic oligonucleotide
  Antisense strand to SEQ ID NO: 2028690
auauaacucacugacuugg

SEQ ID NO: 2028692 - RNA, 19 nt, Artificial Sequence
  Description of Artificial Sequence: Synthetic oligonucleotide
  Sense strand starting at position 885 of SEQ ID NO: 1881235
guuauauccuguuuagaga

SEQ ID NO: 2028693 - RNA, 19 nt, Artificial Sequence
  Description of Artificial Sequence: Synthetic oligonucleotide
  Antisense strand to SEQ ID NO: 2028692
ucucuaaacaggauauaac

SEQ ID NO: 2028694 - RNA, 19 nt, Artificial Sequence
  Description of Artificial Sequence: Synthetic oligonucleotide
  Sense strand starting at position 886 of SEQ ID NO: 1881235
uuauauccuguuuagagau

SEQ ID NO: 2028695 - RNA, 19 nt, Artificial Sequence
  Description of Artificial Sequence: Synthetic oligonucleotide
  Antisense strand to SEQ ID NO: 2028694
aucucuaaacaggauauaa

SEQ ID NO: 2028696 - RNA, 19 nt, Artificial Sequence
  Description of Artificial Sequence: Synthetic oligonucleotide
  Sense strand starting at position 892 of SEQ ID NO: 1881235
ccuguuuagagaugagauc

SEQ ID NO: 2028697 - RNA, 19 nt, Artificial Sequence
  Description of Artificial Sequence: Synthetic oligonucleotide
  Antisense strand to SEQ ID NO: 2028696
gaucucaucucuaaacagg

SEQ ID NO: 2028698 - RNA, 19 nt, Artificial Sequence
  Description of Artificial Sequence: Synthetic oligonucleotide
  Sense strand starting at position 898 of SEQ ID NO: 1881235
uagagaugagaucgcaagu

SEQ ID NO: 2028699 - RNA, 19 nt, Artificial Sequence
  Description of Artificial Sequence: Synthetic oligonucleotide
  Antisense strand to SEQ ID NO: 2028698
acuugcgaucucaucucua

SEQ ID NO: 2028700 - RNA, 19 nt, Artificial Sequence
  Description of Artificial Sequence: Synthetic oligonucleotide
  Sense strand starting at position 1256 of SEQ ID NO: 1881235
agaccaguucugcagacua

SEQ ID NO: 2028701 - RNA, 19 nt, Artificial Sequence
  Description of Artificial Sequence: Synthetic oligonucleotide
  Antisense strand to SEQ ID NO: 2028700
uagucugcagaacuggucu

SEQ ID NO: 2028702 - RNA, 19 nt, Artificial Sequence
  Description of Artificial Sequence: Synthetic oligonucleotide
  Sense strand starting at position 1324 of SEQ ID NO: 1881235
gugaucuaucuauauaccu

SEQ ID NO: 2028703 - RNA, 19 nt, Artificial Sequence
  Description of Artificial Sequence: Synthetic oligonucleotide
  Antisense strand to SEQ ID NO: 2028702
agguauauagauagaucac

SEQ ID NO: 2028704 - RNA, 19 nt, Artificial Sequence
  Description of Artificial Sequence: Synthetic oligonucleotide
  Sense strand starting at position 1378 of SEQ ID NO: 1881235
uggauucuguucuccacaa

SEQ ID NO: 2028705 - RNA, 19 nt, Artificial Sequence
  Description of Artificial Sequence: Synthetic oligonucleotide
  Antisense strand to SEQ ID NO: 2028704
uuguggagaacagaaucca

SEQ ID NO: 2028706 - RNA, 19 nt, Artificial Sequence
  Description of Artificial Sequence: Synthetic oligonucleotide
  Sense strand starting at position 1379 of SEQ ID NO: 1881235
ggauucuguucuccacaac

SEQ ID NO: 2028707 - RNA, 19 nt, Artificial Sequence
  Description of Artificial Sequence: Synthetic oligonucleotide
  Antisense strand to SEQ ID NO: 2028706
guuguggagaacagaaucc

SEQ ID NO: 2028708 - RNA, 19 nt, Artificial Sequence
  Description of Artificial Sequence: Synthetic oligonucleotide
  Sense strand starting at position 1382 of SEQ ID NO: 1881235
uucuguucuccacaacgau

SEQ ID NO: 2028709 - RNA, 19 nt, Artificial Sequence
  Description of Artificial Sequence: Synthetic oligonucleotide
  Antisense strand to SEQ ID NO: 2028708
aucguuguggagaacagaa

SEQ ID NO: 2028710 - RNA, 19 nt, Artificial Sequence
  Description of Artificial Sequence: Synthetic oligonucleotide
  Sense strand starting at position 1433 of SEQ ID NO: 1881235
cuuauaauacuacaguguu

SEQ ID NO: 2028711 - RNA, 19 nt, Artificial Sequence
  Description of Artificial Sequence: Synthetic oligonucleotide
  Antisense strand to SEQ ID NO: 2028710
aacacuguaguauuauaag

SEQ ID NO: 2028712 - RNA, 19 nt, Artificial Sequence
  Description of Artificial Sequence: Synthetic oligonucleotide
  Sense strand starting at position 1439 of SEQ ID NO: 1881235
auacuacaguguuuccuaa

SEQ ID NO: 2028713 - RNA, 19 nt, Artificial Sequence
  Description of Artificial Sequence: Synthetic oligonucleotide
  Antisense strand to SEQ ID NO: 2028712
uuaggaaacacuguaguau

SEQ ID NO: 2028714 - RNA, 19 nt, Artificial Sequence
  Description of Artificial Sequence: Synthetic oligonucleotide
  Sense strand starting at position 1530 of SEQ ID NO: 1881235
ggauucuguaguuauguaa

SEQ ID NO: 2028715 - RNA, 19 nt, Artificial Sequence
  Description of Artificial Sequence: Synthetic oligonucleotide
  Antisense strand to SEQ ID NO: 2028714
uuacauaacuacagaaucc

SEQ ID NO: 2028716 - RNA, 19 nt, Artificial Sequence
  Description of Artificial Sequence: Synthetic oligonucleotide
  Sense strand starting at position 1575 of SEQ ID NO: 1881235
agauuucuuuacuacagga

SEQ ID NO: 2028717 - RNA, 19 nt, Artificial Sequence
  Description of Artificial Sequence: Synthetic oligonucleotide
  Antisense strand to SEQ ID NO: 2028716
uccuguaguaaagaaaucu

SEQ ID NO: 2028718 - RNA, 19 nt, Artificial Sequence
  Description of Artificial Sequence: Synthetic oligonucleotide
  Sense strand starting at position 1699 of SEQ ID NO: 1881235
gucuuaccaguacaguaau

SEQ ID NO: 2028719 - RNA, 19 nt, Artificial Sequence
  Description of Artificial Sequence: Synthetic oligonucleotide
  Antisense strand to SEQ ID NO: 2028718
auuacuguacugguaagac

SEQ ID NO: 2028720 - RNA, 19 nt, Artificial Sequence
  Description of Artificial Sequence: Synthetic oligonucleotide
  Sense strand starting at position 1819 of SEQ ID NO: 1881235
cuggaauauguugggugaa

SEQ ID NO: 2028721 - RNA, 19 nt, Artificial Sequence
  Description of Artificial Sequence: Synthetic oligonucleotide
  Antisense strand to SEQ ID NO: 2028720
uucacccaacauauuccag

SEQ ID NO: 2028722 - RNA, 19 nt, Artificial Sequence
  Description of Artificial Sequence: Synthetic oligonucleotide
  Sense strand starting at position 1821 of SEQ ID NO: 1881235
ggaauauguugggugaaau

SEQ ID NO: 2028723 - RNA, 19 nt, Artificial Sequence
  Description of Artificial Sequence: Synthetic oligonucleotide
  Antisense strand to SEQ ID NO: 2028722
auuucacccaacauauucc

SEQ ID NO: 2028724 - RNA, 19 nt, Artificial Sequence
  Description of Artificial Sequence: Synthetic oligonucleotide
  Sense strand starting at position 1822 of SEQ ID NO: 1881235
gaauauguugggugaaauu

SEQ ID NO: 2028725 - RNA, 19 nt, Artificial Sequence
  Description of Artificial Sequence: Synthetic oligonucleotide
  Antisense strand to SEQ ID NO: 2028724
aauuucacccaacauauuc

SEQ ID NO: 2028726 - RNA, 19 nt, Artificial Sequence
  Description of Artificial Sequence: Synthetic oligonucleotide
  Sense strand starting at position 1907 of SEQ ID NO: 1881235
uuuggaaagcauuggcaau

SEQ ID NO: 2028727 - RNA, 19 nt, Artificial Sequence
  Description of Artificial Sequence: Synthetic oligonucleotide
  Antisense strand to SEQ ID NO: 2028726
auugccaaugcuuuccaaa

SEQ ID NO: 2028728 - RNA, 19 nt, Artificial Sequence
  Description of Artificial Sequence: Synthetic oligonucleotide
  Sense strand starting at position 2207 of SEQ ID NO: 1881235
ggucauaacuuccuuauga

SEQ ID NO: 2028729 - RNA, 19 nt, Artificial Sequence
  Description of Artificial Sequence: Synthetic oligonucleotide
  Antisense strand to SEQ ID NO: 2028728
ucauaaggaaguuaugacc

SEQ ID NO: 2028730 - RNA, 19 nt, Artificial Sequence
  Description of Artificial Sequence: Synthetic oligonucleotide
  Sense strand starting at position 2215 of SEQ ID NO: 1881235
cuuccuuaugauugaggga

SEQ ID NO: 2028731 - RNA, 19 nt, Artificial Sequence
  Description of Artificial Sequence: Synthetic oligonucleotide
  Antisense strand to SEQ ID NO: 2028730
ucccucaaucauaaggaag

SEQ ID NO: 2028732 - RNA, 19 nt, Artificial Sequence
  Description of Artificial Sequence: Synthetic oligonucleotide
  Sense strand starting at position 2344 of SEQ ID NO: 1881235
ccaagaguaucucuauugu

SEQ ID NO: 2028733 - RNA, 19 nt, Artificial Sequence
  Description of Artificial Sequence: Synthetic oligonucleotide
  Antisense strand to SEQ ID NO: 2028732
acaauagagauacucuugg

SEQ ID NO: 2028734 - RNA, 19 nt, Artificial Sequence
  Description of Artificial Sequence: Synthetic oligonucleotide
  Sense strand starting at position 2431 of SEQ ID NO: 1881235
ugaguauguaguuagaggu

SEQ ID NO: 2028735 - RNA, 19 nt, Artificial Sequence
  Description of Artificial Sequence: Synthetic oligonucleotide
  Antisense strand to SEQ ID NO: 2028734
accucuaacuacauacuca

SEQ ID NO: 2028736 - RNA, 19 nt, Artificial Sequence
  Description of Artificial Sequence: Synthetic oligonucleotide
  Sense strand starting at position 2523 of SEQ ID NO: 1881235
ucaguuuaacuugguaaag

SEQ ID NO: 2028737 - RNA, 19 nt, Artificial Sequence
  Description of Artificial Sequence: Synthetic oligonucleotide
  Antisense strand to SEQ ID NO: 2028736
cuuuaccaaguuaaacuga

SEQ ID NO: 2028738 - RNA, 19 nt, Artificial Sequence
  Description of Artificial Sequence: Synthetic oligonucleotide
  Sense strand starting at position 2524 of SEQ ID NO: 1881235
caguuuaacuugguaaaga

SEQ ID NO: 2028739 - RNA, 19 nt, Artificial Sequence
  Description of Artificial Sequence: Synthetic oligonucleotide
  Antisense strand to SEQ ID NO: 2028738
ucuuuaccaaguuaaacug

SEQ ID NO: 2028740 - RNA, 19 nt, Artificial Sequence
  Description of Artificial Sequence: Synthetic oligonucleotide
  Sense strand starting at position 2686 of SEQ ID NO: 1881235
ugucuaauucuguggagga

SEQ ID NO: 2028741 - RNA, 19 nt, Artificial Sequence
  Description of Artificial Sequence: Synthetic oligonucleotide
  Antisense strand to SEQ ID NO: 2028740
uccuccacagaauuagaca

SEQ ID NO: 2028742 - RNA, 19 nt, Artificial Sequence
  Description of Artificial Sequence: Synthetic oligonucleotide
  Sense strand starting at position 3621 of SEQ ID NO: 1881235
gagaaaucauggucuccaa

SEQ ID NO: 2028743 - RNA, 19 nt, Artificial Sequence
  Description of Artificial Sequence: Synthetic oligonucleotide
  Antisense strand to SEQ ID NO: 2028742
uuggagaccaugauuucuc

SEQ ID NO: 2028744 - RNA, 19 nt, Artificial Sequence
  Description of Artificial Sequence: Synthetic oligonucleotide
  Sense strand starting at position 35 of SEQ ID NO: 1881236
aaagauuugugauaggcca

SEQ ID NO: 2028745 - RNA, 19 nt, Artificial Sequence
  Description of Artificial Sequence: Synthetic oligonucleotide
  Antisense strand to SEQ ID NO: 2028744
uggccuaucacaaaucuuu

SEQ ID NO: 2028746 - RNA, 19 nt, Artificial Sequence
  Description of Artificial Sequence: Synthetic oligonucleotide
  Sense strand starting at position 728 of SEQ ID NO: 1881236
guguccacuguacaauuau

SEQ ID NO: 2028747 - RNA, 19 nt, Artificial Sequence
  Description of Artificial Sequence: Synthetic oligonucleotide
  Antisense strand to SEQ ID NO: 2028746
auaauuguacaguggacac

SEQ ID NO: 2028748 - RNA, 19 nt, Artificial Sequence
  Description of Artificial Sequence: Synthetic oligonucleotide
  Sense strand starting at position 748 of SEQ ID NO: 1881236
ucagcauuucuguauguuu

SEQ ID NO: 2028749 - RNA, 19 nt, Artificial Sequence
  Description of Artificial Sequence: Synthetic oligonucleotide
  Antisense strand to SEQ ID NO: 2028748
aaacauacagaaaugcuga

SEQ ID NO: 2028750 - RNA, 19 nt, Artificial Sequence
  Description of Artificial Sequence: Synthetic oligonucleotide
  Sense strand starting at position 750 of SEQ ID NO: 1881236
agcauuucuguauguuuga

SEQ ID NO: 2028751 - RNA, 19 nt, Artificial Sequence
  Description of Artificial Sequence: Synthetic oligonucleotide
  Antisense strand to SEQ ID NO: 2028750
ucaaacauacagaaaugcu

SEQ ID NO: 2028752 - RNA, 19 nt, Artificial Sequence
  Description of Artificial Sequence: Synthetic oligonucleotide
  Sense strand starting at position 751 of SEQ ID NO: 1881236
gcauuucuguauguuugaa

SEQ ID NO: 2028753 - RNA, 19 nt, Artificial Sequence
  Description of Artificial Sequence: Synthetic oligonucleotide
  Antisense strand to SEQ ID NO: 2028752
uucaaacauacagaaaugc

SEQ ID NO: 2028754 - RNA, 19 nt, Artificial Sequence
  Description of Artificial Sequence: Synthetic oligonucleotide
  Sense strand starting at position 782 of SEQ ID NO: 1881236
aaaguauugggaggaaguu

SEQ ID NO: 2028755 - RNA, 19 nt, Artificial Sequence
  Description of Artificial Sequence: Synthetic oligonucleotide
  Antisense strand to SEQ ID NO: 2028754
aacuuccucccaauacuuu

SEQ ID NO: 2028756 - RNA, 19 nt, Artificial Sequence
  Description of Artificial Sequence: Synthetic oligonucleotide
  Sense strand starting at position 957 of SEQ ID NO: 1881236
cuccaacauggcgaagaau

SEQ ID NO: 2028757 - RNA, 19 nt, Artificial Sequence
  Description of Artificial Sequence: Synthetic oligonucleotide
  Antisense strand to SEQ ID NO: 2028756
auucuucgccauguuggag

SEQ ID NO: 2028758 - RNA, 19 nt, Artificial Sequence
  Description of Artificial Sequence: Synthetic oligonucleotide
  Sense strand starting at position 966 of SEQ ID NO: 1881236
ggcgaagaaucaucuguga

SEQ ID NO: 2028759 - RNA, 19 nt, Artificial Sequence
  Description of Artificial Sequence: Synthetic oligonucleotide
  Antisense strand to SEQ ID NO: 2028758
ucacagaugauucuucgcc

SEQ ID NO: 2028760 - RNA, 19 nt, Artificial Sequence
  Description of Artificial Sequence: Synthetic oligonucleotide
  Sense strand starting at position 968 of SEQ ID NO: 1881236
cgaagaaucaucugugaga

SEQ ID NO: 2028761 - RNA, 19 nt, Artificial Sequence
  Description of Artificial Sequence: Synthetic oligonucleotide
  Antisense strand to SEQ ID NO: 2028760
ucucacagaugauucuucg

SEQ ID NO: 2028762 - RNA, 19 nt, Artificial Sequence
  Description of Artificial Sequence: Synthetic oligonucleotide
  Sense strand starting at position 970 of SEQ ID NO: 1881236
aagaaucaucugugagauu

SEQ ID NO: 2028763 - RNA, 19 nt, Artificial Sequence
  Description of Artificial Sequence: Synthetic oligonucleotide
  Antisense strand to SEQ ID NO: 2028762
aaucucacagaugauucuu

SEQ ID NO: 2028764 - RNA, 19 nt, Artificial Sequence
  Description of Artificial Sequence: Synthetic oligonucleotide
  Sense strand starting at position 1047 of SEQ ID NO: 1881236
uugggaauauacuuucgua

SEQ ID NO: 2028765 - RNA, 19 nt, Artificial Sequence
  Description of Artificial Sequence: Synthetic oligonucleotide
  Antisense strand to SEQ ID NO: 2028764
uacgaaaguauauucccaa

SEQ ID NO: 2028766 - RNA, 19 nt, Artificial Sequence
  Description of Artificial Sequence: Synthetic oligonucleotide
  Sense strand starting at position 1140 of SEQ ID NO: 1881236
aaagccauuguguaguaga

SEQ ID NO: 2028767 - RNA, 19 nt, Artificial Sequence
  Description of Artificial Sequence: Synthetic oligonucleotide
  Antisense strand to SEQ ID NO: 2028766
ucuacuacacaauggcuuu

SEQ ID NO: 2028768 - RNA, 19 nt, Artificial Sequence
  Description of Artificial Sequence: Synthetic oligonucleotide
  Sense strand starting at position 1145 of SEQ ID NO: 1881236
cauuguguaguagacagua

SEQ ID NO: 2028769 - RNA, 19 nt, Artificial Sequence
  Description of Artificial Sequence: Synthetic oligonucleotide
  Antisense strand to SEQ ID NO: 2028768
uacugucuacuacacaaug

SEQ ID NO: 2028770 - RNA, 19 nt, Artificial Sequence
  Description of Artificial Sequence: Synthetic oligonucleotide
  Sense strand starting at position 1147 of SEQ ID NO: 1881236
uuguguaguagacaguaga

SEQ ID NO: 2028771 - RNA, 19 nt, Artificial Sequence
  Description of Artificial Sequence: Synthetic oligonucleotide
  Antisense strand to SEQ ID NO: 2028770
ucuacugucuacuacacaa

SEQ ID NO: 2028772 - RNA, 19 nt, Artificial Sequence
  Description of Artificial Sequence: Synthetic oligonucleotide
  Sense strand starting at position 1303 of SEQ ID NO: 1881236
augagcaaauacuuguaua

SEQ ID NO: 2028773 - RNA, 19 nt, Artificial Sequence
  Description of Artificial Sequence: Synthetic oligonucleotide
  Antisense strand to SEQ ID NO: 2028772
uauacaaguauuugcucau

SEQ ID NO: 2028774 - RNA, 19 nt, Artificial Sequence
  Description of Artificial Sequence: Synthetic oligonucleotide
  Sense strand starting at position 1403 of SEQ ID NO: 1881236
ugggacucacuauguugaa

SEQ ID NO: 2028775 - RNA, 19 nt, Artificial Sequence
  Description of Artificial Sequence: Synthetic oligonucleotide
  Antisense strand to SEQ ID NO: 2028774
uucaacauagugaguccca

SEQ ID NO: 2028776 - RNA, 19 nt, Artificial Sequence
  Description of Artificial Sequence: Synthetic oligonucleotide
  Sense strand starting at position 1404 of SEQ ID NO: 1881236
gggacucacuauguugaaa

SEQ ID NO: 2028777 - RNA, 19 nt, Artificial Sequence
  Description of Artificial Sequence: Synthetic oligonucleotide
  Antisense strand to SEQ ID NO: 2028776
uuucaacauagugaguccc

SEQ ID NO: 2028778 - RNA, 19 nt, Artificial Sequence
  Description of Artificial Sequence: Synthetic oligonucleotide
  Sense strand starting at position 1424 of SEQ ID NO: 1881236
gagaaaucuuacguauggu

SEQ ID NO: 2028779 - RNA, 19 nt, Artificial Sequence
  Description of Artificial Sequence: Synthetic oligonucleotide
  Antisense strand to SEQ ID NO: 2028778
accauacguaagauuucuc

SEQ ID NO: 2028780 - RNA, 19 nt, Artificial Sequence
  Description of Artificial Sequence: Synthetic oligonucleotide
  Sense strand starting at position 1425 of SEQ ID NO: 1881236
agaaaucuuacguauggug

SEQ ID NO: 2028781 - RNA, 19 nt, Artificial Sequence
  Description of Artificial Sequence: Synthetic oligonucleotide
  Antisense strand to SEQ ID NO: 2028780
caccauacguaagauuucu

SEQ ID NO: 2028782 - RNA, 19 nt, Artificial Sequence
  Description of Artificial Sequence: Synthetic oligonucleotide
  Sense strand starting at position 1427 of SEQ ID NO: 1881236
aaaucuuacguauggugaa

SEQ ID NO: 2028783 - RNA, 19 nt, Artificial Sequence
  Description of Artificial Sequence: Synthetic oligonucleotide
  Antisense strand to SEQ ID NO: 2028782
uucaccauacguaagauuu

SEQ ID NO: 2028784 - RNA, 19 nt, Artificial Sequence
  Description of Artificial Sequence: Synthetic oligonucleotide
  Sense strand starting at position 1744 of SEQ ID NO: 1881236
uuugaaagcuaaguacaaa

SEQ ID NO: 2028785 - RNA, 19 nt, Artificial Sequence
  Description of Artificial Sequence: Synthetic oligonucleotide
  Antisense strand to SEQ ID NO: 2028784
uuuguacuuagcuuucaaa

SEQ ID NO: 2028786 - RNA, 19 nt, Artificial Sequence
  Description of Artificial Sequence: Synthetic oligonucleotide
  Sense strand starting at position 1807 of SEQ ID NO: 1881236
gcucguaaggaugagacaa

SEQ ID NO: 2028787 - RNA, 19 nt, Artificial Sequence
  Description of Artificial Sequence: Synthetic oligonucleotide
  Antisense strand to SEQ ID NO: 2028786
uugucucauccuuacgagc

SEQ ID NO: 2028788 - RNA, 19 nt, Artificial Sequence
  Description of Artificial Sequence: Synthetic oligonucleotide
  Sense strand starting at position 1829 of SEQ ID NO: 1881236
ugauuauugcuggagguua

SEQ ID NO: 2028789 - RNA, 19 nt, Artificial Sequence
  Description of Artificial Sequence: Synthetic oligonucleotide
  Antisense strand to SEQ ID NO: 2028788
uaaccuccagcaauaauca

SEQ ID NO: 2028790 - RNA, 19 nt, Artificial Sequence
  Description of Artificial Sequence: Synthetic oligonucleotide
  Sense strand starting at position 2151 of SEQ ID NO: 1881236
gcucaugcucucuauagaa

SEQ ID NO: 2028791 - RNA, 19 nt, Artificial Sequence
  Description of Artificial Sequence: Synthetic oligonucleotide
  Antisense strand to SEQ ID NO: 2028790
uucuauagagagcaugagc

SEQ ID NO: 2028792 - RNA, 19 nt, Artificial Sequence
  Description of Artificial Sequence: Synthetic oligonucleotide
  Sense strand starting at position 2428 of SEQ ID NO: 1881236
gauuauagacgcuauccua

SEQ ID NO: 2028793 - RNA, 19 nt, Artificial Sequence
  Description of Artificial Sequence: Synthetic oligonucleotide
  Antisense strand to SEQ ID NO: 2028792
uaggauagcgucuauaauc

SEQ ID NO: 2028794 - RNA, 19 nt, Artificial Sequence
  Description of Artificial Sequence: Synthetic oligonucleotide
  Sense strand starting at position 2606 of SEQ ID NO: 1881236
aacuauacuucgguuugga

SEQ ID NO: 2028795 - RNA, 19 nt, Artificial Sequence
  Description of Artificial Sequence: Synthetic oligonucleotide
  Antisense strand to SEQ ID NO: 2028794
uccaaaccgaaguauaguu

SEQ ID NO: 2028796 - RNA, 19 nt, Artificial Sequence
  Description of Artificial Sequence: Synthetic oligonucleotide
  Sense strand starting at position 2638 of SEQ ID NO: 1881236
ggcagaaaguauucaggca

SEQ ID NO: 2028797 - RNA, 19 nt, Artificial Sequence
  Description of Artificial Sequence: Synthetic oligonucleotide
  Antisense strand to SEQ ID NO: 2028796
ugccugaauacuuucugcc

SEQ ID NO: 2028798 - RNA, 19 nt, Artificial Sequence
  Description of Artificial Sequence: Synthetic oligonucleotide
  Sense strand starting at position 2737 of SEQ ID NO: 1881236
ggaauauaagcucgagauc

SEQ ID NO: 2028799 - RNA, 19 nt, Artificial Sequence
  Description of Artificial Sequence: Synthetic oligonucleotide
  Antisense strand to SEQ ID NO: 2028798
gaucucgagcuuauauucc

SEQ ID NO: 2028800 - RNA, 19 nt, Artificial Sequence
  Description of Artificial Sequence: Synthetic oligonucleotide
  Sense strand starting at position 2802 of SEQ ID NO: 1881236
cauuauuguuggguaauga

SEQ ID NO: 2028801 - RNA, 19 nt, Artificial Sequence
  Description of Artificial Sequence: Synthetic oligonucleotide
  Antisense strand to SEQ ID NO: 2028800
ucauuacccaacaauaaug

SEQ ID NO: 2028802 - RNA, 19 nt, Artificial Sequence
  Description of Artificial Sequence: Synthetic oligonucleotide
  Sense strand starting at position 2848 of SEQ ID NO: 1881236
gagugaaaugaucggagcu

SEQ ID NO: 2028803 - RNA, 19 nt, Artificial Sequence
  Description of Artificial Sequence: Synthetic oligonucleotide
  Antisense strand to SEQ ID NO: 2028802
agcuccgaucauuucacuc

SEQ ID NO: 2028804 - RNA, 19 nt, Artificial Sequence
  Description of Artificial Sequence: Synthetic oligonucleotide
  Sense strand starting at position 2849 of SEQ ID NO: 1881236
agugaaaugaucggagcuu

SEQ ID NO: 2028805 - RNA, 19 nt, Artificial Sequence
  Description of Artificial Sequence: Synthetic oligonucleotide
  Antisense strand to SEQ ID NO: 2028804
aagcuccgaucauuucacu

SEQ ID NO: 2028806 - RNA, 19 nt, Artificial Sequence
  Description of Artificial Sequence: Synthetic oligonucleotide
  Sense strand starting at position 2918 of SEQ ID NO: 1881236
ccaaguaagggcuauugua

SEQ ID NO: 2028807 - RNA, 19 nt, Artificial Sequence
  Description of Artificial Sequence: Synthetic oligonucleotide
  Antisense strand to SEQ ID NO: 2028806
uacaauagcccuuacuugg

SEQ ID NO: 2028808 - RNA, 19 nt, Artificial Sequence
  Description of Artificial Sequence: Synthetic oligonucleotide
  Sense strand starting at position 3107 of SEQ ID NO: 1881236
gagggagaauaauaacaga

SEQ ID NO: 2028809 - RNA, 19 nt, Artificial Sequence
  Description of Artificial Sequence: Synthetic oligonucleotide
  Antisense strand to SEQ ID NO: 2028808
ucuguuauuauucucccuc

SEQ ID NO: 2028810 - RNA, 19 nt, Artificial Sequence
  Description of Artificial Sequence: Synthetic oligonucleotide
  Sense strand starting at position 3128 of SEQ ID NO: 1881236
gguaauauaggaggcagua

SEQ ID NO: 2028811 - RNA, 19 nt, Artificial Sequence
  Description of Artificial Sequence: Synthetic oligonucleotide
  Antisense strand to SEQ ID NO: 2028810
uacugccuccuauauuacc

SEQ ID NO: 2028812 - RNA, 19 nt, Artificial Sequence
  Description of Artificial Sequence: Synthetic oligonucleotide
  Sense strand starting at position 3734 of SEQ ID NO: 1881236
augguagcuccagacaugu

SEQ ID NO: 2028813 - RNA, 19 nt, Artificial Sequence
  Description of Artificial Sequence: Synthetic oligonucleotide
  Antisense strand to SEQ ID NO: 2028812
acaugucuggagcuaccau

SEQ ID NO: 2028814 - RNA, 19 nt, Artificial Sequence
  Description of Artificial Sequence: Synthetic oligonucleotide
  Sense strand starting at position 3809 of SEQ ID NO: 1881236
uaccgaauccgugugcgau

SEQ ID NO: 2028815 - RNA, 19 nt, Artificial Sequence
  Description of Artificial Sequence: Synthetic oligonucleotide
  Antisense strand to SEQ ID NO: 2028814
aucgcacacggauucggua

SEQ ID NO: 2028816 - RNA, 19 nt, Artificial Sequence
  Description of Artificial Sequence: Synthetic oligonucleotide
  Sense strand starting at position 3815 of SEQ ID NO: 1881236
auccgugugcgauuaucca

SEQ ID NO: 2028817 - RNA, 19 nt, Artificial Sequence
  Description of Artificial Sequence: Synthetic oligonucleotide
  Antisense strand to SEQ ID NO: 2028816
uggauaaucgcacacggau

SEQ ID NO: 2028818 - RNA, 19 nt, Artificial Sequence
  Description of Artificial Sequence: Synthetic oligonucleotide
  Sense strand starting at position 3822 of SEQ ID NO: 1881236
ugcgauuauccagaauaag

SEQ ID NO: 2028819 - RNA, 19 nt, Artificial Sequence
  Description of Artificial Sequence: Synthetic oligonucleotide
  Antisense strand to SEQ ID NO: 2028818
cuuauucuggauaaucgca

SEQ ID NO: 2028820 - RNA, 19 nt, Artificial Sequence
  Description of Artificial Sequence: Synthetic oligonucleotide
  Sense strand starting at position 3933 of SEQ ID NO: 1881236
cuaauugcugauggucaaa

SEQ ID NO: 2028821 - RNA, 19 nt, Artificial Sequence
  Description of Artificial Sequence: Synthetic oligonucleotide
  Antisense strand to SEQ ID NO: 2028820
uuugaccaucagcaauuag

SEQ ID NO: 2028822 - RNA, 19 nt, Artificial Sequence
  Description of Artificial Sequence: Synthetic oligonucleotide
  Sense strand starting at position 3935 of SEQ ID NO: 1881236
aauugcugauggucaaaua

SEQ ID NO: 2028823 - RNA, 19 nt, Artificial Sequence
  Description of Artificial Sequence: Synthetic oligonucleotide
  Antisense strand to SEQ ID NO: 2028822
uauuugaccaucagcaauu

SEQ ID NO: 2028824 - RNA, 19 nt, Artificial Sequence
  Description of Artificial Sequence: Synthetic oligonucleotide
  Sense strand starting at position 2 of SEQ ID NO: 1881237
ucgagugaaguuuaccaau

SEQ ID NO: 2028825 - RNA, 19 nt, Artificial Sequence
  Description of Artificial Sequence: Synthetic oligonucleotide
  Antisense strand to SEQ ID NO: 2028824
auugguaaacuucacucga

SEQ ID NO: 2028826 - RNA, 19 nt, Artificial Sequence
  Description of Artificial Sequence: Synthetic oligonucleotide
  Sense strand starting at position 4 of SEQ ID NO: 1881237
gagugaaguuuaccaauaa

SEQ ID NO: 2028827 - RNA, 19 nt, Artificial Sequence
  Description of Artificial Sequence: Synthetic oligonucleotide
  Antisense strand to SEQ ID NO: 2028826
uuauugguaaacuucacuc

SEQ ID NO: 2028828 - RNA, 19 nt, Artificial Sequence
  Description of Artificial Sequence: Synthetic oligonucleotide
  Sense strand starting at position 57 of SEQ ID NO: 1881237
gaaacuguucuuuggaagu

SEQ ID NO: 2028829 - RNA, 19 nt, Artificial Sequence
  Description of Artificial Sequence: Synthetic oligonucleotide
  Antisense strand to SEQ ID NO: 2028828
acuuccaaagaacaguuuc

SEQ ID NO: 2028830 - RNA, 19 nt, Artificial Sequence
  Description of Artificial Sequence: Synthetic oligonucleotide
  Sense strand starting at position 107 of SEQ ID NO: 1881237
auugcuguacauugagaga

SEQ ID NO: 2028831 - RNA, 19 nt, Artificial Sequence
  Description of Artificial Sequence: Synthetic oligonucleotide
  Antisense strand to SEQ ID NO: 2028830
ucucucaauguacagcaau

SEQ ID NO: 2028832 - RNA, 19 nt, Artificial Sequence
  Description of Artificial Sequence: Synthetic oligonucleotide
  Sense strand starting at position 149 of SEQ ID NO: 1881237
cucugaucugucuaugagu

SEQ ID NO: 2028833 - RNA, 19 nt, Artificial Sequence
  Description of Artificial Sequence: Synthetic oligonucleotide
  Antisense strand to SEQ ID NO: 2028832
acucauagacagaucagag

SEQ ID NO: 2028834 - RNA, 19 nt, Artificial Sequence
  Description of Artificial Sequence: Synthetic oligonucleotide
  Sense strand starting at position 158 of SEQ ID NO: 1881237
gucuaugaguuauuaacac

SEQ ID NO: 2028835 - RNA, 19 nt, Artificial Sequence
  Description of Artificial Sequence: Synthetic oligonucleotide
  Antisense strand to SEQ ID NO: 2028834
guguuaauaacucauagac

SEQ ID NO: 2028836 - RNA, 19 nt, Artificial Sequence
  Description of Artificial Sequence: Synthetic oligonucleotide
  Sense strand starting at position 190 of SEQ ID NO: 1881237
aucacuugucauuagguca

SEQ ID NO: 2028837 - RNA, 19 nt, Artificial Sequence
  Description of Artificial Sequence: Synthetic oligonucleotide
  Antisense strand to SEQ ID NO: 2028836
ugaccuaaugacaagugau

SEQ ID NO: 2028838 - RNA, 19 nt, Artificial Sequence
  Description of Artificial Sequence: Synthetic oligonucleotide
  Sense strand starting at position 193 of SEQ ID NO: 1881237
acuugucauuaggucacaa

SEQ ID NO: 2028839 - RNA, 19 nt, Artificial Sequence
  Description of Artificial Sequence: Synthetic oligonucleotide
  Antisense strand to SEQ ID NO: 2028838
uugugaccuaaugacaagu

SEQ ID NO: 2028840 - RNA, 19 nt, Artificial Sequence
  Description of Artificial Sequence: Synthetic oligonucleotide
  Sense strand starting at position 195 of SEQ ID NO: 1881237
uugucauuaggucacaauu

SEQ ID NO: 2028841 - RNA, 19 nt, Artificial Sequence
  Description of Artificial Sequence: Synthetic oligonucleotide
  Antisense strand to SEQ ID NO: 2028840
aauugugaccuaaugacaa

SEQ ID NO: 2028842 - RNA, 19 nt, Artificial Sequence
  Description of Artificial Sequence: Synthetic oligonucleotide
  Sense strand starting at position 205 of SEQ ID NO: 1881237
gucacaauucuugggacua

SEQ ID NO: 2028843 - RNA, 19 nt, Artificial Sequence
  Description of Artificial Sequence: Synthetic oligonucleotide
  Antisense strand to SEQ ID NO: 2028842
uagucccaagaauugugac

SEQ ID NO: 2028844 - RNA, 19 nt, Artificial Sequence
  Description of Artificial Sequence: Synthetic oligonucleotide
  Sense strand starting at position 265 of SEQ ID NO: 1881237
gcauguugaguccaacaug

SEQ ID NO: 2028845 - RNA, 19 nt, Artificial Sequence
  Description of Artificial Sequence: Synthetic oligonucleotide
  Antisense strand to SEQ ID NO: 2028844
cauguuggacucaacaugc

SEQ ID NO: 2028846 - RNA, 19 nt, Artificial Sequence
  Description of Artificial Sequence: Synthetic oligonucleotide
  Sense strand starting at position 965 of SEQ ID NO: 1881237
aaagguuugggcuaccuga

SEQ ID NO: 2028847 - RNA, 19 nt, Artificial Sequence
  Description of Artificial Sequence: Synthetic oligonucleotide
  Antisense strand to SEQ ID NO: 2028846
ucagguagcccaaaccuuu

SEQ ID NO: 2028848 - RNA, 19 nt, Artificial Sequence
  Description of Artificial Sequence: Synthetic oligonucleotide
  Sense strand starting at position 972 of SEQ ID NO: 1881237
ugggcuaccugacuauuau

SEQ ID NO: 2028849 - RNA, 19 nt, Artificial Sequence
  Description of Artificial Sequence: Synthetic oligonucleotide
  Antisense strand to SEQ ID NO: 2028848
auaauagucagguagccca

SEQ ID NO: 2028850 - RNA, 19 nt, Artificial Sequence
  Description of Artificial Sequence: Synthetic oligonucleotide
  Sense strand starting at position 973 of SEQ ID NO: 1881237
gggcuaccugacuauuaug

SEQ ID NO: 2028851 - RNA, 19 nt, Artificial Sequence
  Description of Artificial Sequence: Synthetic oligonucleotide
  Antisense strand to SEQ ID NO: 2028850
cauaauagucagguagccc

SEQ ID NO: 2028852 - RNA, 19 nt, Artificial Sequence
  Description of Artificial Sequence: Synthetic oligonucleotide
  Sense strand starting at position 995 of SEQ ID NO: 1881237
ccaagaaaucucugguaua

SEQ ID NO: 2028853 - RNA, 19 nt, Artificial Sequence
  Description of Artificial Sequence: Synthetic oligonucleotide
  Antisense strand to SEQ ID NO: 2028852
uauaccagagauuucuugg

SEQ ID NO: 2028854 - RNA, 19 nt, Artificial Sequence
  Description of Artificial Sequence: Synthetic oligonucleotide
  Sense strand starting at position 1170 of SEQ ID NO: 1881237
uggauacugacauggcaaa

SEQ ID NO: 2028855 - RNA, 19 nt, Artificial Sequence
  Description of Artificial Sequence: Synthetic oligonucleotide
  Antisense strand to SEQ ID NO: 2028854
uuugccaugucaguaucca

SEQ ID NO: 2028856 - RNA, 19 nt, Artificial Sequence
  Description of Artificial Sequence: Synthetic oligonucleotide
  Sense strand starting at position 1215 of SEQ ID NO: 1881237
gaauguucccaaugagcag

SEQ ID NO: 2028857 - RNA, 19 nt, Artificial Sequence
  Description of Artificial Sequence: Synthetic oligonucleotide
  Antisense strand to SEQ ID NO: 2028856
cugcucauugggaacauuc

SEQ ID NO: 2028858 - RNA, 19 nt, Artificial Sequence
  Description of Artificial Sequence: Synthetic oligonucleotide
  Sense strand starting at position 1265 of SEQ ID NO: 1881237
cuagcaaagaagugauugu

SEQ ID NO: 2028859 - RNA, 19 nt, Artificial Sequence
  Description of Artificial Sequence: Synthetic oligonucleotide
  Antisense strand to SEQ ID NO: 2028858
acaaucacuucuuugcuag

SEQ ID NO: 2028860 - RNA, 19 nt, Artificial Sequence
  Description of Artificial Sequence: Synthetic oligonucleotide
  Sense strand starting at position 1728 of SEQ ID NO: 1881237
uuuaauaugugguccagga

SEQ ID NO: 2028861 - RNA, 19 nt, Artificial Sequence
  Description of Artificial Sequence: Synthetic oligonucleotide
  Antisense strand to SEQ ID NO: 2028860
uccuggaccacauauuaaa

SEQ ID NO: 2028862 - RNA, 19 nt, Artificial Sequence
  Description of Artificial Sequence: Synthetic oligonucleotide
  Sense strand starting at position 1732 of SEQ ID NO: 1881237
auaugugguccaggaacca

SEQ ID NO: 2028863 - RNA, 19 nt, Artificial Sequence
  Description of Artificial Sequence: Synthetic oligonucleotide
  Antisense strand to SEQ ID NO: 2028862
ugguuccuggaccacauau

SEQ ID NO: 2028864 - RNA, 19 nt, Artificial Sequence
  Description of Artificial Sequence: Synthetic oligonucleotide
  Sense strand starting at position 1855 of SEQ ID NO: 1881237
uuaaguuauccagaugugg

SEQ ID NO: 2028865 - RNA, 19 nt, Artificial Sequence
  Description of Artificial Sequence: Synthetic oligonucleotide
  Antisense strand to SEQ ID NO: 2028864
ccacaucuggauaacuuaa

SEQ ID NO: 2028866 - RNA, 19 nt, Artificial Sequence
  Description of Artificial Sequence: Synthetic oligonucleotide
  Sense strand starting at position 1996 of SEQ ID NO: 1881237
ucuaauggauugucucaua

SEQ ID NO: 2028867 - RNA, 19 nt, Artificial Sequence
  Description of Artificial Sequence: Synthetic oligonucleotide
  Antisense strand to SEQ ID NO: 2028866
uaugagacaauccauuaga

SEQ ID NO: 2028868 - RNA, 19 nt, Artificial Sequence
  Description of Artificial Sequence: Synthetic oligonucleotide
  Sense strand starting at position 2156 of SEQ ID NO: 1881237
ucuucuacucuggaguuaa

SEQ ID NO: 2028869 - RNA, 19 nt, Artificial Sequence
  Description of Artificial Sequence: Synthetic oligonucleotide
  Antisense strand to SEQ ID NO: 2028868
uuaacuccagaguagaaga

SEQ ID NO: 2028870 - RNA, 19 nt, Artificial Sequence
  Description of Artificial Sequence: Synthetic oligonucleotide
  Sense strand starting at position 2360 of SEQ ID NO: 1881237
auggaaacucaugguugau

SEQ ID NO: 2028871 - RNA, 19 nt, Artificial Sequence
  Description of Artificial Sequence: Synthetic oligonucleotide
  Antisense strand to SEQ ID NO: 2028870
aucaaccaugaguuuccau

SEQ ID NO: 2028872 - RNA, 19 nt, Artificial Sequence
  Description of Artificial Sequence: Synthetic oligonucleotide
  Sense strand starting at position 2362 of SEQ ID NO: 1881237
ggaaacucaugguugauau

SEQ ID NO: 2028873 - RNA, 19 nt, Artificial Sequence
  Description of Artificial Sequence: Synthetic oligonucleotide
  Antisense strand to SEQ ID NO: 2028872
auaucaaccaugaguuucc

SEQ ID NO: 2028874 - RNA, 19 nt, Artificial Sequence
  Description of Artificial Sequence: Synthetic oligonucleotide
  Sense strand starting at position 2363 of SEQ ID NO: 1881237
gaaacucaugguugauaug

SEQ ID NO: 2028875 - RNA, 19 nt, Artificial Sequence
  Description of Artificial Sequence: Synthetic oligonucleotide
  Antisense strand to SEQ ID NO: 2028874
cauaucaaccaugaguuuc

SEQ ID NO: 2028876 - RNA, 19 nt, Artificial Sequence
  Description of Artificial Sequence: Synthetic oligonucleotide
  Sense strand starting at position 2451 of SEQ ID NO: 1881237
ggcugugcugcuguagaga

SEQ ID NO: 2028877 - RNA, 19 nt, Artificial Sequence
  Description of Artificial Sequence: Synthetic oligonucleotide
  Antisense strand to SEQ ID NO: 2028876
ucucuacagcagcacagcc

SEQ ID NO: 2028878 - RNA, 19 nt, Artificial Sequence
  Description of Artificial Sequence: Synthetic oligonucleotide
  Sense strand starting at position 2611 of SEQ ID NO: 1881237
uguugacgugugcucauua

SEQ ID NO: 2028879 - RNA, 19 nt, Artificial Sequence
  Description of Artificial Sequence: Synthetic oligonucleotide
  Antisense strand to SEQ ID NO: 2028878
uaaugagcacacgucaaca

SEQ ID NO: 2028880 - RNA, 19 nt, Artificial Sequence
  Description of Artificial Sequence: Synthetic oligonucleotide
  Sense strand starting at position 2682 of SEQ ID NO: 1881237
cguuaauuugcugagggca

SEQ ID NO: 2028881 - RNA, 19 nt, Artificial Sequence
  Description of Artificial Sequence: Synthetic oligonucleotide
  Antisense strand to SEQ ID NO: 2028880
ugcccucagcaaauuaacg

SEQ ID NO: 2028882 - RNA, 19 nt, Artificial Sequence
  Description of Artificial Sequence: Synthetic oligonucleotide
  Sense strand starting at position 2783 of SEQ ID NO: 1881237
agaagcugcgaauauguua

SEQ ID NO: 2028883 - RNA, 19 nt, Artificial Sequence
  Description of Artificial Sequence: Synthetic oligonucleotide
  Antisense strand to SEQ ID NO: 2028882
uaacauauucgcagcuucu

SEQ ID NO: 2028884 - RNA, 19 nt, Artificial Sequence
  Description of Artificial Sequence: Synthetic oligonucleotide
  Sense strand starting at position 2863 of SEQ ID NO: 1881237
gaccuugaaucaucugagu

SEQ ID NO: 2028885 - RNA, 19 nt, Artificial Sequence
  Description of Artificial Sequence: Synthetic oligonucleotide
  Antisense strand to SEQ ID NO: 2028884
acucagaugauucaagguc

SEQ ID NO: 2028886 - RNA, 19 nt, Artificial Sequence
  Description of Artificial Sequence: Synthetic oligonucleotide
  Sense strand starting at position 2869 of SEQ ID NO: 1881237
gaaucaucugaguggaccu

SEQ ID NO: 2028887 - RNA, 19 nt, Artificial Sequence
  Description of Artificial Sequence: Synthetic oligonucleotide
  Antisense strand to SEQ ID NO: 2028886
agguccacucagaugauuc

SEQ ID NO: 2028888 - RNA, 19 nt, Artificial Sequence
  Description of Artificial Sequence: Synthetic oligonucleotide
  Sense strand starting at position 3155 of SEQ ID NO: 1881237
accacaggaugauaaauuu

SEQ ID NO: 2028889 - RNA, 19 nt, Artificial Sequence
  Description of Artificial Sequence: Synthetic oligonucleotide
  Antisense strand to SEQ ID NO: 2028888
aaauuuaucauccuguggu

SEQ ID NO: 2028890 - RNA, 19 nt, Artificial Sequence
  Description of Artificial Sequence: Synthetic oligonucleotide
  Sense strand starting at position 3185 of SEQ ID NO: 1881237
agccacugagucugauaau

SEQ ID NO: 2028891 - RNA, 19 nt, Artificial Sequence
  Description of Artificial Sequence: Synthetic oligonucleotide
  Antisense strand to SEQ ID NO: 2028890
auuaucagacucaguggcu

SEQ ID NO: 2028892 - RNA, 19 nt, Artificial Sequence
  Description of Artificial Sequence: Synthetic oligonucleotide
  Sense strand starting at position 3253 of SEQ ID NO: 1881237
cauuauagguggucacaaa

SEQ ID NO: 2028893 - RNA, 19 nt, Artificial Sequence
  Description of Artificial Sequence: Synthetic oligonucleotide
  Antisense strand to SEQ ID NO: 2028892
uuugugaccaccuauaaug

SEQ ID NO: 2028894 - RNA, 19 nt, Artificial Sequence
  Description of Artificial Sequence: Synthetic oligonucleotide
  Sense strand starting at position 3872 of SEQ ID NO: 1881237
agcugaucuugagcaugaa

SEQ ID NO: 2028895 - RNA, 19 nt, Artificial Sequence
  Description of Artificial Sequence: Synthetic oligonucleotide
  Antisense strand to SEQ ID NO: 2028894
uucaugcucaagaucagcu

SEQ ID NO: 2028896 - RNA, 19 nt, Artificial Sequence
  Description of Artificial Sequence: Synthetic oligonucleotide
  Sense strand starting at position 3873 of SEQ ID NO: 1881237
gcugaucuugagcaugaaa

SEQ ID NO: 2028897 - RNA, 19 nt, Artificial Sequence
  Description of Artificial Sequence: Synthetic oligonucleotide
  Antisense strand to SEQ ID NO: 2028896
uuucaugcucaagaucagc

SEQ ID NO: 2028898 - RNA, 19 nt, Artificial Sequence
  Description of Artificial Sequence: Synthetic oligonucleotide
  Sense strand starting at position 3875 of SEQ ID NO: 1881237
ugaucuugagcaugaaagu

SEQ ID NO: 2028899 - RNA, 19 nt, Artificial Sequence
  Description of Artificial Sequence: Synthetic oligonucleotide
  Antisense strand to SEQ ID NO: 2028898
acuuucaugcucaagauca

SEQ ID NO: 2028900 - RNA, 19 nt, Artificial Sequence
  Description of Artificial Sequence: Synthetic oligonucleotide
  Sense strand starting at position 3881 of SEQ ID NO: 1881237
ugagcaugaaagugacuuu

SEQ ID NO: 2028901 - RNA, 19 nt, Artificial Sequence
  Description of Artificial Sequence: Synthetic oligonucleotide
  Antisense strand to SEQ ID NO: 2028900
aaagucacuuucaugcuca

SEQ ID NO: 2028902 - RNA, 19 nt, Artificial Sequence
  Description of Artificial Sequence: Synthetic oligonucleotide
  Sense strand starting at position 3916 of SEQ ID NO: 1881237
aggugcaauccaugaaaga

SEQ ID NO: 2028903 - RNA, 19 nt, Artificial Sequence
  Description of Artificial Sequence: Synthetic oligonucleotide
  Antisense strand to SEQ ID NO: 2028902
ucuuucauggauugcaccu

SEQ ID NO: 2028904 - RNA, 19 nt, Artificial Sequence
  Description of Artificial Sequence: Synthetic oligonucleotide
  Sense strand starting at position 542 of SEQ ID NO: 1881238
gucuucuucucuucuagua

SEQ ID NO: 2028905 - RNA, 19 nt, Artificial Sequence
  Description of Artificial Sequence: Synthetic oligonucleotide
  Antisense strand to SEQ ID NO: 2028904
uacuagaagagaagaagac

SEQ ID NO: 2028906 - RNA, 19 nt, Artificial Sequence
  Description of Artificial Sequence: Synthetic oligonucleotide
  Sense strand starting at position 554 of SEQ ID NO: 1881238
ucuaguaguuucuucguga

SEQ ID NO: 2028907 - RNA, 19 nt, Artificial Sequence
  Description of Artificial Sequence: Synthetic oligonucleotide
  Antisense strand to SEQ ID NO: 2028906
ucacgaagaaacuacuaga

SEQ ID NO: 2028908 - RNA, 19 nt, Artificial Sequence
  Description of Artificial Sequence: Synthetic oligonucleotide
  Sense strand starting at position 555 of SEQ ID NO: 1881238
cuaguaguuucuucgugaa

SEQ ID NO: 2028909 - RNA, 19 nt, Artificial Sequence
  Description of Artificial Sequence: Synthetic oligonucleotide
  Antisense strand to SEQ ID NO: 2028908
uucacgaagaaacuacuag

SEQ ID NO: 2028910 - RNA, 19 nt, Artificial Sequence
  Description of Artificial Sequence: Synthetic oligonucleotide
  Sense strand starting at position 557 of SEQ ID NO: 1881238
aguaguuucuucgugaaga

SEQ ID NO: 2028911 - RNA, 19 nt, Artificial Sequence
  Description of Artificial Sequence: Synthetic oligonucleotide
  Antisense strand to SEQ ID NO: 2028910
ucuucacgaagaaacuacu

SEQ ID NO: 2028912 - RNA, 19 nt, Artificial Sequence
  Description of Artificial Sequence: Synthetic oligonucleotide
  Sense strand starting at position 559 of SEQ ID NO: 1881238
uaguuucuucgugaagagg

SEQ ID NO: 2028913 - RNA, 19 nt, Artificial Sequence
  Description of Artificial Sequence: Synthetic oligonucleotide
  Antisense strand to SEQ ID NO: 2028912
ccucuucacgaagaaacua

SEQ ID NO: 2028914 - RNA, 19 nt, Artificial Sequence
  Description of Artificial Sequence: Synthetic oligonucleotide
  Sense strand starting at position 640 of SEQ ID NO: 1881238
uaauuugucugggaaucau

SEQ ID NO: 2028915 - RNA, 19 nt, Artificial Sequence
  Description of Artificial Sequence: Synthetic oligonucleotide
  Antisense strand to SEQ ID NO: 2028914
augauucccagacaaauua

SEQ ID NO: 2028916 - RNA, 19 nt, Artificial Sequence
  Description of Artificial Sequence: Synthetic oligonucleotide
  Sense strand starting at position 649 of SEQ ID NO: 1881238
ugggaaucauugucuugau

SEQ ID NO: 2028917 - RNA, 19 nt, Artificial Sequence
  Description of Artificial Sequence: Synthetic oligonucleotide
  Antisense strand to SEQ ID NO: 2028916
aucaagacaaugauuccca

SEQ ID NO: 2028918 - RNA, 19 nt, Artificial Sequence
  Description of Artificial Sequence: Synthetic oligonucleotide
  Sense strand starting at position 650 of SEQ ID NO: 1881238
gggaaucauugucuugauu

SEQ ID NO: 2028919 - RNA, 19 nt, Artificial Sequence
  Description of Artificial Sequence: Synthetic oligonucleotide
  Antisense strand to SEQ ID NO: 2028918
aaucaagacaaugauuccc

SEQ ID NO: 2028920 - RNA, 19 nt, Artificial Sequence
  Description of Artificial Sequence: Synthetic oligonucleotide
  Sense strand starting at position 952 of SEQ ID NO: 1881238
uauucuggaugaggauaau

SEQ ID NO: 2028921 - RNA, 19 nt, Artificial Sequence
  Description of Artificial Sequence: Synthetic oligonucleotide
  Antisense strand to SEQ ID NO: 2028920
auuauccucauccagaaua

SEQ ID NO: 2028922 - RNA, 19 nt, Artificial Sequence
  Description of Artificial Sequence: Synthetic oligonucleotide
  Sense strand starting at position 961 of SEQ ID NO: 1881238
ugaggauaauguuuaauug

SEQ ID NO: 2028923 - RNA, 19 nt, Artificial Sequence
  Description of Artificial Sequence: Synthetic oligonucleotide
  Antisense strand to SEQ ID NO: 2028922
caauuaaacauuauccuca

SEQ ID NO: 2028924 - RNA, 19 nt, Artificial Sequence
  Description of Artificial Sequence: Synthetic oligonucleotide
  Sense strand starting at position 968 of SEQ ID NO: 1881238
aauguuuaauugguagacu

SEQ ID NO: 2028925 - RNA, 19 nt, Artificial Sequence
  Description of Artificial Sequence: Synthetic oligonucleotide
  Antisense strand to SEQ ID NO: 2028924
agucuaccaauuaaacauu

SEQ ID NO: 2028926 - RNA, 19 nt, Artificial Sequence
  Description of Artificial Sequence: Synthetic oligonucleotide
  Sense strand starting at position 1430 of SEQ ID NO: 1881238
cuguguguagcauagagaa

SEQ ID NO: 2028927 - RNA, 19 nt, Artificial Sequence
  Description of Artificial Sequence: Synthetic oligonucleotide
  Antisense strand to SEQ ID NO: 2028926
uucucuaugcuacacacag

SEQ ID NO: 2028928 - RNA, 19 nt, Artificial Sequence
  Description of Artificial Sequence: Synthetic oligonucleotide
  Sense strand starting at position 1432 of SEQ ID NO: 1881238
guguguagcauagagaauc

SEQ ID NO: 2028929 - RNA, 19 nt, Artificial Sequence
  Description of Artificial Sequence: Synthetic oligonucleotide
  Antisense strand to SEQ ID NO: 2028928
gauucucuaugcuacacac

SEQ ID NO: 2028930 - RNA, 19 nt, Artificial Sequence
  Description of Artificial Sequence: Synthetic oligonucleotide
  Sense strand starting at position 1759 of SEQ ID NO: 1881238
cuguuauucuagccaagaa

SEQ ID NO: 2028931 - RNA, 19 nt, Artificial Sequence
  Description of Artificial Sequence: Synthetic oligonucleotide
  Antisense strand to SEQ ID NO: 2028930
uucuuggcuagaauaacag

SEQ ID NO: 2028932 - RNA, 19 nt, Artificial Sequence
  Description of Artificial Sequence: Synthetic oligonucleotide
  Sense strand starting at position 2104 of SEQ ID NO: 1881238
uuagcauguggagacuuua

SEQ ID NO: 2028933 - RNA, 19 nt, Artificial Sequence
  Description of Artificial Sequence: Synthetic oligonucleotide
  Antisense strand to SEQ ID NO: 2028932
uaaagucuccacaugcuaa

SEQ ID NO: 2028934 - RNA, 19 nt, Artificial Sequence
  Description of Artificial Sequence: Synthetic oligonucleotide
  Sense strand starting at position 2114 of SEQ ID NO: 1881238
gagacuuuagcaugauuau

SEQ ID NO: 2028935 - RNA, 19 nt, Artificial Sequence
  Description of Artificial Sequence: Synthetic oligonucleotide
  Antisense strand to SEQ ID NO: 2028934
auaaucaugcuaaagucuc

SEQ ID NO: 2028936 - RNA, 19 nt, Artificial Sequence
  Description of Artificial Sequence: Synthetic oligonucleotide
  Sense strand starting at position 2117 of SEQ ID NO: 1881238
acuuuagcaugauuauaug

SEQ ID NO: 2028937 - RNA, 19 nt, Artificial Sequence
  Description of Artificial Sequence: Synthetic oligonucleotide
  Antisense strand to SEQ ID NO: 2028936
cauauaaucaugcuaaagu

SEQ ID NO: 2028938 - RNA, 19 nt, Artificial Sequence
  Description of Artificial Sequence: Synthetic oligonucleotide
  Sense strand starting at position 2450 of SEQ ID NO: 1881238
uagcaaauaugguucggaa

SEQ ID NO: 2028939 - RNA, 19 nt, Artificial Sequence
  Description of Artificial Sequence: Synthetic oligonucleotide
  Antisense strand to SEQ ID NO: 2028938
uuccgaaccauauuugcua

SEQ ID NO: 2028940 - RNA, 19 nt, Artificial Sequence
  Description of Artificial Sequence: Synthetic oligonucleotide
  Sense strand starting at position 2452 of SEQ ID NO: 1881238
gcaaauaugguucggaauu

SEQ ID NO: 2028941 - RNA, 19 nt, Artificial Sequence
  Description of Artificial Sequence: Synthetic oligonucleotide
  Antisense strand to SEQ ID NO: 2028940
aauuccgaaccauauuugc

SEQ ID NO: 2028942 - RNA, 19 nt, Artificial Sequence
  Description of Artificial Sequence: Synthetic oligonucleotide
  Sense strand starting at position 2453 of SEQ ID NO: 1881238
caaauaugguucggaauuu

SEQ ID NO: 2028943 - RNA, 19 nt, Artificial Sequence
  Description of Artificial Sequence: Synthetic oligonucleotide
  Antisense strand to SEQ ID NO: 2028942
aaauuccgaaccauauuug

SEQ ID NO: 2028944 - RNA, 19 nt, Artificial Sequence
  Description of Artificial Sequence: Synthetic oligonucleotide
  Sense strand starting at position 2454 of SEQ ID NO: 1881238
aaauaugguucggaauuua

SEQ ID NO: 2028945 - RNA, 19 nt, Artificial Sequence
  Description of Artificial Sequence: Synthetic oligonucleotide
  Antisense strand to SEQ ID NO: 2028944
uaaauuccgaaccauauuu

SEQ ID NO: 2028946 - RNA, 19 nt, Artificial Sequence
  Description of Artificial Sequence: Synthetic oligonucleotide
  Sense strand starting at position 2465 of SEQ ID NO: 1881238
ggaauuuauuuguaaugcu

SEQ ID NO: 2028947 - RNA, 19 nt, Artificial Sequence
  Description of Artificial Sequence: Synthetic oligonucleotide
  Antisense strand to SEQ ID NO: 2028946
agcauuacaaauaaauucc

SEQ ID NO: 2028948 - RNA, 19 nt, Artificial Sequence
  Description of Artificial Sequence: Synthetic oligonucleotide
  Sense strand starting at position 2667 of SEQ ID NO: 1881238
gaaagaguuuaggagcaca

SEQ ID NO: 2028949 - RNA, 19 nt, Artificial Sequence
  Description of Artificial Sequence: Synthetic oligonucleotide
  Antisense strand to SEQ ID NO: 2028948
ugugcuccuaaacucuuuc

SEQ ID NO: 2028950 - RNA, 19 nt, Artificial Sequence
  Description of Artificial Sequence: Synthetic oligonucleotide
  Sense strand starting at position 2756 of SEQ ID NO: 1881238
agagaagucuagagggaug

SEQ ID NO: 2028951 - RNA, 19 nt, Artificial Sequence
  Description of Artificial Sequence: Synthetic oligonucleotide
  Antisense strand to SEQ ID NO: 2028950
caucccucuagacuucucu

SEQ ID NO: 2028952 - RNA, 19 nt, Artificial Sequence
  Description of Artificial Sequence: Synthetic oligonucleotide
  Sense strand starting at position 2841 of SEQ ID NO: 1881238
agagcuuuacaaugauuau

SEQ ID NO: 2028953 - RNA, 19 nt, Artificial Sequence
  Description of Artificial Sequence: Synthetic oligonucleotide
  Antisense strand to SEQ ID NO: 2028952
auaaucauuguaaagcucu

SEQ ID NO: 2028954 - RNA, 19 nt, Artificial Sequence
  Description of Artificial Sequence: Synthetic oligonucleotide
  Sense strand starting at position 2844 of SEQ ID NO: 1881238
gcuuuacaaugauuaugaa

SEQ ID NO: 2028955 - RNA, 19 nt, Artificial Sequence
  Description of Artificial Sequence: Synthetic oligonucleotide
  Antisense strand to SEQ ID NO: 2028954
uucauaaucauuguaaagc

SEQ ID NO: 2028956 - RNA, 19 nt, Artificial Sequence
  Description of Artificial Sequence: Synthetic oligonucleotide
  Sense strand starting at position 2927 of SEQ ID NO: 1881238
gguggauaucugcacauug

SEQ ID NO: 2028957 - RNA, 19 nt, Artificial Sequence
  Description of Artificial Sequence: Synthetic oligonucleotide
  Antisense strand to SEQ ID NO: 2028956
caaugugcagauauccacc

SEQ ID NO: 2028958 - RNA, 19 nt, Artificial Sequence
  Description of Artificial Sequence: Synthetic oligonucleotide
  Sense strand starting at position 2929 of SEQ ID NO: 1881238
uggauaucugcacauugau

SEQ ID NO: 2028959 - RNA, 19 nt, Artificial Sequence
  Description of Artificial Sequence: Synthetic oligonucleotide
  Antisense strand to SEQ ID NO: 2028958
aucaaugugcagauaucca

SEQ ID NO: 2028960 - RNA, 19 nt, Artificial Sequence
  Description of Artificial Sequence: Synthetic oligonucleotide
  Sense strand starting at position 3059 of SEQ ID NO: 1881238
uuuggaccaucuguacaaa

SEQ ID NO: 2028961 - RNA, 19 nt, Artificial Sequence
  Description of Artificial Sequence: Synthetic oligonucleotide
  Antisense strand to SEQ ID NO: 2028960
uuuguacagaugguccaaa

SEQ ID NO: 2028962 - RNA, 19 nt, Artificial Sequence
  Description of Artificial Sequence: Synthetic oligonucleotide
  Sense strand starting at position 3119 of SEQ ID NO: 1881238
gucacagaaauguguccau

SEQ ID NO: 2028963 - RNA, 19 nt, Artificial Sequence
  Description of Artificial Sequence: Synthetic oligonucleotide
  Antisense strand to SEQ ID NO: 2028962
auggacacauuucugugac

SEQ ID NO: 2028964 - RNA, 19 nt, Artificial Sequence
  Description of Artificial Sequence: Synthetic oligonucleotide
  Sense strand starting at position 3123 of SEQ ID NO: 1881238
cagaaauguguccauuggu

SEQ ID NO: 2028965 - RNA, 19 nt, Artificial Sequence
  Description of Artificial Sequence: Synthetic oligonucleotide
  Antisense strand to SEQ ID NO: 2028964
accaauggacacauuucug

SEQ ID NO: 2028966 - RNA, 19 nt, Artificial Sequence
  Description of Artificial Sequence: Synthetic oligonucleotide
  Sense strand starting at position 3126 of SEQ ID NO: 1881238
aaauguguccauuggugaa

SEQ ID NO: 2028967 - RNA, 19 nt, Artificial Sequence
  Description of Artificial Sequence: Synthetic oligonucleotide
  Antisense strand to SEQ ID NO: 2028966
uucaccaauggacacauuu

SEQ ID NO: 2028968 - RNA, 19 nt, Artificial Sequence
  Description of Artificial Sequence: Synthetic oligonucleotide
  Sense strand starting at position 3163 of SEQ ID NO: 1881238
uuuggaggauuguucugua

SEQ ID NO: 2028969 - RNA, 19 nt, Artificial Sequence
  Description of Artificial Sequence: Synthetic oligonucleotide
  Antisense strand to SEQ ID NO: 2028968
uacagaacaauccuccaaa

SEQ ID NO: 2028970 - RNA, 19 nt, Artificial Sequence
  Description of Artificial Sequence: Synthetic oligonucleotide
  Sense strand starting at position 3167 of SEQ ID NO: 1881238
gaggauuguucuguauucu

SEQ ID NO: 2028971 - RNA, 19 nt, Artificial Sequence
  Description of Artificial Sequence: Synthetic oligonucleotide
  Antisense strand to SEQ ID NO: 2028970
agaauacagaacaauccuc

SEQ ID NO: 2028972 - RNA, 19 nt, Artificial Sequence
  Description of Artificial Sequence: Synthetic oligonucleotide
  Sense strand starting at position 3168 of SEQ ID NO: 1881238
aggauuguucuguauucua

SEQ ID NO: 2028973 - RNA, 19 nt, Artificial Sequence
  Description of Artificial Sequence: Synthetic oligonucleotide
  Antisense strand to SEQ ID NO: 2028972
uagaauacagaacaauccu

SEQ ID NO: 2028974 - RNA, 19 nt, Artificial Sequence
  Description of Artificial Sequence: Synthetic oligonucleotide
  Sense strand starting at position 3368 of SEQ ID NO: 1881238
agacuucuagccuggguca

SEQ ID NO: 2028975 - RNA, 19 nt, Artificial Sequence
  Description of Artificial Sequence: Synthetic oligonucleotide
  Antisense strand to SEQ ID NO: 2028974
ugacccaggcuagaagucu

SEQ ID NO: 2028976 - RNA, 19 nt, Artificial Sequence
  Description of Artificial Sequence: Synthetic oligonucleotide
  Sense strand starting at position 3369 of SEQ ID NO: 1881238
gacuucuagccugggucau

SEQ ID NO: 2028977 - RNA, 19 nt, Artificial Sequence
  Description of Artificial Sequence: Synthetic oligonucleotide
  Antisense strand to SEQ ID NO: 2028976
augacccaggcuagaaguc

SEQ ID NO: 2028978 - RNA, 19 nt, Artificial Sequence
  Description of Artificial Sequence: Synthetic oligonucleotide
  Sense strand starting at position 3370 of SEQ ID NO: 1881238
acuucuagccugggucauu

SEQ ID NO: 2028979 - RNA, 19 nt, Artificial Sequence
  Description of Artificial Sequence: Synthetic oligonucleotide
  Antisense strand to SEQ ID NO: 2028978
aaugacccaggcuagaagu

SEQ ID NO: 2028980 - RNA, 19 nt, Artificial Sequence
  Description of Artificial Sequence: Synthetic oligonucleotide
  Sense strand starting at position 3859 of SEQ ID NO: 1881238
agccaagacuuggaauauu

SEQ ID NO: 2028981 - RNA, 19 nt, Artificial Sequence
  Description of Artificial Sequence: Synthetic oligonucleotide
  Antisense strand to SEQ ID NO: 2028980
aauauuccaagucuuggcu

SEQ ID NO: 2028982 - RNA, 19 nt, Artificial Sequence
  Description of Artificial Sequence: Synthetic oligonucleotide
  Sense strand starting at position 3923 of SEQ ID NO: 1881238
gaugaaauggugcagccau

SEQ ID NO: 2028983 - RNA, 19 nt, Artificial Sequence
  Description of Artificial Sequence: Synthetic oligonucleotide
  Antisense strand to SEQ ID NO: 2028982
auggcugcaccauuucauc

SEQ ID NO: 2028984 - RNA, 19 nt, Artificial Sequence
  Description of Artificial Sequence: Synthetic oligonucleotide
  Sense strand starting at position 13 of SEQ ID NO: 1881239
auuguauaagaaugcuaug

SEQ ID NO: 2028985 - RNA, 19 nt, Artificial Sequence
  Description of Artificial Sequence: Synthetic oligonucleotide
  Antisense strand to SEQ ID NO: 2028984
cauagcauucuuauacaau

SEQ ID NO: 2028986 - RNA, 19 nt, Artificial Sequence
  Description of Artificial Sequence: Synthetic oligonucleotide
  Sense strand starting at position 479 of SEQ ID NO: 1881239
agaugaauuugguaaacuu

SEQ ID NO: 2028987 - RNA, 19 nt, Artificial Sequence
  Description of Artificial Sequence: Synthetic oligonucleotide
  Antisense strand to SEQ ID NO: 2028986
aaguuuaccaaauucaucu

SEQ ID NO: 2028988 - RNA, 19 nt, Artificial Sequence
  Description of Artificial Sequence: Synthetic oligonucleotide
  Sense strand starting at position 640 of SEQ ID NO: 1881239
gucaaauuagugcagauug

SEQ ID NO: 2028989 - RNA, 19 nt, Artificial Sequence
  Description of Artificial Sequence: Synthetic oligonucleotide
  Antisense strand to SEQ ID NO: 2028988
caaucugcacuaauuugac

SEQ ID NO: 2028990 - RNA, 19 nt, Artificial Sequence
  Description of Artificial Sequence: Synthetic oligonucleotide
  Sense strand starting at position 642 of SEQ ID NO: 1881239
caaauuagugcagauugua

SEQ ID NO: 2028991 - RNA, 19 nt, Artificial Sequence
  Description of Artificial Sequence: Synthetic oligonucleotide
  Antisense strand to SEQ ID NO: 2028990
uacaaucugcacuaauuug

SEQ ID NO: 2028992 - RNA, 19 nt, Artificial Sequence
  Description of Artificial Sequence: Synthetic oligonucleotide
  Sense strand starting at position 650 of SEQ ID NO: 1881239
ugcagauuguaggucauuu

SEQ ID NO: 2028993 - RNA, 19 nt, Artificial Sequence
  Description of Artificial Sequence: Synthetic oligonucleotide
  Antisense strand to SEQ ID NO: 2028992
aaaugaccuacaaucugca

SEQ ID NO: 2028994 - RNA, 19 nt, Artificial Sequence
  Description of Artificial Sequence: Synthetic oligonucleotide
  Sense strand starting at position 654 of SEQ ID NO: 1881239
gauuguaggucauuucugu

SEQ ID NO: 2028995 - RNA, 19 nt, Artificial Sequence
  Description of Artificial Sequence: Synthetic oligonucleotide
  Antisense strand to SEQ ID NO: 2028994
acagaaaugaccuacaauc

SEQ ID NO: 2028996 - RNA, 19 nt, Artificial Sequence
  Description of Artificial Sequence: Synthetic oligonucleotide
  Sense strand starting at position 694 of SEQ ID NO: 1881239
acagcacuucuuuagaaug

SEQ ID NO: 2028997 - RNA, 19 nt, Artificial Sequence
  Description of Artificial Sequence: Synthetic oligonucleotide
  Antisense strand to SEQ ID NO: 2028996
cauucuaaagaagugcugu

SEQ ID NO: 2028998 - RNA, 19 nt, Artificial Sequence
  Description of Artificial Sequence: Synthetic oligonucleotide
  Sense strand starting at position 836 of SEQ ID NO: 1881239
gggaaauguccuugauuaa

SEQ ID NO: 2028999 - RNA, 19 nt, Artificial Sequence
  Description of Artificial Sequence: Synthetic oligonucleotide
  Antisense strand to SEQ ID NO: 2028998
uuaaucaaggacauuuccc

SEQ ID NO: 2029000 - RNA, 19 nt, Artificial Sequence
  Description of Artificial Sequence: Synthetic oligonucleotide
  Sense strand starting at position 1087 of SEQ ID NO: 1881239
ucagaauucuuguugagaa

SEQ ID NO: 2029001 - RNA, 19 nt, Artificial Sequence
  Description of Artificial Sequence: Synthetic oligonucleotide
  Antisense strand to SEQ ID NO: 2029000
uucucaacaagaauucuga

SEQ ID NO: 2029002 - RNA, 19 nt, Artificial Sequence
  Description of Artificial Sequence: Synthetic oligonucleotide
  Sense strand starting at position 1272 of SEQ ID NO: 1881239
auuaauuaucagcaaaggu

SEQ ID NO: 2029003 - RNA, 19 nt, Artificial Sequence
  Description of Artificial Sequence: Synthetic oligonucleotide
  Antisense strand to SEQ ID NO: 2029002
accuuugcugauaauuaau

SEQ ID NO: 2029004 - RNA, 19 nt, Artificial Sequence
  Description of Artificial Sequence: Synthetic oligonucleotide
  Sense strand starting at position 1288 of SEQ ID NO: 1881239
gguacaaaguaugcaauaa

SEQ ID NO: 2029005 - RNA, 19 nt, Artificial Sequence
  Description of Artificial Sequence: Synthetic oligonucleotide
  Antisense strand to SEQ ID NO: 2029004
uuauugcauacuuuguacc

SEQ ID NO: 2029006 - RNA, 19 nt, Artificial Sequence
  Description of Artificial Sequence: Synthetic oligonucleotide
  Sense strand starting at position 1418 of SEQ ID NO: 1881239
gcagauugcuaacuagaga

SEQ ID NO: 2029007 - RNA, 19 nt, Artificial Sequence
  Description of Artificial Sequence: Synthetic oligonucleotide
  Antisense strand to SEQ ID NO: 2029006
ucucuaguuagcaaucugc

SEQ ID NO: 2029008 - RNA, 19 nt, Artificial Sequence
  Description of Artificial Sequence: Synthetic oligonucleotide
  Sense strand starting at position 1571 of SEQ ID NO: 1881239
ccauccauuucuguuaguu

SEQ ID NO: 2029009 - RNA, 19 nt, Artificial Sequence
  Description of Artificial Sequence: Synthetic oligonucleotide
  Antisense strand to SEQ ID NO: 2029008
aacuaacagaaauggaugg

SEQ ID NO: 2029010 - RNA, 19 nt, Artificial Sequence
  Description of Artificial Sequence: Synthetic oligonucleotide
  Sense strand starting at position 1583 of SEQ ID NO: 1881239
guuaguuaccaaggaacua

SEQ ID NO: 2029011 - RNA, 19 nt, Artificial Sequence
  Description of Artificial Sequence: Synthetic oligonucleotide
  Antisense strand to SEQ ID NO: 2029010
uaguuccuugguaacuaac

SEQ ID NO: 2029012 - RNA, 19 nt, Artificial Sequence
  Description of Artificial Sequence: Synthetic oligonucleotide
  Sense strand starting at position 1656 of SEQ ID NO: 1881239
guauaccuugaaggaguaa

SEQ ID NO: 2029013 - RNA, 19 nt, Artificial Sequence
  Description of Artificial Sequence: Synthetic oligonucleotide
  Antisense strand to SEQ ID NO: 2029012
uuacuccuucaagguauac

SEQ ID NO: 2029014 - RNA, 19 nt, Artificial Sequence
  Description of Artificial Sequence: Synthetic oligonucleotide
  Sense strand starting at position 1860 of SEQ ID NO: 1881239
cuggaaguccugcauaaac

SEQ ID NO: 2029015 - RNA, 19 nt, Artificial Sequence
  Description of Artificial Sequence: Synthetic oligonucleotide
  Antisense strand to SEQ ID NO: 2029014
guuuaugcaggacuuccag

SEQ ID NO: 2029016 - RNA, 19 nt, Artificial Sequence
  Description of Artificial Sequence: Synthetic oligonucleotide
  Sense strand starting at position 1862 of SEQ ID NO: 1881239
ggaaguccugcauaaacau

SEQ ID NO: 2029017 - RNA, 19 nt, Artificial Sequence
  Description of Artificial Sequence: Synthetic oligonucleotide
  Antisense strand to SEQ ID NO: 2029016
auguuuaugcaggacuucc

SEQ ID NO: 2029018 - RNA, 19 nt, Artificial Sequence
  Description of Artificial Sequence: Synthetic oligonucleotide
  Sense strand starting at position 1884 of SEQ ID NO: 1881239
ugguauucccucuaaauug

SEQ ID NO: 2029019 - RNA, 19 nt, Artificial Sequence
  Description of Artificial Sequence: Synthetic oligonucleotide
  Antisense strand to SEQ ID NO: 2029018
caauuuagagggaauacca

SEQ ID NO: 2029020 - RNA, 19 nt, Artificial Sequence
  Description of Artificial Sequence: Synthetic oligonucleotide
  Sense strand starting at position 1994 of SEQ ID NO: 1881239
gcacaucuggcagaucuaa

SEQ ID NO: 2029021 - RNA, 19 nt, Artificial Sequence
  Description of Artificial Sequence: Synthetic oligonucleotide
  Antisense strand to SEQ ID NO: 2029020
uuagaucugccagaugugc

SEQ ID NO: 2029022 - RNA, 19 nt, Artificial Sequence
  Description of Artificial Sequence: Synthetic oligonucleotide
  Sense strand starting at position 2018 of SEQ ID NO: 1881239
gucugaagucaggacaguu

SEQ ID NO: 2029023 - RNA, 19 nt, Artificial Sequence
  Description of Artificial Sequence: Synthetic oligonucleotide
  Antisense strand to SEQ ID NO: 2029022
aacuguccugacuucagac

SEQ ID NO: 2029024 - RNA, 19 nt, Artificial Sequence
  Description of Artificial Sequence: Synthetic oligonucleotide
  Sense strand starting at position 2035 of SEQ ID NO: 1881239
uuagcuagaaggugauaaa

SEQ ID NO: 2029025 - RNA, 19 nt, Artificial Sequence
  Description of Artificial Sequence: Synthetic oligonucleotide
  Antisense strand to SEQ ID NO: 2029024
uuuaucaccuucuagcuaa

SEQ ID NO: 2029026 - RNA, 19 nt, Artificial Sequence
  Description of Artificial Sequence: Synthetic oligonucleotide
  Sense strand starting at position 2166 of SEQ ID NO: 1881239
uuaucuguacuguauccaa

SEQ ID NO: 2029027 - RNA, 19 nt, Artificial Sequence
  Description of Artificial Sequence: Synthetic oligonucleotide
  Antisense strand to SEQ ID NO: 2029026
uuggauacaguacagauaa

SEQ ID NO: 2029028 - RNA, 19 nt, Artificial Sequence
  Description of Artificial Sequence: Synthetic oligonucleotide
  Sense strand starting at position 2312 of SEQ ID NO: 1881239
ccaaucguucuggacuuaa

SEQ ID NO: 2029029 - RNA, 19 nt, Artificial Sequence
  Description of Artificial Sequence: Synthetic oligonucleotide
  Antisense strand to SEQ ID NO: 2029028
uuaaguccagaacgauugg

SEQ ID NO: 2029030 - RNA, 19 nt, Artificial Sequence
  Description of Artificial Sequence: Synthetic oligonucleotide
  Sense strand starting at position 2560 of SEQ ID NO: 1881239
uucuaaagucuugaguaau

SEQ ID NO: 2029031 - RNA, 19 nt, Artificial Sequence
  Description of Artificial Sequence: Synthetic oligonucleotide
  Antisense strand to SEQ ID NO: 2029030
auuacucaagacuuuagaa

SEQ ID NO: 2029032 - RNA, 19 nt, Artificial Sequence
  Description of Artificial Sequence: Synthetic oligonucleotide
  Sense strand starting at position 2657 of SEQ ID NO: 1881239
ccauguuggcaugauacuu

SEQ ID NO: 2029033 - RNA, 19 nt, Artificial Sequence
  Description of Artificial Sequence: Synthetic oligonucleotide
  Antisense strand to SEQ ID NO: 2029032
aaguaucaugccaacaugg

SEQ ID NO: 2029034 - RNA, 19 nt, Artificial Sequence
  Description of Artificial Sequence: Synthetic oligonucleotide
  Sense strand starting at position 2733 of SEQ ID NO: 1881239
agagucauagcauagcaga

SEQ ID NO: 2029035 - RNA, 19 nt, Artificial Sequence
  Description of Artificial Sequence: Synthetic oligonucleotide
  Antisense strand to SEQ ID NO: 2029034
ucugcuaugcuaugacucu

SEQ ID NO: 2029036 - RNA, 19 nt, Artificial Sequence
  Description of Artificial Sequence: Synthetic oligonucleotide
  Sense strand starting at position 2833 of SEQ ID NO: 1881239
uuaaccugaguuuggaaau

SEQ ID NO: 2029037 - RNA, 19 nt, Artificial Sequence
  Description of Artificial Sequence: Synthetic oligonucleotide
  Antisense strand to SEQ ID NO: 2029036
auuuccaaacucagguuaa

SEQ ID NO: 2029038 - RNA, 19 nt, Artificial Sequence
  Description of Artificial Sequence: Synthetic oligonucleotide
  Sense strand starting at position 2839 of SEQ ID NO: 1881239
ugaguuuggaaaugcauca

SEQ ID NO: 2029039 - RNA, 19 nt, Artificial Sequence
  Description of Artificial Sequence: Synthetic oligonucleotide
  Antisense strand to SEQ ID NO: 2029038
ugaugcauuuccaaacuca

SEQ ID NO: 2029040 - RNA, 19 nt, Artificial Sequence
  Description of Artificial Sequence: Synthetic oligonucleotide
  Sense strand starting at position 3305 of SEQ ID NO: 1881239
uuuacaaggucauuggauu

SEQ ID NO: 2029041 - RNA, 19 nt, Artificial Sequence
  Description of Artificial Sequence: Synthetic oligonucleotide
  Antisense strand to SEQ ID NO: 2029040
aauccaaugaccuuguaaa

SEQ ID NO: 2029042 - RNA, 19 nt, Artificial Sequence
  Description of Artificial Sequence: Synthetic oligonucleotide
  Sense strand starting at position 3346 of SEQ ID NO: 1881239
uuaauuuccgaguggcacu

SEQ ID NO: 2029043 - RNA, 19 nt, Artificial Sequence
  Description of Artificial Sequence: Synthetic oligonucleotide
  Antisense strand to SEQ ID NO: 2029042
agugccacucggaaauuaa

SEQ ID NO: 2029044 - RNA, 19 nt, Artificial Sequence
  Description of Artificial Sequence: Synthetic oligonucleotide
  Sense strand starting at position 3371 of SEQ ID NO: 1881239
acauuaacuucuuugugga

SEQ ID NO: 2029045 - RNA, 19 nt, Artificial Sequence
  Description of Artificial Sequence: Synthetic oligonucleotide
  Antisense strand to SEQ ID NO: 2029044
uccacaaagaaguuaaugu

SEQ ID NO: 2029046 - RNA, 19 nt, Artificial Sequence
  Description of Artificial Sequence: Synthetic oligonucleotide
  Sense strand starting at position 3373 of SEQ ID NO: 1881239
auuaacuucuuuguggaaa

SEQ ID NO: 2029047 - RNA, 19 nt, Artificial Sequence
  Description of Artificial Sequence: Synthetic oligonucleotide
  Antisense strand to SEQ ID NO: 2029046
uuuccacaaagaaguuaau

SEQ ID NO: 2029048 - RNA, 19 nt, Artificial Sequence
  Description of Artificial Sequence: Synthetic oligonucleotide
  Sense strand starting at position 3376 of SEQ ID NO: 1881239
aacuucuuuguggaaaguu

SEQ ID NO: 2029049 - RNA, 19 nt, Artificial Sequence
  Description of Artificial Sequence: Synthetic oligonucleotide
  Antisense strand to SEQ ID NO: 2029048
aacuuuccacaaagaaguu

SEQ ID NO: 2029050 - RNA, 19 nt, Artificial Sequence
  Description of Artificial Sequence: Synthetic oligonucleotide
  Sense strand starting at position 3421 of SEQ ID NO: 1881239
gggcaugggccacauaaua

SEQ ID NO: 2029051 - RNA, 19 nt, Artificial Sequence
  Description of Artificial Sequence: Synthetic oligonucleotide
  Antisense strand to SEQ ID NO: 2029050
uauuauguggcccaugccc

SEQ ID NO: 2029052 - RNA, 19 nt, Artificial Sequence
  Description of Artificial Sequence: Synthetic oligonucleotide
  Sense strand starting at position 3520 of SEQ ID NO: 1881239
uuuccaagugggcaauuaa

SEQ ID NO: 2029053 - RNA, 19 nt, Artificial Sequence
  Description of Artificial Sequence: Synthetic oligonucleotide
  Antisense strand to SEQ ID NO: 2029052
uuaauugcccacuuggaaa

SEQ ID NO: 2029054 - RNA, 19 nt, Artificial Sequence
  Description of Artificial Sequence: Synthetic oligonucleotide
  Sense strand starting at position 3770 of SEQ ID NO: 1881239
agcagaggcuaguuagaaa

SEQ ID NO: 2029055 - RNA, 19 nt, Artificial Sequence
  Description of Artificial Sequence: Synthetic oligonucleotide
  Antisense strand to SEQ ID NO: 2029054
uuucuaacuagccucugcu

SEQ ID NO: 2029056 - RNA, 19 nt, Artificial Sequence
  Description of Artificial Sequence: Synthetic oligonucleotide
  Sense strand starting at position 3831 of SEQ ID NO: 1881239
acuuguggcagugaagaua

SEQ ID NO: 2029057 - RNA, 19 nt, Artificial Sequence
  Description of Artificial Sequence: Synthetic oligonucleotide
  Antisense strand to SEQ ID NO: 2029056
uaucuucacugccacaagu

SEQ ID NO: 2029058 - RNA, 19 nt, Artificial Sequence
  Description of Artificial Sequence: Synthetic oligonucleotide
  Sense strand starting at position 3898 of SEQ ID NO: 1881239
ccaauagaauuugaggauu

SEQ ID NO: 2029059 - RNA, 19 nt, Artificial Sequence
  Description of Artificial Sequence: Synthetic oligonucleotide
  Antisense strand to SEQ ID NO: 2029058
aauccucaaauucuauugg

SEQ ID NO: 2029060 - RNA, 19 nt, Artificial Sequence
  Description of Artificial Sequence: Synthetic oligonucleotide
  Sense strand starting at position 3964 of SEQ ID NO: 1881239
gaacguggugguuaugaca

SEQ ID NO: 2029061 - RNA, 19 nt, Artificial Sequence
  Description of Artificial Sequence: Synthetic oligonucleotide
  Antisense strand to SEQ ID NO: 2029060
ugucauaaccaccacguuc

SEQ ID NO: 2029062 - RNA, 19 nt, Artificial Sequence
  Description of Artificial Sequence: Synthetic oligonucleotide
  Sense strand starting at position 3982 of SEQ ID NO: 1881239
accauuuacucagagguaa

SEQ ID NO: 2029063 - RNA, 19 nt, Artificial Sequence
  Description of Artificial Sequence: Synthetic oligonucleotide
  Antisense strand to SEQ ID NO: 2029062
uuaccucugaguaaauggu

SEQ ID NO: 2029064 - RNA, 19 nt, Artificial Sequence
  Description of Artificial Sequence: Synthetic oligonucleotide
  Sense strand starting at position 96 of SEQ ID NO: 1881240
uucgguuacguguuuguau

SEQ ID NO: 2029065 - RNA, 19 nt, Artificial Sequence
  Description of Artificial Sequence: Synthetic oligonucleotide
  Antisense strand to SEQ ID NO: 2029064
auacaaacacguaaccgaa

SEQ ID NO: 2029066 - RNA, 19 nt, Artificial Sequence
  Description of Artificial Sequence: Synthetic oligonucleotide
  Sense strand starting at position 151 of SEQ ID NO: 1881240
cuuucuuacucuguggauu

SEQ ID NO: 2029067 - RNA, 19 nt, Artificial Sequence
  Description of Artificial Sequence: Synthetic oligonucleotide
  Antisense strand to SEQ ID NO: 2029066
aauccacagaguaagaaag

SEQ ID NO: 2029068 - RNA, 19 nt, Artificial Sequence
  Description of Artificial Sequence: Synthetic oligonucleotide
  Sense strand starting at position 152 of SEQ ID NO: 1881240
uuucuuacucuguggauua

SEQ ID NO: 2029069 - RNA, 19 nt, Artificial Sequence
  Description of Artificial Sequence: Synthetic oligonucleotide
  Antisense strand to SEQ ID NO: 2029068
uaauccacagaguaagaaa

SEQ ID NO: 2029070 - RNA, 19 nt, Artificial Sequence
  Description of Artificial Sequence: Synthetic oligonucleotide
  Sense strand starting at position 188 of SEQ ID NO: 1881240
gaaagccauuguucuggga

SEQ ID NO: 2029071 - RNA, 19 nt, Artificial Sequence
  Description of Artificial Sequence: Synthetic oligonucleotide
  Antisense strand to SEQ ID NO: 2029070
ucccagaacaauggcuuuc

SEQ ID NO: 2029072 - RNA, 19 nt, Artificial Sequence
  Description of Artificial Sequence: Synthetic oligonucleotide
  Sense strand starting at position 192 of SEQ ID NO: 1881240
gccauuguucugggagaca

SEQ ID NO: 2029073 - RNA, 19 nt, Artificial Sequence
  Description of Artificial Sequence: Synthetic oligonucleotide
  Antisense strand to SEQ ID NO: 2029072
ugucucccagaacaauggc

SEQ ID NO: 2029074 - RNA, 19 nt, Artificial Sequence
  Description of Artificial Sequence: Synthetic oligonucleotide
  Sense strand starting at position 216 of SEQ ID NO: 1881240
auuaaucaggcauguccua

SEQ ID NO: 2029075 - RNA, 19 nt, Artificial Sequence
  Description of Artificial Sequence: Synthetic oligonucleotide
  Antisense strand to SEQ ID NO: 2029074
uaggacaugccugauuaau

SEQ ID NO: 2029076 - RNA, 19 nt, Artificial Sequence
  Description of Artificial Sequence: Synthetic oligonucleotide
  Sense strand starting at position 223 of SEQ ID NO: 1881240
aggcauguccuauacuuau

SEQ ID NO: 2029077 - RNA, 19 nt, Artificial Sequence
  Description of Artificial Sequence: Synthetic oligonucleotide
  Antisense strand to SEQ ID NO: 2029076
auaaguauaggacaugccu

SEQ ID NO: 2029078 - RNA, 19 nt, Artificial Sequence
  Description of Artificial Sequence: Synthetic oligonucleotide
  Sense strand starting at position 255 of SEQ ID NO: 1881240
guuuaucugaauggaagca

SEQ ID NO: 2029079 - RNA, 19 nt, Artificial Sequence
  Description of Artificial Sequence: Synthetic oligonucleotide
  Antisense strand to SEQ ID NO: 2029078
ugcuuccauucagauaaac

SEQ ID NO: 2029080 - RNA, 19 nt, Artificial Sequence
  Description of Artificial Sequence: Synthetic oligonucleotide
  Sense strand starting at position 271 of SEQ ID NO: 1881240
gcaaacauggcuggcuaaa

SEQ ID NO: 2029081 - RNA, 19 nt, Artificial Sequence
  Description of Artificial Sequence: Synthetic oligonucleotide
  Antisense strand to SEQ ID NO: 2029080
uuuagccagccauguuugc

SEQ ID NO: 2029082 - RNA, 19 nt, Artificial Sequence
  Description of Artificial Sequence: Synthetic oligonucleotide
  Sense strand starting at position 404 of SEQ ID NO: 1881240
ggagacgacuucccauaua

SEQ ID NO: 2029083 - RNA, 19 nt, Artificial Sequence
  Description of Artificial Sequence: Synthetic oligonucleotide
  Antisense strand to SEQ ID NO: 2029082
uauaugggaagucgucucc

SEQ ID NO: 2029084 - RNA, 19 nt, Artificial Sequence
  Description of Artificial Sequence: Synthetic oligonucleotide
  Sense strand starting at position 586 of SEQ ID NO: 1881240
uggagaauaucuucuugau

SEQ ID NO: 2029085 - RNA, 19 nt, Artificial Sequence
  Description of Artificial Sequence: Synthetic oligonucleotide
  Antisense strand to SEQ ID NO: 2029084
aucaagaagauauucucca

SEQ ID NO: 2029086 - RNA, 19 nt, Artificial Sequence
  Description of Artificial Sequence: Synthetic oligonucleotide
  Sense strand starting at position 648 of SEQ ID NO: 1881240
uugaacaggucuucugacu

SEQ ID NO: 2029087 - RNA, 19 nt, Artificial Sequence
  Description of Artificial Sequence: Synthetic oligonucleotide
  Antisense strand to SEQ ID NO: 2029086
agucagaagaccuguucaa

SEQ ID NO: 2029088 - RNA, 19 nt, Artificial Sequence
  Description of Artificial Sequence: Synthetic oligonucleotide
  Sense strand starting at position 653 of SEQ ID NO: 1881240
caggucuucugacuaauag

SEQ ID NO: 2029089 - RNA, 19 nt, Artificial Sequence
  Description of Artificial Sequence: Synthetic oligonucleotide
  Antisense strand to SEQ ID NO: 2029088
cuauuagucagaagaccug

SEQ ID NO: 2029090 - RNA, 19 nt, Artificial Sequence
  Description of Artificial Sequence: Synthetic oligonucleotide
  Sense strand starting at position 736 of SEQ ID NO: 1881240
ugagguaggcccuaacauu

SEQ ID NO: 2029091 - RNA, 19 nt, Artificial Sequence
  Description of Artificial Sequence: Synthetic oligonucleotide
  Antisense strand to SEQ ID NO: 2029090
aauguuagggccuaccuca

SEQ ID NO: 2029092 - RNA, 19 nt, Artificial Sequence
  Description of Artificial Sequence: Synthetic oligonucleotide
  Sense strand starting at position 1184 of SEQ ID NO: 1881240
auuccuagucauggguauu

SEQ ID NO: 2029093 - RNA, 19 nt, Artificial Sequence
  Description of Artificial Sequence: Synthetic oligonucleotide
  Antisense strand to SEQ ID NO: 2029092
aauacccaugacuaggaau

SEQ ID NO: 2029094 - RNA, 19 nt, Artificial Sequence
  Description of Artificial Sequence: Synthetic oligonucleotide
  Sense strand starting at position 1187 of SEQ ID NO: 1881240
ccuagucauggguauuaga

SEQ ID NO: 2029095 - RNA, 19 nt, Artificial Sequence
  Description of Artificial Sequence: Synthetic oligonucleotide
  Antisense strand to SEQ ID NO: 2029094
ucuaauacccaugacuagg

SEQ ID NO: 2029096 - RNA, 19 nt, Artificial Sequence
  Description of Artificial Sequence: Synthetic oligonucleotide
  Sense strand starting at position 1197 of SEQ ID NO: 1881240
gguauuagaguauggaacu

SEQ ID NO: 2029097 - RNA, 19 nt, Artificial Sequence
  Description of Artificial Sequence: Synthetic oligonucleotide
  Antisense strand to SEQ ID NO: 2029096
aguuccauacucuaauacc

SEQ ID NO: 2029098 - RNA, 19 nt, Artificial Sequence
  Description of Artificial Sequence: Synthetic oligonucleotide
  Sense strand starting at position 1361 of SEQ ID NO: 1881240
guagacaugucauccuuau

SEQ ID NO: 2029099 - RNA, 19 nt, Artificial Sequence
  Description of Artificial Sequence: Synthetic oligonucleotide
  Antisense strand to SEQ ID NO: 2029098
auaaggaugacaugucuac

SEQ ID NO: 2029100 - RNA, 19 nt, Artificial Sequence
  Description of Artificial Sequence: Synthetic oligonucleotide
  Sense strand starting at position 1365 of SEQ ID NO: 1881240
acaugucauccuuauguga

SEQ ID NO: 2029101 - RNA, 19 nt, Artificial Sequence
  Description of Artificial Sequence: Synthetic oligonucleotide
  Antisense strand to SEQ ID NO: 2029100
ucacauaaggaugacaugu

SEQ ID NO: 2029102 - RNA, 19 nt, Artificial Sequence
  Description of Artificial Sequence: Synthetic oligonucleotide
  Sense strand starting at position 1368 of SEQ ID NO: 1881240
ugucauccuuaugugauuu

SEQ ID NO: 2029103 - RNA, 19 nt, Artificial Sequence
  Description of Artificial Sequence: Synthetic oligonucleotide
  Antisense strand to SEQ ID NO: 2029102
aaaucacauaaggaugaca

SEQ ID NO: 2029104 - RNA, 19 nt, Artificial Sequence
  Description of Artificial Sequence: Synthetic oligonucleotide
  Sense strand starting at position 1612 of SEQ ID NO: 1881240
ucuuauucccuguggauag

SEQ ID NO: 2029105 - RNA, 19 nt, Artificial Sequence
  Description of Artificial Sequence: Synthetic oligonucleotide
  Antisense strand to SEQ ID NO: 2029104
cuauccacagggaauaaga

SEQ ID NO: 2029106 - RNA, 19 nt, Artificial Sequence
  Description of Artificial Sequence: Synthetic oligonucleotide
  Sense strand starting at position 1714 of SEQ ID NO: 1881240
aggcaacauugaucucacu

SEQ ID NO: 2029107 - RNA, 19 nt, Artificial Sequence
  Description of Artificial Sequence: Synthetic oligonucleotide
  Antisense strand to SEQ ID NO: 2029106
agugagaucaauguugccu

SEQ ID NO: 2029108 - RNA, 19 nt, Artificial Sequence
  Description of Artificial Sequence: Synthetic oligonucleotide
  Sense strand starting at position 1835 of SEQ ID NO: 1881240
augugagucuuccuuggaa

SEQ ID NO: 2029109 - RNA, 19 nt, Artificial Sequence
  Description of Artificial Sequence: Synthetic oligonucleotide
  Antisense strand to SEQ ID NO: 2029108
uuccaaggaagacucacau

SEQ ID NO: 2029110 - RNA, 19 nt, Artificial Sequence
  Description of Artificial Sequence: Synthetic oligonucleotide
  Sense strand starting at position 1855 of SEQ ID NO: 1881240
caccaaaguccugagguuu

SEQ ID NO: 2029111 - RNA, 19 nt, Artificial Sequence
  Description of Artificial Sequence: Synthetic oligonucleotide
  Antisense strand to SEQ ID NO: 2029110
aaaccucaggacuuuggug

SEQ ID NO: 2029112 - RNA, 19 nt, Artificial Sequence
  Description of Artificial Sequence: Synthetic oligonucleotide
  Sense strand starting at position 1872 of SEQ ID NO: 1881240
uuaaacaaaucaggagaaa

SEQ ID NO: 2029113 - RNA, 19 nt, Artificial Sequence
  Description of Artificial Sequence: Synthetic oligonucleotide
  Antisense strand to SEQ ID NO: 2029112
uuucuccugauuuguuuaa

SEQ ID NO: 2029114 - RNA, 19 nt, Artificial Sequence
  Description of Artificial Sequence: Synthetic oligonucleotide
  Sense strand starting at position 2062 of SEQ ID NO: 1881240
gggagugaggcuggaucaa

SEQ ID NO: 2029115 - RNA, 19 nt, Artificial Sequence
  Description of Artificial Sequence: Synthetic oligonucleotide
  Antisense strand to SEQ ID NO: 2029114
uugauccagccucacuccc

SEQ ID NO: 2029116 - RNA, 19 nt, Artificial Sequence
  Description of Artificial Sequence: Synthetic oligonucleotide
  Sense strand starting at position 2383 of SEQ ID NO: 1881240
aggccaacucccuaagugu

SEQ ID NO: 2029117 - RNA, 19 nt, Artificial Sequence
  Description of Artificial Sequence: Synthetic oligonucleotide
  Antisense strand to SEQ ID NO: 2029116
acacuuagggaguuggccu

SEQ ID NO: 2029118 - RNA, 19 nt, Artificial Sequence
  Description of Artificial Sequence: Synthetic oligonucleotide
  Sense strand starting at position 2451 of SEQ ID NO: 1881240
gagaguucccugcgaagau

SEQ ID NO: 2029119 - RNA, 19 nt, Artificial Sequence
  Description of Artificial Sequence: Synthetic oligonucleotide
  Antisense strand to SEQ ID NO: 2029118
aucuucgcagggaacucuc

SEQ ID NO: 2029120 - RNA, 19 nt, Artificial Sequence
  Description of Artificial Sequence: Synthetic oligonucleotide
  Sense strand starting at position 2735 of SEQ ID NO: 1881240
gcguauacucggccauguu

SEQ ID NO: 2029121 - RNA, 19 nt, Artificial Sequence
  Description of Artificial Sequence: Synthetic oligonucleotide
  Antisense strand to SEQ ID NO: 2029120
aacauggccgaguauacgc

SEQ ID NO: 2029122 - RNA, 19 nt, Artificial Sequence
  Description of Artificial Sequence: Synthetic oligonucleotide
  Sense strand starting at position 3010 of SEQ ID NO: 1881240
cuguaauugccggcaaguc

SEQ ID NO: 2029123 - RNA, 19 nt, Artificial Sequence
  Description of Artificial Sequence: Synthetic oligonucleotide
  Antisense strand to SEQ ID NO: 2029122
gacuugccggcaauuacag

SEQ ID NO: 2029124 - RNA, 19 nt, Artificial Sequence
  Description of Artificial Sequence: Synthetic oligonucleotide
  Sense strand starting at position 3103 of SEQ ID NO: 1881240
guccucaucgcgguauuca

SEQ ID NO: 2029125 - RNA, 19 nt, Artificial Sequence
  Description of Artificial Sequence: Synthetic oligonucleotide
  Antisense strand to SEQ ID NO: 2029124
ugaauaccgcgaugaggac

SEQ ID NO: 2029126 - RNA, 19 nt, Artificial Sequence
  Description of Artificial Sequence: Synthetic oligonucleotide
  Sense strand starting at position 3165 of SEQ ID NO: 1881240
ccugacaguuaugugauau

SEQ ID NO: 2029127 - RNA, 19 nt, Artificial Sequence
  Description of Artificial Sequence: Synthetic oligonucleotide
  Antisense strand to SEQ ID NO: 2029126
auaucacauaacugucagg

SEQ ID NO: 2029128 - RNA, 19 nt, Artificial Sequence
  Description of Artificial Sequence: Synthetic oligonucleotide
  Sense strand starting at position 3468 of SEQ ID NO: 1881240
gacagaggagugugaauuc

SEQ ID NO: 2029129 - RNA, 19 nt, Artificial Sequence
  Description of Artificial Sequence: Synthetic oligonucleotide
  Antisense strand to SEQ ID NO: 2029128
gaauucacacuccucuguc

SEQ ID NO: 2029130 - RNA, 19 nt, Artificial Sequence
  Description of Artificial Sequence: Synthetic oligonucleotide
  Sense strand starting at position 3478 of SEQ ID NO: 1881240
ugugaauucucucugcuaa

SEQ ID NO: 2029131 - RNA, 19 nt, Artificial Sequence
  Description of Artificial Sequence: Synthetic oligonucleotide
  Antisense strand to SEQ ID NO: 2029130
uuagcagagagaauucaca

SEQ ID NO: 2029132 - RNA, 19 nt, Artificial Sequence
  Description of Artificial Sequence: Synthetic oligonucleotide
  Sense strand starting at position 3479 of SEQ ID NO: 1881240
gugaauucucucugcuaag

SEQ ID NO: 2029133 - RNA, 19 nt, Artificial Sequence
  Description of Artificial Sequence: Synthetic oligonucleotide
  Antisense strand to SEQ ID NO: 2029132
cuuagcagagagaauucac

SEQ ID NO: 2029134 - RNA, 19 nt, Artificial Sequence
  Description of Artificial Sequence: Synthetic oligonucleotide
  Sense strand starting at position 3520 of SEQ ID NO: 1881240
gccauuauuccggaagcca

SEQ ID NO: 2029135 - RNA, 19 nt, Artificial Sequence
  Description of Artificial Sequence: Synthetic oligonucleotide
  Antisense strand to SEQ ID NO: 2029134
uggcuuccggaauaauggc

SEQ ID NO: 2029136 - RNA, 19 nt, Artificial Sequence
  Description of Artificial Sequence: Synthetic oligonucleotide
  Sense strand starting at position 3804 of SEQ ID NO: 1881240
acuagccuucgaugagauu

SEQ ID NO: 2029137 - RNA, 19 nt, Artificial Sequence
  Description of Artificial Sequence: Synthetic oligonucleotide
  Antisense strand to SEQ ID NO: 2029136
aaucucaucgaaggcuagu

SEQ ID NO: 2029138 - RNA, 19 nt, Artificial Sequence
  Description of Artificial Sequence: Synthetic oligonucleotide
  Sense strand starting at position 3830 of SEQ ID NO: 1881240
guaauaacuccauguccca

SEQ ID NO: 2029139 - RNA, 19 nt, Artificial Sequence
  Description of Artificial Sequence: Synthetic oligonucleotide
  Antisense strand to SEQ ID NO: 2029138
ugggacauggaguuauuac

SEQ ID NO: 2029140 - RNA, 19 nt, Artificial Sequence
  Description of Artificial Sequence: Synthetic oligonucleotide
  Sense strand starting at position 3899 of SEQ ID NO: 1881240
uguggucuuccugaauuga

SEQ ID NO: 2029141 - RNA, 19 nt, Artificial Sequence
  Description of Artificial Sequence: Synthetic oligonucleotide
  Antisense strand to SEQ ID NO: 2029140
ucaauucaggaagaccaca

SEQ ID NO: 2029142 - RNA, 19 nt, Artificial Sequence
  Description of Artificial Sequence: Synthetic oligonucleotide
  Sense strand starting at position 3946 of SEQ ID NO: 1881240
ccauccagugauuacucua

SEQ ID NO: 2029143 - RNA, 19 nt, Artificial Sequence
  Description of Artificial Sequence: Synthetic oligonucleotide
  Antisense strand to SEQ ID NO: 2029142
uagaguaaucacuggaugg

SEQ ID NO: 2029144 - RNA, 19 nt, Artificial Sequence
  Description of Artificial Sequence: Synthetic oligonucleotide
  Sense strand starting at position 5 of SEQ ID NO: 1881241
aucauugccuaguuagaga

SEQ ID NO: 2029145 - RNA, 19 nt, Artificial Sequence
  Description of Artificial Sequence: Synthetic oligonucleotide
  Antisense strand to SEQ ID NO: 2029144
ucucuaacuaggcaaugau

SEQ ID NO: 2029146 - RNA, 19 nt, Artificial Sequence
  Description of Artificial Sequence: Synthetic oligonucleotide
  Sense strand starting at position 124 of SEQ ID NO: 1881241
ugcaaagguccagaaagua

SEQ ID NO: 2029147 - RNA, 19 nt, Artificial Sequence
  Description of Artificial Sequence: Synthetic oligonucleotide
  Antisense strand to SEQ ID NO: 2029146
uacuuucuggaccuuugca

SEQ ID NO: 2029148 - RNA, 19 nt, Artificial Sequence
  Description of Artificial Sequence: Synthetic oligonucleotide
  Sense strand starting at position 244 of SEQ ID NO: 1881241
uguguaucugaugacauac

SEQ ID NO: 2029149 - RNA, 19 nt, Artificial Sequence
  Description of Artificial Sequence: Synthetic oligonucleotide
  Antisense strand to SEQ ID NO: 2029148
guaugucaucagauacaca

SEQ ID NO: 2029150 - RNA, 19 nt, Artificial Sequence
  Description of Artificial Sequence: Synthetic oligonucleotide
  Sense strand starting at position 305 of SEQ ID NO: 1881241
aggauagcuuccuucuaag

SEQ ID NO: 2029151 - RNA, 19 nt, Artificial Sequence
  Description of Artificial Sequence: Synthetic oligonucleotide
  Antisense strand to SEQ ID NO: 2029150
cuuagaaggaagcuauccu

SEQ ID NO: 2029152 - RNA, 19 nt, Artificial Sequence
  Description of Artificial Sequence: Synthetic oligonucleotide
  Sense strand starting at position 376 of SEQ ID NO: 1881241
ggcugauuugccugguaaa

SEQ ID NO: 2029153 - RNA, 19 nt, Artificial Sequence
  Description of Artificial Sequence: Synthetic oligonucleotide
  Antisense strand to SEQ ID NO: 2029152
uuuaccaggcaaaucagcc

SEQ ID NO: 2029154 - RNA, 19 nt, Artificial Sequence
  Description of Artificial Sequence: Synthetic oligonucleotide
  Sense strand starting at position 399 of SEQ ID NO: 1881241
guacuucuagucuauagaa

SEQ ID NO: 2029155 - RNA, 19 nt, Artificial Sequence
  Description of Artificial Sequence: Synthetic oligonucleotide
  Antisense strand to SEQ ID NO: 2029154
uucuauagacuagaaguac

SEQ ID NO: 2029156 - RNA, 19 nt, Artificial Sequence
  Description of Artificial Sequence: Synthetic oligonucleotide
  Sense strand starting at position 1181 of SEQ ID NO: 1881241
ccuauaguggcuuaucaca

SEQ ID NO: 2029157 - RNA, 19 nt, Artificial Sequence
  Description of Artificial Sequence: Synthetic oligonucleotide
  Antisense strand to SEQ ID NO: 2029156
ugugauaagccacuauagg

SEQ ID NO: 2029158 - RNA, 19 nt, Artificial Sequence
  Description of Artificial Sequence: Synthetic oligonucleotide
  Sense strand starting at position 1189 of SEQ ID NO: 1881241
ggcuuaucacaguaauuaa

SEQ ID NO: 2029159 - RNA, 19 nt, Artificial Sequence
  Description of Artificial Sequence: Synthetic oligonucleotide
  Antisense strand to SEQ ID NO: 2029158
uuaauuacugugauaagcc

SEQ ID NO: 2029160 - RNA, 19 nt, Artificial Sequence
  Description of Artificial Sequence: Synthetic oligonucleotide
  Sense strand starting at position 1281 of SEQ ID NO: 1881241
auuuguugcuuccuuggga

SEQ ID NO: 2029161 - RNA, 19 nt, Artificial Sequence
  Description of Artificial Sequence: Synthetic oligonucleotide
  Antisense strand to SEQ ID NO: 2029160
ucccaaggaagcaacaaau

SEQ ID NO: 2029162 - RNA, 19 nt, Artificial Sequence
  Description of Artificial Sequence: Synthetic oligonucleotide
  Sense strand starting at position 1523 of SEQ ID NO: 1881241
agagacaucuuguuacucu

SEQ ID NO: 2029163 - RNA, 19 nt, Artificial Sequence
  Description of Artificial Sequence: Synthetic oligonucleotide
  Antisense strand to SEQ ID NO: 2029162
agaguaacaagaugucucu

SEQ ID NO: 2029164 - RNA, 19 nt, Artificial Sequence
  Description of Artificial Sequence: Synthetic oligonucleotide
  Sense strand starting at position 1560 of SEQ ID NO: 1881241
uguugaucaugcucugaaa

SEQ ID NO: 2029165 - RNA, 19 nt, Artificial Sequence
  Description of Artificial Sequence: Synthetic oligonucleotide
  Antisense strand to SEQ ID NO: 2029164
uuucagagcaugaucaaca

SEQ ID NO: 2029166 - RNA, 19 nt, Artificial Sequence
  Description of Artificial Sequence: Synthetic oligonucleotide
  Sense strand starting at position 1700 of SEQ ID NO: 1881241
aguaguaguacccagcaua

SEQ ID NO: 2029167 - RNA, 19 nt, Artificial Sequence
  Description of Artificial Sequence: Synthetic oligonucleotide
  Antisense strand to SEQ ID NO: 2029166
uaugcuggguacuacuacu

SEQ ID NO: 2029168 - RNA, 19 nt, Artificial Sequence
  Description of Artificial Sequence: Synthetic oligonucleotide
  Sense strand starting at position 1739 of SEQ ID NO: 1881241
acugaauaugcuuguacau

SEQ ID NO: 2029169 - RNA, 19 nt, Artificial Sequence
  Description of Artificial Sequence: Synthetic oligonucleotide
  Antisense strand to SEQ ID NO: 2029168
auguacaagcauauucagu

SEQ ID NO: 2029170 - RNA, 19 nt, Artificial Sequence
  Description of Artificial Sequence: Synthetic oligonucleotide
  Sense strand starting at position 1886 of SEQ ID NO: 1881241
uucugauaucaaggguuag

SEQ ID NO: 2029171 - RNA, 19 nt, Artificial Sequence
  Description of Artificial Sequence: Synthetic oligonucleotide
  Antisense strand to SEQ ID NO: 2029170
cuaacccuugauaucagaa

SEQ ID NO: 2029172 - RNA, 19 nt, Artificial Sequence
  Description of Artificial Sequence: Synthetic oligonucleotide
  Sense strand starting at position 1887 of SEQ ID NO: 1881241
ucugauaucaaggguuagu

SEQ ID NO: 2029173 - RNA, 19 nt, Artificial Sequence
  Description of Artificial Sequence: Synthetic oligonucleotide
  Antisense strand to SEQ ID NO: 2029172
acuaacccuugauaucaga

SEQ ID NO: 2029174 - RNA, 19 nt, Artificial Sequence
  Description of Artificial Sequence: Synthetic oligonucleotide
  Sense strand starting at position 2028 of SEQ ID NO: 1881241
guuaaacaacauuguuaca

SEQ ID NO: 2029175 - RNA, 19 nt, Artificial Sequence
  Description of Artificial Sequence: Synthetic oligonucleotide
  Antisense strand to SEQ ID NO: 2029174
uguaacaauguuguuuaac

SEQ ID NO: 2029176 - RNA, 19 nt, Artificial Sequence
  Description of Artificial Sequence: Synthetic oligonucleotide
  Sense strand starting at position 2180 of SEQ ID NO: 1881241
ucugcucugcauuauauga

SEQ ID NO: 2029177 - RNA, 19 nt, Artificial Sequence
  Description of Artificial Sequence: Synthetic oligonucleotide
  Antisense strand to SEQ ID NO: 2029176
ucauauaaugcagagcaga

SEQ ID NO: 2029178 - RNA, 19 nt, Artificial Sequence
  Description of Artificial Sequence: Synthetic oligonucleotide
  Sense strand starting at position 2294 of SEQ ID NO: 1881241
gacagucgugcuuauuuau

SEQ ID NO: 2029179 - RNA, 19 nt, Artificial Sequence
  Description of Artificial Sequence: Synthetic oligonucleotide
  Antisense strand to SEQ ID NO: 2029178
auaaauaagcacgacuguc

SEQ ID NO: 2029180 - RNA, 19 nt, Artificial Sequence
  Description of Artificial Sequence: Synthetic oligonucleotide
  Sense strand starting at position 2375 of SEQ ID NO: 1881241
ccugcagaagcuugagaau

SEQ ID NO: 2029181 - RNA, 19 nt, Artificial Sequence
  Description of Artificial Sequence: Synthetic oligonucleotide
  Antisense strand to SEQ ID NO: 2029180
auucucaagcuucugcagg

SEQ ID NO: 2029182 - RNA, 19 nt, Artificial Sequence
  Description of Artificial Sequence: Synthetic oligonucleotide
  Sense strand starting at position 2384 of SEQ ID NO: 1881241
gcuugagaaucaucucauc

SEQ ID NO: 2029183 - RNA, 19 nt, Artificial Sequence
  Description of Artificial Sequence: Synthetic oligonucleotide
  Antisense strand to SEQ ID NO: 2029182
gaugagaugauucucaagc

SEQ ID NO: 2029184 - RNA, 19 nt, Artificial Sequence
  Description of Artificial Sequence: Synthetic oligonucleotide
  Sense strand starting at position 2426 of SEQ ID NO: 1881241
gccuaaugagguuaacuga

SEQ ID NO: 2029185 - RNA, 19 nt, Artificial Sequence
  Description of Artificial Sequence: Synthetic oligonucleotide
  Antisense strand to SEQ ID NO: 2029184
ucaguuaaccucauuaggc

SEQ ID NO: 2029186 - RNA, 19 nt, Artificial Sequence
  Description of Artificial Sequence: Synthetic oligonucleotide
  Sense strand starting at position 2522 of SEQ ID NO: 1881241
ugguauuucugccucacca

SEQ ID NO: 2029187 - RNA, 19 nt, Artificial Sequence
  Description of Artificial Sequence: Synthetic oligonucleotide
  Antisense strand to SEQ ID NO: 2029186
uggugaggcagaaauacca

SEQ ID NO: 2029188 - RNA, 19 nt, Artificial Sequence
  Description of Artificial Sequence: Synthetic oligonucleotide
  Sense strand starting at position 2578 of SEQ ID NO: 1881241
aggaguauauuaucuucca

SEQ ID NO: 2029189 - RNA, 19 nt, Artificial Sequence
  Description of Artificial Sequence: Synthetic oligonucleotide
  Antisense strand to SEQ ID NO: 2029188
uggaagauaauauacuccu

SEQ ID NO: 2029190 - RNA, 19 nt, Artificial Sequence
  Description of Artificial Sequence: Synthetic oligonucleotide
  Sense strand starting at position 2579 of SEQ ID NO: 1881241
ggaguauauuaucuuccaa

SEQ ID NO: 2029191 - RNA, 19 nt, Artificial Sequence
  Description of Artificial Sequence: Synthetic oligonucleotide
  Antisense strand to SEQ ID NO: 2029190
uuggaagauaauauacucc

SEQ ID NO: 2029192 - RNA, 19 nt, Artificial Sequence
  Description of Artificial Sequence: Synthetic oligonucleotide
  Sense strand starting at position 2601 of SEQ ID NO: 1881241
gcauguaauccuugaggau

SEQ ID NO: 2029193 - RNA, 19 nt, Artificial Sequence
  Description of Artificial Sequence: Synthetic oligonucleotide
  Antisense strand to SEQ ID NO: 2029192
auccucaaggauuacaugc

SEQ ID NO: 2029194 - RNA, 19 nt, Artificial Sequence
  Description of Artificial Sequence: Synthetic oligonucleotide
  Sense strand starting at position 2607 of SEQ ID NO: 1881241
aauccuugaggauguggua

SEQ ID NO: 2029195 - RNA, 19 nt, Artificial Sequence
  Description of Artificial Sequence: Synthetic oligonucleotide
  Antisense strand to SEQ ID NO: 2029194
uaccacauccucaaggauu

SEQ ID NO: 2029196 - RNA, 19 nt, Artificial Sequence
  Description of Artificial Sequence: Synthetic oligonucleotide
  Sense strand starting at position 2643 of SEQ ID NO: 1881241
uaauuaguuggccauaugu

SEQ ID NO: 2029197 - RNA, 19 nt, Artificial Sequence
  Description of Artificial Sequence: Synthetic oligonucleotide
  Antisense strand to SEQ ID NO: 2029196
acauauggccaacuaauua

SEQ ID NO: 2029198 - RNA, 19 nt, Artificial Sequence
  Description of Artificial Sequence: Synthetic oligonucleotide
  Sense strand starting at position 2645 of SEQ ID NO: 1881241
auuaguuggccauauguaa

SEQ ID NO: 2029199 - RNA, 19 nt, Artificial Sequence
  Description of Artificial Sequence: Synthetic oligonucleotide
  Antisense strand to SEQ ID NO: 2029198
uuacauauggccaacuaau

SEQ ID NO: 2029200 - RNA, 19 nt, Artificial Sequence
  Description of Artificial Sequence: Synthetic oligonucleotide
  Sense strand starting at position 2682 of SEQ ID NO: 1881241
aaggaauaguuugccauca

SEQ ID NO: 2029201 - RNA, 19 nt, Artificial Sequence
  Description of Artificial Sequence: Synthetic oligonucleotide
  Antisense strand to SEQ ID NO: 2029200
ugauggcaaacuauuccuu

SEQ ID NO: 2029202 - RNA, 19 nt, Artificial Sequence
  Description of Artificial Sequence: Synthetic oligonucleotide
  Sense strand starting at position 2687 of SEQ ID NO: 1881241
auaguuugccaucagucaa

SEQ ID NO: 2029203 - RNA, 19 nt, Artificial Sequence
  Description of Artificial Sequence: Synthetic oligonucleotide
  Antisense strand to SEQ ID NO: 2029202
uugacugauggcaaacuau

SEQ ID NO: 2029204 - RNA, 19 nt, Artificial Sequence
  Description of Artificial Sequence: Synthetic oligonucleotide
  Sense strand starting at position 3120 of SEQ ID NO: 1881241
ccuagauuccaugguccau

SEQ ID NO: 2029205 - RNA, 19 nt, Artificial Sequence
  Description of Artificial Sequence: Synthetic oligonucleotide
  Antisense strand to SEQ ID NO: 2029204
auggaccauggaaucuagg

SEQ ID NO: 2029206 - RNA, 19 nt, Artificial Sequence
  Description of Artificial Sequence: Synthetic oligonucleotide
  Sense strand starting at position 3229 of SEQ ID NO: 1881241
acuccaaucuugguuaaag

SEQ ID NO: 2029207 - RNA, 19 nt, Artificial Sequence
  Description of Artificial Sequence: Synthetic oligonucleotide
  Antisense strand to SEQ ID NO: 2029206
cuuuaaccaagauuggagu

SEQ ID NO: 2029208 - RNA, 19 nt, Artificial Sequence
  Description of Artificial Sequence: Synthetic oligonucleotide
  Sense strand starting at position 3272 of SEQ ID NO: 1881241
ugcacuuaagcaugaaaug

SEQ ID NO: 2029209 - RNA, 19 nt, Artificial Sequence
  Description of Artificial Sequence: Synthetic oligonucleotide
  Antisense strand to SEQ ID NO: 2029208
cauuucaugcuuaagugca

SEQ ID NO: 2029210 - RNA, 19 nt, Artificial Sequence
  Description of Artificial Sequence: Synthetic oligonucleotide
  Sense strand starting at position 3273 of SEQ ID NO: 1881241
gcacuuaagcaugaaauga

SEQ ID NO: 2029211 - RNA, 19 nt, Artificial Sequence
  Description of Artificial Sequence: Synthetic oligonucleotide
  Antisense strand to SEQ ID NO: 2029210
ucauuucaugcuuaagugc

SEQ ID NO: 2029212 - RNA, 19 nt, Artificial Sequence
  Description of Artificial Sequence: Synthetic oligonucleotide
  Sense strand starting at position 3324 of SEQ ID NO: 1881241
gguuaaauuuaugaucaca

SEQ ID NO: 2029213 - RNA, 19 nt, Artificial Sequence
  Description of Artificial Sequence: Synthetic oligonucleotide
  Antisense strand to SEQ ID NO: 2029212
ugugaucauaaauuuaacc

SEQ ID NO: 2029214 - RNA, 19 nt, Artificial Sequence
  Description of Artificial Sequence: Synthetic oligonucleotide
  Sense strand starting at position 3613 of SEQ ID NO: 1881241
aggcuaaacucuguugaga

SEQ ID NO: 2029215 - RNA, 19 nt, Artificial Sequence
  Description of Artificial Sequence: Synthetic oligonucleotide
  Antisense strand to SEQ ID NO: 2029214
ucucaacagaguuuagccu

SEQ ID NO: 2029216 - RNA, 19 nt, Artificial Sequence
  Description of Artificial Sequence: Synthetic oligonucleotide
  Sense strand starting at position 3661 of SEQ ID NO: 1881241
cuuguuccagacuauguaa

SEQ ID NO: 2029217 - RNA, 19 nt, Artificial Sequence
  Description of Artificial Sequence: Synthetic oligonucleotide
  Antisense strand to SEQ ID NO: 2029216
uuacauagucuggaacaag

SEQ ID NO: 2029218 - RNA, 19 nt, Artificial Sequence
  Description of Artificial Sequence: Synthetic oligonucleotide
  Sense strand starting at position 3664 of SEQ ID NO: 1881241
guuccagacuauguaauca

SEQ ID NO: 2029219 - RNA, 19 nt, Artificial Sequence
  Description of Artificial Sequence: Synthetic oligonucleotide
  Antisense strand to SEQ ID NO: 2029218
ugauuacauagucuggaac

SEQ ID NO: 2029220 - RNA, 19 nt, Artificial Sequence
  Description of Artificial Sequence: Synthetic oligonucleotide
  Sense strand starting at position 3672 of SEQ ID NO: 1881241
cuauguaaucaaggauuga

SEQ ID NO: 2029221 - RNA, 19 nt, Artificial Sequence
  Description of Artificial Sequence: Synthetic oligonucleotide
  Antisense strand to SEQ ID NO: 2029220
ucaauccuugauuacauag

SEQ ID NO: 2029222 - RNA, 19 nt, Artificial Sequence
  Description of Artificial Sequence: Synthetic oligonucleotide
  Sense strand starting at position 3676 of SEQ ID NO: 1881241
guaaucaaggauugaaugu

SEQ ID NO: 2029223 - RNA, 19 nt, Artificial Sequence
  Description of Artificial Sequence: Synthetic oligonucleotide
  Antisense strand to SEQ ID NO: 2029222
acauucaauccuugauuac

SEQ ID NO: 2029224 - RNA, 19 nt, Artificial Sequence
  Description of Artificial Sequence: Synthetic oligonucleotide
  Sense strand starting at position 6 of SEQ ID NO: 1881242
cacaaugaccagugcuuga

SEQ ID NO: 2029225 - RNA, 19 nt, Artificial Sequence
  Description of Artificial Sequence: Synthetic oligonucleotide
  Antisense strand to SEQ ID NO: 2029224
ucaagcacuggucauugug

SEQ ID NO: 2029226 - RNA, 19 nt, Artificial Sequence
  Description of Artificial Sequence: Synthetic oligonucleotide
  Sense strand starting at position 10 of SEQ ID NO: 1881242
augaccagugcuugaagau

SEQ ID NO: 2029227 - RNA, 19 nt, Artificial Sequence
  Description of Artificial Sequence: Synthetic oligonucleotide
  Antisense strand to SEQ ID NO: 2029226
aucuucaagcacuggucau

SEQ ID NO: 2029228 - RNA, 19 nt, Artificial Sequence
  Description of Artificial Sequence: Synthetic oligonucleotide
  Sense strand starting at position 11 of SEQ ID NO: 1881242
ugaccagugcuugaagauc

SEQ ID NO: 2029229 - RNA, 19 nt, Artificial Sequence
  Description of Artificial Sequence: Synthetic oligonucleotide
  Antisense strand to SEQ ID NO: 2029228
gaucuucaagcacugguca

SEQ ID NO: 2029230 - RNA, 19 nt, Artificial Sequence
  Description of Artificial Sequence: Synthetic oligonucleotide
  Sense strand starting at position 100 of SEQ ID NO: 1881242
ucaggcaaagcaugaauua

SEQ ID NO: 2029231 - RNA, 19 nt, Artificial Sequence
  Description of Artificial Sequence: Synthetic oligonucleotide
  Antisense strand to SEQ ID NO: 2029230
uaauucaugcuuugccuga

SEQ ID NO: 2029232 - RNA, 19 nt, Artificial Sequence
  Description of Artificial Sequence: Synthetic oligonucleotide
  Sense strand starting at position 187 of SEQ ID NO: 1881242
cuggguauucuugagcuuu

SEQ ID NO: 2029233 - RNA, 19 nt, Artificial Sequence
  Description of Artificial Sequence: Synthetic oligonucleotide
  Antisense strand to SEQ ID NO: 2029232
aaagcucaagaauacccag

SEQ ID NO: 2029234 - RNA, 19 nt, Artificial Sequence
  Description of Artificial Sequence: Synthetic oligonucleotide
  Sense strand starting at position 586 of SEQ ID NO: 1881242
gggugcggaaucuaaauau

SEQ ID NO: 2029235 - RNA, 19 nt, Artificial Sequence
  Description of Artificial Sequence: Synthetic oligonucleotide
  Antisense strand to SEQ ID NO: 2029234
auauuuagauuccgcaccc

SEQ ID NO: 2029236 - RNA, 19 nt, Artificial Sequence
  Description of Artificial Sequence: Synthetic oligonucleotide
  Sense strand starting at position 637 of SEQ ID NO: 1881242
aacacauagugucuugaga

SEQ ID NO: 2029237 - RNA, 19 nt, Artificial Sequence
  Description of Artificial Sequence: Synthetic oligonucleotide
  Antisense strand to SEQ ID NO: 2029236
ucucaagacacuauguguu

SEQ ID NO: 2029238 - RNA, 19 nt, Artificial Sequence
  Description of Artificial Sequence: Synthetic oligonucleotide
  Sense strand starting at position 844 of SEQ ID NO: 1881242
guuggacaaccuugucuua

SEQ ID NO: 2029239 - RNA, 19 nt, Artificial Sequence
  Description of Artificial Sequence: Synthetic oligonucleotide
  Antisense strand to SEQ ID NO: 2029238
uaagacaagguuguccaac

SEQ ID NO: 2029240 - RNA, 19 nt, Artificial Sequence
  Description of Artificial Sequence: Synthetic oligonucleotide
  Sense strand starting at position 846 of SEQ ID NO: 1881242
uggacaaccuugucuuaca

SEQ ID NO: 2029241 - RNA, 19 nt, Artificial Sequence
  Description of Artificial Sequence: Synthetic oligonucleotide
  Antisense strand to SEQ ID NO: 2029240
uguaagacaagguugucca

SEQ ID NO: 2029242 - RNA, 19 nt, Artificial Sequence
  Description of Artificial Sequence: Synthetic oligonucleotide
  Sense strand starting at position 909 of SEQ ID NO: 1881242
aaggucuaguuccugacaa

SEQ ID NO: 2029243 - RNA, 19 nt, Artificial Sequence
  Description of Artificial Sequence: Synthetic oligonucleotide
  Antisense strand to SEQ ID NO: 2029242
uugucaggaacuagaccuu

SEQ ID NO: 2029244 - RNA, 19 nt, Artificial Sequence
  Description of Artificial Sequence: Synthetic oligonucleotide
  Sense strand starting at position 911 of SEQ ID NO: 1881242
ggucuaguuccugacaaca

SEQ ID NO: 2029245 - RNA, 19 nt, Artificial Sequence
  Description of Artificial Sequence: Synthetic oligonucleotide
  Antisense strand to SEQ ID NO: 2029244
uguugucaggaacuagacc

SEQ ID NO: 2029246 - RNA, 19 nt, Artificial Sequence
  Description of Artificial Sequence: Synthetic oligonucleotide
  Sense strand starting at position 1068 of SEQ ID NO: 1881242
gaccacuguccaggucaga

SEQ ID NO: 2029247 - RNA, 19 nt, Artificial Sequence
  Description of Artificial Sequence: Synthetic oligonucleotide
  Antisense strand to SEQ ID NO: 2029246
ucugaccuggacagugguc

SEQ ID NO: 2029248 - RNA, 19 nt, Artificial Sequence
  Description of Artificial Sequence: Synthetic oligonucleotide
  Sense strand starting at position 1202 of SEQ ID NO: 1881242
aguucucagcgucaggaaa

SEQ ID NO: 2029249 - RNA, 19 nt, Artificial Sequence
  Description of Artificial Sequence: Synthetic oligonucleotide
  Antisense strand to SEQ ID NO: 2029248
uuuccugacgcugagaacu

SEQ ID NO: 2029250 - RNA, 19 nt, Artificial Sequence
  Description of Artificial Sequence: Synthetic oligonucleotide
  Sense strand starting at position 1245 of SEQ ID NO: 1881242
uccucuuaugccuacagua

SEQ ID NO: 2029251 - RNA, 19 nt, Artificial Sequence
  Description of Artificial Sequence: Synthetic oligonucleotide
  Antisense strand to SEQ ID NO: 2029250
uacuguaggcauaagagga

SEQ ID NO: 2029252 - RNA, 19 nt, Artificial Sequence
  Description of Artificial Sequence: Synthetic oligonucleotide
  Sense strand starting at position 1300 of SEQ ID NO: 1881242
uggucaucuggucacaaca

SEQ ID NO: 2029253 - RNA, 19 nt, Artificial Sequence
  Description of Artificial Sequence: Synthetic oligonucleotide
  Antisense strand to SEQ ID NO: 2029252
uguugugaccagaugacca

SEQ ID NO: 2029254 - RNA, 19 nt, Artificial Sequence
  Description of Artificial Sequence: Synthetic oligonucleotide
  Sense strand starting at position 1320 of SEQ ID NO: 1881242
ccguuaauuacggaguaaa

SEQ ID NO: 2029255 - RNA, 19 nt, Artificial Sequence
  Description of Artificial Sequence: Synthetic oligonucleotide
  Antisense strand to SEQ ID NO: 2029254
uuuacuccguaauuaacgg

SEQ ID NO: 2029256 - RNA, 19 nt, Artificial Sequence
  Description of Artificial Sequence: Synthetic oligonucleotide
  Sense strand starting at position 1352 of SEQ ID NO: 1881242
ggcuucucaccuuaagagu

SEQ ID NO: 2029257 - RNA, 19 nt, Artificial Sequence
  Description of Artificial Sequence: Synthetic oligonucleotide
  Antisense strand to SEQ ID NO: 2029256
acucuuaaggugagaagcc

SEQ ID NO: 2029258 - RNA, 19 nt, Artificial Sequence
  Description of Artificial Sequence: Synthetic oligonucleotide
  Sense strand starting at position 1363 of SEQ ID NO: 1881242
uuaagagucacguggagag

SEQ ID NO: 2029259 - RNA, 19 nt, Artificial Sequence
  Description of Artificial Sequence: Synthetic oligonucleotide
  Antisense strand to SEQ ID NO: 2029258
cucuccacgugacucuuaa

SEQ ID NO: 2029260 - RNA, 19 nt, Artificial Sequence
  Description of Artificial Sequence: Synthetic oligonucleotide
  Sense strand starting at position 1544 of SEQ ID NO: 1881242
aggguuuggcgugauuaga

SEQ ID NO: 2029261 - RNA, 19 nt, Artificial Sequence
  Description of Artificial Sequence: Synthetic oligonucleotide
  Antisense strand to SEQ ID NO: 2029260
ucuaaucacgccaaacccu

SEQ ID NO: 2029262 - RNA, 19 nt, Artificial Sequence
  Description of Artificial Sequence: Synthetic oligonucleotide
  Sense strand starting at position 1553 of SEQ ID NO: 1881242
cgugauuagaggcgaaaca

SEQ ID NO: 2029263 - RNA, 19 nt, Artificial Sequence
  Description of Artificial Sequence: Synthetic oligonucleotide
  Antisense strand to SEQ ID NO: 2029262
uguuucgccucuaaucacg

SEQ ID NO: 2029264 - RNA, 19 nt, Artificial Sequence
  Description of Artificial Sequence: Synthetic oligonucleotide
  Sense strand starting at position 2233 of SEQ ID NO: 1881242
ugugguagaagguaaacuu

SEQ ID NO: 2029265 - RNA, 19 nt, Artificial Sequence
  Description of Artificial Sequence: Synthetic oligonucleotide
  Antisense strand to SEQ ID NO: 2029264
aaguuuaccuucuaccaca

SEQ ID NO: 2029266 - RNA, 19 nt, Artificial Sequence
  Description of Artificial Sequence: Synthetic oligonucleotide
  Sense strand starting at position 2243 of SEQ ID NO: 1881242
gguaaacuucucgcggcuu

SEQ ID NO: 2029267 - RNA, 19 nt, Artificial Sequence
  Description of Artificial Sequence: Synthetic oligonucleotide
  Antisense strand to SEQ ID NO: 2029266
aagccgcgagaaguuuacc

SEQ ID NO: 2029268 - RNA, 19 nt, Artificial Sequence
  Description of Artificial Sequence: Synthetic oligonucleotide
  Sense strand starting at position 2255 of SEQ ID NO: 1881242
gcggcuuagccgucuccau

SEQ ID NO: 2029269 - RNA, 19 nt, Artificial Sequence
  Description of Artificial Sequence: Synthetic oligonucleotide
  Antisense strand to SEQ ID NO: 2029268
auggagacggcuaagccgc

SEQ ID NO: 2029270 - RNA, 19 nt, Artificial Sequence
  Description of Artificial Sequence: Synthetic oligonucleotide
  Sense strand starting at position 2291 of SEQ ID NO: 1881242
cggugaaacuuauuaaaga

SEQ ID NO: 2029271 - RNA, 19 nt, Artificial Sequence
  Description of Artificial Sequence: Synthetic oligonucleotide
  Antisense strand to SEQ ID NO: 2029270
ucuuuaauaaguuucaccg

SEQ ID NO: 2029272 - RNA, 19 nt, Artificial Sequence
  Description of Artificial Sequence: Synthetic oligonucleotide
  Sense strand starting at position 2574 of SEQ ID NO: 1881242
acuuacguauguuuagaau

SEQ ID NO: 2029273 - RNA, 19 nt, Artificial Sequence
  Description of Artificial Sequence: Synthetic oligonucleotide
  Antisense strand to SEQ ID NO: 2029272
auucuaaacauacguaagu

SEQ ID NO: 2029274 - RNA, 19 nt, Artificial Sequence
  Description of Artificial Sequence: Synthetic oligonucleotide
  Sense strand starting at position 2941 of SEQ ID NO: 1881242
uguugaaauguauaaagug

SEQ ID NO: 2029275 - RNA, 19 nt, Artificial Sequence
  Description of Artificial Sequence: Synthetic oligonucleotide
  Antisense strand to SEQ ID NO: 2029274
cacuuuauacauuucaaca

SEQ ID NO: 2029276 - RNA, 19 nt, Artificial Sequence
  Description of Artificial Sequence: Synthetic oligonucleotide
  Sense strand starting at position 3123 of SEQ ID NO: 1881242
guaucuucuguuuagcaag

SEQ ID NO: 2029277 - RNA, 19 nt, Artificial Sequence
  Description of Artificial Sequence: Synthetic oligonucleotide
  Antisense strand to SEQ ID NO: 2029276
cuugcuaaacagaagauac

SEQ ID NO: 2029278 - RNA, 19 nt, Artificial Sequence
  Description of Artificial Sequence: Synthetic oligonucleotide
  Sense strand starting at position 3263 of SEQ ID NO: 1881242
gccaaagguggguggauua

SEQ ID NO: 2029279 - RNA, 19 nt, Artificial Sequence
  Description of Artificial Sequence: Synthetic oligonucleotide
  Antisense strand to SEQ ID NO: 2029278
uaauccacccaccuuuggc

SEQ ID NO: 2029280 - RNA, 19 nt, Artificial Sequence
  Description of Artificial Sequence: Synthetic oligonucleotide
  Sense strand starting at position 3305 of SEQ ID NO: 1881242
auuggucaagauggugaaa

SEQ ID NO: 2029281 - RNA, 19 nt, Artificial Sequence
  Description of Artificial Sequence: Synthetic oligonucleotide
  Antisense strand to SEQ ID NO: 2029280
uuucaccaucuugaccaau

SEQ ID NO: 2029282 - RNA, 19 nt, Artificial Sequence
  Description of Artificial Sequence: Synthetic oligonucleotide
  Sense strand starting at position 3522 of SEQ ID NO: 1881242
caguaacgccaauauggua

SEQ ID NO: 2029283 - RNA, 19 nt, Artificial Sequence
  Description of Artificial Sequence: Synthetic oligonucleotide
  Antisense strand to SEQ ID NO: 2029282
uaccauauuggcguuacug

SEQ ID NO: 2029284 - RNA, 19 nt, Artificial Sequence
  Description of Artificial Sequence: Synthetic oligonucleotide
  Sense strand starting at position 3591 of SEQ ID NO: 1881242
gcaccacuccauugaguaa

SEQ ID NO: 2029285 - RNA, 19 nt, Artificial Sequence
  Description of Artificial Sequence: Synthetic oligonucleotide
  Antisense strand to SEQ ID NO: 2029284
uuacucaauggaguggugc

SEQ ID NO: 2029286 - RNA, 19 nt, Artificial Sequence
  Description of Artificial Sequence: Synthetic oligonucleotide
  Sense strand starting at position 3607 of SEQ ID NO: 1881242
uaaggagcugcucaaagau

SEQ ID NO: 2029287 - RNA, 19 nt, Artificial Sequence
  Description of Artificial Sequence: Synthetic oligonucleotide
  Antisense strand to SEQ ID NO: 2029286
aucuuugagcagcuccuua

SEQ ID NO: 2029288 - RNA, 19 nt, Artificial Sequence
  Description of Artificial Sequence: Synthetic oligonucleotide
  Sense strand starting at position 3660 of SEQ ID NO: 1881242
agguguugcauugaucaac

SEQ ID NO: 2029289 - RNA, 19 nt, Artificial Sequence
  Description of Artificial Sequence: Synthetic oligonucleotide
  Antisense strand to SEQ ID NO: 2029288
guugaucaaugcaacaccu

SEQ ID NO: 2029290 - RNA, 19 nt, Artificial Sequence
  Description of Artificial Sequence: Synthetic oligonucleotide
  Sense strand starting at position 3671 of SEQ ID NO: 1881242
ugaucaacucugcaugcuu

SEQ ID NO: 2029291 - RNA, 19 nt, Artificial Sequence
  Description of Artificial Sequence: Synthetic oligonucleotide
  Antisense strand to SEQ ID NO: 2029290
aagcaugcagaguugauca

SEQ ID NO: 2029292 - RNA, 19 nt, Artificial Sequence
  Description of Artificial Sequence: Synthetic oligonucleotide
  Sense strand starting at position 3678 of SEQ ID NO: 1881242
cucugcaugcuuuaaagaa

SEQ ID NO: 2029293 - RNA, 19 nt, Artificial Sequence
  Description of Artificial Sequence: Synthetic oligonucleotide
  Antisense strand to SEQ ID NO: 2029292
uucuuuaaagcaugcagag

SEQ ID NO: 2029294 - RNA, 19 nt, Artificial Sequence
  Description of Artificial Sequence: Synthetic oligonucleotide
  Sense strand starting at position 3685 of SEQ ID NO: 1881242
ugcuuuaaagaauguaaag

SEQ ID NO: 2029295 - RNA, 19 nt, Artificial Sequence
  Description of Artificial Sequence: Synthetic oligonucleotide
  Antisense strand to SEQ ID NO: 2029294
cuuuacauucuuuaaagca

SEQ ID NO: 2029296 - RNA, 19 nt, Artificial Sequence
  Description of Artificial Sequence: Synthetic oligonucleotide
  Sense strand starting at position 3772 of SEQ ID NO: 1881242
uguaaagccgucucugcua

SEQ ID NO: 2029297 - RNA, 19 nt, Artificial Sequence
  Description of Artificial Sequence: Synthetic oligonucleotide
  Antisense strand to SEQ ID NO: 2029296
uagcagagacggcuuuaca

SEQ ID NO: 2029298 - RNA, 19 nt, Artificial Sequence
  Description of Artificial Sequence: Synthetic oligonucleotide
  Sense strand starting at position 3871 of SEQ ID NO: 1881242
gggacuacaucguuguuaa

SEQ ID NO: 2029299 - RNA, 19 nt, Artificial Sequence
  Description of Artificial Sequence: Synthetic oligonucleotide
  Antisense strand to SEQ ID NO: 2029298
uuaacaacgauguaguccc

SEQ ID NO: 2029300 - RNA, 19 nt, Artificial Sequence
  Description of Artificial Sequence: Synthetic oligonucleotide
  Sense strand starting at position 3908 of SEQ ID NO: 1881242
uggugaugauggcugaagu

SEQ ID NO: 2029301 - RNA, 19 nt, Artificial Sequence
  Description of Artificial Sequence: Synthetic oligonucleotide
  Antisense strand to SEQ ID NO: 2029300
acuucagccaucaucacca

SEQ ID NO: 2029302 - RNA, 19 nt, Artificial Sequence
  Description of Artificial Sequence: Synthetic oligonucleotide
  Sense strand starting at position 3970 of SEQ ID NO: 1881242
agaaacuccuguguacaca

SEQ ID NO: 2029303 - RNA, 19 nt, Artificial Sequence
  Description of Artificial Sequence: Synthetic oligonucleotide
  Antisense strand to SEQ ID NO: 2029302
uguguacacaggaguuucu

SEQ ID NO: 2029304 - RNA, 19 nt, Artificial Sequence
  Description of Artificial Sequence: Synthetic oligonucleotide
  Sense strand starting at position 98 of SEQ ID NO: 1881243
ggcagugcugccuggcaaa

SEQ ID NO: 2029305 - RNA, 19 nt, Artificial Sequence
  Description of Artificial Sequence: Synthetic oligonucleotide
  Antisense strand to SEQ ID NO: 2029304
uuugccaggcagcacugcc

SEQ ID NO: 2029306 - RNA, 19 nt, Artificial Sequence
  Description of Artificial Sequence: Synthetic oligonucleotide
  Sense strand starting at position 221 of SEQ ID NO: 1881243
caugguguggccugagaag

SEQ ID NO: 2029307 - RNA, 19 nt, Artificial Sequence
  Description of Artificial Sequence: Synthetic oligonucleotide
  Antisense strand to SEQ ID NO: 2029306
cuucucaggccacaccaug

SEQ ID NO: 2029308 - RNA, 19 nt, Artificial Sequence
  Description of Artificial Sequence: Synthetic oligonucleotide
  Sense strand starting at position 354 of SEQ ID NO: 1881243
gcacgucuaugcgugugua

SEQ ID NO: 2029309 - RNA, 19 nt, Artificial Sequence
  Description of Artificial Sequence: Synthetic oligonucleotide
  Antisense strand to SEQ ID NO: 2029308
uacacacgcauagacgugc

SEQ ID NO: 2029310 - RNA, 19 nt, Artificial Sequence
  Description of Artificial Sequence: Synthetic oligonucleotide
  Sense strand starting at position 356 of SEQ ID NO: 1881243
acgucuaugcguguguaca

SEQ ID NO: 2029311 - RNA, 19 nt, Artificial Sequence
  Description of Artificial Sequence: Synthetic oligonucleotide
  Antisense strand to SEQ ID NO: 2029310
uguacacacgcauagacgu

SEQ ID NO: 2029312 - RNA, 19 nt, Artificial Sequence
  Description of Artificial Sequence: Synthetic oligonucleotide
  Sense strand starting at position 357 of SEQ ID NO: 1881243
cgucuaugcguguguacau

SEQ ID NO: 2029313 - RNA, 19 nt, Artificial Sequence
  Description of Artificial Sequence: Synthetic oligonucleotide
  Antisense strand to SEQ ID NO: 2029312
auguacacacgcauagacg

SEQ ID NO: 2029314 - RNA, 19 nt, Artificial Sequence
  Description of Artificial Sequence: Synthetic oligonucleotide
  Sense strand starting at position 358 of SEQ ID NO: 1881243
gucuaugcguguguacaua

SEQ ID NO: 2029315 - RNA, 19 nt, Artificial Sequence
  Description of Artificial Sequence: Synthetic oligonucleotide
  Antisense strand to SEQ ID NO: 2029314
uauguacacacgcauagac

SEQ ID NO: 2029316 - RNA, 19 nt, Artificial Sequence
  Description of Artificial Sequence: Synthetic oligonucleotide
  Sense strand starting at position 686 of SEQ ID NO: 1881243
gagagcuguugccacauau

SEQ ID NO: 2029317 - RNA, 19 nt, Artificial Sequence
  Description of Artificial Sequence: Synthetic oligonucleotide
  Antisense strand to SEQ ID NO: 2029316
auauguggcaacagcucuc

SEQ ID NO: 2029318 - RNA, 19 nt, Artificial Sequence
  Description of Artificial Sequence: Synthetic oligonucleotide
  Sense strand starting at position 704 of SEQ ID NO: 1881243
uggagcaagugcuuacuau

SEQ ID NO: 2029319 - RNA, 19 nt, Artificial Sequence
  Description of Artificial Sequence: Synthetic oligonucleotide
  Antisense strand to SEQ ID NO: 2029318
auaguaagcacuugcucca

SEQ ID NO: 2029320 - RNA, 19 nt, Artificial Sequence
  Description of Artificial Sequence: Synthetic oligonucleotide
  Sense strand starting at position 705 of SEQ ID NO: 1881243
ggagcaagugcuuacuaug

SEQ ID NO: 2029321 - RNA, 19 nt, Artificial Sequence
  Description of Artificial Sequence: Synthetic oligonucleotide
  Antisense strand to SEQ ID NO: 2029320
cauaguaagcacuugcucc

SEQ ID NO: 2029322 - RNA, 19 nt, Artificial Sequence
  Description of Artificial Sequence: Synthetic oligonucleotide
  Sense strand starting at position 776 of SEQ ID NO: 1881243
cacaccgaccugugagaaa

SEQ ID NO: 2029323 - RNA, 19 nt, Artificial Sequence
  Description of Artificial Sequence: Synthetic oligonucleotide
  Antisense strand to SEQ ID NO: 2029322
uuucucacaggucggugug

SEQ ID NO: 2029324 - RNA, 19 nt, Artificial Sequence
  Description of Artificial Sequence: Synthetic oligonucleotide
  Sense strand starting at position 1266 of SEQ ID NO: 1881243
cccaguguaucugcagaga

SEQ ID NO: 2029325 - RNA, 19 nt, Artificial Sequence
  Description of Artificial Sequence: Synthetic oligonucleotide
  Antisense strand to SEQ ID NO: 2029324
ucucugcagauacacuggg

SEQ ID NO: 2029326 - RNA, 19 nt, Artificial Sequence
  Description of Artificial Sequence: Synthetic oligonucleotide
  Sense strand starting at position 1297 of SEQ ID NO: 1881243
ggugcagccuucuggacau

SEQ ID NO: 2029327 - RNA, 19 nt, Artificial Sequence
  Description of Artificial Sequence: Synthetic oligonucleotide
  Antisense strand to SEQ ID NO: 2029326
auguccagaaggcugcacc

SEQ ID NO: 2029328 - RNA, 19 nt, Artificial Sequence
  Description of Artificial Sequence: Synthetic oligonucleotide
  Sense strand starting at position 1716 of SEQ ID NO: 1881243
gcaguacaguagcgagauu

SEQ ID NO: 2029329 - RNA, 19 nt, Artificial Sequence
  Description of Artificial Sequence: Synthetic oligonucleotide
  Antisense strand to SEQ ID NO: 2029328
aaucucgcuacuguacugc

SEQ ID NO: 2029330 - RNA, 19 nt, Artificial Sequence
  Description of Artificial Sequence: Synthetic oligonucleotide
  Sense strand starting at position 2134 of SEQ ID NO: 1881243
cccacacaguggucuuaaa

SEQ ID NO: 2029331 - RNA, 19 nt, Artificial Sequence
  Description of Artificial Sequence: Synthetic oligonucleotide
  Antisense strand to SEQ ID NO: 2029330
uuuaagaccacuguguggg

SEQ ID NO: 2029332 - RNA, 19 nt, Artificial Sequence
  Description of Artificial Sequence: Synthetic oligonucleotide
  Sense strand starting at position 2294 of SEQ ID NO: 1881243
gucucugggucccaaugaa

SEQ ID NO: 2029333 - RNA, 19 nt, Artificial Sequence
  Description of Artificial Sequence: Synthetic oligonucleotide
  Antisense strand to SEQ ID NO: 2029332
uucauugggacccagagac

SEQ ID NO: 2029334 - RNA, 19 nt, Artificial Sequence
  Description of Artificial Sequence: Synthetic oligonucleotide
  Sense strand starting at position 2422 of SEQ ID NO: 1881243
aaggguuaaugagcagaua

SEQ ID NO: 2029335 - RNA, 19 nt, Artificial Sequence
  Description of Artificial Sequence: Synthetic oligonucleotide
  Antisense strand to SEQ ID NO: 2029334
uaucugcucauuaacccuu

SEQ ID NO: 2029336 - RNA, 19 nt, Artificial Sequence
  Description of Artificial Sequence: Synthetic oligonucleotide
  Sense strand starting at position 2553 of SEQ ID NO: 1881243
gguccucacuuggucugaa

SEQ ID NO: 2029337 - RNA, 19 nt, Artificial Sequence
  Description of Artificial Sequence: Synthetic oligonucleotide
  Antisense strand to SEQ ID NO: 2029336
uucagaccaagugaggacc

SEQ ID NO: 2029338 - RNA, 19 nt, Artificial Sequence
  Description of Artificial Sequence: Synthetic oligonucleotide
  Sense strand starting at position 2639 of SEQ ID NO: 1881243
acccuauaaggcugcuaau

SEQ ID NO: 2029339 - RNA, 19 nt, Artificial Sequence
  Description of Artificial Sequence: Synthetic oligonucleotide
  Antisense strand to SEQ ID NO: 2029338
auuagcagccuuauagggu

SEQ ID NO: 2029340 - RNA, 19 nt, Artificial Sequence
  Description of Artificial Sequence: Synthetic oligonucleotide
  Sense strand starting at position 2691 of SEQ ID NO: 1881243
gacagucauuucugggaaa

SEQ ID NO: 2029341 - RNA, 19 nt, Artificial Sequence
  Description of Artificial Sequence: Synthetic oligonucleotide
  Antisense strand to SEQ ID NO: 2029340
uuucccagaaaugacuguc

SEQ ID NO: 2029342 - RNA, 19 nt, Artificial Sequence
  Description of Artificial Sequence: Synthetic oligonucleotide
  Sense strand starting at position 2692 of SEQ ID NO: 1881243
acagucauuucugggaaag

SEQ ID NO: 2029343 - RNA, 19 nt, Artificial Sequence
  Description of Artificial Sequence: Synthetic oligonucleotide
  Antisense strand to SEQ ID NO: 2029342
cuuucccagaaaugacugu

SEQ ID NO: 2029344 - RNA, 19 nt, Artificial Sequence
  Description of Artificial Sequence: Synthetic oligonucleotide
  Sense strand starting at position 2694 of SEQ ID NO: 1881243
agucauuucugggaaagag

SEQ ID NO: 2029345 - RNA, 19 nt, Artificial Sequence
  Description of Artificial Sequence: Synthetic oligonucleotide
  Antisense strand to SEQ ID NO: 2029344
cucuuucccagaaaugacu

SEQ ID NO: 2029346 - RNA, 19 nt, Artificial Sequence
  Description of Artificial Sequence: Synthetic oligonucleotide
  Sense strand starting at position 2712 of SEQ ID NO: 1881243
ggcucucucccuggagcua

SEQ ID NO: 2029347 - RNA, 19 nt, Artificial Sequence
  Description of Artificial Sequence: Synthetic oligonucleotide
  Antisense strand to SEQ ID NO: 2029346
uagcuccagggagagagcc

SEQ ID NO: 2029348 - RNA, 19 nt, Artificial Sequence
  Description of Artificial Sequence: Synthetic oligonucleotide
  Sense strand starting at position 2782 of SEQ ID NO: 1881243
gcaugaguccagcagccuu

SEQ ID NO: 2029349 - RNA, 19 nt, Artificial Sequence
  Description of Artificial Sequence: Synthetic oligonucleotide
  Antisense strand to SEQ ID NO: 2029348
aaggcugcuggacucaugc

SEQ ID NO: 2029350 - RNA, 19 nt, Artificial Sequence
  Description of Artificial Sequence: Synthetic oligonucleotide
  Sense strand starting at position 2831 of SEQ ID NO: 1881243
aguccuuccuaaggaugaa

SEQ ID NO: 2029351 - RNA, 19 nt, Artificial Sequence
  Description of Artificial Sequence: Synthetic oligonucleotide
  Antisense strand to SEQ ID NO: 2029350
uucauccuuaggaaggacu

SEQ ID NO: 2029352 - RNA, 19 nt, Artificial Sequence
  Description of Artificial Sequence: Synthetic oligonucleotide
  Sense strand starting at position 2993 of SEQ ID NO: 1881243
ggaacacuguaaugaggau

SEQ ID NO: 2029353 - RNA, 19 nt, Artificial Sequence
  Description of Artificial Sequence: Synthetic oligonucleotide
  Antisense strand to SEQ ID NO: 2029352
auccucauuacaguguucc

SEQ ID NO: 2029354 - RNA, 19 nt, Artificial Sequence
  Description of Artificial Sequence: Synthetic oligonucleotide
  Sense strand starting at position 3002 of SEQ ID NO: 1881243
uaaugaggaugaugaauau

SEQ ID NO: 2029355 - RNA, 19 nt, Artificial Sequence
  Description of Artificial Sequence: Synthetic oligonucleotide
  Antisense strand to SEQ ID NO: 2029354
auauucaucauccucauua

SEQ ID NO: 2029356 - RNA, 19 nt, Artificial Sequence
  Description of Artificial Sequence: Synthetic oligonucleotide
  Sense strand starting at position 3101 of SEQ ID NO: 1881243
gcacacauguccuaccaca

SEQ ID NO: 2029357 - RNA, 19 nt, Artificial Sequence
  Description of Artificial Sequence: Synthetic oligonucleotide
  Antisense strand to SEQ ID NO: 2029356
ugugguaggacaugugugc

SEQ ID NO: 2029358 - RNA, 19 nt, Artificial Sequence
  Description of Artificial Sequence: Synthetic oligonucleotide
  Sense strand starting at position 3357 of SEQ ID NO: 1881243
cugagaaacuaguggguaa

SEQ ID NO: 2029359 - RNA, 19 nt, Artificial Sequence
  Description of Artificial Sequence: Synthetic oligonucleotide
  Antisense strand to SEQ ID NO: 2029358
uuacccacuaguuucucag

SEQ ID NO: 2029360 - RNA, 19 nt, Artificial Sequence
  Description of Artificial Sequence: Synthetic oligonucleotide
  Sense strand starting at position 3426 of SEQ ID NO: 1881243
aggugaugaccuuggccaa

SEQ ID NO: 2029361 - RNA, 19 nt, Artificial Sequence
  Description of Artificial Sequence: Synthetic oligonucleotide
  Antisense strand to SEQ ID NO: 2029360
uuggccaaggucaucaccu

SEQ ID NO: 2029362 - RNA, 19 nt, Artificial Sequence
  Description of Artificial Sequence: Synthetic oligonucleotide
  Sense strand starting at position 473 of SEQ ID NO: 1881244
ucaggaugcucugugagga

SEQ ID NO: 2029363 - RNA, 19 nt, Artificial Sequence
  Description of Artificial Sequence: Synthetic oligonucleotide
  Antisense strand to SEQ ID NO: 2029362
uccucacagagcauccuga

SEQ ID NO: 2029364 - RNA, 19 nt, Artificial Sequence
  Description of Artificial Sequence: Synthetic oligonucleotide
  Sense strand starting at position 474 of SEQ ID NO: 1881244
caggaugcucugugaggaa

SEQ ID NO: 2029365 - RNA, 19 nt, Artificial Sequence
  Description of Artificial Sequence: Synthetic oligonucleotide
  Antisense strand to SEQ ID NO: 2029364
uuccucacagagcauccug

SEQ ID NO: 2029366 - RNA, 19 nt, Artificial Sequence
  Description of Artificial Sequence: Synthetic oligonucleotide
  Sense strand starting at position 505 of SEQ ID NO: 1881244
ugagacuuccagugagcua

SEQ ID NO: 2029367 - RNA, 19 nt, Artificial Sequence
  Description of Artificial Sequence: Synthetic oligonucleotide
  Antisense strand to SEQ ID NO: 2029366
uagcucacuggaagucuca

SEQ ID NO: 2029368 - RNA, 19 nt, Artificial Sequence
  Description of Artificial Sequence: Synthetic oligonucleotide
  Sense strand starting at position 575 of SEQ ID NO: 1881244
gccuucuuaggccaacauu

SEQ ID NO: 2029369 - RNA, 19 nt, Artificial Sequence
  Description of Artificial Sequence: Synthetic oligonucleotide
  Antisense strand to SEQ ID NO: 2029368
aauguuggccuaagaaggc

SEQ ID NO: 2029370 - RNA, 19 nt, Artificial Sequence
  Description of Artificial Sequence: Synthetic oligonucleotide
  Sense strand starting at position 635 of SEQ ID NO: 1881244
auaaacaccuugucuugua

SEQ ID NO: 2029371 - RNA, 19 nt, Artificial Sequence
  Description of Artificial Sequence: Synthetic oligonucleotide
  Antisense strand to SEQ ID NO: 2029370
uacaagacaagguguuuau

SEQ ID NO: 2029372 - RNA, 19 nt, Artificial Sequence
  Description of Artificial Sequence: Synthetic oligonucleotide
  Sense strand starting at position 689 of SEQ ID NO: 1881244
ccaugcuucugauucuaga

SEQ ID NO: 2029373 - RNA, 19 nt, Artificial Sequence
  Description of Artificial Sequence: Synthetic oligonucleotide
  Antisense strand to SEQ ID NO: 2029372
ucuagaaucagaagcaugg

SEQ ID NO: 2029374 - RNA, 19 nt, Artificial Sequence
  Description of Artificial Sequence: Synthetic oligonucleotide
  Sense strand starting at position 697 of SEQ ID NO: 1881244
cugauucuagaccguuaau

SEQ ID NO: 2029375 - RNA, 19 nt, Artificial Sequence
  Description of Artificial Sequence: Synthetic oligonucleotide
  Antisense strand to SEQ ID NO: 2029374
auuaacggucuagaaucag

SEQ ID NO: 2029376 - RNA, 19 nt, Artificial Sequence
  Description of Artificial Sequence: Synthetic oligonucleotide
  Sense strand starting at position 700 of SEQ ID NO: 1881244
auucuagaccguuaaugca

SEQ ID NO: 2029377 - RNA, 19 nt, Artificial Sequence
  Description of Artificial Sequence: Synthetic oligonucleotide
  Antisense strand to SEQ ID NO: 2029376
ugcauuaacggucuagaau

SEQ ID NO: 2029378 - RNA, 19 nt, Artificial Sequence
  Description of Artificial Sequence: Synthetic oligonucleotide
  Sense strand starting at position 765 of SEQ ID NO: 1881244
acuaguauuuacugagaac

SEQ ID NO: 2029379 - RNA, 19 nt, Artificial Sequence
  Description of Artificial Sequence: Synthetic oligonucleotide
  Antisense strand to SEQ ID NO: 2029378
guucucaguaaauacuagu

SEQ ID NO: 2029380 - RNA, 19 nt, Artificial Sequence
  Description of Artificial Sequence: Synthetic oligonucleotide
  Sense strand starting at position 838 of SEQ ID NO: 1881244
ucaagauuguuggcauuag

SEQ ID NO: 2029381 - RNA, 19 nt, Artificial Sequence
  Description of Artificial Sequence: Synthetic oligonucleotide
  Antisense strand to SEQ ID NO: 2029380
cuaaugccaacaaucuuga

SEQ ID NO: 2029382 - RNA, 19 nt, Artificial Sequence
  Description of Artificial Sequence: Synthetic oligonucleotide
  Sense strand starting at position 899 of SEQ ID NO: 1881244
aagugagaucagcagcaaa

SEQ ID NO: 2029383 - RNA, 19 nt, Artificial Sequence
  Description of Artificial Sequence: Synthetic oligonucleotide
  Antisense strand to SEQ ID NO: 2029382
uuugcugcugaucucacuu

SEQ ID NO: 2029384 - RNA, 19 nt, Artificial Sequence
  Description of Artificial Sequence: Synthetic oligonucleotide
  Sense strand starting at position 1080 of SEQ ID NO: 1881244
cuuguucuguucuuaauuu

SEQ ID NO: 2029385 - RNA, 19 nt, Artificial Sequence
  Description of Artificial Sequence: Synthetic oligonucleotide
  Antisense strand to SEQ ID NO: 2029384
aaauuaagaacagaacaag

SEQ ID NO: 2029386 - RNA, 19 nt, Artificial Sequence
  Description of Artificial Sequence: Synthetic oligonucleotide
  Sense strand starting at position 1277 of SEQ ID NO: 1881244
auucuuacuucucuuguga

SEQ ID NO: 2029387 - RNA, 19 nt, Artificial Sequence
  Description of Artificial Sequence: Synthetic oligonucleotide
  Antisense strand to SEQ ID NO: 2029386
ucacaagagaaguaagaau

SEQ ID NO: 2029388 - RNA, 19 nt, Artificial Sequence
  Description of Artificial Sequence: Synthetic oligonucleotide
  Sense strand starting at position 1300 of SEQ ID NO: 1881244
acaguaucuccauaaaggu

SEQ ID NO: 2029389 - RNA, 19 nt, Artificial Sequence
  Description of Artificial Sequence: Synthetic oligonucleotide
  Antisense strand to SEQ ID NO: 2029388
accuuuauggagauacugu

SEQ ID NO: 2029390 - RNA, 19 nt, Artificial Sequence
  Description of Artificial Sequence: Synthetic oligonucleotide
  Sense strand starting at position 1307 of SEQ ID NO: 1881244
cuccauaaagguugcuaau

SEQ ID NO: 2029391 - RNA, 19 nt, Artificial Sequence
  Description of Artificial Sequence: Synthetic oligonucleotide
  Antisense strand to SEQ ID NO: 2029390
auuagcaaccuuuauggag

SEQ ID NO: 2029392 - RNA, 19 nt, Artificial Sequence
  Description of Artificial Sequence: Synthetic oligonucleotide
  Sense strand starting at position 1309 of SEQ ID NO: 1881244
ccauaaagguugcuaauca

SEQ ID NO: 2029393 - RNA, 19 nt, Artificial Sequence
  Description of Artificial Sequence: Synthetic oligonucleotide
  Antisense strand to SEQ ID NO: 2029392
ugauuagcaaccuuuaugg

SEQ ID NO: 2029394 - RNA, 19 nt, Artificial Sequence
  Description of Artificial Sequence: Synthetic oligonucleotide
  Sense strand starting at position 1313 of SEQ ID NO: 1881244
aaagguugcuaaucauguu

SEQ ID NO: 2029395 - RNA, 19 nt, Artificial Sequence
  Description of Artificial Sequence: Synthetic oligonucleotide
  Antisense strand to SEQ ID NO: 2029394
aacaugauuagcaaccuuu

SEQ ID NO: 2029396 - RNA, 19 nt, Artificial Sequence
  Description of Artificial Sequence: Synthetic oligonucleotide
  Sense strand starting at position 1328 of SEQ ID NO: 1881244
uguuguaaaguaggauaca

SEQ ID NO: 2029397 - RNA, 19 nt, Artificial Sequence
  Description of Artificial Sequence: Synthetic oligonucleotide
  Antisense strand to SEQ ID NO: 2029396
uguauccuacuuuacaaca

SEQ ID NO: 2029398 - RNA, 19 nt, Artificial Sequence
  Description of Artificial Sequence: Synthetic oligonucleotide
  Sense strand starting at position 1347 of SEQ ID NO: 1881244
gggcuuagaauguggguga

SEQ ID NO: 2029399 - RNA, 19 nt, Artificial Sequence
  Description of Artificial Sequence: Synthetic oligonucleotide
  Antisense strand to SEQ ID NO: 2029398
ucacccacauucuaagccc

SEQ ID NO: 2029400 - RNA, 19 nt, Artificial Sequence
  Description of Artificial Sequence: Synthetic oligonucleotide
  Sense strand starting at position 1350 of SEQ ID NO: 1881244
cuuagaaugugggugaacu

SEQ ID NO: 2029401 - RNA, 19 nt, Artificial Sequence
  Description of Artificial Sequence: Synthetic oligonucleotide
  Antisense strand to SEQ ID NO: 2029400
aguucacccacauucuaag

SEQ ID NO: 2029402 - RNA, 19 nt, Artificial Sequence
  Description of Artificial Sequence: Synthetic oligonucleotide
  Sense strand starting at position 1360 of SEQ ID NO: 1881244
gggugaacugcaugaggaa

SEQ ID NO: 2029403 - RNA, 19 nt, Artificial Sequence
  Description of Artificial Sequence: Synthetic oligonucleotide
  Antisense strand to SEQ ID NO: 2029402
uuccucaugcaguucaccc

SEQ ID NO: 2029404 - RNA, 19 nt, Artificial Sequence
  Description of Artificial Sequence: Synthetic oligonucleotide
  Sense strand starting at position 1611 of SEQ ID NO: 1881244
accuguuuauugucacaac

SEQ ID NO: 2029405 - RNA, 19 nt, Artificial Sequence
  Description of Artificial Sequence: Synthetic oligonucleotide
  Antisense strand to SEQ ID NO: 2029404
guugugacaauaaacaggu

SEQ ID NO: 2029406 - RNA, 19 nt, Artificial Sequence
  Description of Artificial Sequence: Synthetic oligonucleotide
  Sense strand starting at position 2059 of SEQ ID NO: 1881244
guaccuauccucuaggaau

SEQ ID NO: 2029407 - RNA, 19 nt, Artificial Sequence
  Description of Artificial Sequence: Synthetic oligonucleotide
  Antisense strand to SEQ ID NO: 2029406
auuccuagaggauagguac

SEQ ID NO: 2029408 - RNA, 19 nt, Artificial Sequence
  Description of Artificial Sequence: Synthetic oligonucleotide
  Sense strand starting at position 2261 of SEQ ID NO: 1881244
aaaggugugccagggauau

SEQ ID NO: 2029409 - RNA, 19 nt, Artificial Sequence
  Description of Artificial Sequence: Synthetic oligonucleotide
  Antisense strand to SEQ ID NO: 2029408
auaucccuggcacaccuuu

SEQ ID NO: 2029410 - RNA, 19 nt, Artificial Sequence
  Description of Artificial Sequence: Synthetic oligonucleotide
  Sense strand starting at position 2360 of SEQ ID NO: 1881244
acuucugaacguugacaga

SEQ ID NO: 2029411 - RNA, 19 nt, Artificial Sequence
  Description of Artificial Sequence: Synthetic oligonucleotide
  Antisense strand to SEQ ID NO: 2029410
ucugucaacguucagaagu

SEQ ID NO: 2029412 - RNA, 19 nt, Artificial Sequence
  Description of Artificial Sequence: Synthetic oligonucleotide
  Sense strand starting at position 2384 of SEQ ID NO: 1881244
cccuguguaucagcaacaa

SEQ ID NO: 2029413 - RNA, 19 nt, Artificial Sequence
  Description of Artificial Sequence: Synthetic oligonucleotide
  Antisense strand to SEQ ID NO: 2029412
uuguugcugauacacaggg

SEQ ID NO: 2029414 - RNA, 19 nt, Artificial Sequence
  Description of Artificial Sequence: Synthetic oligonucleotide
  Sense strand starting at position 2571 of SEQ ID NO: 1881244
agggcuacccuccauuaau

SEQ ID NO: 2029415 - RNA, 19 nt, Artificial Sequence
  Description of Artificial Sequence: Synthetic oligonucleotide
  Antisense strand to SEQ ID NO: 2029414
auuaauggaggguagcccu

SEQ ID NO: 2029416 - RNA, 19 nt, Artificial Sequence
  Description of Artificial Sequence: Synthetic oligonucleotide
  Sense strand starting at position 2585 of SEQ ID NO: 1881244
uuaauuagugucuaaugcu

SEQ ID NO: 2029417 - RNA, 19 nt, Artificial Sequence
  Description of Artificial Sequence: Synthetic oligonucleotide
  Antisense strand to SEQ ID NO: 2029416
agcauuagacacuaauuaa

SEQ ID NO: 2029418 - RNA, 19 nt, Artificial Sequence
  Description of Artificial Sequence: Synthetic oligonucleotide
  Sense strand starting at position 2645 of SEQ ID NO: 1881244
auccuauuacuuugguuua

SEQ ID NO: 2029419 - RNA, 19 nt, Artificial Sequence
  Description of Artificial Sequence: Synthetic oligonucleotide
  Antisense strand to SEQ ID NO: 2029418
uaaaccaaaguaauaggau

SEQ ID NO: 2029420 - RNA, 19 nt, Artificial Sequence
  Description of Artificial Sequence: Synthetic oligonucleotide
  Sense strand starting at position 2648 of SEQ ID NO: 1881244
cuauuacuuugguuuaaga

SEQ ID NO: 2029421 - RNA, 19 nt, Artificial Sequence
  Description of Artificial Sequence: Synthetic oligonucleotide
  Antisense strand to SEQ ID NO: 2029420
ucuuaaaccaaaguaauag

SEQ ID NO: 2029422 - RNA, 19 nt, Artificial Sequence
  Description of Artificial Sequence: Synthetic oligonucleotide
  Sense strand starting at position 2658 of SEQ ID NO: 1881244
gguuuaagaugggccagau

SEQ ID NO: 2029423 - RNA, 19 nt, Artificial Sequence
  Description of Artificial Sequence: Synthetic oligonucleotide
  Antisense strand to SEQ ID NO: 2029422
aucuggcccaucuuaaacc

SEQ ID NO: 2029424 - RNA, 19 nt, Artificial Sequence
  Description of Artificial Sequence: Synthetic oligonucleotide
  Sense strand starting at position 2754 of SEQ ID NO: 1881244
gucccauuagugugaauca

SEQ ID NO: 2029425 - RNA, 19 nt, Artificial Sequence
  Description of Artificial Sequence: Synthetic oligonucleotide
  Antisense strand to SEQ ID NO: 2029424
ugauucacacuaaugggac

SEQ ID NO: 2029426 - RNA, 19 nt, Artificial Sequence
  Description of Artificial Sequence: Synthetic oligonucleotide
  Sense strand starting at position 2850 of SEQ ID NO: 1881244
uuacaagguggcugacaau

SEQ ID NO: 2029427 - RNA, 19 nt, Artificial Sequence
  Description of Artificial Sequence: Synthetic oligonucleotide
  Antisense strand to SEQ ID NO: 2029426
auugucagccaccuuguaa

SEQ ID NO: 2029428 - RNA, 19 nt, Artificial Sequence
  Description of Artificial Sequence: Synthetic oligonucleotide
  Sense strand starting at position 2860 of SEQ ID NO: 1881244
gcugacaauugagcuuaua

SEQ ID NO: 2029429 - RNA, 19 nt, Artificial Sequence
  Description of Artificial Sequence: Synthetic oligonucleotide
  Antisense strand to SEQ ID NO: 2029428
uauaagcucaauugucagc

SEQ ID NO: 2029430 - RNA, 19 nt, Artificial Sequence
  Description of Artificial Sequence: Synthetic oligonucleotide
  Sense strand starting at position 3035 of SEQ ID NO: 1881244
gucauaacuuguucccuga

SEQ ID NO: 2029431 - RNA, 19 nt, Artificial Sequence
  Description of Artificial Sequence: Synthetic oligonucleotide
  Antisense strand to SEQ ID NO: 2029430
ucagggaacaaguuaugac

SEQ ID NO: 2029432 - RNA, 19 nt, Artificial Sequence
  Description of Artificial Sequence: Synthetic oligonucleotide
  Sense strand starting at position 3062 of SEQ ID NO: 1881244
cucuaauuaucgcuaauga

SEQ ID NO: 2029433 - RNA, 19 nt, Artificial Sequence
  Description of Artificial Sequence: Synthetic oligonucleotide
  Antisense strand to SEQ ID NO: 2029432
ucauuagcgauaauuagag

SEQ ID NO: 2029434 - RNA, 19 nt, Artificial Sequence
  Description of Artificial Sequence: Synthetic oligonucleotide
  Sense strand starting at position 3063 of SEQ ID NO: 1881244
ucuaauuaucgcuaaugau

SEQ ID NO: 2029435 - RNA, 19 nt, Artificial Sequence
  Description of Artificial Sequence: Synthetic oligonucleotide
  Antisense strand to SEQ ID NO: 2029434
aucauuagcgauaauuaga

SEQ ID NO: 2029436 - RNA, 19 nt, Artificial Sequence
  Description of Artificial Sequence: Synthetic oligonucleotide
  Sense strand starting at position 3125 of SEQ ID NO: 1881244
aggacuugggcuggcuaau

SEQ ID NO: 2029437 - RNA, 19 nt, Artificial Sequence
  Description of Artificial Sequence: Synthetic oligonucleotide
  Antisense strand to SEQ ID NO: 2029436
auuagccagcccaaguccu

SEQ ID NO: 2029438 - RNA, 19 nt, Artificial Sequence
  Description of Artificial Sequence: Synthetic oligonucleotide
  Sense strand starting at position 3423 of SEQ ID NO: 1881244
augcaugugccagggauuu

SEQ ID NO: 2029439 - RNA, 19 nt, Artificial Sequence
  Description of Artificial Sequence: Synthetic oligonucleotide
  Antisense strand to SEQ ID NO: 2029438
aaaucccuggcacaugcau

SEQ ID NO: 2029440 - RNA, 19 nt, Artificial Sequence
  Description of Artificial Sequence: Synthetic oligonucleotide
  Sense strand starting at position 3915 of SEQ ID NO: 1881244
ccauauguaucuguagacu

SEQ ID NO: 2029441 - RNA, 19 nt, Artificial Sequence
  Description of Artificial Sequence: Synthetic oligonucleotide
  Antisense strand to SEQ ID NO: 2029440
agucuacagauacauaugg

SEQ ID NO: 2029442 - RNA, 19 nt, Artificial Sequence
  Description of Artificial Sequence: Synthetic oligonucleotide
  Sense strand starting at position 153 of SEQ ID NO: 1881245
guaauacuuccguauaaag

SEQ ID NO: 2029443 - RNA, 19 nt, Artificial Sequence
  Description of Artificial Sequence: Synthetic oligonucleotide
  Antisense strand to SEQ ID NO: 2029442
cuuuauacggaaguauuac

SEQ ID NO: 2029444 - RNA, 19 nt, Artificial Sequence
  Description of Artificial Sequence: Synthetic oligonucleotide
  Sense strand starting at position 162 of SEQ ID NO: 1881245
ccguauaaaguauaugcaa

SEQ ID NO: 2029445 - RNA, 19 nt, Artificial Sequence
  Description of Artificial Sequence: Synthetic oligonucleotide
  Antisense strand to SEQ ID NO: 2029444
uugcauauacuuuauacgg

SEQ ID NO: 2029446 - RNA, 19 nt, Artificial Sequence
  Description of Artificial Sequence: Synthetic oligonucleotide
  Sense strand starting at position 310 of SEQ ID NO: 1881245
cagguaaauauacgugaga

SEQ ID NO: 2029447 - RNA, 19 nt, Artificial Sequence
  Description of Artificial Sequence: Synthetic oligonucleotide
  Antisense strand to SEQ ID NO: 2029446
ucucacguauauuuaccug

SEQ ID NO: 2029448 - RNA, 19 nt, Artificial Sequence
  Description of Artificial Sequence: Synthetic oligonucleotide
  Sense strand starting at position 311 of SEQ ID NO: 1881245
agguaaauauacgugagaa

SEQ ID NO: 2029449 - RNA, 19 nt, Artificial Sequence
  Description of Artificial Sequence: Synthetic oligonucleotide
  Antisense strand to SEQ ID NO: 2029448
uucucacguauauuuaccu

SEQ ID NO: 2029450 - RNA, 19 nt, Artificial Sequence
  Description of Artificial Sequence: Synthetic oligonucleotide
  Sense strand starting at position 312 of SEQ ID NO: 1881245
gguaaauauacgugagaaa

SEQ ID NO: 2029451 - RNA, 19 nt, Artificial Sequence
  Description of Artificial Sequence: Synthetic oligonucleotide
  Antisense strand to SEQ ID NO: 2029450
uuucucacguauauuuacc

SEQ ID NO: 2029452 - RNA, 19 nt, Artificial Sequence
  Description of Artificial Sequence: Synthetic oligonucleotide
  Sense strand starting at position 360 of SEQ ID NO: 1881245
aggauacugucacuguaag

SEQ ID NO: 2029453 - RNA, 19 nt, Artificial Sequence
  Description of Artificial Sequence: Synthetic oligonucleotide
  Antisense strand to SEQ ID NO: 2029452
cuuacagugacaguauccu

SEQ ID NO: 2029454 - RNA, 19 nt, Artificial Sequence
  Description of Artificial Sequence: Synthetic oligonucleotide
  Sense strand starting at position 361 of SEQ ID NO: 1881245
ggauacugucacuguaaga

SEQ ID NO: 2029455 - RNA, 19 nt, Artificial Sequence
  Description of Artificial Sequence: Synthetic oligonucleotide
  Antisense strand to SEQ ID NO: 2029454
ucuuacagugacaguaucc

SEQ ID NO: 2029456 - RNA, 19 nt, Artificial Sequence
  Description of Artificial Sequence: Synthetic oligonucleotide
  Sense strand starting at position 391 of SEQ ID NO: 1881245
ggauguguguauuuagucu

SEQ ID NO: 2029457 - RNA, 19 nt, Artificial Sequence
  Description of Artificial Sequence: Synthetic oligonucleotide
  Antisense strand to SEQ ID NO: 2029456
agacuaaauacacacaucc

SEQ ID NO: 2029458 - RNA, 19 nt, Artificial Sequence
  Description of Artificial Sequence: Synthetic oligonucleotide
  Sense strand starting at position 395 of SEQ ID NO: 1881245
guguguauuuagucuauau

SEQ ID NO: 2029459 - RNA, 19 nt, Artificial Sequence
  Description of Artificial Sequence: Synthetic oligonucleotide
  Antisense strand to SEQ ID NO: 2029458
auauagacuaaauacacac

SEQ ID NO: 2029460 - RNA, 19 nt, Artificial Sequence
  Description of Artificial Sequence: Synthetic oligonucleotide
  Sense strand starting at position 473 of SEQ ID NO: 1881245
uuuguuugauaacugacaa

SEQ ID NO: 2029461 - RNA, 19 nt, Artificial Sequence
  Description of Artificial Sequence: Synthetic oligonucleotide
  Antisense strand to SEQ ID NO: 2029460
uugucaguuaucaaacaaa

SEQ ID NO: 2029462 - RNA, 19 nt, Artificial Sequence
  Description of Artificial Sequence: Synthetic oligonucleotide
  Sense strand starting at position 565 of SEQ ID NO: 1881245
cauguauauguugauggau

SEQ ID NO: 2029463 - RNA, 19 nt, Artificial Sequence
  Description of Artificial Sequence: Synthetic oligonucleotide
  Antisense strand to SEQ ID NO: 2029462
auccaucaacauauacaug

SEQ ID NO: 2029464 - RNA, 19 nt, Artificial Sequence
  Description of Artificial Sequence: Synthetic oligonucleotide
  Sense strand starting at position 568 of SEQ ID NO: 1881245
guauauguugauggaugga

SEQ ID NO: 2029465 - RNA, 19 nt, Artificial Sequence
  Description of Artificial Sequence: Synthetic oligonucleotide
  Antisense strand to SEQ ID NO: 2029464
uccauccaucaacauauac

SEQ ID NO: 2029466 - RNA, 19 nt, Artificial Sequence
  Description of Artificial Sequence: Synthetic oligonucleotide
  Sense strand starting at position 626 of SEQ ID NO: 1881245
gagugauacaagcaguguu

SEQ ID NO: 2029467 - RNA, 19 nt, Artificial Sequence
  Description of Artificial Sequence: Synthetic oligonucleotide
  Antisense strand to SEQ ID NO: 2029466
aacacugcuuguaucacuc

SEQ ID NO: 2029468 - RNA, 19 nt, Artificial Sequence
  Description of Artificial Sequence: Synthetic oligonucleotide
  Sense strand starting at position 670 of SEQ ID NO: 1881245
gguauaacacugcagucau

SEQ ID NO: 2029469 - RNA, 19 nt, Artificial Sequence
  Description of Artificial Sequence: Synthetic oligonucleotide
  Antisense strand to SEQ ID NO: 2029468
augacugcaguguuauacc

SEQ ID NO: 2029470 - RNA, 19 nt, Artificial Sequence
  Description of Artificial Sequence: Synthetic oligonucleotide
  Sense strand starting at position 777 of SEQ ID NO: 1881245
ccaggucuuuguucugaaa

SEQ ID NO: 2029471 - RNA, 19 nt, Artificial Sequence
  Description of Artificial Sequence: Synthetic oligonucleotide
  Antisense strand to SEQ ID NO: 2029470
uuucagaacaaagaccugg

SEQ ID NO: 2029472 - RNA, 19 nt, Artificial Sequence
  Description of Artificial Sequence: Synthetic oligonucleotide
  Sense strand starting at position 851 of SEQ ID NO: 1881245
cugcauaaacagugacaca

SEQ ID NO: 2029473 - RNA, 19 nt, Artificial Sequence
  Description of Artificial Sequence: Synthetic oligonucleotide
  Antisense strand to SEQ ID NO: 2029472
ugugucacuguuuaugcag

SEQ ID NO: 2029474 - RNA, 19 nt, Artificial Sequence
  Description of Artificial Sequence: Synthetic oligonucleotide
  Sense strand starting at position 1241 of SEQ ID NO: 1881245
gcacauguauauguuaaca

SEQ ID NO: 2029475 - RNA, 19 nt, Artificial Sequence
  Description of Artificial Sequence: Synthetic oligonucleotide
  Antisense strand to SEQ ID NO: 2029474
uguuaacauauacaugugc

SEQ ID NO: 2029476 - RNA, 19 nt, Artificial Sequence
  Description of Artificial Sequence: Synthetic oligonucleotide
  Sense strand starting at position 1310 of SEQ ID NO: 1881245
ucaauaaggugcucaaaga

SEQ ID NO: 2029477 - RNA, 19 nt, Artificial Sequence
  Description of Artificial Sequence: Synthetic oligonucleotide
  Antisense strand to SEQ ID NO: 2029476
ucuuugagcaccuuauuga

SEQ ID NO: 2029478 - RNA, 19 nt, Artificial Sequence
  Description of Artificial Sequence: Synthetic oligonucleotide
  Sense strand starting at position 1744 of SEQ ID NO: 1881245
gaccaaagucacugcaagu

SEQ ID NO: 2029479 - RNA, 19 nt, Artificial Sequence
  Description of Artificial Sequence: Synthetic oligonucleotide
  Antisense strand to SEQ ID NO: 2029478
acuugcagugacuuugguc

SEQ ID NO: 2029480 - RNA, 19 nt, Artificial Sequence
  Description of Artificial Sequence: Synthetic oligonucleotide
  Sense strand starting at position 1955 of SEQ ID NO: 1881245
acauauaggaaguguguau

SEQ ID NO: 2029481 - RNA, 19 nt, Artificial Sequence
  Description of Artificial Sequence: Synthetic oligonucleotide
  Antisense strand to SEQ ID NO: 2029480
auacacacuuccuauaugu

SEQ ID NO: 2029482 - RNA, 19 nt, Artificial Sequence
  Description of Artificial Sequence: Synthetic oligonucleotide
  Sense strand starting at position 1959 of SEQ ID NO: 1881245
auaggaaguguguauacau

SEQ ID NO: 2029483 - RNA, 19 nt, Artificial Sequence
  Description of Artificial Sequence: Synthetic oligonucleotide
  Antisense strand to SEQ ID NO: 2029482
auguauacacacuuccuau

SEQ ID NO: 2029484 - RNA, 19 nt, Artificial Sequence
  Description of Artificial Sequence: Synthetic oligonucleotide
  Sense strand starting at position 2138 of SEQ ID NO: 1881245
auccacugauuccuuggaa

SEQ ID NO: 2029485 - RNA, 19 nt, Artificial Sequence
  Description of Artificial Sequence: Synthetic oligonucleotide
  Antisense strand to SEQ ID NO: 2029484
uuccaaggaaucaguggau

SEQ ID NO: 2029486 - RNA, 19 nt, Artificial Sequence
  Description of Artificial Sequence: Synthetic oligonucleotide
  Sense strand starting at position 2198 of SEQ ID NO: 1881245
gcaagagaaaccuggguuu

SEQ ID NO: 2029487 - RNA, 19 nt, Artificial Sequence
  Description of Artificial Sequence: Synthetic oligonucleotide
  Antisense strand to SEQ ID NO: 2029486
aaacccagguuucucuugc

SEQ ID NO: 2029488 - RNA, 19 nt, Artificial Sequence
  Description of Artificial Sequence: Synthetic oligonucleotide
  Sense strand starting at position 2201 of SEQ ID NO: 1881245
agagaaaccuggguuuggu

SEQ ID NO: 2029489 - RNA, 19 nt, Artificial Sequence
  Description of Artificial Sequence: Synthetic oligonucleotide
  Antisense strand to SEQ ID NO: 2029488
accaaacccagguuucucu

SEQ ID NO: 2029490 - RNA, 19 nt, Artificial Sequence
  Description of Artificial Sequence: Synthetic oligonucleotide
  Sense strand starting at position 2579 of SEQ ID NO: 1881245
gccagcaucaaguaggaau

SEQ ID NO: 2029491 - RNA, 19 nt, Artificial Sequence
  Description of Artificial Sequence: Synthetic oligonucleotide
  Antisense strand to SEQ ID NO: 2029490
auuccuacuugaugcuggc

SEQ ID NO: 2029492 - RNA, 19 nt, Artificial Sequence
  Description of Artificial Sequence: Synthetic oligonucleotide
  Sense strand starting at position 2704 of SEQ ID NO: 1881245
guaccuaaagugugucaaa

SEQ ID NO: 2029493 - RNA, 19 nt, Artificial Sequence
  Description of Artificial Sequence: Synthetic oligonucleotide
  Antisense strand to SEQ ID NO: 2029492
uuugacacacuuuagguac

SEQ ID NO: 2029494 - RNA, 19 nt, Artificial Sequence
  Description of Artificial Sequence: Synthetic oligonucleotide
  Sense strand starting at position 2948 of SEQ ID NO: 1881245
acggauuuaggcugucaug

SEQ ID NO: 2029495 - RNA, 19 nt, Artificial Sequence
  Description of Artificial Sequence: Synthetic oligonucleotide
  Antisense strand to SEQ ID NO: 2029494
caugacagccuaaauccgu

SEQ ID NO: 2029496 - RNA, 19 nt, Artificial Sequence
  Description of Artificial Sequence: Synthetic oligonucleotide
  Sense strand starting at position 2970 of SEQ ID NO: 1881245
augguuacucaaugcuuua

SEQ ID NO: 2029497 - RNA, 19 nt, Artificial Sequence
  Description of Artificial Sequence: Synthetic oligonucleotide
  Antisense strand to SEQ ID NO: 2029496
uaaagcauugaguaaccau

SEQ ID NO: 2029498 - RNA, 19 nt, Artificial Sequence
  Description of Artificial Sequence: Synthetic oligonucleotide
  Sense strand starting at position 2982 of SEQ ID NO: 1881245
ugcuuuaaauguccaaaga

SEQ ID NO: 2029499 - RNA, 19 nt, Artificial Sequence
  Description of Artificial Sequence: Synthetic oligonucleotide
  Antisense strand to SEQ ID NO: 2029498
ucuuuggacauuuaaagca

SEQ ID NO: 2029500 - RNA, 19 nt, Artificial Sequence
  Description of Artificial Sequence: Synthetic oligonucleotide
  Sense strand starting at position 2983 of SEQ ID NO: 1881245
gcuuuaaauguccaaagag

SEQ ID NO: 2029501 - RNA, 19 nt, Artificial Sequence
  Description of Artificial Sequence: Synthetic oligonucleotide
  Antisense strand to SEQ ID NO: 2029500
cucuuuggacauuuaaagc

SEQ ID NO: 2029502 - RNA, 19 nt, Artificial Sequence
  Description of Artificial Sequence: Synthetic oligonucleotide
  Sense strand starting at position 3169 of SEQ ID NO: 1881245
gaugaaggcacgugauauu

SEQ ID NO: 2029503 - RNA, 19 nt, Artificial Sequence
  Description of Artificial Sequence: Synthetic oligonucleotide
  Antisense strand to SEQ ID NO: 2029502
aauaucacgugccuucauc

SEQ ID NO: 2029504 - RNA, 19 nt, Artificial Sequence
  Description of Artificial Sequence: Synthetic oligonucleotide
  Sense strand starting at position 3241 of SEQ ID NO: 1881245
ugugcucgcauacaugaaa

SEQ ID NO: 2029505 - RNA, 19 nt, Artificial Sequence
  Description of Artificial Sequence: Synthetic oligonucleotide
  Antisense strand to SEQ ID NO: 2029504
uuucauguaugcgagcaca

SEQ ID NO: 2029506 - RNA, 19 nt, Artificial Sequence
  Description of Artificial Sequence: Synthetic oligonucleotide
  Sense strand starting at position 3372 of SEQ ID NO: 1881245
agcuuucugucauugacag

SEQ ID NO: 2029507 - RNA, 19 nt, Artificial Sequence
  Description of Artificial Sequence: Synthetic oligonucleotide
  Antisense strand to SEQ ID NO: 2029506
cugucaaugacagaaagcu

SEQ ID NO: 2029508 - RNA, 19 nt, Artificial Sequence
  Description of Artificial Sequence: Synthetic oligonucleotide
  Sense strand starting at position 3405 of SEQ ID NO: 1881245
ugcuuuagaguccagaaag

SEQ ID NO: 2029509 - RNA, 19 nt, Artificial Sequence
  Description of Artificial Sequence: Synthetic oligonucleotide
  Antisense strand to SEQ ID NO: 2029508
cuuucuggacucuaaagca

SEQ ID NO: 2029510 - RNA, 19 nt, Artificial Sequence
  Description of Artificial Sequence: Synthetic oligonucleotide
  Sense strand starting at position 3423 of SEQ ID NO: 1881245
ggaauuuguuugucuuggu

SEQ ID NO: 2029511 - RNA, 19 nt, Artificial Sequence
  Description of Artificial Sequence: Synthetic oligonucleotide
  Antisense strand to SEQ ID NO: 2029510
accaagacaaacaaauucc

SEQ ID NO: 2029512 - RNA, 19 nt, Artificial Sequence
  Description of Artificial Sequence: Synthetic oligonucleotide
  Sense strand starting at position 3431 of SEQ ID NO: 1881245
uuugucuuggucuggaaag

SEQ ID NO: 2029513 - RNA, 19 nt, Artificial Sequence
  Description of Artificial Sequence: Synthetic oligonucleotide
  Antisense strand to SEQ ID NO: 2029512
cuuuccagaccaagacaaa

SEQ ID NO: 2029514 - RNA, 19 nt, Artificial Sequence
  Description of Artificial Sequence: Synthetic oligonucleotide
  Sense strand starting at position 3433 of SEQ ID NO: 1881245
ugucuuggucuggaaagug

SEQ ID NO: 2029515 - RNA, 19 nt, Artificial Sequence
  Description of Artificial Sequence: Synthetic oligonucleotide
  Antisense strand to SEQ ID NO: 2029514
cacuuuccagaccaagaca

SEQ ID NO: 2029516 - RNA, 19 nt, Artificial Sequence
  Description of Artificial Sequence: Synthetic oligonucleotide
  Sense strand starting at position 3454 of SEQ ID NO: 1881245
ccaguuaaauaucuccagu

SEQ ID NO: 2029517 - RNA, 19 nt, Artificial Sequence
  Description of Artificial Sequence: Synthetic oligonucleotide
  Antisense strand to SEQ ID NO: 2029516
acuggagauauuuaacugg

SEQ ID NO: 2029518 - RNA, 19 nt, Artificial Sequence
  Description of Artificial Sequence: Synthetic oligonucleotide
  Sense strand starting at position 3456 of SEQ ID NO: 1881245
aguuaaauaucuccaguuc

SEQ ID NO: 2029519 - RNA, 19 nt, Artificial Sequence
  Description of Artificial Sequence: Synthetic oligonucleotide
  Antisense strand to SEQ ID NO: 2029518
gaacuggagauauuuaacu

SEQ ID NO: 2029520 - RNA, 19 nt, Artificial Sequence
  Description of Artificial Sequence: Synthetic oligonucleotide
  Sense strand starting at position 3927 of SEQ ID NO: 1881245
gccucaucucaggauggga

SEQ ID NO: 2029521 - RNA, 19 nt, Artificial Sequence
  Description of Artificial Sequence: Synthetic oligonucleotide
  Antisense strand to SEQ ID NO: 2029520
ucccauccugagaugaggc

SEQ ID NO: 2029522 - RNA, 19 nt, Artificial Sequence
  Description of Artificial Sequence: Synthetic oligonucleotide
  Sense strand starting at position 143 of SEQ ID NO: 1881246
ucacguacccaguagucau

SEQ ID NO: 2029523 - RNA, 19 nt, Artificial Sequence
  Description of Artificial Sequence: Synthetic oligonucleotide
  Antisense strand to SEQ ID NO: 2029522
augacuacuggguacguga

SEQ ID NO: 2029524 - RNA, 19 nt, Artificial Sequence
  Description of Artificial Sequence: Synthetic oligonucleotide
  Sense strand starting at position 883 of SEQ ID NO: 1881246
guccauuuauauugaaagu

SEQ ID NO: 2029525 - RNA, 19 nt, Artificial Sequence
  Description of Artificial Sequence: Synthetic oligonucleotide
  Antisense strand to SEQ ID NO: 2029524
acuuucaauauaaauggac

SEQ ID NO: 2029526 - RNA, 19 nt, Artificial Sequence
  Description of Artificial Sequence: Synthetic oligonucleotide
  Sense strand starting at position 1329 of SEQ ID NO: 1881246
agaaauaaguccuaucuag

SEQ ID NO: 2029527 - RNA, 19 nt, Artificial Sequence
  Description of Artificial Sequence: Synthetic oligonucleotide
  Antisense strand to SEQ ID NO: 2029526
cuagauaggacuuauuucu

SEQ ID NO: 2029528 - RNA, 19 nt, Artificial Sequence
  Description of Artificial Sequence: Synthetic oligonucleotide
  Sense strand starting at position 1394 of SEQ ID NO: 1881246
agacuaaguuuagagauuu

SEQ ID NO: 2029529 - RNA, 19 nt, Artificial Sequence
  Description of Artificial Sequence: Synthetic oligonucleotide
  Antisense strand to SEQ ID NO: 2029528
aaaucucuaaacuuagucu

SEQ ID NO: 2029530 - RNA, 19 nt, Artificial Sequence
  Description of Artificial Sequence: Synthetic oligonucleotide
  Sense strand starting at position 1413 of SEQ ID NO: 1881246
ggcgugagauagcugagua

SEQ ID NO: 2029531 - RNA, 19 nt, Artificial Sequence
  Description of Artificial Sequence: Synthetic oligonucleotide
  Antisense strand to SEQ ID NO: 2029530
uacucagcuaucucacgcc

SEQ ID NO: 2029532 - RNA, 19 nt, Artificial Sequence
  Description of Artificial Sequence: Synthetic oligonucleotide
  Sense strand starting at position 1414 of SEQ ID NO: 1881246
gcgugagauagcugaguag

SEQ ID NO: 2029533 - RNA, 19 nt, Artificial Sequence
  Description of Artificial Sequence: Synthetic oligonucleotide
  Antisense strand to SEQ ID NO: 2029532
cuacucagcuaucucacgc

SEQ ID NO: 2029534 - RNA, 19 nt, Artificial Sequence
  Description of Artificial Sequence: Synthetic oligonucleotide
  Sense strand starting at position 1417 of SEQ ID NO: 1881246
ugagauagcugaguagaag

SEQ ID NO: 2029535 - RNA, 19 nt, Artificial Sequence
  Description of Artificial Sequence: Synthetic oligonucleotide
  Antisense strand to SEQ ID NO: 2029534
cuucuacucagcuaucuca

SEQ ID NO: 2029536 - RNA, 19 nt, Artificial Sequence
  Description of Artificial Sequence: Synthetic oligonucleotide
  Sense strand starting at position 1418 of SEQ ID NO: 1881246
gagauagcugaguagaagu

SEQ ID NO: 2029537 - RNA, 19 nt, Artificial Sequence
  Description of Artificial Sequence: Synthetic oligonucleotide
  Antisense strand to SEQ ID NO: 2029536
acuucuacucagcuaucuc

SEQ ID NO: 2029538 - RNA, 19 nt, Artificial Sequence
  Description of Artificial Sequence: Synthetic oligonucleotide
  Sense strand starting at position 1425 of SEQ ID NO: 1881246
cugaguagaaguggguaau

SEQ ID NO: 2029539 - RNA, 19 nt, Artificial Sequence
  Description of Artificial Sequence: Synthetic oligonucleotide
  Antisense strand to SEQ ID NO: 2029538
auuacccacuucuacucag

SEQ ID NO: 2029540 - RNA, 19 nt, Artificial Sequence
  Description of Artificial Sequence: Synthetic oligonucleotide
  Sense strand starting at position 1426 of SEQ ID NO: 1881246
ugaguagaaguggguaaua

SEQ ID NO: 2029541 - RNA, 19 nt, Artificial Sequence
  Description of Artificial Sequence: Synthetic oligonucleotide
  Antisense strand to SEQ ID NO: 2029540
uauuacccacuucuacuca

SEQ ID NO: 2029542 - RNA, 19 nt, Artificial Sequence
  Description of Artificial Sequence: Synthetic oligonucleotide
  Sense strand starting at position 1694 of SEQ ID NO: 1881246
gacucaggaucaggagauu

SEQ ID NO: 2029543 - RNA, 19 nt, Artificial Sequence
  Description of Artificial Sequence: Synthetic oligonucleotide
  Antisense strand to SEQ ID NO: 2029542
aaucuccugauccugaguc

SEQ ID NO: 2029544 - RNA, 19 nt, Artificial Sequence
  Description of Artificial Sequence: Synthetic oligonucleotide
  Sense strand starting at position 1706 of SEQ ID NO: 1881246
ggagauuucucaugauccc

SEQ ID NO: 2029545 - RNA, 19 nt, Artificial Sequence
  Description of Artificial Sequence: Synthetic oligonucleotide
  Antisense strand to SEQ ID NO: 2029544
gggaucaugagaaaucucc

SEQ ID NO: 2029546 - RNA, 19 nt, Artificial Sequence
  Description of Artificial Sequence: Synthetic oligonucleotide
  Sense strand starting at position 1752 of SEQ ID NO: 1881246
caaagaguuauguggaguc

SEQ ID NO: 2029547 - RNA, 19 nt, Artificial Sequence
  Description of Artificial Sequence: Synthetic oligonucleotide
  Antisense strand to SEQ ID NO: 2029546
gacuccacauaacucuuug

SEQ ID NO: 2029548 - RNA, 19 nt, Artificial Sequence
  Description of Artificial Sequence: Synthetic oligonucleotide
  Sense strand starting at position 1754 of SEQ ID NO: 1881246
aagaguuauguggagucuu

SEQ ID NO: 2029549 - RNA, 19 nt, Artificial Sequence
  Description of Artificial Sequence: Synthetic oligonucleotide
  Antisense strand to SEQ ID NO: 2029548
aagacuccacauaacucuu

SEQ ID NO: 2029550 - RNA, 19 nt, Artificial Sequence
  Description of Artificial Sequence: Synthetic oligonucleotide
  Sense strand starting at position 1875 of SEQ ID NO: 1881246
cccucacgucuccaggaaa

SEQ ID NO: 2029551 - RNA, 19 nt, Artificial Sequence
  Description of Artificial Sequence: Synthetic oligonucleotide
  Antisense strand to SEQ ID NO: 2029550
uuuccuggagacgugaggg

SEQ ID NO: 2029552 - RNA, 19 nt, Artificial Sequence
  Description of Artificial Sequence: Synthetic oligonucleotide
  Sense strand starting at position 1900 of SEQ ID NO: 1881246
gaauccauguggcugaaga

SEQ ID NO: 2029553 - RNA, 19 nt, Artificial Sequence
  Description of Artificial Sequence: Synthetic oligonucleotide
  Antisense strand to SEQ ID NO: 2029552
ucuucagccacauggauuc

SEQ ID NO: 2029554 - RNA, 19 nt, Artificial Sequence
  Description of Artificial Sequence: Synthetic oligonucleotide
  Sense strand starting at position 2031 of SEQ ID NO: 1881246
accagaauucucggaucag

SEQ ID NO: 2029555 - RNA, 19 nt, Artificial Sequence
  Description of Artificial Sequence: Synthetic oligonucleotide
  Antisense strand to SEQ ID NO: 2029554
cugauccgagaauucuggu

SEQ ID NO: 2029556 - RNA, 19 nt, Artificial Sequence
  Description of Artificial Sequence: Synthetic oligonucleotide
  Sense strand starting at position 2032 of SEQ ID NO: 1881246
ccagaauucucggaucagg

SEQ ID NO: 2029557 - RNA, 19 nt, Artificial Sequence
  Description of Artificial Sequence: Synthetic oligonucleotide
  Antisense strand to SEQ ID NO: 2029556
ccugauccgagaauucugg

SEQ ID NO: 2029558 - RNA, 19 nt, Artificial Sequence
  Description of Artificial Sequence: Synthetic oligonucleotide
  Sense strand starting at position 2139 of SEQ ID NO: 1881246
gaguguacucagugauuag

SEQ ID NO: 2029559 - RNA, 19 nt, Artificial Sequence
  Description of Artificial Sequence: Synthetic oligonucleotide
  Antisense strand to SEQ ID NO: 2029558
cuaaucacugaguacacuc

SEQ ID NO: 2029560 - RNA, 19 nt, Artificial Sequence
  Description of Artificial Sequence: Synthetic oligonucleotide
  Sense strand starting at position 2239 of SEQ ID NO: 1881246
gcuacuucucacugagcaa

SEQ ID NO: 2029561 - RNA, 19 nt, Artificial Sequence
  Description of Artificial Sequence: Synthetic oligonucleotide
  Antisense strand to SEQ ID NO: 2029560
uugcucagugagaaguagc

SEQ ID NO: 2029562 - RNA, 19 nt, Artificial Sequence
  Description of Artificial Sequence: Synthetic oligonucleotide
  Sense strand starting at position 2317 of SEQ ID NO: 1881246
uccacuucccugggacaga

SEQ ID NO: 2029563 - RNA, 19 nt, Artificial Sequence
  Description of Artificial Sequence: Synthetic oligonucleotide
  Antisense strand to SEQ ID NO: 2029562
ucugucccagggaagugga

SEQ ID NO: 2029564 - RNA, 19 nt, Artificial Sequence
  Description of Artificial Sequence: Synthetic oligonucleotide
  Sense strand starting at position 2332 of SEQ ID NO: 1881246
cagagcucucagugggaaa

SEQ ID NO: 2029565 - RNA, 19 nt, Artificial Sequence
  Description of Artificial Sequence: Synthetic oligonucleotide
  Antisense strand to SEQ ID NO: 2029564
uuucccacugagagcucug

SEQ ID NO: 2029566 - RNA, 19 nt, Artificial Sequence
  Description of Artificial Sequence: Synthetic oligonucleotide
  Sense strand starting at position 2333 of SEQ ID NO: 1881246
agagcucucagugggaaag

SEQ ID NO: 2029567 - RNA, 19 nt, Artificial Sequence
  Description of Artificial Sequence: Synthetic oligonucleotide
  Antisense strand to SEQ ID NO: 2029566
cuuucccacugagagcucu

SEQ ID NO: 2029568 - RNA, 19 nt, Artificial Sequence
  Description of Artificial Sequence: Synthetic oligonucleotide
  Sense strand starting at position 2360 of SEQ ID NO: 1881246
ccauguuuguugcccuaca

SEQ ID NO: 2029569 - RNA, 19 nt, Artificial Sequence
  Description of Artificial Sequence: Synthetic oligonucleotide
  Antisense strand to SEQ ID NO: 2029568
uguagggcaacaaacaugg

SEQ ID NO: 2029570 - RNA, 19 nt, Artificial Sequence
  Description of Artificial Sequence: Synthetic oligonucleotide
  Sense strand starting at position 2657 of SEQ ID NO: 1881246
uccuguugcccuugggauu

SEQ ID NO: 2029571 - RNA, 19 nt, Artificial Sequence
  Description of Artificial Sequence: Synthetic oligonucleotide
  Antisense strand to SEQ ID NO: 2029570
aaucccaagggcaacagga

SEQ ID NO: 2029572 - RNA, 19 nt, Artificial Sequence
  Description of Artificial Sequence: Synthetic oligonucleotide
  Sense strand starting at position 2844 of SEQ ID NO: 1881246
aggauaaucgcucaaacca

SEQ ID NO: 2029573 - RNA, 19 nt, Artificial Sequence
  Description of Artificial Sequence: Synthetic oligonucleotide
  Antisense strand to SEQ ID NO: 2029572
ugguuugagcgauuauccu

SEQ ID NO: 2029574 - RNA, 19 nt, Artificial Sequence
  Description of Artificial Sequence: Synthetic oligonucleotide
  Sense strand starting at position 3062 of SEQ ID NO: 1881246
augacugguucucugaacu

SEQ ID NO: 2029575 - RNA, 19 nt, Artificial Sequence
  Description of Artificial Sequence: Synthetic oligonucleotide
  Antisense strand to SEQ ID NO: 2029574
aguucagagaaccagucau

SEQ ID NO: 2029576 - RNA, 19 nt, Artificial Sequence
  Description of Artificial Sequence: Synthetic oligonucleotide
  Sense strand starting at position 3155 of SEQ ID NO: 1881246
ucauuaguaucccugcaag

SEQ ID NO: 2029577 - RNA, 19 nt, Artificial Sequence
  Description of Artificial Sequence: Synthetic oligonucleotide
  Antisense strand to SEQ ID NO: 2029576
cuugcagggauacuaauga

SEQ ID NO: 2029578 - RNA, 19 nt, Artificial Sequence
  Description of Artificial Sequence: Synthetic oligonucleotide
  Sense strand starting at position 3158 of SEQ ID NO: 1881246
uuaguaucccugcaagaga

SEQ ID NO: 2029579 - RNA, 19 nt, Artificial Sequence
  Description of Artificial Sequence: Synthetic oligonucleotide
  Antisense strand to SEQ ID NO: 2029578
ucucuugcagggauacuaa

SEQ ID NO: 2029580 - RNA, 19 nt, Artificial Sequence
  Description of Artificial Sequence: Synthetic oligonucleotide
  Sense strand starting at position 3161 of SEQ ID NO: 1881246
guaucccugcaagagauaa

SEQ ID NO: 2029581 - RNA, 19 nt, Artificial Sequence
  Description of Artificial Sequence: Synthetic oligonucleotide
  Antisense strand to SEQ ID NO: 2029580
uuaucucuugcagggauac

SEQ ID NO: 2029582 - RNA, 19 nt, Artificial Sequence
  Description of Artificial Sequence: Synthetic oligonucleotide
  Sense strand starting at position 3278 of SEQ ID NO: 1881246
agagaaccagcgugagaua

SEQ ID NO: 2029583 - RNA, 19 nt, Artificial Sequence
  Description of Artificial Sequence: Synthetic oligonucleotide
  Antisense strand to SEQ ID NO: 2029582
uaucucacgcugguucucu

SEQ ID NO: 2029584 - RNA, 19 nt, Artificial Sequence
  Description of Artificial Sequence: Synthetic oligonucleotide
  Sense strand starting at position 3281 of SEQ ID NO: 1881246
gaaccagcgugagauacua

SEQ ID NO: 2029585 - RNA, 19 nt, Artificial Sequence
  Description of Artificial Sequence: Synthetic oligonucleotide
  Antisense strand to SEQ ID NO: 2029584
uaguaucucacgcugguuc

SEQ ID NO: 2029586 - RNA, 19 nt, Artificial Sequence
  Description of Artificial Sequence: Synthetic oligonucleotide
  Sense strand starting at position 3385 of SEQ ID NO: 1881246
gggcaugucaccuacaaag

SEQ ID NO: 2029587 - RNA, 19 nt, Artificial Sequence
  Description of Artificial Sequence: Synthetic oligonucleotide
  Antisense strand to SEQ ID NO: 2029586
cuuuguaggugacaugccc

SEQ ID NO: 2029588 - RNA, 19 nt, Artificial Sequence
  Description of Artificial Sequence: Synthetic oligonucleotide
  Sense strand starting at position 3387 of SEQ ID NO: 1881246
gcaugucaccuacaaagga

SEQ ID NO: 2029589 - RNA, 19 nt, Artificial Sequence
  Description of Artificial Sequence: Synthetic oligonucleotide
  Antisense strand to SEQ ID NO: 2029588
uccuuuguaggugacaugc

SEQ ID NO: 2029590 - RNA, 19 nt, Artificial Sequence
  Description of Artificial Sequence: Synthetic oligonucleotide
  Sense strand starting at position 3536 of SEQ ID NO: 1881246
ucauaaaccuaggagaaau

SEQ ID NO: 2029591 - RNA, 19 nt, Artificial Sequence
  Description of Artificial Sequence: Synthetic oligonucleotide
  Antisense strand to SEQ ID NO: 2029590
auuucuccuagguuuauga

SEQ ID NO: 2029592 - RNA, 19 nt, Artificial Sequence
  Description of Artificial Sequence: Synthetic oligonucleotide
  Sense strand starting at position 3553 of SEQ ID NO: 1881246
auuagauucuuucccgaua

SEQ ID NO: 2029593 - RNA, 19 nt, Artificial Sequence
  Description of Artificial Sequence: Synthetic oligonucleotide
  Antisense strand to SEQ ID NO: 2029592
uaucgggaaagaaucuaau

SEQ ID NO: 2029594 - RNA, 19 nt, Artificial Sequence
  Description of Artificial Sequence: Synthetic oligonucleotide
  Sense strand starting at position 3554 of SEQ ID NO: 1881246
uuagauucuuucccgauaa

SEQ ID NO: 2029595 - RNA, 19 nt, Artificial Sequence
  Description of Artificial Sequence: Synthetic oligonucleotide
  Antisense strand to SEQ ID NO: 2029594
uuaucgggaaagaaucuaa

SEQ ID NO: 2029596 - RNA, 19 nt, Artificial Sequence
  Description of Artificial Sequence: Synthetic oligonucleotide
  Sense strand starting at position 3556 of SEQ ID NO: 1881246
agauucuuucccgauaagc

SEQ ID NO: 2029597 - RNA, 19 nt, Artificial Sequence
  Description of Artificial Sequence: Synthetic oligonucleotide
  Antisense strand to SEQ ID NO: 2029596
gcuuaucgggaaagaaucu

SEQ ID NO: 2029598 - RNA, 19 nt, Artificial Sequence
  Description of Artificial Sequence: Synthetic oligonucleotide
  Sense strand starting at position 3643 of SEQ ID NO: 1881246
gaaagcaaagacuguuaua

SEQ ID NO: 2029599 - RNA, 19 nt, Artificial Sequence
  Description of Artificial Sequence: Synthetic oligonucleotide
  Antisense strand to SEQ ID NO: 2029598
uauaacagucuuugcuuuc

SEQ ID NO: 2029600 - RNA, 19 nt, Artificial Sequence
  Description of Artificial Sequence: Synthetic oligonucleotide
  Sense strand starting at position 119 of SEQ ID NO: 1881247
cagagaacugccugcagaa

SEQ ID NO: 2029601 - RNA, 19 nt, Artificial Sequence
  Description of Artificial Sequence: Synthetic oligonucleotide
  Antisense strand to SEQ ID NO: 2029600
uucugcaggcaguucucug

SEQ ID NO: 2029602 - RNA, 19 nt, Artificial Sequence
  Description of Artificial Sequence: Synthetic oligonucleotide
  Sense strand starting at position 167 of SEQ ID NO: 1881247
cucuguuguuuauuuguca

SEQ ID NO: 2029603 - RNA, 19 nt, Artificial Sequence
  Description of Artificial Sequence: Synthetic oligonucleotide
  Antisense strand to SEQ ID NO: 2029602
ugacaaauaaacaacagag

SEQ ID NO: 2029604 - RNA, 19 nt, Artificial Sequence
  Description of Artificial Sequence: Synthetic oligonucleotide
  Sense strand starting at position 170 of SEQ ID NO: 1881247
uguuguuuauuugucagua

SEQ ID NO: 2029605 - RNA, 19 nt, Artificial Sequence
  Description of Artificial Sequence: Synthetic oligonucleotide
  Antisense strand to SEQ ID NO: 2029604
uacugacaaauaaacaaca

SEQ ID NO: 2029606 - RNA, 19 nt, Artificial Sequence
  Description of Artificial Sequence: Synthetic oligonucleotide
  Sense strand starting at position 171 of SEQ ID NO: 1881247
guuguuuauuugucaguau

SEQ ID NO: 2029607 - RNA, 19 nt, Artificial Sequence
  Description of Artificial Sequence: Synthetic oligonucleotide
  Antisense strand to SEQ ID NO: 2029606
auacugacaaauaaacaac

SEQ ID NO: 2029608 - RNA, 19 nt, Artificial Sequence
  Description of Artificial Sequence: Synthetic oligonucleotide
  Sense strand starting at position 174 of SEQ ID NO: 1881247
guuuauuugucaguaucag

SEQ ID NO: 2029609 - RNA, 19 nt, Artificial Sequence
  Description of Artificial Sequence: Synthetic oligonucleotide
  Antisense strand to SEQ ID NO: 2029608
cugauacugacaaauaaac

SEQ ID NO: 2029610 - RNA, 19 nt, Artificial Sequence
  Description of Artificial Sequence: Synthetic oligonucleotide
  Sense strand starting at position 289 of SEQ ID NO: 1881247
ucaauagugauaggauugu

SEQ ID NO: 2029611 - RNA, 19 nt, Artificial Sequence
  Description of Artificial Sequence: Synthetic oligonucleotide
  Antisense strand to SEQ ID NO: 2029610
acaauccuaucacuauuga

SEQ ID NO: 2029612 - RNA, 19 nt, Artificial Sequence
  Description of Artificial Sequence: Synthetic oligonucleotide
  Sense strand starting at position 305 of SEQ ID NO: 1881247
uguguuucuagguagcaaa

SEQ ID NO: 2029613 - RNA, 19 nt, Artificial Sequence
  Description of Artificial Sequence: Synthetic oligonucleotide
  Antisense strand to SEQ ID NO: 2029612
uuugcuaccuagaaacaca

SEQ ID NO: 2029614 - RNA, 19 nt, Artificial Sequence
  Description of Artificial Sequence: Synthetic oligonucleotide
  Sense strand starting at position 356 of SEQ ID NO: 1881247
ugagauguauaacuuuaca

SEQ ID NO: 2029615 - RNA, 19 nt, Artificial Sequence
  Description of Artificial Sequence: Synthetic oligonucleotide
  Antisense strand to SEQ ID NO: 2029614
uguaaaguuauacaucuca

SEQ ID NO: 2029616 - RNA, 19 nt, Artificial Sequence
  Description of Artificial Sequence: Synthetic oligonucleotide
  Sense strand starting at position 642 of SEQ ID NO: 1881247
cccagaguauuccuuacuc

SEQ ID NO: 2029617 - RNA, 19 nt, Artificial Sequence
  Description of Artificial Sequence: Synthetic oligonucleotide
  Antisense strand to SEQ ID NO: 2029616
gaguaaggaauacucuggg

SEQ ID NO: 2029618 - RNA, 19 nt, Artificial Sequence
  Description of Artificial Sequence: Synthetic oligonucleotide
  Sense strand starting at position 646 of SEQ ID NO: 1881247
gaguauuccuuacucagag

SEQ ID NO: 2029619 - RNA, 19 nt, Artificial Sequence
  Description of Artificial Sequence: Synthetic oligonucleotide
  Antisense strand to SEQ ID NO: 2029618
cucugaguaaggaauacuc

SEQ ID NO: 2029620 - RNA, 19 nt, Artificial Sequence
  Description of Artificial Sequence: Synthetic oligonucleotide
  Sense strand starting at position 647 of SEQ ID NO: 1881247
aguauuccuuacucagaga

SEQ ID NO: 2029621 - RNA, 19 nt, Artificial Sequence
  Description of Artificial Sequence: Synthetic oligonucleotide
  Antisense strand to SEQ ID NO: 2029620
ucucugaguaaggaauacu

SEQ ID NO: 2029622 - RNA, 19 nt, Artificial Sequence
  Description of Artificial Sequence: Synthetic oligonucleotide
  Sense strand starting at position 660 of SEQ ID NO: 1881247
cagagagauugcuuuagga

SEQ ID NO: 2029623 - RNA, 19 nt, Artificial Sequence
  Description of Artificial Sequence: Synthetic oligonucleotide
  Antisense strand to SEQ ID NO: 2029622
uccuaaagcaaucucucug

SEQ ID NO: 2029624 - RNA, 19 nt, Artificial Sequence
  Description of Artificial Sequence: Synthetic oligonucleotide
  Sense strand starting at position 956 of SEQ ID NO: 1881247
aguaguaauccuuaacaug

SEQ ID NO: 2029625 - RNA, 19 nt, Artificial Sequence
  Description of Artificial Sequence: Synthetic oligonucleotide
  Antisense strand to SEQ ID NO: 2029624
cauguuaaggauuacuacu

SEQ ID NO: 2029626 - RNA, 19 nt, Artificial Sequence
  Description of Artificial Sequence: Synthetic oligonucleotide
  Sense strand starting at position 1113 of SEQ ID NO: 1881247
gcacacugucagugagaag

SEQ ID NO: 2029627 - RNA, 19 nt, Artificial Sequence
  Description of Artificial Sequence: Synthetic oligonucleotide
  Antisense strand to SEQ ID NO: 2029626
cuucucacugacagugugc

SEQ ID NO: 2029628 - RNA, 19 nt, Artificial Sequence
  Description of Artificial Sequence: Synthetic oligonucleotide
  Sense strand starting at position 1277 of SEQ ID NO: 1881247
gugaauuucuuagcuugcu

SEQ ID NO: 2029629 - RNA, 19 nt, Artificial Sequence
  Description of Artificial Sequence: Synthetic oligonucleotide
  Antisense strand to SEQ ID NO: 2029628
agcaagcuaagaaauucac

SEQ ID NO: 2029630 - RNA, 19 nt, Artificial Sequence
  Description of Artificial Sequence: Synthetic oligonucleotide
  Sense strand starting at position 1352 of SEQ ID NO: 1881247
gggaccugcucuccuuaau

SEQ ID NO: 2029631 - RNA, 19 nt, Artificial Sequence
  Description of Artificial Sequence: Synthetic oligonucleotide
  Antisense strand to SEQ ID NO: 2029630
auuaaggagagcagguccc

SEQ ID NO: 2029632 - RNA, 19 nt, Artificial Sequence
  Description of Artificial Sequence: Synthetic oligonucleotide
  Sense strand starting at position 1406 of SEQ ID NO: 1881247
ggaccacguucccuacaau

SEQ ID NO: 2029633 - RNA, 19 nt, Artificial Sequence
  Description of Artificial Sequence: Synthetic oligonucleotide
  Antisense strand to SEQ ID NO: 2029632
auuguagggaacguggucc

SEQ ID NO: 2029634 - RNA, 19 nt, Artificial Sequence
  Description of Artificial Sequence: Synthetic oligonucleotide
  Sense strand starting at position 1799 of SEQ ID NO: 1881247
guguacuaugcucaguaga

SEQ ID NO: 2029635 - RNA, 19 nt, Artificial Sequence
  Description of Artificial Sequence: Synthetic oligonucleotide
  Antisense strand to SEQ ID NO: 2029634
ucuacugagcauaguacac

SEQ ID NO: 2029636 - RNA, 19 nt, Artificial Sequence
  Description of Artificial Sequence: Synthetic oligonucleotide
  Sense strand starting at position 1801 of SEQ ID NO: 1881247
guacuaugcucaguagaaa

SEQ ID NO: 2029637 - RNA, 19 nt, Artificial Sequence
  Description of Artificial Sequence: Synthetic oligonucleotide
  Antisense strand to SEQ ID NO: 2029636
uuucuacugagcauaguac

SEQ ID NO: 2029638 - RNA, 19 nt, Artificial Sequence
  Description of Artificial Sequence: Synthetic oligonucleotide
  Sense strand starting at position 1804 of SEQ ID NO: 1881247
cuaugcucaguagaaacuu

SEQ ID NO: 2029639 - RNA, 19 nt, Artificial Sequence
  Description of Artificial Sequence: Synthetic oligonucleotide
  Antisense strand to SEQ ID NO: 2029638
aaguuucuacugagcauag

SEQ ID NO: 2029640 - RNA, 19 nt, Artificial Sequence
  Description of Artificial Sequence: Synthetic oligonucleotide
  Sense strand starting at position 1845 of SEQ ID NO: 1881247
augucaaagcgagaauguu

SEQ ID NO: 2029641 - RNA, 19 nt, Artificial Sequence
  Description of Artificial Sequence: Synthetic oligonucleotide
  Antisense strand to SEQ ID NO: 2029640
aacauucucgcuuugacau

SEQ ID NO: 2029642 - RNA, 19 nt, Artificial Sequence
  Description of Artificial Sequence: Synthetic oligonucleotide
  Sense strand starting at position 1916 of SEQ ID NO: 1881247
agagaaacacuuugcuguu

SEQ ID NO: 2029643 - RNA, 19 nt, Artificial Sequence
  Description of Artificial Sequence: Synthetic oligonucleotide
  Antisense strand to SEQ ID NO: 2029642
aacagcaaaguguuucucu

SEQ ID NO: 2029644 - RNA, 19 nt, Artificial Sequence
  Description of Artificial Sequence: Synthetic oligonucleotide
  Sense strand starting at position 1917 of SEQ ID NO: 1881247
gagaaacacuuugcuguuu

SEQ ID NO: 2029645 - RNA, 19 nt, Artificial Sequence
  Description of Artificial Sequence: Synthetic oligonucleotide
  Antisense strand to SEQ ID NO: 2029644
aaacagcaaaguguuucuc

SEQ ID NO: 2029646 - RNA, 19 nt, Artificial Sequence
  Description of Artificial Sequence: Synthetic oligonucleotide
  Sense strand starting at position 1987 of SEQ ID NO: 1881247
aaggcaaaguguuucucaa

SEQ ID NO: 2029647 - RNA, 19 nt, Artificial Sequence
  Description of Artificial Sequence: Synthetic oligonucleotide
  Antisense strand to SEQ ID NO: 2029646
uugagaaacacuuugccuu

SEQ ID NO: 2029648 - RNA, 19 nt, Artificial Sequence
  Description of Artificial Sequence: Synthetic oligonucleotide
  Sense strand starting at position 1989 of SEQ ID NO: 1881247
ggcaaaguguuucucaaag

SEQ ID NO: 2029649 - RNA, 19 nt, Artificial Sequence
  Description of Artificial Sequence: Synthetic oligonucleotide
  Antisense strand to SEQ ID NO: 2029648
cuuugagaaacacuuugcc

SEQ ID NO: 2029650 - RNA, 19 nt, Artificial Sequence
  Description of Artificial Sequence: Synthetic oligonucleotide
  Sense strand starting at position 2290 of SEQ ID NO: 1881247
acaaaugagccaugucuau

SEQ ID NO: 2029651 - RNA, 19 nt, Artificial Sequence
  Description of Artificial Sequence: Synthetic oligonucleotide
  Antisense strand to SEQ ID NO: 2029650
auagacauggcucauuugu

SEQ ID NO: 2029652 - RNA, 19 nt, Artificial Sequence
  Description of Artificial Sequence: Synthetic oligonucleotide
  Sense strand starting at position 2294 of SEQ ID NO: 1881247
augagccaugucuaugauu

SEQ ID NO: 2029653 - RNA, 19 nt, Artificial Sequence
  Description of Artificial Sequence: Synthetic oligonucleotide
  Antisense strand to SEQ ID NO: 2029652
aaucauagacauggcucau

SEQ ID NO: 2029654 - RNA, 19 nt, Artificial Sequence
  Description of Artificial Sequence: Synthetic oligonucleotide
  Sense strand starting at position 2796 of SEQ ID NO: 1881247
agcuuuauuggaggauaua

SEQ ID NO: 2029655 - RNA, 19 nt, Artificial Sequence
  Description of Artificial Sequence: Synthetic oligonucleotide
  Antisense strand to SEQ ID NO: 2029654
uauauccuccaauaaagcu

SEQ ID NO: 2029656 - RNA, 19 nt, Artificial Sequence
  Description of Artificial Sequence: Synthetic oligonucleotide
  Sense strand starting at position 2834 of SEQ ID NO: 1881247
auaugcaauuggguauaua

SEQ ID NO: 2029657 - RNA, 19 nt, Artificial Sequence
  Description of Artificial Sequence: Synthetic oligonucleotide
  Antisense strand to SEQ ID NO: 2029656
uauauacccaauugcauau

SEQ ID NO: 2029658 - RNA, 19 nt, Artificial Sequence
  Description of Artificial Sequence: Synthetic oligonucleotide
  Sense strand starting at position 2835 of SEQ ID NO: 1881247
uaugcaauuggguauauaa

SEQ ID NO: 2029659 - RNA, 19 nt, Artificial Sequence
  Description of Artificial Sequence: Synthetic oligonucleotide
  Antisense strand to SEQ ID NO: 2029658
uuauauacccaauugcaua

SEQ ID NO: 2029660 - RNA, 19 nt, Artificial Sequence
  Description of Artificial Sequence: Synthetic oligonucleotide
  Sense strand starting at position 2837 of SEQ ID NO: 1881247
ugcaauuggguauauaauc

SEQ ID NO: 2029661 - RNA, 19 nt, Artificial Sequence
  Description of Artificial Sequence: Synthetic oligonucleotide
  Antisense strand to SEQ ID NO: 2029660
gauuauauacccaauugca

SEQ ID NO: 2029662 - RNA, 19 nt, Artificial Sequence
  Description of Artificial Sequence: Synthetic oligonucleotide
  Sense strand starting at position 2924 of SEQ ID NO: 1881247
agguuuaucaaagguugca

SEQ ID NO: 2029663 - RNA, 19 nt, Artificial Sequence
  Description of Artificial Sequence: Synthetic oligonucleotide
  Antisense strand to SEQ ID NO: 2029662
ugcaaccuuugauaaaccu

SEQ ID NO: 2029664 - RNA, 19 nt, Artificial Sequence
  Description of Artificial Sequence: Synthetic oligonucleotide
  Sense strand starting at position 3510 of SEQ ID NO: 1881247
auaacaaugggaugucguu

SEQ ID NO: 2029665 - RNA, 19 nt, Artificial Sequence
  Description of Artificial Sequence: Synthetic oligonucleotide
  Antisense strand to SEQ ID NO: 2029664
aacgacaucccauuguuau

SEQ ID NO: 2029666 - RNA, 19 nt, Artificial Sequence
  Description of Artificial Sequence: Synthetic oligonucleotide
  Sense strand starting at position 3602 of SEQ ID NO: 1881247
gcaacauugguggaagugu

SEQ ID NO: 2029667 - RNA, 19 nt, Artificial Sequence
  Description of Artificial Sequence: Synthetic oligonucleotide
  Antisense strand to SEQ ID NO: 2029666
acacuuccaccaauguugc

SEQ ID NO: 2029668 - RNA, 19 nt, Artificial Sequence
  Description of Artificial Sequence: Synthetic oligonucleotide
  Sense strand starting at position 3613 of SEQ ID NO: 1881247
ggaaguguaaacugguauu

SEQ ID NO: 2029669 - RNA, 19 nt, Artificial Sequence
  Description of Artificial Sequence: Synthetic oligonucleotide
  Antisense strand to SEQ ID NO: 2029668
aauaccaguuuacacuucc

SEQ ID NO: 2029670 - RNA, 19 nt, Artificial Sequence
  Description of Artificial Sequence: Synthetic oligonucleotide
  Sense strand starting at position 3730 of SEQ ID NO: 1881247
acaugaucaugagauauuu

SEQ ID NO: 2029671 - RNA, 19 nt, Artificial Sequence
  Description of Artificial Sequence: Synthetic oligonucleotide
  Antisense strand to SEQ ID NO: 2029670
aaauaucucaugaucaugu

SEQ ID NO: 2029672 - RNA, 19 nt, Artificial Sequence
  Description of Artificial Sequence: Synthetic oligonucleotide
  Sense strand starting at position 3824 of SEQ ID NO: 1881247
augauaaauagugguaagu

SEQ ID NO: 2029673 - RNA, 19 nt, Artificial Sequence
  Description of Artificial Sequence: Synthetic oligonucleotide
  Antisense strand to SEQ ID NO: 2029672
acuuaccacuauuuaucau

SEQ ID NO: 2029674 - RNA, 19 nt, Artificial Sequence
  Description of Artificial Sequence: Synthetic oligonucleotide
  Sense strand starting at position 3860 of SEQ ID NO: 1881247
auacuauauagugguggaa

SEQ ID NO: 2029675 - RNA, 19 nt, Artificial Sequence
  Description of Artificial Sequence: Synthetic oligonucleotide
  Antisense strand to SEQ ID NO: 2029674
uuccaccacuauauaguau

SEQ ID NO: 2029676 - RNA, 19 nt, Artificial Sequence
  Description of Artificial Sequence: Synthetic oligonucleotide
  Sense strand starting at position 3863 of SEQ ID NO: 1881247
cuauauagugguggaaauc

SEQ ID NO: 2029677 - RNA, 19 nt, Artificial Sequence
  Description of Artificial Sequence: Synthetic oligonucleotide
  Antisense strand to SEQ ID NO: 2029676
gauuuccaccacuauauag

SEQ ID NO: 2029678 - RNA, 19 nt, Artificial Sequence
  Description of Artificial Sequence: Synthetic oligonucleotide
  Sense strand starting at position 3933 of SEQ ID NO: 1881247
aguauugaagaauguauac

SEQ ID NO: 2029679 - RNA, 19 nt, Artificial Sequence
  Description of Artificial Sequence: Synthetic oligonucleotide
  Antisense strand to SEQ ID NO: 2029678
guauacauucuucaauacu

SEQ ID NO: 2029680 - RNA, 19 nt, Artificial Sequence
  Description of Artificial Sequence: Synthetic oligonucleotide
  Sense strand starting at position 279 of SEQ ID NO: 1881248
auuagaaagcaaugucaca

SEQ ID NO: 2029681 - RNA, 19 nt, Artificial Sequence
  Description of Artificial Sequence: Synthetic oligonucleotide
  Antisense strand to SEQ ID NO: 2029680
ugugacauugcuuucuaau

SEQ ID NO: 2029682 - RNA, 19 nt, Artificial Sequence
  Description of Artificial Sequence: Synthetic oligonucleotide
  Sense strand starting at position 464 of SEQ ID NO: 1881248
aagggagaaagguguaguu

SEQ ID NO: 2029683 - RNA, 19 nt, Artificial Sequence
  Description of Artificial Sequence: Synthetic oligonucleotide
  Antisense strand to SEQ ID NO: 2029682
aacuacaccuuucucccuu

SEQ ID NO: 2029684 - RNA, 19 nt, Artificial Sequence
  Description of Artificial Sequence: Synthetic oligonucleotide
  Sense strand starting at position 584 of SEQ ID NO: 1881248
cugcucuauccacaagaug

SEQ ID NO: 2029685 - RNA, 19 nt, Artificial Sequence
  Description of Artificial Sequence: Synthetic oligonucleotide
  Antisense strand to SEQ ID NO: 2029684
caucuuguggauagagcag

SEQ ID NO: 2029686 - RNA, 19 nt, Artificial Sequence
  Description of Artificial Sequence: Synthetic oligonucleotide
  Sense strand starting at position 742 of SEQ ID NO: 1881248
agugguuuggaucagugau

SEQ ID NO: 2029687 - RNA, 19 nt, Artificial Sequence
  Description of Artificial Sequence: Synthetic oligonucleotide
  Antisense strand to SEQ ID NO: 2029686
aucacugauccaaaccacu

SEQ ID NO: 2029688 - RNA, 19 nt, Artificial Sequence
  Description of Artificial Sequence: Synthetic oligonucleotide
  Sense strand starting at position 962 of SEQ ID NO: 1881248
agaugaaaucugugagagc

SEQ ID NO: 2029689 - RNA, 19 nt, Artificial Sequence
  Description of Artificial Sequence: Synthetic oligonucleotide
  Antisense strand to SEQ ID NO: 2029688
gcucucacagauuucaucu

SEQ ID NO: 2029690 - RNA, 19 nt, Artificial Sequence
  Description of Artificial Sequence: Synthetic oligonucleotide
  Sense strand starting at position 1100 of SEQ ID NO: 1881248
uuaccuguucugggagaaa

SEQ ID NO: 2029691 - RNA, 19 nt, Artificial Sequence
  Description of Artificial Sequence: Synthetic oligonucleotide
  Antisense strand to SEQ ID NO: 2029690
uuucucccagaacagguaa

SEQ ID NO: 2029692 - RNA, 19 nt, Artificial Sequence
  Description of Artificial Sequence: Synthetic oligonucleotide
  Sense strand starting at position 1445 of SEQ ID NO: 1881248
uggcuuucugcagcaaugu

SEQ ID NO: 2029693 - RNA, 19 nt, Artificial Sequence
  Description of Artificial Sequence: Synthetic oligonucleotide
  Antisense strand to SEQ ID NO: 2029692
acauugcugcagaaagcca

SEQ ID NO: 2029694 - RNA, 19 nt, Artificial Sequence
  Description of Artificial Sequence: Synthetic oligonucleotide
  Sense strand starting at position 1508 of SEQ ID NO: 1881248
acaaucuuguaagugggau

SEQ ID NO: 2029695 - RNA, 19 nt, Artificial Sequence
  Description of Artificial Sequence: Synthetic oligonucleotide
  Antisense strand to SEQ ID NO: 2029694
aucccacuuacaagauugu

SEQ ID NO: 2029696 - RNA, 19 nt, Artificial Sequence
  Description of Artificial Sequence: Synthetic oligonucleotide
  Sense strand starting at position 1704 of SEQ ID NO: 1881248
cuuuaaagccaugauggua

SEQ ID NO: 2029697 - RNA, 19 nt, Artificial Sequence
  Description of Artificial Sequence: Synthetic oligonucleotide
  Antisense strand to SEQ ID NO: 2029696
uaccaucauggcuuuaaag

SEQ ID NO: 2029698 - RNA, 19 nt, Artificial Sequence
  Description of Artificial Sequence: Synthetic oligonucleotide
  Sense strand starting at position 1716 of SEQ ID NO: 1881248
gaugguagucuuuagauuc

SEQ ID NO: 2029699 - RNA, 19 nt, Artificial Sequence
  Description of Artificial Sequence: Synthetic oligonucleotide
  Antisense strand to SEQ ID NO: 2029698
gaaucuaaagacuaccauc

SEQ ID NO: 2029700 - RNA, 19 nt, Artificial Sequence
  Description of Artificial Sequence: Synthetic oligonucleotide
  Sense strand starting at position 1752 of SEQ ID NO: 1881248
uugcaaggccuggaucuua

SEQ ID NO: 2029701 - RNA, 19 nt, Artificial Sequence
  Description of Artificial Sequence: Synthetic oligonucleotide
  Antisense strand to SEQ ID NO: 2029700
uaagauccaggccuugcaa

SEQ ID NO: 2029702 - RNA, 19 nt, Artificial Sequence
  Description of Artificial Sequence: Synthetic oligonucleotide
  Sense strand starting at position 1809 of SEQ ID NO: 1881248
gacaaauagcaguaaggca

SEQ ID NO: 2029703 - RNA, 19 nt, Artificial Sequence
  Description of Artificial Sequence: Synthetic oligonucleotide
  Antisense strand to SEQ ID NO: 2029702
ugccuuacugcuauuuguc

SEQ ID NO: 2029704 - RNA, 19 nt, Artificial Sequence
  Description of Artificial Sequence: Synthetic oligonucleotide
  Sense strand starting at position 1953 of SEQ ID NO: 1881248
gcuucugaugcuguuguua

SEQ ID NO: 2029705 - RNA, 19 nt, Artificial Sequence
  Description of Artificial Sequence: Synthetic oligonucleotide
  Antisense strand to SEQ ID NO: 2029704
uaacaacagcaucagaagc

SEQ ID NO: 2029706 - RNA, 19 nt, Artificial Sequence
  Description of Artificial Sequence: Synthetic oligonucleotide
  Sense strand starting at position 2038 of SEQ ID NO: 1881248
uggaguguccuagaaugau

SEQ ID NO: 2029707 - RNA, 19 nt, Artificial Sequence
  Description of Artificial Sequence: Synthetic oligonucleotide
  Antisense strand to SEQ ID NO: 2029706
aucauucuaggacacucca

SEQ ID NO: 2029708 - RNA, 19 nt, Artificial Sequence
  Description of Artificial Sequence: Synthetic oligonucleotide
  Sense strand starting at position 2116 of SEQ ID NO: 1881248
agguuugcuauuggaagau

SEQ ID NO: 2029709 - RNA, 19 nt, Artificial Sequence
  Description of Artificial Sequence: Synthetic oligonucleotide
  Antisense strand to SEQ ID NO: 2029708
aucuuccaauagcaaaccu

SEQ ID NO: 2029710 - RNA, 19 nt, Artificial Sequence
  Description of Artificial Sequence: Synthetic oligonucleotide
  Sense strand starting at position 2174 of SEQ ID NO: 1881248
ugucauuagccagacugga

SEQ ID NO: 2029711 - RNA, 19 nt, Artificial Sequence
  Description of Artificial Sequence: Synthetic oligonucleotide
  Antisense strand to SEQ ID NO: 2029710
uccagucuggcuaaugaca

SEQ ID NO: 2029712 - RNA, 19 nt, Artificial Sequence
  Description of Artificial Sequence: Synthetic oligonucleotide
  Sense strand starting at position 2235 of SEQ ID NO: 1881248
aagcuauauggguagguuu

SEQ ID NO: 2029713 - RNA, 19 nt, Artificial Sequence
  Description of Artificial Sequence: Synthetic oligonucleotide
  Antisense strand to SEQ ID NO: 2029712
aaaccuacccauauagcuu

SEQ ID NO: 2029714 - RNA, 19 nt, Artificial Sequence
  Description of Artificial Sequence: Synthetic oligonucleotide
  Sense strand starting at position 2297 of SEQ ID NO: 1881248
agcagauugcuacaaaucu

SEQ ID NO: 2029715 - RNA, 19 nt, Artificial Sequence
  Description of Artificial Sequence: Synthetic oligonucleotide
  Antisense strand to SEQ ID NO: 2029714
agauuuguagcaaucugcu

SEQ ID NO: 2029716 - RNA, 19 nt, Artificial Sequence
  Description of Artificial Sequence: Synthetic oligonucleotide
  Sense strand starting at position 2391 of SEQ ID NO: 1881248
gugaaagcaugaccaagaa

SEQ ID NO: 2029717 - RNA, 19 nt, Artificial Sequence
  Description of Artificial Sequence: Synthetic oligonucleotide
  Antisense strand to SEQ ID NO: 2029716
uucuuggucaugcuuucac

SEQ ID NO: 2029718 - RNA, 19 nt, Artificial Sequence
  Description of Artificial Sequence: Synthetic oligonucleotide
  Sense strand starting at position 2563 of SEQ ID NO: 1881248
gggcgaagagaaugucaau

SEQ ID NO: 2029719 - RNA, 19 nt, Artificial Sequence
  Description of Artificial Sequence: Synthetic oligonucleotide
  Antisense strand to SEQ ID NO: 2029718
auugacauucucuucgccc

SEQ ID NO: 2029720 - RNA, 19 nt, Artificial Sequence
  Description of Artificial Sequence: Synthetic oligonucleotide
  Sense strand starting at position 2614 of SEQ ID NO: 1881248
ucgguauacgucguuacuu

SEQ ID NO: 2029721 - RNA, 19 nt, Artificial Sequence
  Description of Artificial Sequence: Synthetic oligonucleotide
  Antisense strand to SEQ ID NO: 2029720
aaguaacgacguauaccga

SEQ ID NO: 2029722 - RNA, 19 nt, Artificial Sequence
  Description of Artificial Sequence: Synthetic oligonucleotide
  Sense strand starting at position 2872 of SEQ ID NO: 1881248
aaauauaguccuggaggca

SEQ ID NO: 2029723 - RNA, 19 nt, Artificial Sequence
  Description of Artificial Sequence: Synthetic oligonucleotide
  Antisense strand to SEQ ID NO: 2029722
ugccuccaggacuauauuu

SEQ ID NO: 2029724 - RNA, 19 nt, Artificial Sequence
  Description of Artificial Sequence: Synthetic oligonucleotide
  Sense strand starting at position 2873 of SEQ ID NO: 1881248
aauauaguccuggaggcau

SEQ ID NO: 2029725 - RNA, 19 nt, Artificial Sequence
  Description of Artificial Sequence: Synthetic oligonucleotide
  Antisense strand to SEQ ID NO: 2029724
augccuccaggacuauauu

SEQ ID NO: 2029726 - RNA, 19 nt, Artificial Sequence
  Description of Artificial Sequence: Synthetic oligonucleotide
  Sense strand starting at position 3020 of SEQ ID NO: 1881248
caaaguugcugaguagaaa

SEQ ID NO: 2029727 - RNA, 19 nt, Artificial Sequence
  Description of Artificial Sequence: Synthetic oligonucleotide
  Antisense strand to SEQ ID NO: 2029726
uuucuacucagcaacuuug

SEQ ID NO: 2029728 - RNA, 19 nt, Artificial Sequence
  Description of Artificial Sequence: Synthetic oligonucleotide
  Sense strand starting at position 3021 of SEQ ID NO: 1881248
aaaguugcugaguagaaau

SEQ ID NO: 2029729 - RNA, 19 nt, Artificial Sequence
  Description of Artificial Sequence: Synthetic oligonucleotide
  Antisense strand to SEQ ID NO: 2029728
auuucuacucagcaacuuu

SEQ ID NO: 2029730 - RNA, 19 nt, Artificial Sequence
  Description of Artificial Sequence: Synthetic oligonucleotide
  Sense strand starting at position 3023 of SEQ ID NO: 1881248
aguugcugaguagaaauua

SEQ ID NO: 2029731 - RNA, 19 nt, Artificial Sequence
  Description of Artificial Sequence: Synthetic oligonucleotide
  Antisense strand to SEQ ID NO: 2029730
uaauuucuacucagcaacu

SEQ ID NO: 2029732 - RNA, 19 nt, Artificial Sequence
  Description of Artificial Sequence: Synthetic oligonucleotide
  Sense strand starting at position 3076 of SEQ ID NO: 1881248
uaguuaaaggacugcuaau

SEQ ID NO: 2029733 - RNA, 19 nt, Artificial Sequence
  Description of Artificial Sequence: Synthetic oligonucleotide
  Antisense strand to SEQ ID NO: 2029732
auuagcaguccuuuaacua

SEQ ID NO: 2029734 - RNA, 19 nt, Artificial Sequence
  Description of Artificial Sequence: Synthetic oligonucleotide
  Sense strand starting at position 3086 of SEQ ID NO: 1881248
acugcuaaugaucagcaaa

SEQ ID NO: 2029735 - RNA, 19 nt, Artificial Sequence
  Description of Artificial Sequence: Synthetic oligonucleotide
  Antisense strand to SEQ ID NO: 2029734
uuugcugaucauuagcagu

SEQ ID NO: 2029736 - RNA, 19 nt, Artificial Sequence
  Description of Artificial Sequence: Synthetic oligonucleotide
  Sense strand starting at position 3088 of SEQ ID NO: 1881248
ugcuaaugaucagcaaaua

SEQ ID NO: 2029737 - RNA, 19 nt, Artificial Sequence
  Description of Artificial Sequence: Synthetic oligonucleotide
  Antisense strand to SEQ ID NO: 2029736
uauuugcugaucauuagca

SEQ ID NO: 2029738 - RNA, 19 nt, Artificial Sequence
  Description of Artificial Sequence: Synthetic oligonucleotide
  Sense strand starting at position 3089 of SEQ ID NO: 1881248
gcuaaugaucagcaaauag

SEQ ID NO: 2029739 - RNA, 19 nt, Artificial Sequence
  Description of Artificial Sequence: Synthetic oligonucleotide
  Antisense strand to SEQ ID NO: 2029738
cuauuugcugaucauuagc

SEQ ID NO: 2029740 - RNA, 19 nt, Artificial Sequence
  Description of Artificial Sequence: Synthetic oligonucleotide
  Sense strand starting at position 3149 of SEQ ID NO: 1881248
ccuaaucagguaugacuuu

SEQ ID NO: 2029741 - RNA, 19 nt, Artificial Sequence
  Description of Artificial Sequence: Synthetic oligonucleotide
  Antisense strand to SEQ ID NO: 2029740
aaagucauaccugauuagg

SEQ ID NO: 2029742 - RNA, 19 nt, Artificial Sequence
  Description of Artificial Sequence: Synthetic oligonucleotide
  Sense strand starting at position 3458 of SEQ ID NO: 1881248
ucaaguucugaaugaauua

SEQ ID NO: 2029743 - RNA, 19 nt, Artificial Sequence
  Description of Artificial Sequence: Synthetic oligonucleotide
  Antisense strand to SEQ ID NO: 2029742
uaauucauucagaacuuga

SEQ ID NO: 2029744 - RNA, 19 nt, Artificial Sequence
  Description of Artificial Sequence: Synthetic oligonucleotide
  Sense strand starting at position 3465 of SEQ ID NO: 1881248
cugaaugaauuaucuguga

SEQ ID NO: 2029745 - RNA, 19 nt, Artificial Sequence
  Description of Artificial Sequence: Synthetic oligonucleotide
  Antisense strand to SEQ ID NO: 2029744
ucacagauaauucauucag

SEQ ID NO: 2029746 - RNA, 19 nt, Artificial Sequence
  Description of Artificial Sequence: Synthetic oligonucleotide
  Sense strand starting at position 3468 of SEQ ID NO: 1881248
aaugaauuaucugugaugu

SEQ ID NO: 2029747 - RNA, 19 nt, Artificial Sequence
  Description of Artificial Sequence: Synthetic oligonucleotide
  Antisense strand to SEQ ID NO: 2029746
acaucacagauaauucauu

SEQ ID NO: 2029748 - RNA, 19 nt, Artificial Sequence
  Description of Artificial Sequence: Synthetic oligonucleotide
  Sense strand starting at position 3497 of SEQ ID NO: 1881248
ugagauuacucaguggaca

SEQ ID NO: 2029749 - RNA, 19 nt, Artificial Sequence
  Description of Artificial Sequence: Synthetic oligonucleotide
  Antisense strand to SEQ ID NO: 2029748
uguccacugaguaaucuca

SEQ ID NO: 2029750 - RNA, 19 nt, Artificial Sequence
  Description of Artificial Sequence: Synthetic oligonucleotide
  Sense strand starting at position 3498 of SEQ ID NO: 1881248
gagauuacucaguggacac

SEQ ID NO: 2029751 - RNA, 19 nt, Artificial Sequence
  Description of Artificial Sequence: Synthetic oligonucleotide
  Antisense strand to SEQ ID NO: 2029750
guguccacugaguaaucuc

SEQ ID NO: 2029752 - RNA, 19 nt, Artificial Sequence
  Description of Artificial Sequence: Synthetic oligonucleotide
  Sense strand starting at position 3526 of SEQ ID NO: 1881248
cugggcaaauccucaagaa

SEQ ID NO: 2029753 - RNA, 19 nt, Artificial Sequence
  Description of Artificial Sequence: Synthetic oligonucleotide
  Antisense strand to SEQ ID NO: 2029752
uucuugaggauuugcccag

SEQ ID NO: 2029754 - RNA, 19 nt, Artificial Sequence
  Description of Artificial Sequence: Synthetic oligonucleotide
  Sense strand starting at position 3583 of SEQ ID NO: 1881248
aggcuugugaccuggaaau

SEQ ID NO: 2029755 - RNA, 19 nt, Artificial Sequence
  Description of Artificial Sequence: Synthetic oligonucleotide
  Antisense strand to SEQ ID NO: 2029754
auuuccaggucacaagccu

SEQ ID NO: 2029756 - RNA, 19 nt, Artificial Sequence
  Description of Artificial Sequence: Synthetic oligonucleotide
  Sense strand starting at position 3585 of SEQ ID NO: 1881248
gcuugugaccuggaaauca

SEQ ID NO: 2029757 - RNA, 19 nt, Artificial Sequence
  Description of Artificial Sequence: Synthetic oligonucleotide
  Antisense strand to SEQ ID NO: 2029756
ugauuuccaggucacaagc

SEQ ID NO: 2029758 - RNA, 19 nt, Artificial Sequence
  Description of Artificial Sequence: Synthetic oligonucleotide
  Sense strand starting at position 3983 of SEQ ID NO: 1881248
uuuaauuggagaugggagu

SEQ ID NO: 2029759 - RNA, 19 nt, Artificial Sequence
  Description of Artificial Sequence: Synthetic oligonucleotide
  Antisense strand to SEQ ID NO: 2029758
acucccaucuccaauuaaa

SEQ ID NO: 2029760 - RNA, 19 nt, Artificial Sequence
  Description of Artificial Sequence: Synthetic oligonucleotide
  Sense strand starting at position 564 of SEQ ID NO: 1881249
cagugauugagugguacag

SEQ ID NO: 2029761 - RNA, 19 nt, Artificial Sequence
  Description of Artificial Sequence: Synthetic oligonucleotide
  Antisense strand to SEQ ID NO: 2029760
cuguaccacucaaucacug

SEQ ID NO: 2029762 - RNA, 19 nt, Artificial Sequence
  Description of Artificial Sequence: Synthetic oligonucleotide
  Sense strand starting at position 964 of SEQ ID NO: 1881249
gauaucuccugguuuaaag

SEQ ID NO: 2029763 - RNA, 19 nt, Artificial Sequence
  Description of Artificial Sequence: Synthetic oligonucleotide
  Antisense strand to SEQ ID NO: 2029762
cuuuaaaccaggagauauc

SEQ ID NO: 2029764 - RNA, 19 nt, Artificial Sequence
  Description of Artificial Sequence: Synthetic oligonucleotide
  Sense strand starting at position 1133 of SEQ ID NO: 1881249
agauacuaguccuuugcaa

SEQ ID NO: 2029765 - RNA, 19 nt, Artificial Sequence
  Description of Artificial Sequence: Synthetic oligonucleotide
  Antisense strand to SEQ ID NO: 2029764
uugcaaaggacuaguaucu

SEQ ID NO: 2029766 - RNA, 19 nt, Artificial Sequence
  Description of Artificial Sequence: Synthetic oligonucleotide
  Sense strand starting at position 1246 of SEQ ID NO: 1881249
uccuguugccgagugcaau

SEQ ID NO: 2029767 - RNA, 19 nt, Artificial Sequence
  Description of Artificial Sequence: Synthetic oligonucleotide
  Antisense strand to SEQ ID NO: 2029766
auugcacucggcaacagga

SEQ ID NO: 2029768 - RNA, 19 nt, Artificial Sequence
  Description of Artificial Sequence: Synthetic oligonucleotide
  Sense strand starting at position 1267 of SEQ ID NO: 1881249
uacucaugugucuagugau

SEQ ID NO: 2029769 - RNA, 19 nt, Artificial Sequence
  Description of Artificial Sequence: Synthetic oligonucleotide
  Antisense strand to SEQ ID NO: 2029768
aucacuagacacaugagua

SEQ ID NO: 2029770 - RNA, 19 nt, Artificial Sequence
  Description of Artificial Sequence: Synthetic oligonucleotide
  Sense strand starting at position 1368 of SEQ ID NO: 1881249
uaauaaauguguuccugga

SEQ ID NO: 2029771 - RNA, 19 nt, Artificial Sequence
  Description of Artificial Sequence: Synthetic oligonucleotide
  Antisense strand to SEQ ID NO: 2029770
uccaggaacacauuuauua

SEQ ID NO: 2029772 - RNA, 19 nt, Artificial Sequence
  Description of Artificial Sequence: Synthetic oligonucleotide
  Sense strand starting at position 1370 of SEQ ID NO: 1881249
auaaauguguuccuggaua

SEQ ID NO: 2029773 - RNA, 19 nt, Artificial Sequence
  Description of Artificial Sequence: Synthetic oligonucleotide
  Antisense strand to SEQ ID NO: 2029772
uauccaggaacacauuuau

SEQ ID NO: 2029774 - RNA, 19 nt, Artificial Sequence
  Description of Artificial Sequence: Synthetic oligonucleotide
  Sense strand starting at position 1469 of SEQ ID NO: 1881249
auauacuauugaucagugu

SEQ ID NO: 2029775 - RNA, 19 nt, Artificial Sequence
  Description of Artificial Sequence: Synthetic oligonucleotide
  Antisense strand to SEQ ID NO: 2029774
acacugaucaauaguauau

SEQ ID NO: 2029776 - RNA, 19 nt, Artificial Sequence
  Description of Artificial Sequence: Synthetic oligonucleotide
  Sense strand starting at position 1837 of SEQ ID NO: 1881249
uagaguccuguggauguua

SEQ ID NO: 2029777 - RNA, 19 nt, Artificial Sequence
  Description of Artificial Sequence: Synthetic oligonucleotide
  Antisense strand to SEQ ID NO: 2029776
uaacauccacaggacucua

SEQ ID NO: 2029778 - RNA, 19 nt, Artificial Sequence
  Description of Artificial Sequence: Synthetic oligonucleotide
  Sense strand starting at position 2069 of SEQ ID NO: 1881249
ggacacuuggcccaugacu

SEQ ID NO: 2029779 - RNA, 19 nt, Artificial Sequence
  Description of Artificial Sequence: Synthetic oligonucleotide
  Antisense strand to SEQ ID NO: 2029778
agucaugggccaagugucc

SEQ ID NO: 2029780 - RNA, 19 nt, Artificial Sequence
  Description of Artificial Sequence: Synthetic oligonucleotide
  Sense strand starting at position 2303 of SEQ ID NO: 1881249
agcugcaaucaagagucau

SEQ ID NO: 2029781 - RNA, 19 nt, Artificial Sequence
  Description of Artificial Sequence: Synthetic oligonucleotide
  Antisense strand to SEQ ID NO: 2029780
augacucuugauugcagcu

SEQ ID NO: 2029782 - RNA, 19 nt, Artificial Sequence
  Description of Artificial Sequence: Synthetic oligonucleotide
  Sense strand starting at position 2411 of SEQ ID NO: 1881249
cagggaaaguuguucuauu

SEQ ID NO: 2029783 - RNA, 19 nt, Artificial Sequence
  Description of Artificial Sequence: Synthetic oligonucleotide
  Antisense strand to SEQ ID NO: 2029782
aauagaacaacuuucccug

SEQ ID NO: 2029784 - RNA, 19 nt, Artificial Sequence
  Description of Artificial Sequence: Synthetic oligonucleotide
  Sense strand starting at position 2412 of SEQ ID NO: 1881249
agggaaaguuguucuauuc

SEQ ID NO: 2029785 - RNA, 19 nt, Artificial Sequence
  Description of Artificial Sequence: Synthetic oligonucleotide
  Antisense strand to SEQ ID NO: 2029784
gaauagaacaacuuucccu

SEQ ID NO: 2029786 - RNA, 19 nt, Artificial Sequence
  Description of Artificial Sequence: Synthetic oligonucleotide
  Sense strand starting at position 2496 of SEQ ID NO: 1881249
gugccuuguagucaaagaa

SEQ ID NO: 2029787 - RNA, 19 nt, Artificial Sequence
  Description of Artificial Sequence: Synthetic oligonucleotide
  Antisense strand to SEQ ID NO: 2029786
uucuuugacuacaaggcac

SEQ ID NO: 2029788 - RNA, 19 nt, Artificial Sequence
  Description of Artificial Sequence: Synthetic oligonucleotide
  Sense strand starting at position 2500 of SEQ ID NO: 1881249
cuuguagucaaagaaguga

SEQ ID NO: 2029789 - RNA, 19 nt, Artificial Sequence
  Description of Artificial Sequence: Synthetic oligonucleotide
  Antisense strand to SEQ ID NO: 2029788
ucacuucuuugacuacaag

SEQ ID NO: 2029790 - RNA, 19 nt, Artificial Sequence
  Description of Artificial Sequence: Synthetic oligonucleotide
  Sense strand starting at position 2760 of SEQ ID NO: 1881249
ccaucauuccagugauuga

SEQ ID NO: 2029791 - RNA, 19 nt, Artificial Sequence
  Description of Artificial Sequence: Synthetic oligonucleotide
  Antisense strand to SEQ ID NO: 2029790
ucaaucacuggaaugaugg

SEQ ID NO: 2029792 - RNA, 19 nt, Artificial Sequence
  Description of Artificial Sequence: Synthetic oligonucleotide
  Sense strand starting at position 2763 of SEQ ID NO: 1881249
ucauuccagugauugaaga

SEQ ID NO: 2029793 - RNA, 19 nt, Artificial Sequence
  Description of Artificial Sequence: Synthetic oligonucleotide
  Antisense strand to SEQ ID NO: 2029792
ucuucaaucacuggaauga

SEQ ID NO: 2029794 - RNA, 19 nt, Artificial Sequence
  Description of Artificial Sequence: Synthetic oligonucleotide
  Sense strand starting at position 2764 of SEQ ID NO: 1881249
cauuccagugauugaagau

SEQ ID NO: 2029795 - RNA, 19 nt, Artificial Sequence
  Description of Artificial Sequence: Synthetic oligonucleotide
  Antisense strand to SEQ ID NO: 2029794
aucuucaaucacuggaaug

SEQ ID NO: 2029796 - RNA, 19 nt, Artificial Sequence
  Description of Artificial Sequence: Synthetic oligonucleotide
  Sense strand starting at position 2770 of SEQ ID NO: 1881249
agugauugaagauguugau

SEQ ID NO: 2029797 - RNA, 19 nt, Artificial Sequence
  Description of Artificial Sequence: Synthetic oligonucleotide
  Antisense strand to SEQ ID NO: 2029796
aucaacaucuucaaucacu

SEQ ID NO: 2029798 - RNA, 19 nt, Artificial Sequence
  Description of Artificial Sequence: Synthetic oligonucleotide
  Sense strand starting at position 2779 of SEQ ID NO: 1881249
agauguugaucuguaauag

SEQ ID NO: 2029799 - RNA, 19 nt, Artificial Sequence
  Description of Artificial Sequence: Synthetic oligonucleotide
  Antisense strand to SEQ ID NO: 2029798
cuauuacagaucaacaucu

SEQ ID NO: 2029800 - RNA, 19 nt, Artificial Sequence
  Description of Artificial Sequence: Synthetic oligonucleotide
  Sense strand starting at position 2780 of SEQ ID NO: 1881249
gauguugaucuguaauagg

SEQ ID NO: 2029801 - RNA, 19 nt, Artificial Sequence
  Description of Artificial Sequence: Synthetic oligonucleotide
  Antisense strand to SEQ ID NO: 2029800
ccuauuacagaucaacauc

SEQ ID NO: 2029802 - RNA, 19 nt, Artificial Sequence
  Description of Artificial Sequence: Synthetic oligonucleotide
  Sense strand starting at position 2785 of SEQ ID NO: 1881249
ugaucuguaauaggguaau

SEQ ID NO: 2029803 - RNA, 19 nt, Artificial Sequence
  Description of Artificial Sequence: Synthetic oligonucleotide
  Antisense strand to SEQ ID NO: 2029802
auuacccuauuacagauca

SEQ ID NO: 2029804 - RNA, 19 nt, Artificial Sequence
  Description of Artificial Sequence: Synthetic oligonucleotide
  Sense strand starting at position 2797 of SEQ ID NO: 1881249
ggguaauggccauacacuu

SEQ ID NO: 2029805 - RNA, 19 nt, Artificial Sequence
  Description of Artificial Sequence: Synthetic oligonucleotide
  Antisense strand to SEQ ID NO: 2029804
aaguguauggccauuaccc

SEQ ID NO: 2029806 - RNA, 19 nt, Artificial Sequence
  Description of Artificial Sequence: Synthetic oligonucleotide
  Sense strand starting at position 2923 of SEQ ID NO: 1881249
guggacagucaccgacaua

SEQ ID NO: 2029807 - RNA, 19 nt, Artificial Sequence
  Description of Artificial Sequence: Synthetic oligonucleotide
  Antisense strand to SEQ ID NO: 2029806
uaugucggugacuguccac

SEQ ID NO: 2029808 - RNA, 19 nt, Artificial Sequence
  Description of Artificial Sequence: Synthetic oligonucleotide
  Sense strand starting at position 2924 of SEQ ID NO: 1881249
uggacagucaccgacauau

SEQ ID NO: 2029809 - RNA, 19 nt, Artificial Sequence
  Description of Artificial Sequence: Synthetic oligonucleotide
  Antisense strand to SEQ ID NO: 2029808
auaugucggugacugucca

SEQ ID NO: 2029810 - RNA, 19 nt, Artificial Sequence
  Description of Artificial Sequence: Synthetic oligonucleotide
  Sense strand starting at position 3024 of SEQ ID NO: 1881249
ucaugaauauguccaguag

SEQ ID NO: 2029811 - RNA, 19 nt, Artificial Sequence
  Description of Artificial Sequence: Synthetic oligonucleotide
  Antisense strand to SEQ ID NO: 2029810
cuacuggacauauucauga

SEQ ID NO: 2029812 - RNA, 19 nt, Artificial Sequence
  Description of Artificial Sequence: Synthetic oligonucleotide
  Sense strand starting at position 3028 of SEQ ID NO: 1881249
gaauauguccaguaguaua

SEQ ID NO: 2029813 - RNA, 19 nt, Artificial Sequence
  Description of Artificial Sequence: Synthetic oligonucleotide
  Antisense strand to SEQ ID NO: 2029812
uauacuacuggacauauuc

SEQ ID NO: 2029814 - RNA, 19 nt, Artificial Sequence
  Description of Artificial Sequence: Synthetic oligonucleotide
  Sense strand starting at position 3093 of SEQ ID NO: 1881249
uuugauagucaucacuaug

SEQ ID NO: 2029815 - RNA, 19 nt, Artificial Sequence
  Description of Artificial Sequence: Synthetic oligonucleotide
  Antisense strand to SEQ ID NO: 2029814
cauagugaugacuaucaaa

SEQ ID NO: 2029816 - RNA, 19 nt, Artificial Sequence
  Description of Artificial Sequence: Synthetic oligonucleotide
  Sense strand starting at position 3098 of SEQ ID NO: 1881249
uagucaucacuauggagau

SEQ ID NO: 2029817 - RNA, 19 nt, Artificial Sequence
  Description of Artificial Sequence: Synthetic oligonucleotide
  Antisense strand to SEQ ID NO: 2029816
aucuccauagugaugacua

SEQ ID NO: 2029818 - RNA, 19 nt, Artificial Sequence
  Description of Artificial Sequence: Synthetic oligonucleotide
  Sense strand starting at position 3197 of SEQ ID NO: 1881249
caaggaaugcucggaggga

SEQ ID NO: 2029819 - RNA, 19 nt, Artificial Sequence
  Description of Artificial Sequence: Synthetic oligonucleotide
  Antisense strand to SEQ ID NO: 2029818
ucccuccgagcauuccuug

SEQ ID NO: 2029820 - RNA, 19 nt, Artificial Sequence
  Description of Artificial Sequence: Synthetic oligonucleotide
  Sense strand starting at position 3301 of SEQ ID NO: 1881249
cuaagaagugaaggauguu

SEQ ID NO: 2029821 - RNA, 19 nt, Artificial Sequence
  Description of Artificial Sequence: Synthetic oligonucleotide
  Antisense strand to SEQ ID NO: 2029820
aacauccuucacuucuuag

SEQ ID NO: 2029822 - RNA, 19 nt, Artificial Sequence
  Description of Artificial Sequence: Synthetic oligonucleotide
  Sense strand starting at position 3364 of SEQ ID NO: 1881249
agggauccucuuuggcaga

SEQ ID NO: 2029823 - RNA, 19 nt, Artificial Sequence
  Description of Artificial Sequence: Synthetic oligonucleotide
  Antisense strand to SEQ ID NO: 2029822
ucugccaaagaggaucccu

SEQ ID NO: 2029824 - RNA, 19 nt, Artificial Sequence
  Description of Artificial Sequence: Synthetic oligonucleotide
  Sense strand starting at position 3425 of SEQ ID NO: 1881249
ccaaaugagcgugaggagu

SEQ ID NO: 2029825 - RNA, 19 nt, Artificial Sequence
  Description of Artificial Sequence: Synthetic oligonucleotide
  Antisense strand to SEQ ID NO: 2029824
acuccucacgcucauuugg

SEQ ID NO: 2029826 - RNA, 19 nt, Artificial Sequence
  Description of Artificial Sequence: Synthetic oligonucleotide
  Sense strand starting at position 3435 of SEQ ID NO: 1881249
gugaggaguguuuaggagu

SEQ ID NO: 2029827 - RNA, 19 nt, Artificial Sequence
  Description of Artificial Sequence: Synthetic oligonucleotide
  Antisense strand to SEQ ID NO: 2029826
acuccuaaacacuccucac

SEQ ID NO: 2029828 - RNA, 19 nt, Artificial Sequence
  Description of Artificial Sequence: Synthetic oligonucleotide
  Sense strand starting at position 3442 of SEQ ID NO: 1881249
guguuuaggaguugacaga

SEQ ID NO: 2029829 - RNA, 19 nt, Artificial Sequence
  Description of Artificial Sequence: Synthetic oligonucleotide
  Antisense strand to SEQ ID NO: 2029828
ucugucaacuccuaaacac

SEQ ID NO: 2029830 - RNA, 19 nt, Artificial Sequence
  Description of Artificial Sequence: Synthetic oligonucleotide
  Sense strand starting at position 3481 of SEQ ID NO: 1881249
gacguuuagccaggaagag

SEQ ID NO: 2029831 - RNA, 19 nt, Artificial Sequence
  Description of Artificial Sequence: Synthetic oligonucleotide
  Antisense strand to SEQ ID NO: 2029830
cucuuccuggcuaaacguc

SEQ ID NO: 2029832 - RNA, 19 nt, Artificial Sequence
  Description of Artificial Sequence: Synthetic oligonucleotide
  Sense strand starting at position 3531 of SEQ ID NO: 1881249
gaugaaauuaagggagugu

SEQ ID NO: 2029833 - RNA, 19 nt, Artificial Sequence
  Description of Artificial Sequence: Synthetic oligonucleotide
  Antisense strand to SEQ ID NO: 2029832
acacucccuuaauuucauc

SEQ ID NO: 2029834 - RNA, 19 nt, Artificial Sequence
  Description of Artificial Sequence: Synthetic oligonucleotide
  Sense strand starting at position 3783 of SEQ ID NO: 1881249
gcuucuauuucuccuguga

SEQ ID NO: 2029835 - RNA, 19 nt, Artificial Sequence
  Description of Artificial Sequence: Synthetic oligonucleotide
  Antisense strand to SEQ ID NO: 2029834
ucacaggagaaauagaagc

SEQ ID NO: 2029836 - RNA, 19 nt, Artificial Sequence
  Description of Artificial Sequence: Synthetic oligonucleotide
  Sense strand starting at position 3883 of SEQ ID NO: 1881249
aggcguuaagaaugggaaa

SEQ ID NO: 2029837 - RNA, 19 nt, Artificial Sequence
  Description of Artificial Sequence: Synthetic oligonucleotide
  Antisense strand to SEQ ID NO: 2029836
uuucccauucuuaacgccu

SEQ ID NO: 2029838 - RNA, 19 nt, Artificial Sequence
  Description of Artificial Sequence: Synthetic oligonucleotide
  Sense strand starting at position 3884 of SEQ ID NO: 1881249
ggcguuaagaaugggaaag

SEQ ID NO: 2029839 - RNA, 19 nt, Artificial Sequence
  Description of Artificial Sequence: Synthetic oligonucleotide
  Antisense strand to SEQ ID NO: 2029838
cuuucccauucuuaacgcc

SEQ ID NO: 2029840 - RNA, 19 nt, Artificial Sequence
  Description of Artificial Sequence: Synthetic oligonucleotide
  Sense strand starting at position 209 of SEQ ID NO: 1881250
ucaguugagacuuguagau

SEQ ID NO: 2029841 - RNA, 19 nt, Artificial Sequence
  Description of Artificial Sequence: Synthetic oligonucleotide
  Antisense strand to SEQ ID NO: 2029840
aucuacaagucucaacuga

SEQ ID NO: 2029842 - RNA, 19 nt, Artificial Sequence
  Description of Artificial Sequence: Synthetic oligonucleotide
  Sense strand starting at position 253 of SEQ ID NO: 1881250
aaugguaagugacugagua

SEQ ID NO: 2029843 - RNA, 19 nt, Artificial Sequence
  Description of Artificial Sequence: Synthetic oligonucleotide
  Antisense strand to SEQ ID NO: 2029842
uacucagucacuuaccauu

SEQ ID NO: 2029844 - RNA, 19 nt, Artificial Sequence
  Description of Artificial Sequence: Synthetic oligonucleotide
  Sense strand starting at position 254 of SEQ ID NO: 1881250
augguaagugacugaguaa

SEQ ID NO: 2029845 - RNA, 19 nt, Artificial Sequence
  Description of Artificial Sequence: Synthetic oligonucleotide
  Antisense strand to SEQ ID NO: 2029844
uuacucagucacuuaccau

SEQ ID NO: 2029846 - RNA, 19 nt, Artificial Sequence
  Description of Artificial Sequence: Synthetic oligonucleotide
  Sense strand starting at position 255 of SEQ ID NO: 1881250
ugguaagugacugaguaaa

SEQ ID NO: 2029847 - RNA, 19 nt, Artificial Sequence
  Description of Artificial Sequence: Synthetic oligonucleotide
  Antisense strand to SEQ ID NO: 2029846
uuuacucagucacuuacca

SEQ ID NO: 2029848 - RNA, 19 nt, Artificial Sequence
  Description of Artificial Sequence: Synthetic oligonucleotide
  Sense strand starting at position 323 of SEQ ID NO: 1881250
cugcacugccucuagauaa

SEQ ID NO: 2029849 - RNA, 19 nt, Artificial Sequence
  Description of Artificial Sequence: Synthetic oligonucleotide
  Antisense strand to SEQ ID NO: 2029848
uuaucuagaggcagugcag

SEQ ID NO: 2029850 - RNA, 19 nt, Artificial Sequence
  Description of Artificial Sequence: Synthetic oligonucleotide
  Sense strand starting at position 568 of SEQ ID NO: 1881250
guaguugauguguaaacaa

SEQ ID NO: 2029851 - RNA, 19 nt, Artificial Sequence
  Description of Artificial Sequence: Synthetic oligonucleotide
  Antisense strand to SEQ ID NO: 2029850
uuguuuacacaucaacuac

SEQ ID NO: 2029852 - RNA, 19 nt, Artificial Sequence
  Description of Artificial Sequence: Synthetic oligonucleotide
  Sense strand starting at position 794 of SEQ ID NO: 1881250
uguagugccagagaauuaa

SEQ ID NO: 2029853 - RNA, 19 nt, Artificial Sequence
  Description of Artificial Sequence: Synthetic oligonucleotide
  Antisense strand to SEQ ID NO: 2029852
uuaauucucuggcacuaca

SEQ ID NO: 2029854 - RNA, 19 nt, Artificial Sequence
  Description of Artificial Sequence: Synthetic oligonucleotide
  Sense strand starting at position 822 of SEQ ID NO: 1881250
acugauaggaguugguaga

SEQ ID NO: 2029855 - RNA, 19 nt, Artificial Sequence
  Description of Artificial Sequence: Synthetic oligonucleotide
  Antisense strand to SEQ ID NO: 2029854
ucuaccaacuccuaucagu

SEQ ID NO: 2029856 - RNA, 19 nt, Artificial Sequence
  Description of Artificial Sequence: Synthetic oligonucleotide
  Sense strand starting at position 823 of SEQ ID NO: 1881250
cugauaggaguugguagau

SEQ ID NO: 2029857 - RNA, 19 nt, Artificial Sequence
  Description of Artificial Sequence: Synthetic oligonucleotide
  Antisense strand to SEQ ID NO: 2029856
aucuaccaacuccuaucag

SEQ ID NO: 2029858 - RNA, 19 nt, Artificial Sequence
  Description of Artificial Sequence: Synthetic oligonucleotide
  Sense strand starting at position 836 of SEQ ID NO: 1881250
guagauuaauaccucaguu

SEQ ID NO: 2029859 - RNA, 19 nt, Artificial Sequence
  Description of Artificial Sequence: Synthetic oligonucleotide
  Antisense strand to SEQ ID NO: 2029858
aacugagguauuaaucuac

SEQ ID NO: 2029860 - RNA, 19 nt, Artificial Sequence
  Description of Artificial Sequence: Synthetic oligonucleotide
  Sense strand starting at position 869 of SEQ ID NO: 1881250
gggagauaccucugagguc

SEQ ID NO: 2029861 - RNA, 19 nt, Artificial Sequence
  Description of Artificial Sequence: Synthetic oligonucleotide
  Antisense strand to SEQ ID NO: 2029860
gaccucagagguaucuccc

SEQ ID NO: 2029862 - RNA, 19 nt, Artificial Sequence
  Description of Artificial Sequence: Synthetic oligonucleotide
  Sense strand starting at position 881 of SEQ ID NO: 1881250
ugaggucuaucuuccacau

SEQ ID NO: 2029863 - RNA, 19 nt, Artificial Sequence
  Description of Artificial Sequence: Synthetic oligonucleotide
  Antisense strand to SEQ ID NO: 2029862
auguggaagauagaccuca

SEQ ID NO: 2029864 - RNA, 19 nt, Artificial Sequence
  Description of Artificial Sequence: Synthetic oligonucleotide
  Sense strand starting at position 885 of SEQ ID NO: 1881250
gucuaucuuccacauuggu

SEQ ID NO: 2029865 - RNA, 19 nt, Artificial Sequence
  Description of Artificial Sequence: Synthetic oligonucleotide
  Antisense strand to SEQ ID NO: 2029864
accaauguggaagauagac

SEQ ID NO: 2029866 - RNA, 19 nt, Artificial Sequence
  Description of Artificial Sequence: Synthetic oligonucleotide
  Sense strand starting at position 995 of SEQ ID NO: 1881250
gucugacuucuccaucuac

SEQ ID NO: 2029867 - RNA, 19 nt, Artificial Sequence
  Description of Artificial Sequence: Synthetic oligonucleotide
  Antisense strand to SEQ ID NO: 2029866
guagauggagaagucagac

SEQ ID NO: 2029868 - RNA, 19 nt, Artificial Sequence
  Description of Artificial Sequence: Synthetic oligonucleotide
  Sense strand starting at position 1220 of SEQ ID NO: 1881250
uagagagcccucuaaguug

SEQ ID NO: 2029869 - RNA, 19 nt, Artificial Sequence
  Description of Artificial Sequence: Synthetic oligonucleotide
  Antisense strand to SEQ ID NO: 2029868
caacuuagagggcucucua

SEQ ID NO: 2029870 - RNA, 19 nt, Artificial Sequence
  Description of Artificial Sequence: Synthetic oligonucleotide
  Sense strand starting at position 1366 of SEQ ID NO: 1881250
agggacacaucagucuaua

SEQ ID NO: 2029871 - RNA, 19 nt, Artificial Sequence
  Description of Artificial Sequence: Synthetic oligonucleotide
  Antisense strand to SEQ ID NO: 2029870
uauagacugaugugucccu

SEQ ID NO: 2029872 - RNA, 19 nt, Artificial Sequence
  Description of Artificial Sequence: Synthetic oligonucleotide
  Sense strand starting at position 1463 of SEQ ID NO: 1881250
uuuacuaugcaucauguua

SEQ ID NO: 2029873 - RNA, 19 nt, Artificial Sequence
  Description of Artificial Sequence: Synthetic oligonucleotide
  Antisense strand to SEQ ID NO: 2029872
uaacaugaugcauaguaaa

SEQ ID NO: 2029874 - RNA, 19 nt, Artificial Sequence
  Description of Artificial Sequence: Synthetic oligonucleotide
  Sense strand starting at position 1507 of SEQ ID NO: 1881250
guuaauuaauccucaggau

SEQ ID NO: 2029875 - RNA, 19 nt, Artificial Sequence
  Description of Artificial Sequence: Synthetic oligonucleotide
  Antisense strand to SEQ ID NO: 2029874
auccugaggauuaauuaac

SEQ ID NO: 2029876 - RNA, 19 nt, Artificial Sequence
  Description of Artificial Sequence: Synthetic oligonucleotide
  Sense strand starting at position 1521 of SEQ ID NO: 1881250
aggauaauccugcaagcua

SEQ ID NO: 2029877 - RNA, 19 nt, Artificial Sequence
  Description of Artificial Sequence: Synthetic oligonucleotide
  Antisense strand to SEQ ID NO: 2029876
uagcuugcaggauuauccu

SEQ ID NO: 2029878 - RNA, 19 nt, Artificial Sequence
  Description of Artificial Sequence: Synthetic oligonucleotide
  Sense strand starting at position 1737 of SEQ ID NO: 1881250
uuggaucacuucguaauca

SEQ ID NO: 2029879 - RNA, 19 nt, Artificial Sequence
  Description of Artificial Sequence: Synthetic oligonucleotide
  Antisense strand to SEQ ID NO: 2029878
ugauuacgaagugauccaa

SEQ ID NO: 2029880 - RNA, 19 nt, Artificial Sequence
  Description of Artificial Sequence: Synthetic oligonucleotide
  Sense strand starting at position 1911 of SEQ ID NO: 1881250
ugggauaauugucuggucu

SEQ ID NO: 2029881 - RNA, 19 nt, Artificial Sequence
  Description of Artificial Sequence: Synthetic oligonucleotide
  Antisense strand to SEQ ID NO: 2029880
agaccagacaauuauccca

SEQ ID NO: 2029882 - RNA, 19 nt, Artificial Sequence
  Description of Artificial Sequence: Synthetic oligonucleotide
  Sense strand starting at position 2165 of SEQ ID NO: 1881250
aaagucaucgcuugagaag

SEQ ID NO: 2029883 - RNA, 19 nt, Artificial Sequence
  Description of Artificial Sequence: Synthetic oligonucleotide
  Antisense strand to SEQ ID NO: 2029882
cuucucaagcgaugacuuu

SEQ ID NO: 2029884 - RNA, 19 nt, Artificial Sequence
  Description of Artificial Sequence: Synthetic oligonucleotide
  Sense strand starting at position 2166 of SEQ ID NO: 1881250
aagucaucgcuugagaaga

SEQ ID NO: 2029885 - RNA, 19 nt, Artificial Sequence
  Description of Artificial Sequence: Synthetic oligonucleotide
  Antisense strand to SEQ ID NO: 2029884
ucuucucaagcgaugacuu

SEQ ID NO: 2029886 - RNA, 19 nt, Artificial Sequence
  Description of Artificial Sequence: Synthetic oligonucleotide
  Sense strand starting at position 2207 of SEQ ID NO: 1881250
cugcuuuaaccagauuaag

SEQ ID NO: 2029887 - RNA, 19 nt, Artificial Sequence
  Description of Artificial Sequence: Synthetic oligonucleotide
  Antisense strand to SEQ ID NO: 2029886
cuuaaucugguuaaagcag

SEQ ID NO: 2029888 - RNA, 19 nt, Artificial Sequence
  Description of Artificial Sequence: Synthetic oligonucleotide
  Sense strand starting at position 2303 of SEQ ID NO: 1881250
acagaaccugauugguagu

SEQ ID NO: 2029889 - RNA, 19 nt, Artificial Sequence
  Description of Artificial Sequence: Synthetic oligonucleotide
  Antisense strand to SEQ ID NO: 2029888
acuaccaaucagguucugu

SEQ ID NO: 2029890 - RNA, 19 nt, Artificial Sequence
  Description of Artificial Sequence: Synthetic oligonucleotide
  Sense strand starting at position 2752 of SEQ ID NO: 1881250
uuagaaguucgagaccauc

SEQ ID NO: 2029891 - RNA, 19 nt, Artificial Sequence
  Description of Artificial Sequence: Synthetic oligonucleotide
  Antisense strand to SEQ ID NO: 2029890
gauggucucgaacuucuaa

SEQ ID NO: 2029892 - RNA, 19 nt, Artificial Sequence
  Description of Artificial Sequence: Synthetic oligonucleotide
  Sense strand starting at position 3074 of SEQ ID NO: 1881250
ggaagugguacuuaggcau

SEQ ID NO: 2029893 - RNA, 19 nt, Artificial Sequence
  Description of Artificial Sequence: Synthetic oligonucleotide
  Antisense strand to SEQ ID NO: 2029892
augccuaaguaccacuucc

SEQ ID NO: 2029894 - RNA, 19 nt, Artificial Sequence
  Description of Artificial Sequence: Synthetic oligonucleotide
  Sense strand starting at position 3081 of SEQ ID NO: 1881250
guacuuaggcaucaguuga

SEQ ID NO: 2029895 - RNA, 19 nt, Artificial Sequence
  Description of Artificial Sequence: Synthetic oligonucleotide
  Antisense strand to SEQ ID NO: 2029894
ucaacugaugccuaaguac

SEQ ID NO: 2029896 - RNA, 19 nt, Artificial Sequence
  Description of Artificial Sequence: Synthetic oligonucleotide
  Sense strand starting at position 3086 of SEQ ID NO: 1881250
uaggcaucaguugauauca

SEQ ID NO: 2029897 - RNA, 19 nt, Artificial Sequence
  Description of Artificial Sequence: Synthetic oligonucleotide
  Antisense strand to SEQ ID NO: 2029896
ugauaucaacugaugccua

SEQ ID NO: 2029898 - RNA, 19 nt, Artificial Sequence
  Description of Artificial Sequence: Synthetic oligonucleotide
  Sense strand starting at position 3177 of SEQ ID NO: 1881250
gugugauuugugggugauu

SEQ ID NO: 2029899 - RNA, 19 nt, Artificial Sequence
  Description of Artificial Sequence: Synthetic oligonucleotide
  Antisense strand to SEQ ID NO: 2029898
aaucacccacaaaucacac

SEQ ID NO: 2029900 - RNA, 19 nt, Artificial Sequence
  Description of Artificial Sequence: Synthetic oligonucleotide
  Sense strand starting at position 3267 of SEQ ID NO: 1881250
cuaauaagcuaauuaacga

SEQ ID NO: 2029901 - RNA, 19 nt, Artificial Sequence
  Description of Artificial Sequence: Synthetic oligonucleotide
  Antisense strand to SEQ ID NO: 2029900
ucguuaauuagcuuauuag

SEQ ID NO: 2029902 - RNA, 19 nt, Artificial Sequence
  Description of Artificial Sequence: Synthetic oligonucleotide
  Sense strand starting at position 3274 of SEQ ID NO: 1881250
gcuaauuaacgauaguaga

SEQ ID NO: 2029903 - RNA, 19 nt, Artificial Sequence
  Description of Artificial Sequence: Synthetic oligonucleotide
  Antisense strand to SEQ ID NO: 2029902
ucuacuaucguuaauuagc

SEQ ID NO: 2029904 - RNA, 19 nt, Artificial Sequence
  Description of Artificial Sequence: Synthetic oligonucleotide
  Sense strand starting at position 3307 of SEQ ID NO: 1881250
uugccucugggagaguauu

SEQ ID NO: 2029905 - RNA, 19 nt, Artificial Sequence
  Description of Artificial Sequence: Synthetic oligonucleotide
  Antisense strand to SEQ ID NO: 2029904
aauacucucccagaggcaa

SEQ ID NO: 2029906 - RNA, 19 nt, Artificial Sequence
  Description of Artificial Sequence: Synthetic oligonucleotide
  Sense strand starting at position 3410 of SEQ ID NO: 1881250
aguaguacacuuuagguua

SEQ ID NO: 2029907 - RNA, 19 nt, Artificial Sequence
  Description of Artificial Sequence: Synthetic oligonucleotide
  Antisense strand to SEQ ID NO: 2029906
uaaccuaaaguguacuacu

SEQ ID NO: 2029908 - RNA, 19 nt, Artificial Sequence
  Description of Artificial Sequence: Synthetic oligonucleotide
  Sense strand starting at position 3425 of SEQ ID NO: 1881250
guuaguacacuuuacaaau

SEQ ID NO: 2029909 - RNA, 19 nt, Artificial Sequence
  Description of Artificial Sequence: Synthetic oligonucleotide
  Antisense strand to SEQ ID NO: 2029908
auuuguaaaguguacuaac

SEQ ID NO: 2029910 - RNA, 19 nt, Artificial Sequence
  Description of Artificial Sequence: Synthetic oligonucleotide
  Sense strand starting at position 3775 of SEQ ID NO: 1881250
agauuaguauacuuuacac

SEQ ID NO: 2029911 - RNA, 19 nt, Artificial Sequence
  Description of Artificial Sequence: Synthetic oligonucleotide
  Antisense strand to SEQ ID NO: 2029910
guguaaaguauacuaaucu

SEQ ID NO: 2029912 - RNA, 19 nt, Artificial Sequence
  Description of Artificial Sequence: Synthetic oligonucleotide
  Sense strand starting at position 3835 of SEQ ID NO: 1881250
agguucugauggucuagau

SEQ ID NO: 2029913 - RNA, 19 nt, Artificial Sequence
  Description of Artificial Sequence: Synthetic oligonucleotide
  Antisense strand to SEQ ID NO: 2029912
aucuagaccaucagaaccu

SEQ ID NO: 2029914 - RNA, 19 nt, Artificial Sequence
  Description of Artificial Sequence: Synthetic oligonucleotide
  Sense strand starting at position 3892 of SEQ ID NO: 1881250
aucugaucuuacuuugagu

SEQ ID NO: 2029915 - RNA, 19 nt, Artificial Sequence
  Description of Artificial Sequence: Synthetic oligonucleotide
  Antisense strand to SEQ ID NO: 2029914
acucaaaguaagaucagau

SEQ ID NO: 2029916 - RNA, 19 nt, Artificial Sequence
  Description of Artificial Sequence: Synthetic oligonucleotide
  Sense strand starting at position 3909 of SEQ ID NO: 1881250
gucucaaggcucuagacua

SEQ ID NO: 2029917 - RNA, 19 nt, Artificial Sequence
  Description of Artificial Sequence: Synthetic oligonucleotide
  Antisense strand to SEQ ID NO: 2029916
uagucuagagccuugagac

SEQ ID NO: 2029918 - RNA, 19 nt, Artificial Sequence
  Description of Artificial Sequence: Synthetic oligonucleotide
  Sense strand starting at position 3928 of SEQ ID NO: 1881250
gugucagggugacuuacaa

SEQ ID NO: 2029919 - RNA, 19 nt, Artificial Sequence
  Description of Artificial Sequence: Synthetic oligonucleotide
  Antisense strand to SEQ ID NO: 2029918
uuguaagucacccugacac

SEQ ID NO: 2029920 - RNA, 19 nt, Artificial Sequence
  Description of Artificial Sequence: Synthetic oligonucleotide
  Sense strand starting at position 111 of SEQ ID NO: 1881251
uuucuuuguccuugaagag

SEQ ID NO: 2029921 - RNA, 19 nt, Artificial Sequence
  Description of Artificial Sequence: Synthetic oligonucleotide
  Antisense strand to SEQ ID NO: 2029920
cucuucaaggacaaagaaa

SEQ ID NO: 2029922 - RNA, 19 nt, Artificial Sequence
  Description of Artificial Sequence: Synthetic oligonucleotide
  Sense strand starting at position 112 of SEQ ID NO: 1881251
uucuuuguccuugaagagu

SEQ ID NO: 2029923 - RNA, 19 nt, Artificial Sequence
  Description of Artificial Sequence: Synthetic oligonucleotide
  Antisense strand to SEQ ID NO: 2029922
acucuucaaggacaaagaa

SEQ ID NO: 2029924 - RNA, 19 nt, Artificial Sequence
  Description of Artificial Sequence: Synthetic oligonucleotide
  Sense strand starting at position 212 of SEQ ID NO: 1881251
gggccugggaaaugauaau

SEQ ID NO: 2029925 - RNA, 19 nt, Artificial Sequence
  Description of Artificial Sequence: Synthetic oligonucleotide
  Antisense strand to SEQ ID NO: 2029924
auuaucauuucccaggccc

SEQ ID NO: 2029926 - RNA, 19 nt, Artificial Sequence
  Description of Artificial Sequence: Synthetic oligonucleotide
  Sense strand starting at position 233 of SEQ ID NO: 1881251
auucuauucccaggagcua

SEQ ID NO: 2029927 - RNA, 19 nt, Artificial Sequence
  Description of Artificial Sequence: Synthetic oligonucleotide
  Antisense strand to SEQ ID NO: 2029926
uagcuccugggaauagaau

SEQ ID NO: 2029928 - RNA, 19 nt, Artificial Sequence
  Description of Artificial Sequence: Synthetic oligonucleotide
  Sense strand starting at position 326 of SEQ ID NO: 1881251
acucguuagggcugucauu

SEQ ID NO: 2029929 - RNA, 19 nt, Artificial Sequence
  Description of Artificial Sequence: Synthetic oligonucleotide
  Antisense strand to SEQ ID NO: 2029928
aaugacagcccuaacgagu

SEQ ID NO: 2029930 - RNA, 19 nt, Artificial Sequence
  Description of Artificial Sequence: Synthetic oligonucleotide
  Sense strand starting at position 345 of SEQ ID NO: 1881251
agcacugcuuccuggaauu

SEQ ID NO: 2029931 - RNA, 19 nt, Artificial Sequence
  Description of Artificial Sequence: Synthetic oligonucleotide
  Antisense strand to SEQ ID NO: 2029930
aauuccaggaagcagugcu

SEQ ID NO: 2029932 - RNA, 19 nt, Artificial Sequence
  Description of Artificial Sequence: Synthetic oligonucleotide
  Sense strand starting at position 460 of SEQ ID NO: 1881251
uguagauugugacuaggag

SEQ ID NO: 2029933 - RNA, 19 nt, Artificial Sequence
  Description of Artificial Sequence: Synthetic oligonucleotide
  Antisense strand to SEQ ID NO: 2029932
cuccuagucacaaucuaca

SEQ ID NO: 2029934 - RNA, 19 nt, Artificial Sequence
  Description of Artificial Sequence: Synthetic oligonucleotide
  Sense strand starting at position 517 of SEQ ID NO: 1881251
ggaagcuggucacugaguu

SEQ ID NO: 2029935 - RNA, 19 nt, Artificial Sequence
  Description of Artificial Sequence: Synthetic oligonucleotide
  Antisense strand to SEQ ID NO: 2029934
aacucagugaccagcuucc

SEQ ID NO: 2029936 - RNA, 19 nt, Artificial Sequence
  Description of Artificial Sequence: Synthetic oligonucleotide
  Sense strand starting at position 572 of SEQ ID NO: 1881251
gagcaaauacugcgaucaa

SEQ ID NO: 2029937 - RNA, 19 nt, Artificial Sequence
  Description of Artificial Sequence: Synthetic oligonucleotide
  Antisense strand to SEQ ID NO: 2029936
uugaucgcaguauuugcuc

SEQ ID NO: 2029938 - RNA, 19 nt, Artificial Sequence
  Description of Artificial Sequence: Synthetic oligonucleotide
  Sense strand starting at position 573 of SEQ ID NO: 1881251
agcaaauacugcgaucaag

SEQ ID NO: 2029939 - RNA, 19 nt, Artificial Sequence
  Description of Artificial Sequence: Synthetic oligonucleotide
  Antisense strand to SEQ ID NO: 2029938
cuugaucgcaguauuugcu

SEQ ID NO: 2029940 - RNA, 19 nt, Artificial Sequence
  Description of Artificial Sequence: Synthetic oligonucleotide
  Sense strand starting at position 616 of SEQ ID NO: 1881251
ugggccuugucaggaguga

SEQ ID NO: 2029941 - RNA, 19 nt, Artificial Sequence
  Description of Artificial Sequence: Synthetic oligonucleotide
  Antisense strand to SEQ ID NO: 2029940
ucacuccugacaaggccca

SEQ ID NO: 2029942 - RNA, 19 nt, Artificial Sequence
  Description of Artificial Sequence: Synthetic oligonucleotide
  Sense strand starting at position 634 of SEQ ID NO: 1881251
acuucaggcuguuggagaa

SEQ ID NO: 2029943 - RNA, 19 nt, Artificial Sequence
  Description of Artificial Sequence: Synthetic oligonucleotide
  Antisense strand to SEQ ID NO: 2029942
uucuccaacagccugaagu

SEQ ID NO: 2029944 - RNA, 19 nt, Artificial Sequence
  Description of Artificial Sequence: Synthetic oligonucleotide
  Sense strand starting at position 768 of SEQ ID NO: 1881251
gccagaucaucccggccau

SEQ ID NO: 2029945 - RNA, 19 nt, Artificial Sequence
  Description of Artificial Sequence: Synthetic oligonucleotide
  Antisense strand to SEQ ID NO: 2029944
auggccgggaugaucuggc

SEQ ID NO: 2029946 - RNA, 19 nt, Artificial Sequence
  Description of Artificial Sequence: Synthetic oligonucleotide
  Sense strand starting at position 1170 of SEQ ID NO: 1881251
cggccaacaugaucugauu

SEQ ID NO: 2029947 - RNA, 19 nt, Artificial Sequence
  Description of Artificial Sequence: Synthetic oligonucleotide
  Antisense strand to SEQ ID NO: 2029946
aaucagaucauguuggccg

SEQ ID NO: 2029948 - RNA, 19 nt, Artificial Sequence
  Description of Artificial Sequence: Synthetic oligonucleotide
  Sense strand starting at position 1198 of SEQ ID NO: 1881251
ccuucugguugcuaugagu

SEQ ID NO: 2029949 - RNA, 19 nt, Artificial Sequence
  Description of Artificial Sequence: Synthetic oligonucleotide
  Antisense strand to SEQ ID NO: 2029948
acucauagcaaccagaagg

SEQ ID NO: 2029950 - RNA, 19 nt, Artificial Sequence
  Description of Artificial Sequence: Synthetic oligonucleotide
  Sense strand starting at position 1201 of SEQ ID NO: 1881251
ucugguugcuaugaguagu

SEQ ID NO: 2029951 - RNA, 19 nt, Artificial Sequence
  Description of Artificial Sequence: Synthetic oligonucleotide
  Antisense strand to SEQ ID NO: 2029950
acuacucauagcaaccaga

SEQ ID NO: 2029952 - RNA, 19 nt, Artificial Sequence
  Description of Artificial Sequence: Synthetic oligonucleotide
  Sense strand starting at position 1204 of SEQ ID NO: 1881251
gguugcuaugaguaguaga

SEQ ID NO: 2029953 - RNA, 19 nt, Artificial Sequence
  Description of Artificial Sequence: Synthetic oligonucleotide
  Antisense strand to SEQ ID NO: 2029952
ucuacuacucauagcaacc

SEQ ID NO: 2029954 - RNA, 19 nt, Artificial Sequence
  Description of Artificial Sequence: Synthetic oligonucleotide
  Sense strand starting at position 1214 of SEQ ID NO: 1881251
aguaguagaaccugaggau

SEQ ID NO: 2029955 - RNA, 19 nt, Artificial Sequence
  Description of Artificial Sequence: Synthetic oligonucleotide
  Antisense strand to SEQ ID NO: 2029954
auccucagguucuacuacu

SEQ ID NO: 2029956 - RNA, 19 nt, Artificial Sequence
  Description of Artificial Sequence: Synthetic oligonucleotide
  Sense strand starting at position 1258 of SEQ ID NO: 1881251
ggcaccauucgagggaaau

SEQ ID NO: 2029957 - RNA, 19 nt, Artificial Sequence
  Description of Artificial Sequence: Synthetic oligonucleotide
  Antisense strand to SEQ ID NO: 2029956
auuucccucgaauggugcc

SEQ ID NO: 2029958 - RNA, 19 nt, Artificial Sequence
  Description of Artificial Sequence: Synthetic oligonucleotide
  Sense strand starting at position 1259 of SEQ ID NO: 1881251
gcaccauucgagggaaaug

SEQ ID NO: 2029959 - RNA, 19 nt, Artificial Sequence
  Description of Artificial Sequence: Synthetic oligonucleotide
  Antisense strand to SEQ ID NO: 2029958
cauuucccucgaauggugc

SEQ ID NO: 2029960 - RNA, 19 nt, Artificial Sequence
  Description of Artificial Sequence: Synthetic oligonucleotide
  Sense strand starting at position 1343 of SEQ ID NO: 1881251
gagcaauuauaacgggagu

SEQ ID NO: 2029961 - RNA, 19 nt, Artificial Sequence
  Description of Artificial Sequence: Synthetic oligonucleotide
  Antisense strand to SEQ ID NO: 2029960
acucccguuauaauugcuc

SEQ ID NO: 2029962 - RNA, 19 nt, Artificial Sequence
  Description of Artificial Sequence: Synthetic oligonucleotide
  Sense strand starting at position 1345 of SEQ ID NO: 1881251
gcaauuauaacgggaguga

SEQ ID NO: 2029963 - RNA, 19 nt, Artificial Sequence
  Description of Artificial Sequence: Synthetic oligonucleotide
  Antisense strand to SEQ ID NO: 2029962
ucacucccguuauaauugc

SEQ ID NO: 2029964 - RNA, 19 nt, Artificial Sequence
  Description of Artificial Sequence: Synthetic oligonucleotide
  Sense strand starting at position 1349 of SEQ ID NO: 1881251
uuauaacgggagugaguuu

SEQ ID NO: 2029965 - RNA, 19 nt, Artificial Sequence
  Description of Artificial Sequence: Synthetic oligonucleotide
  Antisense strand to SEQ ID NO: 2029964
aaacucacucccguuauaa

SEQ ID NO: 2029966 - RNA, 19 nt, Artificial Sequence
  Description of Artificial Sequence: Synthetic oligonucleotide
  Sense strand starting at position 1437 of SEQ ID NO: 1881251
acaccuaaagaucggucua

SEQ ID NO: 2029967 - RNA, 19 nt, Artificial Sequence
  Description of Artificial Sequence: Synthetic oligonucleotide
  Antisense strand to SEQ ID NO: 2029966
uagaccgaucuuuaggugu

SEQ ID NO: 2029968 - RNA, 19 nt, Artificial Sequence
  Description of Artificial Sequence: Synthetic oligonucleotide
  Sense strand starting at position 1439 of SEQ ID NO: 1881251
accuaaagaucggucuaaa

SEQ ID NO: 2029969 - RNA, 19 nt, Artificial Sequence
  Description of Artificial Sequence: Synthetic oligonucleotide
  Antisense strand to SEQ ID NO: 2029968
uuuagaccgaucuuuaggu

SEQ ID NO: 2029970 - RNA, 19 nt, Artificial Sequence
  Description of Artificial Sequence: Synthetic oligonucleotide
  Sense strand starting at position 2140 of SEQ ID NO: 1881251
acgcguccucuugcaacua

SEQ ID NO: 2029971 - RNA, 19 nt, Artificial Sequence
  Description of Artificial Sequence: Synthetic oligonucleotide
  Antisense strand to SEQ ID NO: 2029970
uaguugcaagaggacgcgu

SEQ ID NO: 2029972 - RNA, 19 nt, Artificial Sequence
  Description of Artificial Sequence: Synthetic oligonucleotide
  Sense strand starting at position 2209 of SEQ ID NO: 1881251
cagggucuccuccgcgaua

SEQ ID NO: 2029973 - RNA, 19 nt, Artificial Sequence
  Description of Artificial Sequence: Synthetic oligonucleotide
  Antisense strand to SEQ ID NO: 2029972
uaucgcggaggagacccug

SEQ ID NO: 2029974 - RNA, 19 nt, Artificial Sequence
  Description of Artificial Sequence: Synthetic oligonucleotide
  Sense strand starting at position 2838 of SEQ ID NO: 1881251
auagucaauggcggacaua

SEQ ID NO: 2029975 - RNA, 19 nt, Artificial Sequence
  Description of Artificial Sequence: Synthetic oligonucleotide
  Antisense strand to SEQ ID NO: 2029974
uauguccgccauugacuau

SEQ ID NO: 2029976 - RNA, 19 nt, Artificial Sequence
  Description of Artificial Sequence: Synthetic oligonucleotide
  Sense strand starting at position 3031 of SEQ ID NO: 1881251
cggcuuucuucccacggau

SEQ ID NO: 2029977 - RNA, 19 nt, Artificial Sequence
  Description of Artificial Sequence: Synthetic oligonucleotide
  Antisense strand to SEQ ID NO: 2029976
auccgugggaagaaagccg

SEQ ID NO: 2029978 - RNA, 19 nt, Artificial Sequence
  Description of Artificial Sequence: Synthetic oligonucleotide
  Sense strand starting at position 3066 of SEQ ID NO: 1881251
caggacuguccuggagcau

SEQ ID NO: 2029979 - RNA, 19 nt, Artificial Sequence
  Description of Artificial Sequence: Synthetic oligonucleotide
  Antisense strand to SEQ ID NO: 2029978
augcuccaggacaguccug

SEQ ID NO: 2029980 - RNA, 19 nt, Artificial Sequence
  Description of Artificial Sequence: Synthetic oligonucleotide
  Sense strand starting at position 3221 of SEQ ID NO: 1881251
cggauuaggucgcuggcua

SEQ ID NO: 2029981 - RNA, 19 nt, Artificial Sequence
  Description of Artificial Sequence: Synthetic oligonucleotide
  Antisense strand to SEQ ID NO: 2029980
uagccagcgaccuaauccg

SEQ ID NO: 2029982 - RNA, 19 nt, Artificial Sequence
  Description of Artificial Sequence: Synthetic oligonucleotide
  Sense strand starting at position 3222 of SEQ ID NO: 1881251
ggauuaggucgcuggcuaa

SEQ ID NO: 2029983 - RNA, 19 nt, Artificial Sequence
  Description of Artificial Sequence: Synthetic oligonucleotide
  Antisense strand to SEQ ID NO: 2029982
uuagccagcgaccuaaucc

SEQ ID NO: 2029984 - RNA, 19 nt, Artificial Sequence
  Description of Artificial Sequence: Synthetic oligonucleotide
  Sense strand starting at position 3263 of SEQ ID NO: 1881251
uuuguagacuugugugguu

SEQ ID NO: 2029985 - RNA, 19 nt, Artificial Sequence
  Description of Artificial Sequence: Synthetic oligonucleotide
  Antisense strand to SEQ ID NO: 2029984
aaccacacaagucuacaaa

SEQ ID NO: 2029986 - RNA, 19 nt, Artificial Sequence
  Description of Artificial Sequence: Synthetic oligonucleotide
  Sense strand starting at position 3266 of SEQ ID NO: 1881251
guagacuugugugguugga

SEQ ID NO: 2029987 - RNA, 19 nt, Artificial Sequence
  Description of Artificial Sequence: Synthetic oligonucleotide
  Antisense strand to SEQ ID NO: 2029986
uccaaccacacaagucuac

SEQ ID NO: 2029988 - RNA, 19 nt, Artificial Sequence
  Description of Artificial Sequence: Synthetic oligonucleotide
  Sense strand starting at position 3268 of SEQ ID NO: 1881251
agacuugugugguuggaaa

SEQ ID NO: 2029989 - RNA, 19 nt, Artificial Sequence
  Description of Artificial Sequence: Synthetic oligonucleotide
  Antisense strand to SEQ ID NO: 2029988
uuuccaaccacacaagucu

SEQ ID NO: 2029990 - RNA, 19 nt, Artificial Sequence
  Description of Artificial Sequence: Synthetic oligonucleotide
  Sense strand starting at position 3270 of SEQ ID NO: 1881251
acuugugugguuggaaagu

SEQ ID NO: 2029991 - RNA, 19 nt, Artificial Sequence
  Description of Artificial Sequence: Synthetic oligonucleotide
  Antisense strand to SEQ ID NO: 2029990
acuuuccaaccacacaagu

SEQ ID NO: 2029992 - RNA, 19 nt, Artificial Sequence
  Description of Artificial Sequence: Synthetic oligonucleotide
  Sense strand starting at position 3359 of SEQ ID NO: 1881251
ccgcguuguuggaaaguca

SEQ ID NO: 2029993 - RNA, 19 nt, Artificial Sequence
  Description of Artificial Sequence: Synthetic oligonucleotide
  Antisense strand to SEQ ID NO: 2029992
ugacuuuccaacaacgcgg

SEQ ID NO: 2029994 - RNA, 19 nt, Artificial Sequence
  Description of Artificial Sequence: Synthetic oligonucleotide
  Sense strand starting at position 3378 of SEQ ID NO: 1881251
guugcugggugacuuuaaa

SEQ ID NO: 2029995 - RNA, 19 nt, Artificial Sequence
  Description of Artificial Sequence: Synthetic oligonucleotide
  Antisense strand to SEQ ID NO: 2029994
uuuaaagucacccagcaac

SEQ ID NO: 2029996 - RNA, 19 nt, Artificial Sequence
  Description of Artificial Sequence: Synthetic oligonucleotide
  Sense strand starting at position 3519 of SEQ ID NO: 1881251
aagcgauucucuggaggug

SEQ ID NO: 2029997 - RNA, 19 nt, Artificial Sequence
  Description of Artificial Sequence: Synthetic oligonucleotide
  Antisense strand to SEQ ID NO: 2029996
caccuccagagaaucgcuu

SEQ ID NO: 2029998 - RNA, 19 nt, Artificial Sequence
  Description of Artificial Sequence: Synthetic oligonucleotide
  Sense strand starting at position 55 of SEQ ID NO: 1881252
agagaugcaccuuaaaguu

SEQ ID NO: 2029999 - RNA, 19 nt, Artificial Sequence
  Description of Artificial Sequence: Synthetic oligonucleotide
  Antisense strand to SEQ ID NO: 2029998
aacuuuaaggugcaucucu

SEQ ID NO: 2030000 - RNA, 19 nt, Artificial Sequence
  Description of Artificial Sequence: Synthetic oligonucleotide
  Sense strand starting at position 70 of SEQ ID NO: 1881252
aguugaagacuauguauau

SEQ ID NO: 2030001 - RNA, 19 nt, Artificial Sequence
  Description of Artificial Sequence: Synthetic oligonucleotide
  Antisense strand to SEQ ID NO: 2030000
auauacauagucuucaacu

SEQ ID NO: 2030002 - RNA, 19 nt, Artificial Sequence
  Description of Artificial Sequence: Synthetic oligonucleotide
  Sense strand starting at position 71 of SEQ ID NO: 1881252
guugaagacuauguauaua

SEQ ID NO: 2030003 - RNA, 19 nt, Artificial Sequence
  Description of Artificial Sequence: Synthetic oligonucleotide
  Antisense strand to SEQ ID NO: 2030002
uauauacauagucuucaac

SEQ ID NO: 2030004 - RNA, 19 nt, Artificial Sequence
  Description of Artificial Sequence: Synthetic oligonucleotide
  Sense strand starting at position 251 of SEQ ID NO: 1881252
cucuacuugcuggagacua

SEQ ID NO: 2030005 - RNA, 19 nt, Artificial Sequence
  Description of Artificial Sequence: Synthetic oligonucleotide
  Antisense strand to SEQ ID NO: 2030004
uagucuccagcaaguagag

SEQ ID NO: 2030006 - RNA, 19 nt, Artificial Sequence
  Description of Artificial Sequence: Synthetic oligonucleotide
  Sense strand starting at position 253 of SEQ ID NO: 1881252
cuacuugcuggagacuauu

SEQ ID NO: 2030007 - RNA, 19 nt, Artificial Sequence
  Description of Artificial Sequence: Synthetic oligonucleotide
  Antisense strand to SEQ ID NO: 2030006
aauagucuccagcaaguag

SEQ ID NO: 2030008 - RNA, 19 nt, Artificial Sequence
  Description of Artificial Sequence: Synthetic oligonucleotide
  Sense strand starting at position 379 of SEQ ID NO: 1881252
uguguuuaggaagguacau

SEQ ID NO: 2030009 - RNA, 19 nt, Artificial Sequence
  Description of Artificial Sequence: Synthetic oligonucleotide
  Antisense strand to SEQ ID NO: 2030008
auguaccuuccuaaacaca

SEQ ID NO: 2030010 - RNA, 19 nt, Artificial Sequence
  Description of Artificial Sequence: Synthetic oligonucleotide
  Sense strand starting at position 677 of SEQ ID NO: 1881252
agagguugccaauacuagu

SEQ ID NO: 2030011 - RNA, 19 nt, Artificial Sequence
  Description of Artificial Sequence: Synthetic oligonucleotide
  Antisense strand to SEQ ID NO: 2030010
acuaguauuggcaaccucu

SEQ ID NO: 2030012 - RNA, 19 nt, Artificial Sequence
  Description of Artificial Sequence: Synthetic oligonucleotide
  Sense strand starting at position 683 of SEQ ID NO: 1881252
ugccaauacuaguuacaag

SEQ ID NO: 2030013 - RNA, 19 nt, Artificial Sequence
  Description of Artificial Sequence: Synthetic oligonucleotide
  Antisense strand to SEQ ID NO: 2030012
cuuguaacuaguauuggca

SEQ ID NO: 2030014 - RNA, 19 nt, Artificial Sequence
  Description of Artificial Sequence: Synthetic oligonucleotide
  Sense strand starting at position 699 of SEQ ID NO: 1881252
aagguauaauuugacagau

SEQ ID NO: 2030015 - RNA, 19 nt, Artificial Sequence
  Description of Artificial Sequence: Synthetic oligonucleotide
  Antisense strand to SEQ ID NO: 2030014
aucugucaaauuauaccuu

SEQ ID NO: 2030016 - RNA, 19 nt, Artificial Sequence
  Description of Artificial Sequence: Synthetic oligonucleotide
  Sense strand starting at position 701 of SEQ ID NO: 1881252
gguauaauuugacagauaa

SEQ ID NO: 2030017 - RNA, 19 nt, Artificial Sequence
  Description of Artificial Sequence: Synthetic oligonucleotide
  Antisense strand to SEQ ID NO: 2030016
uuaucugucaaauuauacc

SEQ ID NO: 2030018 - RNA, 19 nt, Artificial Sequence
  Description of Artificial Sequence: Synthetic oligonucleotide
  Sense strand starting at position 781 of SEQ ID NO: 1881252
gggccugagacauauagca

SEQ ID NO: 2030019 - RNA, 19 nt, Artificial Sequence
  Description of Artificial Sequence: Synthetic oligonucleotide
  Antisense strand to SEQ ID NO: 2030018
ugcuauaugucucaggccc

SEQ ID NO: 2030020 - RNA, 19 nt, Artificial Sequence
  Description of Artificial Sequence: Synthetic oligonucleotide
  Sense strand starting at position 802 of SEQ ID NO: 1881252
gaaagauucugucccugac

SEQ ID NO: 2030021 - RNA, 19 nt, Artificial Sequence
  Description of Artificial Sequence: Synthetic oligonucleotide
  Antisense strand to SEQ ID NO: 2030020
gucagggacagaaucuuuc

SEQ ID NO: 2030022 - RNA, 19 nt, Artificial Sequence
  Description of Artificial Sequence: Synthetic oligonucleotide
  Sense strand starting at position 1084 of SEQ ID NO: 1881252
gaggaaggcuuccuccuuu

SEQ ID NO: 2030023 - RNA, 19 nt, Artificial Sequence
  Description of Artificial Sequence: Synthetic oligonucleotide
  Antisense strand to SEQ ID NO: 2030022
aaaggaggaagccuuccuc

SEQ ID NO: 2030024 - RNA, 19 nt, Artificial Sequence
  Description of Artificial Sequence: Synthetic oligonucleotide
  Sense strand starting at position 1171 of SEQ ID NO: 1881252
ccuggaauuugauaacaua

SEQ ID NO: 2030025 - RNA, 19 nt, Artificial Sequence
  Description of Artificial Sequence: Synthetic oligonucleotide
  Antisense strand to SEQ ID NO: 2030024
uauguuaucaaauuccagg

SEQ ID NO: 2030026 - RNA, 19 nt, Artificial Sequence
  Description of Artificial Sequence: Synthetic oligonucleotide
  Sense strand starting at position 1174 of SEQ ID NO: 1881252
ggaauuugauaacauaauc

SEQ ID NO: 2030027 - RNA, 19 nt, Artificial Sequence
  Description of Artificial Sequence: Synthetic oligonucleotide
  Antisense strand to SEQ ID NO: 2030026
gauuauguuaucaaauucc

SEQ ID NO: 2030028 - RNA, 19 nt, Artificial Sequence
  Description of Artificial Sequence: Synthetic oligonucleotide
  Sense strand starting at position 1745 of SEQ ID NO: 1881252
guggaaaggugggucagau

SEQ ID NO: 2030029 - RNA, 19 nt, Artificial Sequence
  Description of Artificial Sequence: Synthetic oligonucleotide
  Antisense strand to SEQ ID NO: 2030028
aucugacccaccuuuccac

SEQ ID NO: 2030030 - RNA, 19 nt, Artificial Sequence
  Description of Artificial Sequence: Synthetic oligonucleotide
  Sense strand starting at position 1875 of SEQ ID NO: 1881252
ugagguuaugccuauauac

SEQ ID NO: 2030031 - RNA, 19 nt, Artificial Sequence
  Description of Artificial Sequence: Synthetic oligonucleotide
  Antisense strand to SEQ ID NO: 2030030
guauauaggcauaaccuca

SEQ ID NO: 2030032 - RNA, 19 nt, Artificial Sequence
  Description of Artificial Sequence: Synthetic oligonucleotide
  Sense strand starting at position 1877 of SEQ ID NO: 1881252
agguuaugccuauauacau

SEQ ID NO: 2030033 - RNA, 19 nt, Artificial Sequence
  Description of Artificial Sequence: Synthetic oligonucleotide
  Antisense strand to SEQ ID NO: 2030032
auguauauaggcauaaccu

SEQ ID NO: 2030034 - RNA, 19 nt, Artificial Sequence
  Description of Artificial Sequence: Synthetic oligonucleotide
  Sense strand starting at position 1886 of SEQ ID NO: 1881252
cuauauacaucuguaggaa

SEQ ID NO: 2030035 - RNA, 19 nt, Artificial Sequence
  Description of Artificial Sequence: Synthetic oligonucleotide
  Antisense strand to SEQ ID NO: 2030034
uuccuacagauguauauag

SEQ ID NO: 2030036 - RNA, 19 nt, Artificial Sequence
  Description of Artificial Sequence: Synthetic oligonucleotide
  Sense strand starting at position 2189 of SEQ ID NO: 1881252
ggaacuagcuagcuuucua

SEQ ID NO: 2030037 - RNA, 19 nt, Artificial Sequence
  Description of Artificial Sequence: Synthetic oligonucleotide
  Antisense strand to SEQ ID NO: 2030036
uagaaagcuagcuaguucc

SEQ ID NO: 2030038 - RNA, 19 nt, Artificial Sequence
  Description of Artificial Sequence: Synthetic oligonucleotide
  Sense strand starting at position 2285 of SEQ ID NO: 1881252
auauauacauuuggaggaa

SEQ ID NO: 2030039 - RNA, 19 nt, Artificial Sequence
  Description of Artificial Sequence: Synthetic oligonucleotide
  Antisense strand to SEQ ID NO: 2030038
uuccuccaaauguauauau

SEQ ID NO: 2030040 - RNA, 19 nt, Artificial Sequence
  Description of Artificial Sequence: Synthetic oligonucleotide
  Sense strand starting at position 2361 of SEQ ID NO: 1881252
cugggcuugguccacagau

SEQ ID NO: 2030041 - RNA, 19 nt, Artificial Sequence
  Description of Artificial Sequence: Synthetic oligonucleotide
  Antisense strand to SEQ ID NO: 2030040
aucuguggaccaagcccag

SEQ ID NO: 2030042 - RNA, 19 nt, Artificial Sequence
  Description of Artificial Sequence: Synthetic oligonucleotide
  Sense strand starting at position 2363 of SEQ ID NO: 1881252
gggcuugguccacagauua

SEQ ID NO: 2030043 - RNA, 19 nt, Artificial Sequence
  Description of Artificial Sequence: Synthetic oligonucleotide
  Antisense strand to SEQ ID NO: 2030042
uaaucuguggaccaagccc

SEQ ID NO: 2030044 - RNA, 19 nt, Artificial Sequence
  Description of Artificial Sequence: Synthetic oligonucleotide
  Sense strand starting at position 2425 of SEQ ID NO: 1881252
acuggauaauucuuugcuu

SEQ ID NO: 2030045 - RNA, 19 nt, Artificial Sequence
  Description of Artificial Sequence: Synthetic oligonucleotide
  Antisense strand to SEQ ID NO: 2030044
aagcaaagaauuauccagu

SEQ ID NO: 2030046 - RNA, 19 nt, Artificial Sequence
  Description of Artificial Sequence: Synthetic oligonucleotide
  Sense strand starting at position 2461 of SEQ ID NO: 1881252
ugaauucugucccugcaaa

SEQ ID NO: 2030047 - RNA, 19 nt, Artificial Sequence
  Description of Artificial Sequence: Synthetic oligonucleotide
  Antisense strand to SEQ ID NO: 2030046
uuugcagggacagaauuca

SEQ ID NO: 2030048 - RNA, 19 nt, Artificial Sequence
  Description of Artificial Sequence: Synthetic oligonucleotide
  Sense strand starting at position 2479 of SEQ ID NO: 1881252
aaagauaugcuguagcucu

SEQ ID NO: 2030049 - RNA, 19 nt, Artificial Sequence
  Description of Artificial Sequence: Synthetic oligonucleotide
  Antisense strand to SEQ ID NO: 2030048
agagcuacagcauaucuuu

SEQ ID NO: 2030050 - RNA, 19 nt, Artificial Sequence
  Description of Artificial Sequence: Synthetic oligonucleotide
  Sense strand starting at position 2535 of SEQ ID NO: 1881252
aacguuguugcagauauaa

SEQ ID NO: 2030051 - RNA, 19 nt, Artificial Sequence
  Description of Artificial Sequence: Synthetic oligonucleotide
  Antisense strand to SEQ ID NO: 2030050
uuauaucugcaacaacguu

SEQ ID NO: 2030052 - RNA, 19 nt, Artificial Sequence
  Description of Artificial Sequence: Synthetic oligonucleotide
  Sense strand starting at position 2938 of SEQ ID NO: 1881252
gcagcaucccuggaaucua

SEQ ID NO: 2030053 - RNA, 19 nt, Artificial Sequence
  Description of Artificial Sequence: Synthetic oligonucleotide
  Antisense strand to SEQ ID NO: 2030052
uagauuccagggaugcugc

SEQ ID NO: 2030054 - RNA, 19 nt, Artificial Sequence
  Description of Artificial Sequence: Synthetic oligonucleotide
  Sense strand starting at position 3418 of SEQ ID NO: 1881252
auugaaaccgcucauccaa

SEQ ID NO: 2030055 - RNA, 19 nt, Artificial Sequence
  Description of Artificial Sequence: Synthetic oligonucleotide
  Antisense strand to SEQ ID NO: 2030054
uuggaugagcgguuucaau

SEQ ID NO: 2030056 - RNA, 19 nt, Artificial Sequence
  Description of Artificial Sequence: Synthetic oligonucleotide
  Sense strand starting at position 3447 of SEQ ID NO: 1881252
caaagccugggcugaaauu

SEQ ID NO: 2030057 - RNA, 19 nt, Artificial Sequence
  Description of Artificial Sequence: Synthetic oligonucleotide
  Antisense strand to SEQ ID NO: 2030056
aauuucagcccaggcuuug

SEQ ID NO: 2030058 - RNA, 19 nt, Artificial Sequence
  Description of Artificial Sequence: Synthetic oligonucleotide
  Sense strand starting at position 3493 of SEQ ID NO: 1881252
ccuugaaauugcucagaac

SEQ ID NO: 2030059 - RNA, 19 nt, Artificial Sequence
  Description of Artificial Sequence: Synthetic oligonucleotide
  Antisense strand to SEQ ID NO: 2030058
guucugagcaauuucaagg

SEQ ID NO: 2030060 - RNA, 19 nt, Artificial Sequence
  Description of Artificial Sequence: Synthetic oligonucleotide
  Sense strand starting at position 3494 of SEQ ID NO: 1881252
cuugaaauugcucagaacu

SEQ ID NO: 2030061 - RNA, 19 nt, Artificial Sequence
  Description of Artificial Sequence: Synthetic oligonucleotide
  Antisense strand to SEQ ID NO: 2030060
aguucugagcaauuucaag

SEQ ID NO: 2030062 - RNA, 19 nt, Artificial Sequence
  Description of Artificial Sequence: Synthetic oligonucleotide
  Sense strand starting at position 3509 of SEQ ID NO: 1881252
aacuuaggacagugaucua

SEQ ID NO: 2030063 - RNA, 19 nt, Artificial Sequence
  Description of Artificial Sequence: Synthetic oligonucleotide
  Antisense strand to SEQ ID NO: 2030062
uagaucacuguccuaaguu

SEQ ID NO: 2030064 - RNA, 19 nt, Artificial Sequence
  Description of Artificial Sequence: Synthetic oligonucleotide
  Sense strand starting at position 3555 of SEQ ID NO: 1881252
auaguaacuguggguuaua

SEQ ID NO: 2030065 - RNA, 19 nt, Artificial Sequence
  Description of Artificial Sequence: Synthetic oligonucleotide
  Antisense strand to SEQ ID NO: 2030064
uauaacccacaguuacuau

SEQ ID NO: 2030066 - RNA, 19 nt, Artificial Sequence
  Description of Artificial Sequence: Synthetic oligonucleotide
  Sense strand starting at position 3558 of SEQ ID NO: 1881252
guaacuguggguuauagaa

SEQ ID NO: 2030067 - RNA, 19 nt, Artificial Sequence
  Description of Artificial Sequence: Synthetic oligonucleotide
  Antisense strand to SEQ ID NO: 2030066
uucuauaacccacaguuac

SEQ ID NO: 2030068 - RNA, 19 nt, Artificial Sequence
  Description of Artificial Sequence: Synthetic oligonucleotide
  Sense strand starting at position 3630 of SEQ ID NO: 1881252
ugugauaacacgugauaga

SEQ ID NO: 2030069 - RNA, 19 nt, Artificial Sequence
  Description of Artificial Sequence: Synthetic oligonucleotide
  Antisense strand to SEQ ID NO: 2030068
ucuaucacguguuaucaca

SEQ ID NO: 2030070 - RNA, 19 nt, Artificial Sequence
  Description of Artificial Sequence: Synthetic oligonucleotide
  Sense strand starting at position 3631 of SEQ ID NO: 1881252
gugauaacacgugauagag

SEQ ID NO: 2030071 - RNA, 19 nt, Artificial Sequence
  Description of Artificial Sequence: Synthetic oligonucleotide
  Antisense strand to SEQ ID NO: 2030070
cucuaucacguguuaucac

SEQ ID NO: 2030072 - RNA, 19 nt, Artificial Sequence
  Description of Artificial Sequence: Synthetic oligonucleotide
  Sense strand starting at position 3769 of SEQ ID NO: 1881252
accaaaguaugguucuaau

SEQ ID NO: 2030073 - RNA, 19 nt, Artificial Sequence
  Description of Artificial Sequence: Synthetic oligonucleotide
  Antisense strand to SEQ ID NO: 2030072
auuagaaccauacuuuggu

SEQ ID NO: 2030074 - RNA, 19 nt, Artificial Sequence
  Description of Artificial Sequence: Synthetic oligonucleotide
  Sense strand starting at position 3891 of SEQ ID NO: 1881252
aguugauguugaucuggaa

SEQ ID NO: 2030075 - RNA, 19 nt, Artificial Sequence
  Description of Artificial Sequence: Synthetic oligonucleotide
  Antisense strand to SEQ ID NO: 2030074
uuccagaucaacaucaacu

SEQ ID NO: 2030076 - RNA, 19 nt, Artificial Sequence
  Description of Artificial Sequence: Synthetic oligonucleotide
  Sense strand starting at position 3917 of SEQ ID NO: 1881252
uuguuugauccugggcaaa

SEQ ID NO: 2030077 - RNA, 19 nt, Artificial Sequence
  Description of Artificial Sequence: Synthetic oligonucleotide
  Antisense strand to SEQ ID NO: 2030076
uuugcccaggaucaaacaa

SEQ ID NO: 2030078 - RNA, 19 nt, Artificial Sequence
  Description of Artificial Sequence: Synthetic oligonucleotide
  Sense strand starting at position 35 of SEQ ID NO: 1881253
ccauguaugugaucagcag

SEQ ID NO: 2030079 - RNA, 19 nt, Artificial Sequence
  Description of Artificial Sequence: Synthetic oligonucleotide
  Antisense strand to SEQ ID NO: 2030078
cugcugaucacauacaugg

SEQ ID NO: 2030080 - RNA, 19 nt, Artificial Sequence
  Description of Artificial Sequence: Synthetic oligonucleotide
  Sense strand starting at position 36 of SEQ ID NO: 1881253
cauguaugugaucagcagu

SEQ ID NO: 2030081 - RNA, 19 nt, Artificial Sequence
  Description of Artificial Sequence: Synthetic oligonucleotide
  Antisense strand to SEQ ID NO: 2030080
acugcugaucacauacaug

SEQ ID NO: 2030082 - RNA, 19 nt, Artificial Sequence
  Description of Artificial Sequence: Synthetic oligonucleotide
  Sense strand starting at position 42 of SEQ ID NO: 1881253
ugugaucagcaguguguua

SEQ ID NO: 2030083 - RNA, 19 nt, Artificial Sequence
  Description of Artificial Sequence: Synthetic oligonucleotide
  Antisense strand to SEQ ID NO: 2030082
uaacacacugcugaucaca

SEQ ID NO: 2030084 - RNA, 19 nt, Artificial Sequence
  Description of Artificial Sequence: Synthetic oligonucleotide
  Sense strand starting at position 44 of SEQ ID NO: 1881253
ugaucagcaguguguuaua

SEQ ID NO: 2030085 - RNA, 19 nt, Artificial Sequence
  Description of Artificial Sequence: Synthetic oligonucleotide
  Antisense strand to SEQ ID NO: 2030084
uauaacacacugcugauca

SEQ ID NO: 2030086 - RNA, 19 nt, Artificial Sequence
  Description of Artificial Sequence: Synthetic oligonucleotide
  Sense strand starting at position 85 of SEQ ID NO: 1881253
gaguuacacuguuccaaag

SEQ ID NO: 2030087 - RNA, 19 nt, Artificial Sequence
  Description of Artificial Sequence: Synthetic oligonucleotide
  Antisense strand to SEQ ID NO: 2030086
cuuuggaacaguguaacuc

SEQ ID NO: 2030088 - RNA, 19 nt, Artificial Sequence
  Description of Artificial Sequence: Synthetic oligonucleotide
  Sense strand starting at position 141 of SEQ ID NO: 1881253
cuggacaacugcucuugaa

SEQ ID NO: 2030089 - RNA, 19 nt, Artificial Sequence
  Description of Artificial Sequence: Synthetic oligonucleotide
  Antisense strand to SEQ ID NO: 2030088
uucaagagcaguuguccag

SEQ ID NO: 2030090 - RNA, 19 nt, Artificial Sequence
  Description of Artificial Sequence: Synthetic oligonucleotide
  Sense strand starting at position 349 of SEQ ID NO: 1881253
aaauguuugcuguguauca

SEQ ID NO: 2030091 - RNA, 19 nt, Artificial Sequence
  Description of Artificial Sequence: Synthetic oligonucleotide
  Antisense strand to SEQ ID NO: 2030090
ugauacacagcaaacauuu

SEQ ID NO: 2030092 - RNA, 19 nt, Artificial Sequence
  Description of Artificial Sequence: Synthetic oligonucleotide
  Sense strand starting at position 362 of SEQ ID NO: 1881253
guaucacuggcagagaguu

SEQ ID NO: 2030093 - RNA, 19 nt, Artificial Sequence
  Description of Artificial Sequence: Synthetic oligonucleotide
  Antisense strand to SEQ ID NO: 2030092
aacucucugccagugauac

SEQ ID NO: 2030094 - RNA, 19 nt, Artificial Sequence
  Description of Artificial Sequence: Synthetic oligonucleotide
  Sense strand starting at position 375 of SEQ ID NO: 1881253
agaguugugccaugauuug

SEQ ID NO: 2030095 - RNA, 19 nt, Artificial Sequence
  Description of Artificial Sequence: Synthetic oligonucleotide
  Antisense strand to SEQ ID NO: 2030094
caaaucauggcacaacucu

SEQ ID NO: 2030096 - RNA, 19 nt, Artificial Sequence
  Description of Artificial Sequence: Synthetic oligonucleotide
  Sense strand starting at position 382 of SEQ ID NO: 1881253
ugccaugauuugggagaca

SEQ ID NO: 2030097 - RNA, 19 nt, Artificial Sequence
  Description of Artificial Sequence: Synthetic oligonucleotide
  Antisense strand to SEQ ID NO: 2030096
ugucucccaaaucauggca

SEQ ID NO: 2030098 - RNA, 19 nt, Artificial Sequence
  Description of Artificial Sequence: Synthetic oligonucleotide
  Sense strand starting at position 653 of SEQ ID NO: 1881253
aggguuucuguaggauguu

SEQ ID NO: 2030099 - RNA, 19 nt, Artificial Sequence
  Description of Artificial Sequence: Synthetic oligonucleotide
  Antisense strand to SEQ ID NO: 2030098
aacauccuacagaaacccu

SEQ ID NO: 2030100 - RNA, 19 nt, Artificial Sequence
  Description of Artificial Sequence: Synthetic oligonucleotide
  Sense strand starting at position 656 of SEQ ID NO: 1881253
guuucuguaggauguuaga

SEQ ID NO: 2030101 - RNA, 19 nt, Artificial Sequence
  Description of Artificial Sequence: Synthetic oligonucleotide
  Antisense strand to SEQ ID NO: 2030100
ucuaacauccuacagaaac

SEQ ID NO: 2030102 - RNA, 19 nt, Artificial Sequence
  Description of Artificial Sequence: Synthetic oligonucleotide
  Sense strand starting at position 667 of SEQ ID NO: 1881253
auguuagauaggcagugua

SEQ ID NO: 2030103 - RNA, 19 nt, Artificial Sequence
  Description of Artificial Sequence: Synthetic oligonucleotide
  Antisense strand to SEQ ID NO: 2030102
uacacugccuaucuaacau

SEQ ID NO: 2030104 - RNA, 19 nt, Artificial Sequence
  Description of Artificial Sequence: Synthetic oligonucleotide
  Sense strand starting at position 749 of SEQ ID NO: 1881253
guagucagguuugucccaa

SEQ ID NO: 2030105 - RNA, 19 nt, Artificial Sequence
  Description of Artificial Sequence: Synthetic oligonucleotide
  Antisense strand to SEQ ID NO: 2030104
uugggacaaaccugacuac

SEQ ID NO: 2030106 - RNA, 19 nt, Artificial Sequence
  Description of Artificial Sequence: Synthetic oligonucleotide
  Sense strand starting at position 750 of SEQ ID NO: 1881253
uagucagguuugucccaaa

SEQ ID NO: 2030107 - RNA, 19 nt, Artificial Sequence
  Description of Artificial Sequence: Synthetic oligonucleotide
  Antisense strand to SEQ ID NO: 2030106
uuugggacaaaccugacua

SEQ ID NO: 2030108 - RNA, 19 nt, Artificial Sequence
  Description of Artificial Sequence: Synthetic oligonucleotide
  Sense strand starting at position 753 of SEQ ID NO: 1881253
ucagguuugucccaaacug

SEQ ID NO: 2030109 - RNA, 19 nt, Artificial Sequence
  Description of Artificial Sequence: Synthetic oligonucleotide
  Antisense strand to SEQ ID NO: 2030108
caguuugggacaaaccuga

SEQ ID NO: 2030110 - RNA, 19 nt, Artificial Sequence
  Description of Artificial Sequence: Synthetic oligonucleotide
  Sense strand starting at position 998 of SEQ ID NO: 1881253
gggagaaguaucugcuucu

SEQ ID NO: 2030111 - RNA, 19 nt, Artificial Sequence
  Description of Artificial Sequence: Synthetic oligonucleotide
  Antisense strand to SEQ ID NO: 2030110
agaagcagauacuucuccc

SEQ ID NO: 2030112 - RNA, 19 nt, Artificial Sequence
  Description of Artificial Sequence: Synthetic oligonucleotide
  Sense strand starting at position 999 of SEQ ID NO: 1881253
ggagaaguaucugcuucuu

SEQ ID NO: 2030113 - RNA, 19 nt, Artificial Sequence
  Description of Artificial Sequence: Synthetic oligonucleotide
  Antisense strand to SEQ ID NO: 2030112
aagaagcagauacuucucc

SEQ ID NO: 2030114 - RNA, 19 nt, Artificial Sequence
  Description of Artificial Sequence: Synthetic oligonucleotide
  Sense strand starting at position 1001 of SEQ ID NO: 1881253
agaaguaucugcuucuuua

SEQ ID NO: 2030115 - RNA, 19 nt, Artificial Sequence
  Description of Artificial Sequence: Synthetic oligonucleotide
  Antisense strand to SEQ ID NO: 2030114
uaaagaagcagauacuucu

SEQ ID NO: 2030116 - RNA, 19 nt, Artificial Sequence
  Description of Artificial Sequence: Synthetic oligonucleotide
  Sense strand starting at position 1137 of SEQ ID NO: 1881253
cucaaagagucugggauaa

SEQ ID NO: 2030117 - RNA, 19 nt, Artificial Sequence
  Description of Artificial Sequence: Synthetic oligonucleotide
  Antisense strand to SEQ ID NO: 2030116
uuaucccagacucuuugag

SEQ ID NO: 2030118 - RNA, 19 nt, Artificial Sequence
  Description of Artificial Sequence: Synthetic oligonucleotide
  Sense strand starting at position 1202 of SEQ ID NO: 1881253
gccaguugaugucuuucuu

SEQ ID NO: 2030119 - RNA, 19 nt, Artificial Sequence
  Description of Artificial Sequence: Synthetic oligonucleotide
  Antisense strand to SEQ ID NO: 2030118
aagaaagacaucaacuggc

SEQ ID NO: 2030120 - RNA, 19 nt, Artificial Sequence
  Description of Artificial Sequence: Synthetic oligonucleotide
  Sense strand starting at position 1208 of SEQ ID NO: 1881253
ugaugucuuucuucccaga

SEQ ID NO: 2030121 - RNA, 19 nt, Artificial Sequence
  Description of Artificial Sequence: Synthetic oligonucleotide
  Antisense strand to SEQ ID NO: 2030120
ucugggaagaaagacauca

SEQ ID NO: 2030122 - RNA, 19 nt, Artificial Sequence
  Description of Artificial Sequence: Synthetic oligonucleotide
  Sense strand starting at position 1249 of SEQ ID NO: 1881253
aacauaaaguuaggucaga

SEQ ID NO: 2030123 - RNA, 19 nt, Artificial Sequence
  Description of Artificial Sequence: Synthetic oligonucleotide
  Antisense strand to SEQ ID NO: 2030122
ucugaccuaacuuuauguu

SEQ ID NO: 2030124 - RNA, 19 nt, Artificial Sequence
  Description of Artificial Sequence: Synthetic oligonucleotide
  Sense strand starting at position 1250 of SEQ ID NO: 1881253
acauaaaguuaggucagau

SEQ ID NO: 2030125 - RNA, 19 nt, Artificial Sequence
  Description of Artificial Sequence: Synthetic oligonucleotide
  Antisense strand to SEQ ID NO: 2030124
aucugaccuaacuuuaugu

SEQ ID NO: 2030126 - RNA, 19 nt, Artificial Sequence
  Description of Artificial Sequence: Synthetic oligonucleotide
  Sense strand starting at position 1254 of SEQ ID NO: 1881253
aaaguuaggucagaugaga

SEQ ID NO: 2030127 - RNA, 19 nt, Artificial Sequence
  Description of Artificial Sequence: Synthetic oligonucleotide
  Antisense strand to SEQ ID NO: 2030126
ucucaucugaccuaacuuu

SEQ ID NO: 2030128 - RNA, 19 nt, Artificial Sequence
  Description of Artificial Sequence: Synthetic oligonucleotide
  Sense strand starting at position 1509 of SEQ ID NO: 1881253
gagaaugggugugcaguau

SEQ ID NO: 2030129 - RNA, 19 nt, Artificial Sequence
  Description of Artificial Sequence: Synthetic oligonucleotide
  Antisense strand to SEQ ID NO: 2030128
auacugcacacccauucuc

SEQ ID NO: 2030130 - RNA, 19 nt, Artificial Sequence
  Description of Artificial Sequence: Synthetic oligonucleotide
  Sense strand starting at position 1520 of SEQ ID NO: 1881253
ugcaguaucaugcagguuu

SEQ ID NO: 2030131 - RNA, 19 nt, Artificial Sequence
  Description of Artificial Sequence: Synthetic oligonucleotide
  Antisense strand to SEQ ID NO: 2030130
aaaccugcaugauacugca

SEQ ID NO: 2030132 - RNA, 19 nt, Artificial Sequence
  Description of Artificial Sequence: Synthetic oligonucleotide
  Sense strand starting at position 1576 of SEQ ID NO: 1881253
uggcuuacaucguugcaga

SEQ ID NO: 2030133 - RNA, 19 nt, Artificial Sequence
  Description of Artificial Sequence: Synthetic oligonucleotide
  Antisense strand to SEQ ID NO: 2030132
ucugcaacgauguaagcca

SEQ ID NO: 2030134 - RNA, 19 nt, Artificial Sequence
  Description of Artificial Sequence: Synthetic oligonucleotide
  Sense strand starting at position 1577 of SEQ ID NO: 1881253
ggcuuacaucguugcagau

SEQ ID NO: 2030135 - RNA, 19 nt, Artificial Sequence
  Description of Artificial Sequence: Synthetic oligonucleotide
  Antisense strand to SEQ ID NO: 2030134
aucugcaacgauguaagcc

SEQ ID NO: 2030136 - RNA, 19 nt, Artificial Sequence
  Description of Artificial Sequence: Synthetic oligonucleotide
  Sense strand starting at position 1579 of SEQ ID NO: 1881253
cuuacaucguugcagauuu

SEQ ID NO: 2030137 - RNA, 19 nt, Artificial Sequence
  Description of Artificial Sequence: Synthetic oligonucleotide
  Antisense strand to SEQ ID NO: 2030136
aaaucugcaacgauguaag

SEQ ID NO: 2030138 - RNA, 19 nt, Artificial Sequence
  Description of Artificial Sequence: Synthetic oligonucleotide
  Sense strand starting at position 2039 of SEQ ID NO: 1881253
acagaagugagcugccaua

SEQ ID NO: 2030139 - RNA, 19 nt, Artificial Sequence
  Description of Artificial Sequence: Synthetic oligonucleotide
  Antisense strand to SEQ ID NO: 2030138
uauggcagcucacuucugu

SEQ ID NO: 2030140 - RNA, 19 nt, Artificial Sequence
  Description of Artificial Sequence: Synthetic oligonucleotide
  Sense strand starting at position 2250 of SEQ ID NO: 1881253
cuuucuguccuuuaguguu

SEQ ID NO: 2030141 - RNA, 19 nt, Artificial Sequence
  Description of Artificial Sequence: Synthetic oligonucleotide
  Antisense strand to SEQ ID NO: 2030140
aacacuaaaggacagaaag

SEQ ID NO: 2030142 - RNA, 19 nt, Artificial Sequence
  Description of Artificial Sequence: Synthetic oligonucleotide
  Sense strand starting at position 2446 of SEQ ID NO: 1881253
cuagaauccuuuccgccau

SEQ ID NO: 2030143 - RNA, 19 nt, Artificial Sequence
  Description of Artificial Sequence: Synthetic oligonucleotide
  Antisense strand to SEQ ID NO: 2030142
auggcggaaaggauucuag

SEQ ID NO: 2030144 - RNA, 19 nt, Artificial Sequence
  Description of Artificial Sequence: Synthetic oligonucleotide
  Sense strand starting at position 3017 of SEQ ID NO: 1881253
agguguuagaccuggguau

SEQ ID NO: 2030145 - RNA, 19 nt, Artificial Sequence
  Description of Artificial Sequence: Synthetic oligonucleotide
  Antisense strand to SEQ ID NO: 2030144
auacccaggucuaacaccu

SEQ ID NO: 2030146 - RNA, 19 nt, Artificial Sequence
  Description of Artificial Sequence: Synthetic oligonucleotide
  Sense strand starting at position 3018 of SEQ ID NO: 1881253
gguguuagaccuggguauc

SEQ ID NO: 2030147 - RNA, 19 nt, Artificial Sequence
  Description of Artificial Sequence: Synthetic oligonucleotide
  Antisense strand to SEQ ID NO: 2030146
gauacccaggucuaacacc

SEQ ID NO: 2030148 - RNA, 19 nt, Artificial Sequence
  Description of Artificial Sequence: Synthetic oligonucleotide
  Sense strand starting at position 3019 of SEQ ID NO: 1881253
guguuagaccuggguauca

SEQ ID NO: 2030149 - RNA, 19 nt, Artificial Sequence
  Description of Artificial Sequence: Synthetic oligonucleotide
  Antisense strand to SEQ ID NO: 2030148
ugauacccaggucuaacac

SEQ ID NO: 2030150 - RNA, 19 nt, Artificial Sequence
  Description of Artificial Sequence: Synthetic oligonucleotide
  Sense strand starting at position 3021 of SEQ ID NO: 1881253
guuagaccuggguaucaga

SEQ ID NO: 2030151 - RNA, 19 nt, Artificial Sequence
  Description of Artificial Sequence: Synthetic oligonucleotide
  Antisense strand to SEQ ID NO: 2030150
ucugauacccaggucuaac

SEQ ID NO: 2030152 - RNA, 19 nt, Artificial Sequence
  Description of Artificial Sequence: Synthetic oligonucleotide
  Sense strand starting at position 3589 of SEQ ID NO: 1881253
guguccuggaggcagaauu

SEQ ID NO: 2030153 - RNA, 19 nt, Artificial Sequence
  Description of Artificial Sequence: Synthetic oligonucleotide
  Antisense strand to SEQ ID NO: 2030152
aauucugccuccaggacac

SEQ ID NO: 2030154 - RNA, 19 nt, Artificial Sequence
  Description of Artificial Sequence: Synthetic oligonucleotide
  Sense strand starting at position 3599 of SEQ ID NO: 1881253
ggcagaauuucugcuccuu

SEQ ID NO: 2030155 - RNA, 19 nt, Artificial Sequence
  Description of Artificial Sequence: Synthetic oligonucleotide
  Antisense strand to SEQ ID NO: 2030154
aaggagcagaaauucugcc

SEQ ID NO: 2030156 - RNA, 19 nt, Artificial Sequence
  Description of Artificial Sequence: Synthetic oligonucleotide
  Sense strand starting at position 3893 of SEQ ID NO: 1881253
gcuguuaucagaugagggu

SEQ ID NO: 2030157 - RNA, 19 nt, Artificial Sequence
  Description of Artificial Sequence: Synthetic oligonucleotide
  Antisense strand to SEQ ID NO: 2030156
acccucaucugauaacagc

SEQ ID NO: 2030158 - RNA, 19 nt, Artificial Sequence
  Description of Artificial Sequence: Synthetic oligonucleotide
  Sense strand starting at position 331 of SEQ ID NO: 1881254
gguuguuggcugaggcaga

SEQ ID NO: 2030159 - RNA, 19 nt, Artificial Sequence
  Description of Artificial Sequence: Synthetic oligonucleotide
  Antisense strand to SEQ ID NO: 2030158
ucugccucagccaacaacc

SEQ ID NO: 2030160 - RNA, 19 nt, Artificial Sequence
  Description of Artificial Sequence: Synthetic oligonucleotide
  Sense strand starting at position 487 of SEQ ID NO: 1881254
ugcauuugauguuccuuga

SEQ ID NO: 2030161 - RNA, 19 nt, Artificial Sequence
  Description of Artificial Sequence: Synthetic oligonucleotide
  Antisense strand to SEQ ID NO: 2030160
ucaaggaacaucaaaugca

SEQ ID NO: 2030162 - RNA, 19 nt, Artificial Sequence
  Description of Artificial Sequence: Synthetic oligonucleotide
  Sense strand starting at position 491 of SEQ ID NO: 1881254
uuugauguuccuugaccua

SEQ ID NO: 2030163 - RNA, 19 nt, Artificial Sequence
  Description of Artificial Sequence: Synthetic oligonucleotide
  Antisense strand to SEQ ID NO: 2030162
uaggucaaggaacaucaaa

SEQ ID NO: 2030164 - RNA, 19 nt, Artificial Sequence
  Description of Artificial Sequence: Synthetic oligonucleotide
  Sense strand starting at position 503 of SEQ ID NO: 1881254
ugaccuaccuauugaggaa

SEQ ID NO: 2030165 - RNA, 19 nt, Artificial Sequence
  Description of Artificial Sequence: Synthetic oligonucleotide
  Antisense strand to SEQ ID NO: 2030164
uuccucaauagguagguca

SEQ ID NO: 2030166 - RNA, 19 nt, Artificial Sequence
  Description of Artificial Sequence: Synthetic oligonucleotide
  Sense strand starting at position 506 of SEQ ID NO: 1881254
ccuaccuauugaggaauau

SEQ ID NO: 2030167 - RNA, 19 nt, Artificial Sequence
  Description of Artificial Sequence: Synthetic oligonucleotide
  Antisense strand to SEQ ID NO: 2030166
auauuccucaauagguagg

SEQ ID NO: 2030168 - RNA, 19 nt, Artificial Sequence
  Description of Artificial Sequence: Synthetic oligonucleotide
  Sense strand starting at position 515 of SEQ ID NO: 1881254
ugaggaauauuggaaugau

SEQ ID NO: 2030169 - RNA, 19 nt, Artificial Sequence
  Description of Artificial Sequence: Synthetic oligonucleotide
  Antisense strand to SEQ ID NO: 2030168
aucauuccaauauuccuca

SEQ ID NO: 2030170 - RNA, 19 nt, Artificial Sequence
  Description of Artificial Sequence: Synthetic oligonucleotide
  Sense strand starting at position 682 of SEQ ID NO: 1881254
acgguagguucagacauua

SEQ ID NO: 2030171 - RNA, 19 nt, Artificial Sequence
  Description of Artificial Sequence: Synthetic oligonucleotide
  Antisense strand to SEQ ID NO: 2030170
uaaugucugaaccuaccgu

SEQ ID NO: 2030172 - RNA, 19 nt, Artificial Sequence
  Description of Artificial Sequence: Synthetic oligonucleotide
  Sense strand starting at position 693 of SEQ ID NO: 1881254
agacauuaguccucuacuu

SEQ ID NO: 2030173 - RNA, 19 nt, Artificial Sequence
  Description of Artificial Sequence: Synthetic oligonucleotide
  Antisense strand to SEQ ID NO: 2030172
aaguagaggacuaaugucu

SEQ ID NO: 2030174 - RNA, 19 nt, Artificial Sequence
  Description of Artificial Sequence: Synthetic oligonucleotide
  Sense strand starting at position 1081 of SEQ ID NO: 1881254
gcuaacaccuccugagaaa

SEQ ID NO: 2030175 - RNA, 19 nt, Artificial Sequence
  Description of Artificial Sequence: Synthetic oligonucleotide
  Antisense strand to SEQ ID NO: 2030174
uuucucaggagguguuagc

SEQ ID NO: 2030176 - RNA, 19 nt, Artificial Sequence
  Description of Artificial Sequence: Synthetic oligonucleotide
  Sense strand starting at position 1187 of SEQ ID NO: 1881254
ggcgguagcauauacauau

SEQ ID NO: 2030177 - RNA, 19 nt, Artificial Sequence
  Description of Artificial Sequence: Synthetic oligonucleotide
  Antisense strand to SEQ ID NO: 2030176
auauguauaugcuaccgcc

SEQ ID NO: 2030178 - RNA, 19 nt, Artificial Sequence
  Description of Artificial Sequence: Synthetic oligonucleotide
  Sense strand starting at position 1252 of SEQ ID NO: 1881254
gcaucuaggagaugucaau

SEQ ID NO: 2030179 - RNA, 19 nt, Artificial Sequence
  Description of Artificial Sequence: Synthetic oligonucleotide
  Antisense strand to SEQ ID NO: 2030178
auugacaucuccuagaugc

SEQ ID NO: 2030180 - RNA, 19 nt, Artificial Sequence
  Description of Artificial Sequence: Synthetic oligonucleotide
  Sense strand starting at position 1258 of SEQ ID NO: 1881254
aggagaugucaaugcaaag

SEQ ID NO: 2030181 - RNA, 19 nt, Artificial Sequence
  Description of Artificial Sequence: Synthetic oligonucleotide
  Antisense strand to SEQ ID NO: 2030180
cuuugcauugacaucuccu

SEQ ID NO: 2030182 - RNA, 19 nt, Artificial Sequence
  Description of Artificial Sequence: Synthetic oligonucleotide
  Sense strand starting at position 1383 of SEQ ID NO: 1881254
gccuguaugccugcacuca

SEQ ID NO: 2030183 - RNA, 19 nt, Artificial Sequence
  Description of Artificial Sequence: Synthetic oligonucleotide
  Antisense strand to SEQ ID NO: 2030182
ugagugcaggcauacaggc

SEQ ID NO: 2030184 - RNA, 19 nt, Artificial Sequence
  Description of Artificial Sequence: Synthetic oligonucleotide
  Sense strand starting at position 1650 of SEQ ID NO: 1881254
agagaccagccuugucaca

SEQ ID NO: 2030185 - RNA, 19 nt, Artificial Sequence
  Description of Artificial Sequence: Synthetic oligonucleotide
  Antisense strand to SEQ ID NO: 2030184
ugugacaaggcuggucucu

SEQ ID NO: 2030186 - RNA, 19 nt, Artificial Sequence
  Description of Artificial Sequence: Synthetic oligonucleotide
  Sense strand starting at position 1711 of SEQ ID NO: 1881254
ucaggaguagcucagucau

SEQ ID NO: 2030187 - RNA, 19 nt, Artificial Sequence
  Description of Artificial Sequence: Synthetic oligonucleotide
  Antisense strand to SEQ ID NO: 2030186
augacugagcuacuccuga

SEQ ID NO: 2030188 - RNA, 19 nt, Artificial Sequence
  Description of Artificial Sequence: Synthetic oligonucleotide
  Sense strand starting at position 1713 of SEQ ID NO: 1881254
aggaguagcucagucauuc

SEQ ID NO: 2030189 - RNA, 19 nt, Artificial Sequence
  Description of Artificial Sequence: Synthetic oligonucleotide
  Antisense strand to SEQ ID NO: 2030188
gaaugacugagcuacuccu

SEQ ID NO: 2030190 - RNA, 19 nt, Artificial Sequence
  Description of Artificial Sequence: Synthetic oligonucleotide
  Sense strand starting at position 1758 of SEQ ID NO: 1881254
ucaguaaauggucaguaau

SEQ ID NO: 2030191 - RNA, 19 nt, Artificial Sequence
  Description of Artificial Sequence: Synthetic oligonucleotide
  Antisense strand to SEQ ID NO: 2030190
auuacugaccauuuacuga

SEQ ID NO: 2030192 - RNA, 19 nt, Artificial Sequence
  Description of Artificial Sequence: Synthetic oligonucleotide
  Sense strand starting at position 1760 of SEQ ID NO: 1881254
aguaaauggucaguaaugu

SEQ ID NO: 2030193 - RNA, 19 nt, Artificial Sequence
  Description of Artificial Sequence: Synthetic oligonucleotide
  Antisense strand to SEQ ID NO: 2030192
acauuacugaccauuuacu

SEQ ID NO: 2030194 - RNA, 19 nt, Artificial Sequence
  Description of Artificial Sequence: Synthetic oligonucleotide
  Sense strand starting at position 1761 of SEQ ID NO: 1881254
guaaauggucaguaaugug

SEQ ID NO: 2030195 - RNA, 19 nt, Artificial Sequence
  Description of Artificial Sequence: Synthetic oligonucleotide
  Antisense strand to SEQ ID NO: 2030194
cacauuacugaccauuuac

SEQ ID NO: 2030196 - RNA, 19 nt, Artificial Sequence
  Description of Artificial Sequence: Synthetic oligonucleotide
  Sense strand starting at position 1776 of SEQ ID NO: 1881254
uguguuagcuuucuccaca

SEQ ID NO: 2030197 - RNA, 19 nt, Artificial Sequence
  Description of Artificial Sequence: Synthetic oligonucleotide
  Antisense strand to SEQ ID NO: 2030196
uguggagaaagcuaacaca

SEQ ID NO: 2030198 - RNA, 19 nt, Artificial Sequence
  Description of Artificial Sequence: Synthetic oligonucleotide
  Sense strand starting at position 1777 of SEQ ID NO: 1881254
guguuagcuuucuccacac

SEQ ID NO: 2030199 - RNA, 19 nt, Artificial Sequence
  Description of Artificial Sequence: Synthetic oligonucleotide
  Antisense strand to SEQ ID NO: 2030198
guguggagaaagcuaacac

SEQ ID NO: 2030200 - RNA, 19 nt, Artificial Sequence
  Description of Artificial Sequence: Synthetic oligonucleotide
  Sense strand starting at position 1915 of SEQ ID NO: 1881254
cggcgauacuggccaacau

SEQ ID NO: 2030201 - RNA, 19 nt, Artificial Sequence
  Description of Artificial Sequence: Synthetic oligonucleotide
  Antisense strand to SEQ ID NO: 2030200
auguuggccaguaucgccg

SEQ ID NO: 2030202 - RNA, 19 nt, Artificial Sequence
  Description of Artificial Sequence: Synthetic oligonucleotide
  Sense strand starting at position 1916 of SEQ ID NO: 1881254
ggcgauacuggccaacauu

SEQ ID NO: 2030203 - RNA, 19 nt, Artificial Sequence
  Description of Artificial Sequence: Synthetic oligonucleotide
  Antisense strand to SEQ ID NO: 2030202
aauguuggccaguaucgcc

SEQ ID NO: 2030204 - RNA, 19 nt, Artificial Sequence
  Description of Artificial Sequence: Synthetic oligonucleotide
  Sense strand starting at position 1947 of SEQ ID NO: 1881254
gaaggagaggcucagcuuu

SEQ ID NO: 2030205 - RNA, 19 nt, Artificial Sequence
  Description of Artificial Sequence: Synthetic oligonucleotide
  Antisense strand to SEQ ID NO: 2030204
aaagcugagccucuccuuc

SEQ ID NO: 2030206 - RNA, 19 nt, Artificial Sequence
  Description of Artificial Sequence: Synthetic oligonucleotide
  Sense strand starting at position 2036 of SEQ ID NO: 1881254
ucucuauucucuucgucau

SEQ ID NO: 2030207 - RNA, 19 nt, Artificial Sequence
  Description of Artificial Sequence: Synthetic oligonucleotide
  Antisense strand to SEQ ID NO: 2030206
augacgaagagaauagaga

SEQ ID NO: 2030208 - RNA, 19 nt, Artificial Sequence
  Description of Artificial Sequence: Synthetic oligonucleotide
  Sense strand starting at position 2129 of SEQ ID NO: 1881254
cgagucagcuucuuggaga

SEQ ID NO: 2030209 - RNA, 19 nt, Artificial Sequence
  Description of Artificial Sequence: Synthetic oligonucleotide
  Antisense strand to SEQ ID NO: 2030208
ucuccaagaagcugacucg

SEQ ID NO: 2030210 - RNA, 19 nt, Artificial Sequence
  Description of Artificial Sequence: Synthetic oligonucleotide
  Sense strand starting at position 2130 of SEQ ID NO: 1881254
gagucagcuucuuggagau

SEQ ID NO: 2030211 - RNA, 19 nt, Artificial Sequence
  Description of Artificial Sequence: Synthetic oligonucleotide
  Antisense strand to SEQ ID NO: 2030210
aucuccaagaagcugacuc

SEQ ID NO: 2030212 - RNA, 19 nt, Artificial Sequence
  Description of Artificial Sequence: Synthetic oligonucleotide
  Sense strand starting at position 2136 of SEQ ID NO: 1881254
gcuucuuggagauguaggu

SEQ ID NO: 2030213 - RNA, 19 nt, Artificial Sequence
  Description of Artificial Sequence: Synthetic oligonucleotide
  Antisense strand to SEQ ID NO: 2030212
accuacaucuccaagaagc

SEQ ID NO: 2030214 - RNA, 19 nt, Artificial Sequence
  Description of Artificial Sequence: Synthetic oligonucleotide
  Sense strand starting at position 2175 of SEQ ID NO: 1881254
ccaccaugacaaugagagu

SEQ ID NO: 2030215 - RNA, 19 nt, Artificial Sequence
  Description of Artificial Sequence: Synthetic oligonucleotide
  Antisense strand to SEQ ID NO: 2030214
acucucauugucauggugg

SEQ ID NO: 2030216 - RNA, 19 nt, Artificial Sequence
  Description of Artificial Sequence: Synthetic oligonucleotide
  Sense strand starting at position 2200 of SEQ ID NO: 1881254
guuggucaugcacacuaaa

SEQ ID NO: 2030217 - RNA, 19 nt, Artificial Sequence
  Description of Artificial Sequence: Synthetic oligonucleotide
  Antisense strand to SEQ ID NO: 2030216
uuuagugugcaugaccaac

SEQ ID NO: 2030218 - RNA, 19 nt, Artificial Sequence
  Description of Artificial Sequence: Synthetic oligonucleotide
  Sense strand starting at position 2318 of SEQ ID NO: 1881254
agacguaucuucuuggcuu

SEQ ID NO: 2030219 - RNA, 19 nt, Artificial Sequence
  Description of Artificial Sequence: Synthetic oligonucleotide
  Antisense strand to SEQ ID NO: 2030218
aagccaagaagauacgucu

SEQ ID NO: 2030220 - RNA, 19 nt, Artificial Sequence
  Description of Artificial Sequence: Synthetic oligonucleotide
  Sense strand starting at position 2322 of SEQ ID NO: 1881254
guaucuucuuggcuuccua

SEQ ID NO: 2030221 - RNA, 19 nt, Artificial Sequence
  Description of Artificial Sequence: Synthetic oligonucleotide
  Antisense strand to SEQ ID NO: 2030220
uaggaagccaagaagauac

SEQ ID NO: 2030222 - RNA, 19 nt, Artificial Sequence
  Description of Artificial Sequence: Synthetic oligonucleotide
  Sense strand starting at position 2585 of SEQ ID NO: 1881254
ucugucauccaggaaucca

SEQ ID NO: 2030223 - RNA, 19 nt, Artificial Sequence
  Description of Artificial Sequence: Synthetic oligonucleotide
  Antisense strand to SEQ ID NO: 2030222
uggauuccuggaugacaga

SEQ ID NO: 2030224 - RNA, 19 nt, Artificial Sequence
  Description of Artificial Sequence: Synthetic oligonucleotide
  Sense strand starting at position 2796 of SEQ ID NO: 1881254
cuggucaccucacuaauga

SEQ ID NO: 2030225 - RNA, 19 nt, Artificial Sequence
  Description of Artificial Sequence: Synthetic oligonucleotide
  Antisense strand to SEQ ID NO: 2030224
ucauuagugaggugaccag

SEQ ID NO: 2030226 - RNA, 19 nt, Artificial Sequence
  Description of Artificial Sequence: Synthetic oligonucleotide
  Sense strand starting at position 2847 of SEQ ID NO: 1881254
gaagaagcccugugguauc

SEQ ID NO: 2030227 - RNA, 19 nt, Artificial Sequence
  Description of Artificial Sequence: Synthetic oligonucleotide
  Antisense strand to SEQ ID NO: 2030226
gauaccacagggcuucuuc

SEQ ID NO: 2030228 - RNA, 19 nt, Artificial Sequence
  Description of Artificial Sequence: Synthetic oligonucleotide
  Sense strand starting at position 2857 of SEQ ID NO: 1881254
ugugguaucugagcccuuu

SEQ ID NO: 2030229 - RNA, 19 nt, Artificial Sequence
  Description of Artificial Sequence: Synthetic oligonucleotide
  Antisense strand to SEQ ID NO: 2030228
aaagggcucagauaccaca

SEQ ID NO: 2030230 - RNA, 19 nt, Artificial Sequence
  Description of Artificial Sequence: Synthetic oligonucleotide
  Sense strand starting at position 2942 of SEQ ID NO: 1881254
cuagaagucucucagggua

SEQ ID NO: 2030231 - RNA, 19 nt, Artificial Sequence
  Description of Artificial Sequence: Synthetic oligonucleotide
  Antisense strand to SEQ ID NO: 2030230
uacccugagagacuucuag

SEQ ID NO: 2030232 - RNA, 19 nt, Artificial Sequence
  Description of Artificial Sequence: Synthetic oligonucleotide
  Sense strand starting at position 2944 of SEQ ID NO: 1881254
agaagucucucaggguaag

SEQ ID NO: 2030233 - RNA, 19 nt, Artificial Sequence
  Description of Artificial Sequence: Synthetic oligonucleotide
  Antisense strand to SEQ ID NO: 2030232
cuuacccugagagacuucu

SEQ ID NO: 2030234 - RNA, 19 nt, Artificial Sequence
  Description of Artificial Sequence: Synthetic oligonucleotide
  Sense strand starting at position 3091 of SEQ ID NO: 1881254
acggaaggaucugaauaca

SEQ ID NO: 2030235 - RNA, 19 nt, Artificial Sequence
  Description of Artificial Sequence: Synthetic oligonucleotide
  Antisense strand to SEQ ID NO: 2030234
uguauucagauccuuccgu

SEQ ID NO: 2030236 - RNA, 19 nt, Artificial Sequence
  Description of Artificial Sequence: Synthetic oligonucleotide
  Sense strand starting at position 3843 of SEQ ID NO: 1881254
cgcggucucacgucagaag

SEQ ID NO: 2030237 - RNA, 19 nt, Artificial Sequence
  Description of Artificial Sequence: Synthetic oligonucleotide
  Antisense strand to SEQ ID NO: 2030236
cuucugacgugagaccgcg

SEQ ID NO: 2030238 - RNA, 19 nt, Artificial Sequence
  Description of Artificial Sequence: Synthetic oligonucleotide
  Sense strand starting at position 229 of SEQ ID NO: 1881255
acacauacuugagcuguga

SEQ ID NO: 2030239 - RNA, 19 nt, Artificial Sequence
  Description of Artificial Sequence: Synthetic oligonucleotide
  Antisense strand to SEQ ID NO: 2030238
ucacagcucaaguaugugu

SEQ ID NO: 2030240 - RNA, 19 nt, Artificial Sequence
  Description of Artificial Sequence: Synthetic oligonucleotide
  Sense strand starting at position 231 of SEQ ID NO: 1881255
acauacuugagcugugaga

SEQ ID NO: 2030241 - RNA, 19 nt, Artificial Sequence
  Description of Artificial Sequence: Synthetic oligonucleotide
  Antisense strand to SEQ ID NO: 2030240
ucucacagcucaaguaugu

SEQ ID NO: 2030242 - RNA, 19 nt, Artificial Sequence
  Description of Artificial Sequence: Synthetic oligonucleotide
  Sense strand starting at position 273 of SEQ ID NO: 1881255
gugguauagccucggacaa

SEQ ID NO: 2030243 - RNA, 19 nt, Artificial Sequence
  Description of Artificial Sequence: Synthetic oligonucleotide
  Antisense strand to SEQ ID NO: 2030242
uuguccgaggcuauaccac

SEQ ID NO: 2030244 - RNA, 19 nt, Artificial Sequence
  Description of Artificial Sequence: Synthetic oligonucleotide
  Sense strand starting at position 522 of SEQ ID NO: 1881255
gcacauacuccugacuguu

SEQ ID NO: 2030245 - RNA, 19 nt, Artificial Sequence
  Description of Artificial Sequence: Synthetic oligonucleotide
  Antisense strand to SEQ ID NO: 2030244
aacagucaggaguaugugc

SEQ ID NO: 2030246 - RNA, 19 nt, Artificial Sequence
  Description of Artificial Sequence: Synthetic oligonucleotide
  Sense strand starting at position 605 of SEQ ID NO: 1881255
cuggcugucucauugauca

SEQ ID NO: 2030247 - RNA, 19 nt, Artificial Sequence
  Description of Artificial Sequence: Synthetic oligonucleotide
  Antisense strand to SEQ ID NO: 2030246
ugaucaaugagacagccag

SEQ ID NO: 2030248 - RNA, 19 nt, Artificial Sequence
  Description of Artificial Sequence: Synthetic oligonucleotide
  Sense strand starting at position 607 of SEQ ID NO: 1881255
ggcugucucauugaucaug

SEQ ID NO: 2030249 - RNA, 19 nt, Artificial Sequence
  Description of Artificial Sequence: Synthetic oligonucleotide
  Antisense strand to SEQ ID NO: 2030248
caugaucaaugagacagcc

SEQ ID NO: 2030250 - RNA, 19 nt, Artificial Sequence
  Description of Artificial Sequence: Synthetic oligonucleotide
  Sense strand starting at position 609 of SEQ ID NO: 1881255
cugucucauugaucaugga

SEQ ID NO: 2030251 - RNA, 19 nt, Artificial Sequence
  Description of Artificial Sequence: Synthetic oligonucleotide
  Antisense strand to SEQ ID NO: 2030250
uccaugaucaaugagacag

SEQ ID NO: 2030252 - RNA, 19 nt, Artificial Sequence
  Description of Artificial Sequence: Synthetic oligonucleotide
  Sense strand starting at position 784 of SEQ ID NO: 1881255
cuuccaguucuggauaaau

SEQ ID NO: 2030253 - RNA, 19 nt, Artificial Sequence
  Description of Artificial Sequence: Synthetic oligonucleotide
  Antisense strand to SEQ ID NO: 2030252
auuuauccagaacuggaag

SEQ ID NO: 2030254 - RNA, 19 nt, Artificial Sequence
  Description of Artificial Sequence: Synthetic oligonucleotide
  Sense strand starting at position 786 of SEQ ID NO: 1881255
uccaguucuggauaaaugu

SEQ ID NO: 2030255 - RNA, 19 nt, Artificial Sequence
  Description of Artificial Sequence: Synthetic oligonucleotide
  Antisense strand to SEQ ID NO: 2030254
acauuuauccagaacugga

SEQ ID NO: 2030256 - RNA, 19 nt, Artificial Sequence
  Description of Artificial Sequence: Synthetic oligonucleotide
  Sense strand starting at position 795 of SEQ ID NO: 1881255
ggauaaauguacucagauu

SEQ ID NO: 2030257 - RNA, 19 nt, Artificial Sequence
  Description of Artificial Sequence: Synthetic oligonucleotide
  Antisense strand to SEQ ID NO: 2030256
aaucugaguacauuuaucc

SEQ ID NO: 2030258 - RNA, 19 nt, Artificial Sequence
  Description of Artificial Sequence: Synthetic oligonucleotide
  Sense strand starting at position 807 of SEQ ID NO: 1881255
ucagauuauggcugcauga

SEQ ID NO: 2030259 - RNA, 19 nt, Artificial Sequence
  Description of Artificial Sequence: Synthetic oligonucleotide
  Antisense strand to SEQ ID NO: 2030258
ucaugcagccauaaucuga

SEQ ID NO: 2030260 - RNA, 19 nt, Artificial Sequence
  Description of Artificial Sequence: Synthetic oligonucleotide
  Sense strand starting at position 809 of SEQ ID NO: 1881255
agauuauggcugcaugaac

SEQ ID NO: 2030261 - RNA, 19 nt, Artificial Sequence
  Description of Artificial Sequence: Synthetic oligonucleotide
  Antisense strand to SEQ ID NO: 2030260
guucaugcagccauaaucu

SEQ ID NO: 2030262 - RNA, 19 nt, Artificial Sequence
  Description of Artificial Sequence: Synthetic oligonucleotide
  Sense strand starting at position 864 of SEQ ID NO: 1881255
ggaguaaacccugagcuca

SEQ ID NO: 2030263 - RNA, 19 nt, Artificial Sequence
  Description of Artificial Sequence: Synthetic oligonucleotide
  Antisense strand to SEQ ID NO: 2030262
ugagcucaggguuuacucc

SEQ ID NO: 2030264 - RNA, 19 nt, Artificial Sequence
  Description of Artificial Sequence: Synthetic oligonucleotide
  Sense strand starting at position 886 of SEQ ID NO: 1881255
gcccuuaagcauggcuaga

SEQ ID NO: 2030265 - RNA, 19 nt, Artificial Sequence
  Description of Artificial Sequence: Synthetic oligonucleotide
  Antisense strand to SEQ ID NO: 2030264
ucuagccaugcuuaagggc

SEQ ID NO: 2030266 - RNA, 19 nt, Artificial Sequence
  Description of Artificial Sequence: Synthetic oligonucleotide
  Sense strand starting at position 888 of SEQ ID NO: 1881255
ccuuaagcauggcuagaaa

SEQ ID NO: 2030267 - RNA, 19 nt, Artificial Sequence
  Description of Artificial Sequence: Synthetic oligonucleotide
  Antisense strand to SEQ ID NO: 2030266
uuucuagccaugcuuaagg

SEQ ID NO: 2030268 - RNA, 19 nt, Artificial Sequence
  Description of Artificial Sequence: Synthetic oligonucleotide
  Sense strand starting at position 962 of SEQ ID NO: 1881255
agaggcucucuguggagua

SEQ ID NO: 2030269 - RNA, 19 nt, Artificial Sequence
  Description of Artificial Sequence: Synthetic oligonucleotide
  Antisense strand to SEQ ID NO: 2030268
uacuccacagagagccucu

SEQ ID NO: 2030270 - RNA, 19 nt, Artificial Sequence
  Description of Artificial Sequence: Synthetic oligonucleotide
  Sense strand starting at position 1225 of SEQ ID NO: 1881255
ccaugauggaugugggcau

SEQ ID NO: 2030271 - RNA, 19 nt, Artificial Sequence
  Description of Artificial Sequence: Synthetic oligonucleotide
  Antisense strand to SEQ ID NO: 2030270
augcccacauccaucaugg

SEQ ID NO: 2030272 - RNA, 19 nt, Artificial Sequence
  Description of Artificial Sequence: Synthetic oligonucleotide
  Sense strand starting at position 1279 of SEQ ID NO: 1881255
cggagaugugccgggaagu

SEQ ID NO: 2030273 - RNA, 19 nt, Artificial Sequence
  Description of Artificial Sequence: Synthetic oligonucleotide
  Antisense strand to SEQ ID NO: 2030272
acuucccggcacaucuccg

SEQ ID NO: 2030274 - RNA, 19 nt, Artificial Sequence
  Description of Artificial Sequence: Synthetic oligonucleotide
  Sense strand starting at position 1280 of SEQ ID NO: 1881255
ggagaugugccgggaagug

SEQ ID NO: 2030275 - RNA, 19 nt, Artificial Sequence
  Description of Artificial Sequence: Synthetic oligonucleotide
  Antisense strand to SEQ ID NO: 2030274
cacuucccggcacaucucc

SEQ ID NO: 2030276 - RNA, 19 nt, Artificial Sequence
  Description of Artificial Sequence: Synthetic oligonucleotide
  Sense strand starting at position 1899 of SEQ ID NO: 1881255
gcuuguguugcagacagca

SEQ ID NO: 2030277 - RNA, 19 nt, Artificial Sequence
  Description of Artificial Sequence: Synthetic oligonucleotide
  Antisense strand to SEQ ID NO: 2030276
ugcugucugcaacacaagc

SEQ ID NO: 2030278 - RNA, 19 nt, Artificial Sequence
  Description of Artificial Sequence: Synthetic oligonucleotide
  Sense strand starting at position 2120 of SEQ ID NO: 1881255
ugaacuuuggcuggugaga

SEQ ID NO: 2030279 - RNA, 19 nt, Artificial Sequence
  Description of Artificial Sequence: Synthetic oligonucleotide
  Antisense strand to SEQ ID NO: 2030278
ucucaccagccaaaguuca

SEQ ID NO: 2030280 - RNA, 19 nt, Artificial Sequence
  Description of Artificial Sequence: Synthetic oligonucleotide
  Sense strand starting at position 2135 of SEQ ID NO: 1881255
gagaaagccucuuucuagg

SEQ ID NO: 2030281 - RNA, 19 nt, Artificial Sequence
  Description of Artificial Sequence: Synthetic oligonucleotide
  Antisense strand to SEQ ID NO: 2030280
ccuagaaagaggcuuucuc

SEQ ID NO: 2030282 - RNA, 19 nt, Artificial Sequence
  Description of Artificial Sequence: Synthetic oligonucleotide
  Sense strand starting at position 2140 of SEQ ID NO: 1881255
agccucuuucuaggacaaa

SEQ ID NO: 2030283 - RNA, 19 nt, Artificial Sequence
  Description of Artificial Sequence: Synthetic oligonucleotide
  Antisense strand to SEQ ID NO: 2030282
uuuguccuagaaagaggcu

SEQ ID NO: 2030284 - RNA, 19 nt, Artificial Sequence
  Description of Artificial Sequence: Synthetic oligonucleotide
  Sense strand starting at position 2178 of SEQ ID NO: 1881255
caggaugagcacuagcuau

SEQ ID NO: 2030285 - RNA, 19 nt, Artificial Sequence
  Description of Artificial Sequence: Synthetic oligonucleotide
  Antisense strand to SEQ ID NO: 2030284
auagcuagugcucauccug

SEQ ID NO: 2030286 - RNA, 19 nt, Artificial Sequence
  Description of Artificial Sequence: Synthetic oligonucleotide
  Sense strand starting at position 2219 of SEQ ID NO: 1881255
cccagugcugaguguucua

SEQ ID NO: 2030287 - RNA, 19 nt, Artificial Sequence
  Description of Artificial Sequence: Synthetic oligonucleotide
  Antisense strand to SEQ ID NO: 2030286
uagaacacucagcacuggg

SEQ ID NO: 2030288 - RNA, 19 nt, Artificial Sequence
  Description of Artificial Sequence: Synthetic oligonucleotide
  Sense strand starting at position 2222 of SEQ ID NO: 1881255
agugcugaguguucuacca

SEQ ID NO: 2030289 - RNA, 19 nt, Artificial Sequence
  Description of Artificial Sequence: Synthetic oligonucleotide
  Antisense strand to SEQ ID NO: 2030288
ugguagaacacucagcacu

SEQ ID NO: 2030290 - RNA, 19 nt, Artificial Sequence
  Description of Artificial Sequence: Synthetic oligonucleotide
  Sense strand starting at position 2525 of SEQ ID NO: 1881255
cuggcucucaccugagaag

SEQ ID NO: 2030291 - RNA, 19 nt, Artificial Sequence
  Description of Artificial Sequence: Synthetic oligonucleotide
  Antisense strand to SEQ ID NO: 2030290
cuucucaggugagagccag

SEQ ID NO: 2030292 - RNA, 19 nt, Artificial Sequence
  Description of Artificial Sequence: Synthetic oligonucleotide
  Sense strand starting at position 2540 of SEQ ID NO: 1881255
gaaggagcuugcucuugga

SEQ ID NO: 2030293 - RNA, 19 nt, Artificial Sequence
  Description of Artificial Sequence: Synthetic oligonucleotide
  Antisense strand to SEQ ID NO: 2030292
uccaagagcaagcuccuuc

SEQ ID NO: 2030294 - RNA, 19 nt, Artificial Sequence
  Description of Artificial Sequence: Synthetic oligonucleotide
  Sense strand starting at position 2627 of SEQ ID NO: 1881255
aagagcucaccugggaaua

SEQ ID NO: 2030295 - RNA, 19 nt, Artificial Sequence
  Description of Artificial Sequence: Synthetic oligonucleotide
  Antisense strand to SEQ ID NO: 2030294
uauucccaggugagcucuu

SEQ ID NO: 2030296 - RNA, 19 nt, Artificial Sequence
  Description of Artificial Sequence: Synthetic oligonucleotide
  Sense strand starting at position 2629 of SEQ ID NO: 1881255
gagcucaccugggaauaga

SEQ ID NO: 2030297 - RNA, 19 nt, Artificial Sequence
  Description of Artificial Sequence: Synthetic oligonucleotide
  Antisense strand to SEQ ID NO: 2030296
ucuauucccaggugagcuc

SEQ ID NO: 2030298 - RNA, 19 nt, Artificial Sequence
  Description of Artificial Sequence: Synthetic oligonucleotide
  Sense strand starting at position 2691 of SEQ ID NO: 1881255
agggaaucuuuaucagccu

SEQ ID NO: 2030299 - RNA, 19 nt, Artificial Sequence
  Description of Artificial Sequence: Synthetic oligonucleotide
  Antisense strand to SEQ ID NO: 2030298
aggcugauaaagauucccu

SEQ ID NO: 2030300 - RNA, 19 nt, Artificial Sequence
  Description of Artificial Sequence: Synthetic oligonucleotide
  Sense strand starting at position 2697 of SEQ ID NO: 1881255
ucuuuaucagccuggcaag

SEQ ID NO: 2030301 - RNA, 19 nt, Artificial Sequence
  Description of Artificial Sequence: Synthetic oligonucleotide
  Antisense strand to SEQ ID NO: 2030300
cuugccaggcugauaaaga

SEQ ID NO: 2030302 - RNA, 19 nt, Artificial Sequence
  Description of Artificial Sequence: Synthetic oligonucleotide
  Sense strand starting at position 2774 of SEQ ID NO: 1881255
gaucucacaugggaagaaa

SEQ ID NO: 2030303 - RNA, 19 nt, Artificial Sequence
  Description of Artificial Sequence: Synthetic oligonucleotide
  Antisense strand to SEQ ID NO: 2030302
uuucuucccaugugagauc

SEQ ID NO: 2030304 - RNA, 19 nt, Artificial Sequence
  Description of Artificial Sequence: Synthetic oligonucleotide
  Sense strand starting at position 2884 of SEQ ID NO: 1881255
agcugucaccugggaauag

SEQ ID NO: 2030305 - RNA, 19 nt, Artificial Sequence
  Description of Artificial Sequence: Synthetic oligonucleotide
  Antisense strand to SEQ ID NO: 2030304
cuauucccaggugacagcu

SEQ ID NO: 2030306 - RNA, 19 nt, Artificial Sequence
  Description of Artificial Sequence: Synthetic oligonucleotide
  Sense strand starting at position 2895 of SEQ ID NO: 1881255
gggaauagaucucacagaa

SEQ ID NO: 2030307 - RNA, 19 nt, Artificial Sequence
  Description of Artificial Sequence: Synthetic oligonucleotide
  Antisense strand to SEQ ID NO: 2030306
uucugugagaucuauuccc

SEQ ID NO: 2030308 - RNA, 19 nt, Artificial Sequence
  Description of Artificial Sequence: Synthetic oligonucleotide
  Sense strand starting at position 2964 of SEQ ID NO: 1881255
caggaaaguucugaucuag

SEQ ID NO: 2030309 - RNA, 19 nt, Artificial Sequence
  Description of Artificial Sequence: Synthetic oligonucleotide
  Antisense strand to SEQ ID NO: 2030308
cuagaucagaacuuuccug

SEQ ID NO: 2030310 - RNA, 19 nt, Artificial Sequence
  Description of Artificial Sequence: Synthetic oligonucleotide
  Sense strand starting at position 2999 of SEQ ID NO: 1881255
gggagaggaucccauuuga

SEQ ID NO: 2030311 - RNA, 19 nt, Artificial Sequence
  Description of Artificial Sequence: Synthetic oligonucleotide
  Antisense strand to SEQ ID NO: 2030310
ucaaaugggauccucuccc

SEQ ID NO: 2030312 - RNA, 19 nt, Artificial Sequence
  Description of Artificial Sequence: Synthetic oligonucleotide
  Sense strand starting at position 3088 of SEQ ID NO: 1881255
ggaagauccucagagacuc

SEQ ID NO: 2030313 - RNA, 19 nt, Artificial Sequence
  Description of Artificial Sequence: Synthetic oligonucleotide
  Antisense strand to SEQ ID NO: 2030312
gagucucugaggaucuucc

SEQ ID NO: 2030314 - RNA, 19 nt, Artificial Sequence
  Description of Artificial Sequence: Synthetic oligonucleotide
  Sense strand starting at position 3113 of SEQ ID NO: 1881255
ccgcuaucucaaggagauc

SEQ ID NO: 2030315 - RNA, 19 nt, Artificial Sequence
  Description of Artificial Sequence: Synthetic oligonucleotide
  Antisense strand to SEQ ID NO: 2030314
gaucuccuugagauagcgg

SEQ ID NO: 2030316 - RNA, 19 nt, Artificial Sequence
  Description of Artificial Sequence: Synthetic oligonucleotide
  Sense strand starting at position 3143 of SEQ ID NO: 1881255
ucuccuuuccuacgugagu

SEQ ID NO: 2030317 - RNA, 19 nt, Artificial Sequence
  Description of Artificial Sequence: Synthetic oligonucleotide
  Antisense strand to SEQ ID NO: 2030316
acucacguaggaaaggaga

SEQ ID NO: 2030318 - RNA, 19 nt, Artificial Sequence
  Description of Artificial Sequence: Synthetic oligonucleotide
  Sense strand starting at position 422 of SEQ ID NO: 1881256
uggcauuuguaggagaaga

SEQ ID NO: 2030319 - RNA, 19 nt, Artificial Sequence
  Description of Artificial Sequence: Synthetic oligonucleotide
  Antisense strand to SEQ ID NO: 2030318
ucuucuccuacaaaugcca

SEQ ID NO: 2030320 - RNA, 19 nt, Artificial Sequence
  Description of Artificial Sequence: Synthetic oligonucleotide
  Sense strand starting at position 447 of SEQ ID NO: 1881256
ugggcuccgagcugauaaa

SEQ ID NO: 2030321 - RNA, 19 nt, Artificial Sequence
  Description of Artificial Sequence: Synthetic oligonucleotide
  Antisense strand to SEQ ID NO: 2030320
uuuaucagcucggagccca

SEQ ID NO: 2030322 - RNA, 19 nt, Artificial Sequence
  Description of Artificial Sequence: Synthetic oligonucleotide
  Sense strand starting at position 482 of SEQ ID NO: 1881256
ggaagccucacugagugau

SEQ ID NO: 2030323 - RNA, 19 nt, Artificial Sequence
  Description of Artificial Sequence: Synthetic oligonucleotide
  Antisense strand to SEQ ID NO: 2030322
aucacucagugaggcuucc

SEQ ID NO: 2030324 - RNA, 19 nt, Artificial Sequence
  Description of Artificial Sequence: Synthetic oligonucleotide
  Sense strand starting at position 492 of SEQ ID NO: 1881256
cugagugauucaggaagag

SEQ ID NO: 2030325 - RNA, 19 nt, Artificial Sequence
  Description of Artificial Sequence: Synthetic oligonucleotide
  Antisense strand to SEQ ID NO: 2030324
cucuuccugaaucacucag

SEQ ID NO: 2030326 - RNA, 19 nt, Artificial Sequence
  Description of Artificial Sequence: Synthetic oligonucleotide
  Sense strand starting at position 683 of SEQ ID NO: 1881256
cugcuuccucauggugaaa

SEQ ID NO: 2030327 - RNA, 19 nt, Artificial Sequence
  Description of Artificial Sequence: Synthetic oligonucleotide
  Antisense strand to SEQ ID NO: 2030326
uuucaccaugaggaagcag

SEQ ID NO: 2030328 - RNA, 19 nt, Artificial Sequence
  Description of Artificial Sequence: Synthetic oligonucleotide
  Sense strand starting at position 714 of SEQ ID NO: 1881256
caccguguggaggaagaau

SEQ ID NO: 2030329 - RNA, 19 nt, Artificial Sequence
  Description of Artificial Sequence: Synthetic oligonucleotide
  Antisense strand to SEQ ID NO: 2030328
auucuuccuccacacggug

SEQ ID NO: 2030330 - RNA, 19 nt, Artificial Sequence
  Description of Artificial Sequence: Synthetic oligonucleotide
  Sense strand starting at position 733 of SEQ ID NO: 1881256
ggacauaaaucaugaggcu

SEQ ID NO: 2030331 - RNA, 19 nt, Artificial Sequence
  Description of Artificial Sequence: Synthetic oligonucleotide
  Antisense strand to SEQ ID NO: 2030330
agccucaugauuuaugucc

SEQ ID NO: 2030332 - RNA, 19 nt, Artificial Sequence
  Description of Artificial Sequence: Synthetic oligonucleotide
  Sense strand starting at position 930 of SEQ ID NO: 1881256
gggagaaauugugugcaaa

SEQ ID NO: 2030333 - RNA, 19 nt, Artificial Sequence
  Description of Artificial Sequence: Synthetic oligonucleotide
  Antisense strand to SEQ ID NO: 2030332
uuugcacacaauuucuccc

SEQ ID NO: 2030334 - RNA, 19 nt, Artificial Sequence
  Description of Artificial Sequence: Synthetic oligonucleotide
  Sense strand starting at position 931 of SEQ ID NO: 1881256
ggagaaauugugugcaaag

SEQ ID NO: 2030335 - RNA, 19 nt, Artificial Sequence
  Description of Artificial Sequence: Synthetic oligonucleotide
  Antisense strand to SEQ ID NO: 2030334
cuuugcacacaauuucucc

SEQ ID NO: 2030336 - RNA, 19 nt, Artificial Sequence
  Description of Artificial Sequence: Synthetic oligonucleotide
  Sense strand starting at position 932 of SEQ ID NO: 1881256
gagaaauugugugcaaaga

SEQ ID NO: 2030337 - RNA, 19 nt, Artificial Sequence
  Description of Artificial Sequence: Synthetic oligonucleotide
  Antisense strand to SEQ ID NO: 2030336
ucuuugcacacaauuucuc

SEQ ID NO: 2030338 - RNA, 19 nt, Artificial Sequence
  Description of Artificial Sequence: Synthetic oligonucleotide
  Sense strand starting at position 933 of SEQ ID NO: 1881256
agaaauugugugcaaagau

SEQ ID NO: 2030339 - RNA, 19 nt, Artificial Sequence
  Description of Artificial Sequence: Synthetic oligonucleotide
  Antisense strand to SEQ ID NO: 2030338
aucuuugcacacaauuucu

SEQ ID NO: 2030340 - RNA, 19 nt, Artificial Sequence
  Description of Artificial Sequence: Synthetic oligonucleotide
  Sense strand starting at position 1025 of SEQ ID NO: 1881256
agaccuggcaggugagaaa

SEQ ID NO: 2030341 - RNA, 19 nt, Artificial Sequence
  Description of Artificial Sequence: Synthetic oligonucleotide
  Antisense strand to SEQ ID NO: 2030340
uuucucaccugccaggucu

SEQ ID NO: 2030342 - RNA, 19 nt, Artificial Sequence
  Description of Artificial Sequence: Synthetic oligonucleotide
  Sense strand starting at position 1233 of SEQ ID NO: 1881256
gguacaagcuuugugagga

SEQ ID NO: 2030343 - RNA, 19 nt, Artificial Sequence
  Description of Artificial Sequence: Synthetic oligonucleotide
  Antisense strand to SEQ ID NO: 2030342
uccucacaaagcuuguacc

SEQ ID NO: 2030344 - RNA, 19 nt, Artificial Sequence
  Description of Artificial Sequence: Synthetic oligonucleotide
  Sense strand starting at position 1318 of SEQ ID NO: 1881256
cucaaugaaugcuugcgaa

SEQ ID NO: 2030345 - RNA, 19 nt, Artificial Sequence
  Description of Artificial Sequence: Synthetic oligonucleotide
  Antisense strand to SEQ ID NO: 2030344
uucgcaagcauucauugag

SEQ ID NO: 2030346 - RNA, 19 nt, Artificial Sequence
  Description of Artificial Sequence: Synthetic oligonucleotide
  Sense strand starting at position 1322 of SEQ ID NO: 1881256
augaaugcuugcgaaugaa

SEQ ID NO: 2030347 - RNA, 19 nt, Artificial Sequence
  Description of Artificial Sequence: Synthetic oligonucleotide
  Antisense strand to SEQ ID NO: 2030346
uucauucgcaagcauucau

SEQ ID NO: 2030348 - RNA, 19 nt, Artificial Sequence
  Description of Artificial Sequence: Synthetic oligonucleotide
  Sense strand starting at position 1325 of SEQ ID NO: 1881256
aaugcuugcgaaugaauga

SEQ ID NO: 2030349 - RNA, 19 nt, Artificial Sequence
  Description of Artificial Sequence: Synthetic oligonucleotide
  Antisense strand to SEQ ID NO: 2030348
ucauucauucgcaagcauu

SEQ ID NO: 2030350 - RNA, 19 nt, Artificial Sequence
  Description of Artificial Sequence: Synthetic oligonucleotide
  Sense strand starting at position 1330 of SEQ ID NO: 1881256
uugcgaaugaaugaguuaa

SEQ ID NO: 2030351 - RNA, 19 nt, Artificial Sequence
  Description of Artificial Sequence: Synthetic oligonucleotide
  Antisense strand to SEQ ID NO: 2030350
uuaacucauucauucgcaa

SEQ ID NO: 2030352 - RNA, 19 nt, Artificial Sequence
  Description of Artificial Sequence: Synthetic oligonucleotide
  Sense strand starting at position 1332 of SEQ ID NO: 1881256
gcgaaugaaugaguuaaua

SEQ ID NO: 2030353 - RNA, 19 nt, Artificial Sequence
  Description of Artificial Sequence: Synthetic oligonucleotide
  Antisense strand to SEQ ID NO: 2030352
uauuaacucauucauucgc

SEQ ID NO: 2030354 - RNA, 19 nt, Artificial Sequence
  Description of Artificial Sequence: Synthetic oligonucleotide
  Sense strand starting at position 1412 of SEQ ID NO: 1881256
gagaguaugucugugugua

SEQ ID NO: 2030355 - RNA, 19 nt, Artificial Sequence
  Description of Artificial Sequence: Synthetic oligonucleotide
  Antisense strand to SEQ ID NO: 2030354
uacacacagacauacucuc

SEQ ID NO: 2030356 - RNA, 19 nt, Artificial Sequence
  Description of Artificial Sequence: Synthetic oligonucleotide
  Sense strand starting at position 1413 of SEQ ID NO: 1881256
agaguaugucuguguguac

SEQ ID NO: 2030357 - RNA, 19 nt, Artificial Sequence
  Description of Artificial Sequence: Synthetic oligonucleotide
  Antisense strand to SEQ ID NO: 2030356
guacacacagacauacucu

SEQ ID NO: 2030358 - RNA, 19 nt, Artificial Sequence
  Description of Artificial Sequence: Synthetic oligonucleotide
  Sense strand starting at position 1414 of SEQ ID NO: 1881256
gaguaugucuguguguacu

SEQ ID NO: 2030359 - RNA, 19 nt, Artificial Sequence
  Description of Artificial Sequence: Synthetic oligonucleotide
  Antisense strand to SEQ ID NO: 2030358
aguacacacagacauacuc

SEQ ID NO: 2030360 - RNA, 19 nt, Artificial Sequence
  Description of Artificial Sequence: Synthetic oligonucleotide
  Sense strand starting at position 1424 of SEQ ID NO: 1881256
guguguacuguacauacaa

SEQ ID NO: 2030361 - RNA, 19 nt, Artificial Sequence
  Description of Artificial Sequence: Synthetic oligonucleotide
  Antisense strand to SEQ ID NO: 2030360
uuguauguacaguacacac

SEQ ID NO: 2030362 - RNA, 19 nt, Artificial Sequence
  Description of Artificial Sequence: Synthetic oligonucleotide
  Sense strand starting at position 1467 of SEQ ID NO: 1881256
uggauaugugcauauaucu

SEQ ID NO: 2030363 - RNA, 19 nt, Artificial Sequence
  Description of Artificial Sequence: Synthetic oligonucleotide
  Antisense strand to SEQ ID NO: 2030362
agauauaugcacauaucca

SEQ ID NO: 2030364 - RNA, 19 nt, Artificial Sequence
  Description of Artificial Sequence: Synthetic oligonucleotide
  Sense strand starting at position 1475 of SEQ ID NO: 1881256
ugcauauaucuacauguau

SEQ ID NO: 2030365 - RNA, 19 nt, Artificial Sequence
  Description of Artificial Sequence: Synthetic oligonucleotide
  Antisense strand to SEQ ID NO: 2030364
auacauguagauauaugca

SEQ ID NO: 2030366 - RNA, 19 nt, Artificial Sequence
  Description of Artificial Sequence: Synthetic oligonucleotide
  Sense strand starting at position 1505 of SEQ ID NO: 1881256
gcacguguucaugugugua

SEQ ID NO: 2030367 - RNA, 19 nt, Artificial Sequence
  Description of Artificial Sequence: Synthetic oligonucleotide
  Antisense strand to SEQ ID NO: 2030366
uacacacaugaacacgugc

SEQ ID NO: 2030368 - RNA, 19 nt, Artificial Sequence
  Description of Artificial Sequence: Synthetic oligonucleotide
  Sense strand starting at position 1510 of SEQ ID NO: 1881256
uguucauguguguaugcau

SEQ ID NO: 2030369 - RNA, 19 nt, Artificial Sequence
  Description of Artificial Sequence: Synthetic oligonucleotide
  Antisense strand to SEQ ID NO: 2030368
augcauacacacaugaaca

SEQ ID NO: 2030370 - RNA, 19 nt, Artificial Sequence
  Description of Artificial Sequence: Synthetic oligonucleotide
  Sense strand starting at position 1557 of SEQ ID NO: 1881256
gugcauaugcccgugugua

SEQ ID NO: 2030371 - RNA, 19 nt, Artificial Sequence
  Description of Artificial Sequence: Synthetic oligonucleotide
  Antisense strand to SEQ ID NO: 2030370
uacacacgggcauaugcac

SEQ ID NO: 2030372 - RNA, 19 nt, Artificial Sequence
  Description of Artificial Sequence: Synthetic oligonucleotide
  Sense strand starting at position 1867 of SEQ ID NO: 1881256
ggaggaaagccacguagau

SEQ ID NO: 2030373 - RNA, 19 nt, Artificial Sequence
  Description of Artificial Sequence: Synthetic oligonucleotide
  Antisense strand to SEQ ID NO: 2030372
aucuacguggcuuuccucc

SEQ ID NO: 2030374 - RNA, 19 nt, Artificial Sequence
  Description of Artificial Sequence: Synthetic oligonucleotide
  Sense strand starting at position 2656 of SEQ ID NO: 1881256
ggccauagauauuaaaguc

SEQ ID NO: 2030375 - RNA, 19 nt, Artificial Sequence
  Description of Artificial Sequence: Synthetic oligonucleotide
  Antisense strand to SEQ ID NO: 2030374
gacuuuaauaucuauggcc

SEQ ID NO: 2030376 - RNA, 19 nt, Artificial Sequence
  Description of Artificial Sequence: Synthetic oligonucleotide
  Sense strand starting at position 2670 of SEQ ID NO: 1881256
aaguccucagcugagagau

SEQ ID NO: 2030377 - RNA, 19 nt, Artificial Sequence
  Description of Artificial Sequence: Synthetic oligonucleotide
  Antisense strand to SEQ ID NO: 2030376
aucucucagcugaggacuu

SEQ ID NO: 2030378 - RNA, 19 nt, Artificial Sequence
  Description of Artificial Sequence: Synthetic oligonucleotide
  Sense strand starting at position 2914 of SEQ ID NO: 1881256
ccagucuugggcugaguca

SEQ ID NO: 2030379 - RNA, 19 nt, Artificial Sequence
  Description of Artificial Sequence: Synthetic oligonucleotide
  Antisense strand to SEQ ID NO: 2030378
ugacucagcccaagacugg

SEQ ID NO: 2030380 - RNA, 19 nt, Artificial Sequence
  Description of Artificial Sequence: Synthetic oligonucleotide
  Sense strand starting at position 3124 of SEQ ID NO: 1881256
cccagaaugugccucggua

SEQ ID NO: 2030381 - RNA, 19 nt, Artificial Sequence
  Description of Artificial Sequence: Synthetic oligonucleotide
  Antisense strand to SEQ ID NO: 2030380
uaccgaggcacauucuggg

SEQ ID NO: 2030382 - RNA, 19 nt, Artificial Sequence
  Description of Artificial Sequence: Synthetic oligonucleotide
  Sense strand starting at position 3126 of SEQ ID NO: 1881256
cagaaugugccucgguaac

SEQ ID NO: 2030383 - RNA, 19 nt, Artificial Sequence
  Description of Artificial Sequence: Synthetic oligonucleotide
  Antisense strand to SEQ ID NO: 2030382
guuaccgaggcacauucug

SEQ ID NO: 2030384 - RNA, 19 nt, Artificial Sequence
  Description of Artificial Sequence: Synthetic oligonucleotide
  Sense strand starting at position 3128 of SEQ ID NO: 1881256
gaaugugccucgguaacaa

SEQ ID NO: 2030385 - RNA, 19 nt, Artificial Sequence
  Description of Artificial Sequence: Synthetic oligonucleotide
  Antisense strand to SEQ ID NO: 2030384
uuguuaccgaggcacauuc

SEQ ID NO: 2030386 - RNA, 19 nt, Artificial Sequence
  Description of Artificial Sequence: Synthetic oligonucleotide
  Sense strand starting at position 3155 of SEQ ID NO: 1881256
ugugauuucucaggugcaa

SEQ ID NO: 2030387 - RNA, 19 nt, Artificial Sequence
  Description of Artificial Sequence: Synthetic oligonucleotide
  Antisense strand to SEQ ID NO: 2030386
uugcaccugagaaaucaca

SEQ ID NO: 2030388 - RNA, 19 nt, Artificial Sequence
  Description of Artificial Sequence: Synthetic oligonucleotide
  Sense strand starting at position 3277 of SEQ ID NO: 1881256
cccucuuaccugggugaca

SEQ ID NO: 2030389 - RNA, 19 nt, Artificial Sequence
  Description of Artificial Sequence: Synthetic oligonucleotide
  Antisense strand to SEQ ID NO: 2030388
ugucacccagguaagaggg

SEQ ID NO: 2030390 - RNA, 19 nt, Artificial Sequence
  Description of Artificial Sequence: Synthetic oligonucleotide
  Sense strand starting at position 3334 of SEQ ID NO: 1881256
ccgcuugaugcuggacuua

SEQ ID NO: 2030391 - RNA, 19 nt, Artificial Sequence
  Description of Artificial Sequence: Synthetic oligonucleotide
  Antisense strand to SEQ ID NO: 2030390
uaaguccagcaucaagcgg

SEQ ID NO: 2030392 - RNA, 19 nt, Artificial Sequence
  Description of Artificial Sequence: Synthetic oligonucleotide
  Sense strand starting at position 3655 of SEQ ID NO: 1881256
gcaccuuaucagcaacagu

SEQ ID NO: 2030393 - RNA, 19 nt, Artificial Sequence
  Description of Artificial Sequence: Synthetic oligonucleotide
  Antisense strand to SEQ ID NO: 2030392
acuguugcugauaaggugc

SEQ ID NO: 2030394 - RNA, 19 nt, Artificial Sequence
  Description of Artificial Sequence: Synthetic oligonucleotide
  Sense strand starting at position 3896 of SEQ ID NO: 1881256
gggaucacuccaggaagca

SEQ ID NO: 2030395 - RNA, 19 nt, Artificial Sequence
  Description of Artificial Sequence: Synthetic oligonucleotide
  Antisense strand to SEQ ID NO: 2030394
ugcuuccuggagugauccc

SEQ ID NO: 2030396 - RNA, 19 nt, Artificial Sequence
  Description of Artificial Sequence: Synthetic oligonucleotide
  Sense strand starting at position 3910 of SEQ ID NO: 1881256
aagcaaggcucacagaguu

SEQ ID NO: 2030397 - RNA, 19 nt, Artificial Sequence
  Description of Artificial Sequence: Synthetic oligonucleotide
  Antisense strand to SEQ ID NO: 2030396
aacucugugagccuugcuu

SEQ ID NO: 2030398 - RNA, 19 nt, Artificial Sequence
  Description of Artificial Sequence: Synthetic oligonucleotide
  Sense strand starting at position 1 of SEQ ID NO: 1881257
aggagcucacuuggucuua

SEQ ID NO: 2030399 - RNA, 19 nt, Artificial Sequence
  Description of Artificial Sequence: Synthetic oligonucleotide
  Antisense strand to SEQ ID NO: 2030398
uaagaccaagugagcuccu

SEQ ID NO: 2030400 - RNA, 19 nt, Artificial Sequence
  Description of Artificial Sequence: Synthetic oligonucleotide
  Sense strand starting at position 3 of SEQ ID NO: 1881257
gagcucacuuggucuuaga

SEQ ID NO: 2030401 - RNA, 19 nt, Artificial Sequence
  Description of Artificial Sequence: Synthetic oligonucleotide
  Antisense strand to SEQ ID NO: 2030400
ucuaagaccaagugagcuc

SEQ ID NO: 2030402 - RNA, 19 nt, Artificial Sequence
  Description of Artificial Sequence: Synthetic oligonucleotide
  Sense strand starting at position 78 of SEQ ID NO: 1881257
gugacucuaggaugacaca

SEQ ID NO: 2030403 - RNA, 19 nt, Artificial Sequence
  Description of Artificial Sequence: Synthetic oligonucleotide
  Antisense strand to SEQ ID NO: 2030402
ugugucauccuagagucac

SEQ ID NO: 2030404 - RNA, 19 nt, Artificial Sequence
  Description of Artificial Sequence: Synthetic oligonucleotide
  Sense strand starting at position 248 of SEQ ID NO: 1881257
guuccaccgagcuaagaua

SEQ ID NO: 2030405 - RNA, 19 nt, Artificial Sequence
  Description of Artificial Sequence: Synthetic oligonucleotide
  Antisense strand to SEQ ID NO: 2030404
uaucuuagcucgguggaac

SEQ ID NO: 2030406 - RNA, 19 nt, Artificial Sequence
  Description of Artificial Sequence: Synthetic oligonucleotide
  Sense strand starting at position 255 of SEQ ID NO: 1881257
cgagcuaagauaggagaau

SEQ ID NO: 2030407 - RNA, 19 nt, Artificial Sequence
  Description of Artificial Sequence: Synthetic oligonucleotide
  Antisense strand to SEQ ID NO: 2030406
auucuccuaucuuagcucg

SEQ ID NO: 2030408 - RNA, 19 nt, Artificial Sequence
  Description of Artificial Sequence: Synthetic oligonucleotide
  Sense strand starting at position 282 of SEQ ID NO: 1881257
gcuauuccagugcaugaaa

SEQ ID NO: 2030409 - RNA, 19 nt, Artificial Sequence
  Description of Artificial Sequence: Synthetic oligonucleotide
  Antisense strand to SEQ ID NO: 2030408
uuucaugcacuggaauagc

SEQ ID NO: 2030410 - RNA, 19 nt, Artificial Sequence
  Description of Artificial Sequence: Synthetic oligonucleotide
  Sense strand starting at position 646 of SEQ ID NO: 1881257
caaggucuacacuguaaga

SEQ ID NO: 2030411 - RNA, 19 nt, Artificial Sequence
  Description of Artificial Sequence: Synthetic oligonucleotide
  Antisense strand to SEQ ID NO: 2030410
ucuuacaguguagaccuug

SEQ ID NO: 2030412 - RNA, 19 nt, Artificial Sequence
  Description of Artificial Sequence: Synthetic oligonucleotide
  Sense strand starting at position 703 of SEQ ID NO: 1881257
uaaggauuaugaguaaugu

SEQ ID NO: 2030413 - RNA, 19 nt, Artificial Sequence
  Description of Artificial Sequence: Synthetic oligonucleotide
  Antisense strand to SEQ ID NO: 2030412
acauuacucauaauccuua

SEQ ID NO: 2030414 - RNA, 19 nt, Artificial Sequence
  Description of Artificial Sequence: Synthetic oligonucleotide
  Sense strand starting at position 1582 of SEQ ID NO: 1881257
gcacuugggacucagcuau

SEQ ID NO: 2030415 - RNA, 19 nt, Artificial Sequence
  Description of Artificial Sequence: Synthetic oligonucleotide
  Antisense strand to SEQ ID NO: 2030414
auagcugagucccaagugc

SEQ ID NO: 2030416 - RNA, 19 nt, Artificial Sequence
  Description of Artificial Sequence: Synthetic oligonucleotide
  Sense strand starting at position 1589 of SEQ ID NO: 1881257
ggacucagcuauucuucuu

SEQ ID NO: 2030417 - RNA, 19 nt, Artificial Sequence
  Description of Artificial Sequence: Synthetic oligonucleotide
  Antisense strand to SEQ ID NO: 2030416
aagaagaauagcugagucc

SEQ ID NO: 2030418 - RNA, 19 nt, Artificial Sequence
  Description of Artificial Sequence: Synthetic oligonucleotide
  Sense strand starting at position 1604 of SEQ ID NO: 1881257
ucuucuugggacugaaauc

SEQ ID NO: 2030419 - RNA, 19 nt, Artificial Sequence
  Description of Artificial Sequence: Synthetic oligonucleotide
  Antisense strand to SEQ ID NO: 2030418
gauuucagucccaagaaga

SEQ ID NO: 2030420 - RNA, 19 nt, Artificial Sequence
  Description of Artificial Sequence: Synthetic oligonucleotide
  Sense strand starting at position 1989 of SEQ ID NO: 1881257
ccuauugaccaaggugauu

SEQ ID NO: 2030421 - RNA, 19 nt, Artificial Sequence
  Description of Artificial Sequence: Synthetic oligonucleotide
  Antisense strand to SEQ ID NO: 2030420
aaucaccuuggucaauagg

SEQ ID NO: 2030422 - RNA, 19 nt, Artificial Sequence
  Description of Artificial Sequence: Synthetic oligonucleotide
  Sense strand starting at position 2063 of SEQ ID NO: 1881257
cauggaugucccgagucaa

SEQ ID NO: 2030423 - RNA, 19 nt, Artificial Sequence
  Description of Artificial Sequence: Synthetic oligonucleotide
  Antisense strand to SEQ ID NO: 2030422
uugacucgggacauccaug

SEQ ID NO: 2030424 - RNA, 19 nt, Artificial Sequence
  Description of Artificial Sequence: Synthetic oligonucleotide
  Sense strand starting at position 2106 of SEQ ID NO: 1881257
gggacagauucugucauca

SEQ ID NO: 2030425 - RNA, 19 nt, Artificial Sequence
  Description of Artificial Sequence: Synthetic oligonucleotide
  Antisense strand to SEQ ID NO: 2030424
ugaugacagaaucuguccc

SEQ ID NO: 2030426 - RNA, 19 nt, Artificial Sequence
  Description of Artificial Sequence: Synthetic oligonucleotide
  Sense strand starting at position 2428 of SEQ ID NO: 1881257
acuuguugaugguuucuaa

SEQ ID NO: 2030427 - RNA, 19 nt, Artificial Sequence
  Description of Artificial Sequence: Synthetic oligonucleotide
  Antisense strand to SEQ ID NO: 2030426
uuagaaaccaucaacaagu

SEQ ID NO: 2030428 - RNA, 19 nt, Artificial Sequence
  Description of Artificial Sequence: Synthetic oligonucleotide
  Sense strand starting at position 2431 of SEQ ID NO: 1881257
uguugaugguuucuaauaa

SEQ ID NO: 2030429 - RNA, 19 nt, Artificial Sequence
  Description of Artificial Sequence: Synthetic oligonucleotide
  Antisense strand to SEQ ID NO: 2030428
uuauuagaaaccaucaaca

SEQ ID NO: 2030430 - RNA, 19 nt, Artificial Sequence
  Description of Artificial Sequence: Synthetic oligonucleotide
  Sense strand starting at position 2470 of SEQ ID NO: 1881257
gguguuccacccuaccuua

SEQ ID NO: 2030431 - RNA, 19 nt, Artificial Sequence
  Description of Artificial Sequence: Synthetic oligonucleotide
  Antisense strand to SEQ ID NO: 2030430
uaagguaggguggaacacc

SEQ ID NO: 2030432 - RNA, 19 nt, Artificial Sequence
  Description of Artificial Sequence: Synthetic oligonucleotide
  Sense strand starting at position 2604 of SEQ ID NO: 1881257
aucucuguaccaugaaaga

SEQ ID NO: 2030433 - RNA, 19 nt, Artificial Sequence
  Description of Artificial Sequence: Synthetic oligonucleotide
  Antisense strand to SEQ ID NO: 2030432
ucuuucaugguacagagau

SEQ ID NO: 2030434 - RNA, 19 nt, Artificial Sequence
  Description of Artificial Sequence: Synthetic oligonucleotide
  Sense strand starting at position 2855 of SEQ ID NO: 1881257
ucagaaugagaguguugca

SEQ ID NO: 2030435 - RNA, 19 nt, Artificial Sequence
  Description of Artificial Sequence: Synthetic oligonucleotide
  Antisense strand to SEQ ID NO: 2030434
ugcaacacucucauucuga

SEQ ID NO: 2030436 - RNA, 19 nt, Artificial Sequence
  Description of Artificial Sequence: Synthetic oligonucleotide
  Sense strand starting at position 2882 of SEQ ID NO: 1881257
aacuuagaauuguuugugu

SEQ ID NO: 2030437 - RNA, 19 nt, Artificial Sequence
  Description of Artificial Sequence: Synthetic oligonucleotide
  Antisense strand to SEQ ID NO: 2030436
acacaaacaauucuaaguu

SEQ ID NO: 2030438 - RNA, 19 nt, Artificial Sequence
  Description of Artificial Sequence: Synthetic oligonucleotide
  Sense strand starting at position 3114 of SEQ ID NO: 1881257
gcacuaugaccauggauca

SEQ ID NO: 2030439 - RNA, 19 nt, Artificial Sequence
  Description of Artificial Sequence: Synthetic oligonucleotide
  Antisense strand to SEQ ID NO: 2030438
ugauccauggucauagugc

SEQ ID NO: 2030440 - RNA, 19 nt, Artificial Sequence
  Description of Artificial Sequence: Synthetic oligonucleotide
  Sense strand starting at position 3202 of SEQ ID NO: 1881257
acaucagaaucucugguuu

SEQ ID NO: 2030441 - RNA, 19 nt, Artificial Sequence
  Description of Artificial Sequence: Synthetic oligonucleotide
  Antisense strand to SEQ ID NO: 2030440
aaaccagagauucugaugu

SEQ ID NO: 2030442 - RNA, 19 nt, Artificial Sequence
  Description of Artificial Sequence: Synthetic oligonucleotide
  Sense strand starting at position 3250 of SEQ ID NO: 1881257
guuuccucagauuauucca

SEQ ID NO: 2030443 - RNA, 19 nt, Artificial Sequence
  Description of Artificial Sequence: Synthetic oligonucleotide
  Antisense strand to SEQ ID NO: 2030442
uggaauaaucugaggaaac

SEQ ID NO: 2030444 - RNA, 19 nt, Artificial Sequence
  Description of Artificial Sequence: Synthetic oligonucleotide
  Sense strand starting at position 3287 of SEQ ID NO: 1881257
agaccacugcucuaagauu

SEQ ID NO: 2030445 - RNA, 19 nt, Artificial Sequence
  Description of Artificial Sequence: Synthetic oligonucleotide
  Antisense strand to SEQ ID NO: 2030444
aaucuuagagcaguggucu

SEQ ID NO: 2030446 - RNA, 19 nt, Artificial Sequence
  Description of Artificial Sequence: Synthetic oligonucleotide
  Sense strand starting at position 3352 of SEQ ID NO: 1881257
gugcuuugaggccauggau

SEQ ID NO: 2030447 - RNA, 19 nt, Artificial Sequence
  Description of Artificial Sequence: Synthetic oligonucleotide
  Antisense strand to SEQ ID NO: 2030446
auccauggccucaaagcac

SEQ ID NO: 2030448 - RNA, 19 nt, Artificial Sequence
  Description of Artificial Sequence: Synthetic oligonucleotide
  Sense strand starting at position 3360 of SEQ ID NO: 1881257
aggccauggaucugauauu

SEQ ID NO: 2030449 - RNA, 19 nt, Artificial Sequence
  Description of Artificial Sequence: Synthetic oligonucleotide
  Antisense strand to SEQ ID NO: 2030448
aauaucagauccauggccu

SEQ ID NO: 2030450 - RNA, 19 nt, Artificial Sequence
  Description of Artificial Sequence: Synthetic oligonucleotide
  Sense strand starting at position 3361 of SEQ ID NO: 1881257
ggccauggaucugauauuu

SEQ ID NO: 2030451 - RNA, 19 nt, Artificial Sequence
  Description of Artificial Sequence: Synthetic oligonucleotide
  Antisense strand to SEQ ID NO: 2030450
aaauaucagauccauggcc

SEQ ID NO: 2030452 - RNA, 19 nt, Artificial Sequence
  Description of Artificial Sequence: Synthetic oligonucleotide
  Sense strand starting at position 3421 of SEQ ID NO: 1881257
agagaaagguaggccuuau

SEQ ID NO: 2030453 - RNA, 19 nt, Artificial Sequence
  Description of Artificial Sequence: Synthetic oligonucleotide
  Antisense strand to SEQ ID NO: 2030452
auaaggccuaccuuucucu

SEQ ID NO: 2030454 - RNA, 19 nt, Artificial Sequence
  Description of Artificial Sequence: Synthetic oligonucleotide
  Sense strand starting at position 3740 of SEQ ID NO: 1881257
cguuguuguaaagacaaau

SEQ ID NO: 2030455 - RNA, 19 nt, Artificial Sequence
  Description of Artificial Sequence: Synthetic oligonucleotide
  Antisense strand to SEQ ID NO: 2030454
auuugucuuuacaacaacg

SEQ ID NO: 2030456 - RNA, 19 nt, Artificial Sequence
  Description of Artificial Sequence: Synthetic oligonucleotide
  Sense strand starting at position 3778 of SEQ ID NO: 1881257
cuaggaaaguucuuggaac

SEQ ID NO: 2030457 - RNA, 19 nt, Artificial Sequence
  Description of Artificial Sequence: Synthetic oligonucleotide
  Antisense strand to SEQ ID NO: 2030456
guuccaagaacuuuccuag

SEQ ID NO: 2030458 - RNA, 19 nt, Artificial Sequence
  Description of Artificial Sequence: Synthetic oligonucleotide
  Sense strand starting at position 3795 of SEQ ID NO: 1881257
acugaacauguaugugauu

SEQ ID NO: 2030459 - RNA, 19 nt, Artificial Sequence
  Description of Artificial Sequence: Synthetic oligonucleotide
  Antisense strand to SEQ ID NO: 2030458
aaucacauacauguucagu

SEQ ID NO: 2030460 - RNA, 19 nt, Artificial Sequence
  Description of Artificial Sequence: Synthetic oligonucleotide
  Sense strand starting at position 3796 of SEQ ID NO: 1881257
cugaacauguaugugauua

SEQ ID NO: 2030461 - RNA, 19 nt, Artificial Sequence
  Description of Artificial Sequence: Synthetic oligonucleotide
  Antisense strand to SEQ ID NO: 2030460
uaaucacauacauguucag

SEQ ID NO: 2030462 - RNA, 19 nt, Artificial Sequence
  Description of Artificial Sequence: Synthetic oligonucleotide
  Sense strand starting at position 3797 of SEQ ID NO: 1881257
ugaacauguaugugauuag

SEQ ID NO: 2030463 - RNA, 19 nt, Artificial Sequence
  Description of Artificial Sequence: Synthetic oligonucleotide
  Antisense strand to SEQ ID NO: 2030462
cuaaucacauacauguuca

SEQ ID NO: 2030464 - RNA, 19 nt, Artificial Sequence
  Description of Artificial Sequence: Synthetic oligonucleotide
  Sense strand starting at position 3800 of SEQ ID NO: 1881257
acauguaugugauuaguaa

SEQ ID NO: 2030465 - RNA, 19 nt, Artificial Sequence
  Description of Artificial Sequence: Synthetic oligonucleotide
  Antisense strand to SEQ ID NO: 2030464
uuacuaaucacauacaugu

SEQ ID NO: 2030466 - RNA, 19 nt, Artificial Sequence
  Description of Artificial Sequence: Synthetic oligonucleotide
  Sense strand starting at position 3801 of SEQ ID NO: 1881257
cauguaugugauuaguaaa

SEQ ID NO: 2030467 - RNA, 19 nt, Artificial Sequence
  Description of Artificial Sequence: Synthetic oligonucleotide
  Antisense strand to SEQ ID NO: 2030466
uuuacuaaucacauacaug

SEQ ID NO: 2030468 - RNA, 19 nt, Artificial Sequence
  Description of Artificial Sequence: Synthetic oligonucleotide
  Sense strand starting at position 3848 of SEQ ID NO: 1881257
auggaauuguuacccuuua

SEQ ID NO: 2030469 - RNA, 19 nt, Artificial Sequence
  Description of Artificial Sequence: Synthetic oligonucleotide
  Antisense strand to SEQ ID NO: 2030468
uaaaggguaacaauuccau

SEQ ID NO: 2030470 - RNA, 19 nt, Artificial Sequence
  Description of Artificial Sequence: Synthetic oligonucleotide
  Sense strand starting at position 3849 of SEQ ID NO: 1881257
uggaauuguuacccuuuaa

SEQ ID NO: 2030471 - RNA, 19 nt, Artificial Sequence
  Description of Artificial Sequence: Synthetic oligonucleotide
  Antisense strand to SEQ ID NO: 2030470
uuaaaggguaacaauucca

SEQ ID NO: 2030472 - RNA, 19 nt, Artificial Sequence
  Description of Artificial Sequence: Synthetic oligonucleotide
  Sense strand starting at position 3876 of SEQ ID NO: 1881257
ggagacuuccuuggaaggu

SEQ ID NO: 2030473 - RNA, 19 nt, Artificial Sequence
  Description of Artificial Sequence: Synthetic oligonucleotide
  Antisense strand to SEQ ID NO: 2030472
accuuccaaggaagucucc

SEQ ID NO: 2030474 - RNA, 19 nt, Artificial Sequence
  Description of Artificial Sequence: Synthetic oligonucleotide
  Sense strand starting at position 3889 of SEQ ID NO: 1881257
gaagguguggcagaauaau

SEQ ID NO: 2030475 - RNA, 19 nt, Artificial Sequence
  Description of Artificial Sequence: Synthetic oligonucleotide
  Antisense strand to SEQ ID NO: 2030474
auuauucugccacaccuuc

SEQ ID NO: 2030476 - RNA, 19 nt, Artificial Sequence
  Description of Artificial Sequence: Synthetic oligonucleotide
  Sense strand starting at position 3912 of SEQ ID NO: 1881257
ccaagaugcccacaugcua

SEQ ID NO: 2030477 - RNA, 19 nt, Artificial Sequence
  Description of Artificial Sequence: Synthetic oligonucleotide
  Antisense strand to SEQ ID NO: 2030476
uagcaugugggcaucuugg

SEQ ID NO: 2030478 - RNA, 19 nt, Artificial Sequence
  Description of Artificial Sequence: Synthetic oligonucleotide
  Sense strand starting at position 23 of SEQ ID NO: 1881258
cggcgauuugcagauucca

SEQ ID NO: 2030479 - RNA, 19 nt, Artificial Sequence
  Description of Artificial Sequence: Synthetic oligonucleotide
  Antisense strand to SEQ ID NO: 2030478
uggaaucugcaaaucgccg

SEQ ID NO: 2030480 - RNA, 19 nt, Artificial Sequence
  Description of Artificial Sequence: Synthetic oligonucleotide
  Sense strand starting at position 72 of SEQ ID NO: 1881258
uuuagugucaggugaagcu

SEQ ID NO: 2030481 - RNA, 19 nt, Artificial Sequence
  Description of Artificial Sequence: Synthetic oligonucleotide
  Antisense strand to SEQ ID NO: 2030480
agcuucaccugacacuaaa

SEQ ID NO: 2030482 - RNA, 19 nt, Artificial Sequence
  Description of Artificial Sequence: Synthetic oligonucleotide
  Sense strand starting at position 129 of SEQ ID NO: 1881258
ggcuguauccuccauauug

SEQ ID NO: 2030483 - RNA, 19 nt, Artificial Sequence
  Description of Artificial Sequence: Synthetic oligonucleotide
  Antisense strand to SEQ ID NO: 2030482
caauauggaggauacagcc

SEQ ID NO: 2030484 - RNA, 19 nt, Artificial Sequence
  Description of Artificial Sequence: Synthetic oligonucleotide
  Sense strand starting at position 197 of SEQ ID NO: 1881258
ggagccuccucugucaaga

SEQ ID NO: 2030485 - RNA, 19 nt, Artificial Sequence
  Description of Artificial Sequence: Synthetic oligonucleotide
  Antisense strand to SEQ ID NO: 2030484
ucuugacagaggaggcucc

SEQ ID NO: 2030486 - RNA, 19 nt, Artificial Sequence
  Description of Artificial Sequence: Synthetic oligonucleotide
  Sense strand starting at position 367 of SEQ ID NO: 1881258
aaguaaguccucugcagag

SEQ ID NO: 2030487 - RNA, 19 nt, Artificial Sequence
  Description of Artificial Sequence: Synthetic oligonucleotide
  Antisense strand to SEQ ID NO: 2030486
cucugcagaggacuuacuu

SEQ ID NO: 2030488 - RNA, 19 nt, Artificial Sequence
  Description of Artificial Sequence: Synthetic oligonucleotide
  Sense strand starting at position 369 of SEQ ID NO: 1881258
guaaguccucugcagaggu

SEQ ID NO: 2030489 - RNA, 19 nt, Artificial Sequence
  Description of Artificial Sequence: Synthetic oligonucleotide
  Antisense strand to SEQ ID NO: 2030488
accucugcagaggacuuac

SEQ ID NO: 2030490 - RNA, 19 nt, Artificial Sequence
  Description of Artificial Sequence: Synthetic oligonucleotide
  Sense strand starting at position 412 of SEQ ID NO: 1881258
ggcucucaccucuaagauc

SEQ ID NO: 2030491 - RNA, 19 nt, Artificial Sequence
  Description of Artificial Sequence: Synthetic oligonucleotide
  Antisense strand to SEQ ID NO: 2030490
gaucuuagaggugagagcc

SEQ ID NO: 2030492 - RNA, 19 nt, Artificial Sequence
  Description of Artificial Sequence: Synthetic oligonucleotide
  Sense strand starting at position 421 of SEQ ID NO: 1881258
cucuaagaucccgguugaa

SEQ ID NO: 2030493 - RNA, 19 nt, Artificial Sequence
  Description of Artificial Sequence: Synthetic oligonucleotide
  Antisense strand to SEQ ID NO: 2030492
uucaaccgggaucuuagag

SEQ ID NO: 2030494 - RNA, 19 nt, Artificial Sequence
  Description of Artificial Sequence: Synthetic oligonucleotide
  Sense strand starting at position 568 of SEQ ID NO: 1881258
gcaagagucagacagcaga

SEQ ID NO: 2030495 - RNA, 19 nt, Artificial Sequence
  Description of Artificial Sequence: Synthetic oligonucleotide
  Antisense strand to SEQ ID NO: 2030494
ucugcugucugacucuugc

SEQ ID NO: 2030496 - RNA, 19 nt, Artificial Sequence
  Description of Artificial Sequence: Synthetic oligonucleotide
  Sense strand starting at position 598 of SEQ ID NO: 1881258
gcgagagcucccagggagu

SEQ ID NO: 2030497 - RNA, 19 nt, Artificial Sequence
  Description of Artificial Sequence: Synthetic oligonucleotide
  Antisense strand to SEQ ID NO: 2030496
acucccugggagcucucgc

SEQ ID NO: 2030498 - RNA, 19 nt, Artificial Sequence
  Description of Artificial Sequence: Synthetic oligonucleotide
  Sense strand starting at position 611 of SEQ ID NO: 1881258
gggagugauucgaggcuga

SEQ ID NO: 2030499 - RNA, 19 nt, Artificial Sequence
  Description of Artificial Sequence: Synthetic oligonucleotide
  Antisense strand to SEQ ID NO: 2030498
ucagccucgaaucacuccc

SEQ ID NO: 2030500 - RNA, 19 nt, Artificial Sequence
  Description of Artificial Sequence: Synthetic oligonucleotide
  Sense strand starting at position 898 of SEQ ID NO: 1881258
gcuggcuuccaccaagaaa

SEQ ID NO: 2030501 - RNA, 19 nt, Artificial Sequence
  Description of Artificial Sequence: Synthetic oligonucleotide
  Antisense strand to SEQ ID NO: 2030500
uuucuugguggaagccagc

SEQ ID NO: 2030502 - RNA, 19 nt, Artificial Sequence
  Description of Artificial Sequence: Synthetic oligonucleotide
  Sense strand starting at position 909 of SEQ ID NO: 1881258
ccaagaaacugaguacagu

SEQ ID NO: 2030503 - RNA, 19 nt, Artificial Sequence
  Description of Artificial Sequence: Synthetic oligonucleotide
  Antisense strand to SEQ ID NO: 2030502
acuguacucaguuucuugg

SEQ ID NO: 2030504 - RNA, 19 nt, Artificial Sequence
  Description of Artificial Sequence: Synthetic oligonucleotide
  Sense strand starting at position 920 of SEQ ID NO: 1881258
aguacaguuggccagaagu

SEQ ID NO: 2030505 - RNA, 19 nt, Artificial Sequence
  Description of Artificial Sequence: Synthetic oligonucleotide
  Antisense strand to SEQ ID NO: 2030504
acuucuggccaacuguacu

SEQ ID NO: 2030506 - RNA, 19 nt, Artificial Sequence
  Description of Artificial Sequence: Synthetic oligonucleotide
  Sense strand starting at position 967 of SEQ ID NO: 1881258
ggugguuugaccuaacuug

SEQ ID NO: 2030507 - RNA, 19 nt, Artificial Sequence
  Description of Artificial Sequence: Synthetic oligonucleotide
  Antisense strand to SEQ ID NO: 2030506
caaguuaggucaaaccacc

SEQ ID NO: 2030508 - RNA, 19 nt, Artificial Sequence
  Description of Artificial Sequence: Synthetic oligonucleotide
  Sense strand starting at position 1869 of SEQ ID NO: 1881258
cugagauugcugcagguac

SEQ ID NO: 2030509 - RNA, 19 nt, Artificial Sequence
  Description of Artificial Sequence: Synthetic oligonucleotide
  Antisense strand to SEQ ID NO: 2030508
guaccugcagcaaucucag

SEQ ID NO: 2030510 - RNA, 19 nt, Artificial Sequence
  Description of Artificial Sequence: Synthetic oligonucleotide
  Sense strand starting at position 2023 of SEQ ID NO: 1881258
cuaggcauacugggaagau

SEQ ID NO: 2030511 - RNA, 19 nt, Artificial Sequence
  Description of Artificial Sequence: Synthetic oligonucleotide
  Antisense strand to SEQ ID NO: 2030510
aucuucccaguaugccuag

SEQ ID NO: 2030512 - RNA, 19 nt, Artificial Sequence
  Description of Artificial Sequence: Synthetic oligonucleotide
  Sense strand starting at position 2142 of SEQ ID NO: 1881258
aauguuucugccugaggcu

SEQ ID NO: 2030513 - RNA, 19 nt, Artificial Sequence
  Description of Artificial Sequence: Synthetic oligonucleotide
  Antisense strand to SEQ ID NO: 2030512
agccucaggcagaaacauu

SEQ ID NO: 2030514 - RNA, 19 nt, Artificial Sequence
  Description of Artificial Sequence: Synthetic oligonucleotide
  Sense strand starting at position 2190 of SEQ ID NO: 1881258
gauuaaugucaggaugcuu

SEQ ID NO: 2030515 - RNA, 19 nt, Artificial Sequence
  Description of Artificial Sequence: Synthetic oligonucleotide
  Antisense strand to SEQ ID NO: 2030514
aagcauccugacauuaauc

SEQ ID NO: 2030516 - RNA, 19 nt, Artificial Sequence
  Description of Artificial Sequence: Synthetic oligonucleotide
  Sense strand starting at position 2361 of SEQ ID NO: 1881258
gucaaucaugacugagcau

SEQ ID NO: 2030517 - RNA, 19 nt, Artificial Sequence
  Description of Artificial Sequence: Synthetic oligonucleotide
  Antisense strand to SEQ ID NO: 2030516
augcucagucaugauugac

SEQ ID NO: 2030518 - RNA, 19 nt, Artificial Sequence
  Description of Artificial Sequence: Synthetic oligonucleotide
  Sense strand starting at position 2560 of SEQ ID NO: 1881258
agguuagagcaaugagaca

SEQ ID NO: 2030519 - RNA, 19 nt, Artificial Sequence
  Description of Artificial Sequence: Synthetic oligonucleotide
  Antisense strand to SEQ ID NO: 2030518
ugucucauugcucuaaccu

SEQ ID NO: 2030520 - RNA, 19 nt, Artificial Sequence
  Description of Artificial Sequence: Synthetic oligonucleotide
  Sense strand starting at position 2588 of SEQ ID NO: 1881258
guaagagucugagcucuag

SEQ ID NO: 2030521 - RNA, 19 nt, Artificial Sequence
  Description of Artificial Sequence: Synthetic oligonucleotide
  Antisense strand to SEQ ID NO: 2030520
cuagagcucagacucuuac

SEQ ID NO: 2030522 - RNA, 19 nt, Artificial Sequence
  Description of Artificial Sequence: Synthetic oligonucleotide
  Sense strand starting at position 2592 of SEQ ID NO: 1881258
gagucugagcucuagaguc

SEQ ID NO: 2030523 - RNA, 19 nt, Artificial Sequence
  Description of Artificial Sequence: Synthetic oligonucleotide
  Antisense strand to SEQ ID NO: 2030522
gacucuagagcucagacuc

SEQ ID NO: 2030524 - RNA, 19 nt, Artificial Sequence
  Description of Artificial Sequence: Synthetic oligonucleotide
  Sense strand starting at position 2599 of SEQ ID NO: 1881258
agcucuagagucugacaaa

SEQ ID NO: 2030525 - RNA, 19 nt, Artificial Sequence
  Description of Artificial Sequence: Synthetic oligonucleotide
  Antisense strand to SEQ ID NO: 2030524
uuugucagacucuagagcu

SEQ ID NO: 2030526 - RNA, 19 nt, Artificial Sequence
  Description of Artificial Sequence: Synthetic oligonucleotide
  Sense strand starting at position 2602 of SEQ ID NO: 1881258
ucuagagucugacaaauag

SEQ ID NO: 2030527 - RNA, 19 nt, Artificial Sequence
  Description of Artificial Sequence: Synthetic oligonucleotide
  Antisense strand to SEQ ID NO: 2030526
cuauuugucagacucuaga

SEQ ID NO: 2030528 - RNA, 19 nt, Artificial Sequence
  Description of Artificial Sequence: Synthetic oligonucleotide
  Sense strand starting at position 2721 of SEQ ID NO: 1881258
gggauuuguugaggaugac

SEQ ID NO: 2030529 - RNA, 19 nt, Artificial Sequence
  Description of Artificial Sequence: Synthetic oligonucleotide
  Antisense strand to SEQ ID NO: 2030528
gucauccucaacaaauccc

SEQ ID NO: 2030530 - RNA, 19 nt, Artificial Sequence
  Description of Artificial Sequence: Synthetic oligonucleotide
  Sense strand starting at position 2730 of SEQ ID NO: 1881258
ugaggaugacgcuauguaa

SEQ ID NO: 2030531 - RNA, 19 nt, Artificial Sequence
  Description of Artificial Sequence: Synthetic oligonucleotide
  Antisense strand to SEQ ID NO: 2030530
uuacauagcgucauccuca

SEQ ID NO: 2030532 - RNA, 19 nt, Artificial Sequence
  Description of Artificial Sequence: Synthetic oligonucleotide
  Sense strand starting at position 2741 of SEQ ID NO: 1881258
cuauguaaggccuggcaga

SEQ ID NO: 2030533 - RNA, 19 nt, Artificial Sequence
  Description of Artificial Sequence: Synthetic oligonucleotide
  Antisense strand to SEQ ID NO: 2030532
ucugccaggccuuacauag

SEQ ID NO: 2030534 - RNA, 19 nt, Artificial Sequence
  Description of Artificial Sequence: Synthetic oligonucleotide
  Sense strand starting at position 2836 of SEQ ID NO: 1881258
ucaguuuacccucaguuua

SEQ ID NO: 2030535 - RNA, 19 nt, Artificial Sequence
  Description of Artificial Sequence: Synthetic oligonucleotide
  Antisense strand to SEQ ID NO: 2030534
uaaacugaggguaaacuga

SEQ ID NO: 2030536 - RNA, 19 nt, Artificial Sequence
  Description of Artificial Sequence: Synthetic oligonucleotide
  Sense strand starting at position 2838 of SEQ ID NO: 1881258
aguuuacccucaguuuaga

SEQ ID NO: 2030537 - RNA, 19 nt, Artificial Sequence
  Description of Artificial Sequence: Synthetic oligonucleotide
  Antisense strand to SEQ ID NO: 2030536
ucuaaacugaggguaaacu

SEQ ID NO: 2030538 - RNA, 19 nt, Artificial Sequence
  Description of Artificial Sequence: Synthetic oligonucleotide
  Sense strand starting at position 2908 of SEQ ID NO: 1881258
ggacuacuguggucacuga

SEQ ID NO: 2030539 - RNA, 19 nt, Artificial Sequence
  Description of Artificial Sequence: Synthetic oligonucleotide
  Antisense strand to SEQ ID NO: 2030538
ucagugaccacaguagucc

SEQ ID NO: 2030540 - RNA, 19 nt, Artificial Sequence
  Description of Artificial Sequence: Synthetic oligonucleotide
  Sense strand starting at position 3048 of SEQ ID NO: 1881258
ugugauucccagugucaca

SEQ ID NO: 2030541 - RNA, 19 nt, Artificial Sequence
  Description of Artificial Sequence: Synthetic oligonucleotide
  Antisense strand to SEQ ID NO: 2030540
ugugacacugggaaucaca

SEQ ID NO: 2030542 - RNA, 19 nt, Artificial Sequence
  Description of Artificial Sequence: Synthetic oligonucleotide
  Sense strand starting at position 3264 of SEQ ID NO: 1881258
acuggaucaucugaaagga

SEQ ID NO: 2030543 - RNA, 19 nt, Artificial Sequence
  Description of Artificial Sequence: Synthetic oligonucleotide
  Antisense strand to SEQ ID NO: 2030542
uccuuucagaugauccagu

SEQ ID NO: 2030544 - RNA, 19 nt, Artificial Sequence
  Description of Artificial Sequence: Synthetic oligonucleotide
  Sense strand starting at position 3327 of SEQ ID NO: 1881258
ccaguaagagcugggaaga

SEQ ID NO: 2030545 - RNA, 19 nt, Artificial Sequence
  Description of Artificial Sequence: Synthetic oligonucleotide
  Antisense strand to SEQ ID NO: 2030544
ucuucccagcucuuacugg

SEQ ID NO: 2030546 - RNA, 19 nt, Artificial Sequence
  Description of Artificial Sequence: Synthetic oligonucleotide
  Sense strand starting at position 3468 of SEQ ID NO: 1881258
augacuuagcucugagaaa

SEQ ID NO: 2030547 - RNA, 19 nt, Artificial Sequence
  Description of Artificial Sequence: Synthetic oligonucleotide
  Antisense strand to SEQ ID NO: 2030546
uuucucagagcuaagucau

SEQ ID NO: 2030548 - RNA, 19 nt, Artificial Sequence
  Description of Artificial Sequence: Synthetic oligonucleotide
  Sense strand starting at position 3574 of SEQ ID NO: 1881258
cuuccuugccgugauuacu

SEQ ID NO: 2030549 - RNA, 19 nt, Artificial Sequence
  Description of Artificial Sequence: Synthetic oligonucleotide
  Antisense strand to SEQ ID NO: 2030548
aguaaucacggcaaggaag

SEQ ID NO: 2030550 - RNA, 19 nt, Artificial Sequence
  Description of Artificial Sequence: Synthetic oligonucleotide
  Sense strand starting at position 3805 of SEQ ID NO: 1881258
gugggaaaguggguguuua

SEQ ID NO: 2030551 - RNA, 19 nt, Artificial Sequence
  Description of Artificial Sequence: Synthetic oligonucleotide
  Antisense strand to SEQ ID NO: 2030550
uaaacacccacuuucccac

SEQ ID NO: 2030552 - RNA, 19 nt, Artificial Sequence
  Description of Artificial Sequence: Synthetic oligonucleotide
  Sense strand starting at position 3809 of SEQ ID NO: 1881258
gaaaguggguguuuacuaa

SEQ ID NO: 2030553 - RNA, 19 nt, Artificial Sequence
  Description of Artificial Sequence: Synthetic oligonucleotide
  Antisense strand to SEQ ID NO: 2030552
uuaguaaacacccacuuuc

SEQ ID NO: 2030554 - RNA, 19 nt, Artificial Sequence
  Description of Artificial Sequence: Synthetic oligonucleotide
  Sense strand starting at position 3955 of SEQ ID NO: 1881258
ugugucugcuucucuggaa

SEQ ID NO: 2030555 - RNA, 19 nt, Artificial Sequence
  Description of Artificial Sequence: Synthetic oligonucleotide
  Antisense strand to SEQ ID NO: 2030554
uuccagagaagcagacaca

SEQ ID NO: 2030556 - RNA, 19 nt, Artificial Sequence
  Description of Artificial Sequence: Synthetic oligonucleotide
  Sense strand starting at position 3956 of SEQ ID NO: 1881258
gugucugcuucucuggaaa

SEQ ID NO: 2030557 - RNA, 19 nt, Artificial Sequence
  Description of Artificial Sequence: Synthetic oligonucleotide
  Antisense strand to SEQ ID NO: 2030556
uuuccagagaagcagacac

SEQ ID NO: 2030558 - RNA, 19 nt, Artificial Sequence
  Description of Artificial Sequence: Synthetic oligonucleotide
  Sense strand starting at position 12 of SEQ ID NO: 1881259
cugugagucagauaaagca

SEQ ID NO: 2030559 - RNA, 19 nt, Artificial Sequence
  Description of Artificial Sequence: Synthetic oligonucleotide
  Antisense strand to SEQ ID NO: 2030558
ugcuuuaucugacucacag

SEQ ID NO: 2030560 - RNA, 19 nt, Artificial Sequence
  Description of Artificial Sequence: Synthetic oligonucleotide
  Sense strand starting at position 115 of SEQ ID NO: 1881259
cuggaaauuaguggccuuu

SEQ ID NO: 2030561 - RNA, 19 nt, Artificial Sequence
  Description of Artificial Sequence: Synthetic oligonucleotide
  Antisense strand to SEQ ID NO: 2030560
aaaggccacuaauuuccag

SEQ ID NO: 2030562 - RNA, 19 nt, Artificial Sequence
  Description of Artificial Sequence: Synthetic oligonucleotide
  Sense strand starting at position 277 of SEQ ID NO: 1881259
gugucauuaugagugugag

SEQ ID NO: 2030563 - RNA, 19 nt, Artificial Sequence
  Description of Artificial Sequence: Synthetic oligonucleotide
  Antisense strand to SEQ ID NO: 2030562
cucacacucauaaugacac

SEQ ID NO: 2030564 - RNA, 19 nt, Artificial Sequence
  Description of Artificial Sequence: Synthetic oligonucleotide
  Sense strand starting at position 396 of SEQ ID NO: 1881259
ggguaugaauuccuuguuu

SEQ ID NO: 2030565 - RNA, 19 nt, Artificial Sequence
  Description of Artificial Sequence: Synthetic oligonucleotide
  Antisense strand to SEQ ID NO: 2030564
aaacaaggaauucauaccc

SEQ ID NO: 2030566 - RNA, 19 nt, Artificial Sequence
  Description of Artificial Sequence: Synthetic oligonucleotide
  Sense strand starting at position 411 of SEQ ID NO: 1881259
guuucagaagaaggugauu

SEQ ID NO: 2030567 - RNA, 19 nt, Artificial Sequence
  Description of Artificial Sequence: Synthetic oligonucleotide
  Antisense strand to SEQ ID NO: 2030566
aaucaccuucuucugaaac

SEQ ID NO: 2030568 - RNA, 19 nt, Artificial Sequence
  Description of Artificial Sequence: Synthetic oligonucleotide
  Sense strand starting at position 452 of SEQ ID NO: 1881259
cuaauuuguugucacugau

SEQ ID NO: 2030569 - RNA, 19 nt, Artificial Sequence
  Description of Artificial Sequence: Synthetic oligonucleotide
  Antisense strand to SEQ ID NO: 2030568
aucagugacaacaaauuag

SEQ ID NO: 2030570 - RNA, 19 nt, Artificial Sequence
  Description of Artificial Sequence: Synthetic oligonucleotide
  Sense strand starting at position 474 of SEQ ID NO: 1881259
cgcacuuugcaacaagagu

SEQ ID NO: 2030571 - RNA, 19 nt, Artificial Sequence
  Description of Artificial Sequence: Synthetic oligonucleotide
  Antisense strand to SEQ ID NO: 2030570
acucuuguugcaaagugcg

SEQ ID NO: 2030572 - RNA, 19 nt, Artificial Sequence
  Description of Artificial Sequence: Synthetic oligonucleotide
  Sense strand starting at position 540 of SEQ ID NO: 1881259
aaacuagcaucugagggaa

SEQ ID NO: 2030573 - RNA, 19 nt, Artificial Sequence
  Description of Artificial Sequence: Synthetic oligonucleotide
  Antisense strand to SEQ ID NO: 2030572
uucccucagaugcuaguuu

SEQ ID NO: 2030574 - RNA, 19 nt, Artificial Sequence
  Description of Artificial Sequence: Synthetic oligonucleotide
  Sense strand starting at position 606 of SEQ ID NO: 1881259
cccuccauagguuguuaaa

SEQ ID NO: 2030575 - RNA, 19 nt, Artificial Sequence
  Description of Artificial Sequence: Synthetic oligonucleotide
  Antisense strand to SEQ ID NO: 2030574
uuuaacaaccuauggaggg

SEQ ID NO: 2030576 - RNA, 19 nt, Artificial Sequence
  Description of Artificial Sequence: Synthetic oligonucleotide
  Sense strand starting at position 608 of SEQ ID NO: 1881259
cuccauagguuguuaaaug

SEQ ID NO: 2030577 - RNA, 19 nt, Artificial Sequence
  Description of Artificial Sequence: Synthetic oligonucleotide
  Antisense strand to SEQ ID NO: 2030576
cauuuaacaaccuauggag

SEQ ID NO: 2030578 - RNA, 19 nt, Artificial Sequence
  Description of Artificial Sequence: Synthetic oligonucleotide
  Sense strand starting at position 629 of SEQ ID NO: 1881259
gcccuuuaugugcagguau

SEQ ID NO: 2030579 - RNA, 19 nt, Artificial Sequence
  Description of Artificial Sequence: Synthetic oligonucleotide
  Antisense strand to SEQ ID NO: 2030578
auaccugcacauaaagggc

SEQ ID NO: 2030580 - RNA, 19 nt, Artificial Sequence
  Description of Artificial Sequence: Synthetic oligonucleotide
  Sense strand starting at position 631 of SEQ ID NO: 1881259
ccuuuaugugcagguauaa

SEQ ID NO: 2030581 - RNA, 19 nt, Artificial Sequence
  Description of Artificial Sequence: Synthetic oligonucleotide
  Antisense strand to SEQ ID NO: 2030580
uuauaccugcacauaaagg

SEQ ID NO: 2030582 - RNA, 19 nt, Artificial Sequence
  Description of Artificial Sequence: Synthetic oligonucleotide
  Sense strand starting at position 755 of SEQ ID NO: 1881259
guucuuccacucuggaaac

SEQ ID NO: 2030583 - RNA, 19 nt, Artificial Sequence
  Description of Artificial Sequence: Synthetic oligonucleotide
  Antisense strand to SEQ ID NO: 2030582
guuuccagaguggaagaac

SEQ ID NO: 2030584 - RNA, 19 nt, Artificial Sequence
  Description of Artificial Sequence: Synthetic oligonucleotide
  Sense strand starting at position 942 of SEQ ID NO: 1881259
aaggaaggcuuacugaguu

SEQ ID NO: 2030585 - RNA, 19 nt, Artificial Sequence
  Description of Artificial Sequence: Synthetic oligonucleotide
  Antisense strand to SEQ ID NO: 2030584
aacucaguaagccuuccuu

SEQ ID NO: 2030586 - RNA, 19 nt, Artificial Sequence
  Description of Artificial Sequence: Synthetic oligonucleotide
  Sense strand starting at position 946 of SEQ ID NO: 1881259
aaggcuuacugaguuaaag

SEQ ID NO: 2030587 - RNA, 19 nt, Artificial Sequence
  Description of Artificial Sequence: Synthetic oligonucleotide
  Antisense strand to SEQ ID NO: 2030586
cuuuaacucaguaagccuu

SEQ ID NO: 2030588 - RNA, 19 nt, Artificial Sequence
  Description of Artificial Sequence: Synthetic oligonucleotide
  Sense strand starting at position 1315 of SEQ ID NO: 1881259
ucggccuccuucuuuauua

SEQ ID NO: 2030589 - RNA, 19 nt, Artificial Sequence
  Description of Artificial Sequence: Synthetic oligonucleotide
  Antisense strand to SEQ ID NO: 2030588
uaauaaagaaggaggccga

SEQ ID NO: 2030590 - RNA, 19 nt, Artificial Sequence
  Description of Artificial Sequence: Synthetic oligonucleotide
  Sense strand starting at position 1316 of SEQ ID NO: 1881259
cggccuccuucuuuauuaa

SEQ ID NO: 2030591 - RNA, 19 nt, Artificial Sequence
  Description of Artificial Sequence: Synthetic oligonucleotide
  Antisense strand to SEQ ID NO: 2030590
uuaauaaagaaggaggccg

SEQ ID NO: 2030592 - RNA, 19 nt, Artificial Sequence
  Description of Artificial Sequence: Synthetic oligonucleotide
  Sense strand starting at position 1467 of SEQ ID NO: 1881259
aggauuccacugugaagac

SEQ ID NO: 2030593 - RNA, 19 nt, Artificial Sequence
  Description of Artificial Sequence: Synthetic oligonucleotide
  Antisense strand to SEQ ID NO: 2030592
gucuucacaguggaauccu

SEQ ID NO: 2030594 - RNA, 19 nt, Artificial Sequence
  Description of Artificial Sequence: Synthetic oligonucleotide
  Sense strand starting at position 1506 of SEQ ID NO: 1881259
aggucuuucccuuagguau

SEQ ID NO: 2030595 - RNA, 19 nt, Artificial Sequence
  Description of Artificial Sequence: Synthetic oligonucleotide
  Antisense strand to SEQ ID NO: 2030594
auaccuaagggaaagaccu

SEQ ID NO: 2030596 - RNA, 19 nt, Artificial Sequence
  Description of Artificial Sequence: Synthetic oligonucleotide
  Sense strand starting at position 1604 of SEQ ID NO: 1881259
uguguaaacugcccauaaa

SEQ ID NO: 2030597 - RNA, 19 nt, Artificial Sequence
  Description of Artificial Sequence: Synthetic oligonucleotide
  Antisense strand to SEQ ID NO: 2030596
uuuaugggcaguuuacaca

SEQ ID NO: 2030598 - RNA, 19 nt, Artificial Sequence
  Description of Artificial Sequence: Synthetic oligonucleotide
  Sense strand starting at position 1769 of SEQ ID NO: 1881259
ugucuuacccagcagaaug

SEQ ID NO: 2030599 - RNA, 19 nt, Artificial Sequence
  Description of Artificial Sequence: Synthetic oligonucleotide
  Antisense strand to SEQ ID NO: 2030598
cauucugcuggguaagaca

SEQ ID NO: 2030600 - RNA, 19 nt, Artificial Sequence
  Description of Artificial Sequence: Synthetic oligonucleotide
  Sense strand starting at position 1933 of SEQ ID NO: 1881259
gcacguagccugggaacaa

SEQ ID NO: 2030601 - RNA, 19 nt, Artificial Sequence
  Description of Artificial Sequence: Synthetic oligonucleotide
  Antisense strand to SEQ ID NO: 2030600
uuguucccaggcuacgugc

SEQ ID NO: 2030602 - RNA, 19 nt, Artificial Sequence
  Description of Artificial Sequence: Synthetic oligonucleotide
  Sense strand starting at position 2055 of SEQ ID NO: 1881259
ggacuuagaaggugcuaau

SEQ ID NO: 2030603 - RNA, 19 nt, Artificial Sequence
  Description of Artificial Sequence: Synthetic oligonucleotide
  Antisense strand to SEQ ID NO: 2030602
auuagcaccuucuaagucc

SEQ ID NO: 2030604 - RNA, 19 nt, Artificial Sequence
  Description of Artificial Sequence: Synthetic oligonucleotide
  Sense strand starting at position 2067 of SEQ ID NO: 1881259
ugcuaauguuguccaaggu

SEQ ID NO: 2030605 - RNA, 19 nt, Artificial Sequence
  Description of Artificial Sequence: Synthetic oligonucleotide
  Antisense strand to SEQ ID NO: 2030604
accuuggacaacauuagca

SEQ ID NO: 2030606 - RNA, 19 nt, Artificial Sequence
  Description of Artificial Sequence: Synthetic oligonucleotide
  Sense strand starting at position 2201 of SEQ ID NO: 1881259
agaguccauuuacauuauu

SEQ ID NO: 2030607 - RNA, 19 nt, Artificial Sequence
  Description of Artificial Sequence: Synthetic oligonucleotide
  Antisense strand to SEQ ID NO: 2030606
aauaauguaaauggacucu

SEQ ID NO: 2030608 - RNA, 19 nt, Artificial Sequence
  Description of Artificial Sequence: Synthetic oligonucleotide
  Sense strand starting at position 2334 of SEQ ID NO: 1881259
guuacuuaaccaugauguc

SEQ ID NO: 2030609 - RNA, 19 nt, Artificial Sequence
  Description of Artificial Sequence: Synthetic oligonucleotide
  Antisense strand to SEQ ID NO: 2030608
gacaucaugguuaaguaac

SEQ ID NO: 2030610 - RNA, 19 nt, Artificial Sequence
  Description of Artificial Sequence: Synthetic oligonucleotide
  Sense strand starting at position 2713 of SEQ ID NO: 1881259
guaccuacaucucuguaau

SEQ ID NO: 2030611 - RNA, 19 nt, Artificial Sequence
  Description of Artificial Sequence: Synthetic oligonucleotide
  Antisense strand to SEQ ID NO: 2030610
auuacagagauguagguac

SEQ ID NO: 2030612 - RNA, 19 nt, Artificial Sequence
  Description of Artificial Sequence: Synthetic oligonucleotide
  Sense strand starting at position 2727 of SEQ ID NO: 1881259
guaauagaauucuacugaa

SEQ ID NO: 2030613 - RNA, 19 nt, Artificial Sequence
  Description of Artificial Sequence: Synthetic oligonucleotide
  Antisense strand to SEQ ID NO: 2030612
uucaguagaauucuauuac

SEQ ID NO: 2030614 - RNA, 19 nt, Artificial Sequence
  Description of Artificial Sequence: Synthetic oligonucleotide
  Sense strand starting at position 2730 of SEQ ID NO: 1881259
auagaauucuacugaagau

SEQ ID NO: 2030615 - RNA, 19 nt, Artificial Sequence
  Description of Artificial Sequence: Synthetic oligonucleotide
  Antisense strand to SEQ ID NO: 2030614
aucuucaguagaauucuau

SEQ ID NO: 2030616 - RNA, 19 nt, Artificial Sequence
  Description of Artificial Sequence: Synthetic oligonucleotide
  Sense strand starting at position 2803 of SEQ ID NO: 1881259
aaagguuaguuguuaucau

SEQ ID NO: 2030617 - RNA, 19 nt, Artificial Sequence
  Description of Artificial Sequence: Synthetic oligonucleotide
  Antisense strand to SEQ ID NO: 2030616
augauaacaacuaaccuuu

SEQ ID NO: 2030618 - RNA, 19 nt, Artificial Sequence
  Description of Artificial Sequence: Synthetic oligonucleotide
  Sense strand starting at position 2810 of SEQ ID NO: 1881259
aguuguuaucauugguguu

SEQ ID NO: 2030619 - RNA, 19 nt, Artificial Sequence
  Description of Artificial Sequence: Synthetic oligonucleotide
  Antisense strand to SEQ ID NO: 2030618
aacaccaaugauaacaacu

SEQ ID NO: 2030620 - RNA, 19 nt, Artificial Sequence
  Description of Artificial Sequence: Synthetic oligonucleotide
  Sense strand starting at position 2826 of SEQ ID NO: 1881259
guucuuugucugucucagu

SEQ ID NO: 2030621 - RNA, 19 nt, Artificial Sequence
  Description of Artificial Sequence: Synthetic oligonucleotide
  Antisense strand to SEQ ID NO: 2030620
acugagacagacaaagaac

SEQ ID NO: 2030622 - RNA, 19 nt, Artificial Sequence
  Description of Artificial Sequence: Synthetic oligonucleotide
  Sense strand starting at position 2860 of SEQ ID NO: 1881259
ucagguguccuaggugauu

SEQ ID NO: 2030623 - RNA, 19 nt, Artificial Sequence
  Description of Artificial Sequence: Synthetic oligonucleotide
  Antisense strand to SEQ ID NO: 2030622
aaucaccuaggacaccuga

SEQ ID NO: 2030624 - RNA, 19 nt, Artificial Sequence
  Description of Artificial Sequence: Synthetic oligonucleotide
  Sense strand starting at position 2972 of SEQ ID NO: 1881259
ggcugcuguccucauggau

SEQ ID NO: 2030625 - RNA, 19 nt, Artificial Sequence
  Description of Artificial Sequence: Synthetic oligonucleotide
  Antisense strand to SEQ ID NO: 2030624
auccaugaggacagcagcc

SEQ ID NO: 2030626 - RNA, 19 nt, Artificial Sequence
  Description of Artificial Sequence: Synthetic oligonucleotide
  Sense strand starting at position 3111 of SEQ ID NO: 1881259
agacaccugccuugguauu

SEQ ID NO: 2030627 - RNA, 19 nt, Artificial Sequence
  Description of Artificial Sequence: Synthetic oligonucleotide
  Antisense strand to SEQ ID NO: 2030626
aauaccaaggcaggugucu

SEQ ID NO: 2030628 - RNA, 19 nt, Artificial Sequence
  Description of Artificial Sequence: Synthetic oligonucleotide
  Sense strand starting at position 3121 of SEQ ID NO: 1881259
cuugguauucacggaguua

SEQ ID NO: 2030629 - RNA, 19 nt, Artificial Sequence
  Description of Artificial Sequence: Synthetic oligonucleotide
  Antisense strand to SEQ ID NO: 2030628
uaacuccgugaauaccaag

SEQ ID NO: 2030630 - RNA, 19 nt, Artificial Sequence
  Description of Artificial Sequence: Synthetic oligonucleotide
  Sense strand starting at position 3163 of SEQ ID NO: 1881259
ggaaacaauugcgaaucaa

SEQ ID NO: 2030631 - RNA, 19 nt, Artificial Sequence
  Description of Artificial Sequence: Synthetic oligonucleotide
  Antisense strand to SEQ ID NO: 2030630
uugauucgcaauuguuucc

SEQ ID NO: 2030632 - RNA, 19 nt, Artificial Sequence
  Description of Artificial Sequence: Synthetic oligonucleotide
  Sense strand starting at position 3278 of SEQ ID NO: 1881259
auuacaauaugugucacau

SEQ ID NO: 2030633 - RNA, 19 nt, Artificial Sequence
  Description of Artificial Sequence: Synthetic oligonucleotide
  Antisense strand to SEQ ID NO: 2030632
augugacacauauuguaau

SEQ ID NO: 2030634 - RNA, 19 nt, Artificial Sequence
  Description of Artificial Sequence: Synthetic oligonucleotide
  Sense strand starting at position 3315 of SEQ ID NO: 1881259
acaagauacugggagaauu

SEQ ID NO: 2030635 - RNA, 19 nt, Artificial Sequence
  Description of Artificial Sequence: Synthetic oligonucleotide
  Antisense strand to SEQ ID NO: 2030634
aauucucccaguaucuugu

SEQ ID NO: 2030636 - RNA, 19 nt, Artificial Sequence
  Description of Artificial Sequence: Synthetic oligonucleotide
  Sense strand starting at position 3491 of SEQ ID NO: 1881259
ccaggaaucuagccgacau

SEQ ID NO: 2030637 - RNA, 19 nt, Artificial Sequence
  Description of Artificial Sequence: Synthetic oligonucleotide
  Antisense strand to SEQ ID NO: 2030636
augucggcuagauuccugg

SEQ ID NO: 2030638 - RNA, 19 nt, Artificial Sequence
  Description of Artificial Sequence: Synthetic oligonucleotide
  Sense strand starting at position 254 of SEQ ID NO: 1881260
agcauauaucccuguauca

SEQ ID NO: 2030639 - RNA, 19 nt, Artificial Sequence
  Description of Artificial Sequence: Synthetic oligonucleotide
  Antisense strand to SEQ ID NO: 2030638
ugauacagggauauaugcu

SEQ ID NO: 2030640 - RNA, 19 nt, Artificial Sequence
  Description of Artificial Sequence: Synthetic oligonucleotide
  Sense strand starting at position 814 of SEQ ID NO: 1881260
agcgucuaucccuguaaca

SEQ ID NO: 2030641 - RNA, 19 nt, Artificial Sequence
  Description of Artificial Sequence: Synthetic oligonucleotide
  Antisense strand to SEQ ID NO: 2030640
uguuacagggauagacgcu

SEQ ID NO: 2030642 - RNA, 19 nt, Artificial Sequence
  Description of Artificial Sequence: Synthetic oligonucleotide
  Sense strand starting at position 1121 of SEQ ID NO: 1881260
ggcaucuaucccuguaaca

SEQ ID NO: 2030643 - RNA, 19 nt, Artificial Sequence
  Description of Artificial Sequence: Synthetic oligonucleotide
  Antisense strand to SEQ ID NO: 2030642
uguuacagggauagaugcc

SEQ ID NO: 2030644 - RNA, 19 nt, Artificial Sequence
  Description of Artificial Sequence: Synthetic oligonucleotide
  Sense strand starting at position 1430 of SEQ ID NO: 1881260
cagcauguaucccugugau

SEQ ID NO: 2030645 - RNA, 19 nt, Artificial Sequence
  Description of Artificial Sequence: Synthetic oligonucleotide
  Antisense strand to SEQ ID NO: 2030644
aucacagggauacaugcug

SEQ ID NO: 2030646 - RNA, 19 nt, Artificial Sequence
  Description of Artificial Sequence: Synthetic oligonucleotide
  Sense strand starting at position 1675 of SEQ ID NO: 1881260
gauguuccugcaugacgua

SEQ ID NO: 2030647 - RNA, 19 nt, Artificial Sequence
  Description of Artificial Sequence: Synthetic oligonucleotide
  Antisense strand to SEQ ID NO: 2030646
uacgucaugcaggaacauc

SEQ ID NO: 2030648 - RNA, 19 nt, Artificial Sequence
  Description of Artificial Sequence: Synthetic oligonucleotide
  Sense strand starting at position 1687 of SEQ ID NO: 1881260
ugacguaauggucgucauu

SEQ ID NO: 2030649 - RNA, 19 nt, Artificial Sequence
  Description of Artificial Sequence: Synthetic oligonucleotide
  Antisense strand to SEQ ID NO: 2030648
aaugacgaccauuacguca

SEQ ID NO: 2030650 - RNA, 19 nt, Artificial Sequence
  Description of Artificial Sequence: Synthetic oligonucleotide
  Sense strand starting at position 1689 of SEQ ID NO: 1881260
acguaauggucgucauucu

SEQ ID NO: 2030651 - RNA, 19 nt, Artificial Sequence
  Description of Artificial Sequence: Synthetic oligonucleotide
  Antisense strand to SEQ ID NO: 2030650
agaaugacgaccauuacgu

SEQ ID NO: 2030652 - RNA, 19 nt, Artificial Sequence
  Description of Artificial Sequence: Synthetic oligonucleotide
  Sense strand starting at position 1697 of SEQ ID NO: 1881260
gucgucauucugagguagu

SEQ ID NO: 2030653 - RNA, 19 nt, Artificial Sequence
  Description of Artificial Sequence: Synthetic oligonucleotide
  Antisense strand to SEQ ID NO: 2030652
acuaccucagaaugacgac

SEQ ID NO: 2030654 - RNA, 19 nt, Artificial Sequence
  Description of Artificial Sequence: Synthetic oligonucleotide
  Sense strand starting at position 1698 of SEQ ID NO: 1881260
ucgucauucugagguagug

SEQ ID NO: 2030655 - RNA, 19 nt, Artificial Sequence
  Description of Artificial Sequence: Synthetic oligonucleotide
  Antisense strand to SEQ ID NO: 2030654
cacuaccucagaaugacga

SEQ ID NO: 2030656 - RNA, 19 nt, Artificial Sequence
  Description of Artificial Sequence: Synthetic oligonucleotide
  Sense strand starting at position 1707 of SEQ ID NO: 1881260
ugagguagugcucgcauca

SEQ ID NO: 2030657 - RNA, 19 nt, Artificial Sequence
  Description of Artificial Sequence: Synthetic oligonucleotide
  Antisense strand to SEQ ID NO: 2030656
ugaugcgagcacuaccuca

SEQ ID NO: 2030658 - RNA, 19 nt, Artificial Sequence
  Description of Artificial Sequence: Synthetic oligonucleotide
  Sense strand starting at position 1780 of SEQ ID NO: 1881260
cagccaggucacggugaau

SEQ ID NO: 2030659 - RNA, 19 nt, Artificial Sequence
  Description of Artificial Sequence: Synthetic oligonucleotide
  Antisense strand to SEQ ID NO: 2030658
auucaccgugaccuggcug

SEQ ID NO: 2030660 - RNA, 19 nt, Artificial Sequence
  Description of Artificial Sequence: Synthetic oligonucleotide
  Sense strand starting at position 1783 of SEQ ID NO: 1881260
ccaggucacggugaauaaa

SEQ ID NO: 2030661 - RNA, 19 nt, Artificial Sequence
  Description of Artificial Sequence: Synthetic oligonucleotide
  Antisense strand to SEQ ID NO: 2030660
uuuauucaccgugaccugg

SEQ ID NO: 2030662 - RNA, 19 nt, Artificial Sequence
  Description of Artificial Sequence: Synthetic oligonucleotide
  Sense strand starting at position 2152 of SEQ ID NO: 1881260
agaggcaguggcuagaaau

SEQ ID NO: 2030663 - RNA, 19 nt, Artificial Sequence
  Description of Artificial Sequence: Synthetic oligonucleotide
  Antisense strand to SEQ ID NO: 2030662
auuucuagccacugccucu

SEQ ID NO: 2030664 - RNA, 19 nt, Artificial Sequence
  Description of Artificial Sequence: Synthetic oligonucleotide
  Sense strand starting at position 2367 of SEQ ID NO: 1881260
gcaggaauaucgcgugaac

SEQ ID NO: 2030665 - RNA, 19 nt, Artificial Sequence
  Description of Artificial Sequence: Synthetic oligonucleotide
  Antisense strand to SEQ ID NO: 2030664
guucacgcgauauuccugc

SEQ ID NO: 2030666 - RNA, 19 nt, Artificial Sequence
  Description of Artificial Sequence: Synthetic oligonucleotide
  Sense strand starting at position 2370 of SEQ ID NO: 1881260
ggaauaucgcgugaaccca

SEQ ID NO: 2030667 - RNA, 19 nt, Artificial Sequence
  Description of Artificial Sequence: Synthetic oligonucleotide
  Antisense strand to SEQ ID NO: 2030666
uggguucacgcgauauucc

SEQ ID NO: 2030668 - RNA, 19 nt, Artificial Sequence
  Description of Artificial Sequence: Synthetic oligonucleotide
  Sense strand starting at position 2526 of SEQ ID NO: 1881260
gggaguaacucucuugaca

SEQ ID NO: 2030669 - RNA, 19 nt, Artificial Sequence
  Description of Artificial Sequence: Synthetic oligonucleotide
  Antisense strand to SEQ ID NO: 2030668
ugucaagagaguuacuccc

SEQ ID NO: 2030670 - RNA, 19 nt, Artificial Sequence
  Description of Artificial Sequence: Synthetic oligonucleotide
  Sense strand starting at position 2802 of SEQ ID NO: 1881260
augagguuucgguggucga

SEQ ID NO: 2030671 - RNA, 19 nt, Artificial Sequence
  Description of Artificial Sequence: Synthetic oligonucleotide
  Antisense strand to SEQ ID NO: 2030670
ucgaccaccgaaaccucau

SEQ ID NO: 2030672 - RNA, 19 nt, Artificial Sequence
  Description of Artificial Sequence: Synthetic oligonucleotide
  Sense strand starting at position 2833 of SEQ ID NO: 1881260
cauugaccucccggaugaa

SEQ ID NO: 2030673 - RNA, 19 nt, Artificial Sequence
  Description of Artificial Sequence: Synthetic oligonucleotide
  Antisense strand to SEQ ID NO: 2030672
uucauccgggaggucaaug

SEQ ID NO: 2030674 - RNA, 19 nt, Artificial Sequence
  Description of Artificial Sequence: Synthetic oligonucleotide
  Sense strand starting at position 2842 of SEQ ID NO: 1881260
cccggaugaagucguccau

SEQ ID NO: 2030675 - RNA, 19 nt, Artificial Sequence
  Description of Artificial Sequence: Synthetic oligonucleotide
  Antisense strand to SEQ ID NO: 2030674
auggacgacuucauccggg

SEQ ID NO: 2030676 - RNA, 19 nt, Artificial Sequence
  Description of Artificial Sequence: Synthetic oligonucleotide
  Sense strand starting at position 3021 of SEQ ID NO: 1881260
uccucaucuggguggguaa

SEQ ID NO: 2030677 - RNA, 19 nt, Artificial Sequence
  Description of Artificial Sequence: Synthetic oligonucleotide
  Antisense strand to SEQ ID NO: 2030676
uuacccacccagaugagga

SEQ ID NO: 2030678 - RNA, 19 nt, Artificial Sequence
  Description of Artificial Sequence: Synthetic oligonucleotide
  Sense strand starting at position 3183 of SEQ ID NO: 1881260
gauaaccaguaugaugaga

SEQ ID NO: 2030679 - RNA, 19 nt, Artificial Sequence
  Description of Artificial Sequence: Synthetic oligonucleotide
  Antisense strand to SEQ ID NO: 2030678
ucucaucauacugguuauc

SEQ ID NO: 2030680 - RNA, 19 nt, Artificial Sequence
  Description of Artificial Sequence: Synthetic oligonucleotide
  Sense strand starting at position 3185 of SEQ ID NO: 1881260
uaaccaguaugaugagaga

SEQ ID NO: 2030681 - RNA, 19 nt, Artificial Sequence
  Description of Artificial Sequence: Synthetic oligonucleotide
  Antisense strand to SEQ ID NO: 2030680
ucucucaucauacugguua

SEQ ID NO: 2030682 - RNA, 19 nt, Artificial Sequence
  Description of Artificial Sequence: Synthetic oligonucleotide
  Sense strand starting at position 3188 of SEQ ID NO: 1881260
ccaguaugaugagagaaua

SEQ ID NO: 2030683 - RNA, 19 nt, Artificial Sequence
  Description of Artificial Sequence: Synthetic oligonucleotide
  Antisense strand to SEQ ID NO: 2030682
uauucucucaucauacugg

SEQ ID NO: 2030684 - RNA, 19 nt, Artificial Sequence
  Description of Artificial Sequence: Synthetic oligonucleotide
  Sense strand starting at position 3421 of SEQ ID NO: 1881260
auugcucaggcuggucaua

SEQ ID NO: 2030685 - RNA, 19 nt, Artificial Sequence
  Description of Artificial Sequence: Synthetic oligonucleotide
  Antisense strand to SEQ ID NO: 2030684
uaugaccagccugagcaau

SEQ ID NO: 2030686 - RNA, 19 nt, Artificial Sequence
  Description of Artificial Sequence: Synthetic oligonucleotide
  Sense strand starting at position 3481 of SEQ ID NO: 1881260
cuguaaauguaaugccaaa

SEQ ID NO: 2030687 - RNA, 19 nt, Artificial Sequence
  Description of Artificial Sequence: Synthetic oligonucleotide
  Antisense strand to SEQ ID NO: 2030686
uuuggcauuacauuuacag

SEQ ID NO: 2030688 - RNA, 19 nt, Artificial Sequence
  Description of Artificial Sequence: Synthetic oligonucleotide
  Sense strand starting at position 3588 of SEQ ID NO: 1881260
cacugaguggacggagaau

SEQ ID NO: 2030689 - RNA, 19 nt, Artificial Sequence
  Description of Artificial Sequence: Synthetic oligonucleotide
  Antisense strand to SEQ ID NO: 2030688
auucuccguccacucagug

SEQ ID NO: 2030690 - RNA, 19 nt, Artificial Sequence
  Description of Artificial Sequence: Synthetic oligonucleotide
  Sense strand starting at position 3640 of SEQ ID NO: 1881260
acgugaucugagcaguaag

SEQ ID NO: 2030691 - RNA, 19 nt, Artificial Sequence
  Description of Artificial Sequence: Synthetic oligonucleotide
  Antisense strand to SEQ ID NO: 2030690
cuuacugcucagaucacgu

SEQ ID NO: 2030692 - RNA, 19 nt, Artificial Sequence
  Description of Artificial Sequence: Synthetic oligonucleotide
  Sense strand starting at position 3694 of SEQ ID NO: 1881260
acuguaugcuguggugaca

SEQ ID NO: 2030693 - RNA, 19 nt, Artificial Sequence
  Description of Artificial Sequence: Synthetic oligonucleotide
  Antisense strand to SEQ ID NO: 2030692
ugucaccacagcauacagu

SEQ ID NO: 2030694 - RNA, 19 nt, Artificial Sequence
  Description of Artificial Sequence: Synthetic oligonucleotide
  Sense strand starting at position 3843 of SEQ ID NO: 1881260
uccucugaguggugggauu

SEQ ID NO: 2030695 - RNA, 19 nt, Artificial Sequence
  Description of Artificial Sequence: Synthetic oligonucleotide
  Antisense strand to SEQ ID NO: 2030694
aaucccaccacucagagga

SEQ ID NO: 2030696 - RNA, 19 nt, Artificial Sequence
  Description of Artificial Sequence: Synthetic oligonucleotide
  Sense strand starting at position 6 of SEQ ID NO: 1881261
cuucuuccacucgacagau

SEQ ID NO: 2030697 - RNA, 19 nt, Artificial Sequence
  Description of Artificial Sequence: Synthetic oligonucleotide
  Antisense strand to SEQ ID NO: 2030696
aucugucgaguggaagaag

SEQ ID NO: 2030698 - RNA, 19 nt, Artificial Sequence
  Description of Artificial Sequence: Synthetic oligonucleotide
  Sense strand starting at position 24 of SEQ ID NO: 1881261
ugggaacacugaggucuua

SEQ ID NO: 2030699 - RNA, 19 nt, Artificial Sequence
  Description of Artificial Sequence: Synthetic oligonucleotide
  Antisense strand to SEQ ID NO: 2030698
uaagaccucaguguuccca

SEQ ID NO: 2030700 - RNA, 19 nt, Artificial Sequence
  Description of Artificial Sequence: Synthetic oligonucleotide
  Sense strand starting at position 36 of SEQ ID NO: 1881261
ggucuuacgccucagguca

SEQ ID NO: 2030701 - RNA, 19 nt, Artificial Sequence
  Description of Artificial Sequence: Synthetic oligonucleotide
  Antisense strand to SEQ ID NO: 2030700
ugaccugaggcguaagacc

SEQ ID NO: 2030702 - RNA, 19 nt, Artificial Sequence
  Description of Artificial Sequence: Synthetic oligonucleotide
  Sense strand starting at position 479 of SEQ ID NO: 1881261
cagcauguuuggguuguga

SEQ ID NO: 2030703 - RNA, 19 nt, Artificial Sequence
  Description of Artificial Sequence: Synthetic oligonucleotide
  Antisense strand to SEQ ID NO: 2030702
ucacaacccaaacaugcug

SEQ ID NO: 2030704 - RNA, 19 nt, Artificial Sequence
  Description of Artificial Sequence: Synthetic oligonucleotide
  Sense strand starting at position 481 of SEQ ID NO: 1881261
gcauguuuggguugugaag

SEQ ID NO: 2030705 - RNA, 19 nt, Artificial Sequence
  Description of Artificial Sequence: Synthetic oligonucleotide
  Antisense strand to SEQ ID NO: 2030704
cuucacaacccaaacaugc

SEQ ID NO: 2030706 - RNA, 19 nt, Artificial Sequence
  Description of Artificial Sequence: Synthetic oligonucleotide
  Sense strand starting at position 483 of SEQ ID NO: 1881261
auguuuggguugugaagag

SEQ ID NO: 2030707 - RNA, 19 nt, Artificial Sequence
  Description of Artificial Sequence: Synthetic oligonucleotide
  Antisense strand to SEQ ID NO: 2030706
cucuucacaacccaaacau

SEQ ID NO: 2030708 - RNA, 19 nt, Artificial Sequence
  Description of Artificial Sequence: Synthetic oligonucleotide
  Sense strand starting at position 646 of SEQ ID NO: 1881261
gacccugaccugugccaau

SEQ ID NO: 2030709 - RNA, 19 nt, Artificial Sequence
  Description of Artificial Sequence: Synthetic oligonucleotide
  Antisense strand to SEQ ID NO: 2030708
auuggcacaggucaggguc

SEQ ID NO: 2030710 - RNA, 19 nt, Artificial Sequence
  Description of Artificial Sequence: Synthetic oligonucleotide
  Sense strand starting at position 977 of SEQ ID NO: 1881261
agaacccugcccugagaau

SEQ ID NO: 2030711 - RNA, 19 nt, Artificial Sequence
  Description of Artificial Sequence: Synthetic oligonucleotide
  Antisense strand to SEQ ID NO: 2030710
auucucagggcaggguucu

SEQ ID NO: 2030712 - RNA, 19 nt, Artificial Sequence
  Description of Artificial Sequence: Synthetic oligonucleotide
  Sense strand starting at position 1002 of SEQ ID NO: 1881261
ggagaucagccuugcccua

SEQ ID NO: 2030713 - RNA, 19 nt, Artificial Sequence
  Description of Artificial Sequence: Synthetic oligonucleotide
  Antisense strand to SEQ ID NO: 2030712
uagggcaaggcugaucucc

SEQ ID NO: 2030714 - RNA, 19 nt, Artificial Sequence
  Description of Artificial Sequence: Synthetic oligonucleotide
  Sense strand starting at position 1035 of SEQ ID NO: 1881261
ggaaacaagccuugucuua

SEQ ID NO: 2030715 - RNA, 19 nt, Artificial Sequence
  Description of Artificial Sequence: Synthetic oligonucleotide
  Antisense strand to SEQ ID NO: 2030714
uaagacaaggcuuguuucc

SEQ ID NO: 2030716 - RNA, 19 nt, Artificial Sequence
  Description of Artificial Sequence: Synthetic oligonucleotide
  Sense strand starting at position 1040 of SEQ ID NO: 1881261
caagccuugucuuaugaug

SEQ ID NO: 2030717 - RNA, 19 nt, Artificial Sequence
  Description of Artificial Sequence: Synthetic oligonucleotide
  Antisense strand to SEQ ID NO: 2030716
caucauaagacaaggcuug

SEQ ID NO: 2030718 - RNA, 19 nt, Artificial Sequence
  Description of Artificial Sequence: Synthetic oligonucleotide
  Sense strand starting at position 1042 of SEQ ID NO: 1881261
agccuugucuuaugaugga

SEQ ID NO: 2030719 - RNA, 19 nt, Artificial Sequence
  Description of Artificial Sequence: Synthetic oligonucleotide
  Antisense strand to SEQ ID NO: 2030718
uccaucauaagacaaggcu

SEQ ID NO: 2030720 - RNA, 19 nt, Artificial Sequence
  Description of Artificial Sequence: Synthetic oligonucleotide
  Sense strand starting at position 1045 of SEQ ID NO: 1881261
cuugucuuaugauggaaac

SEQ ID NO: 2030721 - RNA, 19 nt, Artificial Sequence
  Description of Artificial Sequence: Synthetic oligonucleotide
  Antisense strand to SEQ ID NO: 2030720
guuuccaucauaagacaag

SEQ ID NO: 2030722 - RNA, 19 nt, Artificial Sequence
  Description of Artificial Sequence: Synthetic oligonucleotide
  Sense strand starting at position 1047 of SEQ ID NO: 1881261
ugucuuaugauggaaacgu

SEQ ID NO: 2030723 - RNA, 19 nt, Artificial Sequence
  Description of Artificial Sequence: Synthetic oligonucleotide
  Antisense strand to SEQ ID NO: 2030722
acguuuccaucauaagaca

SEQ ID NO: 2030724 - RNA, 19 nt, Artificial Sequence
  Description of Artificial Sequence: Synthetic oligonucleotide
  Sense strand starting at position 1156 of SEQ ID NO: 1881261
agcagaagucccugggcua

SEQ ID NO: 2030725 - RNA, 19 nt, Artificial Sequence
  Description of Artificial Sequence: Synthetic oligonucleotide
  Antisense strand to SEQ ID NO: 2030724
uagcccagggacuucugcu

SEQ ID NO: 2030726 - RNA, 19 nt, Artificial Sequence
  Description of Artificial Sequence: Synthetic oligonucleotide
  Sense strand starting at position 1697 of SEQ ID NO: 1881261
gucguucugccgggacgau

SEQ ID NO: 2030727 - RNA, 19 nt, Artificial Sequence
  Description of Artificial Sequence: Synthetic oligonucleotide
  Antisense strand to SEQ ID NO: 2030726
aucgucccggcagaacgac

SEQ ID NO: 2030728 - RNA, 19 nt, Artificial Sequence
  Description of Artificial Sequence: Synthetic oligonucleotide
  Sense strand starting at position 2478 of SEQ ID NO: 1881261
agauuacagucagagccua

SEQ ID NO: 2030729 - RNA, 19 nt, Artificial Sequence
  Description of Artificial Sequence: Synthetic oligonucleotide
  Antisense strand to SEQ ID NO: 2030728
uaggcucugacuguaaucu

SEQ ID NO: 2030730 - RNA, 19 nt, Artificial Sequence
  Description of Artificial Sequence: Synthetic oligonucleotide
  Sense strand starting at position 2658 of SEQ ID NO: 1881261
accaucaugccggacuaau

SEQ ID NO: 2030731 - RNA, 19 nt, Artificial Sequence
  Description of Artificial Sequence: Synthetic oligonucleotide
  Antisense strand to SEQ ID NO: 2030730
auuaguccggcaugauggu

SEQ ID NO: 2030732 - RNA, 19 nt, Artificial Sequence
  Description of Artificial Sequence: Synthetic oligonucleotide
  Sense strand starting at position 3147 of SEQ ID NO: 1881261
agcccaggcugguaugaaa

SEQ ID NO: 2030733 - RNA, 19 nt, Artificial Sequence
  Description of Artificial Sequence: Synthetic oligonucleotide
  Antisense strand to SEQ ID NO: 2030732
uuucauaccagccugggcu

SEQ ID NO: 2030734 - RNA, 19 nt, Artificial Sequence
  Description of Artificial Sequence: Synthetic oligonucleotide
  Sense strand starting at position 3158 of SEQ ID NO: 1881261
guaugaaacuccugucuuc

SEQ ID NO: 2030735 - RNA, 19 nt, Artificial Sequence
  Description of Artificial Sequence: Synthetic oligonucleotide
  Antisense strand to SEQ ID NO: 2030734
gaagacaggaguuucauac

SEQ ID NO: 2030736 - RNA, 19 nt, Artificial Sequence
  Description of Artificial Sequence: Synthetic oligonucleotide
  Sense strand starting at position 3297 of SEQ ID NO: 1881261
cauugcuagcucugcaagu

SEQ ID NO: 2030737 - RNA, 19 nt, Artificial Sequence
  Description of Artificial Sequence: Synthetic oligonucleotide
  Antisense strand to SEQ ID NO: 2030736
acuugcagagcuagcaaug

SEQ ID NO: 2030738 - RNA, 19 nt, Artificial Sequence
  Description of Artificial Sequence: Synthetic oligonucleotide
  Sense strand starting at position 3313 of SEQ ID NO: 1881261
agucuauuccuuugcuugu

SEQ ID NO: 2030739 - RNA, 19 nt, Artificial Sequence
  Description of Artificial Sequence: Synthetic oligonucleotide
  Antisense strand to SEQ ID NO: 2030738
acaagcaaaggaauagacu

SEQ ID NO: 2030740 - RNA, 19 nt, Artificial Sequence
  Description of Artificial Sequence: Synthetic oligonucleotide
  Sense strand starting at position 3388 of SEQ ID NO: 1881261
cuggaaugcucaucccuaa

SEQ ID NO: 2030741 - RNA, 19 nt, Artificial Sequence
  Description of Artificial Sequence: Synthetic oligonucleotide
  Antisense strand to SEQ ID NO: 2030740
uuagggaugagcauuccag

SEQ ID NO: 2030742 - RNA, 19 nt, Artificial Sequence
  Description of Artificial Sequence: Synthetic oligonucleotide
  Sense strand starting at position 3420 of SEQ ID NO: 1881261
gcugucuugugcuugggaa

SEQ ID NO: 2030743 - RNA, 19 nt, Artificial Sequence
  Description of Artificial Sequence: Synthetic oligonucleotide
  Antisense strand to SEQ ID NO: 2030742
uucccaagcacaagacagc

SEQ ID NO: 2030744 - RNA, 19 nt, Artificial Sequence
  Description of Artificial Sequence: Synthetic oligonucleotide
  Sense strand starting at position 3422 of SEQ ID NO: 1881261
ugucuugugcuugggaauu

SEQ ID NO: 2030745 - RNA, 19 nt, Artificial Sequence
  Description of Artificial Sequence: Synthetic oligonucleotide
  Antisense strand to SEQ ID NO: 2030744
aauucccaagcacaagaca

SEQ ID NO: 2030746 - RNA, 19 nt, Artificial Sequence
  Description of Artificial Sequence: Synthetic oligonucleotide
  Sense strand starting at position 3433 of SEQ ID NO: 1881261
ugggaauuagcucauacuc

SEQ ID NO: 2030747 - RNA, 19 nt, Artificial Sequence
  Description of Artificial Sequence: Synthetic oligonucleotide
  Antisense strand to SEQ ID NO: 2030746
gaguaugagcuaauuccca

SEQ ID NO: 2030748 - RNA, 19 nt, Artificial Sequence
  Description of Artificial Sequence: Synthetic oligonucleotide
  Sense strand starting at position 3539 of SEQ ID NO: 1881261
ggccauuggacuugaucuu

SEQ ID NO: 2030749 - RNA, 19 nt, Artificial Sequence
  Description of Artificial Sequence: Synthetic oligonucleotide
  Antisense strand to SEQ ID NO: 2030748
aagaucaaguccaauggcc

SEQ ID NO: 2030750 - RNA, 19 nt, Artificial Sequence
  Description of Artificial Sequence: Synthetic oligonucleotide
  Sense strand starting at position 3540 of SEQ ID NO: 1881261
gccauuggacuugaucuua

SEQ ID NO: 2030751 - RNA, 19 nt, Artificial Sequence
  Description of Artificial Sequence: Synthetic oligonucleotide
  Antisense strand to SEQ ID NO: 2030750
uaagaucaaguccaauggc

SEQ ID NO: 2030752 - RNA, 19 nt, Artificial Sequence
  Description of Artificial Sequence: Synthetic oligonucleotide
  Sense strand starting at position 3545 of SEQ ID NO: 1881261
uggacuugaucuuaucaug

SEQ ID NO: 2030753 - RNA, 19 nt, Artificial Sequence
  Description of Artificial Sequence: Synthetic oligonucleotide
  Antisense strand to SEQ ID NO: 2030752
caugauaagaucaagucca

SEQ ID NO: 2030754 - RNA, 19 nt, Artificial Sequence
  Description of Artificial Sequence: Synthetic oligonucleotide
  Sense strand starting at position 3548 of SEQ ID NO: 1881261
acuugaucuuaucauguau

SEQ ID NO: 2030755 - RNA, 19 nt, Artificial Sequence
  Description of Artificial Sequence: Synthetic oligonucleotide
  Antisense strand to SEQ ID NO: 2030754
auacaugauaagaucaagu

SEQ ID NO: 2030756 - RNA, 19 nt, Artificial Sequence
  Description of Artificial Sequence: Synthetic oligonucleotide
  Sense strand starting at position 3550 of SEQ ID NO: 1881261
uugaucuuaucauguaugu

SEQ ID NO: 2030757 - RNA, 19 nt, Artificial Sequence
  Description of Artificial Sequence: Synthetic oligonucleotide
  Antisense strand to SEQ ID NO: 2030756
acauacaugauaagaucaa

SEQ ID NO: 2030758 - RNA, 19 nt, Artificial Sequence
  Description of Artificial Sequence: Synthetic oligonucleotide
  Sense strand starting at position 3554 of SEQ ID NO: 1881261
ucuuaucauguaugugauc

SEQ ID NO: 2030759 - RNA, 19 nt, Artificial Sequence
  Description of Artificial Sequence: Synthetic oligonucleotide
  Antisense strand to SEQ ID NO: 2030758
gaucacauacaugauaaga

SEQ ID NO: 2030760 - RNA, 19 nt, Artificial Sequence
  Description of Artificial Sequence: Synthetic oligonucleotide
  Sense strand starting at position 3559 of SEQ ID NO: 1881261
ucauguaugugaucuguga

SEQ ID NO: 2030761 - RNA, 19 nt, Artificial Sequence
  Description of Artificial Sequence: Synthetic oligonucleotide
  Antisense strand to SEQ ID NO: 2030760
ucacagaucacauacauga

SEQ ID NO: 2030762 - RNA, 19 nt, Artificial Sequence
  Description of Artificial Sequence: Synthetic oligonucleotide
  Sense strand starting at position 3561 of SEQ ID NO: 1881261
auguaugugaucugugaac

SEQ ID NO: 2030763 - RNA, 19 nt, Artificial Sequence
  Description of Artificial Sequence: Synthetic oligonucleotide
  Antisense strand to SEQ ID NO: 2030762
guucacagaucacauacau

SEQ ID NO: 2030764 - RNA, 19 nt, Artificial Sequence
  Description of Artificial Sequence: Synthetic oligonucleotide
  Sense strand starting at position 3563 of SEQ ID NO: 1881261
guaugugaucugugaacuc

SEQ ID NO: 2030765 - RNA, 19 nt, Artificial Sequence
  Description of Artificial Sequence: Synthetic oligonucleotide
  Antisense strand to SEQ ID NO: 2030764
gaguucacagaucacauac

SEQ ID NO: 2030766 - RNA, 19 nt, Artificial Sequence
  Description of Artificial Sequence: Synthetic oligonucleotide
  Sense strand starting at position 3581 of SEQ ID NO: 1881261
caaagaggucacggucaua

SEQ ID NO: 2030767 - RNA, 19 nt, Artificial Sequence
  Description of Artificial Sequence: Synthetic oligonucleotide
  Antisense strand to SEQ ID NO: 2030766
uaugaccgugaccucuuug

SEQ ID NO: 2030768 - RNA, 19 nt, Artificial Sequence
  Description of Artificial Sequence: Synthetic oligonucleotide
  Sense strand starting at position 3620 of SEQ ID NO: 1881261
gacgccagugccugauuaa

SEQ ID NO: 2030769 - RNA, 19 nt, Artificial Sequence
  Description of Artificial Sequence: Synthetic oligonucleotide
  Antisense strand to SEQ ID NO: 2030768
uuaaucaggcacuggcguc

SEQ ID NO: 2030770 - RNA, 19 nt, Artificial Sequence
  Description of Artificial Sequence: Synthetic oligonucleotide
  Sense strand starting at position 3621 of SEQ ID NO: 1881261
acgccagugccugauuaag

SEQ ID NO: 2030771 - RNA, 19 nt, Artificial Sequence
  Description of Artificial Sequence: Synthetic oligonucleotide
  Antisense strand to SEQ ID NO: 2030770
cuuaaucaggcacuggcgu

SEQ ID NO: 2030772 - RNA, 19 nt, Artificial Sequence
  Description of Artificial Sequence: Synthetic oligonucleotide
  Sense strand starting at position 3623 of SEQ ID NO: 1881261
gccagugccugauuaagga

SEQ ID NO: 2030773 - RNA, 19 nt, Artificial Sequence
  Description of Artificial Sequence: Synthetic oligonucleotide
  Antisense strand to SEQ ID NO: 2030772
uccuuaaucaggcacuggc

SEQ ID NO: 2030774 - RNA, 19 nt, Artificial Sequence
  Description of Artificial Sequence: Synthetic oligonucleotide
  Sense strand starting at position 3630 of SEQ ID NO: 1881261
ccugauuaaggaggguauu

SEQ ID NO: 2030775 - RNA, 19 nt, Artificial Sequence
  Description of Artificial Sequence: Synthetic oligonucleotide
  Antisense strand to SEQ ID NO: 2030774
aauacccuccuuaaucagg

SEQ ID NO: 2030776 - RNA, 19 nt, Artificial Sequence
  Description of Artificial Sequence: Synthetic oligonucleotide
  Sense strand starting at position 7 of SEQ ID NO: 1881262
gagcacuuggcacaaugaa

SEQ ID NO: 2030777 - RNA, 19 nt, Artificial Sequence
  Description of Artificial Sequence: Synthetic oligonucleotide
  Antisense strand to SEQ ID NO: 2030776
uucauugugccaagugcuc

SEQ ID NO: 2030778 - RNA, 19 nt, Artificial Sequence
  Description of Artificial Sequence: Synthetic oligonucleotide
  Sense strand starting at position 130 of SEQ ID NO: 1881262
uggaacuugucgaaggguu

SEQ ID NO: 2030779 - RNA, 19 nt, Artificial Sequence
  Description of Artificial Sequence: Synthetic oligonucleotide
  Antisense strand to SEQ ID NO: 2030778
aacccuucgacaaguucca

SEQ ID NO: 2030780 - RNA, 19 nt, Artificial Sequence
  Description of Artificial Sequence: Synthetic oligonucleotide
  Sense strand starting at position 162 of SEQ ID NO: 1881262
agagcaguccacuaaugcu

SEQ ID NO: 2030781 - RNA, 19 nt, Artificial Sequence
  Description of Artificial Sequence: Synthetic oligonucleotide
  Antisense strand to SEQ ID NO: 2030780
agcauuaguggacugcucu

SEQ ID NO: 2030782 - RNA, 19 nt, Artificial Sequence
  Description of Artificial Sequence: Synthetic oligonucleotide
  Sense strand starting at position 349 of SEQ ID NO: 1881262
agccaaagugaaggucaua

SEQ ID NO: 2030783 - RNA, 19 nt, Artificial Sequence
  Description of Artificial Sequence: Synthetic oligonucleotide
  Antisense strand to SEQ ID NO: 2030782
uaugaccuucacuuuggcu

SEQ ID NO: 2030784 - RNA, 19 nt, Artificial Sequence
  Description of Artificial Sequence: Synthetic oligonucleotide
  Sense strand starting at position 475 of SEQ ID NO: 1881262
ugugacacccagugaauaa

SEQ ID NO: 2030785 - RNA, 19 nt, Artificial Sequence
  Description of Artificial Sequence: Synthetic oligonucleotide
  Antisense strand to SEQ ID NO: 2030784
uuauucacugggugucaca

SEQ ID NO: 2030786 - RNA, 19 nt, Artificial Sequence
  Description of Artificial Sequence: Synthetic oligonucleotide
  Sense strand starting at position 677 of SEQ ID NO: 1881262
ggcucucaccuugacaaca

SEQ ID NO: 2030787 - RNA, 19 nt, Artificial Sequence
  Description of Artificial Sequence: Synthetic oligonucleotide
  Antisense strand to SEQ ID NO: 2030786
uguugucaaggugagagcc

SEQ ID NO: 2030788 - RNA, 19 nt, Artificial Sequence
  Description of Artificial Sequence: Synthetic oligonucleotide
  Sense strand starting at position 910 of SEQ ID NO: 1881262
gaugaaagguucccaguac

SEQ ID NO: 2030789 - RNA, 19 nt, Artificial Sequence
  Description of Artificial Sequence: Synthetic oligonucleotide
  Antisense strand to SEQ ID NO: 2030788
guacugggaaccuuucauc

SEQ ID NO: 2030790 - RNA, 19 nt, Artificial Sequence
  Description of Artificial Sequence: Synthetic oligonucleotide
  Sense strand starting at position 976 of SEQ ID NO: 1881262
ugaagucaguccucucaau

SEQ ID NO: 2030791 - RNA, 19 nt, Artificial Sequence
  Description of Artificial Sequence: Synthetic oligonucleotide
  Antisense strand to SEQ ID NO: 2030790
auugagaggacugacuuca

SEQ ID NO: 2030792 - RNA, 19 nt, Artificial Sequence
  Description of Artificial Sequence: Synthetic oligonucleotide
  Sense strand starting at position 1035 of SEQ ID NO: 1881262
gucucaucagcugggaagu

SEQ ID NO: 2030793 - RNA, 19 nt, Artificial Sequence
  Description of Artificial Sequence: Synthetic oligonucleotide
  Antisense strand to SEQ ID NO: 2030792
acuucccagcugaugagac

SEQ ID NO: 2030794 - RNA, 19 nt, Artificial Sequence
  Description of Artificial Sequence: Synthetic oligonucleotide
  Sense strand starting at position 1036 of SEQ ID NO: 1881262
ucucaucagcugggaaguu

SEQ ID NO: 2030795 - RNA, 19 nt, Artificial Sequence
  Description of Artificial Sequence: Synthetic oligonucleotide
  Antisense strand to SEQ ID NO: 2030794
aacuucccagcugaugaga

SEQ ID NO: 2030796 - RNA, 19 nt, Artificial Sequence
  Description of Artificial Sequence: Synthetic oligonucleotide
  Sense strand starting at position 1061 of SEQ ID NO: 1881262
cuggauguccaaggacuau

SEQ ID NO: 2030797 - RNA, 19 nt, Artificial Sequence
  Description of Artificial Sequence: Synthetic oligonucleotide
  Antisense strand to SEQ ID NO: 2030796
auaguccuuggacauccag

SEQ ID NO: 2030798 - RNA, 19 nt, Artificial Sequence
  Description of Artificial Sequence: Synthetic oligonucleotide
  Sense strand starting at position 1103 of SEQ ID NO: 1881262
gagucauacucagcauuag

SEQ ID NO: 2030799 - RNA, 19 nt, Artificial Sequence
  Description of Artificial Sequence: Synthetic oligonucleotide
  Antisense strand to SEQ ID NO: 2030798
cuaaugcugaguaugacuc

SEQ ID NO: 2030800 - RNA, 19 nt, Artificial Sequence
  Description of Artificial Sequence: Synthetic oligonucleotide
  Sense strand starting at position 1203 of SEQ ID NO: 1881262
gcaggaaaguuggugauga

SEQ ID NO: 2030801 - RNA, 19 nt, Artificial Sequence
  Description of Artificial Sequence: Synthetic oligonucleotide
  Antisense strand to SEQ ID NO: 2030800
ucaucaccaacuuuccugc

SEQ ID NO: 2030802 - RNA, 19 nt, Artificial Sequence
  Description of Artificial Sequence: Synthetic oligonucleotide
  Sense strand starting at position 1217 of SEQ ID NO: 1881262
gaugaugacccguagugac

SEQ ID NO: 2030803 - RNA, 19 nt, Artificial Sequence
  Description of Artificial Sequence: Synthetic oligonucleotide
  Antisense strand to SEQ ID NO: 2030802
gucacuacgggucaucauc

SEQ ID NO: 2030804 - RNA, 19 nt, Artificial Sequence
  Description of Artificial Sequence: Synthetic oligonucleotide
  Sense strand starting at position 1621 of SEQ ID NO: 1881262
ggaggaucuuccucuuaga

SEQ ID NO: 2030805 - RNA, 19 nt, Artificial Sequence
  Description of Artificial Sequence: Synthetic oligonucleotide
  Antisense strand to SEQ ID NO: 2030804
ucuaagaggaagauccucc

SEQ ID NO: 2030806 - RNA, 19 nt, Artificial Sequence
  Description of Artificial Sequence: Synthetic oligonucleotide
  Sense strand starting at position 1851 of SEQ ID NO: 1881262
ccuggaauuccuuggugca

SEQ ID NO: 2030807 - RNA, 19 nt, Artificial Sequence
  Description of Artificial Sequence: Synthetic oligonucleotide
  Antisense strand to SEQ ID NO: 2030806
ugcaccaaggaauuccagg

SEQ ID NO: 2030808 - RNA, 19 nt, Artificial Sequence
  Description of Artificial Sequence: Synthetic oligonucleotide
  Sense strand starting at position 1853 of SEQ ID NO: 1881262
uggaauuccuuggugcaga

SEQ ID NO: 2030809 - RNA, 19 nt, Artificial Sequence
  Description of Artificial Sequence: Synthetic oligonucleotide
  Antisense strand to SEQ ID NO: 2030808
ucugcaccaaggaauucca

SEQ ID NO: 2030810 - RNA, 19 nt, Artificial Sequence
  Description of Artificial Sequence: Synthetic oligonucleotide
  Sense strand starting at position 1878 of SEQ ID NO: 1881262
gagugaugugcucgaugga

SEQ ID NO: 2030811 - RNA, 19 nt, Artificial Sequence
  Description of Artificial Sequence: Synthetic oligonucleotide
  Antisense strand to SEQ ID NO: 2030810
uccaucgagcacaucacuc

SEQ ID NO: 2030812 - RNA, 19 nt, Artificial Sequence
  Description of Artificial Sequence: Synthetic oligonucleotide
  Sense strand starting at position 1879 of SEQ ID NO: 1881262
agugaugugcucgauggag

SEQ ID NO: 2030813 - RNA, 19 nt, Artificial Sequence
  Description of Artificial Sequence: Synthetic oligonucleotide
  Antisense strand to SEQ ID NO: 2030812
cuccaucgagcacaucacu

SEQ ID NO: 2030814 - RNA, 19 nt, Artificial Sequence
  Description of Artificial Sequence: Synthetic oligonucleotide
  Sense strand starting at position 2065 of SEQ ID NO: 1881262
uggugugguguauacuuga

SEQ ID NO: 2030815 - RNA, 19 nt, Artificial Sequence
  Description of Artificial Sequence: Synthetic oligonucleotide
  Antisense strand to SEQ ID NO: 2030814
ucaaguauacaccacacca

SEQ ID NO: 2030816 - RNA, 19 nt, Artificial Sequence
  Description of Artificial Sequence: Synthetic oligonucleotide
  Sense strand starting at position 2070 of SEQ ID NO: 1881262
ugguguauacuugacucga

SEQ ID NO: 2030817 - RNA, 19 nt, Artificial Sequence
  Description of Artificial Sequence: Synthetic oligonucleotide
  Antisense strand to SEQ ID NO: 2030816
ucgagucaaguauacacca

SEQ ID NO: 2030818 - RNA, 19 nt, Artificial Sequence
  Description of Artificial Sequence: Synthetic oligonucleotide
  Sense strand starting at position 2072 of SEQ ID NO: 1881262
guguauacuugacucgaua

SEQ ID NO: 2030819 - RNA, 19 nt, Artificial Sequence
  Description of Artificial Sequence: Synthetic oligonucleotide
  Antisense strand to SEQ ID NO: 2030818
uaucgagucaaguauacac

SEQ ID NO: 2030820 - RNA, 19 nt, Artificial Sequence
  Description of Artificial Sequence: Synthetic oligonucleotide
  Sense strand starting at position 2251 of SEQ ID NO: 1881262
cccagaugcuccucuagga

SEQ ID NO: 2030821 - RNA, 19 nt, Artificial Sequence
  Description of Artificial Sequence: Synthetic oligonucleotide
  Antisense strand to SEQ ID NO: 2030820
uccuagaggagcaucuggg

SEQ ID NO: 2030822 - RNA, 19 nt, Artificial Sequence
  Description of Artificial Sequence: Synthetic oligonucleotide
  Sense strand starting at position 2328 of SEQ ID NO: 1881262
agaguauuauggccuuuga

SEQ ID NO: 2030823 - RNA, 19 nt, Artificial Sequence
  Description of Artificial Sequence: Synthetic oligonucleotide
  Antisense strand to SEQ ID NO: 2030822
ucaaaggccauaauacucu

SEQ ID NO: 2030824 - RNA, 19 nt, Artificial Sequence
  Description of Artificial Sequence: Synthetic oligonucleotide
  Sense strand starting at position 2508 of SEQ ID NO: 1881262
uagucagacgcauauguga

SEQ ID NO: 2030825 - RNA, 19 nt, Artificial Sequence
  Description of Artificial Sequence: Synthetic oligonucleotide
  Antisense strand to SEQ ID NO: 2030824
ucacauaugcgucugacua

SEQ ID NO: 2030826 - RNA, 19 nt, Artificial Sequence
  Description of Artificial Sequence: Synthetic oligonucleotide
  Sense strand starting at position 2519 of SEQ ID NO: 1881262
auaugugacuuuguaaggu

SEQ ID NO: 2030827 - RNA, 19 nt, Artificial Sequence
  Description of Artificial Sequence: Synthetic oligonucleotide
  Antisense strand to SEQ ID NO: 2030826
accuuacaaagucacauau

SEQ ID NO: 2030828 - RNA, 19 nt, Artificial Sequence
  Description of Artificial Sequence: Synthetic oligonucleotide
  Sense strand starting at position 2679 of SEQ ID NO: 1881262
cacagauggccgugaagaa

SEQ ID NO: 2030829 - RNA, 19 nt, Artificial Sequence
  Description of Artificial Sequence: Synthetic oligonucleotide
  Antisense strand to SEQ ID NO: 2030828
uucuucacggccaucugug

SEQ ID NO: 2030830 - RNA, 19 nt, Artificial Sequence
  Description of Artificial Sequence: Synthetic oligonucleotide
  Sense strand starting at position 2752 of SEQ ID NO: 1881262
auuguuggccuaggaaagu

SEQ ID NO: 2030831 - RNA, 19 nt, Artificial Sequence
  Description of Artificial Sequence: Synthetic oligonucleotide
  Antisense strand to SEQ ID NO: 2030830
acuuuccuaggccaacaau

SEQ ID NO: 2030832 - RNA, 19 nt, Artificial Sequence
  Description of Artificial Sequence: Synthetic oligonucleotide
  Sense strand starting at position 2880 of SEQ ID NO: 1881262
gagucuugauuaucuugca

SEQ ID NO: 2030833 - RNA, 19 nt, Artificial Sequence
  Description of Artificial Sequence: Synthetic oligonucleotide
  Antisense strand to SEQ ID NO: 2030832
ugcaagauaaucaagacuc

SEQ ID NO: 2030834 - RNA, 19 nt, Artificial Sequence
  Description of Artificial Sequence: Synthetic oligonucleotide
  Sense strand starting at position 3278 of SEQ ID NO: 1881262
cucaauagauuccuaggua

SEQ ID NO: 2030835 - RNA, 19 nt, Artificial Sequence
  Description of Artificial Sequence: Synthetic oligonucleotide
  Antisense strand to SEQ ID NO: 2030834
uaccuaggaaucuauugag

SEQ ID NO: 2030836 - RNA, 19 nt, Artificial Sequence
  Description of Artificial Sequence: Synthetic oligonucleotide
  Sense strand starting at position 3282 of SEQ ID NO: 1881262
auagauuccuagguaucug

SEQ ID NO: 2030837 - RNA, 19 nt, Artificial Sequence
  Description of Artificial Sequence: Synthetic oligonucleotide
  Antisense strand to SEQ ID NO: 2030836
cagauaccuaggaaucuau

SEQ ID NO: 2030838 - RNA, 19 nt, Artificial Sequence
  Description of Artificial Sequence: Synthetic oligonucleotide
  Sense strand starting at position 3305 of SEQ ID NO: 1881262
acaugugguuccuuuccau

SEQ ID NO: 2030839 - RNA, 19 nt, Artificial Sequence
  Description of Artificial Sequence: Synthetic oligonucleotide
  Antisense strand to SEQ ID NO: 2030838
auggaaaggaaccacaugu

SEQ ID NO: 2030840 - RNA, 19 nt, Artificial Sequence
  Description of Artificial Sequence: Synthetic oligonucleotide
  Sense strand starting at position 3370 of SEQ ID NO: 1881262
gggauaugguauccacuca

SEQ ID NO: 2030841 - RNA, 19 nt, Artificial Sequence
  Description of Artificial Sequence: Synthetic oligonucleotide
  Antisense strand to SEQ ID NO: 2030840
ugaguggauaccauauccc

SEQ ID NO: 2030842 - RNA, 19 nt, Artificial Sequence
  Description of Artificial Sequence: Synthetic oligonucleotide
  Sense strand starting at position 3378 of SEQ ID NO: 1881262
guauccacucaugggaaca

SEQ ID NO: 2030843 - RNA, 19 nt, Artificial Sequence
  Description of Artificial Sequence: Synthetic oligonucleotide
  Antisense strand to SEQ ID NO: 2030842
uguucccaugaguggauac

SEQ ID NO: 2030844 - RNA, 19 nt, Artificial Sequence
  Description of Artificial Sequence: Synthetic oligonucleotide
  Sense strand starting at position 3431 of SEQ ID NO: 1881262
acaugcuuaccuuggcaua

SEQ ID NO: 2030845 - RNA, 19 nt, Artificial Sequence
  Description of Artificial Sequence: Synthetic oligonucleotide
  Antisense strand to SEQ ID NO: 2030844
uaugccaagguaagcaugu

SEQ ID NO: 2030846 - RNA, 19 nt, Artificial Sequence
  Description of Artificial Sequence: Synthetic oligonucleotide
  Sense strand starting at position 3461 of SEQ ID NO: 1881262
aauugauggcuuuggcaug

SEQ ID NO: 2030847 - RNA, 19 nt, Artificial Sequence
  Description of Artificial Sequence: Synthetic oligonucleotide
  Antisense strand to SEQ ID NO: 2030846
caugccaaagccaucaauu

SEQ ID NO: 2030848 - RNA, 19 nt, Artificial Sequence
  Description of Artificial Sequence: Synthetic oligonucleotide
  Sense strand starting at position 3488 of SEQ ID NO: 1881262
gcaggauuccauuggguuc

SEQ ID NO: 2030849 - RNA, 19 nt, Artificial Sequence
  Description of Artificial Sequence: Synthetic oligonucleotide
  Antisense strand to SEQ ID NO: 2030848
gaacccaauggaauccugc

SEQ ID NO: 2030850 - RNA, 19 nt, Artificial Sequence
  Description of Artificial Sequence: Synthetic oligonucleotide
  Sense strand starting at position 3555 of SEQ ID NO: 1881262
aauaaagucugagcucaga

SEQ ID NO: 2030851 - RNA, 19 nt, Artificial Sequence
  Description of Artificial Sequence: Synthetic oligonucleotide
  Antisense strand to SEQ ID NO: 2030850
ucugagcucagacuuuauu

SEQ ID NO: 2030852 - RNA, 19 nt, Artificial Sequence
  Description of Artificial Sequence: Synthetic oligonucleotide
  Sense strand starting at position 3714 of SEQ ID NO: 1881262
caguaaucuccaggugcug

SEQ ID NO: 2030853 - RNA, 19 nt, Artificial Sequence
  Description of Artificial Sequence: Synthetic oligonucleotide
  Antisense strand to SEQ ID NO: 2030852
cagcaccuggagauuacug

SEQ ID NO: 2030854 - RNA, 19 nt, Artificial Sequence
  Description of Artificial Sequence: Synthetic oligonucleotide
  Sense strand starting at position 3741 of SEQ ID NO: 1881262
gauucaugguguguggagu

SEQ ID NO: 2030855 - RNA, 19 nt, Artificial Sequence
  Description of Artificial Sequence: Synthetic oligonucleotide
  Antisense strand to SEQ ID NO: 2030854
acuccacacaccaugaauc

SEQ ID NO: 2030856 - RNA, 19 nt, Artificial Sequence
  Description of Artificial Sequence: Synthetic oligonucleotide
  Sense strand starting at position 125 of SEQ ID NO: 1881263
agaugacugugacuguauu

SEQ ID NO: 2030857 - RNA, 19 nt, Artificial Sequence
  Description of Artificial Sequence: Synthetic oligonucleotide
  Antisense strand to SEQ ID NO: 2030856
aauacagucacagucaucu

SEQ ID NO: 2030858 - RNA, 19 nt, Artificial Sequence
  Description of Artificial Sequence: Synthetic oligonucleotide
  Sense strand starting at position 137 of SEQ ID NO: 1881263
cuguauuucugugccugua

SEQ ID NO: 2030859 - RNA, 19 nt, Artificial Sequence
  Description of Artificial Sequence: Synthetic oligonucleotide
  Antisense strand to SEQ ID NO: 2030858
uacaggcacagaaauacag

SEQ ID NO: 2030860 - RNA, 19 nt, Artificial Sequence
  Description of Artificial Sequence: Synthetic oligonucleotide
  Sense strand starting at position 262 of SEQ ID NO: 1881263
gcacacauguccuuugacu

SEQ ID NO: 2030861 - RNA, 19 nt, Artificial Sequence
  Description of Artificial Sequence: Synthetic oligonucleotide
  Antisense strand to SEQ ID NO: 2030860
agucaaaggacaugugugc

SEQ ID NO: 2030862 - RNA, 19 nt, Artificial Sequence
  Description of Artificial Sequence: Synthetic oligonucleotide
  Sense strand starting at position 311 of SEQ ID NO: 1881263
gcaucucuggguuggugau

SEQ ID NO: 2030863 - RNA, 19 nt, Artificial Sequence
  Description of Artificial Sequence: Synthetic oligonucleotide
  Antisense strand to SEQ ID NO: 2030862
aucaccaacccagagaugc

SEQ ID NO: 2030864 - RNA, 19 nt, Artificial Sequence
  Description of Artificial Sequence: Synthetic oligonucleotide
  Sense strand starting at position 353 of SEQ ID NO: 1881263
cauauccaugugugucuua

SEQ ID NO: 2030865 - RNA, 19 nt, Artificial Sequence
  Description of Artificial Sequence: Synthetic oligonucleotide
  Antisense strand to SEQ ID NO: 2030864
uaagacacacauggauaug

SEQ ID NO: 2030866 - RNA, 19 nt, Artificial Sequence
  Description of Artificial Sequence: Synthetic oligonucleotide
  Sense strand starting at position 360 of SEQ ID NO: 1881263
augugugucuuaguacaug

SEQ ID NO: 2030867 - RNA, 19 nt, Artificial Sequence
  Description of Artificial Sequence: Synthetic oligonucleotide
  Antisense strand to SEQ ID NO: 2030866
cauguacuaagacacacau

SEQ ID NO: 2030868 - RNA, 19 nt, Artificial Sequence
  Description of Artificial Sequence: Synthetic oligonucleotide
  Sense strand starting at position 435 of SEQ ID NO: 1881263
ugggcaugggcuuauacau

SEQ ID NO: 2030869 - RNA, 19 nt, Artificial Sequence
  Description of Artificial Sequence: Synthetic oligonucleotide
  Antisense strand to SEQ ID NO: 2030868
auguauaagcccaugccca

SEQ ID NO: 2030870 - RNA, 19 nt, Artificial Sequence
  Description of Artificial Sequence: Synthetic oligonucleotide
  Sense strand starting at position 459 of SEQ ID NO: 1881263
caaagagcaugggcuuaua

SEQ ID NO: 2030871 - RNA, 19 nt, Artificial Sequence
  Description of Artificial Sequence: Synthetic oligonucleotide
  Antisense strand to SEQ ID NO: 2030870
uauaagcccaugcucuuug

SEQ ID NO: 2030872 - RNA, 19 nt, Artificial Sequence
  Description of Artificial Sequence: Synthetic oligonucleotide
  Sense strand starting at position 462 of SEQ ID NO: 1881263
agagcaugggcuuauacau

SEQ ID NO: 2030873 - RNA, 19 nt, Artificial Sequence
  Description of Artificial Sequence: Synthetic oligonucleotide
  Antisense strand to SEQ ID NO: 2030872
auguauaagcccaugcucu

SEQ ID NO: 2030874 - RNA, 19 nt, Artificial Sequence
  Description of Artificial Sequence: Synthetic oligonucleotide
  Sense strand starting at position 471 of SEQ ID NO: 1881263
gcuuauacaugccuugaga

SEQ ID NO: 2030875 - RNA, 19 nt, Artificial Sequence
  Description of Artificial Sequence: Synthetic oligonucleotide
  Antisense strand to SEQ ID NO: 2030874
ucucaaggcauguauaagc

SEQ ID NO: 2030876 - RNA, 19 nt, Artificial Sequence
  Description of Artificial Sequence: Synthetic oligonucleotide
  Sense strand starting at position 529 of SEQ ID NO: 1881263
gcucaauguguaugaccau

SEQ ID NO: 2030877 - RNA, 19 nt, Artificial Sequence
  Description of Artificial Sequence: Synthetic oligonucleotide
  Antisense strand to SEQ ID NO: 2030876
auggucauacacauugagc

SEQ ID NO: 2030878 - RNA, 19 nt, Artificial Sequence
  Description of Artificial Sequence: Synthetic oligonucleotide
  Sense strand starting at position 535 of SEQ ID NO: 1881263
uguguaugaccauaagcgu

SEQ ID NO: 2030879 - RNA, 19 nt, Artificial Sequence
  Description of Artificial Sequence: Synthetic oligonucleotide
  Antisense strand to SEQ ID NO: 2030878
acgcuuauggucauacaca

SEQ ID NO: 2030880 - RNA, 19 nt, Artificial Sequence
  Description of Artificial Sequence: Synthetic oligonucleotide
  Sense strand starting at position 592 of SEQ ID NO: 1881263
gcacaugucacaggucaga

SEQ ID NO: 2030881 - RNA, 19 nt, Artificial Sequence
  Description of Artificial Sequence: Synthetic oligonucleotide
  Antisense strand to SEQ ID NO: 2030880
ucugaccugugacaugugc

SEQ ID NO: 2030882 - RNA, 19 nt, Artificial Sequence
  Description of Artificial Sequence: Synthetic oligonucleotide
  Sense strand starting at position 667 of SEQ ID NO: 1881263
caugucuuagcacaugagu

SEQ ID NO: 2030883 - RNA, 19 nt, Artificial Sequence
  Description of Artificial Sequence: Synthetic oligonucleotide
  Antisense strand to SEQ ID NO: 2030882
acucaugugcuaagacaug

SEQ ID NO: 2030884 - RNA, 19 nt, Artificial Sequence
  Description of Artificial Sequence: Synthetic oligonucleotide
  Sense strand starting at position 678 of SEQ ID NO: 1881263
acaugagucuggguggaag

SEQ ID NO: 2030885 - RNA, 19 nt, Artificial Sequence
  Description of Artificial Sequence: Synthetic oligonucleotide
  Antisense strand to SEQ ID NO: 2030884
cuuccacccagacucaugu

SEQ ID NO: 2030886 - RNA, 19 nt, Artificial Sequence
  Description of Artificial Sequence: Synthetic oligonucleotide
  Sense strand starting at position 688 of SEQ ID NO: 1881263
ggguggaagugucugggua

SEQ ID NO: 2030887 - RNA, 19 nt, Artificial Sequence
  Description of Artificial Sequence: Synthetic oligonucleotide
  Antisense strand to SEQ ID NO: 2030886
uacccagacacuuccaccc

SEQ ID NO: 2030888 - RNA, 19 nt, Artificial Sequence
  Description of Artificial Sequence: Synthetic oligonucleotide
  Sense strand starting at position 689 of SEQ ID NO: 1881263
gguggaagugucuggguau

SEQ ID NO: 2030889 - RNA, 19 nt, Artificial Sequence
  Description of Artificial Sequence: Synthetic oligonucleotide
  Antisense strand to SEQ ID NO: 2030888
auacccagacacuuccacc

SEQ ID NO: 2030890 - RNA, 19 nt, Artificial Sequence
  Description of Artificial Sequence: Synthetic oligonucleotide
  Sense strand starting at position 692 of SEQ ID NO: 1881263
ggaagugucuggguaucaa

SEQ ID NO: 2030891 - RNA, 19 nt, Artificial Sequence
  Description of Artificial Sequence: Synthetic oligonucleotide
  Antisense strand to SEQ ID NO: 2030890
uugauacccagacacuucc

SEQ ID NO: 2030892 - RNA, 19 nt, Artificial Sequence
  Description of Artificial Sequence: Synthetic oligonucleotide
  Sense strand starting at position 704 of SEQ ID NO: 1881263
guaucaacaugucucuaag

SEQ ID NO: 2030893 - RNA, 19 nt, Artificial Sequence
  Description of Artificial Sequence: Synthetic oligonucleotide
  Antisense strand to SEQ ID NO: 2030892
cuuagagacauguugauac

SEQ ID NO: 2030894 - RNA, 19 nt, Artificial Sequence
  Description of Artificial Sequence: Synthetic oligonucleotide
  Sense strand starting at position 801 of SEQ ID NO: 1881263
ggguuaucugggcaugugu

SEQ ID NO: 2030895 - RNA, 19 nt, Artificial Sequence
  Description of Artificial Sequence: Synthetic oligonucleotide
  Antisense strand to SEQ ID NO: 2030894
acacaugcccagauaaccc

SEQ ID NO: 2030896 - RNA, 19 nt, Artificial Sequence
  Description of Artificial Sequence: Synthetic oligonucleotide
  Sense strand starting at position 974 of SEQ ID NO: 1881263
ugaggucaguuugugauca

SEQ ID NO: 2030897 - RNA, 19 nt, Artificial Sequence
  Description of Artificial Sequence: Synthetic oligonucleotide
  Antisense strand to SEQ ID NO: 2030896
ugaucacaaacugaccuca

SEQ ID NO: 2030898 - RNA, 19 nt, Artificial Sequence
  Description of Artificial Sequence: Synthetic oligonucleotide
  Sense strand starting at position 1258 of SEQ ID NO: 1881263
ccucauguguugcuacaga

SEQ ID NO: 2030899 - RNA, 19 nt, Artificial Sequence
  Description of Artificial Sequence: Synthetic oligonucleotide
  Antisense strand to SEQ ID NO: 2030898
ucuguagcaacacaugagg

SEQ ID NO: 2030900 - RNA, 19 nt, Artificial Sequence
  Description of Artificial Sequence: Synthetic oligonucleotide
  Sense strand starting at position 1271 of SEQ ID NO: 1881263
uacagaucuuggcugugua

SEQ ID NO: 2030901 - RNA, 19 nt, Artificial Sequence
  Description of Artificial Sequence: Synthetic oligonucleotide
  Antisense strand to SEQ ID NO: 2030900
uacacagccaagaucugua

SEQ ID NO: 2030902 - RNA, 19 nt, Artificial Sequence
  Description of Artificial Sequence: Synthetic oligonucleotide
  Sense strand starting at position 1380 of SEQ ID NO: 1881263
uggcuuucccugugggaac

SEQ ID NO: 2030903 - RNA, 19 nt, Artificial Sequence
  Description of Artificial Sequence: Synthetic oligonucleotide
  Antisense strand to SEQ ID NO: 2030902
guucccacagggaaagcca

SEQ ID NO: 2030904 - RNA, 19 nt, Artificial Sequence
  Description of Artificial Sequence: Synthetic oligonucleotide
  Sense strand starting at position 1467 of SEQ ID NO: 1881263
uggucucaccgguaaucca

SEQ ID NO: 2030905 - RNA, 19 nt, Artificial Sequence
  Description of Artificial Sequence: Synthetic oligonucleotide
  Antisense strand to SEQ ID NO: 2030904
uggauuaccggugagacca

SEQ ID NO: 2030906 - RNA, 19 nt, Artificial Sequence
  Description of Artificial Sequence: Synthetic oligonucleotide
  Sense strand starting at position 1871 of SEQ ID NO: 1881263
ugacuaugaugaucugguu

SEQ ID NO: 2030907 - RNA, 19 nt, Artificial Sequence
  Description of Artificial Sequence: Synthetic oligonucleotide
  Antisense strand to SEQ ID NO: 2030906
aaccagaucaucauaguca

SEQ ID NO: 2030908 - RNA, 19 nt, Artificial Sequence
  Description of Artificial Sequence: Synthetic oligonucleotide
  Sense strand starting at position 1877 of SEQ ID NO: 1881263
ugaugaucugguuggagcu

SEQ ID NO: 2030909 - RNA, 19 nt, Artificial Sequence
  Description of Artificial Sequence: Synthetic oligonucleotide
  Antisense strand to SEQ ID NO: 2030908
agcuccaaccagaucauca

SEQ ID NO: 2030910 - RNA, 19 nt, Artificial Sequence
  Description of Artificial Sequence: Synthetic oligonucleotide
  Sense strand starting at position 2357 of SEQ ID NO: 1881263
ggcucauguccugagaaac

SEQ ID NO: 2030911 - RNA, 19 nt, Artificial Sequence
  Description of Artificial Sequence: Synthetic oligonucleotide
  Antisense strand to SEQ ID NO: 2030910
guuucucaggacaugagcc

SEQ ID NO: 2030912 - RNA, 19 nt, Artificial Sequence
  Description of Artificial Sequence: Synthetic oligonucleotide
  Sense strand starting at position 2434 of SEQ ID NO: 1881263
ggaacagggucagauaaga

SEQ ID NO: 2030913 - RNA, 19 nt, Artificial Sequence
  Description of Artificial Sequence: Synthetic oligonucleotide
  Antisense strand to SEQ ID NO: 2030912
ucuuaucugacccuguucc

SEQ ID NO: 2030914 - RNA, 19 nt, Artificial Sequence
  Description of Artificial Sequence: Synthetic oligonucleotide
  Sense strand starting at position 2688 of SEQ ID NO: 1881263
cucccuguggcagagauaa

SEQ ID NO: 2030915 - RNA, 19 nt, Artificial Sequence
  Description of Artificial Sequence: Synthetic oligonucleotide
  Antisense strand to SEQ ID NO: 2030914
uuaucucugccacagggag

SEQ ID NO: 2030916 - RNA, 19 nt, Artificial Sequence
  Description of Artificial Sequence: Synthetic oligonucleotide
  Sense strand starting at position 2700 of SEQ ID NO: 1881263
gagauaagcuugcugagga

SEQ ID NO: 2030917 - RNA, 19 nt, Artificial Sequence
  Description of Artificial Sequence: Synthetic oligonucleotide
  Antisense strand to SEQ ID NO: 2030916
uccucagcaagcuuaucuc

SEQ ID NO: 2030918 - RNA, 19 nt, Artificial Sequence
  Description of Artificial Sequence: Synthetic oligonucleotide
  Sense strand starting at position 2934 of SEQ ID NO: 1881263
gagguuucagagggacagu

SEQ ID NO: 2030919 - RNA, 19 nt, Artificial Sequence
  Description of Artificial Sequence: Synthetic oligonucleotide
  Antisense strand to SEQ ID NO: 2030918
acugucccucugaaaccuc

SEQ ID NO: 2030920 - RNA, 19 nt, Artificial Sequence
  Description of Artificial Sequence: Synthetic oligonucleotide
  Sense strand starting at position 2962 of SEQ ID NO: 1881263
gggaguuaguggaaggaau

SEQ ID NO: 2030921 - RNA, 19 nt, Artificial Sequence
  Description of Artificial Sequence: Synthetic oligonucleotide
  Antisense strand to SEQ ID NO: 2030920
auuccuuccacuaacuccc

SEQ ID NO: 2030922 - RNA, 19 nt, Artificial Sequence
  Description of Artificial Sequence: Synthetic oligonucleotide
  Sense strand starting at position 3406 of SEQ ID NO: 1881263
agcaguuugggagagcuuu

SEQ ID NO: 2030923 - RNA, 19 nt, Artificial Sequence
  Description of Artificial Sequence: Synthetic oligonucleotide
  Antisense strand to SEQ ID NO: 2030922
aaagcucucccaaacugcu

SEQ ID NO: 2030924 - RNA, 19 nt, Artificial Sequence
  Description of Artificial Sequence: Synthetic oligonucleotide
  Sense strand starting at position 3435 of SEQ ID NO: 1881263
ugaggacucaugggaaugu

SEQ ID NO: 2030925 - RNA, 19 nt, Artificial Sequence
  Description of Artificial Sequence: Synthetic oligonucleotide
  Antisense strand to SEQ ID NO: 2030924
acauucccaugaguccuca

SEQ ID NO: 2030926 - RNA, 19 nt, Artificial Sequence
  Description of Artificial Sequence: Synthetic oligonucleotide
  Sense strand starting at position 3439 of SEQ ID NO: 1881263
gacucaugggaauguuggu

SEQ ID NO: 2030927 - RNA, 19 nt, Artificial Sequence
  Description of Artificial Sequence: Synthetic oligonucleotide
  Antisense strand to SEQ ID NO: 2030926
accaacauucccaugaguc

SEQ ID NO: 2030928 - RNA, 19 nt, Artificial Sequence
  Description of Artificial Sequence: Synthetic oligonucleotide
  Sense strand starting at position 3534 of SEQ ID NO: 1881263
ggaucagguauugggaauu

SEQ ID NO: 2030929 - RNA, 19 nt, Artificial Sequence
  Description of Artificial Sequence: Synthetic oligonucleotide
  Antisense strand to SEQ ID NO: 2030928
aauucccaauaccugaucc

SEQ ID NO: 2030930 - RNA, 19 nt, Artificial Sequence
  Description of Artificial Sequence: Synthetic oligonucleotide
  Sense strand starting at position 3545 of SEQ ID NO: 1881263
ugggaauuggcugguugga

SEQ ID NO: 2030931 - RNA, 19 nt, Artificial Sequence
  Description of Artificial Sequence: Synthetic oligonucleotide
  Antisense strand to SEQ ID NO: 2030930
uccaaccagccaauuccca

SEQ ID NO: 2030932 - RNA, 19 nt, Artificial Sequence
  Description of Artificial Sequence: Synthetic oligonucleotide
  Sense strand starting at position 3880 of SEQ ID NO: 1881263
guuacuucucucugccaag

SEQ ID NO: 2030933 - RNA, 19 nt, Artificial Sequence
  Description of Artificial Sequence: Synthetic oligonucleotide
  Antisense strand to SEQ ID NO: 2030932
cuuggcagagagaaguaac

SEQ ID NO: 2030934 - RNA, 19 nt, Artificial Sequence
  Description of Artificial Sequence: Synthetic oligonucleotide
  Sense strand starting at position 3940 of SEQ ID NO: 1881263
ccgggucacccuggugaua

SEQ ID NO: 2030935 - RNA, 19 nt, Artificial Sequence
  Description of Artificial Sequence: Synthetic oligonucleotide
  Antisense strand to SEQ ID NO: 2030934
uaucaccagggugacccgg

SEQ ID NO: 2030936 - RNA, 19 nt, Artificial Sequence
  Description of Artificial Sequence: Synthetic oligonucleotide
  Sense strand starting at position 67 of SEQ ID NO: 1881264
augguaaacaccuguguca

SEQ ID NO: 2030937 - RNA, 19 nt, Artificial Sequence
  Description of Artificial Sequence: Synthetic oligonucleotide
  Antisense strand to SEQ ID NO: 2030936
ugacacagguguuuaccau

SEQ ID NO: 2030938 - RNA, 19 nt, Artificial Sequence
  Description of Artificial Sequence: Synthetic oligonucleotide
  Sense strand starting at position 183 of SEQ ID NO: 1881264
auauccaauccuuggguga

SEQ ID NO: 2030939 - RNA, 19 nt, Artificial Sequence
  Description of Artificial Sequence: Synthetic oligonucleotide
  Antisense strand to SEQ ID NO: 2030938
ucacccaaggauuggauau

SEQ ID NO: 2030940 - RNA, 19 nt, Artificial Sequence
  Description of Artificial Sequence: Synthetic oligonucleotide
  Sense strand starting at position 184 of SEQ ID NO: 1881264
uauccaauccuugggugaa

SEQ ID NO: 2030941 - RNA, 19 nt, Artificial Sequence
  Description of Artificial Sequence: Synthetic oligonucleotide
  Antisense strand to SEQ ID NO: 2030940
uucacccaaggauuggaua

SEQ ID NO: 2030942 - RNA, 19 nt, Artificial Sequence
  Description of Artificial Sequence: Synthetic oligonucleotide
  Sense strand starting at position 186 of SEQ ID NO: 1881264
uccaauccuugggugaagu

SEQ ID NO: 2030943 - RNA, 19 nt, Artificial Sequence
  Description of Artificial Sequence: Synthetic oligonucleotide
  Antisense strand to SEQ ID NO: 2030942
acuucacccaaggauugga

SEQ ID NO: 2030944 - RNA, 19 nt, Artificial Sequence
  Description of Artificial Sequence: Synthetic oligonucleotide
  Sense strand starting at position 569 of SEQ ID NO: 1881264
cgcuacuuauaacuaaaga

SEQ ID NO: 2030945 - RNA, 19 nt, Artificial Sequence
  Description of Artificial Sequence: Synthetic oligonucleotide
  Antisense strand to SEQ ID NO: 2030944
ucuuuaguuauaaguagcg

SEQ ID NO: 2030946 - RNA, 19 nt, Artificial Sequence
  Description of Artificial Sequence: Synthetic oligonucleotide
  Sense strand starting at position 609 of SEQ ID NO: 1881264
cucugcuguccauggagaa

SEQ ID NO: 2030947 - RNA, 19 nt, Artificial Sequence
  Description of Artificial Sequence: Synthetic oligonucleotide
  Antisense strand to SEQ ID NO: 2030946
uucuccauggacagcagag

SEQ ID NO: 2030948 - RNA, 19 nt, Artificial Sequence
  Description of Artificial Sequence: Synthetic oligonucleotide
  Sense strand starting at position 610 of SEQ ID NO: 1881264
ucugcuguccauggagaaa

SEQ ID NO: 2030949 - RNA, 19 nt, Artificial Sequence
  Description of Artificial Sequence: Synthetic oligonucleotide
  Antisense strand to SEQ ID NO: 2030948
uuucuccauggacagcaga

SEQ ID NO: 2030950 - RNA, 19 nt, Artificial Sequence
  Description of Artificial Sequence: Synthetic oligonucleotide
  Sense strand starting at position 700 of SEQ ID NO: 1881264
gugucagucacgcaggaau

SEQ ID NO: 2030951 - RNA, 19 nt, Artificial Sequence
  Description of Artificial Sequence: Synthetic oligonucleotide
  Antisense strand to SEQ ID NO: 2030950
auuccugcgugacugacac

SEQ ID NO: 2030952 - RNA, 19 nt, Artificial Sequence
  Description of Artificial Sequence: Synthetic oligonucleotide
  Sense strand starting at position 1238 of SEQ ID NO: 1881264
uagucaugcgaucauagau

SEQ ID NO: 2030953 - RNA, 19 nt, Artificial Sequence
  Description of Artificial Sequence: Synthetic oligonucleotide
  Antisense strand to SEQ ID NO: 2030952
aucuaugaucgcaugacua

SEQ ID NO: 2030954 - RNA, 19 nt, Artificial Sequence
  Description of Artificial Sequence: Synthetic oligonucleotide
  Sense strand starting at position 1442 of SEQ ID NO: 1881264
agucauugaucaucuugac

SEQ ID NO: 2030955 - RNA, 19 nt, Artificial Sequence
  Description of Artificial Sequence: Synthetic oligonucleotide
  Antisense strand to SEQ ID NO: 2030954
gucaagaugaucaaugacu

SEQ ID NO: 2030956 - RNA, 19 nt, Artificial Sequence
  Description of Artificial Sequence: Synthetic oligonucleotide
  Sense strand starting at position 1446 of SEQ ID NO: 1881264
auugaucaucuugacguau

SEQ ID NO: 2030957 - RNA, 19 nt, Artificial Sequence
  Description of Artificial Sequence: Synthetic oligonucleotide
  Antisense strand to SEQ ID NO: 2030956
auacgucaagaugaucaau

SEQ ID NO: 2030958 - RNA, 19 nt, Artificial Sequence
  Description of Artificial Sequence: Synthetic oligonucleotide
  Sense strand starting at position 1457 of SEQ ID NO: 1881264
ugacguauuuccucucauu

SEQ ID NO: 2030959 - RNA, 19 nt, Artificial Sequence
  Description of Artificial Sequence: Synthetic oligonucleotide
  Antisense strand to SEQ ID NO: 2030958
aaugagaggaaauacguca

SEQ ID NO: 2030960 - RNA, 19 nt, Artificial Sequence
  Description of Artificial Sequence: Synthetic oligonucleotide
  Sense strand starting at position 1561 of SEQ ID NO: 1881264
gagucaccuccaugcagau

SEQ ID NO: 2030961 - RNA, 19 nt, Artificial Sequence
  Description of Artificial Sequence: Synthetic oligonucleotide
  Antisense strand to SEQ ID NO: 2030960
aucugcauggaggugacuc

SEQ ID NO: 2030962 - RNA, 19 nt, Artificial Sequence
  Description of Artificial Sequence: Synthetic oligonucleotide
  Sense strand starting at position 1632 of SEQ ID NO: 1881264
ggaugugaguauccaccuu

SEQ ID NO: 2030963 - RNA, 19 nt, Artificial Sequence
  Description of Artificial Sequence: Synthetic oligonucleotide
  Antisense strand to SEQ ID NO: 2030962
aagguggauacucacaucc

SEQ ID NO: 2030964 - RNA, 19 nt, Artificial Sequence
  Description of Artificial Sequence: Synthetic oligonucleotide
  Sense strand starting at position 1907 of SEQ ID NO: 1881264
ucccaauuccugcagggaa

SEQ ID NO: 2030965 - RNA, 19 nt, Artificial Sequence
  Description of Artificial Sequence: Synthetic oligonucleotide
  Antisense strand to SEQ ID NO: 2030964
uucccugcaggaauuggga

SEQ ID NO: 2030966 - RNA, 19 nt, Artificial Sequence
  Description of Artificial Sequence: Synthetic oligonucleotide
  Sense strand starting at position 1909 of SEQ ID NO: 1881264
ccaauuccugcagggaagu

SEQ ID NO: 2030967 - RNA, 19 nt, Artificial Sequence
  Description of Artificial Sequence: Synthetic oligonucleotide
  Antisense strand to SEQ ID NO: 2030966
acuucccugcaggaauugg

SEQ ID NO: 2030968 - RNA, 19 nt, Artificial Sequence
  Description of Artificial Sequence: Synthetic oligonucleotide
  Sense strand starting at position 2035 of SEQ ID NO: 1881264
ggcagacuucugcaaggug

SEQ ID NO: 2030969 - RNA, 19 nt, Artificial Sequence
  Description of Artificial Sequence: Synthetic oligonucleotide
  Antisense strand to SEQ ID NO: 2030968
caccuugcagaagucugcc

SEQ ID NO: 2030970 - RNA, 19 nt, Artificial Sequence
  Description of Artificial Sequence: Synthetic oligonucleotide
  Sense strand starting at position 2158 of SEQ ID NO: 1881264
uugggacucuccuccaaca

SEQ ID NO: 2030971 - RNA, 19 nt, Artificial Sequence
  Description of Artificial Sequence: Synthetic oligonucleotide
  Antisense strand to SEQ ID NO: 2030970
uguuggaggagagucccaa

SEQ ID NO: 2030972 - RNA, 19 nt, Artificial Sequence
  Description of Artificial Sequence: Synthetic oligonucleotide
  Sense strand starting at position 2548 of SEQ ID NO: 1881264
acaucuaguccacgucaca

SEQ ID NO: 2030973 - RNA, 19 nt, Artificial Sequence
  Description of Artificial Sequence: Synthetic oligonucleotide
  Antisense strand to SEQ ID NO: 2030972
ugugacguggacuagaugu

SEQ ID NO: 2030974 - RNA, 19 nt, Artificial Sequence
  Description of Artificial Sequence: Synthetic oligonucleotide
  Sense strand starting at position 2626 of SEQ ID NO: 1881264
ucaggacuccuuggagacu

SEQ ID NO: 2030975 - RNA, 19 nt, Artificial Sequence
  Description of Artificial Sequence: Synthetic oligonucleotide
  Antisense strand to SEQ ID NO: 2030974
agucuccaaggaguccuga

SEQ ID NO: 2030976 - RNA, 19 nt, Artificial Sequence
  Description of Artificial Sequence: Synthetic oligonucleotide
  Sense strand starting at position 2663 of SEQ ID NO: 1881264
uuuccagauggguaagguu

SEQ ID NO: 2030977 - RNA, 19 nt, Artificial Sequence
  Description of Artificial Sequence: Synthetic oligonucleotide
  Antisense strand to SEQ ID NO: 2030976
aaccuuacccaucuggaaa

SEQ ID NO: 2030978 - RNA, 19 nt, Artificial Sequence
  Description of Artificial Sequence: Synthetic oligonucleotide
  Sense strand starting at position 2726 of SEQ ID NO: 1881264
agaguaugaugaucguaaa

SEQ ID NO: 2030979 - RNA, 19 nt, Artificial Sequence
  Description of Artificial Sequence: Synthetic oligonucleotide
  Antisense strand to SEQ ID NO: 2030978
uuuacgaucaucauacucu

SEQ ID NO: 2030980 - RNA, 19 nt, Artificial Sequence
  Description of Artificial Sequence: Synthetic oligonucleotide
  Sense strand starting at position 2727 of SEQ ID NO: 1881264
gaguaugaugaucguaaag

SEQ ID NO: 2030981 - RNA, 19 nt, Artificial Sequence
  Description of Artificial Sequence: Synthetic oligonucleotide
  Antisense strand to SEQ ID NO: 2030980
cuuuacgaucaucauacuc

SEQ ID NO: 2030982 - RNA, 19 nt, Artificial Sequence
  Description of Artificial Sequence: Synthetic oligonucleotide
  Sense strand starting at position 2788 of SEQ ID NO: 1881264
uggugcuaucuguaaggga

SEQ ID NO: 2030983 - RNA, 19 nt, Artificial Sequence
  Description of Artificial Sequence: Synthetic oligonucleotide
  Antisense strand to SEQ ID NO: 2030982
ucccuuacagauagcacca

SEQ ID NO: 2030984 - RNA, 19 nt, Artificial Sequence
  Description of Artificial Sequence: Synthetic oligonucleotide
  Sense strand starting at position 2801 of SEQ ID NO: 1881264
aagggacuguaggauuuaa

SEQ ID NO: 2030985 - RNA, 19 nt, Artificial Sequence
  Description of Artificial Sequence: Synthetic oligonucleotide
  Antisense strand to SEQ ID NO: 2030984
uuaaauccuacagucccuu

SEQ ID NO: 2030986 - RNA, 19 nt, Artificial Sequence
  Description of Artificial Sequence: Synthetic oligonucleotide
  Sense strand starting at position 2830 of SEQ ID NO: 1881264
acuaauauuuccggaacau

SEQ ID NO: 2030987 - RNA, 19 nt, Artificial Sequence
  Description of Artificial Sequence: Synthetic oligonucleotide
  Antisense strand to SEQ ID NO: 2030986
auguuccggaaauauuagu

SEQ ID NO: 2030988 - RNA, 19 nt, Artificial Sequence
  Description of Artificial Sequence: Synthetic oligonucleotide
  Sense strand starting at position 2920 of SEQ ID NO: 1881264
uugguuugccuggacagua

SEQ ID NO: 2030989 - RNA, 19 nt, Artificial Sequence
  Description of Artificial Sequence: Synthetic oligonucleotide
  Antisense strand to SEQ ID NO: 2030988
uacuguccaggcaaaccaa

SEQ ID NO: 2030990 - RNA, 19 nt, Artificial Sequence
  Description of Artificial Sequence: Synthetic oligonucleotide
  Sense strand starting at position 3096 of SEQ ID NO: 1881264
caggaaaugucagcugcua

SEQ ID NO: 2030991 - RNA, 19 nt, Artificial Sequence
  Description of Artificial Sequence: Synthetic oligonucleotide
  Antisense strand to SEQ ID NO: 2030990
uagcagcugacauuuccug

SEQ ID NO: 2030992 - RNA, 19 nt, Artificial Sequence
  Description of Artificial Sequence: Synthetic oligonucleotide
  Sense strand starting at position 3261 of SEQ ID NO: 1881264
aaaggcgcucuguaugauu

SEQ ID NO: 2030993 - RNA, 19 nt, Artificial Sequence
  Description of Artificial Sequence: Synthetic oligonucleotide
  Antisense strand to SEQ ID NO: 2030992
aaucauacagagcgccuuu

SEQ ID NO: 2030994 - RNA, 19 nt, Artificial Sequence
  Description of Artificial Sequence: Synthetic oligonucleotide
  Sense strand starting at position 3359 of SEQ ID NO: 1881264
ccaucagaauguuugguca

SEQ ID NO: 2030995 - RNA, 19 nt, Artificial Sequence
  Description of Artificial Sequence: Synthetic oligonucleotide
  Antisense strand to SEQ ID NO: 2030994
ugaccaaacauucugaugg

SEQ ID NO: 2030996 - RNA, 19 nt, Artificial Sequence
  Description of Artificial Sequence: Synthetic oligonucleotide
  Sense strand starting at position 3362 of SEQ ID NO: 1881264
ucagaauguuuggucagaa

SEQ ID NO: 2030997 - RNA, 19 nt, Artificial Sequence
  Description of Artificial Sequence: Synthetic oligonucleotide
  Antisense strand to SEQ ID NO: 2030996
uucugaccaaacauucuga

SEQ ID NO: 2030998 - RNA, 19 nt, Artificial Sequence
  Description of Artificial Sequence: Synthetic oligonucleotide
  Sense strand starting at position 3363 of SEQ ID NO: 1881264
cagaauguuuggucagaaa

SEQ ID NO: 2030999 - RNA, 19 nt, Artificial Sequence
  Description of Artificial Sequence: Synthetic oligonucleotide
  Antisense strand to SEQ ID NO: 2030998
uuucugaccaaacauucug

SEQ ID NO: 2031000 - RNA, 19 nt, Artificial Sequence
  Description of Artificial Sequence: Synthetic oligonucleotide
  Sense strand starting at position 3566 of SEQ ID NO: 1881264
ccaguacagagguguuaug

SEQ ID NO: 2031001 - RNA, 19 nt, Artificial Sequence
  Description of Artificial Sequence: Synthetic oligonucleotide
  Antisense strand to SEQ ID NO: 2031000
cauaacaccucuguacugg

SEQ ID NO: 2031002 - RNA, 19 nt, Artificial Sequence
  Description of Artificial Sequence: Synthetic oligonucleotide
  Sense strand starting at position 3593 of SEQ ID NO: 1881264
ggcagauucccaugagaau

SEQ ID NO: 2031003 - RNA, 19 nt, Artificial Sequence
  Description of Artificial Sequence: Synthetic oligonucleotide
  Antisense strand to SEQ ID NO: 2031002
auucucaugggaaucugcc

SEQ ID NO: 2031004 - RNA, 19 nt, Artificial Sequence
  Description of Artificial Sequence: Synthetic oligonucleotide
  Sense strand starting at position 3681 of SEQ ID NO: 1881264
caacgucgaccuugacaaa

SEQ ID NO: 2031005 - RNA, 19 nt, Artificial Sequence
  Description of Artificial Sequence: Synthetic oligonucleotide
  Antisense strand to SEQ ID NO: 2031004
uuugucaaggucgacguug

SEQ ID NO: 2031006 - RNA, 19 nt, Artificial Sequence
  Description of Artificial Sequence: Synthetic oligonucleotide
  Sense strand starting at position 3755 of SEQ ID NO: 1881264
aaugaaugcuuggaagaaa

SEQ ID NO: 2031007 - RNA, 19 nt, Artificial Sequence
  Description of Artificial Sequence: Synthetic oligonucleotide
  Antisense strand to SEQ ID NO: 2031006
uuucuuccaagcauucauu

SEQ ID NO: 2031008 - RNA, 19 nt, Artificial Sequence
  Description of Artificial Sequence: Synthetic oligonucleotide
  Sense strand starting at position 3827 of SEQ ID NO: 1881264
cacacaguucuuugguuga

SEQ ID NO: 2031009 - RNA, 19 nt, Artificial Sequence
  Description of Artificial Sequence: Synthetic oligonucleotide
  Antisense strand to SEQ ID NO: 2031008
ucaaccaaagaacugugug

SEQ ID NO: 2031010 - RNA, 19 nt, Artificial Sequence
  Description of Artificial Sequence: Synthetic oligonucleotide
  Sense strand starting at position 3840 of SEQ ID NO: 1881264
gguugaugguuauuugcau

SEQ ID NO: 2031011 - RNA, 19 nt, Artificial Sequence
  Description of Artificial Sequence: Synthetic oligonucleotide
  Antisense strand to SEQ ID NO: 2031010
augcaaauaaccaucaacc

SEQ ID NO: 2031012 - RNA, 19 nt, Artificial Sequence
  Description of Artificial Sequence: Synthetic oligonucleotide
  Sense strand starting at position 3841 of SEQ ID NO: 1881264
guugaugguuauuugcauu

SEQ ID NO: 2031013 - RNA, 19 nt, Artificial Sequence
  Description of Artificial Sequence: Synthetic oligonucleotide
  Antisense strand to SEQ ID NO: 2031012
aaugcaaauaaccaucaac

SEQ ID NO: 2031014 - RNA, 19 nt, Artificial Sequence
  Description of Artificial Sequence: Synthetic oligonucleotide
  Sense strand starting at position 3849 of SEQ ID NO: 1881264
uuauuugcauuuggacaaa

SEQ ID NO: 2031015 - RNA, 19 nt, Artificial Sequence
  Description of Artificial Sequence: Synthetic oligonucleotide
  Antisense strand to SEQ ID NO: 2031014
uuuguccaaaugcaaauaa

SEQ ID NO: 2031016 - RNA, 19 nt, Artificial Sequence
  Description of Artificial Sequence: Synthetic oligonucleotide
  Sense strand starting at position 241 of SEQ ID NO: 1881265
gagugagaggucugguuuc

SEQ ID NO: 2031017 - RNA, 19 nt, Artificial Sequence
  Description of Artificial Sequence: Synthetic oligonucleotide
  Antisense strand to SEQ ID NO: 2031016
gaaaccagaccucucacuc

SEQ ID NO: 2031018 - RNA, 19 nt, Artificial Sequence
  Description of Artificial Sequence: Synthetic oligonucleotide
  Sense strand starting at position 493 of SEQ ID NO: 1881265
caguuucuggccugaguca

SEQ ID NO: 2031019 - RNA, 19 nt, Artificial Sequence
  Description of Artificial Sequence: Synthetic oligonucleotide
  Antisense strand to SEQ ID NO: 2031018
ugacucaggccagaaacug

SEQ ID NO: 2031020 - RNA, 19 nt, Artificial Sequence
  Description of Artificial Sequence: Synthetic oligonucleotide
  Sense strand starting at position 502 of SEQ ID NO: 1881265
gccugagucacuggauguu

SEQ ID NO: 2031021 - RNA, 19 nt, Artificial Sequence
  Description of Artificial Sequence: Synthetic oligonucleotide
  Antisense strand to SEQ ID NO: 2031020
aacauccagugacucaggc

SEQ ID NO: 2031022 - RNA, 19 nt, Artificial Sequence
  Description of Artificial Sequence: Synthetic oligonucleotide
  Sense strand starting at position 709 of SEQ ID NO: 1881265
cuaguuugacauggcaacu

SEQ ID NO: 2031023 - RNA, 19 nt, Artificial Sequence
  Description of Artificial Sequence: Synthetic oligonucleotide
  Antisense strand to SEQ ID NO: 2031022
aguugccaugucaaacuag

SEQ ID NO: 2031024 - RNA, 19 nt, Artificial Sequence
  Description of Artificial Sequence: Synthetic oligonucleotide
  Sense strand starting at position 775 of SEQ ID NO: 1881265
cugccaaaugucugcaaug

SEQ ID NO: 2031025 - RNA, 19 nt, Artificial Sequence
  Description of Artificial Sequence: Synthetic oligonucleotide
  Antisense strand to SEQ ID NO: 2031024
cauugcagacauuuggcag

SEQ ID NO: 2031026 - RNA, 19 nt, Artificial Sequence
  Description of Artificial Sequence: Synthetic oligonucleotide
  Sense strand starting at position 777 of SEQ ID NO: 1881265
gccaaaugucugcaaugca

SEQ ID NO: 2031027 - RNA, 19 nt, Artificial Sequence
  Description of Artificial Sequence: Synthetic oligonucleotide
  Antisense strand to SEQ ID NO: 2031026
ugcauugcagacauuuggc

SEQ ID NO: 2031028 - RNA, 19 nt, Artificial Sequence
  Description of Artificial Sequence: Synthetic oligonucleotide
  Sense strand starting at position 795 of SEQ ID NO: 1881265
auaggacagucugccaaau

SEQ ID NO: 2031029 - RNA, 19 nt, Artificial Sequence
  Description of Artificial Sequence: Synthetic oligonucleotide
  Antisense strand to SEQ ID NO: 2031028
auuuggcagacuguccuau

SEQ ID NO: 2031030 - RNA, 19 nt, Artificial Sequence
  Description of Artificial Sequence: Synthetic oligonucleotide
  Sense strand starting at position 805 of SEQ ID NO: 1881265
cugccaaaugaguaacuaa

SEQ ID NO: 2031031 - RNA, 19 nt, Artificial Sequence
  Description of Artificial Sequence: Synthetic oligonucleotide
  Antisense strand to SEQ ID NO: 2031030
uuaguuacucauuuggcag

SEQ ID NO: 2031032 - RNA, 19 nt, Artificial Sequence
  Description of Artificial Sequence: Synthetic oligonucleotide
  Sense strand starting at position 1061 of SEQ ID NO: 1881265
augacuucugguggcauga

SEQ ID NO: 2031033 - RNA, 19 nt, Artificial Sequence
  Description of Artificial Sequence: Synthetic oligonucleotide
  Antisense strand to SEQ ID NO: 2031032
ucaugccaccagaagucau

SEQ ID NO: 2031034 - RNA, 19 nt, Artificial Sequence
  Description of Artificial Sequence: Synthetic oligonucleotide
  Sense strand starting at position 1089 of SEQ ID NO: 1881265
uuguaacuuugaguugaga

SEQ ID NO: 2031035 - RNA, 19 nt, Artificial Sequence
  Description of Artificial Sequence: Synthetic oligonucleotide
  Antisense strand to SEQ ID NO: 2031034
ucucaacucaaaguuacaa

SEQ ID NO: 2031036 - RNA, 19 nt, Artificial Sequence
  Description of Artificial Sequence: Synthetic oligonucleotide
  Sense strand starting at position 1091 of SEQ ID NO: 1881265
guaacuuugaguugagagu

SEQ ID NO: 2031037 - RNA, 19 nt, Artificial Sequence
  Description of Artificial Sequence: Synthetic oligonucleotide
  Antisense strand to SEQ ID NO: 2031036
acucucaacucaaaguuac

SEQ ID NO: 2031038 - RNA, 19 nt, Artificial Sequence
  Description of Artificial Sequence: Synthetic oligonucleotide
  Sense strand starting at position 1097 of SEQ ID NO: 1881265
uugaguugagaguaucagu

SEQ ID NO: 2031039 - RNA, 19 nt, Artificial Sequence
  Description of Artificial Sequence: Synthetic oligonucleotide
  Antisense strand to SEQ ID NO: 2031038
acugauacucucaacucaa

SEQ ID NO: 2031040 - RNA, 19 nt, Artificial Sequence
  Description of Artificial Sequence: Synthetic oligonucleotide
  Sense strand starting at position 1106 of SEQ ID NO: 1881265
gaguaucagugaccugaug

SEQ ID NO: 2031041 - RNA, 19 nt, Artificial Sequence
  Description of Artificial Sequence: Synthetic oligonucleotide
  Antisense strand to SEQ ID NO: 2031040
caucaggucacugauacuc

SEQ ID NO: 2031042 - RNA, 19 nt, Artificial Sequence
  Description of Artificial Sequence: Synthetic oligonucleotide
  Sense strand starting at position 1108 of SEQ ID NO: 1881265
guaucagugaccugaugaa

SEQ ID NO: 2031043 - RNA, 19 nt, Artificial Sequence
  Description of Artificial Sequence: Synthetic oligonucleotide
  Antisense strand to SEQ ID NO: 2031042
uucaucaggucacugauac

SEQ ID NO: 2031044 - RNA, 19 nt, Artificial Sequence
  Description of Artificial Sequence: Synthetic oligonucleotide
  Sense strand starting at position 1516 of SEQ ID NO: 1881265
gagugaacgccugguccua

SEQ ID NO: 2031045 - RNA, 19 nt, Artificial Sequence
  Description of Artificial Sequence: Synthetic oligonucleotide
  Antisense strand to SEQ ID NO: 2031044
uaggaccaggcguucacuc

SEQ ID NO: 2031046 - RNA, 19 nt, Artificial Sequence
  Description of Artificial Sequence: Synthetic oligonucleotide
  Sense strand starting at position 1823 of SEQ ID NO: 1881265
cuagacucucuggaaguuu

SEQ ID NO: 2031047 - RNA, 19 nt, Artificial Sequence
  Description of Artificial Sequence: Synthetic oligonucleotide
  Antisense strand to SEQ ID NO: 2031046
aaacuuccagagagucuag

SEQ ID NO: 2031048 - RNA, 19 nt, Artificial Sequence
  Description of Artificial Sequence: Synthetic oligonucleotide
  Sense strand starting at position 1835 of SEQ ID NO: 1881265
gaaguuuagggaugcguga

SEQ ID NO: 2031049 - RNA, 19 nt, Artificial Sequence
  Description of Artificial Sequence: Synthetic oligonucleotide
  Antisense strand to SEQ ID NO: 2031048
ucacgcaucccuaaacuuc

SEQ ID NO: 2031050 - RNA, 19 nt, Artificial Sequence
  Description of Artificial Sequence: Synthetic oligonucleotide
  Sense strand starting at position 1871 of SEQ ID NO: 1881265
agggaaugcaccugugauc

SEQ ID NO: 2031051 - RNA, 19 nt, Artificial Sequence
  Description of Artificial Sequence: Synthetic oligonucleotide
  Antisense strand to SEQ ID NO: 2031050
gaucacaggugcauucccu

SEQ ID NO: 2031052 - RNA, 19 nt, Artificial Sequence
  Description of Artificial Sequence: Synthetic oligonucleotide
  Sense strand starting at position 1876 of SEQ ID NO: 1881265
augcaccugugaucuaagu

SEQ ID NO: 2031053 - RNA, 19 nt, Artificial Sequence
  Description of Artificial Sequence: Synthetic oligonucleotide
  Antisense strand to SEQ ID NO: 2031052
acuuagaucacaggugcau

SEQ ID NO: 2031054 - RNA, 19 nt, Artificial Sequence
  Description of Artificial Sequence: Synthetic oligonucleotide
  Sense strand starting at position 1887 of SEQ ID NO: 1881265
aucuaagucuggcuaguca

SEQ ID NO: 2031055 - RNA, 19 nt, Artificial Sequence
  Description of Artificial Sequence: Synthetic oligonucleotide
  Antisense strand to SEQ ID NO: 2031054
ugacuagccagacuuagau

SEQ ID NO: 2031056 - RNA, 19 nt, Artificial Sequence
  Description of Artificial Sequence: Synthetic oligonucleotide
  Sense strand starting at position 1997 of SEQ ID NO: 1881265
ggcagauucucauugacaa

SEQ ID NO: 2031057 - RNA, 19 nt, Artificial Sequence
  Description of Artificial Sequence: Synthetic oligonucleotide
  Antisense strand to SEQ ID NO: 2031056
uugucaaugagaaucugcc

SEQ ID NO: 2031058 - RNA, 19 nt, Artificial Sequence
  Description of Artificial Sequence: Synthetic oligonucleotide
  Sense strand starting at position 1998 of SEQ ID NO: 1881265
gcagauucucauugacaau

SEQ ID NO: 2031059 - RNA, 19 nt, Artificial Sequence
  Description of Artificial Sequence: Synthetic oligonucleotide
  Antisense strand to SEQ ID NO: 2031058
auugucaaugagaaucugc

SEQ ID NO: 2031060 - RNA, 19 nt, Artificial Sequence
  Description of Artificial Sequence: Synthetic oligonucleotide
  Sense strand starting at position 2032 of SEQ ID NO: 1881265
ugcugagcucaguaaguca

SEQ ID NO: 2031061 - RNA, 19 nt, Artificial Sequence
  Description of Artificial Sequence: Synthetic oligonucleotide
  Antisense strand to SEQ ID NO: 2031060
ugacuuacugagcucagca

SEQ ID NO: 2031062 - RNA, 19 nt, Artificial Sequence
  Description of Artificial Sequence: Synthetic oligonucleotide
  Sense strand starting at position 2040 of SEQ ID NO: 1881265
ucaguaagucagggcugua

SEQ ID NO: 2031063 - RNA, 19 nt, Artificial Sequence
  Description of Artificial Sequence: Synthetic oligonucleotide
  Antisense strand to SEQ ID NO: 2031062
uacagcccugacuuacuga

SEQ ID NO: 2031064 - RNA, 19 nt, Artificial Sequence
  Description of Artificial Sequence: Synthetic oligonucleotide
  Sense strand starting at position 2134 of SEQ ID NO: 1881265
ggagacagaucuugaugag

SEQ ID NO: 2031065 - RNA, 19 nt, Artificial Sequence
  Description of Artificial Sequence: Synthetic oligonucleotide
  Antisense strand to SEQ ID NO: 2031064
cucaucaagaucugucucc

SEQ ID NO: 2031066 - RNA, 19 nt, Artificial Sequence
  Description of Artificial Sequence: Synthetic oligonucleotide
  Sense strand starting at position 2422 of SEQ ID NO: 1881265
ugccguaaggaucaaacaa

SEQ ID NO: 2031067 - RNA, 19 nt, Artificial Sequence
  Description of Artificial Sequence: Synthetic oligonucleotide
  Antisense strand to SEQ ID NO: 2031066
uuguuugauccuuacggca

SEQ ID NO: 2031068 - RNA, 19 nt, Artificial Sequence
  Description of Artificial Sequence: Synthetic oligonucleotide
  Sense strand starting at position 2845 of SEQ ID NO: 1881265
uuauguuauccgcauugug

SEQ ID NO: 2031069 - RNA, 19 nt, Artificial Sequence
  Description of Artificial Sequence: Synthetic oligonucleotide
  Antisense strand to SEQ ID NO: 2031068
cacaaugcggauaacauaa

SEQ ID NO: 2031070 - RNA, 19 nt, Artificial Sequence
  Description of Artificial Sequence: Synthetic oligonucleotide
  Sense strand starting at position 2847 of SEQ ID NO: 1881265
auguuauccgcauugugca

SEQ ID NO: 2031071 - RNA, 19 nt, Artificial Sequence
  Description of Artificial Sequence: Synthetic oligonucleotide
  Antisense strand to SEQ ID NO: 2031070
ugcacaaugcggauaacau

SEQ ID NO: 2031072 - RNA, 19 nt, Artificial Sequence
  Description of Artificial Sequence: Synthetic oligonucleotide
  Sense strand starting at position 2998 of SEQ ID NO: 1881265
gcaccaggcuuguucuaga

SEQ ID NO: 2031073 - RNA, 19 nt, Artificial Sequence
  Description of Artificial Sequence: Synthetic oligonucleotide
  Antisense strand to SEQ ID NO: 2031072
ucuagaacaagccuggugc

SEQ ID NO: 2031074 - RNA, 19 nt, Artificial Sequence
  Description of Artificial Sequence: Synthetic oligonucleotide
  Sense strand starting at position 3003 of SEQ ID NO: 1881265
aggcuuguucuagagcuau

SEQ ID NO: 2031075 - RNA, 19 nt, Artificial Sequence
  Description of Artificial Sequence: Synthetic oligonucleotide
  Antisense strand to SEQ ID NO: 2031074
auagcucuagaacaagccu

SEQ ID NO: 2031076 - RNA, 19 nt, Artificial Sequence
  Description of Artificial Sequence: Synthetic oligonucleotide
  Sense strand starting at position 3038 of SEQ ID NO: 1881265
ugggaaauacccugguguu

SEQ ID NO: 2031077 - RNA, 19 nt, Artificial Sequence
  Description of Artificial Sequence: Synthetic oligonucleotide
  Antisense strand to SEQ ID NO: 2031076
aacaccaggguauuuccca

SEQ ID NO: 2031078 - RNA, 19 nt, Artificial Sequence
  Description of Artificial Sequence: Synthetic oligonucleotide
  Sense strand starting at position 3039 of SEQ ID NO: 1881265
gggaaauacccugguguug

SEQ ID NO: 2031079 - RNA, 19 nt, Artificial Sequence
  Description of Artificial Sequence: Synthetic oligonucleotide
  Antisense strand to SEQ ID NO: 2031078
caacaccaggguauuuccc

SEQ ID NO: 2031080 - RNA, 19 nt, Artificial Sequence
  Description of Artificial Sequence: Synthetic oligonucleotide
  Sense strand starting at position 3194 of SEQ ID NO: 1881265
caggauugccauuacguau

SEQ ID NO: 2031081 - RNA, 19 nt, Artificial Sequence
  Description of Artificial Sequence: Synthetic oligonucleotide
  Antisense strand to SEQ ID NO: 2031080
auacguaauggcaauccug

SEQ ID NO: 2031082 - RNA, 19 nt, Artificial Sequence
  Description of Artificial Sequence: Synthetic oligonucleotide
  Sense strand starting at position 3208 of SEQ ID NO: 1881265
cguaucaaagcuuaggaaa

SEQ ID NO: 2031083 - RNA, 19 nt, Artificial Sequence
  Description of Artificial Sequence: Synthetic oligonucleotide
  Antisense strand to SEQ ID NO: 2031082
uuuccuaagcuuugauacg

SEQ ID NO: 2031084 - RNA, 19 nt, Artificial Sequence
  Description of Artificial Sequence: Synthetic oligonucleotide
  Sense strand starting at position 3211 of SEQ ID NO: 1881265
aucaaagcuuaggaaauaa

SEQ ID NO: 2031085 - RNA, 19 nt, Artificial Sequence
  Description of Artificial Sequence: Synthetic oligonucleotide
  Antisense strand to SEQ ID NO: 2031084
uuauuuccuaagcuuugau

SEQ ID NO: 2031086 - RNA, 19 nt, Artificial Sequence
  Description of Artificial Sequence: Synthetic oligonucleotide
  Sense strand starting at position 3636 of SEQ ID NO: 1881265
ucgccuucuaagggagaga

SEQ ID NO: 2031087 - RNA, 19 nt, Artificial Sequence
  Description of Artificial Sequence: Synthetic oligonucleotide
  Antisense strand to SEQ ID NO: 2031086
ucucucccuuagaaggcga

SEQ ID NO: 2031088 - RNA, 19 nt, Artificial Sequence
  Description of Artificial Sequence: Synthetic oligonucleotide
  Sense strand starting at position 3720 of SEQ ID NO: 1881265
ucuacuuaguucucuuaga

SEQ ID NO: 2031089 - RNA, 19 nt, Artificial Sequence
  Description of Artificial Sequence: Synthetic oligonucleotide
  Antisense strand to SEQ ID NO: 2031088
ucuaagagaacuaaguaga

SEQ ID NO: 2031090 - RNA, 19 nt, Artificial Sequence
  Description of Artificial Sequence: Synthetic oligonucleotide
  Sense strand starting at position 3721 of SEQ ID NO: 1881265
cuacuuaguucucuuagac

SEQ ID NO: 2031091 - RNA, 19 nt, Artificial Sequence
  Description of Artificial Sequence: Synthetic oligonucleotide
  Antisense strand to SEQ ID NO: 2031090
gucuaagagaacuaaguag

SEQ ID NO: 2031092 - RNA, 19 nt, Artificial Sequence
  Description of Artificial Sequence: Synthetic oligonucleotide
  Sense strand starting at position 3841 of SEQ ID NO: 1881265
gggugauucucagaggagg

SEQ ID NO: 2031093 - RNA, 19 nt, Artificial Sequence
  Description of Artificial Sequence: Synthetic oligonucleotide
  Antisense strand to SEQ ID NO: 2031092
ccuccucugagaaucaccc

SEQ ID NO: 2031094 - RNA, 19 nt, Artificial Sequence
  Description of Artificial Sequence: Synthetic oligonucleotide
  Sense strand starting at position 3856 of SEQ ID NO: 1881265
gaggaauuccugcggugca

SEQ ID NO: 2031095 - RNA, 19 nt, Artificial Sequence
  Description of Artificial Sequence: Synthetic oligonucleotide
  Antisense strand to SEQ ID NO: 2031094
ugcaccgcaggaauuccuc

SEQ ID NO: 2031096 - RNA, 19 nt, Artificial Sequence
  Description of Artificial Sequence: Synthetic oligonucleotide
  Sense strand starting at position 52 of SEQ ID NO: 1881266
acauauucuggauguaaau

SEQ ID NO: 2031097 - RNA, 19 nt, Artificial Sequence
  Description of Artificial Sequence: Synthetic oligonucleotide
  Antisense strand to SEQ ID NO: 2031096
auuuacauccagaauaugu

SEQ ID NO: 2031098 - RNA, 19 nt, Artificial Sequence
  Description of Artificial Sequence: Synthetic oligonucleotide
  Sense strand starting at position 63 of SEQ ID NO: 1881266
auguaaaugccuuaucaga

SEQ ID NO: 2031099 - RNA, 19 nt, Artificial Sequence
  Description of Artificial Sequence: Synthetic oligonucleotide
  Antisense strand to SEQ ID NO: 2031098
ucugauaaggcauuuacau

SEQ ID NO: 2031100 - RNA, 19 nt, Artificial Sequence
  Description of Artificial Sequence: Synthetic oligonucleotide
  Sense strand starting at position 65 of SEQ ID NO: 1881266
guaaaugccuuaucagaaa

SEQ ID NO: 2031101 - RNA, 19 nt, Artificial Sequence
  Description of Artificial Sequence: Synthetic oligonucleotide
  Antisense strand to SEQ ID NO: 2031100
uuucugauaaggcauuuac

SEQ ID NO: 2031102 - RNA, 19 nt, Artificial Sequence
  Description of Artificial Sequence: Synthetic oligonucleotide
  Sense strand starting at position 128 of SEQ ID NO: 1881266
ucugucagcuauuucuuua

SEQ ID NO: 2031103 - RNA, 19 nt, Artificial Sequence
  Description of Artificial Sequence: Synthetic oligonucleotide
  Antisense strand to SEQ ID NO: 2031102
uaaagaaauagcugacaga

SEQ ID NO: 2031104 - RNA, 19 nt, Artificial Sequence
  Description of Artificial Sequence: Synthetic oligonucleotide
  Sense strand starting at position 202 of SEQ ID NO: 1881266
aauggauuguggucucaau

SEQ ID NO: 2031105 - RNA, 19 nt, Artificial Sequence
  Description of Artificial Sequence: Synthetic oligonucleotide
  Antisense strand to SEQ ID NO: 2031104
auugagaccacaauccauu

SEQ ID NO: 2031106 - RNA, 19 nt, Artificial Sequence
  Description of Artificial Sequence: Synthetic oligonucleotide
  Sense strand starting at position 231 of SEQ ID NO: 1881266
agaaauuauugacuagcca

SEQ ID NO: 2031107 - RNA, 19 nt, Artificial Sequence
  Description of Artificial Sequence: Synthetic oligonucleotide
  Antisense strand to SEQ ID NO: 2031106
uggcuagucaauaauuucu

SEQ ID NO: 2031108 - RNA, 19 nt, Artificial Sequence
  Description of Artificial Sequence: Synthetic oligonucleotide
  Sense strand starting at position 239 of SEQ ID NO: 1881266
uugacuagccaaggucaaa

SEQ ID NO: 2031109 - RNA, 19 nt, Artificial Sequence
  Description of Artificial Sequence: Synthetic oligonucleotide
  Antisense strand to SEQ ID NO: 2031108
uuugaccuuggcuagucaa

SEQ ID NO: 2031110 - RNA, 19 nt, Artificial Sequence
  Description of Artificial Sequence: Synthetic oligonucleotide
  Sense strand starting at position 331 of SEQ ID NO: 1881266
gagucaauuugugugcaua

SEQ ID NO: 2031111 - RNA, 19 nt, Artificial Sequence
  Description of Artificial Sequence: Synthetic oligonucleotide
  Antisense strand to SEQ ID NO: 2031110
uaugcacacaaauugacuc

SEQ ID NO: 2031112 - RNA, 19 nt, Artificial Sequence
  Description of Artificial Sequence: Synthetic oligonucleotide
  Sense strand starting at position 332 of SEQ ID NO: 1881266
agucaauuugugugcauag

SEQ ID NO: 2031113 - RNA, 19 nt, Artificial Sequence
  Description of Artificial Sequence: Synthetic oligonucleotide
  Antisense strand to SEQ ID NO: 2031112
cuaugcacacaaauugacu

SEQ ID NO: 2031114 - RNA, 19 nt, Artificial Sequence
  Description of Artificial Sequence: Synthetic oligonucleotide
  Sense strand starting at position 334 of SEQ ID NO: 1881266
ucaauuugugugcauaguu

SEQ ID NO: 2031115 - RNA, 19 nt, Artificial Sequence
  Description of Artificial Sequence: Synthetic oligonucleotide
  Antisense strand to SEQ ID NO: 2031114
aacuaugcacacaaauuga

SEQ ID NO: 2031116 - RNA, 19 nt, Artificial Sequence
  Description of Artificial Sequence: Synthetic oligonucleotide
  Sense strand starting at position 350 of SEQ ID NO: 1881266
guuugagauaaaggccuaa

SEQ ID NO: 2031117 - RNA, 19 nt, Artificial Sequence
  Description of Artificial Sequence: Synthetic oligonucleotide
  Antisense strand to SEQ ID NO: 2031116
uuaggccuuuaucucaaac

SEQ ID NO: 2031118 - RNA, 19 nt, Artificial Sequence
  Description of Artificial Sequence: Synthetic oligonucleotide
  Sense strand starting at position 476 of SEQ ID NO: 1881266
acacaauuagaaggcuuua

SEQ ID NO: 2031119 - RNA, 19 nt, Artificial Sequence
  Description of Artificial Sequence: Synthetic oligonucleotide
  Antisense strand to SEQ ID NO: 2031118
uaaagccuucuaauugugu

SEQ ID NO: 2031120 - RNA, 19 nt, Artificial Sequence
  Description of Artificial Sequence: Synthetic oligonucleotide
  Sense strand starting at position 481 of SEQ ID NO: 1881266
auuagaaggcuuuacuucu

SEQ ID NO: 2031121 - RNA, 19 nt, Artificial Sequence
  Description of Artificial Sequence: Synthetic oligonucleotide
  Antisense strand to SEQ ID NO: 2031120
agaaguaaagccuucuaau

SEQ ID NO: 2031122 - RNA, 19 nt, Artificial Sequence
  Description of Artificial Sequence: Synthetic oligonucleotide
  Sense strand starting at position 1089 of SEQ ID NO: 1881266
cacguuuaaagacggagau

SEQ ID NO: 2031123 - RNA, 19 nt, Artificial Sequence
  Description of Artificial Sequence: Synthetic oligonucleotide
  Antisense strand to SEQ ID NO: 2031122
aucuccgucuuuaaacgug

SEQ ID NO: 2031124 - RNA, 19 nt, Artificial Sequence
  Description of Artificial Sequence: Synthetic oligonucleotide
  Sense strand starting at position 1090 of SEQ ID NO: 1881266
acguuuaaagacggagauu

SEQ ID NO: 2031125 - RNA, 19 nt, Artificial Sequence
  Description of Artificial Sequence: Synthetic oligonucleotide
  Antisense strand to SEQ ID NO: 2031124
aaucuccgucuuuaaacgu

SEQ ID NO: 2031126 - RNA, 19 nt, Artificial Sequence
  Description of Artificial Sequence: Synthetic oligonucleotide
  Sense strand starting at position 1136 of SEQ ID NO: 1881266
auagguaagacugguauac

SEQ ID NO: 2031127 - RNA, 19 nt, Artificial Sequence
  Description of Artificial Sequence: Synthetic oligonucleotide
  Antisense strand to SEQ ID NO: 2031126
guauaccagucuuaccuau

SEQ ID NO: 2031128 - RNA, 19 nt, Artificial Sequence
  Description of Artificial Sequence: Synthetic oligonucleotide
  Sense strand starting at position 1193 of SEQ ID NO: 1881266
acuguuugagcauaaguca

SEQ ID NO: 2031129 - RNA, 19 nt, Artificial Sequence
  Description of Artificial Sequence: Synthetic oligonucleotide
  Antisense strand to SEQ ID NO: 2031128
ugacuuaugcucaaacagu

SEQ ID NO: 2031130 - RNA, 19 nt, Artificial Sequence
  Description of Artificial Sequence: Synthetic oligonucleotide
  Sense strand starting at position 1201 of SEQ ID NO: 1881266
agcauaagucagggaauaa

SEQ ID NO: 2031131 - RNA, 19 nt, Artificial Sequence
  Description of Artificial Sequence: Synthetic oligonucleotide
  Antisense strand to SEQ ID NO: 2031130
uuauucccugacuuaugcu

SEQ ID NO: 2031132 - RNA, 19 nt, Artificial Sequence
  Description of Artificial Sequence: Synthetic oligonucleotide
  Sense strand starting at position 1253 of SEQ ID NO: 1881266
gucuucuuuacugggagaa

SEQ ID NO: 2031133 - RNA, 19 nt, Artificial Sequence
  Description of Artificial Sequence: Synthetic oligonucleotide
  Antisense strand to SEQ ID NO: 2031132
uucucccaguaaagaagac

SEQ ID NO: 2031134 - RNA, 19 nt, Artificial Sequence
  Description of Artificial Sequence: Synthetic oligonucleotide
  Sense strand starting at position 1254 of SEQ ID NO: 1881266
ucuucuuuacugggagaaa

SEQ ID NO: 2031135 - RNA, 19 nt, Artificial Sequence
  Description of Artificial Sequence: Synthetic oligonucleotide
  Antisense strand to SEQ ID NO: 2031134
uuucucccaguaaagaaga

SEQ ID NO: 2031136 - RNA, 19 nt, Artificial Sequence
  Description of Artificial Sequence: Synthetic oligonucleotide
  Sense strand starting at position 1263 of SEQ ID NO: 1881266
cugggagaaaucugccacu

SEQ ID NO: 2031137 - RNA, 19 nt, Artificial Sequence
  Description of Artificial Sequence: Synthetic oligonucleotide
  Antisense strand to SEQ ID NO: 2031136
aguggcagauuucucccag

SEQ ID NO: 2031138 - RNA, 19 nt, Artificial Sequence
  Description of Artificial Sequence: Synthetic oligonucleotide
  Sense strand starting at position 1369 of SEQ ID NO: 1881266
aguuguauuccugaucgaa

SEQ ID NO: 2031139 - RNA, 19 nt, Artificial Sequence
  Description of Artificial Sequence: Synthetic oligonucleotide
  Antisense strand to SEQ ID NO: 2031138
uucgaucaggaauacaacu

SEQ ID NO: 2031140 - RNA, 19 nt, Artificial Sequence
  Description of Artificial Sequence: Synthetic oligonucleotide
  Sense strand starting at position 1372 of SEQ ID NO: 1881266
uguauuccugaucgaagaa

SEQ ID NO: 2031141 - RNA, 19 nt, Artificial Sequence
  Description of Artificial Sequence: Synthetic oligonucleotide
  Antisense strand to SEQ ID NO: 2031140
uucuucgaucaggaauaca

SEQ ID NO: 2031142 - RNA, 19 nt, Artificial Sequence
  Description of Artificial Sequence: Synthetic oligonucleotide
  Sense strand starting at position 1373 of SEQ ID NO: 1881266
guauuccugaucgaagaau

SEQ ID NO: 2031143 - RNA, 19 nt, Artificial Sequence
  Description of Artificial Sequence: Synthetic oligonucleotide
  Antisense strand to SEQ ID NO: 2031142
auucuucgaucaggaauac

SEQ ID NO: 2031144 - RNA, 19 nt, Artificial Sequence
  Description of Artificial Sequence: Synthetic oligonucleotide
  Sense strand starting at position 1382 of SEQ ID NO: 1881266
aucgaagaaucacuaguau

SEQ ID NO: 2031145 - RNA, 19 nt, Artificial Sequence
  Description of Artificial Sequence: Synthetic oligonucleotide
  Antisense strand to SEQ ID NO: 2031144
auacuagugauucuucgau

SEQ ID NO: 2031146 - RNA, 19 nt, Artificial Sequence
  Description of Artificial Sequence: Synthetic oligonucleotide
  Sense strand starting at position 1394 of SEQ ID NO: 1881266
cuaguauuacaggaguuau

SEQ ID NO: 2031147 - RNA, 19 nt, Artificial Sequence
  Description of Artificial Sequence: Synthetic oligonucleotide
  Antisense strand to SEQ ID NO: 2031146
auaacuccuguaauacuag

SEQ ID NO: 2031148 - RNA, 19 nt, Artificial Sequence
  Description of Artificial Sequence: Synthetic oligonucleotide
  Sense strand starting at position 1905 of SEQ ID NO: 1881266
uguauccgugucgcuaauu

SEQ ID NO: 2031149 - RNA, 19 nt, Artificial Sequence
  Description of Artificial Sequence: Synthetic oligonucleotide
  Antisense strand to SEQ ID NO: 2031148
aauuagcgacacggauaca

SEQ ID NO: 2031150 - RNA, 19 nt, Artificial Sequence
  Description of Artificial Sequence: Synthetic oligonucleotide
  Sense strand starting at position 1950 of SEQ ID NO: 1881266
gguguuucuccagacaaca

SEQ ID NO: 2031151 - RNA, 19 nt, Artificial Sequence
  Description of Artificial Sequence: Synthetic oligonucleotide
  Antisense strand to SEQ ID NO: 2031150
uguugucuggagaaacacc

SEQ ID NO: 2031152 - RNA, 19 nt, Artificial Sequence
  Description of Artificial Sequence: Synthetic oligonucleotide
  Sense strand starting at position 2213 of SEQ ID NO: 1881266
uacccugggucauugggaa

SEQ ID NO: 2031153 - RNA, 19 nt, Artificial Sequence
  Description of Artificial Sequence: Synthetic oligonucleotide
  Antisense strand to SEQ ID NO: 2031152
uucccaaugacccagggua

SEQ ID NO: 2031154 - RNA, 19 nt, Artificial Sequence
  Description of Artificial Sequence: Synthetic oligonucleotide
  Sense strand starting at position 2452 of SEQ ID NO: 1881266
ggucgcuaugccucuuauu

SEQ ID NO: 2031155 - RNA, 19 nt, Artificial Sequence
  Description of Artificial Sequence: Synthetic oligonucleotide
  Antisense strand to SEQ ID NO: 2031154
aauaagaggcauagcgacc

SEQ ID NO: 2031156 - RNA, 19 nt, Artificial Sequence
  Description of Artificial Sequence: Synthetic oligonucleotide
  Sense strand starting at position 2454 of SEQ ID NO: 1881266
ucgcuaugccucuuauucu

SEQ ID NO: 2031157 - RNA, 19 nt, Artificial Sequence
  Description of Artificial Sequence: Synthetic oligonucleotide
  Antisense strand to SEQ ID NO: 2031156
agaauaagaggcauagcga

SEQ ID NO: 2031158 - RNA, 19 nt, Artificial Sequence
  Description of Artificial Sequence: Synthetic oligonucleotide
  Sense strand starting at position 2481 of SEQ ID NO: 1881266
gucgaaugugugggaauuu

SEQ ID NO: 2031159 - RNA, 19 nt, Artificial Sequence
  Description of Artificial Sequence: Synthetic oligonucleotide
  Antisense strand to SEQ ID NO: 2031158
aaauucccacacauucgac

SEQ ID NO: 2031160 - RNA, 19 nt, Artificial Sequence
  Description of Artificial Sequence: Synthetic oligonucleotide
  Sense strand starting at position 2621 of SEQ ID NO: 1881266
ugagaugagucccuacuau

SEQ ID NO: 2031161 - RNA, 19 nt, Artificial Sequence
  Description of Artificial Sequence: Synthetic oligonucleotide
  Antisense strand to SEQ ID NO: 2031160
auaguagggacucaucuca

SEQ ID NO: 2031162 - RNA, 19 nt, Artificial Sequence
  Description of Artificial Sequence: Synthetic oligonucleotide
  Sense strand starting at position 2714 of SEQ ID NO: 1881266
auugcuuguccgcuacagu

SEQ ID NO: 2031163 - RNA, 19 nt, Artificial Sequence
  Description of Artificial Sequence: Synthetic oligonucleotide
  Antisense strand to SEQ ID NO: 2031162
acuguagcggacaagcaau

SEQ ID NO: 2031164 - RNA, 19 nt, Artificial Sequence
  Description of Artificial Sequence: Synthetic oligonucleotide
  Sense strand starting at position 2919 of SEQ ID NO: 1881266
ggaaacuauucugucucca

SEQ ID NO: 2031165 - RNA, 19 nt, Artificial Sequence
  Description of Artificial Sequence: Synthetic oligonucleotide
  Antisense strand to SEQ ID NO: 2031164
uggagacagaauaguuucc

SEQ ID NO: 2031166 - RNA, 19 nt, Artificial Sequence
  Description of Artificial Sequence: Synthetic oligonucleotide
  Sense strand starting at position 3432 of SEQ ID NO: 1881266
ccuggaguauauucuaaag

SEQ ID NO: 2031167 - RNA, 19 nt, Artificial Sequence
  Description of Artificial Sequence: Synthetic oligonucleotide
  Antisense strand to SEQ ID NO: 2031166
cuuuagaauauacuccagg

SEQ ID NO: 2031168 - RNA, 19 nt, Artificial Sequence
  Description of Artificial Sequence: Synthetic oligonucleotide
  Sense strand starting at position 3468 of SEQ ID NO: 1881266
cccugagacuuuguagaaa

SEQ ID NO: 2031169 - RNA, 19 nt, Artificial Sequence
  Description of Artificial Sequence: Synthetic oligonucleotide
  Antisense strand to SEQ ID NO: 2031168
uuucuacaaagucucaggg

SEQ ID NO: 2031170 - RNA, 19 nt, Artificial Sequence
  Description of Artificial Sequence: Synthetic oligonucleotide
  Sense strand starting at position 3680 of SEQ ID NO: 1881266
acaagcuuuguacaauuga

SEQ ID NO: 2031171 - RNA, 19 nt, Artificial Sequence
  Description of Artificial Sequence: Synthetic oligonucleotide
  Antisense strand to SEQ ID NO: 2031170
ucaauuguacaaagcuugu

SEQ ID NO: 2031172 - RNA, 19 nt, Artificial Sequence
  Description of Artificial Sequence: Synthetic oligonucleotide
  Sense strand starting at position 3892 of SEQ ID NO: 1881266
auucuuaucucugcaggaa

SEQ ID NO: 2031173 - RNA, 19 nt, Artificial Sequence
  Description of Artificial Sequence: Synthetic oligonucleotide
  Antisense strand to SEQ ID NO: 2031172
uuccugcagagauaagaau

SEQ ID NO: 2031174 - RNA, 19 nt, Artificial Sequence
  Description of Artificial Sequence: Synthetic oligonucleotide
  Sense strand starting at position 3893 of SEQ ID NO: 1881266
uucuuaucucugcaggaag

SEQ ID NO: 2031175 - RNA, 19 nt, Artificial Sequence
  Description of Artificial Sequence: Synthetic oligonucleotide
  Antisense strand to SEQ ID NO: 2031174
cuuccugcagagauaagaa

SEQ ID NO: 2031176 - RNA, 19 nt, Artificial Sequence
  Description of Artificial Sequence: Synthetic oligonucleotide
  Sense strand starting at position 22 of SEQ ID NO: 1881267
ucuugagagguugguuuaa

SEQ ID NO: 2031177 - RNA, 19 nt, Artificial Sequence
  Description of Artificial Sequence: Synthetic oligonucleotide
  Antisense strand to SEQ ID NO: 2031176
uuaaaccaaccucucaaga

SEQ ID NO: 2031178 - RNA, 19 nt, Artificial Sequence
  Description of Artificial Sequence: Synthetic oligonucleotide
  Sense strand starting at position 24 of SEQ ID NO: 1881267
uugagagguugguuuaaua

SEQ ID NO: 2031179 - RNA, 19 nt, Artificial Sequence
  Description of Artificial Sequence: Synthetic oligonucleotide
  Antisense strand to SEQ ID NO: 2031178
uauuaaaccaaccucucaa

SEQ ID NO: 2031180 - RNA, 19 nt, Artificial Sequence
  Description of Artificial Sequence: Synthetic oligonucleotide
  Sense strand starting at position 86 of SEQ ID NO: 1881267
ggaagacaguuaccuuguu

SEQ ID NO: 2031181 - RNA, 19 nt, Artificial Sequence
  Description of Artificial Sequence: Synthetic oligonucleotide
  Antisense strand to SEQ ID NO: 2031180
aacaagguaacugucuucc

SEQ ID NO: 2031182 - RNA, 19 nt, Artificial Sequence
  Description of Artificial Sequence: Synthetic oligonucleotide
  Sense strand starting at position 106 of SEQ ID NO: 1881267
uggguuaugcaacaaauca

SEQ ID NO: 2031183 - RNA, 19 nt, Artificial Sequence
  Description of Artificial Sequence: Synthetic oligonucleotide
  Antisense strand to SEQ ID NO: 2031182
ugauuuguugcauaaccca

SEQ ID NO: 2031184 - RNA, 19 nt, Artificial Sequence
  Description of Artificial Sequence: Synthetic oligonucleotide
  Sense strand starting at position 146 of SEQ ID NO: 1881267
gugugauuucauuguuguc

SEQ ID NO: 2031185 - RNA, 19 nt, Artificial Sequence
  Description of Artificial Sequence: Synthetic oligonucleotide
  Antisense strand to SEQ ID NO: 2031184
gacaacaaugaaaucacac

SEQ ID NO: 2031186 - RNA, 19 nt, Artificial Sequence
  Description of Artificial Sequence: Synthetic oligonucleotide
  Sense strand starting at position 231 of SEQ ID NO: 1881267
gggcuuggaaugcaucaau

SEQ ID NO: 2031187 - RNA, 19 nt, Artificial Sequence
  Description of Artificial Sequence: Synthetic oligonucleotide
  Antisense strand to SEQ ID NO: 2031186
auugaugcauuccaagccc

SEQ ID NO: 2031188 - RNA, 19 nt, Artificial Sequence
  Description of Artificial Sequence: Synthetic oligonucleotide
  Sense strand starting at position 234 of SEQ ID NO: 1881267
cuuggaaugcaucaaugua

SEQ ID NO: 2031189 - RNA, 19 nt, Artificial Sequence
  Description of Artificial Sequence: Synthetic oligonucleotide
  Antisense strand to SEQ ID NO: 2031188
uacauugaugcauuccaag

SEQ ID NO: 2031190 - RNA, 19 nt, Artificial Sequence
  Description of Artificial Sequence: Synthetic oligonucleotide
  Sense strand starting at position 336 of SEQ ID NO: 1881267
cagugugauuuggccucaa

SEQ ID NO: 2031191 - RNA, 19 nt, Artificial Sequence
  Description of Artificial Sequence: Synthetic oligonucleotide
  Antisense strand to SEQ ID NO: 2031190
uugaggccaaaucacacug

SEQ ID NO: 2031192 - RNA, 19 nt, Artificial Sequence
  Description of Artificial Sequence: Synthetic oligonucleotide
  Sense strand starting at position 449 of SEQ ID NO: 1881267
auccuuauuccagagcagu

SEQ ID NO: 2031193 - RNA, 19 nt, Artificial Sequence
  Description of Artificial Sequence: Synthetic oligonucleotide
  Antisense strand to SEQ ID NO: 2031192
acugcucuggaauaaggau

SEQ ID NO: 2031194 - RNA, 19 nt, Artificial Sequence
  Description of Artificial Sequence: Synthetic oligonucleotide
  Sense strand starting at position 539 of SEQ ID NO: 1881267
uguggacaccucuauaugu

SEQ ID NO: 2031195 - RNA, 19 nt, Artificial Sequence
  Description of Artificial Sequence: Synthetic oligonucleotide
  Antisense strand to SEQ ID NO: 2031194
acauauagagguguccaca

SEQ ID NO: 2031196 - RNA, 19 nt, Artificial Sequence
  Description of Artificial Sequence: Synthetic oligonucleotide
  Sense strand starting at position 548 of SEQ ID NO: 1881267
cucuauaugugauuggaca

SEQ ID NO: 2031197 - RNA, 19 nt, Artificial Sequence
  Description of Artificial Sequence: Synthetic oligonucleotide
  Antisense strand to SEQ ID NO: 2031196
uguccaaucacauauagag

SEQ ID NO: 2031198 - RNA, 19 nt, Artificial Sequence
  Description of Artificial Sequence: Synthetic oligonucleotide
  Sense strand starting at position 549 of SEQ ID NO: 1881267
ucuauaugugauuggacaa

SEQ ID NO: 2031199 - RNA, 19 nt, Artificial Sequence
  Description of Artificial Sequence: Synthetic oligonucleotide
  Antisense strand to SEQ ID NO: 2031198
uuguccaaucacauauaga

SEQ ID NO: 2031200 - RNA, 19 nt, Artificial Sequence
  Description of Artificial Sequence: Synthetic oligonucleotide
  Sense strand starting at position 660 of SEQ ID NO: 1881267
ggagguuccuggaggauga

SEQ ID NO: 2031201 - RNA, 19 nt, Artificial Sequence
  Description of Artificial Sequence: Synthetic oligonucleotide
  Antisense strand to SEQ ID NO: 2031200
ucauccuccaggaaccucc

SEQ ID NO: 2031202 - RNA, 19 nt, Artificial Sequence
  Description of Artificial Sequence: Synthetic oligonucleotide
  Sense strand starting at position 882 of SEQ ID NO: 1881267
ucagaaguucuggagucua

SEQ ID NO: 2031203 - RNA, 19 nt, Artificial Sequence
  Description of Artificial Sequence: Synthetic oligonucleotide
  Antisense strand to SEQ ID NO: 2031202
uagacuccagaacuucuga

SEQ ID NO: 2031204 - RNA, 19 nt, Artificial Sequence
  Description of Artificial Sequence: Synthetic oligonucleotide
  Sense strand starting at position 1173 of SEQ ID NO: 1881267
ugaaauguucuaggcauaa

SEQ ID NO: 2031205 - RNA, 19 nt, Artificial Sequence
  Description of Artificial Sequence: Synthetic oligonucleotide
  Antisense strand to SEQ ID NO: 2031204
uuaugccuagaacauuuca

SEQ ID NO: 2031206 - RNA, 19 nt, Artificial Sequence
  Description of Artificial Sequence: Synthetic oligonucleotide
  Sense strand starting at position 1227 of SEQ ID NO: 1881267
agaacaaauugugugcaua

SEQ ID NO: 2031207 - RNA, 19 nt, Artificial Sequence
  Description of Artificial Sequence: Synthetic oligonucleotide
  Antisense strand to SEQ ID NO: 2031206
uaugcacacaauuuguucu

SEQ ID NO: 2031208 - RNA, 19 nt, Artificial Sequence
  Description of Artificial Sequence: Synthetic oligonucleotide
  Sense strand starting at position 1228 of SEQ ID NO: 1881267
gaacaaauugugugcauaa

SEQ ID NO: 2031209 - RNA, 19 nt, Artificial Sequence
  Description of Artificial Sequence: Synthetic oligonucleotide
  Antisense strand to SEQ ID NO: 2031208
uuaugcacacaauuuguuc

SEQ ID NO: 2031210 - RNA, 19 nt, Artificial Sequence
  Description of Artificial Sequence: Synthetic oligonucleotide
  Sense strand starting at position 1230 of SEQ ID NO: 1881267
acaaauugugugcauaauu

SEQ ID NO: 2031211 - RNA, 19 nt, Artificial Sequence
  Description of Artificial Sequence: Synthetic oligonucleotide
  Antisense strand to SEQ ID NO: 2031210
aauuaugcacacaauuugu

SEQ ID NO: 2031212 - RNA, 19 nt, Artificial Sequence
  Description of Artificial Sequence: Synthetic oligonucleotide
  Sense strand starting at position 1398 of SEQ ID NO: 1881267
aguucucacugauuauacu

SEQ ID NO: 2031213 - RNA, 19 nt, Artificial Sequence
  Description of Artificial Sequence: Synthetic oligonucleotide
  Antisense strand to SEQ ID NO: 2031212
aguauaaucagugagaacu

SEQ ID NO: 2031214 - RNA, 19 nt, Artificial Sequence
  Description of Artificial Sequence: Synthetic oligonucleotide
  Sense strand starting at position 1476 of SEQ ID NO: 1881267
cucucaauuucuccguguu

SEQ ID NO: 2031215 - RNA, 19 nt, Artificial Sequence
  Description of Artificial Sequence: Synthetic oligonucleotide
  Antisense strand to SEQ ID NO: 2031214
aacacggagaaauugagag

SEQ ID NO: 2031216 - RNA, 19 nt, Artificial Sequence
  Description of Artificial Sequence: Synthetic oligonucleotide
  Sense strand starting at position 1477 of SEQ ID NO: 1881267
ucucaauuucuccguguuu

SEQ ID NO: 2031217 - RNA, 19 nt, Artificial Sequence
  Description of Artificial Sequence: Synthetic oligonucleotide
  Antisense strand to SEQ ID NO: 2031216
aaacacggagaaauugaga

SEQ ID NO: 2031218 - RNA, 19 nt, Artificial Sequence
  Description of Artificial Sequence: Synthetic oligonucleotide
  Sense strand starting at position 1555 of SEQ ID NO: 1881267
gaggaaagcuucuccugaa

SEQ ID NO: 2031219 - RNA, 19 nt, Artificial Sequence
  Description of Artificial Sequence: Synthetic oligonucleotide
  Antisense strand to SEQ ID NO: 2031218
uucaggagaagcuuuccuc

SEQ ID NO: 2031220 - RNA, 19 nt, Artificial Sequence
  Description of Artificial Sequence: Synthetic oligonucleotide
  Sense strand starting at position 1556 of SEQ ID NO: 1881267
aggaaagcuucuccugaag

SEQ ID NO: 2031221 - RNA, 19 nt, Artificial Sequence
  Description of Artificial Sequence: Synthetic oligonucleotide
  Antisense strand to SEQ ID NO: 2031220
cuucaggagaagcuuuccu

SEQ ID NO: 2031222 - RNA, 19 nt, Artificial Sequence
  Description of Artificial Sequence: Synthetic oligonucleotide
  Sense strand starting at position 1740 of SEQ ID NO: 1881267
agaagcaaugauuguauau

SEQ ID NO: 2031223 - RNA, 19 nt, Artificial Sequence
  Description of Artificial Sequence: Synthetic oligonucleotide
  Antisense strand to SEQ ID NO: 2031222
auauacaaucauugcuucu

SEQ ID NO: 2031224 - RNA, 19 nt, Artificial Sequence
  Description of Artificial Sequence: Synthetic oligonucleotide
  Sense strand starting at position 1790 of SEQ ID NO: 1881267
agguaacaucuccauaguu

SEQ ID NO: 2031225 - RNA, 19 nt, Artificial Sequence
  Description of Artificial Sequence: Synthetic oligonucleotide
  Antisense strand to SEQ ID NO: 2031224
aacuauggagauguuaccu

SEQ ID NO: 2031226 - RNA, 19 nt, Artificial Sequence
  Description of Artificial Sequence: Synthetic oligonucleotide
  Sense strand starting at position 1792 of SEQ ID NO: 1881267
guaacaucuccauaguuaa

SEQ ID NO: 2031227 - RNA, 19 nt, Artificial Sequence
  Description of Artificial Sequence: Synthetic oligonucleotide
  Antisense strand to SEQ ID NO: 2031226
uuaacuauggagauguuac

SEQ ID NO: 2031228 - RNA, 19 nt, Artificial Sequence
  Description of Artificial Sequence: Synthetic oligonucleotide
  Sense strand starting at position 1849 of SEQ ID NO: 1881267
ucaaauucucacggguaaa

SEQ ID NO: 2031229 - RNA, 19 nt, Artificial Sequence
  Description of Artificial Sequence: Synthetic oligonucleotide
  Antisense strand to SEQ ID NO: 2031228
uuuacccgugagaauuuga

SEQ ID NO: 2031230 - RNA, 19 nt, Artificial Sequence
  Description of Artificial Sequence: Synthetic oligonucleotide
  Sense strand starting at position 1852 of SEQ ID NO: 1881267
aauucucacggguaaacua

SEQ ID NO: 2031231 - RNA, 19 nt, Artificial Sequence
  Description of Artificial Sequence: Synthetic oligonucleotide
  Antisense strand to SEQ ID NO: 2031230
uaguuuacccgugagaauu

SEQ ID NO: 2031232 - RNA, 19 nt, Artificial Sequence
  Description of Artificial Sequence: Synthetic oligonucleotide
  Sense strand starting at position 1881 of SEQ ID NO: 1881267
auaugagguuaccuaguca

SEQ ID NO: 2031233 - RNA, 19 nt, Artificial Sequence
  Description of Artificial Sequence: Synthetic oligonucleotide
  Antisense strand to SEQ ID NO: 2031232
ugacuagguaaccucauau

SEQ ID NO: 2031234 - RNA, 19 nt, Artificial Sequence
  Description of Artificial Sequence: Synthetic oligonucleotide
  Sense strand starting at position 1885 of SEQ ID NO: 1881267
gagguuaccuagucacaca

SEQ ID NO: 2031235 - RNA, 19 nt, Artificial Sequence
  Description of Artificial Sequence: Synthetic oligonucleotide
  Antisense strand to SEQ ID NO: 2031234
ugugugacuagguaaccuc

SEQ ID NO: 2031236 - RNA, 19 nt, Artificial Sequence
  Description of Artificial Sequence: Synthetic oligonucleotide
  Sense strand starting at position 2544 of SEQ ID NO: 1881267
uuacuuugggcauauauac

SEQ ID NO: 2031237 - RNA, 19 nt, Artificial Sequence
  Description of Artificial Sequence: Synthetic oligonucleotide
  Antisense strand to SEQ ID NO: 2031236
guauauaugcccaaaguaa

SEQ ID NO: 2031238 - RNA, 19 nt, Artificial Sequence
  Description of Artificial Sequence: Synthetic oligonucleotide
  Sense strand starting at position 2827 of SEQ ID NO: 1881267
cugcauuugugucuuugga

SEQ ID NO: 2031239 - RNA, 19 nt, Artificial Sequence
  Description of Artificial Sequence: Synthetic oligonucleotide
  Antisense strand to SEQ ID NO: 2031238
uccaaagacacaaaugcag

SEQ ID NO: 2031240 - RNA, 19 nt, Artificial Sequence
  Description of Artificial Sequence: Synthetic oligonucleotide
  Sense strand starting at position 2829 of SEQ ID NO: 1881267
gcauuugugucuuuggaaa

SEQ ID NO: 2031241 - RNA, 19 nt, Artificial Sequence
  Description of Artificial Sequence: Synthetic oligonucleotide
  Antisense strand to SEQ ID NO: 2031240
uuuccaaagacacaaaugc

SEQ ID NO: 2031242 - RNA, 19 nt, Artificial Sequence
  Description of Artificial Sequence: Synthetic oligonucleotide
  Sense strand starting at position 2957 of SEQ ID NO: 1881267
guaguuugcaguuauuucu

SEQ ID NO: 2031243 - RNA, 19 nt, Artificial Sequence
  Description of Artificial Sequence: Synthetic oligonucleotide
  Antisense strand to SEQ ID NO: 2031242
agaaauaacugcaaacuac

SEQ ID NO: 2031244 - RNA, 19 nt, Artificial Sequence
  Description of Artificial Sequence: Synthetic oligonucleotide
  Sense strand starting at position 2963 of SEQ ID NO: 1881267
ugcaguuauuucucucauu

SEQ ID NO: 2031245 - RNA, 19 nt, Artificial Sequence
  Description of Artificial Sequence: Synthetic oligonucleotide
  Antisense strand to SEQ ID NO: 2031244
aaugagagaaauaacugca

SEQ ID NO: 2031246 - RNA, 19 nt, Artificial Sequence
  Description of Artificial Sequence: Synthetic oligonucleotide
  Sense strand starting at position 2964 of SEQ ID NO: 1881267
gcaguuauuucucucauuc

SEQ ID NO: 2031247 - RNA, 19 nt, Artificial Sequence
  Description of Artificial Sequence: Synthetic oligonucleotide
  Antisense strand to SEQ ID NO: 2031246
gaaugagagaaauaacugc

SEQ ID NO: 2031248 - RNA, 19 nt, Artificial Sequence
  Description of Artificial Sequence: Synthetic oligonucleotide
  Sense strand starting at position 3293 of SEQ ID NO: 1881267
agggaauucuugccuuauu

SEQ ID NO: 2031249 - RNA, 19 nt, Artificial Sequence
  Description of Artificial Sequence: Synthetic oligonucleotide
  Antisense strand to SEQ ID NO: 2031248
aauaaggcaagaauucccu

SEQ ID NO: 2031250 - RNA, 19 nt, Artificial Sequence
  Description of Artificial Sequence: Synthetic oligonucleotide
  Sense strand starting at position 3294 of SEQ ID NO: 1881267
gggaauucuugccuuauug

SEQ ID NO: 2031251 - RNA, 19 nt, Artificial Sequence
  Description of Artificial Sequence: Synthetic oligonucleotide
  Antisense strand to SEQ ID NO: 2031250
caauaaggcaagaauuccc

SEQ ID NO: 2031252 - RNA, 19 nt, Artificial Sequence
  Description of Artificial Sequence: Synthetic oligonucleotide
  Sense strand starting at position 3617 of SEQ ID NO: 1881267
ucuauaguauugguccaaa

SEQ ID NO: 2031253 - RNA, 19 nt, Artificial Sequence
  Description of Artificial Sequence: Synthetic oligonucleotide
  Antisense strand to SEQ ID NO: 2031252
uuuggaccaauacuauaga

SEQ ID NO: 2031254 - RNA, 19 nt, Artificial Sequence
  Description of Artificial Sequence: Synthetic oligonucleotide
  Sense strand starting at position 3738 of SEQ ID NO: 1881267
ccaaaucuggaaugcaauu

SEQ ID NO: 2031255 - RNA, 19 nt, Artificial Sequence
  Description of Artificial Sequence: Synthetic oligonucleotide
  Antisense strand to SEQ ID NO: 2031254
aauugcauuccagauuugg

SEQ ID NO: 2031256 - RNA, 19 nt, Artificial Sequence
  Description of Artificial Sequence: Synthetic oligonucleotide
  Sense strand starting at position 288 of SEQ ID NO: 1881268
gaaguauuaggaggacgau

SEQ ID NO: 2031257 - RNA, 19 nt, Artificial Sequence
  Description of Artificial Sequence: Synthetic oligonucleotide
  Antisense strand to SEQ ID NO: 2031256
aucguccuccuaauacuuc

SEQ ID NO: 2031258 - RNA, 19 nt, Artificial Sequence
  Description of Artificial Sequence: Synthetic oligonucleotide
  Sense strand starting at position 330 of SEQ ID NO: 1881268
ucaugaucacgauguaaag

SEQ ID NO: 2031259 - RNA, 19 nt, Artificial Sequence
  Description of Artificial Sequence: Synthetic oligonucleotide
  Antisense strand to SEQ ID NO: 2031258
cuuuacaucgugaucauga

SEQ ID NO: 2031260 - RNA, 19 nt, Artificial Sequence
  Description of Artificial Sequence: Synthetic oligonucleotide
  Sense strand starting at position 425 of SEQ ID NO: 1881268
ccaggcaucugagugagau

SEQ ID NO: 2031261 - RNA, 19 nt, Artificial Sequence
  Description of Artificial Sequence: Synthetic oligonucleotide
  Antisense strand to SEQ ID NO: 2031260
aucucacucagaugccugg

SEQ ID NO: 2031262 - RNA, 19 nt, Artificial Sequence
  Description of Artificial Sequence: Synthetic oligonucleotide
  Sense strand starting at position 426 of SEQ ID NO: 1881268
caggcaucugagugagaug

SEQ ID NO: 2031263 - RNA, 19 nt, Artificial Sequence
  Description of Artificial Sequence: Synthetic oligonucleotide
  Antisense strand to SEQ ID NO: 2031262
caucucacucagaugccug

SEQ ID NO: 2031264 - RNA, 19 nt, Artificial Sequence
  Description of Artificial Sequence: Synthetic oligonucleotide
  Sense strand starting at position 475 of SEQ ID NO: 1881268
ccagaacacuggcucuaaa

SEQ ID NO: 2031265 - RNA, 19 nt, Artificial Sequence
  Description of Artificial Sequence: Synthetic oligonucleotide
  Antisense strand to SEQ ID NO: 2031264
uuuagagccaguguucugg

SEQ ID NO: 2031266 - RNA, 19 nt, Artificial Sequence
  Description of Artificial Sequence: Synthetic oligonucleotide
  Sense strand starting at position 495 of SEQ ID NO: 1881268
cucuaaagguacuuaauga

SEQ ID NO: 2031267 - RNA, 19 nt, Artificial Sequence
  Description of Artificial Sequence: Synthetic oligonucleotide
  Antisense strand to SEQ ID NO: 2031266
ucauuaaguaccuuuagag

SEQ ID NO: 2031268 - RNA, 19 nt, Artificial Sequence
  Description of Artificial Sequence: Synthetic oligonucleotide
  Sense strand starting at position 717 of SEQ ID NO: 1881268
agcuguaugaagcaagacu

SEQ ID NO: 2031269 - RNA, 19 nt, Artificial Sequence
  Description of Artificial Sequence: Synthetic oligonucleotide
  Antisense strand to SEQ ID NO: 2031268
agucuugcuucauacagcu

SEQ ID NO: 2031270 - RNA, 19 nt, Artificial Sequence
  Description of Artificial Sequence: Synthetic oligonucleotide
  Sense strand starting at position 741 of SEQ ID NO: 1881268
ucuuauccguuguugauuu

SEQ ID NO: 2031271 - RNA, 19 nt, Artificial Sequence
  Description of Artificial Sequence: Synthetic oligonucleotide
  Antisense strand to SEQ ID NO: 2031270
aaaucaacaacggauaaga

SEQ ID NO: 2031272 - RNA, 19 nt, Artificial Sequence
  Description of Artificial Sequence: Synthetic oligonucleotide
  Sense strand starting at position 796 of SEQ ID NO: 1881268
ccaugaguggacugauguu

SEQ ID NO: 2031273 - RNA, 19 nt, Artificial Sequence
  Description of Artificial Sequence: Synthetic oligonucleotide
  Antisense strand to SEQ ID NO: 2031272
aacaucaguccacucaugg

SEQ ID NO: 2031274 - RNA, 19 nt, Artificial Sequence
  Description of Artificial Sequence: Synthetic oligonucleotide
  Sense strand starting at position 809 of SEQ ID NO: 1881268
gauguuuguggaugaugaa

SEQ ID NO: 2031275 - RNA, 19 nt, Artificial Sequence
  Description of Artificial Sequence: Synthetic oligonucleotide
  Antisense strand to SEQ ID NO: 2031274
uucaucauccacaaacauc

SEQ ID NO: 2031276 - RNA, 19 nt, Artificial Sequence
  Description of Artificial Sequence: Synthetic oligonucleotide
  Sense strand starting at position 1088 of SEQ ID NO: 1881268
cagucaccaugcuugagaa

SEQ ID NO: 2031277 - RNA, 19 nt, Artificial Sequence
  Description of Artificial Sequence: Synthetic oligonucleotide
  Antisense strand to SEQ ID NO: 2031276
uucucaagcauggugacug

SEQ ID NO: 2031278 - RNA, 19 nt, Artificial Sequence
  Description of Artificial Sequence: Synthetic oligonucleotide
  Sense strand starting at position 1089 of SEQ ID NO: 1881268
agucaccaugcuugagaaa

SEQ ID NO: 2031279 - RNA, 19 nt, Artificial Sequence
  Description of Artificial Sequence: Synthetic oligonucleotide
  Antisense strand to SEQ ID NO: 2031278
uuucucaagcauggugacu

SEQ ID NO: 2031280 - RNA, 19 nt, Artificial Sequence
  Description of Artificial Sequence: Synthetic oligonucleotide
  Sense strand starting at position 1406 of SEQ ID NO: 1881268
ggguaaaggccguaaucca

SEQ ID NO: 2031281 - RNA, 19 nt, Artificial Sequence
  Description of Artificial Sequence: Synthetic oligonucleotide
  Antisense strand to SEQ ID NO: 2031280
uggauuacggccuuuaccc

SEQ ID NO: 2031282 - RNA, 19 nt, Artificial Sequence
  Description of Artificial Sequence: Synthetic oligonucleotide
  Sense strand starting at position 1416 of SEQ ID NO: 1881268
cguaauccaggcuaugaga

SEQ ID NO: 2031283 - RNA, 19 nt, Artificial Sequence
  Description of Artificial Sequence: Synthetic oligonucleotide
  Antisense strand to SEQ ID NO: 2031282
ucucauagccuggauuacg

SEQ ID NO: 2031284 - RNA, 19 nt, Artificial Sequence
  Description of Artificial Sequence: Synthetic oligonucleotide
  Sense strand starting at position 1791 of SEQ ID NO: 1881268
uaaccuuaucgagaacagu

SEQ ID NO: 2031285 - RNA, 19 nt, Artificial Sequence
  Description of Artificial Sequence: Synthetic oligonucleotide
  Antisense strand to SEQ ID NO: 2031284
acuguucucgauaagguua

SEQ ID NO: 2031286 - RNA, 19 nt, Artificial Sequence
  Description of Artificial Sequence: Synthetic oligonucleotide
  Sense strand starting at position 1826 of SEQ ID NO: 1881268
gaacuuauuugugagaaac

SEQ ID NO: 2031287 - RNA, 19 nt, Artificial Sequence
  Description of Artificial Sequence: Synthetic oligonucleotide
  Antisense strand to SEQ ID NO: 2031286
guuucucacaaauaaguuc

SEQ ID NO: 2031288 - RNA, 19 nt, Artificial Sequence
  Description of Artificial Sequence: Synthetic oligonucleotide
  Sense strand starting at position 1828 of SEQ ID NO: 1881268
acuuauuugugagaaacca

SEQ ID NO: 2031289 - RNA, 19 nt, Artificial Sequence
  Description of Artificial Sequence: Synthetic oligonucleotide
  Antisense strand to SEQ ID NO: 2031288
ugguuucucacaaauaagu

SEQ ID NO: 2031290 - RNA, 19 nt, Artificial Sequence
  Description of Artificial Sequence: Synthetic oligonucleotide
  Sense strand starting at position 1850 of SEQ ID NO: 1881268
aguaauuaaguagguuuga

SEQ ID NO: 2031291 - RNA, 19 nt, Artificial Sequence
  Description of Artificial Sequence: Synthetic oligonucleotide
  Antisense strand to SEQ ID NO: 2031290
ucaaaccuacuuaauuacu

SEQ ID NO: 2031292 - RNA, 19 nt, Artificial Sequence
  Description of Artificial Sequence: Synthetic oligonucleotide
  Sense strand starting at position 1893 of SEQ ID NO: 1881268
uaggaaaucucucugugag

SEQ ID NO: 2031293 - RNA, 19 nt, Artificial Sequence
  Description of Artificial Sequence: Synthetic oligonucleotide
  Antisense strand to SEQ ID NO: 2031292
cucacagagagauuuccua

SEQ ID NO: 2031294 - RNA, 19 nt, Artificial Sequence
  Description of Artificial Sequence: Synthetic oligonucleotide
  Sense strand starting at position 1894 of SEQ ID NO: 1881268
aggaaaucucucugugagg

SEQ ID NO: 2031295 - RNA, 19 nt, Artificial Sequence
  Description of Artificial Sequence: Synthetic oligonucleotide
  Antisense strand to SEQ ID NO: 2031294
ccucacagagagauuuccu

SEQ ID NO: 2031296 - RNA, 19 nt, Artificial Sequence
  Description of Artificial Sequence: Synthetic oligonucleotide
  Sense strand starting at position 1896 of SEQ ID NO: 1881268
gaaaucucucugugaggac

SEQ ID NO: 2031297 - RNA, 19 nt, Artificial Sequence
  Description of Artificial Sequence: Synthetic oligonucleotide
  Antisense strand to SEQ ID NO: 2031296
guccucacagagagauuuc

SEQ ID NO: 2031298 - RNA, 19 nt, Artificial Sequence
  Description of Artificial Sequence: Synthetic oligonucleotide
  Sense strand starting at position 2076 of SEQ ID NO: 1881268
agguuucugcuacacaacu

SEQ ID NO: 2031299 - RNA, 19 nt, Artificial Sequence
  Description of Artificial Sequence: Synthetic oligonucleotide
  Antisense strand to SEQ ID NO: 2031298
aguuguguagcagaaaccu

SEQ ID NO: 2031300 - RNA, 19 nt, Artificial Sequence
  Description of Artificial Sequence: Synthetic oligonucleotide
  Sense strand starting at position 2332 of SEQ ID NO: 1881268
gcauguccugcuuugucau

SEQ ID NO: 2031301 - RNA, 19 nt, Artificial Sequence
  Description of Artificial Sequence: Synthetic oligonucleotide
  Antisense strand to SEQ ID NO: 2031300
augacaaagcaggacaugc

SEQ ID NO: 2031302 - RNA, 19 nt, Artificial Sequence
  Description of Artificial Sequence: Synthetic oligonucleotide
  Sense strand starting at position 2344 of SEQ ID NO: 1881268
uugucauugcuguuauugu

SEQ ID NO: 2031303 - RNA, 19 nt, Artificial Sequence
  Description of Artificial Sequence: Synthetic oligonucleotide
  Antisense strand to SEQ ID NO: 2031302
acaauaacagcaaugacaa

SEQ ID NO: 2031304 - RNA, 19 nt, Artificial Sequence
  Description of Artificial Sequence: Synthetic oligonucleotide
  Sense strand starting at position 2800 of SEQ ID NO: 1881268
gggagaguuuggccaggga

SEQ ID NO: 2031305 - RNA, 19 nt, Artificial Sequence
  Description of Artificial Sequence: Synthetic oligonucleotide
  Antisense strand to SEQ ID NO: 2031304
ucccuggccaaacucuccc

SEQ ID NO: 2031306 - RNA, 19 nt, Artificial Sequence
  Description of Artificial Sequence: Synthetic oligonucleotide
  Sense strand starting at position 2858 of SEQ ID NO: 1881268
agggcuuccacaugggaaa

SEQ ID NO: 2031307 - RNA, 19 nt, Artificial Sequence
  Description of Artificial Sequence: Synthetic oligonucleotide
  Antisense strand to SEQ ID NO: 2031306
uuucccauguggaagcccu

SEQ ID NO: 2031308 - RNA, 19 nt, Artificial Sequence
  Description of Artificial Sequence: Synthetic oligonucleotide
  Sense strand starting at position 2873 of SEQ ID NO: 1881268
gaaagaguggccugguaau

SEQ ID NO: 2031309 - RNA, 19 nt, Artificial Sequence
  Description of Artificial Sequence: Synthetic oligonucleotide
  Antisense strand to SEQ ID NO: 2031308
auuaccaggccacucuuuc

SEQ ID NO: 2031310 - RNA, 19 nt, Artificial Sequence
  Description of Artificial Sequence: Synthetic oligonucleotide
  Sense strand starting at position 2945 of SEQ ID NO: 1881268
guggcuuauuucccugagu

SEQ ID NO: 2031311 - RNA, 19 nt, Artificial Sequence
  Description of Artificial Sequence: Synthetic oligonucleotide
  Antisense strand to SEQ ID NO: 2031310
acucagggaaauaagccac

SEQ ID NO: 2031312 - RNA, 19 nt, Artificial Sequence
  Description of Artificial Sequence: Synthetic oligonucleotide
  Sense strand starting at position 2946 of SEQ ID NO: 1881268
uggcuuauuucccugaguc

SEQ ID NO: 2031313 - RNA, 19 nt, Artificial Sequence
  Description of Artificial Sequence: Synthetic oligonucleotide
  Antisense strand to SEQ ID NO: 2031312
gacucagggaaauaagcca

SEQ ID NO: 2031314 - RNA, 19 nt, Artificial Sequence
  Description of Artificial Sequence: Synthetic oligonucleotide
  Sense strand starting at position 2947 of SEQ ID NO: 1881268
ggcuuauuucccugagucc

SEQ ID NO: 2031315 - RNA, 19 nt, Artificial Sequence
  Description of Artificial Sequence: Synthetic oligonucleotide
  Antisense strand to SEQ ID NO: 2031314
ggacucagggaaauaagcc

SEQ ID NO: 2031316 - RNA, 19 nt, Artificial Sequence
  Description of Artificial Sequence: Synthetic oligonucleotide
  Sense strand starting at position 3101 of SEQ ID NO: 1881268
aggugugggagguggaaua

SEQ ID NO: 2031317 - RNA, 19 nt, Artificial Sequence
  Description of Artificial Sequence: Synthetic oligonucleotide
  Antisense strand to SEQ ID NO: 2031316
uauuccaccucccacaccu

SEQ ID NO: 2031318 - RNA, 19 nt, Artificial Sequence
  Description of Artificial Sequence: Synthetic oligonucleotide
  Sense strand starting at position 3188 of SEQ ID NO: 1881268
gggaauugaggcugcaaau

SEQ ID NO: 2031319 - RNA, 19 nt, Artificial Sequence
  Description of Artificial Sequence: Synthetic oligonucleotide
  Antisense strand to SEQ ID NO: 2031318
auuugcagccucaauuccc

SEQ ID NO: 2031320 - RNA, 19 nt, Artificial Sequence
  Description of Artificial Sequence: Synthetic oligonucleotide
  Sense strand starting at position 3223 of SEQ ID NO: 1881268
gucagcugacuuuaagaca

SEQ ID NO: 2031321 - RNA, 19 nt, Artificial Sequence
  Description of Artificial Sequence: Synthetic oligonucleotide
  Antisense strand to SEQ ID NO: 2031320
ugucuuaaagucagcugac

SEQ ID NO: 2031322 - RNA, 19 nt, Artificial Sequence
  Description of Artificial Sequence: Synthetic oligonucleotide
  Sense strand starting at position 3322 of SEQ ID NO: 1881268
caacucgaugugggauaaa

SEQ ID NO: 2031323 - RNA, 19 nt, Artificial Sequence
  Description of Artificial Sequence: Synthetic oligonucleotide
  Antisense strand to SEQ ID NO: 2031322
uuuaucccacaucgaguug

SEQ ID NO: 2031324 - RNA, 19 nt, Artificial Sequence
  Description of Artificial Sequence: Synthetic oligonucleotide
  Sense strand starting at position 3541 of SEQ ID NO: 1881268
caauuugugccaugaaguu

SEQ ID NO: 2031325 - RNA, 19 nt, Artificial Sequence
  Description of Artificial Sequence: Synthetic oligonucleotide
  Antisense strand to SEQ ID NO: 2031324
aacuucauggcacaaauug

SEQ ID NO: 2031326 - RNA, 19 nt, Artificial Sequence
  Description of Artificial Sequence: Synthetic oligonucleotide
  Sense strand starting at position 3693 of SEQ ID NO: 1881268
gagacauucuggcuugaag

SEQ ID NO: 2031327 - RNA, 19 nt, Artificial Sequence
  Description of Artificial Sequence: Synthetic oligonucleotide
  Antisense strand to SEQ ID NO: 2031326
cuucaagccagaaugucuc

SEQ ID NO: 2031328 - RNA, 19 nt, Artificial Sequence
  Description of Artificial Sequence: Synthetic oligonucleotide
  Sense strand starting at position 3695 of SEQ ID NO: 1881268
gacauucuggcuugaagac

SEQ ID NO: 2031329 - RNA, 19 nt, Artificial Sequence
  Description of Artificial Sequence: Synthetic oligonucleotide
  Antisense strand to SEQ ID NO: 2031328
gucuucaagccagaauguc

SEQ ID NO: 2031330 - RNA, 19 nt, Artificial Sequence
  Description of Artificial Sequence: Synthetic oligonucleotide
  Sense strand starting at position 3696 of SEQ ID NO: 1881268
acauucuggcuugaagacu

SEQ ID NO: 2031331 - RNA, 19 nt, Artificial Sequence
  Description of Artificial Sequence: Synthetic oligonucleotide
  Antisense strand to SEQ ID NO: 2031330
agucuucaagccagaaugu

SEQ ID NO: 2031332 - RNA, 19 nt, Artificial Sequence
  Description of Artificial Sequence: Synthetic oligonucleotide
  Sense strand starting at position 3707 of SEQ ID NO: 1881268
ugaagacucuggcucccaa

SEQ ID NO: 2031333 - RNA, 19 nt, Artificial Sequence
  Description of Artificial Sequence: Synthetic oligonucleotide
  Antisense strand to SEQ ID NO: 2031332
uugggagccagagucuuca

SEQ ID NO: 2031334 - RNA, 19 nt, Artificial Sequence
  Description of Artificial Sequence: Synthetic oligonucleotide
  Sense strand starting at position 3962 of SEQ ID NO: 1881268
acuggucagcuauaguaga

SEQ ID NO: 2031335 - RNA, 19 nt, Artificial Sequence
  Description of Artificial Sequence: Synthetic oligonucleotide
  Antisense strand to SEQ ID NO: 2031334
ucuacuauagcugaccagu

SEQ ID NO: 2031336 - RNA, 19 nt, Artificial Sequence
  Description of Artificial Sequence: Synthetic oligonucleotide
  Sense strand starting at position 120 of SEQ ID NO: 1881269
caguccuuggaaggaaauu

SEQ ID NO: 2031337 - RNA, 19 nt, Artificial Sequence
  Description of Artificial Sequence: Synthetic oligonucleotide
  Antisense strand to SEQ ID NO: 2031336
aauuuccuuccaaggacug

SEQ ID NO: 2031338 - RNA, 19 nt, Artificial Sequence
  Description of Artificial Sequence: Synthetic oligonucleotide
  Sense strand starting at position 375 of SEQ ID NO: 1881269
cuacaaaguuaugucaaca

SEQ ID NO: 2031339 - RNA, 19 nt, Artificial Sequence
  Description of Artificial Sequence: Synthetic oligonucleotide
  Antisense strand to SEQ ID NO: 2031338
uguugacauaacuuuguag

SEQ ID NO: 2031340 - RNA, 19 nt, Artificial Sequence
  Description of Artificial Sequence: Synthetic oligonucleotide
  Sense strand starting at position 418 of SEQ ID NO: 1881269
gggcaaauugcaugaaaga

SEQ ID NO: 2031341 - RNA, 19 nt, Artificial Sequence
  Description of Artificial Sequence: Synthetic oligonucleotide
  Antisense strand to SEQ ID NO: 2031340
ucuuucaugcaauuugccc

SEQ ID NO: 2031342 - RNA, 19 nt, Artificial Sequence
  Description of Artificial Sequence: Synthetic oligonucleotide
  Sense strand starting at position 647 of SEQ ID NO: 1881269
uuaaauaaggucugcaaua

SEQ ID NO: 2031343 - RNA, 19 nt, Artificial Sequence
  Description of Artificial Sequence: Synthetic oligonucleotide
  Antisense strand to SEQ ID NO: 2031342
uauugcagaccuuauuuaa

SEQ ID NO: 2031344 - RNA, 19 nt, Artificial Sequence
  Description of Artificial Sequence: Synthetic oligonucleotide
  Sense strand starting at position 688 of SEQ ID NO: 1881269
agaaaucaaugccuuagua

SEQ ID NO: 2031345 - RNA, 19 nt, Artificial Sequence
  Description of Artificial Sequence: Synthetic oligonucleotide
  Antisense strand to SEQ ID NO: 2031344
uacuaaggcauugauuucu

SEQ ID NO: 2031346 - RNA, 19 nt, Artificial Sequence
  Description of Artificial Sequence: Synthetic oligonucleotide
  Sense strand starting at position 723 of SEQ ID NO: 1881269
caucgugagaaaugaugga

SEQ ID NO: 2031347 - RNA, 19 nt, Artificial Sequence
  Description of Artificial Sequence: Synthetic oligonucleotide
  Antisense strand to SEQ ID NO: 2031346
uccaucauuucucacgaug

SEQ ID NO: 2031348 - RNA, 19 nt, Artificial Sequence
  Description of Artificial Sequence: Synthetic oligonucleotide
  Sense strand starting at position 727 of SEQ ID NO: 1881269
gugagaaaugauggauggu

SEQ ID NO: 2031349 - RNA, 19 nt, Artificial Sequence
  Description of Artificial Sequence: Synthetic oligonucleotide
  Antisense strand to SEQ ID NO: 2031348
accauccaucauuucucac

SEQ ID NO: 2031350 - RNA, 19 nt, Artificial Sequence
  Description of Artificial Sequence: Synthetic oligonucleotide
  Sense strand starting at position 794 of SEQ ID NO: 1881269
agaaaccucuuguuaagua

SEQ ID NO: 2031351 - RNA, 19 nt, Artificial Sequence
  Description of Artificial Sequence: Synthetic oligonucleotide
  Antisense strand to SEQ ID NO: 2031350
uacuuaacaagagguuucu

SEQ ID NO: 2031352 - RNA, 19 nt, Artificial Sequence
  Description of Artificial Sequence: Synthetic oligonucleotide
  Sense strand starting at position 799 of SEQ ID NO: 1881269
ccucuuguuaaguauggga

SEQ ID NO: 2031353 - RNA, 19 nt, Artificial Sequence
  Description of Artificial Sequence: Synthetic oligonucleotide
  Antisense strand to SEQ ID NO: 2031352
ucccauacuuaacaagagg

SEQ ID NO: 2031354 - RNA, 19 nt, Artificial Sequence
  Description of Artificial Sequence: Synthetic oligonucleotide
  Sense strand starting at position 801 of SEQ ID NO: 1881269
ucuuguuaaguaugggaaa

SEQ ID NO: 2031355 - RNA, 19 nt, Artificial Sequence
  Description of Artificial Sequence: Synthetic oligonucleotide
  Antisense strand to SEQ ID NO: 2031354
uuucccauacuuaacaaga

SEQ ID NO: 2031356 - RNA, 19 nt, Artificial Sequence
  Description of Artificial Sequence: Synthetic oligonucleotide
  Sense strand starting at position 1016 of SEQ ID NO: 1881269
gguacaggauguucagaau

SEQ ID NO: 2031357 - RNA, 19 nt, Artificial Sequence
  Description of Artificial Sequence: Synthetic oligonucleotide
  Antisense strand to SEQ ID NO: 2031356
auucugaacauccuguacc

SEQ ID NO: 2031358 - RNA, 19 nt, Artificial Sequence
  Description of Artificial Sequence: Synthetic oligonucleotide
  Sense strand starting at position 1022 of SEQ ID NO: 1881269
ggauguucagaaugccaga

SEQ ID NO: 2031359 - RNA, 19 nt, Artificial Sequence
  Description of Artificial Sequence: Synthetic oligonucleotide
  Antisense strand to SEQ ID NO: 2031358
ucuggcauucugaacaucc

SEQ ID NO: 2031360 - RNA, 19 nt, Artificial Sequence
  Description of Artificial Sequence: Synthetic oligonucleotide
  Sense strand starting at position 1073 of SEQ ID NO: 1881269
gacauaugauaugugaacu

SEQ ID NO: 2031361 - RNA, 19 nt, Artificial Sequence
  Description of Artificial Sequence: Synthetic oligonucleotide
  Antisense strand to SEQ ID NO: 2031360
aguucacauaucauauguc

SEQ ID NO: 2031362 - RNA, 19 nt, Artificial Sequence
  Description of Artificial Sequence: Synthetic oligonucleotide
  Sense strand starting at position 1187 of SEQ ID NO: 1881269
gacaaagggucauuaucau

SEQ ID NO: 2031363 - RNA, 19 nt, Artificial Sequence
  Description of Artificial Sequence: Synthetic oligonucleotide
  Antisense strand to SEQ ID NO: 2031362
augauaaugacccuuuguc

SEQ ID NO: 2031364 - RNA, 19 nt, Artificial Sequence
  Description of Artificial Sequence: Synthetic oligonucleotide
  Sense strand starting at position 1193 of SEQ ID NO: 1881269
gggucauuaucauuaaauc

SEQ ID NO: 2031365 - RNA, 19 nt, Artificial Sequence
  Description of Artificial Sequence: Synthetic oligonucleotide
  Antisense strand to SEQ ID NO: 2031364
gauuuaaugauaaugaccc

SEQ ID NO: 2031366 - RNA, 19 nt, Artificial Sequence
  Description of Artificial Sequence: Synthetic oligonucleotide
  Sense strand starting at position 1274 of SEQ ID NO: 1881269
cagacaauccugugucaga

SEQ ID NO: 2031367 - RNA, 19 nt, Artificial Sequence
  Description of Artificial Sequence: Synthetic oligonucleotide
  Antisense strand to SEQ ID NO: 2031366
ucugacacaggauugucug

SEQ ID NO: 2031368 - RNA, 19 nt, Artificial Sequence
  Description of Artificial Sequence: Synthetic oligonucleotide
  Sense strand starting at position 1275 of SEQ ID NO: 1881269
agacaauccugugucagaa

SEQ ID NO: 2031369 - RNA, 19 nt, Artificial Sequence
  Description of Artificial Sequence: Synthetic oligonucleotide
  Antisense strand to SEQ ID NO: 2031368
uucugacacaggauugucu

SEQ ID NO: 2031370 - RNA, 19 nt, Artificial Sequence
  Description of Artificial Sequence: Synthetic oligonucleotide
  Sense strand starting at position 1287 of SEQ ID NO: 1881269
gucagaaauguagggagua

SEQ ID NO: 2031371 - RNA, 19 nt, Artificial Sequence
  Description of Artificial Sequence: Synthetic oligonucleotide
  Antisense strand to SEQ ID NO: 2031370
uacucccuacauuucugac

SEQ ID NO: 2031372 - RNA, 19 nt, Artificial Sequence
  Description of Artificial Sequence: Synthetic oligonucleotide
  Sense strand starting at position 1351 of SEQ ID NO: 1881269
ucugaaguaagcgauauaa

SEQ ID NO: 2031373 - RNA, 19 nt, Artificial Sequence
  Description of Artificial Sequence: Synthetic oligonucleotide
  Antisense strand to SEQ ID NO: 2031372
uuauaucgcuuacuucaga

SEQ ID NO: 2031374 - RNA, 19 nt, Artificial Sequence
  Description of Artificial Sequence: Synthetic oligonucleotide
  Sense strand starting at position 1353 of SEQ ID NO: 1881269
ugaaguaagcgauauaaug

SEQ ID NO: 2031375 - RNA, 19 nt, Artificial Sequence
  Description of Artificial Sequence: Synthetic oligonucleotide
  Antisense strand to SEQ ID NO: 2031374
cauuauaucgcuuacuuca

SEQ ID NO: 2031376 - RNA, 19 nt, Artificial Sequence
  Description of Artificial Sequence: Synthetic oligonucleotide
  Sense strand starting at position 1444 of SEQ ID NO: 1881269
guugcaagagucuaaacca

SEQ ID NO: 2031377 - RNA, 19 nt, Artificial Sequence
  Description of Artificial Sequence: Synthetic oligonucleotide
  Antisense strand to SEQ ID NO: 2031376
ugguuuagacucuugcaac

SEQ ID NO: 2031378 - RNA, 19 nt, Artificial Sequence
  Description of Artificial Sequence: Synthetic oligonucleotide
  Sense strand starting at position 1518 of SEQ ID NO: 1881269
acaugucugcgauagauua

SEQ ID NO: 2031379 - RNA, 19 nt, Artificial Sequence
  Description of Artificial Sequence: Synthetic oligonucleotide
  Antisense strand to SEQ ID NO: 2031378
uaaucuaucgcagacaugu

SEQ ID NO: 2031380 - RNA, 19 nt, Artificial Sequence
  Description of Artificial Sequence: Synthetic oligonucleotide
  Sense strand starting at position 1520 of SEQ ID NO: 1881269
augucugcgauagauuaaa

SEQ ID NO: 2031381 - RNA, 19 nt, Artificial Sequence
  Description of Artificial Sequence: Synthetic oligonucleotide
  Antisense strand to SEQ ID NO: 2031380
uuuaaucuaucgcagacau

SEQ ID NO: 2031382 - RNA, 19 nt, Artificial Sequence
  Description of Artificial Sequence: Synthetic oligonucleotide
  Sense strand starting at position 1582 of SEQ ID NO: 1881269
ccugaucuucucuagguga

SEQ ID NO: 2031383 - RNA, 19 nt, Artificial Sequence
  Description of Artificial Sequence: Synthetic oligonucleotide
  Antisense strand to SEQ ID NO: 2031382
ucaccuagagaagaucagg

SEQ ID NO: 2031384 - RNA, 19 nt, Artificial Sequence
  Description of Artificial Sequence: Synthetic oligonucleotide
  Sense strand starting at position 1584 of SEQ ID NO: 1881269
ugaucuucucuaggugaac

SEQ ID NO: 2031385 - RNA, 19 nt, Artificial Sequence
  Description of Artificial Sequence: Synthetic oligonucleotide
  Antisense strand to SEQ ID NO: 2031384
guucaccuagagaagauca

SEQ ID NO: 2031386 - RNA, 19 nt, Artificial Sequence
  Description of Artificial Sequence: Synthetic oligonucleotide
  Sense strand starting at position 1585 of SEQ ID NO: 1881269
gaucuucucuaggugaaca

SEQ ID NO: 2031387 - RNA, 19 nt, Artificial Sequence
  Description of Artificial Sequence: Synthetic oligonucleotide
  Antisense strand to SEQ ID NO: 2031386
uguucaccuagagaagauc

SEQ ID NO: 2031388 - RNA, 19 nt, Artificial Sequence
  Description of Artificial Sequence: Synthetic oligonucleotide
  Sense strand starting at position 1668 of SEQ ID NO: 1881269
gauaccuaacaucgugaua

SEQ ID NO: 2031389 - RNA, 19 nt, Artificial Sequence
  Description of Artificial Sequence: Synthetic oligonucleotide
  Antisense strand to SEQ ID NO: 2031388
uaucacgauguuagguauc

SEQ ID NO: 2031390 - RNA, 19 nt, Artificial Sequence
  Description of Artificial Sequence: Synthetic oligonucleotide
  Sense strand starting at position 1681 of SEQ ID NO: 1881269
gugauagucagucagaaag

SEQ ID NO: 2031391 - RNA, 19 nt, Artificial Sequence
  Description of Artificial Sequence: Synthetic oligonucleotide
  Antisense strand to SEQ ID NO: 2031390
cuuucugacugacuaucac

SEQ ID NO: 2031392 - RNA, 19 nt, Artificial Sequence
  Description of Artificial Sequence: Synthetic oligonucleotide
  Sense strand starting at position 1838 of SEQ ID NO: 1881269
cucagaaagaugugguaau

SEQ ID NO: 2031393 - RNA, 19 nt, Artificial Sequence
  Description of Artificial Sequence: Synthetic oligonucleotide
  Antisense strand to SEQ ID NO: 2031392
auuaccacaucuuucugag

SEQ ID NO: 2031394 - RNA, 19 nt, Artificial Sequence
  Description of Artificial Sequence: Synthetic oligonucleotide
  Sense strand starting at position 1992 of SEQ ID NO: 1881269
guggauagguuauuaucaa

SEQ ID NO: 2031395 - RNA, 19 nt, Artificial Sequence
  Description of Artificial Sequence: Synthetic oligonucleotide
  Antisense strand to SEQ ID NO: 2031394
uugauaauaaccuauccac

SEQ ID NO: 2031396 - RNA, 19 nt, Artificial Sequence
  Description of Artificial Sequence: Synthetic oligonucleotide
  Sense strand starting at position 2074 of SEQ ID NO: 1881269
uuguaagggaguugaacaa

SEQ ID NO: 2031397 - RNA, 19 nt, Artificial Sequence
  Description of Artificial Sequence: Synthetic oligonucleotide
  Antisense strand to SEQ ID NO: 2031396
uuguucaacucccuuacaa

SEQ ID NO: 2031398 - RNA, 19 nt, Artificial Sequence
  Description of Artificial Sequence: Synthetic oligonucleotide
  Sense strand starting at position 2387 of SEQ ID NO: 1881269
guguuuauuaugggaagau

SEQ ID NO: 2031399 - RNA, 19 nt, Artificial Sequence
  Description of Artificial Sequence: Synthetic oligonucleotide
  Antisense strand to SEQ ID NO: 2031398
aucuucccauaauaaacac

SEQ ID NO: 2031400 - RNA, 19 nt, Artificial Sequence
  Description of Artificial Sequence: Synthetic oligonucleotide
  Sense strand starting at position 2524 of SEQ ID NO: 1881269
acucauuccugaguuaaga

SEQ ID NO: 2031401 - RNA, 19 nt, Artificial Sequence
  Description of Artificial Sequence: Synthetic oligonucleotide
  Antisense strand to SEQ ID NO: 2031400
ucuuaacucaggaaugagu

SEQ ID NO: 2031402 - RNA, 19 nt, Artificial Sequence
  Description of Artificial Sequence: Synthetic oligonucleotide
  Sense strand starting at position 2532 of SEQ ID NO: 1881269
cugaguuaagaauguauua

SEQ ID NO: 2031403 - RNA, 19 nt, Artificial Sequence
  Description of Artificial Sequence: Synthetic oligonucleotide
  Antisense strand to SEQ ID NO: 2031402
uaauacauucuuaacucag

SEQ ID NO: 2031404 - RNA, 19 nt, Artificial Sequence
  Description of Artificial Sequence: Synthetic oligonucleotide
  Sense strand starting at position 2652 of SEQ ID NO: 1881269
gucauaguucuauaaauuc

SEQ ID NO: 2031405 - RNA, 19 nt, Artificial Sequence
  Description of Artificial Sequence: Synthetic oligonucleotide
  Antisense strand to SEQ ID NO: 2031404
gaauuuauagaacuaugac

SEQ ID NO: 2031406 - RNA, 19 nt, Artificial Sequence
  Description of Artificial Sequence: Synthetic oligonucleotide
  Sense strand starting at position 2727 of SEQ ID NO: 1881269
aacuuucuuggaggugaaa

SEQ ID NO: 2031407 - RNA, 19 nt, Artificial Sequence
  Description of Artificial Sequence: Synthetic oligonucleotide
  Antisense strand to SEQ ID NO: 2031406
uuucaccuccaagaaaguu

SEQ ID NO: 2031408 - RNA, 19 nt, Artificial Sequence
  Description of Artificial Sequence: Synthetic oligonucleotide
  Sense strand starting at position 3152 of SEQ ID NO: 1881269
ccagaagacggagguuaua

SEQ ID NO: 2031409 - RNA, 19 nt, Artificial Sequence
  Description of Artificial Sequence: Synthetic oligonucleotide
  Antisense strand to SEQ ID NO: 2031408
uauaaccuccgucuucugg

SEQ ID NO: 2031410 - RNA, 19 nt, Artificial Sequence
  Description of Artificial Sequence: Synthetic oligonucleotide
  Sense strand starting at position 3168 of SEQ ID NO: 1881269
auaguaagccaagaucgua

SEQ ID NO: 2031411 - RNA, 19 nt, Artificial Sequence
  Description of Artificial Sequence: Synthetic oligonucleotide
  Antisense strand to SEQ ID NO: 2031410
uacgaucuuggcuuacuau

SEQ ID NO: 2031412 - RNA, 19 nt, Artificial Sequence
  Description of Artificial Sequence: Synthetic oligonucleotide
  Sense strand starting at position 3825 of SEQ ID NO: 1881269
ucaaauucccuuggaguua

SEQ ID NO: 2031413 - RNA, 19 nt, Artificial Sequence
  Description of Artificial Sequence: Synthetic oligonucleotide
  Antisense strand to SEQ ID NO: 2031412
uaacuccaagggaauuuga

SEQ ID NO: 2031414 - RNA, 19 nt, Artificial Sequence
  Description of Artificial Sequence: Synthetic oligonucleotide
  Sense strand starting at position 3898 of SEQ ID NO: 1881269
ucuuauguuggguacuaaa

SEQ ID NO: 2031415 - RNA, 19 nt, Artificial Sequence
  Description of Artificial Sequence: Synthetic oligonucleotide
  Antisense strand to SEQ ID NO: 2031414
uuuaguacccaacauaaga

SEQ ID NO: 2031416 - RNA, 19 nt, Artificial Sequence
  Description of Artificial Sequence: Synthetic oligonucleotide
  Sense strand starting at position 177 of SEQ ID NO: 1881270
gggacauggugucuaauuc

SEQ ID NO: 2031417 - RNA, 19 nt, Artificial Sequence
  Description of Artificial Sequence: Synthetic oligonucleotide
  Antisense strand to SEQ ID NO: 2031416
gaauuagacaccauguccc

SEQ ID NO: 2031418 - RNA, 19 nt, Artificial Sequence
  Description of Artificial Sequence: Synthetic oligonucleotide
  Sense strand starting at position 178 of SEQ ID NO: 1881270
ggacauggugucuaauucu

SEQ ID NO: 2031419 - RNA, 19 nt, Artificial Sequence
  Description of Artificial Sequence: Synthetic oligonucleotide
  Antisense strand to SEQ ID NO: 2031418
agaauuagacaccaugucc

SEQ ID NO: 2031420 - RNA, 19 nt, Artificial Sequence
  Description of Artificial Sequence: Synthetic oligonucleotide
  Sense strand starting at position 181 of SEQ ID NO: 1881270
cauggugucuaauucugau

SEQ ID NO: 2031421 - RNA, 19 nt, Artificial Sequence
  Description of Artificial Sequence: Synthetic oligonucleotide
  Antisense strand to SEQ ID NO: 2031420
aucagaauuagacaccaug

SEQ ID NO: 2031422 - RNA, 19 nt, Artificial Sequence
  Description of Artificial Sequence: Synthetic oligonucleotide
  Sense strand starting at position 187 of SEQ ID NO: 1881270
gucuaauucugauugcuau

SEQ ID NO: 2031423 - RNA, 19 nt, Artificial Sequence
  Description of Artificial Sequence: Synthetic oligonucleotide
  Antisense strand to SEQ ID NO: 2031422
auagcaaucagaauuagac

SEQ ID NO: 2031424 - RNA, 19 nt, Artificial Sequence
  Description of Artificial Sequence: Synthetic oligonucleotide
  Sense strand starting at position 188 of SEQ ID NO: 1881270
ucuaauucugauugcuaug

SEQ ID NO: 2031425 - RNA, 19 nt, Artificial Sequence
  Description of Artificial Sequence: Synthetic oligonucleotide
  Antisense strand to SEQ ID NO: 2031424
cauagcaaucagaauuaga

SEQ ID NO: 2031426 - RNA, 19 nt, Artificial Sequence
  Description of Artificial Sequence: Synthetic oligonucleotide
  Sense strand starting at position 293 of SEQ ID NO: 1881270
cagcaauagugucuugaca

SEQ ID NO: 2031427 - RNA, 19 nt, Artificial Sequence
  Description of Artificial Sequence: Synthetic oligonucleotide
  Antisense strand to SEQ ID NO: 2031426
ugucaagacacuauugcug

SEQ ID NO: 2031428 - RNA, 19 nt, Artificial Sequence
  Description of Artificial Sequence: Synthetic oligonucleotide
  Sense strand starting at position 301 of SEQ ID NO: 1881270
gugucuugacacugucuaa

SEQ ID NO: 2031429 - RNA, 19 nt, Artificial Sequence
  Description of Artificial Sequence: Synthetic oligonucleotide
  Antisense strand to SEQ ID NO: 2031428
uuagacagugucaagacac

SEQ ID NO: 2031430 - RNA, 19 nt, Artificial Sequence
  Description of Artificial Sequence: Synthetic oligonucleotide
  Sense strand starting at position 357 of SEQ ID NO: 1881270
cagcuacaucucgggaaga

SEQ ID NO: 2031431 - RNA, 19 nt, Artificial Sequence
  Description of Artificial Sequence: Synthetic oligonucleotide
  Antisense strand to SEQ ID NO: 2031430
ucuucccgagauguagcug

SEQ ID NO: 2031432 - RNA, 19 nt, Artificial Sequence
  Description of Artificial Sequence: Synthetic oligonucleotide
  Sense strand starting at position 498 of SEQ ID NO: 1881270
ggcucucgggucugagaga

SEQ ID NO: 2031433 - RNA, 19 nt, Artificial Sequence
  Description of Artificial Sequence: Synthetic oligonucleotide
  Antisense strand to SEQ ID NO: 2031432
ucucucagacccgagagcc

SEQ ID NO: 2031434 - RNA, 19 nt, Artificial Sequence
  Description of Artificial Sequence: Synthetic oligonucleotide
  Sense strand starting at position 763 of SEQ ID NO: 1881270
cuugguguucaauaggaag

SEQ ID NO: 2031435 - RNA, 19 nt, Artificial Sequence
  Description of Artificial Sequence: Synthetic oligonucleotide
  Antisense strand to SEQ ID NO: 2031434
cuuccuauugaacaccaag

SEQ ID NO: 2031436 - RNA, 19 nt, Artificial Sequence
  Description of Artificial Sequence: Synthetic oligonucleotide
  Sense strand starting at position 1452 of SEQ ID NO: 1881270
gguuucugagcccagauaa

SEQ ID NO: 2031437 - RNA, 19 nt, Artificial Sequence
  Description of Artificial Sequence: Synthetic oligonucleotide
  Antisense strand to SEQ ID NO: 2031436
uuaucugggcucagaaacc

SEQ ID NO: 2031438 - RNA, 19 nt, Artificial Sequence
  Description of Artificial Sequence: Synthetic oligonucleotide
  Sense strand starting at position 1550 of SEQ ID NO: 1881270
uuaggccucucccuggaua

SEQ ID NO: 2031439 - RNA, 19 nt, Artificial Sequence
  Description of Artificial Sequence: Synthetic oligonucleotide
  Antisense strand to SEQ ID NO: 2031438
uauccagggagaggccuaa

SEQ ID NO: 2031440 - RNA, 19 nt, Artificial Sequence
  Description of Artificial Sequence: Synthetic oligonucleotide
  Sense strand starting at position 1865 of SEQ ID NO: 1881270
cucagagagcuugagugau

SEQ ID NO: 2031441 - RNA, 19 nt, Artificial Sequence
  Description of Artificial Sequence: Synthetic oligonucleotide
  Antisense strand to SEQ ID NO: 2031440
aucacucaagcucucugag

SEQ ID NO: 2031442 - RNA, 19 nt, Artificial Sequence
  Description of Artificial Sequence: Synthetic oligonucleotide
  Sense strand starting at position 2358 of SEQ ID NO: 1881270
ugcauuucccaguggaagu

SEQ ID NO: 2031443 - RNA, 19 nt, Artificial Sequence
  Description of Artificial Sequence: Synthetic oligonucleotide
  Antisense strand to SEQ ID NO: 2031442
acuuccacugggaaaugca

SEQ ID NO: 2031444 - RNA, 19 nt, Artificial Sequence
  Description of Artificial Sequence: Synthetic oligonucleotide
  Sense strand starting at position 2359 of SEQ ID NO: 1881270
gcauuucccaguggaaguu

SEQ ID NO: 2031445 - RNA, 19 nt, Artificial Sequence
  Description of Artificial Sequence: Synthetic oligonucleotide
  Antisense strand to SEQ ID NO: 2031444
aacuuccacugggaaaugc

SEQ ID NO: 2031446 - RNA, 19 nt, Artificial Sequence
  Description of Artificial Sequence: Synthetic oligonucleotide
  Sense strand starting at position 2523 of SEQ ID NO: 1881270
ggguccucuagggaucauu

SEQ ID NO: 2031447 - RNA, 19 nt, Artificial Sequence
  Description of Artificial Sequence: Synthetic oligonucleotide
  Antisense strand to SEQ ID NO: 2031446
aaugaucccuagaggaccc

SEQ ID NO: 2031448 - RNA, 19 nt, Artificial Sequence
  Description of Artificial Sequence: Synthetic oligonucleotide
  Sense strand starting at position 2562 of SEQ ID NO: 1881270
agaugaggagucugggcau

SEQ ID NO: 2031449 - RNA, 19 nt, Artificial Sequence
  Description of Artificial Sequence: Synthetic oligonucleotide
  Antisense strand to SEQ ID NO: 2031448
augcccagacuccucaucu

SEQ ID NO: 2031450 - RNA, 19 nt, Artificial Sequence
  Description of Artificial Sequence: Synthetic oligonucleotide
  Sense strand starting at position 2575 of SEQ ID NO: 1881270
gggcaucuguuccuuauaa

SEQ ID NO: 2031451 - RNA, 19 nt, Artificial Sequence
  Description of Artificial Sequence: Synthetic oligonucleotide
  Antisense strand to SEQ ID NO: 2031450
uuauaaggaacagaugccc

SEQ ID NO: 2031452 - RNA, 19 nt, Artificial Sequence
  Description of Artificial Sequence: Synthetic oligonucleotide
  Sense strand starting at position 2576 of SEQ ID NO: 1881270
ggcaucuguuccuuauaag

SEQ ID NO: 2031453 - RNA, 19 nt, Artificial Sequence
  Description of Artificial Sequence: Synthetic oligonucleotide
  Antisense strand to SEQ ID NO: 2031452
cuuauaaggaacagaugcc

SEQ ID NO: 2031454 - RNA, 19 nt, Artificial Sequence
  Description of Artificial Sequence: Synthetic oligonucleotide
  Sense strand starting at position 2577 of SEQ ID NO: 1881270
gcaucuguuccuuauaaga

SEQ ID NO: 2031455 - RNA, 19 nt, Artificial Sequence
  Description of Artificial Sequence: Synthetic oligonucleotide
  Antisense strand to SEQ ID NO: 2031454
ucuuauaaggaacagaugc

SEQ ID NO: 2031456 - RNA, 19 nt, Artificial Sequence
  Description of Artificial Sequence: Synthetic oligonucleotide
  Sense strand starting at position 2612 of SEQ ID NO: 1881270
uggaacucucacggaaguu

SEQ ID NO: 2031457 - RNA, 19 nt, Artificial Sequence
  Description of Artificial Sequence: Synthetic oligonucleotide
  Antisense strand to SEQ ID NO: 2031456
aacuuccgugagaguucca

SEQ ID NO: 2031458 - RNA, 19 nt, Artificial Sequence
  Description of Artificial Sequence: Synthetic oligonucleotide
  Sense strand starting at position 2656 of SEQ ID NO: 1881270
acuggcuuuccaugaagac

SEQ ID NO: 2031459 - RNA, 19 nt, Artificial Sequence
  Description of Artificial Sequence: Synthetic oligonucleotide
  Antisense strand to SEQ ID NO: 2031458
gucuucauggaaagccagu

SEQ ID NO: 2031460 - RNA, 19 nt, Artificial Sequence
  Description of Artificial Sequence: Synthetic oligonucleotide
  Sense strand starting at position 2657 of SEQ ID NO: 1881270
cuggcuuuccaugaagaca

SEQ ID NO: 2031461 - RNA, 19 nt, Artificial Sequence
  Description of Artificial Sequence: Synthetic oligonucleotide
  Antisense strand to SEQ ID NO: 2031460
ugucuucauggaaagccag

SEQ ID NO: 2031462 - RNA, 19 nt, Artificial Sequence
  Description of Artificial Sequence: Synthetic oligonucleotide
  Sense strand starting at position 2782 of SEQ ID NO: 1881270
auuggcagaaugugaauau

SEQ ID NO: 2031463 - RNA, 19 nt, Artificial Sequence
  Description of Artificial Sequence: Synthetic oligonucleotide
  Antisense strand to SEQ ID NO: 2031462
auauucacauucugccaau

SEQ ID NO: 2031464 - RNA, 19 nt, Artificial Sequence
  Description of Artificial Sequence: Synthetic oligonucleotide
  Sense strand starting at position 2792 of SEQ ID NO: 1881270
ugugaauauggauggcaca

SEQ ID NO: 2031465 - RNA, 19 nt, Artificial Sequence
  Description of Artificial Sequence: Synthetic oligonucleotide
  Antisense strand to SEQ ID NO: 2031464
ugugccauccauauucaca

SEQ ID NO: 2031466 - RNA, 19 nt, Artificial Sequence
  Description of Artificial Sequence: Synthetic oligonucleotide
  Sense strand starting at position 2832 of SEQ ID NO: 1881270
augucaaguuuccugaauu

SEQ ID NO: 2031467 - RNA, 19 nt, Artificial Sequence
  Description of Artificial Sequence: Synthetic oligonucleotide
  Antisense strand to SEQ ID NO: 2031466
aauucaggaaacuugacau

SEQ ID NO: 2031468 - RNA, 19 nt, Artificial Sequence
  Description of Artificial Sequence: Synthetic oligonucleotide
  Sense strand starting at position 2862 of SEQ ID NO: 1881270
ugugguuaugcaugagaau

SEQ ID NO: 2031469 - RNA, 19 nt, Artificial Sequence
  Description of Artificial Sequence: Synthetic oligonucleotide
  Antisense strand to SEQ ID NO: 2031468
auucucaugcauaaccaca

SEQ ID NO: 2031470 - RNA, 19 nt, Artificial Sequence
  Description of Artificial Sequence: Synthetic oligonucleotide
  Sense strand starting at position 2863 of SEQ ID NO: 1881270
gugguuaugcaugagaaua

SEQ ID NO: 2031471 - RNA, 19 nt, Artificial Sequence
  Description of Artificial Sequence: Synthetic oligonucleotide
  Antisense strand to SEQ ID NO: 2031470
uauucucaugcauaaccac

SEQ ID NO: 2031472 - RNA, 19 nt, Artificial Sequence
  Description of Artificial Sequence: Synthetic oligonucleotide
  Sense strand starting at position 2874 of SEQ ID NO: 1881270
ugagaauacccuugcucuu

SEQ ID NO: 2031473 - RNA, 19 nt, Artificial Sequence
  Description of Artificial Sequence: Synthetic oligonucleotide
  Antisense strand to SEQ ID NO: 2031472
aagagcaaggguauucuca

SEQ ID NO: 2031474 - RNA, 19 nt, Artificial Sequence
  Description of Artificial Sequence: Synthetic oligonucleotide
  Sense strand starting at position 2926 of SEQ ID NO: 1881270
gccaucacaucugcaugau

SEQ ID NO: 2031475 - RNA, 19 nt, Artificial Sequence
  Description of Artificial Sequence: Synthetic oligonucleotide
  Antisense strand to SEQ ID NO: 2031474
aucaugcagaugugauggc

SEQ ID NO: 2031476 - RNA, 19 nt, Artificial Sequence
  Description of Artificial Sequence: Synthetic oligonucleotide
  Sense strand starting at position 2947 of SEQ ID NO: 1881270
ggaggagagugagauuugu

SEQ ID NO: 2031477 - RNA, 19 nt, Artificial Sequence
  Description of Artificial Sequence: Synthetic oligonucleotide
  Antisense strand to SEQ ID NO: 2031476
acaaaucucacucuccucc

SEQ ID NO: 2031478 - RNA, 19 nt, Artificial Sequence
  Description of Artificial Sequence: Synthetic oligonucleotide
  Sense strand starting at position 2956 of SEQ ID NO: 1881270
ugagauuugucagagagca

SEQ ID NO: 2031479 - RNA, 19 nt, Artificial Sequence
  Description of Artificial Sequence: Synthetic oligonucleotide
  Antisense strand to SEQ ID NO: 2031478
ugcucucugacaaaucuca

SEQ ID NO: 2031480 - RNA, 19 nt, Artificial Sequence
  Description of Artificial Sequence: Synthetic oligonucleotide
  Sense strand starting at position 3165 of SEQ ID NO: 1881270
ggaauuucuugccaauacu

SEQ ID NO: 2031481 - RNA, 19 nt, Artificial Sequence
  Description of Artificial Sequence: Synthetic oligonucleotide
  Antisense strand to SEQ ID NO: 2031480
aguauuggcaagaaauucc

SEQ ID NO: 2031482 - RNA, 19 nt, Artificial Sequence
  Description of Artificial Sequence: Synthetic oligonucleotide
  Sense strand starting at position 3338 of SEQ ID NO: 1881270
gacauaugaguuugcaauu

SEQ ID NO: 2031483 - RNA, 19 nt, Artificial Sequence
  Description of Artificial Sequence: Synthetic oligonucleotide
  Antisense strand to SEQ ID NO: 2031482
aauugcaaacucauauguc

SEQ ID NO: 2031484 - RNA, 19 nt, Artificial Sequence
  Description of Artificial Sequence: Synthetic oligonucleotide
  Sense strand starting at position 3599 of SEQ ID NO: 1881270
ugggcauucugccuccaga

SEQ ID NO: 2031485 - RNA, 19 nt, Artificial Sequence
  Description of Artificial Sequence: Synthetic oligonucleotide
  Antisense strand to SEQ ID NO: 2031484
ucuggaggcagaaugccca

SEQ ID NO: 2031486 - RNA, 19 nt, Artificial Sequence
  Description of Artificial Sequence: Synthetic oligonucleotide
  Sense strand starting at position 3855 of SEQ ID NO: 1881270
gcccucuucuaagcugaaa

SEQ ID NO: 2031487 - RNA, 19 nt, Artificial Sequence
  Description of Artificial Sequence: Synthetic oligonucleotide
  Antisense strand to SEQ ID NO: 2031486
uuucagcuuagaagagggc

SEQ ID NO: 2031488 - RNA, 19 nt, Artificial Sequence
  Description of Artificial Sequence: Synthetic oligonucleotide
  Sense strand starting at position 3867 of SEQ ID NO: 1881270
gcugaaacagugcaugaga

SEQ ID NO: 2031489 - RNA, 19 nt, Artificial Sequence
  Description of Artificial Sequence: Synthetic oligonucleotide
  Antisense strand to SEQ ID NO: 2031488
ucucaugcacuguuucagc

SEQ ID NO: 2031490 - RNA, 19 nt, Artificial Sequence
  Description of Artificial Sequence: Synthetic oligonucleotide
  Sense strand starting at position 3946 of SEQ ID NO: 1881270
cuguguuguuccucaagga

SEQ ID NO: 2031491 - RNA, 19 nt, Artificial Sequence
  Description of Artificial Sequence: Synthetic oligonucleotide
  Antisense strand to SEQ ID NO: 2031490
uccuugaggaacaacacag

SEQ ID NO: 2031492 - RNA, 19 nt, Artificial Sequence
  Description of Artificial Sequence: Synthetic oligonucleotide
  Sense strand starting at position 3947 of SEQ ID NO: 1881270
uguguuguuccucaaggau

SEQ ID NO: 2031493 - RNA, 19 nt, Artificial Sequence
  Description of Artificial Sequence: Synthetic oligonucleotide
  Antisense strand to SEQ ID NO: 2031492
auccuugaggaacaacaca

SEQ ID NO: 2031494 - RNA, 19 nt, Artificial Sequence
  Description of Artificial Sequence: Synthetic oligonucleotide
  Sense strand starting at position 3950 of SEQ ID NO: 1881270
guuguuccucaaggaucau

SEQ ID NO: 2031495 - RNA, 19 nt, Artificial Sequence
  Description of Artificial Sequence: Synthetic oligonucleotide
  Antisense strand to SEQ ID NO: 2031494
augauccuugaggaacaac

SEQ ID NO: 2031496 - RNA, 19 nt, Artificial Sequence
  Description of Artificial Sequence: Synthetic oligonucleotide
  Sense strand starting at position 86 of SEQ ID NO: 1881271
agcgcagugaccuggagaa

SEQ ID NO: 2031497 - RNA, 19 nt, Artificial Sequence
  Description of Artificial Sequence: Synthetic oligonucleotide
  Antisense strand to SEQ ID NO: 2031496
uucuccaggucacugcgcu

SEQ ID NO: 2031498 - RNA, 19 nt, Artificial Sequence
  Description of Artificial Sequence: Synthetic oligonucleotide
  Sense strand starting at position 102 of SEQ ID NO: 1881271
gaaagagcuggauguguca

SEQ ID NO: 2031499 - RNA, 19 nt, Artificial Sequence
  Description of Artificial Sequence: Synthetic oligonucleotide
  Antisense strand to SEQ ID NO: 2031498
ugacacauccagcucuuuc

SEQ ID NO: 2031500 - RNA, 19 nt, Artificial Sequence
  Description of Artificial Sequence: Synthetic oligonucleotide
  Sense strand starting at position 409 of SEQ ID NO: 1881271
cuggccuggauguguaauu

SEQ ID NO: 2031501 - RNA, 19 nt, Artificial Sequence
  Description of Artificial Sequence: Synthetic oligonucleotide
  Antisense strand to SEQ ID NO: 2031500
aauuacacauccaggccag

SEQ ID NO: 2031502 - RNA, 19 nt, Artificial Sequence
  Description of Artificial Sequence: Synthetic oligonucleotide
  Sense strand starting at position 410 of SEQ ID NO: 1881271
uggccuggauguguaauuu

SEQ ID NO: 2031503 - RNA, 19 nt, Artificial Sequence
  Description of Artificial Sequence: Synthetic oligonucleotide
  Antisense strand to SEQ ID NO: 2031502
aaauuacacauccaggcca

SEQ ID NO: 2031504 - RNA, 19 nt, Artificial Sequence
  Description of Artificial Sequence: Synthetic oligonucleotide
  Sense strand starting at position 493 of SEQ ID NO: 1881271
cuaguuaaacuugaguucu

SEQ ID NO: 2031505 - RNA, 19 nt, Artificial Sequence
  Description of Artificial Sequence: Synthetic oligonucleotide
  Antisense strand to SEQ ID NO: 2031504
agaacucaaguuuaacuag

SEQ ID NO: 2031506 - RNA, 19 nt, Artificial Sequence
  Description of Artificial Sequence: Synthetic oligonucleotide
  Sense strand starting at position 495 of SEQ ID NO: 1881271
aguuaaacuugaguucugu

SEQ ID NO: 2031507 - RNA, 19 nt, Artificial Sequence
  Description of Artificial Sequence: Synthetic oligonucleotide
  Antisense strand to SEQ ID NO: 2031506
acagaacucaaguuuaacu

SEQ ID NO: 2031508 - RNA, 19 nt, Artificial Sequence
  Description of Artificial Sequence: Synthetic oligonucleotide
  Sense strand starting at position 523 of SEQ ID NO: 1881271
cuuaaagcucccugaagga

SEQ ID NO: 2031509 - RNA, 19 nt, Artificial Sequence
  Description of Artificial Sequence: Synthetic oligonucleotide
  Antisense strand to SEQ ID NO: 2031508
uccuucagggagcuuuaag

SEQ ID NO: 2031510 - RNA, 19 nt, Artificial Sequence
  Description of Artificial Sequence: Synthetic oligonucleotide
  Sense strand starting at position 767 of SEQ ID NO: 1881271
cugggagacuccuucuuac

SEQ ID NO: 2031511 - RNA, 19 nt, Artificial Sequence
  Description of Artificial Sequence: Synthetic oligonucleotide
  Antisense strand to SEQ ID NO: 2031510
guaagaaggagucucccag

SEQ ID NO: 2031512 - RNA, 19 nt, Artificial Sequence
  Description of Artificial Sequence: Synthetic oligonucleotide
  Sense strand starting at position 824 of SEQ ID NO: 1881271
gcaacuuuccgcucagcuu

SEQ ID NO: 2031513 - RNA, 19 nt, Artificial Sequence
  Description of Artificial Sequence: Synthetic oligonucleotide
  Antisense strand to SEQ ID NO: 2031512
aagcugagcggaaaguugc

SEQ ID NO: 2031514 - RNA, 19 nt, Artificial Sequence
  Description of Artificial Sequence: Synthetic oligonucleotide
  Sense strand starting at position 1224 of SEQ ID NO: 1881271
cagaguuaagugcauaauu

SEQ ID NO: 2031515 - RNA, 19 nt, Artificial Sequence
  Description of Artificial Sequence: Synthetic oligonucleotide
  Antisense strand to SEQ ID NO: 2031514
aauuaugcacuuaacucug

SEQ ID NO: 2031516 - RNA, 19 nt, Artificial Sequence
  Description of Artificial Sequence: Synthetic oligonucleotide
  Sense strand starting at position 1232 of SEQ ID NO: 1881271
agugcauaauuggcauaaa

SEQ ID NO: 2031517 - RNA, 19 nt, Artificial Sequence
  Description of Artificial Sequence: Synthetic oligonucleotide
  Antisense strand to SEQ ID NO: 2031516
uuuaugccaauuaugcacu

SEQ ID NO: 2031518 - RNA, 19 nt, Artificial Sequence
  Description of Artificial Sequence: Synthetic oligonucleotide
  Sense strand starting at position 1251 of SEQ ID NO: 1881271
ggcucuuguuaucccaaga

SEQ ID NO: 2031519 - RNA, 19 nt, Artificial Sequence
  Description of Artificial Sequence: Synthetic oligonucleotide
  Antisense strand to SEQ ID NO: 2031518
ucuugggauaacaagagcc

SEQ ID NO: 2031520 - RNA, 19 nt, Artificial Sequence
  Description of Artificial Sequence: Synthetic oligonucleotide
  Sense strand starting at position 1301 of SEQ ID NO: 1881271
ccgucaaguucuguaacag

SEQ ID NO: 2031521 - RNA, 19 nt, Artificial Sequence
  Description of Artificial Sequence: Synthetic oligonucleotide
  Antisense strand to SEQ ID NO: 2031520
cuguuacagaacuugacgg

SEQ ID NO: 2031522 - RNA, 19 nt, Artificial Sequence
  Description of Artificial Sequence: Synthetic oligonucleotide
  Sense strand starting at position 1770 of SEQ ID NO: 1881271
uguggcauccucuaugcuu

SEQ ID NO: 2031523 - RNA, 19 nt, Artificial Sequence
  Description of Artificial Sequence: Synthetic oligonucleotide
  Antisense strand to SEQ ID NO: 2031522
aagcauagaggaugccaca

SEQ ID NO: 2031524 - RNA, 19 nt, Artificial Sequence
  Description of Artificial Sequence: Synthetic oligonucleotide
  Sense strand starting at position 1843 of SEQ ID NO: 1881271
gaggucucugaggagucua

SEQ ID NO: 2031525 - RNA, 19 nt, Artificial Sequence
  Description of Artificial Sequence: Synthetic oligonucleotide
  Antisense strand to SEQ ID NO: 2031524
uagacuccucagagaccuc

SEQ ID NO: 2031526 - RNA, 19 nt, Artificial Sequence
  Description of Artificial Sequence: Synthetic oligonucleotide
  Sense strand starting at position 1856 of SEQ ID NO: 1881271
agucuaggauagucaggau

SEQ ID NO: 2031527 - RNA, 19 nt, Artificial Sequence
  Description of Artificial Sequence: Synthetic oligonucleotide
  Antisense strand to SEQ ID NO: 2031526
auccugacuauccuagacu

SEQ ID NO: 2031528 - RNA, 19 nt, Artificial Sequence
  Description of Artificial Sequence: Synthetic oligonucleotide
  Sense strand starting at position 1860 of SEQ ID NO: 1881271
uaggauagucaggauuguu

SEQ ID NO: 2031529 - RNA, 19 nt, Artificial Sequence
  Description of Artificial Sequence: Synthetic oligonucleotide
  Antisense strand to SEQ ID NO: 2031528
aacaauccugacuauccua

SEQ ID NO: 2031530 - RNA, 19 nt, Artificial Sequence
  Description of Artificial Sequence: Synthetic oligonucleotide
  Sense strand starting at position 1909 of SEQ ID NO: 1881271
acgaaaugcccaugacgua

SEQ ID NO: 2031531 - RNA, 19 nt, Artificial Sequence
  Description of Artificial Sequence: Synthetic oligonucleotide
  Antisense strand to SEQ ID NO: 2031530
uacgucaugggcauuucgu

SEQ ID NO: 2031532 - RNA, 19 nt, Artificial Sequence
  Description of Artificial Sequence: Synthetic oligonucleotide
  Sense strand starting at position 2027 of SEQ ID NO: 1881271
uugagaaaggccuggcuca

SEQ ID NO: 2031533 - RNA, 19 nt, Artificial Sequence
  Description of Artificial Sequence: Synthetic oligonucleotide
  Antisense strand to SEQ ID NO: 2031532
ugagccaggccuuucucaa

SEQ ID NO: 2031534 - RNA, 19 nt, Artificial Sequence
  Description of Artificial Sequence: Synthetic oligonucleotide
  Sense strand starting at position 2085 of SEQ ID NO: 1881271
accugacaugcaggugaaa

SEQ ID NO: 2031535 - RNA, 19 nt, Artificial Sequence
  Description of Artificial Sequence: Synthetic oligonucleotide
  Antisense strand to SEQ ID NO: 2031534
uuucaccugcaugucaggu

SEQ ID NO: 2031536 - RNA, 19 nt, Artificial Sequence
  Description of Artificial Sequence: Synthetic oligonucleotide
  Sense strand starting at position 2126 of SEQ ID NO: 1881271
gcuggaagaacuuggucuu

SEQ ID NO: 2031537 - RNA, 19 nt, Artificial Sequence
  Description of Artificial Sequence: Synthetic oligonucleotide
  Antisense strand to SEQ ID NO: 2031536
aagaccaaguucuuccagc

SEQ ID NO: 2031538 - RNA, 19 nt, Artificial Sequence
  Description of Artificial Sequence: Synthetic oligonucleotide
  Sense strand starting at position 2129 of SEQ ID NO: 1881271
ggaagaacuuggucuugcu

SEQ ID NO: 2031539 - RNA, 19 nt, Artificial Sequence
  Description of Artificial Sequence: Synthetic oligonucleotide
  Antisense strand to SEQ ID NO: 2031538
agcaagaccaaguucuucc

SEQ ID NO: 2031540 - RNA, 19 nt, Artificial Sequence
  Description of Artificial Sequence: Synthetic oligonucleotide
  Sense strand starting at position 2147 of SEQ ID NO: 1881271
ugucucuuccacugacaga

SEQ ID NO: 2031541 - RNA, 19 nt, Artificial Sequence
  Description of Artificial Sequence: Synthetic oligonucleotide
  Antisense strand to SEQ ID NO: 2031540
ucugucaguggaagagaca

SEQ ID NO: 2031542 - RNA, 19 nt, Artificial Sequence
  Description of Artificial Sequence: Synthetic oligonucleotide
  Sense strand starting at position 2197 of SEQ ID NO: 1881271
gucaguucugauggaaaca

SEQ ID NO: 2031543 - RNA, 19 nt, Artificial Sequence
  Description of Artificial Sequence: Synthetic oligonucleotide
  Antisense strand to SEQ ID NO: 2031542
uguuuccaucagaacugac

SEQ ID NO: 2031544 - RNA, 19 nt, Artificial Sequence
  Description of Artificial Sequence: Synthetic oligonucleotide
  Sense strand starting at position 2206 of SEQ ID NO: 1881271
gauggaaacaccugguguu

SEQ ID NO: 2031545 - RNA, 19 nt, Artificial Sequence
  Description of Artificial Sequence: Synthetic oligonucleotide
  Antisense strand to SEQ ID NO: 2031544
aacaccagguguuuccauc

SEQ ID NO: 2031546 - RNA, 19 nt, Artificial Sequence
  Description of Artificial Sequence: Synthetic oligonucleotide
  Sense strand starting at position 2207 of SEQ ID NO: 1881271
auggaaacaccugguguuu

SEQ ID NO: 2031547 - RNA, 19 nt, Artificial Sequence
  Description of Artificial Sequence: Synthetic oligonucleotide
  Antisense strand to SEQ ID NO: 2031546
aaacaccagguguuuccau

SEQ ID NO: 2031548 - RNA, 19 nt, Artificial Sequence
  Description of Artificial Sequence: Synthetic oligonucleotide
  Sense strand starting at position 2213 of SEQ ID NO: 1881271
acaccugguguuuacaaau

SEQ ID NO: 2031549 - RNA, 19 nt, Artificial Sequence
  Description of Artificial Sequence: Synthetic oligonucleotide
  Antisense strand to SEQ ID NO: 2031548
auuuguaaacaccaggugu

SEQ ID NO: 2031550 - RNA, 19 nt, Artificial Sequence
  Description of Artificial Sequence: Synthetic oligonucleotide
  Sense strand starting at position 2365 of SEQ ID NO: 1881271
gggcgaguccuucaaagag

SEQ ID NO: 2031551 - RNA, 19 nt, Artificial Sequence
  Description of Artificial Sequence: Synthetic oligonucleotide
  Antisense strand to SEQ ID NO: 2031550
cucuuugaaggacucgccc

SEQ ID NO: 2031552 - RNA, 19 nt, Artificial Sequence
  Description of Artificial Sequence: Synthetic oligonucleotide
  Sense strand starting at position 2498 of SEQ ID NO: 1881271
cguagucugacagguaaga

SEQ ID NO: 2031553 - RNA, 19 nt, Artificial Sequence
  Description of Artificial Sequence: Synthetic oligonucleotide
  Antisense strand to SEQ ID NO: 2031552
ucuuaccugucagacuacg

SEQ ID NO: 2031554 - RNA, 19 nt, Artificial Sequence
  Description of Artificial Sequence: Synthetic oligonucleotide
  Sense strand starting at position 2660 of SEQ ID NO: 1881271
uuguauuaucuccagcuag

SEQ ID NO: 2031555 - RNA, 19 nt, Artificial Sequence
  Description of Artificial Sequence: Synthetic oligonucleotide
  Antisense strand to SEQ ID NO: 2031554
cuagcuggagauaauacaa

SEQ ID NO: 2031556 - RNA, 19 nt, Artificial Sequence
  Description of Artificial Sequence: Synthetic oligonucleotide
  Sense strand starting at position 2920 of SEQ ID NO: 1881271
aagccuuuggcuuggcaga

SEQ ID NO: 2031557 - RNA, 19 nt, Artificial Sequence
  Description of Artificial Sequence: Synthetic oligonucleotide
  Antisense strand to SEQ ID NO: 2031556
ucugccaagccaaaggcuu

SEQ ID NO: 2031558 - RNA, 19 nt, Artificial Sequence
  Description of Artificial Sequence: Synthetic oligonucleotide
  Sense strand starting at position 3017 of SEQ ID NO: 1881271
gggaguggucuacaggguu

SEQ ID NO: 2031559 - RNA, 19 nt, Artificial Sequence
  Description of Artificial Sequence: Synthetic oligonucleotide
  Antisense strand to SEQ ID NO: 2031558
aacccuguagaccacuccc

SEQ ID NO: 2031560 - RNA, 19 nt, Artificial Sequence
  Description of Artificial Sequence: Synthetic oligonucleotide
  Sense strand starting at position 3118 of SEQ ID NO: 1881271
aagcuuuaggcagaagauc

SEQ ID NO: 2031561 - RNA, 19 nt, Artificial Sequence
  Description of Artificial Sequence: Synthetic oligonucleotide
  Antisense strand to SEQ ID NO: 2031560
gaucuucugccuaaagcuu

SEQ ID NO: 2031562 - RNA, 19 nt, Artificial Sequence
  Description of Artificial Sequence: Synthetic oligonucleotide
  Sense strand starting at position 3173 of SEQ ID NO: 1881271
gcggcucuccaugaagaga

SEQ ID NO: 2031563 - RNA, 19 nt, Artificial Sequence
  Description of Artificial Sequence: Synthetic oligonucleotide
  Antisense strand to SEQ ID NO: 2031562
ucucuucauggagagccgc

SEQ ID NO: 2031564 - RNA, 19 nt, Artificial Sequence
  Description of Artificial Sequence: Synthetic oligonucleotide
  Sense strand starting at position 3237 of SEQ ID NO: 1881271
ucccaucugggucaugauu

SEQ ID NO: 2031565 - RNA, 19 nt, Artificial Sequence
  Description of Artificial Sequence: Synthetic oligonucleotide
  Antisense strand to SEQ ID NO: 2031564
aaucaugacccagauggga

SEQ ID NO: 2031566 - RNA, 19 nt, Artificial Sequence
  Description of Artificial Sequence: Synthetic oligonucleotide
  Sense strand starting at position 3302 of SEQ ID NO: 1881271
cgaggcuguuccucaaaca

SEQ ID NO: 2031567 - RNA, 19 nt, Artificial Sequence
  Description of Artificial Sequence: Synthetic oligonucleotide
  Antisense strand to SEQ ID NO: 2031566
uguuugaggaacagccucg

SEQ ID NO: 2031568 - RNA, 19 nt, Artificial Sequence
  Description of Artificial Sequence: Synthetic oligonucleotide
  Sense strand starting at position 3338 of SEQ ID NO: 1881271
ucagguuguagugaaggau

SEQ ID NO: 2031569 - RNA, 19 nt, Artificial Sequence
  Description of Artificial Sequence: Synthetic oligonucleotide
  Antisense strand to SEQ ID NO: 2031568
auccuucacuacaaccuga

SEQ ID NO: 2031570 - RNA, 19 nt, Artificial Sequence
  Description of Artificial Sequence: Synthetic oligonucleotide
  Sense strand starting at position 3400 of SEQ ID NO: 1881271
gcucgaauuaugggacggu

SEQ ID NO: 2031571 - RNA, 19 nt, Artificial Sequence
  Description of Artificial Sequence: Synthetic oligonucleotide
  Antisense strand to SEQ ID NO: 2031570
accgucccauaauucgagc

SEQ ID NO: 2031572 - RNA, 19 nt, Artificial Sequence
  Description of Artificial Sequence: Synthetic oligonucleotide
  Sense strand starting at position 3404 of SEQ ID NO: 1881271
gaauuaugggacggucaca

SEQ ID NO: 2031573 - RNA, 19 nt, Artificial Sequence
  Description of Artificial Sequence: Synthetic oligonucleotide
  Antisense strand to SEQ ID NO: 2031572
ugugaccgucccauaauuc

SEQ ID NO: 2031574 - RNA, 19 nt, Artificial Sequence
  Description of Artificial Sequence: Synthetic oligonucleotide
  Sense strand starting at position 3517 of SEQ ID NO: 1881271
gcguuugaggaauacauaa

SEQ ID NO: 2031575 - RNA, 19 nt, Artificial Sequence
  Description of Artificial Sequence: Synthetic oligonucleotide
  Antisense strand to SEQ ID NO: 2031574
uuauguauuccucaaacgc

SEQ ID NO: 2031576 - RNA, 19 nt, Artificial Sequence
  Description of Artificial Sequence: Synthetic oligonucleotide
  Sense strand starting at position 127 of SEQ ID NO: 1881272
caucaaguucugggacaaa

SEQ ID NO: 2031577 - RNA, 19 nt, Artificial Sequence
  Description of Artificial Sequence: Synthetic oligonucleotide
  Antisense strand to SEQ ID NO: 2031576
uuugucccagaacuugaug

SEQ ID NO: 2031578 - RNA, 19 nt, Artificial Sequence
  Description of Artificial Sequence: Synthetic oligonucleotide
  Sense strand starting at position 289 of SEQ ID NO: 1881272
ugcugcuaucaucaaauga

SEQ ID NO: 2031579 - RNA, 19 nt, Artificial Sequence
  Description of Artificial Sequence: Synthetic oligonucleotide
  Antisense strand to SEQ ID NO: 2031578
ucauuugaugauagcagca

SEQ ID NO: 2031580 - RNA, 19 nt, Artificial Sequence
  Description of Artificial Sequence: Synthetic oligonucleotide
  Sense strand starting at position 381 of SEQ ID NO: 1881272
gugagcuuccguguccuca

SEQ ID NO: 2031581 - RNA, 19 nt, Artificial Sequence
  Description of Artificial Sequence: Synthetic oligonucleotide
  Antisense strand to SEQ ID NO: 2031580
ugaggacacggaagcucac

SEQ ID NO: 2031582 - RNA, 19 nt, Artificial Sequence
  Description of Artificial Sequence: Synthetic oligonucleotide
  Sense strand starting at position 382 of SEQ ID NO: 1881272
ugagcuuccguguccucau

SEQ ID NO: 2031583 - RNA, 19 nt, Artificial Sequence
  Description of Artificial Sequence: Synthetic oligonucleotide
  Antisense strand to SEQ ID NO: 2031582
augaggacacggaagcuca

SEQ ID NO: 2031584 - RNA, 19 nt, Artificial Sequence
  Description of Artificial Sequence: Synthetic oligonucleotide
  Sense strand starting at position 479 of SEQ ID NO: 1881272
augaccugugcauauaaau

SEQ ID NO: 2031585 - RNA, 19 nt, Artificial Sequence
  Description of Artificial Sequence: Synthetic oligonucleotide
  Antisense strand to SEQ ID NO: 2031584
auuuauaugcacaggucau

SEQ ID NO: 2031586 - RNA, 19 nt, Artificial Sequence
  Description of Artificial Sequence: Synthetic oligonucleotide
  Sense strand starting at position 586 of SEQ ID NO: 1881272
gcaauagauuuauaaaguc

SEQ ID NO: 2031587 - RNA, 19 nt, Artificial Sequence
  Description of Artificial Sequence: Synthetic oligonucleotide
  Antisense strand to SEQ ID NO: 2031586
gacuuuauaaaucuauugc

SEQ ID NO: 2031588 - RNA, 19 nt, Artificial Sequence
  Description of Artificial Sequence: Synthetic oligonucleotide
  Sense strand starting at position 741 of SEQ ID NO: 1881272
guuguugucacagauagug

SEQ ID NO: 2031589 - RNA, 19 nt, Artificial Sequence
  Description of Artificial Sequence: Synthetic oligonucleotide
  Antisense strand to SEQ ID NO: 2031588
cacuaucugugacaacaac

SEQ ID NO: 2031590 - RNA, 19 nt, Artificial Sequence
  Description of Artificial Sequence: Synthetic oligonucleotide
  Sense strand starting at position 743 of SEQ ID NO: 1881272
uguugucacagauagugca

SEQ ID NO: 2031591 - RNA, 19 nt, Artificial Sequence
  Description of Artificial Sequence: Synthetic oligonucleotide
  Antisense strand to SEQ ID NO: 2031590
ugcacuaucugugacaaca

SEQ ID NO: 2031592 - RNA, 19 nt, Artificial Sequence
  Description of Artificial Sequence: Synthetic oligonucleotide
  Sense strand starting at position 765 of SEQ ID NO: 1881272
cuguucucaccucaugaga

SEQ ID NO: 2031593 - RNA, 19 nt, Artificial Sequence
  Description of Artificial Sequence: Synthetic oligonucleotide
  Antisense strand to SEQ ID NO: 2031592
ucucaugaggugagaacag

SEQ ID NO: 2031594 - RNA, 19 nt, Artificial Sequence
  Description of Artificial Sequence: Synthetic oligonucleotide
  Sense strand starting at position 824 of SEQ ID NO: 1881272
agcauuggcacugggaaga

SEQ ID NO: 2031595 - RNA, 19 nt, Artificial Sequence
  Description of Artificial Sequence: Synthetic oligonucleotide
  Antisense strand to SEQ ID NO: 2031594
ucuucccagugccaaugcu

SEQ ID NO: 2031596 - RNA, 19 nt, Artificial Sequence
  Description of Artificial Sequence: Synthetic oligonucleotide
  Sense strand starting at position 1006 of SEQ ID NO: 1881272
cuccuuuguguuuaaauug

SEQ ID NO: 2031597 - RNA, 19 nt, Artificial Sequence
  Description of Artificial Sequence: Synthetic oligonucleotide
  Antisense strand to SEQ ID NO: 2031596
caauuuaaacacaaaggag

SEQ ID NO: 2031598 - RNA, 19 nt, Artificial Sequence
  Description of Artificial Sequence: Synthetic oligonucleotide
  Sense strand starting at position 1029 of SEQ ID NO: 1881272
agaccuuauaggugagguu

SEQ ID NO: 2031599 - RNA, 19 nt, Artificial Sequence
  Description of Artificial Sequence: Synthetic oligonucleotide
  Antisense strand to SEQ ID NO: 2031598
aaccucaccuauaaggucu

SEQ ID NO: 2031600 - RNA, 19 nt, Artificial Sequence
  Description of Artificial Sequence: Synthetic oligonucleotide
  Sense strand starting at position 1030 of SEQ ID NO: 1881272
gaccuuauaggugagguuu

SEQ ID NO: 2031601 - RNA, 19 nt, Artificial Sequence
  Description of Artificial Sequence: Synthetic oligonucleotide
  Antisense strand to SEQ ID NO: 2031600
aaaccucaccuauaagguc

SEQ ID NO: 2031602 - RNA, 19 nt, Artificial Sequence
  Description of Artificial Sequence: Synthetic oligonucleotide
  Sense strand starting at position 1044 of SEQ ID NO: 1881272
gguuuauucucccuuuaca

SEQ ID NO: 2031603 - RNA, 19 nt, Artificial Sequence
  Description of Artificial Sequence: Synthetic oligonucleotide
  Antisense strand to SEQ ID NO: 2031602
uguaaagggagaauaaacc

SEQ ID NO: 2031604 - RNA, 19 nt, Artificial Sequence
  Description of Artificial Sequence: Synthetic oligonucleotide
  Sense strand starting at position 1187 of SEQ ID NO: 1881272
ugauaauuaugggccuuua

SEQ ID NO: 2031605 - RNA, 19 nt, Artificial Sequence
  Description of Artificial Sequence: Synthetic oligonucleotide
  Antisense strand to SEQ ID NO: 2031604
uaaaggcccauaauuauca

SEQ ID NO: 2031606 - RNA, 19 nt, Artificial Sequence
  Description of Artificial Sequence: Synthetic oligonucleotide
  Sense strand starting at position 1328 of SEQ ID NO: 1881272
cagaaaugauacuugugua

SEQ ID NO: 2031607 - RNA, 19 nt, Artificial Sequence
  Description of Artificial Sequence: Synthetic oligonucleotide
  Antisense strand to SEQ ID NO: 2031606
uacacaaguaucauuucug

SEQ ID NO: 2031608 - RNA, 19 nt, Artificial Sequence
  Description of Artificial Sequence: Synthetic oligonucleotide
  Sense strand starting at position 1443 of SEQ ID NO: 1881272
guuaguaaacuggagguuu

SEQ ID NO: 2031609 - RNA, 19 nt, Artificial Sequence
  Description of Artificial Sequence: Synthetic oligonucleotide
  Antisense strand to SEQ ID NO: 2031608
aaaccuccaguuuacuaac

SEQ ID NO: 2031610 - RNA, 19 nt, Artificial Sequence
  Description of Artificial Sequence: Synthetic oligonucleotide
  Sense strand starting at position 1585 of SEQ ID NO: 1881272
agucaaauugaagguagau

SEQ ID NO: 2031611 - RNA, 19 nt, Artificial Sequence
  Description of Artificial Sequence: Synthetic oligonucleotide
  Antisense strand to SEQ ID NO: 2031610
aucuaccuucaauuugacu

SEQ ID NO: 2031612 - RNA, 19 nt, Artificial Sequence
  Description of Artificial Sequence: Synthetic oligonucleotide
  Sense strand starting at position 1682 of SEQ ID NO: 1881272
gguagcuccugacuacaau

SEQ ID NO: 2031613 - RNA, 19 nt, Artificial Sequence
  Description of Artificial Sequence: Synthetic oligonucleotide
  Antisense strand to SEQ ID NO: 2031612
auuguagucaggagcuacc

SEQ ID NO: 2031614 - RNA, 19 nt, Artificial Sequence
  Description of Artificial Sequence: Synthetic oligonucleotide
  Sense strand starting at position 1683 of SEQ ID NO: 1881272
guagcuccugacuacaauu

SEQ ID NO: 2031615 - RNA, 19 nt, Artificial Sequence
  Description of Artificial Sequence: Synthetic oligonucleotide
  Antisense strand to SEQ ID NO: 2031614
aauuguagucaggagcuac

SEQ ID NO: 2031616 - RNA, 19 nt, Artificial Sequence
  Description of Artificial Sequence: Synthetic oligonucleotide
  Sense strand starting at position 1692 of SEQ ID NO: 1881272
gacuacaauuuguaaaggu

SEQ ID NO: 2031617 - RNA, 19 nt, Artificial Sequence
  Description of Artificial Sequence: Synthetic oligonucleotide
  Antisense strand to SEQ ID NO: 2031616
accuuuacaaauuguaguc

SEQ ID NO: 2031618 - RNA, 19 nt, Artificial Sequence
  Description of Artificial Sequence: Synthetic oligonucleotide
  Sense strand starting at position 1700 of SEQ ID NO: 1881272
uuuguaaaggucuagcuuu

SEQ ID NO: 2031619 - RNA, 19 nt, Artificial Sequence
  Description of Artificial Sequence: Synthetic oligonucleotide
  Antisense strand to SEQ ID NO: 2031618
aaagcuagaccuuuacaaa

SEQ ID NO: 2031620 - RNA, 19 nt, Artificial Sequence
  Description of Artificial Sequence: Synthetic oligonucleotide
  Sense strand starting at position 1730 of SEQ ID NO: 1881272
agauucuccuagucagauc

SEQ ID NO: 2031621 - RNA, 19 nt, Artificial Sequence
  Description of Artificial Sequence: Synthetic oligonucleotide
  Antisense strand to SEQ ID NO: 2031620
gaucugacuaggagaaucu

SEQ ID NO: 2031622 - RNA, 19 nt, Artificial Sequence
  Description of Artificial Sequence: Synthetic oligonucleotide
  Sense strand starting at position 1773 of SEQ ID NO: 1881272
ugaacuguguuucuauaac

SEQ ID NO: 2031623 - RNA, 19 nt, Artificial Sequence
  Description of Artificial Sequence: Synthetic oligonucleotide
  Antisense strand to SEQ ID NO: 2031622
guuauagaaacacaguuca

SEQ ID NO: 2031624 - RNA, 19 nt, Artificial Sequence
  Description of Artificial Sequence: Synthetic oligonucleotide
  Sense strand starting at position 1888 of SEQ ID NO: 1881272
gaagguuacaguggagcua

SEQ ID NO: 2031625 - RNA, 19 nt, Artificial Sequence
  Description of Artificial Sequence: Synthetic oligonucleotide
  Antisense strand to SEQ ID NO: 2031624
uagcuccacuguaaccuuc

SEQ ID NO: 2031626 - RNA, 19 nt, Artificial Sequence
  Description of Artificial Sequence: Synthetic oligonucleotide
  Sense strand starting at position 1984 of SEQ ID NO: 1881272
augagaugugucuggaaca

SEQ ID NO: 2031627 - RNA, 19 nt, Artificial Sequence
  Description of Artificial Sequence: Synthetic oligonucleotide
  Antisense strand to SEQ ID NO: 2031626
uguuccagacacaucucau

SEQ ID NO: 2031628 - RNA, 19 nt, Artificial Sequence
  Description of Artificial Sequence: Synthetic oligonucleotide
  Sense strand starting at position 2027 of SEQ ID NO: 1881272
auuguuuaucuugguugaa

SEQ ID NO: 2031629 - RNA, 19 nt, Artificial Sequence
  Description of Artificial Sequence: Synthetic oligonucleotide
  Antisense strand to SEQ ID NO: 2031628
uucaaccaagauaaacaau

SEQ ID NO: 2031630 - RNA, 19 nt, Artificial Sequence
  Description of Artificial Sequence: Synthetic oligonucleotide
  Sense strand starting at position 2028 of SEQ ID NO: 1881272
uuguuuaucuugguugaaa

SEQ ID NO: 2031631 - RNA, 19 nt, Artificial Sequence
  Description of Artificial Sequence: Synthetic oligonucleotide
  Antisense strand to SEQ ID NO: 2031630
uuucaaccaagauaaacaa

SEQ ID NO: 2031632 - RNA, 19 nt, Artificial Sequence
  Description of Artificial Sequence: Synthetic oligonucleotide
  Sense strand starting at position 2054 of SEQ ID NO: 1881272
agguuauauuggucuggua

SEQ ID NO: 2031633 - RNA, 19 nt, Artificial Sequence
  Description of Artificial Sequence: Synthetic oligonucleotide
  Antisense strand to SEQ ID NO: 2031632
uaccagaccaauauaaccu

SEQ ID NO: 2031634 - RNA, 19 nt, Artificial Sequence
  Description of Artificial Sequence: Synthetic oligonucleotide
  Sense strand starting at position 2106 of SEQ ID NO: 1881272
aacugucagcaguauagaa

SEQ ID NO: 2031635 - RNA, 19 nt, Artificial Sequence
  Description of Artificial Sequence: Synthetic oligonucleotide
  Antisense strand to SEQ ID NO: 2031634
uucuauacugcugacaguu

SEQ ID NO: 2031636 - RNA, 19 nt, Artificial Sequence
  Description of Artificial Sequence: Synthetic oligonucleotide
  Sense strand starting at position 2108 of SEQ ID NO: 1881272
cugucagcaguauagaaau

SEQ ID NO: 2031637 - RNA, 19 nt, Artificial Sequence
  Description of Artificial Sequence: Synthetic oligonucleotide
  Antisense strand to SEQ ID NO: 2031636
auuucuauacugcugacag

SEQ ID NO: 2031638 - RNA, 19 nt, Artificial Sequence
  Description of Artificial Sequence: Synthetic oligonucleotide
  Sense strand starting at position 2510 of SEQ ID NO: 1881272
uugauaguuggaugcuaac

SEQ ID NO: 2031639 - RNA, 19 nt, Artificial Sequence
  Description of Artificial Sequence: Synthetic oligonucleotide
  Antisense strand to SEQ ID NO: 2031638
guuagcauccaacuaucaa

SEQ ID NO: 2031640 - RNA, 19 nt, Artificial Sequence
  Description of Artificial Sequence: Synthetic oligonucleotide
  Sense strand starting at position 2521 of SEQ ID NO: 1881272
augcuaacuuguuuacaug

SEQ ID NO: 2031641 - RNA, 19 nt, Artificial Sequence
  Description of Artificial Sequence: Synthetic oligonucleotide
  Antisense strand to SEQ ID NO: 2031640
cauguaaacaaguuagcau

SEQ ID NO: 2031642 - RNA, 19 nt, Artificial Sequence
  Description of Artificial Sequence: Synthetic oligonucleotide
  Sense strand starting at position 2527 of SEQ ID NO: 1881272
acuuguuuacaugggucua

SEQ ID NO: 2031643 - RNA, 19 nt, Artificial Sequence
  Description of Artificial Sequence: Synthetic oligonucleotide
  Antisense strand to SEQ ID NO: 2031642
uagacccauguaaacaagu

SEQ ID NO: 2031644 - RNA, 19 nt, Artificial Sequence
  Description of Artificial Sequence: Synthetic oligonucleotide
  Sense strand starting at position 2601 of SEQ ID NO: 1881272
uaguguauugcucagaaac

SEQ ID NO: 2031645 - RNA, 19 nt, Artificial Sequence
  Description of Artificial Sequence: Synthetic oligonucleotide
  Antisense strand to SEQ ID NO: 2031644
guuucugagcaauacacua

SEQ ID NO: 2031646 - RNA, 19 nt, Artificial Sequence
  Description of Artificial Sequence: Synthetic oligonucleotide
  Sense strand starting at position 2783 of SEQ ID NO: 1881272
uugaauccuucuuugggua

SEQ ID NO: 2031647 - RNA, 19 nt, Artificial Sequence
  Description of Artificial Sequence: Synthetic oligonucleotide
  Antisense strand to SEQ ID NO: 2031646
uacccaaagaaggauucaa

SEQ ID NO: 2031648 - RNA, 19 nt, Artificial Sequence
  Description of Artificial Sequence: Synthetic oligonucleotide
  Sense strand starting at position 3472 of SEQ ID NO: 1881272
uugguacaguccuuauaag

SEQ ID NO: 2031649 - RNA, 19 nt, Artificial Sequence
  Description of Artificial Sequence: Synthetic oligonucleotide
  Antisense strand to SEQ ID NO: 2031648
cuuauaaggacuguaccaa

SEQ ID NO: 2031650 - RNA, 19 nt, Artificial Sequence
  Description of Artificial Sequence: Synthetic oligonucleotide
  Sense strand starting at position 3473 of SEQ ID NO: 1881272
ugguacaguccuuauaaga

SEQ ID NO: 2031651 - RNA, 19 nt, Artificial Sequence
  Description of Artificial Sequence: Synthetic oligonucleotide
  Antisense strand to SEQ ID NO: 2031650
ucuuauaaggacuguacca

SEQ ID NO: 2031652 - RNA, 19 nt, Artificial Sequence
  Description of Artificial Sequence: Synthetic oligonucleotide
  Sense strand starting at position 3521 of SEQ ID NO: 1881272
guuacaaugguaggaguca

SEQ ID NO: 2031653 - RNA, 19 nt, Artificial Sequence
  Description of Artificial Sequence: Synthetic oligonucleotide
  Antisense strand to SEQ ID NO: 2031652
ugacuccuaccauuguaac

SEQ ID NO: 2031654 - RNA, 19 nt, Artificial Sequence
  Description of Artificial Sequence: Synthetic oligonucleotide
  Sense strand starting at position 3636 of SEQ ID NO: 1881272
cccauaucuccguaucucu

SEQ ID NO: 2031655 - RNA, 19 nt, Artificial Sequence
  Description of Artificial Sequence: Synthetic oligonucleotide
  Antisense strand to SEQ ID NO: 2031654
agagauacggagauauggg

SEQ ID NO: 2031656 - RNA, 19 nt, Artificial Sequence
  Description of Artificial Sequence: Synthetic oligonucleotide
  Sense strand starting at position 525 of SEQ ID NO: 1881273
ccuucuauucucuggguaa

SEQ ID NO: 2031657 - RNA, 19 nt, Artificial Sequence
  Description of Artificial Sequence: Synthetic oligonucleotide
  Antisense strand to SEQ ID NO: 2031656
uuacccagagaauagaagg

SEQ ID NO: 2031658 - RNA, 19 nt, Artificial Sequence
  Description of Artificial Sequence: Synthetic oligonucleotide
  Sense strand starting at position 570 of SEQ ID NO: 1881273
ucuauaauacgugggucuu

SEQ ID NO: 2031659 - RNA, 19 nt, Artificial Sequence
  Description of Artificial Sequence: Synthetic oligonucleotide
  Antisense strand to SEQ ID NO: 2031658
aagacccacguauuauaga

SEQ ID NO: 2031660 - RNA, 19 nt, Artificial Sequence
  Description of Artificial Sequence: Synthetic oligonucleotide
  Sense strand starting at position 571 of SEQ ID NO: 1881273
cuauaauacgugggucuua

SEQ ID NO: 2031661 - RNA, 19 nt, Artificial Sequence
  Description of Artificial Sequence: Synthetic oligonucleotide
  Antisense strand to SEQ ID NO: 2031660
uaagacccacguauuauag

SEQ ID NO: 2031662 - RNA, 19 nt, Artificial Sequence
  Description of Artificial Sequence: Synthetic oligonucleotide
  Sense strand starting at position 646 of SEQ ID NO: 1881273
aacgaauaguaucuguaaa

SEQ ID NO: 2031663 - RNA, 19 nt, Artificial Sequence
  Description of Artificial Sequence: Synthetic oligonucleotide
  Antisense strand to SEQ ID NO: 2031662
uuuacagauacuauucguu

SEQ ID NO: 2031664 - RNA, 19 nt, Artificial Sequence
  Description of Artificial Sequence: Synthetic oligonucleotide
  Sense strand starting at position 669 of SEQ ID NO: 1881273
caaacaagguaugaugaua

SEQ ID NO: 2031665 - RNA, 19 nt, Artificial Sequence
  Description of Artificial Sequence: Synthetic oligonucleotide
  Antisense strand to SEQ ID NO: 2031664
uaucaucauaccuuguuug

SEQ ID NO: 2031666 - RNA, 19 nt, Artificial Sequence
  Description of Artificial Sequence: Synthetic oligonucleotide
  Sense strand starting at position 766 of SEQ ID NO: 1881273
ccaagcaaggcaugaauaa

SEQ ID NO: 2031667 - RNA, 19 nt, Artificial Sequence
  Description of Artificial Sequence: Synthetic oligonucleotide
  Antisense strand to SEQ ID NO: 2031666
uuauucaugccuugcuugg

SEQ ID NO: 2031668 - RNA, 19 nt, Artificial Sequence
  Description of Artificial Sequence: Synthetic oligonucleotide
  Sense strand starting at position 811 of SEQ ID NO: 1881273
gcugaagaguggguaugua

SEQ ID NO: 2031669 - RNA, 19 nt, Artificial Sequence
  Description of Artificial Sequence: Synthetic oligonucleotide
  Antisense strand to SEQ ID NO: 2031668
uacauacccacucuucagc

SEQ ID NO: 2031670 - RNA, 19 nt, Artificial Sequence
  Description of Artificial Sequence: Synthetic oligonucleotide
  Sense strand starting at position 815 of SEQ ID NO: 1881273
aagaguggguauguagauu

SEQ ID NO: 2031671 - RNA, 19 nt, Artificial Sequence
  Description of Artificial Sequence: Synthetic oligonucleotide
  Antisense strand to SEQ ID NO: 2031670
aaucuacauacccacucuu

SEQ ID NO: 2031672 - RNA, 19 nt, Artificial Sequence
  Description of Artificial Sequence: Synthetic oligonucleotide
  Sense strand starting at position 850 of SEQ ID NO: 1881273
cagaguucuuaaguugaca

SEQ ID NO: 2031673 - RNA, 19 nt, Artificial Sequence
  Description of Artificial Sequence: Synthetic oligonucleotide
  Antisense strand to SEQ ID NO: 2031672
ugucaacuuaagaacucug

SEQ ID NO: 2031674 - RNA, 19 nt, Artificial Sequence
  Description of Artificial Sequence: Synthetic oligonucleotide
  Sense strand starting at position 870 of SEQ ID NO: 1881273
cauagaaagcaauguuuga

SEQ ID NO: 2031675 - RNA, 19 nt, Artificial Sequence
  Description of Artificial Sequence: Synthetic oligonucleotide
  Antisense strand to SEQ ID NO: 2031674
ucaaacauugcuuucuaug

SEQ ID NO: 2031676 - RNA, 19 nt, Artificial Sequence
  Description of Artificial Sequence: Synthetic oligonucleotide
  Sense strand starting at position 874 of SEQ ID NO: 1881273
gaaagcaauguuugaaaug

SEQ ID NO: 2031677 - RNA, 19 nt, Artificial Sequence
  Description of Artificial Sequence: Synthetic oligonucleotide
  Antisense strand to SEQ ID NO: 2031676
cauuucaaacauugcuuuc

SEQ ID NO: 2031678 - RNA, 19 nt, Artificial Sequence
  Description of Artificial Sequence: Synthetic oligonucleotide
  Sense strand starting at position 945 of SEQ ID NO: 1881273
gcaaauauacccuggucaa

SEQ ID NO: 2031679 - RNA, 19 nt, Artificial Sequence
  Description of Artificial Sequence: Synthetic oligonucleotide
  Antisense strand to SEQ ID NO: 2031678
uugaccaggguauauuugc

SEQ ID NO: 2031680 - RNA, 19 nt, Artificial Sequence
  Description of Artificial Sequence: Synthetic oligonucleotide
  Sense strand starting at position 1005 of SEQ ID NO: 1881273
uggucuaguguccacagaa

SEQ ID NO: 2031681 - RNA, 19 nt, Artificial Sequence
  Description of Artificial Sequence: Synthetic oligonucleotide
  Antisense strand to SEQ ID NO: 2031680
uucuguggacacuagacca

SEQ ID NO: 2031682 - RNA, 19 nt, Artificial Sequence
  Description of Artificial Sequence: Synthetic oligonucleotide
  Sense strand starting at position 1131 of SEQ ID NO: 1881273
ugucuagaguucuccauca

SEQ ID NO: 2031683 - RNA, 19 nt, Artificial Sequence
  Description of Artificial Sequence: Synthetic oligonucleotide
  Antisense strand to SEQ ID NO: 2031682
ugauggagaacucuagaca

SEQ ID NO: 2031684 - RNA, 19 nt, Artificial Sequence
  Description of Artificial Sequence: Synthetic oligonucleotide
  Sense strand starting at position 1133 of SEQ ID NO: 1881273
ucuagaguucuccaucagu

SEQ ID NO: 2031685 - RNA, 19 nt, Artificial Sequence
  Description of Artificial Sequence: Synthetic oligonucleotide
  Antisense strand to SEQ ID NO: 2031684
acugauggagaacucuaga

SEQ ID NO: 2031686 - RNA, 19 nt, Artificial Sequence
  Description of Artificial Sequence: Synthetic oligonucleotide
  Sense strand starting at position 1136 of SEQ ID NO: 1881273
agaguucuccaucaguaug

SEQ ID NO: 2031687 - RNA, 19 nt, Artificial Sequence
  Description of Artificial Sequence: Synthetic oligonucleotide
  Antisense strand to SEQ ID NO: 2031686
cauacugauggagaacucu

SEQ ID NO: 2031688 - RNA, 19 nt, Artificial Sequence
  Description of Artificial Sequence: Synthetic oligonucleotide
  Sense strand starting at position 1236 of SEQ ID NO: 1881273
gaugucaagaucuggguua

SEQ ID NO: 2031689 - RNA, 19 nt, Artificial Sequence
  Description of Artificial Sequence: Synthetic oligonucleotide
  Antisense strand to SEQ ID NO: 2031688
uaacccagaucuugacauc

SEQ ID NO: 2031690 - RNA, 19 nt, Artificial Sequence
  Description of Artificial Sequence: Synthetic oligonucleotide
  Sense strand starting at position 1238 of SEQ ID NO: 1881273
ugucaagaucuggguuaaa

SEQ ID NO: 2031691 - RNA, 19 nt, Artificial Sequence
  Description of Artificial Sequence: Synthetic oligonucleotide
  Antisense strand to SEQ ID NO: 2031690
uuuaacccagaucuugaca

SEQ ID NO: 2031692 - RNA, 19 nt, Artificial Sequence
  Description of Artificial Sequence: Synthetic oligonucleotide
  Sense strand starting at position 1385 of SEQ ID NO: 1881273
augauucuaucugaaagag

SEQ ID NO: 2031693 - RNA, 19 nt, Artificial Sequence
  Description of Artificial Sequence: Synthetic oligonucleotide
  Antisense strand to SEQ ID NO: 2031692
cucuuucagauagaaucau

SEQ ID NO: 2031694 - RNA, 19 nt, Artificial Sequence
  Description of Artificial Sequence: Synthetic oligonucleotide
  Sense strand starting at position 1431 of SEQ ID NO: 1881273
agagaaaugaagugccaua

SEQ ID NO: 2031695 - RNA, 19 nt, Artificial Sequence
  Description of Artificial Sequence: Synthetic oligonucleotide
  Antisense strand to SEQ ID NO: 2031694
uauggcacuucauuucucu

SEQ ID NO: 2031696 - RNA, 19 nt, Artificial Sequence
  Description of Artificial Sequence: Synthetic oligonucleotide
  Sense strand starting at position 1607 of SEQ ID NO: 1881273
gguugaaagcaucgaguca

SEQ ID NO: 2031697 - RNA, 19 nt, Artificial Sequence
  Description of Artificial Sequence: Synthetic oligonucleotide
  Antisense strand to SEQ ID NO: 2031696
ugacucgaugcuuucaacc

SEQ ID NO: 2031698 - RNA, 19 nt, Artificial Sequence
  Description of Artificial Sequence: Synthetic oligonucleotide
  Sense strand starting at position 1608 of SEQ ID NO: 1881273
guugaaagcaucgagucau

SEQ ID NO: 2031699 - RNA, 19 nt, Artificial Sequence
  Description of Artificial Sequence: Synthetic oligonucleotide
  Antisense strand to SEQ ID NO: 2031698
augacucgaugcuuucaac

SEQ ID NO: 2031700 - RNA, 19 nt, Artificial Sequence
  Description of Artificial Sequence: Synthetic oligonucleotide
  Sense strand starting at position 1692 of SEQ ID NO: 1881273
uagggauauuuguauauuc

SEQ ID NO: 2031701 - RNA, 19 nt, Artificial Sequence
  Description of Artificial Sequence: Synthetic oligonucleotide
  Antisense strand to SEQ ID NO: 2031700
gaauauacaaauaucccua

SEQ ID NO: 2031702 - RNA, 19 nt, Artificial Sequence
  Description of Artificial Sequence: Synthetic oligonucleotide
  Sense strand starting at position 1761 of SEQ ID NO: 1881273
gaaugacaacuacgaagua

SEQ ID NO: 2031703 - RNA, 19 nt, Artificial Sequence
  Description of Artificial Sequence: Synthetic oligonucleotide
  Antisense strand to SEQ ID NO: 2031702
uacuucguaguugucauuc

SEQ ID NO: 2031704 - RNA, 19 nt, Artificial Sequence
  Description of Artificial Sequence: Synthetic oligonucleotide
  Sense strand starting at position 1844 of SEQ ID NO: 1881273
uuaccugguuucccagaga

SEQ ID NO: 2031705 - RNA, 19 nt, Artificial Sequence
  Description of Artificial Sequence: Synthetic oligonucleotide
  Antisense strand to SEQ ID NO: 2031704
ucucugggaaaccagguaa

SEQ ID NO: 2031706 - RNA, 19 nt, Artificial Sequence
  Description of Artificial Sequence: Synthetic oligonucleotide
  Sense strand starting at position 2040 of SEQ ID NO: 1881273
ucaggaugcacuugagaca

SEQ ID NO: 2031707 - RNA, 19 nt, Artificial Sequence
  Description of Artificial Sequence: Synthetic oligonucleotide
  Antisense strand to SEQ ID NO: 2031706
ugucucaagugcauccuga

SEQ ID NO: 2031708 - RNA, 19 nt, Artificial Sequence
  Description of Artificial Sequence: Synthetic oligonucleotide
  Sense strand starting at position 2191 of SEQ ID NO: 1881273
cagucauucggaugaucac

SEQ ID NO: 2031709 - RNA, 19 nt, Artificial Sequence
  Description of Artificial Sequence: Synthetic oligonucleotide
  Antisense strand to SEQ ID NO: 2031708
gugaucauccgaaugacug

SEQ ID NO: 2031710 - RNA, 19 nt, Artificial Sequence
  Description of Artificial Sequence: Synthetic oligonucleotide
  Sense strand starting at position 2192 of SEQ ID NO: 1881273
agucauucggaugaucaca

SEQ ID NO: 2031711 - RNA, 19 nt, Artificial Sequence
  Description of Artificial Sequence: Synthetic oligonucleotide
  Antisense strand to SEQ ID NO: 2031710
ugugaucauccgaaugacu

SEQ ID NO: 2031712 - RNA, 19 nt, Artificial Sequence
  Description of Artificial Sequence: Synthetic oligonucleotide
  Sense strand starting at position 2211 of SEQ ID NO: 1881273
uagacauguuuccucagga

SEQ ID NO: 2031713 - RNA, 19 nt, Artificial Sequence
  Description of Artificial Sequence: Synthetic oligonucleotide
  Antisense strand to SEQ ID NO: 2031712
uccugaggaaacaugucua

SEQ ID NO: 2031714 - RNA, 19 nt, Artificial Sequence
  Description of Artificial Sequence: Synthetic oligonucleotide
  Sense strand starting at position 2212 of SEQ ID NO: 1881273
agacauguuuccucaggau

SEQ ID NO: 2031715 - RNA, 19 nt, Artificial Sequence
  Description of Artificial Sequence: Synthetic oligonucleotide
  Antisense strand to SEQ ID NO: 2031714
auccugaggaaacaugucu

SEQ ID NO: 2031716 - RNA, 19 nt, Artificial Sequence
  Description of Artificial Sequence: Synthetic oligonucleotide
  Sense strand starting at position 2216 of SEQ ID NO: 1881273
auguuuccucaggauccua

SEQ ID NO: 2031717 - RNA, 19 nt, Artificial Sequence
  Description of Artificial Sequence: Synthetic oligonucleotide
  Antisense strand to SEQ ID NO: 2031716
uaggauccugaggaaacau

SEQ ID NO: 2031718 - RNA, 19 nt, Artificial Sequence
  Description of Artificial Sequence: Synthetic oligonucleotide
  Sense strand starting at position 2396 of SEQ ID NO: 1881273
cccauucugcucugagaua

SEQ ID NO: 2031719 - RNA, 19 nt, Artificial Sequence
  Description of Artificial Sequence: Synthetic oligonucleotide
  Antisense strand to SEQ ID NO: 2031718
uaucucagagcagaauggg

SEQ ID NO: 2031720 - RNA, 19 nt, Artificial Sequence
  Description of Artificial Sequence: Synthetic oligonucleotide
  Sense strand starting at position 2435 of SEQ ID NO: 1881273
auaagcuauccuuguggaa

SEQ ID NO: 2031721 - RNA, 19 nt, Artificial Sequence
  Description of Artificial Sequence: Synthetic oligonucleotide
  Antisense strand to SEQ ID NO: 2031720
uuccacaaggauagcuuau

SEQ ID NO: 2031722 - RNA, 19 nt, Artificial Sequence
  Description of Artificial Sequence: Synthetic oligonucleotide
  Sense strand starting at position 2442 of SEQ ID NO: 1881273
auccuuguggaaugacauu

SEQ ID NO: 2031723 - RNA, 19 nt, Artificial Sequence
  Description of Artificial Sequence: Synthetic oligonucleotide
  Antisense strand to SEQ ID NO: 2031722
aaugucauuccacaaggau

SEQ ID NO: 2031724 - RNA, 19 nt, Artificial Sequence
  Description of Artificial Sequence: Synthetic oligonucleotide
  Sense strand starting at position 2525 of SEQ ID NO: 1881273
gugugaucacccuagaccu

SEQ ID NO: 2031725 - RNA, 19 nt, Artificial Sequence
  Description of Artificial Sequence: Synthetic oligonucleotide
  Antisense strand to SEQ ID NO: 2031724
aggucuagggugaucacac

SEQ ID NO: 2031726 - RNA, 19 nt, Artificial Sequence
  Description of Artificial Sequence: Synthetic oligonucleotide
  Sense strand starting at position 3468 of SEQ ID NO: 1881273
cuguuaacuuaggauuuau

SEQ ID NO: 2031727 - RNA, 19 nt, Artificial Sequence
  Description of Artificial Sequence: Synthetic oligonucleotide
  Antisense strand to SEQ ID NO: 2031726
auaaauccuaaguuaacag

SEQ ID NO: 2031728 - RNA, 19 nt, Artificial Sequence
  Description of Artificial Sequence: Synthetic oligonucleotide
  Sense strand starting at position 3477 of SEQ ID NO: 1881273
uaggauuuaucucgagaca

SEQ ID NO: 2031729 - RNA, 19 nt, Artificial Sequence
  Description of Artificial Sequence: Synthetic oligonucleotide
  Antisense strand to SEQ ID NO: 2031728
ugucucgagauaaauccua

SEQ ID NO: 2031730 - RNA, 19 nt, Artificial Sequence
  Description of Artificial Sequence: Synthetic oligonucleotide
  Sense strand starting at position 3598 of SEQ ID NO: 1881273
agugacuaagguugggaaa

SEQ ID NO: 2031731 - RNA, 19 nt, Artificial Sequence
  Description of Artificial Sequence: Synthetic oligonucleotide
  Antisense strand to SEQ ID NO: 2031730
uuucccaaccuuagucacu

SEQ ID NO: 2031732 - RNA, 19 nt, Artificial Sequence
  Description of Artificial Sequence: Synthetic oligonucleotide
  Sense strand starting at position 3656 of SEQ ID NO: 1881273
ucaagcauuugugaaacuu

SEQ ID NO: 2031733 - RNA, 19 nt, Artificial Sequence
  Description of Artificial Sequence: Synthetic oligonucleotide
  Antisense strand to SEQ ID NO: 2031732
aaguuucacaaaugcuuga

SEQ ID NO: 2031734 - RNA, 19 nt, Artificial Sequence
  Description of Artificial Sequence: Synthetic oligonucleotide
  Sense strand starting at position 3718 of SEQ ID NO: 1881273
aucacuugcuguguaucaa

SEQ ID NO: 2031735 - RNA, 19 nt, Artificial Sequence
  Description of Artificial Sequence: Synthetic oligonucleotide
  Antisense strand to SEQ ID NO: 2031734
uugauacacagcaagugau

SEQ ID NO: 2031736 - RNA, 19 nt, Artificial Sequence
  Description of Artificial Sequence: Synthetic oligonucleotide
  Sense strand starting at position 35 of SEQ ID NO: 1881274
ggucaugcaugguucucaa

SEQ ID NO: 2031737 - RNA, 19 nt, Artificial Sequence
  Description of Artificial Sequence: Synthetic oligonucleotide
  Antisense strand to SEQ ID NO: 2031736
uugagaaccaugcaugacc

SEQ ID NO: 2031738 - RNA, 19 nt, Artificial Sequence
  Description of Artificial Sequence: Synthetic oligonucleotide
  Sense strand starting at position 50 of SEQ ID NO: 1881274
ucaauucgcuccuuggaca

SEQ ID NO: 2031739 - RNA, 19 nt, Artificial Sequence
  Description of Artificial Sequence: Synthetic oligonucleotide
  Antisense strand to SEQ ID NO: 2031738
uguccaaggagcgaauuga

SEQ ID NO: 2031740 - RNA, 19 nt, Artificial Sequence
  Description of Artificial Sequence: Synthetic oligonucleotide
  Sense strand starting at position 934 of SEQ ID NO: 1881274
gaaagagaaugauaaagga

SEQ ID NO: 2031741 - RNA, 19 nt, Artificial Sequence
  Description of Artificial Sequence: Synthetic oligonucleotide
  Antisense strand to SEQ ID NO: 2031740
uccuuuaucauucucuuuc

SEQ ID NO: 2031742 - RNA, 19 nt, Artificial Sequence
  Description of Artificial Sequence: Synthetic oligonucleotide
  Sense strand starting at position 965 of SEQ ID NO: 1881274
caggaacaucuggguaauu

SEQ ID NO: 2031743 - RNA, 19 nt, Artificial Sequence
  Description of Artificial Sequence: Synthetic oligonucleotide
  Antisense strand to SEQ ID NO: 2031742
aauuacccagauguuccug

SEQ ID NO: 2031744 - RNA, 19 nt, Artificial Sequence
  Description of Artificial Sequence: Synthetic oligonucleotide
  Sense strand starting at position 976 of SEQ ID NO: 1881274
ggguaauuuggcugcaccu

SEQ ID NO: 2031745 - RNA, 19 nt, Artificial Sequence
  Description of Artificial Sequence: Synthetic oligonucleotide
  Antisense strand to SEQ ID NO: 2031744
aggugcagccaaauuaccc

SEQ ID NO: 2031746 - RNA, 19 nt, Artificial Sequence
  Description of Artificial Sequence: Synthetic oligonucleotide
  Sense strand starting at position 1057 of SEQ ID NO: 1881274
ccaacaaguuuccugucau

SEQ ID NO: 2031747 - RNA, 19 nt, Artificial Sequence
  Description of Artificial Sequence: Synthetic oligonucleotide
  Antisense strand to SEQ ID NO: 2031746
augacaggaaacuuguugg

SEQ ID NO: 2031748 - RNA, 19 nt, Artificial Sequence
  Description of Artificial Sequence: Synthetic oligonucleotide
  Sense strand starting at position 1063 of SEQ ID NO: 1881274
aguuuccugucauucuaaa

SEQ ID NO: 2031749 - RNA, 19 nt, Artificial Sequence
  Description of Artificial Sequence: Synthetic oligonucleotide
  Antisense strand to SEQ ID NO: 2031748
uuuagaaugacaggaaacu

SEQ ID NO: 2031750 - RNA, 19 nt, Artificial Sequence
  Description of Artificial Sequence: Synthetic oligonucleotide
  Sense strand starting at position 1272 of SEQ ID NO: 1881274
cuaagauauucuguaucag

SEQ ID NO: 2031751 - RNA, 19 nt, Artificial Sequence
  Description of Artificial Sequence: Synthetic oligonucleotide
  Antisense strand to SEQ ID NO: 2031750
cugauacagaauaucuuag

SEQ ID NO: 2031752 - RNA, 19 nt, Artificial Sequence
  Description of Artificial Sequence: Synthetic oligonucleotide
  Sense strand starting at position 1295 of SEQ ID NO: 1881274
agcauuagcgccuuuccau

SEQ ID NO: 2031753 - RNA, 19 nt, Artificial Sequence
  Description of Artificial Sequence: Synthetic oligonucleotide
  Antisense strand to SEQ ID NO: 2031752
auggaaaggcgcuaaugcu

SEQ ID NO: 2031754 - RNA, 19 nt, Artificial Sequence
  Description of Artificial Sequence: Synthetic oligonucleotide
  Sense strand starting at position 1296 of SEQ ID NO: 1881274
gcauuagcgccuuuccauu

SEQ ID NO: 2031755 - RNA, 19 nt, Artificial Sequence
  Description of Artificial Sequence: Synthetic oligonucleotide
  Antisense strand to SEQ ID NO: 2031754
aauggaaaggcgcuaaugc

SEQ ID NO: 2031756 - RNA, 19 nt, Artificial Sequence
  Description of Artificial Sequence: Synthetic oligonucleotide
  Sense strand starting at position 1351 of SEQ ID NO: 1881274
agauuugggcuuuguuguu

SEQ ID NO: 2031757 - RNA, 19 nt, Artificial Sequence
  Description of Artificial Sequence: Synthetic oligonucleotide
  Antisense strand to SEQ ID NO: 2031756
aacaacaaagcccaaaucu

SEQ ID NO: 2031758 - RNA, 19 nt, Artificial Sequence
  Description of Artificial Sequence: Synthetic oligonucleotide
  Sense strand starting at position 1357 of SEQ ID NO: 1881274
gggcuuuguuguuccauua

SEQ ID NO: 2031759 - RNA, 19 nt, Artificial Sequence
  Description of Artificial Sequence: Synthetic oligonucleotide
  Antisense strand to SEQ ID NO: 2031758
uaauggaacaacaaagccc

SEQ ID NO: 2031760 - RNA, 19 nt, Artificial Sequence
  Description of Artificial Sequence: Synthetic oligonucleotide
  Sense strand starting at position 1393 of SEQ ID NO: 1881274
auccaacuguaugaggaaa

SEQ ID NO: 2031761 - RNA, 19 nt, Artificial Sequence
  Description of Artificial Sequence: Synthetic oligonucleotide
  Antisense strand to SEQ ID NO: 2031760
uuuccucauacaguuggau

SEQ ID NO: 2031762 - RNA, 19 nt, Artificial Sequence
  Description of Artificial Sequence: Synthetic oligonucleotide
  Sense strand starting at position 1418 of SEQ ID NO: 1881274
guuccuagauaagaagaaa

SEQ ID NO: 2031763 - RNA, 19 nt, Artificial Sequence
  Description of Artificial Sequence: Synthetic oligonucleotide
  Antisense strand to SEQ ID NO: 2031762
uuucuucuuaucuaggaac

SEQ ID NO: 2031764 - RNA, 19 nt, Artificial Sequence
  Description of Artificial Sequence: Synthetic oligonucleotide
  Sense strand starting at position 1544 of SEQ ID NO: 1881274
gggcuuugaaucugaggaa

SEQ ID NO: 2031765 - RNA, 19 nt, Artificial Sequence
  Description of Artificial Sequence: Synthetic oligonucleotide
  Antisense strand to SEQ ID NO: 2031764
uuccucagauucaaagccc

SEQ ID NO: 2031766 - RNA, 19 nt, Artificial Sequence
  Description of Artificial Sequence: Synthetic oligonucleotide
  Sense strand starting at position 1596 of SEQ ID NO: 1881274
ucagacgauuuccaaacau

SEQ ID NO: 2031767 - RNA, 19 nt, Artificial Sequence
  Description of Artificial Sequence: Synthetic oligonucleotide
  Antisense strand to SEQ ID NO: 2031766
auguuuggaaaucgucuga

SEQ ID NO: 2031768 - RNA, 19 nt, Artificial Sequence
  Description of Artificial Sequence: Synthetic oligonucleotide
  Sense strand starting at position 1689 of SEQ ID NO: 1881274
ccuuguauguccucucaau

SEQ ID NO: 2031769 - RNA, 19 nt, Artificial Sequence
  Description of Artificial Sequence: Synthetic oligonucleotide
  Antisense strand to SEQ ID NO: 2031768
auugagaggacauacaagg

SEQ ID NO: 2031770 - RNA, 19 nt, Artificial Sequence
  Description of Artificial Sequence: Synthetic oligonucleotide
  Sense strand starting at position 1710 of SEQ ID NO: 1881274
ugacuauucuuacagaaag

SEQ ID NO: 2031771 - RNA, 19 nt, Artificial Sequence
  Description of Artificial Sequence: Synthetic oligonucleotide
  Antisense strand to SEQ ID NO: 2031770
cuuucuguaagaauaguca

SEQ ID NO: 2031772 - RNA, 19 nt, Artificial Sequence
  Description of Artificial Sequence: Synthetic oligonucleotide
  Sense strand starting at position 2491 of SEQ ID NO: 1881274
ugacaaauuccaggaguuu

SEQ ID NO: 2031773 - RNA, 19 nt, Artificial Sequence
  Description of Artificial Sequence: Synthetic oligonucleotide
  Antisense strand to SEQ ID NO: 2031772
aaacuccuggaauuuguca

SEQ ID NO: 2031774 - RNA, 19 nt, Artificial Sequence
  Description of Artificial Sequence: Synthetic oligonucleotide
  Sense strand starting at position 2612 of SEQ ID NO: 1881274
uuguacacuugauuagcaa

SEQ ID NO: 2031775 - RNA, 19 nt, Artificial Sequence
  Description of Artificial Sequence: Synthetic oligonucleotide
  Antisense strand to SEQ ID NO: 2031774
uugcuaaucaaguguacaa

SEQ ID NO: 2031776 - RNA, 19 nt, Artificial Sequence
  Description of Artificial Sequence: Synthetic oligonucleotide
  Sense strand starting at position 2619 of SEQ ID NO: 1881274
cuugauuagcaagagucua

SEQ ID NO: 2031777 - RNA, 19 nt, Artificial Sequence
  Description of Artificial Sequence: Synthetic oligonucleotide
  Antisense strand to SEQ ID NO: 2031776
uagacucuugcuaaucaag

SEQ ID NO: 2031778 - RNA, 19 nt, Artificial Sequence
  Description of Artificial Sequence: Synthetic oligonucleotide
  Sense strand starting at position 2624 of SEQ ID NO: 1881274
uuagcaagagucuaaucca

SEQ ID NO: 2031779 - RNA, 19 nt, Artificial Sequence
  Description of Artificial Sequence: Synthetic oligonucleotide
  Antisense strand to SEQ ID NO: 2031778
uggauuagacucuugcuaa

SEQ ID NO: 2031780 - RNA, 19 nt, Artificial Sequence
  Description of Artificial Sequence: Synthetic oligonucleotide
  Sense strand starting at position 2627 of SEQ ID NO: 1881274
gcaagagucuaauccaguc

SEQ ID NO: 2031781 - RNA, 19 nt, Artificial Sequence
  Description of Artificial Sequence: Synthetic oligonucleotide
  Antisense strand to SEQ ID NO: 2031780
gacuggauuagacucuugc

SEQ ID NO: 2031782 - RNA, 19 nt, Artificial Sequence
  Description of Artificial Sequence: Synthetic oligonucleotide
  Sense strand starting at position 2726 of SEQ ID NO: 1881274
aucucuuauguugaacagu

SEQ ID NO: 2031783 - RNA, 19 nt, Artificial Sequence
  Description of Artificial Sequence: Synthetic oligonucleotide
  Antisense strand to SEQ ID NO: 2031782
acuguucaacauaagagau

SEQ ID NO: 2031784 - RNA, 19 nt, Artificial Sequence
  Description of Artificial Sequence: Synthetic oligonucleotide
  Sense strand starting at position 2735 of SEQ ID NO: 1881274
guugaacaguuucugcgaa

SEQ ID NO: 2031785 - RNA, 19 nt, Artificial Sequence
  Description of Artificial Sequence: Synthetic oligonucleotide
  Antisense strand to SEQ ID NO: 2031784
uucgcagaaacuguucaac

SEQ ID NO: 2031786 - RNA, 19 nt, Artificial Sequence
  Description of Artificial Sequence: Synthetic oligonucleotide
  Sense strand starting at position 2737 of SEQ ID NO: 1881274
ugaacaguuucugcgaaug

SEQ ID NO: 2031787 - RNA, 19 nt, Artificial Sequence
  Description of Artificial Sequence: Synthetic oligonucleotide
  Antisense strand to SEQ ID NO: 2031786
cauucgcagaaacuguuca

SEQ ID NO: 2031788 - RNA, 19 nt, Artificial Sequence
  Description of Artificial Sequence: Synthetic oligonucleotide
  Sense strand starting at position 2742 of SEQ ID NO: 1881274
aguuucugcgaaugauaaa

SEQ ID NO: 2031789 - RNA, 19 nt, Artificial Sequence
  Description of Artificial Sequence: Synthetic oligonucleotide
  Antisense strand to SEQ ID NO: 2031788
uuuaucauucgcagaaacu

SEQ ID NO: 2031790 - RNA, 19 nt, Artificial Sequence
  Description of Artificial Sequence: Synthetic oligonucleotide
  Sense strand starting at position 2743 of SEQ ID NO: 1881274
guuucugcgaaugauaaau

SEQ ID NO: 2031791 - RNA, 19 nt, Artificial Sequence
  Description of Artificial Sequence: Synthetic oligonucleotide
  Antisense strand to SEQ ID NO: 2031790
auuuaucauucgcagaaac

SEQ ID NO: 2031792 - RNA, 19 nt, Artificial Sequence
  Description of Artificial Sequence: Synthetic oligonucleotide
  Sense strand starting at position 2945 of SEQ ID NO: 1881274
augaaagcuuacuucugaa

SEQ ID NO: 2031793 - RNA, 19 nt, Artificial Sequence
  Description of Artificial Sequence: Synthetic oligonucleotide
  Antisense strand to SEQ ID NO: 2031792
uucagaaguaagcuuucau

SEQ ID NO: 2031794 - RNA, 19 nt, Artificial Sequence
  Description of Artificial Sequence: Synthetic oligonucleotide
  Sense strand starting at position 3010 of SEQ ID NO: 1881274
ccuccaugacaguguaaua

SEQ ID NO: 2031795 - RNA, 19 nt, Artificial Sequence
  Description of Artificial Sequence: Synthetic oligonucleotide
  Antisense strand to SEQ ID NO: 2031794
uauuacacugucauggagg

SEQ ID NO: 2031796 - RNA, 19 nt, Artificial Sequence
  Description of Artificial Sequence: Synthetic oligonucleotide
  Sense strand starting at position 3047 of SEQ ID NO: 1881274
ccaaguuucucuuuaggcu

SEQ ID NO: 2031797 - RNA, 19 nt, Artificial Sequence
  Description of Artificial Sequence: Synthetic oligonucleotide
  Antisense strand to SEQ ID NO: 2031796
agccuaaagagaaacuugg

SEQ ID NO: 2031798 - RNA, 19 nt, Artificial Sequence
  Description of Artificial Sequence: Synthetic oligonucleotide
  Sense strand starting at position 3063 of SEQ ID NO: 1881274
gcucuugucucaguaaaga

SEQ ID NO: 2031799 - RNA, 19 nt, Artificial Sequence
  Description of Artificial Sequence: Synthetic oligonucleotide
  Antisense strand to SEQ ID NO: 2031798
ucuuuacugagacaagagc

SEQ ID NO: 2031800 - RNA, 19 nt, Artificial Sequence
  Description of Artificial Sequence: Synthetic oligonucleotide
  Sense strand starting at position 3102 of SEQ ID NO: 1881274
aagguaauccagugagacu

SEQ ID NO: 2031801 - RNA, 19 nt, Artificial Sequence
  Description of Artificial Sequence: Synthetic oligonucleotide
  Antisense strand to SEQ ID NO: 2031800
agucucacuggauuaccuu

SEQ ID NO: 2031802 - RNA, 19 nt, Artificial Sequence
  Description of Artificial Sequence: Synthetic oligonucleotide
  Sense strand starting at position 3456 of SEQ ID NO: 1881274
ggccucuucguauacuaac

SEQ ID NO: 2031803 - RNA, 19 nt, Artificial Sequence
  Description of Artificial Sequence: Synthetic oligonucleotide
  Antisense strand to SEQ ID NO: 2031802
guuaguauacgaagaggcc

SEQ ID NO: 2031804 - RNA, 19 nt, Artificial Sequence
  Description of Artificial Sequence: Synthetic oligonucleotide
  Sense strand starting at position 3506 of SEQ ID NO: 1881274
gaguuauagacguaugcug

SEQ ID NO: 2031805 - RNA, 19 nt, Artificial Sequence
  Description of Artificial Sequence: Synthetic oligonucleotide
  Antisense strand to SEQ ID NO: 2031804
cagcauacgucuauaacuc

SEQ ID NO: 2031806 - RNA, 19 nt, Artificial Sequence
  Description of Artificial Sequence: Synthetic oligonucleotide
  Sense strand starting at position 3515 of SEQ ID NO: 1881274
acguaugcugguugauuca

SEQ ID NO: 2031807 - RNA, 19 nt, Artificial Sequence
  Description of Artificial Sequence: Synthetic oligonucleotide
  Antisense strand to SEQ ID NO: 2031806
ugaaucaaccagcauacgu

SEQ ID NO: 2031808 - RNA, 19 nt, Artificial Sequence
  Description of Artificial Sequence: Synthetic oligonucleotide
  Sense strand starting at position 3596 of SEQ ID NO: 1881274
aggguaagaugguuuagag

SEQ ID NO: 2031809 - RNA, 19 nt, Artificial Sequence
  Description of Artificial Sequence: Synthetic oligonucleotide
  Antisense strand to SEQ ID NO: 2031808
cucuaaaccaucuuacccu

SEQ ID NO: 2031810 - RNA, 19 nt, Artificial Sequence
  Description of Artificial Sequence: Synthetic oligonucleotide
  Sense strand starting at position 3665 of SEQ ID NO: 1881274
ggauuugagugaggacuaa

SEQ ID NO: 2031811 - RNA, 19 nt, Artificial Sequence
  Description of Artificial Sequence: Synthetic oligonucleotide
  Antisense strand to SEQ ID NO: 2031810
uuaguccucacucaaaucc

SEQ ID NO: 2031812 - RNA, 19 nt, Artificial Sequence
  Description of Artificial Sequence: Synthetic oligonucleotide
  Sense strand starting at position 3692 of SEQ ID NO: 1881274
auauguguucacuggugga

SEQ ID NO: 2031813 - RNA, 19 nt, Artificial Sequence
  Description of Artificial Sequence: Synthetic oligonucleotide
  Antisense strand to SEQ ID NO: 2031812
uccaccagugaacacauau

SEQ ID NO: 2031814 - RNA, 19 nt, Artificial Sequence
  Description of Artificial Sequence: Synthetic oligonucleotide
  Sense strand starting at position 3696 of SEQ ID NO: 1881274
guguucacugguggaaaga

SEQ ID NO: 2031815 - RNA, 19 nt, Artificial Sequence
  Description of Artificial Sequence: Synthetic oligonucleotide
  Antisense strand to SEQ ID NO: 2031814
ucuuuccaccagugaacac

SEQ ID NO: 2031816 - RNA, 19 nt, Artificial Sequence
  Description of Artificial Sequence: Synthetic oligonucleotide
  Sense strand starting at position 331 of SEQ ID NO: 1881275
gagaguguauaagauauuu

SEQ ID NO: 2031817 - RNA, 19 nt, Artificial Sequence
  Description of Artificial Sequence: Synthetic oligonucleotide
  Antisense strand to SEQ ID NO: 2031816
aaauaucuuauacacucuc

SEQ ID NO: 2031818 - RNA, 19 nt, Artificial Sequence
  Description of Artificial Sequence: Synthetic oligonucleotide
  Sense strand starting at position 411 of SEQ ID NO: 1881275
agaaucuuauaagugcuau

SEQ ID NO: 2031819 - RNA, 19 nt, Artificial Sequence
  Description of Artificial Sequence: Synthetic oligonucleotide
  Antisense strand to SEQ ID NO: 2031818
auagcacuuauaagauucu

SEQ ID NO: 2031820 - RNA, 19 nt, Artificial Sequence
  Description of Artificial Sequence: Synthetic oligonucleotide
  Sense strand starting at position 442 of SEQ ID NO: 1881275
uuauaagugcuauaggguu

SEQ ID NO: 2031821 - RNA, 19 nt, Artificial Sequence
  Description of Artificial Sequence: Synthetic oligonucleotide
  Antisense strand to SEQ ID NO: 2031820
aacccuauagcacuuauaa

SEQ ID NO: 2031822 - RNA, 19 nt, Artificial Sequence
  Description of Artificial Sequence: Synthetic oligonucleotide
  Sense strand starting at position 444 of SEQ ID NO: 1881275
auaagugcuauaggguuua

SEQ ID NO: 2031823 - RNA, 19 nt, Artificial Sequence
  Description of Artificial Sequence: Synthetic oligonucleotide
  Antisense strand to SEQ ID NO: 2031822
uaaacccuauagcacuuau

SEQ ID NO: 2031824 - RNA, 19 nt, Artificial Sequence
  Description of Artificial Sequence: Synthetic oligonucleotide
  Sense strand starting at position 449 of SEQ ID NO: 1881275
ugcuauaggguuuaugaga

SEQ ID NO: 2031825 - RNA, 19 nt, Artificial Sequence
  Description of Artificial Sequence: Synthetic oligonucleotide
  Antisense strand to SEQ ID NO: 2031824
ucucauaaacccuauagca

SEQ ID NO: 2031826 - RNA, 19 nt, Artificial Sequence
  Description of Artificial Sequence: Synthetic oligonucleotide
  Sense strand starting at position 709 of SEQ ID NO: 1881275
cuaagauauuugcuguguu

SEQ ID NO: 2031827 - RNA, 19 nt, Artificial Sequence
  Description of Artificial Sequence: Synthetic oligonucleotide
  Antisense strand to SEQ ID NO: 2031826
aacacagcaaauaucuuag

SEQ ID NO: 2031828 - RNA, 19 nt, Artificial Sequence
  Description of Artificial Sequence: Synthetic oligonucleotide
  Sense strand starting at position 737 of SEQ ID NO: 1881275
ucauauguccagggaaucu

SEQ ID NO: 2031829 - RNA, 19 nt, Artificial Sequence
  Description of Artificial Sequence: Synthetic oligonucleotide
  Antisense strand to SEQ ID NO: 2031828
agauucccuggacauauga

SEQ ID NO: 2031830 - RNA, 19 nt, Artificial Sequence
  Description of Artificial Sequence: Synthetic oligonucleotide
  Sense strand starting at position 812 of SEQ ID NO: 1881275
agaggagcuucuuuaaggu

SEQ ID NO: 2031831 - RNA, 19 nt, Artificial Sequence
  Description of Artificial Sequence: Synthetic oligonucleotide
  Antisense strand to SEQ ID NO: 2031830
accuuaaagaagcuccucu

SEQ ID NO: 2031832 - RNA, 19 nt, Artificial Sequence
  Description of Artificial Sequence: Synthetic oligonucleotide
  Sense strand starting at position 1113 of SEQ ID NO: 1881275
aaagguauucugcauugua

SEQ ID NO: 2031833 - RNA, 19 nt, Artificial Sequence
  Description of Artificial Sequence: Synthetic oligonucleotide
  Antisense strand to SEQ ID NO: 2031832
uacaaugcagaauaccuuu

SEQ ID NO: 2031834 - RNA, 19 nt, Artificial Sequence
  Description of Artificial Sequence: Synthetic oligonucleotide
  Sense strand starting at position 1227 of SEQ ID NO: 1881275
augacagugucacuaauca

SEQ ID NO: 2031835 - RNA, 19 nt, Artificial Sequence
  Description of Artificial Sequence: Synthetic oligonucleotide
  Antisense strand to SEQ ID NO: 2031834
ugauuagugacacugucau

SEQ ID NO: 2031836 - RNA, 19 nt, Artificial Sequence
  Description of Artificial Sequence: Synthetic oligonucleotide
  Sense strand starting at position 1360 of SEQ ID NO: 1881275
acucuauuaggguagugau

SEQ ID NO: 2031837 - RNA, 19 nt, Artificial Sequence
  Description of Artificial Sequence: Synthetic oligonucleotide
  Antisense strand to SEQ ID NO: 2031836
aucacuacccuaauagagu

SEQ ID NO: 2031838 - RNA, 19 nt, Artificial Sequence
  Description of Artificial Sequence: Synthetic oligonucleotide
  Sense strand starting at position 1384 of SEQ ID NO: 1881275
acagguauauacuuaugua

SEQ ID NO: 2031839 - RNA, 19 nt, Artificial Sequence
  Description of Artificial Sequence: Synthetic oligonucleotide
  Antisense strand to SEQ ID NO: 2031838
uacauaaguauauaccugu

SEQ ID NO: 2031840 - RNA, 19 nt, Artificial Sequence
  Description of Artificial Sequence: Synthetic oligonucleotide
  Sense strand starting at position 1418 of SEQ ID NO: 1881275
ggaaauuggaguuguucca

SEQ ID NO: 2031841 - RNA, 19 nt, Artificial Sequence
  Description of Artificial Sequence: Synthetic oligonucleotide
  Antisense strand to SEQ ID NO: 2031840
uggaacaacuccaauuucc

SEQ ID NO: 2031842 - RNA, 19 nt, Artificial Sequence
  Description of Artificial Sequence: Synthetic oligonucleotide
  Sense strand starting at position 1428 of SEQ ID NO: 1881275
guuguuccaccacaaugaa

SEQ ID NO: 2031843 - RNA, 19 nt, Artificial Sequence
  Description of Artificial Sequence: Synthetic oligonucleotide
  Antisense strand to SEQ ID NO: 2031842
uucauugugguggaacaac

SEQ ID NO: 2031844 - RNA, 19 nt, Artificial Sequence
  Description of Artificial Sequence: Synthetic oligonucleotide
  Sense strand starting at position 1458 of SEQ ID NO: 1881275
ucagaagguuucuugaaug

SEQ ID NO: 2031845 - RNA, 19 nt, Artificial Sequence
  Description of Artificial Sequence: Synthetic oligonucleotide
  Antisense strand to SEQ ID NO: 2031844
cauucaagaaaccuucuga

SEQ ID NO: 2031846 - RNA, 19 nt, Artificial Sequence
  Description of Artificial Sequence: Synthetic oligonucleotide
  Sense strand starting at position 1550 of SEQ ID NO: 1881275
gccuauuuguaguuugaga

SEQ ID NO: 2031847 - RNA, 19 nt, Artificial Sequence
  Description of Artificial Sequence: Synthetic oligonucleotide
  Antisense strand to SEQ ID NO: 2031846
ucucaaacuacaaauaggc

SEQ ID NO: 2031848 - RNA, 19 nt, Artificial Sequence
  Description of Artificial Sequence: Synthetic oligonucleotide
  Sense strand starting at position 1750 of SEQ ID NO: 1881275
aacaucagacgagguaaau

SEQ ID NO: 2031849 - RNA, 19 nt, Artificial Sequence
  Description of Artificial Sequence: Synthetic oligonucleotide
  Antisense strand to SEQ ID NO: 2031848
auuuaccucgucugauguu

SEQ ID NO: 2031850 - RNA, 19 nt, Artificial Sequence
  Description of Artificial Sequence: Synthetic oligonucleotide
  Sense strand starting at position 1785 of SEQ ID NO: 1881275
acugcuguuccucaaugaa

SEQ ID NO: 2031851 - RNA, 19 nt, Artificial Sequence
  Description of Artificial Sequence: Synthetic oligonucleotide
  Antisense strand to SEQ ID NO: 2031850
uucauugaggaacagcagu

SEQ ID NO: 2031852 - RNA, 19 nt, Artificial Sequence
  Description of Artificial Sequence: Synthetic oligonucleotide
  Sense strand starting at position 1788 of SEQ ID NO: 1881275
gcuguuccucaaugaaaua

SEQ ID NO: 2031853 - RNA, 19 nt, Artificial Sequence
  Description of Artificial Sequence: Synthetic oligonucleotide
  Antisense strand to SEQ ID NO: 2031852
uauuucauugaggaacagc

SEQ ID NO: 2031854 - RNA, 19 nt, Artificial Sequence
  Description of Artificial Sequence: Synthetic oligonucleotide
  Sense strand starting at position 1892 of SEQ ID NO: 1881275
acaugauagcuguaacuuu

SEQ ID NO: 2031855 - RNA, 19 nt, Artificial Sequence
  Description of Artificial Sequence: Synthetic oligonucleotide
  Antisense strand to SEQ ID NO: 2031854
aaaguuacagcuaucaugu

SEQ ID NO: 2031856 - RNA, 19 nt, Artificial Sequence
  Description of Artificial Sequence: Synthetic oligonucleotide
  Sense strand starting at position 1915 of SEQ ID NO: 1881275
gcuggauuagucuaugggu

SEQ ID NO: 2031857 - RNA, 19 nt, Artificial Sequence
  Description of Artificial Sequence: Synthetic oligonucleotide
  Antisense strand to SEQ ID NO: 2031856
acccauagacuaauccagc

SEQ ID NO: 2031858 - RNA, 19 nt, Artificial Sequence
  Description of Artificial Sequence: Synthetic oligonucleotide
  Sense strand starting at position 1917 of SEQ ID NO: 1881275
uggauuagucuauggguug

SEQ ID NO: 2031859 - RNA, 19 nt, Artificial Sequence
  Description of Artificial Sequence: Synthetic oligonucleotide
  Antisense strand to SEQ ID NO: 2031858
caacccauagacuaaucca

SEQ ID NO: 2031860 - RNA, 19 nt, Artificial Sequence
  Description of Artificial Sequence: Synthetic oligonucleotide
  Sense strand starting at position 1973 of SEQ ID NO: 1881275
guacuaucaugacuuacau

SEQ ID NO: 2031861 - RNA, 19 nt, Artificial Sequence
  Description of Artificial Sequence: Synthetic oligonucleotide
  Antisense strand to SEQ ID NO: 2031860
auguaagucaugauaguac

SEQ ID NO: 2031862 - RNA, 19 nt, Artificial Sequence
  Description of Artificial Sequence: Synthetic oligonucleotide
  Sense strand starting at position 2065 of SEQ ID NO: 1881275
cugucauuccuuggcauuu

SEQ ID NO: 2031863 - RNA, 19 nt, Artificial Sequence
  Description of Artificial Sequence: Synthetic oligonucleotide
  Antisense strand to SEQ ID NO: 2031862
aaaugccaaggaaugacag

SEQ ID NO: 2031864 - RNA, 19 nt, Artificial Sequence
  Description of Artificial Sequence: Synthetic oligonucleotide
  Sense strand starting at position 2123 of SEQ ID NO: 1881275
gcauuaaugcuaugaaacu

SEQ ID NO: 2031865 - RNA, 19 nt, Artificial Sequence
  Description of Artificial Sequence: Synthetic oligonucleotide
  Antisense strand to SEQ ID NO: 2031864
aguuucauagcauuaaugc

SEQ ID NO: 2031866 - RNA, 19 nt, Artificial Sequence
  Description of Artificial Sequence: Synthetic oligonucleotide
  Sense strand starting at position 2270 of SEQ ID NO: 1881275
agaggcacuuauccaacau

SEQ ID NO: 2031867 - RNA, 19 nt, Artificial Sequence
  Description of Artificial Sequence: Synthetic oligonucleotide
  Antisense strand to SEQ ID NO: 2031866
auguuggauaagugccucu

SEQ ID NO: 2031868 - RNA, 19 nt, Artificial Sequence
  Description of Artificial Sequence: Synthetic oligonucleotide
  Sense strand starting at position 2348 of SEQ ID NO: 1881275
ugaauaauggcaugguucu

SEQ ID NO: 2031869 - RNA, 19 nt, Artificial Sequence
  Description of Artificial Sequence: Synthetic oligonucleotide
  Antisense strand to SEQ ID NO: 2031868
agaaccaugccauuauuca

SEQ ID NO: 2031870 - RNA, 19 nt, Artificial Sequence
  Description of Artificial Sequence: Synthetic oligonucleotide
  Sense strand starting at position 2349 of SEQ ID NO: 1881275
gaauaauggcaugguucuu

SEQ ID NO: 2031871 - RNA, 19 nt, Artificial Sequence
  Description of Artificial Sequence: Synthetic oligonucleotide
  Antisense strand to SEQ ID NO: 2031870
aagaaccaugccauuauuc

SEQ ID NO: 2031872 - RNA, 19 nt, Artificial Sequence
  Description of Artificial Sequence: Synthetic oligonucleotide
  Sense strand starting at position 2437 of SEQ ID NO: 1881275
aagcaacugugguuccaaa

SEQ ID NO: 2031873 - RNA, 19 nt, Artificial Sequence
  Description of Artificial Sequence: Synthetic oligonucleotide
  Antisense strand to SEQ ID NO: 2031872
uuuggaaccacaguugcuu

SEQ ID NO: 2031874 - RNA, 19 nt, Artificial Sequence
  Description of Artificial Sequence: Synthetic oligonucleotide
  Sense strand starting at position 2646 of SEQ ID NO: 1881275
cauugaguuaggugaaggu

SEQ ID NO: 2031875 - RNA, 19 nt, Artificial Sequence
  Description of Artificial Sequence: Synthetic oligonucleotide
  Antisense strand to SEQ ID NO: 2031874
accuucaccuaacucaaug

SEQ ID NO: 2031876 - RNA, 19 nt, Artificial Sequence
  Description of Artificial Sequence: Synthetic oligonucleotide
  Sense strand starting at position 2852 of SEQ ID NO: 1881275
ucucuuauaugaucuggau

SEQ ID NO: 2031877 - RNA, 19 nt, Artificial Sequence
  Description of Artificial Sequence: Synthetic oligonucleotide
  Antisense strand to SEQ ID NO: 2031876
auccagaucauauaagaga

SEQ ID NO: 2031878 - RNA, 19 nt, Artificial Sequence
  Description of Artificial Sequence: Synthetic oligonucleotide
  Sense strand starting at position 2856 of SEQ ID NO: 1881275
uuauaugaucuggaugcuu

SEQ ID NO: 2031879 - RNA, 19 nt, Artificial Sequence
  Description of Artificial Sequence: Synthetic oligonucleotide
  Antisense strand to SEQ ID NO: 2031878
aagcauccagaucauauaa

SEQ ID NO: 2031880 - RNA, 19 nt, Artificial Sequence
  Description of Artificial Sequence: Synthetic oligonucleotide
  Sense strand starting at position 3055 of SEQ ID NO: 1881275
cuguucuuauaacugagaa

SEQ ID NO: 2031881 - RNA, 19 nt, Artificial Sequence
  Description of Artificial Sequence: Synthetic oligonucleotide
  Antisense strand to SEQ ID NO: 2031880
uucucaguuauaagaacag

SEQ ID NO: 2031882 - RNA, 19 nt, Artificial Sequence
  Description of Artificial Sequence: Synthetic oligonucleotide
  Sense strand starting at position 3088 of SEQ ID NO: 1881275
uuugaauguguagaaccau

SEQ ID NO: 2031883 - RNA, 19 nt, Artificial Sequence
  Description of Artificial Sequence: Synthetic oligonucleotide
  Antisense strand to SEQ ID NO: 2031882
augguucuacacauucaaa

SEQ ID NO: 2031884 - RNA, 19 nt, Artificial Sequence
  Description of Artificial Sequence: Synthetic oligonucleotide
  Sense strand starting at position 3109 of SEQ ID NO: 1881275
auuacuacauccuuuggua

SEQ ID NO: 2031885 - RNA, 19 nt, Artificial Sequence
  Description of Artificial Sequence: Synthetic oligonucleotide
  Antisense strand to SEQ ID NO: 2031884
uaccaaaggauguaguaau

SEQ ID NO: 2031886 - RNA, 19 nt, Artificial Sequence
  Description of Artificial Sequence: Synthetic oligonucleotide
  Sense strand starting at position 3250 of SEQ ID NO: 1881275
agaccuagucucuaaagua

SEQ ID NO: 2031887 - RNA, 19 nt, Artificial Sequence
  Description of Artificial Sequence: Synthetic oligonucleotide
  Antisense strand to SEQ ID NO: 2031886
uacuuuagagacuaggucu

SEQ ID NO: 2031888 - RNA, 19 nt, Artificial Sequence
  Description of Artificial Sequence: Synthetic oligonucleotide
  Sense strand starting at position 3397 of SEQ ID NO: 1881275
ugguaagacuuacuggcuu

SEQ ID NO: 2031889 - RNA, 19 nt, Artificial Sequence
  Description of Artificial Sequence: Synthetic oligonucleotide
  Antisense strand to SEQ ID NO: 2031888
aagccaguaagucuuacca

SEQ ID NO: 2031890 - RNA, 19 nt, Artificial Sequence
  Description of Artificial Sequence: Synthetic oligonucleotide
  Sense strand starting at position 3499 of SEQ ID NO: 1881275
gaggaauauugagcacacu

SEQ ID NO: 2031891 - RNA, 19 nt, Artificial Sequence
  Description of Artificial Sequence: Synthetic oligonucleotide
  Antisense strand to SEQ ID NO: 2031890
agugugcucaauauuccuc

SEQ ID NO: 2031892 - RNA, 19 nt, Artificial Sequence
  Description of Artificial Sequence: Synthetic oligonucleotide
  Sense strand starting at position 3502 of SEQ ID NO: 1881275
gaauauugagcacacuagu

SEQ ID NO: 2031893 - RNA, 19 nt, Artificial Sequence
  Description of Artificial Sequence: Synthetic oligonucleotide
  Antisense strand to SEQ ID NO: 2031892
acuagugugcucaauauuc

SEQ ID NO: 2031894 - RNA, 19 nt, Artificial Sequence
  Description of Artificial Sequence: Synthetic oligonucleotide
  Sense strand starting at position 3658 of SEQ ID NO: 1881275
agguuccauaacgguaauu

SEQ ID NO: 2031895 - RNA, 19 nt, Artificial Sequence
  Description of Artificial Sequence: Synthetic oligonucleotide
  Antisense strand to SEQ ID NO: 2031894
aauuaccguuauggaaccu

SEQ ID NO: 2031896 - RNA, 19 nt, Artificial Sequence
  Description of Artificial Sequence: Synthetic oligonucleotide
  Sense strand starting at position 165 of SEQ ID NO: 1881276
augccauggucucuaugaa

SEQ ID NO: 2031897 - RNA, 19 nt, Artificial Sequence
  Description of Artificial Sequence: Synthetic oligonucleotide
  Antisense strand to SEQ ID NO: 2031896
uucauagagaccauggcau

SEQ ID NO: 2031898 - RNA, 19 nt, Artificial Sequence
  Description of Artificial Sequence: Synthetic oligonucleotide
  Sense strand starting at position 166 of SEQ ID NO: 1881276
ugccauggucucuaugaau

SEQ ID NO: 2031899 - RNA, 19 nt, Artificial Sequence
  Description of Artificial Sequence: Synthetic oligonucleotide
  Antisense strand to SEQ ID NO: 2031898
auucauagagaccauggca

SEQ ID NO: 2031900 - RNA, 19 nt, Artificial Sequence
  Description of Artificial Sequence: Synthetic oligonucleotide
  Sense strand starting at position 209 of SEQ ID NO: 1881276
gaagaacguauugggugau

SEQ ID NO: 2031901 - RNA, 19 nt, Artificial Sequence
  Description of Artificial Sequence: Synthetic oligonucleotide
  Antisense strand to SEQ ID NO: 2031900
aucacccaauacguucuuc

SEQ ID NO: 2031902 - RNA, 19 nt, Artificial Sequence
  Description of Artificial Sequence: Synthetic oligonucleotide
  Sense strand starting at position 212 of SEQ ID NO: 1881276
gaacguauugggugauuac

SEQ ID NO: 2031903 - RNA, 19 nt, Artificial Sequence
  Description of Artificial Sequence: Synthetic oligonucleotide
  Antisense strand to SEQ ID NO: 2031902
guaaucacccaauacguuc

SEQ ID NO: 2031904 - RNA, 19 nt, Artificial Sequence
  Description of Artificial Sequence: Synthetic oligonucleotide
  Sense strand starting at position 213 of SEQ ID NO: 1881276
aacguauugggugauuaca

SEQ ID NO: 2031905 - RNA, 19 nt, Artificial Sequence
  Description of Artificial Sequence: Synthetic oligonucleotide
  Antisense strand to SEQ ID NO: 2031904
uguaaucacccaauacguu

SEQ ID NO: 2031906 - RNA, 19 nt, Artificial Sequence
  Description of Artificial Sequence: Synthetic oligonucleotide
  Sense strand starting at position 221 of SEQ ID NO: 1881276
gggugauuacagugucaug

SEQ ID NO: 2031907 - RNA, 19 nt, Artificial Sequence
  Description of Artificial Sequence: Synthetic oligonucleotide
  Antisense strand to SEQ ID NO: 2031906
caugacacuguaaucaccc

SEQ ID NO: 2031908 - RNA, 19 nt, Artificial Sequence
  Description of Artificial Sequence: Synthetic oligonucleotide
  Sense strand starting at position 303 of SEQ ID NO: 1881276
cugucugagcuaugugaag

SEQ ID NO: 2031909 - RNA, 19 nt, Artificial Sequence
  Description of Artificial Sequence: Synthetic oligonucleotide
  Antisense strand to SEQ ID NO: 2031908
cuucacauagcucagacag

SEQ ID NO: 2031910 - RNA, 19 nt, Artificial Sequence
  Description of Artificial Sequence: Synthetic oligonucleotide
  Sense strand starting at position 752 of SEQ ID NO: 1881276
ccacuuggauguuuaauaa

SEQ ID NO: 2031911 - RNA, 19 nt, Artificial Sequence
  Description of Artificial Sequence: Synthetic oligonucleotide
  Antisense strand to SEQ ID NO: 2031910
uuauuaaacauccaagugg

SEQ ID NO: 2031912 - RNA, 19 nt, Artificial Sequence
  Description of Artificial Sequence: Synthetic oligonucleotide
  Sense strand starting at position 973 of SEQ ID NO: 1881276
ucaccauggcuggauuauu

SEQ ID NO: 2031913 - RNA, 19 nt, Artificial Sequence
  Description of Artificial Sequence: Synthetic oligonucleotide
  Antisense strand to SEQ ID NO: 2031912
aauaauccagccaugguga

SEQ ID NO: 2031914 - RNA, 19 nt, Artificial Sequence
  Description of Artificial Sequence: Synthetic oligonucleotide
  Sense strand starting at position 978 of SEQ ID NO: 1881276
auggcuggauuauuguaau

SEQ ID NO: 2031915 - RNA, 19 nt, Artificial Sequence
  Description of Artificial Sequence: Synthetic oligonucleotide
  Antisense strand to SEQ ID NO: 2031914
auuacaauaauccagccau

SEQ ID NO: 2031916 - RNA, 19 nt, Artificial Sequence
  Description of Artificial Sequence: Synthetic oligonucleotide
  Sense strand starting at position 1216 of SEQ ID NO: 1881276
uugugaacugcgcauugga

SEQ ID NO: 2031917 - RNA, 19 nt, Artificial Sequence
  Description of Artificial Sequence: Synthetic oligonucleotide
  Antisense strand to SEQ ID NO: 2031916
uccaaugcgcaguucacaa

SEQ ID NO: 2031918 - RNA, 19 nt, Artificial Sequence
  Description of Artificial Sequence: Synthetic oligonucleotide
  Sense strand starting at position 1276 of SEQ ID NO: 1881276
auguaaugccuuugaauca

SEQ ID NO: 2031919 - RNA, 19 nt, Artificial Sequence
  Description of Artificial Sequence: Synthetic oligonucleotide
  Antisense strand to SEQ ID NO: 2031918
ugauucaaaggcauuacau

SEQ ID NO: 2031920 - RNA, 19 nt, Artificial Sequence
  Description of Artificial Sequence: Synthetic oligonucleotide
  Sense strand starting at position 1283 of SEQ ID NO: 1881276
gccuuugaaucauccugaa

SEQ ID NO: 2031921 - RNA, 19 nt, Artificial Sequence
  Description of Artificial Sequence: Synthetic oligonucleotide
  Antisense strand to SEQ ID NO: 2031920
uucaggaugauucaaaggc

SEQ ID NO: 2031922 - RNA, 19 nt, Artificial Sequence
  Description of Artificial Sequence: Synthetic oligonucleotide
  Sense strand starting at position 1590 of SEQ ID NO: 1881276
gugggaucagcugguugaa

SEQ ID NO: 2031923 - RNA, 19 nt, Artificial Sequence
  Description of Artificial Sequence: Synthetic oligonucleotide
  Antisense strand to SEQ ID NO: 2031922
uucaaccagcugaucccac

SEQ ID NO: 2031924 - RNA, 19 nt, Artificial Sequence
  Description of Artificial Sequence: Synthetic oligonucleotide
  Sense strand starting at position 1998 of SEQ ID NO: 1881276
aagugaauccaccgucaac

SEQ ID NO: 2031925 - RNA, 19 nt, Artificial Sequence
  Description of Artificial Sequence: Synthetic oligonucleotide
  Antisense strand to SEQ ID NO: 2031924
guugacgguggauucacuu

SEQ ID NO: 2031926 - RNA, 19 nt, Artificial Sequence
  Description of Artificial Sequence: Synthetic oligonucleotide
  Sense strand starting at position 2045 of SEQ ID NO: 1881276
gagcaauaguguucaggug

SEQ ID NO: 2031927 - RNA, 19 nt, Artificial Sequence
  Description of Artificial Sequence: Synthetic oligonucleotide
  Antisense strand to SEQ ID NO: 2031926
caccugaacacuauugcuc

SEQ ID NO: 2031928 - RNA, 19 nt, Artificial Sequence
  Description of Artificial Sequence: Synthetic oligonucleotide
  Sense strand starting at position 2052 of SEQ ID NO: 1881276
aguguucaggugugaagau

SEQ ID NO: 2031929 - RNA, 19 nt, Artificial Sequence
  Description of Artificial Sequence: Synthetic oligonucleotide
  Antisense strand to SEQ ID NO: 2031928
aucuucacaccugaacacu

SEQ ID NO: 2031930 - RNA, 19 nt, Artificial Sequence
  Description of Artificial Sequence: Synthetic oligonucleotide
  Sense strand starting at position 2128 of SEQ ID NO: 1881276
gugauuauaggagggcgaa

SEQ ID NO: 2031931 - RNA, 19 nt, Artificial Sequence
  Description of Artificial Sequence: Synthetic oligonucleotide
  Antisense strand to SEQ ID NO: 2031930
uucgcccuccuauaaucac

SEQ ID NO: 2031932 - RNA, 19 nt, Artificial Sequence
  Description of Artificial Sequence: Synthetic oligonucleotide
  Sense strand starting at position 2129 of SEQ ID NO: 1881276
ugauuauaggagggcgaau

SEQ ID NO: 2031933 - RNA, 19 nt, Artificial Sequence
  Description of Artificial Sequence: Synthetic oligonucleotide
  Antisense strand to SEQ ID NO: 2031932
auucgcccuccuauaauca

SEQ ID NO: 2031934 - RNA, 19 nt, Artificial Sequence
  Description of Artificial Sequence: Synthetic oligonucleotide
  Sense strand starting at position 2198 of SEQ ID NO: 1881276
gguggcuacauugaacuaa

SEQ ID NO: 2031935 - RNA, 19 nt, Artificial Sequence
  Description of Artificial Sequence: Synthetic oligonucleotide
  Antisense strand to SEQ ID NO: 2031934
uuaguucaauguagccacc

SEQ ID NO: 2031936 - RNA, 19 nt, Artificial Sequence
  Description of Artificial Sequence: Synthetic oligonucleotide
  Sense strand starting at position 2259 of SEQ ID NO: 1881276
cgggaauuacccugaucca

SEQ ID NO: 2031937 - RNA, 19 nt, Artificial Sequence
  Description of Artificial Sequence: Synthetic oligonucleotide
  Antisense strand to SEQ ID NO: 2031936
uggaucaggguaauucccg

SEQ ID NO: 2031938 - RNA, 19 nt, Artificial Sequence
  Description of Artificial Sequence: Synthetic oligonucleotide
  Sense strand starting at position 2325 of SEQ ID NO: 1881276
gcgucuuugcccucagcca

SEQ ID NO: 2031939 - RNA, 19 nt, Artificial Sequence
  Description of Artificial Sequence: Synthetic oligonucleotide
  Antisense strand to SEQ ID NO: 2031938
uggcugagggcaaagacgc

SEQ ID NO: 2031940 - RNA, 19 nt, Artificial Sequence
  Description of Artificial Sequence: Synthetic oligonucleotide
  Sense strand starting at position 2605 of SEQ ID NO: 1881276
cguaccuggucaucuacaa

SEQ ID NO: 2031941 - RNA, 19 nt, Artificial Sequence
  Description of Artificial Sequence: Synthetic oligonucleotide
  Antisense strand to SEQ ID NO: 2031940
uuguagaugaccagguacg

SEQ ID NO: 2031942 - RNA, 19 nt, Artificial Sequence
  Description of Artificial Sequence: Synthetic oligonucleotide
  Sense strand starting at position 2998 of SEQ ID NO: 1881276
gccagauucggauguugaa

SEQ ID NO: 2031943 - RNA, 19 nt, Artificial Sequence
  Description of Artificial Sequence: Synthetic oligonucleotide
  Antisense strand to SEQ ID NO: 2031942
uucaacauccgaaucuggc

SEQ ID NO: 2031944 - RNA, 19 nt, Artificial Sequence
  Description of Artificial Sequence: Synthetic oligonucleotide
  Sense strand starting at position 3117 of SEQ ID NO: 1881276
ugggaaagcguucaaaguu

SEQ ID NO: 2031945 - RNA, 19 nt, Artificial Sequence
  Description of Artificial Sequence: Synthetic oligonucleotide
  Antisense strand to SEQ ID NO: 2031944
aacuuugaacgcuuuccca

SEQ ID NO: 2031946 - RNA, 19 nt, Artificial Sequence
  Description of Artificial Sequence: Synthetic oligonucleotide
  Sense strand starting at position 3155 of SEQ ID NO: 1881276
agagcuaggcuuuagauga

SEQ ID NO: 2031947 - RNA, 19 nt, Artificial Sequence
  Description of Artificial Sequence: Synthetic oligonucleotide
  Antisense strand to SEQ ID NO: 2031946
ucaucuaaagccuagcucu

SEQ ID NO: 2031948 - RNA, 19 nt, Artificial Sequence
  Description of Artificial Sequence: Synthetic oligonucleotide
  Sense strand starting at position 3159 of SEQ ID NO: 1881276
cuaggcuuuagaugaguuu

SEQ ID NO: 2031949 - RNA, 19 nt, Artificial Sequence
  Description of Artificial Sequence: Synthetic oligonucleotide
  Antisense strand to SEQ ID NO: 2031948
aaacucaucuaaagccuag

SEQ ID NO: 2031950 - RNA, 19 nt, Artificial Sequence
  Description of Artificial Sequence: Synthetic oligonucleotide
  Sense strand starting at position 3160 of SEQ ID NO: 1881276
uaggcuuuagaugaguuua

SEQ ID NO: 2031951 - RNA, 19 nt, Artificial Sequence
  Description of Artificial Sequence: Synthetic oligonucleotide
  Antisense strand to SEQ ID NO: 2031950
uaaacucaucuaaagccua

SEQ ID NO: 2031952 - RNA, 19 nt, Artificial Sequence
  Description of Artificial Sequence: Synthetic oligonucleotide
  Sense strand starting at position 3162 of SEQ ID NO: 1881276
ggcuuuagaugaguuuaga

SEQ ID NO: 2031953 - RNA, 19 nt, Artificial Sequence
  Description of Artificial Sequence: Synthetic oligonucleotide
  Antisense strand to SEQ ID NO: 2031952
ucuaaacucaucuaaagcc

SEQ ID NO: 2031954 - RNA, 19 nt, Artificial Sequence
  Description of Artificial Sequence: Synthetic oligonucleotide
  Sense strand starting at position 3222 of SEQ ID NO: 1881276
aaggcagaguuacuggaaa

SEQ ID NO: 2031955 - RNA, 19 nt, Artificial Sequence
  Description of Artificial Sequence: Synthetic oligonucleotide
  Antisense strand to SEQ ID NO: 2031954
uuuccaguaacucugccuu

SEQ ID NO: 2031956 - RNA, 19 nt, Artificial Sequence
  Description of Artificial Sequence: Synthetic oligonucleotide
  Sense strand starting at position 3411 of SEQ ID NO: 1881276
ggguuggucugggugauga

SEQ ID NO: 2031957 - RNA, 19 nt, Artificial Sequence
  Description of Artificial Sequence: Synthetic oligonucleotide
  Antisense strand to SEQ ID NO: 2031956
ucaucacccagaccaaccc

SEQ ID NO: 2031958 - RNA, 19 nt, Artificial Sequence
  Description of Artificial Sequence: Synthetic oligonucleotide
  Sense strand starting at position 3412 of SEQ ID NO: 1881276
gguuggucugggugaugaa

SEQ ID NO: 2031959 - RNA, 19 nt, Artificial Sequence
  Description of Artificial Sequence: Synthetic oligonucleotide
  Antisense strand to SEQ ID NO: 2031958
uucaucacccagaccaacc

SEQ ID NO: 2031960 - RNA, 19 nt, Artificial Sequence
  Description of Artificial Sequence: Synthetic oligonucleotide
  Sense strand starting at position 3623 of SEQ ID NO: 1881276
ggugauacauuguuagggu

SEQ ID NO: 2031961 - RNA, 19 nt, Artificial Sequence
  Description of Artificial Sequence: Synthetic oligonucleotide
  Antisense strand to SEQ ID NO: 2031960
acccuaacaauguaucacc

SEQ ID NO: 2031962 - RNA, 19 nt, Artificial Sequence
  Description of Artificial Sequence: Synthetic oligonucleotide
  Sense strand starting at position 3739 of SEQ ID NO: 1881276
ccuuaagaugcugaugcaa

SEQ ID NO: 2031963 - RNA, 19 nt, Artificial Sequence
  Description of Artificial Sequence: Synthetic oligonucleotide
  Antisense strand to SEQ ID NO: 2031962
uugcaucagcaucuuaagg

SEQ ID NO: 2031964 - RNA, 19 nt, Artificial Sequence
  Description of Artificial Sequence: Synthetic oligonucleotide
  Sense strand starting at position 3754 of SEQ ID NO: 1881276
gcaagcaaauauguuuaua

SEQ ID NO: 2031965 - RNA, 19 nt, Artificial Sequence
  Description of Artificial Sequence: Synthetic oligonucleotide
  Antisense strand to SEQ ID NO: 2031964
uauaaacauauuugcuugc

SEQ ID NO: 2031966 - RNA, 19 nt, Artificial Sequence
  Description of Artificial Sequence: Synthetic oligonucleotide
  Sense strand starting at position 3862 of SEQ ID NO: 1881276
aaauauaucgugggaggau

SEQ ID NO: 2031967 - RNA, 19 nt, Artificial Sequence
  Description of Artificial Sequence: Synthetic oligonucleotide
  Antisense strand to SEQ ID NO: 2031966
auccucccacgauauauuu

SEQ ID NO: 2031968 - RNA, 19 nt, Artificial Sequence
  Description of Artificial Sequence: Synthetic oligonucleotide
  Sense strand starting at position 3896 of SEQ ID NO: 1881276
aguauuagaaaugguaggu

SEQ ID NO: 2031969 - RNA, 19 nt, Artificial Sequence
  Description of Artificial Sequence: Synthetic oligonucleotide
  Antisense strand to SEQ ID NO: 2031968
accuaccauuucuaauacu

SEQ ID NO: 2031970 - RNA, 19 nt, Artificial Sequence
  Description of Artificial Sequence: Synthetic oligonucleotide
  Sense strand starting at position 3934 of SEQ ID NO: 1881276
gaaguugugacuugcauga

SEQ ID NO: 2031971 - RNA, 19 nt, Artificial Sequence
  Description of Artificial Sequence: Synthetic oligonucleotide
  Antisense strand to SEQ ID NO: 2031970
ucaugcaagucacaacuuc

SEQ ID NO: 2031972 - RNA, 19 nt, Artificial Sequence
  Description of Artificial Sequence: Synthetic oligonucleotide
  Sense strand starting at position 3938 of SEQ ID NO: 1881276
uugugacuugcaugagauc

SEQ ID NO: 2031973 - RNA, 19 nt, Artificial Sequence
  Description of Artificial Sequence: Synthetic oligonucleotide
  Antisense strand to SEQ ID NO: 2031972
gaucucaugcaagucacaa

SEQ ID NO: 2031974 - RNA, 19 nt, Artificial Sequence
  Description of Artificial Sequence: Synthetic oligonucleotide
  Sense strand starting at position 3939 of SEQ ID NO: 1881276
ugugacuugcaugagauca

SEQ ID NO: 2031975 - RNA, 19 nt, Artificial Sequence
  Description of Artificial Sequence: Synthetic oligonucleotide
  Antisense strand to SEQ ID NO: 2031974
ugaucucaugcaagucaca

SEQ ID NO: 2031976 - RNA, 19 nt, Artificial Sequence
  Description of Artificial Sequence: Synthetic oligonucleotide
  Sense strand starting at position 60 of SEQ ID NO: 1881277
agcugagcucuauggaaca

SEQ ID NO: 2031977 - RNA, 19 nt, Artificial Sequence
  Description of Artificial Sequence: Synthetic oligonucleotide
  Antisense strand to SEQ ID NO: 2031976
uguuccauagagcucagcu

SEQ ID NO: 2031978 - RNA, 19 nt, Artificial Sequence
  Description of Artificial Sequence: Synthetic oligonucleotide
  Sense strand starting at position 145 of SEQ ID NO: 1881277
uuguuaauagccgaaaggu

SEQ ID NO: 2031979 - RNA, 19 nt, Artificial Sequence
  Description of Artificial Sequence: Synthetic oligonucleotide
  Antisense strand to SEQ ID NO: 2031978
accuuucggcuauuaacaa

SEQ ID NO: 2031980 - RNA, 19 nt, Artificial Sequence
  Description of Artificial Sequence: Synthetic oligonucleotide
  Sense strand starting at position 225 of SEQ ID NO: 1881277
gggcucugagucuaaggaa

SEQ ID NO: 2031981 - RNA, 19 nt, Artificial Sequence
  Description of Artificial Sequence: Synthetic oligonucleotide
  Antisense strand to SEQ ID NO: 2031980
uuccuuagacucagagccc

SEQ ID NO: 2031982 - RNA, 19 nt, Artificial Sequence
  Description of Artificial Sequence: Synthetic oligonucleotide
  Sense strand starting at position 248 of SEQ ID NO: 1881277
acuugauguguccaaguuu

SEQ ID NO: 2031983 - RNA, 19 nt, Artificial Sequence
  Description of Artificial Sequence: Synthetic oligonucleotide
  Antisense strand to SEQ ID NO: 2031982
aaacuuggacacaucaagu

SEQ ID NO: 2031984 - RNA, 19 nt, Artificial Sequence
  Description of Artificial Sequence: Synthetic oligonucleotide
  Sense strand starting at position 328 of SEQ ID NO: 1881277
ugaugacuccuguguggga

SEQ ID NO: 2031985 - RNA, 19 nt, Artificial Sequence
  Description of Artificial Sequence: Synthetic oligonucleotide
  Antisense strand to SEQ ID NO: 2031984
ucccacacaggagucauca

SEQ ID NO: 2031986 - RNA, 19 nt, Artificial Sequence
  Description of Artificial Sequence: Synthetic oligonucleotide
  Sense strand starting at position 343 of SEQ ID NO: 1881277
gggagucucuccucaccca

SEQ ID NO: 2031987 - RNA, 19 nt, Artificial Sequence
  Description of Artificial Sequence: Synthetic oligonucleotide
  Antisense strand to SEQ ID NO: 2031986
ugggugaggagagacuccc

SEQ ID NO: 2031988 - RNA, 19 nt, Artificial Sequence
  Description of Artificial Sequence: Synthetic oligonucleotide
  Sense strand starting at position 1032 of SEQ ID NO: 1881277
ucaagagccucucuaggaa

SEQ ID NO: 2031989 - RNA, 19 nt, Artificial Sequence
  Description of Artificial Sequence: Synthetic oligonucleotide
  Antisense strand to SEQ ID NO: 2031988
uuccuagagaggcucuuga

SEQ ID NO: 2031990 - RNA, 19 nt, Artificial Sequence
  Description of Artificial Sequence: Synthetic oligonucleotide
  Sense strand starting at position 1057 of SEQ ID NO: 1881277
aaaggacuguugucacuuu

SEQ ID NO: 2031991 - RNA, 19 nt, Artificial Sequence
  Description of Artificial Sequence: Synthetic oligonucleotide
  Antisense strand to SEQ ID NO: 2031990
aaagugacaacaguccuuu

SEQ ID NO: 2031992 - RNA, 19 nt, Artificial Sequence
  Description of Artificial Sequence: Synthetic oligonucleotide
  Sense strand starting at position 1263 of SEQ ID NO: 1881277
guuggagcaucuuucugaa

SEQ ID NO: 2031993 - RNA, 19 nt, Artificial Sequence
  Description of Artificial Sequence: Synthetic oligonucleotide
  Antisense strand to SEQ ID NO: 2031992
uucagaaagaugcuccaac

SEQ ID NO: 2031994 - RNA, 19 nt, Artificial Sequence
  Description of Artificial Sequence: Synthetic oligonucleotide
  Sense strand starting at position 1265 of SEQ ID NO: 1881277
uggagcaucuuucugaaga

SEQ ID NO: 2031995 - RNA, 19 nt, Artificial Sequence
  Description of Artificial Sequence: Synthetic oligonucleotide
  Antisense strand to SEQ ID NO: 2031994
ucuucagaaagaugcucca

SEQ ID NO: 2031996 - RNA, 19 nt, Artificial Sequence
  Description of Artificial Sequence: Synthetic oligonucleotide
  Sense strand starting at position 1325 of SEQ ID NO: 1881277
ugaaucagaauacguugaa

SEQ ID NO: 2031997 - RNA, 19 nt, Artificial Sequence
  Description of Artificial Sequence: Synthetic oligonucleotide
  Antisense strand to SEQ ID NO: 2031996
uucaacguauucugauuca

SEQ ID NO: 2031998 - RNA, 19 nt, Artificial Sequence
  Description of Artificial Sequence: Synthetic oligonucleotide
  Sense strand starting at position 1328 of SEQ ID NO: 1881277
aucagaauacguugaagaa

SEQ ID NO: 2031999 - RNA, 19 nt, Artificial Sequence
  Description of Artificial Sequence: Synthetic oligonucleotide
  Antisense strand to SEQ ID NO: 2031998
uucuucaacguauucugau

SEQ ID NO: 2032000 - RNA, 19 nt, Artificial Sequence
  Description of Artificial Sequence: Synthetic oligonucleotide
  Sense strand starting at position 1570 of SEQ ID NO: 1881277
ccugaaagucgcuaucauu

SEQ ID NO: 2032001 - RNA, 19 nt, Artificial Sequence
  Description of Artificial Sequence: Synthetic oligonucleotide
  Antisense strand to SEQ ID NO: 2032000
aaugauagcgacuuucagg

SEQ ID NO: 2032002 - RNA, 19 nt, Artificial Sequence
  Description of Artificial Sequence: Synthetic oligonucleotide
  Sense strand starting at position 1802 of SEQ ID NO: 1881277
uuaugaacuugcuugauua

SEQ ID NO: 2032003 - RNA, 19 nt, Artificial Sequence
  Description of Artificial Sequence: Synthetic oligonucleotide
  Antisense strand to SEQ ID NO: 2032002
uaaucaagcaaguucauaa

SEQ ID NO: 2032004 - RNA, 19 nt, Artificial Sequence
  Description of Artificial Sequence: Synthetic oligonucleotide
  Sense strand starting at position 1806 of SEQ ID NO: 1881277
gaacuugcuugauuauggu

SEQ ID NO: 2032005 - RNA, 19 nt, Artificial Sequence
  Description of Artificial Sequence: Synthetic oligonucleotide
  Antisense strand to SEQ ID NO: 2032004
accauaaucaagcaaguuc

SEQ ID NO: 2032006 - RNA, 19 nt, Artificial Sequence
  Description of Artificial Sequence: Synthetic oligonucleotide
  Sense strand starting at position 1813 of SEQ ID NO: 1881277
cuugauuauggucauauca

SEQ ID NO: 2032007 - RNA, 19 nt, Artificial Sequence
  Description of Artificial Sequence: Synthetic oligonucleotide
  Antisense strand to SEQ ID NO: 2032006
ugauaugaccauaaucaag

SEQ ID NO: 2032008 - RNA, 19 nt, Artificial Sequence
  Description of Artificial Sequence: Synthetic oligonucleotide
  Sense strand starting at position 2135 of SEQ ID NO: 1881277
augaaauauccuggcagga

SEQ ID NO: 2032009 - RNA, 19 nt, Artificial Sequence
  Description of Artificial Sequence: Synthetic oligonucleotide
  Antisense strand to SEQ ID NO: 2032008
uccugccaggauauuucau

SEQ ID NO: 2032010 - RNA, 19 nt, Artificial Sequence
  Description of Artificial Sequence: Synthetic oligonucleotide
  Sense strand starting at position 2249 of SEQ ID NO: 1881277
uccagaccucccugaguaa

SEQ ID NO: 2032011 - RNA, 19 nt, Artificial Sequence
  Description of Artificial Sequence: Synthetic oligonucleotide
  Antisense strand to SEQ ID NO: 2032010
uuacucagggaggucugga

SEQ ID NO: 2032012 - RNA, 19 nt, Artificial Sequence
  Description of Artificial Sequence: Synthetic oligonucleotide
  Sense strand starting at position 2334 of SEQ ID NO: 1881277
ccagaugagcagugaggaa

SEQ ID NO: 2032013 - RNA, 19 nt, Artificial Sequence
  Description of Artificial Sequence: Synthetic oligonucleotide
  Antisense strand to SEQ ID NO: 2032012
uuccucacugcucaucugg

SEQ ID NO: 2032014 - RNA, 19 nt, Artificial Sequence
  Description of Artificial Sequence: Synthetic oligonucleotide
  Sense strand starting at position 2498 of SEQ ID NO: 1881277
agggcuuugugaccacaga

SEQ ID NO: 2032015 - RNA, 19 nt, Artificial Sequence
  Description of Artificial Sequence: Synthetic oligonucleotide
  Antisense strand to SEQ ID NO: 2032014
ucuguggucacaaagcccu

SEQ ID NO: 2032016 - RNA, 19 nt, Artificial Sequence
  Description of Artificial Sequence: Synthetic oligonucleotide
  Sense strand starting at position 2584 of SEQ ID NO: 1881277
acuaauaucugagugccca

SEQ ID NO: 2032017 - RNA, 19 nt, Artificial Sequence
  Description of Artificial Sequence: Synthetic oligonucleotide
  Antisense strand to SEQ ID NO: 2032016
ugggcacucagauauuagu

SEQ ID NO: 2032018 - RNA, 19 nt, Artificial Sequence
  Description of Artificial Sequence: Synthetic oligonucleotide
  Sense strand starting at position 2718 of SEQ ID NO: 1881277
gugucauauccucagguaa

SEQ ID NO: 2032019 - RNA, 19 nt, Artificial Sequence
  Description of Artificial Sequence: Synthetic oligonucleotide
  Antisense strand to SEQ ID NO: 2032018
uuaccugaggauaugacac

SEQ ID NO: 2032020 - RNA, 19 nt, Artificial Sequence
  Description of Artificial Sequence: Synthetic oligonucleotide
  Sense strand starting at position 2731 of SEQ ID NO: 1881277
agguaaugucaccagcuau

SEQ ID NO: 2032021 - RNA, 19 nt, Artificial Sequence
  Description of Artificial Sequence: Synthetic oligonucleotide
  Antisense strand to SEQ ID NO: 2032020
auagcuggugacauuaccu

SEQ ID NO: 2032022 - RNA, 19 nt, Artificial Sequence
  Description of Artificial Sequence: Synthetic oligonucleotide
  Sense strand starting at position 2737 of SEQ ID NO: 1881277
ugucaccagcuaugaagaa

SEQ ID NO: 2032023 - RNA, 19 nt, Artificial Sequence
  Description of Artificial Sequence: Synthetic oligonucleotide
  Antisense strand to SEQ ID NO: 2032022
uucuucauagcuggugaca

SEQ ID NO: 2032024 - RNA, 19 nt, Artificial Sequence
  Description of Artificial Sequence: Synthetic oligonucleotide
  Sense strand starting at position 3016 of SEQ ID NO: 1881277
caguguuggcuaggacaaa

SEQ ID NO: 2032025 - RNA, 19 nt, Artificial Sequence
  Description of Artificial Sequence: Synthetic oligonucleotide
  Antisense strand to SEQ ID NO: 2032024
uuuguccuagccaacacug

SEQ ID NO: 2032026 - RNA, 19 nt, Artificial Sequence
  Description of Artificial Sequence: Synthetic oligonucleotide
  Sense strand starting at position 3055 of SEQ ID NO: 1881277
aguguuaugggccaacacu

SEQ ID NO: 2032027 - RNA, 19 nt, Artificial Sequence
  Description of Artificial Sequence: Synthetic oligonucleotide
  Antisense strand to SEQ ID NO: 2032026
aguguuggcccauaacacu

SEQ ID NO: 2032028 - RNA, 19 nt, Artificial Sequence
  Description of Artificial Sequence: Synthetic oligonucleotide
  Sense strand starting at position 3071 of SEQ ID NO: 1881277
acuggacauuuaugaagga

SEQ ID NO: 2032029 - RNA, 19 nt, Artificial Sequence
  Description of Artificial Sequence: Synthetic oligonucleotide
  Antisense strand to SEQ ID NO: 2032028
uccuucauaaauguccagu

SEQ ID NO: 2032030 - RNA, 19 nt, Artificial Sequence
  Description of Artificial Sequence: Synthetic oligonucleotide
  Sense strand starting at position 3072 of SEQ ID NO: 1881277
cuggacauuuaugaaggau

SEQ ID NO: 2032031 - RNA, 19 nt, Artificial Sequence
  Description of Artificial Sequence: Synthetic oligonucleotide
  Antisense strand to SEQ ID NO: 2032030
auccuucauaaauguccag

SEQ ID NO: 2032032 - RNA, 19 nt, Artificial Sequence
  Description of Artificial Sequence: Synthetic oligonucleotide
  Sense strand starting at position 3089 of SEQ ID NO: 1881277
aucacucauguccauguga

SEQ ID NO: 2032033 - RNA, 19 nt, Artificial Sequence
  Description of Artificial Sequence: Synthetic oligonucleotide
  Antisense strand to SEQ ID NO: 2032032
ucacauggacaugagugau

SEQ ID NO: 2032034 - RNA, 19 nt, Artificial Sequence
  Description of Artificial Sequence: Synthetic oligonucleotide
  Sense strand starting at position 3091 of SEQ ID NO: 1881277
cacucauguccaugugaug

SEQ ID NO: 2032035 - RNA, 19 nt, Artificial Sequence
  Description of Artificial Sequence: Synthetic oligonucleotide
  Antisense strand to SEQ ID NO: 2032034
caucacauggacaugagug

SEQ ID NO: 2032036 - RNA, 19 nt, Artificial Sequence
  Description of Artificial Sequence: Synthetic oligonucleotide
  Sense strand starting at position 3097 of SEQ ID NO: 1881277
uguccaugugaugaccaga

SEQ ID NO: 2032037 - RNA, 19 nt, Artificial Sequence
  Description of Artificial Sequence: Synthetic oligonucleotide
  Antisense strand to SEQ ID NO: 2032036
ucuggucaucacauggaca

SEQ ID NO: 2032038 - RNA, 19 nt, Artificial Sequence
  Description of Artificial Sequence: Synthetic oligonucleotide
  Sense strand starting at position 3202 of SEQ ID NO: 1881277
ggcuguagagcugauauga

SEQ ID NO: 2032039 - RNA, 19 nt, Artificial Sequence
  Description of Artificial Sequence: Synthetic oligonucleotide
  Antisense strand to SEQ ID NO: 2032038
ucauaucagcucuacagcc

SEQ ID NO: 2032040 - RNA, 19 nt, Artificial Sequence
  Description of Artificial Sequence: Synthetic oligonucleotide
  Sense strand starting at position 3254 of SEQ ID NO: 1881277
aguuaaagaugacucaguu

SEQ ID NO: 2032041 - RNA, 19 nt, Artificial Sequence
  Description of Artificial Sequence: Synthetic oligonucleotide
  Antisense strand to SEQ ID NO: 2032040
aacugagucaucuuuaacu

SEQ ID NO: 2032042 - RNA, 19 nt, Artificial Sequence
  Description of Artificial Sequence: Synthetic oligonucleotide
  Sense strand starting at position 3308 of SEQ ID NO: 1881277
gggcacgaucaagaguuua

SEQ ID NO: 2032043 - RNA, 19 nt, Artificial Sequence
  Description of Artificial Sequence: Synthetic oligonucleotide
  Antisense strand to SEQ ID NO: 2032042
uaaacucuugaucgugccc

SEQ ID NO: 2032044 - RNA, 19 nt, Artificial Sequence
  Description of Artificial Sequence: Synthetic oligonucleotide
  Sense strand starting at position 3313 of SEQ ID NO: 1881277
cgaucaagaguuuagugca

SEQ ID NO: 2032045 - RNA, 19 nt, Artificial Sequence
  Description of Artificial Sequence: Synthetic oligonucleotide
  Antisense strand to SEQ ID NO: 2032044
ugcacuaaacucuugaucg

SEQ ID NO: 2032046 - RNA, 19 nt, Artificial Sequence
  Description of Artificial Sequence: Synthetic oligonucleotide
  Sense strand starting at position 3318 of SEQ ID NO: 1881277
aagaguuuagugcauguga

SEQ ID NO: 2032047 - RNA, 19 nt, Artificial Sequence
  Description of Artificial Sequence: Synthetic oligonucleotide
  Antisense strand to SEQ ID NO: 2032046
ucacaugcacuaaacucuu

SEQ ID NO: 2032048 - RNA, 19 nt, Artificial Sequence
  Description of Artificial Sequence: Synthetic oligonucleotide
  Sense strand starting at position 3329 of SEQ ID NO: 1881277
gcaugugaaguuuaagauu

SEQ ID NO: 2032049 - RNA, 19 nt, Artificial Sequence
  Description of Artificial Sequence: Synthetic oligonucleotide
  Antisense strand to SEQ ID NO: 2032048
aaucuuaaacuucacaugc

SEQ ID NO: 2032050 - RNA, 19 nt, Artificial Sequence
  Description of Artificial Sequence: Synthetic oligonucleotide
  Sense strand starting at position 3335 of SEQ ID NO: 1881277
gaaguuuaagauugcuauu

SEQ ID NO: 2032051 - RNA, 19 nt, Artificial Sequence
  Description of Artificial Sequence: Synthetic oligonucleotide
  Antisense strand to SEQ ID NO: 2032050
aauagcaaucuuaaacuuc

SEQ ID NO: 2032052 - RNA, 19 nt, Artificial Sequence
  Description of Artificial Sequence: Synthetic oligonucleotide
  Sense strand starting at position 3577 of SEQ ID NO: 1881277
gaaguacuccagugagaug

SEQ ID NO: 2032053 - RNA, 19 nt, Artificial Sequence
  Description of Artificial Sequence: Synthetic oligonucleotide
  Antisense strand to SEQ ID NO: 2032052
caucucacuggaguacuuc

SEQ ID NO: 2032054 - RNA, 19 nt, Artificial Sequence
  Description of Artificial Sequence: Synthetic oligonucleotide
  Sense strand starting at position 3717 of SEQ ID NO: 1881277
cuuugagaagcaggugaau

SEQ ID NO: 2032055 - RNA, 19 nt, Artificial Sequence
  Description of Artificial Sequence: Synthetic oligonucleotide
  Antisense strand to SEQ ID NO: 2032054
auucaccugcuucucaaag

SEQ ID NO: 2032056 - RNA, 19 nt, Artificial Sequence
  Description of Artificial Sequence: Synthetic oligonucleotide
  Sense strand starting at position 255 of SEQ ID NO: 1881278
agugaaaucacaggcuuug

SEQ ID NO: 2032057 - RNA, 19 nt, Artificial Sequence
  Description of Artificial Sequence: Synthetic oligonucleotide
  Antisense strand to SEQ ID NO: 2032056
caaagccugugauuucacu

SEQ ID NO: 2032058 - RNA, 19 nt, Artificial Sequence
  Description of Artificial Sequence: Synthetic oligonucleotide
  Sense strand starting at position 278 of SEQ ID NO: 1881278
aguaaauaaacgugucaga

SEQ ID NO: 2032059 - RNA, 19 nt, Artificial Sequence
  Description of Artificial Sequence: Synthetic oligonucleotide
  Antisense strand to SEQ ID NO: 2032058
ucugacacguuuauuuacu

SEQ ID NO: 2032060 - RNA, 19 nt, Artificial Sequence
  Description of Artificial Sequence: Synthetic oligonucleotide
  Sense strand starting at position 307 of SEQ ID NO: 1881278
uuuauuaucugugcuuaug

SEQ ID NO: 2032061 - RNA, 19 nt, Artificial Sequence
  Description of Artificial Sequence: Synthetic oligonucleotide
  Antisense strand to SEQ ID NO: 2032060
cauaagcacagauaauaaa

SEQ ID NO: 2032062 - RNA, 19 nt, Artificial Sequence
  Description of Artificial Sequence: Synthetic oligonucleotide
  Sense strand starting at position 310 of SEQ ID NO: 1881278
auuaucugugcuuaugaaa

SEQ ID NO: 2032063 - RNA, 19 nt, Artificial Sequence
  Description of Artificial Sequence: Synthetic oligonucleotide
  Antisense strand to SEQ ID NO: 2032062
uuucauaagcacagauaau

SEQ ID NO: 2032064 - RNA, 19 nt, Artificial Sequence
  Description of Artificial Sequence: Synthetic oligonucleotide
  Sense strand starting at position 377 of SEQ ID NO: 1881278
acaaacauugugugcauaa

SEQ ID NO: 2032065 - RNA, 19 nt, Artificial Sequence
  Description of Artificial Sequence: Synthetic oligonucleotide
  Antisense strand to SEQ ID NO: 2032064
uuaugcacacaauguuugu

SEQ ID NO: 2032066 - RNA, 19 nt, Artificial Sequence
  Description of Artificial Sequence: Synthetic oligonucleotide
  Sense strand starting at position 388 of SEQ ID NO: 1881278
gugcauaaauaggugaaga

SEQ ID NO: 2032067 - RNA, 19 nt, Artificial Sequence
  Description of Artificial Sequence: Synthetic oligonucleotide
  Antisense strand to SEQ ID NO: 2032066
ucuucaccuauuuaugcac

SEQ ID NO: 2032068 - RNA, 19 nt, Artificial Sequence
  Description of Artificial Sequence: Synthetic oligonucleotide
  Sense strand starting at position 389 of SEQ ID NO: 1881278
ugcauaaauaggugaagaa

SEQ ID NO: 2032069 - RNA, 19 nt, Artificial Sequence
  Description of Artificial Sequence: Synthetic oligonucleotide
  Antisense strand to SEQ ID NO: 2032068
uucuucaccuauuuaugca

SEQ ID NO: 2032070 - RNA, 19 nt, Artificial Sequence
  Description of Artificial Sequence: Synthetic oligonucleotide
  Sense strand starting at position 399 of SEQ ID NO: 1881278
ggugaagaauuugaguuca

SEQ ID NO: 2032071 - RNA, 19 nt, Artificial Sequence
  Description of Artificial Sequence: Synthetic oligonucleotide
  Antisense strand to SEQ ID NO: 2032070
ugaacucaaauucuucacc

SEQ ID NO: 2032072 - RNA, 19 nt, Artificial Sequence
  Description of Artificial Sequence: Synthetic oligonucleotide
  Sense strand starting at position 493 of SEQ ID NO: 1881278
uguguacuuuaccugucaa

SEQ ID NO: 2032073 - RNA, 19 nt, Artificial Sequence
  Description of Artificial Sequence: Synthetic oligonucleotide
  Antisense strand to SEQ ID NO: 2032072
uugacagguaaaguacaca

SEQ ID NO: 2032074 - RNA, 19 nt, Artificial Sequence
  Description of Artificial Sequence: Synthetic oligonucleotide
  Sense strand starting at position 494 of SEQ ID NO: 1881278
guguacuuuaccugucaag

SEQ ID NO: 2032075 - RNA, 19 nt, Artificial Sequence
  Description of Artificial Sequence: Synthetic oligonucleotide
  Antisense strand to SEQ ID NO: 2032074
cuugacagguaaaguacac

SEQ ID NO: 2032076 - RNA, 19 nt, Artificial Sequence
  Description of Artificial Sequence: Synthetic oligonucleotide
  Sense strand starting at position 819 of SEQ ID NO: 1881278
acaguaaaucaguaaccgu

SEQ ID NO: 2032077 - RNA, 19 nt, Artificial Sequence
  Description of Artificial Sequence: Synthetic oligonucleotide
  Antisense strand to SEQ ID NO: 2032076
acgguuacugauuuacugu

SEQ ID NO: 2032078 - RNA, 19 nt, Artificial Sequence
  Description of Artificial Sequence: Synthetic oligonucleotide
  Sense strand starting at position 836 of SEQ ID NO: 1881278
guaaguucucaucaacguu

SEQ ID NO: 2032079 - RNA, 19 nt, Artificial Sequence
  Description of Artificial Sequence: Synthetic oligonucleotide
  Antisense strand to SEQ ID NO: 2032078
aacguugaugagaacuuac

SEQ ID NO: 2032080 - RNA, 19 nt, Artificial Sequence
  Description of Artificial Sequence: Synthetic oligonucleotide
  Sense strand starting at position 921 of SEQ ID NO: 1881278
auacaugguuaagaaugaa

SEQ ID NO: 2032081 - RNA, 19 nt, Artificial Sequence
  Description of Artificial Sequence: Synthetic oligonucleotide
  Antisense strand to SEQ ID NO: 2032080
uucauucuuaaccauguau

SEQ ID NO: 2032082 - RNA, 19 nt, Artificial Sequence
  Description of Artificial Sequence: Synthetic oligonucleotide
  Sense strand starting at position 939 of SEQ ID NO: 1881278
agggaugagugccuuucua

SEQ ID NO: 2032083 - RNA, 19 nt, Artificial Sequence
  Description of Artificial Sequence: Synthetic oligonucleotide
  Antisense strand to SEQ ID NO: 2032082
uagaaaggcacucaucccu

SEQ ID NO: 2032084 - RNA, 19 nt, Artificial Sequence
  Description of Artificial Sequence: Synthetic oligonucleotide
  Sense strand starting at position 943 of SEQ ID NO: 1881278
augagugccuuucuaucuu

SEQ ID NO: 2032085 - RNA, 19 nt, Artificial Sequence
  Description of Artificial Sequence: Synthetic oligonucleotide
  Antisense strand to SEQ ID NO: 2032084
aagauagaaaggcacucau

SEQ ID NO: 2032086 - RNA, 19 nt, Artificial Sequence
  Description of Artificial Sequence: Synthetic oligonucleotide
  Sense strand starting at position 949 of SEQ ID NO: 1881278
gccuuucuaucuuugguua

SEQ ID NO: 2032087 - RNA, 19 nt, Artificial Sequence
  Description of Artificial Sequence: Synthetic oligonucleotide
  Antisense strand to SEQ ID NO: 2032086
uaaccaaagauagaaaggc

SEQ ID NO: 2032088 - RNA, 19 nt, Artificial Sequence
  Description of Artificial Sequence: Synthetic oligonucleotide
  Sense strand starting at position 960 of SEQ ID NO: 1881278
uuugguuaccuugaucaac

SEQ ID NO: 2032089 - RNA, 19 nt, Artificial Sequence
  Description of Artificial Sequence: Synthetic oligonucleotide
  Antisense strand to SEQ ID NO: 2032088
guugaucaagguaaccaaa

SEQ ID NO: 2032090 - RNA, 19 nt, Artificial Sequence
  Description of Artificial Sequence: Synthetic oligonucleotide
  Sense strand starting at position 962 of SEQ ID NO: 1881278
ugguuaccuugaucaacua

SEQ ID NO: 2032091 - RNA, 19 nt, Artificial Sequence
  Description of Artificial Sequence: Synthetic oligonucleotide
  Antisense strand to SEQ ID NO: 2032090
uaguugaucaagguaacca

SEQ ID NO: 2032092 - RNA, 19 nt, Artificial Sequence
  Description of Artificial Sequence: Synthetic oligonucleotide
  Sense strand starting at position 1145 of SEQ ID NO: 1881278
augaucucuugggacagau

SEQ ID NO: 2032093 - RNA, 19 nt, Artificial Sequence
  Description of Artificial Sequence: Synthetic oligonucleotide
  Antisense strand to SEQ ID NO: 2032092
aucugucccaagagaucau

SEQ ID NO: 2032094 - RNA, 19 nt, Artificial Sequence
  Description of Artificial Sequence: Synthetic oligonucleotide
  Sense strand starting at position 1167 of SEQ ID NO: 1881278
ggcagaacaguacgaguuu

SEQ ID NO: 2032095 - RNA, 19 nt, Artificial Sequence
  Description of Artificial Sequence: Synthetic oligonucleotide
  Antisense strand to SEQ ID NO: 2032094
aaacucguacuguucugcc

SEQ ID NO: 2032096 - RNA, 19 nt, Artificial Sequence
  Description of Artificial Sequence: Synthetic oligonucleotide
  Sense strand starting at position 1303 of SEQ ID NO: 1881278
guucuaucacucgcgcuaa

SEQ ID NO: 2032097 - RNA, 19 nt, Artificial Sequence
  Description of Artificial Sequence: Synthetic oligonucleotide
  Antisense strand to SEQ ID NO: 2032096
uuagcgcgagugauagaac

SEQ ID NO: 2032098 - RNA, 19 nt, Artificial Sequence
  Description of Artificial Sequence: Synthetic oligonucleotide
  Sense strand starting at position 1360 of SEQ ID NO: 1881278
gcggcauccgagagugaca

SEQ ID NO: 2032099 - RNA, 19 nt, Artificial Sequence
  Description of Artificial Sequence: Synthetic oligonucleotide
  Antisense strand to SEQ ID NO: 2032098
ugucacucucggaugccgc

SEQ ID NO: 2032100 - RNA, 19 nt, Artificial Sequence
  Description of Artificial Sequence: Synthetic oligonucleotide
  Sense strand starting at position 2239 of SEQ ID NO: 1881278
gacagaagucugggaugca

SEQ ID NO: 2032101 - RNA, 19 nt, Artificial Sequence
  Description of Artificial Sequence: Synthetic oligonucleotide
  Antisense strand to SEQ ID NO: 2032100
ugcaucccagacuucuguc

SEQ ID NO: 2032102 - RNA, 19 nt, Artificial Sequence
  Description of Artificial Sequence: Synthetic oligonucleotide
  Sense strand starting at position 2283 of SEQ ID NO: 1881278
gggcaugcgcaacauuaga

SEQ ID NO: 2032103 - RNA, 19 nt, Artificial Sequence
  Description of Artificial Sequence: Synthetic oligonucleotide
  Antisense strand to SEQ ID NO: 2032102
ucuaauguugcgcaugccc

SEQ ID NO: 2032104 - RNA, 19 nt, Artificial Sequence
  Description of Artificial Sequence: Synthetic oligonucleotide
  Sense strand starting at position 2299 of SEQ ID NO: 1881278
agaggaaggugggcuuuau

SEQ ID NO: 2032105 - RNA, 19 nt, Artificial Sequence
  Description of Artificial Sequence: Synthetic oligonucleotide
  Antisense strand to SEQ ID NO: 2032104
auaaagcccaccuuccucu

SEQ ID NO: 2032106 - RNA, 19 nt, Artificial Sequence
  Description of Artificial Sequence: Synthetic oligonucleotide
  Sense strand starting at position 2336 of SEQ ID NO: 1881278
gcgucuggaccagaagauu

SEQ ID NO: 2032107 - RNA, 19 nt, Artificial Sequence
  Description of Artificial Sequence: Synthetic oligonucleotide
  Antisense strand to SEQ ID NO: 2032106
aaucuucugguccagacgc

SEQ ID NO: 2032108 - RNA, 19 nt, Artificial Sequence
  Description of Artificial Sequence: Synthetic oligonucleotide
  Sense strand starting at position 2485 of SEQ ID NO: 1881278
guguuagcuggugagucaa

SEQ ID NO: 2032109 - RNA, 19 nt, Artificial Sequence
  Description of Artificial Sequence: Synthetic oligonucleotide
  Antisense strand to SEQ ID NO: 2032108
uugacucaccagcuaacac

SEQ ID NO: 2032110 - RNA, 19 nt, Artificial Sequence
  Description of Artificial Sequence: Synthetic oligonucleotide
  Sense strand starting at position 2487 of SEQ ID NO: 1881278
guuagcuggugagucaaau

SEQ ID NO: 2032111 - RNA, 19 nt, Artificial Sequence
  Description of Artificial Sequence: Synthetic oligonucleotide
  Antisense strand to SEQ ID NO: 2032110
auuugacucaccagcuaac

SEQ ID NO: 2032112 - RNA, 19 nt, Artificial Sequence
  Description of Artificial Sequence: Synthetic oligonucleotide
  Sense strand starting at position 2645 of SEQ ID NO: 1881278
agcuaaggcuucccucaga

SEQ ID NO: 2032113 - RNA, 19 nt, Artificial Sequence
  Description of Artificial Sequence: Synthetic oligonucleotide
  Antisense strand to SEQ ID NO: 2032112
ucugagggaagccuuagcu

SEQ ID NO: 2032114 - RNA, 19 nt, Artificial Sequence
  Description of Artificial Sequence: Synthetic oligonucleotide
  Sense strand starting at position 2698 of SEQ ID NO: 1881278
gcgugaucucacgcuuucu

SEQ ID NO: 2032115 - RNA, 19 nt, Artificial Sequence
  Description of Artificial Sequence: Synthetic oligonucleotide
  Antisense strand to SEQ ID NO: 2032114
agaaagcgugagaucacgc

SEQ ID NO: 2032116 - RNA, 19 nt, Artificial Sequence
  Description of Artificial Sequence: Synthetic oligonucleotide
  Sense strand starting at position 2699 of SEQ ID NO: 1881278
cgugaucucacgcuuucuu

SEQ ID NO: 2032117 - RNA, 19 nt, Artificial Sequence
  Description of Artificial Sequence: Synthetic oligonucleotide
  Antisense strand to SEQ ID NO: 2032116
aagaaagcgugagaucacg

SEQ ID NO: 2032118 - RNA, 19 nt, Artificial Sequence
  Description of Artificial Sequence: Synthetic oligonucleotide
  Sense strand starting at position 2761 of SEQ ID NO: 1881278
guguguuuccgcccgguuu

SEQ ID NO: 2032119 - RNA, 19 nt, Artificial Sequence
  Description of Artificial Sequence: Synthetic oligonucleotide
  Antisense strand to SEQ ID NO: 2032118
aaaccgggcggaaacacac

SEQ ID NO: 2032120 - RNA, 19 nt, Artificial Sequence
  Description of Artificial Sequence: Synthetic oligonucleotide
  Sense strand starting at position 2862 of SEQ ID NO: 1881278
guccuugauauguaagugu

SEQ ID NO: 2032121 - RNA, 19 nt, Artificial Sequence
  Description of Artificial Sequence: Synthetic oligonucleotide
  Antisense strand to SEQ ID NO: 2032120
acacuuacauaucaaggac

SEQ ID NO: 2032122 - RNA, 19 nt, Artificial Sequence
  Description of Artificial Sequence: Synthetic oligonucleotide
  Sense strand starting at position 2865 of SEQ ID NO: 1881278
cuugauauguaagugucaa

SEQ ID NO: 2032123 - RNA, 19 nt, Artificial Sequence
  Description of Artificial Sequence: Synthetic oligonucleotide
  Antisense strand to SEQ ID NO: 2032122
uugacacuuacauaucaag

SEQ ID NO: 2032124 - RNA, 19 nt, Artificial Sequence
  Description of Artificial Sequence: Synthetic oligonucleotide
  Sense strand starting at position 2905 of SEQ ID NO: 1881278
uuaucaaauugagaggaau

SEQ ID NO: 2032125 - RNA, 19 nt, Artificial Sequence
  Description of Artificial Sequence: Synthetic oligonucleotide
  Antisense strand to SEQ ID NO: 2032124
auuccucucaauuugauaa

SEQ ID NO: 2032126 - RNA, 19 nt, Artificial Sequence
  Description of Artificial Sequence: Synthetic oligonucleotide
  Sense strand starting at position 3183 of SEQ ID NO: 1881278
uucguuauucagccgcgaa

SEQ ID NO: 2032127 - RNA, 19 nt, Artificial Sequence
  Description of Artificial Sequence: Synthetic oligonucleotide
  Antisense strand to SEQ ID NO: 2032126
uucgcggcugaauaacgaa

SEQ ID NO: 2032128 - RNA, 19 nt, Artificial Sequence
  Description of Artificial Sequence: Synthetic oligonucleotide
  Sense strand starting at position 3316 of SEQ ID NO: 1881278
ucuacagauguaugcagaa

SEQ ID NO: 2032129 - RNA, 19 nt, Artificial Sequence
  Description of Artificial Sequence: Synthetic oligonucleotide
  Antisense strand to SEQ ID NO: 2032128
uucugcauacaucuguaga

SEQ ID NO: 2032130 - RNA, 19 nt, Artificial Sequence
  Description of Artificial Sequence: Synthetic oligonucleotide
  Sense strand starting at position 3339 of SEQ ID NO: 1881278
acaccaagaugcguuuauu

SEQ ID NO: 2032131 - RNA, 19 nt, Artificial Sequence
  Description of Artificial Sequence: Synthetic oligonucleotide
  Antisense strand to SEQ ID NO: 2032130
aauaaacgcaucuuggugu

SEQ ID NO: 2032132 - RNA, 19 nt, Artificial Sequence
  Description of Artificial Sequence: Synthetic oligonucleotide
  Sense strand starting at position 3342 of SEQ ID NO: 1881278
ccaagaugcguuuauugac

SEQ ID NO: 2032133 - RNA, 19 nt, Artificial Sequence
  Description of Artificial Sequence: Synthetic oligonucleotide
  Antisense strand to SEQ ID NO: 2032132
gucaauaaacgcaucuugg

SEQ ID NO: 2032134 - RNA, 19 nt, Artificial Sequence
  Description of Artificial Sequence: Synthetic oligonucleotide
  Sense strand starting at position 3350 of SEQ ID NO: 1881278
cguuuauugacaugcaaug

SEQ ID NO: 2032135 - RNA, 19 nt, Artificial Sequence
  Description of Artificial Sequence: Synthetic oligonucleotide
  Antisense strand to SEQ ID NO: 2032134
cauugcaugucaauaaacg

SEQ ID NO: 2032136 - RNA, 19 nt, Artificial Sequence
  Description of Artificial Sequence: Synthetic oligonucleotide
  Sense strand starting at position 62 of SEQ ID NO: 1881279
ggagguagugguggguaau

SEQ ID NO: 2032137 - RNA, 19 nt, Artificial Sequence
  Description of Artificial Sequence: Synthetic oligonucleotide
  Antisense strand to SEQ ID NO: 2032136
auuacccaccacuaccucc

SEQ ID NO: 2032138 - RNA, 19 nt, Artificial Sequence
  Description of Artificial Sequence: Synthetic oligonucleotide
  Sense strand starting at position 63 of SEQ ID NO: 1881279
gagguagugguggguaauu

SEQ ID NO: 2032139 - RNA, 19 nt, Artificial Sequence
  Description of Artificial Sequence: Synthetic oligonucleotide
  Antisense strand to SEQ ID NO: 2032138
aauuacccaccacuaccuc

SEQ ID NO: 2032140 - RNA, 19 nt, Artificial Sequence
  Description of Artificial Sequence: Synthetic oligonucleotide
  Sense strand starting at position 254 of SEQ ID NO: 1881279
cccagaugccuugaaccau

SEQ ID NO: 2032141 - RNA, 19 nt, Artificial Sequence
  Description of Artificial Sequence: Synthetic oligonucleotide
  Antisense strand to SEQ ID NO: 2032140
augguucaaggcaucuggg

SEQ ID NO: 2032142 - RNA, 19 nt, Artificial Sequence
  Description of Artificial Sequence: Synthetic oligonucleotide
  Sense strand starting at position 331 of SEQ ID NO: 1881279
acuccaaguuccuugggaa

SEQ ID NO: 2032143 - RNA, 19 nt, Artificial Sequence
  Description of Artificial Sequence: Synthetic oligonucleotide
  Antisense strand to SEQ ID NO: 2032142
uucccaaggaacuuggagu

SEQ ID NO: 2032144 - RNA, 19 nt, Artificial Sequence
  Description of Artificial Sequence: Synthetic oligonucleotide
  Sense strand starting at position 332 of SEQ ID NO: 1881279
cuccaaguuccuugggaag

SEQ ID NO: 2032145 - RNA, 19 nt, Artificial Sequence
  Description of Artificial Sequence: Synthetic oligonucleotide
  Antisense strand to SEQ ID NO: 2032144
cuucccaaggaacuuggag

SEQ ID NO: 2032146 - RNA, 19 nt, Artificial Sequence
  Description of Artificial Sequence: Synthetic oligonucleotide
  Sense strand starting at position 402 of SEQ ID NO: 1881279
caaagaugcuggucaguca

SEQ ID NO: 2032147 - RNA, 19 nt, Artificial Sequence
  Description of Artificial Sequence: Synthetic oligonucleotide
  Antisense strand to SEQ ID NO: 2032146
ugacugaccagcaucuuug

SEQ ID NO: 2032148 - RNA, 19 nt, Artificial Sequence
  Description of Artificial Sequence: Synthetic oligonucleotide
  Sense strand starting at position 403 of SEQ ID NO: 1881279
aaagaugcuggucagucau

SEQ ID NO: 2032149 - RNA, 19 nt, Artificial Sequence
  Description of Artificial Sequence: Synthetic oligonucleotide
  Antisense strand to SEQ ID NO: 2032148
augacugaccagcaucuuu

SEQ ID NO: 2032150 - RNA, 19 nt, Artificial Sequence
  Description of Artificial Sequence: Synthetic oligonucleotide
  Sense strand starting at position 409 of SEQ ID NO: 1881279
gcuggucagucaucacaaa

SEQ ID NO: 2032151 - RNA, 19 nt, Artificial Sequence
  Description of Artificial Sequence: Synthetic oligonucleotide
  Antisense strand to SEQ ID NO: 2032150
uuugugaugacugaccagc

SEQ ID NO: 2032152 - RNA, 19 nt, Artificial Sequence
  Description of Artificial Sequence: Synthetic oligonucleotide
  Sense strand starting at position 474 of SEQ ID NO: 1881279
ggcugaguugaagggacaa

SEQ ID NO: 2032153 - RNA, 19 nt, Artificial Sequence
  Description of Artificial Sequence: Synthetic oligonucleotide
  Antisense strand to SEQ ID NO: 2032152
uugucccuucaacucagcc

SEQ ID NO: 2032154 - RNA, 19 nt, Artificial Sequence
  Description of Artificial Sequence: Synthetic oligonucleotide
  Sense strand starting at position 800 of SEQ ID NO: 1881279
agcguacucgcuucucuua

SEQ ID NO: 2032155 - RNA, 19 nt, Artificial Sequence
  Description of Artificial Sequence: Synthetic oligonucleotide
  Antisense strand to SEQ ID NO: 2032154
uaagagaagcgaguacgcu

SEQ ID NO: 2032156 - RNA, 19 nt, Artificial Sequence
  Description of Artificial Sequence: Synthetic oligonucleotide
  Sense strand starting at position 835 of SEQ ID NO: 1881279
aaaccagugugugcauuua

SEQ ID NO: 2032157 - RNA, 19 nt, Artificial Sequence
  Description of Artificial Sequence: Synthetic oligonucleotide
  Antisense strand to SEQ ID NO: 2032156
uaaaugcacacacugguuu

SEQ ID NO: 2032158 - RNA, 19 nt, Artificial Sequence
  Description of Artificial Sequence: Synthetic oligonucleotide
  Sense strand starting at position 862 of SEQ ID NO: 1881279
gggauacguacuuauccuu

SEQ ID NO: 2032159 - RNA, 19 nt, Artificial Sequence
  Description of Artificial Sequence: Synthetic oligonucleotide
  Antisense strand to SEQ ID NO: 2032158
aaggauaaguacguauccc

SEQ ID NO: 2032160 - RNA, 19 nt, Artificial Sequence
  Description of Artificial Sequence: Synthetic oligonucleotide
  Sense strand starting at position 947 of SEQ ID NO: 1881279
cugccaagacgucaguaaa

SEQ ID NO: 2032161 - RNA, 19 nt, Artificial Sequence
  Description of Artificial Sequence: Synthetic oligonucleotide
  Antisense strand to SEQ ID NO: 2032160
uuuacugacgucuuggcag

SEQ ID NO: 2032162 - RNA, 19 nt, Artificial Sequence
  Description of Artificial Sequence: Synthetic oligonucleotide
  Sense strand starting at position 950 of SEQ ID NO: 1881279
ccaagacgucaguaaauua

SEQ ID NO: 2032163 - RNA, 19 nt, Artificial Sequence
  Description of Artificial Sequence: Synthetic oligonucleotide
  Antisense strand to SEQ ID NO: 2032162
uaauuuacugacgucuugg

SEQ ID NO: 2032164 - RNA, 19 nt, Artificial Sequence
  Description of Artificial Sequence: Synthetic oligonucleotide
  Sense strand starting at position 1074 of SEQ ID NO: 1881279
ccuccaaaucuauguagag

SEQ ID NO: 2032165 - RNA, 19 nt, Artificial Sequence
  Description of Artificial Sequence: Synthetic oligonucleotide
  Antisense strand to SEQ ID NO: 2032164
cucuacauagauuuggagg

SEQ ID NO: 2032166 - RNA, 19 nt, Artificial Sequence
  Description of Artificial Sequence: Synthetic oligonucleotide
  Sense strand starting at position 1277 of SEQ ID NO: 1881279
uugagagagucccugauua

SEQ ID NO: 2032167 - RNA, 19 nt, Artificial Sequence
  Description of Artificial Sequence: Synthetic oligonucleotide
  Antisense strand to SEQ ID NO: 2032166
uaaucagggacucucucaa

SEQ ID NO: 2032168 - RNA, 19 nt, Artificial Sequence
  Description of Artificial Sequence: Synthetic oligonucleotide
  Sense strand starting at position 1309 of SEQ ID NO: 1881279
gaauuaagaguuugaguca

SEQ ID NO: 2032169 - RNA, 19 nt, Artificial Sequence
  Description of Artificial Sequence: Synthetic oligonucleotide
  Antisense strand to SEQ ID NO: 2032168
ugacucaaacucuuaauuc

SEQ ID NO: 2032170 - RNA, 19 nt, Artificial Sequence
  Description of Artificial Sequence: Synthetic oligonucleotide
  Sense strand starting at position 1312 of SEQ ID NO: 1881279
uuaagaguuugagucaggu

SEQ ID NO: 2032171 - RNA, 19 nt, Artificial Sequence
  Description of Artificial Sequence: Synthetic oligonucleotide
  Antisense strand to SEQ ID NO: 2032170
accugacucaaacucuuaa

SEQ ID NO: 2032172 - RNA, 19 nt, Artificial Sequence
  Description of Artificial Sequence: Synthetic oligonucleotide
  Sense strand starting at position 1525 of SEQ ID NO: 1881279
gaugaucccugagcaaguu

SEQ ID NO: 2032173 - RNA, 19 nt, Artificial Sequence
  Description of Artificial Sequence: Synthetic oligonucleotide
  Antisense strand to SEQ ID NO: 2032172
aacuugcucagggaucauc

SEQ ID NO: 2032174 - RNA, 19 nt, Artificial Sequence
  Description of Artificial Sequence: Synthetic oligonucleotide
  Sense strand starting at position 2478 of SEQ ID NO: 1881279
aguaaugggucaccagaau

SEQ ID NO: 2032175 - RNA, 19 nt, Artificial Sequence
  Description of Artificial Sequence: Synthetic oligonucleotide
  Antisense strand to SEQ ID NO: 2032174
auucuggugacccauuacu

SEQ ID NO: 2032176 - RNA, 19 nt, Artificial Sequence
  Description of Artificial Sequence: Synthetic oligonucleotide
  Sense strand starting at position 2560 of SEQ ID NO: 1881279
cacagucccuggguaauua

SEQ ID NO: 2032177 - RNA, 19 nt, Artificial Sequence
  Description of Artificial Sequence: Synthetic oligonucleotide
  Antisense strand to SEQ ID NO: 2032176
uaauuacccagggacugug

SEQ ID NO: 2032178 - RNA, 19 nt, Artificial Sequence
  Description of Artificial Sequence: Synthetic oligonucleotide
  Sense strand starting at position 2561 of SEQ ID NO: 1881279
acagucccuggguaauuaa

SEQ ID NO: 2032179 - RNA, 19 nt, Artificial Sequence
  Description of Artificial Sequence: Synthetic oligonucleotide
  Antisense strand to SEQ ID NO: 2032178
uuaauuacccagggacugu

SEQ ID NO: 2032180 - RNA, 19 nt, Artificial Sequence
  Description of Artificial Sequence: Synthetic oligonucleotide
  Sense strand starting at position 2595 of SEQ ID NO: 1881279
cccuaucuggauugcuuua

SEQ ID NO: 2032181 - RNA, 19 nt, Artificial Sequence
  Description of Artificial Sequence: Synthetic oligonucleotide
  Antisense strand to SEQ ID NO: 2032180
uaaagcaauccagauaggg

SEQ ID NO: 2032182 - RNA, 19 nt, Artificial Sequence
  Description of Artificial Sequence: Synthetic oligonucleotide
  Sense strand starting at position 2597 of SEQ ID NO: 1881279
cuaucuggauugcuuuaau

SEQ ID NO: 2032183 - RNA, 19 nt, Artificial Sequence
  Description of Artificial Sequence: Synthetic oligonucleotide
  Antisense strand to SEQ ID NO: 2032182
auuaaagcaauccagauag

SEQ ID NO: 2032184 - RNA, 19 nt, Artificial Sequence
  Description of Artificial Sequence: Synthetic oligonucleotide
  Sense strand starting at position 2883 of SEQ ID NO: 1881279
gugcguuugcauccauuaa

SEQ ID NO: 2032185 - RNA, 19 nt, Artificial Sequence
  Description of Artificial Sequence: Synthetic oligonucleotide
  Antisense strand to SEQ ID NO: 2032184
uuaauggaugcaaacgcac

SEQ ID NO: 2032186 - RNA, 19 nt, Artificial Sequence
  Description of Artificial Sequence: Synthetic oligonucleotide
  Sense strand starting at position 2887 of SEQ ID NO: 1881279
guuugcauccauuaagcca

SEQ ID NO: 2032187 - RNA, 19 nt, Artificial Sequence
  Description of Artificial Sequence: Synthetic oligonucleotide
  Antisense strand to SEQ ID NO: 2032186
uggcuuaauggaugcaaac

SEQ ID NO: 2032188 - RNA, 19 nt, Artificial Sequence
  Description of Artificial Sequence: Synthetic oligonucleotide
  Sense strand starting at position 2894 of SEQ ID NO: 1881279
uccauuaagccagggaucu

SEQ ID NO: 2032189 - RNA, 19 nt, Artificial Sequence
  Description of Artificial Sequence: Synthetic oligonucleotide
  Antisense strand to SEQ ID NO: 2032188
agaucccuggcuuaaugga

SEQ ID NO: 2032190 - RNA, 19 nt, Artificial Sequence
  Description of Artificial Sequence: Synthetic oligonucleotide
  Sense strand starting at position 2895 of SEQ ID NO: 1881279
ccauuaagccagggaucuu

SEQ ID NO: 2032191 - RNA, 19 nt, Artificial Sequence
  Description of Artificial Sequence: Synthetic oligonucleotide
  Antisense strand to SEQ ID NO: 2032190
aagaucccuggcuuaaugg

SEQ ID NO: 2032192 - RNA, 19 nt, Artificial Sequence
  Description of Artificial Sequence: Synthetic oligonucleotide
  Sense strand starting at position 2937 of SEQ ID NO: 1881279
caacaacucggcugugaaa

SEQ ID NO: 2032193 - RNA, 19 nt, Artificial Sequence
  Description of Artificial Sequence: Synthetic oligonucleotide
  Antisense strand to SEQ ID NO: 2032192
uuucacagccgaguuguug

SEQ ID NO: 2032194 - RNA, 19 nt, Artificial Sequence
  Description of Artificial Sequence: Synthetic oligonucleotide
  Sense strand starting at position 3087 of SEQ ID NO: 1881279
aaaugugcgcaguagaaau

SEQ ID NO: 2032195 - RNA, 19 nt, Artificial Sequence
  Description of Artificial Sequence: Synthetic oligonucleotide
  Antisense strand to SEQ ID NO: 2032194
auuucuacugcgcacauuu

SEQ ID NO: 2032196 - RNA, 19 nt, Artificial Sequence
  Description of Artificial Sequence: Synthetic oligonucleotide
  Sense strand starting at position 3100 of SEQ ID NO: 1881279
agaaauaaauggcuuguuu

SEQ ID NO: 2032197 - RNA, 19 nt, Artificial Sequence
  Description of Artificial Sequence: Synthetic oligonucleotide
  Antisense strand to SEQ ID NO: 2032196
aaacaagccauuuauuucu

SEQ ID NO: 2032198 - RNA, 19 nt, Artificial Sequence
  Description of Artificial Sequence: Synthetic oligonucleotide
  Sense strand starting at position 3211 of SEQ ID NO: 1881279
ucgauucccuccuuuaaag

SEQ ID NO: 2032199 - RNA, 19 nt, Artificial Sequence
  Description of Artificial Sequence: Synthetic oligonucleotide
  Antisense strand to SEQ ID NO: 2032198
cuuuaaaggagggaaucga

SEQ ID NO: 2032200 - RNA, 19 nt, Artificial Sequence
  Description of Artificial Sequence: Synthetic oligonucleotide
  Sense strand starting at position 3260 of SEQ ID NO: 1881279
gaaggaaguuaguuuguuu

SEQ ID NO: 2032201 - RNA, 19 nt, Artificial Sequence
  Description of Artificial Sequence: Synthetic oligonucleotide
  Antisense strand to SEQ ID NO: 2032200
aaacaaacuaacuuccuuc

SEQ ID NO: 2032202 - RNA, 19 nt, Artificial Sequence
  Description of Artificial Sequence: Synthetic oligonucleotide
  Sense strand starting at position 3305 of SEQ ID NO: 1881279
uuuauuuagcugugcuuga

SEQ ID NO: 2032203 - RNA, 19 nt, Artificial Sequence
  Description of Artificial Sequence: Synthetic oligonucleotide
  Antisense strand to SEQ ID NO: 2032202
ucaagcacagcuaaauaaa

SEQ ID NO: 2032204 - RNA, 19 nt, Artificial Sequence
  Description of Artificial Sequence: Synthetic oligonucleotide
  Sense strand starting at position 3306 of SEQ ID NO: 1881279
uuauuuagcugugcuugau

SEQ ID NO: 2032205 - RNA, 19 nt, Artificial Sequence
  Description of Artificial Sequence: Synthetic oligonucleotide
  Antisense strand to SEQ ID NO: 2032204
aucaagcacagcuaaauaa

SEQ ID NO: 2032206 - RNA, 19 nt, Artificial Sequence
  Description of Artificial Sequence: Synthetic oligonucleotide
  Sense strand starting at position 3546 of SEQ ID NO: 1881279
agauauuaucguggaguca

SEQ ID NO: 2032207 - RNA, 19 nt, Artificial Sequence
  Description of Artificial Sequence: Synthetic oligonucleotide
  Antisense strand to SEQ ID NO: 2032206
ugacuccacgauaauaucu

SEQ ID NO: 2032208 - RNA, 19 nt, Artificial Sequence
  Description of Artificial Sequence: Synthetic oligonucleotide
  Sense strand starting at position 3547 of SEQ ID NO: 1881279
gauauuaucguggagucau

SEQ ID NO: 2032209 - RNA, 19 nt, Artificial Sequence
  Description of Artificial Sequence: Synthetic oligonucleotide
  Antisense strand to SEQ ID NO: 2032208
augacuccacgauaauauc

SEQ ID NO: 2032210 - RNA, 19 nt, Artificial Sequence
  Description of Artificial Sequence: Synthetic oligonucleotide
  Sense strand starting at position 3558 of SEQ ID NO: 1881279
ggagucauuccauaucauu

SEQ ID NO: 2032211 - RNA, 19 nt, Artificial Sequence
  Description of Artificial Sequence: Synthetic oligonucleotide
  Antisense strand to SEQ ID NO: 2032210
aaugauauggaaugacucc

SEQ ID NO: 2032212 - RNA, 19 nt, Artificial Sequence
  Description of Artificial Sequence: Synthetic oligonucleotide
  Sense strand starting at position 3599 of SEQ ID NO: 1881279
uuuacagcuguaugauauu

SEQ ID NO: 2032213 - RNA, 19 nt, Artificial Sequence
  Description of Artificial Sequence: Synthetic oligonucleotide
  Antisense strand to SEQ ID NO: 2032212
aauaucauacagcuguaaa

SEQ ID NO: 2032214 - RNA, 19 nt, Artificial Sequence
  Description of Artificial Sequence: Synthetic oligonucleotide
  Sense strand starting at position 3715 of SEQ ID NO: 1881279
auaacuuuguuccuaugua

SEQ ID NO: 2032215 - RNA, 19 nt, Artificial Sequence
  Description of Artificial Sequence: Synthetic oligonucleotide
  Antisense strand to SEQ ID NO: 2032214
uacauaggaacaaaguuau

SEQ ID NO: 2032216 - RNA, 19 nt, Artificial Sequence
  Description of Artificial Sequence: Synthetic oligonucleotide
  Sense strand starting at position 7 of SEQ ID NO: 1881280
gacuuauaugaauguuaag

SEQ ID NO: 2032217 - RNA, 19 nt, Artificial Sequence
  Description of Artificial Sequence: Synthetic oligonucleotide
  Antisense strand to SEQ ID NO: 2032216
cuuaacauucauauaaguc

SEQ ID NO: 2032218 - RNA, 19 nt, Artificial Sequence
  Description of Artificial Sequence: Synthetic oligonucleotide
  Sense strand starting at position 206 of SEQ ID NO: 1881280
aguuauaagccugacucau

SEQ ID NO: 2032219 - RNA, 19 nt, Artificial Sequence
  Description of Artificial Sequence: Synthetic oligonucleotide
  Antisense strand to SEQ ID NO: 2032218
augagucaggcuuauaacu

SEQ ID NO: 2032220 - RNA, 19 nt, Artificial Sequence
  Description of Artificial Sequence: Synthetic oligonucleotide
  Sense strand starting at position 271 of SEQ ID NO: 1881280
ggaacucaauuagcuguua

SEQ ID NO: 2032221 - RNA, 19 nt, Artificial Sequence
  Description of Artificial Sequence: Synthetic oligonucleotide
  Antisense strand to SEQ ID NO: 2032220
uaacagcuaauugaguucc

SEQ ID NO: 2032222 - RNA, 19 nt, Artificial Sequence
  Description of Artificial Sequence: Synthetic oligonucleotide
  Sense strand starting at position 309 of SEQ ID NO: 1881280
uugugugaucuggaccuau

SEQ ID NO: 2032223 - RNA, 19 nt, Artificial Sequence
  Description of Artificial Sequence: Synthetic oligonucleotide
  Antisense strand to SEQ ID NO: 2032222
auagguccagaucacacaa

SEQ ID NO: 2032224 - RNA, 19 nt, Artificial Sequence
  Description of Artificial Sequence: Synthetic oligonucleotide
  Sense strand starting at position 382 of SEQ ID NO: 1881280
uaugaaauguaguuaguga

SEQ ID NO: 2032225 - RNA, 19 nt, Artificial Sequence
  Description of Artificial Sequence: Synthetic oligonucleotide
  Antisense strand to SEQ ID NO: 2032224
ucacuaacuacauuucaua

SEQ ID NO: 2032226 - RNA, 19 nt, Artificial Sequence
  Description of Artificial Sequence: Synthetic oligonucleotide
  Sense strand starting at position 414 of SEQ ID NO: 1881280
aaguauaaagugugcauuu

SEQ ID NO: 2032227 - RNA, 19 nt, Artificial Sequence
  Description of Artificial Sequence: Synthetic oligonucleotide
  Antisense strand to SEQ ID NO: 2032226
aaaugcacacuuuauacuu

SEQ ID NO: 2032228 - RNA, 19 nt, Artificial Sequence
  Description of Artificial Sequence: Synthetic oligonucleotide
  Sense strand starting at position 709 of SEQ ID NO: 1881280
ggauguuuggcuuaugaca

SEQ ID NO: 2032229 - RNA, 19 nt, Artificial Sequence
  Description of Artificial Sequence: Synthetic oligonucleotide
  Antisense strand to SEQ ID NO: 2032228
ugucauaagccaaacaucc

SEQ ID NO: 2032230 - RNA, 19 nt, Artificial Sequence
  Description of Artificial Sequence: Synthetic oligonucleotide
  Sense strand starting at position 827 of SEQ ID NO: 1881280
ugugauaguggauggcaaa

SEQ ID NO: 2032231 - RNA, 19 nt, Artificial Sequence
  Description of Artificial Sequence: Synthetic oligonucleotide
  Antisense strand to SEQ ID NO: 2032230
uuugccauccacuaucaca

SEQ ID NO: 2032232 - RNA, 19 nt, Artificial Sequence
  Description of Artificial Sequence: Synthetic oligonucleotide
  Sense strand starting at position 828 of SEQ ID NO: 1881280
gugauaguggauggcaaau

SEQ ID NO: 2032233 - RNA, 19 nt, Artificial Sequence
  Description of Artificial Sequence: Synthetic oligonucleotide
  Antisense strand to SEQ ID NO: 2032232
auuugccauccacuaucac

SEQ ID NO: 2032234 - RNA, 19 nt, Artificial Sequence
  Description of Artificial Sequence: Synthetic oligonucleotide
  Sense strand starting at position 1193 of SEQ ID NO: 1881280
gcaaacauuuaugugccua

SEQ ID NO: 2032235 - RNA, 19 nt, Artificial Sequence
  Description of Artificial Sequence: Synthetic oligonucleotide
  Antisense strand to SEQ ID NO: 2032234
uaggcacauaaauguuugc

SEQ ID NO: 2032236 - RNA, 19 nt, Artificial Sequence
  Description of Artificial Sequence: Synthetic oligonucleotide
  Sense strand starting at position 1197 of SEQ ID NO: 1881280
acauuuaugugccuauucu

SEQ ID NO: 2032237 - RNA, 19 nt, Artificial Sequence
  Description of Artificial Sequence: Synthetic oligonucleotide
  Antisense strand to SEQ ID NO: 2032236
agaauaggcacauaaaugu

SEQ ID NO: 2032238 - RNA, 19 nt, Artificial Sequence
  Description of Artificial Sequence: Synthetic oligonucleotide
  Sense strand starting at position 1222 of SEQ ID NO: 1881280
ggcauuaugcuugaaacua

SEQ ID NO: 2032239 - RNA, 19 nt, Artificial Sequence
  Description of Artificial Sequence: Synthetic oligonucleotide
  Antisense strand to SEQ ID NO: 2032238
uaguuucaagcauaaugcc

SEQ ID NO: 2032240 - RNA, 19 nt, Artificial Sequence
  Description of Artificial Sequence: Synthetic oligonucleotide
  Sense strand starting at position 1338 of SEQ ID NO: 1881280
cuaagucugugaucaugga

SEQ ID NO: 2032241 - RNA, 19 nt, Artificial Sequence
  Description of Artificial Sequence: Synthetic oligonucleotide
  Antisense strand to SEQ ID NO: 2032240
uccaugaucacagacuuag

SEQ ID NO: 2032242 - RNA, 19 nt, Artificial Sequence
  Description of Artificial Sequence: Synthetic oligonucleotide
  Sense strand starting at position 1339 of SEQ ID NO: 1881280
uaagucugugaucauggau

SEQ ID NO: 2032243 - RNA, 19 nt, Artificial Sequence
  Description of Artificial Sequence: Synthetic oligonucleotide
  Antisense strand to SEQ ID NO: 2032242
auccaugaucacagacuua

SEQ ID NO: 2032244 - RNA, 19 nt, Artificial Sequence
  Description of Artificial Sequence: Synthetic oligonucleotide
  Sense strand starting at position 1345 of SEQ ID NO: 1881280
ugugaucauggaugaaauu

SEQ ID NO: 2032245 - RNA, 19 nt, Artificial Sequence
  Description of Artificial Sequence: Synthetic oligonucleotide
  Antisense strand to SEQ ID NO: 2032244
aauuucauccaugaucaca

SEQ ID NO: 2032246 - RNA, 19 nt, Artificial Sequence
  Description of Artificial Sequence: Synthetic oligonucleotide
  Sense strand starting at position 1850 of SEQ ID NO: 1881280
acuuccaaggccuauguua

SEQ ID NO: 2032247 - RNA, 19 nt, Artificial Sequence
  Description of Artificial Sequence: Synthetic oligonucleotide
  Antisense strand to SEQ ID NO: 2032246
uaacauaggccuuggaagu

SEQ ID NO: 2032248 - RNA, 19 nt, Artificial Sequence
  Description of Artificial Sequence: Synthetic oligonucleotide
  Sense strand starting at position 2125 of SEQ ID NO: 1881280
uuuggaccucucugaccaa

SEQ ID NO: 2032249 - RNA, 19 nt, Artificial Sequence
  Description of Artificial Sequence: Synthetic oligonucleotide
  Antisense strand to SEQ ID NO: 2032248
uuggucagagagguccaaa

SEQ ID NO: 2032250 - RNA, 19 nt, Artificial Sequence
  Description of Artificial Sequence: Synthetic oligonucleotide
  Sense strand starting at position 2305 of SEQ ID NO: 1881280
acuggacucugaucccaau

SEQ ID NO: 2032251 - RNA, 19 nt, Artificial Sequence
  Description of Artificial Sequence: Synthetic oligonucleotide
  Antisense strand to SEQ ID NO: 2032250
auugggaucagaguccagu

SEQ ID NO: 2032252 - RNA, 19 nt, Artificial Sequence
  Description of Artificial Sequence: Synthetic oligonucleotide
  Sense strand starting at position 2362 of SEQ ID NO: 1881280
gucugucaaugauuaaauc

SEQ ID NO: 2032253 - RNA, 19 nt, Artificial Sequence
  Description of Artificial Sequence: Synthetic oligonucleotide
  Antisense strand to SEQ ID NO: 2032252
gauuuaaucauugacagac

SEQ ID NO: 2032254 - RNA, 19 nt, Artificial Sequence
  Description of Artificial Sequence: Synthetic oligonucleotide
  Sense strand starting at position 2415 of SEQ ID NO: 1881280
gcagacauuuaacagagau

SEQ ID NO: 2032255 - RNA, 19 nt, Artificial Sequence
  Description of Artificial Sequence: Synthetic oligonucleotide
  Antisense strand to SEQ ID NO: 2032254
aucucuguuaaaugucugc

SEQ ID NO: 2032256 - RNA, 19 nt, Artificial Sequence
  Description of Artificial Sequence: Synthetic oligonucleotide
  Sense strand starting at position 2447 of SEQ ID NO: 1881280
agggaauagagucggaguu

SEQ ID NO: 2032257 - RNA, 19 nt, Artificial Sequence
  Description of Artificial Sequence: Synthetic oligonucleotide
  Antisense strand to SEQ ID NO: 2032256
aacuccgacucuauucccu

SEQ ID NO: 2032258 - RNA, 19 nt, Artificial Sequence
  Description of Artificial Sequence: Synthetic oligonucleotide
  Sense strand starting at position 2448 of SEQ ID NO: 1881280
gggaauagagucggaguuu

SEQ ID NO: 2032259 - RNA, 19 nt, Artificial Sequence
  Description of Artificial Sequence: Synthetic oligonucleotide
  Antisense strand to SEQ ID NO: 2032258
aaacuccgacucuauuccc

SEQ ID NO: 2032260 - RNA, 19 nt, Artificial Sequence
  Description of Artificial Sequence: Synthetic oligonucleotide
  Sense strand starting at position 2516 of SEQ ID NO: 1881280
uuggaacaaugucuuuauu

SEQ ID NO: 2032261 - RNA, 19 nt, Artificial Sequence
  Description of Artificial Sequence: Synthetic oligonucleotide
  Antisense strand to SEQ ID NO: 2032260
aauaaagacauuguuccaa

SEQ ID NO: 2032262 - RNA, 19 nt, Artificial Sequence
  Description of Artificial Sequence: Synthetic oligonucleotide
  Sense strand starting at position 2518 of SEQ ID NO: 1881280
ggaacaaugucuuuauuau

SEQ ID NO: 2032263 - RNA, 19 nt, Artificial Sequence
  Description of Artificial Sequence: Synthetic oligonucleotide
  Antisense strand to SEQ ID NO: 2032262
auaauaaagacauuguucc

SEQ ID NO: 2032264 - RNA, 19 nt, Artificial Sequence
  Description of Artificial Sequence: Synthetic oligonucleotide
  Sense strand starting at position 2640 of SEQ ID NO: 1881280
cugacuacauuguuagaaa

SEQ ID NO: 2032265 - RNA, 19 nt, Artificial Sequence
  Description of Artificial Sequence: Synthetic oligonucleotide
  Antisense strand to SEQ ID NO: 2032264
uuucuaacaauguagucag

SEQ ID NO: 2032266 - RNA, 19 nt, Artificial Sequence
  Description of Artificial Sequence: Synthetic oligonucleotide
  Sense strand starting at position 2708 of SEQ ID NO: 1881280
accagugucauggaguaag

SEQ ID NO: 2032267 - RNA, 19 nt, Artificial Sequence
  Description of Artificial Sequence: Synthetic oligonucleotide
  Antisense strand to SEQ ID NO: 2032266
cuuacuccaugacacuggu

SEQ ID NO: 2032268 - RNA, 19 nt, Artificial Sequence
  Description of Artificial Sequence: Synthetic oligonucleotide
  Sense strand starting at position 2744 of SEQ ID NO: 1881280
cgucuucugauugaugaag

SEQ ID NO: 2032269 - RNA, 19 nt, Artificial Sequence
  Description of Artificial Sequence: Synthetic oligonucleotide
  Antisense strand to SEQ ID NO: 2032268
cuucaucaaucagaagacg

SEQ ID NO: 2032270 - RNA, 19 nt, Artificial Sequence
  Description of Artificial Sequence: Synthetic oligonucleotide
  Sense strand starting at position 3191 of SEQ ID NO: 1881280
aguaucuacuguuuggaaa

SEQ ID NO: 2032271 - RNA, 19 nt, Artificial Sequence
  Description of Artificial Sequence: Synthetic oligonucleotide
  Antisense strand to SEQ ID NO: 2032270
uuuccaaacaguagauacu

SEQ ID NO: 2032272 - RNA, 19 nt, Artificial Sequence
  Description of Artificial Sequence: Synthetic oligonucleotide
  Sense strand starting at position 3248 of SEQ ID NO: 1881280
ucaagagcuuugccaagaa

SEQ ID NO: 2032273 - RNA, 19 nt, Artificial Sequence
  Description of Artificial Sequence: Synthetic oligonucleotide
  Antisense strand to SEQ ID NO: 2032272
uucuuggcaaagcucuuga

SEQ ID NO: 2032274 - RNA, 19 nt, Artificial Sequence
  Description of Artificial Sequence: Synthetic oligonucleotide
  Sense strand starting at position 3268 of SEQ ID NO: 1881280
agauaaguaucugucagag

SEQ ID NO: 2032275 - RNA, 19 nt, Artificial Sequence
  Description of Artificial Sequence: Synthetic oligonucleotide
  Antisense strand to SEQ ID NO: 2032274
cucugacagauacuuaucu

SEQ ID NO: 2032276 - RNA, 19 nt, Artificial Sequence
  Description of Artificial Sequence: Synthetic oligonucleotide
  Sense strand starting at position 3282 of SEQ ID NO: 1881280
cagaguuacaaggguaugu

SEQ ID NO: 2032277 - RNA, 19 nt, Artificial Sequence
  Description of Artificial Sequence: Synthetic oligonucleotide
  Antisense strand to SEQ ID NO: 2032276
acauacccuuguaacucug

SEQ ID NO: 2032278 - RNA, 19 nt, Artificial Sequence
  Description of Artificial Sequence: Synthetic oligonucleotide
  Sense strand starting at position 3284 of SEQ ID NO: 1881280
gaguuacaaggguauguga

SEQ ID NO: 2032279 - RNA, 19 nt, Artificial Sequence
  Description of Artificial Sequence: Synthetic oligonucleotide
  Antisense strand to SEQ ID NO: 2032278
ucacauacccuuguaacuc

SEQ ID NO: 2032280 - RNA, 19 nt, Artificial Sequence
  Description of Artificial Sequence: Synthetic oligonucleotide
  Sense strand starting at position 3381 of SEQ ID NO: 1881280
aaacaugaguuguuggacu

SEQ ID NO: 2032281 - RNA, 19 nt, Artificial Sequence
  Description of Artificial Sequence: Synthetic oligonucleotide
  Antisense strand to SEQ ID NO: 2032280
aguccaacaacucauguuu

SEQ ID NO: 2032282 - RNA, 19 nt, Artificial Sequence
  Description of Artificial Sequence: Synthetic oligonucleotide
  Sense strand starting at position 3396 of SEQ ID NO: 1881280
gacucugaacuguguuaaa

SEQ ID NO: 2032283 - RNA, 19 nt, Artificial Sequence
  Description of Artificial Sequence: Synthetic oligonucleotide
  Antisense strand to SEQ ID NO: 2032282
uuuaacacaguucagaguc

SEQ ID NO: 2032284 - RNA, 19 nt, Artificial Sequence
  Description of Artificial Sequence: Synthetic oligonucleotide
  Sense strand starting at position 3423 of SEQ ID NO: 1881280
guaguuuauccagaccaca

SEQ ID NO: 2032285 - RNA, 19 nt, Artificial Sequence
  Description of Artificial Sequence: Synthetic oligonucleotide
  Antisense strand to SEQ ID NO: 2032284
uguggucuggauaaacuac

SEQ ID NO: 2032286 - RNA, 19 nt, Artificial Sequence
  Description of Artificial Sequence: Synthetic oligonucleotide
  Sense strand starting at position 3676 of SEQ ID NO: 1881280
uguguauaccacuacuauu

SEQ ID NO: 2032287 - RNA, 19 nt, Artificial Sequence
  Description of Artificial Sequence: Synthetic oligonucleotide
  Antisense strand to SEQ ID NO: 2032286
aauaguagugguauacaca

SEQ ID NO: 2032288 - RNA, 19 nt, Artificial Sequence
  Description of Artificial Sequence: Synthetic oligonucleotide
  Sense strand starting at position 3756 of SEQ ID NO: 1881280
acauaugucuggcuagaaa

SEQ ID NO: 2032289 - RNA, 19 nt, Artificial Sequence
  Description of Artificial Sequence: Synthetic oligonucleotide
  Antisense strand to SEQ ID NO: 2032288
uuucuagccagacauaugu

SEQ ID NO: 2032290 - RNA, 19 nt, Artificial Sequence
  Description of Artificial Sequence: Synthetic oligonucleotide
  Sense strand starting at position 3826 of SEQ ID NO: 1881280
guugaauuacuagggaugu

SEQ ID NO: 2032291 - RNA, 19 nt, Artificial Sequence
  Description of Artificial Sequence: Synthetic oligonucleotide
  Antisense strand to SEQ ID NO: 2032290
acaucccuaguaauucaac

SEQ ID NO: 2032292 - RNA, 19 nt, Artificial Sequence
  Description of Artificial Sequence: Synthetic oligonucleotide
  Sense strand starting at position 3877 of SEQ ID NO: 1881280
uccagagugccagauagau

SEQ ID NO: 2032293 - RNA, 19 nt, Artificial Sequence
  Description of Artificial Sequence: Synthetic oligonucleotide
  Antisense strand to SEQ ID NO: 2032292
aucuaucuggcacucugga

SEQ ID NO: 2032294 - RNA, 19 nt, Artificial Sequence
  Description of Artificial Sequence: Synthetic oligonucleotide
  Sense strand starting at position 3946 of SEQ ID NO: 1881280
aaaguagaguaguuacaga

SEQ ID NO: 2032295 - RNA, 19 nt, Artificial Sequence
  Description of Artificial Sequence: Synthetic oligonucleotide
  Antisense strand to SEQ ID NO: 2032294
ucuguaacuacucuacuuu

SEQ ID NO: 2032296 - RNA, 19 nt, Artificial Sequence
  Description of Artificial Sequence: Synthetic oligonucleotide
  Sense strand starting at position 230 of SEQ ID NO: 1881281
aguugauuauuaucaagug

SEQ ID NO: 2032297 - RNA, 19 nt, Artificial Sequence
  Description of Artificial Sequence: Synthetic oligonucleotide
  Antisense strand to SEQ ID NO: 2032296
cacuugauaauaaucaacu

SEQ ID NO: 2032298 - RNA, 19 nt, Artificial Sequence
  Description of Artificial Sequence: Synthetic oligonucleotide
  Sense strand starting at position 239 of SEQ ID NO: 1881281
uuaucaaguguguacauaa

SEQ ID NO: 2032299 - RNA, 19 nt, Artificial Sequence
  Description of Artificial Sequence: Synthetic oligonucleotide
  Antisense strand to SEQ ID NO: 2032298
uuauguacacacuugauaa

SEQ ID NO: 2032300 - RNA, 19 nt, Artificial Sequence
  Description of Artificial Sequence: Synthetic oligonucleotide
  Sense strand starting at position 366 of SEQ ID NO: 1881281
augucacuugcugauagga

SEQ ID NO: 2032301 - RNA, 19 nt, Artificial Sequence
  Description of Artificial Sequence: Synthetic oligonucleotide
  Antisense strand to SEQ ID NO: 2032300
uccuaucagcaagugacau

SEQ ID NO: 2032302 - RNA, 19 nt, Artificial Sequence
  Description of Artificial Sequence: Synthetic oligonucleotide
  Sense strand starting at position 429 of SEQ ID NO: 1881281
gggaucauuccuugaccaa

SEQ ID NO: 2032303 - RNA, 19 nt, Artificial Sequence
  Description of Artificial Sequence: Synthetic oligonucleotide
  Antisense strand to SEQ ID NO: 2032302
uuggucaaggaaugauccc

SEQ ID NO: 2032304 - RNA, 19 nt, Artificial Sequence
  Description of Artificial Sequence: Synthetic oligonucleotide
  Sense strand starting at position 474 of SEQ ID NO: 1881281
gucuguaugacgcuaguuu

SEQ ID NO: 2032305 - RNA, 19 nt, Artificial Sequence
  Description of Artificial Sequence: Synthetic oligonucleotide
  Antisense strand to SEQ ID NO: 2032304
aaacuagcgucauacagac

SEQ ID NO: 2032306 - RNA, 19 nt, Artificial Sequence
  Description of Artificial Sequence: Synthetic oligonucleotide
  Sense strand starting at position 598 of SEQ ID NO: 1881281
uugaaugucuuauccaaug

SEQ ID NO: 2032307 - RNA, 19 nt, Artificial Sequence
  Description of Artificial Sequence: Synthetic oligonucleotide
  Antisense strand to SEQ ID NO: 2032306
cauuggauaagacauucaa

SEQ ID NO: 2032308 - RNA, 19 nt, Artificial Sequence
  Description of Artificial Sequence: Synthetic oligonucleotide
  Sense strand starting at position 1264 of SEQ ID NO: 1881281
caacuaguagguuggauau

SEQ ID NO: 2032309 - RNA, 19 nt, Artificial Sequence
  Description of Artificial Sequence: Synthetic oligonucleotide
  Antisense strand to SEQ ID NO: 2032308
auauccaaccuacuaguug

SEQ ID NO: 2032310 - RNA, 19 nt, Artificial Sequence
  Description of Artificial Sequence: Synthetic oligonucleotide
  Sense strand starting at position 1283 of SEQ ID NO: 1881281
ggucauuacgguuaaauca

SEQ ID NO: 2032311 - RNA, 19 nt, Artificial Sequence
  Description of Artificial Sequence: Synthetic oligonucleotide
  Antisense strand to SEQ ID NO: 2032310
ugauuuaaccguaaugacc

SEQ ID NO: 2032312 - RNA, 19 nt, Artificial Sequence
  Description of Artificial Sequence: Synthetic oligonucleotide
  Sense strand starting at position 1385 of SEQ ID NO: 1881281
aagaaugcugaaugugaau

SEQ ID NO: 2032313 - RNA, 19 nt, Artificial Sequence
  Description of Artificial Sequence: Synthetic oligonucleotide
  Antisense strand to SEQ ID NO: 2032312
auucacauucagcauucuu

SEQ ID NO: 2032314 - RNA, 19 nt, Artificial Sequence
  Description of Artificial Sequence: Synthetic oligonucleotide
  Sense strand starting at position 1446 of SEQ ID NO: 1881281
agggcaauuguauaucgga

SEQ ID NO: 2032315 - RNA, 19 nt, Artificial Sequence
  Description of Artificial Sequence: Synthetic oligonucleotide
  Antisense strand to SEQ ID NO: 2032314
uccgauauacaauugcccu

SEQ ID NO: 2032316 - RNA, 19 nt, Artificial Sequence
  Description of Artificial Sequence: Synthetic oligonucleotide
  Sense strand starting at position 1479 of SEQ ID NO: 1881281
agcaaagaguucucauuaa

SEQ ID NO: 2032317 - RNA, 19 nt, Artificial Sequence
  Description of Artificial Sequence: Synthetic oligonucleotide
  Antisense strand to SEQ ID NO: 2032316
uuaaugagaacucuuugcu

SEQ ID NO: 2032318 - RNA, 19 nt, Artificial Sequence
  Description of Artificial Sequence: Synthetic oligonucleotide
  Sense strand starting at position 1491 of SEQ ID NO: 1881281
ucauuaacuucuccgggaa

SEQ ID NO: 2032319 - RNA, 19 nt, Artificial Sequence
  Description of Artificial Sequence: Synthetic oligonucleotide
  Antisense strand to SEQ ID NO: 2032318
uucccggagaaguuaauga

SEQ ID NO: 2032320 - RNA, 19 nt, Artificial Sequence
  Description of Artificial Sequence: Synthetic oligonucleotide
  Sense strand starting at position 1624 of SEQ ID NO: 1881281
gguugacagauauguggaa

SEQ ID NO: 2032321 - RNA, 19 nt, Artificial Sequence
  Description of Artificial Sequence: Synthetic oligonucleotide
  Antisense strand to SEQ ID NO: 2032320
uuccacauaucugucaacc

SEQ ID NO: 2032322 - RNA, 19 nt, Artificial Sequence
  Description of Artificial Sequence: Synthetic oligonucleotide
  Sense strand starting at position 1625 of SEQ ID NO: 1881281
guugacagauauguggaau

SEQ ID NO: 2032323 - RNA, 19 nt, Artificial Sequence
  Description of Artificial Sequence: Synthetic oligonucleotide
  Antisense strand to SEQ ID NO: 2032322
auuccacauaucugucaac

SEQ ID NO: 2032324 - RNA, 19 nt, Artificial Sequence
  Description of Artificial Sequence: Synthetic oligonucleotide
  Sense strand starting at position 1644 of SEQ ID NO: 1881281
acuguaaugacuugaugga

SEQ ID NO: 2032325 - RNA, 19 nt, Artificial Sequence
  Description of Artificial Sequence: Synthetic oligonucleotide
  Antisense strand to SEQ ID NO: 2032324
uccaucaagucauuacagu

SEQ ID NO: 2032326 - RNA, 19 nt, Artificial Sequence
  Description of Artificial Sequence: Synthetic oligonucleotide
  Sense strand starting at position 1651 of SEQ ID NO: 1881281
ugacuugauggaugcauau

SEQ ID NO: 2032327 - RNA, 19 nt, Artificial Sequence
  Description of Artificial Sequence: Synthetic oligonucleotide
  Antisense strand to SEQ ID NO: 2032326
auaugcauccaucaaguca

SEQ ID NO: 2032328 - RNA, 19 nt, Artificial Sequence
  Description of Artificial Sequence: Synthetic oligonucleotide
  Sense strand starting at position 1770 of SEQ ID NO: 1881281
aaagaaauaguuugugagu

SEQ ID NO: 2032329 - RNA, 19 nt, Artificial Sequence
  Description of Artificial Sequence: Synthetic oligonucleotide
  Antisense strand to SEQ ID NO: 2032328
acucacaaacuauuucuuu

SEQ ID NO: 2032330 - RNA, 19 nt, Artificial Sequence
  Description of Artificial Sequence: Synthetic oligonucleotide
  Sense strand starting at position 1771 of SEQ ID NO: 1881281
aagaaauaguuugugagua

SEQ ID NO: 2032331 - RNA, 19 nt, Artificial Sequence
  Description of Artificial Sequence: Synthetic oligonucleotide
  Antisense strand to SEQ ID NO: 2032330
uacucacaaacuauuucuu

SEQ ID NO: 2032332 - RNA, 19 nt, Artificial Sequence
  Description of Artificial Sequence: Synthetic oligonucleotide
  Sense strand starting at position 1776 of SEQ ID NO: 1881281
auaguuugugaguaaauga

SEQ ID NO: 2032333 - RNA, 19 nt, Artificial Sequence
  Description of Artificial Sequence: Synthetic oligonucleotide
  Antisense strand to SEQ ID NO: 2032332
ucauuuacucacaaacuau

SEQ ID NO: 2032334 - RNA, 19 nt, Artificial Sequence
  Description of Artificial Sequence: Synthetic oligonucleotide
  Sense strand starting at position 1928 of SEQ ID NO: 1881281
guucuuaaugaauaggcau

SEQ ID NO: 2032335 - RNA, 19 nt, Artificial Sequence
  Description of Artificial Sequence: Synthetic oligonucleotide
  Antisense strand to SEQ ID NO: 2032334
augccuauucauuaagaac

SEQ ID NO: 2032336 - RNA, 19 nt, Artificial Sequence
  Description of Artificial Sequence: Synthetic oligonucleotide
  Sense strand starting at position 2041 of SEQ ID NO: 1881281
cagcaaagucuaugagaau

SEQ ID NO: 2032337 - RNA, 19 nt, Artificial Sequence
  Description of Artificial Sequence: Synthetic oligonucleotide
  Antisense strand to SEQ ID NO: 2032336
auucucauagacuuugcug

SEQ ID NO: 2032338 - RNA, 19 nt, Artificial Sequence
  Description of Artificial Sequence: Synthetic oligonucleotide
  Sense strand starting at position 2092 of SEQ ID NO: 1881281
cugauuuaaucuuagagaa

SEQ ID NO: 2032339 - RNA, 19 nt, Artificial Sequence
  Description of Artificial Sequence: Synthetic oligonucleotide
  Antisense strand to SEQ ID NO: 2032338
uucucuaagauuaaaucag

SEQ ID NO: 2032340 - RNA, 19 nt, Artificial Sequence
  Description of Artificial Sequence: Synthetic oligonucleotide
  Sense strand starting at position 2156 of SEQ ID NO: 1881281
uguuuauugguagauuauc

SEQ ID NO: 2032341 - RNA, 19 nt, Artificial Sequence
  Description of Artificial Sequence: Synthetic oligonucleotide
  Antisense strand to SEQ ID NO: 2032340
gauaaucuaccaauaaaca

SEQ ID NO: 2032342 - RNA, 19 nt, Artificial Sequence
  Description of Artificial Sequence: Synthetic oligonucleotide
  Sense strand starting at position 2603 of SEQ ID NO: 1881281
gggcaaucauuugaacaag

SEQ ID NO: 2032343 - RNA, 19 nt, Artificial Sequence
  Description of Artificial Sequence: Synthetic oligonucleotide
  Antisense strand to SEQ ID NO: 2032342
cuuguucaaaugauugccc

SEQ ID NO: 2032344 - RNA, 19 nt, Artificial Sequence
  Description of Artificial Sequence: Synthetic oligonucleotide
  Sense strand starting at position 2730 of SEQ ID NO: 1881281
acuuaaauugugcaaagua

SEQ ID NO: 2032345 - RNA, 19 nt, Artificial Sequence
  Description of Artificial Sequence: Synthetic oligonucleotide
  Antisense strand to SEQ ID NO: 2032344
uacuuugcacaauuuaagu

SEQ ID NO: 2032346 - RNA, 19 nt, Artificial Sequence
  Description of Artificial Sequence: Synthetic oligonucleotide
  Sense strand starting at position 3059 of SEQ ID NO: 1881281
uuuagacaucgauggacua

SEQ ID NO: 2032347 - RNA, 19 nt, Artificial Sequence
  Description of Artificial Sequence: Synthetic oligonucleotide
  Antisense strand to SEQ ID NO: 2032346
uaguccaucgaugucuaaa

SEQ ID NO: 2032348 - RNA, 19 nt, Artificial Sequence
  Description of Artificial Sequence: Synthetic oligonucleotide
  Sense strand starting at position 3060 of SEQ ID NO: 1881281
uuagacaucgauggacuaa

SEQ ID NO: 2032349 - RNA, 19 nt, Artificial Sequence
  Description of Artificial Sequence: Synthetic oligonucleotide
  Antisense strand to SEQ ID NO: 2032348
uuaguccaucgaugucuaa

SEQ ID NO: 2032350 - RNA, 19 nt, Artificial Sequence
  Description of Artificial Sequence: Synthetic oligonucleotide
  Sense strand starting at position 3271 of SEQ ID NO: 1881281
augugaagugaguauuauu

SEQ ID NO: 2032351 - RNA, 19 nt, Artificial Sequence
  Description of Artificial Sequence: Synthetic oligonucleotide
  Antisense strand to SEQ ID NO: 2032350
aauaauacucacuucacau

SEQ ID NO: 2032352 - RNA, 19 nt, Artificial Sequence
  Description of Artificial Sequence: Synthetic oligonucleotide
  Sense strand starting at position 3314 of SEQ ID NO: 1881281
guaggucucaaggaaucuu

SEQ ID NO: 2032353 - RNA, 19 nt, Artificial Sequence
  Description of Artificial Sequence: Synthetic oligonucleotide
  Antisense strand to SEQ ID NO: 2032352
aagauuccuugagaccuac

SEQ ID NO: 2032354 - RNA, 19 nt, Artificial Sequence
  Description of Artificial Sequence: Synthetic oligonucleotide
  Sense strand starting at position 3322 of SEQ ID NO: 1881281
caaggaaucuuugugacag

SEQ ID NO: 2032355 - RNA, 19 nt, Artificial Sequence
  Description of Artificial Sequence: Synthetic oligonucleotide
  Antisense strand to SEQ ID NO: 2032354
cugucacaaagauuccuug

SEQ ID NO: 2032356 - RNA, 19 nt, Artificial Sequence
  Description of Artificial Sequence: Synthetic oligonucleotide
  Sense strand starting at position 3345 of SEQ ID NO: 1881281
aagauuaauugguuuagug

SEQ ID NO: 2032357 - RNA, 19 nt, Artificial Sequence
  Description of Artificial Sequence: Synthetic oligonucleotide
  Antisense strand to SEQ ID NO: 2032356
cacuaaaccaauuaaucuu

SEQ ID NO: 2032358 - RNA, 19 nt, Artificial Sequence
  Description of Artificial Sequence: Synthetic oligonucleotide
  Sense strand starting at position 3347 of SEQ ID NO: 1881281
gauuaauugguuuagugga

SEQ ID NO: 2032359 - RNA, 19 nt, Artificial Sequence
  Description of Artificial Sequence: Synthetic oligonucleotide
  Antisense strand to SEQ ID NO: 2032358
uccacuaaaccaauuaauc

SEQ ID NO: 2032360 - RNA, 19 nt, Artificial Sequence
  Description of Artificial Sequence: Synthetic oligonucleotide
  Sense strand starting at position 3352 of SEQ ID NO: 1881281
auugguuuaguggaacuga

SEQ ID NO: 2032361 - RNA, 19 nt, Artificial Sequence
  Description of Artificial Sequence: Synthetic oligonucleotide
  Antisense strand to SEQ ID NO: 2032360
ucaguuccacuaaaccaau

SEQ ID NO: 2032362 - RNA, 19 nt, Artificial Sequence
  Description of Artificial Sequence: Synthetic oligonucleotide
  Sense strand starting at position 3418 of SEQ ID NO: 1881281
ugugaaauuugcuuuaagc

SEQ ID NO: 2032363 - RNA, 19 nt, Artificial Sequence
  Description of Artificial Sequence: Synthetic oligonucleotide
  Antisense strand to SEQ ID NO: 2032362
gcuuaaagcaaauuucaca

SEQ ID NO: 2032364 - RNA, 19 nt, Artificial Sequence
  Description of Artificial Sequence: Synthetic oligonucleotide
  Sense strand starting at position 3505 of SEQ ID NO: 1881281
guuugagaggcucacuuau

SEQ ID NO: 2032365 - RNA, 19 nt, Artificial Sequence
  Description of Artificial Sequence: Synthetic oligonucleotide
  Antisense strand to SEQ ID NO: 2032364
auaagugagccucucaaac

SEQ ID NO: 2032366 - RNA, 19 nt, Artificial Sequence
  Description of Artificial Sequence: Synthetic oligonucleotide
  Sense strand starting at position 3657 of SEQ ID NO: 1881281
gagauaauucugggucuac

SEQ ID NO: 2032367 - RNA, 19 nt, Artificial Sequence
  Description of Artificial Sequence: Synthetic oligonucleotide
  Antisense strand to SEQ ID NO: 2032366
guagacccagaauuaucuc

SEQ ID NO: 2032368 - RNA, 19 nt, Artificial Sequence
  Description of Artificial Sequence: Synthetic oligonucleotide
  Sense strand starting at position 3658 of SEQ ID NO: 1881281
agauaauucugggucuaca

SEQ ID NO: 2032369 - RNA, 19 nt, Artificial Sequence
  Description of Artificial Sequence: Synthetic oligonucleotide
  Antisense strand to SEQ ID NO: 2032368
uguagacccagaauuaucu

SEQ ID NO: 2032370 - RNA, 19 nt, Artificial Sequence
  Description of Artificial Sequence: Synthetic oligonucleotide
  Sense strand starting at position 3686 of SEQ ID NO: 1881281
agcuguagguuauuuaauc

SEQ ID NO: 2032371 - RNA, 19 nt, Artificial Sequence
  Description of Artificial Sequence: Synthetic oligonucleotide
  Antisense strand to SEQ ID NO: 2032370
gauuaaauaaccuacagcu

SEQ ID NO: 2032372 - RNA, 19 nt, Artificial Sequence
  Description of Artificial Sequence: Synthetic oligonucleotide
  Sense strand starting at position 3687 of SEQ ID NO: 1881281
gcuguagguuauuuaaucu

SEQ ID NO: 2032373 - RNA, 19 nt, Artificial Sequence
  Description of Artificial Sequence: Synthetic oligonucleotide
  Antisense strand to SEQ ID NO: 2032372
agauuaaauaaccuacagc

SEQ ID NO: 2032374 - RNA, 19 nt, Artificial Sequence
  Description of Artificial Sequence: Synthetic oligonucleotide
  Sense strand starting at position 3704 of SEQ ID NO: 1881281
cuguuaucuuggguuauuu

SEQ ID NO: 2032375 - RNA, 19 nt, Artificial Sequence
  Description of Artificial Sequence: Synthetic oligonucleotide
  Antisense strand to SEQ ID NO: 2032374
aaauaacccaagauaacag

SEQ ID NO: 2032376 - RNA, 19 nt, Artificial Sequence
  Description of Artificial Sequence: Synthetic oligonucleotide
  Sense strand starting at position 43 of SEQ ID NO: 1881282
ucaaauguauggucaguga

SEQ ID NO: 2032377 - RNA, 19 nt, Artificial Sequence
  Description of Artificial Sequence: Synthetic oligonucleotide
  Antisense strand to SEQ ID NO: 2032376
ucacugaccauacauuuga

SEQ ID NO: 2032378 - RNA, 19 nt, Artificial Sequence
  Description of Artificial Sequence: Synthetic oligonucleotide
  Sense strand starting at position 244 of SEQ ID NO: 1881282
cuaucaaugucuuugaaag

SEQ ID NO: 2032379 - RNA, 19 nt, Artificial Sequence
  Description of Artificial Sequence: Synthetic oligonucleotide
  Antisense strand to SEQ ID NO: 2032378
cuuucaaagacauugauag

SEQ ID NO: 2032380 - RNA, 19 nt, Artificial Sequence
  Description of Artificial Sequence: Synthetic oligonucleotide
  Sense strand starting at position 245 of SEQ ID NO: 1881282
uaucaaugucuuugaaagg

SEQ ID NO: 2032381 - RNA, 19 nt, Artificial Sequence
  Description of Artificial Sequence: Synthetic oligonucleotide
  Antisense strand to SEQ ID NO: 2032380
ccuuucaaagacauugaua

SEQ ID NO: 2032382 - RNA, 19 nt, Artificial Sequence
  Description of Artificial Sequence: Synthetic oligonucleotide
  Sense strand starting at position 255 of SEQ ID NO: 1881282
uuugaaaggucccauauuu

SEQ ID NO: 2032383 - RNA, 19 nt, Artificial Sequence
  Description of Artificial Sequence: Synthetic oligonucleotide
  Antisense strand to SEQ ID NO: 2032382
aaauaugggaccuuucaaa

SEQ ID NO: 2032384 - RNA, 19 nt, Artificial Sequence
  Description of Artificial Sequence: Synthetic oligonucleotide
  Sense strand starting at position 316 of SEQ ID NO: 1881282
uggauaguugcaggagaca

SEQ ID NO: 2032385 - RNA, 19 nt, Artificial Sequence
  Description of Artificial Sequence: Synthetic oligonucleotide
  Antisense strand to SEQ ID NO: 2032384
ugucuccugcaacuaucca

SEQ ID NO: 2032386 - RNA, 19 nt, Artificial Sequence
  Description of Artificial Sequence: Synthetic oligonucleotide
  Sense strand starting at position 391 of SEQ ID NO: 1881282
agaaucauguuugcaauac

SEQ ID NO: 2032387 - RNA, 19 nt, Artificial Sequence
  Description of Artificial Sequence: Synthetic oligonucleotide
  Antisense strand to SEQ ID NO: 2032386
guauugcaaacaugauucu

SEQ ID NO: 2032388 - RNA, 19 nt, Artificial Sequence
  Description of Artificial Sequence: Synthetic oligonucleotide
  Sense strand starting at position 448 of SEQ ID NO: 1881282
cuaguuggacccugaacau

SEQ ID NO: 2032389 - RNA, 19 nt, Artificial Sequence
  Description of Artificial Sequence: Synthetic oligonucleotide
  Antisense strand to SEQ ID NO: 2032388
auguucaggguccaacuag

SEQ ID NO: 2032390 - RNA, 19 nt, Artificial Sequence
  Description of Artificial Sequence: Synthetic oligonucleotide
  Sense strand starting at position 487 of SEQ ID NO: 1881282
gaggaaacuugugcuuaag

SEQ ID NO: 2032391 - RNA, 19 nt, Artificial Sequence
  Description of Artificial Sequence: Synthetic oligonucleotide
  Antisense strand to SEQ ID NO: 2032390
cuuaagcacaaguuuccuc

SEQ ID NO: 2032392 - RNA, 19 nt, Artificial Sequence
  Description of Artificial Sequence: Synthetic oligonucleotide
  Sense strand starting at position 489 of SEQ ID NO: 1881282
ggaaacuugugcuuaagga

SEQ ID NO: 2032393 - RNA, 19 nt, Artificial Sequence
  Description of Artificial Sequence: Synthetic oligonucleotide
  Antisense strand to SEQ ID NO: 2032392
uccuuaagcacaaguuucc

SEQ ID NO: 2032394 - RNA, 19 nt, Artificial Sequence
  Description of Artificial Sequence: Synthetic oligonucleotide
  Sense strand starting at position 490 of SEQ ID NO: 1881282
gaaacuugugcuuaaggau

SEQ ID NO: 2032395 - RNA, 19 nt, Artificial Sequence
  Description of Artificial Sequence: Synthetic oligonucleotide
  Antisense strand to SEQ ID NO: 2032394
auccuuaagcacaaguuuc

SEQ ID NO: 2032396 - RNA, 19 nt, Artificial Sequence
  Description of Artificial Sequence: Synthetic oligonucleotide
  Sense strand starting at position 884 of SEQ ID NO: 1881282
agcugaaagccuuagugaa

SEQ ID NO: 2032397 - RNA, 19 nt, Artificial Sequence
  Description of Artificial Sequence: Synthetic oligonucleotide
  Antisense strand to SEQ ID NO: 2032396
uucacuaaggcuuucagcu

SEQ ID NO: 2032398 - RNA, 19 nt, Artificial Sequence
  Description of Artificial Sequence: Synthetic oligonucleotide
  Sense strand starting at position 891 of SEQ ID NO: 1881282
agccuuagugaaggauaga

SEQ ID NO: 2032399 - RNA, 19 nt, Artificial Sequence
  Description of Artificial Sequence: Synthetic oligonucleotide
  Antisense strand to SEQ ID NO: 2032398
ucuauccuucacuaaggcu

SEQ ID NO: 2032400 - RNA, 19 nt, Artificial Sequence
  Description of Artificial Sequence: Synthetic oligonucleotide
  Sense strand starting at position 998 of SEQ ID NO: 1881282
auucucauuggaggacuau

SEQ ID NO: 2032401 - RNA, 19 nt, Artificial Sequence
  Description of Artificial Sequence: Synthetic oligonucleotide
  Antisense strand to SEQ ID NO: 2032400
auaguccuccaaugagaau

SEQ ID NO: 2032402 - RNA, 19 nt, Artificial Sequence
  Description of Artificial Sequence: Synthetic oligonucleotide
  Sense strand starting at position 1044 of SEQ ID NO: 1881282
uuguuaacacuuggguuua

SEQ ID NO: 2032403 - RNA, 19 nt, Artificial Sequence
  Description of Artificial Sequence: Synthetic oligonucleotide
  Antisense strand to SEQ ID NO: 2032402
uaaacccaaguguuaacaa

SEQ ID NO: 2032404 - RNA, 19 nt, Artificial Sequence
  Description of Artificial Sequence: Synthetic oligonucleotide
  Sense strand starting at position 1055 of SEQ ID NO: 1881282
uggguuuagcauuacagca

SEQ ID NO: 2032405 - RNA, 19 nt, Artificial Sequence
  Description of Artificial Sequence: Synthetic oligonucleotide
  Antisense strand to SEQ ID NO: 2032404
ugcuguaaugcuaaaccca

SEQ ID NO: 2032406 - RNA, 19 nt, Artificial Sequence
  Description of Artificial Sequence: Synthetic oligonucleotide
  Sense strand starting at position 1202 of SEQ ID NO: 1881282
guauuauuacgcuaaagua

SEQ ID NO: 2032407 - RNA, 19 nt, Artificial Sequence
  Description of Artificial Sequence: Synthetic oligonucleotide
  Antisense strand to SEQ ID NO: 2032406
uacuuuagcguaauaauac

SEQ ID NO: 2032408 - RNA, 19 nt, Artificial Sequence
  Description of Artificial Sequence: Synthetic oligonucleotide
  Sense strand starting at position 1342 of SEQ ID NO: 1881282
auacucugacgaggcauua

SEQ ID NO: 2032409 - RNA, 19 nt, Artificial Sequence
  Description of Artificial Sequence: Synthetic oligonucleotide
  Antisense strand to SEQ ID NO: 2032408
uaaugccucgucagaguau

SEQ ID NO: 2032410 - RNA, 19 nt, Artificial Sequence
  Description of Artificial Sequence: Synthetic oligonucleotide
  Sense strand starting at position 1468 of SEQ ID NO: 1881282
acaguaauacauugggacu

SEQ ID NO: 2032411 - RNA, 19 nt, Artificial Sequence
  Description of Artificial Sequence: Synthetic oligonucleotide
  Antisense strand to SEQ ID NO: 2032410
agucccaauguauuacugu

SEQ ID NO: 2032412 - RNA, 19 nt, Artificial Sequence
  Description of Artificial Sequence: Synthetic oligonucleotide
  Sense strand starting at position 1571 of SEQ ID NO: 1881282
ggcuuagacucauuacagu

SEQ ID NO: 2032413 - RNA, 19 nt, Artificial Sequence
  Description of Artificial Sequence: Synthetic oligonucleotide
  Antisense strand to SEQ ID NO: 2032412
acuguaaugagucuaagcc

SEQ ID NO: 2032414 - RNA, 19 nt, Artificial Sequence
  Description of Artificial Sequence: Synthetic oligonucleotide
  Sense strand starting at position 1620 of SEQ ID NO: 1881282
acguauauuggcuauagua

SEQ ID NO: 2032415 - RNA, 19 nt, Artificial Sequence
  Description of Artificial Sequence: Synthetic oligonucleotide
  Antisense strand to SEQ ID NO: 2032414
uacuauagccaauauacgu

SEQ ID NO: 2032416 - RNA, 19 nt, Artificial Sequence
  Description of Artificial Sequence: Synthetic oligonucleotide
  Sense strand starting at position 1622 of SEQ ID NO: 1881282
guauauuggcuauaguaau

SEQ ID NO: 2032417 - RNA, 19 nt, Artificial Sequence
  Description of Artificial Sequence: Synthetic oligonucleotide
  Antisense strand to SEQ ID NO: 2032416
auuacuauagccaauauac

SEQ ID NO: 2032418 - RNA, 19 nt, Artificial Sequence
  Description of Artificial Sequence: Synthetic oligonucleotide
  Sense strand starting at position 1710 of SEQ ID NO: 1881282
ugguuuaacuaaucugggu

SEQ ID NO: 2032419 - RNA, 19 nt, Artificial Sequence
  Description of Artificial Sequence: Synthetic oligonucleotide
  Antisense strand to SEQ ID NO: 2032418
acccagauuaguuaaacca

SEQ ID NO: 2032420 - RNA, 19 nt, Artificial Sequence
  Description of Artificial Sequence: Synthetic oligonucleotide
  Sense strand starting at position 1714 of SEQ ID NO: 1881282
uuaacuaaucuggguccuu

SEQ ID NO: 2032421 - RNA, 19 nt, Artificial Sequence
  Description of Artificial Sequence: Synthetic oligonucleotide
  Antisense strand to SEQ ID NO: 2032420
aaggacccagauuaguuaa

SEQ ID NO: 2032422 - RNA, 19 nt, Artificial Sequence
  Description of Artificial Sequence: Synthetic oligonucleotide
  Sense strand starting at position 1723 of SEQ ID NO: 1881282
cuggguccuuuccuagaua

SEQ ID NO: 2032423 - RNA, 19 nt, Artificial Sequence
  Description of Artificial Sequence: Synthetic oligonucleotide
  Antisense strand to SEQ ID NO: 2032422
uaucuaggaaaggacccag

SEQ ID NO: 2032424 - RNA, 19 nt, Artificial Sequence
  Description of Artificial Sequence: Synthetic oligonucleotide
  Sense strand starting at position 1726 of SEQ ID NO: 1881282
gguccuuuccuagauaugu

SEQ ID NO: 2032425 - RNA, 19 nt, Artificial Sequence
  Description of Artificial Sequence: Synthetic oligonucleotide
  Antisense strand to SEQ ID NO: 2032424
acauaucuaggaaaggacc

SEQ ID NO: 2032426 - RNA, 19 nt, Artificial Sequence
  Description of Artificial Sequence: Synthetic oligonucleotide
  Sense strand starting at position 1734 of SEQ ID NO: 1881282
ccuagauauguaugguaaa

SEQ ID NO: 2032427 - RNA, 19 nt, Artificial Sequence
  Description of Artificial Sequence: Synthetic oligonucleotide
  Antisense strand to SEQ ID NO: 2032426
uuuaccauacauaucuagg

SEQ ID NO: 2032428 - RNA, 19 nt, Artificial Sequence
  Description of Artificial Sequence: Synthetic oligonucleotide
  Sense strand starting at position 1991 of SEQ ID NO: 1881282
cugucauaggcccagcaaa

SEQ ID NO: 2032429 - RNA, 19 nt, Artificial Sequence
  Description of Artificial Sequence: Synthetic oligonucleotide
  Antisense strand to SEQ ID NO: 2032428
uuugcugggccuaugacag

SEQ ID NO: 2032430 - RNA, 19 nt, Artificial Sequence
  Description of Artificial Sequence: Synthetic oligonucleotide
  Sense strand starting at position 2030 of SEQ ID NO: 1881282
cuuuauugugagcauugau

SEQ ID NO: 2032431 - RNA, 19 nt, Artificial Sequence
  Description of Artificial Sequence: Synthetic oligonucleotide
  Antisense strand to SEQ ID NO: 2032430
aucaaugcucacaauaaag

SEQ ID NO: 2032432 - RNA, 19 nt, Artificial Sequence
  Description of Artificial Sequence: Synthetic oligonucleotide
  Sense strand starting at position 2090 of SEQ ID NO: 1881282
ugaugucacaaagguuagu

SEQ ID NO: 2032433 - RNA, 19 nt, Artificial Sequence
  Description of Artificial Sequence: Synthetic oligonucleotide
  Antisense strand to SEQ ID NO: 2032432
acuaaccuuugugacauca

SEQ ID NO: 2032434 - RNA, 19 nt, Artificial Sequence
  Description of Artificial Sequence: Synthetic oligonucleotide
  Sense strand starting at position 2096 of SEQ ID NO: 1881282
cacaaagguuaguuacagu

SEQ ID NO: 2032435 - RNA, 19 nt, Artificial Sequence
  Description of Artificial Sequence: Synthetic oligonucleotide
  Antisense strand to SEQ ID NO: 2032434
acuguaacuaaccuuugug

SEQ ID NO: 2032436 - RNA, 19 nt, Artificial Sequence
  Description of Artificial Sequence: Synthetic oligonucleotide
  Sense strand starting at position 2106 of SEQ ID NO: 1881282
aguuacaguuucuugacau

SEQ ID NO: 2032437 - RNA, 19 nt, Artificial Sequence
  Description of Artificial Sequence: Synthetic oligonucleotide
  Antisense strand to SEQ ID NO: 2032436
augucaagaaacuguaacu

SEQ ID NO: 2032438 - RNA, 19 nt, Artificial Sequence
  Description of Artificial Sequence: Synthetic oligonucleotide
  Sense strand starting at position 2251 of SEQ ID NO: 1881282
gcagauaacguguauccua

SEQ ID NO: 2032439 - RNA, 19 nt, Artificial Sequence
  Description of Artificial Sequence: Synthetic oligonucleotide
  Antisense strand to SEQ ID NO: 2032438
uaggauacacguuaucugc

SEQ ID NO: 2032440 - RNA, 19 nt, Artificial Sequence
  Description of Artificial Sequence: Synthetic oligonucleotide
  Sense strand starting at position 2254 of SEQ ID NO: 1881282
gauaacguguauccuaaua

SEQ ID NO: 2032441 - RNA, 19 nt, Artificial Sequence
  Description of Artificial Sequence: Synthetic oligonucleotide
  Antisense strand to SEQ ID NO: 2032440
uauuaggauacacguuauc

SEQ ID NO: 2032442 - RNA, 19 nt, Artificial Sequence
  Description of Artificial Sequence: Synthetic oligonucleotide
  Sense strand starting at position 2381 of SEQ ID NO: 1881282
aaguauuugcuaggcauau

SEQ ID NO: 2032443 - RNA, 19 nt, Artificial Sequence
  Description of Artificial Sequence: Synthetic oligonucleotide
  Antisense strand to SEQ ID NO: 2032442
auaugccuagcaaauacuu

SEQ ID NO: 2032444 - RNA, 19 nt, Artificial Sequence
  Description of Artificial Sequence: Synthetic oligonucleotide
  Sense strand starting at position 2382 of SEQ ID NO: 1881282
aguauuugcuaggcauaug

SEQ ID NO: 2032445 - RNA, 19 nt, Artificial Sequence
  Description of Artificial Sequence: Synthetic oligonucleotide
  Antisense strand to SEQ ID NO: 2032444
cauaugccuagcaaauacu

SEQ ID NO: 2032446 - RNA, 19 nt, Artificial Sequence
  Description of Artificial Sequence: Synthetic oligonucleotide
  Sense strand starting at position 2434 of SEQ ID NO: 1881282
ggaaguaaugaaugguauu

SEQ ID NO: 2032447 - RNA, 19 nt, Artificial Sequence
  Description of Artificial Sequence: Synthetic oligonucleotide
  Antisense strand to SEQ ID NO: 2032446
aauaccauucauuacuucc

SEQ ID NO: 2032448 - RNA, 19 nt, Artificial Sequence
  Description of Artificial Sequence: Synthetic oligonucleotide
  Sense strand starting at position 2453 of SEQ ID NO: 1881282
ucugcuuggauaggauauu

SEQ ID NO: 2032449 - RNA, 19 nt, Artificial Sequence
  Description of Artificial Sequence: Synthetic oligonucleotide
  Antisense strand to SEQ ID NO: 2032448
aauauccuauccaagcaga

SEQ ID NO: 2032450 - RNA, 19 nt, Artificial Sequence
  Description of Artificial Sequence: Synthetic oligonucleotide
  Sense strand starting at position 2746 of SEQ ID NO: 1881282
auguuuaucucacuagaug

SEQ ID NO: 2032451 - RNA, 19 nt, Artificial Sequence
  Description of Artificial Sequence: Synthetic oligonucleotide
  Antisense strand to SEQ ID NO: 2032450
caucuagugagauaaacau

SEQ ID NO: 2032452 - RNA, 19 nt, Artificial Sequence
  Description of Artificial Sequence: Synthetic oligonucleotide
  Sense strand starting at position 3678 of SEQ ID NO: 1881282
aagaauggaucagaauaag

SEQ ID NO: 2032453 - RNA, 19 nt, Artificial Sequence
  Description of Artificial Sequence: Synthetic oligonucleotide
  Antisense strand to SEQ ID NO: 2032452
cuuauucugauccauucuu

SEQ ID NO: 2032454 - RNA, 19 nt, Artificial Sequence
  Description of Artificial Sequence: Synthetic oligonucleotide
  Sense strand starting at position 3690 of SEQ ID NO: 1881282
gaauaaggcccuuggaaau

SEQ ID NO: 2032455 - RNA, 19 nt, Artificial Sequence
  Description of Artificial Sequence: Synthetic oligonucleotide
  Antisense strand to SEQ ID NO: 2032454
auuuccaagggccuuauuc

SEQ ID NO: 2032456 - RNA, 19 nt, Artificial Sequence
  Description of Artificial Sequence: Synthetic oligonucleotide
  Sense strand starting at position 610 of SEQ ID NO: 1881283
ugagaaagguucucgcuau

SEQ ID NO: 2032457 - RNA, 19 nt, Artificial Sequence
  Description of Artificial Sequence: Synthetic oligonucleotide
  Antisense strand to SEQ ID NO: 2032456
auagcgagaaccuuucuca

SEQ ID NO: 2032458 - RNA, 19 nt, Artificial Sequence
  Description of Artificial Sequence: Synthetic oligonucleotide
  Sense strand starting at position 2015 of SEQ ID NO: 1881283
cggauuggguccaaugaga

SEQ ID NO: 2032459 - RNA, 19 nt, Artificial Sequence
  Description of Artificial Sequence: Synthetic oligonucleotide
  Antisense strand to SEQ ID NO: 2032458
ucucauuggacccaauccg

SEQ ID NO: 2032460 - RNA, 19 nt, Artificial Sequence
  Description of Artificial Sequence: Synthetic oligonucleotide
  Sense strand starting at position 2234 of SEQ ID NO: 1881283
gggcaagaacgcugagaaa

SEQ ID NO: 2032461 - RNA, 19 nt, Artificial Sequence
  Description of Artificial Sequence: Synthetic oligonucleotide
  Antisense strand to SEQ ID NO: 2032460
uuucucagcguucuugccc

SEQ ID NO: 2032462 - RNA, 19 nt, Artificial Sequence
  Description of Artificial Sequence: Synthetic oligonucleotide
  Sense strand starting at position 2246 of SEQ ID NO: 1881283
ugagaaacgguuugcucuu

SEQ ID NO: 2032463 - RNA, 19 nt, Artificial Sequence
  Description of Artificial Sequence: Synthetic oligonucleotide
  Antisense strand to SEQ ID NO: 2032462
aagagcaaaccguuucuca

SEQ ID NO: 2032464 - RNA, 19 nt, Artificial Sequence
  Description of Artificial Sequence: Synthetic oligonucleotide
  Sense strand starting at position 2253 of SEQ ID NO: 1881283
cgguuugcucuugucucau

SEQ ID NO: 2032465 - RNA, 19 nt, Artificial Sequence
  Description of Artificial Sequence: Synthetic oligonucleotide
  Antisense strand to SEQ ID NO: 2032464
augagacaagagcaaaccg

SEQ ID NO: 2032466 - RNA, 19 nt, Artificial Sequence
  Description of Artificial Sequence: Synthetic oligonucleotide
  Sense strand starting at position 2269 of SEQ ID NO: 1881283
cauugugucgccucccauu

SEQ ID NO: 2032467 - RNA, 19 nt, Artificial Sequence
  Description of Artificial Sequence: Synthetic oligonucleotide
  Antisense strand to SEQ ID NO: 2032466
aaugggaggcgacacaaug

SEQ ID NO: 2032468 - RNA, 19 nt, Artificial Sequence
  Description of Artificial Sequence: Synthetic oligonucleotide
  Sense strand starting at position 2377 of SEQ ID NO: 1881283
agccacuugcucuggaaga

SEQ ID NO: 2032469 - RNA, 19 nt, Artificial Sequence
  Description of Artificial Sequence: Synthetic oligonucleotide
  Antisense strand to SEQ ID NO: 2032468
ucuuccagagcaaguggcu

SEQ ID NO: 2032470 - RNA, 19 nt, Artificial Sequence
  Description of Artificial Sequence: Synthetic oligonucleotide
  Sense strand starting at position 2661 of SEQ ID NO: 1881283
ggaggaugguguuacggaa

SEQ ID NO: 2032471 - RNA, 19 nt, Artificial Sequence
  Description of Artificial Sequence: Synthetic oligonucleotide
  Antisense strand to SEQ ID NO: 2032470
uuccguaacaccauccucc

SEQ ID NO: 2032472 - RNA, 19 nt, Artificial Sequence
  Description of Artificial Sequence: Synthetic oligonucleotide
  Sense strand starting at position 2667 of SEQ ID NO: 1881283
ugguguuacggaagcugua

SEQ ID NO: 2032473 - RNA, 19 nt, Artificial Sequence
  Description of Artificial Sequence: Synthetic oligonucleotide
  Antisense strand to SEQ ID NO: 2032472
uacagcuuccguaacacca

SEQ ID NO: 2032474 - RNA, 19 nt, Artificial Sequence
  Description of Artificial Sequence: Synthetic oligonucleotide
  Sense strand starting at position 2777 of SEQ ID NO: 1881283
aggguguucggauguaaag

SEQ ID NO: 2032475 - RNA, 19 nt, Artificial Sequence
  Description of Artificial Sequence: Synthetic oligonucleotide
  Antisense strand to SEQ ID NO: 2032474
cuuuacauccgaacacccu

SEQ ID NO: 2032476 - RNA, 19 nt, Artificial Sequence
  Description of Artificial Sequence: Synthetic oligonucleotide
  Sense strand starting at position 2779 of SEQ ID NO: 1881283
gguguucggauguaaagau

SEQ ID NO: 2032477 - RNA, 19 nt, Artificial Sequence
  Description of Artificial Sequence: Synthetic oligonucleotide
  Antisense strand to SEQ ID NO: 2032476
aucuuuacauccgaacacc

SEQ ID NO: 2032478 - RNA, 19 nt, Artificial Sequence
  Description of Artificial Sequence: Synthetic oligonucleotide
  Sense strand starting at position 2788 of SEQ ID NO: 1881283
auguaaagaucggagaauu

SEQ ID NO: 2032479 - RNA, 19 nt, Artificial Sequence
  Description of Artificial Sequence: Synthetic oligonucleotide
  Antisense strand to SEQ ID NO: 2032478
aauucuccgaucuuuacau

SEQ ID NO: 2032480 - RNA, 19 nt, Artificial Sequence
  Description of Artificial Sequence: Synthetic oligonucleotide
  Sense strand starting at position 2796 of SEQ ID NO: 1881283
aucggagaauugcuggauu

SEQ ID NO: 2032481 - RNA, 19 nt, Artificial Sequence
  Description of Artificial Sequence: Synthetic oligonucleotide
  Antisense strand to SEQ ID NO: 2032480
aauccagcaauucuccgau

SEQ ID NO: 2032482 - RNA, 19 nt, Artificial Sequence
  Description of Artificial Sequence: Synthetic oligonucleotide
  Sense strand starting at position 2963 of SEQ ID NO: 1881283
ccaauuauuuaguaaacgu

SEQ ID NO: 2032483 - RNA, 19 nt, Artificial Sequence
  Description of Artificial Sequence: Synthetic oligonucleotide
  Antisense strand to SEQ ID NO: 2032482
acguuuacuaaauaauugg

SEQ ID NO: 2032484 - RNA, 19 nt, Artificial Sequence
  Description of Artificial Sequence: Synthetic oligonucleotide
  Sense strand starting at position 2971 of SEQ ID NO: 1881283
uuaguaaacguuuaucgag

SEQ ID NO: 2032485 - RNA, 19 nt, Artificial Sequence
  Description of Artificial Sequence: Synthetic oligonucleotide
  Antisense strand to SEQ ID NO: 2032484
cucgauaaacguuuacuaa

SEQ ID NO: 2032486 - RNA, 19 nt, Artificial Sequence
  Description of Artificial Sequence: Synthetic oligonucleotide
  Sense strand starting at position 2977 of SEQ ID NO: 1881283
aacguuuaucgagugcugu

SEQ ID NO: 2032487 - RNA, 19 nt, Artificial Sequence
  Description of Artificial Sequence: Synthetic oligonucleotide
  Antisense strand to SEQ ID NO: 2032486
acagcacucgauaaacguu

SEQ ID NO: 2032488 - RNA, 19 nt, Artificial Sequence
  Description of Artificial Sequence: Synthetic oligonucleotide
  Sense strand starting at position 2983 of SEQ ID NO: 1881283
uaucgagugcugucgccaa

SEQ ID NO: 2032489 - RNA, 19 nt, Artificial Sequence
  Description of Artificial Sequence: Synthetic oligonucleotide
  Antisense strand to SEQ ID NO: 2032488
uuggcgacagcacucgaua

SEQ ID NO: 2032490 - RNA, 19 nt, Artificial Sequence
  Description of Artificial Sequence: Synthetic oligonucleotide
  Sense strand starting at position 2985 of SEQ ID NO: 1881283
ucgagugcugucgccaaau

SEQ ID NO: 2032491 - RNA, 19 nt, Artificial Sequence
  Description of Artificial Sequence: Synthetic oligonucleotide
  Antisense strand to SEQ ID NO: 2032490
auuuggcgacagcacucga

SEQ ID NO: 2032492 - RNA, 19 nt, Artificial Sequence
  Description of Artificial Sequence: Synthetic oligonucleotide
  Sense strand starting at position 2995 of SEQ ID NO: 1881283
ucgccaaauccuugugcua

SEQ ID NO: 2032493 - RNA, 19 nt, Artificial Sequence
  Description of Artificial Sequence: Synthetic oligonucleotide
  Antisense strand to SEQ ID NO: 2032492
uagcacaaggauuuggcga

SEQ ID NO: 2032494 - RNA, 19 nt, Artificial Sequence
  Description of Artificial Sequence: Synthetic oligonucleotide
  Sense strand starting at position 3043 of SEQ ID NO: 1881283
ugcgcucugcgagcucaua

SEQ ID NO: 2032495 - RNA, 19 nt, Artificial Sequence
  Description of Artificial Sequence: Synthetic oligonucleotide
  Antisense strand to SEQ ID NO: 2032494
uaugagcucgcagagcgca

SEQ ID NO: 2032496 - RNA, 19 nt, Artificial Sequence
  Description of Artificial Sequence: Synthetic oligonucleotide
  Sense strand starting at position 3044 of SEQ ID NO: 1881283
gcgcucugcgagcucauaa

SEQ ID NO: 2032497 - RNA, 19 nt, Artificial Sequence
  Description of Artificial Sequence: Synthetic oligonucleotide
  Antisense strand to SEQ ID NO: 2032496
uuaugagcucgcagagcgc

SEQ ID NO: 2032498 - RNA, 19 nt, Artificial Sequence
  Description of Artificial Sequence: Synthetic oligonucleotide
  Sense strand starting at position 3045 of SEQ ID NO: 1881283
cgcucugcgagcucauaau

SEQ ID NO: 2032499 - RNA, 19 nt, Artificial Sequence
  Description of Artificial Sequence: Synthetic oligonucleotide
  Antisense strand to SEQ ID NO: 2032498
auuaugagcucgcagagcg

SEQ ID NO: 2032500 - RNA, 19 nt, Artificial Sequence
  Description of Artificial Sequence: Synthetic oligonucleotide
  Sense strand starting at position 3136 of SEQ ID NO: 1881283
ggguaaguguggagaaugu

SEQ ID NO: 2032501 - RNA, 19 nt, Artificial Sequence
  Description of Artificial Sequence: Synthetic oligonucleotide
  Antisense strand to SEQ ID NO: 2032500
acauucuccacacuuaccc

SEQ ID NO: 2032502 - RNA, 19 nt, Artificial Sequence
  Description of Artificial Sequence: Synthetic oligonucleotide
  Sense strand starting at position 3149 of SEQ ID NO: 1881283
gaaugugugaaauguguua

SEQ ID NO: 2032503 - RNA, 19 nt, Artificial Sequence
  Description of Artificial Sequence: Synthetic oligonucleotide
  Antisense strand to SEQ ID NO: 2032502
uaacacauuucacacauuc

SEQ ID NO: 2032504 - RNA, 19 nt, Artificial Sequence
  Description of Artificial Sequence: Synthetic oligonucleotide
  Sense strand starting at position 3151 of SEQ ID NO: 1881283
augugugaaauguguuacu

SEQ ID NO: 2032505 - RNA, 19 nt, Artificial Sequence
  Description of Artificial Sequence: Synthetic oligonucleotide
  Antisense strand to SEQ ID NO: 2032504
aguaacacauuucacacau

SEQ ID NO: 2032506 - RNA, 19 nt, Artificial Sequence
  Description of Artificial Sequence: Synthetic oligonucleotide
  Sense strand starting at position 3156 of SEQ ID NO: 1881283
ugaaauguguuacuagagu

SEQ ID NO: 2032507 - RNA, 19 nt, Artificial Sequence
  Description of Artificial Sequence: Synthetic oligonucleotide
  Antisense strand to SEQ ID NO: 2032506
acucuaguaacacauuuca

SEQ ID NO: 2032508 - RNA, 19 nt, Artificial Sequence
  Description of Artificial Sequence: Synthetic oligonucleotide
  Sense strand starting at position 3162 of SEQ ID NO: 1881283
guguuacuagaguagggaa

SEQ ID NO: 2032509 - RNA, 19 nt, Artificial Sequence
  Description of Artificial Sequence: Synthetic oligonucleotide
  Antisense strand to SEQ ID NO: 2032508
uucccuacucuaguaacac

SEQ ID NO: 2032510 - RNA, 19 nt, Artificial Sequence
  Description of Artificial Sequence: Synthetic oligonucleotide
  Sense strand starting at position 3189 of SEQ ID NO: 1881283
uuuguuugacgcuaaauua

SEQ ID NO: 2032511 - RNA, 19 nt, Artificial Sequence
  Description of Artificial Sequence: Synthetic oligonucleotide
  Antisense strand to SEQ ID NO: 2032510
uaauuuagcgucaaacaaa

SEQ ID NO: 2032512 - RNA, 19 nt, Artificial Sequence
  Description of Artificial Sequence: Synthetic oligonucleotide
  Sense strand starting at position 3206 of SEQ ID NO: 1881283
uagggaagcucuuagauuu

SEQ ID NO: 2032513 - RNA, 19 nt, Artificial Sequence
  Description of Artificial Sequence: Synthetic oligonucleotide
  Antisense strand to SEQ ID NO: 2032512
aaaucuaagagcuucccua

SEQ ID NO: 2032514 - RNA, 19 nt, Artificial Sequence
  Description of Artificial Sequence: Synthetic oligonucleotide
  Sense strand starting at position 3486 of SEQ ID NO: 1881283
gcaacagagcgauauuccu

SEQ ID NO: 2032515 - RNA, 19 nt, Artificial Sequence
  Description of Artificial Sequence: Synthetic oligonucleotide
  Antisense strand to SEQ ID NO: 2032514
aggaauaucgcucuguugc

SEQ ID NO: 2032516 - RNA, 19 nt, Artificial Sequence
  Description of Artificial Sequence: Synthetic oligonucleotide
  Sense strand starting at position 3563 of SEQ ID NO: 1881283
cuuuauugccuaggcugaa

SEQ ID NO: 2032517 - RNA, 19 nt, Artificial Sequence
  Description of Artificial Sequence: Synthetic oligonucleotide
  Antisense strand to SEQ ID NO: 2032516
uucagccuaggcaauaaag

SEQ ID NO: 2032518 - RNA, 19 nt, Artificial Sequence
  Description of Artificial Sequence: Synthetic oligonucleotide
  Sense strand starting at position 3799 of SEQ ID NO: 1881283
cuaagugccaggcaugauu

SEQ ID NO: 2032519 - RNA, 19 nt, Artificial Sequence
  Description of Artificial Sequence: Synthetic oligonucleotide
  Antisense strand to SEQ ID NO: 2032518
aaucaugccuggcacuuag

SEQ ID NO: 2032520 - RNA, 19 nt, Artificial Sequence
  Description of Artificial Sequence: Synthetic oligonucleotide
  Sense strand starting at position 3853 of SEQ ID NO: 1881283
guuccacauccugaccauu

SEQ ID NO: 2032521 - RNA, 19 nt, Artificial Sequence
  Description of Artificial Sequence: Synthetic oligonucleotide
  Antisense strand to SEQ ID NO: 2032520
aauggucaggauguggaac

SEQ ID NO: 2032522 - RNA, 19 nt, Artificial Sequence
  Description of Artificial Sequence: Synthetic oligonucleotide
  Sense strand starting at position 3879 of SEQ ID NO: 1881283
uaaagcauccugugagaug

SEQ ID NO: 2032523 - RNA, 19 nt, Artificial Sequence
  Description of Artificial Sequence: Synthetic oligonucleotide
  Antisense strand to SEQ ID NO: 2032522
caucucacaggaugcuuua

SEQ ID NO: 2032524 - RNA, 19 nt, Artificial Sequence
  Description of Artificial Sequence: Synthetic oligonucleotide
  Sense strand starting at position 3880 of SEQ ID NO: 1881283
aaagcauccugugagauga

SEQ ID NO: 2032525 - RNA, 19 nt, Artificial Sequence
  Description of Artificial Sequence: Synthetic oligonucleotide
  Antisense strand to SEQ ID NO: 2032524
ucaucucacaggaugcuuu

SEQ ID NO: 2032526 - RNA, 19 nt, Artificial Sequence
  Description of Artificial Sequence: Synthetic oligonucleotide
  Sense strand starting at position 3882 of SEQ ID NO: 1881283
agcauccugugagaugaaa

SEQ ID NO: 2032527 - RNA, 19 nt, Artificial Sequence
  Description of Artificial Sequence: Synthetic oligonucleotide
  Antisense strand to SEQ ID NO: 2032526
uuucaucucacaggaugcu

SEQ ID NO: 2032528 - RNA, 19 nt, Artificial Sequence
  Description of Artificial Sequence: Synthetic oligonucleotide
  Sense strand starting at position 3908 of SEQ ID NO: 1881283
ccuucugacuuugucuauu

SEQ ID NO: 2032529 - RNA, 19 nt, Artificial Sequence
  Description of Artificial Sequence: Synthetic oligonucleotide
  Antisense strand to SEQ ID NO: 2032528
aauagacaaagucagaagg

SEQ ID NO: 2032530 - RNA, 19 nt, Artificial Sequence
  Description of Artificial Sequence: Synthetic oligonucleotide
  Sense strand starting at position 3910 of SEQ ID NO: 1881283
uucugacuuugucuauuau

SEQ ID NO: 2032531 - RNA, 19 nt, Artificial Sequence
  Description of Artificial Sequence: Synthetic oligonucleotide
  Antisense strand to SEQ ID NO: 2032530
auaauagacaaagucagaa

SEQ ID NO: 2032532 - RNA, 19 nt, Artificial Sequence
  Description of Artificial Sequence: Synthetic oligonucleotide
  Sense strand starting at position 3911 of SEQ ID NO: 1881283
ucugacuuugucuauuauu

SEQ ID NO: 2032533 - RNA, 19 nt, Artificial Sequence
  Description of Artificial Sequence: Synthetic oligonucleotide
  Antisense strand to SEQ ID NO: 2032532
aauaauagacaaagucaga

SEQ ID NO: 2032534 - RNA, 19 nt, Artificial Sequence
  Description of Artificial Sequence: Synthetic oligonucleotide
  Sense strand starting at position 3939 of SEQ ID NO: 1881283
agucuaaaccuguagcuuu

SEQ ID NO: 2032535 - RNA, 19 nt, Artificial Sequence
  Description of Artificial Sequence: Synthetic oligonucleotide
  Antisense strand to SEQ ID NO: 2032534
aaagcuacagguuuagacu

SEQ ID NO: 2032536 - RNA, 19 nt, Artificial Sequence
  Description of Artificial Sequence: Synthetic oligonucleotide
  Sense strand starting at position 5 of SEQ ID NO: 1881284
guagguuagaagcauuaaa

SEQ ID NO: 2032537 - RNA, 19 nt, Artificial Sequence
  Description of Artificial Sequence: Synthetic oligonucleotide
  Antisense strand to SEQ ID NO: 2032536
uuuaaugcuucuaaccuac

SEQ ID NO: 2032538 - RNA, 19 nt, Artificial Sequence
  Description of Artificial Sequence: Synthetic oligonucleotide
  Sense strand starting at position 133 of SEQ ID NO: 1881284
gagugagggcuucaguaug

SEQ ID NO: 2032539 - RNA, 19 nt, Artificial Sequence
  Description of Artificial Sequence: Synthetic oligonucleotide
  Antisense strand to SEQ ID NO: 2032538
cauacugaagcccucacuc

SEQ ID NO: 2032540 - RNA, 19 nt, Artificial Sequence
  Description of Artificial Sequence: Synthetic oligonucleotide
  Sense strand starting at position 350 of SEQ ID NO: 1881284
guaaauuugugcuugaccu

SEQ ID NO: 2032541 - RNA, 19 nt, Artificial Sequence
  Description of Artificial Sequence: Synthetic oligonucleotide
  Antisense strand to SEQ ID NO: 2032540
aggucaagcacaaauuuac

SEQ ID NO: 2032542 - RNA, 19 nt, Artificial Sequence
  Description of Artificial Sequence: Synthetic oligonucleotide
  Sense strand starting at position 362 of SEQ ID NO: 1881284
uugaccuugugauccuaca

SEQ ID NO: 2032543 - RNA, 19 nt, Artificial Sequence
  Description of Artificial Sequence: Synthetic oligonucleotide
  Antisense strand to SEQ ID NO: 2032542
uguaggaucacaaggucaa

SEQ ID NO: 2032544 - RNA, 19 nt, Artificial Sequence
  Description of Artificial Sequence: Synthetic oligonucleotide
  Sense strand starting at position 470 of SEQ ID NO: 1881284
ugguucugaugucuggaaa

SEQ ID NO: 2032545 - RNA, 19 nt, Artificial Sequence
  Description of Artificial Sequence: Synthetic oligonucleotide
  Antisense strand to SEQ ID NO: 2032544
uuuccagacaucagaacca

SEQ ID NO: 2032546 - RNA, 19 nt, Artificial Sequence
  Description of Artificial Sequence: Synthetic oligonucleotide
  Sense strand starting at position 510 of SEQ ID NO: 1881284
aucugaugguagccuaaga

SEQ ID NO: 2032547 - RNA, 19 nt, Artificial Sequence
  Description of Artificial Sequence: Synthetic oligonucleotide
  Antisense strand to SEQ ID NO: 2032546
ucuuaggcuaccaucagau

SEQ ID NO: 2032548 - RNA, 19 nt, Artificial Sequence
  Description of Artificial Sequence: Synthetic oligonucleotide
  Sense strand starting at position 631 of SEQ ID NO: 1881284
accagcucugguggaaaua

SEQ ID NO: 2032549 - RNA, 19 nt, Artificial Sequence
  Description of Artificial Sequence: Synthetic oligonucleotide
  Antisense strand to SEQ ID NO: 2032548
uauuuccaccagagcuggu

SEQ ID NO: 2032550 - RNA, 19 nt, Artificial Sequence
  Description of Artificial Sequence: Synthetic oligonucleotide
  Sense strand starting at position 632 of SEQ ID NO: 1881284
ccagcucugguggaaauaa

SEQ ID NO: 2032551 - RNA, 19 nt, Artificial Sequence
  Description of Artificial Sequence: Synthetic oligonucleotide
  Antisense strand to SEQ ID NO: 2032550
uuauuuccaccagagcugg

SEQ ID NO: 2032552 - RNA, 19 nt, Artificial Sequence
  Description of Artificial Sequence: Synthetic oligonucleotide
  Sense strand starting at position 914 of SEQ ID NO: 1881284
guauuaaugccuuaaacag

SEQ ID NO: 2032553 - RNA, 19 nt, Artificial Sequence
  Description of Artificial Sequence: Synthetic oligonucleotide
  Antisense strand to SEQ ID NO: 2032552
cuguuuaaggcauuaauac

SEQ ID NO: 2032554 - RNA, 19 nt, Artificial Sequence
  Description of Artificial Sequence: Synthetic oligonucleotide
  Sense strand starting at position 1007 of SEQ ID NO: 1881284
uuuacaaucuagguagaca

SEQ ID NO: 2032555 - RNA, 19 nt, Artificial Sequence
  Description of Artificial Sequence: Synthetic oligonucleotide
  Antisense strand to SEQ ID NO: 2032554
ugucuaccuagauuguaaa

SEQ ID NO: 2032556 - RNA, 19 nt, Artificial Sequence
  Description of Artificial Sequence: Synthetic oligonucleotide
  Sense strand starting at position 1062 of SEQ ID NO: 1881284
acaccugugcuccaaggaa

SEQ ID NO: 2032557 - RNA, 19 nt, Artificial Sequence
  Description of Artificial Sequence: Synthetic oligonucleotide
  Antisense strand to SEQ ID NO: 2032556
uuccuuggagcacaggugu

SEQ ID NO: 2032558 - RNA, 19 nt, Artificial Sequence
  Description of Artificial Sequence: Synthetic oligonucleotide
  Sense strand starting at position 1092 of SEQ ID NO: 1881284
gagcaagcuucccugagga

SEQ ID NO: 2032559 - RNA, 19 nt, Artificial Sequence
  Description of Artificial Sequence: Synthetic oligonucleotide
  Antisense strand to SEQ ID NO: 2032558
uccucagggaagcuugcuc

SEQ ID NO: 2032560 - RNA, 19 nt, Artificial Sequence
  Description of Artificial Sequence: Synthetic oligonucleotide
  Sense strand starting at position 1124 of SEQ ID NO: 1881284
gugccacaaagaugguuaa

SEQ ID NO: 2032561 - RNA, 19 nt, Artificial Sequence
  Description of Artificial Sequence: Synthetic oligonucleotide
  Antisense strand to SEQ ID NO: 2032560
uuaaccaucuuuguggcac

SEQ ID NO: 2032562 - RNA, 19 nt, Artificial Sequence
  Description of Artificial Sequence: Synthetic oligonucleotide
  Sense strand starting at position 1131 of SEQ ID NO: 1881284
aaagaugguuaagaagaga

SEQ ID NO: 2032563 - RNA, 19 nt, Artificial Sequence
  Description of Artificial Sequence: Synthetic oligonucleotide
  Antisense strand to SEQ ID NO: 2032562
ucucuucuuaaccaucuuu

SEQ ID NO: 2032564 - RNA, 19 nt, Artificial Sequence
  Description of Artificial Sequence: Synthetic oligonucleotide
  Sense strand starting at position 1651 of SEQ ID NO: 1881284
uggucugugccucaaauua

SEQ ID NO: 2032565 - RNA, 19 nt, Artificial Sequence
  Description of Artificial Sequence: Synthetic oligonucleotide
  Antisense strand to SEQ ID NO: 2032564
uaauuugaggcacagacca

SEQ ID NO: 2032566 - RNA, 19 nt, Artificial Sequence
  Description of Artificial Sequence: Synthetic oligonucleotide
  Sense strand starting at position 1751 of SEQ ID NO: 1881284
gaaccuucggcugggauga

SEQ ID NO: 2032567 - RNA, 19 nt, Artificial Sequence
  Description of Artificial Sequence: Synthetic oligonucleotide
  Antisense strand to SEQ ID NO: 2032566
ucaucccagccgaagguuc

SEQ ID NO: 2032568 - RNA, 19 nt, Artificial Sequence
  Description of Artificial Sequence: Synthetic oligonucleotide
  Sense strand starting at position 1764 of SEQ ID NO: 1881284
ggaugacauucuucaggug

SEQ ID NO: 2032569 - RNA, 19 nt, Artificial Sequence
  Description of Artificial Sequence: Synthetic oligonucleotide
  Antisense strand to SEQ ID NO: 2032568
caccugaagaaugucaucc

SEQ ID NO: 2032570 - RNA, 19 nt, Artificial Sequence
  Description of Artificial Sequence: Synthetic oligonucleotide
  Sense strand starting at position 2082 of SEQ ID NO: 1881284
ggcgacugaaccuaucaga

SEQ ID NO: 2032571 - RNA, 19 nt, Artificial Sequence
  Description of Artificial Sequence: Synthetic oligonucleotide
  Antisense strand to SEQ ID NO: 2032570
ucugauagguucagucgcc

SEQ ID NO: 2032572 - RNA, 19 nt, Artificial Sequence
  Description of Artificial Sequence: Synthetic oligonucleotide
  Sense strand starting at position 2380 of SEQ ID NO: 1881284
ccucuucucgcgcugaguu

SEQ ID NO: 2032573 - RNA, 19 nt, Artificial Sequence
  Description of Artificial Sequence: Synthetic oligonucleotide
  Antisense strand to SEQ ID NO: 2032572
aacucagcgcgagaagagg

SEQ ID NO: 2032574 - RNA, 19 nt, Artificial Sequence
  Description of Artificial Sequence: Synthetic oligonucleotide
  Sense strand starting at position 2468 of SEQ ID NO: 1881284
agacuucugcaccgggauu

SEQ ID NO: 2032575 - RNA, 19 nt, Artificial Sequence
  Description of Artificial Sequence: Synthetic oligonucleotide
  Antisense strand to SEQ ID NO: 2032574
aaucccggugcagaagucu

SEQ ID NO: 2032576 - RNA, 19 nt, Artificial Sequence
  Description of Artificial Sequence: Synthetic oligonucleotide
  Sense strand starting at position 2552 of SEQ ID NO: 1881284
gcgcugugucgggcugaga

SEQ ID NO: 2032577 - RNA, 19 nt, Artificial Sequence
  Description of Artificial Sequence: Synthetic oligonucleotide
  Antisense strand to SEQ ID NO: 2032576
ucucagcccgacacagcgc

SEQ ID NO: 2032578 - RNA, 19 nt, Artificial Sequence
  Description of Artificial Sequence: Synthetic oligonucleotide
  Sense strand starting at position 2837 of SEQ ID NO: 1881284
acuuuaauggucuggaccu

SEQ ID NO: 2032579 - RNA, 19 nt, Artificial Sequence
  Description of Artificial Sequence: Synthetic oligonucleotide
  Antisense strand to SEQ ID NO: 2032578
agguccagaccauuaaagu

SEQ ID NO: 2032580 - RNA, 19 nt, Artificial Sequence
  Description of Artificial Sequence: Synthetic oligonucleotide
  Sense strand starting at position 3084 of SEQ ID NO: 1881284
aauaauuaugcacguuaga

SEQ ID NO: 2032581 - RNA, 19 nt, Artificial Sequence
  Description of Artificial Sequence: Synthetic oligonucleotide
  Antisense strand to SEQ ID NO: 2032580
ucuaacgugcauaauuauu

SEQ ID NO: 2032582 - RNA, 19 nt, Artificial Sequence
  Description of Artificial Sequence: Synthetic oligonucleotide
  Sense strand starting at position 3087 of SEQ ID NO: 1881284
aauuaugcacguuagauua

SEQ ID NO: 2032583 - RNA, 19 nt, Artificial Sequence
  Description of Artificial Sequence: Synthetic oligonucleotide
  Antisense strand to SEQ ID NO: 2032582
uaaucuaacgugcauaauu

SEQ ID NO: 2032584 - RNA, 19 nt, Artificial Sequence
  Description of Artificial Sequence: Synthetic oligonucleotide
  Sense strand starting at position 3095 of SEQ ID NO: 1881284
acguuagauuagguaagaa

SEQ ID NO: 2032585 - RNA, 19 nt, Artificial Sequence
  Description of Artificial Sequence: Synthetic oligonucleotide
  Antisense strand to SEQ ID NO: 2032584
uucuuaccuaaucuaacgu

SEQ ID NO: 2032586 - RNA, 19 nt, Artificial Sequence
  Description of Artificial Sequence: Synthetic oligonucleotide
  Sense strand starting at position 3116 of SEQ ID NO: 1881284
ccuagaaauuaggaaagaa

SEQ ID NO: 2032587 - RNA, 19 nt, Artificial Sequence
  Description of Artificial Sequence: Synthetic oligonucleotide
  Antisense strand to SEQ ID NO: 2032586
uucuuuccuaauuucuagg

SEQ ID NO: 2032588 - RNA, 19 nt, Artificial Sequence
  Description of Artificial Sequence: Synthetic oligonucleotide
  Sense strand starting at position 3153 of SEQ ID NO: 1881284
ccuaacuccucuuugggua

SEQ ID NO: 2032589 - RNA, 19 nt, Artificial Sequence
  Description of Artificial Sequence: Synthetic oligonucleotide
  Antisense strand to SEQ ID NO: 2032588
uacccaaagaggaguuagg

SEQ ID NO: 2032590 - RNA, 19 nt, Artificial Sequence
  Description of Artificial Sequence: Synthetic oligonucleotide
  Sense strand starting at position 3240 of SEQ ID NO: 1881284
cuuugauagacguaugaca

SEQ ID NO: 2032591 - RNA, 19 nt, Artificial Sequence
  Description of Artificial Sequence: Synthetic oligonucleotide
  Antisense strand to SEQ ID NO: 2032590
ugucauacgucuaucaaag

SEQ ID NO: 2032592 - RNA, 19 nt, Artificial Sequence
  Description of Artificial Sequence: Synthetic oligonucleotide
  Sense strand starting at position 3242 of SEQ ID NO: 1881284
uugauagacguaugacaaa

SEQ ID NO: 2032593 - RNA, 19 nt, Artificial Sequence
  Description of Artificial Sequence: Synthetic oligonucleotide
  Antisense strand to SEQ ID NO: 2032592
uuugucauacgucuaucaa

SEQ ID NO: 2032594 - RNA, 19 nt, Artificial Sequence
  Description of Artificial Sequence: Synthetic oligonucleotide
  Sense strand starting at position 3476 of SEQ ID NO: 1881284
aguaauaugcacugguuga

SEQ ID NO: 2032595 - RNA, 19 nt, Artificial Sequence
  Description of Artificial Sequence: Synthetic oligonucleotide
  Antisense strand to SEQ ID NO: 2032594
ucaaccagugcauauuacu

SEQ ID NO: 2032596 - RNA, 19 nt, Artificial Sequence
  Description of Artificial Sequence: Synthetic oligonucleotide
  Sense strand starting at position 3477 of SEQ ID NO: 1881284
guaauaugcacugguugau

SEQ ID NO: 2032597 - RNA, 19 nt, Artificial Sequence
  Description of Artificial Sequence: Synthetic oligonucleotide
  Antisense strand to SEQ ID NO: 2032596
aucaaccagugcauauuac

SEQ ID NO: 2032598 - RNA, 19 nt, Artificial Sequence
  Description of Artificial Sequence: Synthetic oligonucleotide
  Sense strand starting at position 3480 of SEQ ID NO: 1881284
auaugcacugguugauaaa

SEQ ID NO: 2032599 - RNA, 19 nt, Artificial Sequence
  Description of Artificial Sequence: Synthetic oligonucleotide
  Antisense strand to SEQ ID NO: 2032598
uuuaucaaccagugcauau

SEQ ID NO: 2032600 - RNA, 19 nt, Artificial Sequence
  Description of Artificial Sequence: Synthetic oligonucleotide
  Sense strand starting at position 3481 of SEQ ID NO: 1881284
uaugcacugguugauaaau

SEQ ID NO: 2032601 - RNA, 19 nt, Artificial Sequence
  Description of Artificial Sequence: Synthetic oligonucleotide
  Antisense strand to SEQ ID NO: 2032600
auuuaucaaccagugcaua

SEQ ID NO: 2032602 - RNA, 19 nt, Artificial Sequence
  Description of Artificial Sequence: Synthetic oligonucleotide
  Sense strand starting at position 3528 of SEQ ID NO: 1881284
cucugagacuucuuuggga

SEQ ID NO: 2032603 - RNA, 19 nt, Artificial Sequence
  Description of Artificial Sequence: Synthetic oligonucleotide
  Antisense strand to SEQ ID NO: 2032602
ucccaaagaagucucagag

SEQ ID NO: 2032604 - RNA, 19 nt, Artificial Sequence
  Description of Artificial Sequence: Synthetic oligonucleotide
  Sense strand starting at position 3548 of SEQ ID NO: 1881284
aauugugaucuguggaaau

SEQ ID NO: 2032605 - RNA, 19 nt, Artificial Sequence
  Description of Artificial Sequence: Synthetic oligonucleotide
  Antisense strand to SEQ ID NO: 2032604
auuuccacagaucacaauu

SEQ ID NO: 2032606 - RNA, 19 nt, Artificial Sequence
  Description of Artificial Sequence: Synthetic oligonucleotide
  Sense strand starting at position 3550 of SEQ ID NO: 1881284
uugugaucuguggaaauug

SEQ ID NO: 2032607 - RNA, 19 nt, Artificial Sequence
  Description of Artificial Sequence: Synthetic oligonucleotide
  Antisense strand to SEQ ID NO: 2032606
caauuuccacagaucacaa

SEQ ID NO: 2032608 - RNA, 19 nt, Artificial Sequence
  Description of Artificial Sequence: Synthetic oligonucleotide
  Sense strand starting at position 3558 of SEQ ID NO: 1881284
uguggaaauuggcuguaau

SEQ ID NO: 2032609 - RNA, 19 nt, Artificial Sequence
  Description of Artificial Sequence: Synthetic oligonucleotide
  Antisense strand to SEQ ID NO: 2032608
auuacagccaauuuccaca

SEQ ID NO: 2032610 - RNA, 19 nt, Artificial Sequence
  Description of Artificial Sequence: Synthetic oligonucleotide
  Sense strand starting at position 3559 of SEQ ID NO: 1881284
guggaaauuggcuguaaua

SEQ ID NO: 2032611 - RNA, 19 nt, Artificial Sequence
  Description of Artificial Sequence: Synthetic oligonucleotide
  Antisense strand to SEQ ID NO: 2032610
uauuacagccaauuuccac

SEQ ID NO: 2032612 - RNA, 19 nt, Artificial Sequence
  Description of Artificial Sequence: Synthetic oligonucleotide
  Sense strand starting at position 3561 of SEQ ID NO: 1881284
ggaaauuggcuguaauauc

SEQ ID NO: 2032613 - RNA, 19 nt, Artificial Sequence
  Description of Artificial Sequence: Synthetic oligonucleotide
  Antisense strand to SEQ ID NO: 2032612
gauauuacagccaauuucc

SEQ ID NO: 2032614 - RNA, 19 nt, Artificial Sequence
  Description of Artificial Sequence: Synthetic oligonucleotide
  Sense strand starting at position 3582 of SEQ ID NO: 1881284
uaaacauaguuugcagagu

SEQ ID NO: 2032615 - RNA, 19 nt, Artificial Sequence
  Description of Artificial Sequence: Synthetic oligonucleotide
  Antisense strand to SEQ ID NO: 2032614
acucugcaaacuauguuua

SEQ ID NO: 2032616 - RNA, 19 nt, Artificial Sequence
  Description of Artificial Sequence: Synthetic oligonucleotide
  Sense strand starting at position 61 of SEQ ID NO: 1881285
ugucuacaggauugcauua

SEQ ID NO: 2032617 - RNA, 19 nt, Artificial Sequence
  Description of Artificial Sequence: Synthetic oligonucleotide
  Antisense strand to SEQ ID NO: 2032616
uaaugcaauccuguagaca

SEQ ID NO: 2032618 - RNA, 19 nt, Artificial Sequence
  Description of Artificial Sequence: Synthetic oligonucleotide
  Sense strand starting at position 88 of SEQ ID NO: 1881285
ggcucuaguagagaaucua

SEQ ID NO: 2032619 - RNA, 19 nt, Artificial Sequence
  Description of Artificial Sequence: Synthetic oligonucleotide
  Antisense strand to SEQ ID NO: 2032618
uagauucucuacuagagcc

SEQ ID NO: 2032620 - RNA, 19 nt, Artificial Sequence
  Description of Artificial Sequence: Synthetic oligonucleotide
  Sense strand starting at position 283 of SEQ ID NO: 1881285
caaggacuccugugauuau

SEQ ID NO: 2032621 - RNA, 19 nt, Artificial Sequence
  Description of Artificial Sequence: Synthetic oligonucleotide
  Antisense strand to SEQ ID NO: 2032620
auaaucacaggaguccuug

SEQ ID NO: 2032622 - RNA, 19 nt, Artificial Sequence
  Description of Artificial Sequence: Synthetic oligonucleotide
  Sense strand starting at position 448 of SEQ ID NO: 1881285
uuguaucugcuacagagaa

SEQ ID NO: 2032623 - RNA, 19 nt, Artificial Sequence
  Description of Artificial Sequence: Synthetic oligonucleotide
  Antisense strand to SEQ ID NO: 2032622
uucucuguagcagauacaa

SEQ ID NO: 2032624 - RNA, 19 nt, Artificial Sequence
  Description of Artificial Sequence: Synthetic oligonucleotide
  Sense strand starting at position 750 of SEQ ID NO: 1881285
cagcuaaugguagaguuaa

SEQ ID NO: 2032625 - RNA, 19 nt, Artificial Sequence
  Description of Artificial Sequence: Synthetic oligonucleotide
  Antisense strand to SEQ ID NO: 2032624
uuaacucuaccauuagcug

SEQ ID NO: 2032626 - RNA, 19 nt, Artificial Sequence
  Description of Artificial Sequence: Synthetic oligonucleotide
  Sense strand starting at position 774 of SEQ ID NO: 1881285
ugaaauaagccuggccaau

SEQ ID NO: 2032627 - RNA, 19 nt, Artificial Sequence
  Description of Artificial Sequence: Synthetic oligonucleotide
  Antisense strand to SEQ ID NO: 2032626
auuggccaggcuuauuuca

SEQ ID NO: 2032628 - RNA, 19 nt, Artificial Sequence
  Description of Artificial Sequence: Synthetic oligonucleotide
  Sense strand starting at position 838 of SEQ ID NO: 1881285
auuguaucuuagcuagaac

SEQ ID NO: 2032629 - RNA, 19 nt, Artificial Sequence
  Description of Artificial Sequence: Synthetic oligonucleotide
  Antisense strand to SEQ ID NO: 2032628
guucuagcuaagauacaau

SEQ ID NO: 2032630 - RNA, 19 nt, Artificial Sequence
  Description of Artificial Sequence: Synthetic oligonucleotide
  Sense strand starting at position 841 of SEQ ID NO: 1881285
guaucuuagcuagaacagu

SEQ ID NO: 2032631 - RNA, 19 nt, Artificial Sequence
  Description of Artificial Sequence: Synthetic oligonucleotide
  Antisense strand to SEQ ID NO: 2032630
acuguucuagcuaagauac

SEQ ID NO: 2032632 - RNA, 19 nt, Artificial Sequence
  Description of Artificial Sequence: Synthetic oligonucleotide
  Sense strand starting at position 1137 of SEQ ID NO: 1881285
acugaagagcuuuguacuu

SEQ ID NO: 2032633 - RNA, 19 nt, Artificial Sequence
  Description of Artificial Sequence: Synthetic oligonucleotide
  Antisense strand to SEQ ID NO: 2032632
aaguacaaagcucuucagu

SEQ ID NO: 2032634 - RNA, 19 nt, Artificial Sequence
  Description of Artificial Sequence: Synthetic oligonucleotide
  Sense strand starting at position 1167 of SEQ ID NO: 1881285
aggagaaugcugggaugcu

SEQ ID NO: 2032635 - RNA, 19 nt, Artificial Sequence
  Description of Artificial Sequence: Synthetic oligonucleotide
  Antisense strand to SEQ ID NO: 2032634
agcaucccagcauucuccu

SEQ ID NO: 2032636 - RNA, 19 nt, Artificial Sequence
  Description of Artificial Sequence: Synthetic oligonucleotide
  Sense strand starting at position 1212 of SEQ ID NO: 1881285
aggacuuuagauugcaaac

SEQ ID NO: 2032637 - RNA, 19 nt, Artificial Sequence
  Description of Artificial Sequence: Synthetic oligonucleotide
  Antisense strand to SEQ ID NO: 2032636
guuugcaaucuaaaguccu

SEQ ID NO: 2032638 - RNA, 19 nt, Artificial Sequence
  Description of Artificial Sequence: Synthetic oligonucleotide
  Sense strand starting at position 1354 of SEQ ID NO: 1881285
ccacuuauuugagauagaa

SEQ ID NO: 2032639 - RNA, 19 nt, Artificial Sequence
  Description of Artificial Sequence: Synthetic oligonucleotide
  Antisense strand to SEQ ID NO: 2032638
uucuaucucaaauaagugg

SEQ ID NO: 2032640 - RNA, 19 nt, Artificial Sequence
  Description of Artificial Sequence: Synthetic oligonucleotide
  Sense strand starting at position 1380 of SEQ ID NO: 1881285
aggcuuggauuaucucuua

SEQ ID NO: 2032641 - RNA, 19 nt, Artificial Sequence
  Description of Artificial Sequence: Synthetic oligonucleotide
  Antisense strand to SEQ ID NO: 2032640
uaagagauaauccaagccu

SEQ ID NO: 2032642 - RNA, 19 nt, Artificial Sequence
  Description of Artificial Sequence: Synthetic oligonucleotide
  Sense strand starting at position 1391 of SEQ ID NO: 1881285
aucucuuaugguuaucaag

SEQ ID NO: 2032643 - RNA, 19 nt, Artificial Sequence
  Description of Artificial Sequence: Synthetic oligonucleotide
  Antisense strand to SEQ ID NO: 2032642
cuugauaaccauaagagau

SEQ ID NO: 2032644 - RNA, 19 nt, Artificial Sequence
  Description of Artificial Sequence: Synthetic oligonucleotide
  Sense strand starting at position 1393 of SEQ ID NO: 1881285
cucuuaugguuaucaagug

SEQ ID NO: 2032645 - RNA, 19 nt, Artificial Sequence
  Description of Artificial Sequence: Synthetic oligonucleotide
  Antisense strand to SEQ ID NO: 2032644
cacuugauaaccauaagag

SEQ ID NO: 2032646 - RNA, 19 nt, Artificial Sequence
  Description of Artificial Sequence: Synthetic oligonucleotide
  Sense strand starting at position 1462 of SEQ ID NO: 1881285
ggcccuuuggauugaauga

SEQ ID NO: 2032647 - RNA, 19 nt, Artificial Sequence
  Description of Artificial Sequence: Synthetic oligonucleotide
  Antisense strand to SEQ ID NO: 2032646
ucauucaauccaaagggcc

SEQ ID NO: 2032648 - RNA, 19 nt, Artificial Sequence
  Description of Artificial Sequence: Synthetic oligonucleotide
  Sense strand starting at position 1463 of SEQ ID NO: 1881285
gcccuuuggauugaaugau

SEQ ID NO: 2032649 - RNA, 19 nt, Artificial Sequence
  Description of Artificial Sequence: Synthetic oligonucleotide
  Antisense strand to SEQ ID NO: 2032648
aucauucaauccaaagggc

SEQ ID NO: 2032650 - RNA, 19 nt, Artificial Sequence
  Description of Artificial Sequence: Synthetic oligonucleotide
  Sense strand starting at position 1501 of SEQ ID NO: 1881285
guguguuagaaagaaagca

SEQ ID NO: 2032651 - RNA, 19 nt, Artificial Sequence
  Description of Artificial Sequence: Synthetic oligonucleotide
  Antisense strand to SEQ ID NO: 2032650
ugcuuucuuucuaacacac

SEQ ID NO: 2032652 - RNA, 19 nt, Artificial Sequence
  Description of Artificial Sequence: Synthetic oligonucleotide
  Sense strand starting at position 1681 of SEQ ID NO: 1881285
cagauuguucuugguugaa

SEQ ID NO: 2032653 - RNA, 19 nt, Artificial Sequence
  Description of Artificial Sequence: Synthetic oligonucleotide
  Antisense strand to SEQ ID NO: 2032652
uucaaccaagaacaaucug

SEQ ID NO: 2032654 - RNA, 19 nt, Artificial Sequence
  Description of Artificial Sequence: Synthetic oligonucleotide
  Sense strand starting at position 1773 of SEQ ID NO: 1881285
ugagaaugcauaugaguca

SEQ ID NO: 2032655 - RNA, 19 nt, Artificial Sequence
  Description of Artificial Sequence: Synthetic oligonucleotide
  Antisense strand to SEQ ID NO: 2032654
ugacucauaugcauucuca

SEQ ID NO: 2032656 - RNA, 19 nt, Artificial Sequence
  Description of Artificial Sequence: Synthetic oligonucleotide
  Sense strand starting at position 1776 of SEQ ID NO: 1881285
gaaugcauaugagucauca

SEQ ID NO: 2032657 - RNA, 19 nt, Artificial Sequence
  Description of Artificial Sequence: Synthetic oligonucleotide
  Antisense strand to SEQ ID NO: 2032656
ugaugacucauaugcauuc

SEQ ID NO: 2032658 - RNA, 19 nt, Artificial Sequence
  Description of Artificial Sequence: Synthetic oligonucleotide
  Sense strand starting at position 1780 of SEQ ID NO: 1881285
gcauaugagucaucagacu

SEQ ID NO: 2032659 - RNA, 19 nt, Artificial Sequence
  Description of Artificial Sequence: Synthetic oligonucleotide
  Antisense strand to SEQ ID NO: 2032658
agucugaugacucauaugc

SEQ ID NO: 2032660 - RNA, 19 nt, Artificial Sequence
  Description of Artificial Sequence: Synthetic oligonucleotide
  Sense strand starting at position 1830 of SEQ ID NO: 1881285
aagagucaguagcucauaa

SEQ ID NO: 2032661 - RNA, 19 nt, Artificial Sequence
  Description of Artificial Sequence: Synthetic oligonucleotide
  Antisense strand to SEQ ID NO: 2032660
uuaugagcuacugacucuu

SEQ ID NO: 2032662 - RNA, 19 nt, Artificial Sequence
  Description of Artificial Sequence: Synthetic oligonucleotide
  Sense strand starting at position 1832 of SEQ ID NO: 1881285
gagucaguagcucauaaca

SEQ ID NO: 2032663 - RNA, 19 nt, Artificial Sequence
  Description of Artificial Sequence: Synthetic oligonucleotide
  Antisense strand to SEQ ID NO: 2032662
uguuaugagcuacugacuc

SEQ ID NO: 2032664 - RNA, 19 nt, Artificial Sequence
  Description of Artificial Sequence: Synthetic oligonucleotide
  Sense strand starting at position 2242 of SEQ ID NO: 1881285
uuaagaugccuuuauguuu

SEQ ID NO: 2032665 - RNA, 19 nt, Artificial Sequence
  Description of Artificial Sequence: Synthetic oligonucleotide
  Antisense strand to SEQ ID NO: 2032664
aaacauaaaggcaucuuaa

SEQ ID NO: 2032666 - RNA, 19 nt, Artificial Sequence
  Description of Artificial Sequence: Synthetic oligonucleotide
  Sense strand starting at position 2832 of SEQ ID NO: 1881285
acaguuaacauguguauga

SEQ ID NO: 2032667 - RNA, 19 nt, Artificial Sequence
  Description of Artificial Sequence: Synthetic oligonucleotide
  Antisense strand to SEQ ID NO: 2032666
ucauacacauguuaacugu

SEQ ID NO: 2032668 - RNA, 19 nt, Artificial Sequence
  Description of Artificial Sequence: Synthetic oligonucleotide
  Sense strand starting at position 2834 of SEQ ID NO: 1881285
aguuaacauguguaugagu

SEQ ID NO: 2032669 - RNA, 19 nt, Artificial Sequence
  Description of Artificial Sequence: Synthetic oligonucleotide
  Antisense strand to SEQ ID NO: 2032668
acucauacacauguuaacu

SEQ ID NO: 2032670 - RNA, 19 nt, Artificial Sequence
  Description of Artificial Sequence: Synthetic oligonucleotide
  Sense strand starting at position 2875 of SEQ ID NO: 1881285
acagcuaaugaguguuaaa

SEQ ID NO: 2032671 - RNA, 19 nt, Artificial Sequence
  Description of Artificial Sequence: Synthetic oligonucleotide
  Antisense strand to SEQ ID NO: 2032670
uuuaacacucauuagcugu

SEQ ID NO: 2032672 - RNA, 19 nt, Artificial Sequence
  Description of Artificial Sequence: Synthetic oligonucleotide
  Sense strand starting at position 2924 of SEQ ID NO: 1881285
gaguauguauucucaucag

SEQ ID NO: 2032673 - RNA, 19 nt, Artificial Sequence
  Description of Artificial Sequence: Synthetic oligonucleotide
  Antisense strand to SEQ ID NO: 2032672
cugaugagaauacauacuc

SEQ ID NO: 2032674 - RNA, 19 nt, Artificial Sequence
  Description of Artificial Sequence: Synthetic oligonucleotide
  Sense strand starting at position 3002 of SEQ ID NO: 1881285
ugaagaauuaagugguguu

SEQ ID NO: 2032675 - RNA, 19 nt, Artificial Sequence
  Description of Artificial Sequence: Synthetic oligonucleotide
  Antisense strand to SEQ ID NO: 2032674
aacaccacuuaauucuuca

SEQ ID NO: 2032676 - RNA, 19 nt, Artificial Sequence
  Description of Artificial Sequence: Synthetic oligonucleotide
  Sense strand starting at position 3003 of SEQ ID NO: 1881285
gaagaauuaagugguguug

SEQ ID NO: 2032677 - RNA, 19 nt, Artificial Sequence
  Description of Artificial Sequence: Synthetic oligonucleotide
  Antisense strand to SEQ ID NO: 2032676
caacaccacuuaauucuuc

SEQ ID NO: 2032678 - RNA, 19 nt, Artificial Sequence
  Description of Artificial Sequence: Synthetic oligonucleotide
  Sense strand starting at position 3009 of SEQ ID NO: 1881285
uuaagugguguugaucauu

SEQ ID NO: 2032679 - RNA, 19 nt, Artificial Sequence
  Description of Artificial Sequence: Synthetic oligonucleotide
  Antisense strand to SEQ ID NO: 2032678
aaugaucaacaccacuuaa

SEQ ID NO: 2032680 - RNA, 19 nt, Artificial Sequence
  Description of Artificial Sequence: Synthetic oligonucleotide
  Sense strand starting at position 3206 of SEQ ID NO: 1881285
ggugcuacauaauuccuaa

SEQ ID NO: 2032681 - RNA, 19 nt, Artificial Sequence
  Description of Artificial Sequence: Synthetic oligonucleotide
  Antisense strand to SEQ ID NO: 2032680
uuaggaauuauguagcacc

SEQ ID NO: 2032682 - RNA, 19 nt, Artificial Sequence
  Description of Artificial Sequence: Synthetic oligonucleotide
  Sense strand starting at position 3252 of SEQ ID NO: 1881285
ugguguuucuuaguuauuu

SEQ ID NO: 2032683 - RNA, 19 nt, Artificial Sequence
  Description of Artificial Sequence: Synthetic oligonucleotide
  Antisense strand to SEQ ID NO: 2032682
aaauaacuaagaaacacca

SEQ ID NO: 2032684 - RNA, 19 nt, Artificial Sequence
  Description of Artificial Sequence: Synthetic oligonucleotide
  Sense strand starting at position 3253 of SEQ ID NO: 1881285
gguguuucuuaguuauuug

SEQ ID NO: 2032685 - RNA, 19 nt, Artificial Sequence
  Description of Artificial Sequence: Synthetic oligonucleotide
  Antisense strand to SEQ ID NO: 2032684
caaauaacuaagaaacacc

SEQ ID NO: 2032686 - RNA, 19 nt, Artificial Sequence
  Description of Artificial Sequence: Synthetic oligonucleotide
  Sense strand starting at position 3256 of SEQ ID NO: 1881285
guuucuuaguuauuugcua

SEQ ID NO: 2032687 - RNA, 19 nt, Artificial Sequence
  Description of Artificial Sequence: Synthetic oligonucleotide
  Antisense strand to SEQ ID NO: 2032686
uagcaaauaacuaagaaac

SEQ ID NO: 2032688 - RNA, 19 nt, Artificial Sequence
  Description of Artificial Sequence: Synthetic oligonucleotide
  Sense strand starting at position 3260 of SEQ ID NO: 1881285
cuuaguuauuugcuacuuu

SEQ ID NO: 2032689 - RNA, 19 nt, Artificial Sequence
  Description of Artificial Sequence: Synthetic oligonucleotide
  Antisense strand to SEQ ID NO: 2032688
aaaguagcaaauaacuaag

SEQ ID NO: 2032690 - RNA, 19 nt, Artificial Sequence
  Description of Artificial Sequence: Synthetic oligonucleotide
  Sense strand starting at position 3313 of SEQ ID NO: 1881285
cucauugauccaggcuaau

SEQ ID NO: 2032691 - RNA, 19 nt, Artificial Sequence
  Description of Artificial Sequence: Synthetic oligonucleotide
  Antisense strand to SEQ ID NO: 2032690
auuagccuggaucaaugag

SEQ ID NO: 2032692 - RNA, 19 nt, Artificial Sequence
  Description of Artificial Sequence: Synthetic oligonucleotide
  Sense strand starting at position 3598 of SEQ ID NO: 1881285
auguuaacuuugcuaagaa

SEQ ID NO: 2032693 - RNA, 19 nt, Artificial Sequence
  Description of Artificial Sequence: Synthetic oligonucleotide
  Antisense strand to SEQ ID NO: 2032692
uucuuagcaaaguuaacau

SEQ ID NO: 2032694 - RNA, 19 nt, Artificial Sequence
  Description of Artificial Sequence: Synthetic oligonucleotide
  Sense strand starting at position 3894 of SEQ ID NO: 1881285
gcuuaagcucuuuauuaga

SEQ ID NO: 2032695 - RNA, 19 nt, Artificial Sequence
  Description of Artificial Sequence: Synthetic oligonucleotide
  Antisense strand to SEQ ID NO: 2032694
ucuaauaaagagcuuaagc

SEQ ID NO: 2032696 - RNA, 19 nt, Artificial Sequence
  Description of Artificial Sequence: Synthetic oligonucleotide
  Sense strand starting at position 24 of SEQ ID NO: 1881286
guggcuuggauacauugaa

SEQ ID NO: 2032697 - RNA, 19 nt, Artificial Sequence
  Description of Artificial Sequence: Synthetic oligonucleotide
  Antisense strand to SEQ ID NO: 2032696
uucaauguauccaagccac

SEQ ID NO: 2032698 - RNA, 19 nt, Artificial Sequence
  Description of Artificial Sequence: Synthetic oligonucleotide
  Sense strand starting at position 77 of SEQ ID NO: 1881286
augcaagugcauuaagguu

SEQ ID NO: 2032699 - RNA, 19 nt, Artificial Sequence
  Description of Artificial Sequence: Synthetic oligonucleotide
  Antisense strand to SEQ ID NO: 2032698
aaccuuaaugcacuugcau

SEQ ID NO: 2032700 - RNA, 19 nt, Artificial Sequence
  Description of Artificial Sequence: Synthetic oligonucleotide
  Sense strand starting at position 85 of SEQ ID NO: 1881286
gcauuaagguugcccagua

SEQ ID NO: 2032701 - RNA, 19 nt, Artificial Sequence
  Description of Artificial Sequence: Synthetic oligonucleotide
  Antisense strand to SEQ ID NO: 2032700
uacugggcaaccuuaaugc

SEQ ID NO: 2032702 - RNA, 19 nt, Artificial Sequence
  Description of Artificial Sequence: Synthetic oligonucleotide
  Sense strand starting at position 90 of SEQ ID NO: 1881286
aagguugcccaguaggaaa

SEQ ID NO: 2032703 - RNA, 19 nt, Artificial Sequence
  Description of Artificial Sequence: Synthetic oligonucleotide
  Antisense strand to SEQ ID NO: 2032702
uuuccuacugggcaaccuu

SEQ ID NO: 2032704 - RNA, 19 nt, Artificial Sequence
  Description of Artificial Sequence: Synthetic oligonucleotide
  Sense strand starting at position 137 of SEQ ID NO: 1881286
acggacuucuucccagaca

SEQ ID NO: 2032705 - RNA, 19 nt, Artificial Sequence
  Description of Artificial Sequence: Synthetic oligonucleotide
  Antisense strand to SEQ ID NO: 2032704
ugucugggaagaaguccgu

SEQ ID NO: 2032706 - RNA, 19 nt, Artificial Sequence
  Description of Artificial Sequence: Synthetic oligonucleotide
  Sense strand starting at position 235 of SEQ ID NO: 1881286
aagaaugucuagucuugaa

SEQ ID NO: 2032707 - RNA, 19 nt, Artificial Sequence
  Description of Artificial Sequence: Synthetic oligonucleotide
  Antisense strand to SEQ ID NO: 2032706
uucaagacuagacauucuu

SEQ ID NO: 2032708 - RNA, 19 nt, Artificial Sequence
  Description of Artificial Sequence: Synthetic oligonucleotide
  Sense strand starting at position 239 of SEQ ID NO: 1881286
augucuagucuugaagaca

SEQ ID NO: 2032709 - RNA, 19 nt, Artificial Sequence
  Description of Artificial Sequence: Synthetic oligonucleotide
  Antisense strand to SEQ ID NO: 2032708
ugucuucaagacuagacau

SEQ ID NO: 2032710 - RNA, 19 nt, Artificial Sequence
  Description of Artificial Sequence: Synthetic oligonucleotide
  Sense strand starting at position 280 of SEQ ID NO: 1881286
aaaucagucugagguauuu

SEQ ID NO: 2032711 - RNA, 19 nt, Artificial Sequence
  Description of Artificial Sequence: Synthetic oligonucleotide
  Antisense strand to SEQ ID NO: 2032710
aaauaccucagacugauuu

SEQ ID NO: 2032712 - RNA, 19 nt, Artificial Sequence
  Description of Artificial Sequence: Synthetic oligonucleotide
  Sense strand starting at position 826 of SEQ ID NO: 1881286
agcguaaauuaaucaaaug

SEQ ID NO: 2032713 - RNA, 19 nt, Artificial Sequence
  Description of Artificial Sequence: Synthetic oligonucleotide
  Antisense strand to SEQ ID NO: 2032712
cauuugauuaauuuacgcu

SEQ ID NO: 2032714 - RNA, 19 nt, Artificial Sequence
  Description of Artificial Sequence: Synthetic oligonucleotide
  Sense strand starting at position 887 of SEQ ID NO: 1881286
uggugagaucaggaggcuu

SEQ ID NO: 2032715 - RNA, 19 nt, Artificial Sequence
  Description of Artificial Sequence: Synthetic oligonucleotide
  Antisense strand to SEQ ID NO: 2032714
aagccuccugaucucacca

SEQ ID NO: 2032716 - RNA, 19 nt, Artificial Sequence
  Description of Artificial Sequence: Synthetic oligonucleotide
  Sense strand starting at position 935 of SEQ ID NO: 1881286
augcaagagcgaugaaacu

SEQ ID NO: 2032717 - RNA, 19 nt, Artificial Sequence
  Description of Artificial Sequence: Synthetic oligonucleotide
  Antisense strand to SEQ ID NO: 2032716
aguuucaucgcucuugcau

SEQ ID NO: 2032718 - RNA, 19 nt, Artificial Sequence
  Description of Artificial Sequence: Synthetic oligonucleotide
  Sense strand starting at position 1020 of SEQ ID NO: 1881286
gggugaaacuccuaggaag

SEQ ID NO: 2032719 - RNA, 19 nt, Artificial Sequence
  Description of Artificial Sequence: Synthetic oligonucleotide
  Antisense strand to SEQ ID NO: 2032718
cuuccuaggaguuucaccc

SEQ ID NO: 2032720 - RNA, 19 nt, Artificial Sequence
  Description of Artificial Sequence: Synthetic oligonucleotide
  Sense strand starting at position 1023 of SEQ ID NO: 1881286
ugaaacuccuaggaagagu

SEQ ID NO: 2032721 - RNA, 19 nt, Artificial Sequence
  Description of Artificial Sequence: Synthetic oligonucleotide
  Antisense strand to SEQ ID NO: 2032720
acucuuccuaggaguuuca

SEQ ID NO: 2032722 - RNA, 19 nt, Artificial Sequence
  Description of Artificial Sequence: Synthetic oligonucleotide
  Sense strand starting at position 1032 of SEQ ID NO: 1881286
uaggaagaguuugcugagu

SEQ ID NO: 2032723 - RNA, 19 nt, Artificial Sequence
  Description of Artificial Sequence: Synthetic oligonucleotide
  Antisense strand to SEQ ID NO: 2032722
acucagcaaacucuuccua

SEQ ID NO: 2032724 - RNA, 19 nt, Artificial Sequence
  Description of Artificial Sequence: Synthetic oligonucleotide
  Sense strand starting at position 1143 of SEQ ID NO: 1881286
cggcuaauuucuucuaggu

SEQ ID NO: 2032725 - RNA, 19 nt, Artificial Sequence
  Description of Artificial Sequence: Synthetic oligonucleotide
  Antisense strand to SEQ ID NO: 2032724
accuagaagaaauuagccg

SEQ ID NO: 2032726 - RNA, 19 nt, Artificial Sequence
  Description of Artificial Sequence: Synthetic oligonucleotide
  Sense strand starting at position 1581 of SEQ ID NO: 1881286
ucuugcugacgcgaaagau

SEQ ID NO: 2032727 - RNA, 19 nt, Artificial Sequence
  Description of Artificial Sequence: Synthetic oligonucleotide
  Antisense strand to SEQ ID NO: 2032726
aucuuucgcgucagcaaga

SEQ ID NO: 2032728 - RNA, 19 nt, Artificial Sequence
  Description of Artificial Sequence: Synthetic oligonucleotide
  Sense strand starting at position 1837 of SEQ ID NO: 1881286
guacguguccucgaucacu

SEQ ID NO: 2032729 - RNA, 19 nt, Artificial Sequence
  Description of Artificial Sequence: Synthetic oligonucleotide
  Antisense strand to SEQ ID NO: 2032728
agugaucgaggacacguac

SEQ ID NO: 2032730 - RNA, 19 nt, Artificial Sequence
  Description of Artificial Sequence: Synthetic oligonucleotide
  Sense strand starting at position 2804 of SEQ ID NO: 1881286
ucaguaugcauguagauag

SEQ ID NO: 2032731 - RNA, 19 nt, Artificial Sequence
  Description of Artificial Sequence: Synthetic oligonucleotide
  Antisense strand to SEQ ID NO: 2032730
cuaucuacaugcauacuga

SEQ ID NO: 2032732 - RNA, 19 nt, Artificial Sequence
  Description of Artificial Sequence: Synthetic oligonucleotide
  Sense strand starting at position 2919 of SEQ ID NO: 1881286
aacucauugcggcauggga

SEQ ID NO: 2032733 - RNA, 19 nt, Artificial Sequence
  Description of Artificial Sequence: Synthetic oligonucleotide
  Antisense strand to SEQ ID NO: 2032732
ucccaugccgcaaugaguu

SEQ ID NO: 2032734 - RNA, 19 nt, Artificial Sequence
  Description of Artificial Sequence: Synthetic oligonucleotide
  Sense strand starting at position 2976 of SEQ ID NO: 1881286
caucaaaguggcuagucau

SEQ ID NO: 2032735 - RNA, 19 nt, Artificial Sequence
  Description of Artificial Sequence: Synthetic oligonucleotide
  Antisense strand to SEQ ID NO: 2032734
augacuagccacuuugaug

SEQ ID NO: 2032736 - RNA, 19 nt, Artificial Sequence
  Description of Artificial Sequence: Synthetic oligonucleotide
  Sense strand starting at position 3106 of SEQ ID NO: 1881286
gggaaauauuuccaccauc

SEQ ID NO: 2032737 - RNA, 19 nt, Artificial Sequence
  Description of Artificial Sequence: Synthetic oligonucleotide
  Antisense strand to SEQ ID NO: 2032736
gaugguggaaauauuuccc

SEQ ID NO: 2032738 - RNA, 19 nt, Artificial Sequence
  Description of Artificial Sequence: Synthetic oligonucleotide
  Sense strand starting at position 3158 of SEQ ID NO: 1881286
ccguucugauuucuaacuu

SEQ ID NO: 2032739 - RNA, 19 nt, Artificial Sequence
  Description of Artificial Sequence: Synthetic oligonucleotide
  Antisense strand to SEQ ID NO: 2032738
aaguuagaaaucagaacgg

SEQ ID NO: 2032740 - RNA, 19 nt, Artificial Sequence
  Description of Artificial Sequence: Synthetic oligonucleotide
  Sense strand starting at position 3184 of SEQ ID NO: 1881286
uugaauucuccauguggau

SEQ ID NO: 2032741 - RNA, 19 nt, Artificial Sequence
  Description of Artificial Sequence: Synthetic oligonucleotide
  Antisense strand to SEQ ID NO: 2032740
auccacauggagaauucaa

SEQ ID NO: 2032742 - RNA, 19 nt, Artificial Sequence
  Description of Artificial Sequence: Synthetic oligonucleotide
  Sense strand starting at position 3208 of SEQ ID NO: 1881286
guuuaaggaucauccacua

SEQ ID NO: 2032743 - RNA, 19 nt, Artificial Sequence
  Description of Artificial Sequence: Synthetic oligonucleotide
  Antisense strand to SEQ ID NO: 2032742
uaguggaugauccuuaaac

SEQ ID NO: 2032744 - RNA, 19 nt, Artificial Sequence
  Description of Artificial Sequence: Synthetic oligonucleotide
  Sense strand starting at position 3220 of SEQ ID NO: 1881286
uccacuagguuucugacua

SEQ ID NO: 2032745 - RNA, 19 nt, Artificial Sequence
  Description of Artificial Sequence: Synthetic oligonucleotide
  Antisense strand to SEQ ID NO: 2032744
uagucagaaaccuagugga

SEQ ID NO: 2032746 - RNA, 19 nt, Artificial Sequence
  Description of Artificial Sequence: Synthetic oligonucleotide
  Sense strand starting at position 3224 of SEQ ID NO: 1881286
cuagguuucugacuaaacc

SEQ ID NO: 2032747 - RNA, 19 nt, Artificial Sequence
  Description of Artificial Sequence: Synthetic oligonucleotide
  Antisense strand to SEQ ID NO: 2032746
gguuuagucagaaaccuag

SEQ ID NO: 2032748 - RNA, 19 nt, Artificial Sequence
  Description of Artificial Sequence: Synthetic oligonucleotide
  Sense strand starting at position 3261 of SEQ ID NO: 1881286
cuuaguaccuccuuuggaa

SEQ ID NO: 2032749 - RNA, 19 nt, Artificial Sequence
  Description of Artificial Sequence: Synthetic oligonucleotide
  Antisense strand to SEQ ID NO: 2032748
uuccaaaggagguacuaag

SEQ ID NO: 2032750 - RNA, 19 nt, Artificial Sequence
  Description of Artificial Sequence: Synthetic oligonucleotide
  Sense strand starting at position 3300 of SEQ ID NO: 1881286
ccauaacuaugcuugagua

SEQ ID NO: 2032751 - RNA, 19 nt, Artificial Sequence
  Description of Artificial Sequence: Synthetic oligonucleotide
  Antisense strand to SEQ ID NO: 2032750
uacucaagcauaguuaugg

SEQ ID NO: 2032752 - RNA, 19 nt, Artificial Sequence
  Description of Artificial Sequence: Synthetic oligonucleotide
  Sense strand starting at position 3302 of SEQ ID NO: 1881286
auaacuaugcuugaguaag

SEQ ID NO: 2032753 - RNA, 19 nt, Artificial Sequence
  Description of Artificial Sequence: Synthetic oligonucleotide
  Antisense strand to SEQ ID NO: 2032752
cuuacucaagcauaguuau

SEQ ID NO: 2032754 - RNA, 19 nt, Artificial Sequence
  Description of Artificial Sequence: Synthetic oligonucleotide
  Sense strand starting at position 3405 of SEQ ID NO: 1881286
gauucuacagucuggaacu

SEQ ID NO: 2032755 - RNA, 19 nt, Artificial Sequence
  Description of Artificial Sequence: Synthetic oligonucleotide
  Antisense strand to SEQ ID NO: 2032754
aguuccagacuguagaauc

SEQ ID NO: 2032756 - RNA, 19 nt, Artificial Sequence
  Description of Artificial Sequence: Synthetic oligonucleotide
  Sense strand starting at position 3418 of SEQ ID NO: 1881286
ggaacugagugcucugaag

SEQ ID NO: 2032757 - RNA, 19 nt, Artificial Sequence
  Description of Artificial Sequence: Synthetic oligonucleotide
  Antisense strand to SEQ ID NO: 2032756
cuucagagcacucaguucc

SEQ ID NO: 2032758 - RNA, 19 nt, Artificial Sequence
  Description of Artificial Sequence: Synthetic oligonucleotide
  Sense strand starting at position 3420 of SEQ ID NO: 1881286
aacugagugcucugaagca

SEQ ID NO: 2032759 - RNA, 19 nt, Artificial Sequence
  Description of Artificial Sequence: Synthetic oligonucleotide
  Antisense strand to SEQ ID NO: 2032758
ugcuucagagcacucaguu

SEQ ID NO: 2032760 - RNA, 19 nt, Artificial Sequence
  Description of Artificial Sequence: Synthetic oligonucleotide
  Sense strand starting at position 3458 of SEQ ID NO: 1881286
cgucauuucuauccaguga

SEQ ID NO: 2032761 - RNA, 19 nt, Artificial Sequence
  Description of Artificial Sequence: Synthetic oligonucleotide
  Antisense strand to SEQ ID NO: 2032760
ucacuggauagaaaugacg

SEQ ID NO: 2032762 - RNA, 19 nt, Artificial Sequence
  Description of Artificial Sequence: Synthetic oligonucleotide
  Sense strand starting at position 3473 of SEQ ID NO: 1881286
gugacaugccucuaaucca

SEQ ID NO: 2032763 - RNA, 19 nt, Artificial Sequence
  Description of Artificial Sequence: Synthetic oligonucleotide
  Antisense strand to SEQ ID NO: 2032762
uggauuagaggcaugucac

SEQ ID NO: 2032764 - RNA, 19 nt, Artificial Sequence
  Description of Artificial Sequence: Synthetic oligonucleotide
  Sense strand starting at position 3501 of SEQ ID NO: 1881286
acccuacuugcguacugau

SEQ ID NO: 2032765 - RNA, 19 nt, Artificial Sequence
  Description of Artificial Sequence: Synthetic oligonucleotide
  Antisense strand to SEQ ID NO: 2032764
aucaguacgcaaguagggu

SEQ ID NO: 2032766 - RNA, 19 nt, Artificial Sequence
  Description of Artificial Sequence: Synthetic oligonucleotide
  Sense strand starting at position 3523 of SEQ ID NO: 1881286
agauuacuauuggucaaug

SEQ ID NO: 2032767 - RNA, 19 nt, Artificial Sequence
  Description of Artificial Sequence: Synthetic oligonucleotide
  Antisense strand to SEQ ID NO: 2032766
cauugaccaauaguaaucu

SEQ ID NO: 2032768 - RNA, 19 nt, Artificial Sequence
  Description of Artificial Sequence: Synthetic oligonucleotide
  Sense strand starting at position 3528 of SEQ ID NO: 1881286
acuauuggucaaugccaaa

SEQ ID NO: 2032769 - RNA, 19 nt, Artificial Sequence
  Description of Artificial Sequence: Synthetic oligonucleotide
  Antisense strand to SEQ ID NO: 2032768
uuuggcauugaccaauagu

SEQ ID NO: 2032770 - RNA, 19 nt, Artificial Sequence
  Description of Artificial Sequence: Synthetic oligonucleotide
  Sense strand starting at position 3763 of SEQ ID NO: 1881286
gagcgagacuacgucuuua

SEQ ID NO: 2032771 - RNA, 19 nt, Artificial Sequence
  Description of Artificial Sequence: Synthetic oligonucleotide
  Antisense strand to SEQ ID NO: 2032770
uaaagacguagucucgcuc

SEQ ID NO: 2032772 - RNA, 19 nt, Artificial Sequence
  Description of Artificial Sequence: Synthetic oligonucleotide
  Sense strand starting at position 3885 of SEQ ID NO: 1881286
acagaaauauagugagaau

SEQ ID NO: 2032773 - RNA, 19 nt, Artificial Sequence
  Description of Artificial Sequence: Synthetic oligonucleotide
  Antisense strand to SEQ ID NO: 2032772
auucucacuauauuucugu

SEQ ID NO: 2032774 - RNA, 19 nt, Artificial Sequence
  Description of Artificial Sequence: Synthetic oligonucleotide
  Sense strand starting at position 3917 of SEQ ID NO: 1881286
gguggcuuauaacuuacua

SEQ ID NO: 2032775 - RNA, 19 nt, Artificial Sequence
  Description of Artificial Sequence: Synthetic oligonucleotide
  Antisense strand to SEQ ID NO: 2032774
uaguaaguuauaagccacc

SEQ ID NO: 2032776 - RNA, 19 nt, Artificial Sequence
  Description of Artificial Sequence: Synthetic oligonucleotide
  Sense strand starting at position 284 of SEQ ID NO: 1881287
cguguuagccaggaagaaa

SEQ ID NO: 2032777 - RNA, 19 nt, Artificial Sequence
  Description of Artificial Sequence: Synthetic oligonucleotide
  Antisense strand to SEQ ID NO: 2032776
uuucuuccuggcuaacacg

SEQ ID NO: 2032778 - RNA, 19 nt, Artificial Sequence
  Description of Artificial Sequence: Synthetic oligonucleotide
  Sense strand starting at position 334 of SEQ ID NO: 1881287
ucacuuuggcauugaccaa

SEQ ID NO: 2032779 - RNA, 19 nt, Artificial Sequence
  Description of Artificial Sequence: Synthetic oligonucleotide
  Antisense strand to SEQ ID NO: 2032778
uuggucaaugccaaaguga

SEQ ID NO: 2032780 - RNA, 19 nt, Artificial Sequence
  Description of Artificial Sequence: Synthetic oligonucleotide
  Sense strand starting at position 341 of SEQ ID NO: 1881287
ggcauugaccaauaguaau

SEQ ID NO: 2032781 - RNA, 19 nt, Artificial Sequence
  Description of Artificial Sequence: Synthetic oligonucleotide
  Antisense strand to SEQ ID NO: 2032780
auuacuauuggucaaugcc

SEQ ID NO: 2032782 - RNA, 19 nt, Artificial Sequence
  Description of Artificial Sequence: Synthetic oligonucleotide
  Sense strand starting at position 358 of SEQ ID NO: 1881287
aucuaagaucaguacgcaa

SEQ ID NO: 2032783 - RNA, 19 nt, Artificial Sequence
  Description of Artificial Sequence: Synthetic oligonucleotide
  Antisense strand to SEQ ID NO: 2032782
uugcguacugaucuuagau

SEQ ID NO: 2032784 - RNA, 19 nt, Artificial Sequence
  Description of Artificial Sequence: Synthetic oligonucleotide
  Sense strand starting at position 381 of SEQ ID NO: 1881287
gguggagaaauguggauua

SEQ ID NO: 2032785 - RNA, 19 nt, Artificial Sequence
  Description of Artificial Sequence: Synthetic oligonucleotide
  Antisense strand to SEQ ID NO: 2032784
uaauccacauuucuccacc

SEQ ID NO: 2032786 - RNA, 19 nt, Artificial Sequence
  Description of Artificial Sequence: Synthetic oligonucleotide
  Sense strand starting at position 392 of SEQ ID NO: 1881287
guggauuagaggcauguca

SEQ ID NO: 2032787 - RNA, 19 nt, Artificial Sequence
  Description of Artificial Sequence: Synthetic oligonucleotide
  Antisense strand to SEQ ID NO: 2032786
ugacaugccucuaauccac

SEQ ID NO: 2032788 - RNA, 19 nt, Artificial Sequence
  Description of Artificial Sequence: Synthetic oligonucleotide
  Sense strand starting at position 394 of SEQ ID NO: 1881287
ggauuagaggcaugucacu

SEQ ID NO: 2032789 - RNA, 19 nt, Artificial Sequence
  Description of Artificial Sequence: Synthetic oligonucleotide
  Antisense strand to SEQ ID NO: 2032788
agugacaugccucuaaucc

SEQ ID NO: 2032790 - RNA, 19 nt, Artificial Sequence
  Description of Artificial Sequence: Synthetic oligonucleotide
  Sense strand starting at position 399 of SEQ ID NO: 1881287
agaggcaugucacuggaua

SEQ ID NO: 2032791 - RNA, 19 nt, Artificial Sequence
  Description of Artificial Sequence: Synthetic oligonucleotide
  Antisense strand to SEQ ID NO: 2032790
uauccagugacaugccucu

SEQ ID NO: 2032792 - RNA, 19 nt, Artificial Sequence
  Description of Artificial Sequence: Synthetic oligonucleotide
  Sense strand starting at position 400 of SEQ ID NO: 1881287
gaggcaugucacuggauag

SEQ ID NO: 2032793 - RNA, 19 nt, Artificial Sequence
  Description of Artificial Sequence: Synthetic oligonucleotide
  Antisense strand to SEQ ID NO: 2032792
cuauccagugacaugccuc

SEQ ID NO: 2032794 - RNA, 19 nt, Artificial Sequence
  Description of Artificial Sequence: Synthetic oligonucleotide
  Sense strand starting at position 401 of SEQ ID NO: 1881287
aggcaugucacuggauaga

SEQ ID NO: 2032795 - RNA, 19 nt, Artificial Sequence
  Description of Artificial Sequence: Synthetic oligonucleotide
  Antisense strand to SEQ ID NO: 2032794
ucuauccagugacaugccu

SEQ ID NO: 2032796 - RNA, 19 nt, Artificial Sequence
  Description of Artificial Sequence: Synthetic oligonucleotide
  Sense strand starting at position 459 of SEQ ID NO: 1881287
ucaguuccagacuguagaa

SEQ ID NO: 2032797 - RNA, 19 nt, Artificial Sequence
  Description of Artificial Sequence: Synthetic oligonucleotide
  Antisense strand to SEQ ID NO: 2032796
uucuacagucuggaacuga

SEQ ID NO: 2032798 - RNA, 19 nt, Artificial Sequence
  Description of Artificial Sequence: Synthetic oligonucleotide
  Sense strand starting at position 472 of SEQ ID NO: 1881287
guagaaucugaauguacuc

SEQ ID NO: 2032799 - RNA, 19 nt, Artificial Sequence
  Description of Artificial Sequence: Synthetic oligonucleotide
  Antisense strand to SEQ ID NO: 2032798
gaguacauucagauucuac

SEQ ID NO: 2032800 - RNA, 19 nt, Artificial Sequence
  Description of Artificial Sequence: Synthetic oligonucleotide
  Sense strand starting at position 496 of SEQ ID NO: 1881287
gcuguaggaaguuagcaua

SEQ ID NO: 2032801 - RNA, 19 nt, Artificial Sequence
  Description of Artificial Sequence: Synthetic oligonucleotide
  Antisense strand to SEQ ID NO: 2032800
uaugcuaacuuccuacagc

SEQ ID NO: 2032802 - RNA, 19 nt, Artificial Sequence
  Description of Artificial Sequence: Synthetic oligonucleotide
  Sense strand starting at position 513 of SEQ ID NO: 1881287
uagugaguuugguuauuug

SEQ ID NO: 2032803 - RNA, 19 nt, Artificial Sequence
  Description of Artificial Sequence: Synthetic oligonucleotide
  Antisense strand to SEQ ID NO: 2032802
caaauaaccaaacucacua

SEQ ID NO: 2032804 - RNA, 19 nt, Artificial Sequence
  Description of Artificial Sequence: Synthetic oligonucleotide
  Sense strand starting at position 523 of SEQ ID NO: 1881287
gguuauuuguuggagagaa

SEQ ID NO: 2032805 - RNA, 19 nt, Artificial Sequence
  Description of Artificial Sequence: Synthetic oligonucleotide
  Antisense strand to SEQ ID NO: 2032804
uucucuccaacaaauaacc

SEQ ID NO: 2032806 - RNA, 19 nt, Artificial Sequence
  Description of Artificial Sequence: Synthetic oligonucleotide
  Sense strand starting at position 572 of SEQ ID NO: 1881287
agcauaguuauggaagugu

SEQ ID NO: 2032807 - RNA, 19 nt, Artificial Sequence
  Description of Artificial Sequence: Synthetic oligonucleotide
  Antisense strand to SEQ ID NO: 2032806
acacuuccauaacuaugcu

SEQ ID NO: 2032808 - RNA, 19 nt, Artificial Sequence
  Description of Artificial Sequence: Synthetic oligonucleotide
  Sense strand starting at position 600 of SEQ ID NO: 1881287
gcccauuccaaaggaggua

SEQ ID NO: 2032809 - RNA, 19 nt, Artificial Sequence
  Description of Artificial Sequence: Synthetic oligonucleotide
  Antisense strand to SEQ ID NO: 2032808
uaccuccuuuggaaugggc

SEQ ID NO: 2032810 - RNA, 19 nt, Artificial Sequence
  Description of Artificial Sequence: Synthetic oligonucleotide
  Sense strand starting at position 656 of SEQ ID NO: 1881287
ccuaguggaugauccuuaa

SEQ ID NO: 2032811 - RNA, 19 nt, Artificial Sequence
  Description of Artificial Sequence: Synthetic oligonucleotide
  Antisense strand to SEQ ID NO: 2032810
uuaaggaucauccacuagg

SEQ ID NO: 2032812 - RNA, 19 nt, Artificial Sequence
  Description of Artificial Sequence: Synthetic oligonucleotide
  Sense strand starting at position 736 of SEQ ID NO: 1881287
gguagaaaguucuuaaggu

SEQ ID NO: 2032813 - RNA, 19 nt, Artificial Sequence
  Description of Artificial Sequence: Synthetic oligonucleotide
  Antisense strand to SEQ ID NO: 2032812
accuuaagaacuuucuacc

SEQ ID NO: 2032814 - RNA, 19 nt, Artificial Sequence
  Description of Artificial Sequence: Synthetic oligonucleotide
  Sense strand starting at position 754 of SEQ ID NO: 1881287
uacugugaugguggaaaua

SEQ ID NO: 2032815 - RNA, 19 nt, Artificial Sequence
  Description of Artificial Sequence: Synthetic oligonucleotide
  Antisense strand to SEQ ID NO: 2032814
uauuuccaccaucacagua

SEQ ID NO: 2032816 - RNA, 19 nt, Artificial Sequence
  Description of Artificial Sequence: Synthetic oligonucleotide
  Sense strand starting at position 886 of SEQ ID NO: 1881287
agagaugacuagccacuuu

SEQ ID NO: 2032817 - RNA, 19 nt, Artificial Sequence
  Description of Artificial Sequence: Synthetic oligonucleotide
  Antisense strand to SEQ ID NO: 2032816
aaaguggcuagucaucucu

SEQ ID NO: 2032818 - RNA, 19 nt, Artificial Sequence
  Description of Artificial Sequence: Synthetic oligonucleotide
  Sense strand starting at position 971 of SEQ ID NO: 1881287
acuuaaccuugucuaagga

SEQ ID NO: 2032819 - RNA, 19 nt, Artificial Sequence
  Description of Artificial Sequence: Synthetic oligonucleotide
  Antisense strand to SEQ ID NO: 2032818
uccuuagacaagguuaagu

SEQ ID NO: 2032820 - RNA, 19 nt, Artificial Sequence
  Description of Artificial Sequence: Synthetic oligonucleotide
  Sense strand starting at position 972 of SEQ ID NO: 1881287
cuuaaccuugucuaaggau

SEQ ID NO: 2032821 - RNA, 19 nt, Artificial Sequence
  Description of Artificial Sequence: Synthetic oligonucleotide
  Antisense strand to SEQ ID NO: 2032820
auccuuagacaagguuaag

SEQ ID NO: 2032822 - RNA, 19 nt, Artificial Sequence
  Description of Artificial Sequence: Synthetic oligonucleotide
  Sense strand starting at position 1054 of SEQ ID NO: 1881287
uggucauucuaucuacaug

SEQ ID NO: 2032823 - RNA, 19 nt, Artificial Sequence
  Description of Artificial Sequence: Synthetic oligonucleotide
  Antisense strand to SEQ ID NO: 2032822
cauguagauagaaugacca

SEQ ID NO: 2032824 - RNA, 19 nt, Artificial Sequence
  Description of Artificial Sequence: Synthetic oligonucleotide
  Sense strand starting at position 2278 of SEQ ID NO: 1881287
guacgagaucuuucgcguc

SEQ ID NO: 2032825 - RNA, 19 nt, Artificial Sequence
  Description of Artificial Sequence: Synthetic oligonucleotide
  Antisense strand to SEQ ID NO: 2032824
gacgcgaaagaucucguac

SEQ ID NO: 2032826 - RNA, 19 nt, Artificial Sequence
  Description of Artificial Sequence: Synthetic oligonucleotide
  Sense strand starting at position 2282 of SEQ ID NO: 1881287
gagaucuuucgcgucagca

SEQ ID NO: 2032827 - RNA, 19 nt, Artificial Sequence
  Description of Artificial Sequence: Synthetic oligonucleotide
  Antisense strand to SEQ ID NO: 2032826
ugcugacgcgaaagaucuc

SEQ ID NO: 2032828 - RNA, 19 nt, Artificial Sequence
  Description of Artificial Sequence: Synthetic oligonucleotide
  Sense strand starting at position 2283 of SEQ ID NO: 1881287
agaucuuucgcgucagcaa

SEQ ID NO: 2032829 - RNA, 19 nt, Artificial Sequence
  Description of Artificial Sequence: Synthetic oligonucleotide
  Antisense strand to SEQ ID NO: 2032828
uugcugacgcgaaagaucu

SEQ ID NO: 2032830 - RNA, 19 nt, Artificial Sequence
  Description of Artificial Sequence: Synthetic oligonucleotide
  Sense strand starting at position 2506 of SEQ ID NO: 1881287
ucucuucgagucugaaaug

SEQ ID NO: 2032831 - RNA, 19 nt, Artificial Sequence
  Description of Artificial Sequence: Synthetic oligonucleotide
  Antisense strand to SEQ ID NO: 2032830
cauuucagacucgaagaga

SEQ ID NO: 2032832 - RNA, 19 nt, Artificial Sequence
  Description of Artificial Sequence: Synthetic oligonucleotide
  Sense strand starting at position 2729 of SEQ ID NO: 1881287
aagaaauuagccggaaagu

SEQ ID NO: 2032833 - RNA, 19 nt, Artificial Sequence
  Description of Artificial Sequence: Synthetic oligonucleotide
  Antisense strand to SEQ ID NO: 2032832
acuuuccggcuaauuucuu

SEQ ID NO: 2032834 - RNA, 19 nt, Artificial Sequence
  Description of Artificial Sequence: Synthetic oligonucleotide
  Sense strand starting at position 2816 of SEQ ID NO: 1881287
gugacaucuguugaagcaa

SEQ ID NO: 2032835 - RNA, 19 nt, Artificial Sequence
  Description of Artificial Sequence: Synthetic oligonucleotide
  Antisense strand to SEQ ID NO: 2032834
uugcuucaacagaugucac

SEQ ID NO: 2032836 - RNA, 19 nt, Artificial Sequence
  Description of Artificial Sequence: Synthetic oligonucleotide
  Sense strand starting at position 2885 of SEQ ID NO: 1881287
uuaagugggucuccaaagu

SEQ ID NO: 2032837 - RNA, 19 nt, Artificial Sequence
  Description of Artificial Sequence: Synthetic oligonucleotide
  Antisense strand to SEQ ID NO: 2032836
acuuuggagacccacuuaa

SEQ ID NO: 2032838 - RNA, 19 nt, Artificial Sequence
  Description of Artificial Sequence: Synthetic oligonucleotide
  Sense strand starting at position 2984 of SEQ ID NO: 1881287
uccugaucucaccaugguu

SEQ ID NO: 2032839 - RNA, 19 nt, Artificial Sequence
  Description of Artificial Sequence: Synthetic oligonucleotide
  Antisense strand to SEQ ID NO: 2032838
aaccauggugagaucagga

SEQ ID NO: 2032840 - RNA, 19 nt, Artificial Sequence
  Description of Artificial Sequence: Synthetic oligonucleotide
  Sense strand starting at position 2986 of SEQ ID NO: 1881287
cugaucucaccaugguuga

SEQ ID NO: 2032841 - RNA, 19 nt, Artificial Sequence
  Description of Artificial Sequence: Synthetic oligonucleotide
  Antisense strand to SEQ ID NO: 2032840
ucaaccauggugagaucag

SEQ ID NO: 2032842 - RNA, 19 nt, Artificial Sequence
  Description of Artificial Sequence: Synthetic oligonucleotide
  Sense strand starting at position 3506 of SEQ ID NO: 1881287
gucguuuguguacucuuua

SEQ ID NO: 2032843 - RNA, 19 nt, Artificial Sequence
  Description of Artificial Sequence: Synthetic oligonucleotide
  Antisense strand to SEQ ID NO: 2032842
uaaagaguacacaaacgac

SEQ ID NO: 2032844 - RNA, 19 nt, Artificial Sequence
  Description of Artificial Sequence: Synthetic oligonucleotide
  Sense strand starting at position 3516 of SEQ ID NO: 1881287
uacucuuuacugugggaga

SEQ ID NO: 2032845 - RNA, 19 nt, Artificial Sequence
  Description of Artificial Sequence: Synthetic oligonucleotide
  Antisense strand to SEQ ID NO: 2032844
ucucccacaguaaagagua

SEQ ID NO: 2032846 - RNA, 19 nt, Artificial Sequence
  Description of Artificial Sequence: Synthetic oligonucleotide
  Sense strand starting at position 3518 of SEQ ID NO: 1881287
cucuuuacugugggagaga

SEQ ID NO: 2032847 - RNA, 19 nt, Artificial Sequence
  Description of Artificial Sequence: Synthetic oligonucleotide
  Antisense strand to SEQ ID NO: 2032846
ucucucccacaguaaagag

SEQ ID NO: 2032848 - RNA, 19 nt, Artificial Sequence
  Description of Artificial Sequence: Synthetic oligonucleotide
  Sense strand starting at position 3637 of SEQ ID NO: 1881287
acuagacauucuucuaguc

SEQ ID NO: 2032849 - RNA, 19 nt, Artificial Sequence
  Description of Artificial Sequence: Synthetic oligonucleotide
  Antisense strand to SEQ ID NO: 2032848
gacuagaagaaugucuagu

SEQ ID NO: 2032850 - RNA, 19 nt, Artificial Sequence
  Description of Artificial Sequence: Synthetic oligonucleotide
  Sense strand starting at position 3715 of SEQ ID NO: 1881287
guaauuauugucguugucu

SEQ ID NO: 2032851 - RNA, 19 nt, Artificial Sequence
  Description of Artificial Sequence: Synthetic oligonucleotide
  Antisense strand to SEQ ID NO: 2032850
agacaacgacaauaauuac

SEQ ID NO: 2032852 - RNA, 19 nt, Artificial Sequence
  Description of Artificial Sequence: Synthetic oligonucleotide
  Sense strand starting at position 3751 of SEQ ID NO: 1881287
gcaguuuaucuguugucuu

SEQ ID NO: 2032853 - RNA, 19 nt, Artificial Sequence
  Description of Artificial Sequence: Synthetic oligonucleotide
  Antisense strand to SEQ ID NO: 2032852
aagacaacagauaaacugc

SEQ ID NO: 2032854 - RNA, 19 nt, Artificial Sequence
  Description of Artificial Sequence: Synthetic oligonucleotide
  Sense strand starting at position 3978 of SEQ ID NO: 1881287
ccugauucccugugaaaca

SEQ ID NO: 2032855 - RNA, 19 nt, Artificial Sequence
  Description of Artificial Sequence: Synthetic oligonucleotide
  Antisense strand to SEQ ID NO: 2032854
uguuucacagggaaucagg

SEQ ID NO: 2032856 - RNA, 19 nt, Artificial Sequence
  Description of Artificial Sequence: Synthetic oligonucleotide
  Sense strand starting at position 55 of SEQ ID NO: 1881288
gcuaaaggguggguuagaa

SEQ ID NO: 2032857 - RNA, 19 nt, Artificial Sequence
  Description of Artificial Sequence: Synthetic oligonucleotide
  Antisense strand to SEQ ID NO: 2032856
uucuaacccacccuuuagc

SEQ ID NO: 2032858 - RNA, 19 nt, Artificial Sequence
  Description of Artificial Sequence: Synthetic oligonucleotide
  Sense strand starting at position 99 of SEQ ID NO: 1881288
uucuaacauguagaaguuu

SEQ ID NO: 2032859 - RNA, 19 nt, Artificial Sequence
  Description of Artificial Sequence: Synthetic oligonucleotide
  Antisense strand to SEQ ID NO: 2032858
aaacuucuacauguuagaa

SEQ ID NO: 2032860 - RNA, 19 nt, Artificial Sequence
  Description of Artificial Sequence: Synthetic oligonucleotide
  Sense strand starting at position 108 of SEQ ID NO: 1881288
guagaaguuuaauucuaug

SEQ ID NO: 2032861 - RNA, 19 nt, Artificial Sequence
  Description of Artificial Sequence: Synthetic oligonucleotide
  Antisense strand to SEQ ID NO: 2032860
cauagaauuaaacuucuac

SEQ ID NO: 2032862 - RNA, 19 nt, Artificial Sequence
  Description of Artificial Sequence: Synthetic oligonucleotide
  Sense strand starting at position 311 of SEQ ID NO: 1881288
uuguuaucgaggcaagauu

SEQ ID NO: 2032863 - RNA, 19 nt, Artificial Sequence
  Description of Artificial Sequence: Synthetic oligonucleotide
  Antisense strand to SEQ ID NO: 2032862
aaucuugccucgauaacaa

SEQ ID NO: 2032864 - RNA, 19 nt, Artificial Sequence
  Description of Artificial Sequence: Synthetic oligonucleotide
  Sense strand starting at position 364 of SEQ ID NO: 1881288
aaagcuggcuguuuccaua

SEQ ID NO: 2032865 - RNA, 19 nt, Artificial Sequence
  Description of Artificial Sequence: Synthetic oligonucleotide
  Antisense strand to SEQ ID NO: 2032864
uauggaaacagccagcuuu

SEQ ID NO: 2032866 - RNA, 19 nt, Artificial Sequence
  Description of Artificial Sequence: Synthetic oligonucleotide
  Sense strand starting at position 442 of SEQ ID NO: 1881288
ccuguuguuccguugcaau

SEQ ID NO: 2032867 - RNA, 19 nt, Artificial Sequence
  Description of Artificial Sequence: Synthetic oligonucleotide
  Antisense strand to SEQ ID NO: 2032866
auugcaacggaacaacagg

SEQ ID NO: 2032868 - RNA, 19 nt, Artificial Sequence
  Description of Artificial Sequence: Synthetic oligonucleotide
  Sense strand starting at position 444 of SEQ ID NO: 1881288
uguuguuccguugcaaugu

SEQ ID NO: 2032869 - RNA, 19 nt, Artificial Sequence
  Description of Artificial Sequence: Synthetic oligonucleotide
  Antisense strand to SEQ ID NO: 2032868
acauugcaacggaacaaca

SEQ ID NO: 2032870 - RNA, 19 nt, Artificial Sequence
  Description of Artificial Sequence: Synthetic oligonucleotide
  Sense strand starting at position 584 of SEQ ID NO: 1881288
ugguguuggagucaccuau

SEQ ID NO: 2032871 - RNA, 19 nt, Artificial Sequence
  Description of Artificial Sequence: Synthetic oligonucleotide
  Antisense strand to SEQ ID NO: 2032870
auaggugacuccaacacca

SEQ ID NO: 2032872 - RNA, 19 nt, Artificial Sequence
  Description of Artificial Sequence: Synthetic oligonucleotide
  Sense strand starting at position 588 of SEQ ID NO: 1881288
guuggagucaccuaugauc

SEQ ID NO: 2032873 - RNA, 19 nt, Artificial Sequence
  Description of Artificial Sequence: Synthetic oligonucleotide
  Antisense strand to SEQ ID NO: 2032872
gaucauaggugacuccaac

SEQ ID NO: 2032874 - RNA, 19 nt, Artificial Sequence
  Description of Artificial Sequence: Synthetic oligonucleotide
  Sense strand starting at position 590 of SEQ ID NO: 1881288
uggagucaccuaugaucac

SEQ ID NO: 2032875 - RNA, 19 nt, Artificial Sequence
  Description of Artificial Sequence: Synthetic oligonucleotide
  Antisense strand to SEQ ID NO: 2032874
gugaucauaggugacucca

SEQ ID NO: 2032876 - RNA, 19 nt, Artificial Sequence
  Description of Artificial Sequence: Synthetic oligonucleotide
  Sense strand starting at position 599 of SEQ ID NO: 1881288
cuaugaucaccugagucau

SEQ ID NO: 2032877 - RNA, 19 nt, Artificial Sequence
  Description of Artificial Sequence: Synthetic oligonucleotide
  Antisense strand to SEQ ID NO: 2032876
augacucaggugaucauag

SEQ ID NO: 2032878 - RNA, 19 nt, Artificial Sequence
  Description of Artificial Sequence: Synthetic oligonucleotide
  Sense strand starting at position 609 of SEQ ID NO: 1881288
cugagucauccugaccaua

SEQ ID NO: 2032879 - RNA, 19 nt, Artificial Sequence
  Description of Artificial Sequence: Synthetic oligonucleotide
  Antisense strand to SEQ ID NO: 2032878
uauggucaggaugacucag

SEQ ID NO: 2032880 - RNA, 19 nt, Artificial Sequence
  Description of Artificial Sequence: Synthetic oligonucleotide
  Sense strand starting at position 728 of SEQ ID NO: 1881288
ggucgcguccuagagcaaa

SEQ ID NO: 2032881 - RNA, 19 nt, Artificial Sequence
  Description of Artificial Sequence: Synthetic oligonucleotide
  Antisense strand to SEQ ID NO: 2032880
uuugcucuaggacgcgacc

SEQ ID NO: 2032882 - RNA, 19 nt, Artificial Sequence
  Description of Artificial Sequence: Synthetic oligonucleotide
  Sense strand starting at position 842 of SEQ ID NO: 1881288
agcguaucccuucgggaaa

SEQ ID NO: 2032883 - RNA, 19 nt, Artificial Sequence
  Description of Artificial Sequence: Synthetic oligonucleotide
  Antisense strand to SEQ ID NO: 2032882
uuucccgaagggauacgcu

SEQ ID NO: 2032884 - RNA, 19 nt, Artificial Sequence
  Description of Artificial Sequence: Synthetic oligonucleotide
  Sense strand starting at position 913 of SEQ ID NO: 1881288
ugcacuuccuccucggaau

SEQ ID NO: 2032885 - RNA, 19 nt, Artificial Sequence
  Description of Artificial Sequence: Synthetic oligonucleotide
  Antisense strand to SEQ ID NO: 2032884
auuccgaggaggaagugca

SEQ ID NO: 2032886 - RNA, 19 nt, Artificial Sequence
  Description of Artificial Sequence: Synthetic oligonucleotide
  Sense strand starting at position 1464 of SEQ ID NO: 1881288
cggcuuugcagggagacaa

SEQ ID NO: 2032887 - RNA, 19 nt, Artificial Sequence
  Description of Artificial Sequence: Synthetic oligonucleotide
  Antisense strand to SEQ ID NO: 2032886
uugucucccugcaaagccg

SEQ ID NO: 2032888 - RNA, 19 nt, Artificial Sequence
  Description of Artificial Sequence: Synthetic oligonucleotide
  Sense strand starting at position 2529 of SEQ ID NO: 1881288
agaccuauguucuugugau

SEQ ID NO: 2032889 - RNA, 19 nt, Artificial Sequence
  Description of Artificial Sequence: Synthetic oligonucleotide
  Antisense strand to SEQ ID NO: 2032888
aucacaagaacauaggucu

SEQ ID NO: 2032890 - RNA, 19 nt, Artificial Sequence
  Description of Artificial Sequence: Synthetic oligonucleotide
  Sense strand starting at position 2539 of SEQ ID NO: 1881288
ucuugugauucccagauuu

SEQ ID NO: 2032891 - RNA, 19 nt, Artificial Sequence
  Description of Artificial Sequence: Synthetic oligonucleotide
  Antisense strand to SEQ ID NO: 2032890
aaaucugggaaucacaaga

SEQ ID NO: 2032892 - RNA, 19 nt, Artificial Sequence
  Description of Artificial Sequence: Synthetic oligonucleotide
  Sense strand starting at position 2602 of SEQ ID NO: 1881288
uccagcagcccguuugauu

SEQ ID NO: 2032893 - RNA, 19 nt, Artificial Sequence
  Description of Artificial Sequence: Synthetic oligonucleotide
  Antisense strand to SEQ ID NO: 2032892
aaucaaacgggcugcugga

SEQ ID NO: 2032894 - RNA, 19 nt, Artificial Sequence
  Description of Artificial Sequence: Synthetic oligonucleotide
  Sense strand starting at position 2687 of SEQ ID NO: 1881288
agucaagaucugggcguuu

SEQ ID NO: 2032895 - RNA, 19 nt, Artificial Sequence
  Description of Artificial Sequence: Synthetic oligonucleotide
  Antisense strand to SEQ ID NO: 2032894
aaacgcccagaucuugacu

SEQ ID NO: 2032896 - RNA, 19 nt, Artificial Sequence
  Description of Artificial Sequence: Synthetic oligonucleotide
  Sense strand starting at position 2689 of SEQ ID NO: 1881288
ucaagaucugggcguuuca

SEQ ID NO: 2032897 - RNA, 19 nt, Artificial Sequence
  Description of Artificial Sequence: Synthetic oligonucleotide
  Antisense strand to SEQ ID NO: 2032896
ugaaacgcccagaucuuga

SEQ ID NO: 2032898 - RNA, 19 nt, Artificial Sequence
  Description of Artificial Sequence: Synthetic oligonucleotide
  Sense strand starting at position 2755 of SEQ ID NO: 1881288
guaugcgugcugaggugaa

SEQ ID NO: 2032899 - RNA, 19 nt, Artificial Sequence
  Description of Artificial Sequence: Synthetic oligonucleotide
  Antisense strand to SEQ ID NO: 2032898
uucaccucagcacgcauac

SEQ ID NO: 2032900 - RNA, 19 nt, Artificial Sequence
  Description of Artificial Sequence: Synthetic oligonucleotide
  Sense strand starting at position 2818 of SEQ ID NO: 1881288
gaaguaagaugggcugaua

SEQ ID NO: 2032901 - RNA, 19 nt, Artificial Sequence
  Description of Artificial Sequence: Synthetic oligonucleotide
  Antisense strand to SEQ ID NO: 2032900
uaucagcccaucuuacuuc

SEQ ID NO: 2032902 - RNA, 19 nt, Artificial Sequence
  Description of Artificial Sequence: Synthetic oligonucleotide
  Sense strand starting at position 2829 of SEQ ID NO: 1881288
ggcugauagaggcaugaau

SEQ ID NO: 2032903 - RNA, 19 nt, Artificial Sequence
  Description of Artificial Sequence: Synthetic oligonucleotide
  Antisense strand to SEQ ID NO: 2032902
auucaugccucuaucagcc

SEQ ID NO: 2032904 - RNA, 19 nt, Artificial Sequence
  Description of Artificial Sequence: Synthetic oligonucleotide
  Sense strand starting at position 2842 of SEQ ID NO: 1881288
augaauagaugauauggua

SEQ ID NO: 2032905 - RNA, 19 nt, Artificial Sequence
  Description of Artificial Sequence: Synthetic oligonucleotide
  Antisense strand to SEQ ID NO: 2032904
uaccauaucaucuauucau

SEQ ID NO: 2032906 - RNA, 19 nt, Artificial Sequence
  Description of Artificial Sequence: Synthetic oligonucleotide
  Sense strand starting at position 2845 of SEQ ID NO: 1881288
aauagaugauaugguaaga

SEQ ID NO: 2032907 - RNA, 19 nt, Artificial Sequence
  Description of Artificial Sequence: Synthetic oligonucleotide
  Antisense strand to SEQ ID NO: 2032906
ucuuaccauaucaucuauu

SEQ ID NO: 2032908 - RNA, 19 nt, Artificial Sequence
  Description of Artificial Sequence: Synthetic oligonucleotide
  Sense strand starting at position 2850 of SEQ ID NO: 1881288
augauaugguaagauguua

SEQ ID NO: 2032909 - RNA, 19 nt, Artificial Sequence
  Description of Artificial Sequence: Synthetic oligonucleotide
  Antisense strand to SEQ ID NO: 2032908
uaacaucuuaccauaucau

SEQ ID NO: 2032910 - RNA, 19 nt, Artificial Sequence
  Description of Artificial Sequence: Synthetic oligonucleotide
  Sense strand starting at position 2861 of SEQ ID NO: 1881288
agauguuaaacuuaggcga

SEQ ID NO: 2032911 - RNA, 19 nt, Artificial Sequence
  Description of Artificial Sequence: Synthetic oligonucleotide
  Antisense strand to SEQ ID NO: 2032910
ucgccuaaguuuaacaucu

SEQ ID NO: 2032912 - RNA, 19 nt, Artificial Sequence
  Description of Artificial Sequence: Synthetic oligonucleotide
  Sense strand starting at position 2909 of SEQ ID NO: 1881288
uuuccaguuugcucugaaa

SEQ ID NO: 2032913 - RNA, 19 nt, Artificial Sequence
  Description of Artificial Sequence: Synthetic oligonucleotide
  Antisense strand to SEQ ID NO: 2032912
uuucagagcaaacuggaaa

SEQ ID NO: 2032914 - RNA, 19 nt, Artificial Sequence
  Description of Artificial Sequence: Synthetic oligonucleotide
  Sense strand starting at position 3036 of SEQ ID NO: 1881288
uuugguaaaucugcaaguu

SEQ ID NO: 2032915 - RNA, 19 nt, Artificial Sequence
  Description of Artificial Sequence: Synthetic oligonucleotide
  Antisense strand to SEQ ID NO: 2032914
aacuugcagauuuaccaaa

SEQ ID NO: 2032916 - RNA, 19 nt, Artificial Sequence
  Description of Artificial Sequence: Synthetic oligonucleotide
  Sense strand starting at position 3037 of SEQ ID NO: 1881288
uugguaaaucugcaaguuc

SEQ ID NO: 2032917 - RNA, 19 nt, Artificial Sequence
  Description of Artificial Sequence: Synthetic oligonucleotide
  Antisense strand to SEQ ID NO: 2032916
gaacuugcagauuuaccaa

SEQ ID NO: 2032918 - RNA, 19 nt, Artificial Sequence
  Description of Artificial Sequence: Synthetic oligonucleotide
  Sense strand starting at position 3123 of SEQ ID NO: 1881288
uagcaagucugagcuauuc

SEQ ID NO: 2032919 - RNA, 19 nt, Artificial Sequence
  Description of Artificial Sequence: Synthetic oligonucleotide
  Antisense strand to SEQ ID NO: 2032918
gaauagcucagacuugcua

SEQ ID NO: 2032920 - RNA, 19 nt, Artificial Sequence
  Description of Artificial Sequence: Synthetic oligonucleotide
  Sense strand starting at position 3178 of SEQ ID NO: 1881288
uugguauugcuagagcaaa

SEQ ID NO: 2032921 - RNA, 19 nt, Artificial Sequence
  Description of Artificial Sequence: Synthetic oligonucleotide
  Antisense strand to SEQ ID NO: 2032920
uuugcucuagcaauaccaa

SEQ ID NO: 2032922 - RNA, 19 nt, Artificial Sequence
  Description of Artificial Sequence: Synthetic oligonucleotide
  Sense strand starting at position 3220 of SEQ ID NO: 1881288
ugcucugguucccuaacua

SEQ ID NO: 2032923 - RNA, 19 nt, Artificial Sequence
  Description of Artificial Sequence: Synthetic oligonucleotide
  Antisense strand to SEQ ID NO: 2032922
uaguuagggaaccagagca

SEQ ID NO: 2032924 - RNA, 19 nt, Artificial Sequence
  Description of Artificial Sequence: Synthetic oligonucleotide
  Sense strand starting at position 3314 of SEQ ID NO: 1881288
aucugauuacucugcugaa

SEQ ID NO: 2032925 - RNA, 19 nt, Artificial Sequence
  Description of Artificial Sequence: Synthetic oligonucleotide
  Antisense strand to SEQ ID NO: 2032924
uucagcagaguaaucagau

SEQ ID NO: 2032926 - RNA, 19 nt, Artificial Sequence
  Description of Artificial Sequence: Synthetic oligonucleotide
  Sense strand starting at position 3315 of SEQ ID NO: 1881288
ucugauuacucugcugaaa

SEQ ID NO: 2032927 - RNA, 19 nt, Artificial Sequence
  Description of Artificial Sequence: Synthetic oligonucleotide
  Antisense strand to SEQ ID NO: 2032926
uuucagcagaguaaucaga

SEQ ID NO: 2032928 - RNA, 19 nt, Artificial Sequence
  Description of Artificial Sequence: Synthetic oligonucleotide
  Sense strand starting at position 3425 of SEQ ID NO: 1881288
uuccaaggcugucuugaua

SEQ ID NO: 2032929 - RNA, 19 nt, Artificial Sequence
  Description of Artificial Sequence: Synthetic oligonucleotide
  Antisense strand to SEQ ID NO: 2032928
uaucaagacagccuuggaa

SEQ ID NO: 2032930 - RNA, 19 nt, Artificial Sequence
  Description of Artificial Sequence: Synthetic oligonucleotide
  Sense strand starting at position 3475 of SEQ ID NO: 1881288
acgguagcccucuauucuu

SEQ ID NO: 2032931 - RNA, 19 nt, Artificial Sequence
  Description of Artificial Sequence: Synthetic oligonucleotide
  Antisense strand to SEQ ID NO: 2032930
aagaauagagggcuaccgu

SEQ ID NO: 2032932 - RNA, 19 nt, Artificial Sequence
  Description of Artificial Sequence: Synthetic oligonucleotide
  Sense strand starting at position 3518 of SEQ ID NO: 1881288
ucaugugaugcugauggaa

SEQ ID NO: 2032933 - RNA, 19 nt, Artificial Sequence
  Description of Artificial Sequence: Synthetic oligonucleotide
  Antisense strand to SEQ ID NO: 2032932
uuccaucagcaucacauga

SEQ ID NO: 2032934 - RNA, 19 nt, Artificial Sequence
  Description of Artificial Sequence: Synthetic oligonucleotide
  Sense strand starting at position 3678 of SEQ ID NO: 1881288
ggcuguguacuguaugauu

SEQ ID NO: 2032935 - RNA, 19 nt, Artificial Sequence
  Description of Artificial Sequence: Synthetic oligonucleotide
  Antisense strand to SEQ ID NO: 2032934
aaucauacaguacacagcc

SEQ ID NO: 2032936 - RNA, 19 nt, Artificial Sequence
  Description of Artificial Sequence: Synthetic oligonucleotide
  Sense strand starting at position 967 of SEQ ID NO: 1881289
cagggaauugguugggagu

SEQ ID NO: 2032937 - RNA, 19 nt, Artificial Sequence
  Description of Artificial Sequence: Synthetic oligonucleotide
  Antisense strand to SEQ ID NO: 2032936
acucccaaccaauucccug

SEQ ID NO: 2032938 - RNA, 19 nt, Artificial Sequence
  Description of Artificial Sequence: Synthetic oligonucleotide
  Sense strand starting at position 1214 of SEQ ID NO: 1881289
ggaucuuaccuguggaaga

SEQ ID NO: 2032939 - RNA, 19 nt, Artificial Sequence
  Description of Artificial Sequence: Synthetic oligonucleotide
  Antisense strand to SEQ ID NO: 2032938
ucuuccacagguaagaucc

SEQ ID NO: 2032940 - RNA, 19 nt, Artificial Sequence
  Description of Artificial Sequence: Synthetic oligonucleotide
  Sense strand starting at position 1318 of SEQ ID NO: 1881289
gccaguagucccuacuauu

SEQ ID NO: 2032941 - RNA, 19 nt, Artificial Sequence
  Description of Artificial Sequence: Synthetic oligonucleotide
  Antisense strand to SEQ ID NO: 2032940
aauaguagggacuacuggc

SEQ ID NO: 2032942 - RNA, 19 nt, Artificial Sequence
  Description of Artificial Sequence: Synthetic oligonucleotide
  Sense strand starting at position 1365 of SEQ ID NO: 1881289
ggagcugucuggccuauuu

SEQ ID NO: 2032943 - RNA, 19 nt, Artificial Sequence
  Description of Artificial Sequence: Synthetic oligonucleotide
  Antisense strand to SEQ ID NO: 2032942
aaauaggccagacagcucc

SEQ ID NO: 2032944 - RNA, 19 nt, Artificial Sequence
  Description of Artificial Sequence: Synthetic oligonucleotide
  Sense strand starting at position 1501 of SEQ ID NO: 1881289
ucugacauauuggcaagaa

SEQ ID NO: 2032945 - RNA, 19 nt, Artificial Sequence
  Description of Artificial Sequence: Synthetic oligonucleotide
  Antisense strand to SEQ ID NO: 2032944
uucuugccaauaugucaga

SEQ ID NO: 2032946 - RNA, 19 nt, Artificial Sequence
  Description of Artificial Sequence: Synthetic oligonucleotide
  Sense strand starting at position 1511 of SEQ ID NO: 1881289
uggcaagaaucuucuacuc

SEQ ID NO: 2032947 - RNA, 19 nt, Artificial Sequence
  Description of Artificial Sequence: Synthetic oligonucleotide
  Antisense strand to SEQ ID NO: 2032946
gaguagaagauucuugcca

SEQ ID NO: 2032948 - RNA, 19 nt, Artificial Sequence
  Description of Artificial Sequence: Synthetic oligonucleotide
  Sense strand starting at position 1516 of SEQ ID NO: 1881289
agaaucuucuacucuggga

SEQ ID NO: 2032949 - RNA, 19 nt, Artificial Sequence
  Description of Artificial Sequence: Synthetic oligonucleotide
  Antisense strand to SEQ ID NO: 2032948
ucccagaguagaagauucu

SEQ ID NO: 2032950 - RNA, 19 nt, Artificial Sequence
  Description of Artificial Sequence: Synthetic oligonucleotide
  Sense strand starting at position 1530 of SEQ ID NO: 1881289
ugggaagacuucuugaucu

SEQ ID NO: 2032951 - RNA, 19 nt, Artificial Sequence
  Description of Artificial Sequence: Synthetic oligonucleotide
  Antisense strand to SEQ ID NO: 2032950
agaucaagaagucuuccca

SEQ ID NO: 2032952 - RNA, 19 nt, Artificial Sequence
  Description of Artificial Sequence: Synthetic oligonucleotide
  Sense strand starting at position 1611 of SEQ ID NO: 1881289
uccaauuauccagggcaca

SEQ ID NO: 2032953 - RNA, 19 nt, Artificial Sequence
  Description of Artificial Sequence: Synthetic oligonucleotide
  Antisense strand to SEQ ID NO: 2032952
ugugcccuggauaauugga

SEQ ID NO: 2032954 - RNA, 19 nt, Artificial Sequence
  Description of Artificial Sequence: Synthetic oligonucleotide
  Sense strand starting at position 1725 of SEQ ID NO: 1881289
acaagcaucucugugcaaa

SEQ ID NO: 2032955 - RNA, 19 nt, Artificial Sequence
  Description of Artificial Sequence: Synthetic oligonucleotide
  Antisense strand to SEQ ID NO: 2032954
uuugcacagagaugcuugu

SEQ ID NO: 2032956 - RNA, 19 nt, Artificial Sequence
  Description of Artificial Sequence: Synthetic oligonucleotide
  Sense strand starting at position 1726 of SEQ ID NO: 1881289
caagcaucucugugcaaag

SEQ ID NO: 2032957 - RNA, 19 nt, Artificial Sequence
  Description of Artificial Sequence: Synthetic oligonucleotide
  Antisense strand to SEQ ID NO: 2032956
cuuugcacagagaugcuug

SEQ ID NO: 2032958 - RNA, 19 nt, Artificial Sequence
  Description of Artificial Sequence: Synthetic oligonucleotide
  Sense strand starting at position 1779 of SEQ ID NO: 1881289
cuggaaaggaaguguuguu

SEQ ID NO: 2032959 - RNA, 19 nt, Artificial Sequence
  Description of Artificial Sequence: Synthetic oligonucleotide
  Antisense strand to SEQ ID NO: 2032958
aacaacacuuccuuuccag

SEQ ID NO: 2032960 - RNA, 19 nt, Artificial Sequence
  Description of Artificial Sequence: Synthetic oligonucleotide
  Sense strand starting at position 1810 of SEQ ID NO: 1881289
cuggaagcgacuuguccuu

SEQ ID NO: 2032961 - RNA, 19 nt, Artificial Sequence
  Description of Artificial Sequence: Synthetic oligonucleotide
  Antisense strand to SEQ ID NO: 2032960
aaggacaagucgcuuccag

SEQ ID NO: 2032962 - RNA, 19 nt, Artificial Sequence
  Description of Artificial Sequence: Synthetic oligonucleotide
  Sense strand starting at position 1815 of SEQ ID NO: 1881289
agcgacuuguccuuccaau

SEQ ID NO: 2032963 - RNA, 19 nt, Artificial Sequence
  Description of Artificial Sequence: Synthetic oligonucleotide
  Antisense strand to SEQ ID NO: 2032962
auuggaaggacaagucgcu

SEQ ID NO: 2032964 - RNA, 19 nt, Artificial Sequence
  Description of Artificial Sequence: Synthetic oligonucleotide
  Sense strand starting at position 1930 of SEQ ID NO: 1881289
gcccaugaucuggaucaac

SEQ ID NO: 2032965 - RNA, 19 nt, Artificial Sequence
  Description of Artificial Sequence: Synthetic oligonucleotide
  Antisense strand to SEQ ID NO: 2032964
guugauccagaucaugggc

SEQ ID NO: 2032966 - RNA, 19 nt, Artificial Sequence
  Description of Artificial Sequence: Synthetic oligonucleotide
  Sense strand starting at position 1947 of SEQ ID NO: 1881289
acggaugcuuacccacaua

SEQ ID NO: 2032967 - RNA, 19 nt, Artificial Sequence
  Description of Artificial Sequence: Synthetic oligonucleotide
  Antisense strand to SEQ ID NO: 2032966
uauguggguaagcauccgu

SEQ ID NO: 2032968 - RNA, 19 nt, Artificial Sequence
  Description of Artificial Sequence: Synthetic oligonucleotide
  Sense strand starting at position 1992 of SEQ ID NO: 1881289
ugugaaucauggcucuguu

SEQ ID NO: 2032969 - RNA, 19 nt, Artificial Sequence
  Description of Artificial Sequence: Synthetic oligonucleotide
  Antisense strand to SEQ ID NO: 2032968
aacagagccaugauucaca

SEQ ID NO: 2032970 - RNA, 19 nt, Artificial Sequence
  Description of Artificial Sequence: Synthetic oligonucleotide
  Sense strand starting at position 1995 of SEQ ID NO: 1881289
gaaucauggcucuguuagu

SEQ ID NO: 2032971 - RNA, 19 nt, Artificial Sequence
  Description of Artificial Sequence: Synthetic oligonucleotide
  Antisense strand to SEQ ID NO: 2032970
acuaacagagccaugauuc

SEQ ID NO: 2032972 - RNA, 19 nt, Artificial Sequence
  Description of Artificial Sequence: Synthetic oligonucleotide
  Sense strand starting at position 2000 of SEQ ID NO: 1881289
auggcucuguuagugguua

SEQ ID NO: 2032973 - RNA, 19 nt, Artificial Sequence
  Description of Artificial Sequence: Synthetic oligonucleotide
  Antisense strand to SEQ ID NO: 2032972
uaaccacuaacagagccau

SEQ ID NO: 2032974 - RNA, 19 nt, Artificial Sequence
  Description of Artificial Sequence: Synthetic oligonucleotide
  Sense strand starting at position 2002 of SEQ ID NO: 1881289
ggcucuguuagugguuaau

SEQ ID NO: 2032975 - RNA, 19 nt, Artificial Sequence
  Description of Artificial Sequence: Synthetic oligonucleotide
  Antisense strand to SEQ ID NO: 2032974
auuaaccacuaacagagcc

SEQ ID NO: 2032976 - RNA, 19 nt, Artificial Sequence
  Description of Artificial Sequence: Synthetic oligonucleotide
  Sense strand starting at position 2005 of SEQ ID NO: 1881289
ucuguuagugguuaauacu

SEQ ID NO: 2032977 - RNA, 19 nt, Artificial Sequence
  Description of Artificial Sequence: Synthetic oligonucleotide
  Antisense strand to SEQ ID NO: 2032976
aguauuaaccacuaacaga

SEQ ID NO: 2032978 - RNA, 19 nt, Artificial Sequence
  Description of Artificial Sequence: Synthetic oligonucleotide
  Sense strand starting at position 2086 of SEQ ID NO: 1881289
gggagcugcuucucucagu

SEQ ID NO: 2032979 - RNA, 19 nt, Artificial Sequence
  Description of Artificial Sequence: Synthetic oligonucleotide
  Antisense strand to SEQ ID NO: 2032978
acugagagaagcagcuccc

SEQ ID NO: 2032980 - RNA, 19 nt, Artificial Sequence
  Description of Artificial Sequence: Synthetic oligonucleotide
  Sense strand starting at position 2113 of SEQ ID NO: 1881289
ggcugugugcaggaggaau

SEQ ID NO: 2032981 - RNA, 19 nt, Artificial Sequence
  Description of Artificial Sequence: Synthetic oligonucleotide
  Antisense strand to SEQ ID NO: 2032980
auuccuccugcacacagcc

SEQ ID NO: 2032982 - RNA, 19 nt, Artificial Sequence
  Description of Artificial Sequence: Synthetic oligonucleotide
  Sense strand starting at position 2115 of SEQ ID NO: 1881289
cugugugcaggaggaauau

SEQ ID NO: 2032983 - RNA, 19 nt, Artificial Sequence
  Description of Artificial Sequence: Synthetic oligonucleotide
  Antisense strand to SEQ ID NO: 2032982
auauuccuccugcacacag

SEQ ID NO: 2032984 - RNA, 19 nt, Artificial Sequence
  Description of Artificial Sequence: Synthetic oligonucleotide
  Sense strand starting at position 2136 of SEQ ID NO: 1881289
gggaaaucuccaggccuga

SEQ ID NO: 2032985 - RNA, 19 nt, Artificial Sequence
  Description of Artificial Sequence: Synthetic oligonucleotide
  Antisense strand to SEQ ID NO: 2032984
ucaggccuggagauuuccc

SEQ ID NO: 2032986 - RNA, 19 nt, Artificial Sequence
  Description of Artificial Sequence: Synthetic oligonucleotide
  Sense strand starting at position 2225 of SEQ ID NO: 1881289
aguuuccuccugugucaga

SEQ ID NO: 2032987 - RNA, 19 nt, Artificial Sequence
  Description of Artificial Sequence: Synthetic oligonucleotide
  Antisense strand to SEQ ID NO: 2032986
ucugacacaggaggaaacu

SEQ ID NO: 2032988 - RNA, 19 nt, Artificial Sequence
  Description of Artificial Sequence: Synthetic oligonucleotide
  Sense strand starting at position 2226 of SEQ ID NO: 1881289
guuuccuccugugucagau

SEQ ID NO: 2032989 - RNA, 19 nt, Artificial Sequence
  Description of Artificial Sequence: Synthetic oligonucleotide
  Antisense strand to SEQ ID NO: 2032988
aucugacacaggaggaaac

SEQ ID NO: 2032990 - RNA, 19 nt, Artificial Sequence
  Description of Artificial Sequence: Synthetic oligonucleotide
  Sense strand starting at position 2335 of SEQ ID NO: 1881289
ucucaaagacguugccaaa

SEQ ID NO: 2032991 - RNA, 19 nt, Artificial Sequence
  Description of Artificial Sequence: Synthetic oligonucleotide
  Antisense strand to SEQ ID NO: 2032990
uuuggcaacgucuuugaga

SEQ ID NO: 2032992 - RNA, 19 nt, Artificial Sequence
  Description of Artificial Sequence: Synthetic oligonucleotide
  Sense strand starting at position 2360 of SEQ ID NO: 1881289
gucugaguccagggauggu

SEQ ID NO: 2032993 - RNA, 19 nt, Artificial Sequence
  Description of Artificial Sequence: Synthetic oligonucleotide
  Antisense strand to SEQ ID NO: 2032992
accaucccuggacucagac

SEQ ID NO: 2032994 - RNA, 19 nt, Artificial Sequence
  Description of Artificial Sequence: Synthetic oligonucleotide
  Sense strand starting at position 2433 of SEQ ID NO: 1881289
gagagauguacuggccagu

SEQ ID NO: 2032995 - RNA, 19 nt, Artificial Sequence
  Description of Artificial Sequence: Synthetic oligonucleotide
  Antisense strand to SEQ ID NO: 2032994
acuggccaguacaucucuc

SEQ ID NO: 2032996 - RNA, 19 nt, Artificial Sequence
  Description of Artificial Sequence: Synthetic oligonucleotide
  Sense strand starting at position 2517 of SEQ ID NO: 1881289
ggaggacuuucugcaguga

SEQ ID NO: 2032997 - RNA, 19 nt, Artificial Sequence
  Description of Artificial Sequence: Synthetic oligonucleotide
  Antisense strand to SEQ ID NO: 2032996
ucacugcagaaaguccucc

SEQ ID NO: 2032998 - RNA, 19 nt, Artificial Sequence
  Description of Artificial Sequence: Synthetic oligonucleotide
  Sense strand starting at position 2521 of SEQ ID NO: 1881289
gacuuucugcagugaccau

SEQ ID NO: 2032999 - RNA, 19 nt, Artificial Sequence
  Description of Artificial Sequence: Synthetic oligonucleotide
  Antisense strand to SEQ ID NO: 2032998
auggucacugcagaaaguc

SEQ ID NO: 2033000 - RNA, 19 nt, Artificial Sequence
  Description of Artificial Sequence: Synthetic oligonucleotide
  Sense strand starting at position 2544 of SEQ ID NO: 1881289
gcacucuuuccucaagggu

SEQ ID NO: 2033001 - RNA, 19 nt, Artificial Sequence
  Description of Artificial Sequence: Synthetic oligonucleotide
  Antisense strand to SEQ ID NO: 2033000
acccuugaggaaagagugc

SEQ ID NO: 2033002 - RNA, 19 nt, Artificial Sequence
  Description of Artificial Sequence: Synthetic oligonucleotide
  Sense strand starting at position 2572 of SEQ ID NO: 1881289
gcccucuccugaucaggaa

SEQ ID NO: 2033003 - RNA, 19 nt, Artificial Sequence
  Description of Artificial Sequence: Synthetic oligonucleotide
  Antisense strand to SEQ ID NO: 2033002
uuccugaucaggagagggc

SEQ ID NO: 2033004 - RNA, 19 nt, Artificial Sequence
  Description of Artificial Sequence: Synthetic oligonucleotide
  Sense strand starting at position 2612 of SEQ ID NO: 1881289
uggguucagcgagggaaua

SEQ ID NO: 2033005 - RNA, 19 nt, Artificial Sequence
  Description of Artificial Sequence: Synthetic oligonucleotide
  Antisense strand to SEQ ID NO: 2033004
uauucccucgcugaaccca

SEQ ID NO: 2033006 - RNA, 19 nt, Artificial Sequence
  Description of Artificial Sequence: Synthetic oligonucleotide
  Sense strand starting at position 2754 of SEQ ID NO: 1881289
gacccacuuccugagguuu

SEQ ID NO: 2033007 - RNA, 19 nt, Artificial Sequence
  Description of Artificial Sequence: Synthetic oligonucleotide
  Antisense strand to SEQ ID NO: 2033006
aaaccucaggaaguggguc

SEQ ID NO: 2033008 - RNA, 19 nt, Artificial Sequence
  Description of Artificial Sequence: Synthetic oligonucleotide
  Sense strand starting at position 2777 of SEQ ID NO: 1881289
aagagaagcuccucgucua

SEQ ID NO: 2033009 - RNA, 19 nt, Artificial Sequence
  Description of Artificial Sequence: Synthetic oligonucleotide
  Antisense strand to SEQ ID NO: 2033008
uagacgaggagcuucucuu

SEQ ID NO: 2033010 - RNA, 19 nt, Artificial Sequence
  Description of Artificial Sequence: Synthetic oligonucleotide
  Sense strand starting at position 2803 of SEQ ID NO: 1881289
gagagcuugccuggagaag

SEQ ID NO: 2033011 - RNA, 19 nt, Artificial Sequence
  Description of Artificial Sequence: Synthetic oligonucleotide
  Antisense strand to SEQ ID NO: 2033010
cuucuccaggcaagcucuc

SEQ ID NO: 2033012 - RNA, 19 nt, Artificial Sequence
  Description of Artificial Sequence: Synthetic oligonucleotide
  Sense strand starting at position 2871 of SEQ ID NO: 1881289
ccacauauuggguaccgau

SEQ ID NO: 2033013 - RNA, 19 nt, Artificial Sequence
  Description of Artificial Sequence: Synthetic oligonucleotide
  Antisense strand to SEQ ID NO: 2033012
aucgguacccaauaugugg

SEQ ID NO: 2033014 - RNA, 19 nt, Artificial Sequence
  Description of Artificial Sequence: Synthetic oligonucleotide
  Sense strand starting at position 2989 of SEQ ID NO: 1881289
accuuugugucacuuacau

SEQ ID NO: 2033015 - RNA, 19 nt, Artificial Sequence
  Description of Artificial Sequence: Synthetic oligonucleotide
  Antisense strand to SEQ ID NO: 2033014
auguaagugacacaaaggu

SEQ ID NO: 2033016 - RNA, 19 nt, Artificial Sequence
  Description of Artificial Sequence: Synthetic oligonucleotide
  Sense strand starting at position 850 of SEQ ID NO: 1881290
uggcuacugccucaaagau

SEQ ID NO: 2033017 - RNA, 19 nt, Artificial Sequence
  Description of Artificial Sequence: Synthetic oligonucleotide
  Antisense strand to SEQ ID NO: 2033016
aucuuugaggcaguagcca

SEQ ID NO: 2033018 - RNA, 19 nt, Artificial Sequence
  Description of Artificial Sequence: Synthetic oligonucleotide
  Sense strand starting at position 906 of SEQ ID NO: 1881290
guccucagauuauuugcau

SEQ ID NO: 2033019 - RNA, 19 nt, Artificial Sequence
  Description of Artificial Sequence: Synthetic oligonucleotide
  Antisense strand to SEQ ID NO: 2033018
augcaaauaaucugaggac

SEQ ID NO: 2033020 - RNA, 19 nt, Artificial Sequence
  Description of Artificial Sequence: Synthetic oligonucleotide
  Sense strand starting at position 926 of SEQ ID NO: 1881290
agcauuauuugggaacuuu

SEQ ID NO: 2033021 - RNA, 19 nt, Artificial Sequence
  Description of Artificial Sequence: Synthetic oligonucleotide
  Antisense strand to SEQ ID NO: 2033020
aaaguucccaaauaaugcu

SEQ ID NO: 2033022 - RNA, 19 nt, Artificial Sequence
  Description of Artificial Sequence: Synthetic oligonucleotide
  Sense strand starting at position 2029 of SEQ ID NO: 1881290
ggucucaccucggaccaau

SEQ ID NO: 2033023 - RNA, 19 nt, Artificial Sequence
  Description of Artificial Sequence: Synthetic oligonucleotide
  Antisense strand to SEQ ID NO: 2033022
auugguccgaggugagacc

SEQ ID NO: 2033024 - RNA, 19 nt, Artificial Sequence
  Description of Artificial Sequence: Synthetic oligonucleotide
  Sense strand starting at position 2439 of SEQ ID NO: 1881290
gagaaaggcugguacguaa

SEQ ID NO: 2033025 - RNA, 19 nt, Artificial Sequence
  Description of Artificial Sequence: Synthetic oligonucleotide
  Antisense strand to SEQ ID NO: 2033024
uuacguaccagccuuucuc

SEQ ID NO: 2033026 - RNA, 19 nt, Artificial Sequence
  Description of Artificial Sequence: Synthetic oligonucleotide
  Sense strand starting at position 2687 of SEQ ID NO: 1881290
caacuaucuugagugguga

SEQ ID NO: 2033027 - RNA, 19 nt, Artificial Sequence
  Description of Artificial Sequence: Synthetic oligonucleotide
  Antisense strand to SEQ ID NO: 2033026
ucaccacucaagauaguug

SEQ ID NO: 2033028 - RNA, 19 nt, Artificial Sequence
  Description of Artificial Sequence: Synthetic oligonucleotide
  Sense strand starting at position 2688 of SEQ ID NO: 1881290
aacuaucuugaguggugaa

SEQ ID NO: 2033029 - RNA, 19 nt, Artificial Sequence
  Description of Artificial Sequence: Synthetic oligonucleotide
  Antisense strand to SEQ ID NO: 2033028
uucaccacucaagauaguu

SEQ ID NO: 2033030 - RNA, 19 nt, Artificial Sequence
  Description of Artificial Sequence: Synthetic oligonucleotide
  Sense strand starting at position 2689 of SEQ ID NO: 1881290
acuaucuugaguggugaaa

SEQ ID NO: 2033031 - RNA, 19 nt, Artificial Sequence
  Description of Artificial Sequence: Synthetic oligonucleotide
  Antisense strand to SEQ ID NO: 2033030
uuucaccacucaagauagu

SEQ ID NO: 2033032 - RNA, 19 nt, Artificial Sequence
  Description of Artificial Sequence: Synthetic oligonucleotide
  Sense strand starting at position 2691 of SEQ ID NO: 1881290
uaucuugaguggugaaauu

SEQ ID NO: 2033033 - RNA, 19 nt, Artificial Sequence
  Description of Artificial Sequence: Synthetic oligonucleotide
  Antisense strand to SEQ ID NO: 2033032
aauuucaccacucaagaua

SEQ ID NO: 2033034 - RNA, 19 nt, Artificial Sequence
  Description of Artificial Sequence: Synthetic oligonucleotide
  Sense strand starting at position 2714 of SEQ ID NO: 1881290
ggacuuggugacugaguga

SEQ ID NO: 2033035 - RNA, 19 nt, Artificial Sequence
  Description of Artificial Sequence: Synthetic oligonucleotide
  Antisense strand to SEQ ID NO: 2033034
ucacucagucaccaagucc

SEQ ID NO: 2033036 - RNA, 19 nt, Artificial Sequence
  Description of Artificial Sequence: Synthetic oligonucleotide
  Sense strand starting at position 3312 of SEQ ID NO: 1881290
gaaacagguuugugaccuu

SEQ ID NO: 2033037 - RNA, 19 nt, Artificial Sequence
  Description of Artificial Sequence: Synthetic oligonucleotide
  Antisense strand to SEQ ID NO: 2033036
aaggucacaaaccuguuuc

SEQ ID NO: 2033038 - RNA, 19 nt, Artificial Sequence
  Description of Artificial Sequence: Synthetic oligonucleotide
  Sense strand starting at position 3315 of SEQ ID NO: 1881290
acagguuugugaccuuaac

SEQ ID NO: 2033039 - RNA, 19 nt, Artificial Sequence
  Description of Artificial Sequence: Synthetic oligonucleotide
  Antisense strand to SEQ ID NO: 2033038
guuaaggucacaaaccugu

SEQ ID NO: 2033040 - RNA, 19 nt, Artificial Sequence
  Description of Artificial Sequence: Synthetic oligonucleotide
  Sense strand starting at position 3406 of SEQ ID NO: 1881290
ugagauauguuaggcacuu

SEQ ID NO: 2033041 - RNA, 19 nt, Artificial Sequence
  Description of Artificial Sequence: Synthetic oligonucleotide
  Antisense strand to SEQ ID NO: 2033040
aagugccuaacauaucuca

SEQ ID NO: 2033042 - RNA, 19 nt, Artificial Sequence
  Description of Artificial Sequence: Synthetic oligonucleotide
  Sense strand starting at position 3407 of SEQ ID NO: 1881290
gagauauguuaggcacuua

SEQ ID NO: 2033043 - RNA, 19 nt, Artificial Sequence
  Description of Artificial Sequence: Synthetic oligonucleotide
  Antisense strand to SEQ ID NO: 2033042
uaagugccuaacauaucuc

SEQ ID NO: 2033044 - RNA, 19 nt, Artificial Sequence
  Description of Artificial Sequence: Synthetic oligonucleotide
  Sense strand starting at position 3450 of SEQ ID NO: 1881290
uguagccauucuuggaguu

SEQ ID NO: 2033045 - RNA, 19 nt, Artificial Sequence
  Description of Artificial Sequence: Synthetic oligonucleotide
  Antisense strand to SEQ ID NO: 2033044
aacuccaagaauggcuaca

SEQ ID NO: 2033046 - RNA, 19 nt, Artificial Sequence
  Description of Artificial Sequence: Synthetic oligonucleotide
  Sense strand starting at position 3452 of SEQ ID NO: 1881290
uagccauucuuggaguuga

SEQ ID NO: 2033047 - RNA, 19 nt, Artificial Sequence
  Description of Artificial Sequence: Synthetic oligonucleotide
  Antisense strand to SEQ ID NO: 2033046
ucaacuccaagaauggcua

SEQ ID NO: 2033048 - RNA, 19 nt, Artificial Sequence
  Description of Artificial Sequence: Synthetic oligonucleotide
  Sense strand starting at position 3478 of SEQ ID NO: 1881290
ggcacagugcuaugucuua

SEQ ID NO: 2033049 - RNA, 19 nt, Artificial Sequence
  Description of Artificial Sequence: Synthetic oligonucleotide
  Antisense strand to SEQ ID NO: 2033048
uaagacauagcacugugcc

SEQ ID NO: 2033050 - RNA, 19 nt, Artificial Sequence
  Description of Artificial Sequence: Synthetic oligonucleotide
  Sense strand starting at position 3482 of SEQ ID NO: 1881290
cagugcuaugucuuacguu

SEQ ID NO: 2033051 - RNA, 19 nt, Artificial Sequence
  Description of Artificial Sequence: Synthetic oligonucleotide
  Antisense strand to SEQ ID NO: 2033050
aacguaagacauagcacug

SEQ ID NO: 2033052 - RNA, 19 nt, Artificial Sequence
  Description of Artificial Sequence: Synthetic oligonucleotide
  Sense strand starting at position 3677 of SEQ ID NO: 1881290
cgcuccaguguuugaagga

SEQ ID NO: 2033053 - RNA, 19 nt, Artificial Sequence
  Description of Artificial Sequence: Synthetic oligonucleotide
  Antisense strand to SEQ ID NO: 2033052
uccuucaaacacuggagcg

SEQ ID NO: 2033054 - RNA, 19 nt, Artificial Sequence
  Description of Artificial Sequence: Synthetic oligonucleotide
  Sense strand starting at position 3697 of SEQ ID NO: 1881290
ggaugagcuguaugacauc

SEQ ID NO: 2033055 - RNA, 19 nt, Artificial Sequence
  Description of Artificial Sequence: Synthetic oligonucleotide
  Antisense strand to SEQ ID NO: 2033054
gaugucauacagcucaucc

SEQ ID NO: 2033056 - RNA, 19 nt, Artificial Sequence
  Description of Artificial Sequence: Synthetic oligonucleotide
  Sense strand starting at position 3703 of SEQ ID NO: 1881290
gcuguaugacaucaucuuu

SEQ ID NO: 2033057 - RNA, 19 nt, Artificial Sequence
  Description of Artificial Sequence: Synthetic oligonucleotide
  Antisense strand to SEQ ID NO: 2033056
aaagaugaugucauacagc

SEQ ID NO: 2033058 - RNA, 19 nt, Artificial Sequence
  Description of Artificial Sequence: Synthetic oligonucleotide
  Sense strand starting at position 3778 of SEQ ID NO: 1881290
cugcauuaaagugaugagu

SEQ ID NO: 2033059 - RNA, 19 nt, Artificial Sequence
  Description of Artificial Sequence: Synthetic oligonucleotide
  Antisense strand to SEQ ID NO: 2033058
acucaucacuuuaaugcag

SEQ ID NO: 2033060 - RNA, 19 nt, Artificial Sequence
  Description of Artificial Sequence: Synthetic oligonucleotide
  Sense strand starting at position 3780 of SEQ ID NO: 1881290
gcauuaaagugaugagucu

SEQ ID NO: 2033061 - RNA, 19 nt, Artificial Sequence
  Description of Artificial Sequence: Synthetic oligonucleotide
  Antisense strand to SEQ ID NO: 2033060
agacucaucacuuuaaugc

SEQ ID NO: 2033062 - RNA, 19 nt, Artificial Sequence
  Description of Artificial Sequence: Synthetic oligonucleotide
  Sense strand starting at position 3786 of SEQ ID NO: 1881290
aagugaugagucuguaggu

SEQ ID NO: 2033063 - RNA, 19 nt, Artificial Sequence
  Description of Artificial Sequence: Synthetic oligonucleotide
  Antisense strand to SEQ ID NO: 2033062
accuacagacucaucacuu

SEQ ID NO: 2033064 - RNA, 19 nt, Artificial Sequence
  Description of Artificial Sequence: Synthetic oligonucleotide
  Sense strand starting at position 3788 of SEQ ID NO: 1881290
gugaugagucuguaggugu

SEQ ID NO: 2033065 - RNA, 19 nt, Artificial Sequence
  Description of Artificial Sequence: Synthetic oligonucleotide
  Antisense strand to SEQ ID NO: 2033064
acaccuacagacucaucac

SEQ ID NO: 2033066 - RNA, 19 nt, Artificial Sequence
  Description of Artificial Sequence: Synthetic oligonucleotide
  Sense strand starting at position 3789 of SEQ ID NO: 1881290
ugaugagucuguaggugug

SEQ ID NO: 2033067 - RNA, 19 nt, Artificial Sequence
  Description of Artificial Sequence: Synthetic oligonucleotide
  Antisense strand to SEQ ID NO: 2033066
cacaccuacagacucauca

SEQ ID NO: 2033068 - RNA, 19 nt, Artificial Sequence
  Description of Artificial Sequence: Synthetic oligonucleotide
  Sense strand starting at position 3792 of SEQ ID NO: 1881290
ugagucuguaggugugaua

SEQ ID NO: 2033069 - RNA, 19 nt, Artificial Sequence
  Description of Artificial Sequence: Synthetic oligonucleotide
  Antisense strand to SEQ ID NO: 2033068
uaucacaccuacagacuca

SEQ ID NO: 2033070 - RNA, 19 nt, Artificial Sequence
  Description of Artificial Sequence: Synthetic oligonucleotide
  Sense strand starting at position 3795 of SEQ ID NO: 1881290
gucuguaggugugauacaa

SEQ ID NO: 2033071 - RNA, 19 nt, Artificial Sequence
  Description of Artificial Sequence: Synthetic oligonucleotide
  Antisense strand to SEQ ID NO: 2033070
uuguaucacaccuacagac

SEQ ID NO: 2033072 - RNA, 19 nt, Artificial Sequence
  Description of Artificial Sequence: Synthetic oligonucleotide
  Sense strand starting at position 3799 of SEQ ID NO: 1881290
guaggugugauacaauugu

SEQ ID NO: 2033073 - RNA, 19 nt, Artificial Sequence
  Description of Artificial Sequence: Synthetic oligonucleotide
  Antisense strand to SEQ ID NO: 2033072
acaauuguaucacaccuac

SEQ ID NO: 2033074 - RNA, 19 nt, Artificial Sequence
  Description of Artificial Sequence: Synthetic oligonucleotide
  Sense strand starting at position 3803 of SEQ ID NO: 1881290
gugugauacaauugucacu

SEQ ID NO: 2033075 - RNA, 19 nt, Artificial Sequence
  Description of Artificial Sequence: Synthetic oligonucleotide
  Antisense strand to SEQ ID NO: 2033074
agugacaauuguaucacac

SEQ ID NO: 2033076 - RNA, 19 nt, Artificial Sequence
  Description of Artificial Sequence: Synthetic oligonucleotide
  Sense strand starting at position 3846 of SEQ ID NO: 1881290
uggaaauagcccugcuuua

SEQ ID NO: 2033077 - RNA, 19 nt, Artificial Sequence
  Description of Artificial Sequence: Synthetic oligonucleotide
  Antisense strand to SEQ ID NO: 2033076
uaaagcagggcuauuucca

SEQ ID NO: 2033078 - RNA, 19 nt, Artificial Sequence
  Description of Artificial Sequence: Synthetic oligonucleotide
  Sense strand starting at position 3932 of SEQ ID NO: 1881290
ccaguugaaucagaaugua

SEQ ID NO: 2033079 - RNA, 19 nt, Artificial Sequence
  Description of Artificial Sequence: Synthetic oligonucleotide
  Antisense strand to SEQ ID NO: 2033078
uacauucugauucaacugg

SEQ ID NO: 2033080 - RNA, 19 nt, Artificial Sequence
  Description of Artificial Sequence: Synthetic oligonucleotide
  Sense strand starting at position 558 of SEQ ID NO: 1881291
uuuagcagaucuuucuaga

SEQ ID NO: 2033081 - RNA, 19 nt, Artificial Sequence
  Description of Artificial Sequence: Synthetic oligonucleotide
  Antisense strand to SEQ ID NO: 2033080
ucuagaaagaucugcuaaa

SEQ ID NO: 2033082 - RNA, 19 nt, Artificial Sequence
  Description of Artificial Sequence: Synthetic oligonucleotide
  Sense strand starting at position 758 of SEQ ID NO: 1881291
ugcuuagcccugcaacaau

SEQ ID NO: 2033083 - RNA, 19 nt, Artificial Sequence
  Description of Artificial Sequence: Synthetic oligonucleotide
  Antisense strand to SEQ ID NO: 2033082
auuguugcagggcuaagca

SEQ ID NO: 2033084 - RNA, 19 nt, Artificial Sequence
  Description of Artificial Sequence: Synthetic oligonucleotide
  Sense strand starting at position 798 of SEQ ID NO: 1881291
agaccagcguuaucagcau

SEQ ID NO: 2033085 - RNA, 19 nt, Artificial Sequence
  Description of Artificial Sequence: Synthetic oligonucleotide
  Antisense strand to SEQ ID NO: 2033084
augcugauaacgcuggucu

SEQ ID NO: 2033086 - RNA, 19 nt, Artificial Sequence
  Description of Artificial Sequence: Synthetic oligonucleotide
  Sense strand starting at position 802 of SEQ ID NO: 1881291
cagcguuaucagcaucacu

SEQ ID NO: 2033087 - RNA, 19 nt, Artificial Sequence
  Description of Artificial Sequence: Synthetic oligonucleotide
  Antisense strand to SEQ ID NO: 2033086
agugaugcugauaacgcug

SEQ ID NO: 2033088 - RNA, 19 nt, Artificial Sequence
  Description of Artificial Sequence: Synthetic oligonucleotide
  Sense strand starting at position 916 of SEQ ID NO: 1881291
gcguucugggaguagaauc

SEQ ID NO: 2033089 - RNA, 19 nt, Artificial Sequence
  Description of Artificial Sequence: Synthetic oligonucleotide
  Antisense strand to SEQ ID NO: 2033088
gauucuacucccagaacgc

SEQ ID NO: 2033090 - RNA, 19 nt, Artificial Sequence
  Description of Artificial Sequence: Synthetic oligonucleotide
  Sense strand starting at position 950 of SEQ ID NO: 1881291
uuauaagccucagagauga

SEQ ID NO: 2033091 - RNA, 19 nt, Artificial Sequence
  Description of Artificial Sequence: Synthetic oligonucleotide
  Antisense strand to SEQ ID NO: 2033090
ucaucucugaggcuuauaa

SEQ ID NO: 2033092 - RNA, 19 nt, Artificial Sequence
  Description of Artificial Sequence: Synthetic oligonucleotide
  Sense strand starting at position 960 of SEQ ID NO: 1881291
cagagaugauucugauacu

SEQ ID NO: 2033093 - RNA, 19 nt, Artificial Sequence
  Description of Artificial Sequence: Synthetic oligonucleotide
  Antisense strand to SEQ ID NO: 2033092
aguaucagaaucaucucug

SEQ ID NO: 2033094 - RNA, 19 nt, Artificial Sequence
  Description of Artificial Sequence: Synthetic oligonucleotide
  Sense strand starting at position 961 of SEQ ID NO: 1881291
agagaugauucugauacuu

SEQ ID NO: 2033095 - RNA, 19 nt, Artificial Sequence
  Description of Artificial Sequence: Synthetic oligonucleotide
  Antisense strand to SEQ ID NO: 2033094
aaguaucagaaucaucucu

SEQ ID NO: 2033096 - RNA, 19 nt, Artificial Sequence
  Description of Artificial Sequence: Synthetic oligonucleotide
  Sense strand starting at position 963 of SEQ ID NO: 1881291
agaugauucugauacuuga

SEQ ID NO: 2033097 - RNA, 19 nt, Artificial Sequence
  Description of Artificial Sequence: Synthetic oligonucleotide
  Antisense strand to SEQ ID NO: 2033096
ucaaguaucagaaucaucu

SEQ ID NO: 2033098 - RNA, 19 nt, Artificial Sequence
  Description of Artificial Sequence: Synthetic oligonucleotide
  Sense strand starting at position 1015 of SEQ ID NO: 1881291
ucucccuggccuuaaguau

SEQ ID NO: 2033099 - RNA, 19 nt, Artificial Sequence
  Description of Artificial Sequence: Synthetic oligonucleotide
  Antisense strand to SEQ ID NO: 2033098
auacuuaaggccagggaga

SEQ ID NO: 2033100 - RNA, 19 nt, Artificial Sequence
  Description of Artificial Sequence: Synthetic oligonucleotide
  Sense strand starting at position 1030 of SEQ ID NO: 1881291
guauuagggccuuaaguau

SEQ ID NO: 2033101 - RNA, 19 nt, Artificial Sequence
  Description of Artificial Sequence: Synthetic oligonucleotide
  Antisense strand to SEQ ID NO: 2033100
auacuuaaggcccuaauac

SEQ ID NO: 2033102 - RNA, 19 nt, Artificial Sequence
  Description of Artificial Sequence: Synthetic oligonucleotide
  Sense strand starting at position 1043 of SEQ ID NO: 1881291
aaguauuagggccauaucu

SEQ ID NO: 2033103 - RNA, 19 nt, Artificial Sequence
  Description of Artificial Sequence: Synthetic oligonucleotide
  Antisense strand to SEQ ID NO: 2033102
agauauggcccuaauacuu

SEQ ID NO: 2033104 - RNA, 19 nt, Artificial Sequence
  Description of Artificial Sequence: Synthetic oligonucleotide
  Sense strand starting at position 1045 of SEQ ID NO: 1881291
guauuagggccauaucuuc

SEQ ID NO: 2033105 - RNA, 19 nt, Artificial Sequence
  Description of Artificial Sequence: Synthetic oligonucleotide
  Antisense strand to SEQ ID NO: 2033104
gaagauauggcccuaauac

SEQ ID NO: 2033106 - RNA, 19 nt, Artificial Sequence
  Description of Artificial Sequence: Synthetic oligonucleotide
  Sense strand starting at position 1139 of SEQ ID NO: 1881291
gcagcagagagauguagau

SEQ ID NO: 2033107 - RNA, 19 nt, Artificial Sequence
  Description of Artificial Sequence: Synthetic oligonucleotide
  Antisense strand to SEQ ID NO: 2033106
aucuacaucucucugcugc

SEQ ID NO: 2033108 - RNA, 19 nt, Artificial Sequence
  Description of Artificial Sequence: Synthetic oligonucleotide
  Sense strand starting at position 1145 of SEQ ID NO: 1881291
gagagauguagauaugugu

SEQ ID NO: 2033109 - RNA, 19 nt, Artificial Sequence
  Description of Artificial Sequence: Synthetic oligonucleotide
  Antisense strand to SEQ ID NO: 2033108
acacauaucuacaucucuc

SEQ ID NO: 2033110 - RNA, 19 nt, Artificial Sequence
  Description of Artificial Sequence: Synthetic oligonucleotide
  Sense strand starting at position 1148 of SEQ ID NO: 1881291
agauguagauauguguguu

SEQ ID NO: 2033111 - RNA, 19 nt, Artificial Sequence
  Description of Artificial Sequence: Synthetic oligonucleotide
  Antisense strand to SEQ ID NO: 2033110
aacacacauaucuacaucu

SEQ ID NO: 2033112 - RNA, 19 nt, Artificial Sequence
  Description of Artificial Sequence: Synthetic oligonucleotide
  Sense strand starting at position 1152 of SEQ ID NO: 1881291
guagauauguguguucuag

SEQ ID NO: 2033113 - RNA, 19 nt, Artificial Sequence
  Description of Artificial Sequence: Synthetic oligonucleotide
  Antisense strand to SEQ ID NO: 2033112
cuagaacacacauaucuac

SEQ ID NO: 2033114 - RNA, 19 nt, Artificial Sequence
  Description of Artificial Sequence: Synthetic oligonucleotide
  Sense strand starting at position 1154 of SEQ ID NO: 1881291
agauauguguguucuagaa

SEQ ID NO: 2033115 - RNA, 19 nt, Artificial Sequence
  Description of Artificial Sequence: Synthetic oligonucleotide
  Antisense strand to SEQ ID NO: 2033114
uucuagaacacacauaucu

SEQ ID NO: 2033116 - RNA, 19 nt, Artificial Sequence
  Description of Artificial Sequence: Synthetic oligonucleotide
  Sense strand starting at position 1199 of SEQ ID NO: 1881291
cgagguggguggaaaucuu

SEQ ID NO: 2033117 - RNA, 19 nt, Artificial Sequence
  Description of Artificial Sequence: Synthetic oligonucleotide
  Antisense strand to SEQ ID NO: 2033116
aagauuuccacccaccucg

SEQ ID NO: 2033118 - RNA, 19 nt, Artificial Sequence
  Description of Artificial Sequence: Synthetic oligonucleotide
  Sense strand starting at position 2219 of SEQ ID NO: 1881291
gagaaaggcuaguacauaa

SEQ ID NO: 2033119 - RNA, 19 nt, Artificial Sequence
  Description of Artificial Sequence: Synthetic oligonucleotide
  Antisense strand to SEQ ID NO: 2033118
uuauguacuagccuuucuc

SEQ ID NO: 2033120 - RNA, 19 nt, Artificial Sequence
  Description of Artificial Sequence: Synthetic oligonucleotide
  Sense strand starting at position 2462 of SEQ ID NO: 1881291
ucugacaacugucuugagu

SEQ ID NO: 2033121 - RNA, 19 nt, Artificial Sequence
  Description of Artificial Sequence: Synthetic oligonucleotide
  Antisense strand to SEQ ID NO: 2033120
acucaagacaguugucaga

SEQ ID NO: 2033122 - RNA, 19 nt, Artificial Sequence
  Description of Artificial Sequence: Synthetic oligonucleotide
  Sense strand starting at position 2468 of SEQ ID NO: 1881291
aacugucuugaguggugaa

SEQ ID NO: 2033123 - RNA, 19 nt, Artificial Sequence
  Description of Artificial Sequence: Synthetic oligonucleotide
  Antisense strand to SEQ ID NO: 2033122
uucaccacucaagacaguu

SEQ ID NO: 2033124 - RNA, 19 nt, Artificial Sequence
  Description of Artificial Sequence: Synthetic oligonucleotide
  Sense strand starting at position 2469 of SEQ ID NO: 1881291
acugucuugaguggugaaa

SEQ ID NO: 2033125 - RNA, 19 nt, Artificial Sequence
  Description of Artificial Sequence: Synthetic oligonucleotide
  Antisense strand to SEQ ID NO: 2033124
uuucaccacucaagacagu

SEQ ID NO: 2033126 - RNA, 19 nt, Artificial Sequence
  Description of Artificial Sequence: Synthetic oligonucleotide
  Sense strand starting at position 2494 of SEQ ID NO: 1881291
ggacuugguaacugaguga

SEQ ID NO: 2033127 - RNA, 19 nt, Artificial Sequence
  Description of Artificial Sequence: Synthetic oligonucleotide
  Antisense strand to SEQ ID NO: 2033126
ucacucaguuaccaagucc

SEQ ID NO: 2033128 - RNA, 19 nt, Artificial Sequence
  Description of Artificial Sequence: Synthetic oligonucleotide
  Sense strand starting at position 2534 of SEQ ID NO: 1881291
gcuaguguugguuccgagu

SEQ ID NO: 2033129 - RNA, 19 nt, Artificial Sequence
  Description of Artificial Sequence: Synthetic oligonucleotide
  Antisense strand to SEQ ID NO: 2033128
acucggaaccaacacuagc

SEQ ID NO: 2033130 - RNA, 19 nt, Artificial Sequence
  Description of Artificial Sequence: Synthetic oligonucleotide
  Sense strand starting at position 2693 of SEQ ID NO: 1881291
ggagaagucacagggcagu

SEQ ID NO: 2033131 - RNA, 19 nt, Artificial Sequence
  Description of Artificial Sequence: Synthetic oligonucleotide
  Antisense strand to SEQ ID NO: 2033130
acugcccugugacuucucc

SEQ ID NO: 2033132 - RNA, 19 nt, Artificial Sequence
  Description of Artificial Sequence: Synthetic oligonucleotide
  Sense strand starting at position 3095 of SEQ ID NO: 1881291
acagguuugugcccuuaac

SEQ ID NO: 2033133 - RNA, 19 nt, Artificial Sequence
  Description of Artificial Sequence: Synthetic oligonucleotide
  Antisense strand to SEQ ID NO: 2033132
guuaagggcacaaaccugu

SEQ ID NO: 2033134 - RNA, 19 nt, Artificial Sequence
  Description of Artificial Sequence: Synthetic oligonucleotide
  Sense strand starting at position 3181 of SEQ ID NO: 1881291
gauguugagauauguaaag

SEQ ID NO: 2033135 - RNA, 19 nt, Artificial Sequence
  Description of Artificial Sequence: Synthetic oligonucleotide
  Antisense strand to SEQ ID NO: 2033134
cuuuacauaucucaacauc

SEQ ID NO: 2033136 - RNA, 19 nt, Artificial Sequence
  Description of Artificial Sequence: Synthetic oligonucleotide
  Sense strand starting at position 3183 of SEQ ID NO: 1881291
uguugagauauguaaagca

SEQ ID NO: 2033137 - RNA, 19 nt, Artificial Sequence
  Description of Artificial Sequence: Synthetic oligonucleotide
  Antisense strand to SEQ ID NO: 2033136
ugcuuuacauaucucaaca

SEQ ID NO: 2033138 - RNA, 19 nt, Artificial Sequence
  Description of Artificial Sequence: Synthetic oligonucleotide
  Sense strand starting at position 3325 of SEQ ID NO: 1881291
guguuucaagcagggauga

SEQ ID NO: 2033139 - RNA, 19 nt, Artificial Sequence
  Description of Artificial Sequence: Synthetic oligonucleotide
  Antisense strand to SEQ ID NO: 2033138
ucaucccugcuugaaacac

SEQ ID NO: 2033140 - RNA, 19 nt, Artificial Sequence
  Description of Artificial Sequence: Synthetic oligonucleotide
  Sense strand starting at position 3366 of SEQ ID NO: 1881291
cuagcuuagucuucugagu

SEQ ID NO: 2033141 - RNA, 19 nt, Artificial Sequence
  Description of Artificial Sequence: Synthetic oligonucleotide
  Antisense strand to SEQ ID NO: 2033140
acucagaagacuaagcuag

SEQ ID NO: 2033142 - RNA, 19 nt, Artificial Sequence
  Description of Artificial Sequence: Synthetic oligonucleotide
  Sense strand starting at position 3418 of SEQ ID NO: 1881291
ugggcagaucaaggugaua

SEQ ID NO: 2033143 - RNA, 19 nt, Artificial Sequence
  Description of Artificial Sequence: Synthetic oligonucleotide
  Antisense strand to SEQ ID NO: 2033142
uaucaccuugaucugccca

SEQ ID NO: 2033144 - RNA, 19 nt, Artificial Sequence
  Description of Artificial Sequence: Synthetic oligonucleotide
  Sense strand starting at position 3420 of SEQ ID NO: 1881291
ggcagaucaaggugauaaa

SEQ ID NO: 2033145 - RNA, 19 nt, Artificial Sequence
  Description of Artificial Sequence: Synthetic oligonucleotide
  Antisense strand to SEQ ID NO: 2033144
uuuaucaccuugaucugcc

SEQ ID NO: 2033146 - RNA, 19 nt, Artificial Sequence
  Description of Artificial Sequence: Synthetic oligonucleotide
  Sense strand starting at position 3423 of SEQ ID NO: 1881291
agaucaaggugauaaagcu

SEQ ID NO: 2033147 - RNA, 19 nt, Artificial Sequence
  Description of Artificial Sequence: Synthetic oligonucleotide
  Antisense strand to SEQ ID NO: 2033146
agcuuuaucaccuugaucu

SEQ ID NO: 2033148 - RNA, 19 nt, Artificial Sequence
  Description of Artificial Sequence: Synthetic oligonucleotide
  Sense strand starting at position 3429 of SEQ ID NO: 1881291
aggugauaaagcuguaggu

SEQ ID NO: 2033149 - RNA, 19 nt, Artificial Sequence
  Description of Artificial Sequence: Synthetic oligonucleotide
  Antisense strand to SEQ ID NO: 2033148
accuacagcuuuaucaccu

SEQ ID NO: 2033150 - RNA, 19 nt, Artificial Sequence
  Description of Artificial Sequence: Synthetic oligonucleotide
  Sense strand starting at position 3431 of SEQ ID NO: 1881291
gugauaaagcuguaggugu

SEQ ID NO: 2033151 - RNA, 19 nt, Artificial Sequence
  Description of Artificial Sequence: Synthetic oligonucleotide
  Antisense strand to SEQ ID NO: 2033150
acaccuacagcuuuaucac

SEQ ID NO: 2033152 - RNA, 19 nt, Artificial Sequence
  Description of Artificial Sequence: Synthetic oligonucleotide
  Sense strand starting at position 3442 of SEQ ID NO: 1881291
guaggugugacacaaucca

SEQ ID NO: 2033153 - RNA, 19 nt, Artificial Sequence
  Description of Artificial Sequence: Synthetic oligonucleotide
  Antisense strand to SEQ ID NO: 2033152
uggauugugucacaccuac

SEQ ID NO: 2033154 - RNA, 19 nt, Artificial Sequence
  Description of Artificial Sequence: Synthetic oligonucleotide
  Sense strand starting at position 3580 of SEQ ID NO: 1881291
agaaucuguggagguaaua

SEQ ID NO: 2033155 - RNA, 19 nt, Artificial Sequence
  Description of Artificial Sequence: Synthetic oligonucleotide
  Antisense strand to SEQ ID NO: 2033154
uauuaccuccacagauucu

SEQ ID NO: 2033156 - RNA, 19 nt, Artificial Sequence
  Description of Artificial Sequence: Synthetic oligonucleotide
  Sense strand starting at position 3769 of SEQ ID NO: 1881291
uuuccugguugcuugaaga

SEQ ID NO: 2033157 - RNA, 19 nt, Artificial Sequence
  Description of Artificial Sequence: Synthetic oligonucleotide
  Antisense strand to SEQ ID NO: 2033156
ucuucaagcaaccaggaaa

SEQ ID NO: 2033158 - RNA, 19 nt, Artificial Sequence
  Description of Artificial Sequence: Synthetic oligonucleotide
  Sense strand starting at position 3862 of SEQ ID NO: 1881291
gaauuaaugcuuuggagac

SEQ ID NO: 2033159 - RNA, 19 nt, Artificial Sequence
  Description of Artificial Sequence: Synthetic oligonucleotide
  Antisense strand to SEQ ID NO: 2033158
gucuccaaagcauuaauuc

SEQ ID NO: 2033160 - RNA, 19 nt, Artificial Sequence
  Description of Artificial Sequence: Synthetic oligonucleotide
  Sense strand starting at position 587 of SEQ ID NO: 1881292
uuuagcagaucuuucuaga

SEQ ID NO: 2033161 - RNA, 19 nt, Artificial Sequence
  Description of Artificial Sequence: Synthetic oligonucleotide
  Antisense strand to SEQ ID NO: 2033160
ucuagaaagaucugcuaaa

SEQ ID NO: 2033162 - RNA, 19 nt, Artificial Sequence
  Description of Artificial Sequence: Synthetic oligonucleotide
  Sense strand starting at position 787 of SEQ ID NO: 1881292
ugcuuagcccugcaacaau

SEQ ID NO: 2033163 - RNA, 19 nt, Artificial Sequence
  Description of Artificial Sequence: Synthetic oligonucleotide
  Antisense strand to SEQ ID NO: 2033162
auuguugcagggcuaagca

SEQ ID NO: 2033164 - RNA, 19 nt, Artificial Sequence
  Description of Artificial Sequence: Synthetic oligonucleotide
  Sense strand starting at position 827 of SEQ ID NO: 1881292
agaccagcguuaucagcau

SEQ ID NO: 2033165 - RNA, 19 nt, Artificial Sequence
  Description of Artificial Sequence: Synthetic oligonucleotide
  Antisense strand to SEQ ID NO: 2033164
augcugauaacgcuggucu

SEQ ID NO: 2033166 - RNA, 19 nt, Artificial Sequence
  Description of Artificial Sequence: Synthetic oligonucleotide
  Sense strand starting at position 831 of SEQ ID NO: 1881292
cagcguuaucagcaucacu

SEQ ID NO: 2033167 - RNA, 19 nt, Artificial Sequence
  Description of Artificial Sequence: Synthetic oligonucleotide
  Antisense strand to SEQ ID NO: 2033166
agugaugcugauaacgcug

SEQ ID NO: 2033168 - RNA, 19 nt, Artificial Sequence
  Description of Artificial Sequence: Synthetic oligonucleotide
  Sense strand starting at position 945 of SEQ ID NO: 1881292
gcguucugggaguagaauc

SEQ ID NO: 2033169 - RNA, 19 nt, Artificial Sequence
  Description of Artificial Sequence: Synthetic oligonucleotide
  Antisense strand to SEQ ID NO: 2033168
gauucuacucccagaacgc

SEQ ID NO: 2033170 - RNA, 19 nt, Artificial Sequence
  Description of Artificial Sequence: Synthetic oligonucleotide
  Sense strand starting at position 979 of SEQ ID NO: 1881292
uuauaagccucagagauga

SEQ ID NO: 2033171 - RNA, 19 nt, Artificial Sequence
  Description of Artificial Sequence: Synthetic oligonucleotide
  Antisense strand to SEQ ID NO: 2033170
ucaucucugaggcuuauaa

SEQ ID NO: 2033172 - RNA, 19 nt, Artificial Sequence
  Description of Artificial Sequence: Synthetic oligonucleotide
  Sense strand starting at position 989 of SEQ ID NO: 1881292
cagagaugauucugauacu

SEQ ID NO: 2033173 - RNA, 19 nt, Artificial Sequence
  Description of Artificial Sequence: Synthetic oligonucleotide
  Antisense strand to SEQ ID NO: 2033172
aguaucagaaucaucucug

SEQ ID NO: 2033174 - RNA, 19 nt, Artificial Sequence
  Description of Artificial Sequence: Synthetic oligonucleotide
  Sense strand starting at position 990 of SEQ ID NO: 1881292
agagaugauucugauacuu

SEQ ID NO: 2033175 - RNA, 19 nt, Artificial Sequence
  Description of Artificial Sequence: Synthetic oligonucleotide
  Antisense strand to SEQ ID NO: 2033174
aaguaucagaaucaucucu

SEQ ID NO: 2033176 - RNA, 19 nt, Artificial Sequence
  Description of Artificial Sequence: Synthetic oligonucleotide
  Sense strand starting at position 992 of SEQ ID NO: 1881292
agaugauucugauacuuga

SEQ ID NO: 2033177 - RNA, 19 nt, Artificial Sequence
  Description of Artificial Sequence: Synthetic oligonucleotide
  Antisense strand to SEQ ID NO: 2033176
ucaaguaucagaaucaucu

SEQ ID NO: 2033178 - RNA, 19 nt, Artificial Sequence
  Description of Artificial Sequence: Synthetic oligonucleotide
  Sense strand starting at position 1044 of SEQ ID NO: 1881292
ucucccuggccuuaaguau

SEQ ID NO: 2033179 - RNA, 19 nt, Artificial Sequence
  Description of Artificial Sequence: Synthetic oligonucleotide
  Antisense strand to SEQ ID NO: 2033178
auacuuaaggccagggaga

SEQ ID NO: 2033180 - RNA, 19 nt, Artificial Sequence
  Description of Artificial Sequence: Synthetic oligonucleotide
  Sense strand starting at position 1059 of SEQ ID NO: 1881292
guauuagggccuuaaguau

SEQ ID NO: 2033181 - RNA, 19 nt, Artificial Sequence
  Description of Artificial Sequence: Synthetic oligonucleotide
  Antisense strand to SEQ ID NO: 2033180
auacuuaaggcccuaauac

SEQ ID NO: 2033182 - RNA, 19 nt, Artificial Sequence
  Description of Artificial Sequence: Synthetic oligonucleotide
  Sense strand starting at position 1072 of SEQ ID NO: 1881292
aaguauuagggccauaucu

SEQ ID NO: 2033183 - RNA, 19 nt, Artificial Sequence
  Description of Artificial Sequence: Synthetic oligonucleotide
  Antisense strand to SEQ ID NO: 2033182
agauauggcccuaauacuu

SEQ ID NO: 2033184 - RNA, 19 nt, Artificial Sequence
  Description of Artificial Sequence: Synthetic oligonucleotide
  Sense strand starting at position 1074 of SEQ ID NO: 1881292
guauuagggccauaucuuc

SEQ ID NO: 2033185 - RNA, 19 nt, Artificial Sequence
  Description of Artificial Sequence: Synthetic oligonucleotide
  Antisense strand to SEQ ID NO: 2033184
gaagauauggcccuaauac

SEQ ID NO: 2033186 - RNA, 19 nt, Artificial Sequence
  Description of Artificial Sequence: Synthetic oligonucleotide
  Sense strand starting at position 1168 of SEQ ID NO: 1881292
gcagcagagagauguagau

SEQ ID NO: 2033187 - RNA, 19 nt, Artificial Sequence
  Description of Artificial Sequence: Synthetic oligonucleotide
  Antisense strand to SEQ ID NO: 2033186
aucuacaucucucugcugc

SEQ ID NO: 2033188 - RNA, 19 nt, Artificial Sequence
  Description of Artificial Sequence: Synthetic oligonucleotide
  Sense strand starting at position 1174 of SEQ ID NO: 1881292
gagagauguagauaugugu

SEQ ID NO: 2033189 - RNA, 19 nt, Artificial Sequence
  Description of Artificial Sequence: Synthetic oligonucleotide
  Antisense strand to SEQ ID NO: 2033188
acacauaucuacaucucuc

SEQ ID NO: 2033190 - RNA, 19 nt, Artificial Sequence
  Description of Artificial Sequence: Synthetic oligonucleotide
  Sense strand starting at position 1177 of SEQ ID NO: 1881292
agauguagauauguguguu

SEQ ID NO: 2033191 - RNA, 19 nt, Artificial Sequence
  Description of Artificial Sequence: Synthetic oligonucleotide
  Antisense strand to SEQ ID NO: 2033190
aacacacauaucuacaucu

SEQ ID NO: 2033192 - RNA, 19 nt, Artificial Sequence
  Description of Artificial Sequence: Synthetic oligonucleotide
  Sense strand starting at position 1181 of SEQ ID NO: 1881292
guagauauguguguucuag

SEQ ID NO: 2033193 - RNA, 19 nt, Artificial Sequence
  Description of Artificial Sequence: Synthetic oligonucleotide
  Antisense strand to SEQ ID NO: 2033192
cuagaacacacauaucuac

SEQ ID NO: 2033194 - RNA, 19 nt, Artificial Sequence
  Description of Artificial Sequence: Synthetic oligonucleotide
  Sense strand starting at position 1183 of SEQ ID NO: 1881292
agauauguguguucuagaa

SEQ ID NO: 2033195 - RNA, 19 nt, Artificial Sequence
  Description of Artificial Sequence: Synthetic oligonucleotide
  Antisense strand to SEQ ID NO: 2033194
uucuagaacacacauaucu

SEQ ID NO: 2033196 - RNA, 19 nt, Artificial Sequence
  Description of Artificial Sequence: Synthetic oligonucleotide
  Sense strand starting at position 1228 of SEQ ID NO: 1881292
cgagguggguggaaaucuu

SEQ ID NO: 2033197 - RNA, 19 nt, Artificial Sequence
  Description of Artificial Sequence: Synthetic oligonucleotide
  Antisense strand to SEQ ID NO: 2033196
aagauuuccacccaccucg

SEQ ID NO: 2033198 - RNA, 19 nt, Artificial Sequence
  Description of Artificial Sequence: Synthetic oligonucleotide
  Sense strand starting at position 2248 of SEQ ID NO: 1881292
gagaaaggcuaguacauaa

SEQ ID NO: 2033199 - RNA, 19 nt, Artificial Sequence
  Description of Artificial Sequence: Synthetic oligonucleotide
  Antisense strand to SEQ ID NO: 2033198
uuauguacuagccuuucuc

SEQ ID NO: 2033200 - RNA, 19 nt, Artificial Sequence
  Description of Artificial Sequence: Synthetic oligonucleotide
  Sense strand starting at position 2491 of SEQ ID NO: 1881292
ucugacaacugucuugagu

SEQ ID NO: 2033201 - RNA, 19 nt, Artificial Sequence
  Description of Artificial Sequence: Synthetic oligonucleotide
  Antisense strand to SEQ ID NO: 2033200
acucaagacaguugucaga

SEQ ID NO: 2033202 - RNA, 19 nt, Artificial Sequence
  Description of Artificial Sequence: Synthetic oligonucleotide
  Sense strand starting at position 2497 of SEQ ID NO: 1881292
aacugucuugaguggugaa

SEQ ID NO: 2033203 - RNA, 19 nt, Artificial Sequence
  Description of Artificial Sequence: Synthetic oligonucleotide
  Antisense strand to SEQ ID NO: 2033202
uucaccacucaagacaguu

SEQ ID NO: 2033204 - RNA, 19 nt, Artificial Sequence
  Description of Artificial Sequence: Synthetic oligonucleotide
  Sense strand starting at position 2498 of SEQ ID NO: 1881292
acugucuugaguggugaaa

SEQ ID NO: 2033205 - RNA, 19 nt, Artificial Sequence
  Description of Artificial Sequence: Synthetic oligonucleotide
  Antisense strand to SEQ ID NO: 2033204
uuucaccacucaagacagu

SEQ ID NO: 2033206 - RNA, 19 nt, Artificial Sequence
  Description of Artificial Sequence: Synthetic oligonucleotide
  Sense strand starting at position 2523 of SEQ ID NO: 1881292
ggacuugguaacugaguga

SEQ ID NO: 2033207 - RNA, 19 nt, Artificial Sequence
  Description of Artificial Sequence: Synthetic oligonucleotide
  Antisense strand to SEQ ID NO: 2033206
ucacucaguuaccaagucc

SEQ ID NO: 2033208 - RNA, 19 nt, Artificial Sequence
  Description of Artificial Sequence: Synthetic oligonucleotide
  Sense strand starting at position 2563 of SEQ ID NO: 1881292
gcuaguguugguuccgagu

SEQ ID NO: 2033209 - RNA, 19 nt, Artificial Sequence
  Description of Artificial Sequence: Synthetic oligonucleotide
  Antisense strand to SEQ ID NO: 2033208
acucggaaccaacacuagc

SEQ ID NO: 2033210 - RNA, 19 nt, Artificial Sequence
  Description of Artificial Sequence: Synthetic oligonucleotide
  Sense strand starting at position 2722 of SEQ ID NO: 1881292
ggagaagucacagggcagu

SEQ ID NO: 2033211 - RNA, 19 nt, Artificial Sequence
  Description of Artificial Sequence: Synthetic oligonucleotide
  Antisense strand to SEQ ID NO: 2033210
acugcccugugacuucucc

SEQ ID NO: 2033212 - RNA, 19 nt, Artificial Sequence
  Description of Artificial Sequence: Synthetic oligonucleotide
  Sense strand starting at position 3124 of SEQ ID NO: 1881292
acagguuugugcccuuaac

SEQ ID NO: 2033213 - RNA, 19 nt, Artificial Sequence
  Description of Artificial Sequence: Synthetic oligonucleotide
  Antisense strand to SEQ ID NO: 2033212
guuaagggcacaaaccugu

SEQ ID NO: 2033214 - RNA, 19 nt, Artificial Sequence
  Description of Artificial Sequence: Synthetic oligonucleotide
  Sense strand starting at position 3210 of SEQ ID NO: 1881292
gauguugagauauguaaag

SEQ ID NO: 2033215 - RNA, 19 nt, Artificial Sequence
  Description of Artificial Sequence: Synthetic oligonucleotide
  Antisense strand to SEQ ID NO: 2033214
cuuuacauaucucaacauc

SEQ ID NO: 2033216 - RNA, 19 nt, Artificial Sequence
  Description of Artificial Sequence: Synthetic oligonucleotide
  Sense strand starting at position 3212 of SEQ ID NO: 1881292
uguugagauauguaaagca

SEQ ID NO: 2033217 - RNA, 19 nt, Artificial Sequence
  Description of Artificial Sequence: Synthetic oligonucleotide
  Antisense strand to SEQ ID NO: 2033216
ugcuuuacauaucucaaca

SEQ ID NO: 2033218 - RNA, 19 nt, Artificial Sequence
  Description of Artificial Sequence: Synthetic oligonucleotide
  Sense strand starting at position 3354 of SEQ ID NO: 1881292
guguuucaagcagggauga

SEQ ID NO: 2033219 - RNA, 19 nt, Artificial Sequence
  Description of Artificial Sequence: Synthetic oligonucleotide
  Antisense strand to SEQ ID NO: 2033218
ucaucccugcuugaaacac

SEQ ID NO: 2033220 - RNA, 19 nt, Artificial Sequence
  Description of Artificial Sequence: Synthetic oligonucleotide
  Sense strand starting at position 3395 of SEQ ID NO: 1881292
cuagcuuagucuucugagu

SEQ ID NO: 2033221 - RNA, 19 nt, Artificial Sequence
  Description of Artificial Sequence: Synthetic oligonucleotide
  Antisense strand to SEQ ID NO: 2033220
acucagaagacuaagcuag

SEQ ID NO: 2033222 - RNA, 19 nt, Artificial Sequence
  Description of Artificial Sequence: Synthetic oligonucleotide
  Sense strand starting at position 3447 of SEQ ID NO: 1881292
ugggcagaucaaggugaua

SEQ ID NO: 2033223 - RNA, 19 nt, Artificial Sequence
  Description of Artificial Sequence: Synthetic oligonucleotide
  Antisense strand to SEQ ID NO: 2033222
uaucaccuugaucugccca

SEQ ID NO: 2033224 - RNA, 19 nt, Artificial Sequence
  Description of Artificial Sequence: Synthetic oligonucleotide
  Sense strand starting at position 3449 of SEQ ID NO: 1881292
ggcagaucaaggugauaaa

SEQ ID NO: 2033225 - RNA, 19 nt, Artificial Sequence
  Description of Artificial Sequence: Synthetic oligonucleotide
  Antisense strand to SEQ ID NO: 2033224
uuuaucaccuugaucugcc

SEQ ID NO: 2033226 - RNA, 19 nt, Artificial Sequence
  Description of Artificial Sequence: Synthetic oligonucleotide
  Sense strand starting at position 3452 of SEQ ID NO: 1881292
agaucaaggugauaaagcu

SEQ ID NO: 2033227 - RNA, 19 nt, Artificial Sequence
  Description of Artificial Sequence: Synthetic oligonucleotide
  Antisense strand to SEQ ID NO: 2033226
agcuuuaucaccuugaucu

SEQ ID NO: 2033228 - RNA, 19 nt, Artificial Sequence
  Description of Artificial Sequence: Synthetic oligonucleotide
  Sense strand starting at position 3458 of SEQ ID NO: 1881292
aggugauaaagcuguaggu

SEQ ID NO: 2033229 - RNA, 19 nt, Artificial Sequence
  Description of Artificial Sequence: Synthetic oligonucleotide
  Antisense strand to SEQ ID NO: 2033228
accuacagcuuuaucaccu

SEQ ID NO: 2033230 - RNA, 19 nt, Artificial Sequence
  Description of Artificial Sequence: Synthetic oligonucleotide
  Sense strand starting at position 3460 of SEQ ID NO: 1881292
gugauaaagcuguaggugu

SEQ ID NO: 2033231 - RNA, 19 nt, Artificial Sequence
  Description of Artificial Sequence: Synthetic oligonucleotide
  Antisense strand to SEQ ID NO: 2033230
acaccuacagcuuuaucac

SEQ ID NO: 2033232 - RNA, 19 nt, Artificial Sequence
  Description of Artificial Sequence: Synthetic oligonucleotide
  Sense strand starting at position 3471 of SEQ ID NO: 1881292
guaggugugacacaaucca

SEQ ID NO: 2033233 - RNA, 19 nt, Artificial Sequence
  Description of Artificial Sequence: Synthetic oligonucleotide
  Antisense strand to SEQ ID NO: 2033232
uggauugugucacaccuac

SEQ ID NO: 2033234 - RNA, 19 nt, Artificial Sequence
  Description of Artificial Sequence: Synthetic oligonucleotide
  Sense strand starting at position 3609 of SEQ ID NO: 1881292
agaaucuguggagguaaua

SEQ ID NO: 2033235 - RNA, 19 nt, Artificial Sequence
  Description of Artificial Sequence: Synthetic oligonucleotide
  Antisense strand to SEQ ID NO: 2033234
uauuaccuccacagauucu

SEQ ID NO: 2033236 - RNA, 19 nt, Artificial Sequence
  Description of Artificial Sequence: Synthetic oligonucleotide
  Sense strand starting at position 3798 of SEQ ID NO: 1881292
uuuccugguugcuugaaga

SEQ ID NO: 2033237 - RNA, 19 nt, Artificial Sequence
  Description of Artificial Sequence: Synthetic oligonucleotide
  Antisense strand to SEQ ID NO: 2033236
ucuucaagcaaccaggaaa

SEQ ID NO: 2033238 - RNA, 19 nt, Artificial Sequence
  Description of Artificial Sequence: Synthetic oligonucleotide
  Sense strand starting at position 3891 of SEQ ID NO: 1881292
gaauuaaugcuuuggagac

SEQ ID NO: 2033239 - RNA, 19 nt, Artificial Sequence
  Description of Artificial Sequence: Synthetic oligonucleotide
  Antisense strand to SEQ ID NO: 2033238
gucuccaaagcauuaauuc

SEQ ID NO: 2033240 - RNA, 19 nt, Artificial Sequence
  Description of Artificial Sequence: Synthetic oligonucleotide
  Sense strand starting at position 302 of SEQ ID NO: 1881293
ggagacucagccuggagaa

SEQ ID NO: 2033241 - RNA, 19 nt, Artificial Sequence
  Description of Artificial Sequence: Synthetic oligonucleotide
  Antisense strand to SEQ ID NO: 2033240
uucuccaggcugagucucc

SEQ ID NO: 2033242 - RNA, 19 nt, Artificial Sequence
  Description of Artificial Sequence: Synthetic oligonucleotide
  Sense strand starting at position 431 of SEQ ID NO: 1881293
gugguccucagagguagaa

SEQ ID NO: 2033243 - RNA, 19 nt, Artificial Sequence
  Description of Artificial Sequence: Synthetic oligonucleotide
  Antisense strand to SEQ ID NO: 2033242
uucuaccucugaggaccac

SEQ ID NO: 2033244 - RNA, 19 nt, Artificial Sequence
  Description of Artificial Sequence: Synthetic oligonucleotide
  Sense strand starting at position 562 of SEQ ID NO: 1881293
acgucuguuaccugagaga

SEQ ID NO: 2033245 - RNA, 19 nt, Artificial Sequence
  Description of Artificial Sequence: Synthetic oligonucleotide
  Antisense strand to SEQ ID NO: 2033244
ucucucagguaacagacgu

SEQ ID NO: 2033246 - RNA, 19 nt, Artificial Sequence
  Description of Artificial Sequence: Synthetic oligonucleotide
  Sense strand starting at position 763 of SEQ ID NO: 1881293
aggaaauagcagugcauca

SEQ ID NO: 2033247 - RNA, 19 nt, Artificial Sequence
  Description of Artificial Sequence: Synthetic oligonucleotide
  Antisense strand to SEQ ID NO: 2033246
ugaugcacugcuauuuccu

SEQ ID NO: 2033248 - RNA, 19 nt, Artificial Sequence
  Description of Artificial Sequence: Synthetic oligonucleotide
  Sense strand starting at position 961 of SEQ ID NO: 1881293
ugcaucaugacccggauaa

SEQ ID NO: 2033249 - RNA, 19 nt, Artificial Sequence
  Description of Artificial Sequence: Synthetic oligonucleotide
  Antisense strand to SEQ ID NO: 2033248
uuauccgggucaugaugca

SEQ ID NO: 2033250 - RNA, 19 nt, Artificial Sequence
  Description of Artificial Sequence: Synthetic oligonucleotide
  Sense strand starting at position 962 of SEQ ID NO: 1881293
gcaucaugacccggauaag

SEQ ID NO: 2033251 - RNA, 19 nt, Artificial Sequence
  Description of Artificial Sequence: Synthetic oligonucleotide
  Antisense strand to SEQ ID NO: 2033250
cuuauccgggucaugaugc

SEQ ID NO: 2033252 - RNA, 19 nt, Artificial Sequence
  Description of Artificial Sequence: Synthetic oligonucleotide
  Sense strand starting at position 979 of SEQ ID NO: 1881293
agcagugucgcguuccuga

SEQ ID NO: 2033253 - RNA, 19 nt, Artificial Sequence
  Description of Artificial Sequence: Synthetic oligonucleotide
  Antisense strand to SEQ ID NO: 2033252
ucaggaacgcgacacugcu

SEQ ID NO: 2033254 - RNA, 19 nt, Artificial Sequence
  Description of Artificial Sequence: Synthetic oligonucleotide
  Sense strand starting at position 981 of SEQ ID NO: 1881293
cagugucgcguuccugaga

SEQ ID NO: 2033255 - RNA, 19 nt, Artificial Sequence
  Description of Artificial Sequence: Synthetic oligonucleotide
  Antisense strand to SEQ ID NO: 2033254
ucucaggaacgcgacacug

SEQ ID NO: 2033256 - RNA, 19 nt, Artificial Sequence
  Description of Artificial Sequence: Synthetic oligonucleotide
  Sense strand starting at position 1525 of SEQ ID NO: 1881293
guucuugucagugcucuca

SEQ ID NO: 2033257 - RNA, 19 nt, Artificial Sequence
  Description of Artificial Sequence: Synthetic oligonucleotide
  Antisense strand to SEQ ID NO: 2033256
ugagagcacugacaagaac

SEQ ID NO: 2033258 - RNA, 19 nt, Artificial Sequence
  Description of Artificial Sequence: Synthetic oligonucleotide
  Sense strand starting at position 1754 of SEQ ID NO: 1881293
gcuauugcuggucagaaac

SEQ ID NO: 2033259 - RNA, 19 nt, Artificial Sequence
  Description of Artificial Sequence: Synthetic oligonucleotide
  Antisense strand to SEQ ID NO: 2033258
guuucugaccagcaauagc

SEQ ID NO: 2033260 - RNA, 19 nt, Artificial Sequence
  Description of Artificial Sequence: Synthetic oligonucleotide
  Sense strand starting at position 1775 of SEQ ID NO: 1881293
auuucuuauugccagaaga

SEQ ID NO: 2033261 - RNA, 19 nt, Artificial Sequence
  Description of Artificial Sequence: Synthetic oligonucleotide
  Antisense strand to SEQ ID NO: 2033260
ucuucuggcaauaagaaau

SEQ ID NO: 2033262 - RNA, 19 nt, Artificial Sequence
  Description of Artificial Sequence: Synthetic oligonucleotide
  Sense strand starting at position 2023 of SEQ ID NO: 1881293
acauaaugagcccaugagu

SEQ ID NO: 2033263 - RNA, 19 nt, Artificial Sequence
  Description of Artificial Sequence: Synthetic oligonucleotide
  Antisense strand to SEQ ID NO: 2033262
acucaugggcucauuaugu

SEQ ID NO: 2033264 - RNA, 19 nt, Artificial Sequence
  Description of Artificial Sequence: Synthetic oligonucleotide
  Sense strand starting at position 2032 of SEQ ID NO: 1881293
gcccaugagugaccucaga

SEQ ID NO: 2033265 - RNA, 19 nt, Artificial Sequence
  Description of Artificial Sequence: Synthetic oligonucleotide
  Antisense strand to SEQ ID NO: 2033264
ucugaggucacucaugggc

SEQ ID NO: 2033266 - RNA, 19 nt, Artificial Sequence
  Description of Artificial Sequence: Synthetic oligonucleotide
  Sense strand starting at position 2172 of SEQ ID NO: 1881293
gguccaugaaugggaagua

SEQ ID NO: 2033267 - RNA, 19 nt, Artificial Sequence
  Description of Artificial Sequence: Synthetic oligonucleotide
  Antisense strand to SEQ ID NO: 2033266
uacuucccauucauggacc

SEQ ID NO: 2033268 - RNA, 19 nt, Artificial Sequence
  Description of Artificial Sequence: Synthetic oligonucleotide
  Sense strand starting at position 2286 of SEQ ID NO: 1881293
agggauggccucugagaga

SEQ ID NO: 2033269 - RNA, 19 nt, Artificial Sequence
  Description of Artificial Sequence: Synthetic oligonucleotide
  Antisense strand to SEQ ID NO: 2033268
ucucucagaggccaucccu

SEQ ID NO: 2033270 - RNA, 19 nt, Artificial Sequence
  Description of Artificial Sequence: Synthetic oligonucleotide
  Sense strand starting at position 2388 of SEQ ID NO: 1881293
ggaugagucacccagguuu

SEQ ID NO: 2033271 - RNA, 19 nt, Artificial Sequence
  Description of Artificial Sequence: Synthetic oligonucleotide
  Antisense strand to SEQ ID NO: 2033270
aaaccugggugacucaucc

SEQ ID NO: 2033272 - RNA, 19 nt, Artificial Sequence
  Description of Artificial Sequence: Synthetic oligonucleotide
  Sense strand starting at position 2400 of SEQ ID NO: 1881293
cagguuuaccucuggacua

SEQ ID NO: 2033273 - RNA, 19 nt, Artificial Sequence
  Description of Artificial Sequence: Synthetic oligonucleotide
  Antisense strand to SEQ ID NO: 2033272
uaguccagagguaaaccug

SEQ ID NO: 2033274 - RNA, 19 nt, Artificial Sequence
  Description of Artificial Sequence: Synthetic oligonucleotide
  Sense strand starting at position 2442 of SEQ ID NO: 1881293
ugaugaagcgcuuauucca

SEQ ID NO: 2033275 - RNA, 19 nt, Artificial Sequence
  Description of Artificial Sequence: Synthetic oligonucleotide
  Antisense strand to SEQ ID NO: 2033274
uggaauaagcgcuucauca

SEQ ID NO: 2033276 - RNA, 19 nt, Artificial Sequence
  Description of Artificial Sequence: Synthetic oligonucleotide
  Sense strand starting at position 2487 of SEQ ID NO: 1881293
gggauacuuacaggcauaa

SEQ ID NO: 2033277 - RNA, 19 nt, Artificial Sequence
  Description of Artificial Sequence: Synthetic oligonucleotide
  Antisense strand to SEQ ID NO: 2033276
uuaugccuguaaguauccc

SEQ ID NO: 2033278 - RNA, 19 nt, Artificial Sequence
  Description of Artificial Sequence: Synthetic oligonucleotide
  Sense strand starting at position 2549 of SEQ ID NO: 1881293
augagacacugcuuagaac

SEQ ID NO: 2033279 - RNA, 19 nt, Artificial Sequence
  Description of Artificial Sequence: Synthetic oligonucleotide
  Antisense strand to SEQ ID NO: 2033278
guucuaagcagugucucau

SEQ ID NO: 2033280 - RNA, 19 nt, Artificial Sequence
  Description of Artificial Sequence: Synthetic oligonucleotide
  Sense strand starting at position 2572 of SEQ ID NO: 1881293
gcaggcauccaguaggagu

SEQ ID NO: 2033281 - RNA, 19 nt, Artificial Sequence
  Description of Artificial Sequence: Synthetic oligonucleotide
  Antisense strand to SEQ ID NO: 2033280
acuccuacuggaugccugc

SEQ ID NO: 2033282 - RNA, 19 nt, Artificial Sequence
  Description of Artificial Sequence: Synthetic oligonucleotide
  Sense strand starting at position 2583 of SEQ ID NO: 1881293
guaggaguucaguaaaugc

SEQ ID NO: 2033283 - RNA, 19 nt, Artificial Sequence
  Description of Artificial Sequence: Synthetic oligonucleotide
  Antisense strand to SEQ ID NO: 2033282
gcauuuacugaacuccuac

SEQ ID NO: 2033284 - RNA, 19 nt, Artificial Sequence
  Description of Artificial Sequence: Synthetic oligonucleotide
  Sense strand starting at position 2594 of SEQ ID NO: 1881293
guaaaugcucacugacuga

SEQ ID NO: 2033285 - RNA, 19 nt, Artificial Sequence
  Description of Artificial Sequence: Synthetic oligonucleotide
  Antisense strand to SEQ ID NO: 2033284
ucagucagugagcauuuac

SEQ ID NO: 2033286 - RNA, 19 nt, Artificial Sequence
  Description of Artificial Sequence: Synthetic oligonucleotide
  Sense strand starting at position 2626 of SEQ ID NO: 1881293
ggcaguguagaauaugaua

SEQ ID NO: 2033287 - RNA, 19 nt, Artificial Sequence
  Description of Artificial Sequence: Synthetic oligonucleotide
  Antisense strand to SEQ ID NO: 2033286
uaucauauucuacacugcc

SEQ ID NO: 2033288 - RNA, 19 nt, Artificial Sequence
  Description of Artificial Sequence: Synthetic oligonucleotide
  Sense strand starting at position 2634 of SEQ ID NO: 1881293
agaauaugauaagaaccuu

SEQ ID NO: 2033289 - RNA, 19 nt, Artificial Sequence
  Description of Artificial Sequence: Synthetic oligonucleotide
  Antisense strand to SEQ ID NO: 2033288
aagguucuuaucauauucu

SEQ ID NO: 2033290 - RNA, 19 nt, Artificial Sequence
  Description of Artificial Sequence: Synthetic oligonucleotide
  Sense strand starting at position 2730 of SEQ ID NO: 1881293
guaugugaggcuggauaga

SEQ ID NO: 2033291 - RNA, 19 nt, Artificial Sequence
  Description of Artificial Sequence: Synthetic oligonucleotide
  Antisense strand to SEQ ID NO: 2033290
ucuauccagccucacauac

SEQ ID NO: 2033292 - RNA, 19 nt, Artificial Sequence
  Description of Artificial Sequence: Synthetic oligonucleotide
  Sense strand starting at position 2746 of SEQ ID NO: 1881293
agagcauauuagcuucuua

SEQ ID NO: 2033293 - RNA, 19 nt, Artificial Sequence
  Description of Artificial Sequence: Synthetic oligonucleotide
  Antisense strand to SEQ ID NO: 2033292
uaagaagcuaauaugcucu

SEQ ID NO: 2033294 - RNA, 19 nt, Artificial Sequence
  Description of Artificial Sequence: Synthetic oligonucleotide
  Sense strand starting at position 2852 of SEQ ID NO: 1881293
cucagauauuuggaguaau

SEQ ID NO: 2033295 - RNA, 19 nt, Artificial Sequence
  Description of Artificial Sequence: Synthetic oligonucleotide
  Antisense strand to SEQ ID NO: 2033294
auuacuccaaauaucugag

SEQ ID NO: 2033296 - RNA, 19 nt, Artificial Sequence
  Description of Artificial Sequence: Synthetic oligonucleotide
  Sense strand starting at position 2878 of SEQ ID NO: 1881293
cgcuauugacgugaaagau

SEQ ID NO: 2033297 - RNA, 19 nt, Artificial Sequence
  Description of Artificial Sequence: Synthetic oligonucleotide
  Antisense strand to SEQ ID NO: 2033296
aucuuucacgucaauagcg

SEQ ID NO: 2033298 - RNA, 19 nt, Artificial Sequence
  Description of Artificial Sequence: Synthetic oligonucleotide
  Sense strand starting at position 2945 of SEQ ID NO: 1881293
gugagcuguacucauuugu

SEQ ID NO: 2033299 - RNA, 19 nt, Artificial Sequence
  Description of Artificial Sequence: Synthetic oligonucleotide
  Antisense strand to SEQ ID NO: 2033298
acaaaugaguacagcucac

SEQ ID NO: 2033300 - RNA, 19 nt, Artificial Sequence
  Description of Artificial Sequence: Synthetic oligonucleotide
  Sense strand starting at position 3004 of SEQ ID NO: 1881293
ggaaauccaugcucagcaa

SEQ ID NO: 2033301 - RNA, 19 nt, Artificial Sequence
  Description of Artificial Sequence: Synthetic oligonucleotide
  Antisense strand to SEQ ID NO: 2033300
uugcugagcauggauuucc

SEQ ID NO: 2033302 - RNA, 19 nt, Artificial Sequence
  Description of Artificial Sequence: Synthetic oligonucleotide
  Sense strand starting at position 3095 of SEQ ID NO: 1881293
ggcaacuuccagcaggauu

SEQ ID NO: 2033303 - RNA, 19 nt, Artificial Sequence
  Description of Artificial Sequence: Synthetic oligonucleotide
  Antisense strand to SEQ ID NO: 2033302
aauccugcuggaaguugcc

SEQ ID NO: 2033304 - RNA, 19 nt, Artificial Sequence
  Description of Artificial Sequence: Synthetic oligonucleotide
  Sense strand starting at position 3132 of SEQ ID NO: 1881293
ggaugucaccugggaugaa

SEQ ID NO: 2033305 - RNA, 19 nt, Artificial Sequence
  Description of Artificial Sequence: Synthetic oligonucleotide
  Antisense strand to SEQ ID NO: 2033304
uucaucccaggugacaucc

SEQ ID NO: 2033306 - RNA, 19 nt, Artificial Sequence
  Description of Artificial Sequence: Synthetic oligonucleotide
  Sense strand starting at position 3329 of SEQ ID NO: 1881293
ugaagcuuccacugaccuu

SEQ ID NO: 2033307 - RNA, 19 nt, Artificial Sequence
  Description of Artificial Sequence: Synthetic oligonucleotide
  Antisense strand to SEQ ID NO: 2033306
aaggucaguggaagcuuca

SEQ ID NO: 2033308 - RNA, 19 nt, Artificial Sequence
  Description of Artificial Sequence: Synthetic oligonucleotide
  Sense strand starting at position 3423 of SEQ ID NO: 1881293
gcacaagucauaggucaug

SEQ ID NO: 2033309 - RNA, 19 nt, Artificial Sequence
  Description of Artificial Sequence: Synthetic oligonucleotide
  Antisense strand to SEQ ID NO: 2033308
caugaccuaugacuugugc

SEQ ID NO: 2033310 - RNA, 19 nt, Artificial Sequence
  Description of Artificial Sequence: Synthetic oligonucleotide
  Sense strand starting at position 3465 of SEQ ID NO: 1881293
aggguauaccugcaagguu

SEQ ID NO: 2033311 - RNA, 19 nt, Artificial Sequence
  Description of Artificial Sequence: Synthetic oligonucleotide
  Antisense strand to SEQ ID NO: 2033310
aaccuugcagguauacccu

SEQ ID NO: 2033312 - RNA, 19 nt, Artificial Sequence
  Description of Artificial Sequence: Synthetic oligonucleotide
  Sense strand starting at position 3704 of SEQ ID NO: 1881293
ugggauauaacaugucagu

SEQ ID NO: 2033313 - RNA, 19 nt, Artificial Sequence
  Description of Artificial Sequence: Synthetic oligonucleotide
  Antisense strand to SEQ ID NO: 2033312
acugacauguuauauccca

SEQ ID NO: 2033314 - RNA, 19 nt, Artificial Sequence
  Description of Artificial Sequence: Synthetic oligonucleotide
  Sense strand starting at position 3728 of SEQ ID NO: 1881293
gcuagaucucaccgaacau

SEQ ID NO: 2033315 - RNA, 19 nt, Artificial Sequence
  Description of Artificial Sequence: Synthetic oligonucleotide
  Antisense strand to SEQ ID NO: 2033314
auguucggugagaucuagc

SEQ ID NO: 2033316 - RNA, 19 nt, Artificial Sequence
  Description of Artificial Sequence: Synthetic oligonucleotide
  Sense strand starting at position 3738 of SEQ ID NO: 1881293
accgaacauugaucuccaa

SEQ ID NO: 2033317 - RNA, 19 nt, Artificial Sequence
  Description of Artificial Sequence: Synthetic oligonucleotide
  Antisense strand to SEQ ID NO: 2033316
uuggagaucaauguucggu

SEQ ID NO: 2033318 - RNA, 19 nt, Artificial Sequence
  Description of Artificial Sequence: Synthetic oligonucleotide
  Sense strand starting at position 3923 of SEQ ID NO: 1881293
ugaggucuucugugaaacu

SEQ ID NO: 2033319 - RNA, 19 nt, Artificial Sequence
  Description of Artificial Sequence: Synthetic oligonucleotide
  Antisense strand to SEQ ID NO: 2033318
aguuucacagaagaccuca

SEQ ID NO: 2033320 - RNA, 19 nt, Artificial Sequence
  Description of Artificial Sequence: Synthetic oligonucleotide
  Sense strand starting at position 75 of SEQ ID NO: 1881294
ggcuguuucuauuuaaugu

SEQ ID NO: 2033321 - RNA, 19 nt, Artificial Sequence
  Description of Artificial Sequence: Synthetic oligonucleotide
  Antisense strand to SEQ ID NO: 2033320
acauuaaauagaaacagcc

SEQ ID NO: 2033322 - RNA, 19 nt, Artificial Sequence
  Description of Artificial Sequence: Synthetic oligonucleotide
  Sense strand starting at position 571 of SEQ ID NO: 1881294
cugauuuacugaggaggaa

SEQ ID NO: 2033323 - RNA, 19 nt, Artificial Sequence
  Description of Artificial Sequence: Synthetic oligonucleotide
  Antisense strand to SEQ ID NO: 2033322
uuccuccucaguaaaucag

SEQ ID NO: 2033324 - RNA, 19 nt, Artificial Sequence
  Description of Artificial Sequence: Synthetic oligonucleotide
  Sense strand starting at position 617 of SEQ ID NO: 1881294
guaugacggcuuuaaauga

SEQ ID NO: 2033325 - RNA, 19 nt, Artificial Sequence
  Description of Artificial Sequence: Synthetic oligonucleotide
  Antisense strand to SEQ ID NO: 2033324
ucauuuaaagccgucauac

SEQ ID NO: 2033326 - RNA, 19 nt, Artificial Sequence
  Description of Artificial Sequence: Synthetic oligonucleotide
  Sense strand starting at position 624 of SEQ ID NO: 1881294
ggcuuuaaaugaguuucca

SEQ ID NO: 2033327 - RNA, 19 nt, Artificial Sequence
  Description of Artificial Sequence: Synthetic oligonucleotide
  Antisense strand to SEQ ID NO: 2033326
uggaaacucauuuaaagcc

SEQ ID NO: 2033328 - RNA, 19 nt, Artificial Sequence
  Description of Artificial Sequence: Synthetic oligonucleotide
  Sense strand starting at position 694 of SEQ ID NO: 1881294
gcacccuugguuuaacauu

SEQ ID NO: 2033329 - RNA, 19 nt, Artificial Sequence
  Description of Artificial Sequence: Synthetic oligonucleotide
  Antisense strand to SEQ ID NO: 2033328
aauguuaaaccaagggugc

SEQ ID NO: 2033330 - RNA, 19 nt, Artificial Sequence
  Description of Artificial Sequence: Synthetic oligonucleotide
  Sense strand starting at position 867 of SEQ ID NO: 1881294
caaggugauggaugguuua

SEQ ID NO: 2033331 - RNA, 19 nt, Artificial Sequence
  Description of Artificial Sequence: Synthetic oligonucleotide
  Antisense strand to SEQ ID NO: 2033330
uaaaccauccaucaccuug

SEQ ID NO: 2033332 - RNA, 19 nt, Artificial Sequence
  Description of Artificial Sequence: Synthetic oligonucleotide
  Sense strand starting at position 1033 of SEQ ID NO: 1881294
guggguaguauagguaaag

SEQ ID NO: 2033333 - RNA, 19 nt, Artificial Sequence
  Description of Artificial Sequence: Synthetic oligonucleotide
  Antisense strand to SEQ ID NO: 2033332
cuuuaccuauacuacccac

SEQ ID NO: 2033334 - RNA, 19 nt, Artificial Sequence
  Description of Artificial Sequence: Synthetic oligonucleotide
  Sense strand starting at position 1165 of SEQ ID NO: 1881294
guuauugagucacccuaag

SEQ ID NO: 2033335 - RNA, 19 nt, Artificial Sequence
  Description of Artificial Sequence: Synthetic oligonucleotide
  Antisense strand to SEQ ID NO: 2033334
cuuagggugacucaauaac

SEQ ID NO: 2033336 - RNA, 19 nt, Artificial Sequence
  Description of Artificial Sequence: Synthetic oligonucleotide
  Sense strand starting at position 1238 of SEQ ID NO: 1881294
aaagcauugcuguagauga

SEQ ID NO: 2033337 - RNA, 19 nt, Artificial Sequence
  Description of Artificial Sequence: Synthetic oligonucleotide
  Antisense strand to SEQ ID NO: 2033336
ucaucuacagcaaugcuuu

SEQ ID NO: 2033338 - RNA, 19 nt, Artificial Sequence
  Description of Artificial Sequence: Synthetic oligonucleotide
  Sense strand starting at position 1246 of SEQ ID NO: 1881294
gcuguagaugaccaguuua

SEQ ID NO: 2033339 - RNA, 19 nt, Artificial Sequence
  Description of Artificial Sequence: Synthetic oligonucleotide
  Antisense strand to SEQ ID NO: 2033338
uaaacuggucaucuacagc

SEQ ID NO: 2033340 - RNA, 19 nt, Artificial Sequence
  Description of Artificial Sequence: Synthetic oligonucleotide
  Sense strand starting at position 1481 of SEQ ID NO: 1881294
auauaauucugguugcuaa

SEQ ID NO: 2033341 - RNA, 19 nt, Artificial Sequence
  Description of Artificial Sequence: Synthetic oligonucleotide
  Antisense strand to SEQ ID NO: 2033340
uuagcaaccagaauuauau

SEQ ID NO: 2033342 - RNA, 19 nt, Artificial Sequence
  Description of Artificial Sequence: Synthetic oligonucleotide
  Sense strand starting at position 1484 of SEQ ID NO: 1881294
uaauucugguugcuaaaga

SEQ ID NO: 2033343 - RNA, 19 nt, Artificial Sequence
  Description of Artificial Sequence: Synthetic oligonucleotide
  Antisense strand to SEQ ID NO: 2033342
ucuuuagcaaccagaauua

SEQ ID NO: 2033344 - RNA, 19 nt, Artificial Sequence
  Description of Artificial Sequence: Synthetic oligonucleotide
  Sense strand starting at position 1518 of SEQ ID NO: 1881294
agcuuaaguguauaccaau

SEQ ID NO: 2033345 - RNA, 19 nt, Artificial Sequence
  Description of Artificial Sequence: Synthetic oligonucleotide
  Antisense strand to SEQ ID NO: 2033344
auugguauacacuuaagcu

SEQ ID NO: 2033346 - RNA, 19 nt, Artificial Sequence
  Description of Artificial Sequence: Synthetic oligonucleotide
  Sense strand starting at position 1645 of SEQ ID NO: 1881294
aagugaaaucaguguaaug

SEQ ID NO: 2033347 - RNA, 19 nt, Artificial Sequence
  Description of Artificial Sequence: Synthetic oligonucleotide
  Antisense strand to SEQ ID NO: 2033346
cauuacacugauuucacuu

SEQ ID NO: 2033348 - RNA, 19 nt, Artificial Sequence
  Description of Artificial Sequence: Synthetic oligonucleotide
  Sense strand starting at position 1744 of SEQ ID NO: 1881294
uacaaaugcuagucaggaa

SEQ ID NO: 2033349 - RNA, 19 nt, Artificial Sequence
  Description of Artificial Sequence: Synthetic oligonucleotide
  Antisense strand to SEQ ID NO: 2033348
uuccugacuagcauuugua

SEQ ID NO: 2033350 - RNA, 19 nt, Artificial Sequence
  Description of Artificial Sequence: Synthetic oligonucleotide
  Sense strand starting at position 1778 of SEQ ID NO: 1881294
guaauucuuguacauucua

SEQ ID NO: 2033351 - RNA, 19 nt, Artificial Sequence
  Description of Artificial Sequence: Synthetic oligonucleotide
  Antisense strand to SEQ ID NO: 2033350
uagaauguacaagaauuac

SEQ ID NO: 2033352 - RNA, 19 nt, Artificial Sequence
  Description of Artificial Sequence: Synthetic oligonucleotide
  Sense strand starting at position 1846 of SEQ ID NO: 1881294
gcuggcuaaccuuaucuca

SEQ ID NO: 2033353 - RNA, 19 nt, Artificial Sequence
  Description of Artificial Sequence: Synthetic oligonucleotide
  Antisense strand to SEQ ID NO: 2033352
ugagauaagguuagccagc

SEQ ID NO: 2033354 - RNA, 19 nt, Artificial Sequence
  Description of Artificial Sequence: Synthetic oligonucleotide
  Sense strand starting at position 1871 of SEQ ID NO: 1881294
ggugguuaguacuucagag

SEQ ID NO: 2033355 - RNA, 19 nt, Artificial Sequence
  Description of Artificial Sequence: Synthetic oligonucleotide
  Antisense strand to SEQ ID NO: 2033354
cucugaaguacuaaccacc

SEQ ID NO: 2033356 - RNA, 19 nt, Artificial Sequence
  Description of Artificial Sequence: Synthetic oligonucleotide
  Sense strand starting at position 1973 of SEQ ID NO: 1881294
uauuuagcuucggugagca

SEQ ID NO: 2033357 - RNA, 19 nt, Artificial Sequence
  Description of Artificial Sequence: Synthetic oligonucleotide
  Antisense strand to SEQ ID NO: 2033356
ugcucaccgaagcuaaaua

SEQ ID NO: 2033358 - RNA, 19 nt, Artificial Sequence
  Description of Artificial Sequence: Synthetic oligonucleotide
  Sense strand starting at position 2014 of SEQ ID NO: 1881294
agaagugaguuuccuaccu

SEQ ID NO: 2033359 - RNA, 19 nt, Artificial Sequence
  Description of Artificial Sequence: Synthetic oligonucleotide
  Antisense strand to SEQ ID NO: 2033358
agguaggaaacucacuucu

SEQ ID NO: 2033360 - RNA, 19 nt, Artificial Sequence
  Description of Artificial Sequence: Synthetic oligonucleotide
  Sense strand starting at position 2021 of SEQ ID NO: 1881294
aguuuccuaccugguuaaa

SEQ ID NO: 2033361 - RNA, 19 nt, Artificial Sequence
  Description of Artificial Sequence: Synthetic oligonucleotide
  Antisense strand to SEQ ID NO: 2033360
uuuaaccagguaggaaacu

SEQ ID NO: 2033362 - RNA, 19 nt, Artificial Sequence
  Description of Artificial Sequence: Synthetic oligonucleotide
  Sense strand starting at position 2074 of SEQ ID NO: 1881294
uuugaaugguacuuuaaca

SEQ ID NO: 2033363 - RNA, 19 nt, Artificial Sequence
  Description of Artificial Sequence: Synthetic oligonucleotide
  Antisense strand to SEQ ID NO: 2033362
uguuaaaguaccauucaaa

SEQ ID NO: 2033364 - RNA, 19 nt, Artificial Sequence
  Description of Artificial Sequence: Synthetic oligonucleotide
  Sense strand starting at position 2100 of SEQ ID NO: 1881294
uucuguauacugugaauau

SEQ ID NO: 2033365 - RNA, 19 nt, Artificial Sequence
  Description of Artificial Sequence: Synthetic oligonucleotide
  Antisense strand to SEQ ID NO: 2033364
auauucacaguauacagaa

SEQ ID NO: 2033366 - RNA, 19 nt, Artificial Sequence
  Description of Artificial Sequence: Synthetic oligonucleotide
  Sense strand starting at position 2104 of SEQ ID NO: 1881294
guauacugugaauauauca

SEQ ID NO: 2033367 - RNA, 19 nt, Artificial Sequence
  Description of Artificial Sequence: Synthetic oligonucleotide
  Antisense strand to SEQ ID NO: 2033366
ugauauauucacaguauac

SEQ ID NO: 2033368 - RNA, 19 nt, Artificial Sequence
  Description of Artificial Sequence: Synthetic oligonucleotide
  Sense strand starting at position 2245 of SEQ ID NO: 1881294
aguuacacauuguucuuaa

SEQ ID NO: 2033369 - RNA, 19 nt, Artificial Sequence
  Description of Artificial Sequence: Synthetic oligonucleotide
  Antisense strand to SEQ ID NO: 2033368
uuaagaacaauguguaacu

SEQ ID NO: 2033370 - RNA, 19 nt, Artificial Sequence
  Description of Artificial Sequence: Synthetic oligonucleotide
  Sense strand starting at position 2246 of SEQ ID NO: 1881294
guuacacauuguucuuaag

SEQ ID NO: 2033371 - RNA, 19 nt, Artificial Sequence
  Description of Artificial Sequence: Synthetic oligonucleotide
  Antisense strand to SEQ ID NO: 2033370
cuuaagaacaauguguaac

SEQ ID NO: 2033372 - RNA, 19 nt, Artificial Sequence
  Description of Artificial Sequence: Synthetic oligonucleotide
  Sense strand starting at position 2286 of SEQ ID NO: 1881294
aaaugagucccauaggccu

SEQ ID NO: 2033373 - RNA, 19 nt, Artificial Sequence
  Description of Artificial Sequence: Synthetic oligonucleotide
  Antisense strand to SEQ ID NO: 2033372
aggccuaugggacucauuu

SEQ ID NO: 2033374 - RNA, 19 nt, Artificial Sequence
  Description of Artificial Sequence: Synthetic oligonucleotide
  Sense strand starting at position 2443 of SEQ ID NO: 1881294
gccuuuauuugggcuuaga

SEQ ID NO: 2033375 - RNA, 19 nt, Artificial Sequence
  Description of Artificial Sequence: Synthetic oligonucleotide
  Antisense strand to SEQ ID NO: 2033374
ucuaagcccaaauaaaggc

SEQ ID NO: 2033376 - RNA, 19 nt, Artificial Sequence
  Description of Artificial Sequence: Synthetic oligonucleotide
  Sense strand starting at position 2452 of SEQ ID NO: 1881294
ugggcuuagagauguuauu

SEQ ID NO: 2033377 - RNA, 19 nt, Artificial Sequence
  Description of Artificial Sequence: Synthetic oligonucleotide
  Antisense strand to SEQ ID NO: 2033376
aauaacaucucuaagccca

SEQ ID NO: 2033378 - RNA, 19 nt, Artificial Sequence
  Description of Artificial Sequence: Synthetic oligonucleotide
  Sense strand starting at position 2490 of SEQ ID NO: 1881294
ggguuaucuguuuaacccu

SEQ ID NO: 2033379 - RNA, 19 nt, Artificial Sequence
  Description of Artificial Sequence: Synthetic oligonucleotide
  Antisense strand to SEQ ID NO: 2033378
aggguuaaacagauaaccc

SEQ ID NO: 2033380 - RNA, 19 nt, Artificial Sequence
  Description of Artificial Sequence: Synthetic oligonucleotide
  Sense strand starting at position 2808 of SEQ ID NO: 1881294
gcaugugagguuuacuuga

SEQ ID NO: 2033381 - RNA, 19 nt, Artificial Sequence
  Description of Artificial Sequence: Synthetic oligonucleotide
  Antisense strand to SEQ ID NO: 2033380
ucaaguaaaccucacaugc

SEQ ID NO: 2033382 - RNA, 19 nt, Artificial Sequence
  Description of Artificial Sequence: Synthetic oligonucleotide
  Sense strand starting at position 2810 of SEQ ID NO: 1881294
augugagguuuacuugaug

SEQ ID NO: 2033383 - RNA, 19 nt, Artificial Sequence
  Description of Artificial Sequence: Synthetic oligonucleotide
  Antisense strand to SEQ ID NO: 2033382
caucaaguaaaccucacau

SEQ ID NO: 2033384 - RNA, 19 nt, Artificial Sequence
  Description of Artificial Sequence: Synthetic oligonucleotide
  Sense strand starting at position 2885 of SEQ ID NO: 1881294
uugaaagucuaaguagauc

SEQ ID NO: 2033385 - RNA, 19 nt, Artificial Sequence
  Description of Artificial Sequence: Synthetic oligonucleotide
  Antisense strand to SEQ ID NO: 2033384
gaucuacuuagacuuucaa

SEQ ID NO: 2033386 - RNA, 19 nt, Artificial Sequence
  Description of Artificial Sequence: Synthetic oligonucleotide
  Sense strand starting at position 2891 of SEQ ID NO: 1881294
gucuaaguagaucaucauu

SEQ ID NO: 2033387 - RNA, 19 nt, Artificial Sequence
  Description of Artificial Sequence: Synthetic oligonucleotide
  Antisense strand to SEQ ID NO: 2033386
aaugaugaucuacuuagac

SEQ ID NO: 2033388 - RNA, 19 nt, Artificial Sequence
  Description of Artificial Sequence: Synthetic oligonucleotide
  Sense strand starting at position 2988 of SEQ ID NO: 1881294
uagaacuaccauugguagu

SEQ ID NO: 2033389 - RNA, 19 nt, Artificial Sequence
  Description of Artificial Sequence: Synthetic oligonucleotide
  Antisense strand to SEQ ID NO: 2033388
acuaccaaugguaguucua

SEQ ID NO: 2033390 - RNA, 19 nt, Artificial Sequence
  Description of Artificial Sequence: Synthetic oligonucleotide
  Sense strand starting at position 2990 of SEQ ID NO: 1881294
gaacuaccauugguaguuu

SEQ ID NO: 2033391 - RNA, 19 nt, Artificial Sequence
  Description of Artificial Sequence: Synthetic oligonucleotide
  Antisense strand to SEQ ID NO: 2033390
aaacuaccaaugguaguuc

SEQ ID NO: 2033392 - RNA, 19 nt, Artificial Sequence
  Description of Artificial Sequence: Synthetic oligonucleotide
  Sense strand starting at position 3272 of SEQ ID NO: 1881294
cauuucugucagggugagu

SEQ ID NO: 2033393 - RNA, 19 nt, Artificial Sequence
  Description of Artificial Sequence: Synthetic oligonucleotide
  Antisense strand to SEQ ID NO: 2033392
acucacccugacagaaaug

SEQ ID NO: 2033394 - RNA, 19 nt, Artificial Sequence
  Description of Artificial Sequence: Synthetic oligonucleotide
  Sense strand starting at position 3350 of SEQ ID NO: 1881294
guuguaaguggcugaauuu

SEQ ID NO: 2033395 - RNA, 19 nt, Artificial Sequence
  Description of Artificial Sequence: Synthetic oligonucleotide
  Antisense strand to SEQ ID NO: 2033394
aaauucagccacuuacaac

SEQ ID NO: 2033396 - RNA, 19 nt, Artificial Sequence
  Description of Artificial Sequence: Synthetic oligonucleotide
  Sense strand starting at position 3400 of SEQ ID NO: 1881294
cccaauugcuaguuaagac

SEQ ID NO: 2033397 - RNA, 19 nt, Artificial Sequence
  Description of Artificial Sequence: Synthetic oligonucleotide
  Antisense strand to SEQ ID NO: 2033396
gucuuaacuagcaauuggg

SEQ ID NO: 2033398 - RNA, 19 nt, Artificial Sequence
  Description of Artificial Sequence: Synthetic oligonucleotide
  Sense strand starting at position 3939 of SEQ ID NO: 1881294
aggaaacaugcugguaaac

SEQ ID NO: 2033399 - RNA, 19 nt, Artificial Sequence
  Description of Artificial Sequence: Synthetic oligonucleotide
  Antisense strand to SEQ ID NO: 2033398
guuuaccagcauguuuccu

SEQ ID NO: 2033400 - RNA, 19 nt, Artificial Sequence
  Description of Artificial Sequence: Synthetic oligonucleotide
  Sense strand starting at position 244 of SEQ ID NO: 1881295
ugggcuggcucauuugcaa

SEQ ID NO: 2033401 - RNA, 19 nt, Artificial Sequence
  Description of Artificial Sequence: Synthetic oligonucleotide
  Antisense strand to SEQ ID NO: 2033400
uugcaaaugagccagccca

SEQ ID NO: 2033402 - RNA, 19 nt, Artificial Sequence
  Description of Artificial Sequence: Synthetic oligonucleotide
  Sense strand starting at position 315 of SEQ ID NO: 1881295
uucucucagcaguaugaaa

SEQ ID NO: 2033403 - RNA, 19 nt, Artificial Sequence
  Description of Artificial Sequence: Synthetic oligonucleotide
  Antisense strand to SEQ ID NO: 2033402
uuucauacugcugagagaa

SEQ ID NO: 2033404 - RNA, 19 nt, Artificial Sequence
  Description of Artificial Sequence: Synthetic oligonucleotide
  Sense strand starting at position 475 of SEQ ID NO: 1881295
caaguaggacuuugugaga

SEQ ID NO: 2033405 - RNA, 19 nt, Artificial Sequence
  Description of Artificial Sequence: Synthetic oligonucleotide
  Antisense strand to SEQ ID NO: 2033404
ucucacaaaguccuacuug

SEQ ID NO: 2033406 - RNA, 19 nt, Artificial Sequence
  Description of Artificial Sequence: Synthetic oligonucleotide
  Sense strand starting at position 587 of SEQ ID NO: 1881295
aucagaguagcggaaucaa

SEQ ID NO: 2033407 - RNA, 19 nt, Artificial Sequence
  Description of Artificial Sequence: Synthetic oligonucleotide
  Antisense strand to SEQ ID NO: 2033406
uugauuccgcuacucugau

SEQ ID NO: 2033408 - RNA, 19 nt, Artificial Sequence
  Description of Artificial Sequence: Synthetic oligonucleotide
  Sense strand starting at position 709 of SEQ ID NO: 1881295
ugcuuugugguugccagua

SEQ ID NO: 2033409 - RNA, 19 nt, Artificial Sequence
  Description of Artificial Sequence: Synthetic oligonucleotide
  Antisense strand to SEQ ID NO: 2033408
uacuggcaaccacaaagca

SEQ ID NO: 2033410 - RNA, 19 nt, Artificial Sequence
  Description of Artificial Sequence: Synthetic oligonucleotide
  Sense strand starting at position 911 of SEQ ID NO: 1881295
gucaacaugguguaugaaa

SEQ ID NO: 2033411 - RNA, 19 nt, Artificial Sequence
  Description of Artificial Sequence: Synthetic oligonucleotide
  Antisense strand to SEQ ID NO: 2033410
uuucauacaccauguugac

SEQ ID NO: 2033412 - RNA, 19 nt, Artificial Sequence
  Description of Artificial Sequence: Synthetic oligonucleotide
  Sense strand starting at position 919 of SEQ ID NO: 1881295
gguguaugaaaccagcuua

SEQ ID NO: 2033413 - RNA, 19 nt, Artificial Sequence
  Description of Artificial Sequence: Synthetic oligonucleotide
  Antisense strand to SEQ ID NO: 2033412
uaagcugguuucauacacc

SEQ ID NO: 2033414 - RNA, 19 nt, Artificial Sequence
  Description of Artificial Sequence: Synthetic oligonucleotide
  Sense strand starting at position 962 of SEQ ID NO: 1881295
guaggagaauuguuuacaa

SEQ ID NO: 2033415 - RNA, 19 nt, Artificial Sequence
  Description of Artificial Sequence: Synthetic oligonucleotide
  Antisense strand to SEQ ID NO: 2033414
uuguaaacaauucuccuac

SEQ ID NO: 2033416 - RNA, 19 nt, Artificial Sequence
  Description of Artificial Sequence: Synthetic oligonucleotide
  Sense strand starting at position 1062 of SEQ ID NO: 1881295
uggcuugcucaggauuugu

SEQ ID NO: 2033417 - RNA, 19 nt, Artificial Sequence
  Description of Artificial Sequence: Synthetic oligonucleotide
  Antisense strand to SEQ ID NO: 2033416
acaaauccugagcaagcca

SEQ ID NO: 2033418 - RNA, 19 nt, Artificial Sequence
  Description of Artificial Sequence: Synthetic oligonucleotide
  Sense strand starting at position 1145 of SEQ ID NO: 1881295
ccagucaucccggaugacu

SEQ ID NO: 2033419 - RNA, 19 nt, Artificial Sequence
  Description of Artificial Sequence: Synthetic oligonucleotide
  Antisense strand to SEQ ID NO: 2033418
agucauccgggaugacugg

SEQ ID NO: 2033420 - RNA, 19 nt, Artificial Sequence
  Description of Artificial Sequence: Synthetic oligonucleotide
  Sense strand starting at position 1212 of SEQ ID NO: 1881295
cugucuuugagaggaauug

SEQ ID NO: 2033421 - RNA, 19 nt, Artificial Sequence
  Description of Artificial Sequence: Synthetic oligonucleotide
  Antisense strand to SEQ ID NO: 2033420
caauuccucucaaagacag

SEQ ID NO: 2033422 - RNA, 19 nt, Artificial Sequence
  Description of Artificial Sequence: Synthetic oligonucleotide
  Sense strand starting at position 1213 of SEQ ID NO: 1881295
ugucuuugagaggaauugu

SEQ ID NO: 2033423 - RNA, 19 nt, Artificial Sequence
  Description of Artificial Sequence: Synthetic oligonucleotide
  Antisense strand to SEQ ID NO: 2033422
acaauuccucucaaagaca

SEQ ID NO: 2033424 - RNA, 19 nt, Artificial Sequence
  Description of Artificial Sequence: Synthetic oligonucleotide
  Sense strand starting at position 1290 of SEQ ID NO: 1881295
ucacauuuauguguguacu

SEQ ID NO: 2033425 - RNA, 19 nt, Artificial Sequence
  Description of Artificial Sequence: Synthetic oligonucleotide
  Antisense strand to SEQ ID NO: 2033424
aguacacacauaaauguga

SEQ ID NO: 2033426 - RNA, 19 nt, Artificial Sequence
  Description of Artificial Sequence: Synthetic oligonucleotide
  Sense strand starting at position 1336 of SEQ ID NO: 1881295
agacuuucuggcuacuaga

SEQ ID NO: 2033427 - RNA, 19 nt, Artificial Sequence
  Description of Artificial Sequence: Synthetic oligonucleotide
  Antisense strand to SEQ ID NO: 2033426
ucuaguagccagaaagucu

SEQ ID NO: 2033428 - RNA, 19 nt, Artificial Sequence
  Description of Artificial Sequence: Synthetic oligonucleotide
  Sense strand starting at position 1360 of SEQ ID NO: 1881295
gggacaagcugggucuaau

SEQ ID NO: 2033429 - RNA, 19 nt, Artificial Sequence
  Description of Artificial Sequence: Synthetic oligonucleotide
  Antisense strand to SEQ ID NO: 2033428
auuagacccagcuuguccc

SEQ ID NO: 2033430 - RNA, 19 nt, Artificial Sequence
  Description of Artificial Sequence: Synthetic oligonucleotide
  Sense strand starting at position 1430 of SEQ ID NO: 1881295
acacaucacagugagugua

SEQ ID NO: 2033431 - RNA, 19 nt, Artificial Sequence
  Description of Artificial Sequence: Synthetic oligonucleotide
  Antisense strand to SEQ ID NO: 2033430
uacacucacugugaugugu

SEQ ID NO: 2033432 - RNA, 19 nt, Artificial Sequence
  Description of Artificial Sequence: Synthetic oligonucleotide
  Sense strand starting at position 1511 of SEQ ID NO: 1881295
gcuuuagaagaaugaauca

SEQ ID NO: 2033433 - RNA, 19 nt, Artificial Sequence
  Description of Artificial Sequence: Synthetic oligonucleotide
  Antisense strand to SEQ ID NO: 2033432
ugauucauucuucuaaagc

SEQ ID NO: 2033434 - RNA, 19 nt, Artificial Sequence
  Description of Artificial Sequence: Synthetic oligonucleotide
  Sense strand starting at position 1567 of SEQ ID NO: 1881295
gcaauugauuuaguaugca

SEQ ID NO: 2033435 - RNA, 19 nt, Artificial Sequence
  Description of Artificial Sequence: Synthetic oligonucleotide
  Antisense strand to SEQ ID NO: 2033434
ugcauacuaaaucaauugc

SEQ ID NO: 2033436 - RNA, 19 nt, Artificial Sequence
  Description of Artificial Sequence: Synthetic oligonucleotide
  Sense strand starting at position 1655 of SEQ ID NO: 1881295
uguugagauguuuaaggac

SEQ ID NO: 2033437 - RNA, 19 nt, Artificial Sequence
  Description of Artificial Sequence: Synthetic oligonucleotide
  Antisense strand to SEQ ID NO: 2033436
guccuuaaacaucucaaca

SEQ ID NO: 2033438 - RNA, 19 nt, Artificial Sequence
  Description of Artificial Sequence: Synthetic oligonucleotide
  Sense strand starting at position 1882 of SEQ ID NO: 1881295
agggauuugugucugagcu

SEQ ID NO: 2033439 - RNA, 19 nt, Artificial Sequence
  Description of Artificial Sequence: Synthetic oligonucleotide
  Antisense strand to SEQ ID NO: 2033438
agcucagacacaaaucccu

SEQ ID NO: 2033440 - RNA, 19 nt, Artificial Sequence
  Description of Artificial Sequence: Synthetic oligonucleotide
  Sense strand starting at position 2204 of SEQ ID NO: 1881295
guagaaucaggguagcuca

SEQ ID NO: 2033441 - RNA, 19 nt, Artificial Sequence
  Description of Artificial Sequence: Synthetic oligonucleotide
  Antisense strand to SEQ ID NO: 2033440
ugagcuacccugauucuac

SEQ ID NO: 2033442 - RNA, 19 nt, Artificial Sequence
  Description of Artificial Sequence: Synthetic oligonucleotide
  Sense strand starting at position 2269 of SEQ ID NO: 1881295
agguaaggauuccucaauu

SEQ ID NO: 2033443 - RNA, 19 nt, Artificial Sequence
  Description of Artificial Sequence: Synthetic oligonucleotide
  Antisense strand to SEQ ID NO: 2033442
aauugaggaauccuuaccu

SEQ ID NO: 2033444 - RNA, 19 nt, Artificial Sequence
  Description of Artificial Sequence: Synthetic oligonucleotide
  Sense strand starting at position 2315 of SEQ ID NO: 1881295
ugccaaugacgucagauaa

SEQ ID NO: 2033445 - RNA, 19 nt, Artificial Sequence
  Description of Artificial Sequence: Synthetic oligonucleotide
  Antisense strand to SEQ ID NO: 2033444
uuaucugacgucauuggca

SEQ ID NO: 2033446 - RNA, 19 nt, Artificial Sequence
  Description of Artificial Sequence: Synthetic oligonucleotide
  Sense strand starting at position 2456 of SEQ ID NO: 1881295
uuuagagcugauugagaac

SEQ ID NO: 2033447 - RNA, 19 nt, Artificial Sequence
  Description of Artificial Sequence: Synthetic oligonucleotide
  Antisense strand to SEQ ID NO: 2033446
guucucaaucagcucuaaa

SEQ ID NO: 2033448 - RNA, 19 nt, Artificial Sequence
  Description of Artificial Sequence: Synthetic oligonucleotide
  Sense strand starting at position 2480 of SEQ ID NO: 1881295
aggaguaugucuguggaaa

SEQ ID NO: 2033449 - RNA, 19 nt, Artificial Sequence
  Description of Artificial Sequence: Synthetic oligonucleotide
  Antisense strand to SEQ ID NO: 2033448
uuuccacagacauacuccu

SEQ ID NO: 2033450 - RNA, 19 nt, Artificial Sequence
  Description of Artificial Sequence: Synthetic oligonucleotide
  Sense strand starting at position 2501 of SEQ ID NO: 1881295
gucuauuuacguugaaguu

SEQ ID NO: 2033451 - RNA, 19 nt, Artificial Sequence
  Description of Artificial Sequence: Synthetic oligonucleotide
  Antisense strand to SEQ ID NO: 2033450
aacuucaacguaaauagac

SEQ ID NO: 2033452 - RNA, 19 nt, Artificial Sequence
  Description of Artificial Sequence: Synthetic oligonucleotide
  Sense strand starting at position 2600 of SEQ ID NO: 1881295
uauguaaggccagacaauu

SEQ ID NO: 2033453 - RNA, 19 nt, Artificial Sequence
  Description of Artificial Sequence: Synthetic oligonucleotide
  Antisense strand to SEQ ID NO: 2033452
aauugucuggccuuacaua

SEQ ID NO: 2033454 - RNA, 19 nt, Artificial Sequence
  Description of Artificial Sequence: Synthetic oligonucleotide
  Sense strand starting at position 2659 of SEQ ID NO: 1881295
agugccuguagauauaaga

SEQ ID NO: 2033455 - RNA, 19 nt, Artificial Sequence
  Description of Artificial Sequence: Synthetic oligonucleotide
  Antisense strand to SEQ ID NO: 2033454
ucuuauaucuacaggcacu

SEQ ID NO: 2033456 - RNA, 19 nt, Artificial Sequence
  Description of Artificial Sequence: Synthetic oligonucleotide
  Sense strand starting at position 2675 of SEQ ID NO: 1881295
agaugauucugucuaauga

SEQ ID NO: 2033457 - RNA, 19 nt, Artificial Sequence
  Description of Artificial Sequence: Synthetic oligonucleotide
  Antisense strand to SEQ ID NO: 2033456
ucauuagacagaaucaucu

SEQ ID NO: 2033458 - RNA, 19 nt, Artificial Sequence
  Description of Artificial Sequence: Synthetic oligonucleotide
  Sense strand starting at position 2685 of SEQ ID NO: 1881295
gucuaaugagguuaguaaa

SEQ ID NO: 2033459 - RNA, 19 nt, Artificial Sequence
  Description of Artificial Sequence: Synthetic oligonucleotide
  Antisense strand to SEQ ID NO: 2033458
uuuacuaaccucauuagac

SEQ ID NO: 2033460 - RNA, 19 nt, Artificial Sequence
  Description of Artificial Sequence: Synthetic oligonucleotide
  Sense strand starting at position 2728 of SEQ ID NO: 1881295
uggacaagucuguauccuu

SEQ ID NO: 2033461 - RNA, 19 nt, Artificial Sequence
  Description of Artificial Sequence: Synthetic oligonucleotide
  Antisense strand to SEQ ID NO: 2033460
aaggauacagacuugucca

SEQ ID NO: 2033462 - RNA, 19 nt, Artificial Sequence
  Description of Artificial Sequence: Synthetic oligonucleotide
  Sense strand starting at position 2766 of SEQ ID NO: 1881295
gcuucugaauuucuguaua

SEQ ID NO: 2033463 - RNA, 19 nt, Artificial Sequence
  Description of Artificial Sequence: Synthetic oligonucleotide
  Antisense strand to SEQ ID NO: 2033462
uauacagaaauucagaagc

SEQ ID NO: 2033464 - RNA, 19 nt, Artificial Sequence
  Description of Artificial Sequence: Synthetic oligonucleotide
  Sense strand starting at position 2790 of SEQ ID NO: 1881295
ucugaccuguuauugauaa

SEQ ID NO: 2033465 - RNA, 19 nt, Artificial Sequence
  Description of Artificial Sequence: Synthetic oligonucleotide
  Antisense strand to SEQ ID NO: 2033464
uuaucaauaacaggucaga

SEQ ID NO: 2033466 - RNA, 19 nt, Artificial Sequence
  Description of Artificial Sequence: Synthetic oligonucleotide
  Sense strand starting at position 2856 of SEQ ID NO: 1881295
guaagcaagcaucauaaga

SEQ ID NO: 2033467 - RNA, 19 nt, Artificial Sequence
  Description of Artificial Sequence: Synthetic oligonucleotide
  Antisense strand to SEQ ID NO: 2033466
ucuuaugaugcuugcuuac

SEQ ID NO: 2033468 - RNA, 19 nt, Artificial Sequence
  Description of Artificial Sequence: Synthetic oligonucleotide
  Sense strand starting at position 2918 of SEQ ID NO: 1881295
uagaauucugagggcaagu

SEQ ID NO: 2033469 - RNA, 19 nt, Artificial Sequence
  Description of Artificial Sequence: Synthetic oligonucleotide
  Antisense strand to SEQ ID NO: 2033468
acuugcccucagaauucua

SEQ ID NO: 2033470 - RNA, 19 nt, Artificial Sequence
  Description of Artificial Sequence: Synthetic oligonucleotide
  Sense strand starting at position 2952 of SEQ ID NO: 1881295
aguccuuaauacuuggaua

SEQ ID NO: 2033471 - RNA, 19 nt, Artificial Sequence
  Description of Artificial Sequence: Synthetic oligonucleotide
  Antisense strand to SEQ ID NO: 2033470
uauccaaguauuaaggacu

SEQ ID NO: 2033472 - RNA, 19 nt, Artificial Sequence
  Description of Artificial Sequence: Synthetic oligonucleotide
  Sense strand starting at position 3066 of SEQ ID NO: 1881295
auaaacuugcaucgaggaa

SEQ ID NO: 2033473 - RNA, 19 nt, Artificial Sequence
  Description of Artificial Sequence: Synthetic oligonucleotide
  Antisense strand to SEQ ID NO: 2033472
uuccucgaugcaaguuuau

SEQ ID NO: 2033474 - RNA, 19 nt, Artificial Sequence
  Description of Artificial Sequence: Synthetic oligonucleotide
  Sense strand starting at position 3198 of SEQ ID NO: 1881295
uuauaccugcuagagugau

SEQ ID NO: 2033475 - RNA, 19 nt, Artificial Sequence
  Description of Artificial Sequence: Synthetic oligonucleotide
  Antisense strand to SEQ ID NO: 2033474
aucacucuagcagguauaa

SEQ ID NO: 2033476 - RNA, 19 nt, Artificial Sequence
  Description of Artificial Sequence: Synthetic oligonucleotide
  Sense strand starting at position 3343 of SEQ ID NO: 1881295
gcaaguuaacaggagucua

SEQ ID NO: 2033477 - RNA, 19 nt, Artificial Sequence
  Description of Artificial Sequence: Synthetic oligonucleotide
  Antisense strand to SEQ ID NO: 2033476
uagacuccuguuaacuugc

SEQ ID NO: 2033478 - RNA, 19 nt, Artificial Sequence
  Description of Artificial Sequence: Synthetic oligonucleotide
  Sense strand starting at position 3354 of SEQ ID NO: 1881295
ggagucuaacuuugguaaa

SEQ ID NO: 2033479 - RNA, 19 nt, Artificial Sequence
  Description of Artificial Sequence: Synthetic oligonucleotide
  Antisense strand to SEQ ID NO: 2033478
uuuaccaaaguuagacucc

SEQ ID NO: 2033480 - RNA, 19 nt, Artificial Sequence
  Description of Artificial Sequence: Synthetic oligonucleotide
  Sense strand starting at position 29 of SEQ ID NO: 1881296
agugucuuauuugaagaaa

SEQ ID NO: 2033481 - RNA, 19 nt, Artificial Sequence
  Description of Artificial Sequence: Synthetic oligonucleotide
  Antisense strand to SEQ ID NO: 2033480
uuucuucaaauaagacacu

SEQ ID NO: 2033482 - RNA, 19 nt, Artificial Sequence
  Description of Artificial Sequence: Synthetic oligonucleotide
  Sense strand starting at position 41 of SEQ ID NO: 1881296
gaagaaauauuucgaagga

SEQ ID NO: 2033483 - RNA, 19 nt, Artificial Sequence
  Description of Artificial Sequence: Synthetic oligonucleotide
  Antisense strand to SEQ ID NO: 2033482
uccuucgaaauauuucuuc

SEQ ID NO: 2033484 - RNA, 19 nt, Artificial Sequence
  Description of Artificial Sequence: Synthetic oligonucleotide
  Sense strand starting at position 1387 of SEQ ID NO: 1881296
gaagcauccuuugucagga

SEQ ID NO: 2033485 - RNA, 19 nt, Artificial Sequence
  Description of Artificial Sequence: Synthetic oligonucleotide
  Antisense strand to SEQ ID NO: 2033484
uccugacaaaggaugcuuc

SEQ ID NO: 2033486 - RNA, 19 nt, Artificial Sequence
  Description of Artificial Sequence: Synthetic oligonucleotide
  Sense strand starting at position 1392 of SEQ ID NO: 1881296
auccuuugucaggauuacu

SEQ ID NO: 2033487 - RNA, 19 nt, Artificial Sequence
  Description of Artificial Sequence: Synthetic oligonucleotide
  Antisense strand to SEQ ID NO: 2033486
aguaauccugacaaaggau

SEQ ID NO: 2033488 - RNA, 19 nt, Artificial Sequence
  Description of Artificial Sequence: Synthetic oligonucleotide
  Sense strand starting at position 1395 of SEQ ID NO: 1881296
cuuugucaggauuacugau

SEQ ID NO: 2033489 - RNA, 19 nt, Artificial Sequence
  Description of Artificial Sequence: Synthetic oligonucleotide
  Antisense strand to SEQ ID NO: 2033488
aucaguaauccugacaaag

SEQ ID NO: 2033490 - RNA, 19 nt, Artificial Sequence
  Description of Artificial Sequence: Synthetic oligonucleotide
  Sense strand starting at position 1397 of SEQ ID NO: 1881296
uugucaggauuacugauaa

SEQ ID NO: 2033491 - RNA, 19 nt, Artificial Sequence
  Description of Artificial Sequence: Synthetic oligonucleotide
  Antisense strand to SEQ ID NO: 2033490
uuaucaguaauccugacaa

SEQ ID NO: 2033492 - RNA, 19 nt, Artificial Sequence
  Description of Artificial Sequence: Synthetic oligonucleotide
  Sense strand starting at position 1486 of SEQ ID NO: 1881296
guaagugggcuuuaucaau

SEQ ID NO: 2033493 - RNA, 19 nt, Artificial Sequence
  Description of Artificial Sequence: Synthetic oligonucleotide
  Antisense strand to SEQ ID NO: 2033492
auugauaaagcccacuuac

SEQ ID NO: 2033494 - RNA, 19 nt, Artificial Sequence
  Description of Artificial Sequence: Synthetic oligonucleotide
  Sense strand starting at position 1575 of SEQ ID NO: 1881296
ggauacauggguuggcaau

SEQ ID NO: 2033495 - RNA, 19 nt, Artificial Sequence
  Description of Artificial Sequence: Synthetic oligonucleotide
  Antisense strand to SEQ ID NO: 2033494
auugccaacccauguaucc

SEQ ID NO: 2033496 - RNA, 19 nt, Artificial Sequence
  Description of Artificial Sequence: Synthetic oligonucleotide
  Sense strand starting at position 1576 of SEQ ID NO: 1881296
gauacauggguuggcaaua

SEQ ID NO: 2033497 - RNA, 19 nt, Artificial Sequence
  Description of Artificial Sequence: Synthetic oligonucleotide
  Antisense strand to SEQ ID NO: 2033496
uauugccaacccauguauc

SEQ ID NO: 2033498 - RNA, 19 nt, Artificial Sequence
  Description of Artificial Sequence: Synthetic oligonucleotide
  Sense strand starting at position 2243 of SEQ ID NO: 1881296
uucuuuggcagugauaaug

SEQ ID NO: 2033499 - RNA, 19 nt, Artificial Sequence
  Description of Artificial Sequence: Synthetic oligonucleotide
  Antisense strand to SEQ ID NO: 2033498
cauuaucacugccaaagaa

SEQ ID NO: 2033500 - RNA, 19 nt, Artificial Sequence
  Description of Artificial Sequence: Synthetic oligonucleotide
  Sense strand starting at position 2252 of SEQ ID NO: 1881296
agugauaaugcccaaauau

SEQ ID NO: 2033501 - RNA, 19 nt, Artificial Sequence
  Description of Artificial Sequence: Synthetic oligonucleotide
  Antisense strand to SEQ ID NO: 2033500
auauuugggcauuaucacu

SEQ ID NO: 2033502 - RNA, 19 nt, Artificial Sequence
  Description of Artificial Sequence: Synthetic oligonucleotide
  Sense strand starting at position 2327 of SEQ ID NO: 1881296
uaaggaaauucucugcagu

SEQ ID NO: 2033503 - RNA, 19 nt, Artificial Sequence
  Description of Artificial Sequence: Synthetic oligonucleotide
  Antisense strand to SEQ ID NO: 2033502
acugcagagaauuuccuua

SEQ ID NO: 2033504 - RNA, 19 nt, Artificial Sequence
  Description of Artificial Sequence: Synthetic oligonucleotide
  Sense strand starting at position 2328 of SEQ ID NO: 1881296
aaggaaauucucugcaguu

SEQ ID NO: 2033505 - RNA, 19 nt, Artificial Sequence
  Description of Artificial Sequence: Synthetic oligonucleotide
  Antisense strand to SEQ ID NO: 2033504
aacugcagagaauuuccuu

SEQ ID NO: 2033506 - RNA, 19 nt, Artificial Sequence
  Description of Artificial Sequence: Synthetic oligonucleotide
  Sense strand starting at position 2330 of SEQ ID NO: 1881296
ggaaauucucugcaguuuc

SEQ ID NO: 2033507 - RNA, 19 nt, Artificial Sequence
  Description of Artificial Sequence: Synthetic oligonucleotide
  Antisense strand to SEQ ID NO: 2033506
gaaacugcagagaauuucc

SEQ ID NO: 2033508 - RNA, 19 nt, Artificial Sequence
  Description of Artificial Sequence: Synthetic oligonucleotide
  Sense strand starting at position 2379 of SEQ ID NO: 1881296
aguaauugugaguaaagug

SEQ ID NO: 2033509 - RNA, 19 nt, Artificial Sequence
  Description of Artificial Sequence: Synthetic oligonucleotide
  Antisense strand to SEQ ID NO: 2033508
cacuuuacucacaauuacu

SEQ ID NO: 2033510 - RNA, 19 nt, Artificial Sequence
  Description of Artificial Sequence: Synthetic oligonucleotide
  Sense strand starting at position 2384 of SEQ ID NO: 1881296
uugugaguaaaguggaauu

SEQ ID NO: 2033511 - RNA, 19 nt, Artificial Sequence
  Description of Artificial Sequence: Synthetic oligonucleotide
  Antisense strand to SEQ ID NO: 2033510
aauuccacuuuacucacaa

SEQ ID NO: 2033512 - RNA, 19 nt, Artificial Sequence
  Description of Artificial Sequence: Synthetic oligonucleotide
  Sense strand starting at position 2424 of SEQ ID NO: 1881296
gaaauuuguuguguaucuu

SEQ ID NO: 2033513 - RNA, 19 nt, Artificial Sequence
  Description of Artificial Sequence: Synthetic oligonucleotide
  Antisense strand to SEQ ID NO: 2033512
aagauacacaacaaauuuc

SEQ ID NO: 2033514 - RNA, 19 nt, Artificial Sequence
  Description of Artificial Sequence: Synthetic oligonucleotide
  Sense strand starting at position 2457 of SEQ ID NO: 1881296
ugccaugcagccguuuaaa

SEQ ID NO: 2033515 - RNA, 19 nt, Artificial Sequence
  Description of Artificial Sequence: Synthetic oligonucleotide
  Antisense strand to SEQ ID NO: 2033514
uuuaaacggcugcauggca

SEQ ID NO: 2033516 - RNA, 19 nt, Artificial Sequence
  Description of Artificial Sequence: Synthetic oligonucleotide
  Sense strand starting at position 2478 of SEQ ID NO: 1881296
aauucugcaggugaauauu

SEQ ID NO: 2033517 - RNA, 19 nt, Artificial Sequence
  Description of Artificial Sequence: Synthetic oligonucleotide
  Antisense strand to SEQ ID NO: 2033516
aauauucaccugcagaauu

SEQ ID NO: 2033518 - RNA, 19 nt, Artificial Sequence
  Description of Artificial Sequence: Synthetic oligonucleotide
  Sense strand starting at position 2505 of SEQ ID NO: 1881296
agauguugcgacuauuugu

SEQ ID NO: 2033519 - RNA, 19 nt, Artificial Sequence
  Description of Artificial Sequence: Synthetic oligonucleotide
  Antisense strand to SEQ ID NO: 2033518
acaaauagucgcaacaucu

SEQ ID NO: 2033520 - RNA, 19 nt, Artificial Sequence
  Description of Artificial Sequence: Synthetic oligonucleotide
  Sense strand starting at position 2515 of SEQ ID NO: 1881296
acuauuuguuaggagacau

SEQ ID NO: 2033521 - RNA, 19 nt, Artificial Sequence
  Description of Artificial Sequence: Synthetic oligonucleotide
  Antisense strand to SEQ ID NO: 2033520
augucuccuaacaaauagu

SEQ ID NO: 2033522 - RNA, 19 nt, Artificial Sequence
  Description of Artificial Sequence: Synthetic oligonucleotide
  Sense strand starting at position 2519 of SEQ ID NO: 1881296
uuuguuaggagacauaguu

SEQ ID NO: 2033523 - RNA, 19 nt, Artificial Sequence
  Description of Artificial Sequence: Synthetic oligonucleotide
  Antisense strand to SEQ ID NO: 2033522
aacuaugucuccuaacaaa

SEQ ID NO: 2033524 - RNA, 19 nt, Artificial Sequence
  Description of Artificial Sequence: Synthetic oligonucleotide
  Sense strand starting at position 2573 of SEQ ID NO: 1881296
ucuuuaaaggucugcaaga

SEQ ID NO: 2033525 - RNA, 19 nt, Artificial Sequence
  Description of Artificial Sequence: Synthetic oligonucleotide
  Antisense strand to SEQ ID NO: 2033524
ucuugcagaccuuuaaaga

SEQ ID NO: 2033526 - RNA, 19 nt, Artificial Sequence
  Description of Artificial Sequence: Synthetic oligonucleotide
  Sense strand starting at position 2574 of SEQ ID NO: 1881296
cuuuaaaggucugcaagau

SEQ ID NO: 2033527 - RNA, 19 nt, Artificial Sequence
  Description of Artificial Sequence: Synthetic oligonucleotide
  Antisense strand to SEQ ID NO: 2033526
aucuugcagaccuuuaaag

SEQ ID NO: 2033528 - RNA, 19 nt, Artificial Sequence
  Description of Artificial Sequence: Synthetic oligonucleotide
  Sense strand starting at position 2575 of SEQ ID NO: 1881296
uuuaaaggucugcaagaug

SEQ ID NO: 2033529 - RNA, 19 nt, Artificial Sequence
  Description of Artificial Sequence: Synthetic oligonucleotide
  Antisense strand to SEQ ID NO: 2033528
caucuugcagaccuuuaaa

SEQ ID NO: 2033530 - RNA, 19 nt, Artificial Sequence
  Description of Artificial Sequence: Synthetic oligonucleotide
  Sense strand starting at position 2578 of SEQ ID NO: 1881296
aaaggucugcaagauguau

SEQ ID NO: 2033531 - RNA, 19 nt, Artificial Sequence
  Description of Artificial Sequence: Synthetic oligonucleotide
  Antisense strand to SEQ ID NO: 2033530
auacaucuugcagaccuuu

SEQ ID NO: 2033532 - RNA, 19 nt, Artificial Sequence
  Description of Artificial Sequence: Synthetic oligonucleotide
  Sense strand starting at position 2584 of SEQ ID NO: 1881296
cugcaagauguauacugau

SEQ ID NO: 2033533 - RNA, 19 nt, Artificial Sequence
  Description of Artificial Sequence: Synthetic oligonucleotide
  Antisense strand to SEQ ID NO: 2033532
aucaguauacaucuugcag

SEQ ID NO: 2033534 - RNA, 19 nt, Artificial Sequence
  Description of Artificial Sequence: Synthetic oligonucleotide
  Sense strand starting at position 2590 of SEQ ID NO: 1881296
gauguauacugauugugau

SEQ ID NO: 2033535 - RNA, 19 nt, Artificial Sequence
  Description of Artificial Sequence: Synthetic oligonucleotide
  Antisense strand to SEQ ID NO: 2033534
aucacaaucaguauacauc

SEQ ID NO: 2033536 - RNA, 19 nt, Artificial Sequence
  Description of Artificial Sequence: Synthetic oligonucleotide
  Sense strand starting at position 2591 of SEQ ID NO: 1881296
auguauacugauugugauc

SEQ ID NO: 2033537 - RNA, 19 nt, Artificial Sequence
  Description of Artificial Sequence: Synthetic oligonucleotide
  Antisense strand to SEQ ID NO: 2033536
gaucacaaucaguauacau

SEQ ID NO: 2033538 - RNA, 19 nt, Artificial Sequence
  Description of Artificial Sequence: Synthetic oligonucleotide
  Sense strand starting at position 3046 of SEQ ID NO: 1881296
uggaccuucuagucauauu

SEQ ID NO: 2033539 - RNA, 19 nt, Artificial Sequence
  Description of Artificial Sequence: Synthetic oligonucleotide
  Antisense strand to SEQ ID NO: 2033538
aauaugacuagaaggucca

SEQ ID NO: 2033540 - RNA, 19 nt, Artificial Sequence
  Description of Artificial Sequence: Synthetic oligonucleotide
  Sense strand starting at position 3098 of SEQ ID NO: 1881296
auuguuuccaaguagagug

SEQ ID NO: 2033541 - RNA, 19 nt, Artificial Sequence
  Description of Artificial Sequence: Synthetic oligonucleotide
  Antisense strand to SEQ ID NO: 2033540
cacucuacuuggaaacaau

SEQ ID NO: 2033542 - RNA, 19 nt, Artificial Sequence
  Description of Artificial Sequence: Synthetic oligonucleotide
  Sense strand starting at position 3258 of SEQ ID NO: 1881296
accagucaccucuaguuga

SEQ ID NO: 2033543 - RNA, 19 nt, Artificial Sequence
  Description of Artificial Sequence: Synthetic oligonucleotide
  Antisense strand to SEQ ID NO: 2033542
ucaacuagaggugacuggu

SEQ ID NO: 2033544 - RNA, 19 nt, Artificial Sequence
  Description of Artificial Sequence: Synthetic oligonucleotide
  Sense strand starting at position 3292 of SEQ ID NO: 1881296
aaaguagaguuucuugaag

SEQ ID NO: 2033545 - RNA, 19 nt, Artificial Sequence
  Description of Artificial Sequence: Synthetic oligonucleotide
  Antisense strand to SEQ ID NO: 2033544
cuucaagaaacucuacuuu

SEQ ID NO: 2033546 - RNA, 19 nt, Artificial Sequence
  Description of Artificial Sequence: Synthetic oligonucleotide
  Sense strand starting at position 3341 of SEQ ID NO: 1881296
aacacuugaugaguaagua

SEQ ID NO: 2033547 - RNA, 19 nt, Artificial Sequence
  Description of Artificial Sequence: Synthetic oligonucleotide
  Antisense strand to SEQ ID NO: 2033546
uacuuacucaucaaguguu

SEQ ID NO: 2033548 - RNA, 19 nt, Artificial Sequence
  Description of Artificial Sequence: Synthetic oligonucleotide
  Sense strand starting at position 3349 of SEQ ID NO: 1881296
augaguaaguaccuaaacu

SEQ ID NO: 2033549 - RNA, 19 nt, Artificial Sequence
  Description of Artificial Sequence: Synthetic oligonucleotide
  Antisense strand to SEQ ID NO: 2033548
aguuuagguacuuacucau

SEQ ID NO: 2033550 - RNA, 19 nt, Artificial Sequence
  Description of Artificial Sequence: Synthetic oligonucleotide
  Sense strand starting at position 3496 of SEQ ID NO: 1881296
uuggcuaagaggugacaaa

SEQ ID NO: 2033551 - RNA, 19 nt, Artificial Sequence
  Description of Artificial Sequence: Synthetic oligonucleotide
  Antisense strand to SEQ ID NO: 2033550
uuugucaccucuuagccaa

SEQ ID NO: 2033552 - RNA, 19 nt, Artificial Sequence
  Description of Artificial Sequence: Synthetic oligonucleotide
  Sense strand starting at position 3718 of SEQ ID NO: 1881296
cuagguuugccuuaaauuc

SEQ ID NO: 2033553 - RNA, 19 nt, Artificial Sequence
  Description of Artificial Sequence: Synthetic oligonucleotide
  Antisense strand to SEQ ID NO: 2033552
gaauuuaaggcaaaccuag

SEQ ID NO: 2033554 - RNA, 19 nt, Artificial Sequence
  Description of Artificial Sequence: Synthetic oligonucleotide
  Sense strand starting at position 3900 of SEQ ID NO: 1881296
cuaucaaugcuugaaguuu

SEQ ID NO: 2033555 - RNA, 19 nt, Artificial Sequence
  Description of Artificial Sequence: Synthetic oligonucleotide
  Antisense strand to SEQ ID NO: 2033554
aaacuucaagcauugauag

SEQ ID NO: 2033556 - RNA, 19 nt, Artificial Sequence
  Description of Artificial Sequence: Synthetic oligonucleotide
  Sense strand starting at position 3957 of SEQ ID NO: 1881296
agaaguuuauggucuagua

SEQ ID NO: 2033557 - RNA, 19 nt, Artificial Sequence
  Description of Artificial Sequence: Synthetic oligonucleotide
  Antisense strand to SEQ ID NO: 2033556
uacuagaccauaaacuucu

SEQ ID NO: 2033558 - RNA, 19 nt, Artificial Sequence
  Description of Artificial Sequence: Synthetic oligonucleotide
  Sense strand starting at position 3959 of SEQ ID NO: 1881296
aaguuuauggucuaguaaa

SEQ ID NO: 2033559 - RNA, 19 nt, Artificial Sequence
  Description of Artificial Sequence: Synthetic oligonucleotide
  Antisense strand to SEQ ID NO: 2033558
uuuacuagaccauaaacuu

SEQ ID NO: 2033560 - RNA, 19 nt, Artificial Sequence
  Description of Artificial Sequence: Synthetic oligonucleotide
  Sense strand starting at position 42 of SEQ ID NO: 1881297
acacuuuauguaugucaaa

SEQ ID NO: 2033561 - RNA, 19 nt, Artificial Sequence
  Description of Artificial Sequence: Synthetic oligonucleotide
  Antisense strand to SEQ ID NO: 2033560
uuugacauacauaaagugu

SEQ ID NO: 2033562 - RNA, 19 nt, Artificial Sequence
  Description of Artificial Sequence: Synthetic oligonucleotide
  Sense strand starting at position 176 of SEQ ID NO: 1881297
caguuaaaugagugggcaa

SEQ ID NO: 2033563 - RNA, 19 nt, Artificial Sequence
  Description of Artificial Sequence: Synthetic oligonucleotide
  Antisense strand to SEQ ID NO: 2033562
uugcccacucauuuaacug

SEQ ID NO: 2033564 - RNA, 19 nt, Artificial Sequence
  Description of Artificial Sequence: Synthetic oligonucleotide
  Sense strand starting at position 178 of SEQ ID NO: 1881297
guuaaaugagugggcaacu

SEQ ID NO: 2033565 - RNA, 19 nt, Artificial Sequence
  Description of Artificial Sequence: Synthetic oligonucleotide
  Antisense strand to SEQ ID NO: 2033564
aguugcccacucauuuaac

SEQ ID NO: 2033566 - RNA, 19 nt, Artificial Sequence
  Description of Artificial Sequence: Synthetic oligonucleotide
  Sense strand starting at position 1132 of SEQ ID NO: 1881297
cugcauuagcaauacugaa

SEQ ID NO: 2033567 - RNA, 19 nt, Artificial Sequence
  Description of Artificial Sequence: Synthetic oligonucleotide
  Antisense strand to SEQ ID NO: 2033566
uucaguauugcuaaugcag

SEQ ID NO: 2033568 - RNA, 19 nt, Artificial Sequence
  Description of Artificial Sequence: Synthetic oligonucleotide
  Sense strand starting at position 1333 of SEQ ID NO: 1881297
acaaucaaugaugguuuau

SEQ ID NO: 2033569 - RNA, 19 nt, Artificial Sequence
  Description of Artificial Sequence: Synthetic oligonucleotide
  Antisense strand to SEQ ID NO: 2033568
auaaaccaucauugauugu

SEQ ID NO: 2033570 - RNA, 19 nt, Artificial Sequence
  Description of Artificial Sequence: Synthetic oligonucleotide
  Sense strand starting at position 1339 of SEQ ID NO: 1881297
aaugaugguuuauucuagu

SEQ ID NO: 2033571 - RNA, 19 nt, Artificial Sequence
  Description of Artificial Sequence: Synthetic oligonucleotide
  Antisense strand to SEQ ID NO: 2033570
acuagaauaaaccaucauu

SEQ ID NO: 2033572 - RNA, 19 nt, Artificial Sequence
  Description of Artificial Sequence: Synthetic oligonucleotide
  Sense strand starting at position 1361 of SEQ ID NO: 1881297
auuaguucugucuaaagug

SEQ ID NO: 2033573 - RNA, 19 nt, Artificial Sequence
  Description of Artificial Sequence: Synthetic oligonucleotide
  Antisense strand to SEQ ID NO: 2033572
cacuuuagacagaacuaau

SEQ ID NO: 2033574 - RNA, 19 nt, Artificial Sequence
  Description of Artificial Sequence: Synthetic oligonucleotide
  Sense strand starting at position 1369 of SEQ ID NO: 1881297
ugucuaaagugauuaaagg

SEQ ID NO: 2033575 - RNA, 19 nt, Artificial Sequence
  Description of Artificial Sequence: Synthetic oligonucleotide
  Antisense strand to SEQ ID NO: 2033574
ccuuuaaucacuuuagaca

SEQ ID NO: 2033576 - RNA, 19 nt, Artificial Sequence
  Description of Artificial Sequence: Synthetic oligonucleotide
  Sense strand starting at position 1386 of SEQ ID NO: 1881297
ggauuugauucccagauaa

SEQ ID NO: 2033577 - RNA, 19 nt, Artificial Sequence
  Description of Artificial Sequence: Synthetic oligonucleotide
  Antisense strand to SEQ ID NO: 2033576
uuaucugggaaucaaaucc

SEQ ID NO: 2033578 - RNA, 19 nt, Artificial Sequence
  Description of Artificial Sequence: Synthetic oligonucleotide
  Sense strand starting at position 1442 of SEQ ID NO: 1881297
uuucuauacuuaguucuga

SEQ ID NO: 2033579 - RNA, 19 nt, Artificial Sequence
  Description of Artificial Sequence: Synthetic oligonucleotide
  Antisense strand to SEQ ID NO: 2033578
ucagaacuaaguauagaaa

SEQ ID NO: 2033580 - RNA, 19 nt, Artificial Sequence
  Description of Artificial Sequence: Synthetic oligonucleotide
  Sense strand starting at position 1443 of SEQ ID NO: 1881297
uucuauacuuaguucugau

SEQ ID NO: 2033581 - RNA, 19 nt, Artificial Sequence
  Description of Artificial Sequence: Synthetic oligonucleotide
  Antisense strand to SEQ ID NO: 2033580
aucagaacuaaguauagaa

SEQ ID NO: 2033582 - RNA, 19 nt, Artificial Sequence
  Description of Artificial Sequence: Synthetic oligonucleotide
  Sense strand starting at position 1555 of SEQ ID NO: 1881297
ugaugauaccuuuauugua

SEQ ID NO: 2033583 - RNA, 19 nt, Artificial Sequence
  Description of Artificial Sequence: Synthetic oligonucleotide
  Antisense strand to SEQ ID NO: 2033582
uacaauaaagguaucauca

SEQ ID NO: 2033584 - RNA, 19 nt, Artificial Sequence
  Description of Artificial Sequence: Synthetic oligonucleotide
  Sense strand starting at position 1634 of SEQ ID NO: 1881297
guugaaacaucugcaaaua

SEQ ID NO: 2033585 - RNA, 19 nt, Artificial Sequence
  Description of Artificial Sequence: Synthetic oligonucleotide
  Antisense strand to SEQ ID NO: 2033584
uauuugcagauguuucaac

SEQ ID NO: 2033586 - RNA, 19 nt, Artificial Sequence
  Description of Artificial Sequence: Synthetic oligonucleotide
  Sense strand starting at position 1784 of SEQ ID NO: 1881297
auuagaaugggagguuagu

SEQ ID NO: 2033587 - RNA, 19 nt, Artificial Sequence
  Description of Artificial Sequence: Synthetic oligonucleotide
  Antisense strand to SEQ ID NO: 2033586
acuaaccucccauucuaau

SEQ ID NO: 2033588 - RNA, 19 nt, Artificial Sequence
  Description of Artificial Sequence: Synthetic oligonucleotide
  Sense strand starting at position 1790 of SEQ ID NO: 1881297
augggagguuaguucuuau

SEQ ID NO: 2033589 - RNA, 19 nt, Artificial Sequence
  Description of Artificial Sequence: Synthetic oligonucleotide
  Antisense strand to SEQ ID NO: 2033588
auaagaacuaaccucccau

SEQ ID NO: 2033590 - RNA, 19 nt, Artificial Sequence
  Description of Artificial Sequence: Synthetic oligonucleotide
  Sense strand starting at position 1854 of SEQ ID NO: 1881297
aucacuuauuggguaguau

SEQ ID NO: 2033591 - RNA, 19 nt, Artificial Sequence
  Description of Artificial Sequence: Synthetic oligonucleotide
  Antisense strand to SEQ ID NO: 2033590
auacuacccaauaagugau

SEQ ID NO: 2033592 - RNA, 19 nt, Artificial Sequence
  Description of Artificial Sequence: Synthetic oligonucleotide
  Sense strand starting at position 1855 of SEQ ID NO: 1881297
ucacuuauuggguaguaug

SEQ ID NO: 2033593 - RNA, 19 nt, Artificial Sequence
  Description of Artificial Sequence: Synthetic oligonucleotide
  Antisense strand to SEQ ID NO: 2033592
cauacuacccaauaaguga

SEQ ID NO: 2033594 - RNA, 19 nt, Artificial Sequence
  Description of Artificial Sequence: Synthetic oligonucleotide
  Sense strand starting at position 1867 of SEQ ID NO: 1881297
uaguaugagcaaugcaaau

SEQ ID NO: 2033595 - RNA, 19 nt, Artificial Sequence
  Description of Artificial Sequence: Synthetic oligonucleotide
  Antisense strand to SEQ ID NO: 2033594
auuugcauugcucauacua

SEQ ID NO: 2033596 - RNA, 19 nt, Artificial Sequence
  Description of Artificial Sequence: Synthetic oligonucleotide
  Sense strand starting at position 2000 of SEQ ID NO: 1881297
aucuucuaugaguaaaguu

SEQ ID NO: 2033597 - RNA, 19 nt, Artificial Sequence
  Description of Artificial Sequence: Synthetic oligonucleotide
  Antisense strand to SEQ ID NO: 2033596
aacuuuacucauagaagau

SEQ ID NO: 2033598 - RNA, 19 nt, Artificial Sequence
  Description of Artificial Sequence: Synthetic oligonucleotide
  Sense strand starting at position 2249 of SEQ ID NO: 1881297
ucuuuaggccuuuauguua

SEQ ID NO: 2033599 - RNA, 19 nt, Artificial Sequence
  Description of Artificial Sequence: Synthetic oligonucleotide
  Antisense strand to SEQ ID NO: 2033598
uaacauaaaggccuaaaga

SEQ ID NO: 2033600 - RNA, 19 nt, Artificial Sequence
  Description of Artificial Sequence: Synthetic oligonucleotide
  Sense strand starting at position 2284 of SEQ ID NO: 1881297
guuuaacuauugcuaggaa

SEQ ID NO: 2033601 - RNA, 19 nt, Artificial Sequence
  Description of Artificial Sequence: Synthetic oligonucleotide
  Antisense strand to SEQ ID NO: 2033600
uuccuagcaauaguuaaac

SEQ ID NO: 2033602 - RNA, 19 nt, Artificial Sequence
  Description of Artificial Sequence: Synthetic oligonucleotide
  Sense strand starting at position 2323 of SEQ ID NO: 1881297
guuaauccaguuggaucau

SEQ ID NO: 2033603 - RNA, 19 nt, Artificial Sequence
  Description of Artificial Sequence: Synthetic oligonucleotide
  Antisense strand to SEQ ID NO: 2033602
augauccaacuggauuaac

SEQ ID NO: 2033604 - RNA, 19 nt, Artificial Sequence
  Description of Artificial Sequence: Synthetic oligonucleotide
  Sense strand starting at position 2357 of SEQ ID NO: 1881297
agauauuaacugcaaguuu

SEQ ID NO: 2033605 - RNA, 19 nt, Artificial Sequence
  Description of Artificial Sequence: Synthetic oligonucleotide
  Antisense strand to SEQ ID NO: 2033604
aaacuugcaguuaauaucu

SEQ ID NO: 2033606 - RNA, 19 nt, Artificial Sequence
  Description of Artificial Sequence: Synthetic oligonucleotide
  Sense strand starting at position 2432 of SEQ ID NO: 1881297
gguuacauuuaugauaauc

SEQ ID NO: 2033607 - RNA, 19 nt, Artificial Sequence
  Description of Artificial Sequence: Synthetic oligonucleotide
  Antisense strand to SEQ ID NO: 2033606
gauuaucauaaauguaacc

SEQ ID NO: 2033608 - RNA, 19 nt, Artificial Sequence
  Description of Artificial Sequence: Synthetic oligonucleotide
  Sense strand starting at position 2465 of SEQ ID NO: 1881297
ucuaauuaaccuggaguug

SEQ ID NO: 2033609 - RNA, 19 nt, Artificial Sequence
  Description of Artificial Sequence: Synthetic oligonucleotide
  Antisense strand to SEQ ID NO: 2033608
caacuccagguuaauuaga

SEQ ID NO: 2033610 - RNA, 19 nt, Artificial Sequence
  Description of Artificial Sequence: Synthetic oligonucleotide
  Sense strand starting at position 2466 of SEQ ID NO: 1881297
cuaauuaaccuggaguugu

SEQ ID NO: 2033611 - RNA, 19 nt, Artificial Sequence
  Description of Artificial Sequence: Synthetic oligonucleotide
  Antisense strand to SEQ ID NO: 2033610
acaacuccagguuaauuag

SEQ ID NO: 2033612 - RNA, 19 nt, Artificial Sequence
  Description of Artificial Sequence: Synthetic oligonucleotide
  Sense strand starting at position 2474 of SEQ ID NO: 1881297
ccuggaguuguugagcaau

SEQ ID NO: 2033613 - RNA, 19 nt, Artificial Sequence
  Description of Artificial Sequence: Synthetic oligonucleotide
  Antisense strand to SEQ ID NO: 2033612
auugcucaacaacuccagg

SEQ ID NO: 2033614 - RNA, 19 nt, Artificial Sequence
  Description of Artificial Sequence: Synthetic oligonucleotide
  Sense strand starting at position 2476 of SEQ ID NO: 1881297
uggaguuguugagcaauaa

SEQ ID NO: 2033615 - RNA, 19 nt, Artificial Sequence
  Description of Artificial Sequence: Synthetic oligonucleotide
  Antisense strand to SEQ ID NO: 2033614
uuauugcucaacaacucca

SEQ ID NO: 2033616 - RNA, 19 nt, Artificial Sequence
  Description of Artificial Sequence: Synthetic oligonucleotide
  Sense strand starting at position 2477 of SEQ ID NO: 1881297
ggaguuguugagcaauaau

SEQ ID NO: 2033617 - RNA, 19 nt, Artificial Sequence
  Description of Artificial Sequence: Synthetic oligonucleotide
  Antisense strand to SEQ ID NO: 2033616
auuauugcucaacaacucc

SEQ ID NO: 2033618 - RNA, 19 nt, Artificial Sequence
  Description of Artificial Sequence: Synthetic oligonucleotide
  Sense strand starting at position 2695 of SEQ ID NO: 1881297
acguaaugucaacagacca

SEQ ID NO: 2033619 - RNA, 19 nt, Artificial Sequence
  Description of Artificial Sequence: Synthetic oligonucleotide
  Antisense strand to SEQ ID NO: 2033618
uggucuguugacauuacgu

SEQ ID NO: 2033620 - RNA, 19 nt, Artificial Sequence
  Description of Artificial Sequence: Synthetic oligonucleotide
  Sense strand starting at position 2818 of SEQ ID NO: 1881297
acaaaugagcucggccaaa

SEQ ID NO: 2033621 - RNA, 19 nt, Artificial Sequence
  Description of Artificial Sequence: Synthetic oligonucleotide
  Antisense strand to SEQ ID NO: 2033620
uuuggccgagcucauuugu

SEQ ID NO: 2033622 - RNA, 19 nt, Artificial Sequence
  Description of Artificial Sequence: Synthetic oligonucleotide
  Sense strand starting at position 2910 of SEQ ID NO: 1881297
ugacaauucuuccuguuug

SEQ ID NO: 2033623 - RNA, 19 nt, Artificial Sequence
  Description of Artificial Sequence: Synthetic oligonucleotide
  Antisense strand to SEQ ID NO: 2033622
caaacaggaagaauuguca

SEQ ID NO: 2033624 - RNA, 19 nt, Artificial Sequence
  Description of Artificial Sequence: Synthetic oligonucleotide
  Sense strand starting at position 3037 of SEQ ID NO: 1881297
auuagacaucuuggaagcu

SEQ ID NO: 2033625 - RNA, 19 nt, Artificial Sequence
  Description of Artificial Sequence: Synthetic oligonucleotide
  Antisense strand to SEQ ID NO: 2033624
agcuuccaagaugucuaau

SEQ ID NO: 2033626 - RNA, 19 nt, Artificial Sequence
  Description of Artificial Sequence: Synthetic oligonucleotide
  Sense strand starting at position 3181 of SEQ ID NO: 1881297
ggguuagaugccugagaac

SEQ ID NO: 2033627 - RNA, 19 nt, Artificial Sequence
  Description of Artificial Sequence: Synthetic oligonucleotide
  Antisense strand to SEQ ID NO: 2033626
guucucaggcaucuaaccc

SEQ ID NO: 2033628 - RNA, 19 nt, Artificial Sequence
  Description of Artificial Sequence: Synthetic oligonucleotide
  Sense strand starting at position 3190 of SEQ ID NO: 1881297
gccugagaacucugaagaa

SEQ ID NO: 2033629 - RNA, 19 nt, Artificial Sequence
  Description of Artificial Sequence: Synthetic oligonucleotide
  Antisense strand to SEQ ID NO: 2033628
uucuucagaguucucaggc

SEQ ID NO: 2033630 - RNA, 19 nt, Artificial Sequence
  Description of Artificial Sequence: Synthetic oligonucleotide
  Sense strand starting at position 3700 of SEQ ID NO: 1881297
aguaaugugcauuaaauag

SEQ ID NO: 2033631 - RNA, 19 nt, Artificial Sequence
  Description of Artificial Sequence: Synthetic oligonucleotide
  Antisense strand to SEQ ID NO: 2033630
cuauuuaaugcacauuacu

SEQ ID NO: 2033632 - RNA, 19 nt, Artificial Sequence
  Description of Artificial Sequence: Synthetic oligonucleotide
  Sense strand starting at position 3822 of SEQ ID NO: 1881297
ugauuauaucgcuagacuu

SEQ ID NO: 2033633 - RNA, 19 nt, Artificial Sequence
  Description of Artificial Sequence: Synthetic oligonucleotide
  Antisense strand to SEQ ID NO: 2033632
aagucuagcgauauaauca

SEQ ID NO: 2033634 - RNA, 19 nt, Artificial Sequence
  Description of Artificial Sequence: Synthetic oligonucleotide
  Sense strand starting at position 3824 of SEQ ID NO: 1881297
auuauaucgcuagacuuuc

SEQ ID NO: 2033635 - RNA, 19 nt, Artificial Sequence
  Description of Artificial Sequence: Synthetic oligonucleotide
  Antisense strand to SEQ ID NO: 2033634
gaaagucuagcgauauaau

SEQ ID NO: 2033636 - RNA, 19 nt, Artificial Sequence
  Description of Artificial Sequence: Synthetic oligonucleotide
  Sense strand starting at position 3857 of SEQ ID NO: 1881297
agacaauuauaccaagaag

SEQ ID NO: 2033637 - RNA, 19 nt, Artificial Sequence
  Description of Artificial Sequence: Synthetic oligonucleotide
  Antisense strand to SEQ ID NO: 2033636
cuucuugguauaauugucu

SEQ ID NO: 2033638 - RNA, 19 nt, Artificial Sequence
  Description of Artificial Sequence: Synthetic oligonucleotide
  Sense strand starting at position 3868 of SEQ ID NO: 1881297
ccaagaaggucccuuaucu

SEQ ID NO: 2033639 - RNA, 19 nt, Artificial Sequence
  Description of Artificial Sequence: Synthetic oligonucleotide
  Antisense strand to SEQ ID NO: 2033638
agauaagggaccuucuugg

SEQ ID NO: 2033640 - RNA, 19 nt, Artificial Sequence
  Description of Artificial Sequence: Synthetic oligonucleotide
  Sense strand starting at position 260 of SEQ ID NO: 1881298
gauuauguaagcgagcuga

SEQ ID NO: 2033641 - RNA, 19 nt, Artificial Sequence
  Description of Artificial Sequence: Synthetic oligonucleotide
  Antisense strand to SEQ ID NO: 2033640
ucagcucgcuuacauaauc

SEQ ID NO: 2033642 - RNA, 19 nt, Artificial Sequence
  Description of Artificial Sequence: Synthetic oligonucleotide
  Sense strand starting at position 264 of SEQ ID NO: 1881298
auguaagcgagcugauuau

SEQ ID NO: 2033643 - RNA, 19 nt, Artificial Sequence
  Description of Artificial Sequence: Synthetic oligonucleotide
  Antisense strand to SEQ ID NO: 2033642
auaaucagcucgcuuacau

SEQ ID NO: 2033644 - RNA, 19 nt, Artificial Sequence
  Description of Artificial Sequence: Synthetic oligonucleotide
  Sense strand starting at position 268 of SEQ ID NO: 1881298
aagcgagcugauuaugcaa

SEQ ID NO: 2033645 - RNA, 19 nt, Artificial Sequence
  Description of Artificial Sequence: Synthetic oligonucleotide
  Antisense strand to SEQ ID NO: 2033644
uugcauaaucagcucgcuu

SEQ ID NO: 2033646 - RNA, 19 nt, Artificial Sequence
  Description of Artificial Sequence: Synthetic oligonucleotide
  Sense strand starting at position 271 of SEQ ID NO: 1881298
cgagcugauuaugcaacua

SEQ ID NO: 2033647 - RNA, 19 nt, Artificial Sequence
  Description of Artificial Sequence: Synthetic oligonucleotide
  Antisense strand to SEQ ID NO: 2033646
uaguugcauaaucagcucg

SEQ ID NO: 2033648 - RNA, 19 nt, Artificial Sequence
  Description of Artificial Sequence: Synthetic oligonucleotide
  Sense strand starting at position 284 of SEQ ID NO: 1881298
caacuaagagugugguaaa

SEQ ID NO: 2033649 - RNA, 19 nt, Artificial Sequence
  Description of Artificial Sequence: Synthetic oligonucleotide
  Antisense strand to SEQ ID NO: 2033648
uuuaccacacucuuaguug

SEQ ID NO: 2033650 - RNA, 19 nt, Artificial Sequence
  Description of Artificial Sequence: Synthetic oligonucleotide
  Sense strand starting at position 287 of SEQ ID NO: 1881298
cuaagagugugguaaauau

SEQ ID NO: 2033651 - RNA, 19 nt, Artificial Sequence
  Description of Artificial Sequence: Synthetic oligonucleotide
  Antisense strand to SEQ ID NO: 2033650
auauuuaccacacucuuag

SEQ ID NO: 2033652 - RNA, 19 nt, Artificial Sequence
  Description of Artificial Sequence: Synthetic oligonucleotide
  Sense strand starting at position 348 of SEQ ID NO: 1881298
gguuguuuguggaguaaca

SEQ ID NO: 2033653 - RNA, 19 nt, Artificial Sequence
  Description of Artificial Sequence: Synthetic oligonucleotide
  Antisense strand to SEQ ID NO: 2033652
uguuacuccacaaacaacc

SEQ ID NO: 2033654 - RNA, 19 nt, Artificial Sequence
  Description of Artificial Sequence: Synthetic oligonucleotide
  Sense strand starting at position 350 of SEQ ID NO: 1881298
uuguuuguggaguaacaaa

SEQ ID NO: 2033655 - RNA, 19 nt, Artificial Sequence
  Description of Artificial Sequence: Synthetic oligonucleotide
  Antisense strand to SEQ ID NO: 2033654
uuuguuacuccacaaacaa

SEQ ID NO: 2033656 - RNA, 19 nt, Artificial Sequence
  Description of Artificial Sequence: Synthetic oligonucleotide
  Sense strand starting at position 475 of SEQ ID NO: 1881298
guccucaguccagauauaa

SEQ ID NO: 2033657 - RNA, 19 nt, Artificial Sequence
  Description of Artificial Sequence: Synthetic oligonucleotide
  Antisense strand to SEQ ID NO: 2033656
uuauaucuggacugaggac

SEQ ID NO: 2033658 - RNA, 19 nt, Artificial Sequence
  Description of Artificial Sequence: Synthetic oligonucleotide
  Sense strand starting at position 669 of SEQ ID NO: 1881298
gcgcacguuugaucuaauu

SEQ ID NO: 2033659 - RNA, 19 nt, Artificial Sequence
  Description of Artificial Sequence: Synthetic oligonucleotide
  Antisense strand to SEQ ID NO: 2033658
aauuagaucaaacgugcgc

SEQ ID NO: 2033660 - RNA, 19 nt, Artificial Sequence
  Description of Artificial Sequence: Synthetic oligonucleotide
  Sense strand starting at position 671 of SEQ ID NO: 1881298
gcacguuugaucuaauugu

SEQ ID NO: 2033661 - RNA, 19 nt, Artificial Sequence
  Description of Artificial Sequence: Synthetic oligonucleotide
  Antisense strand to SEQ ID NO: 2033660
acaauuagaucaaacgugc

SEQ ID NO: 2033662 - RNA, 19 nt, Artificial Sequence
  Description of Artificial Sequence: Synthetic oligonucleotide
  Sense strand starting at position 678 of SEQ ID NO: 1881298
ugaucuaauuguguaagag

SEQ ID NO: 2033663 - RNA, 19 nt, Artificial Sequence
  Description of Artificial Sequence: Synthetic oligonucleotide
  Antisense strand to SEQ ID NO: 2033662
cucuuacacaauuagauca

SEQ ID NO: 2033664 - RNA, 19 nt, Artificial Sequence
  Description of Artificial Sequence: Synthetic oligonucleotide
  Sense strand starting at position 679 of SEQ ID NO: 1881298
gaucuaauuguguaagagc

SEQ ID NO: 2033665 - RNA, 19 nt, Artificial Sequence
  Description of Artificial Sequence: Synthetic oligonucleotide
  Antisense strand to SEQ ID NO: 2033664
gcucuuacacaauuagauc

SEQ ID NO: 2033666 - RNA, 19 nt, Artificial Sequence
  Description of Artificial Sequence: Synthetic oligonucleotide
  Sense strand starting at position 687 of SEQ ID NO: 1881298
uguguaagagcuugcuaaa

SEQ ID NO: 2033667 - RNA, 19 nt, Artificial Sequence
  Description of Artificial Sequence: Synthetic oligonucleotide
  Antisense strand to SEQ ID NO: 2033666
uuuagcaagcucuuacaca

SEQ ID NO: 2033668 - RNA, 19 nt, Artificial Sequence
  Description of Artificial Sequence: Synthetic oligonucleotide
  Sense strand starting at position 705 of SEQ ID NO: 1881298
aucaguuacuacuugaaag

SEQ ID NO: 2033669 - RNA, 19 nt, Artificial Sequence
  Description of Artificial Sequence: Synthetic oligonucleotide
  Antisense strand to SEQ ID NO: 2033668
cuuucaaguaguaacugau

SEQ ID NO: 2033670 - RNA, 19 nt, Artificial Sequence
  Description of Artificial Sequence: Synthetic oligonucleotide
  Sense strand starting at position 742 of SEQ ID NO: 1881298
cugaaacuucuagacuguu

SEQ ID NO: 2033671 - RNA, 19 nt, Artificial Sequence
  Description of Artificial Sequence: Synthetic oligonucleotide
  Antisense strand to SEQ ID NO: 2033670
aacagucuagaaguuucag

SEQ ID NO: 2033672 - RNA, 19 nt, Artificial Sequence
  Description of Artificial Sequence: Synthetic oligonucleotide
  Sense strand starting at position 750 of SEQ ID NO: 1881298
ucuagacuguuucuagcau

SEQ ID NO: 2033673 - RNA, 19 nt, Artificial Sequence
  Description of Artificial Sequence: Synthetic oligonucleotide
  Antisense strand to SEQ ID NO: 2033672
augcuagaaacagucuaga

SEQ ID NO: 2033674 - RNA, 19 nt, Artificial Sequence
  Description of Artificial Sequence: Synthetic oligonucleotide
  Sense strand starting at position 796 of SEQ ID NO: 1881298
acugaaugauauccuaguu

SEQ ID NO: 2033675 - RNA, 19 nt, Artificial Sequence
  Description of Artificial Sequence: Synthetic oligonucleotide
  Antisense strand to SEQ ID NO: 2033674
aacuaggauaucauucagu

SEQ ID NO: 2033676 - RNA, 19 nt, Artificial Sequence
  Description of Artificial Sequence: Synthetic oligonucleotide
  Sense strand starting at position 890 of SEQ ID NO: 1881298
augugcaguagcgaugaaa

SEQ ID NO: 2033677 - RNA, 19 nt, Artificial Sequence
  Description of Artificial Sequence: Synthetic oligonucleotide
  Antisense strand to SEQ ID NO: 2033676
uuucaucgcuacugcacau

SEQ ID NO: 2033678 - RNA, 19 nt, Artificial Sequence
  Description of Artificial Sequence: Synthetic oligonucleotide
  Sense strand starting at position 893 of SEQ ID NO: 1881298
ugcaguagcgaugaaagua

SEQ ID NO: 2033679 - RNA, 19 nt, Artificial Sequence
  Description of Artificial Sequence: Synthetic oligonucleotide
  Antisense strand to SEQ ID NO: 2033678
uacuuucaucgcuacugca

SEQ ID NO: 2033680 - RNA, 19 nt, Artificial Sequence
  Description of Artificial Sequence: Synthetic oligonucleotide
  Sense strand starting at position 1275 of SEQ ID NO: 1881298
ucauucuuccaguguuccu

SEQ ID NO: 2033681 - RNA, 19 nt, Artificial Sequence
  Description of Artificial Sequence: Synthetic oligonucleotide
  Antisense strand to SEQ ID NO: 2033680
aggaacacuggaagaauga

SEQ ID NO: 2033682 - RNA, 19 nt, Artificial Sequence
  Description of Artificial Sequence: Synthetic oligonucleotide
  Sense strand starting at position 1317 of SEQ ID NO: 1881298
ccagguacuucugauuaau

SEQ ID NO: 2033683 - RNA, 19 nt, Artificial Sequence
  Description of Artificial Sequence: Synthetic oligonucleotide
  Antisense strand to SEQ ID NO: 2033682
auuaaucagaaguaccugg

SEQ ID NO: 2033684 - RNA, 19 nt, Artificial Sequence
  Description of Artificial Sequence: Synthetic oligonucleotide
  Sense strand starting at position 1319 of SEQ ID NO: 1881298
agguacuucugauuaauua

SEQ ID NO: 2033685 - RNA, 19 nt, Artificial Sequence
  Description of Artificial Sequence: Synthetic oligonucleotide
  Antisense strand to SEQ ID NO: 2033684
uaauuaaucagaaguaccu

SEQ ID NO: 2033686 - RNA, 19 nt, Artificial Sequence
  Description of Artificial Sequence: Synthetic oligonucleotide
  Sense strand starting at position 1320 of SEQ ID NO: 1881298
gguacuucugauuaauuac

SEQ ID NO: 2033687 - RNA, 19 nt, Artificial Sequence
  Description of Artificial Sequence: Synthetic oligonucleotide
  Antisense strand to SEQ ID NO: 2033686
guaauuaaucagaaguacc

SEQ ID NO: 2033688 - RNA, 19 nt, Artificial Sequence
  Description of Artificial Sequence: Synthetic oligonucleotide
  Sense strand starting at position 1678 of SEQ ID NO: 1881298
gguucuuucggacaggaca

SEQ ID NO: 2033689 - RNA, 19 nt, Artificial Sequence
  Description of Artificial Sequence: Synthetic oligonucleotide
  Antisense strand to SEQ ID NO: 2033688
uguccuguccgaaagaacc

SEQ ID NO: 2033690 - RNA, 19 nt, Artificial Sequence
  Description of Artificial Sequence: Synthetic oligonucleotide
  Sense strand starting at position 1758 of SEQ ID NO: 1881298
caacuaagccuucguguag

SEQ ID NO: 2033691 - RNA, 19 nt, Artificial Sequence
  Description of Artificial Sequence: Synthetic oligonucleotide
  Antisense strand to SEQ ID NO: 2033690
cuacacgaaggcuuaguug

SEQ ID NO: 2033692 - RNA, 19 nt, Artificial Sequence
  Description of Artificial Sequence: Synthetic oligonucleotide
  Sense strand starting at position 1759 of SEQ ID NO: 1881298
aacuaagccuucguguagu

SEQ ID NO: 2033693 - RNA, 19 nt, Artificial Sequence
  Description of Artificial Sequence: Synthetic oligonucleotide
  Antisense strand to SEQ ID NO: 2033692
acuacacgaaggcuuaguu

SEQ ID NO: 2033694 - RNA, 19 nt, Artificial Sequence
  Description of Artificial Sequence: Synthetic oligonucleotide
  Sense strand starting at position 1941 of SEQ ID NO: 1881298
cggcgaccuccggagauua

SEQ ID NO: 2033695 - RNA, 19 nt, Artificial Sequence
  Description of Artificial Sequence: Synthetic oligonucleotide
  Antisense strand to SEQ ID NO: 2033694
uaaucuccggaggucgccg

SEQ ID NO: 2033696 - RNA, 19 nt, Artificial Sequence
  Description of Artificial Sequence: Synthetic oligonucleotide
  Sense strand starting at position 2072 of SEQ ID NO: 1881298
guggcugucggguuucgaa

SEQ ID NO: 2033697 - RNA, 19 nt, Artificial Sequence
  Description of Artificial Sequence: Synthetic oligonucleotide
  Antisense strand to SEQ ID NO: 2033696
uucgaaacccgacagccac

SEQ ID NO: 2033698 - RNA, 19 nt, Artificial Sequence
  Description of Artificial Sequence: Synthetic oligonucleotide
  Sense strand starting at position 2517 of SEQ ID NO: 1881298
cgcagcgcugccuauuaau

SEQ ID NO: 2033699 - RNA, 19 nt, Artificial Sequence
  Description of Artificial Sequence: Synthetic oligonucleotide
  Antisense strand to SEQ ID NO: 2033698
auuaauaggcagcgcugcg

SEQ ID NO: 2033700 - RNA, 19 nt, Artificial Sequence
  Description of Artificial Sequence: Synthetic oligonucleotide
  Sense strand starting at position 3006 of SEQ ID NO: 1881298
ugcuguuccugagcaaguu

SEQ ID NO: 2033701 - RNA, 19 nt, Artificial Sequence
  Description of Artificial Sequence: Synthetic oligonucleotide
  Antisense strand to SEQ ID NO: 2033700
aacuugcucaggaacagca

SEQ ID NO: 2033702 - RNA, 19 nt, Artificial Sequence
  Description of Artificial Sequence: Synthetic oligonucleotide
  Sense strand starting at position 3018 of SEQ ID NO: 1881298
gcaaguucugccgucuguu

SEQ ID NO: 2033703 - RNA, 19 nt, Artificial Sequence
  Description of Artificial Sequence: Synthetic oligonucleotide
  Antisense strand to SEQ ID NO: 2033702
aacagacggcagaacuugc

SEQ ID NO: 2033704 - RNA, 19 nt, Artificial Sequence
  Description of Artificial Sequence: Synthetic oligonucleotide
  Sense strand starting at position 3462 of SEQ ID NO: 1881298
ucgucaugccgcucagcau

SEQ ID NO: 2033705 - RNA, 19 nt, Artificial Sequence
  Description of Artificial Sequence: Synthetic oligonucleotide
  Antisense strand to SEQ ID NO: 2033704
augcugagcggcaugacga

SEQ ID NO: 2033706 - RNA, 19 nt, Artificial Sequence
  Description of Artificial Sequence: Synthetic oligonucleotide
  Sense strand starting at position 3488 of SEQ ID NO: 1881298
cccauuaugcucgagagcu

SEQ ID NO: 2033707 - RNA, 19 nt, Artificial Sequence
  Description of Artificial Sequence: Synthetic oligonucleotide
  Antisense strand to SEQ ID NO: 2033706
agcucucgagcauaauggg

SEQ ID NO: 2033708 - RNA, 19 nt, Artificial Sequence
  Description of Artificial Sequence: Synthetic oligonucleotide
  Sense strand starting at position 3694 of SEQ ID NO: 1881298
ccagguguacuacguagaa

SEQ ID NO: 2033709 - RNA, 19 nt, Artificial Sequence
  Description of Artificial Sequence: Synthetic oligonucleotide
  Antisense strand to SEQ ID NO: 2033708
uucuacguaguacaccugg

SEQ ID NO: 2033710 - RNA, 19 nt, Artificial Sequence
  Description of Artificial Sequence: Synthetic oligonucleotide
  Sense strand starting at position 3696 of SEQ ID NO: 1881298
agguguacuacguagaaga

SEQ ID NO: 2033711 - RNA, 19 nt, Artificial Sequence
  Description of Artificial Sequence: Synthetic oligonucleotide
  Antisense strand to SEQ ID NO: 2033710
ucuucuacguaguacaccu

SEQ ID NO: 2033712 - RNA, 19 nt, Artificial Sequence
  Description of Artificial Sequence: Synthetic oligonucleotide
  Sense strand starting at position 3832 of SEQ ID NO: 1881298
cuccgaauucugcaguaaa

SEQ ID NO: 2033713 - RNA, 19 nt, Artificial Sequence
  Description of Artificial Sequence: Synthetic oligonucleotide
  Antisense strand to SEQ ID NO: 2033712
uuuacugcagaauucggag

SEQ ID NO: 2033714 - RNA, 19 nt, Artificial Sequence
  Description of Artificial Sequence: Synthetic oligonucleotide
  Sense strand starting at position 3885 of SEQ ID NO: 1881298
cgcccaucuguuuggaguu

SEQ ID NO: 2033715 - RNA, 19 nt, Artificial Sequence
  Description of Artificial Sequence: Synthetic oligonucleotide
  Antisense strand to SEQ ID NO: 2033714
aacuccaaacagaugggcg

SEQ ID NO: 2033716 - RNA, 19 nt, Artificial Sequence
  Description of Artificial Sequence: Synthetic oligonucleotide
  Sense strand starting at position 3899 of SEQ ID NO: 1881298
gaguuucuguuguugcuau

SEQ ID NO: 2033717 - RNA, 19 nt, Artificial Sequence
  Description of Artificial Sequence: Synthetic oligonucleotide
  Antisense strand to SEQ ID NO: 2033716
auagcaacaacagaaacuc

SEQ ID NO: 2033718 - RNA, 19 nt, Artificial Sequence
  Description of Artificial Sequence: Synthetic oligonucleotide
  Sense strand starting at position 3948 of SEQ ID NO: 1881298
uucuucuuugcucaaggaa

SEQ ID NO: 2033719 - RNA, 19 nt, Artificial Sequence
  Description of Artificial Sequence: Synthetic oligonucleotide
  Antisense strand to SEQ ID NO: 2033718
uuccuugagcaaagaagaa

SEQ ID NO: 2033720 - RNA, 19 nt, Artificial Sequence
  Description of Artificial Sequence: Synthetic oligonucleotide
  Sense strand starting at position 195 of SEQ ID NO: 1881299
gagguaugauuguaaauuu

SEQ ID NO: 2033721 - RNA, 19 nt, Artificial Sequence
  Description of Artificial Sequence: Synthetic oligonucleotide
  Antisense strand to SEQ ID NO: 2033720
aaauuuacaaucauaccuc

SEQ ID NO: 2033722 - RNA, 19 nt, Artificial Sequence
  Description of Artificial Sequence: Synthetic oligonucleotide
  Sense strand starting at position 203 of SEQ ID NO: 1881299
auuguaaauuuauggguga

SEQ ID NO: 2033723 - RNA, 19 nt, Artificial Sequence
  Description of Artificial Sequence: Synthetic oligonucleotide
  Antisense strand to SEQ ID NO: 2033722
ucacccauaaauuuacaau

SEQ ID NO: 2033724 - RNA, 19 nt, Artificial Sequence
  Description of Artificial Sequence: Synthetic oligonucleotide
  Sense strand starting at position 204 of SEQ ID NO: 1881299
uuguaaauuuaugggugaa

SEQ ID NO: 2033725 - RNA, 19 nt, Artificial Sequence
  Description of Artificial Sequence: Synthetic oligonucleotide
  Antisense strand to SEQ ID NO: 2033724
uucacccauaaauuuacaa

SEQ ID NO: 2033726 - RNA, 19 nt, Artificial Sequence
  Description of Artificial Sequence: Synthetic oligonucleotide
  Sense strand starting at position 252 of SEQ ID NO: 1881299
ggucaaauguuauucugaa

SEQ ID NO: 2033727 - RNA, 19 nt, Artificial Sequence
  Description of Artificial Sequence: Synthetic oligonucleotide
  Antisense strand to SEQ ID NO: 2033726
uucagaauaacauuugacc

SEQ ID NO: 2033728 - RNA, 19 nt, Artificial Sequence
  Description of Artificial Sequence: Synthetic oligonucleotide
  Sense strand starting at position 253 of SEQ ID NO: 1881299
gucaaauguuauucugaau

SEQ ID NO: 2033729 - RNA, 19 nt, Artificial Sequence
  Description of Artificial Sequence: Synthetic oligonucleotide
  Antisense strand to SEQ ID NO: 2033728
auucagaauaacauuugac

SEQ ID NO: 2033730 - RNA, 19 nt, Artificial Sequence
  Description of Artificial Sequence: Synthetic oligonucleotide
  Sense strand starting at position 259 of SEQ ID NO: 1881299
uguuauucugaaugucucu

SEQ ID NO: 2033731 - RNA, 19 nt, Artificial Sequence
  Description of Artificial Sequence: Synthetic oligonucleotide
  Antisense strand to SEQ ID NO: 2033730
agagacauucagaauaaca

SEQ ID NO: 2033732 - RNA, 19 nt, Artificial Sequence
  Description of Artificial Sequence: Synthetic oligonucleotide
  Sense strand starting at position 264 of SEQ ID NO: 1881299
uucugaaugucucugugaa

SEQ ID NO: 2033733 - RNA, 19 nt, Artificial Sequence
  Description of Artificial Sequence: Synthetic oligonucleotide
  Antisense strand to SEQ ID NO: 2033732
uucacagagacauucagaa

SEQ ID NO: 2033734 - RNA, 19 nt, Artificial Sequence
  Description of Artificial Sequence: Synthetic oligonucleotide
  Sense strand starting at position 265 of SEQ ID NO: 1881299
ucugaaugucucugugaag

SEQ ID NO: 2033735 - RNA, 19 nt, Artificial Sequence
  Description of Artificial Sequence: Synthetic oligonucleotide
  Antisense strand to SEQ ID NO: 2033734
cuucacagagacauucaga

SEQ ID NO: 2033736 - RNA, 19 nt, Artificial Sequence
  Description of Artificial Sequence: Synthetic oligonucleotide
  Sense strand starting at position 284 of SEQ ID NO: 1881299
guggucuugcgauaaugug

SEQ ID NO: 2033737 - RNA, 19 nt, Artificial Sequence
  Description of Artificial Sequence: Synthetic oligonucleotide
  Antisense strand to SEQ ID NO: 2033736
cacauuaucgcaagaccac

SEQ ID NO: 2033738 - RNA, 19 nt, Artificial Sequence
  Description of Artificial Sequence: Synthetic oligonucleotide
  Sense strand starting at position 300 of SEQ ID NO: 1881299
gugggugugccucaaccaa

SEQ ID NO: 2033739 - RNA, 19 nt, Artificial Sequence
  Description of Artificial Sequence: Synthetic oligonucleotide
  Antisense strand to SEQ ID NO: 2033738
uugguugaggcacacccac

SEQ ID NO: 2033740 - RNA, 19 nt, Artificial Sequence
  Description of Artificial Sequence: Synthetic oligonucleotide
  Sense strand starting at position 386 of SEQ ID NO: 1881299
agauuugaaucacagcauu

SEQ ID NO: 2033741 - RNA, 19 nt, Artificial Sequence
  Description of Artificial Sequence: Synthetic oligonucleotide
  Antisense strand to SEQ ID NO: 2033740
aaugcugugauucaaaucu

SEQ ID NO: 2033742 - RNA, 19 nt, Artificial Sequence
  Description of Artificial Sequence: Synthetic oligonucleotide
  Sense strand starting at position 406 of SEQ ID NO: 1881299
gcucuugucugggucucua

SEQ ID NO: 2033743 - RNA, 19 nt, Artificial Sequence
  Description of Artificial Sequence: Synthetic oligonucleotide
  Antisense strand to SEQ ID NO: 2033742
uagagacccagacaagagc

SEQ ID NO: 2033744 - RNA, 19 nt, Artificial Sequence
  Description of Artificial Sequence: Synthetic oligonucleotide
  Sense strand starting at position 794 of SEQ ID NO: 1881299
uuaccuuuccagugaagag

SEQ ID NO: 2033745 - RNA, 19 nt, Artificial Sequence
  Description of Artificial Sequence: Synthetic oligonucleotide
  Antisense strand to SEQ ID NO: 2033744
cucuucacuggaaagguaa

SEQ ID NO: 2033746 - RNA, 19 nt, Artificial Sequence
  Description of Artificial Sequence: Synthetic oligonucleotide
  Sense strand starting at position 843 of SEQ ID NO: 1881299
guauauugguaugcugagu

SEQ ID NO: 2033747 - RNA, 19 nt, Artificial Sequence
  Description of Artificial Sequence: Synthetic oligonucleotide
  Antisense strand to SEQ ID NO: 2033746
acucagcauaccaauauac

SEQ ID NO: 2033748 - RNA, 19 nt, Artificial Sequence
  Description of Artificial Sequence: Synthetic oligonucleotide
  Sense strand starting at position 913 of SEQ ID NO: 1881299
cuuugaaaucacugaguuu

SEQ ID NO: 2033749 - RNA, 19 nt, Artificial Sequence
  Description of Artificial Sequence: Synthetic oligonucleotide
  Antisense strand to SEQ ID NO: 2033748
aaacucagugauuucaaag

SEQ ID NO: 2033750 - RNA, 19 nt, Artificial Sequence
  Description of Artificial Sequence: Synthetic oligonucleotide
  Sense strand starting at position 2357 of SEQ ID NO: 1881299
ggcugcuauguauagaugu

SEQ ID NO: 2033751 - RNA, 19 nt, Artificial Sequence
  Description of Artificial Sequence: Synthetic oligonucleotide
  Antisense strand to SEQ ID NO: 2033750
acaucuauacauagcagcc

SEQ ID NO: 2033752 - RNA, 19 nt, Artificial Sequence
  Description of Artificial Sequence: Synthetic oligonucleotide
  Sense strand starting at position 2367 of SEQ ID NO: 1881299
uauagauguucucuagcag

SEQ ID NO: 2033753 - RNA, 19 nt, Artificial Sequence
  Description of Artificial Sequence: Synthetic oligonucleotide
  Antisense strand to SEQ ID NO: 2033752
cugcuagagaacaucuaua

SEQ ID NO: 2033754 - RNA, 19 nt, Artificial Sequence
  Description of Artificial Sequence: Synthetic oligonucleotide
  Sense strand starting at position 2448 of SEQ ID NO: 1881299
agcuaauuaugcuuuguac

SEQ ID NO: 2033755 - RNA, 19 nt, Artificial Sequence
  Description of Artificial Sequence: Synthetic oligonucleotide
  Antisense strand to SEQ ID NO: 2033754
guacaaagcauaauuagcu

SEQ ID NO: 2033756 - RNA, 19 nt, Artificial Sequence
  Description of Artificial Sequence: Synthetic oligonucleotide
  Sense strand starting at position 2675 of SEQ ID NO: 1881299
auaguuacacuuuguaacu

SEQ ID NO: 2033757 - RNA, 19 nt, Artificial Sequence
  Description of Artificial Sequence: Synthetic oligonucleotide
  Antisense strand to SEQ ID NO: 2033756
aguuacaaaguguaacuau

SEQ ID NO: 2033758 - RNA, 19 nt, Artificial Sequence
  Description of Artificial Sequence: Synthetic oligonucleotide
  Sense strand starting at position 2753 of SEQ ID NO: 1881299
gcauauaucccucauguca

SEQ ID NO: 2033759 - RNA, 19 nt, Artificial Sequence
  Description of Artificial Sequence: Synthetic oligonucleotide
  Antisense strand to SEQ ID NO: 2033758
ugacaugagggauauaugc

SEQ ID NO: 2033760 - RNA, 19 nt, Artificial Sequence
  Description of Artificial Sequence: Synthetic oligonucleotide
  Sense strand starting at position 3027 of SEQ ID NO: 1881299
uggcgcuuacuaugcaaau

SEQ ID NO: 2033761 - RNA, 19 nt, Artificial Sequence
  Description of Artificial Sequence: Synthetic oligonucleotide
  Antisense strand to SEQ ID NO: 2033760
auuugcauaguaagcgcca

SEQ ID NO: 2033762 - RNA, 19 nt, Artificial Sequence
  Description of Artificial Sequence: Synthetic oligonucleotide
  Sense strand starting at position 3028 of SEQ ID NO: 1881299
ggcgcuuacuaugcaaaug

SEQ ID NO: 2033763 - RNA, 19 nt, Artificial Sequence
  Description of Artificial Sequence: Synthetic oligonucleotide
  Antisense strand to SEQ ID NO: 2033762
cauuugcauaguaagcgcc

SEQ ID NO: 2033764 - RNA, 19 nt, Artificial Sequence
  Description of Artificial Sequence: Synthetic oligonucleotide
  Sense strand starting at position 3029 of SEQ ID NO: 1881299
gcgcuuacuaugcaaauga

SEQ ID NO: 2033765 - RNA, 19 nt, Artificial Sequence
  Description of Artificial Sequence: Synthetic oligonucleotide
  Antisense strand to SEQ ID NO: 2033764
ucauuugcauaguaagcgc

SEQ ID NO: 2033766 - RNA, 19 nt, Artificial Sequence
  Description of Artificial Sequence: Synthetic oligonucleotide
  Sense strand starting at position 3153 of SEQ ID NO: 1881299
auuaaagaguaugucaaca

SEQ ID NO: 2033767 - RNA, 19 nt, Artificial Sequence
  Description of Artificial Sequence: Synthetic oligonucleotide
  Antisense strand to SEQ ID NO: 2033766
uguugacauacucuuuaau

SEQ ID NO: 2033768 - RNA, 19 nt, Artificial Sequence
  Description of Artificial Sequence: Synthetic oligonucleotide
  Sense strand starting at position 3222 of SEQ ID NO: 1881299
ccaagugccucauuuguua

SEQ ID NO: 2033769 - RNA, 19 nt, Artificial Sequence
  Description of Artificial Sequence: Synthetic oligonucleotide
  Antisense strand to SEQ ID NO: 2033768
uaacaaaugaggcacuugg

SEQ ID NO: 2033770 - RNA, 19 nt, Artificial Sequence
  Description of Artificial Sequence: Synthetic oligonucleotide
  Sense strand starting at position 3230 of SEQ ID NO: 1881299
cucauuuguuagccuagua

SEQ ID NO: 2033771 - RNA, 19 nt, Artificial Sequence
  Description of Artificial Sequence: Synthetic oligonucleotide
  Antisense strand to SEQ ID NO: 2033770
uacuaggcuaacaaaugag

SEQ ID NO: 2033772 - RNA, 19 nt, Artificial Sequence
  Description of Artificial Sequence: Synthetic oligonucleotide
  Sense strand starting at position 3283 of SEQ ID NO: 1881299
guuugauugaaguggcuga

SEQ ID NO: 2033773 - RNA, 19 nt, Artificial Sequence
  Description of Artificial Sequence: Synthetic oligonucleotide
  Antisense strand to SEQ ID NO: 2033772
ucagccacuucaaucaaac

SEQ ID NO: 2033774 - RNA, 19 nt, Artificial Sequence
  Description of Artificial Sequence: Synthetic oligonucleotide
  Sense strand starting at position 3287 of SEQ ID NO: 1881299
gauugaaguggcugaagaa

SEQ ID NO: 2033775 - RNA, 19 nt, Artificial Sequence
  Description of Artificial Sequence: Synthetic oligonucleotide
  Antisense strand to SEQ ID NO: 2033774
uucuucagccacuucaauc

SEQ ID NO: 2033776 - RNA, 19 nt, Artificial Sequence
  Description of Artificial Sequence: Synthetic oligonucleotide
  Sense strand starting at position 3539 of SEQ ID NO: 1881299
acuauuagccuuuagguga

SEQ ID NO: 2033777 - RNA, 19 nt, Artificial Sequence
  Description of Artificial Sequence: Synthetic oligonucleotide
  Antisense strand to SEQ ID NO: 2033776
ucaccuaaaggcuaauagu

SEQ ID NO: 2033778 - RNA, 19 nt, Artificial Sequence
  Description of Artificial Sequence: Synthetic oligonucleotide
  Sense strand starting at position 3556 of SEQ ID NO: 1881299
gagaacagcugcuuaaagu

SEQ ID NO: 2033779 - RNA, 19 nt, Artificial Sequence
  Description of Artificial Sequence: Synthetic oligonucleotide
  Antisense strand to SEQ ID NO: 2033778
acuuuaagcagcuguucuc

SEQ ID NO: 2033780 - RNA, 19 nt, Artificial Sequence
  Description of Artificial Sequence: Synthetic oligonucleotide
  Sense strand starting at position 3819 of SEQ ID NO: 1881299
acugaauugacagguguua

SEQ ID NO: 2033781 - RNA, 19 nt, Artificial Sequence
  Description of Artificial Sequence: Synthetic oligonucleotide
  Antisense strand to SEQ ID NO: 2033780
uaacaccugucaauucagu

SEQ ID NO: 2033782 - RNA, 19 nt, Artificial Sequence
  Description of Artificial Sequence: Synthetic oligonucleotide
  Sense strand starting at position 3821 of SEQ ID NO: 1881299
ugaauugacagguguuauu

SEQ ID NO: 2033783 - RNA, 19 nt, Artificial Sequence
  Description of Artificial Sequence: Synthetic oligonucleotide
  Antisense strand to SEQ ID NO: 2033782
aauaacaccugucaauuca

SEQ ID NO: 2033784 - RNA, 19 nt, Artificial Sequence
  Description of Artificial Sequence: Synthetic oligonucleotide
  Sense strand starting at position 3824 of SEQ ID NO: 1881299
auugacagguguuauugau

SEQ ID NO: 2033785 - RNA, 19 nt, Artificial Sequence
  Description of Artificial Sequence: Synthetic oligonucleotide
  Antisense strand to SEQ ID NO: 2033784
aucaauaacaccugucaau

SEQ ID NO: 2033786 - RNA, 19 nt, Artificial Sequence
  Description of Artificial Sequence: Synthetic oligonucleotide
  Sense strand starting at position 3836 of SEQ ID NO: 1881299
uauugauguugcucauuug

SEQ ID NO: 2033787 - RNA, 19 nt, Artificial Sequence
  Description of Artificial Sequence: Synthetic oligonucleotide
  Antisense strand to SEQ ID NO: 2033786
caaaugagcaacaucaaua

SEQ ID NO: 2033788 - RNA, 19 nt, Artificial Sequence
  Description of Artificial Sequence: Synthetic oligonucleotide
  Sense strand starting at position 3844 of SEQ ID NO: 1881299
uugcucauuuguuccuaua

SEQ ID NO: 2033789 - RNA, 19 nt, Artificial Sequence
  Description of Artificial Sequence: Synthetic oligonucleotide
  Antisense strand to SEQ ID NO: 2033788
uauaggaacaaaugagcaa

SEQ ID NO: 2033790 - RNA, 19 nt, Artificial Sequence
  Description of Artificial Sequence: Synthetic oligonucleotide
  Sense strand starting at position 3846 of SEQ ID NO: 1881299
gcucauuuguuccuauaua

SEQ ID NO: 2033791 - RNA, 19 nt, Artificial Sequence
  Description of Artificial Sequence: Synthetic oligonucleotide
  Antisense strand to SEQ ID NO: 2033790
uauauaggaacaaaugagc

SEQ ID NO: 2033792 - RNA, 19 nt, Artificial Sequence
  Description of Artificial Sequence: Synthetic oligonucleotide
  Sense strand starting at position 3918 of SEQ ID NO: 1881299
ugaaacagcugagaauauu

SEQ ID NO: 2033793 - RNA, 19 nt, Artificial Sequence
  Description of Artificial Sequence: Synthetic oligonucleotide
  Antisense strand to SEQ ID NO: 2033792
aauauucucagcuguuuca

SEQ ID NO: 2033794 - RNA, 19 nt, Artificial Sequence
  Description of Artificial Sequence: Synthetic oligonucleotide
  Sense strand starting at position 3974 of SEQ ID NO: 1881299
gaaguagaaucgcuuugcu

SEQ ID NO: 2033795 - RNA, 19 nt, Artificial Sequence
  Description of Artificial Sequence: Synthetic oligonucleotide
  Antisense strand to SEQ ID NO: 2033794
agcaaagcgauucuacuuc

SEQ ID NO: 2033796 - RNA, 19 nt, Artificial Sequence
  Description of Artificial Sequence: Synthetic oligonucleotide
  Sense strand starting at position 3977 of SEQ ID NO: 1881299
guagaaucgcuuugcuaua

SEQ ID NO: 2033797 - RNA, 19 nt, Artificial Sequence
  Description of Artificial Sequence: Synthetic oligonucleotide
  Antisense strand to SEQ ID NO: 2033796
uauagcaaagcgauucuac

SEQ ID NO: 2033798 - RNA, 19 nt, Artificial Sequence
  Description of Artificial Sequence: Synthetic oligonucleotide
  Sense strand starting at position 3979 of SEQ ID NO: 1881299
agaaucgcuuugcuauauu

SEQ ID NO: 2033799 - RNA, 19 nt, Artificial Sequence
  Description of Artificial Sequence: Synthetic oligonucleotide
  Antisense strand to SEQ ID NO: 2033798
aauauagcaaagcgauucu

SEQ ID NO: 2033800 - RNA, 19 nt, Artificial Sequence
  Description of Artificial Sequence: Synthetic oligonucleotide
  Sense strand starting at position 57 of SEQ ID NO: 1881300
ugggcaacuucuucuccaa

SEQ ID NO: 2033801 - RNA, 19 nt, Artificial Sequence
  Description of Artificial Sequence: Synthetic oligonucleotide
  Antisense strand to SEQ ID NO: 2033800
uuggagaagaaguugccca

SEQ ID NO: 2033802 - RNA, 19 nt, Artificial Sequence
  Description of Artificial Sequence: Synthetic oligonucleotide
  Sense strand starting at position 173 of SEQ ID NO: 1881300
uacagaauuguuugggauu

SEQ ID NO: 2033803 - RNA, 19 nt, Artificial Sequence
  Description of Artificial Sequence: Synthetic oligonucleotide
  Antisense strand to SEQ ID NO: 2033802
aaucccaaacaauucugua

SEQ ID NO: 2033804 - RNA, 19 nt, Artificial Sequence
  Description of Artificial Sequence: Synthetic oligonucleotide
  Sense strand starting at position 386 of SEQ ID NO: 1881300
gaauguaggaguugcucuu

SEQ ID NO: 2033805 - RNA, 19 nt, Artificial Sequence
  Description of Artificial Sequence: Synthetic oligonucleotide
  Antisense strand to SEQ ID NO: 2033804
aagagcaacuccuacauuc

SEQ ID NO: 2033806 - RNA, 19 nt, Artificial Sequence
  Description of Artificial Sequence: Synthetic oligonucleotide
  Sense strand starting at position 1238 of SEQ ID NO: 1881300
aggacauuacgcugagaua

SEQ ID NO: 2033807 - RNA, 19 nt, Artificial Sequence
  Description of Artificial Sequence: Synthetic oligonucleotide
  Antisense strand to SEQ ID NO: 2033806
uaucucagcguaauguccu

SEQ ID NO: 2033808 - RNA, 19 nt, Artificial Sequence
  Description of Artificial Sequence: Synthetic oligonucleotide
  Sense strand starting at position 1367 of SEQ ID NO: 1881300
ugaggaguuaccgaguaau

SEQ ID NO: 2033809 - RNA, 19 nt, Artificial Sequence
  Description of Artificial Sequence: Synthetic oligonucleotide
  Antisense strand to SEQ ID NO: 2033808
auuacucgguaacuccuca

SEQ ID NO: 2033810 - RNA, 19 nt, Artificial Sequence
  Description of Artificial Sequence: Synthetic oligonucleotide
  Sense strand starting at position 1370 of SEQ ID NO: 1881300
ggaguuaccgaguaaugga

SEQ ID NO: 2033811 - RNA, 19 nt, Artificial Sequence
  Description of Artificial Sequence: Synthetic oligonucleotide
  Antisense strand to SEQ ID NO: 2033810
uccauuacucgguaacucc

SEQ ID NO: 2033812 - RNA, 19 nt, Artificial Sequence
  Description of Artificial Sequence: Synthetic oligonucleotide
  Sense strand starting at position 1387 of SEQ ID NO: 1881300
gacaguuucugcuugggau

SEQ ID NO: 2033813 - RNA, 19 nt, Artificial Sequence
  Description of Artificial Sequence: Synthetic oligonucleotide
  Antisense strand to SEQ ID NO: 2033812
aucccaagcagaaacuguc

SEQ ID NO: 2033814 - RNA, 19 nt, Artificial Sequence
  Description of Artificial Sequence: Synthetic oligonucleotide
  Sense strand starting at position 1388 of SEQ ID NO: 1881300
acaguuucugcuugggaug

SEQ ID NO: 2033815 - RNA, 19 nt, Artificial Sequence
  Description of Artificial Sequence: Synthetic oligonucleotide
  Antisense strand to SEQ ID NO: 2033814
caucccaagcagaaacugu

SEQ ID NO: 2033816 - RNA, 19 nt, Artificial Sequence
  Description of Artificial Sequence: Synthetic oligonucleotide
  Sense strand starting at position 1389 of SEQ ID NO: 1881300
caguuucugcuugggauga

SEQ ID NO: 2033817 - RNA, 19 nt, Artificial Sequence
  Description of Artificial Sequence: Synthetic oligonucleotide
  Antisense strand to SEQ ID NO: 2033816
ucaucccaagcagaaacug

SEQ ID NO: 2033818 - RNA, 19 nt, Artificial Sequence
  Description of Artificial Sequence: Synthetic oligonucleotide
  Sense strand starting at position 1393 of SEQ ID NO: 1881300
uucugcuugggaugauuaa

SEQ ID NO: 2033819 - RNA, 19 nt, Artificial Sequence
  Description of Artificial Sequence: Synthetic oligonucleotide
  Antisense strand to SEQ ID NO: 2033818
uuaaucaucccaagcagaa

SEQ ID NO: 2033820 - RNA, 19 nt, Artificial Sequence
  Description of Artificial Sequence: Synthetic oligonucleotide
  Sense strand starting at position 1430 of SEQ ID NO: 1881300
ggugguuaaugguuguaca

SEQ ID NO: 2033821 - RNA, 19 nt, Artificial Sequence
  Description of Artificial Sequence: Synthetic oligonucleotide
  Antisense strand to SEQ ID NO: 2033820
uguacaaccauuaaccacc

SEQ ID NO: 2033822 - RNA, 19 nt, Artificial Sequence
  Description of Artificial Sequence: Synthetic oligonucleotide
  Sense strand starting at position 1431 of SEQ ID NO: 1881300
gugguuaaugguuguacaa

SEQ ID NO: 2033823 - RNA, 19 nt, Artificial Sequence
  Description of Artificial Sequence: Synthetic oligonucleotide
  Antisense strand to SEQ ID NO: 2033822
uuguacaaccauuaaccac

SEQ ID NO: 2033824 - RNA, 19 nt, Artificial Sequence
  Description of Artificial Sequence: Synthetic oligonucleotide
  Sense strand starting at position 1552 of SEQ ID NO: 1881300
ggaggaaacgccuagucuu

SEQ ID NO: 2033825 - RNA, 19 nt, Artificial Sequence
  Description of Artificial Sequence: Synthetic oligonucleotide
  Antisense strand to SEQ ID NO: 2033824
aagacuaggcguuuccucc

SEQ ID NO: 2033826 - RNA, 19 nt, Artificial Sequence
  Description of Artificial Sequence: Synthetic oligonucleotide
  Sense strand starting at position 1555 of SEQ ID NO: 1881300
ggaaacgccuagucuuagu

SEQ ID NO: 2033827 - RNA, 19 nt, Artificial Sequence
  Description of Artificial Sequence: Synthetic oligonucleotide
  Antisense strand to SEQ ID NO: 2033826
acuaagacuaggcguuucc

SEQ ID NO: 2033828 - RNA, 19 nt, Artificial Sequence
  Description of Artificial Sequence: Synthetic oligonucleotide
  Sense strand starting at position 1726 of SEQ ID NO: 1881300
ggccuccuucccgagagaa

SEQ ID NO: 2033829 - RNA, 19 nt, Artificial Sequence
  Description of Artificial Sequence: Synthetic oligonucleotide
  Antisense strand to SEQ ID NO: 2033828
uucucucgggaaggaggcc

SEQ ID NO: 2033830 - RNA, 19 nt, Artificial Sequence
  Description of Artificial Sequence: Synthetic oligonucleotide
  Sense strand starting at position 2277 of SEQ ID NO: 1881300
ggagcaugaucucuggaag

SEQ ID NO: 2033831 - RNA, 19 nt, Artificial Sequence
  Description of Artificial Sequence: Synthetic oligonucleotide
  Antisense strand to SEQ ID NO: 2033830
cuuccagagaucaugcucc

SEQ ID NO: 2033832 - RNA, 19 nt, Artificial Sequence
  Description of Artificial Sequence: Synthetic oligonucleotide
  Sense strand starting at position 2280 of SEQ ID NO: 1881300
gcaugaucucuggaagcug

SEQ ID NO: 2033833 - RNA, 19 nt, Artificial Sequence
  Description of Artificial Sequence: Synthetic oligonucleotide
  Antisense strand to SEQ ID NO: 2033832
cagcuuccagagaucaugc

SEQ ID NO: 2033834 - RNA, 19 nt, Artificial Sequence
  Description of Artificial Sequence: Synthetic oligonucleotide
  Sense strand starting at position 2335 of SEQ ID NO: 1881300
gcuggaauccuuugggcac

SEQ ID NO: 2033835 - RNA, 19 nt, Artificial Sequence
  Description of Artificial Sequence: Synthetic oligonucleotide
  Antisense strand to SEQ ID NO: 2033834
gugcccaaaggauuccagc

SEQ ID NO: 2033836 - RNA, 19 nt, Artificial Sequence
  Description of Artificial Sequence: Synthetic oligonucleotide
  Sense strand starting at position 2410 of SEQ ID NO: 1881300
cuagucuucccuggacagu

SEQ ID NO: 2033837 - RNA, 19 nt, Artificial Sequence
  Description of Artificial Sequence: Synthetic oligonucleotide
  Antisense strand to SEQ ID NO: 2033836
acuguccagggaagacuag

SEQ ID NO: 2033838 - RNA, 19 nt, Artificial Sequence
  Description of Artificial Sequence: Synthetic oligonucleotide
  Sense strand starting at position 2423 of SEQ ID NO: 1881300
gacagugcugucuguugau

SEQ ID NO: 2033839 - RNA, 19 nt, Artificial Sequence
  Description of Artificial Sequence: Synthetic oligonucleotide
  Antisense strand to SEQ ID NO: 2033838
aucaacagacagcacuguc

SEQ ID NO: 2033840 - RNA, 19 nt, Artificial Sequence
  Description of Artificial Sequence: Synthetic oligonucleotide
  Sense strand starting at position 2429 of SEQ ID NO: 1881300
gcugucuguugauuccuua

SEQ ID NO: 2033841 - RNA, 19 nt, Artificial Sequence
  Description of Artificial Sequence: Synthetic oligonucleotide
  Antisense strand to SEQ ID NO: 2033840
uaaggaaucaacagacagc

SEQ ID NO: 2033842 - RNA, 19 nt, Artificial Sequence
  Description of Artificial Sequence: Synthetic oligonucleotide
  Sense strand starting at position 2432 of SEQ ID NO: 1881300
gucuguugauuccuuauaa

SEQ ID NO: 2033843 - RNA, 19 nt, Artificial Sequence
  Description of Artificial Sequence: Synthetic oligonucleotide
  Antisense strand to SEQ ID NO: 2033842
uuauaaggaaucaacagac

SEQ ID NO: 2033844 - RNA, 19 nt, Artificial Sequence
  Description of Artificial Sequence: Synthetic oligonucleotide
  Sense strand starting at position 2492 of SEQ ID NO: 1881300
ugagccaagcauugagaua

SEQ ID NO: 2033845 - RNA, 19 nt, Artificial Sequence
  Description of Artificial Sequence: Synthetic oligonucleotide
  Antisense strand to SEQ ID NO: 2033844
uaucucaaugcuuggcuca

SEQ ID NO: 2033846 - RNA, 19 nt, Artificial Sequence
  Description of Artificial Sequence: Synthetic oligonucleotide
  Sense strand starting at position 2506 of SEQ ID NO: 1881300
agauaugugcuguauagcu

SEQ ID NO: 2033847 - RNA, 19 nt, Artificial Sequence
  Description of Artificial Sequence: Synthetic oligonucleotide
  Antisense strand to SEQ ID NO: 2033846
agcuauacagcacauaucu

SEQ ID NO: 2033848 - RNA, 19 nt, Artificial Sequence
  Description of Artificial Sequence: Synthetic oligonucleotide
  Sense strand starting at position 2602 of SEQ ID NO: 1881300
uugauuaaaugagccgaua

SEQ ID NO: 2033849 - RNA, 19 nt, Artificial Sequence
  Description of Artificial Sequence: Synthetic oligonucleotide
  Antisense strand to SEQ ID NO: 2033848
uaucggcucauuuaaucaa

SEQ ID NO: 2033850 - RNA, 19 nt, Artificial Sequence
  Description of Artificial Sequence: Synthetic oligonucleotide
  Sense strand starting at position 2634 of SEQ ID NO: 1881300
cugucuugacucuaaagca

SEQ ID NO: 2033851 - RNA, 19 nt, Artificial Sequence
  Description of Artificial Sequence: Synthetic oligonucleotide
  Antisense strand to SEQ ID NO: 2033850
ugcuuuagagucaagacag

SEQ ID NO: 2033852 - RNA, 19 nt, Artificial Sequence
  Description of Artificial Sequence: Synthetic oligonucleotide
  Sense strand starting at position 2642 of SEQ ID NO: 1881300
acucuaaagcauggucuuu

SEQ ID NO: 2033853 - RNA, 19 nt, Artificial Sequence
  Description of Artificial Sequence: Synthetic oligonucleotide
  Antisense strand to SEQ ID NO: 2033852
aaagaccaugcuuuagagu

SEQ ID NO: 2033854 - RNA, 19 nt, Artificial Sequence
  Description of Artificial Sequence: Synthetic oligonucleotide
  Sense strand starting at position 2964 of SEQ ID NO: 1881300
cgguaauuagacuggaaca

SEQ ID NO: 2033855 - RNA, 19 nt, Artificial Sequence
  Description of Artificial Sequence: Synthetic oligonucleotide
  Antisense strand to SEQ ID NO: 2033854
uguuccagucuaauuaccg

SEQ ID NO: 2033856 - RNA, 19 nt, Artificial Sequence
  Description of Artificial Sequence: Synthetic oligonucleotide
  Sense strand starting at position 3230 of SEQ ID NO: 1881300
ucuggaagcucauuagucu

SEQ ID NO: 2033857 - RNA, 19 nt, Artificial Sequence
  Description of Artificial Sequence: Synthetic oligonucleotide
  Antisense strand to SEQ ID NO: 2033856
agacuaaugagcuuccaga

SEQ ID NO: 2033858 - RNA, 19 nt, Artificial Sequence
  Description of Artificial Sequence: Synthetic oligonucleotide
  Sense strand starting at position 3231 of SEQ ID NO: 1881300
cuggaagcucauuagucuu

SEQ ID NO: 2033859 - RNA, 19 nt, Artificial Sequence
  Description of Artificial Sequence: Synthetic oligonucleotide
  Antisense strand to SEQ ID NO: 2033858
aagacuaaugagcuuccag

SEQ ID NO: 2033860 - RNA, 19 nt, Artificial Sequence
  Description of Artificial Sequence: Synthetic oligonucleotide
  Sense strand starting at position 3233 of SEQ ID NO: 1881300
ggaagcucauuagucuuaa

SEQ ID NO: 2033861 - RNA, 19 nt, Artificial Sequence
  Description of Artificial Sequence: Synthetic oligonucleotide
  Antisense strand to SEQ ID NO: 2033860
uuaagacuaaugagcuucc

SEQ ID NO: 2033862 - RNA, 19 nt, Artificial Sequence
  Description of Artificial Sequence: Synthetic oligonucleotide
  Sense strand starting at position 3237 of SEQ ID NO: 1881300
gcucauuagucuuaauuug

SEQ ID NO: 2033863 - RNA, 19 nt, Artificial Sequence
  Description of Artificial Sequence: Synthetic oligonucleotide
  Antisense strand to SEQ ID NO: 2033862
caaauuaagacuaaugagc

SEQ ID NO: 2033864 - RNA, 19 nt, Artificial Sequence
  Description of Artificial Sequence: Synthetic oligonucleotide
  Sense strand starting at position 3377 of SEQ ID NO: 1881300
guagguugcugacugggaa

SEQ ID NO: 2033865 - RNA, 19 nt, Artificial Sequence
  Description of Artificial Sequence: Synthetic oligonucleotide
  Antisense strand to SEQ ID NO: 2033864
uucccagucagcaaccuac

SEQ ID NO: 2033866 - RNA, 19 nt, Artificial Sequence
  Description of Artificial Sequence: Synthetic oligonucleotide
  Sense strand starting at position 3378 of SEQ ID NO: 1881300
uagguugcugacugggaau

SEQ ID NO: 2033867 - RNA, 19 nt, Artificial Sequence
  Description of Artificial Sequence: Synthetic oligonucleotide
  Antisense strand to SEQ ID NO: 2033866
auucccagucagcaaccua

SEQ ID NO: 2033868 - RNA, 19 nt, Artificial Sequence
  Description of Artificial Sequence: Synthetic oligonucleotide
  Sense strand starting at position 3505 of SEQ ID NO: 1881300
gagaucuauuugggcuaga

SEQ ID NO: 2033869 - RNA, 19 nt, Artificial Sequence
  Description of Artificial Sequence: Synthetic oligonucleotide
  Antisense strand to SEQ ID NO: 2033868
ucuagcccaaauagaucuc

SEQ ID NO: 2033870 - RNA, 19 nt, Artificial Sequence
  Description of Artificial Sequence: Synthetic oligonucleotide
  Sense strand starting at position 3537 of SEQ ID NO: 1881300
cuguaagugcuagggaaga

SEQ ID NO: 2033871 - RNA, 19 nt, Artificial Sequence
  Description of Artificial Sequence: Synthetic oligonucleotide
  Antisense strand to SEQ ID NO: 2033870
ucuucccuagcacuuacag

SEQ ID NO: 2033872 - RNA, 19 nt, Artificial Sequence
  Description of Artificial Sequence: Synthetic oligonucleotide
  Sense strand starting at position 3576 of SEQ ID NO: 1881300
uuugucauugcuggaugga

SEQ ID NO: 2033873 - RNA, 19 nt, Artificial Sequence
  Description of Artificial Sequence: Synthetic oligonucleotide
  Antisense strand to SEQ ID NO: 2033872
uccauccagcaaugacaaa

SEQ ID NO: 2033874 - RNA, 19 nt, Artificial Sequence
  Description of Artificial Sequence: Synthetic oligonucleotide
  Sense strand starting at position 3577 of SEQ ID NO: 1881300
uugucauugcuggauggau

SEQ ID NO: 2033875 - RNA, 19 nt, Artificial Sequence
  Description of Artificial Sequence: Synthetic oligonucleotide
  Antisense strand to SEQ ID NO: 2033874
auccauccagcaaugacaa

SEQ ID NO: 2033876 - RNA, 19 nt, Artificial Sequence
  Description of Artificial Sequence: Synthetic oligonucleotide
  Sense strand starting at position 3945 of SEQ ID NO: 1881300
agccuuuauucuuuagaug

SEQ ID NO: 2033877 - RNA, 19 nt, Artificial Sequence
  Description of Artificial Sequence: Synthetic oligonucleotide
  Antisense strand to SEQ ID NO: 2033876
caucuaaagaauaaaggcu

SEQ ID NO: 2033878 - RNA, 19 nt, Artificial Sequence
  Description of Artificial Sequence: Synthetic oligonucleotide
  Sense strand starting at position 3946 of SEQ ID NO: 1881300
gccuuuauucuuuagauga

SEQ ID NO: 2033879 - RNA, 19 nt, Artificial Sequence
  Description of Artificial Sequence: Synthetic oligonucleotide
  Antisense strand to SEQ ID NO: 2033878
ucaucuaaagaauaaaggc

SEQ ID NO: 2033880 - RNA, 19 nt, Artificial Sequence
  Description of Artificial Sequence: Synthetic oligonucleotide
  Sense strand starting at position 139 of SEQ ID NO: 1881301
cgguucagugaaggauacu

SEQ ID NO: 2033881 - RNA, 19 nt, Artificial Sequence
  Description of Artificial Sequence: Synthetic oligonucleotide
  Antisense strand to SEQ ID NO: 2033880
aguauccuucacugaaccg

SEQ ID NO: 2033882 - RNA, 19 nt, Artificial Sequence
  Description of Artificial Sequence: Synthetic oligonucleotide
  Sense strand starting at position 148 of SEQ ID NO: 1881301
gaaggauacuaguacuuaa

SEQ ID NO: 2033883 - RNA, 19 nt, Artificial Sequence
  Description of Artificial Sequence: Synthetic oligonucleotide
  Antisense strand to SEQ ID NO: 2033882
uuaaguacuaguauccuuc

SEQ ID NO: 2033884 - RNA, 19 nt, Artificial Sequence
  Description of Artificial Sequence: Synthetic oligonucleotide
  Sense strand starting at position 151 of SEQ ID NO: 1881301
ggauacuaguacuuaaggu

SEQ ID NO: 2033885 - RNA, 19 nt, Artificial Sequence
  Description of Artificial Sequence: Synthetic oligonucleotide
  Antisense strand to SEQ ID NO: 2033884
accuuaaguacuaguaucc

SEQ ID NO: 2033886 - RNA, 19 nt, Artificial Sequence
  Description of Artificial Sequence: Synthetic oligonucleotide
  Sense strand starting at position 176 of SEQ ID NO: 1881301
acuugcaguucugucauua

SEQ ID NO: 2033887 - RNA, 19 nt, Artificial Sequence
  Description of Artificial Sequence: Synthetic oligonucleotide
  Antisense strand to SEQ ID NO: 2033886
uaaugacagaacugcaagu

SEQ ID NO: 2033888 - RNA, 19 nt, Artificial Sequence
  Description of Artificial Sequence: Synthetic oligonucleotide
  Sense strand starting at position 180 of SEQ ID NO: 1881301
gcaguucugucauuauuug

SEQ ID NO: 2033889 - RNA, 19 nt, Artificial Sequence
  Description of Artificial Sequence: Synthetic oligonucleotide
  Antisense strand to SEQ ID NO: 2033888
caaauaaugacagaacugc

SEQ ID NO: 2033890 - RNA, 19 nt, Artificial Sequence
  Description of Artificial Sequence: Synthetic oligonucleotide
  Sense strand starting at position 186 of SEQ ID NO: 1881301
cugucauuauuugcucaca

SEQ ID NO: 2033891 - RNA, 19 nt, Artificial Sequence
  Description of Artificial Sequence: Synthetic oligonucleotide
  Antisense strand to SEQ ID NO: 2033890
ugugagcaaauaaugacag

SEQ ID NO: 2033892 - RNA, 19 nt, Artificial Sequence
  Description of Artificial Sequence: Synthetic oligonucleotide
  Sense strand starting at position 191 of SEQ ID NO: 1881301
auuauuugcucacaggacu

SEQ ID NO: 2033893 - RNA, 19 nt, Artificial Sequence
  Description of Artificial Sequence: Synthetic oligonucleotide
  Antisense strand to SEQ ID NO: 2033892
aguccugugagcaaauaau

SEQ ID NO: 2033894 - RNA, 19 nt, Artificial Sequence
  Description of Artificial Sequence: Synthetic oligonucleotide
  Sense strand starting at position 332 of SEQ ID NO: 1881301
augucugccgaaugaaauu

SEQ ID NO: 2033895 - RNA, 19 nt, Artificial Sequence
  Description of Artificial Sequence: Synthetic oligonucleotide
  Antisense strand to SEQ ID NO: 2033894
aauuucauucggcagacau

SEQ ID NO: 2033896 - RNA, 19 nt, Artificial Sequence
  Description of Artificial Sequence: Synthetic oligonucleotide
  Sense strand starting at position 443 of SEQ ID NO: 1881301
ggcguuucaggagauagcu

SEQ ID NO: 2033897 - RNA, 19 nt, Artificial Sequence
  Description of Artificial Sequence: Synthetic oligonucleotide
  Antisense strand to SEQ ID NO: 2033896
agcuaucuccugaaacgcc

SEQ ID NO: 2033898 - RNA, 19 nt, Artificial Sequence
  Description of Artificial Sequence: Synthetic oligonucleotide
  Sense strand starting at position 814 of SEQ ID NO: 1881301
caggaaguucccuggaacu

SEQ ID NO: 2033899 - RNA, 19 nt, Artificial Sequence
  Description of Artificial Sequence: Synthetic oligonucleotide
  Antisense strand to SEQ ID NO: 2033898
aguuccagggaacuuccug

SEQ ID NO: 2033900 - RNA, 19 nt, Artificial Sequence
  Description of Artificial Sequence: Synthetic oligonucleotide
  Sense strand starting at position 869 of SEQ ID NO: 1881301
gagcgcauaaguuauggaa

SEQ ID NO: 2033901 - RNA, 19 nt, Artificial Sequence
  Description of Artificial Sequence: Synthetic oligonucleotide
  Antisense strand to SEQ ID NO: 2033900
uuccauaacuuaugcgcuc

SEQ ID NO: 2033902 - RNA, 19 nt, Artificial Sequence
  Description of Artificial Sequence: Synthetic oligonucleotide
  Sense strand starting at position 1019 of SEQ ID NO: 1881301
guagcaaacuacucuugga

SEQ ID NO: 2033903 - RNA, 19 nt, Artificial Sequence
  Description of Artificial Sequence: Synthetic oligonucleotide
  Antisense strand to SEQ ID NO: 2033902
uccaagaguaguuugcuac

SEQ ID NO: 2033904 - RNA, 19 nt, Artificial Sequence
  Description of Artificial Sequence: Synthetic oligonucleotide
  Sense strand starting at position 1143 of SEQ ID NO: 1881301
cuauaucaugcaugaggaa

SEQ ID NO: 2033905 - RNA, 19 nt, Artificial Sequence
  Description of Artificial Sequence: Synthetic oligonucleotide
  Antisense strand to SEQ ID NO: 2033904
uuccucaugcaugauauag

SEQ ID NO: 2033906 - RNA, 19 nt, Artificial Sequence
  Description of Artificial Sequence: Synthetic oligonucleotide
  Sense strand starting at position 1155 of SEQ ID NO: 1881301
ugaggaaacuagcucagau

SEQ ID NO: 2033907 - RNA, 19 nt, Artificial Sequence
  Description of Artificial Sequence: Synthetic oligonucleotide
  Antisense strand to SEQ ID NO: 2033906
aucugagcuaguuuccuca

SEQ ID NO: 2033908 - RNA, 19 nt, Artificial Sequence
  Description of Artificial Sequence: Synthetic oligonucleotide
  Sense strand starting at position 2029 of SEQ ID NO: 1881301
gugcucgcugggaguugua

SEQ ID NO: 2033909 - RNA, 19 nt, Artificial Sequence
  Description of Artificial Sequence: Synthetic oligonucleotide
  Antisense strand to SEQ ID NO: 2033908
uacaacucccagcgagcac

SEQ ID NO: 2033910 - RNA, 19 nt, Artificial Sequence
  Description of Artificial Sequence: Synthetic oligonucleotide
  Sense strand starting at position 2271 of SEQ ID NO: 1881301
uaaguacguugauccagau

SEQ ID NO: 2033911 - RNA, 19 nt, Artificial Sequence
  Description of Artificial Sequence: Synthetic oligonucleotide
  Antisense strand to SEQ ID NO: 2033910
aucuggaucaacguacuua

SEQ ID NO: 2033912 - RNA, 19 nt, Artificial Sequence
  Description of Artificial Sequence: Synthetic oligonucleotide
  Sense strand starting at position 2275 of SEQ ID NO: 1881301
uacguugauccagaucaca

SEQ ID NO: 2033913 - RNA, 19 nt, Artificial Sequence
  Description of Artificial Sequence: Synthetic oligonucleotide
  Antisense strand to SEQ ID NO: 2033912
ugugaucuggaucaacgua

SEQ ID NO: 2033914 - RNA, 19 nt, Artificial Sequence
  Description of Artificial Sequence: Synthetic oligonucleotide
  Sense strand starting at position 2398 of SEQ ID NO: 1881301
acauuauugagcuguugga

SEQ ID NO: 2033915 - RNA, 19 nt, Artificial Sequence
  Description of Artificial Sequence: Synthetic oligonucleotide
  Antisense strand to SEQ ID NO: 2033914
uccaacagcucaauaaugu

SEQ ID NO: 2033916 - RNA, 19 nt, Artificial Sequence
  Description of Artificial Sequence: Synthetic oligonucleotide
  Sense strand starting at position 2581 of SEQ ID NO: 1881301
acucuaacgucugucaaag

SEQ ID NO: 2033917 - RNA, 19 nt, Artificial Sequence
  Description of Artificial Sequence: Synthetic oligonucleotide
  Antisense strand to SEQ ID NO: 2033916
cuuugacagacguuagagu

SEQ ID NO: 2033918 - RNA, 19 nt, Artificial Sequence
  Description of Artificial Sequence: Synthetic oligonucleotide
  Sense strand starting at position 2587 of SEQ ID NO: 1881301
acgucugucaaaggaugaa

SEQ ID NO: 2033919 - RNA, 19 nt, Artificial Sequence
  Description of Artificial Sequence: Synthetic oligonucleotide
  Antisense strand to SEQ ID NO: 2033918
uucauccuuugacagacgu

SEQ ID NO: 2033920 - RNA, 19 nt, Artificial Sequence
  Description of Artificial Sequence: Synthetic oligonucleotide
  Sense strand starting at position 2607 of SEQ ID NO: 1881301
ggguaaacaaagugugaua

SEQ ID NO: 2033921 - RNA, 19 nt, Artificial Sequence
  Description of Artificial Sequence: Synthetic oligonucleotide
  Antisense strand to SEQ ID NO: 2033920
uaucacacuuuguuuaccc

SEQ ID NO: 2033922 - RNA, 19 nt, Artificial Sequence
  Description of Artificial Sequence: Synthetic oligonucleotide
  Sense strand starting at position 2609 of SEQ ID NO: 1881301
guaaacaaagugugauaca

SEQ ID NO: 2033923 - RNA, 19 nt, Artificial Sequence
  Description of Artificial Sequence: Synthetic oligonucleotide
  Antisense strand to SEQ ID NO: 2033922
uguaucacacuuuguuuac

SEQ ID NO: 2033924 - RNA, 19 nt, Artificial Sequence
  Description of Artificial Sequence: Synthetic oligonucleotide
  Sense strand starting at position 2724 of SEQ ID NO: 1881301
agcagaaucguguaagacu

SEQ ID NO: 2033925 - RNA, 19 nt, Artificial Sequence
  Description of Artificial Sequence: Synthetic oligonucleotide
  Antisense strand to SEQ ID NO: 2033924
agucuuacacgauucugcu

SEQ ID NO: 2033926 - RNA, 19 nt, Artificial Sequence
  Description of Artificial Sequence: Synthetic oligonucleotide
  Sense strand starting at position 2732 of SEQ ID NO: 1881301
cguguaagacuaggaguuu

SEQ ID NO: 2033927 - RNA, 19 nt, Artificial Sequence
  Description of Artificial Sequence: Synthetic oligonucleotide
  Antisense strand to SEQ ID NO: 2033926
aaacuccuagucuuacacg

SEQ ID NO: 2033928 - RNA, 19 nt, Artificial Sequence
  Description of Artificial Sequence: Synthetic oligonucleotide
  Sense strand starting at position 3023 of SEQ ID NO: 1881301
augaaugaaucucagaaau

SEQ ID NO: 2033929 - RNA, 19 nt, Artificial Sequence
  Description of Artificial Sequence: Synthetic oligonucleotide
  Antisense strand to SEQ ID NO: 2033928
auuucugagauucauucau

SEQ ID NO: 2033930 - RNA, 19 nt, Artificial Sequence
  Description of Artificial Sequence: Synthetic oligonucleotide
  Sense strand starting at position 3033 of SEQ ID NO: 1881301
cucagaaauguaugcuaau

SEQ ID NO: 2033931 - RNA, 19 nt, Artificial Sequence
  Description of Artificial Sequence: Synthetic oligonucleotide
  Antisense strand to SEQ ID NO: 2033930
auuagcauacauuucugag

SEQ ID NO: 2033932 - RNA, 19 nt, Artificial Sequence
  Description of Artificial Sequence: Synthetic oligonucleotide
  Sense strand starting at position 3034 of SEQ ID NO: 1881301
ucagaaauguaugcuaaug

SEQ ID NO: 2033933 - RNA, 19 nt, Artificial Sequence
  Description of Artificial Sequence: Synthetic oligonucleotide
  Antisense strand to SEQ ID NO: 2033932
cauuagcauacauuucuga

SEQ ID NO: 2033934 - RNA, 19 nt, Artificial Sequence
  Description of Artificial Sequence: Synthetic oligonucleotide
  Sense strand starting at position 3036 of SEQ ID NO: 1881301
agaaauguaugcuaaugaa

SEQ ID NO: 2033935 - RNA, 19 nt, Artificial Sequence
  Description of Artificial Sequence: Synthetic oligonucleotide
  Antisense strand to SEQ ID NO: 2033934
uucauuagcauacauuucu

SEQ ID NO: 2033936 - RNA, 19 nt, Artificial Sequence
  Description of Artificial Sequence: Synthetic oligonucleotide
  Sense strand starting at position 3085 of SEQ ID NO: 1881301
gugauuacaucuuaugaaa

SEQ ID NO: 2033937 - RNA, 19 nt, Artificial Sequence
  Description of Artificial Sequence: Synthetic oligonucleotide
  Antisense strand to SEQ ID NO: 2033936
uuucauaagauguaaucac

SEQ ID NO: 2033938 - RNA, 19 nt, Artificial Sequence
  Description of Artificial Sequence: Synthetic oligonucleotide
  Sense strand starting at position 3190 of SEQ ID NO: 1881301
uagggacuccuuugggagu

SEQ ID NO: 2033939 - RNA, 19 nt, Artificial Sequence
  Description of Artificial Sequence: Synthetic oligonucleotide
  Antisense strand to SEQ ID NO: 2033938
acucccaaaggagucccua

SEQ ID NO: 2033940 - RNA, 19 nt, Artificial Sequence
  Description of Artificial Sequence: Synthetic oligonucleotide
  Sense strand starting at position 3231 of SEQ ID NO: 1881301
uggagaugaugguuccaca

SEQ ID NO: 2033941 - RNA, 19 nt, Artificial Sequence
  Description of Artificial Sequence: Synthetic oligonucleotide
  Antisense strand to SEQ ID NO: 2033940
uguggaaccaucaucucca

SEQ ID NO: 2033942 - RNA, 19 nt, Artificial Sequence
  Description of Artificial Sequence: Synthetic oligonucleotide
  Sense strand starting at position 3234 of SEQ ID NO: 1881301
agaugaugguuccacaaca

SEQ ID NO: 2033943 - RNA, 19 nt, Artificial Sequence
  Description of Artificial Sequence: Synthetic oligonucleotide
  Antisense strand to SEQ ID NO: 2033942
uguuguggaaccaucaucu

SEQ ID NO: 2033944 - RNA, 19 nt, Artificial Sequence
  Description of Artificial Sequence: Synthetic oligonucleotide
  Sense strand starting at position 3408 of SEQ ID NO: 1881301
gacagucuguggccuguua

SEQ ID NO: 2033945 - RNA, 19 nt, Artificial Sequence
  Description of Artificial Sequence: Synthetic oligonucleotide
  Antisense strand to SEQ ID NO: 2033944
uaacaggccacagacuguc

SEQ ID NO: 2033946 - RNA, 19 nt, Artificial Sequence
  Description of Artificial Sequence: Synthetic oligonucleotide
  Sense strand starting at position 3705 of SEQ ID NO: 1881301
gcuaaagcauucuugcaug

SEQ ID NO: 2033947 - RNA, 19 nt, Artificial Sequence
  Description of Artificial Sequence: Synthetic oligonucleotide
  Antisense strand to SEQ ID NO: 2033946
caugcaagaaugcuuuagc

SEQ ID NO: 2033948 - RNA, 19 nt, Artificial Sequence
  Description of Artificial Sequence: Synthetic oligonucleotide
  Sense strand starting at position 3767 of SEQ ID NO: 1881301
uguccugaggcucaagaua

SEQ ID NO: 2033949 - RNA, 19 nt, Artificial Sequence
  Description of Artificial Sequence: Synthetic oligonucleotide
  Antisense strand to SEQ ID NO: 2033948
uaucuugagccucaggaca

SEQ ID NO: 2033950 - RNA, 19 nt, Artificial Sequence
  Description of Artificial Sequence: Synthetic oligonucleotide
  Sense strand starting at position 3787 of SEQ ID NO: 1881301
ccaguagugagaugaacaa

SEQ ID NO: 2033951 - RNA, 19 nt, Artificial Sequence
  Description of Artificial Sequence: Synthetic oligonucleotide
  Antisense strand to SEQ ID NO: 2033950
uuguucaucucacuacugg

SEQ ID NO: 2033952 - RNA, 19 nt, Artificial Sequence
  Description of Artificial Sequence: Synthetic oligonucleotide
  Sense strand starting at position 3816 of SEQ ID NO: 1881301
cagucagagguugguaagu

SEQ ID NO: 2033953 - RNA, 19 nt, Artificial Sequence
  Description of Artificial Sequence: Synthetic oligonucleotide
  Antisense strand to SEQ ID NO: 2033952
acuuaccaaccucugacug

SEQ ID NO: 2033954 - RNA, 19 nt, Artificial Sequence
  Description of Artificial Sequence: Synthetic oligonucleotide
  Sense strand starting at position 3829 of SEQ ID NO: 1881301
guaaguuauagcugaaagg

SEQ ID NO: 2033955 - RNA, 19 nt, Artificial Sequence
  Description of Artificial Sequence: Synthetic oligonucleotide
  Antisense strand to SEQ ID NO: 2033954
ccuuucagcuauaacuuac

SEQ ID NO: 2033956 - RNA, 19 nt, Artificial Sequence
  Description of Artificial Sequence: Synthetic oligonucleotide
  Sense strand starting at position 3830 of SEQ ID NO: 1881301
uaaguuauagcugaaaggu

SEQ ID NO: 2033957 - RNA, 19 nt, Artificial Sequence
  Description of Artificial Sequence: Synthetic oligonucleotide
  Antisense strand to SEQ ID NO: 2033956
accuuucagcuauaacuua

SEQ ID NO: 2033958 - RNA, 19 nt, Artificial Sequence
  Description of Artificial Sequence: Synthetic oligonucleotide
  Sense strand starting at position 3839 of SEQ ID NO: 1881301
gcugaaagguccuugccuu

SEQ ID NO: 2033959 - RNA, 19 nt, Artificial Sequence
  Description of Artificial Sequence: Synthetic oligonucleotide
  Antisense strand to SEQ ID NO: 2033958
aaggcaaggaccuuucagc

SEQ ID NO: 2033960 - RNA, 19 nt, Artificial Sequence
  Description of Artificial Sequence: Synthetic oligonucleotide
  Sense strand starting at position 145 of SEQ ID NO: 1881302
ucuguaacuuucccuggaa

SEQ ID NO: 2033961 - RNA, 19 nt, Artificial Sequence
  Description of Artificial Sequence: Synthetic oligonucleotide
  Antisense strand to SEQ ID NO: 2033960
uuccagggaaaguuacaga

SEQ ID NO: 2033962 - RNA, 19 nt, Artificial Sequence
  Description of Artificial Sequence: Synthetic oligonucleotide
  Sense strand starting at position 146 of SEQ ID NO: 1881302
cuguaacuuucccuggaau

SEQ ID NO: 2033963 - RNA, 19 nt, Artificial Sequence
  Description of Artificial Sequence: Synthetic oligonucleotide
  Antisense strand to SEQ ID NO: 2033962
auuccagggaaaguuacag

SEQ ID NO: 2033964 - RNA, 19 nt, Artificial Sequence
  Description of Artificial Sequence: Synthetic oligonucleotide
  Sense strand starting at position 147 of SEQ ID NO: 1881302
uguaacuuucccuggaaug

SEQ ID NO: 2033965 - RNA, 19 nt, Artificial Sequence
  Description of Artificial Sequence: Synthetic oligonucleotide
  Antisense strand to SEQ ID NO: 2033964
cauuccagggaaaguuaca

SEQ ID NO: 2033966 - RNA, 19 nt, Artificial Sequence
  Description of Artificial Sequence: Synthetic oligonucleotide
  Sense strand starting at position 148 of SEQ ID NO: 1881302
guaacuuucccuggaauga

SEQ ID NO: 2033967 - RNA, 19 nt, Artificial Sequence
  Description of Artificial Sequence: Synthetic oligonucleotide
  Antisense strand to SEQ ID NO: 2033966
ucauuccagggaaaguuac

SEQ ID NO: 2033968 - RNA, 19 nt, Artificial Sequence
  Description of Artificial Sequence: Synthetic oligonucleotide
  Sense strand starting at position 152 of SEQ ID NO: 1881302
cuuucccuggaaugaaaua

SEQ ID NO: 2033969 - RNA, 19 nt, Artificial Sequence
  Description of Artificial Sequence: Synthetic oligonucleotide
  Antisense strand to SEQ ID NO: 2033968
uauuucauuccagggaaag

SEQ ID NO: 2033970 - RNA, 19 nt, Artificial Sequence
  Description of Artificial Sequence: Synthetic oligonucleotide
  Sense strand starting at position 182 of SEQ ID NO: 1881302
accguaagugcugagauag

SEQ ID NO: 2033971 - RNA, 19 nt, Artificial Sequence
  Description of Artificial Sequence: Synthetic oligonucleotide
  Antisense strand to SEQ ID NO: 2033970
cuaucucagcacuuacggu

SEQ ID NO: 2033972 - RNA, 19 nt, Artificial Sequence
  Description of Artificial Sequence: Synthetic oligonucleotide
  Sense strand starting at position 301 of SEQ ID NO: 1881302
agagaacccuugggagaaa

SEQ ID NO: 2033973 - RNA, 19 nt, Artificial Sequence
  Description of Artificial Sequence: Synthetic oligonucleotide
  Antisense strand to SEQ ID NO: 2033972
uuucucccaaggguucucu

SEQ ID NO: 2033974 - RNA, 19 nt, Artificial Sequence
  Description of Artificial Sequence: Synthetic oligonucleotide
  Sense strand starting at position 377 of SEQ ID NO: 1881302
uagcguagacuguaagaga

SEQ ID NO: 2033975 - RNA, 19 nt, Artificial Sequence
  Description of Artificial Sequence: Synthetic oligonucleotide
  Antisense strand to SEQ ID NO: 2033974
ucucuuacagucuacgcua

SEQ ID NO: 2033976 - RNA, 19 nt, Artificial Sequence
  Description of Artificial Sequence: Synthetic oligonucleotide
  Sense strand starting at position 403 of SEQ ID NO: 1881302
ggaguuucccgagaagauu

SEQ ID NO: 2033977 - RNA, 19 nt, Artificial Sequence
  Description of Artificial Sequence: Synthetic oligonucleotide
  Antisense strand to SEQ ID NO: 2033976
aaucuucucgggaaacucc

SEQ ID NO: 2033978 - RNA, 19 nt, Artificial Sequence
  Description of Artificial Sequence: Synthetic oligonucleotide
  Sense strand starting at position 1553 of SEQ ID NO: 1881302
ccgagcuucccgggaacau

SEQ ID NO: 2033979 - RNA, 19 nt, Artificial Sequence
  Description of Artificial Sequence: Synthetic oligonucleotide
  Antisense strand to SEQ ID NO: 2033978
auguucccgggaagcucgg

SEQ ID NO: 2033980 - RNA, 19 nt, Artificial Sequence
  Description of Artificial Sequence: Synthetic oligonucleotide
  Sense strand starting at position 2087 of SEQ ID NO: 1881302
aaacuauggucccuagaga

SEQ ID NO: 2033981 - RNA, 19 nt, Artificial Sequence
  Description of Artificial Sequence: Synthetic oligonucleotide
  Antisense strand to SEQ ID NO: 2033980
ucucuagggaccauaguuu

SEQ ID NO: 2033982 - RNA, 19 nt, Artificial Sequence
  Description of Artificial Sequence: Synthetic oligonucleotide
  Sense strand starting at position 2096 of SEQ ID NO: 1881302
ucccuagagacgugguaua

SEQ ID NO: 2033983 - RNA, 19 nt, Artificial Sequence
  Description of Artificial Sequence: Synthetic oligonucleotide
  Antisense strand to SEQ ID NO: 2033982
uauaccacgucucuaggga

SEQ ID NO: 2033984 - RNA, 19 nt, Artificial Sequence
  Description of Artificial Sequence: Synthetic oligonucleotide
  Sense strand starting at position 2103 of SEQ ID NO: 1881302
agacgugguauacagagua

SEQ ID NO: 2033985 - RNA, 19 nt, Artificial Sequence
  Description of Artificial Sequence: Synthetic oligonucleotide
  Antisense strand to SEQ ID NO: 2033984
uacucuguauaccacgucu

SEQ ID NO: 2033986 - RNA, 19 nt, Artificial Sequence
  Description of Artificial Sequence: Synthetic oligonucleotide
  Sense strand starting at position 2206 of SEQ ID NO: 1881302
guaauaauuaagugugagu

SEQ ID NO: 2033987 - RNA, 19 nt, Artificial Sequence
  Description of Artificial Sequence: Synthetic oligonucleotide
  Antisense strand to SEQ ID NO: 2033986
acucacacuuaauuauuac

SEQ ID NO: 2033988 - RNA, 19 nt, Artificial Sequence
  Description of Artificial Sequence: Synthetic oligonucleotide
  Sense strand starting at position 2219 of SEQ ID NO: 1881302
gugaguccucuggaguuaa

SEQ ID NO: 2033989 - RNA, 19 nt, Artificial Sequence
  Description of Artificial Sequence: Synthetic oligonucleotide
  Antisense strand to SEQ ID NO: 2033988
uuaacuccagaggacucac

SEQ ID NO: 2033990 - RNA, 19 nt, Artificial Sequence
  Description of Artificial Sequence: Synthetic oligonucleotide
  Sense strand starting at position 2344 of SEQ ID NO: 1881302
gggagagaguuuaguagaa

SEQ ID NO: 2033991 - RNA, 19 nt, Artificial Sequence
  Description of Artificial Sequence: Synthetic oligonucleotide
  Antisense strand to SEQ ID NO: 2033990
uucuacuaaacucucuccc

SEQ ID NO: 2033992 - RNA, 19 nt, Artificial Sequence
  Description of Artificial Sequence: Synthetic oligonucleotide
  Sense strand starting at position 2459 of SEQ ID NO: 1881302
gaggguuuacuuugcucca

SEQ ID NO: 2033993 - RNA, 19 nt, Artificial Sequence
  Description of Artificial Sequence: Synthetic oligonucleotide
  Antisense strand to SEQ ID NO: 2033992
uggagcaaaguaaacccuc

SEQ ID NO: 2033994 - RNA, 19 nt, Artificial Sequence
  Description of Artificial Sequence: Synthetic oligonucleotide
  Sense strand starting at position 2530 of SEQ ID NO: 1881302
gugugacccuucccacuua

SEQ ID NO: 2033995 - RNA, 19 nt, Artificial Sequence
  Description of Artificial Sequence: Synthetic oligonucleotide
  Antisense strand to SEQ ID NO: 2033994
uaagugggaagggucacac

SEQ ID NO: 2033996 - RNA, 19 nt, Artificial Sequence
  Description of Artificial Sequence: Synthetic oligonucleotide
  Sense strand starting at position 2651 of SEQ ID NO: 1881302
gcccacguucuauaaacua

SEQ ID NO: 2033997 - RNA, 19 nt, Artificial Sequence
  Description of Artificial Sequence: Synthetic oligonucleotide
  Antisense strand to SEQ ID NO: 2033996
uaguuuauagaacgugggc

SEQ ID NO: 2033998 - RNA, 19 nt, Artificial Sequence
  Description of Artificial Sequence: Synthetic oligonucleotide
  Sense strand starting at position 2760 of SEQ ID NO: 1881302
uauguuguccuuugagaug

SEQ ID NO: 2033999 - RNA, 19 nt, Artificial Sequence
  Description of Artificial Sequence: Synthetic oligonucleotide
  Antisense strand to SEQ ID NO: 2033998
caucucaaaggacaacaua

SEQ ID NO: 2034000 - RNA, 19 nt, Artificial Sequence
  Description of Artificial Sequence: Synthetic oligonucleotide
  Sense strand starting at position 2765 of SEQ ID NO: 1881302
uguccuuugagaugaggga

SEQ ID NO: 2034001 - RNA, 19 nt, Artificial Sequence
  Description of Artificial Sequence: Synthetic oligonucleotide
  Antisense strand to SEQ ID NO: 2034000
ucccucaucucaaaggaca

SEQ ID NO: 2034002 - RNA, 19 nt, Artificial Sequence
  Description of Artificial Sequence: Synthetic oligonucleotide
  Sense strand starting at position 2858 of SEQ ID NO: 1881302
accucagaguucucaguuu

SEQ ID NO: 2034003 - RNA, 19 nt, Artificial Sequence
  Description of Artificial Sequence: Synthetic oligonucleotide
  Antisense strand to SEQ ID NO: 2034002
aaacugagaacucugaggu

SEQ ID NO: 2034004 - RNA, 19 nt, Artificial Sequence
  Description of Artificial Sequence: Synthetic oligonucleotide
  Sense strand starting at position 2901 of SEQ ID NO: 1881302
ccauaacucuuaguuggga

SEQ ID NO: 2034005 - RNA, 19 nt, Artificial Sequence
  Description of Artificial Sequence: Synthetic oligonucleotide
  Antisense strand to SEQ ID NO: 2034004
ucccaacuaagaguuaugg

SEQ ID NO: 2034006 - RNA, 19 nt, Artificial Sequence
  Description of Artificial Sequence: Synthetic oligonucleotide
  Sense strand starting at position 2999 of SEQ ID NO: 1881302
ugucaaguguccucuggag

SEQ ID NO: 2034007 - RNA, 19 nt, Artificial Sequence
  Description of Artificial Sequence: Synthetic oligonucleotide
  Antisense strand to SEQ ID NO: 2034006
cuccagaggacacuugaca

SEQ ID NO: 2034008 - RNA, 19 nt, Artificial Sequence
  Description of Artificial Sequence: Synthetic oligonucleotide
  Sense strand starting at position 3041 of SEQ ID NO: 1881302
accacugguuucccugauu

SEQ ID NO: 2034009 - RNA, 19 nt, Artificial Sequence
  Description of Artificial Sequence: Synthetic oligonucleotide
  Antisense strand to SEQ ID NO: 2034008
aaucagggaaaccaguggu

SEQ ID NO: 2034010 - RNA, 19 nt, Artificial Sequence
  Description of Artificial Sequence: Synthetic oligonucleotide
  Sense strand starting at position 3044 of SEQ ID NO: 1881302
acugguuucccugauugca

SEQ ID NO: 2034011 - RNA, 19 nt, Artificial Sequence
  Description of Artificial Sequence: Synthetic oligonucleotide
  Antisense strand to SEQ ID NO: 2034010
ugcaaucagggaaaccagu

SEQ ID NO: 2034012 - RNA, 19 nt, Artificial Sequence
  Description of Artificial Sequence: Synthetic oligonucleotide
  Sense strand starting at position 3046 of SEQ ID NO: 1881302
ugguuucccugauugcaga

SEQ ID NO: 2034013 - RNA, 19 nt, Artificial Sequence
  Description of Artificial Sequence: Synthetic oligonucleotide
  Antisense strand to SEQ ID NO: 2034012
ucugcaaucagggaaacca

SEQ ID NO: 2034014 - RNA, 19 nt, Artificial Sequence
  Description of Artificial Sequence: Synthetic oligonucleotide
  Sense strand starting at position 3047 of SEQ ID NO: 1881302
gguuucccugauugcagaa

SEQ ID NO: 2034015 - RNA, 19 nt, Artificial Sequence
  Description of Artificial Sequence: Synthetic oligonucleotide
  Antisense strand to SEQ ID NO: 2034014
uucugcaaucagggaaacc

SEQ ID NO: 2034016 - RNA, 19 nt, Artificial Sequence
  Description of Artificial Sequence: Synthetic oligonucleotide
  Sense strand starting at position 3432 of SEQ ID NO: 1881302
gggcaaagcuuggucuuca

SEQ ID NO: 2034017 - RNA, 19 nt, Artificial Sequence
  Description of Artificial Sequence: Synthetic oligonucleotide
  Antisense strand to SEQ ID NO: 2034016
ugaagaccaagcuuugccc

SEQ ID NO: 2034018 - RNA, 19 nt, Artificial Sequence
  Description of Artificial Sequence: Synthetic oligonucleotide
  Sense strand starting at position 3472 of SEQ ID NO: 1881302
gaaggaguucccgaguuuc

SEQ ID NO: 2034019 - RNA, 19 nt, Artificial Sequence
  Description of Artificial Sequence: Synthetic oligonucleotide
  Antisense strand to SEQ ID NO: 2034018
gaaacucgggaacuccuuc

SEQ ID NO: 2034020 - RNA, 19 nt, Artificial Sequence
  Description of Artificial Sequence: Synthetic oligonucleotide
  Sense strand starting at position 3492 of SEQ ID NO: 1881302
gcuguuuaugcugucaucu

SEQ ID NO: 2034021 - RNA, 19 nt, Artificial Sequence
  Description of Artificial Sequence: Synthetic oligonucleotide
  Antisense strand to SEQ ID NO: 2034020
agaugacagcauaaacagc

SEQ ID NO: 2034022 - RNA, 19 nt, Artificial Sequence
  Description of Artificial Sequence: Synthetic oligonucleotide
  Sense strand starting at position 3565 of SEQ ID NO: 1881302
cccagaguuuaugcaucau

SEQ ID NO: 2034023 - RNA, 19 nt, Artificial Sequence
  Description of Artificial Sequence: Synthetic oligonucleotide
  Antisense strand to SEQ ID NO: 2034022
augaugcauaaacucuggg

SEQ ID NO: 2034024 - RNA, 19 nt, Artificial Sequence
  Description of Artificial Sequence: Synthetic oligonucleotide
  Sense strand starting at position 3571 of SEQ ID NO: 1881302
guuuaugcaucauuuauug

SEQ ID NO: 2034025 - RNA, 19 nt, Artificial Sequence
  Description of Artificial Sequence: Synthetic oligonucleotide
  Antisense strand to SEQ ID NO: 2034024
caauaaaugaugcauaaac

SEQ ID NO: 2034026 - RNA, 19 nt, Artificial Sequence
  Description of Artificial Sequence: Synthetic oligonucleotide
  Sense strand starting at position 3582 of SEQ ID NO: 1881302
auuuauuguugagcuaguu

SEQ ID NO: 2034027 - RNA, 19 nt, Artificial Sequence
  Description of Artificial Sequence: Synthetic oligonucleotide
  Antisense strand to SEQ ID NO: 2034026
aacuagcucaacaauaaau

SEQ ID NO: 2034028 - RNA, 19 nt, Artificial Sequence
  Description of Artificial Sequence: Synthetic oligonucleotide
  Sense strand starting at position 3712 of SEQ ID NO: 1881302
uugaguuaguggguagcau

SEQ ID NO: 2034029 - RNA, 19 nt, Artificial Sequence
  Description of Artificial Sequence: Synthetic oligonucleotide
  Antisense strand to SEQ ID NO: 2034028
augcuacccacuaacucaa

SEQ ID NO: 2034030 - RNA, 19 nt, Artificial Sequence
  Description of Artificial Sequence: Synthetic oligonucleotide
  Sense strand starting at position 3713 of SEQ ID NO: 1881302
ugaguuaguggguagcaua

SEQ ID NO: 2034031 - RNA, 19 nt, Artificial Sequence
  Description of Artificial Sequence: Synthetic oligonucleotide
  Antisense strand to SEQ ID NO: 2034030
uaugcuacccacuaacuca

SEQ ID NO: 2034032 - RNA, 19 nt, Artificial Sequence
  Description of Artificial Sequence: Synthetic oligonucleotide
  Sense strand starting at position 3734 of SEQ ID NO: 1881302
gaaggauguuaagcuuaga

SEQ ID NO: 2034033 - RNA, 19 nt, Artificial Sequence
  Description of Artificial Sequence: Synthetic oligonucleotide
  Antisense strand to SEQ ID NO: 2034032
ucuaagcuuaacauccuuc

SEQ ID NO: 2034034 - RNA, 19 nt, Artificial Sequence
  Description of Artificial Sequence: Synthetic oligonucleotide
  Sense strand starting at position 3779 of SEQ ID NO: 1881302
gagaaagguuuguuccggu

SEQ ID NO: 2034035 - RNA, 19 nt, Artificial Sequence
  Description of Artificial Sequence: Synthetic oligonucleotide
  Antisense strand to SEQ ID NO: 2034034
accggaacaaaccuuucuc

SEQ ID NO: 2034036 - RNA, 19 nt, Artificial Sequence
  Description of Artificial Sequence: Synthetic oligonucleotide
  Sense strand starting at position 3870 of SEQ ID NO: 1881302
gaagcugcccuagauaguu

SEQ ID NO: 2034037 - RNA, 19 nt, Artificial Sequence
  Description of Artificial Sequence: Synthetic oligonucleotide
  Antisense strand to SEQ ID NO: 2034036
aacuaucuagggcagcuuc

SEQ ID NO: 2034038 - RNA, 19 nt, Artificial Sequence
  Description of Artificial Sequence: Synthetic oligonucleotide
  Sense strand starting at position 3882 of SEQ ID NO: 1881302
gauaguuucccuggccuca

SEQ ID NO: 2034039 - RNA, 19 nt, Artificial Sequence
  Description of Artificial Sequence: Synthetic oligonucleotide
  Antisense strand to SEQ ID NO: 2034038
ugaggccagggaaacuauc

SEQ ID NO: 2034040 - RNA, 19 nt, Artificial Sequence
  Description of Artificial Sequence: Synthetic oligonucleotide
  Sense strand starting at position 107 of SEQ ID NO: 1881303
ucacucgcaugauuaugaa

SEQ ID NO: 2034041 - RNA, 19 nt, Artificial Sequence
  Description of Artificial Sequence: Synthetic oligonucleotide
  Antisense strand to SEQ ID NO: 2034040
uucauaaucaugcgaguga

SEQ ID NO: 2034042 - RNA, 19 nt, Artificial Sequence
  Description of Artificial Sequence: Synthetic oligonucleotide
  Sense strand starting at position 321 of SEQ ID NO: 1881303
ugaagucaugucgaagauu

SEQ ID NO: 2034043 - RNA, 19 nt, Artificial Sequence
  Description of Artificial Sequence: Synthetic oligonucleotide
  Antisense strand to SEQ ID NO: 2034042
aaucuucgacaugacuuca

SEQ ID NO: 2034044 - RNA, 19 nt, Artificial Sequence
  Description of Artificial Sequence: Synthetic oligonucleotide
  Sense strand starting at position 373 of SEQ ID NO: 1881303
uuaauugacuuuccuguga

SEQ ID NO: 2034045 - RNA, 19 nt, Artificial Sequence
  Description of Artificial Sequence: Synthetic oligonucleotide
  Antisense strand to SEQ ID NO: 2034044
ucacaggaaagucaauuaa

SEQ ID NO: 2034046 - RNA, 19 nt, Artificial Sequence
  Description of Artificial Sequence: Synthetic oligonucleotide
  Sense strand starting at position 377 of SEQ ID NO: 1881303
uugacuuuccugugacuga

SEQ ID NO: 2034047 - RNA, 19 nt, Artificial Sequence
  Description of Artificial Sequence: Synthetic oligonucleotide
  Antisense strand to SEQ ID NO: 2034046
ucagucacaggaaagucaa

SEQ ID NO: 2034048 - RNA, 19 nt, Artificial Sequence
  Description of Artificial Sequence: Synthetic oligonucleotide
  Sense strand starting at position 409 of SEQ ID NO: 1881303
gccagaauauaccuugauc

SEQ ID NO: 2034049 - RNA, 19 nt, Artificial Sequence
  Description of Artificial Sequence: Synthetic oligonucleotide
  Antisense strand to SEQ ID NO: 2034048
gaucaagguauauucuggc

SEQ ID NO: 2034050 - RNA, 19 nt, Artificial Sequence
  Description of Artificial Sequence: Synthetic oligonucleotide
  Sense strand starting at position 439 of SEQ ID NO: 1881303
gugagagauuucuagacug

SEQ ID NO: 2034051 - RNA, 19 nt, Artificial Sequence
  Description of Artificial Sequence: Synthetic oligonucleotide
  Antisense strand to SEQ ID NO: 2034050
cagucuagaaaucucucac

SEQ ID NO: 2034052 - RNA, 19 nt, Artificial Sequence
  Description of Artificial Sequence: Synthetic oligonucleotide
  Sense strand starting at position 476 of SEQ ID NO: 1881303
auaaacauaucucuguguu

SEQ ID NO: 2034053 - RNA, 19 nt, Artificial Sequence
  Description of Artificial Sequence: Synthetic oligonucleotide
  Antisense strand to SEQ ID NO: 2034052
aacacagagauauguuuau

SEQ ID NO: 2034054 - RNA, 19 nt, Artificial Sequence
  Description of Artificial Sequence: Synthetic oligonucleotide
  Sense strand starting at position 654 of SEQ ID NO: 1881303
uggaucuggccaugacuaa

SEQ ID NO: 2034055 - RNA, 19 nt, Artificial Sequence
  Description of Artificial Sequence: Synthetic oligonucleotide
  Antisense strand to SEQ ID NO: 2034054
uuagucauggccagaucca

SEQ ID NO: 2034056 - RNA, 19 nt, Artificial Sequence
  Description of Artificial Sequence: Synthetic oligonucleotide
  Sense strand starting at position 668 of SEQ ID NO: 1881303
acuaaaggcucauugcuaa

SEQ ID NO: 2034057 - RNA, 19 nt, Artificial Sequence
  Description of Artificial Sequence: Synthetic oligonucleotide
  Antisense strand to SEQ ID NO: 2034056
uuagcaaugagccuuuagu

SEQ ID NO: 2034058 - RNA, 19 nt, Artificial Sequence
  Description of Artificial Sequence: Synthetic oligonucleotide
  Sense strand starting at position 966 of SEQ ID NO: 1881303
uuguuucuugcugugugau

SEQ ID NO: 2034059 - RNA, 19 nt, Artificial Sequence
  Description of Artificial Sequence: Synthetic oligonucleotide
  Antisense strand to SEQ ID NO: 2034058
aucacacagcaagaaacaa

SEQ ID NO: 2034060 - RNA, 19 nt, Artificial Sequence
  Description of Artificial Sequence: Synthetic oligonucleotide
  Sense strand starting at position 1506 of SEQ ID NO: 1881303
aggagaauauggcuuuauu

SEQ ID NO: 2034061 - RNA, 19 nt, Artificial Sequence
  Description of Artificial Sequence: Synthetic oligonucleotide
  Antisense strand to SEQ ID NO: 2034060
aauaaagccauauucuccu

SEQ ID NO: 2034062 - RNA, 19 nt, Artificial Sequence
  Description of Artificial Sequence: Synthetic oligonucleotide
  Sense strand starting at position 1529 of SEQ ID NO: 1881303
gcugacucacuuugggaga

SEQ ID NO: 2034063 - RNA, 19 nt, Artificial Sequence
  Description of Artificial Sequence: Synthetic oligonucleotide
  Antisense strand to SEQ ID NO: 2034062
ucucccaaagugagucagc

SEQ ID NO: 2034064 - RNA, 19 nt, Artificial Sequence
  Description of Artificial Sequence: Synthetic oligonucleotide
  Sense strand starting at position 1553 of SEQ ID NO: 1881303
ggcuucucucuggaacuca

SEQ ID NO: 2034065 - RNA, 19 nt, Artificial Sequence
  Description of Artificial Sequence: Synthetic oligonucleotide
  Antisense strand to SEQ ID NO: 2034064
ugaguuccagagagaagcc

SEQ ID NO: 2034066 - RNA, 19 nt, Artificial Sequence
  Description of Artificial Sequence: Synthetic oligonucleotide
  Sense strand starting at position 1613 of SEQ ID NO: 1881303
uguguagaguggucaagag

SEQ ID NO: 2034067 - RNA, 19 nt, Artificial Sequence
  Description of Artificial Sequence: Synthetic oligonucleotide
  Antisense strand to SEQ ID NO: 2034066
cucuugaccacucuacaca

SEQ ID NO: 2034068 - RNA, 19 nt, Artificial Sequence
  Description of Artificial Sequence: Synthetic oligonucleotide
  Sense strand starting at position 1718 of SEQ ID NO: 1881303
ugugcaaauuguuugaaag

SEQ ID NO: 2034069 - RNA, 19 nt, Artificial Sequence
  Description of Artificial Sequence: Synthetic oligonucleotide
  Antisense strand to SEQ ID NO: 2034068
cuuucaaacaauuugcaca

SEQ ID NO: 2034070 - RNA, 19 nt, Artificial Sequence
  Description of Artificial Sequence: Synthetic oligonucleotide
  Sense strand starting at position 1958 of SEQ ID NO: 1881303
ucaggcuuucgucugcaau

SEQ ID NO: 2034071 - RNA, 19 nt, Artificial Sequence
  Description of Artificial Sequence: Synthetic oligonucleotide
  Antisense strand to SEQ ID NO: 2034070
auugcagacgaaagccuga

SEQ ID NO: 2034072 - RNA, 19 nt, Artificial Sequence
  Description of Artificial Sequence: Synthetic oligonucleotide
  Sense strand starting at position 2027 of SEQ ID NO: 1881303
ugucuugauucuguacaaa

SEQ ID NO: 2034073 - RNA, 19 nt, Artificial Sequence
  Description of Artificial Sequence: Synthetic oligonucleotide
  Antisense strand to SEQ ID NO: 2034072
uuuguacagaaucaagaca

SEQ ID NO: 2034074 - RNA, 19 nt, Artificial Sequence
  Description of Artificial Sequence: Synthetic oligonucleotide
  Sense strand starting at position 2030 of SEQ ID NO: 1881303
cuugauucuguacaaaugu

SEQ ID NO: 2034075 - RNA, 19 nt, Artificial Sequence
  Description of Artificial Sequence: Synthetic oligonucleotide
  Antisense strand to SEQ ID NO: 2034074
acauuuguacagaaucaag

SEQ ID NO: 2034076 - RNA, 19 nt, Artificial Sequence
  Description of Artificial Sequence: Synthetic oligonucleotide
  Sense strand starting at position 2089 of SEQ ID NO: 1881303
ucugauugugcagacccaa

SEQ ID NO: 2034077 - RNA, 19 nt, Artificial Sequence
  Description of Artificial Sequence: Synthetic oligonucleotide
  Antisense strand to SEQ ID NO: 2034076
uugggucugcacaaucaga

SEQ ID NO: 2034078 - RNA, 19 nt, Artificial Sequence
  Description of Artificial Sequence: Synthetic oligonucleotide
  Sense strand starting at position 2122 of SEQ ID NO: 1881303
cgucacuaaggcuacuaau

SEQ ID NO: 2034079 - RNA, 19 nt, Artificial Sequence
  Description of Artificial Sequence: Synthetic oligonucleotide
  Antisense strand to SEQ ID NO: 2034078
auuaguagccuuagugacg

SEQ ID NO: 2034080 - RNA, 19 nt, Artificial Sequence
  Description of Artificial Sequence: Synthetic oligonucleotide
  Sense strand starting at position 2248 of SEQ ID NO: 1881303
aaguguaauugccuuaaag

SEQ ID NO: 2034081 - RNA, 19 nt, Artificial Sequence
  Description of Artificial Sequence: Synthetic oligonucleotide
  Antisense strand to SEQ ID NO: 2034080
cuuuaaggcaauuacacuu

SEQ ID NO: 2034082 - RNA, 19 nt, Artificial Sequence
  Description of Artificial Sequence: Synthetic oligonucleotide
  Sense strand starting at position 2250 of SEQ ID NO: 1881303
guguaauugccuuaaagaa

SEQ ID NO: 2034083 - RNA, 19 nt, Artificial Sequence
  Description of Artificial Sequence: Synthetic oligonucleotide
  Antisense strand to SEQ ID NO: 2034082
uucuuuaaggcaauuacac

SEQ ID NO: 2034084 - RNA, 19 nt, Artificial Sequence
  Description of Artificial Sequence: Synthetic oligonucleotide
  Sense strand starting at position 2329 of SEQ ID NO: 1881303
uuccaacaucaagagugua

SEQ ID NO: 2034085 - RNA, 19 nt, Artificial Sequence
  Description of Artificial Sequence: Synthetic oligonucleotide
  Antisense strand to SEQ ID NO: 2034084
uacacucuugauguuggaa

SEQ ID NO: 2034086 - RNA, 19 nt, Artificial Sequence
  Description of Artificial Sequence: Synthetic oligonucleotide
  Sense strand starting at position 2355 of SEQ ID NO: 1881303
uuaggaucuuguucuuaau

SEQ ID NO: 2034087 - RNA, 19 nt, Artificial Sequence
  Description of Artificial Sequence: Synthetic oligonucleotide
  Antisense strand to SEQ ID NO: 2034086
auuaagaacaagauccuaa

SEQ ID NO: 2034088 - RNA, 19 nt, Artificial Sequence
  Description of Artificial Sequence: Synthetic oligonucleotide
  Sense strand starting at position 2390 of SEQ ID NO: 1881303
guugaaaccuagguguacu

SEQ ID NO: 2034089 - RNA, 19 nt, Artificial Sequence
  Description of Artificial Sequence: Synthetic oligonucleotide
  Antisense strand to SEQ ID NO: 2034088
aguacaccuagguuucaac

SEQ ID NO: 2034090 - RNA, 19 nt, Artificial Sequence
  Description of Artificial Sequence: Synthetic oligonucleotide
  Sense strand starting at position 2486 of SEQ ID NO: 1881303
cacguaaugcuagaagacu

SEQ ID NO: 2034091 - RNA, 19 nt, Artificial Sequence
  Description of Artificial Sequence: Synthetic oligonucleotide
  Antisense strand to SEQ ID NO: 2034090
agucuucuagcauuacgug

SEQ ID NO: 2034092 - RNA, 19 nt, Artificial Sequence
  Description of Artificial Sequence: Synthetic oligonucleotide
  Sense strand starting at position 2504 of SEQ ID NO: 1881303
uggaauaggcuguggagau

SEQ ID NO: 2034093 - RNA, 19 nt, Artificial Sequence
  Description of Artificial Sequence: Synthetic oligonucleotide
  Antisense strand to SEQ ID NO: 2034092
aucuccacagccuauucca

SEQ ID NO: 2034094 - RNA, 19 nt, Artificial Sequence
  Description of Artificial Sequence: Synthetic oligonucleotide
  Sense strand starting at position 2674 of SEQ ID NO: 1881303
gcuagaugcccgcccgaaa

SEQ ID NO: 2034095 - RNA, 19 nt, Artificial Sequence
  Description of Artificial Sequence: Synthetic oligonucleotide
  Antisense strand to SEQ ID NO: 2034094
uuucgggcgggcaucuagc

SEQ ID NO: 2034096 - RNA, 19 nt, Artificial Sequence
  Description of Artificial Sequence: Synthetic oligonucleotide
  Sense strand starting at position 2724 of SEQ ID NO: 1881303
gggauuaugugaguguuga

SEQ ID NO: 2034097 - RNA, 19 nt, Artificial Sequence
  Description of Artificial Sequence: Synthetic oligonucleotide
  Antisense strand to SEQ ID NO: 2034096
ucaacacucacauaauccc

SEQ ID NO: 2034098 - RNA, 19 nt, Artificial Sequence
  Description of Artificial Sequence: Synthetic oligonucleotide
  Sense strand starting at position 2725 of SEQ ID NO: 1881303
ggauuaugugaguguugau

SEQ ID NO: 2034099 - RNA, 19 nt, Artificial Sequence
  Description of Artificial Sequence: Synthetic oligonucleotide
  Antisense strand to SEQ ID NO: 2034098
aucaacacucacauaaucc

SEQ ID NO: 2034100 - RNA, 19 nt, Artificial Sequence
  Description of Artificial Sequence: Synthetic oligonucleotide
  Sense strand starting at position 2800 of SEQ ID NO: 1881303
uugguuuauuauguggaua

SEQ ID NO: 2034101 - RNA, 19 nt, Artificial Sequence
  Description of Artificial Sequence: Synthetic oligonucleotide
  Antisense strand to SEQ ID NO: 2034100
uauccacauaauaaaccaa

SEQ ID NO: 2034102 - RNA, 19 nt, Artificial Sequence
  Description of Artificial Sequence: Synthetic oligonucleotide
  Sense strand starting at position 2801 of SEQ ID NO: 1881303
ugguuuauuauguggauau

SEQ ID NO: 2034103 - RNA, 19 nt, Artificial Sequence
  Description of Artificial Sequence: Synthetic oligonucleotide
  Antisense strand to SEQ ID NO: 2034102
auauccacauaauaaacca

SEQ ID NO: 2034104 - RNA, 19 nt, Artificial Sequence
  Description of Artificial Sequence: Synthetic oligonucleotide
  Sense strand starting at position 2829 of SEQ ID NO: 1881303
auagcaugugccuaacaau

SEQ ID NO: 2034105 - RNA, 19 nt, Artificial Sequence
  Description of Artificial Sequence: Synthetic oligonucleotide
  Antisense strand to SEQ ID NO: 2034104
auuguuaggcacaugcuau

SEQ ID NO: 2034106 - RNA, 19 nt, Artificial Sequence
  Description of Artificial Sequence: Synthetic oligonucleotide
  Sense strand starting at position 2881 of SEQ ID NO: 1881303
uguccauuuggucaguguu

SEQ ID NO: 2034107 - RNA, 19 nt, Artificial Sequence
  Description of Artificial Sequence: Synthetic oligonucleotide
  Antisense strand to SEQ ID NO: 2034106
aacacugaccaaauggaca

SEQ ID NO: 2034108 - RNA, 19 nt, Artificial Sequence
  Description of Artificial Sequence: Synthetic oligonucleotide
  Sense strand starting at position 3094 of SEQ ID NO: 1881303
acaugugugcucgcgcaua

SEQ ID NO: 2034109 - RNA, 19 nt, Artificial Sequence
  Description of Artificial Sequence: Synthetic oligonucleotide
  Antisense strand to SEQ ID NO: 2034108
uaugcgcgagcacacaugu

SEQ ID NO: 2034110 - RNA, 19 nt, Artificial Sequence
  Description of Artificial Sequence: Synthetic oligonucleotide
  Sense strand starting at position 3096 of SEQ ID NO: 1881303
augugugcucgcgcauaca

SEQ ID NO: 2034111 - RNA, 19 nt, Artificial Sequence
  Description of Artificial Sequence: Synthetic oligonucleotide
  Antisense strand to SEQ ID NO: 2034110
uguaugcgcgagcacacau

SEQ ID NO: 2034112 - RNA, 19 nt, Artificial Sequence
  Description of Artificial Sequence: Synthetic oligonucleotide
  Sense strand starting at position 3260 of SEQ ID NO: 1881303
cagguuugucaggacucaa

SEQ ID NO: 2034113 - RNA, 19 nt, Artificial Sequence
  Description of Artificial Sequence: Synthetic oligonucleotide
  Antisense strand to SEQ ID NO: 2034112
uugaguccugacaaaccug

SEQ ID NO: 2034114 - RNA, 19 nt, Artificial Sequence
  Description of Artificial Sequence: Synthetic oligonucleotide
  Sense strand starting at position 3440 of SEQ ID NO: 1881303
gggucaucugcacagacuu

SEQ ID NO: 2034115 - RNA, 19 nt, Artificial Sequence
  Description of Artificial Sequence: Synthetic oligonucleotide
  Antisense strand to SEQ ID NO: 2034114
aagucugugcagaugaccc

SEQ ID NO: 2034116 - RNA, 19 nt, Artificial Sequence
  Description of Artificial Sequence: Synthetic oligonucleotide
  Sense strand starting at position 3464 of SEQ ID NO: 1881303
acuacuucggcaggacaaa

SEQ ID NO: 2034117 - RNA, 19 nt, Artificial Sequence
  Description of Artificial Sequence: Synthetic oligonucleotide
  Antisense strand to SEQ ID NO: 2034116
uuuguccugccgaaguagu

SEQ ID NO: 2034118 - RNA, 19 nt, Artificial Sequence
  Description of Artificial Sequence: Synthetic oligonucleotide
  Sense strand starting at position 3671 of SEQ ID NO: 1881303
guggccugucaacaucaua

SEQ ID NO: 2034119 - RNA, 19 nt, Artificial Sequence
  Description of Artificial Sequence: Synthetic oligonucleotide
  Antisense strand to SEQ ID NO: 2034118
uaugauguugacaggccac

SEQ ID NO: 2034120 - RNA, 19 nt, Artificial Sequence
  Description of Artificial Sequence: Synthetic oligonucleotide
  Sense strand starting at position 36 of SEQ ID NO: 1881304
gagaaugccucacugggua

SEQ ID NO: 2034121 - RNA, 19 nt, Artificial Sequence
  Description of Artificial Sequence: Synthetic oligonucleotide
  Antisense strand to SEQ ID NO: 2034120
uacccagugaggcauucuc

SEQ ID NO: 2034122 - RNA, 19 nt, Artificial Sequence
  Description of Artificial Sequence: Synthetic oligonucleotide
  Sense strand starting at position 123 of SEQ ID NO: 1881304
gcuaacauguuauuauaag

SEQ ID NO: 2034123 - RNA, 19 nt, Artificial Sequence
  Description of Artificial Sequence: Synthetic oligonucleotide
  Antisense strand to SEQ ID NO: 2034122
cuuauaauaacauguuagc

SEQ ID NO: 2034124 - RNA, 19 nt, Artificial Sequence
  Description of Artificial Sequence: Synthetic oligonucleotide
  Sense strand starting at position 275 of SEQ ID NO: 1881304
caggcuuaccgacagauga

SEQ ID NO: 2034125 - RNA, 19 nt, Artificial Sequence
  Description of Artificial Sequence: Synthetic oligonucleotide
  Antisense strand to SEQ ID NO: 2034124
ucaucugucgguaagccug

SEQ ID NO: 2034126 - RNA, 19 nt, Artificial Sequence
  Description of Artificial Sequence: Synthetic oligonucleotide
  Sense strand starting at position 710 of SEQ ID NO: 1881304
aggauuccagucuggguua

SEQ ID NO: 2034127 - RNA, 19 nt, Artificial Sequence
  Description of Artificial Sequence: Synthetic oligonucleotide
  Antisense strand to SEQ ID NO: 2034126
uaacccagacuggaauccu

SEQ ID NO: 2034128 - RNA, 19 nt, Artificial Sequence
  Description of Artificial Sequence: Synthetic oligonucleotide
  Sense strand starting at position 807 of SEQ ID NO: 1881304
ggacaucugcucuauacag

SEQ ID NO: 2034129 - RNA, 19 nt, Artificial Sequence
  Description of Artificial Sequence: Synthetic oligonucleotide
  Antisense strand to SEQ ID NO: 2034128
cuguauagagcagaugucc

SEQ ID NO: 2034130 - RNA, 19 nt, Artificial Sequence
  Description of Artificial Sequence: Synthetic oligonucleotide
  Sense strand starting at position 1140 of SEQ ID NO: 1881304
gaauuaaauguccagcgga

SEQ ID NO: 2034131 - RNA, 19 nt, Artificial Sequence
  Description of Artificial Sequence: Synthetic oligonucleotide
  Antisense strand to SEQ ID NO: 2034130
uccgcuggacauuuaauuc

SEQ ID NO: 2034132 - RNA, 19 nt, Artificial Sequence
  Description of Artificial Sequence: Synthetic oligonucleotide
  Sense strand starting at position 1261 of SEQ ID NO: 1881304
caaaguagagcagguuaau

SEQ ID NO: 2034133 - RNA, 19 nt, Artificial Sequence
  Description of Artificial Sequence: Synthetic oligonucleotide
  Antisense strand to SEQ ID NO: 2034132
auuaaccugcucuacuuug

SEQ ID NO: 2034134 - RNA, 19 nt, Artificial Sequence
  Description of Artificial Sequence: Synthetic oligonucleotide
  Sense strand starting at position 1294 of SEQ ID NO: 1881304
gagggaucagugggucagu

SEQ ID NO: 2034135 - RNA, 19 nt, Artificial Sequence
  Description of Artificial Sequence: Synthetic oligonucleotide
  Antisense strand to SEQ ID NO: 2034134
acugacccacugaucccuc

SEQ ID NO: 2034136 - RNA, 19 nt, Artificial Sequence
  Description of Artificial Sequence: Synthetic oligonucleotide
  Sense strand starting at position 1341 of SEQ ID NO: 1881304
uuggcaucugagggaaguu

SEQ ID NO: 2034137 - RNA, 19 nt, Artificial Sequence
  Description of Artificial Sequence: Synthetic oligonucleotide
  Antisense strand to SEQ ID NO: 2034136
aacuucccucagaugccaa

SEQ ID NO: 2034138 - RNA, 19 nt, Artificial Sequence
  Description of Artificial Sequence: Synthetic oligonucleotide
  Sense strand starting at position 1342 of SEQ ID NO: 1881304
uggcaucugagggaaguuu

SEQ ID NO: 2034139 - RNA, 19 nt, Artificial Sequence
  Description of Artificial Sequence: Synthetic oligonucleotide
  Antisense strand to SEQ ID NO: 2034138
aaacuucccucagaugcca

SEQ ID NO: 2034140 - RNA, 19 nt, Artificial Sequence
  Description of Artificial Sequence: Synthetic oligonucleotide
  Sense strand starting at position 1650 of SEQ ID NO: 1881304
ucggauaaccagggaaagu

SEQ ID NO: 2034141 - RNA, 19 nt, Artificial Sequence
  Description of Artificial Sequence: Synthetic oligonucleotide
  Antisense strand to SEQ ID NO: 2034140
acuuucccugguuauccga

SEQ ID NO: 2034142 - RNA, 19 nt, Artificial Sequence
  Description of Artificial Sequence: Synthetic oligonucleotide
  Sense strand starting at position 1782 of SEQ ID NO: 1881304
aaguuaguacugcauaagu

SEQ ID NO: 2034143 - RNA, 19 nt, Artificial Sequence
  Description of Artificial Sequence: Synthetic oligonucleotide
  Antisense strand to SEQ ID NO: 2034142
acuuaugcaguacuaacuu

SEQ ID NO: 2034144 - RNA, 19 nt, Artificial Sequence
  Description of Artificial Sequence: Synthetic oligonucleotide
  Sense strand starting at position 1792 of SEQ ID NO: 1881304
ugcauaaguaguuggagaa

SEQ ID NO: 2034145 - RNA, 19 nt, Artificial Sequence
  Description of Artificial Sequence: Synthetic oligonucleotide
  Antisense strand to SEQ ID NO: 2034144
uucuccaacuacuuaugca

SEQ ID NO: 2034146 - RNA, 19 nt, Artificial Sequence
  Description of Artificial Sequence: Synthetic oligonucleotide
  Sense strand starting at position 1793 of SEQ ID NO: 1881304
gcauaaguaguuggagaaa

SEQ ID NO: 2034147 - RNA, 19 nt, Artificial Sequence
  Description of Artificial Sequence: Synthetic oligonucleotide
  Antisense strand to SEQ ID NO: 2034146
uuucuccaacuacuuaugc

SEQ ID NO: 2034148 - RNA, 19 nt, Artificial Sequence
  Description of Artificial Sequence: Synthetic oligonucleotide
  Sense strand starting at position 2153 of SEQ ID NO: 1881304
accagagugcauugaaaca

SEQ ID NO: 2034149 - RNA, 19 nt, Artificial Sequence
  Description of Artificial Sequence: Synthetic oligonucleotide
  Antisense strand to SEQ ID NO: 2034148
uguuucaaugcacucuggu

SEQ ID NO: 2034150 - RNA, 19 nt, Artificial Sequence
  Description of Artificial Sequence: Synthetic oligonucleotide
  Sense strand starting at position 2224 of SEQ ID NO: 1881304
cccacuucccgugauagga

SEQ ID NO: 2034151 - RNA, 19 nt, Artificial Sequence
  Description of Artificial Sequence: Synthetic oligonucleotide
  Antisense strand to SEQ ID NO: 2034150
uccuaucacgggaaguggg

SEQ ID NO: 2034152 - RNA, 19 nt, Artificial Sequence
  Description of Artificial Sequence: Synthetic oligonucleotide
  Sense strand starting at position 2247 of SEQ ID NO: 1881304
aguaauaaccaaggcagaa

SEQ ID NO: 2034153 - RNA, 19 nt, Artificial Sequence
  Description of Artificial Sequence: Synthetic oligonucleotide
  Antisense strand to SEQ ID NO: 2034152
uucugccuugguuauuacu

SEQ ID NO: 2034154 - RNA, 19 nt, Artificial Sequence
  Description of Artificial Sequence: Synthetic oligonucleotide
  Sense strand starting at position 2303 of SEQ ID NO: 1881304
guuggaauuaucuguggac

SEQ ID NO: 2034155 - RNA, 19 nt, Artificial Sequence
  Description of Artificial Sequence: Synthetic oligonucleotide
  Antisense strand to SEQ ID NO: 2034154
guccacagauaauuccaac

SEQ ID NO: 2034156 - RNA, 19 nt, Artificial Sequence
  Description of Artificial Sequence: Synthetic oligonucleotide
  Sense strand starting at position 2304 of SEQ ID NO: 1881304
uuggaauuaucuguggaca

SEQ ID NO: 2034157 - RNA, 19 nt, Artificial Sequence
  Description of Artificial Sequence: Synthetic oligonucleotide
  Antisense strand to SEQ ID NO: 2034156
uguccacagauaauuccaa

SEQ ID NO: 2034158 - RNA, 19 nt, Artificial Sequence
  Description of Artificial Sequence: Synthetic oligonucleotide
  Sense strand starting at position 2305 of SEQ ID NO: 1881304
uggaauuaucuguggacau

SEQ ID NO: 2034159 - RNA, 19 nt, Artificial Sequence
  Description of Artificial Sequence: Synthetic oligonucleotide
  Antisense strand to SEQ ID NO: 2034158
auguccacagauaauucca

SEQ ID NO: 2034160 - RNA, 19 nt, Artificial Sequence
  Description of Artificial Sequence: Synthetic oligonucleotide
  Sense strand starting at position 2307 of SEQ ID NO: 1881304
gaauuaucuguggacaugu

SEQ ID NO: 2034161 - RNA, 19 nt, Artificial Sequence
  Description of Artificial Sequence: Synthetic oligonucleotide
  Antisense strand to SEQ ID NO: 2034160
acauguccacagauaauuc

SEQ ID NO: 2034162 - RNA, 19 nt, Artificial Sequence
  Description of Artificial Sequence: Synthetic oligonucleotide
  Sense strand starting at position 2325 of SEQ ID NO: 1881304
ugugucucccuagaagauu

SEQ ID NO: 2034163 - RNA, 19 nt, Artificial Sequence
  Description of Artificial Sequence: Synthetic oligonucleotide
  Antisense strand to SEQ ID NO: 2034162
aaucuucuagggagacaca

SEQ ID NO: 2034164 - RNA, 19 nt, Artificial Sequence
  Description of Artificial Sequence: Synthetic oligonucleotide
  Sense strand starting at position 2336 of SEQ ID NO: 1881304
agaagauucugagugacuu

SEQ ID NO: 2034165 - RNA, 19 nt, Artificial Sequence
  Description of Artificial Sequence: Synthetic oligonucleotide
  Antisense strand to SEQ ID NO: 2034164
aagucacucagaaucuucu

SEQ ID NO: 2034166 - RNA, 19 nt, Artificial Sequence
  Description of Artificial Sequence: Synthetic oligonucleotide
  Sense strand starting at position 2337 of SEQ ID NO: 1881304
gaagauucugagugacuug

SEQ ID NO: 2034167 - RNA, 19 nt, Artificial Sequence
  Description of Artificial Sequence: Synthetic oligonucleotide
  Antisense strand to SEQ ID NO: 2034166
caagucacucagaaucuuc

SEQ ID NO: 2034168 - RNA, 19 nt, Artificial Sequence
  Description of Artificial Sequence: Synthetic oligonucleotide
  Sense strand starting at position 2340 of SEQ ID NO: 1881304
gauucugagugacuugaga

SEQ ID NO: 2034169 - RNA, 19 nt, Artificial Sequence
  Description of Artificial Sequence: Synthetic oligonucleotide
  Antisense strand to SEQ ID NO: 2034168
ucucaagucacucagaauc

SEQ ID NO: 2034170 - RNA, 19 nt, Artificial Sequence
  Description of Artificial Sequence: Synthetic oligonucleotide
  Sense strand starting at position 2397 of SEQ ID NO: 1881304
cuagcacaagacugagaua

SEQ ID NO: 2034171 - RNA, 19 nt, Artificial Sequence
  Description of Artificial Sequence: Synthetic oligonucleotide
  Antisense strand to SEQ ID NO: 2034170
uaucucagucuugugcuag

SEQ ID NO: 2034172 - RNA, 19 nt, Artificial Sequence
  Description of Artificial Sequence: Synthetic oligonucleotide
  Sense strand starting at position 2460 of SEQ ID NO: 1881304
aaguuuccucuggagagua

SEQ ID NO: 2034173 - RNA, 19 nt, Artificial Sequence
  Description of Artificial Sequence: Synthetic oligonucleotide
  Antisense strand to SEQ ID NO: 2034172
uacucuccagaggaaacuu

SEQ ID NO: 2034174 - RNA, 19 nt, Artificial Sequence
  Description of Artificial Sequence: Synthetic oligonucleotide
  Sense strand starting at position 2462 of SEQ ID NO: 1881304
guuuccucuggagaguacu

SEQ ID NO: 2034175 - RNA, 19 nt, Artificial Sequence
  Description of Artificial Sequence: Synthetic oligonucleotide
  Antisense strand to SEQ ID NO: 2034174
aguacucuccagaggaaac

SEQ ID NO: 2034176 - RNA, 19 nt, Artificial Sequence
  Description of Artificial Sequence: Synthetic oligonucleotide
  Sense strand starting at position 2505 of SEQ ID NO: 1881304
aggagucaaguccaacuuu

SEQ ID NO: 2034177 - RNA, 19 nt, Artificial Sequence
  Description of Artificial Sequence: Synthetic oligonucleotide
  Antisense strand to SEQ ID NO: 2034176
aaaguuggacuugacuccu

SEQ ID NO: 2034178 - RNA, 19 nt, Artificial Sequence
  Description of Artificial Sequence: Synthetic oligonucleotide
  Sense strand starting at position 2586 of SEQ ID NO: 1881304
agagaucccguugguggaa

SEQ ID NO: 2034179 - RNA, 19 nt, Artificial Sequence
  Description of Artificial Sequence: Synthetic oligonucleotide
  Antisense strand to SEQ ID NO: 2034178
uuccaccaacgggaucucu

SEQ ID NO: 2034180 - RNA, 19 nt, Artificial Sequence
  Description of Artificial Sequence: Synthetic oligonucleotide
  Sense strand starting at position 2685 of SEQ ID NO: 1881304
gagcuauuucuaggcaagu

SEQ ID NO: 2034181 - RNA, 19 nt, Artificial Sequence
  Description of Artificial Sequence: Synthetic oligonucleotide
  Antisense strand to SEQ ID NO: 2034180
acuugccuagaaauagcuc

SEQ ID NO: 2034182 - RNA, 19 nt, Artificial Sequence
  Description of Artificial Sequence: Synthetic oligonucleotide
  Sense strand starting at position 2686 of SEQ ID NO: 1881304
agcuauuucuaggcaaguc

SEQ ID NO: 2034183 - RNA, 19 nt, Artificial Sequence
  Description of Artificial Sequence: Synthetic oligonucleotide
  Antisense strand to SEQ ID NO: 2034182
gacuugccuagaaauagcu

SEQ ID NO: 2034184 - RNA, 19 nt, Artificial Sequence
  Description of Artificial Sequence: Synthetic oligonucleotide
  Sense strand starting at position 2812 of SEQ ID NO: 1881304
acaauaacucucugaggug

SEQ ID NO: 2034185 - RNA, 19 nt, Artificial Sequence
  Description of Artificial Sequence: Synthetic oligonucleotide
  Antisense strand to SEQ ID NO: 2034184
caccucagagaguuauugu

SEQ ID NO: 2034186 - RNA, 19 nt, Artificial Sequence
  Description of Artificial Sequence: Synthetic oligonucleotide
  Sense strand starting at position 2821 of SEQ ID NO: 1881304
cucugaggugaguauuauc

SEQ ID NO: 2034187 - RNA, 19 nt, Artificial Sequence
  Description of Artificial Sequence: Synthetic oligonucleotide
  Antisense strand to SEQ ID NO: 2034186
gauaauacucaccucagag

SEQ ID NO: 2034188 - RNA, 19 nt, Artificial Sequence
  Description of Artificial Sequence: Synthetic oligonucleotide
  Sense strand starting at position 2826 of SEQ ID NO: 1881304
aggugaguauuaucacaga

SEQ ID NO: 2034189 - RNA, 19 nt, Artificial Sequence
  Description of Artificial Sequence: Synthetic oligonucleotide
  Antisense strand to SEQ ID NO: 2034188
ucugugauaauacucaccu

SEQ ID NO: 2034190 - RNA, 19 nt, Artificial Sequence
  Description of Artificial Sequence: Synthetic oligonucleotide
  Sense strand starting at position 2948 of SEQ ID NO: 1881304
auuacuucucugugauaga

SEQ ID NO: 2034191 - RNA, 19 nt, Artificial Sequence
  Description of Artificial Sequence: Synthetic oligonucleotide
  Antisense strand to SEQ ID NO: 2034190
ucuaucacagagaaguaau

SEQ ID NO: 2034192 - RNA, 19 nt, Artificial Sequence
  Description of Artificial Sequence: Synthetic oligonucleotide
  Sense strand starting at position 3290 of SEQ ID NO: 1881304
gaaagcugucuugauauua

SEQ ID NO: 2034193 - RNA, 19 nt, Artificial Sequence
  Description of Artificial Sequence: Synthetic oligonucleotide
  Antisense strand to SEQ ID NO: 2034192
uaauaucaagacagcuuuc

SEQ ID NO: 2034194 - RNA, 19 nt, Artificial Sequence
  Description of Artificial Sequence: Synthetic oligonucleotide
  Sense strand starting at position 3635 of SEQ ID NO: 1881304
uagucauuagcugagguca

SEQ ID NO: 2034195 - RNA, 19 nt, Artificial Sequence
  Description of Artificial Sequence: Synthetic oligonucleotide
  Antisense strand to SEQ ID NO: 2034194
ugaccucagcuaaugacua

SEQ ID NO: 2034196 - RNA, 19 nt, Artificial Sequence
  Description of Artificial Sequence: Synthetic oligonucleotide
  Sense strand starting at position 3795 of SEQ ID NO: 1881304
ugugcauggcaugaauaca

SEQ ID NO: 2034197 - RNA, 19 nt, Artificial Sequence
  Description of Artificial Sequence: Synthetic oligonucleotide
  Antisense strand to SEQ ID NO: 2034196
uguauucaugccaugcaca

SEQ ID NO: 2034198 - RNA, 19 nt, Artificial Sequence
  Description of Artificial Sequence: Synthetic oligonucleotide
  Sense strand starting at position 3810 of SEQ ID NO: 1881304
uacagcugacauugagaga

SEQ ID NO: 2034199 - RNA, 19 nt, Artificial Sequence
  Description of Artificial Sequence: Synthetic oligonucleotide
  Antisense strand to SEQ ID NO: 2034198
ucucucaaugucagcugua

SEQ ID NO: 2034200 - RNA, 19 nt, Artificial Sequence
  Description of Artificial Sequence: Synthetic oligonucleotide
  Sense strand starting at position 357 of SEQ ID NO: 1881305
uuccuauaccaagggugau

SEQ ID NO: 2034201 - RNA, 19 nt, Artificial Sequence
  Description of Artificial Sequence: Synthetic oligonucleotide
  Antisense strand to SEQ ID NO: 2034200
aucacccuugguauaggaa

SEQ ID NO: 2034202 - RNA, 19 nt, Artificial Sequence
  Description of Artificial Sequence: Synthetic oligonucleotide
  Sense strand starting at position 542 of SEQ ID NO: 1881305
ggaguugcacagugucaca

SEQ ID NO: 2034203 - RNA, 19 nt, Artificial Sequence
  Description of Artificial Sequence: Synthetic oligonucleotide
  Antisense strand to SEQ ID NO: 2034202
ugugacacugugcaacucc

SEQ ID NO: 2034204 - RNA, 19 nt, Artificial Sequence
  Description of Artificial Sequence: Synthetic oligonucleotide
  Sense strand starting at position 648 of SEQ ID NO: 1881305
auaagauacuguucuuagc

SEQ ID NO: 2034205 - RNA, 19 nt, Artificial Sequence
  Description of Artificial Sequence: Synthetic oligonucleotide
  Antisense strand to SEQ ID NO: 2034204
gcuaagaacaguaucuuau

SEQ ID NO: 2034206 - RNA, 19 nt, Artificial Sequence
  Description of Artificial Sequence: Synthetic oligonucleotide
  Sense strand starting at position 696 of SEQ ID NO: 1881305
ugaggaaggcacugucauu

SEQ ID NO: 2034207 - RNA, 19 nt, Artificial Sequence
  Description of Artificial Sequence: Synthetic oligonucleotide
  Antisense strand to SEQ ID NO: 2034206
aaugacagugccuuccuca

SEQ ID NO: 2034208 - RNA, 19 nt, Artificial Sequence
  Description of Artificial Sequence: Synthetic oligonucleotide
  Sense strand starting at position 797 of SEQ ID NO: 1881305
cagggucagcgguaugaaa

SEQ ID NO: 2034209 - RNA, 19 nt, Artificial Sequence
  Description of Artificial Sequence: Synthetic oligonucleotide
  Antisense strand to SEQ ID NO: 2034208
uuucauaccgcugacccug

SEQ ID NO: 2034210 - RNA, 19 nt, Artificial Sequence
  Description of Artificial Sequence: Synthetic oligonucleotide
  Sense strand starting at position 799 of SEQ ID NO: 1881305
gggucagcgguaugaaacu

SEQ ID NO: 2034211 - RNA, 19 nt, Artificial Sequence
  Description of Artificial Sequence: Synthetic oligonucleotide
  Antisense strand to SEQ ID NO: 2034210
aguuucauaccgcugaccc

SEQ ID NO: 2034212 - RNA, 19 nt, Artificial Sequence
  Description of Artificial Sequence: Synthetic oligonucleotide
  Sense strand starting at position 932 of SEQ ID NO: 1881305
cugucacauugguuauaca

SEQ ID NO: 2034213 - RNA, 19 nt, Artificial Sequence
  Description of Artificial Sequence: Synthetic oligonucleotide
  Antisense strand to SEQ ID NO: 2034212
uguauaaccaaugugacag

SEQ ID NO: 2034214 - RNA, 19 nt, Artificial Sequence
  Description of Artificial Sequence: Synthetic oligonucleotide
  Sense strand starting at position 958 of SEQ ID NO: 1881305
ucaguugaacaguaucaca

SEQ ID NO: 2034215 - RNA, 19 nt, Artificial Sequence
  Description of Artificial Sequence: Synthetic oligonucleotide
  Antisense strand to SEQ ID NO: 2034214
ugugauacuguucaacuga

SEQ ID NO: 2034216 - RNA, 19 nt, Artificial Sequence
  Description of Artificial Sequence: Synthetic oligonucleotide
  Sense strand starting at position 963 of SEQ ID NO: 1881305
ugaacaguaucacaacaga

SEQ ID NO: 2034217 - RNA, 19 nt, Artificial Sequence
  Description of Artificial Sequence: Synthetic oligonucleotide
  Antisense strand to SEQ ID NO: 2034216
ucuguugugauacuguuca

SEQ ID NO: 2034218 - RNA, 19 nt, Artificial Sequence
  Description of Artificial Sequence: Synthetic oligonucleotide
  Sense strand starting at position 1145 of SEQ ID NO: 1881305
cuagaucaccacugucaca

SEQ ID NO: 2034219 - RNA, 19 nt, Artificial Sequence
  Description of Artificial Sequence: Synthetic oligonucleotide
  Antisense strand to SEQ ID NO: 2034218
ugugacaguggugaucuag

SEQ ID NO: 2034220 - RNA, 19 nt, Artificial Sequence
  Description of Artificial Sequence: Synthetic oligonucleotide
  Sense strand starting at position 1187 of SEQ ID NO: 1881305
ugcacaggaucauauugaa

SEQ ID NO: 2034221 - RNA, 19 nt, Artificial Sequence
  Description of Artificial Sequence: Synthetic oligonucleotide
  Antisense strand to SEQ ID NO: 2034220
uucaauaugauccugugca

SEQ ID NO: 2034222 - RNA, 19 nt, Artificial Sequence
  Description of Artificial Sequence: Synthetic oligonucleotide
  Sense strand starting at position 1256 of SEQ ID NO: 1881305
cacggugccucagaaauuu

SEQ ID NO: 2034223 - RNA, 19 nt, Artificial Sequence
  Description of Artificial Sequence: Synthetic oligonucleotide
  Antisense strand to SEQ ID NO: 2034222
aaauuucugaggcaccgug

SEQ ID NO: 2034224 - RNA, 19 nt, Artificial Sequence
  Description of Artificial Sequence: Synthetic oligonucleotide
  Sense strand starting at position 1264 of SEQ ID NO: 1881305
cucagaaauuuguaaacag

SEQ ID NO: 2034225 - RNA, 19 nt, Artificial Sequence
  Description of Artificial Sequence: Synthetic oligonucleotide
  Antisense strand to SEQ ID NO: 2034224
cuguuuacaaauuucugag

SEQ ID NO: 2034226 - RNA, 19 nt, Artificial Sequence
  Description of Artificial Sequence: Synthetic oligonucleotide
  Sense strand starting at position 1312 of SEQ ID NO: 1881305
cguuggaagggcugaguua

SEQ ID NO: 2034227 - RNA, 19 nt, Artificial Sequence
  Description of Artificial Sequence: Synthetic oligonucleotide
  Antisense strand to SEQ ID NO: 2034226
uaacucagcccuuccaacg

SEQ ID NO: 2034228 - RNA, 19 nt, Artificial Sequence
  Description of Artificial Sequence: Synthetic oligonucleotide
  Sense strand starting at position 1313 of SEQ ID NO: 1881305
guuggaagggcugaguuaa

SEQ ID NO: 2034229 - RNA, 19 nt, Artificial Sequence
  Description of Artificial Sequence: Synthetic oligonucleotide
  Antisense strand to SEQ ID NO: 2034228
uuaacucagcccuuccaac

SEQ ID NO: 2034230 - RNA, 19 nt, Artificial Sequence
  Description of Artificial Sequence: Synthetic oligonucleotide
  Sense strand starting at position 1324 of SEQ ID NO: 1881305
ugaguuaaauaaugagaag

SEQ ID NO: 2034231 - RNA, 19 nt, Artificial Sequence
  Description of Artificial Sequence: Synthetic oligonucleotide
  Antisense strand to SEQ ID NO: 2034230
cuucucauuauuuaacuca

SEQ ID NO: 2034232 - RNA, 19 nt, Artificial Sequence
  Description of Artificial Sequence: Synthetic oligonucleotide
  Sense strand starting at position 2198 of SEQ ID NO: 1881305
gaagcaaaucugugucgaa

SEQ ID NO: 2034233 - RNA, 19 nt, Artificial Sequence
  Description of Artificial Sequence: Synthetic oligonucleotide
  Antisense strand to SEQ ID NO: 2034232
uucgacacagauuugcuuc

SEQ ID NO: 2034234 - RNA, 19 nt, Artificial Sequence
  Description of Artificial Sequence: Synthetic oligonucleotide
  Sense strand starting at position 2199 of SEQ ID NO: 1881305
aagcaaaucugugucgaag

SEQ ID NO: 2034235 - RNA, 19 nt, Artificial Sequence
  Description of Artificial Sequence: Synthetic oligonucleotide
  Antisense strand to SEQ ID NO: 2034234
cuucgacacagauuugcuu

SEQ ID NO: 2034236 - RNA, 19 nt, Artificial Sequence
  Description of Artificial Sequence: Synthetic oligonucleotide
  Sense strand starting at position 2723 of SEQ ID NO: 1881305
gcuguugccucauuuguga

SEQ ID NO: 2034237 - RNA, 19 nt, Artificial Sequence
  Description of Artificial Sequence: Synthetic oligonucleotide
  Antisense strand to SEQ ID NO: 2034236
ucacaaaugaggcaacagc

SEQ ID NO: 2034238 - RNA, 19 nt, Artificial Sequence
  Description of Artificial Sequence: Synthetic oligonucleotide
  Sense strand starting at position 2802 of SEQ ID NO: 1881305
gacggaugcaaacgaaauu

SEQ ID NO: 2034239 - RNA, 19 nt, Artificial Sequence
  Description of Artificial Sequence: Synthetic oligonucleotide
  Antisense strand to SEQ ID NO: 2034238
aauuucguuugcauccguc

SEQ ID NO: 2034240 - RNA, 19 nt, Artificial Sequence
  Description of Artificial Sequence: Synthetic oligonucleotide
  Sense strand starting at position 2881 of SEQ ID NO: 1881305
ugagaacgacuguaacuuu

SEQ ID NO: 2034241 - RNA, 19 nt, Artificial Sequence
  Description of Artificial Sequence: Synthetic oligonucleotide
  Antisense strand to SEQ ID NO: 2034240
aaaguuacagucguucuca

SEQ ID NO: 2034242 - RNA, 19 nt, Artificial Sequence
  Description of Artificial Sequence: Synthetic oligonucleotide
  Sense strand starting at position 2913 of SEQ ID NO: 1881305
cugccaauaugcucgggaa

SEQ ID NO: 2034243 - RNA, 19 nt, Artificial Sequence
  Description of Artificial Sequence: Synthetic oligonucleotide
  Antisense strand to SEQ ID NO: 2034242
uucccgagcauauuggcag

SEQ ID NO: 2034244 - RNA, 19 nt, Artificial Sequence
  Description of Artificial Sequence: Synthetic oligonucleotide
  Sense strand starting at position 2914 of SEQ ID NO: 1881305
ugccaauaugcucgggaac

SEQ ID NO: 2034245 - RNA, 19 nt, Artificial Sequence
  Description of Artificial Sequence: Synthetic oligonucleotide
  Antisense strand to SEQ ID NO: 2034244
guucccgagcauauuggca

SEQ ID NO: 2034246 - RNA, 19 nt, Artificial Sequence
  Description of Artificial Sequence: Synthetic oligonucleotide
  Sense strand starting at position 2915 of SEQ ID NO: 1881305
gccaauaugcucgggaaca

SEQ ID NO: 2034247 - RNA, 19 nt, Artificial Sequence
  Description of Artificial Sequence: Synthetic oligonucleotide
  Antisense strand to SEQ ID NO: 2034246
uguucccgagcauauuggc

SEQ ID NO: 2034248 - RNA, 19 nt, Artificial Sequence
  Description of Artificial Sequence: Synthetic oligonucleotide
  Sense strand starting at position 2917 of SEQ ID NO: 1881305
caauaugcucgggaacagu

SEQ ID NO: 2034249 - RNA, 19 nt, Artificial Sequence
  Description of Artificial Sequence: Synthetic oligonucleotide
  Antisense strand to SEQ ID NO: 2034248
acuguucccgagcauauug

SEQ ID NO: 2034250 - RNA, 19 nt, Artificial Sequence
  Description of Artificial Sequence: Synthetic oligonucleotide
  Sense strand starting at position 3095 of SEQ ID NO: 1881305
cagcauugacagugaguca

SEQ ID NO: 2034251 - RNA, 19 nt, Artificial Sequence
  Description of Artificial Sequence: Synthetic oligonucleotide
  Antisense strand to SEQ ID NO: 2034250
ugacucacugucaaugcug

SEQ ID NO: 2034252 - RNA, 19 nt, Artificial Sequence
  Description of Artificial Sequence: Synthetic oligonucleotide
  Sense strand starting at position 3104 of SEQ ID NO: 1881305
cagugagucacuggcaaag

SEQ ID NO: 2034253 - RNA, 19 nt, Artificial Sequence
  Description of Artificial Sequence: Synthetic oligonucleotide
  Antisense strand to SEQ ID NO: 2034252
cuuugccagugacucacug

SEQ ID NO: 2034254 - RNA, 19 nt, Artificial Sequence
  Description of Artificial Sequence: Synthetic oligonucleotide
  Sense strand starting at position 3124 of SEQ ID NO: 1881305
caguuauuggcacagacaa

SEQ ID NO: 2034255 - RNA, 19 nt, Artificial Sequence
  Description of Artificial Sequence: Synthetic oligonucleotide
  Antisense strand to SEQ ID NO: 2034254
uugucugugccaauaacug

SEQ ID NO: 2034256 - RNA, 19 nt, Artificial Sequence
  Description of Artificial Sequence: Synthetic oligonucleotide
  Sense strand starting at position 3171 of SEQ ID NO: 1881305
cgcagaguaacuugccuaa

SEQ ID NO: 2034257 - RNA, 19 nt, Artificial Sequence
  Description of Artificial Sequence: Synthetic oligonucleotide
  Antisense strand to SEQ ID NO: 2034256
uuaggcaaguuacucugcg

SEQ ID NO: 2034258 - RNA, 19 nt, Artificial Sequence
  Description of Artificial Sequence: Synthetic oligonucleotide
  Sense strand starting at position 3188 of SEQ ID NO: 1881305
aaggucauaucagagagaa

SEQ ID NO: 2034259 - RNA, 19 nt, Artificial Sequence
  Description of Artificial Sequence: Synthetic oligonucleotide
  Antisense strand to SEQ ID NO: 2034258
uucucucugauaugaccuu

SEQ ID NO: 2034260 - RNA, 19 nt, Artificial Sequence
  Description of Artificial Sequence: Synthetic oligonucleotide
  Sense strand starting at position 3266 of SEQ ID NO: 1881305
aaagcuauucuuuggagag

SEQ ID NO: 2034261 - RNA, 19 nt, Artificial Sequence
  Description of Artificial Sequence: Synthetic oligonucleotide
  Antisense strand to SEQ ID NO: 2034260
cucuccaaagaauagcuuu

SEQ ID NO: 2034262 - RNA, 19 nt, Artificial Sequence
  Description of Artificial Sequence: Synthetic oligonucleotide
  Sense strand starting at position 3306 of SEQ ID NO: 1881305
gccuguguuauggagaaac

SEQ ID NO: 2034263 - RNA, 19 nt, Artificial Sequence
  Description of Artificial Sequence: Synthetic oligonucleotide
  Antisense strand to SEQ ID NO: 2034262
guuucuccauaacacaggc

SEQ ID NO: 2034264 - RNA, 19 nt, Artificial Sequence
  Description of Artificial Sequence: Synthetic oligonucleotide
  Sense strand starting at position 3308 of SEQ ID NO: 1881305
cuguguuauggagaaacug

SEQ ID NO: 2034265 - RNA, 19 nt, Artificial Sequence
  Description of Artificial Sequence: Synthetic oligonucleotide
  Antisense strand to SEQ ID NO: 2034264
caguuucuccauaacacag

SEQ ID NO: 2034266 - RNA, 19 nt, Artificial Sequence
  Description of Artificial Sequence: Synthetic oligonucleotide
  Sense strand starting at position 3390 of SEQ ID NO: 1881305
auaauuggcuuccuuugaa

SEQ ID NO: 2034267 - RNA, 19 nt, Artificial Sequence
  Description of Artificial Sequence: Synthetic oligonucleotide
  Antisense strand to SEQ ID NO: 2034266
uucaaaggaagccaauuau

SEQ ID NO: 2034268 - RNA, 19 nt, Artificial Sequence
  Description of Artificial Sequence: Synthetic oligonucleotide
  Sense strand starting at position 3714 of SEQ ID NO: 1881305
cagugagauucugucucau

SEQ ID NO: 2034269 - RNA, 19 nt, Artificial Sequence
  Description of Artificial Sequence: Synthetic oligonucleotide
  Antisense strand to SEQ ID NO: 2034268
augagacagaaucucacug

SEQ ID NO: 2034270 - RNA, 19 nt, Artificial Sequence
  Description of Artificial Sequence: Synthetic oligonucleotide
  Sense strand starting at position 3802 of SEQ ID NO: 1881305
caaaguggucuguggcaca

SEQ ID NO: 2034271 - RNA, 19 nt, Artificial Sequence
  Description of Artificial Sequence: Synthetic oligonucleotide
  Antisense strand to SEQ ID NO: 2034270
ugugccacagaccacuuug

SEQ ID NO: 2034272 - RNA, 19 nt, Artificial Sequence
  Description of Artificial Sequence: Synthetic oligonucleotide
  Sense strand starting at position 3826 of SEQ ID NO: 1881305
uuaagauugguguggauca

SEQ ID NO: 2034273 - RNA, 19 nt, Artificial Sequence
  Description of Artificial Sequence: Synthetic oligonucleotide
  Antisense strand to SEQ ID NO: 2034272
ugauccacaccaaucuuaa

SEQ ID NO: 2034274 - RNA, 19 nt, Artificial Sequence
  Description of Artificial Sequence: Synthetic oligonucleotide
  Sense strand starting at position 3881 of SEQ ID NO: 1881305
ggcagacugcuuuggaaca

SEQ ID NO: 2034275 - RNA, 19 nt, Artificial Sequence
  Description of Artificial Sequence: Synthetic oligonucleotide
  Antisense strand to SEQ ID NO: 2034274
uguuccaaagcagucugcc

SEQ ID NO: 2034276 - RNA, 19 nt, Artificial Sequence
  Description of Artificial Sequence: Synthetic oligonucleotide
  Sense strand starting at position 3930 of SEQ ID NO: 1881305
ugcuaagagcucuggaauc

SEQ ID NO: 2034277 - RNA, 19 nt, Artificial Sequence
  Description of Artificial Sequence: Synthetic oligonucleotide
  Antisense strand to SEQ ID NO: 2034276
gauuccagagcucuuagca

SEQ ID NO: 2034278 - RNA, 19 nt, Artificial Sequence
  Description of Artificial Sequence: Synthetic oligonucleotide
  Sense strand starting at position 3948 of SEQ ID NO: 1881305
caucaucucuuggaggacu

SEQ ID NO: 2034279 - RNA, 19 nt, Artificial Sequence
  Description of Artificial Sequence: Synthetic oligonucleotide
  Antisense strand to SEQ ID NO: 2034278
aguccuccaagagaugaug

SEQ ID NO: 2034280 - RNA, 19 nt, Artificial Sequence
  Description of Artificial Sequence: Synthetic oligonucleotide
  Sense strand starting at position 5 of SEQ ID NO: 1881306
guguuuaauucugccauuu

SEQ ID NO: 2034281 - RNA, 19 nt, Artificial Sequence
  Description of Artificial Sequence: Synthetic oligonucleotide
  Antisense strand to SEQ ID NO: 2034280
aaauggcagaauuaaacac

SEQ ID NO: 2034282 - RNA, 19 nt, Artificial Sequence
  Description of Artificial Sequence: Synthetic oligonucleotide
  Sense strand starting at position 61 of SEQ ID NO: 1881306
cugagaaauuaauugucag

SEQ ID NO: 2034283 - RNA, 19 nt, Artificial Sequence
  Description of Artificial Sequence: Synthetic oligonucleotide
  Antisense strand to SEQ ID NO: 2034282
cugacaauuaauuucucag

SEQ ID NO: 2034284 - RNA, 19 nt, Artificial Sequence
  Description of Artificial Sequence: Synthetic oligonucleotide
  Sense strand starting at position 64 of SEQ ID NO: 1881306
agaaauuaauugucaguga

SEQ ID NO: 2034285 - RNA, 19 nt, Artificial Sequence
  Description of Artificial Sequence: Synthetic oligonucleotide
  Antisense strand to SEQ ID NO: 2034284
ucacugacaauuaauuucu

SEQ ID NO: 2034286 - RNA, 19 nt, Artificial Sequence
  Description of Artificial Sequence: Synthetic oligonucleotide
  Sense strand starting at position 265 of SEQ ID NO: 1881306
guuguuauguguaugugag

SEQ ID NO: 2034287 - RNA, 19 nt, Artificial Sequence
  Description of Artificial Sequence: Synthetic oligonucleotide
  Antisense strand to SEQ ID NO: 2034286
cucacauacacauaacaac

SEQ ID NO: 2034288 - RNA, 19 nt, Artificial Sequence
  Description of Artificial Sequence: Synthetic oligonucleotide
  Sense strand starting at position 292 of SEQ ID NO: 1881306
ugucuuaaaucacuugaag

SEQ ID NO: 2034289 - RNA, 19 nt, Artificial Sequence
  Description of Artificial Sequence: Synthetic oligonucleotide
  Antisense strand to SEQ ID NO: 2034288
cuucaagugauuuaagaca

SEQ ID NO: 2034290 - RNA, 19 nt, Artificial Sequence
  Description of Artificial Sequence: Synthetic oligonucleotide
  Sense strand starting at position 595 of SEQ ID NO: 1881306
gugucugccugacugauuu

SEQ ID NO: 2034291 - RNA, 19 nt, Artificial Sequence
  Description of Artificial Sequence: Synthetic oligonucleotide
  Antisense strand to SEQ ID NO: 2034290
aaaucagucaggcagacac

SEQ ID NO: 2034292 - RNA, 19 nt, Artificial Sequence
  Description of Artificial Sequence: Synthetic oligonucleotide
  Sense strand starting at position 715 of SEQ ID NO: 1881306
ucagaaggugguuauugua

SEQ ID NO: 2034293 - RNA, 19 nt, Artificial Sequence
  Description of Artificial Sequence: Synthetic oligonucleotide
  Antisense strand to SEQ ID NO: 2034292
uacaauaaccaccuucuga

SEQ ID NO: 2034294 - RNA, 19 nt, Artificial Sequence
  Description of Artificial Sequence: Synthetic oligonucleotide
  Sense strand starting at position 745 of SEQ ID NO: 1881306
gaaggauauuuggacagug

SEQ ID NO: 2034295 - RNA, 19 nt, Artificial Sequence
  Description of Artificial Sequence: Synthetic oligonucleotide
  Antisense strand to SEQ ID NO: 2034294
cacuguccaaauauccuuc

SEQ ID NO: 2034296 - RNA, 19 nt, Artificial Sequence
  Description of Artificial Sequence: Synthetic oligonucleotide
  Sense strand starting at position 1144 of SEQ ID NO: 1881306
ugcgaaauuucuuuauagu

SEQ ID NO: 2034297 - RNA, 19 nt, Artificial Sequence
  Description of Artificial Sequence: Synthetic oligonucleotide
  Antisense strand to SEQ ID NO: 2034296
acuauaaagaaauuucgca

SEQ ID NO: 2034298 - RNA, 19 nt, Artificial Sequence
  Description of Artificial Sequence: Synthetic oligonucleotide
  Sense strand starting at position 1191 of SEQ ID NO: 1881306
gacuacaguuccuugggaa

SEQ ID NO: 2034299 - RNA, 19 nt, Artificial Sequence
  Description of Artificial Sequence: Synthetic oligonucleotide
  Antisense strand to SEQ ID NO: 2034298
uucccaaggaacuguaguc

SEQ ID NO: 2034300 - RNA, 19 nt, Artificial Sequence
  Description of Artificial Sequence: Synthetic oligonucleotide
  Sense strand starting at position 1192 of SEQ ID NO: 1881306
acuacaguuccuugggaaa

SEQ ID NO: 2034301 - RNA, 19 nt, Artificial Sequence
  Description of Artificial Sequence: Synthetic oligonucleotide
  Antisense strand to SEQ ID NO: 2034300
uuucccaaggaacuguagu

SEQ ID NO: 2034302 - RNA, 19 nt, Artificial Sequence
  Description of Artificial Sequence: Synthetic oligonucleotide
  Sense strand starting at position 1264 of SEQ ID NO: 1881306
uggaguugucacugaaaug

SEQ ID NO: 2034303 - RNA, 19 nt, Artificial Sequence
  Description of Artificial Sequence: Synthetic oligonucleotide
  Antisense strand to SEQ ID NO: 2034302
cauuucagugacaacucca

SEQ ID NO: 2034304 - RNA, 19 nt, Artificial Sequence
  Description of Artificial Sequence: Synthetic oligonucleotide
  Sense strand starting at position 1320 of SEQ ID NO: 1881306
aggccuucugauggaauua

SEQ ID NO: 2034305 - RNA, 19 nt, Artificial Sequence
  Description of Artificial Sequence: Synthetic oligonucleotide
  Antisense strand to SEQ ID NO: 2034304
uaauuccaucagaaggccu

SEQ ID NO: 2034306 - RNA, 19 nt, Artificial Sequence
  Description of Artificial Sequence: Synthetic oligonucleotide
  Sense strand starting at position 1321 of SEQ ID NO: 1881306
ggccuucugauggaauuau

SEQ ID NO: 2034307 - RNA, 19 nt, Artificial Sequence
  Description of Artificial Sequence: Synthetic oligonucleotide
  Antisense strand to SEQ ID NO: 2034306
auaauuccaucagaaggcc

SEQ ID NO: 2034308 - RNA, 19 nt, Artificial Sequence
  Description of Artificial Sequence: Synthetic oligonucleotide
  Sense strand starting at position 1366 of SEQ ID NO: 1881306
uguguuugcaaacagaaug

SEQ ID NO: 2034309 - RNA, 19 nt, Artificial Sequence
  Description of Artificial Sequence: Synthetic oligonucleotide
  Antisense strand to SEQ ID NO: 2034308
cauucuguuugcaaacaca

SEQ ID NO: 2034310 - RNA, 19 nt, Artificial Sequence
  Description of Artificial Sequence: Synthetic oligonucleotide
  Sense strand starting at position 1543 of SEQ ID NO: 1881306
ggcauuuguucugugauuc

SEQ ID NO: 2034311 - RNA, 19 nt, Artificial Sequence
  Description of Artificial Sequence: Synthetic oligonucleotide
  Antisense strand to SEQ ID NO: 2034310
gaaucacagaacaaaugcc

SEQ ID NO: 2034312 - RNA, 19 nt, Artificial Sequence
  Description of Artificial Sequence: Synthetic oligonucleotide
  Sense strand starting at position 1793 of SEQ ID NO: 1881306
ggacauuaaguguauguau

SEQ ID NO: 2034313 - RNA, 19 nt, Artificial Sequence
  Description of Artificial Sequence: Synthetic oligonucleotide
  Antisense strand to SEQ ID NO: 2034312
auacauacacuuaaugucc

SEQ ID NO: 2034314 - RNA, 19 nt, Artificial Sequence
  Description of Artificial Sequence: Synthetic oligonucleotide
  Sense strand starting at position 1942 of SEQ ID NO: 1881306
ccaguccuugcugagaaau

SEQ ID NO: 2034315 - RNA, 19 nt, Artificial Sequence
  Description of Artificial Sequence: Synthetic oligonucleotide
  Antisense strand to SEQ ID NO: 2034314
auuucucagcaaggacugg

SEQ ID NO: 2034316 - RNA, 19 nt, Artificial Sequence
  Description of Artificial Sequence: Synthetic oligonucleotide
  Sense strand starting at position 2139 of SEQ ID NO: 1881306
acauccucacuuuagaguu

SEQ ID NO: 2034317 - RNA, 19 nt, Artificial Sequence
  Description of Artificial Sequence: Synthetic oligonucleotide
  Antisense strand to SEQ ID NO: 2034316
aacucuaaagugaggaugu

SEQ ID NO: 2034318 - RNA, 19 nt, Artificial Sequence
  Description of Artificial Sequence: Synthetic oligonucleotide
  Sense strand starting at position 2204 of SEQ ID NO: 1881306
acaaauaguaagugguaga

SEQ ID NO: 2034319 - RNA, 19 nt, Artificial Sequence
  Description of Artificial Sequence: Synthetic oligonucleotide
  Antisense strand to SEQ ID NO: 2034318
ucuaccacuuacuauuugu

SEQ ID NO: 2034320 - RNA, 19 nt, Artificial Sequence
  Description of Artificial Sequence: Synthetic oligonucleotide
  Sense strand starting at position 2282 of SEQ ID NO: 1881306
gggucuugggaauggcaga

SEQ ID NO: 2034321 - RNA, 19 nt, Artificial Sequence
  Description of Artificial Sequence: Synthetic oligonucleotide
  Antisense strand to SEQ ID NO: 2034320
ucugccauucccaagaccc

SEQ ID NO: 2034322 - RNA, 19 nt, Artificial Sequence
  Description of Artificial Sequence: Synthetic oligonucleotide
  Sense strand starting at position 2306 of SEQ ID NO: 1881306
ggguguaaucuuuaacuga

SEQ ID NO: 2034323 - RNA, 19 nt, Artificial Sequence
  Description of Artificial Sequence: Synthetic oligonucleotide
  Antisense strand to SEQ ID NO: 2034322
ucaguuaaagauuacaccc

SEQ ID NO: 2034324 - RNA, 19 nt, Artificial Sequence
  Description of Artificial Sequence: Synthetic oligonucleotide
  Sense strand starting at position 2309 of SEQ ID NO: 1881306
uguaaucuuuaacugaaag

SEQ ID NO: 2034325 - RNA, 19 nt, Artificial Sequence
  Description of Artificial Sequence: Synthetic oligonucleotide
  Antisense strand to SEQ ID NO: 2034324
cuuucaguuaaagauuaca

SEQ ID NO: 2034326 - RNA, 19 nt, Artificial Sequence
  Description of Artificial Sequence: Synthetic oligonucleotide
  Sense strand starting at position 2347 of SEQ ID NO: 1881306
cucugcagugaaugaaaga

SEQ ID NO: 2034327 - RNA, 19 nt, Artificial Sequence
  Description of Artificial Sequence: Synthetic oligonucleotide
  Antisense strand to SEQ ID NO: 2034326
ucuuucauucacugcagag

SEQ ID NO: 2034328 - RNA, 19 nt, Artificial Sequence
  Description of Artificial Sequence: Synthetic oligonucleotide
  Sense strand starting at position 2379 of SEQ ID NO: 1881306
agugguauuugucuaagug

SEQ ID NO: 2034329 - RNA, 19 nt, Artificial Sequence
  Description of Artificial Sequence: Synthetic oligonucleotide
  Antisense strand to SEQ ID NO: 2034328
cacuuagacaaauaccacu

SEQ ID NO: 2034330 - RNA, 19 nt, Artificial Sequence
  Description of Artificial Sequence: Synthetic oligonucleotide
  Sense strand starting at position 2388 of SEQ ID NO: 1881306
ugucuaagugauuaucacu

SEQ ID NO: 2034331 - RNA, 19 nt, Artificial Sequence
  Description of Artificial Sequence: Synthetic oligonucleotide
  Antisense strand to SEQ ID NO: 2034330
agugauaaucacuuagaca

SEQ ID NO: 2034332 - RNA, 19 nt, Artificial Sequence
  Description of Artificial Sequence: Synthetic oligonucleotide
  Sense strand starting at position 2445 of SEQ ID NO: 1881306
ucuacuuguguacauauau

SEQ ID NO: 2034333 - RNA, 19 nt, Artificial Sequence
  Description of Artificial Sequence: Synthetic oligonucleotide
  Antisense strand to SEQ ID NO: 2034332
auauauguacacaaguaga

SEQ ID NO: 2034334 - RNA, 19 nt, Artificial Sequence
  Description of Artificial Sequence: Synthetic oligonucleotide
  Sense strand starting at position 2494 of SEQ ID NO: 1881306
auugaaacccaguaaguuu

SEQ ID NO: 2034335 - RNA, 19 nt, Artificial Sequence
  Description of Artificial Sequence: Synthetic oligonucleotide
  Antisense strand to SEQ ID NO: 2034334
aaacuuacuggguuucaau

SEQ ID NO: 2034336 - RNA, 19 nt, Artificial Sequence
  Description of Artificial Sequence: Synthetic oligonucleotide
  Sense strand starting at position 2594 of SEQ ID NO: 1881306
gaucuaucaggauggugau

SEQ ID NO: 2034337 - RNA, 19 nt, Artificial Sequence
  Description of Artificial Sequence: Synthetic oligonucleotide
  Antisense strand to SEQ ID NO: 2034336
aucaccauccugauagauc

SEQ ID NO: 2034338 - RNA, 19 nt, Artificial Sequence
  Description of Artificial Sequence: Synthetic oligonucleotide
  Sense strand starting at position 2719 of SEQ ID NO: 1881306
ugccuaagucaugauggga

SEQ ID NO: 2034339 - RNA, 19 nt, Artificial Sequence
  Description of Artificial Sequence: Synthetic oligonucleotide
  Antisense strand to SEQ ID NO: 2034338
ucccaucaugacuuaggca

SEQ ID NO: 2034340 - RNA, 19 nt, Artificial Sequence
  Description of Artificial Sequence: Synthetic oligonucleotide
  Sense strand starting at position 2737 of SEQ ID NO: 1881306
agagaacaugugugaaugu

SEQ ID NO: 2034341 - RNA, 19 nt, Artificial Sequence
  Description of Artificial Sequence: Synthetic oligonucleotide
  Antisense strand to SEQ ID NO: 2034340
acauucacacauguucucu

SEQ ID NO: 2034342 - RNA, 19 nt, Artificial Sequence
  Description of Artificial Sequence: Synthetic oligonucleotide
  Sense strand starting at position 2878 of SEQ ID NO: 1881306
uugcuaacuguauagaauc

SEQ ID NO: 2034343 - RNA, 19 nt, Artificial Sequence
  Description of Artificial Sequence: Synthetic oligonucleotide
  Antisense strand to SEQ ID NO: 2034342
gauucuauacaguuagcaa

SEQ ID NO: 2034344 - RNA, 19 nt, Artificial Sequence
  Description of Artificial Sequence: Synthetic oligonucleotide
  Sense strand starting at position 2997 of SEQ ID NO: 1881306
cgugauauucucuauggac

SEQ ID NO: 2034345 - RNA, 19 nt, Artificial Sequence
  Description of Artificial Sequence: Synthetic oligonucleotide
  Antisense strand to SEQ ID NO: 2034344
guccauagagaauaucacg

SEQ ID NO: 2034346 - RNA, 19 nt, Artificial Sequence
  Description of Artificial Sequence: Synthetic oligonucleotide
  Sense strand starting at position 2999 of SEQ ID NO: 1881306
ugauauucucuauggacaa

SEQ ID NO: 2034347 - RNA, 19 nt, Artificial Sequence
  Description of Artificial Sequence: Synthetic oligonucleotide
  Antisense strand to SEQ ID NO: 2034346
uuguccauagagaauauca

SEQ ID NO: 2034348 - RNA, 19 nt, Artificial Sequence
  Description of Artificial Sequence: Synthetic oligonucleotide
  Sense strand starting at position 3129 of SEQ ID NO: 1881306
aagguaaacuacuugguuu

SEQ ID NO: 2034349 - RNA, 19 nt, Artificial Sequence
  Description of Artificial Sequence: Synthetic oligonucleotide
  Antisense strand to SEQ ID NO: 2034348
aaaccaaguaguuuaccuu

SEQ ID NO: 2034350 - RNA, 19 nt, Artificial Sequence
  Description of Artificial Sequence: Synthetic oligonucleotide
  Sense strand starting at position 3168 of SEQ ID NO: 1881306
ugggaagagccuugaacuu

SEQ ID NO: 2034351 - RNA, 19 nt, Artificial Sequence
  Description of Artificial Sequence: Synthetic oligonucleotide
  Antisense strand to SEQ ID NO: 2034350
aaguucaaggcucuuccca

SEQ ID NO: 2034352 - RNA, 19 nt, Artificial Sequence
  Description of Artificial Sequence: Synthetic oligonucleotide
  Sense strand starting at position 3250 of SEQ ID NO: 1881306
aggacauaguuucuuuauu

SEQ ID NO: 2034353 - RNA, 19 nt, Artificial Sequence
  Description of Artificial Sequence: Synthetic oligonucleotide
  Antisense strand to SEQ ID NO: 2034352
aauaaagaaacuauguccu

SEQ ID NO: 2034354 - RNA, 19 nt, Artificial Sequence
  Description of Artificial Sequence: Synthetic oligonucleotide
  Sense strand starting at position 3528 of SEQ ID NO: 1881306
uguagauuacuugaugcaa

SEQ ID NO: 2034355 - RNA, 19 nt, Artificial Sequence
  Description of Artificial Sequence: Synthetic oligonucleotide
  Antisense strand to SEQ ID NO: 2034354
uugcaucaaguaaucuaca

SEQ ID NO: 2034356 - RNA, 19 nt, Artificial Sequence
  Description of Artificial Sequence: Synthetic oligonucleotide
  Sense strand starting at position 3570 of SEQ ID NO: 1881306
cuaagugcacuuuaagaaa

SEQ ID NO: 2034357 - RNA, 19 nt, Artificial Sequence
  Description of Artificial Sequence: Synthetic oligonucleotide
  Antisense strand to SEQ ID NO: 2034356
uuucuuaaagugcacuuag

SEQ ID NO: 2034358 - RNA, 19 nt, Artificial Sequence
  Description of Artificial Sequence: Synthetic oligonucleotide
  Sense strand starting at position 3748 of SEQ ID NO: 1881306
ggaacuaccuuguugagaa

SEQ ID NO: 2034359 - RNA, 19 nt, Artificial Sequence
  Description of Artificial Sequence: Synthetic oligonucleotide
  Antisense strand to SEQ ID NO: 2034358
uucucaacaagguaguucc

SEQ ID NO: 2034360 - RNA, 19 nt, Artificial Sequence
  Description of Artificial Sequence: Synthetic oligonucleotide
  Sense strand starting at position 206 of SEQ ID NO: 1881307
uuauuuagcugaugaagaa

SEQ ID NO: 2034361 - RNA, 19 nt, Artificial Sequence
  Description of Artificial Sequence: Synthetic oligonucleotide
  Antisense strand to SEQ ID NO: 2034360
uucuucaucagcuaaauaa

SEQ ID NO: 2034362 - RNA, 19 nt, Artificial Sequence
  Description of Artificial Sequence: Synthetic oligonucleotide
  Sense strand starting at position 306 of SEQ ID NO: 1881307
agaguuaucuuucuaccau

SEQ ID NO: 2034363 - RNA, 19 nt, Artificial Sequence
  Description of Artificial Sequence: Synthetic oligonucleotide
  Antisense strand to SEQ ID NO: 2034362
augguagaaagauaacucu

SEQ ID NO: 2034364 - RNA, 19 nt, Artificial Sequence
  Description of Artificial Sequence: Synthetic oligonucleotide
  Sense strand starting at position 684 of SEQ ID NO: 1881307
ggacuagauucagcgauag

SEQ ID NO: 2034365 - RNA, 19 nt, Artificial Sequence
  Description of Artificial Sequence: Synthetic oligonucleotide
  Antisense strand to SEQ ID NO: 2034364
cuaucgcugaaucuagucc

SEQ ID NO: 2034366 - RNA, 19 nt, Artificial Sequence
  Description of Artificial Sequence: Synthetic oligonucleotide
  Sense strand starting at position 694 of SEQ ID NO: 1881307
cagcgauagauggguuuau

SEQ ID NO: 2034367 - RNA, 19 nt, Artificial Sequence
  Description of Artificial Sequence: Synthetic oligonucleotide
  Antisense strand to SEQ ID NO: 2034366
auaaacccaucuaucgcug

SEQ ID NO: 2034368 - RNA, 19 nt, Artificial Sequence
  Description of Artificial Sequence: Synthetic oligonucleotide
  Sense strand starting at position 695 of SEQ ID NO: 1881307
agcgauagauggguuuauu

SEQ ID NO: 2034369 - RNA, 19 nt, Artificial Sequence
  Description of Artificial Sequence: Synthetic oligonucleotide
  Antisense strand to SEQ ID NO: 2034368
aauaaacccaucuaucgcu

SEQ ID NO: 2034370 - RNA, 19 nt, Artificial Sequence
  Description of Artificial Sequence: Synthetic oligonucleotide
  Sense strand starting at position 851 of SEQ ID NO: 1881307
gucagugguuagguugaca

SEQ ID NO: 2034371 - RNA, 19 nt, Artificial Sequence
  Description of Artificial Sequence: Synthetic oligonucleotide
  Antisense strand to SEQ ID NO: 2034370
ugucaaccuaaccacugac

SEQ ID NO: 2034372 - RNA, 19 nt, Artificial Sequence
  Description of Artificial Sequence: Synthetic oligonucleotide
  Sense strand starting at position 954 of SEQ ID NO: 1881307
aucucucaaggauguuaga

SEQ ID NO: 2034373 - RNA, 19 nt, Artificial Sequence
  Description of Artificial Sequence: Synthetic oligonucleotide
  Antisense strand to SEQ ID NO: 2034372
ucuaacauccuugagagau

SEQ ID NO: 2034374 - RNA, 19 nt, Artificial Sequence
  Description of Artificial Sequence: Synthetic oligonucleotide
  Sense strand starting at position 968 of SEQ ID NO: 1881307
uuagaauacuuccugugac

SEQ ID NO: 2034375 - RNA, 19 nt, Artificial Sequence
  Description of Artificial Sequence: Synthetic oligonucleotide
  Antisense strand to SEQ ID NO: 2034374
gucacaggaaguauucuaa

SEQ ID NO: 2034376 - RNA, 19 nt, Artificial Sequence
  Description of Artificial Sequence: Synthetic oligonucleotide
  Sense strand starting at position 971 of SEQ ID NO: 1881307
gaauacuuccugugacagc

SEQ ID NO: 2034377 - RNA, 19 nt, Artificial Sequence
  Description of Artificial Sequence: Synthetic oligonucleotide
  Antisense strand to SEQ ID NO: 2034376
gcugucacaggaaguauuc

SEQ ID NO: 2034378 - RNA, 19 nt, Artificial Sequence
  Description of Artificial Sequence: Synthetic oligonucleotide
  Sense strand starting at position 1127 of SEQ ID NO: 1881307
aagugaaguaaaugagagu

SEQ ID NO: 2034379 - RNA, 19 nt, Artificial Sequence
  Description of Artificial Sequence: Synthetic oligonucleotide
  Antisense strand to SEQ ID NO: 2034378
acucucauuuacuucacuu

SEQ ID NO: 2034380 - RNA, 19 nt, Artificial Sequence
  Description of Artificial Sequence: Synthetic oligonucleotide
  Sense strand starting at position 1165 of SEQ ID NO: 1881307
guuauuugcugacaccaca

SEQ ID NO: 2034381 - RNA, 19 nt, Artificial Sequence
  Description of Artificial Sequence: Synthetic oligonucleotide
  Antisense strand to SEQ ID NO: 2034380
uguggugucagcaaauaac

SEQ ID NO: 2034382 - RNA, 19 nt, Artificial Sequence
  Description of Artificial Sequence: Synthetic oligonucleotide
  Sense strand starting at position 1314 of SEQ ID NO: 1881307
gcugucagguguccaagaa

SEQ ID NO: 2034383 - RNA, 19 nt, Artificial Sequence
  Description of Artificial Sequence: Synthetic oligonucleotide
  Antisense strand to SEQ ID NO: 2034382
uucuuggacaccugacagc

SEQ ID NO: 2034384 - RNA, 19 nt, Artificial Sequence
  Description of Artificial Sequence: Synthetic oligonucleotide
  Sense strand starting at position 1315 of SEQ ID NO: 1881307
cugucagguguccaagaaa

SEQ ID NO: 2034385 - RNA, 19 nt, Artificial Sequence
  Description of Artificial Sequence: Synthetic oligonucleotide
  Antisense strand to SEQ ID NO: 2034384
uuucuuggacaccugacag

SEQ ID NO: 2034386 - RNA, 19 nt, Artificial Sequence
  Description of Artificial Sequence: Synthetic oligonucleotide
  Sense strand starting at position 1364 of SEQ ID NO: 1881307
cucagaaugcuauggauag

SEQ ID NO: 2034387 - RNA, 19 nt, Artificial Sequence
  Description of Artificial Sequence: Synthetic oligonucleotide
  Antisense strand to SEQ ID NO: 2034386
cuauccauagcauucugag

SEQ ID NO: 2034388 - RNA, 19 nt, Artificial Sequence
  Description of Artificial Sequence: Synthetic oligonucleotide
  Sense strand starting at position 2075 of SEQ ID NO: 1881307
ggcggaguuucccugagaa

SEQ ID NO: 2034389 - RNA, 19 nt, Artificial Sequence
  Description of Artificial Sequence: Synthetic oligonucleotide
  Antisense strand to SEQ ID NO: 2034388
uucucagggaaacuccgcc

SEQ ID NO: 2034390 - RNA, 19 nt, Artificial Sequence
  Description of Artificial Sequence: Synthetic oligonucleotide
  Sense strand starting at position 2077 of SEQ ID NO: 1881307
cggaguuucccugagaagg

SEQ ID NO: 2034391 - RNA, 19 nt, Artificial Sequence
  Description of Artificial Sequence: Synthetic oligonucleotide
  Antisense strand to SEQ ID NO: 2034390
ccuucucagggaaacuccg

SEQ ID NO: 2034392 - RNA, 19 nt, Artificial Sequence
  Description of Artificial Sequence: Synthetic oligonucleotide
  Sense strand starting at position 2272 of SEQ ID NO: 1881307
gacgucaaauugccucuua

SEQ ID NO: 2034393 - RNA, 19 nt, Artificial Sequence
  Description of Artificial Sequence: Synthetic oligonucleotide
  Antisense strand to SEQ ID NO: 2034392
uaagaggcaauuugacguc

SEQ ID NO: 2034394 - RNA, 19 nt, Artificial Sequence
  Description of Artificial Sequence: Synthetic oligonucleotide
  Sense strand starting at position 2273 of SEQ ID NO: 1881307
acgucaaauugccucuuau

SEQ ID NO: 2034395 - RNA, 19 nt, Artificial Sequence
  Description of Artificial Sequence: Synthetic oligonucleotide
  Antisense strand to SEQ ID NO: 2034394
auaagaggcaauuugacgu

SEQ ID NO: 2034396 - RNA, 19 nt, Artificial Sequence
  Description of Artificial Sequence: Synthetic oligonucleotide
  Sense strand starting at position 2391 of SEQ ID NO: 1881307
cagggaucccuuuguaaua

SEQ ID NO: 2034397 - RNA, 19 nt, Artificial Sequence
  Description of Artificial Sequence: Synthetic oligonucleotide
  Antisense strand to SEQ ID NO: 2034396
uauuacaaagggaucccug

SEQ ID NO: 2034398 - RNA, 19 nt, Artificial Sequence
  Description of Artificial Sequence: Synthetic oligonucleotide
  Sense strand starting at position 2392 of SEQ ID NO: 1881307
agggaucccuuuguaauag

SEQ ID NO: 2034399 - RNA, 19 nt, Artificial Sequence
  Description of Artificial Sequence: Synthetic oligonucleotide
  Antisense strand to SEQ ID NO: 2034398
cuauuacaaagggaucccu

SEQ ID NO: 2034400 - RNA, 19 nt, Artificial Sequence
  Description of Artificial Sequence: Synthetic oligonucleotide
  Sense strand starting at position 2427 of SEQ ID NO: 1881307
gggugacuuagacguagga

SEQ ID NO: 2034401 - RNA, 19 nt, Artificial Sequence
  Description of Artificial Sequence: Synthetic oligonucleotide
  Antisense strand to SEQ ID NO: 2034400
uccuacgucuaagucaccc

SEQ ID NO: 2034402 - RNA, 19 nt, Artificial Sequence
  Description of Artificial Sequence: Synthetic oligonucleotide
  Sense strand starting at position 2429 of SEQ ID NO: 1881307
gugacuuagacguaggaaa

SEQ ID NO: 2034403 - RNA, 19 nt, Artificial Sequence
  Description of Artificial Sequence: Synthetic oligonucleotide
  Antisense strand to SEQ ID NO: 2034402
uuuccuacgucuaagucac

SEQ ID NO: 2034404 - RNA, 19 nt, Artificial Sequence
  Description of Artificial Sequence: Synthetic oligonucleotide
  Sense strand starting at position 2505 of SEQ ID NO: 1881307
ggcacuaggccucaagaga

SEQ ID NO: 2034405 - RNA, 19 nt, Artificial Sequence
  Description of Artificial Sequence: Synthetic oligonucleotide
  Antisense strand to SEQ ID NO: 2034404
ucucuugaggccuagugcc

SEQ ID NO: 2034406 - RNA, 19 nt, Artificial Sequence
  Description of Artificial Sequence: Synthetic oligonucleotide
  Sense strand starting at position 2552 of SEQ ID NO: 1881307
guccuaggugcugcguaau

SEQ ID NO: 2034407 - RNA, 19 nt, Artificial Sequence
  Description of Artificial Sequence: Synthetic oligonucleotide
  Antisense strand to SEQ ID NO: 2034406
auuacgcagcaccuaggac

SEQ ID NO: 2034408 - RNA, 19 nt, Artificial Sequence
  Description of Artificial Sequence: Synthetic oligonucleotide
  Sense strand starting at position 2658 of SEQ ID NO: 1881307
ugauguaacucuuugagga

SEQ ID NO: 2034409 - RNA, 19 nt, Artificial Sequence
  Description of Artificial Sequence: Synthetic oligonucleotide
  Antisense strand to SEQ ID NO: 2034408
uccucaaagaguuacauca

SEQ ID NO: 2034410 - RNA, 19 nt, Artificial Sequence
  Description of Artificial Sequence: Synthetic oligonucleotide
  Sense strand starting at position 2659 of SEQ ID NO: 1881307
gauguaacucuuugaggaa

SEQ ID NO: 2034411 - RNA, 19 nt, Artificial Sequence
  Description of Artificial Sequence: Synthetic oligonucleotide
  Antisense strand to SEQ ID NO: 2034410
uuccucaaagaguuacauc

SEQ ID NO: 2034412 - RNA, 19 nt, Artificial Sequence
  Description of Artificial Sequence: Synthetic oligonucleotide
  Sense strand starting at position 3176 of SEQ ID NO: 1881307
guuucuugacagugggcaa

SEQ ID NO: 2034413 - RNA, 19 nt, Artificial Sequence
  Description of Artificial Sequence: Synthetic oligonucleotide
  Antisense strand to SEQ ID NO: 2034412
uugcccacugucaagaaac

SEQ ID NO: 2034414 - RNA, 19 nt, Artificial Sequence
  Description of Artificial Sequence: Synthetic oligonucleotide
  Sense strand starting at position 3213 of SEQ ID NO: 1881307
agguauauaguauaguaca

SEQ ID NO: 2034415 - RNA, 19 nt, Artificial Sequence
  Description of Artificial Sequence: Synthetic oligonucleotide
  Antisense strand to SEQ ID NO: 2034414
uguacuauacuauauaccu

SEQ ID NO: 2034416 - RNA, 19 nt, Artificial Sequence
  Description of Artificial Sequence: Synthetic oligonucleotide
  Sense strand starting at position 3253 of SEQ ID NO: 1881307
auauauaggucaguguaga

SEQ ID NO: 2034417 - RNA, 19 nt, Artificial Sequence
  Description of Artificial Sequence: Synthetic oligonucleotide
  Antisense strand to SEQ ID NO: 2034416
ucuacacugaccuauauau

SEQ ID NO: 2034418 - RNA, 19 nt, Artificial Sequence
  Description of Artificial Sequence: Synthetic oligonucleotide
  Sense strand starting at position 3254 of SEQ ID NO: 1881307
uauauaggucaguguagau

SEQ ID NO: 2034419 - RNA, 19 nt, Artificial Sequence
  Description of Artificial Sequence: Synthetic oligonucleotide
  Antisense strand to SEQ ID NO: 2034418
aucuacacugaccuauaua

SEQ ID NO: 2034420 - RNA, 19 nt, Artificial Sequence
  Description of Artificial Sequence: Synthetic oligonucleotide
  Sense strand starting at position 3258 of SEQ ID NO: 1881307
uaggucaguguagauauau

SEQ ID NO: 2034421 - RNA, 19 nt, Artificial Sequence
  Description of Artificial Sequence: Synthetic oligonucleotide
  Antisense strand to SEQ ID NO: 2034420
auauaucuacacugaccua

SEQ ID NO: 2034422 - RNA, 19 nt, Artificial Sequence
  Description of Artificial Sequence: Synthetic oligonucleotide
  Sense strand starting at position 3640 of SEQ ID NO: 1881307
ugguuauaucccuaagccu

SEQ ID NO: 2034423 - RNA, 19 nt, Artificial Sequence
  Description of Artificial Sequence: Synthetic oligonucleotide
  Antisense strand to SEQ ID NO: 2034422
aggcuuagggauauaacca

SEQ ID NO: 2034424 - RNA, 19 nt, Artificial Sequence
  Description of Artificial Sequence: Synthetic oligonucleotide
  Sense strand starting at position 3647 of SEQ ID NO: 1881307
aucccuaagccuuguggaa

SEQ ID NO: 2034425 - RNA, 19 nt, Artificial Sequence
  Description of Artificial Sequence: Synthetic oligonucleotide
  Antisense strand to SEQ ID NO: 2034424
uuccacaaggcuuagggau

SEQ ID NO: 2034426 - RNA, 19 nt, Artificial Sequence
  Description of Artificial Sequence: Synthetic oligonucleotide
  Sense strand starting at position 3651 of SEQ ID NO: 1881307
cuaagccuuguggaaauau

SEQ ID NO: 2034427 - RNA, 19 nt, Artificial Sequence
  Description of Artificial Sequence: Synthetic oligonucleotide
  Antisense strand to SEQ ID NO: 2034426
auauuuccacaaggcuuag

SEQ ID NO: 2034428 - RNA, 19 nt, Artificial Sequence
  Description of Artificial Sequence: Synthetic oligonucleotide
  Sense strand starting at position 3698 of SEQ ID NO: 1881307
cugugcucccaggaguuua

SEQ ID NO: 2034429 - RNA, 19 nt, Artificial Sequence
  Description of Artificial Sequence: Synthetic oligonucleotide
  Antisense strand to SEQ ID NO: 2034428
uaaacuccugggagcacag

SEQ ID NO: 2034430 - RNA, 19 nt, Artificial Sequence
  Description of Artificial Sequence: Synthetic oligonucleotide
  Sense strand starting at position 3887 of SEQ ID NO: 1881307
gaauauugugcuggaguca

SEQ ID NO: 2034431 - RNA, 19 nt, Artificial Sequence
  Description of Artificial Sequence: Synthetic oligonucleotide
  Antisense strand to SEQ ID NO: 2034430
ugacuccagcacaauauuc

SEQ ID NO: 2034432 - RNA, 19 nt, Artificial Sequence
  Description of Artificial Sequence: Synthetic oligonucleotide
  Sense strand starting at position 3892 of SEQ ID NO: 1881307
uugugcuggagucacuaaa

SEQ ID NO: 2034433 - RNA, 19 nt, Artificial Sequence
  Description of Artificial Sequence: Synthetic oligonucleotide
  Antisense strand to SEQ ID NO: 2034432
uuuagugacuccagcacaa

SEQ ID NO: 2034434 - RNA, 19 nt, Artificial Sequence
  Description of Artificial Sequence: Synthetic oligonucleotide
  Sense strand starting at position 3957 of SEQ ID NO: 1881307
gacaguaguggaggcuuua

SEQ ID NO: 2034435 - RNA, 19 nt, Artificial Sequence
  Description of Artificial Sequence: Synthetic oligonucleotide
  Antisense strand to SEQ ID NO: 2034434
uaaagccuccacuacuguc

SEQ ID NO: 2034436 - RNA, 19 nt, Artificial Sequence
  Description of Artificial Sequence: Synthetic oligonucleotide
  Sense strand starting at position 3969 of SEQ ID NO: 1881307
ggcuuuaggaugcacguua

SEQ ID NO: 2034437 - RNA, 19 nt, Artificial Sequence
  Description of Artificial Sequence: Synthetic oligonucleotide
  Antisense strand to SEQ ID NO: 2034436
uaacgugcauccuaaagcc

SEQ ID NO: 2034438 - RNA, 19 nt, Artificial Sequence
  Description of Artificial Sequence: Synthetic oligonucleotide
  Sense strand starting at position 3982 of SEQ ID NO: 1881307
acguuaaggaaugguggaa

SEQ ID NO: 2034439 - RNA, 19 nt, Artificial Sequence
  Description of Artificial Sequence: Synthetic oligonucleotide
  Antisense strand to SEQ ID NO: 2034438
uuccaccauuccuuaacgu

SEQ ID NO: 2034440 - RNA, 19 nt, Artificial Sequence
  Description of Artificial Sequence: Synthetic oligonucleotide
  Sense strand starting at position 87 of SEQ ID NO: 1881308
ugccgauuuacagguguga

SEQ ID NO: 2034441 - RNA, 19 nt, Artificial Sequence
  Description of Artificial Sequence: Synthetic oligonucleotide
  Antisense strand to SEQ ID NO: 2034440
ucacaccuguaaaucggca

SEQ ID NO: 2034442 - RNA, 19 nt, Artificial Sequence
  Description of Artificial Sequence: Synthetic oligonucleotide
  Sense strand starting at position 205 of SEQ ID NO: 1881308
gucucaacagucuaaucca

SEQ ID NO: 2034443 - RNA, 19 nt, Artificial Sequence
  Description of Artificial Sequence: Synthetic oligonucleotide
  Antisense strand to SEQ ID NO: 2034442
uggauuagacuguugagac

SEQ ID NO: 2034444 - RNA, 19 nt, Artificial Sequence
  Description of Artificial Sequence: Synthetic oligonucleotide
  Sense strand starting at position 659 of SEQ ID NO: 1881308
guuugcagugcuguccaua

SEQ ID NO: 2034445 - RNA, 19 nt, Artificial Sequence
  Description of Artificial Sequence: Synthetic oligonucleotide
  Antisense strand to SEQ ID NO: 2034444
uauggacagcacugcaaac

SEQ ID NO: 2034446 - RNA, 19 nt, Artificial Sequence
  Description of Artificial Sequence: Synthetic oligonucleotide
  Sense strand starting at position 660 of SEQ ID NO: 1881308
uuugcagugcuguccauau

SEQ ID NO: 2034447 - RNA, 19 nt, Artificial Sequence
  Description of Artificial Sequence: Synthetic oligonucleotide
  Antisense strand to SEQ ID NO: 2034446
auauggacagcacugcaaa

SEQ ID NO: 2034448 - RNA, 19 nt, Artificial Sequence
  Description of Artificial Sequence: Synthetic oligonucleotide
  Sense strand starting at position 679 of SEQ ID NO: 1881308
gcucauccaggucauuaau

SEQ ID NO: 2034449 - RNA, 19 nt, Artificial Sequence
  Description of Artificial Sequence: Synthetic oligonucleotide
  Antisense strand to SEQ ID NO: 2034448
auuaaugaccuggaugagc

SEQ ID NO: 2034450 - RNA, 19 nt, Artificial Sequence
  Description of Artificial Sequence: Synthetic oligonucleotide
  Sense strand starting at position 778 of SEQ ID NO: 1881308
cuaggaauggugugaugag

SEQ ID NO: 2034451 - RNA, 19 nt, Artificial Sequence
  Description of Artificial Sequence: Synthetic oligonucleotide
  Antisense strand to SEQ ID NO: 2034450
cucaucacaccauuccuag

SEQ ID NO: 2034452 - RNA, 19 nt, Artificial Sequence
  Description of Artificial Sequence: Synthetic oligonucleotide
  Sense strand starting at position 1025 of SEQ ID NO: 1881308
ucauguaaaggauguaguu

SEQ ID NO: 2034453 - RNA, 19 nt, Artificial Sequence
  Description of Artificial Sequence: Synthetic oligonucleotide
  Antisense strand to SEQ ID NO: 2034452
aacuacauccuuuacauga

SEQ ID NO: 2034454 - RNA, 19 nt, Artificial Sequence
  Description of Artificial Sequence: Synthetic oligonucleotide
  Sense strand starting at position 1047 of SEQ ID NO: 1881308
ugagccuugauggacuauu

SEQ ID NO: 2034455 - RNA, 19 nt, Artificial Sequence
  Description of Artificial Sequence: Synthetic oligonucleotide
  Antisense strand to SEQ ID NO: 2034454
aauaguccaucaaggcuca

SEQ ID NO: 2034456 - RNA, 19 nt, Artificial Sequence
  Description of Artificial Sequence: Synthetic oligonucleotide
  Sense strand starting at position 1105 of SEQ ID NO: 1881308
ugaagucaauuacuuguau

SEQ ID NO: 2034457 - RNA, 19 nt, Artificial Sequence
  Description of Artificial Sequence: Synthetic oligonucleotide
  Antisense strand to SEQ ID NO: 2034456
auacaaguaauugacuuca

SEQ ID NO: 2034458 - RNA, 19 nt, Artificial Sequence
  Description of Artificial Sequence: Synthetic oligonucleotide
  Sense strand starting at position 1621 of SEQ ID NO: 1881308
guauaaggcagagggauau

SEQ ID NO: 2034459 - RNA, 19 nt, Artificial Sequence
  Description of Artificial Sequence: Synthetic oligonucleotide
  Antisense strand to SEQ ID NO: 2034458
auaucccucugccuuauac

SEQ ID NO: 2034460 - RNA, 19 nt, Artificial Sequence
  Description of Artificial Sequence: Synthetic oligonucleotide
  Sense strand starting at position 1730 of SEQ ID NO: 1881308
acucauuggcuauacguau

SEQ ID NO: 2034461 - RNA, 19 nt, Artificial Sequence
  Description of Artificial Sequence: Synthetic oligonucleotide
  Antisense strand to SEQ ID NO: 2034460
auacguauagccaaugagu

SEQ ID NO: 2034462 - RNA, 19 nt, Artificial Sequence
  Description of Artificial Sequence: Synthetic oligonucleotide
  Sense strand starting at position 1858 of SEQ ID NO: 1881308
ucuccaacuugaguaguga

SEQ ID NO: 2034463 - RNA, 19 nt, Artificial Sequence
  Description of Artificial Sequence: Synthetic oligonucleotide
  Antisense strand to SEQ ID NO: 2034462
ucacuacucaaguuggaga

SEQ ID NO: 2034464 - RNA, 19 nt, Artificial Sequence
  Description of Artificial Sequence: Synthetic oligonucleotide
  Sense strand starting at position 1859 of SEQ ID NO: 1881308
cuccaacuugaguagugau

SEQ ID NO: 2034465 - RNA, 19 nt, Artificial Sequence
  Description of Artificial Sequence: Synthetic oligonucleotide
  Antisense strand to SEQ ID NO: 2034464
aucacuacucaaguuggag

SEQ ID NO: 2034466 - RNA, 19 nt, Artificial Sequence
  Description of Artificial Sequence: Synthetic oligonucleotide
  Sense strand starting at position 1890 of SEQ ID NO: 1881308
gguagaggugaaugugaug

SEQ ID NO: 2034467 - RNA, 19 nt, Artificial Sequence
  Description of Artificial Sequence: Synthetic oligonucleotide
  Antisense strand to SEQ ID NO: 2034466
caucacauucaccucuacc

SEQ ID NO: 2034468 - RNA, 19 nt, Artificial Sequence
  Description of Artificial Sequence: Synthetic oligonucleotide
  Sense strand starting at position 2074 of SEQ ID NO: 1881308
ugaaguaaacuuuggaauu

SEQ ID NO: 2034469 - RNA, 19 nt, Artificial Sequence
  Description of Artificial Sequence: Synthetic oligonucleotide
  Antisense strand to SEQ ID NO: 2034468
aauuccaaaguuuacuuca

SEQ ID NO: 2034470 - RNA, 19 nt, Artificial Sequence
  Description of Artificial Sequence: Synthetic oligonucleotide
  Sense strand starting at position 2084 of SEQ ID NO: 1881308
uuuggaauuucugaaagaa

SEQ ID NO: 2034471 - RNA, 19 nt, Artificial Sequence
  Description of Artificial Sequence: Synthetic oligonucleotide
  Antisense strand to SEQ ID NO: 2034470
uucuuucagaaauuccaaa

SEQ ID NO: 2034472 - RNA, 19 nt, Artificial Sequence
  Description of Artificial Sequence: Synthetic oligonucleotide
  Sense strand starting at position 2102 of SEQ ID NO: 1881308
aggagcauuuguuaaauau

SEQ ID NO: 2034473 - RNA, 19 nt, Artificial Sequence
  Description of Artificial Sequence: Synthetic oligonucleotide
  Antisense strand to SEQ ID NO: 2034472
auauuuaacaaaugcuccu

SEQ ID NO: 2034474 - RNA, 19 nt, Artificial Sequence
  Description of Artificial Sequence: Synthetic oligonucleotide
  Sense strand starting at position 2360 of SEQ ID NO: 1881308
auuuauguugugugaaggu

SEQ ID NO: 2034475 - RNA, 19 nt, Artificial Sequence
  Description of Artificial Sequence: Synthetic oligonucleotide
  Antisense strand to SEQ ID NO: 2034474
accuucacacaacauaaau

SEQ ID NO: 2034476 - RNA, 19 nt, Artificial Sequence
  Description of Artificial Sequence: Synthetic oligonucleotide
  Sense strand starting at position 2431 of SEQ ID NO: 1881308
ggacauguuucacugggac

SEQ ID NO: 2034477 - RNA, 19 nt, Artificial Sequence
  Description of Artificial Sequence: Synthetic oligonucleotide
  Antisense strand to SEQ ID NO: 2034476
gucccagugaaacaugucc

SEQ ID NO: 2034478 - RNA, 19 nt, Artificial Sequence
  Description of Artificial Sequence: Synthetic oligonucleotide
  Sense strand starting at position 2501 of SEQ ID NO: 1881308
guaauaaauaugugagguc

SEQ ID NO: 2034479 - RNA, 19 nt, Artificial Sequence
  Description of Artificial Sequence: Synthetic oligonucleotide
  Antisense strand to SEQ ID NO: 2034478
gaccucacauauuuauuac

SEQ ID NO: 2034480 - RNA, 19 nt, Artificial Sequence
  Description of Artificial Sequence: Synthetic oligonucleotide
  Sense strand starting at position 3062 of SEQ ID NO: 1881308
gccuauguaguagaaauga

SEQ ID NO: 2034481 - RNA, 19 nt, Artificial Sequence
  Description of Artificial Sequence: Synthetic oligonucleotide
  Antisense strand to SEQ ID NO: 2034480
ucauuucuacuacauaggc

SEQ ID NO: 2034482 - RNA, 19 nt, Artificial Sequence
  Description of Artificial Sequence: Synthetic oligonucleotide
  Sense strand starting at position 3142 of SEQ ID NO: 1881308
uuaggagacuauccuuacu

SEQ ID NO: 2034483 - RNA, 19 nt, Artificial Sequence
  Description of Artificial Sequence: Synthetic oligonucleotide
  Antisense strand to SEQ ID NO: 2034482
aguaaggauagucuccuaa

SEQ ID NO: 2034484 - RNA, 19 nt, Artificial Sequence
  Description of Artificial Sequence: Synthetic oligonucleotide
  Sense strand starting at position 3144 of SEQ ID NO: 1881308
aggagacuauccuuacugu

SEQ ID NO: 2034485 - RNA, 19 nt, Artificial Sequence
  Description of Artificial Sequence: Synthetic oligonucleotide
  Antisense strand to SEQ ID NO: 2034484
acaguaaggauagucuccu

SEQ ID NO: 2034486 - RNA, 19 nt, Artificial Sequence
  Description of Artificial Sequence: Synthetic oligonucleotide
  Sense strand starting at position 3147 of SEQ ID NO: 1881308
agacuauccuuacuguaca

SEQ ID NO: 2034487 - RNA, 19 nt, Artificial Sequence
  Description of Artificial Sequence: Synthetic oligonucleotide
  Antisense strand to SEQ ID NO: 2034486
uguacaguaaggauagucu

SEQ ID NO: 2034488 - RNA, 19 nt, Artificial Sequence
  Description of Artificial Sequence: Synthetic oligonucleotide
  Sense strand starting at position 3150 of SEQ ID NO: 1881308
cuauccuuacuguacagau

SEQ ID NO: 2034489 - RNA, 19 nt, Artificial Sequence
  Description of Artificial Sequence: Synthetic oligonucleotide
  Antisense strand to SEQ ID NO: 2034488
aucuguacaguaaggauag

SEQ ID NO: 2034490 - RNA, 19 nt, Artificial Sequence
  Description of Artificial Sequence: Synthetic oligonucleotide
  Sense strand starting at position 3202 of SEQ ID NO: 1881308
aggccaucucucgaggaca

SEQ ID NO: 2034491 - RNA, 19 nt, Artificial Sequence
  Description of Artificial Sequence: Synthetic oligonucleotide
  Antisense strand to SEQ ID NO: 2034490
uguccucgagagauggccu

SEQ ID NO: 2034492 - RNA, 19 nt, Artificial Sequence
  Description of Artificial Sequence: Synthetic oligonucleotide
  Sense strand starting at position 3267 of SEQ ID NO: 1881308
ucaauuaacugccugagag

SEQ ID NO: 2034493 - RNA, 19 nt, Artificial Sequence
  Description of Artificial Sequence: Synthetic oligonucleotide
  Antisense strand to SEQ ID NO: 2034492
cucucaggcaguuaauuga

SEQ ID NO: 2034494 - RNA, 19 nt, Artificial Sequence
  Description of Artificial Sequence: Synthetic oligonucleotide
  Sense strand starting at position 3268 of SEQ ID NO: 1881308
caauuaacugccugagagu

SEQ ID NO: 2034495 - RNA, 19 nt, Artificial Sequence
  Description of Artificial Sequence: Synthetic oligonucleotide
  Antisense strand to SEQ ID NO: 2034494
acucucaggcaguuaauug

SEQ ID NO: 2034496 - RNA, 19 nt, Artificial Sequence
  Description of Artificial Sequence: Synthetic oligonucleotide
  Sense strand starting at position 3269 of SEQ ID NO: 1881308
aauuaacugccugagaguu

SEQ ID NO: 2034497 - RNA, 19 nt, Artificial Sequence
  Description of Artificial Sequence: Synthetic oligonucleotide
  Antisense strand to SEQ ID NO: 2034496
aacucucaggcaguuaauu

SEQ ID NO: 2034498 - RNA, 19 nt, Artificial Sequence
  Description of Artificial Sequence: Synthetic oligonucleotide
  Sense strand starting at position 3285 of SEQ ID NO: 1881308
guuguagaucuugacugga

SEQ ID NO: 2034499 - RNA, 19 nt, Artificial Sequence
  Description of Artificial Sequence: Synthetic oligonucleotide
  Antisense strand to SEQ ID NO: 2034498
uccagucaagaucuacaac

SEQ ID NO: 2034500 - RNA, 19 nt, Artificial Sequence
  Description of Artificial Sequence: Synthetic oligonucleotide
  Sense strand starting at position 3287 of SEQ ID NO: 1881308
uguagaucuugacuggacu

SEQ ID NO: 2034501 - RNA, 19 nt, Artificial Sequence
  Description of Artificial Sequence: Synthetic oligonucleotide
  Antisense strand to SEQ ID NO: 2034500
aguccagucaagaucuaca

SEQ ID NO: 2034502 - RNA, 19 nt, Artificial Sequence
  Description of Artificial Sequence: Synthetic oligonucleotide
  Sense strand starting at position 3432 of SEQ ID NO: 1881308
cugaaugcugaagaaguuu

SEQ ID NO: 2034503 - RNA, 19 nt, Artificial Sequence
  Description of Artificial Sequence: Synthetic oligonucleotide
  Antisense strand to SEQ ID NO: 2034502
aaacuucuucagcauucag

SEQ ID NO: 2034504 - RNA, 19 nt, Artificial Sequence
  Description of Artificial Sequence: Synthetic oligonucleotide
  Sense strand starting at position 3438 of SEQ ID NO: 1881308
gcugaagaaguuuggacaa

SEQ ID NO: 2034505 - RNA, 19 nt, Artificial Sequence
  Description of Artificial Sequence: Synthetic oligonucleotide
  Antisense strand to SEQ ID NO: 2034504
uuguccaaacuucuucagc

SEQ ID NO: 2034506 - RNA, 19 nt, Artificial Sequence
  Description of Artificial Sequence: Synthetic oligonucleotide
  Sense strand starting at position 3470 of SEQ ID NO: 1881308
cuaggugucucccugaaga

SEQ ID NO: 2034507 - RNA, 19 nt, Artificial Sequence
  Description of Artificial Sequence: Synthetic oligonucleotide
  Antisense strand to SEQ ID NO: 2034506
ucuucagggagacaccuag

SEQ ID NO: 2034508 - RNA, 19 nt, Artificial Sequence
  Description of Artificial Sequence: Synthetic oligonucleotide
  Sense strand starting at position 3655 of SEQ ID NO: 1881308
uuuauauuggaaugcuauc

SEQ ID NO: 2034509 - RNA, 19 nt, Artificial Sequence
  Description of Artificial Sequence: Synthetic oligonucleotide
  Antisense strand to SEQ ID NO: 2034508
gauagcauuccaauauaaa

SEQ ID NO: 2034510 - RNA, 19 nt, Artificial Sequence
  Description of Artificial Sequence: Synthetic oligonucleotide
  Sense strand starting at position 3771 of SEQ ID NO: 1881308
ccaggucuugcugaccaau

SEQ ID NO: 2034511 - RNA, 19 nt, Artificial Sequence
  Description of Artificial Sequence: Synthetic oligonucleotide
  Antisense strand to SEQ ID NO: 2034510
auuggucagcaagaccugg

SEQ ID NO: 2034512 - RNA, 19 nt, Artificial Sequence
  Description of Artificial Sequence: Synthetic oligonucleotide
  Sense strand starting at position 3818 of SEQ ID NO: 1881308
cgucuuugggcccacagaa

SEQ ID NO: 2034513 - RNA, 19 nt, Artificial Sequence
  Description of Artificial Sequence: Synthetic oligonucleotide
  Antisense strand to SEQ ID NO: 2034512
uucugugggcccaaagacg

SEQ ID NO: 2034514 - RNA, 19 nt, Artificial Sequence
  Description of Artificial Sequence: Synthetic oligonucleotide
  Sense strand starting at position 3950 of SEQ ID NO: 1881308
cuccucuucccagauguuu

SEQ ID NO: 2034515 - RNA, 19 nt, Artificial Sequence
  Description of Artificial Sequence: Synthetic oligonucleotide
  Antisense strand to SEQ ID NO: 2034514
aaacaucugggaagaggag

SEQ ID NO: 2034516 - RNA, 19 nt, Artificial Sequence
  Description of Artificial Sequence: Synthetic oligonucleotide
  Sense strand starting at position 3956 of SEQ ID NO: 1881308
uucccagauguuuaguuga

SEQ ID NO: 2034517 - RNA, 19 nt, Artificial Sequence
  Description of Artificial Sequence: Synthetic oligonucleotide
  Antisense strand to SEQ ID NO: 2034516
ucaacuaaacaucugggaa

SEQ ID NO: 2034518 - RNA, 19 nt, Artificial Sequence
  Description of Artificial Sequence: Synthetic oligonucleotide
  Sense strand starting at position 3959 of SEQ ID NO: 1881308
ccagauguuuaguugacca

SEQ ID NO: 2034519 - RNA, 19 nt, Artificial Sequence
  Description of Artificial Sequence: Synthetic oligonucleotide
  Antisense strand to SEQ ID NO: 2034518
uggucaacuaaacaucugg

SEQ ID NO: 2034520 - RNA, 19 nt, Artificial Sequence
  Description of Artificial Sequence: Synthetic oligonucleotide
  Sense strand starting at position 380 of SEQ ID NO: 1881309
uucugaaucuugccaaguc

SEQ ID NO: 2034521 - RNA, 19 nt, Artificial Sequence
  Description of Artificial Sequence: Synthetic oligonucleotide
  Antisense strand to SEQ ID NO: 2034520
gacuuggcaagauucagaa

SEQ ID NO: 2034522 - RNA, 19 nt, Artificial Sequence
  Description of Artificial Sequence: Synthetic oligonucleotide
  Sense strand starting at position 442 of SEQ ID NO: 1881309
aggccaauaaguuguaaga

SEQ ID NO: 2034523 - RNA, 19 nt, Artificial Sequence
  Description of Artificial Sequence: Synthetic oligonucleotide
  Antisense strand to SEQ ID NO: 2034522
ucuuacaacuuauuggccu

SEQ ID NO: 2034524 - RNA, 19 nt, Artificial Sequence
  Description of Artificial Sequence: Synthetic oligonucleotide
  Sense strand starting at position 462 of SEQ ID NO: 1881309
gcaucaacgcauuaagaaa

SEQ ID NO: 2034525 - RNA, 19 nt, Artificial Sequence
  Description of Artificial Sequence: Synthetic oligonucleotide
  Antisense strand to SEQ ID NO: 2034524
uuucuuaaugcguugaugc

SEQ ID NO: 2034526 - RNA, 19 nt, Artificial Sequence
  Description of Artificial Sequence: Synthetic oligonucleotide
  Sense strand starting at position 503 of SEQ ID NO: 1881309
auaagacagcuuuguuaac

SEQ ID NO: 2034527 - RNA, 19 nt, Artificial Sequence
  Description of Artificial Sequence: Synthetic oligonucleotide
  Antisense strand to SEQ ID NO: 2034526
guuaacaaagcugucuuau

SEQ ID NO: 2034528 - RNA, 19 nt, Artificial Sequence
  Description of Artificial Sequence: Synthetic oligonucleotide
  Sense strand starting at position 533 of SEQ ID NO: 1881309
cccuguaauuuggaagaca

SEQ ID NO: 2034529 - RNA, 19 nt, Artificial Sequence
  Description of Artificial Sequence: Synthetic oligonucleotide
  Antisense strand to SEQ ID NO: 2034528
ugucuuccaaauuacaggg

SEQ ID NO: 2034530 - RNA, 19 nt, Artificial Sequence
  Description of Artificial Sequence: Synthetic oligonucleotide
  Sense strand starting at position 575 of SEQ ID NO: 1881309
gucagauaacgcuaggugu

SEQ ID NO: 2034531 - RNA, 19 nt, Artificial Sequence
  Description of Artificial Sequence: Synthetic oligonucleotide
  Antisense strand to SEQ ID NO: 2034530
acaccuagcguuaucugac

SEQ ID NO: 2034532 - RNA, 19 nt, Artificial Sequence
  Description of Artificial Sequence: Synthetic oligonucleotide
  Sense strand starting at position 624 of SEQ ID NO: 1881309
gagagcuauuggccuggaa

SEQ ID NO: 2034533 - RNA, 19 nt, Artificial Sequence
  Description of Artificial Sequence: Synthetic oligonucleotide
  Antisense strand to SEQ ID NO: 2034532
uuccaggccaauagcucuc

SEQ ID NO: 2034534 - RNA, 19 nt, Artificial Sequence
  Description of Artificial Sequence: Synthetic oligonucleotide
  Sense strand starting at position 626 of SEQ ID NO: 1881309
gagcuauuggccuggaaac

SEQ ID NO: 2034535 - RNA, 19 nt, Artificial Sequence
  Description of Artificial Sequence: Synthetic oligonucleotide
  Antisense strand to SEQ ID NO: 2034534
guuuccaggccaauagcuc

SEQ ID NO: 2034536 - RNA, 19 nt, Artificial Sequence
  Description of Artificial Sequence: Synthetic oligonucleotide
  Sense strand starting at position 627 of SEQ ID NO: 1881309
agcuauuggccuggaaacu

SEQ ID NO: 2034537 - RNA, 19 nt, Artificial Sequence
  Description of Artificial Sequence: Synthetic oligonucleotide
  Antisense strand to SEQ ID NO: 2034536
aguuuccaggccaauagcu

SEQ ID NO: 2034538 - RNA, 19 nt, Artificial Sequence
  Description of Artificial Sequence: Synthetic oligonucleotide
  Sense strand starting at position 636 of SEQ ID NO: 1881309
ccuggaaacucuucuugag

SEQ ID NO: 2034539 - RNA, 19 nt, Artificial Sequence
  Description of Artificial Sequence: Synthetic oligonucleotide
  Antisense strand to SEQ ID NO: 2034538
cucaagaagaguuuccagg

SEQ ID NO: 2034540 - RNA, 19 nt, Artificial Sequence
  Description of Artificial Sequence: Synthetic oligonucleotide
  Sense strand starting at position 638 of SEQ ID NO: 1881309
uggaaacucuucuugagca

SEQ ID NO: 2034541 - RNA, 19 nt, Artificial Sequence
  Description of Artificial Sequence: Synthetic oligonucleotide
  Antisense strand to SEQ ID NO: 2034540
ugcucaagaagaguuucca

SEQ ID NO: 2034542 - RNA, 19 nt, Artificial Sequence
  Description of Artificial Sequence: Synthetic oligonucleotide
  Sense strand starting at position 648 of SEQ ID NO: 1881309
ucuugagcacuuuaugaug

SEQ ID NO: 2034543 - RNA, 19 nt, Artificial Sequence
  Description of Artificial Sequence: Synthetic oligonucleotide
  Antisense strand to SEQ ID NO: 2034542
caucauaaagugcucaaga

SEQ ID NO: 2034544 - RNA, 19 nt, Artificial Sequence
  Description of Artificial Sequence: Synthetic oligonucleotide
  Sense strand starting at position 669 of SEQ ID NO: 1881309
gagaaucagccaugcagca

SEQ ID NO: 2034545 - RNA, 19 nt, Artificial Sequence
  Description of Artificial Sequence: Synthetic oligonucleotide
  Antisense strand to SEQ ID NO: 2034544
ugcugcauggcugauucuc

SEQ ID NO: 2034546 - RNA, 19 nt, Artificial Sequence
  Description of Artificial Sequence: Synthetic oligonucleotide
  Sense strand starting at position 808 of SEQ ID NO: 1881309
ugagaugccuccucucuca

SEQ ID NO: 2034547 - RNA, 19 nt, Artificial Sequence
  Description of Artificial Sequence: Synthetic oligonucleotide
  Antisense strand to SEQ ID NO: 2034546
ugagagaggaggcaucuca

SEQ ID NO: 2034548 - RNA, 19 nt, Artificial Sequence
  Description of Artificial Sequence: Synthetic oligonucleotide
  Sense strand starting at position 949 of SEQ ID NO: 1881309
ggacuuauuuaauaagaug

SEQ ID NO: 2034549 - RNA, 19 nt, Artificial Sequence
  Description of Artificial Sequence: Synthetic oligonucleotide
  Antisense strand to SEQ ID NO: 2034548
caucuuauuaaauaagucc

SEQ ID NO: 2034550 - RNA, 19 nt, Artificial Sequence
  Description of Artificial Sequence: Synthetic oligonucleotide
  Sense strand starting at position 1014 of SEQ ID NO: 1881309
cccguaaugccagcauguu

SEQ ID NO: 2034551 - RNA, 19 nt, Artificial Sequence
  Description of Artificial Sequence: Synthetic oligonucleotide
  Antisense strand to SEQ ID NO: 2034550
aacaugcuggcauuacggg

SEQ ID NO: 2034552 - RNA, 19 nt, Artificial Sequence
  Description of Artificial Sequence: Synthetic oligonucleotide
  Sense strand starting at position 1094 of SEQ ID NO: 1881309
guggaacugucucuacuaa

SEQ ID NO: 2034553 - RNA, 19 nt, Artificial Sequence
  Description of Artificial Sequence: Synthetic oligonucleotide
  Antisense strand to SEQ ID NO: 2034552
uuaguagagacaguuccac

SEQ ID NO: 2034554 - RNA, 19 nt, Artificial Sequence
  Description of Artificial Sequence: Synthetic oligonucleotide
  Sense strand starting at position 1537 of SEQ ID NO: 1881309
gcgcucuacaaaggagaaa

SEQ ID NO: 2034555 - RNA, 19 nt, Artificial Sequence
  Description of Artificial Sequence: Synthetic oligonucleotide
  Antisense strand to SEQ ID NO: 2034554
uuucuccuuuguagagcgc

SEQ ID NO: 2034556 - RNA, 19 nt, Artificial Sequence
  Description of Artificial Sequence: Synthetic oligonucleotide
  Sense strand starting at position 1568 of SEQ ID NO: 1881309
uccugcuggccucaagaua

SEQ ID NO: 2034557 - RNA, 19 nt, Artificial Sequence
  Description of Artificial Sequence: Synthetic oligonucleotide
  Antisense strand to SEQ ID NO: 2034556
uaucuugaggccagcagga

SEQ ID NO: 2034558 - RNA, 19 nt, Artificial Sequence
  Description of Artificial Sequence: Synthetic oligonucleotide
  Sense strand starting at position 1611 of SEQ ID NO: 1881309
cucaaaguuugguccacuu

SEQ ID NO: 2034559 - RNA, 19 nt, Artificial Sequence
  Description of Artificial Sequence: Synthetic oligonucleotide
  Antisense strand to SEQ ID NO: 2034558
aaguggaccaaacuuugag

SEQ ID NO: 2034560 - RNA, 19 nt, Artificial Sequence
  Description of Artificial Sequence: Synthetic oligonucleotide
  Sense strand starting at position 1706 of SEQ ID NO: 1881309
gacacucaugagcgagauu

SEQ ID NO: 2034561 - RNA, 19 nt, Artificial Sequence
  Description of Artificial Sequence: Synthetic oligonucleotide
  Antisense strand to SEQ ID NO: 2034560
aaucucgcucaugaguguc

SEQ ID NO: 2034562 - RNA, 19 nt, Artificial Sequence
  Description of Artificial Sequence: Synthetic oligonucleotide
  Sense strand starting at position 1739 of SEQ ID NO: 1881309
ggucauucuguacaaaggu

SEQ ID NO: 2034563 - RNA, 19 nt, Artificial Sequence
  Description of Artificial Sequence: Synthetic oligonucleotide
  Antisense strand to SEQ ID NO: 2034562
accuuuguacagaaugacc

SEQ ID NO: 2034564 - RNA, 19 nt, Artificial Sequence
  Description of Artificial Sequence: Synthetic oligonucleotide
  Sense strand starting at position 1758 of SEQ ID NO: 1881309
ggucuuagguuucccauca

SEQ ID NO: 2034565 - RNA, 19 nt, Artificial Sequence
  Description of Artificial Sequence: Synthetic oligonucleotide
  Antisense strand to SEQ ID NO: 2034564
ugaugggaaaccuaagacc

SEQ ID NO: 2034566 - RNA, 19 nt, Artificial Sequence
  Description of Artificial Sequence: Synthetic oligonucleotide
  Sense strand starting at position 1823 of SEQ ID NO: 1881309
gcaguuuacuaaccucaag

SEQ ID NO: 2034567 - RNA, 19 nt, Artificial Sequence
  Description of Artificial Sequence: Synthetic oligonucleotide
  Antisense strand to SEQ ID NO: 2034566
cuugagguuaguaaacugc

SEQ ID NO: 2034568 - RNA, 19 nt, Artificial Sequence
  Description of Artificial Sequence: Synthetic oligonucleotide
  Sense strand starting at position 2124 of SEQ ID NO: 1881309
ggucgcguuuagauuguca

SEQ ID NO: 2034569 - RNA, 19 nt, Artificial Sequence
  Description of Artificial Sequence: Synthetic oligonucleotide
  Antisense strand to SEQ ID NO: 2034568
ugacaaucuaaacgcgacc

SEQ ID NO: 2034570 - RNA, 19 nt, Artificial Sequence
  Description of Artificial Sequence: Synthetic oligonucleotide
  Sense strand starting at position 2539 of SEQ ID NO: 1881309
acgauaacuuggccuagga

SEQ ID NO: 2034571 - RNA, 19 nt, Artificial Sequence
  Description of Artificial Sequence: Synthetic oligonucleotide
  Antisense strand to SEQ ID NO: 2034570
uccuaggccaaguuaucgu

SEQ ID NO: 2034572 - RNA, 19 nt, Artificial Sequence
  Description of Artificial Sequence: Synthetic oligonucleotide
  Sense strand starting at position 2681 of SEQ ID NO: 1881309
acguaaacacguagucgua

SEQ ID NO: 2034573 - RNA, 19 nt, Artificial Sequence
  Description of Artificial Sequence: Synthetic oligonucleotide
  Antisense strand to SEQ ID NO: 2034572
uacgacuacguguuuacgu

SEQ ID NO: 2034574 - RNA, 19 nt, Artificial Sequence
  Description of Artificial Sequence: Synthetic oligonucleotide
  Sense strand starting at position 2809 of SEQ ID NO: 1881309
cuuucuguuguagacugaa

SEQ ID NO: 2034575 - RNA, 19 nt, Artificial Sequence
  Description of Artificial Sequence: Synthetic oligonucleotide
  Antisense strand to SEQ ID NO: 2034574
uucagucuacaacagaaag

SEQ ID NO: 2034576 - RNA, 19 nt, Artificial Sequence
  Description of Artificial Sequence: Synthetic oligonucleotide
  Sense strand starting at position 2852 of SEQ ID NO: 1881309
aucccaagauauccaggua

SEQ ID NO: 2034577 - RNA, 19 nt, Artificial Sequence
  Description of Artificial Sequence: Synthetic oligonucleotide
  Antisense strand to SEQ ID NO: 2034576
uaccuggauaucuugggau

SEQ ID NO: 2034578 - RNA, 19 nt, Artificial Sequence
  Description of Artificial Sequence: Synthetic oligonucleotide
  Sense strand starting at position 2855 of SEQ ID NO: 1881309
ccaagauauccagguacua

SEQ ID NO: 2034579 - RNA, 19 nt, Artificial Sequence
  Description of Artificial Sequence: Synthetic oligonucleotide
  Antisense strand to SEQ ID NO: 2034578
uaguaccuggauaucuugg

SEQ ID NO: 2034580 - RNA, 19 nt, Artificial Sequence
  Description of Artificial Sequence: Synthetic oligonucleotide
  Sense strand starting at position 2867 of SEQ ID NO: 1881309
gguacuaugccuggaaccu

SEQ ID NO: 2034581 - RNA, 19 nt, Artificial Sequence
  Description of Artificial Sequence: Synthetic oligonucleotide
  Antisense strand to SEQ ID NO: 2034580
agguuccaggcauaguacc

SEQ ID NO: 2034582 - RNA, 19 nt, Artificial Sequence
  Description of Artificial Sequence: Synthetic oligonucleotide
  Sense strand starting at position 2885 of SEQ ID NO: 1881309
ugugaagaguuaccuuaua

SEQ ID NO: 2034583 - RNA, 19 nt, Artificial Sequence
  Description of Artificial Sequence: Synthetic oligonucleotide
  Antisense strand to SEQ ID NO: 2034582
uauaagguaacucuucaca

SEQ ID NO: 2034584 - RNA, 19 nt, Artificial Sequence
  Description of Artificial Sequence: Synthetic oligonucleotide
  Sense strand starting at position 3340 of SEQ ID NO: 1881309
agucuuugagaucgaaauu

SEQ ID NO: 2034585 - RNA, 19 nt, Artificial Sequence
  Description of Artificial Sequence: Synthetic oligonucleotide
  Antisense strand to SEQ ID NO: 2034584
aauuucgaucucaaagacu

SEQ ID NO: 2034586 - RNA, 19 nt, Artificial Sequence
  Description of Artificial Sequence: Synthetic oligonucleotide
  Sense strand starting at position 3341 of SEQ ID NO: 1881309
gucuuugagaucgaaauua

SEQ ID NO: 2034587 - RNA, 19 nt, Artificial Sequence
  Description of Artificial Sequence: Synthetic oligonucleotide
  Antisense strand to SEQ ID NO: 2034586
uaauuucgaucucaaagac

SEQ ID NO: 2034588 - RNA, 19 nt, Artificial Sequence
  Description of Artificial Sequence: Synthetic oligonucleotide
  Sense strand starting at position 3357 of SEQ ID NO: 1881309
uuaggaucaugccauuuaa

SEQ ID NO: 2034589 - RNA, 19 nt, Artificial Sequence
  Description of Artificial Sequence: Synthetic oligonucleotide
  Antisense strand to SEQ ID NO: 2034588
uuaaauggcaugauccuaa

SEQ ID NO: 2034590 - RNA, 19 nt, Artificial Sequence
  Description of Artificial Sequence: Synthetic oligonucleotide
  Sense strand starting at position 3542 of SEQ ID NO: 1881309
uccagaggcuggguuaaau

SEQ ID NO: 2034591 - RNA, 19 nt, Artificial Sequence
  Description of Artificial Sequence: Synthetic oligonucleotide
  Antisense strand to SEQ ID NO: 2034590
auuuaacccagccucugga

SEQ ID NO: 2034592 - RNA, 19 nt, Artificial Sequence
  Description of Artificial Sequence: Synthetic oligonucleotide
  Sense strand starting at position 3624 of SEQ ID NO: 1881309
caguaagugcuccacagau

SEQ ID NO: 2034593 - RNA, 19 nt, Artificial Sequence
  Description of Artificial Sequence: Synthetic oligonucleotide
  Antisense strand to SEQ ID NO: 2034592
aucuguggagcacuuacug

SEQ ID NO: 2034594 - RNA, 19 nt, Artificial Sequence
  Description of Artificial Sequence: Synthetic oligonucleotide
  Sense strand starting at position 3682 of SEQ ID NO: 1881309
acuucagugggaggucaaa

SEQ ID NO: 2034595 - RNA, 19 nt, Artificial Sequence
  Description of Artificial Sequence: Synthetic oligonucleotide
  Antisense strand to SEQ ID NO: 2034594
uuugaccucccacugaagu

SEQ ID NO: 2034596 - RNA, 19 nt, Artificial Sequence
  Description of Artificial Sequence: Synthetic oligonucleotide
  Sense strand starting at position 3757 of SEQ ID NO: 1881309
gaggcuucuuacccucaga

SEQ ID NO: 2034597 - RNA, 19 nt, Artificial Sequence
  Description of Artificial Sequence: Synthetic oligonucleotide
  Antisense strand to SEQ ID NO: 2034596
ucugaggguaagaagccuc

SEQ ID NO: 2034598 - RNA, 19 nt, Artificial Sequence
  Description of Artificial Sequence: Synthetic oligonucleotide
  Sense strand starting at position 3929 of SEQ ID NO: 1881309
acucuuauuccuuaccgua

SEQ ID NO: 2034599 - RNA, 19 nt, Artificial Sequence
  Description of Artificial Sequence: Synthetic oligonucleotide
  Antisense strand to SEQ ID NO: 2034598
uacgguaaggaauaagagu

SEQ ID NO: 2034600 - RNA, 19 nt, Artificial Sequence
  Description of Artificial Sequence: Synthetic oligonucleotide
  Sense strand starting at position 387 of SEQ ID NO: 1881310
gcacacauacauggaaauu

SEQ ID NO: 2034601 - RNA, 19 nt, Artificial Sequence
  Description of Artificial Sequence: Synthetic oligonucleotide
  Antisense strand to SEQ ID NO: 2034600
aauuuccauguaugugugc

SEQ ID NO: 2034602 - RNA, 19 nt, Artificial Sequence
  Description of Artificial Sequence: Synthetic oligonucleotide
  Sense strand starting at position 549 of SEQ ID NO: 1881310
auaaaugccucugucaaga

SEQ ID NO: 2034603 - RNA, 19 nt, Artificial Sequence
  Description of Artificial Sequence: Synthetic oligonucleotide
  Antisense strand to SEQ ID NO: 2034602
ucuugacagaggcauuuau

SEQ ID NO: 2034604 - RNA, 19 nt, Artificial Sequence
  Description of Artificial Sequence: Synthetic oligonucleotide
  Sense strand starting at position 554 of SEQ ID NO: 1881310
ugccucugucaagaaggua

SEQ ID NO: 2034605 - RNA, 19 nt, Artificial Sequence
  Description of Artificial Sequence: Synthetic oligonucleotide
  Antisense strand to SEQ ID NO: 2034604
uaccuucuugacagaggca

SEQ ID NO: 2034606 - RNA, 19 nt, Artificial Sequence
  Description of Artificial Sequence: Synthetic oligonucleotide
  Sense strand starting at position 1115 of SEQ ID NO: 1881310
uccucaaacuauucggaaa

SEQ ID NO: 2034607 - RNA, 19 nt, Artificial Sequence
  Description of Artificial Sequence: Synthetic oligonucleotide
  Antisense strand to SEQ ID NO: 2034606
uuuccgaauaguuugagga

SEQ ID NO: 2034608 - RNA, 19 nt, Artificial Sequence
  Description of Artificial Sequence: Synthetic oligonucleotide
  Sense strand starting at position 1384 of SEQ ID NO: 1881310
auugucuauguguaauucu

SEQ ID NO: 2034609 - RNA, 19 nt, Artificial Sequence
  Description of Artificial Sequence: Synthetic oligonucleotide
  Antisense strand to SEQ ID NO: 2034608
agaauuacacauagacaau

SEQ ID NO: 2034610 - RNA, 19 nt, Artificial Sequence
  Description of Artificial Sequence: Synthetic oligonucleotide
  Sense strand starting at position 1555 of SEQ ID NO: 1881310
accauaguucuauguuacu

SEQ ID NO: 2034611 - RNA, 19 nt, Artificial Sequence
  Description of Artificial Sequence: Synthetic oligonucleotide
  Antisense strand to SEQ ID NO: 2034610
aguaacauagaacuauggu

SEQ ID NO: 2034612 - RNA, 19 nt, Artificial Sequence
  Description of Artificial Sequence: Synthetic oligonucleotide
  Sense strand starting at position 1753 of SEQ ID NO: 1881310
guuccaagaucuguccaca

SEQ ID NO: 2034613 - RNA, 19 nt, Artificial Sequence
  Description of Artificial Sequence: Synthetic oligonucleotide
  Antisense strand to SEQ ID NO: 2034612
uguggacagaucuuggaac

SEQ ID NO: 2034614 - RNA, 19 nt, Artificial Sequence
  Description of Artificial Sequence: Synthetic oligonucleotide
  Sense strand starting at position 2023 of SEQ ID NO: 1881310
cggauaaccaaguggauua

SEQ ID NO: 2034615 - RNA, 19 nt, Artificial Sequence
  Description of Artificial Sequence: Synthetic oligonucleotide
  Antisense strand to SEQ ID NO: 2034614
uaauccacuugguuauccg

SEQ ID NO: 2034616 - RNA, 19 nt, Artificial Sequence
  Description of Artificial Sequence: Synthetic oligonucleotide
  Sense strand starting at position 2033 of SEQ ID NO: 1881310
aguggauuaucuccaggaa

SEQ ID NO: 2034617 - RNA, 19 nt, Artificial Sequence
  Description of Artificial Sequence: Synthetic oligonucleotide
  Antisense strand to SEQ ID NO: 2034616
uuccuggagauaauccacu

SEQ ID NO: 2034618 - RNA, 19 nt, Artificial Sequence
  Description of Artificial Sequence: Synthetic oligonucleotide
  Sense strand starting at position 2048 of SEQ ID NO: 1881310
ggaaucaucuucucaguca

SEQ ID NO: 2034619 - RNA, 19 nt, Artificial Sequence
  Description of Artificial Sequence: Synthetic oligonucleotide
  Antisense strand to SEQ ID NO: 2034618
ugacugagaagaugauucc

SEQ ID NO: 2034620 - RNA, 19 nt, Artificial Sequence
  Description of Artificial Sequence: Synthetic oligonucleotide
  Sense strand starting at position 2159 of SEQ ID NO: 1881310
guugcugcuccauaauaca

SEQ ID NO: 2034621 - RNA, 19 nt, Artificial Sequence
  Description of Artificial Sequence: Synthetic oligonucleotide
  Antisense strand to SEQ ID NO: 2034620
uguauuauggagcagcaac

SEQ ID NO: 2034622 - RNA, 19 nt, Artificial Sequence
  Description of Artificial Sequence: Synthetic oligonucleotide
  Sense strand starting at position 2182 of SEQ ID NO: 1881310
cuaaaucaggcuuauuagu

SEQ ID NO: 2034623 - RNA, 19 nt, Artificial Sequence
  Description of Artificial Sequence: Synthetic oligonucleotide
  Antisense strand to SEQ ID NO: 2034622
acuaauaagccugauuuag

SEQ ID NO: 2034624 - RNA, 19 nt, Artificial Sequence
  Description of Artificial Sequence: Synthetic oligonucleotide
  Sense strand starting at position 2297 of SEQ ID NO: 1881310
agaagucagcaaggguuua

SEQ ID NO: 2034625 - RNA, 19 nt, Artificial Sequence
  Description of Artificial Sequence: Synthetic oligonucleotide
  Antisense strand to SEQ ID NO: 2034624
uaaacccuugcugacuucu

SEQ ID NO: 2034626 - RNA, 19 nt, Artificial Sequence
  Description of Artificial Sequence: Synthetic oligonucleotide
  Sense strand starting at position 2302 of SEQ ID NO: 1881310
ucagcaaggguuuagagua

SEQ ID NO: 2034627 - RNA, 19 nt, Artificial Sequence
  Description of Artificial Sequence: Synthetic oligonucleotide
  Antisense strand to SEQ ID NO: 2034626
uacucuaaacccuugcuga

SEQ ID NO: 2034628 - RNA, 19 nt, Artificial Sequence
  Description of Artificial Sequence: Synthetic oligonucleotide
  Sense strand starting at position 2310 of SEQ ID NO: 1881310
gguuuagaguacccggaau

SEQ ID NO: 2034629 - RNA, 19 nt, Artificial Sequence
  Description of Artificial Sequence: Synthetic oligonucleotide
  Antisense strand to SEQ ID NO: 2034628
auuccggguacucuaaacc

SEQ ID NO: 2034630 - RNA, 19 nt, Artificial Sequence
  Description of Artificial Sequence: Synthetic oligonucleotide
  Sense strand starting at position 2403 of SEQ ID NO: 1881310
uugacaaguugcucagaga

SEQ ID NO: 2034631 - RNA, 19 nt, Artificial Sequence
  Description of Artificial Sequence: Synthetic oligonucleotide
  Antisense strand to SEQ ID NO: 2034630
ucucugagcaacuugucaa

SEQ ID NO: 2034632 - RNA, 19 nt, Artificial Sequence
  Description of Artificial Sequence: Synthetic oligonucleotide
  Sense strand starting at position 2455 of SEQ ID NO: 1881310
aaacauugucagggaggca

SEQ ID NO: 2034633 - RNA, 19 nt, Artificial Sequence
  Description of Artificial Sequence: Synthetic oligonucleotide
  Antisense strand to SEQ ID NO: 2034632
ugccucccugacaauguuu

SEQ ID NO: 2034634 - RNA, 19 nt, Artificial Sequence
  Description of Artificial Sequence: Synthetic oligonucleotide
  Sense strand starting at position 2498 of SEQ ID NO: 1881310
gguggucucccuuagcaca

SEQ ID NO: 2034635 - RNA, 19 nt, Artificial Sequence
  Description of Artificial Sequence: Synthetic oligonucleotide
  Antisense strand to SEQ ID NO: 2034634
ugugcuaagggagaccacc

SEQ ID NO: 2034636 - RNA, 19 nt, Artificial Sequence
  Description of Artificial Sequence: Synthetic oligonucleotide
  Sense strand starting at position 2534 of SEQ ID NO: 1881310
guacauacagcugguaaga

SEQ ID NO: 2034637 - RNA, 19 nt, Artificial Sequence
  Description of Artificial Sequence: Synthetic oligonucleotide
  Antisense strand to SEQ ID NO: 2034636
ucuuaccagcuguauguac

SEQ ID NO: 2034638 - RNA, 19 nt, Artificial Sequence
  Description of Artificial Sequence: Synthetic oligonucleotide
  Sense strand starting at position 2545 of SEQ ID NO: 1881310
ugguaagaaucugugucca

SEQ ID NO: 2034639 - RNA, 19 nt, Artificial Sequence
  Description of Artificial Sequence: Synthetic oligonucleotide
  Antisense strand to SEQ ID NO: 2034638
uggacacagauucuuacca

SEQ ID NO: 2034640 - RNA, 19 nt, Artificial Sequence
  Description of Artificial Sequence: Synthetic oligonucleotide
  Sense strand starting at position 2547 of SEQ ID NO: 1881310
guaagaaucuguguccaua

SEQ ID NO: 2034641 - RNA, 19 nt, Artificial Sequence
  Description of Artificial Sequence: Synthetic oligonucleotide
  Antisense strand to SEQ ID NO: 2034640
uauggacacagauucuuac

SEQ ID NO: 2034642 - RNA, 19 nt, Artificial Sequence
  Description of Artificial Sequence: Synthetic oligonucleotide
  Sense strand starting at position 2550 of SEQ ID NO: 1881310
agaaucuguguccauaaac

SEQ ID NO: 2034643 - RNA, 19 nt, Artificial Sequence
  Description of Artificial Sequence: Synthetic oligonucleotide
  Antisense strand to SEQ ID NO: 2034642
guuuauggacacagauucu

SEQ ID NO: 2034644 - RNA, 19 nt, Artificial Sequence
  Description of Artificial Sequence: Synthetic oligonucleotide
  Sense strand starting at position 2649 of SEQ ID NO: 1881310
ugucaacgucuggagacau

SEQ ID NO: 2034645 - RNA, 19 nt, Artificial Sequence
  Description of Artificial Sequence: Synthetic oligonucleotide
  Antisense strand to SEQ ID NO: 2034644
augucuccagacguugaca

SEQ ID NO: 2034646 - RNA, 19 nt, Artificial Sequence
  Description of Artificial Sequence: Synthetic oligonucleotide
  Sense strand starting at position 2699 of SEQ ID NO: 1881310
cuagcaucuagugagcaga

SEQ ID NO: 2034647 - RNA, 19 nt, Artificial Sequence
  Description of Artificial Sequence: Synthetic oligonucleotide
  Antisense strand to SEQ ID NO: 2034646
ucugcucacuagaugcuag

SEQ ID NO: 2034648 - RNA, 19 nt, Artificial Sequence
  Description of Artificial Sequence: Synthetic oligonucleotide
  Sense strand starting at position 2804 of SEQ ID NO: 1881310
gugaaacccugccuuaaau

SEQ ID NO: 2034649 - RNA, 19 nt, Artificial Sequence
  Description of Artificial Sequence: Synthetic oligonucleotide
  Antisense strand to SEQ ID NO: 2034648
auuuaaggcaggguuucac

SEQ ID NO: 2034650 - RNA, 19 nt, Artificial Sequence
  Description of Artificial Sequence: Synthetic oligonucleotide
  Sense strand starting at position 2973 of SEQ ID NO: 1881310
auggaaucuuagccagaug

SEQ ID NO: 2034651 - RNA, 19 nt, Artificial Sequence
  Description of Artificial Sequence: Synthetic oligonucleotide
  Antisense strand to SEQ ID NO: 2034650
caucuggcuaagauuccau

SEQ ID NO: 2034652 - RNA, 19 nt, Artificial Sequence
  Description of Artificial Sequence: Synthetic oligonucleotide
  Sense strand starting at position 2974 of SEQ ID NO: 1881310
uggaaucuuagccagaugu

SEQ ID NO: 2034653 - RNA, 19 nt, Artificial Sequence
  Description of Artificial Sequence: Synthetic oligonucleotide
  Antisense strand to SEQ ID NO: 2034652
acaucuggcuaagauucca

SEQ ID NO: 2034654 - RNA, 19 nt, Artificial Sequence
  Description of Artificial Sequence: Synthetic oligonucleotide
  Sense strand starting at position 3298 of SEQ ID NO: 1881310
uagaaucuucugggagguu

SEQ ID NO: 2034655 - RNA, 19 nt, Artificial Sequence
  Description of Artificial Sequence: Synthetic oligonucleotide
  Antisense strand to SEQ ID NO: 2034654
aaccucccagaagauucua

SEQ ID NO: 2034656 - RNA, 19 nt, Artificial Sequence
  Description of Artificial Sequence: Synthetic oligonucleotide
  Sense strand starting at position 3378 of SEQ ID NO: 1881310
uccagaguuccauagcacu

SEQ ID NO: 2034657 - RNA, 19 nt, Artificial Sequence
  Description of Artificial Sequence: Synthetic oligonucleotide
  Antisense strand to SEQ ID NO: 2034656
agugcuauggaacucugga

SEQ ID NO: 2034658 - RNA, 19 nt, Artificial Sequence
  Description of Artificial Sequence: Synthetic oligonucleotide
  Sense strand starting at position 3486 of SEQ ID NO: 1881310
ucuuauucucaguacuuag

SEQ ID NO: 2034659 - RNA, 19 nt, Artificial Sequence
  Description of Artificial Sequence: Synthetic oligonucleotide
  Antisense strand to SEQ ID NO: 2034658
cuaaguacugagaauaaga

SEQ ID NO: 2034660 - RNA, 19 nt, Artificial Sequence
  Description of Artificial Sequence: Synthetic oligonucleotide
  Sense strand starting at position 3567 of SEQ ID NO: 1881310
cccugagagccuuacuuga

SEQ ID NO: 2034661 - RNA, 19 nt, Artificial Sequence
  Description of Artificial Sequence: Synthetic oligonucleotide
  Antisense strand to SEQ ID NO: 2034660
ucaaguaaggcucucaggg

SEQ ID NO: 2034662 - RNA, 19 nt, Artificial Sequence
  Description of Artificial Sequence: Synthetic oligonucleotide
  Sense strand starting at position 3569 of SEQ ID NO: 1881310
cugagagccuuacuugacu

SEQ ID NO: 2034663 - RNA, 19 nt, Artificial Sequence
  Description of Artificial Sequence: Synthetic oligonucleotide
  Antisense strand to SEQ ID NO: 2034662
agucaaguaaggcucucag

SEQ ID NO: 2034664 - RNA, 19 nt, Artificial Sequence
  Description of Artificial Sequence: Synthetic oligonucleotide
  Sense strand starting at position 3574 of SEQ ID NO: 1881310
agccuuacuugacuaaaga

SEQ ID NO: 2034665 - RNA, 19 nt, Artificial Sequence
  Description of Artificial Sequence: Synthetic oligonucleotide
  Antisense strand to SEQ ID NO: 2034664
ucuuuagucaaguaaggcu

SEQ ID NO: 2034666 - RNA, 19 nt, Artificial Sequence
  Description of Artificial Sequence: Synthetic oligonucleotide
  Sense strand starting at position 3781 of SEQ ID NO: 1881310
aguuauuaacaucgguuau

SEQ ID NO: 2034667 - RNA, 19 nt, Artificial Sequence
  Description of Artificial Sequence: Synthetic oligonucleotide
  Antisense strand to SEQ ID NO: 2034666
auaaccgauguuaauaacu

SEQ ID NO: 2034668 - RNA, 19 nt, Artificial Sequence
  Description of Artificial Sequence: Synthetic oligonucleotide
  Sense strand starting at position 3783 of SEQ ID NO: 1881310
uuauuaacaucgguuauca

SEQ ID NO: 2034669 - RNA, 19 nt, Artificial Sequence
  Description of Artificial Sequence: Synthetic oligonucleotide
  Antisense strand to SEQ ID NO: 2034668
ugauaaccgauguuaauaa

SEQ ID NO: 2034670 - RNA, 19 nt, Artificial Sequence
  Description of Artificial Sequence: Synthetic oligonucleotide
  Sense strand starting at position 3785 of SEQ ID NO: 1881310
auuaacaucgguuaucaga

SEQ ID NO: 2034671 - RNA, 19 nt, Artificial Sequence
  Description of Artificial Sequence: Synthetic oligonucleotide
  Antisense strand to SEQ ID NO: 2034670
ucugauaaccgauguuaau

SEQ ID NO: 2034672 - RNA, 19 nt, Artificial Sequence
  Description of Artificial Sequence: Synthetic oligonucleotide
  Sense strand starting at position 3787 of SEQ ID NO: 1881310
uaacaucgguuaucagaua

SEQ ID NO: 2034673 - RNA, 19 nt, Artificial Sequence
  Description of Artificial Sequence: Synthetic oligonucleotide
  Antisense strand to SEQ ID NO: 2034672
uaucugauaaccgauguua

SEQ ID NO: 2034674 - RNA, 19 nt, Artificial Sequence
  Description of Artificial Sequence: Synthetic oligonucleotide
  Sense strand starting at position 3792 of SEQ ID NO: 1881310
ucgguuaucagauauguua

SEQ ID NO: 2034675 - RNA, 19 nt, Artificial Sequence
  Description of Artificial Sequence: Synthetic oligonucleotide
  Antisense strand to SEQ ID NO: 2034674
uaacauaucugauaaccga

SEQ ID NO: 2034676 - RNA, 19 nt, Artificial Sequence
  Description of Artificial Sequence: Synthetic oligonucleotide
  Sense strand starting at position 3805 of SEQ ID NO: 1881310
auguuaaccuaagucauca

SEQ ID NO: 2034677 - RNA, 19 nt, Artificial Sequence
  Description of Artificial Sequence: Synthetic oligonucleotide
  Antisense strand to SEQ ID NO: 2034676
ugaugacuuagguuaacau

SEQ ID NO: 2034678 - RNA, 19 nt, Artificial Sequence
  Description of Artificial Sequence: Synthetic oligonucleotide
  Sense strand starting at position 3849 of SEQ ID NO: 1881310
aggucucagcccuggagaa

SEQ ID NO: 2034679 - RNA, 19 nt, Artificial Sequence
  Description of Artificial Sequence: Synthetic oligonucleotide
  Antisense strand to SEQ ID NO: 2034678
uucuccagggcugagaccu

SEQ ID NO: 2034680 - RNA, 19 nt, Artificial Sequence
  Description of Artificial Sequence: Synthetic oligonucleotide
  Sense strand starting at position 33 of SEQ ID NO: 1881311
acguuuauuccaugaguau

SEQ ID NO: 2034681 - RNA, 19 nt, Artificial Sequence
  Description of Artificial Sequence: Synthetic oligonucleotide
  Antisense strand to SEQ ID NO: 2034680
auacucauggaauaaacgu

SEQ ID NO: 2034682 - RNA, 19 nt, Artificial Sequence
  Description of Artificial Sequence: Synthetic oligonucleotide
  Sense strand starting at position 34 of SEQ ID NO: 1881311
cguuuauuccaugaguaug

SEQ ID NO: 2034683 - RNA, 19 nt, Artificial Sequence
  Description of Artificial Sequence: Synthetic oligonucleotide
  Antisense strand to SEQ ID NO: 2034682
cauacucauggaauaaacg

SEQ ID NO: 2034684 - RNA, 19 nt, Artificial Sequence
  Description of Artificial Sequence: Synthetic oligonucleotide
  Sense strand starting at position 36 of SEQ ID NO: 1881311
uuuauuccaugaguaugua

SEQ ID NO: 2034685 - RNA, 19 nt, Artificial Sequence
  Description of Artificial Sequence: Synthetic oligonucleotide
  Antisense strand to SEQ ID NO: 2034684
uacauacucauggaauaaa

SEQ ID NO: 2034686 - RNA, 19 nt, Artificial Sequence
  Description of Artificial Sequence: Synthetic oligonucleotide
  Sense strand starting at position 37 of SEQ ID NO: 1881311
uuauuccaugaguauguau

SEQ ID NO: 2034687 - RNA, 19 nt, Artificial Sequence
  Description of Artificial Sequence: Synthetic oligonucleotide
  Antisense strand to SEQ ID NO: 2034686
auacauacucauggaauaa

SEQ ID NO: 2034688 - RNA, 19 nt, Artificial Sequence
  Description of Artificial Sequence: Synthetic oligonucleotide
  Sense strand starting at position 40 of SEQ ID NO: 1881311
uuccaugaguauguauuga

SEQ ID NO: 2034689 - RNA, 19 nt, Artificial Sequence
  Description of Artificial Sequence: Synthetic oligonucleotide
  Antisense strand to SEQ ID NO: 2034688
ucaauacauacucauggaa

SEQ ID NO: 2034690 - RNA, 19 nt, Artificial Sequence
  Description of Artificial Sequence: Synthetic oligonucleotide
  Sense strand starting at position 48 of SEQ ID NO: 1881311
guauguauugagcaccaaa

SEQ ID NO: 2034691 - RNA, 19 nt, Artificial Sequence
  Description of Artificial Sequence: Synthetic oligonucleotide
  Antisense strand to SEQ ID NO: 2034690
uuuggugcucaauacauac

SEQ ID NO: 2034692 - RNA, 19 nt, Artificial Sequence
  Description of Artificial Sequence: Synthetic oligonucleotide
  Sense strand starting at position 78 of SEQ ID NO: 1881311
acugcuagcucugcaagaa

SEQ ID NO: 2034693 - RNA, 19 nt, Artificial Sequence
  Description of Artificial Sequence: Synthetic oligonucleotide
  Antisense strand to SEQ ID NO: 2034692
uucuugcagagcuagcagu

SEQ ID NO: 2034694 - RNA, 19 nt, Artificial Sequence
  Description of Artificial Sequence: Synthetic oligonucleotide
  Sense strand starting at position 79 of SEQ ID NO: 1881311
cugcuagcucugcaagaau

SEQ ID NO: 2034695 - RNA, 19 nt, Artificial Sequence
  Description of Artificial Sequence: Synthetic oligonucleotide
  Antisense strand to SEQ ID NO: 2034694
auucuugcagagcuagcag

SEQ ID NO: 2034696 - RNA, 19 nt, Artificial Sequence
  Description of Artificial Sequence: Synthetic oligonucleotide
  Sense strand starting at position 82 of SEQ ID NO: 1881311
cuagcucugcaagaauaca

SEQ ID NO: 2034697 - RNA, 19 nt, Artificial Sequence
  Description of Artificial Sequence: Synthetic oligonucleotide
  Antisense strand to SEQ ID NO: 2034696
uguauucuugcagagcuag

SEQ ID NO: 2034698 - RNA, 19 nt, Artificial Sequence
  Description of Artificial Sequence: Synthetic oligonucleotide
  Sense strand starting at position 166 of SEQ ID NO: 1881311
uuaauaagucagggugagu

SEQ ID NO: 2034699 - RNA, 19 nt, Artificial Sequence
  Description of Artificial Sequence: Synthetic oligonucleotide
  Antisense strand to SEQ ID NO: 2034698
acucacccugacuuauuaa

SEQ ID NO: 2034700 - RNA, 19 nt, Artificial Sequence
  Description of Artificial Sequence: Synthetic oligonucleotide
  Sense strand starting at position 202 of SEQ ID NO: 1881311
agugcaauagugagugguu

SEQ ID NO: 2034701 - RNA, 19 nt, Artificial Sequence
  Description of Artificial Sequence: Synthetic oligonucleotide
  Antisense strand to SEQ ID NO: 2034700
aaccacucacuauugcacu

SEQ ID NO: 2034702 - RNA, 19 nt, Artificial Sequence
  Description of Artificial Sequence: Synthetic oligonucleotide
  Sense strand starting at position 214 of SEQ ID NO: 1881311
agugguuggccagaagaca

SEQ ID NO: 2034703 - RNA, 19 nt, Artificial Sequence
  Description of Artificial Sequence: Synthetic oligonucleotide
  Antisense strand to SEQ ID NO: 2034702
ugucuucuggccaaccacu

SEQ ID NO: 2034704 - RNA, 19 nt, Artificial Sequence
  Description of Artificial Sequence: Synthetic oligonucleotide
  Sense strand starting at position 243 of SEQ ID NO: 1881311
cuacuuuagaaggaguguu

SEQ ID NO: 2034705 - RNA, 19 nt, Artificial Sequence
  Description of Artificial Sequence: Synthetic oligonucleotide
  Antisense strand to SEQ ID NO: 2034704
aacacuccuucuaaaguag

SEQ ID NO: 2034706 - RNA, 19 nt, Artificial Sequence
  Description of Artificial Sequence: Synthetic oligonucleotide
  Sense strand starting at position 311 of SEQ ID NO: 1881311
acagaagucaggcaugcaa

SEQ ID NO: 2034707 - RNA, 19 nt, Artificial Sequence
  Description of Artificial Sequence: Synthetic oligonucleotide
  Antisense strand to SEQ ID NO: 2034706
uugcaugccugacuucugu

SEQ ID NO: 2034708 - RNA, 19 nt, Artificial Sequence
  Description of Artificial Sequence: Synthetic oligonucleotide
  Sense strand starting at position 353 of SEQ ID NO: 1881311
cuggaauaagcuuauuguu

SEQ ID NO: 2034709 - RNA, 19 nt, Artificial Sequence
  Description of Artificial Sequence: Synthetic oligonucleotide
  Antisense strand to SEQ ID NO: 2034708
aacaauaagcuuauuccag

SEQ ID NO: 2034710 - RNA, 19 nt, Artificial Sequence
  Description of Artificial Sequence: Synthetic oligonucleotide
  Sense strand starting at position 355 of SEQ ID NO: 1881311
ggaauaagcuuauuguugu

SEQ ID NO: 2034711 - RNA, 19 nt, Artificial Sequence
  Description of Artificial Sequence: Synthetic oligonucleotide
  Antisense strand to SEQ ID NO: 2034710
acaacaauaagcuuauucc

SEQ ID NO: 2034712 - RNA, 19 nt, Artificial Sequence
  Description of Artificial Sequence: Synthetic oligonucleotide
  Sense strand starting at position 414 of SEQ ID NO: 1881311
gaguuaagcgaggaggagu

SEQ ID NO: 2034713 - RNA, 19 nt, Artificial Sequence
  Description of Artificial Sequence: Synthetic oligonucleotide
  Antisense strand to SEQ ID NO: 2034712
acuccuccucgcuuaacuc

SEQ ID NO: 2034714 - RNA, 19 nt, Artificial Sequence
  Description of Artificial Sequence: Synthetic oligonucleotide
  Sense strand starting at position 427 of SEQ ID NO: 1881311
aggaguguuuaguugauua

SEQ ID NO: 2034715 - RNA, 19 nt, Artificial Sequence
  Description of Artificial Sequence: Synthetic oligonucleotide
  Antisense strand to SEQ ID NO: 2034714
uaaucaacuaaacacuccu

SEQ ID NO: 2034716 - RNA, 19 nt, Artificial Sequence
  Description of Artificial Sequence: Synthetic oligonucleotide
  Sense strand starting at position 429 of SEQ ID NO: 1881311
gaguguuuaguugauuauc

SEQ ID NO: 2034717 - RNA, 19 nt, Artificial Sequence
  Description of Artificial Sequence: Synthetic oligonucleotide
  Antisense strand to SEQ ID NO: 2034716
gauaaucaacuaaacacuc

SEQ ID NO: 2034718 - RNA, 19 nt, Artificial Sequence
  Description of Artificial Sequence: Synthetic oligonucleotide
  Sense strand starting at position 438 of SEQ ID NO: 1881311
guugauuaucuuggagaaa

SEQ ID NO: 2034719 - RNA, 19 nt, Artificial Sequence
  Description of Artificial Sequence: Synthetic oligonucleotide
  Antisense strand to SEQ ID NO: 2034718
uuucuccaagauaaucaac

SEQ ID NO: 2034720 - RNA, 19 nt, Artificial Sequence
  Description of Artificial Sequence: Synthetic oligonucleotide
  Sense strand starting at position 561 of SEQ ID NO: 1881311
acaguuauugcucaucuuu

SEQ ID NO: 2034721 - RNA, 19 nt, Artificial Sequence
  Description of Artificial Sequence: Synthetic oligonucleotide
  Antisense strand to SEQ ID NO: 2034720
aaagaugagcaauaacugu

SEQ ID NO: 2034722 - RNA, 19 nt, Artificial Sequence
  Description of Artificial Sequence: Synthetic oligonucleotide
  Sense strand starting at position 567 of SEQ ID NO: 1881311
auugcucaucuuuggucaa

SEQ ID NO: 2034723 - RNA, 19 nt, Artificial Sequence
  Description of Artificial Sequence: Synthetic oligonucleotide
  Antisense strand to SEQ ID NO: 2034722
uugaccaaagaugagcaau

SEQ ID NO: 2034724 - RNA, 19 nt, Artificial Sequence
  Description of Artificial Sequence: Synthetic oligonucleotide
  Sense strand starting at position 569 of SEQ ID NO: 1881311
ugcucaucuuuggucaaca

SEQ ID NO: 2034725 - RNA, 19 nt, Artificial Sequence
  Description of Artificial Sequence: Synthetic oligonucleotide
  Antisense strand to SEQ ID NO: 2034724
uguugaccaaagaugagca

SEQ ID NO: 2034726 - RNA, 19 nt, Artificial Sequence
  Description of Artificial Sequence: Synthetic oligonucleotide
  Sense strand starting at position 570 of SEQ ID NO: 1881311
gcucaucuuuggucaacau

SEQ ID NO: 2034727 - RNA, 19 nt, Artificial Sequence
  Description of Artificial Sequence: Synthetic oligonucleotide
  Antisense strand to SEQ ID NO: 2034726
auguugaccaaagaugagc

SEQ ID NO: 2034728 - RNA, 19 nt, Artificial Sequence
  Description of Artificial Sequence: Synthetic oligonucleotide
  Sense strand starting at position 641 of SEQ ID NO: 1881311
guuaaugaaucagaagaga

SEQ ID NO: 2034729 - RNA, 19 nt, Artificial Sequence
  Description of Artificial Sequence: Synthetic oligonucleotide
  Antisense strand to SEQ ID NO: 2034728
ucucuucugauucauuaac

SEQ ID NO: 2034730 - RNA, 19 nt, Artificial Sequence
  Description of Artificial Sequence: Synthetic oligonucleotide
  Sense strand starting at position 721 of SEQ ID NO: 1881311
gggaaugaauggcuuacau

SEQ ID NO: 2034731 - RNA, 19 nt, Artificial Sequence
  Description of Artificial Sequence: Synthetic oligonucleotide
  Antisense strand to SEQ ID NO: 2034730
auguaagccauucauuccc

SEQ ID NO: 2034732 - RNA, 19 nt, Artificial Sequence
  Description of Artificial Sequence: Synthetic oligonucleotide
  Sense strand starting at position 1080 of SEQ ID NO: 1881311
uggaaagcccugcaaagau

SEQ ID NO: 2034733 - RNA, 19 nt, Artificial Sequence
  Description of Artificial Sequence: Synthetic oligonucleotide
  Antisense strand to SEQ ID NO: 2034732
aucuuugcagggcuuucca

SEQ ID NO: 2034734 - RNA, 19 nt, Artificial Sequence
  Description of Artificial Sequence: Synthetic oligonucleotide
  Sense strand starting at position 1095 of SEQ ID NO: 1881311
agaucauuguguccaccuu

SEQ ID NO: 2034735 - RNA, 19 nt, Artificial Sequence
  Description of Artificial Sequence: Synthetic oligonucleotide
  Antisense strand to SEQ ID NO: 2034734
aagguggacacaaugaucu

SEQ ID NO: 2034736 - RNA, 19 nt, Artificial Sequence
  Description of Artificial Sequence: Synthetic oligonucleotide
  Sense strand starting at position 1146 of SEQ ID NO: 1881311
uuuccuuucuuacuagagu

SEQ ID NO: 2034737 - RNA, 19 nt, Artificial Sequence
  Description of Artificial Sequence: Synthetic oligonucleotide
  Antisense strand to SEQ ID NO: 2034736
acucuaguaagaaaggaaa

SEQ ID NO: 2034738 - RNA, 19 nt, Artificial Sequence
  Description of Artificial Sequence: Synthetic oligonucleotide
  Sense strand starting at position 1186 of SEQ ID NO: 1881311
ucaucaucuuagguuguua

SEQ ID NO: 2034739 - RNA, 19 nt, Artificial Sequence
  Description of Artificial Sequence: Synthetic oligonucleotide
  Antisense strand to SEQ ID NO: 2034738
uaacaaccuaagaugauga

SEQ ID NO: 2034740 - RNA, 19 nt, Artificial Sequence
  Description of Artificial Sequence: Synthetic oligonucleotide
  Sense strand starting at position 1328 of SEQ ID NO: 1881311
ugcuauugcccugacaguu

SEQ ID NO: 2034741 - RNA, 19 nt, Artificial Sequence
  Description of Artificial Sequence: Synthetic oligonucleotide
  Antisense strand to SEQ ID NO: 2034740
aacugucagggcaauagca

SEQ ID NO: 2034742 - RNA, 19 nt, Artificial Sequence
  Description of Artificial Sequence: Synthetic oligonucleotide
  Sense strand starting at position 1341 of SEQ ID NO: 1881311
acaguuaucccaggaacga

SEQ ID NO: 2034743 - RNA, 19 nt, Artificial Sequence
  Description of Artificial Sequence: Synthetic oligonucleotide
  Antisense strand to SEQ ID NO: 2034742
ucguuccugggauaacugu

SEQ ID NO: 2034744 - RNA, 19 nt, Artificial Sequence
  Description of Artificial Sequence: Synthetic oligonucleotide
  Sense strand starting at position 1377 of SEQ ID NO: 1881311
acuggaguauaugauauuu

SEQ ID NO: 2034745 - RNA, 19 nt, Artificial Sequence
  Description of Artificial Sequence: Synthetic oligonucleotide
  Antisense strand to SEQ ID NO: 2034744
aaauaucauauacuccagu

SEQ ID NO: 2034746 - RNA, 19 nt, Artificial Sequence
  Description of Artificial Sequence: Synthetic oligonucleotide
  Sense strand starting at position 1379 of SEQ ID NO: 1881311
uggaguauaugauauuuag

SEQ ID NO: 2034747 - RNA, 19 nt, Artificial Sequence
  Description of Artificial Sequence: Synthetic oligonucleotide
  Antisense strand to SEQ ID NO: 2034746
cuaaauaucauauacucca

SEQ ID NO: 2034748 - RNA, 19 nt, Artificial Sequence
  Description of Artificial Sequence: Synthetic oligonucleotide
  Sense strand starting at position 1415 of SEQ ID NO: 1881311
aggcauauccaauguuaaa

SEQ ID NO: 2034749 - RNA, 19 nt, Artificial Sequence
  Description of Artificial Sequence: Synthetic oligonucleotide
  Antisense strand to SEQ ID NO: 2034748
uuuaacauuggauaugccu

SEQ ID NO: 2034750 - RNA, 19 nt, Artificial Sequence
  Description of Artificial Sequence: Synthetic oligonucleotide
  Sense strand starting at position 1910 of SEQ ID NO: 1881311
gaacaauugcagugcccua

SEQ ID NO: 2034751 - RNA, 19 nt, Artificial Sequence
  Description of Artificial Sequence: Synthetic oligonucleotide
  Antisense strand to SEQ ID NO: 2034750
uagggcacugcaauuguuc

SEQ ID NO: 2034752 - RNA, 19 nt, Artificial Sequence
  Description of Artificial Sequence: Synthetic oligonucleotide
  Sense strand starting at position 1963 of SEQ ID NO: 1881311
ugaccuguaucacuauaga

SEQ ID NO: 2034753 - RNA, 19 nt, Artificial Sequence
  Description of Artificial Sequence: Synthetic oligonucleotide
  Antisense strand to SEQ ID NO: 2034752
ucuauagugauacagguca

SEQ ID NO: 2034754 - RNA, 19 nt, Artificial Sequence
  Description of Artificial Sequence: Synthetic oligonucleotide
  Sense strand starting at position 2074 of SEQ ID NO: 1881311
uguucuuggguguaguuau

SEQ ID NO: 2034755 - RNA, 19 nt, Artificial Sequence
  Description of Artificial Sequence: Synthetic oligonucleotide
  Antisense strand to SEQ ID NO: 2034754
auaacuacacccaagaaca

SEQ ID NO: 2034756 - RNA, 19 nt, Artificial Sequence
  Description of Artificial Sequence: Synthetic oligonucleotide
  Sense strand starting at position 2146 of SEQ ID NO: 1881311
uugacaguuugguuuggaa

SEQ ID NO: 2034757 - RNA, 19 nt, Artificial Sequence
  Description of Artificial Sequence: Synthetic oligonucleotide
  Antisense strand to SEQ ID NO: 2034756
uuccaaaccaaacugucaa

SEQ ID NO: 2034758 - RNA, 19 nt, Artificial Sequence
  Description of Artificial Sequence: Synthetic oligonucleotide
  Sense strand starting at position 2281 of SEQ ID NO: 1881311
guguccagauguuuccaaa

SEQ ID NO: 2034759 - RNA, 19 nt, Artificial Sequence
  Description of Artificial Sequence: Synthetic oligonucleotide
  Antisense strand to SEQ ID NO: 2034758
uuuggaaacaucuggacac

SEQ ID NO: 2034760 - RNA, 19 nt, Artificial Sequence
  Description of Artificial Sequence: Synthetic oligonucleotide
  Sense strand starting at position 15 of SEQ ID NO: 1881312
ccauuugucugacucuagu

SEQ ID NO: 2034761 - RNA, 19 nt, Artificial Sequence
  Description of Artificial Sequence: Synthetic oligonucleotide
  Antisense strand to SEQ ID NO: 2034760
acuagagucagacaaaugg

SEQ ID NO: 2034762 - RNA, 19 nt, Artificial Sequence
  Description of Artificial Sequence: Synthetic oligonucleotide
  Sense strand starting at position 191 of SEQ ID NO: 1881312
ggaaauuucuccuaaucug

SEQ ID NO: 2034763 - RNA, 19 nt, Artificial Sequence
  Description of Artificial Sequence: Synthetic oligonucleotide
  Antisense strand to SEQ ID NO: 2034762
cagauuaggagaaauuucc

SEQ ID NO: 2034764 - RNA, 19 nt, Artificial Sequence
  Description of Artificial Sequence: Synthetic oligonucleotide
  Sense strand starting at position 631 of SEQ ID NO: 1881312
ggugauaugaucuggagca

SEQ ID NO: 2034765 - RNA, 19 nt, Artificial Sequence
  Description of Artificial Sequence: Synthetic oligonucleotide
  Antisense strand to SEQ ID NO: 2034764
ugcuccagaucauaucacc

SEQ ID NO: 2034766 - RNA, 19 nt, Artificial Sequence
  Description of Artificial Sequence: Synthetic oligonucleotide
  Sense strand starting at position 875 of SEQ ID NO: 1881312
cuuuauauuggauggcuaa

SEQ ID NO: 2034767 - RNA, 19 nt, Artificial Sequence
  Description of Artificial Sequence: Synthetic oligonucleotide
  Antisense strand to SEQ ID NO: 2034766
uuagccauccaauauaaag

SEQ ID NO: 2034768 - RNA, 19 nt, Artificial Sequence
  Description of Artificial Sequence: Synthetic oligonucleotide
  Sense strand starting at position 937 of SEQ ID NO: 1881312
auggaaugauggcuugauu

SEQ ID NO: 2034769 - RNA, 19 nt, Artificial Sequence
  Description of Artificial Sequence: Synthetic oligonucleotide
  Antisense strand to SEQ ID NO: 2034768
aaucaagccaucauuccau

SEQ ID NO: 2034770 - RNA, 19 nt, Artificial Sequence
  Description of Artificial Sequence: Synthetic oligonucleotide
  Sense strand starting at position 946 of SEQ ID NO: 1881312
uggcuugauuacccagauu

SEQ ID NO: 2034771 - RNA, 19 nt, Artificial Sequence
  Description of Artificial Sequence: Synthetic oligonucleotide
  Antisense strand to SEQ ID NO: 2034770
aaucuggguaaucaagcca

SEQ ID NO: 2034772 - RNA, 19 nt, Artificial Sequence
  Description of Artificial Sequence: Synthetic oligonucleotide
  Sense strand starting at position 1016 of SEQ ID NO: 1881312
cuaguaucaccugggaacu

SEQ ID NO: 2034773 - RNA, 19 nt, Artificial Sequence
  Description of Artificial Sequence: Synthetic oligonucleotide
  Antisense strand to SEQ ID NO: 2034772
aguucccaggugauacuag

SEQ ID NO: 2034774 - RNA, 19 nt, Artificial Sequence
  Description of Artificial Sequence: Synthetic oligonucleotide
  Sense strand starting at position 1034 of SEQ ID NO: 1881312
uuguuaaauguagacucuu

SEQ ID NO: 2034775 - RNA, 19 nt, Artificial Sequence
  Description of Artificial Sequence: Synthetic oligonucleotide
  Antisense strand to SEQ ID NO: 2034774
aagagucuacauuuaacaa

SEQ ID NO: 2034776 - RNA, 19 nt, Artificial Sequence
  Description of Artificial Sequence: Synthetic oligonucleotide
  Sense strand starting at position 1361 of SEQ ID NO: 1881312
ccaaauagguccucagcaa

SEQ ID NO: 2034777 - RNA, 19 nt, Artificial Sequence
  Description of Artificial Sequence: Synthetic oligonucleotide
  Antisense strand to SEQ ID NO: 2034776
uugcugaggaccuauuugg

SEQ ID NO: 2034778 - RNA, 19 nt, Artificial Sequence
  Description of Artificial Sequence: Synthetic oligonucleotide
  Sense strand starting at position 1535 of SEQ ID NO: 1881312
auacaaggcugauuguuaa

SEQ ID NO: 2034779 - RNA, 19 nt, Artificial Sequence
  Description of Artificial Sequence: Synthetic oligonucleotide
  Antisense strand to SEQ ID NO: 2034778
uuaacaaucagccuuguau

SEQ ID NO: 2034780 - RNA, 19 nt, Artificial Sequence
  Description of Artificial Sequence: Synthetic oligonucleotide
  Sense strand starting at position 1717 of SEQ ID NO: 1881312
ccagcuuuaccguuagcuu

SEQ ID NO: 2034781 - RNA, 19 nt, Artificial Sequence
  Description of Artificial Sequence: Synthetic oligonucleotide
  Antisense strand to SEQ ID NO: 2034780
aagcuaacgguaaagcugg

SEQ ID NO: 2034782 - RNA, 19 nt, Artificial Sequence
  Description of Artificial Sequence: Synthetic oligonucleotide
  Sense strand starting at position 2115 of SEQ ID NO: 1881312
caguuugagagaugaguug

SEQ ID NO: 2034783 - RNA, 19 nt, Artificial Sequence
  Description of Artificial Sequence: Synthetic oligonucleotide
  Antisense strand to SEQ ID NO: 2034782
caacucaucucucaaacug

SEQ ID NO: 2034784 - RNA, 19 nt, Artificial Sequence
  Description of Artificial Sequence: Synthetic oligonucleotide
  Sense strand starting at position 2184 of SEQ ID NO: 1881312
accucacucuucuugggaa

SEQ ID NO: 2034785 - RNA, 19 nt, Artificial Sequence
  Description of Artificial Sequence: Synthetic oligonucleotide
  Antisense strand to SEQ ID NO: 2034784
uucccaagaagagugaggu

SEQ ID NO: 2034786 - RNA, 19 nt, Artificial Sequence
  Description of Artificial Sequence: Synthetic oligonucleotide
  Sense strand starting at position 2223 of SEQ ID NO: 1881312
uguauuuaucuuggcucca

SEQ ID NO: 2034787 - RNA, 19 nt, Artificial Sequence
  Description of Artificial Sequence: Synthetic oligonucleotide
  Antisense strand to SEQ ID NO: 2034786
uggagccaagauaaauaca

SEQ ID NO: 2034788 - RNA, 19 nt, Artificial Sequence
  Description of Artificial Sequence: Synthetic oligonucleotide
  Sense strand starting at position 2228 of SEQ ID NO: 1881312
uuaucuuggcuccagaaau

SEQ ID NO: 2034789 - RNA, 19 nt, Artificial Sequence
  Description of Artificial Sequence: Synthetic oligonucleotide
  Antisense strand to SEQ ID NO: 2034788
auuucuggagccaagauaa

SEQ ID NO: 2034790 - RNA, 19 nt, Artificial Sequence
  Description of Artificial Sequence: Synthetic oligonucleotide
  Sense strand starting at position 2239 of SEQ ID NO: 1881312
ccagaaauacacugauguc

SEQ ID NO: 2034791 - RNA, 19 nt, Artificial Sequence
  Description of Artificial Sequence: Synthetic oligonucleotide
  Antisense strand to SEQ ID NO: 2034790
gacaucaguguauuucugg

SEQ ID NO: 2034792 - RNA, 19 nt, Artificial Sequence
  Description of Artificial Sequence: Synthetic oligonucleotide
  Sense strand starting at position 2377 of SEQ ID NO: 1881312
gggccucugccagaugaag

SEQ ID NO: 2034793 - RNA, 19 nt, Artificial Sequence
  Description of Artificial Sequence: Synthetic oligonucleotide
  Antisense strand to SEQ ID NO: 2034792
cuucaucuggcagaggccc

SEQ ID NO: 2034794 - RNA, 19 nt, Artificial Sequence
  Description of Artificial Sequence: Synthetic oligonucleotide
  Sense strand starting at position 2421 of SEQ ID NO: 1881312
ccagcagggacuugucaag

SEQ ID NO: 2034795 - RNA, 19 nt, Artificial Sequence
  Description of Artificial Sequence: Synthetic oligonucleotide
  Antisense strand to SEQ ID NO: 2034794
cuugacaagucccugcugg

SEQ ID NO: 2034796 - RNA, 19 nt, Artificial Sequence
  Description of Artificial Sequence: Synthetic oligonucleotide
  Sense strand starting at position 2436 of SEQ ID NO: 1881312
caaggcuugcgugcagauu

SEQ ID NO: 2034797 - RNA, 19 nt, Artificial Sequence
  Description of Artificial Sequence: Synthetic oligonucleotide
  Antisense strand to SEQ ID NO: 2034796
aaucugcacgcaagccuug

SEQ ID NO: 2034798 - RNA, 19 nt, Artificial Sequence
  Description of Artificial Sequence: Synthetic oligonucleotide
  Sense strand starting at position 2469 of SEQ ID NO: 1881312
ggccaaggcucauuugcaa

SEQ ID NO: 2034799 - RNA, 19 nt, Artificial Sequence
  Description of Artificial Sequence: Synthetic oligonucleotide
  Antisense strand to SEQ ID NO: 2034798
uugcaaaugagccuuggcc

SEQ ID NO: 2034800 - RNA, 19 nt, Artificial Sequence
  Description of Artificial Sequence: Synthetic oligonucleotide
  Sense strand starting at position 2493 of SEQ ID NO: 1881312
ggaugagagaccugccauu

SEQ ID NO: 2034801 - RNA, 19 nt, Artificial Sequence
  Description of Artificial Sequence: Synthetic oligonucleotide
  Antisense strand to SEQ ID NO: 2034800
aauggcaggucucucaucc

SEQ ID NO: 2034802 - RNA, 19 nt, Artificial Sequence
  Description of Artificial Sequence: Synthetic oligonucleotide
  Sense strand starting at position 2567 of SEQ ID NO: 1881312
gguccuaaaguuugggacu

SEQ ID NO: 2034803 - RNA, 19 nt, Artificial Sequence
  Description of Artificial Sequence: Synthetic oligonucleotide
  Antisense strand to SEQ ID NO: 2034802
agucccaaacuuuaggacc

SEQ ID NO: 2034804 - RNA, 19 nt, Artificial Sequence
  Description of Artificial Sequence: Synthetic oligonucleotide
  Sense strand starting at position 2664 of SEQ ID NO: 1881312
uggugugagaguuaaugua

SEQ ID NO: 2034805 - RNA, 19 nt, Artificial Sequence
  Description of Artificial Sequence: Synthetic oligonucleotide
  Antisense strand to SEQ ID NO: 2034804
uacauuaacucucacacca

SEQ ID NO: 2034806 - RNA, 19 nt, Artificial Sequence
  Description of Artificial Sequence: Synthetic oligonucleotide
  Sense strand starting at position 2702 of SEQ ID NO: 1881312
ugccuuaugacgcaggaga

SEQ ID NO: 2034807 - RNA, 19 nt, Artificial Sequence
  Description of Artificial Sequence: Synthetic oligonucleotide
  Antisense strand to SEQ ID NO: 2034806
ucuccugcgucauaaggca

SEQ ID NO: 2034808 - RNA, 19 nt, Artificial Sequence
  Description of Artificial Sequence: Synthetic oligonucleotide
  Sense strand starting at position 2704 of SEQ ID NO: 1881312
ccuuaugacgcaggagaua

SEQ ID NO: 2034809 - RNA, 19 nt, Artificial Sequence
  Description of Artificial Sequence: Synthetic oligonucleotide
  Antisense strand to SEQ ID NO: 2034808
uaucuccugcgucauaagg

SEQ ID NO: 2034810 - RNA, 19 nt, Artificial Sequence
  Description of Artificial Sequence: Synthetic oligonucleotide
  Sense strand starting at position 2856 of SEQ ID NO: 1881312
ucaacaguuguuuauuaag

SEQ ID NO: 2034811 - RNA, 19 nt, Artificial Sequence
  Description of Artificial Sequence: Synthetic oligonucleotide
  Antisense strand to SEQ ID NO: 2034810
cuuaauaaacaacuguuga

SEQ ID NO: 2034812 - RNA, 19 nt, Artificial Sequence
  Description of Artificial Sequence: Synthetic oligonucleotide
  Sense strand starting at position 2894 of SEQ ID NO: 1881312
uuaguauaggugugauuuc

SEQ ID NO: 2034813 - RNA, 19 nt, Artificial Sequence
  Description of Artificial Sequence: Synthetic oligonucleotide
  Antisense strand to SEQ ID NO: 2034812
gaaaucacaccuauacuaa

SEQ ID NO: 2034814 - RNA, 19 nt, Artificial Sequence
  Description of Artificial Sequence: Synthetic oligonucleotide
  Sense strand starting at position 2946 of SEQ ID NO: 1881312
ggagcuuuccaacaccagu

SEQ ID NO: 2034815 - RNA, 19 nt, Artificial Sequence
  Description of Artificial Sequence: Synthetic oligonucleotide
  Antisense strand to SEQ ID NO: 2034814
acugguguuggaaagcucc

SEQ ID NO: 2034816 - RNA, 19 nt, Artificial Sequence
  Description of Artificial Sequence: Synthetic oligonucleotide
  Sense strand starting at position 3006 of SEQ ID NO: 1881312
agauguagaaagugucuca

SEQ ID NO: 2034817 - RNA, 19 nt, Artificial Sequence
  Description of Artificial Sequence: Synthetic oligonucleotide
  Antisense strand to SEQ ID NO: 2034816
ugagacacuuucuacaucu

SEQ ID NO: 2034818 - RNA, 19 nt, Artificial Sequence
  Description of Artificial Sequence: Synthetic oligonucleotide
  Sense strand starting at position 3120 of SEQ ID NO: 1881312
cuaagcuucgaugauaacu

SEQ ID NO: 2034819 - RNA, 19 nt, Artificial Sequence
  Description of Artificial Sequence: Synthetic oligonucleotide
  Antisense strand to SEQ ID NO: 2034818
aguuaucaucgaagcuuag

SEQ ID NO: 2034820 - RNA, 19 nt, Artificial Sequence
  Description of Artificial Sequence: Synthetic oligonucleotide
  Sense strand starting at position 3231 of SEQ ID NO: 1881312
ggaugucaguacuuaacua

SEQ ID NO: 2034821 - RNA, 19 nt, Artificial Sequence
  Description of Artificial Sequence: Synthetic oligonucleotide
  Antisense strand to SEQ ID NO: 2034820
uaguuaaguacugacaucc

SEQ ID NO: 2034822 - RNA, 19 nt, Artificial Sequence
  Description of Artificial Sequence: Synthetic oligonucleotide
  Sense strand starting at position 3440 of SEQ ID NO: 1881312
uguugaucuaugcaaagug

SEQ ID NO: 2034823 - RNA, 19 nt, Artificial Sequence
  Description of Artificial Sequence: Synthetic oligonucleotide
  Antisense strand to SEQ ID NO: 2034822
cacuuugcauagaucaaca

SEQ ID NO: 2034824 - RNA, 19 nt, Artificial Sequence
  Description of Artificial Sequence: Synthetic oligonucleotide
  Sense strand starting at position 3693 of SEQ ID NO: 1881312
gguacauacauauguugga

SEQ ID NO: 2034825 - RNA, 19 nt, Artificial Sequence
  Description of Artificial Sequence: Synthetic oligonucleotide
  Antisense strand to SEQ ID NO: 2034824
uccaacauauguauguacc

SEQ ID NO: 2034826 - RNA, 19 nt, Artificial Sequence
  Description of Artificial Sequence: Synthetic oligonucleotide
  Sense strand starting at position 3694 of SEQ ID NO: 1881312
guacauacauauguuggaa

SEQ ID NO: 2034827 - RNA, 19 nt, Artificial Sequence
  Description of Artificial Sequence: Synthetic oligonucleotide
  Antisense strand to SEQ ID NO: 2034826
uuccaacauauguauguac

SEQ ID NO: 2034828 - RNA, 19 nt, Artificial Sequence
  Description of Artificial Sequence: Synthetic oligonucleotide
  Sense strand starting at position 3746 of SEQ ID NO: 1881312
auauguugauaccucgaua

SEQ ID NO: 2034829 - RNA, 19 nt, Artificial Sequence
  Description of Artificial Sequence: Synthetic oligonucleotide
  Antisense strand to SEQ ID NO: 2034828
uaucgagguaucaacauau

SEQ ID NO: 2034830 - RNA, 19 nt, Artificial Sequence
  Description of Artificial Sequence: Synthetic oligonucleotide
  Sense strand starting at position 3749 of SEQ ID NO: 1881312
uguugauaccucgauaaag

SEQ ID NO: 2034831 - RNA, 19 nt, Artificial Sequence
  Description of Artificial Sequence: Synthetic oligonucleotide
  Antisense strand to SEQ ID NO: 2034830
cuuuaucgagguaucaaca

SEQ ID NO: 2034832 - RNA, 19 nt, Artificial Sequence
  Description of Artificial Sequence: Synthetic oligonucleotide
  Sense strand starting at position 3751 of SEQ ID NO: 1881312
uugauaccucgauaaagug

SEQ ID NO: 2034833 - RNA, 19 nt, Artificial Sequence
  Description of Artificial Sequence: Synthetic oligonucleotide
  Antisense strand to SEQ ID NO: 2034832
cacuuuaucgagguaucaa

SEQ ID NO: 2034834 - RNA, 19 nt, Artificial Sequence
  Description of Artificial Sequence: Synthetic oligonucleotide
  Sense strand starting at position 3785 of SEQ ID NO: 1881312
gaaugaaguuacucuuuag

SEQ ID NO: 2034835 - RNA, 19 nt, Artificial Sequence
  Description of Artificial Sequence: Synthetic oligonucleotide
  Antisense strand to SEQ ID NO: 2034834
cuaaagaguaacuucauuc

SEQ ID NO: 2034836 - RNA, 19 nt, Artificial Sequence
  Description of Artificial Sequence: Synthetic oligonucleotide
  Sense strand starting at position 3906 of SEQ ID NO: 1881312
gaaagaacugcucaguauu

SEQ ID NO: 2034837 - RNA, 19 nt, Artificial Sequence
  Description of Artificial Sequence: Synthetic oligonucleotide
  Antisense strand to SEQ ID NO: 2034836
aauacugagcaguucuuuc

SEQ ID NO: 2034838 - RNA, 19 nt, Artificial Sequence
  Description of Artificial Sequence: Synthetic oligonucleotide
  Sense strand starting at position 3909 of SEQ ID NO: 1881312
agaacugcucaguauuaau

SEQ ID NO: 2034839 - RNA, 19 nt, Artificial Sequence
  Description of Artificial Sequence: Synthetic oligonucleotide
  Antisense strand to SEQ ID NO: 2034838
auuaauacugagcaguucu

SEQ ID NO: 2034840 - RNA, 19 nt, Artificial Sequence
  Description of Artificial Sequence: Synthetic oligonucleotide
  Sense strand starting at position 950 of SEQ ID NO: 1881313
gccuguaugggaggugaua

SEQ ID NO: 2034841 - RNA, 19 nt, Artificial Sequence
  Description of Artificial Sequence: Synthetic oligonucleotide
  Antisense strand to SEQ ID NO: 2034840
uaucaccucccauacaggc

SEQ ID NO: 2034842 - RNA, 19 nt, Artificial Sequence
  Description of Artificial Sequence: Synthetic oligonucleotide
  Sense strand starting at position 1193 of SEQ ID NO: 1881313
gagggcaauuugggaaaua

SEQ ID NO: 2034843 - RNA, 19 nt, Artificial Sequence
  Description of Artificial Sequence: Synthetic oligonucleotide
  Antisense strand to SEQ ID NO: 2034842
uauuucccaaauugcccuc

SEQ ID NO: 2034844 - RNA, 19 nt, Artificial Sequence
  Description of Artificial Sequence: Synthetic oligonucleotide
  Sense strand starting at position 1206 of SEQ ID NO: 1881313
gaaauagucuggccucuac

SEQ ID NO: 2034845 - RNA, 19 nt, Artificial Sequence
  Description of Artificial Sequence: Synthetic oligonucleotide
  Antisense strand to SEQ ID NO: 2034844
guagaggccagacuauuuc

SEQ ID NO: 2034846 - RNA, 19 nt, Artificial Sequence
  Description of Artificial Sequence: Synthetic oligonucleotide
  Sense strand starting at position 1266 of SEQ ID NO: 1881313
gccuguggucugcucaacu

SEQ ID NO: 2034847 - RNA, 19 nt, Artificial Sequence
  Description of Artificial Sequence: Synthetic oligonucleotide
  Antisense strand to SEQ ID NO: 2034846
aguugagcagaccacaggc

SEQ ID NO: 2034848 - RNA, 19 nt, Artificial Sequence
  Description of Artificial Sequence: Synthetic oligonucleotide
  Sense strand starting at position 1360 of SEQ ID NO: 1881313
uggugaaagugcuccagga

SEQ ID NO: 2034849 - RNA, 19 nt, Artificial Sequence
  Description of Artificial Sequence: Synthetic oligonucleotide
  Antisense strand to SEQ ID NO: 2034848
uccuggagcacuuucacca

SEQ ID NO: 2034850 - RNA, 19 nt, Artificial Sequence
  Description of Artificial Sequence: Synthetic oligonucleotide
  Sense strand starting at position 1364 of SEQ ID NO: 1881313
gaaagugcuccaggaggaa

SEQ ID NO: 2034851 - RNA, 19 nt, Artificial Sequence
  Description of Artificial Sequence: Synthetic oligonucleotide
  Antisense strand to SEQ ID NO: 2034850
uuccuccuggagcacuuuc

SEQ ID NO: 2034852 - RNA, 19 nt, Artificial Sequence
  Description of Artificial Sequence: Synthetic oligonucleotide
  Sense strand starting at position 1523 of SEQ ID NO: 1881313
gccuuacccguuugacauc

SEQ ID NO: 2034853 - RNA, 19 nt, Artificial Sequence
  Description of Artificial Sequence: Synthetic oligonucleotide
  Antisense strand to SEQ ID NO: 2034852
gaugucaaacggguaaggc

SEQ ID NO: 2034854 - RNA, 19 nt, Artificial Sequence
  Description of Artificial Sequence: Synthetic oligonucleotide
  Sense strand starting at position 1990 of SEQ ID NO: 1881313
gggucaucuaguggcgcaa

SEQ ID NO: 2034855 - RNA, 19 nt, Artificial Sequence
  Description of Artificial Sequence: Synthetic oligonucleotide
  Antisense strand to SEQ ID NO: 2034854
uugcgccacuagaugaccc

SEQ ID NO: 2034856 - RNA, 19 nt, Artificial Sequence
  Description of Artificial Sequence: Synthetic oligonucleotide
  Sense strand starting at position 2417 of SEQ ID NO: 1881313
ccgccugaccucgucgaau

SEQ ID NO: 2034857 - RNA, 19 nt, Artificial Sequence
  Description of Artificial Sequence: Synthetic oligonucleotide
  Antisense strand to SEQ ID NO: 2034856
auucgacgaggucaggcgg

SEQ ID NO: 2034858 - RNA, 19 nt, Artificial Sequence
  Description of Artificial Sequence: Synthetic oligonucleotide
  Sense strand starting at position 2419 of SEQ ID NO: 1881313
gccugaccucgucgaauuc

SEQ ID NO: 2034859 - RNA, 19 nt, Artificial Sequence
  Description of Artificial Sequence: Synthetic oligonucleotide
  Antisense strand to SEQ ID NO: 2034858
gaauucgacgaggucaggc

SEQ ID NO: 2034860 - RNA, 19 nt, Artificial Sequence
  Description of Artificial Sequence: Synthetic oligonucleotide
  Sense strand starting at position 2428 of SEQ ID NO: 1881313
cgucgaauucgcaguggag

SEQ ID NO: 2034861 - RNA, 19 nt, Artificial Sequence
  Description of Artificial Sequence: Synthetic oligonucleotide
  Antisense strand to SEQ ID NO: 2034860
cuccacugcgaauucgacg

SEQ ID NO: 2034862 - RNA, 19 nt, Artificial Sequence
  Description of Artificial Sequence: Synthetic oligonucleotide
  Sense strand starting at position 2429 of SEQ ID NO: 1881313
gucgaauucgcaguggagu

SEQ ID NO: 2034863 - RNA, 19 nt, Artificial Sequence
  Description of Artificial Sequence: Synthetic oligonucleotide
  Antisense strand to SEQ ID NO: 2034862
acuccacugcgaauucgac

SEQ ID NO: 2034864 - RNA, 19 nt, Artificial Sequence
  Description of Artificial Sequence: Synthetic oligonucleotide
  Sense strand starting at position 2430 of SEQ ID NO: 1881313
ucgaauucgcaguggagua

SEQ ID NO: 2034865 - RNA, 19 nt, Artificial Sequence
  Description of Artificial Sequence: Synthetic oligonucleotide
  Antisense strand to SEQ ID NO: 2034864
uacuccacugcgaauucga

SEQ ID NO: 2034866 - RNA, 19 nt, Artificial Sequence
  Description of Artificial Sequence: Synthetic oligonucleotide
  Sense strand starting at position 2737 of SEQ ID NO: 1881313
uagcguuucccugagacac

SEQ ID NO: 2034867 - RNA, 19 nt, Artificial Sequence
  Description of Artificial Sequence: Synthetic oligonucleotide
  Antisense strand to SEQ ID NO: 2034866
gugucucagggaaacgcua

SEQ ID NO: 2034868 - RNA, 19 nt, Artificial Sequence
  Description of Artificial Sequence: Synthetic oligonucleotide
  Sense strand starting at position 2823 of SEQ ID NO: 1881313
agugauuugucagauccag

SEQ ID NO: 2034869 - RNA, 19 nt, Artificial Sequence
  Description of Artificial Sequence: Synthetic oligonucleotide
  Antisense strand to SEQ ID NO: 2034868
cuggaucugacaaaucacu

SEQ ID NO: 2034870 - RNA, 19 nt, Artificial Sequence
  Description of Artificial Sequence: Synthetic oligonucleotide
  Sense strand starting at position 2935 of SEQ ID NO: 1881313
guucucauccagugacuug

SEQ ID NO: 2034871 - RNA, 19 nt, Artificial Sequence
  Description of Artificial Sequence: Synthetic oligonucleotide
  Antisense strand to SEQ ID NO: 2034870
caagucacuggaugagaac

SEQ ID NO: 2034872 - RNA, 19 nt, Artificial Sequence
  Description of Artificial Sequence: Synthetic oligonucleotide
  Sense strand starting at position 2945 of SEQ ID NO: 1881313
agugacuuguguuuaauug

SEQ ID NO: 2034873 - RNA, 19 nt, Artificial Sequence
  Description of Artificial Sequence: Synthetic oligonucleotide
  Antisense strand to SEQ ID NO: 2034872
caauuaaacacaagucacu

SEQ ID NO: 2034874 - RNA, 19 nt, Artificial Sequence
  Description of Artificial Sequence: Synthetic oligonucleotide
  Sense strand starting at position 2946 of SEQ ID NO: 1881313
gugacuuguguuuaauuga

SEQ ID NO: 2034875 - RNA, 19 nt, Artificial Sequence
  Description of Artificial Sequence: Synthetic oligonucleotide
  Antisense strand to SEQ ID NO: 2034874
ucaauuaaacacaagucac

SEQ ID NO: 2034876 - RNA, 19 nt, Artificial Sequence
  Description of Artificial Sequence: Synthetic oligonucleotide
  Sense strand starting at position 2949 of SEQ ID NO: 1881313
acuuguguuuaauugauag

SEQ ID NO: 2034877 - RNA, 19 nt, Artificial Sequence
  Description of Artificial Sequence: Synthetic oligonucleotide
  Antisense strand to SEQ ID NO: 2034876
cuaucaauuaaacacaagu

SEQ ID NO: 2034878 - RNA, 19 nt, Artificial Sequence
  Description of Artificial Sequence: Synthetic oligonucleotide
  Sense strand starting at position 2955 of SEQ ID NO: 1881313
guuuaauugauaggacagu

SEQ ID NO: 2034879 - RNA, 19 nt, Artificial Sequence
  Description of Artificial Sequence: Synthetic oligonucleotide
  Antisense strand to SEQ ID NO: 2034878
acuguccuaucaauuaaac

SEQ ID NO: 2034880 - RNA, 19 nt, Artificial Sequence
  Description of Artificial Sequence: Synthetic oligonucleotide
  Sense strand starting at position 2956 of SEQ ID NO: 1881313
uuuaauugauaggacagua

SEQ ID NO: 2034881 - RNA, 19 nt, Artificial Sequence
  Description of Artificial Sequence: Synthetic oligonucleotide
  Antisense strand to SEQ ID NO: 2034880
uacuguccuaucaauuaaa

SEQ ID NO: 2034882 - RNA, 19 nt, Artificial Sequence
  Description of Artificial Sequence: Synthetic oligonucleotide
  Sense strand starting at position 2968 of SEQ ID NO: 1881313
gacaguaaguuuguuugga

SEQ ID NO: 2034883 - RNA, 19 nt, Artificial Sequence
  Description of Artificial Sequence: Synthetic oligonucleotide
  Antisense strand to SEQ ID NO: 2034882
uccaaacaaacuuacuguc

SEQ ID NO: 2034884 - RNA, 19 nt, Artificial Sequence
  Description of Artificial Sequence: Synthetic oligonucleotide
  Sense strand starting at position 2969 of SEQ ID NO: 1881313
acaguaaguuuguuuggaa

SEQ ID NO: 2034885 - RNA, 19 nt, Artificial Sequence
  Description of Artificial Sequence: Synthetic oligonucleotide
  Antisense strand to SEQ ID NO: 2034884
uuccaaacaaacuuacugu

SEQ ID NO: 2034886 - RNA, 19 nt, Artificial Sequence
  Description of Artificial Sequence: Synthetic oligonucleotide
  Sense strand starting at position 2970 of SEQ ID NO: 1881313
caguaaguuuguuuggaaa

SEQ ID NO: 2034887 - RNA, 19 nt, Artificial Sequence
  Description of Artificial Sequence: Synthetic oligonucleotide
  Antisense strand to SEQ ID NO: 2034886
uuuccaaacaaacuuacug

SEQ ID NO: 2034888 - RNA, 19 nt, Artificial Sequence
  Description of Artificial Sequence: Synthetic oligonucleotide
  Sense strand starting at position 3040 of SEQ ID NO: 1881313
gaggaaaggugagaugaau

SEQ ID NO: 2034889 - RNA, 19 nt, Artificial Sequence
  Description of Artificial Sequence: Synthetic oligonucleotide
  Antisense strand to SEQ ID NO: 2034888
auucaucucaccuuuccuc

SEQ ID NO: 2034890 - RNA, 19 nt, Artificial Sequence
  Description of Artificial Sequence: Synthetic oligonucleotide
  Sense strand starting at position 3081 of SEQ ID NO: 1881313
uuaacaguugcguuuguca

SEQ ID NO: 2034891 - RNA, 19 nt, Artificial Sequence
  Description of Artificial Sequence: Synthetic oligonucleotide
  Antisense strand to SEQ ID NO: 2034890
ugacaaacgcaacuguuaa

SEQ ID NO: 2034892 - RNA, 19 nt, Artificial Sequence
  Description of Artificial Sequence: Synthetic oligonucleotide
  Sense strand starting at position 3083 of SEQ ID NO: 1881313
aacaguugcguuugucaca

SEQ ID NO: 2034893 - RNA, 19 nt, Artificial Sequence
  Description of Artificial Sequence: Synthetic oligonucleotide
  Antisense strand to SEQ ID NO: 2034892
ugugacaaacgcaacuguu

SEQ ID NO: 2034894 - RNA, 19 nt, Artificial Sequence
  Description of Artificial Sequence: Synthetic oligonucleotide
  Sense strand starting at position 3084 of SEQ ID NO: 1881313
acaguugcguuugucacaa

SEQ ID NO: 2034895 - RNA, 19 nt, Artificial Sequence
  Description of Artificial Sequence: Synthetic oligonucleotide
  Antisense strand to SEQ ID NO: 2034894
uugugacaaacgcaacugu

SEQ ID NO: 2034896 - RNA, 19 nt, Artificial Sequence
  Description of Artificial Sequence: Synthetic oligonucleotide
  Sense strand starting at position 3123 of SEQ ID NO: 1881313
ucuuucuuugccgaagugu

SEQ ID NO: 2034897 - RNA, 19 nt, Artificial Sequence
  Description of Artificial Sequence: Synthetic oligonucleotide
  Antisense strand to SEQ ID NO: 2034896
acacuucggcaaagaaaga

SEQ ID NO: 2034898 - RNA, 19 nt, Artificial Sequence
  Description of Artificial Sequence: Synthetic oligonucleotide
  Sense strand starting at position 3129 of SEQ ID NO: 1881313
uuugccgaaguguauuaaa

SEQ ID NO: 2034899 - RNA, 19 nt, Artificial Sequence
  Description of Artificial Sequence: Synthetic oligonucleotide
  Antisense strand to SEQ ID NO: 2034898
uuuaauacacuucggcaaa

SEQ ID NO: 2034900 - RNA, 19 nt, Artificial Sequence
  Description of Artificial Sequence: Synthetic oligonucleotide
  Sense strand starting at position 3173 of SEQ ID NO: 1881313
cugcuuacuugaguuugua

SEQ ID NO: 2034901 - RNA, 19 nt, Artificial Sequence
  Description of Artificial Sequence: Synthetic oligonucleotide
  Antisense strand to SEQ ID NO: 2034900
uacaaacucaaguaagcag

SEQ ID NO: 2034902 - RNA, 19 nt, Artificial Sequence
  Description of Artificial Sequence: Synthetic oligonucleotide
  Sense strand starting at position 3176 of SEQ ID NO: 1881313
cuuacuugaguuuguauuu

SEQ ID NO: 2034903 - RNA, 19 nt, Artificial Sequence
  Description of Artificial Sequence: Synthetic oligonucleotide
  Antisense strand to SEQ ID NO: 2034902
aaauacaaacucaaguaag

SEQ ID NO: 2034904 - RNA, 19 nt, Artificial Sequence
  Description of Artificial Sequence: Synthetic oligonucleotide
  Sense strand starting at position 3198 of SEQ ID NO: 1881313
caaacauggucccugggaa

SEQ ID NO: 2034905 - RNA, 19 nt, Artificial Sequence
  Description of Artificial Sequence: Synthetic oligonucleotide
  Antisense strand to SEQ ID NO: 2034904
uucccagggaccauguuug

SEQ ID NO: 2034906 - RNA, 19 nt, Artificial Sequence
  Description of Artificial Sequence: Synthetic oligonucleotide
  Sense strand starting at position 3199 of SEQ ID NO: 1881313
aaacauggucccugggaau

SEQ ID NO: 2034907 - RNA, 19 nt, Artificial Sequence
  Description of Artificial Sequence: Synthetic oligonucleotide
  Antisense strand to SEQ ID NO: 2034906
auucccagggaccauguuu

SEQ ID NO: 2034908 - RNA, 19 nt, Artificial Sequence
  Description of Artificial Sequence: Synthetic oligonucleotide
  Sense strand starting at position 3250 of SEQ ID NO: 1881313
ugaaucaaauuuggugaga

SEQ ID NO: 2034909 - RNA, 19 nt, Artificial Sequence
  Description of Artificial Sequence: Synthetic oligonucleotide
  Antisense strand to SEQ ID NO: 2034908
ucucaccaaauuugauuca

SEQ ID NO: 2034910 - RNA, 19 nt, Artificial Sequence
  Description of Artificial Sequence: Synthetic oligonucleotide
  Sense strand starting at position 3252 of SEQ ID NO: 1881313
aaucaaauuuggugagagu

SEQ ID NO: 2034911 - RNA, 19 nt, Artificial Sequence
  Description of Artificial Sequence: Synthetic oligonucleotide
  Antisense strand to SEQ ID NO: 2034910
acucucaccaaauuugauu

SEQ ID NO: 2034912 - RNA, 19 nt, Artificial Sequence
  Description of Artificial Sequence: Synthetic oligonucleotide
  Sense strand starting at position 3338 of SEQ ID NO: 1881313
gaggaaauaucgcuugaau

SEQ ID NO: 2034913 - RNA, 19 nt, Artificial Sequence
  Description of Artificial Sequence: Synthetic oligonucleotide
  Antisense strand to SEQ ID NO: 2034912
auucaagcgauauuuccuc

SEQ ID NO: 2034914 - RNA, 19 nt, Artificial Sequence
  Description of Artificial Sequence: Synthetic oligonucleotide
  Sense strand starting at position 3340 of SEQ ID NO: 1881313
ggaaauaucgcuugaaucc

SEQ ID NO: 2034915 - RNA, 19 nt, Artificial Sequence
  Description of Artificial Sequence: Synthetic oligonucleotide
  Antisense strand to SEQ ID NO: 2034914
ggauucaagcgauauuucc

SEQ ID NO: 2034916 - RNA, 19 nt, Artificial Sequence
  Description of Artificial Sequence: Synthetic oligonucleotide
  Sense strand starting at position 3739 of SEQ ID NO: 1881313
acuauauucuuguuuagug

SEQ ID NO: 2034917 - RNA, 19 nt, Artificial Sequence
  Description of Artificial Sequence: Synthetic oligonucleotide
  Antisense strand to SEQ ID NO: 2034916
cacuaaacaagaauauagu

SEQ ID NO: 2034918 - RNA, 19 nt, Artificial Sequence
  Description of Artificial Sequence: Synthetic oligonucleotide
  Sense strand starting at position 3881 of SEQ ID NO: 1881313
ugcaauaaacuccaagagu

SEQ ID NO: 2034919 - RNA, 19 nt, Artificial Sequence
  Description of Artificial Sequence: Synthetic oligonucleotide
  Antisense strand to SEQ ID NO: 2034918
acucuuggaguuuauugca

SEQ ID NO: 2034920 - RNA, 19 nt, Artificial Sequence
  Description of Artificial Sequence: Synthetic oligonucleotide
  Sense strand starting at position 36 of SEQ ID NO: 1881314
cccugauguuggcucagua

SEQ ID NO: 2034921 - RNA, 19 nt, Artificial Sequence
  Description of Artificial Sequence: Synthetic oligonucleotide
  Antisense strand to SEQ ID NO: 2034920
uacugagccaacaucaggg

SEQ ID NO: 2034922 - RNA, 19 nt, Artificial Sequence
  Description of Artificial Sequence: Synthetic oligonucleotide
  Sense strand starting at position 171 of SEQ ID NO: 1881314
ugagguguccugggaaguc

SEQ ID NO: 2034923 - RNA, 19 nt, Artificial Sequence
  Description of Artificial Sequence: Synthetic oligonucleotide
  Antisense strand to SEQ ID NO: 2034922
gacuucccaggacaccuca

SEQ ID NO: 2034924 - RNA, 19 nt, Artificial Sequence
  Description of Artificial Sequence: Synthetic oligonucleotide
  Sense strand starting at position 298 of SEQ ID NO: 1881314
aagccagguggguaucaau

SEQ ID NO: 2034925 - RNA, 19 nt, Artificial Sequence
  Description of Artificial Sequence: Synthetic oligonucleotide
  Antisense strand to SEQ ID NO: 2034924
auugauacccaccuggcuu

SEQ ID NO: 2034926 - RNA, 19 nt, Artificial Sequence
  Description of Artificial Sequence: Synthetic oligonucleotide
  Sense strand starting at position 403 of SEQ ID NO: 1881314
ggcaaaugagguugauugu

SEQ ID NO: 2034927 - RNA, 19 nt, Artificial Sequence
  Description of Artificial Sequence: Synthetic oligonucleotide
  Antisense strand to SEQ ID NO: 2034926
acaaucaaccucauuugcc

SEQ ID NO: 2034928 - RNA, 19 nt, Artificial Sequence
  Description of Artificial Sequence: Synthetic oligonucleotide
  Sense strand starting at position 412 of SEQ ID NO: 1881314
gguugauugugacucaauc

SEQ ID NO: 2034929 - RNA, 19 nt, Artificial Sequence
  Description of Artificial Sequence: Synthetic oligonucleotide
  Antisense strand to SEQ ID NO: 2034928
gauugagucacaaucaacc

SEQ ID NO: 2034930 - RNA, 19 nt, Artificial Sequence
  Description of Artificial Sequence: Synthetic oligonucleotide
  Sense strand starting at position 423 of SEQ ID NO: 1881314
acucaauccugagggauua

SEQ ID NO: 2034931 - RNA, 19 nt, Artificial Sequence
  Description of Artificial Sequence: Synthetic oligonucleotide
  Antisense strand to SEQ ID NO: 2034930
uaaucccucaggauugagu

SEQ ID NO: 2034932 - RNA, 19 nt, Artificial Sequence
  Description of Artificial Sequence: Synthetic oligonucleotide
  Sense strand starting at position 467 of SEQ ID NO: 1881314
ggugaugacugcuuuguca

SEQ ID NO: 2034933 - RNA, 19 nt, Artificial Sequence
  Description of Artificial Sequence: Synthetic oligonucleotide
  Antisense strand to SEQ ID NO: 2034932
ugacaaagcagucaucacc

SEQ ID NO: 2034934 - RNA, 19 nt, Artificial Sequence
  Description of Artificial Sequence: Synthetic oligonucleotide
  Sense strand starting at position 469 of SEQ ID NO: 1881314
ugaugacugcuuugucauu

SEQ ID NO: 2034935 - RNA, 19 nt, Artificial Sequence
  Description of Artificial Sequence: Synthetic oligonucleotide
  Antisense strand to SEQ ID NO: 2034934
aaugacaaagcagucauca

SEQ ID NO: 2034936 - RNA, 19 nt, Artificial Sequence
  Description of Artificial Sequence: Synthetic oligonucleotide
  Sense strand starting at position 470 of SEQ ID NO: 1881314
gaugacugcuuugucauuu

SEQ ID NO: 2034937 - RNA, 19 nt, Artificial Sequence
  Description of Artificial Sequence: Synthetic oligonucleotide
  Antisense strand to SEQ ID NO: 2034936
aaaugacaaagcagucauc

SEQ ID NO: 2034938 - RNA, 19 nt, Artificial Sequence
  Description of Artificial Sequence: Synthetic oligonucleotide
  Sense strand starting at position 674 of SEQ ID NO: 1881314
gagggagugcucugucuag

SEQ ID NO: 2034939 - RNA, 19 nt, Artificial Sequence
  Description of Artificial Sequence: Synthetic oligonucleotide
  Antisense strand to SEQ ID NO: 2034938
cuagacagagcacucccuc

SEQ ID NO: 2034940 - RNA, 19 nt, Artificial Sequence
  Description of Artificial Sequence: Synthetic oligonucleotide
  Sense strand starting at position 678 of SEQ ID NO: 1881314
gagugcucugucuaguaac

SEQ ID NO: 2034941 - RNA, 19 nt, Artificial Sequence
  Description of Artificial Sequence: Synthetic oligonucleotide
  Antisense strand to SEQ ID NO: 2034940
guuacuagacagagcacuc

SEQ ID NO: 2034942 - RNA, 19 nt, Artificial Sequence
  Description of Artificial Sequence: Synthetic oligonucleotide
  Sense strand starting at position 684 of SEQ ID NO: 1881314
ucugucuaguaacugagaa

SEQ ID NO: 2034943 - RNA, 19 nt, Artificial Sequence
  Description of Artificial Sequence: Synthetic oligonucleotide
  Antisense strand to SEQ ID NO: 2034942
uucucaguuacuagacaga

SEQ ID NO: 2034944 - RNA, 19 nt, Artificial Sequence
  Description of Artificial Sequence: Synthetic oligonucleotide
  Sense strand starting at position 809 of SEQ ID NO: 1881314
ucauacucacugggaaauc

SEQ ID NO: 2034945 - RNA, 19 nt, Artificial Sequence
  Description of Artificial Sequence: Synthetic oligonucleotide
  Antisense strand to SEQ ID NO: 2034944
gauuucccagugaguauga

SEQ ID NO: 2034946 - RNA, 19 nt, Artificial Sequence
  Description of Artificial Sequence: Synthetic oligonucleotide
  Sense strand starting at position 819 of SEQ ID NO: 1881314
ugggaaaucugggagaagu

SEQ ID NO: 2034947 - RNA, 19 nt, Artificial Sequence
  Description of Artificial Sequence: Synthetic oligonucleotide
  Antisense strand to SEQ ID NO: 2034946
acuucucccagauuuccca

SEQ ID NO: 2034948 - RNA, 19 nt, Artificial Sequence
  Description of Artificial Sequence: Synthetic oligonucleotide
  Sense strand starting at position 852 of SEQ ID NO: 1881314
gggcuagaauguucuaaua

SEQ ID NO: 2034949 - RNA, 19 nt, Artificial Sequence
  Description of Artificial Sequence: Synthetic oligonucleotide
  Antisense strand to SEQ ID NO: 2034948
uauuagaacauucuagccc

SEQ ID NO: 2034950 - RNA, 19 nt, Artificial Sequence
  Description of Artificial Sequence: Synthetic oligonucleotide
  Sense strand starting at position 864 of SEQ ID NO: 1881314
ucuaauauguaacauggau

SEQ ID NO: 2034951 - RNA, 19 nt, Artificial Sequence
  Description of Artificial Sequence: Synthetic oligonucleotide
  Antisense strand to SEQ ID NO: 2034950
auccauguuacauauuaga

SEQ ID NO: 2034952 - RNA, 19 nt, Artificial Sequence
  Description of Artificial Sequence: Synthetic oligonucleotide
  Sense strand starting at position 870 of SEQ ID NO: 1881314
auguaacauggauauguuu

SEQ ID NO: 2034953 - RNA, 19 nt, Artificial Sequence
  Description of Artificial Sequence: Synthetic oligonucleotide
  Antisense strand to SEQ ID NO: 2034952
aaacauauccauguuacau

SEQ ID NO: 2034954 - RNA, 19 nt, Artificial Sequence
  Description of Artificial Sequence: Synthetic oligonucleotide
  Sense strand starting at position 872 of SEQ ID NO: 1881314
guaacauggauauguuuag

SEQ ID NO: 2034955 - RNA, 19 nt, Artificial Sequence
  Description of Artificial Sequence: Synthetic oligonucleotide
  Antisense strand to SEQ ID NO: 2034954
cuaaacauauccauguuac

SEQ ID NO: 2034956 - RNA, 19 nt, Artificial Sequence
  Description of Artificial Sequence: Synthetic oligonucleotide
  Sense strand starting at position 873 of SEQ ID NO: 1881314
uaacauggauauguuuaga

SEQ ID NO: 2034957 - RNA, 19 nt, Artificial Sequence
  Description of Artificial Sequence: Synthetic oligonucleotide
  Antisense strand to SEQ ID NO: 2034956
ucuaaacauauccauguua

SEQ ID NO: 2034958 - RNA, 19 nt, Artificial Sequence
  Description of Artificial Sequence: Synthetic oligonucleotide
  Sense strand starting at position 878 of SEQ ID NO: 1881314
uggauauguuuagaacaaa

SEQ ID NO: 2034959 - RNA, 19 nt, Artificial Sequence
  Description of Artificial Sequence: Synthetic oligonucleotide
  Antisense strand to SEQ ID NO: 2034958
uuuguucuaaacauaucca

SEQ ID NO: 2034960 - RNA, 19 nt, Artificial Sequence
  Description of Artificial Sequence: Synthetic oligonucleotide
  Sense strand starting at position 1110 of SEQ ID NO: 1881314
auuccuuggucuccagaag

SEQ ID NO: 2034961 - RNA, 19 nt, Artificial Sequence
  Description of Artificial Sequence: Synthetic oligonucleotide
  Antisense strand to SEQ ID NO: 2034960
cuucuggagaccaaggaau

SEQ ID NO: 2034962 - RNA, 19 nt, Artificial Sequence
  Description of Artificial Sequence: Synthetic oligonucleotide
  Sense strand starting at position 1111 of SEQ ID NO: 1881314
uuccuuggucuccagaaga

SEQ ID NO: 2034963 - RNA, 19 nt, Artificial Sequence
  Description of Artificial Sequence: Synthetic oligonucleotide
  Antisense strand to SEQ ID NO: 2034962
ucuucuggagaccaaggaa

SEQ ID NO: 2034964 - RNA, 19 nt, Artificial Sequence
  Description of Artificial Sequence: Synthetic oligonucleotide
  Sense strand starting at position 1121 of SEQ ID NO: 1881314
uccagaagauucuaauaug

SEQ ID NO: 2034965 - RNA, 19 nt, Artificial Sequence
  Description of Artificial Sequence: Synthetic oligonucleotide
  Antisense strand to SEQ ID NO: 2034964
cauauuagaaucuucugga

SEQ ID NO: 2034966 - RNA, 19 nt, Artificial Sequence
  Description of Artificial Sequence: Synthetic oligonucleotide
  Sense strand starting at position 1124 of SEQ ID NO: 1881314
agaagauucuaauaugcag

SEQ ID NO: 2034967 - RNA, 19 nt, Artificial Sequence
  Description of Artificial Sequence: Synthetic oligonucleotide
  Antisense strand to SEQ ID NO: 2034966
cugcauauuagaaucuucu

SEQ ID NO: 2034968 - RNA, 19 nt, Artificial Sequence
  Description of Artificial Sequence: Synthetic oligonucleotide
  Sense strand starting at position 1164 of SEQ ID NO: 1881314
guacuaccucccugauagu

SEQ ID NO: 2034969 - RNA, 19 nt, Artificial Sequence
  Description of Artificial Sequence: Synthetic oligonucleotide
  Antisense strand to SEQ ID NO: 2034968
acuaucagggagguaguac

SEQ ID NO: 2034970 - RNA, 19 nt, Artificial Sequence
  Description of Artificial Sequence: Synthetic oligonucleotide
  Sense strand starting at position 2007 of SEQ ID NO: 1881314
ccacauggucugugcucaa

SEQ ID NO: 2034971 - RNA, 19 nt, Artificial Sequence
  Description of Artificial Sequence: Synthetic oligonucleotide
  Antisense strand to SEQ ID NO: 2034970
uugagcacagaccaugugg

SEQ ID NO: 2034972 - RNA, 19 nt, Artificial Sequence
  Description of Artificial Sequence: Synthetic oligonucleotide
  Sense strand starting at position 2964 of SEQ ID NO: 1881314
cacucaagaucaguuggaa

SEQ ID NO: 2034973 - RNA, 19 nt, Artificial Sequence
  Description of Artificial Sequence: Synthetic oligonucleotide
  Antisense strand to SEQ ID NO: 2034972
uuccaacugaucuugagug

SEQ ID NO: 2034974 - RNA, 19 nt, Artificial Sequence
  Description of Artificial Sequence: Synthetic oligonucleotide
  Sense strand starting at position 3157 of SEQ ID NO: 1881314
cagugauaccaucgagcuu

SEQ ID NO: 2034975 - RNA, 19 nt, Artificial Sequence
  Description of Artificial Sequence: Synthetic oligonucleotide
  Antisense strand to SEQ ID NO: 2034974
aagcucgaugguaucacug

SEQ ID NO: 2034976 - RNA, 19 nt, Artificial Sequence
  Description of Artificial Sequence: Synthetic oligonucleotide
  Sense strand starting at position 3158 of SEQ ID NO: 1881314
agugauaccaucgagcuuu

SEQ ID NO: 2034977 - RNA, 19 nt, Artificial Sequence
  Description of Artificial Sequence: Synthetic oligonucleotide
  Antisense strand to SEQ ID NO: 2034976
aaagcucgaugguaucacu

SEQ ID NO: 2034978 - RNA, 19 nt, Artificial Sequence
  Description of Artificial Sequence: Synthetic oligonucleotide
  Sense strand starting at position 3356 of SEQ ID NO: 1881314
ccuccuggucucgaacaua

SEQ ID NO: 2034979 - RNA, 19 nt, Artificial Sequence
  Description of Artificial Sequence: Synthetic oligonucleotide
  Antisense strand to SEQ ID NO: 2034978
uauguucgagaccaggagg

SEQ ID NO: 2034980 - RNA, 19 nt, Artificial Sequence
  Description of Artificial Sequence: Synthetic oligonucleotide
  Sense strand starting at position 3715 of SEQ ID NO: 1881314
gugucuuaugcggaauaca

SEQ ID NO: 2034981 - RNA, 19 nt, Artificial Sequence
  Description of Artificial Sequence: Synthetic oligonucleotide
  Antisense strand to SEQ ID NO: 2034980
uguauuccgcauaagacac

SEQ ID NO: 2034982 - RNA, 19 nt, Artificial Sequence
  Description of Artificial Sequence: Synthetic oligonucleotide
  Sense strand starting at position 3745 of SEQ ID NO: 1881314
cauggauucgggcaugaag

SEQ ID NO: 2034983 - RNA, 19 nt, Artificial Sequence
  Description of Artificial Sequence: Synthetic oligonucleotide
  Antisense strand to SEQ ID NO: 2034982
cuucaugcccgaauccaug

SEQ ID NO: 2034984 - RNA, 19 nt, Artificial Sequence
  Description of Artificial Sequence: Synthetic oligonucleotide
  Sense strand starting at position 3747 of SEQ ID NO: 1881314
uggauucgggcaugaagaa

SEQ ID NO: 2034985 - RNA, 19 nt, Artificial Sequence
  Description of Artificial Sequence: Synthetic oligonucleotide
  Antisense strand to SEQ ID NO: 2034984
uucuucaugcccgaaucca

SEQ ID NO: 2034986 - RNA, 19 nt, Artificial Sequence
  Description of Artificial Sequence: Synthetic oligonucleotide
  Sense strand starting at position 3805 of SEQ ID NO: 1881314
gagccucgcuugucuagau

SEQ ID NO: 2034987 - RNA, 19 nt, Artificial Sequence
  Description of Artificial Sequence: Synthetic oligonucleotide
  Antisense strand to SEQ ID NO: 2034986
aucuagacaagcgaggcuc

SEQ ID NO: 2034988 - RNA, 19 nt, Artificial Sequence
  Description of Artificial Sequence: Synthetic oligonucleotide
  Sense strand starting at position 3815 of SEQ ID NO: 1881314
ugucuagauuguccucuuu

SEQ ID NO: 2034989 - RNA, 19 nt, Artificial Sequence
  Description of Artificial Sequence: Synthetic oligonucleotide
  Antisense strand to SEQ ID NO: 2034988
aaagaggacaaucuagaca

SEQ ID NO: 2034990 - RNA, 19 nt, Artificial Sequence
  Description of Artificial Sequence: Synthetic oligonucleotide
  Sense strand starting at position 3817 of SEQ ID NO: 1881314
ucuagauuguccucuuugu

SEQ ID NO: 2034991 - RNA, 19 nt, Artificial Sequence
  Description of Artificial Sequence: Synthetic oligonucleotide
  Antisense strand to SEQ ID NO: 2034990
acaaagaggacaaucuaga

SEQ ID NO: 2034992 - RNA, 19 nt, Artificial Sequence
  Description of Artificial Sequence: Synthetic oligonucleotide
  Sense strand starting at position 3893 of SEQ ID NO: 1881314
ccuguacucauaggaggaa

SEQ ID NO: 2034993 - RNA, 19 nt, Artificial Sequence
  Description of Artificial Sequence: Synthetic oligonucleotide
  Antisense strand to SEQ ID NO: 2034992
uuccuccuaugaguacagg

SEQ ID NO: 2034994 - RNA, 19 nt, Artificial Sequence
  Description of Artificial Sequence: Synthetic oligonucleotide
  Sense strand starting at position 3942 of SEQ ID NO: 1881314
uucuaaguccuguguauug

SEQ ID NO: 2034995 - RNA, 19 nt, Artificial Sequence
  Description of Artificial Sequence: Synthetic oligonucleotide
  Antisense strand to SEQ ID NO: 2034994
caauacacaggacuuagaa

SEQ ID NO: 2034996 - RNA, 19 nt, Artificial Sequence
  Description of Artificial Sequence: Synthetic oligonucleotide
  Sense strand starting at position 3944 of SEQ ID NO: 1881314
cuaaguccuguguauugga

SEQ ID NO: 2034997 - RNA, 19 nt, Artificial Sequence
  Description of Artificial Sequence: Synthetic oligonucleotide
  Antisense strand to SEQ ID NO: 2034996
uccaauacacaggacuuag

SEQ ID NO: 2034998 - RNA, 19 nt, Artificial Sequence
  Description of Artificial Sequence: Synthetic oligonucleotide
  Sense strand starting at position 3953 of SEQ ID NO: 1881314
guguauuggacggagagca

SEQ ID NO: 2034999 - RNA, 19 nt, Artificial Sequence
  Description of Artificial Sequence: Synthetic oligonucleotide
  Antisense strand to SEQ ID NO: 2034998
ugcucuccguccaauacac

SEQ ID NO: 2035000 - RNA, 19 nt, Artificial Sequence
  Description of Artificial Sequence: Synthetic oligonucleotide
  Sense strand starting at position 2028 of SEQ ID NO: 1881315
aaaugauuaugcuguguuc

SEQ ID NO: 2035001 - RNA, 19 nt, Artificial Sequence
  Description of Artificial Sequence: Synthetic oligonucleotide
  Antisense strand to SEQ ID NO: 2035000
gaacacagcauaaucauuu

SEQ ID NO: 2035002 - RNA, 19 nt, Artificial Sequence
  Description of Artificial Sequence: Synthetic oligonucleotide
  Sense strand starting at position 2030 of SEQ ID NO: 1881315
augauuaugcuguguucca

SEQ ID NO: 2035003 - RNA, 19 nt, Artificial Sequence
  Description of Artificial Sequence: Synthetic oligonucleotide
  Antisense strand to SEQ ID NO: 2035002
uggaacacagcauaaucau

SEQ ID NO: 2035004 - RNA, 19 nt, Artificial Sequence
  Description of Artificial Sequence: Synthetic oligonucleotide
  Sense strand starting at position 2031 of SEQ ID NO: 1881315
ugauuaugcuguguuccaa

SEQ ID NO: 2035005 - RNA, 19 nt, Artificial Sequence
  Description of Artificial Sequence: Synthetic oligonucleotide
  Antisense strand to SEQ ID NO: 2035004
uuggaacacagcauaauca

SEQ ID NO: 2035006 - RNA, 19 nt, Artificial Sequence
  Description of Artificial Sequence: Synthetic oligonucleotide
  Sense strand starting at position 2063 of SEQ ID NO: 1881315
gcacuuguauugccaguaa

SEQ ID NO: 2035007 - RNA, 19 nt, Artificial Sequence
  Description of Artificial Sequence: Synthetic oligonucleotide
  Antisense strand to SEQ ID NO: 2035006
uuacuggcaauacaagugc

SEQ ID NO: 2035008 - RNA, 19 nt, Artificial Sequence
  Description of Artificial Sequence: Synthetic oligonucleotide
  Sense strand starting at position 2067 of SEQ ID NO: 1881315
uuguauugccaguaaggga

SEQ ID NO: 2035009 - RNA, 19 nt, Artificial Sequence
  Description of Artificial Sequence: Synthetic oligonucleotide
  Antisense strand to SEQ ID NO: 2035008
ucccuuacuggcaauacaa

SEQ ID NO: 2035010 - RNA, 19 nt, Artificial Sequence
  Description of Artificial Sequence: Synthetic oligonucleotide
  Sense strand starting at position 2175 of SEQ ID NO: 1881315
guacaaauagaauguguuu

SEQ ID NO: 2035011 - RNA, 19 nt, Artificial Sequence
  Description of Artificial Sequence: Synthetic oligonucleotide
  Antisense strand to SEQ ID NO: 2035010
aaacacauucuauuuguac

SEQ ID NO: 2035012 - RNA, 19 nt, Artificial Sequence
  Description of Artificial Sequence: Synthetic oligonucleotide
  Sense strand starting at position 2236 of SEQ ID NO: 1881315
gccagaauacaguaauguu

SEQ ID NO: 2035013 - RNA, 19 nt, Artificial Sequence
  Description of Artificial Sequence: Synthetic oligonucleotide
  Antisense strand to SEQ ID NO: 2035012
aacauuacuguauucuggc

SEQ ID NO: 2035014 - RNA, 19 nt, Artificial Sequence
  Description of Artificial Sequence: Synthetic oligonucleotide
  Sense strand starting at position 2376 of SEQ ID NO: 1881315
aaggguguuccaugccaaa

SEQ ID NO: 2035015 - RNA, 19 nt, Artificial Sequence
  Description of Artificial Sequence: Synthetic oligonucleotide
  Antisense strand to SEQ ID NO: 2035014
uuuggcauggaacacccuu

SEQ ID NO: 2035016 - RNA, 19 nt, Artificial Sequence
  Description of Artificial Sequence: Synthetic oligonucleotide
  Sense strand starting at position 2424 of SEQ ID NO: 1881315
gguuuaguaucacaacgag

SEQ ID NO: 2035017 - RNA, 19 nt, Artificial Sequence
  Description of Artificial Sequence: Synthetic oligonucleotide
  Antisense strand to SEQ ID NO: 2035016
cucguugugauacuaaacc

SEQ ID NO: 2035018 - RNA, 19 nt, Artificial Sequence
  Description of Artificial Sequence: Synthetic oligonucleotide
  Sense strand starting at position 2442 of SEQ ID NO: 1881315
ggcagaaacguacaauauu

SEQ ID NO: 2035019 - RNA, 19 nt, Artificial Sequence
  Description of Artificial Sequence: Synthetic oligonucleotide
  Antisense strand to SEQ ID NO: 2035018
aauauuguacguuucugcc

SEQ ID NO: 2035020 - RNA, 19 nt, Artificial Sequence
  Description of Artificial Sequence: Synthetic oligonucleotide
  Sense strand starting at position 2506 of SEQ ID NO: 1881315
cguuuaguaacauguuugu

SEQ ID NO: 2035021 - RNA, 19 nt, Artificial Sequence
  Description of Artificial Sequence: Synthetic oligonucleotide
  Antisense strand to SEQ ID NO: 2035020
acaaacauguuacuaaacg

SEQ ID NO: 2035022 - RNA, 19 nt, Artificial Sequence
  Description of Artificial Sequence: Synthetic oligonucleotide
  Sense strand starting at position 2512 of SEQ ID NO: 1881315
guaacauguuuguuccaca

SEQ ID NO: 2035023 - RNA, 19 nt, Artificial Sequence
  Description of Artificial Sequence: Synthetic oligonucleotide
  Antisense strand to SEQ ID NO: 2035022
uguggaacaaacauguuac

SEQ ID NO: 2035024 - RNA, 19 nt, Artificial Sequence
  Description of Artificial Sequence: Synthetic oligonucleotide
  Sense strand starting at position 2517 of SEQ ID NO: 1881315
auguuuguuccacaagcua

SEQ ID NO: 2035025 - RNA, 19 nt, Artificial Sequence
  Description of Artificial Sequence: Synthetic oligonucleotide
  Antisense strand to SEQ ID NO: 2035024
uagcuuguggaacaaacau

SEQ ID NO: 2035026 - RNA, 19 nt, Artificial Sequence
  Description of Artificial Sequence: Synthetic oligonucleotide
  Sense strand starting at position 122 of SEQ ID NO: 1881316
cugugaaugccucacucca

SEQ ID NO: 2035027 - RNA, 19 nt, Artificial Sequence
  Description of Artificial Sequence: Synthetic oligonucleotide
  Antisense strand to SEQ ID NO: 2035026
uggagugaggcauucacag

SEQ ID NO: 2035028 - RNA, 19 nt, Artificial Sequence
  Description of Artificial Sequence: Synthetic oligonucleotide
  Sense strand starting at position 129 of SEQ ID NO: 1881316
ugccucacuccagaaagua

SEQ ID NO: 2035029 - RNA, 19 nt, Artificial Sequence
  Description of Artificial Sequence: Synthetic oligonucleotide
  Antisense strand to SEQ ID NO: 2035028
uacuuucuggagugaggca

SEQ ID NO: 2035030 - RNA, 19 nt, Artificial Sequence
  Description of Artificial Sequence: Synthetic oligonucleotide
  Sense strand starting at position 168 of SEQ ID NO: 1881316
acagaagcuguauauuaau

SEQ ID NO: 2035031 - RNA, 19 nt, Artificial Sequence
  Description of Artificial Sequence: Synthetic oligonucleotide
  Antisense strand to SEQ ID NO: 2035030
auuaauauacagcuucugu

SEQ ID NO: 2035032 - RNA, 19 nt, Artificial Sequence
  Description of Artificial Sequence: Synthetic oligonucleotide
  Sense strand starting at position 188 of SEQ ID NO: 1881316
gauacaauguugccauaga

SEQ ID NO: 2035033 - RNA, 19 nt, Artificial Sequence
  Description of Artificial Sequence: Synthetic oligonucleotide
  Antisense strand to SEQ ID NO: 2035032
ucuauggcaacauuguauc

SEQ ID NO: 2035034 - RNA, 19 nt, Artificial Sequence
  Description of Artificial Sequence: Synthetic oligonucleotide
  Sense strand starting at position 303 of SEQ ID NO: 1881316
accuuuauuggaugcuaua

SEQ ID NO: 2035035 - RNA, 19 nt, Artificial Sequence
  Description of Artificial Sequence: Synthetic oligonucleotide
  Antisense strand to SEQ ID NO: 2035034
uauagcauccaauaaaggu

SEQ ID NO: 2035036 - RNA, 19 nt, Artificial Sequence
  Description of Artificial Sequence: Synthetic oligonucleotide
  Sense strand starting at position 363 of SEQ ID NO: 1881316
ugugauauauuccugauug

SEQ ID NO: 2035037 - RNA, 19 nt, Artificial Sequence
  Description of Artificial Sequence: Synthetic oligonucleotide
  Antisense strand to SEQ ID NO: 2035036
caaucaggaauauaucaca

SEQ ID NO: 2035038 - RNA, 19 nt, Artificial Sequence
  Description of Artificial Sequence: Synthetic oligonucleotide
  Sense strand starting at position 365 of SEQ ID NO: 1881316
ugauauauuccugauugcu

SEQ ID NO: 2035039 - RNA, 19 nt, Artificial Sequence
  Description of Artificial Sequence: Synthetic oligonucleotide
  Antisense strand to SEQ ID NO: 2035038
agcaaucaggaauauauca

SEQ ID NO: 2035040 - RNA, 19 nt, Artificial Sequence
  Description of Artificial Sequence: Synthetic oligonucleotide
  Sense strand starting at position 436 of SEQ ID NO: 1881316
ggcggauggugaccuacaa

SEQ ID NO: 2035041 - RNA, 19 nt, Artificial Sequence
  Description of Artificial Sequence: Synthetic oligonucleotide
  Antisense strand to SEQ ID NO: 2035040
uuguaggucaccauccgcc

SEQ ID NO: 2035042 - RNA, 19 nt, Artificial Sequence
  Description of Artificial Sequence: Synthetic oligonucleotide
  Sense strand starting at position 459 of SEQ ID NO: 1881316
ugggcucaaaguugaaaga

SEQ ID NO: 2035043 - RNA, 19 nt, Artificial Sequence
  Description of Artificial Sequence: Synthetic oligonucleotide
  Antisense strand to SEQ ID NO: 2035042
ucuuucaacuuugagccca

SEQ ID NO: 2035044 - RNA, 19 nt, Artificial Sequence
  Description of Artificial Sequence: Synthetic oligonucleotide
  Sense strand starting at position 559 of SEQ ID NO: 1881316
cuguaaugagccuacaguu

SEQ ID NO: 2035045 - RNA, 19 nt, Artificial Sequence
  Description of Artificial Sequence: Synthetic oligonucleotide
  Antisense strand to SEQ ID NO: 2035044
aacuguaggcucauuacag

SEQ ID NO: 2035046 - RNA, 19 nt, Artificial Sequence
  Description of Artificial Sequence: Synthetic oligonucleotide
  Sense strand starting at position 775 of SEQ ID NO: 1881316
aaguuagaguacucugaaa

SEQ ID NO: 2035047 - RNA, 19 nt, Artificial Sequence
  Description of Artificial Sequence: Synthetic oligonucleotide
  Antisense strand to SEQ ID NO: 2035046
uuucagaguacucuaacuu

SEQ ID NO: 2035048 - RNA, 19 nt, Artificial Sequence
  Description of Artificial Sequence: Synthetic oligonucleotide
  Sense strand starting at position 777 of SEQ ID NO: 1881316
guuagaguacucugaaauu

SEQ ID NO: 2035049 - RNA, 19 nt, Artificial Sequence
  Description of Artificial Sequence: Synthetic oligonucleotide
  Antisense strand to SEQ ID NO: 2035048
aauuucagaguacucuaac

SEQ ID NO: 2035050 - RNA, 19 nt, Artificial Sequence
  Description of Artificial Sequence: Synthetic oligonucleotide
  Sense strand starting at position 803 of SEQ ID NO: 1881316
auguuaacgggaggaauua

SEQ ID NO: 2035051 - RNA, 19 nt, Artificial Sequence
  Description of Artificial Sequence: Synthetic oligonucleotide
  Antisense strand to SEQ ID NO: 2035050
uaauuccucccguuaacau

SEQ ID NO: 2035052 - RNA, 19 nt, Artificial Sequence
  Description of Artificial Sequence: Synthetic oligonucleotide
  Sense strand starting at position 874 of SEQ ID NO: 1881316
ccgguugcugaggauacau

SEQ ID NO: 2035053 - RNA, 19 nt, Artificial Sequence
  Description of Artificial Sequence: Synthetic oligonucleotide
  Antisense strand to SEQ ID NO: 2035052
auguauccucagcaaccgg

SEQ ID NO: 2035054 - RNA, 19 nt, Artificial Sequence
  Description of Artificial Sequence: Synthetic oligonucleotide
  Sense strand starting at position 1081 of SEQ ID NO: 1881316
gguccugugaggugacaga

SEQ ID NO: 2035055 - RNA, 19 nt, Artificial Sequence
  Description of Artificial Sequence: Synthetic oligonucleotide
  Antisense strand to SEQ ID NO: 2035054
ucugucaccucacaggacc

SEQ ID NO: 2035056 - RNA, 19 nt, Artificial Sequence
  Description of Artificial Sequence: Synthetic oligonucleotide
  Sense strand starting at position 1157 of SEQ ID NO: 1881316
aaacauuaagugcagaagu

SEQ ID NO: 2035057 - RNA, 19 nt, Artificial Sequence
  Description of Artificial Sequence: Synthetic oligonucleotide
  Antisense strand to SEQ ID NO: 2035056
acuucugcacuuaauguuu

SEQ ID NO: 2035058 - RNA, 19 nt, Artificial Sequence
  Description of Artificial Sequence: Synthetic oligonucleotide
  Sense strand starting at position 1200 of SEQ ID NO: 1881316
guaaauauucuacgaggag

SEQ ID NO: 2035059 - RNA, 19 nt, Artificial Sequence
  Description of Artificial Sequence: Synthetic oligonucleotide
  Antisense strand to SEQ ID NO: 2035058
cuccucguagaauauuuac

SEQ ID NO: 2035060 - RNA, 19 nt, Artificial Sequence
  Description of Artificial Sequence: Synthetic oligonucleotide
  Sense strand starting at position 1266 of SEQ ID NO: 1881316
uuaccagcagaguauaauu

SEQ ID NO: 2035061 - RNA, 19 nt, Artificial Sequence
  Description of Artificial Sequence: Synthetic oligonucleotide
  Antisense strand to SEQ ID NO: 2035060
aauuauacucugcugguaa

SEQ ID NO: 2035062 - RNA, 19 nt, Artificial Sequence
  Description of Artificial Sequence: Synthetic oligonucleotide
  Sense strand starting at position 1321 of SEQ ID NO: 1881316
ucuuccucuguauauuaga

SEQ ID NO: 2035063 - RNA, 19 nt, Artificial Sequence
  Description of Artificial Sequence: Synthetic oligonucleotide
  Antisense strand to SEQ ID NO: 2035062
ucuaauauacagaggaaga

SEQ ID NO: 2035064 - RNA, 19 nt, Artificial Sequence
  Description of Artificial Sequence: Synthetic oligonucleotide
  Sense strand starting at position 1500 of SEQ ID NO: 1881316
ugagauaaccaacguaaau

SEQ ID NO: 2035065 - RNA, 19 nt, Artificial Sequence
  Description of Artificial Sequence: Synthetic oligonucleotide
  Antisense strand to SEQ ID NO: 2035064
auuuacguugguuaucuca

SEQ ID NO: 2035066 - RNA, 19 nt, Artificial Sequence
  Description of Artificial Sequence: Synthetic oligonucleotide
  Sense strand starting at position 1515 of SEQ ID NO: 1881316
aaauaugucgacugacacu

SEQ ID NO: 2035067 - RNA, 19 nt, Artificial Sequence
  Description of Artificial Sequence: Synthetic oligonucleotide
  Antisense strand to SEQ ID NO: 2035066
agugucagucgacauauuu

SEQ ID NO: 2035068 - RNA, 19 nt, Artificial Sequence
  Description of Artificial Sequence: Synthetic oligonucleotide
  Sense strand starting at position 1665 of SEQ ID NO: 1881316
caggcauucguugaauaaa

SEQ ID NO: 2035069 - RNA, 19 nt, Artificial Sequence
  Description of Artificial Sequence: Synthetic oligonucleotide
  Antisense strand to SEQ ID NO: 2035068
uuuauucaacgaaugccug

SEQ ID NO: 2035070 - RNA, 19 nt, Artificial Sequence
  Description of Artificial Sequence: Synthetic oligonucleotide
  Sense strand starting at position 1674 of SEQ ID NO: 1881316
guugaauaaaccgacugua

SEQ ID NO: 2035071 - RNA, 19 nt, Artificial Sequence
  Description of Artificial Sequence: Synthetic oligonucleotide
  Antisense strand to SEQ ID NO: 2035070
uacagucgguuuauucaac

SEQ ID NO: 2035072 - RNA, 19 nt, Artificial Sequence
  Description of Artificial Sequence: Synthetic oligonucleotide
  Sense strand starting at position 1695 of SEQ ID NO: 1881316
cucgacucacuuuagacua

SEQ ID NO: 2035073 - RNA, 19 nt, Artificial Sequence
  Description of Artificial Sequence: Synthetic oligonucleotide
  Antisense strand to SEQ ID NO: 2035072
uagucuaaagugagucgag

SEQ ID NO: 2035074 - RNA, 19 nt, Artificial Sequence
  Description of Artificial Sequence: Synthetic oligonucleotide
  Sense strand starting at position 1736 of SEQ ID NO: 1881316
cuacauucugcugggacau

SEQ ID NO: 2035075 - RNA, 19 nt, Artificial Sequence
  Description of Artificial Sequence: Synthetic oligonucleotide
  Antisense strand to SEQ ID NO: 2035074
augucccagcagaauguag

SEQ ID NO: 2035076 - RNA, 19 nt, Artificial Sequence
  Description of Artificial Sequence: Synthetic oligonucleotide
  Sense strand starting at position 1737 of SEQ ID NO: 1881316
uacauucugcugggacauu

SEQ ID NO: 2035077 - RNA, 19 nt, Artificial Sequence
  Description of Artificial Sequence: Synthetic oligonucleotide
  Antisense strand to SEQ ID NO: 2035076
aaugucccagcagaaugua

SEQ ID NO: 2035078 - RNA, 19 nt, Artificial Sequence
  Description of Artificial Sequence: Synthetic oligonucleotide
  Sense strand starting at position 2456 of SEQ ID NO: 1881316
gcgggugauguuagcggaa

SEQ ID NO: 2035079 - RNA, 19 nt, Artificial Sequence
  Description of Artificial Sequence: Synthetic oligonucleotide
  Antisense strand to SEQ ID NO: 2035078
uuccgcuaacaucacccgc

SEQ ID NO: 2035080 - RNA, 19 nt, Artificial Sequence
  Description of Artificial Sequence: Synthetic oligonucleotide
  Sense strand starting at position 2666 of SEQ ID NO: 1881316
ugugucaaucuuuagacaa

SEQ ID NO: 2035081 - RNA, 19 nt, Artificial Sequence
  Description of Artificial Sequence: Synthetic oligonucleotide
  Antisense strand to SEQ ID NO: 2035080
uugucuaaagauugacaca

SEQ ID NO: 2035082 - RNA, 19 nt, Artificial Sequence
  Description of Artificial Sequence: Synthetic oligonucleotide
  Sense strand starting at position 2686 of SEQ ID NO: 1881316
cuuuauagagugcauagau

SEQ ID NO: 2035083 - RNA, 19 nt, Artificial Sequence
  Description of Artificial Sequence: Synthetic oligonucleotide
  Antisense strand to SEQ ID NO: 2035082
aucuaugcacucuauaaag

SEQ ID NO: 2035084 - RNA, 19 nt, Artificial Sequence
  Description of Artificial Sequence: Synthetic oligonucleotide
  Sense strand starting at position 2695 of SEQ ID NO: 1881316
gugcauagauguuuaauuu

SEQ ID NO: 2035085 - RNA, 19 nt, Artificial Sequence
  Description of Artificial Sequence: Synthetic oligonucleotide
  Antisense strand to SEQ ID NO: 2035084
aaauuaaacaucuaugcac

SEQ ID NO: 2035086 - RNA, 19 nt, Artificial Sequence
  Description of Artificial Sequence: Synthetic oligonucleotide
  Sense strand starting at position 2973 of SEQ ID NO: 1881316
gaagguaucuaucuaauug

SEQ ID NO: 2035087 - RNA, 19 nt, Artificial Sequence
  Description of Artificial Sequence: Synthetic oligonucleotide
  Antisense strand to SEQ ID NO: 2035086
caauuagauagauaccuuc

SEQ ID NO: 2035088 - RNA, 19 nt, Artificial Sequence
  Description of Artificial Sequence: Synthetic oligonucleotide
  Sense strand starting at position 3293 of SEQ ID NO: 1881316
auauguuggguuuaccuaa

SEQ ID NO: 2035089 - RNA, 19 nt, Artificial Sequence
  Description of Artificial Sequence: Synthetic oligonucleotide
  Antisense strand to SEQ ID NO: 2035088
uuagguaaacccaacauau

SEQ ID NO: 2035090 - RNA, 19 nt, Artificial Sequence
  Description of Artificial Sequence: Synthetic oligonucleotide
  Sense strand starting at position 3504 of SEQ ID NO: 1881316
uuaugacagcuuugauuaa

SEQ ID NO: 2035091 - RNA, 19 nt, Artificial Sequence
  Description of Artificial Sequence: Synthetic oligonucleotide
  Antisense strand to SEQ ID NO: 2035090
uuaaucaaagcugucauaa

SEQ ID NO: 2035092 - RNA, 19 nt, Artificial Sequence
  Description of Artificial Sequence: Synthetic oligonucleotide
  Sense strand starting at position 3621 of SEQ ID NO: 1881316
ggcuuuguuagugaaauau

SEQ ID NO: 2035093 - RNA, 19 nt, Artificial Sequence
  Description of Artificial Sequence: Synthetic oligonucleotide
  Antisense strand to SEQ ID NO: 2035092
auauuucacuaacaaagcc

SEQ ID NO: 2035094 - RNA, 19 nt, Artificial Sequence
  Description of Artificial Sequence: Synthetic oligonucleotide
  Sense strand starting at position 3641 of SEQ ID NO: 1881316
guauacacaggaugacuua

SEQ ID NO: 2035095 - RNA, 19 nt, Artificial Sequence
  Description of Artificial Sequence: Synthetic oligonucleotide
  Antisense strand to SEQ ID NO: 2035094
uaagucauccuguguauac

SEQ ID NO: 2035096 - RNA, 19 nt, Artificial Sequence
  Description of Artificial Sequence: Synthetic oligonucleotide
  Sense strand starting at position 3730 of SEQ ID NO: 1881316
ucuuaugaauaagcaagau

SEQ ID NO: 2035097 - RNA, 19 nt, Artificial Sequence
  Description of Artificial Sequence: Synthetic oligonucleotide
  Antisense strand to SEQ ID NO: 2035096
aucuugcuuauucauaaga

SEQ ID NO: 2035098 - RNA, 19 nt, Artificial Sequence
  Description of Artificial Sequence: Synthetic oligonucleotide
  Sense strand starting at position 3753 of SEQ ID NO: 1881316
agguauguucuauguauuu

SEQ ID NO: 2035099 - RNA, 19 nt, Artificial Sequence
  Description of Artificial Sequence: Synthetic oligonucleotide
  Antisense strand to SEQ ID NO: 2035098
aaauacauagaacauaccu

SEQ ID NO: 2035100 - RNA, 19 nt, Artificial Sequence
  Description of Artificial Sequence: Synthetic oligonucleotide
  Sense strand starting at position 3882 of SEQ ID NO: 1881316
uuggguaugugacuuauau

SEQ ID NO: 2035101 - RNA, 19 nt, Artificial Sequence
  Description of Artificial Sequence: Synthetic oligonucleotide
  Antisense strand to SEQ ID NO: 2035100
auauaagucacauacccaa

SEQ ID NO: 2035102 - RNA, 19 nt, Artificial Sequence
  Description of Artificial Sequence: Synthetic oligonucleotide
  Sense strand starting at position 3884 of SEQ ID NO: 1881316
ggguaugugacuuauauac

SEQ ID NO: 2035103 - RNA, 19 nt, Artificial Sequence
  Description of Artificial Sequence: Synthetic oligonucleotide
  Antisense strand to SEQ ID NO: 2035102
guauauaagucacauaccc

SEQ ID NO: 2035104 - RNA, 19 nt, Artificial Sequence
  Description of Artificial Sequence: Synthetic oligonucleotide
  Sense strand starting at position 3958 of SEQ ID NO: 1881316
uggacuggacccugcaaau

SEQ ID NO: 2035105 - RNA, 19 nt, Artificial Sequence
  Description of Artificial Sequence: Synthetic oligonucleotide
  Antisense strand to SEQ ID NO: 2035104
auuugcaggguccagucca

SEQ ID NO: 2035106 - RNA, 19 nt, Artificial Sequence
  Description of Artificial Sequence: Synthetic oligonucleotide
  Sense strand starting at position 168 of SEQ ID NO: 1881317
agacaugucagaugguaag

SEQ ID NO: 2035107 - RNA, 19 nt, Artificial Sequence
  Description of Artificial Sequence: Synthetic oligonucleotide
  Antisense strand to SEQ ID NO: 2035106
cuuaccaucugacaugucu

SEQ ID NO: 2035108 - RNA, 19 nt, Artificial Sequence
  Description of Artificial Sequence: Synthetic oligonucleotide
  Sense strand starting at position 363 of SEQ ID NO: 1881317
acuugcauuuaauaagagu

SEQ ID NO: 2035109 - RNA, 19 nt, Artificial Sequence
  Description of Artificial Sequence: Synthetic oligonucleotide
  Antisense strand to SEQ ID NO: 2035108
acucuuauuaaaugcaagu

SEQ ID NO: 2035110 - RNA, 19 nt, Artificial Sequence
  Description of Artificial Sequence: Synthetic oligonucleotide
  Sense strand starting at position 366 of SEQ ID NO: 1881317
ugcauuuaauaagaguaag

SEQ ID NO: 2035111 - RNA, 19 nt, Artificial Sequence
  Description of Artificial Sequence: Synthetic oligonucleotide
  Antisense strand to SEQ ID NO: 2035110
cuuacucuuauuaaaugca

SEQ ID NO: 2035112 - RNA, 19 nt, Artificial Sequence
  Description of Artificial Sequence: Synthetic oligonucleotide
  Sense strand starting at position 470 of SEQ ID NO: 1881317
cugugauccuaacuggaua

SEQ ID NO: 2035113 - RNA, 19 nt, Artificial Sequence
  Description of Artificial Sequence: Synthetic oligonucleotide
  Antisense strand to SEQ ID NO: 2035112
uauccaguuaggaucacag

SEQ ID NO: 2035114 - RNA, 19 nt, Artificial Sequence
  Description of Artificial Sequence: Synthetic oligonucleotide
  Sense strand starting at position 483 of SEQ ID NO: 1881317
uggauaacauaagcuuauu

SEQ ID NO: 2035115 - RNA, 19 nt, Artificial Sequence
  Description of Artificial Sequence: Synthetic oligonucleotide
  Antisense strand to SEQ ID NO: 2035114
aauaagcuuauguuaucca

SEQ ID NO: 2035116 - RNA, 19 nt, Artificial Sequence
  Description of Artificial Sequence: Synthetic oligonucleotide
  Sense strand starting at position 670 of SEQ ID NO: 1881317
cagagucagcuaugaaauu

SEQ ID NO: 2035117 - RNA, 19 nt, Artificial Sequence
  Description of Artificial Sequence: Synthetic oligonucleotide
  Antisense strand to SEQ ID NO: 2035116
aauuucauagcugacucug

SEQ ID NO: 2035118 - RNA, 19 nt, Artificial Sequence
  Description of Artificial Sequence: Synthetic oligonucleotide
  Sense strand starting at position 713 of SEQ ID NO: 1881317
cuuggauuauuugaguaaa

SEQ ID NO: 2035119 - RNA, 19 nt, Artificial Sequence
  Description of Artificial Sequence: Synthetic oligonucleotide
  Antisense strand to SEQ ID NO: 2035118
uuuacucaaauaauccaag

SEQ ID NO: 2035120 - RNA, 19 nt, Artificial Sequence
  Description of Artificial Sequence: Synthetic oligonucleotide
  Sense strand starting at position 801 of SEQ ID NO: 1881317
guuaaugaaccuugauaau

SEQ ID NO: 2035121 - RNA, 19 nt, Artificial Sequence
  Description of Artificial Sequence: Synthetic oligonucleotide
  Antisense strand to SEQ ID NO: 2035120
auuaucaagguucauuaac

SEQ ID NO: 2035122 - RNA, 19 nt, Artificial Sequence
  Description of Artificial Sequence: Synthetic oligonucleotide
  Sense strand starting at position 810 of SEQ ID NO: 1881317
ccuugauaauuggcaaaca

SEQ ID NO: 2035123 - RNA, 19 nt, Artificial Sequence
  Description of Artificial Sequence: Synthetic oligonucleotide
  Antisense strand to SEQ ID NO: 2035122
uguuugccaauuaucaagg

SEQ ID NO: 2035124 - RNA, 19 nt, Artificial Sequence
  Description of Artificial Sequence: Synthetic oligonucleotide
  Sense strand starting at position 828 of SEQ ID NO: 1881317
aaucuuugagccgaaagua

SEQ ID NO: 2035125 - RNA, 19 nt, Artificial Sequence
  Description of Artificial Sequence: Synthetic oligonucleotide
  Antisense strand to SEQ ID NO: 2035124
uacuuucggcucaaagauu

SEQ ID NO: 2035126 - RNA, 19 nt, Artificial Sequence
  Description of Artificial Sequence: Synthetic oligonucleotide
  Sense strand starting at position 881 of SEQ ID NO: 1881317
augaaacuauuguuggcau

SEQ ID NO: 2035127 - RNA, 19 nt, Artificial Sequence
  Description of Artificial Sequence: Synthetic oligonucleotide
  Antisense strand to SEQ ID NO: 2035126
augccaacaauaguuucau

SEQ ID NO: 2035128 - RNA, 19 nt, Artificial Sequence
  Description of Artificial Sequence: Synthetic oligonucleotide
  Sense strand starting at position 883 of SEQ ID NO: 1881317
gaaacuauuguuggcauua

SEQ ID NO: 2035129 - RNA, 19 nt, Artificial Sequence
  Description of Artificial Sequence: Synthetic oligonucleotide
  Antisense strand to SEQ ID NO: 2035128
uaaugccaacaauaguuuc

SEQ ID NO: 2035130 - RNA, 19 nt, Artificial Sequence
  Description of Artificial Sequence: Synthetic oligonucleotide
  Sense strand starting at position 888 of SEQ ID NO: 1881317
uauuguuggcauuaggauu

SEQ ID NO: 2035131 - RNA, 19 nt, Artificial Sequence
  Description of Artificial Sequence: Synthetic oligonucleotide
  Antisense strand to SEQ ID NO: 2035130
aauccuaaugccaacaaua

SEQ ID NO: 2035132 - RNA, 19 nt, Artificial Sequence
  Description of Artificial Sequence: Synthetic oligonucleotide
  Sense strand starting at position 1009 of SEQ ID NO: 1881317
ccuuaaacaguuuguuauu

SEQ ID NO: 2035133 - RNA, 19 nt, Artificial Sequence
  Description of Artificial Sequence: Synthetic oligonucleotide
  Antisense strand to SEQ ID NO: 2035132
aauaacaaacuguuuaagg

SEQ ID NO: 2035134 - RNA, 19 nt, Artificial Sequence
  Description of Artificial Sequence: Synthetic oligonucleotide
  Sense strand starting at position 1144 of SEQ ID NO: 1881317
acaugaguuguauauguaa

SEQ ID NO: 2035135 - RNA, 19 nt, Artificial Sequence
  Description of Artificial Sequence: Synthetic oligonucleotide
  Antisense strand to SEQ ID NO: 2035134
uuacauauacaacucaugu

SEQ ID NO: 2035136 - RNA, 19 nt, Artificial Sequence
  Description of Artificial Sequence: Synthetic oligonucleotide
  Sense strand starting at position 1428 of SEQ ID NO: 1881317
guucuuguagcugucaagu

SEQ ID NO: 2035137 - RNA, 19 nt, Artificial Sequence
  Description of Artificial Sequence: Synthetic oligonucleotide
  Antisense strand to SEQ ID NO: 2035136
acuugacagcuacaagaac

SEQ ID NO: 2035138 - RNA, 19 nt, Artificial Sequence
  Description of Artificial Sequence: Synthetic oligonucleotide
  Sense strand starting at position 1434 of SEQ ID NO: 1881317
guagcugucaaguagauaa

SEQ ID NO: 2035139 - RNA, 19 nt, Artificial Sequence
  Description of Artificial Sequence: Synthetic oligonucleotide
  Antisense strand to SEQ ID NO: 2035138
uuaucuacuugacagcuac

SEQ ID NO: 2035140 - RNA, 19 nt, Artificial Sequence
  Description of Artificial Sequence: Synthetic oligonucleotide
  Sense strand starting at position 1436 of SEQ ID NO: 1881317
agcugucaaguagauaaua

SEQ ID NO: 2035141 - RNA, 19 nt, Artificial Sequence
  Description of Artificial Sequence: Synthetic oligonucleotide
  Antisense strand to SEQ ID NO: 2035140
uauuaucuacuugacagcu

SEQ ID NO: 2035142 - RNA, 19 nt, Artificial Sequence
  Description of Artificial Sequence: Synthetic oligonucleotide
  Sense strand starting at position 1489 of SEQ ID NO: 1881317
cuuugacaucuuuaguuga

SEQ ID NO: 2035143 - RNA, 19 nt, Artificial Sequence
  Description of Artificial Sequence: Synthetic oligonucleotide
  Antisense strand to SEQ ID NO: 2035142
ucaacuaaagaugucaaag

SEQ ID NO: 2035144 - RNA, 19 nt, Artificial Sequence
  Description of Artificial Sequence: Synthetic oligonucleotide
  Sense strand starting at position 1491 of SEQ ID NO: 1881317
uugacaucuuuaguugaag

SEQ ID NO: 2035145 - RNA, 19 nt, Artificial Sequence
  Description of Artificial Sequence: Synthetic oligonucleotide
  Antisense strand to SEQ ID NO: 2035144
cuucaacuaaagaugucaa

SEQ ID NO: 2035146 - RNA, 19 nt, Artificial Sequence
  Description of Artificial Sequence: Synthetic oligonucleotide
  Sense strand starting at position 1492 of SEQ ID NO: 1881317
ugacaucuuuaguugaaga

SEQ ID NO: 2035147 - RNA, 19 nt, Artificial Sequence
  Description of Artificial Sequence: Synthetic oligonucleotide
  Antisense strand to SEQ ID NO: 2035146
ucuucaacuaaagauguca

SEQ ID NO: 2035148 - RNA, 19 nt, Artificial Sequence
  Description of Artificial Sequence: Synthetic oligonucleotide
  Sense strand starting at position 1700 of SEQ ID NO: 1881317
uuguuaaagcuccauguca

SEQ ID NO: 2035149 - RNA, 19 nt, Artificial Sequence
  Description of Artificial Sequence: Synthetic oligonucleotide
  Antisense strand to SEQ ID NO: 2035148
ugacauggagcuuuaacaa

SEQ ID NO: 2035150 - RNA, 19 nt, Artificial Sequence
  Description of Artificial Sequence: Synthetic oligonucleotide
  Sense strand starting at position 1740 of SEQ ID NO: 1881317
cugcuaauuccuuaugguc

SEQ ID NO: 2035151 - RNA, 19 nt, Artificial Sequence
  Description of Artificial Sequence: Synthetic oligonucleotide
  Antisense strand to SEQ ID NO: 2035150
gaccauaaggaauuagcag

SEQ ID NO: 2035152 - RNA, 19 nt, Artificial Sequence
  Description of Artificial Sequence: Synthetic oligonucleotide
  Sense strand starting at position 1809 of SEQ ID NO: 1881317
uuugaaauguuggcuaaau

SEQ ID NO: 2035153 - RNA, 19 nt, Artificial Sequence
  Description of Artificial Sequence: Synthetic oligonucleotide
  Antisense strand to SEQ ID NO: 2035152
auuuagccaacauuucaaa

SEQ ID NO: 2035154 - RNA, 19 nt, Artificial Sequence
  Description of Artificial Sequence: Synthetic oligonucleotide
  Sense strand starting at position 1810 of SEQ ID NO: 1881317
uugaaauguuggcuaaauu

SEQ ID NO: 2035155 - RNA, 19 nt, Artificial Sequence
  Description of Artificial Sequence: Synthetic oligonucleotide
  Antisense strand to SEQ ID NO: 2035154
aauuuagccaacauuucaa

SEQ ID NO: 2035156 - RNA, 19 nt, Artificial Sequence
  Description of Artificial Sequence: Synthetic oligonucleotide
  Sense strand starting at position 1870 of SEQ ID NO: 1881317
gaaugaaauuggcuaguga

SEQ ID NO: 2035157 - RNA, 19 nt, Artificial Sequence
  Description of Artificial Sequence: Synthetic oligonucleotide
  Antisense strand to SEQ ID NO: 2035156
ucacuagccaauuucauuc

SEQ ID NO: 2035158 - RNA, 19 nt, Artificial Sequence
  Description of Artificial Sequence: Synthetic oligonucleotide
  Sense strand starting at position 2007 of SEQ ID NO: 1881317
agguuuagggaaugcgaau

SEQ ID NO: 2035159 - RNA, 19 nt, Artificial Sequence
  Description of Artificial Sequence: Synthetic oligonucleotide
  Antisense strand to SEQ ID NO: 2035158
auucgcauucccuaaaccu

SEQ ID NO: 2035160 - RNA, 19 nt, Artificial Sequence
  Description of Artificial Sequence: Synthetic oligonucleotide
  Sense strand starting at position 2169 of SEQ ID NO: 1881317
gagaauaggugauagaaag

SEQ ID NO: 2035161 - RNA, 19 nt, Artificial Sequence
  Description of Artificial Sequence: Synthetic oligonucleotide
  Antisense strand to SEQ ID NO: 2035160
cuuucuaucaccuauucuc

SEQ ID NO: 2035162 - RNA, 19 nt, Artificial Sequence
  Description of Artificial Sequence: Synthetic oligonucleotide
  Sense strand starting at position 2361 of SEQ ID NO: 1881317
agccuuggagguuaguaaa

SEQ ID NO: 2035163 - RNA, 19 nt, Artificial Sequence
  Description of Artificial Sequence: Synthetic oligonucleotide
  Antisense strand to SEQ ID NO: 2035162
uuuacuaaccuccaaggcu

SEQ ID NO: 2035164 - RNA, 19 nt, Artificial Sequence
  Description of Artificial Sequence: Synthetic oligonucleotide
  Sense strand starting at position 2538 of SEQ ID NO: 1881317
ggcuaucucguggagauga

SEQ ID NO: 2035165 - RNA, 19 nt, Artificial Sequence
  Description of Artificial Sequence: Synthetic oligonucleotide
  Antisense strand to SEQ ID NO: 2035164
ucaucuccacgagauagcc

SEQ ID NO: 2035166 - RNA, 19 nt, Artificial Sequence
  Description of Artificial Sequence: Synthetic oligonucleotide
  Sense strand starting at position 2789 of SEQ ID NO: 1881317
uucuuauacgggcaaaugu

SEQ ID NO: 2035167 - RNA, 19 nt, Artificial Sequence
  Description of Artificial Sequence: Synthetic oligonucleotide
  Antisense strand to SEQ ID NO: 2035166
acauuugcccguauaagaa

SEQ ID NO: 2035168 - RNA, 19 nt, Artificial Sequence
  Description of Artificial Sequence: Synthetic oligonucleotide
  Sense strand starting at position 2797 of SEQ ID NO: 1881317
cgggcaaauguuuaauacu

SEQ ID NO: 2035169 - RNA, 19 nt, Artificial Sequence
  Description of Artificial Sequence: Synthetic oligonucleotide
  Antisense strand to SEQ ID NO: 2035168
aguauuaaacauuugcccg

SEQ ID NO: 2035170 - RNA, 19 nt, Artificial Sequence
  Description of Artificial Sequence: Synthetic oligonucleotide
  Sense strand starting at position 3236 of SEQ ID NO: 1881317
gaagauuacuaguccagca

SEQ ID NO: 2035171 - RNA, 19 nt, Artificial Sequence
  Description of Artificial Sequence: Synthetic oligonucleotide
  Antisense strand to SEQ ID NO: 2035170
ugcuggacuaguaaucuuc

SEQ ID NO: 2035172 - RNA, 19 nt, Artificial Sequence
  Description of Artificial Sequence: Synthetic oligonucleotide
  Sense strand starting at position 3279 of SEQ ID NO: 1881317
gaaccuuuagcaugggcaa

SEQ ID NO: 2035173 - RNA, 19 nt, Artificial Sequence
  Description of Artificial Sequence: Synthetic oligonucleotide
  Antisense strand to SEQ ID NO: 2035172
uugcccaugcuaaagguuc

SEQ ID NO: 2035174 - RNA, 19 nt, Artificial Sequence
  Description of Artificial Sequence: Synthetic oligonucleotide
  Sense strand starting at position 3465 of SEQ ID NO: 1881317
gggcgagaccauuggaaag

SEQ ID NO: 2035175 - RNA, 19 nt, Artificial Sequence
  Description of Artificial Sequence: Synthetic oligonucleotide
  Antisense strand to SEQ ID NO: 2035174
cuuuccaauggucucgccc

SEQ ID NO: 2035176 - RNA, 19 nt, Artificial Sequence
  Description of Artificial Sequence: Synthetic oligonucleotide
  Sense strand starting at position 3525 of SEQ ID NO: 1881317
cgacuaaccuauuccagau

SEQ ID NO: 2035177 - RNA, 19 nt, Artificial Sequence
  Description of Artificial Sequence: Synthetic oligonucleotide
  Antisense strand to SEQ ID NO: 2035176
aucuggaauagguuagucg

SEQ ID NO: 2035178 - RNA, 19 nt, Artificial Sequence
  Description of Artificial Sequence: Synthetic oligonucleotide
  Sense strand starting at position 3559 of SEQ ID NO: 1881317
aaaucucugcugugggaga

SEQ ID NO: 2035179 - RNA, 19 nt, Artificial Sequence
  Description of Artificial Sequence: Synthetic oligonucleotide
  Antisense strand to SEQ ID NO: 2035178
ucucccacagcagagauuu

SEQ ID NO: 2035180 - RNA, 19 nt, Artificial Sequence
  Description of Artificial Sequence: Synthetic oligonucleotide
  Sense strand starting at position 3561 of SEQ ID NO: 1881317
aucucugcugugggagaaa

SEQ ID NO: 2035181 - RNA, 19 nt, Artificial Sequence
  Description of Artificial Sequence: Synthetic oligonucleotide
  Antisense strand to SEQ ID NO: 2035180
uuucucccacagcagagau

SEQ ID NO: 2035182 - RNA, 19 nt, Artificial Sequence
  Description of Artificial Sequence: Synthetic oligonucleotide
  Sense strand starting at position 3582 of SEQ ID NO: 1881317
ccguuaucaaaguggauga

SEQ ID NO: 2035183 - RNA, 19 nt, Artificial Sequence
  Description of Artificial Sequence: Synthetic oligonucleotide
  Antisense strand to SEQ ID NO: 2035182
ucauccacuuugauaacgg

SEQ ID NO: 2035184 - RNA, 19 nt, Artificial Sequence
  Description of Artificial Sequence: Synthetic oligonucleotide
  Sense strand starting at position 3583 of SEQ ID NO: 1881317
cguuaucaaaguggaugaa

SEQ ID NO: 2035185 - RNA, 19 nt, Artificial Sequence
  Description of Artificial Sequence: Synthetic oligonucleotide
  Antisense strand to SEQ ID NO: 2035184
uucauccacuuugauaacg

SEQ ID NO: 2035186 - RNA, 19 nt, Artificial Sequence
  Description of Artificial Sequence: Synthetic oligonucleotide
  Sense strand starting at position 16 of SEQ ID NO: 1881318
aggaguucucaauauguug

SEQ ID NO: 2035187 - RNA, 19 nt, Artificial Sequence
  Description of Artificial Sequence: Synthetic oligonucleotide
  Antisense strand to SEQ ID NO: 2035186
caacauauugagaacuccu

SEQ ID NO: 2035188 - RNA, 19 nt, Artificial Sequence
  Description of Artificial Sequence: Synthetic oligonucleotide
  Sense strand starting at position 433 of SEQ ID NO: 1881318
cucacucgugcccagaaga

SEQ ID NO: 2035189 - RNA, 19 nt, Artificial Sequence
  Description of Artificial Sequence: Synthetic oligonucleotide
  Antisense strand to SEQ ID NO: 2035188
ucuucugggcacgagugag

SEQ ID NO: 2035190 - RNA, 19 nt, Artificial Sequence
  Description of Artificial Sequence: Synthetic oligonucleotide
  Sense strand starting at position 848 of SEQ ID NO: 1881318
gaagaaagagcccgugagu

SEQ ID NO: 2035191 - RNA, 19 nt, Artificial Sequence
  Description of Artificial Sequence: Synthetic oligonucleotide
  Antisense strand to SEQ ID NO: 2035190
acucacgggcucuuucuuc

SEQ ID NO: 2035192 - RNA, 19 nt, Artificial Sequence
  Description of Artificial Sequence: Synthetic oligonucleotide
  Sense strand starting at position 870 of SEQ ID NO: 1881318
uggcaucucugcuccaaga

SEQ ID NO: 2035193 - RNA, 19 nt, Artificial Sequence
  Description of Artificial Sequence: Synthetic oligonucleotide
  Antisense strand to SEQ ID NO: 2035192
ucuuggagcagagaugcca

SEQ ID NO: 2035194 - RNA, 19 nt, Artificial Sequence
  Description of Artificial Sequence: Synthetic oligonucleotide
  Sense strand starting at position 872 of SEQ ID NO: 1881318
gcaucucugcuccaagaag

SEQ ID NO: 2035195 - RNA, 19 nt, Artificial Sequence
  Description of Artificial Sequence: Synthetic oligonucleotide
  Antisense strand to SEQ ID NO: 2035194
cuucuuggagcagagaugc

SEQ ID NO: 2035196 - RNA, 19 nt, Artificial Sequence
  Description of Artificial Sequence: Synthetic oligonucleotide
  Sense strand starting at position 994 of SEQ ID NO: 1881318
gcacgugucgagaguggau

SEQ ID NO: 2035197 - RNA, 19 nt, Artificial Sequence
  Description of Artificial Sequence: Synthetic oligonucleotide
  Antisense strand to SEQ ID NO: 2035196
auccacucucgacacgugc

SEQ ID NO: 2035198 - RNA, 19 nt, Artificial Sequence
  Description of Artificial Sequence: Synthetic oligonucleotide
  Sense strand starting at position 1086 of SEQ ID NO: 1881318
agaacuaggugucuagaaa

SEQ ID NO: 2035199 - RNA, 19 nt, Artificial Sequence
  Description of Artificial Sequence: Synthetic oligonucleotide
  Antisense strand to SEQ ID NO: 2035198
uuucuagacaccuaguucu

SEQ ID NO: 2035200 - RNA, 19 nt, Artificial Sequence
  Description of Artificial Sequence: Synthetic oligonucleotide
  Sense strand starting at position 1210 of SEQ ID NO: 1881318
caguguggaucuucuuacu

SEQ ID NO: 2035201 - RNA, 19 nt, Artificial Sequence
  Description of Artificial Sequence: Synthetic oligonucleotide
  Antisense strand to SEQ ID NO: 2035200
aguaagaagauccacacug

SEQ ID NO: 2035202 - RNA, 19 nt, Artificial Sequence
  Description of Artificial Sequence: Synthetic oligonucleotide
  Sense strand starting at position 1294 of SEQ ID NO: 1881318
acaggaucccgguagcuuu

SEQ ID NO: 2035203 - RNA, 19 nt, Artificial Sequence
  Description of Artificial Sequence: Synthetic oligonucleotide
  Antisense strand to SEQ ID NO: 2035202
aaagcuaccgggauccugu

SEQ ID NO: 2035204 - RNA, 19 nt, Artificial Sequence
  Description of Artificial Sequence: Synthetic oligonucleotide
  Sense strand starting at position 1306 of SEQ ID NO: 1881318
uagcuuugucaauggugga

SEQ ID NO: 2035205 - RNA, 19 nt, Artificial Sequence
  Description of Artificial Sequence: Synthetic oligonucleotide
  Antisense strand to SEQ ID NO: 2035204
uccaccauugacaaagcua

SEQ ID NO: 2035206 - RNA, 19 nt, Artificial Sequence
  Description of Artificial Sequence: Synthetic oligonucleotide
  Sense strand starting at position 1307 of SEQ ID NO: 1881318
agcuuugucaaugguggaa

SEQ ID NO: 2035207 - RNA, 19 nt, Artificial Sequence
  Description of Artificial Sequence: Synthetic oligonucleotide
  Antisense strand to SEQ ID NO: 2035206
uuccaccauugacaaagcu

SEQ ID NO: 2035208 - RNA, 19 nt, Artificial Sequence
  Description of Artificial Sequence: Synthetic oligonucleotide
  Sense strand starting at position 1662 of SEQ ID NO: 1881318
cucgcugaccaaugagagu

SEQ ID NO: 2035209 - RNA, 19 nt, Artificial Sequence
  Description of Artificial Sequence: Synthetic oligonucleotide
  Antisense strand to SEQ ID NO: 2035208
acucucauuggucagcgag

SEQ ID NO: 2035210 - RNA, 19 nt, Artificial Sequence
  Description of Artificial Sequence: Synthetic oligonucleotide
  Sense strand starting at position 1857 of SEQ ID NO: 1881318
ggagauauuugccacggac

SEQ ID NO: 2035211 - RNA, 19 nt, Artificial Sequence
  Description of Artificial Sequence: Synthetic oligonucleotide
  Antisense strand to SEQ ID NO: 2035210
guccguggcaaauaucucc

SEQ ID NO: 2035212 - RNA, 19 nt, Artificial Sequence
  Description of Artificial Sequence: Synthetic oligonucleotide
  Sense strand starting at position 2092 of SEQ ID NO: 1881318
cguagagaauguguggaau

SEQ ID NO: 2035213 - RNA, 19 nt, Artificial Sequence
  Description of Artificial Sequence: Synthetic oligonucleotide
  Antisense strand to SEQ ID NO: 2035212
auuccacacauucucuacg

SEQ ID NO: 2035214 - RNA, 19 nt, Artificial Sequence
  Description of Artificial Sequence: Synthetic oligonucleotide
  Sense strand starting at position 2126 of SEQ ID NO: 1881318
cccauaaguccgccgguuu

SEQ ID NO: 2035215 - RNA, 19 nt, Artificial Sequence
  Description of Artificial Sequence: Synthetic oligonucleotide
  Antisense strand to SEQ ID NO: 2035214
aaaccggcggacuuauggg

SEQ ID NO: 2035216 - RNA, 19 nt, Artificial Sequence
  Description of Artificial Sequence: Synthetic oligonucleotide
  Sense strand starting at position 2212 of SEQ ID NO: 1881318
acauaaguucuaugaugau

SEQ ID NO: 2035217 - RNA, 19 nt, Artificial Sequence
  Description of Artificial Sequence: Synthetic oligonucleotide
  Antisense strand to SEQ ID NO: 2035216
aucaucauagaacuuaugu

SEQ ID NO: 2035218 - RNA, 19 nt, Artificial Sequence
  Description of Artificial Sequence: Synthetic oligonucleotide
  Sense strand starting at position 2215 of SEQ ID NO: 1881318
uaaguucuaugaugauuug

SEQ ID NO: 2035219 - RNA, 19 nt, Artificial Sequence
  Description of Artificial Sequence: Synthetic oligonucleotide
  Antisense strand to SEQ ID NO: 2035218
caaaucaucauagaacuua

SEQ ID NO: 2035220 - RNA, 19 nt, Artificial Sequence
  Description of Artificial Sequence: Synthetic oligonucleotide
  Sense strand starting at position 2221 of SEQ ID NO: 1881318
cuaugaugauuugguuuaa

SEQ ID NO: 2035221 - RNA, 19 nt, Artificial Sequence
  Description of Artificial Sequence: Synthetic oligonucleotide
  Antisense strand to SEQ ID NO: 2035220
uuaaaccaaaucaucauag

SEQ ID NO: 2035222 - RNA, 19 nt, Artificial Sequence
  Description of Artificial Sequence: Synthetic oligonucleotide
  Sense strand starting at position 2577 of SEQ ID NO: 1881318
gccaaagcauuaucaggaa

SEQ ID NO: 2035223 - RNA, 19 nt, Artificial Sequence
  Description of Artificial Sequence: Synthetic oligonucleotide
  Antisense strand to SEQ ID NO: 2035222
uuccugauaaugcuuuggc

SEQ ID NO: 2035224 - RNA, 19 nt, Artificial Sequence
  Description of Artificial Sequence: Synthetic oligonucleotide
  Sense strand starting at position 2631 of SEQ ID NO: 1881318
aggccuuugagaggauauu

SEQ ID NO: 2035225 - RNA, 19 nt, Artificial Sequence
  Description of Artificial Sequence: Synthetic oligonucleotide
  Antisense strand to SEQ ID NO: 2035224
aauauccucucaaaggccu

SEQ ID NO: 2035226 - RNA, 19 nt, Artificial Sequence
  Description of Artificial Sequence: Synthetic oligonucleotide
  Sense strand starting at position 2750 of SEQ ID NO: 1881318
ggaccugcuggcugaaaca

SEQ ID NO: 2035227 - RNA, 19 nt, Artificial Sequence
  Description of Artificial Sequence: Synthetic oligonucleotide
  Antisense strand to SEQ ID NO: 2035226
uguuucagccagcaggucc

SEQ ID NO: 2035228 - RNA, 19 nt, Artificial Sequence
  Description of Artificial Sequence: Synthetic oligonucleotide
  Sense strand starting at position 2808 of SEQ ID NO: 1881318
guaguaagggacugaggua

SEQ ID NO: 2035229 - RNA, 19 nt, Artificial Sequence
  Description of Artificial Sequence: Synthetic oligonucleotide
  Antisense strand to SEQ ID NO: 2035228
uaccucagucccuuacuac

SEQ ID NO: 2035230 - RNA, 19 nt, Artificial Sequence
  Description of Artificial Sequence: Synthetic oligonucleotide
  Sense strand starting at position 2902 of SEQ ID NO: 1881318
auuggugaugcucauacuu

SEQ ID NO: 2035231 - RNA, 19 nt, Artificial Sequence
  Description of Artificial Sequence: Synthetic oligonucleotide
  Antisense strand to SEQ ID NO: 2035230
aaguaugagcaucaccaau

SEQ ID NO: 2035232 - RNA, 19 nt, Artificial Sequence
  Description of Artificial Sequence: Synthetic oligonucleotide
  Sense strand starting at position 2940 of SEQ ID NO: 1881318
gcaggauccugacuagucu

SEQ ID NO: 2035233 - RNA, 19 nt, Artificial Sequence
  Description of Artificial Sequence: Synthetic oligonucleotide
  Antisense strand to SEQ ID NO: 2035232
agacuagucaggauccugc

SEQ ID NO: 2035234 - RNA, 19 nt, Artificial Sequence
  Description of Artificial Sequence: Synthetic oligonucleotide
  Sense strand starting at position 2947 of SEQ ID NO: 1881318
ccugacuagucuuuaucua

SEQ ID NO: 2035235 - RNA, 19 nt, Artificial Sequence
  Description of Artificial Sequence: Synthetic oligonucleotide
  Antisense strand to SEQ ID NO: 2035234
uagauaaagacuagucagg

SEQ ID NO: 2035236 - RNA, 19 nt, Artificial Sequence
  Description of Artificial Sequence: Synthetic oligonucleotide
  Sense strand starting at position 2948 of SEQ ID NO: 1881318
cugacuagucuuuaucuau

SEQ ID NO: 2035237 - RNA, 19 nt, Artificial Sequence
  Description of Artificial Sequence: Synthetic oligonucleotide
  Antisense strand to SEQ ID NO: 2035236
auagauaaagacuagucag

SEQ ID NO: 2035238 - RNA, 19 nt, Artificial Sequence
  Description of Artificial Sequence: Synthetic oligonucleotide
  Sense strand starting at position 3078 of SEQ ID NO: 1881318
gcuguaucgcuauccaggu

SEQ ID NO: 2035239 - RNA, 19 nt, Artificial Sequence
  Description of Artificial Sequence: Synthetic oligonucleotide
  Antisense strand to SEQ ID NO: 2035238
accuggauagcgauacagc

SEQ ID NO: 2035240 - RNA, 19 nt, Artificial Sequence
  Description of Artificial Sequence: Synthetic oligonucleotide
  Sense strand starting at position 3161 of SEQ ID NO: 1881318
ugcaguguacugcaugaga

SEQ ID NO: 2035241 - RNA, 19 nt, Artificial Sequence
  Description of Artificial Sequence: Synthetic oligonucleotide
  Antisense strand to SEQ ID NO: 2035240
ucucaugcaguacacugca

SEQ ID NO: 2035242 - RNA, 19 nt, Artificial Sequence
  Description of Artificial Sequence: Synthetic oligonucleotide
  Sense strand starting at position 3163 of SEQ ID NO: 1881318
caguguacugcaugagaaa

SEQ ID NO: 2035243 - RNA, 19 nt, Artificial Sequence
  Description of Artificial Sequence: Synthetic oligonucleotide
  Antisense strand to SEQ ID NO: 2035242
uuucucaugcaguacacug

SEQ ID NO: 2035244 - RNA, 19 nt, Artificial Sequence
  Description of Artificial Sequence: Synthetic oligonucleotide
  Sense strand starting at position 3164 of SEQ ID NO: 1881318
aguguacugcaugagaaag

SEQ ID NO: 2035245 - RNA, 19 nt, Artificial Sequence
  Description of Artificial Sequence: Synthetic oligonucleotide
  Antisense strand to SEQ ID NO: 2035244
cuuucucaugcaguacacu

SEQ ID NO: 2035246 - RNA, 19 nt, Artificial Sequence
  Description of Artificial Sequence: Synthetic oligonucleotide
  Sense strand starting at position 3349 of SEQ ID NO: 1881318
ugccacuauuuccucagua

SEQ ID NO: 2035247 - RNA, 19 nt, Artificial Sequence
  Description of Artificial Sequence: Synthetic oligonucleotide
  Antisense strand to SEQ ID NO: 2035246
uacugaggaaauaguggca

SEQ ID NO: 2035248 - RNA, 19 nt, Artificial Sequence
  Description of Artificial Sequence: Synthetic oligonucleotide
  Sense strand starting at position 3350 of SEQ ID NO: 1881318
gccacuauuuccucaguac

SEQ ID NO: 2035249 - RNA, 19 nt, Artificial Sequence
  Description of Artificial Sequence: Synthetic oligonucleotide
  Antisense strand to SEQ ID NO: 2035248
guacugaggaaauaguggc

SEQ ID NO: 2035250 - RNA, 19 nt, Artificial Sequence
  Description of Artificial Sequence: Synthetic oligonucleotide
  Sense strand starting at position 3408 of SEQ ID NO: 1881318
guccuacaggucuagugau

SEQ ID NO: 2035251 - RNA, 19 nt, Artificial Sequence
  Description of Artificial Sequence: Synthetic oligonucleotide
  Antisense strand to SEQ ID NO: 2035250
aucacuagaccuguaggac

SEQ ID NO: 2035252 - RNA, 19 nt, Artificial Sequence
  Description of Artificial Sequence: Synthetic oligonucleotide
  Sense strand starting at position 3421 of SEQ ID NO: 1881318
agugauggcucccucaaug

SEQ ID NO: 2035253 - RNA, 19 nt, Artificial Sequence
  Description of Artificial Sequence: Synthetic oligonucleotide
  Antisense strand to SEQ ID NO: 2035252
cauugagggagccaucacu

SEQ ID NO: 2035254 - RNA, 19 nt, Artificial Sequence
  Description of Artificial Sequence: Synthetic oligonucleotide
  Sense strand starting at position 3526 of SEQ ID NO: 1881318
ccaccagugucaccaagaa

SEQ ID NO: 2035255 - RNA, 19 nt, Artificial Sequence
  Description of Artificial Sequence: Synthetic oligonucleotide
  Antisense strand to SEQ ID NO: 2035254
uucuuggugacacuggugg

SEQ ID NO: 2035256 - RNA, 19 nt, Artificial Sequence
  Description of Artificial Sequence: Synthetic oligonucleotide
  Sense strand starting at position 3576 of SEQ ID NO: 1881318
cagcuagugcccuagaugu

SEQ ID NO: 2035257 - RNA, 19 nt, Artificial Sequence
  Description of Artificial Sequence: Synthetic oligonucleotide
  Antisense strand to SEQ ID NO: 2035256
acaucuagggcacuagcug

SEQ ID NO: 2035258 - RNA, 19 nt, Artificial Sequence
  Description of Artificial Sequence: Synthetic oligonucleotide
  Sense strand starting at position 3584 of SEQ ID NO: 1881318
gcccuagaugucuacgacu

SEQ ID NO: 2035259 - RNA, 19 nt, Artificial Sequence
  Description of Artificial Sequence: Synthetic oligonucleotide
  Antisense strand to SEQ ID NO: 2035258
agucguagacaucuagggc

SEQ ID NO: 2035260 - RNA, 19 nt, Artificial Sequence
  Description of Artificial Sequence: Synthetic oligonucleotide
  Sense strand starting at position 3586 of SEQ ID NO: 1881318
ccuagaugucuacgacuug

SEQ ID NO: 2035261 - RNA, 19 nt, Artificial Sequence
  Description of Artificial Sequence: Synthetic oligonucleotide
  Antisense strand to SEQ ID NO: 2035260
caagucguagacaucuagg

SEQ ID NO: 2035262 - RNA, 19 nt, Artificial Sequence
  Description of Artificial Sequence: Synthetic oligonucleotide
  Sense strand starting at position 3809 of SEQ ID NO: 1881318
cugaaauauuugggacuac

SEQ ID NO: 2035263 - RNA, 19 nt, Artificial Sequence
  Description of Artificial Sequence: Synthetic oligonucleotide
  Antisense strand to SEQ ID NO: 2035262
guagucccaaauauuucag

SEQ ID NO: 2035264 - RNA, 19 nt, Artificial Sequence
  Description of Artificial Sequence: Synthetic oligonucleotide
  Sense strand starting at position 3810 of SEQ ID NO: 1881318
ugaaauauuugggacuaca

SEQ ID NO: 2035265 - RNA, 19 nt, Artificial Sequence
  Description of Artificial Sequence: Synthetic oligonucleotide
  Antisense strand to SEQ ID NO: 2035264
uguagucccaaauauuuca

SEQ ID NO: 2035266 - RNA, 19 nt, Artificial Sequence
  Description of Artificial Sequence: Synthetic oligonucleotide
  Sense strand starting at position 119 of SEQ ID NO: 1881319
guuggcaucaaaugguuau

SEQ ID NO: 2035267 - RNA, 19 nt, Artificial Sequence
  Description of Artificial Sequence: Synthetic oligonucleotide
  Antisense strand to SEQ ID NO: 2035266
auaaccauuugaugccaac

SEQ ID NO: 2035268 - RNA, 19 nt, Artificial Sequence
  Description of Artificial Sequence: Synthetic oligonucleotide
  Sense strand starting at position 122 of SEQ ID NO: 1881319
ggcaucaaaugguuauuga

SEQ ID NO: 2035269 - RNA, 19 nt, Artificial Sequence
  Description of Artificial Sequence: Synthetic oligonucleotide
  Antisense strand to SEQ ID NO: 2035268
ucaauaaccauuugaugcc

SEQ ID NO: 2035270 - RNA, 19 nt, Artificial Sequence
  Description of Artificial Sequence: Synthetic oligonucleotide
  Sense strand starting at position 123 of SEQ ID NO: 1881319
gcaucaaaugguuauugau

SEQ ID NO: 2035271 - RNA, 19 nt, Artificial Sequence
  Description of Artificial Sequence: Synthetic oligonucleotide
  Antisense strand to SEQ ID NO: 2035270
aucaauaaccauuugaugc

SEQ ID NO: 2035272 - RNA, 19 nt, Artificial Sequence
  Description of Artificial Sequence: Synthetic oligonucleotide
  Sense strand starting at position 158 of SEQ ID NO: 1881319
uguugauuucccggcccaa

SEQ ID NO: 2035273 - RNA, 19 nt, Artificial Sequence
  Description of Artificial Sequence: Synthetic oligonucleotide
  Antisense strand to SEQ ID NO: 2035272
uugggccgggaaaucaaca

SEQ ID NO: 2035274 - RNA, 19 nt, Artificial Sequence
  Description of Artificial Sequence: Synthetic oligonucleotide
  Sense strand starting at position 176 of SEQ ID NO: 1881319
agaagcaagucuuuauucu

SEQ ID NO: 2035275 - RNA, 19 nt, Artificial Sequence
  Description of Artificial Sequence: Synthetic oligonucleotide
  Antisense strand to SEQ ID NO: 2035274
agaauaaagacuugcuucu

SEQ ID NO: 2035276 - RNA, 19 nt, Artificial Sequence
  Description of Artificial Sequence: Synthetic oligonucleotide
  Sense strand starting at position 180 of SEQ ID NO: 1881319
gcaagucuuuauucuuaag

SEQ ID NO: 2035277 - RNA, 19 nt, Artificial Sequence
  Description of Artificial Sequence: Synthetic oligonucleotide
  Antisense strand to SEQ ID NO: 2035276
cuuaagaauaaagacuugc

SEQ ID NO: 2035278 - RNA, 19 nt, Artificial Sequence
  Description of Artificial Sequence: Synthetic oligonucleotide
  Sense strand starting at position 271 of SEQ ID NO: 1881319
gccaccauguuauuaggaa

SEQ ID NO: 2035279 - RNA, 19 nt, Artificial Sequence
  Description of Artificial Sequence: Synthetic oligonucleotide
  Antisense strand to SEQ ID NO: 2035278
uuccuaauaacaugguggc

SEQ ID NO: 2035280 - RNA, 19 nt, Artificial Sequence
  Description of Artificial Sequence: Synthetic oligonucleotide
  Sense strand starting at position 353 of SEQ ID NO: 1881319
aggcuaaugcuccaaugaa

SEQ ID NO: 2035281 - RNA, 19 nt, Artificial Sequence
  Description of Artificial Sequence: Synthetic oligonucleotide
  Antisense strand to SEQ ID NO: 2035280
uucauuggagcauuagccu

SEQ ID NO: 2035282 - RNA, 19 nt, Artificial Sequence
  Description of Artificial Sequence: Synthetic oligonucleotide
  Sense strand starting at position 556 of SEQ ID NO: 1881319
cugugucagcaucagauaa

SEQ ID NO: 2035283 - RNA, 19 nt, Artificial Sequence
  Description of Artificial Sequence: Synthetic oligonucleotide
  Antisense strand to SEQ ID NO: 2035282
uuaucugaugcugacacag

SEQ ID NO: 2035284 - RNA, 19 nt, Artificial Sequence
  Description of Artificial Sequence: Synthetic oligonucleotide
  Sense strand starting at position 651 of SEQ ID NO: 1881319
cgggcugaacugcaagaua

SEQ ID NO: 2035285 - RNA, 19 nt, Artificial Sequence
  Description of Artificial Sequence: Synthetic oligonucleotide
  Antisense strand to SEQ ID NO: 2035284
uaucuugcaguucagcccg

SEQ ID NO: 2035286 - RNA, 19 nt, Artificial Sequence
  Description of Artificial Sequence: Synthetic oligonucleotide
  Sense strand starting at position 832 of SEQ ID NO: 1881319
uugaacuggugguuuauga

SEQ ID NO: 2035287 - RNA, 19 nt, Artificial Sequence
  Description of Artificial Sequence: Synthetic oligonucleotide
  Antisense strand to SEQ ID NO: 2035286
ucauaaaccaccaguucaa

SEQ ID NO: 2035288 - RNA, 19 nt, Artificial Sequence
  Description of Artificial Sequence: Synthetic oligonucleotide
  Sense strand starting at position 1034 of SEQ ID NO: 1881319
gucaaauugcccuacuuga

SEQ ID NO: 2035289 - RNA, 19 nt, Artificial Sequence
  Description of Artificial Sequence: Synthetic oligonucleotide
  Antisense strand to SEQ ID NO: 2035288
ucaaguagggcaauuugac

SEQ ID NO: 2035290 - RNA, 19 nt, Artificial Sequence
  Description of Artificial Sequence: Synthetic oligonucleotide
  Sense strand starting at position 1039 of SEQ ID NO: 1881319
auugcccuacuugaagaau

SEQ ID NO: 2035291 - RNA, 19 nt, Artificial Sequence
  Description of Artificial Sequence: Synthetic oligonucleotide
  Antisense strand to SEQ ID NO: 2035290
auucuucaaguagggcaau

SEQ ID NO: 2035292 - RNA, 19 nt, Artificial Sequence
  Description of Artificial Sequence: Synthetic oligonucleotide
  Sense strand starting at position 1042 of SEQ ID NO: 1881319
gcccuacuugaagaauguu

SEQ ID NO: 2035293 - RNA, 19 nt, Artificial Sequence
  Description of Artificial Sequence: Synthetic oligonucleotide
  Antisense strand to SEQ ID NO: 2035292
aacauucuucaaguagggc

SEQ ID NO: 2035294 - RNA, 19 nt, Artificial Sequence
  Description of Artificial Sequence: Synthetic oligonucleotide
  Sense strand starting at position 1133 of SEQ ID NO: 1881319
agacuauaagguugguaag

SEQ ID NO: 2035295 - RNA, 19 nt, Artificial Sequence
  Description of Artificial Sequence: Synthetic oligonucleotide
  Antisense strand to SEQ ID NO: 2035294
cuuaccaaccuuauagucu

SEQ ID NO: 2035296 - RNA, 19 nt, Artificial Sequence
  Description of Artificial Sequence: Synthetic oligonucleotide
  Sense strand starting at position 1295 of SEQ ID NO: 1881319
guuuauuuccaacgucuuu

SEQ ID NO: 2035297 - RNA, 19 nt, Artificial Sequence
  Description of Artificial Sequence: Synthetic oligonucleotide
  Antisense strand to SEQ ID NO: 2035296
aaagacguuggaaauaaac

SEQ ID NO: 2035298 - RNA, 19 nt, Artificial Sequence
  Description of Artificial Sequence: Synthetic oligonucleotide
  Sense strand starting at position 2026 of SEQ ID NO: 1881319
aauauaugcgagugaacuu

SEQ ID NO: 2035299 - RNA, 19 nt, Artificial Sequence
  Description of Artificial Sequence: Synthetic oligonucleotide
  Antisense strand to SEQ ID NO: 2035298
aaguucacucgcauauauu

SEQ ID NO: 2035300 - RNA, 19 nt, Artificial Sequence
  Description of Artificial Sequence: Synthetic oligonucleotide
  Sense strand starting at position 2027 of SEQ ID NO: 1881319
auauaugcgagugaacuuu

SEQ ID NO: 2035301 - RNA, 19 nt, Artificial Sequence
  Description of Artificial Sequence: Synthetic oligonucleotide
  Antisense strand to SEQ ID NO: 2035300
aaaguucacucgcauauau

SEQ ID NO: 2035302 - RNA, 19 nt, Artificial Sequence
  Description of Artificial Sequence: Synthetic oligonucleotide
  Sense strand starting at position 2105 of SEQ ID NO: 1881319
cucccaggauucucacaga

SEQ ID NO: 2035303 - RNA, 19 nt, Artificial Sequence
  Description of Artificial Sequence: Synthetic oligonucleotide
  Antisense strand to SEQ ID NO: 2035302
ucugugagaauccugggag

SEQ ID NO: 2035304 - RNA, 19 nt, Artificial Sequence
  Description of Artificial Sequence: Synthetic oligonucleotide
  Sense strand starting at position 2416 of SEQ ID NO: 1881319
ugcgccuuucugucuguua

SEQ ID NO: 2035305 - RNA, 19 nt, Artificial Sequence
  Description of Artificial Sequence: Synthetic oligonucleotide
  Antisense strand to SEQ ID NO: 2035304
uaacagacagaaaggcgca

SEQ ID NO: 2035306 - RNA, 19 nt, Artificial Sequence
  Description of Artificial Sequence: Synthetic oligonucleotide
  Sense strand starting at position 2483 of SEQ ID NO: 1881319
agcccuaaacuguagaaca

SEQ ID NO: 2035307 - RNA, 19 nt, Artificial Sequence
  Description of Artificial Sequence: Synthetic oligonucleotide
  Antisense strand to SEQ ID NO: 2035306
uguucuacaguuuagggcu

SEQ ID NO: 2035308 - RNA, 19 nt, Artificial Sequence
  Description of Artificial Sequence: Synthetic oligonucleotide
  Sense strand starting at position 2522 of SEQ ID NO: 1881319
aaaggcuuggguugggaaa

SEQ ID NO: 2035309 - RNA, 19 nt, Artificial Sequence
  Description of Artificial Sequence: Synthetic oligonucleotide
  Antisense strand to SEQ ID NO: 2035308
uuucccaacccaagccuuu

SEQ ID NO: 2035310 - RNA, 19 nt, Artificial Sequence
  Description of Artificial Sequence: Synthetic oligonucleotide
  Sense strand starting at position 2673 of SEQ ID NO: 1881319
cauauagaguagucaggaa

SEQ ID NO: 2035311 - RNA, 19 nt, Artificial Sequence
  Description of Artificial Sequence: Synthetic oligonucleotide
  Antisense strand to SEQ ID NO: 2035310
uuccugacuacucuauaug

SEQ ID NO: 2035312 - RNA, 19 nt, Artificial Sequence
  Description of Artificial Sequence: Synthetic oligonucleotide
  Sense strand starting at position 2758 of SEQ ID NO: 1881319
acaguauaguggucaagag

SEQ ID NO: 2035313 - RNA, 19 nt, Artificial Sequence
  Description of Artificial Sequence: Synthetic oligonucleotide
  Antisense strand to SEQ ID NO: 2035312
cucuugaccacuauacugu

SEQ ID NO: 2035314 - RNA, 19 nt, Artificial Sequence
  Description of Artificial Sequence: Synthetic oligonucleotide
  Sense strand starting at position 2834 of SEQ ID NO: 1881319
cuguguguucugggauaag

SEQ ID NO: 2035315 - RNA, 19 nt, Artificial Sequence
  Description of Artificial Sequence: Synthetic oligonucleotide
  Antisense strand to SEQ ID NO: 2035314
cuuaucccagaacacacag

SEQ ID NO: 2035316 - RNA, 19 nt, Artificial Sequence
  Description of Artificial Sequence: Synthetic oligonucleotide
  Sense strand starting at position 2837 of SEQ ID NO: 1881319
uguguucugggauaaguau

SEQ ID NO: 2035317 - RNA, 19 nt, Artificial Sequence
  Description of Artificial Sequence: Synthetic oligonucleotide
  Antisense strand to SEQ ID NO: 2035316
auacuuaucccagaacaca

SEQ ID NO: 2035318 - RNA, 19 nt, Artificial Sequence
  Description of Artificial Sequence: Synthetic oligonucleotide
  Sense strand starting at position 2949 of SEQ ID NO: 1881319
uauggugcuggguaaauau

SEQ ID NO: 2035319 - RNA, 19 nt, Artificial Sequence
  Description of Artificial Sequence: Synthetic oligonucleotide
  Antisense strand to SEQ ID NO: 2035318
auauuuacccagcaccaua

SEQ ID NO: 2035320 - RNA, 19 nt, Artificial Sequence
  Description of Artificial Sequence: Synthetic oligonucleotide
  Sense strand starting at position 2972 of SEQ ID NO: 1881319
gaacaaauguuagcuguga

SEQ ID NO: 2035321 - RNA, 19 nt, Artificial Sequence
  Description of Artificial Sequence: Synthetic oligonucleotide
  Antisense strand to SEQ ID NO: 2035320
ucacagcuaacauuuguuc

SEQ ID NO: 2035322 - RNA, 19 nt, Artificial Sequence
  Description of Artificial Sequence: Synthetic oligonucleotide
  Sense strand starting at position 2976 of SEQ ID NO: 1881319
aaauguuagcugugacuca

SEQ ID NO: 2035323 - RNA, 19 nt, Artificial Sequence
  Description of Artificial Sequence: Synthetic oligonucleotide
  Antisense strand to SEQ ID NO: 2035322
ugagucacagcuaacauuu

SEQ ID NO: 2035324 - RNA, 19 nt, Artificial Sequence
  Description of Artificial Sequence: Synthetic oligonucleotide
  Sense strand starting at position 3093 of SEQ ID NO: 1881319
augaaaguccaaugugaaa

SEQ ID NO: 2035325 - RNA, 19 nt, Artificial Sequence
  Description of Artificial Sequence: Synthetic oligonucleotide
  Antisense strand to SEQ ID NO: 2035324
uuucacauuggacuuucau

SEQ ID NO: 2035326 - RNA, 19 nt, Artificial Sequence
  Description of Artificial Sequence: Synthetic oligonucleotide
  Sense strand starting at position 3213 of SEQ ID NO: 1881319
uuuguaaacugguuuaagu

SEQ ID NO: 2035327 - RNA, 19 nt, Artificial Sequence
  Description of Artificial Sequence: Synthetic oligonucleotide
  Antisense strand to SEQ ID NO: 2035326
acuuaaaccaguuuacaaa

SEQ ID NO: 2035328 - RNA, 19 nt, Artificial Sequence
  Description of Artificial Sequence: Synthetic oligonucleotide
  Sense strand starting at position 3215 of SEQ ID NO: 1881319
uguaaacugguuuaaguau

SEQ ID NO: 2035329 - RNA, 19 nt, Artificial Sequence
  Description of Artificial Sequence: Synthetic oligonucleotide
  Antisense strand to SEQ ID NO: 2035328
auacuuaaaccaguuuaca

SEQ ID NO: 2035330 - RNA, 19 nt, Artificial Sequence
  Description of Artificial Sequence: Synthetic oligonucleotide
  Sense strand starting at position 3221 of SEQ ID NO: 1881319
cugguuuaaguaugacagu

SEQ ID NO: 2035331 - RNA, 19 nt, Artificial Sequence
  Description of Artificial Sequence: Synthetic oligonucleotide
  Antisense strand to SEQ ID NO: 2035330
acugucauacuuaaaccag

SEQ ID NO: 2035332 - RNA, 19 nt, Artificial Sequence
  Description of Artificial Sequence: Synthetic oligonucleotide
  Sense strand starting at position 3361 of SEQ ID NO: 1881319
agaagagucuuuccagcca

SEQ ID NO: 2035333 - RNA, 19 nt, Artificial Sequence
  Description of Artificial Sequence: Synthetic oligonucleotide
  Antisense strand to SEQ ID NO: 2035332
uggcuggaaagacucuucu

SEQ ID NO: 2035334 - RNA, 19 nt, Artificial Sequence
  Description of Artificial Sequence: Synthetic oligonucleotide
  Sense strand starting at position 3479 of SEQ ID NO: 1881319
gcacaacuuguuuaaagga

SEQ ID NO: 2035335 - RNA, 19 nt, Artificial Sequence
  Description of Artificial Sequence: Synthetic oligonucleotide
  Antisense strand to SEQ ID NO: 2035334
uccuuuaaacaaguugugc

SEQ ID NO: 2035336 - RNA, 19 nt, Artificial Sequence
  Description of Artificial Sequence: Synthetic oligonucleotide
  Sense strand starting at position 3486 of SEQ ID NO: 1881319
uuguuuaaaggaugcaaca

SEQ ID NO: 2035337 - RNA, 19 nt, Artificial Sequence
  Description of Artificial Sequence: Synthetic oligonucleotide
  Antisense strand to SEQ ID NO: 2035336
uguugcauccuuuaaacaa

SEQ ID NO: 2035338 - RNA, 19 nt, Artificial Sequence
  Description of Artificial Sequence: Synthetic oligonucleotide
  Sense strand starting at position 3565 of SEQ ID NO: 1881319
uguagcauuuacuuguaau

SEQ ID NO: 2035339 - RNA, 19 nt, Artificial Sequence
  Description of Artificial Sequence: Synthetic oligonucleotide
  Antisense strand to SEQ ID NO: 2035338
auuacaaguaaaugcuaca

SEQ ID NO: 2035340 - RNA, 19 nt, Artificial Sequence
  Description of Artificial Sequence: Synthetic oligonucleotide
  Sense strand starting at position 3623 of SEQ ID NO: 1881319
gggagagucuccuugccca

SEQ ID NO: 2035341 - RNA, 19 nt, Artificial Sequence
  Description of Artificial Sequence: Synthetic oligonucleotide
  Antisense strand to SEQ ID NO: 2035340
ugggcaaggagacucuccc

SEQ ID NO: 2035342 - RNA, 19 nt, Artificial Sequence
  Description of Artificial Sequence: Synthetic oligonucleotide
  Sense strand starting at position 3783 of SEQ ID NO: 1881319
gcacuugugguguaacaug

SEQ ID NO: 2035343 - RNA, 19 nt, Artificial Sequence
  Description of Artificial Sequence: Synthetic oligonucleotide
  Antisense strand to SEQ ID NO: 2035342
cauguuacaccacaagugc

SEQ ID NO: 2035344 - RNA, 19 nt, Artificial Sequence
  Description of Artificial Sequence: Synthetic oligonucleotide
  Sense strand starting at position 3934 of SEQ ID NO: 1881319
gaaucuguguuuguuauuu

SEQ ID NO: 2035345 - RNA, 19 nt, Artificial Sequence
  Description of Artificial Sequence: Synthetic oligonucleotide
  Antisense strand to SEQ ID NO: 2035344
aaauaacaaacacagauuc

SEQ ID NO: 2035346 - RNA, 19 nt, Artificial Sequence
  Description of Artificial Sequence: Synthetic oligonucleotide
  Sense strand starting at position 167 of SEQ ID NO: 1881320
auugcagcguucucaaaga

SEQ ID NO: 2035347 - RNA, 19 nt, Artificial Sequence
  Description of Artificial Sequence: Synthetic oligonucleotide
  Antisense strand to SEQ ID NO: 2035346
ucuuugagaacgcugcaau

SEQ ID NO: 2035348 - RNA, 19 nt, Artificial Sequence
  Description of Artificial Sequence: Synthetic oligonucleotide
  Sense strand starting at position 172 of SEQ ID NO: 1881320
agcguucucaaagagaaau

SEQ ID NO: 2035349 - RNA, 19 nt, Artificial Sequence
  Description of Artificial Sequence: Synthetic oligonucleotide
  Antisense strand to SEQ ID NO: 2035348
auuucucuuugagaacgcu

SEQ ID NO: 2035350 - RNA, 19 nt, Artificial Sequence
  Description of Artificial Sequence: Synthetic oligonucleotide
  Sense strand starting at position 190 of SEQ ID NO: 1881320
uaaaguagccauggagaua

SEQ ID NO: 2035351 - RNA, 19 nt, Artificial Sequence
  Description of Artificial Sequence: Synthetic oligonucleotide
  Antisense strand to SEQ ID NO: 2035350
uaucuccauggcuacuuua

SEQ ID NO: 2035352 - RNA, 19 nt, Artificial Sequence
  Description of Artificial Sequence: Synthetic oligonucleotide
  Sense strand starting at position 229 of SEQ ID NO: 1881320
auguuuaucagagguagag

SEQ ID NO: 2035353 - RNA, 19 nt, Artificial Sequence
  Description of Artificial Sequence: Synthetic oligonucleotide
  Antisense strand to SEQ ID NO: 2035352
cucuaccucugauaaacau

SEQ ID NO: 2035354 - RNA, 19 nt, Artificial Sequence
  Description of Artificial Sequence: Synthetic oligonucleotide
  Sense strand starting at position 261 of SEQ ID NO: 1881320
caaagauaaguuugggcuu

SEQ ID NO: 2035355 - RNA, 19 nt, Artificial Sequence
  Description of Artificial Sequence: Synthetic oligonucleotide
  Antisense strand to SEQ ID NO: 2035354
aagcccaaacuuaucuuug

SEQ ID NO: 2035356 - RNA, 19 nt, Artificial Sequence
  Description of Artificial Sequence: Synthetic oligonucleotide
  Sense strand starting at position 343 of SEQ ID NO: 1881320
agcagugaggcugaagaaa

SEQ ID NO: 2035357 - RNA, 19 nt, Artificial Sequence
  Description of Artificial Sequence: Synthetic oligonucleotide
  Antisense strand to SEQ ID NO: 2035356
uuucuucagccucacugcu

SEQ ID NO: 2035358 - RNA, 19 nt, Artificial Sequence
  Description of Artificial Sequence: Synthetic oligonucleotide
  Sense strand starting at position 443 of SEQ ID NO: 1881320
gaggguuuaggucaguguu

SEQ ID NO: 2035359 - RNA, 19 nt, Artificial Sequence
  Description of Artificial Sequence: Synthetic oligonucleotide
  Antisense strand to SEQ ID NO: 2035358
aacacugaccuaaacccuc

SEQ ID NO: 2035360 - RNA, 19 nt, Artificial Sequence
  Description of Artificial Sequence: Synthetic oligonucleotide
  Sense strand starting at position 444 of SEQ ID NO: 1881320
aggguuuaggucaguguuu

SEQ ID NO: 2035361 - RNA, 19 nt, Artificial Sequence
  Description of Artificial Sequence: Synthetic oligonucleotide
  Antisense strand to SEQ ID NO: 2035360
aaacacugaccuaaacccu

SEQ ID NO: 2035362 - RNA, 19 nt, Artificial Sequence
  Description of Artificial Sequence: Synthetic oligonucleotide
  Sense strand starting at position 446 of SEQ ID NO: 1881320
gguuuaggucaguguuuca

SEQ ID NO: 2035363 - RNA, 19 nt, Artificial Sequence
  Description of Artificial Sequence: Synthetic oligonucleotide
  Antisense strand to SEQ ID NO: 2035362
ugaaacacugaccuaaacc

SEQ ID NO: 2035364 - RNA, 19 nt, Artificial Sequence
  Description of Artificial Sequence: Synthetic oligonucleotide
  Sense strand starting at position 530 of SEQ ID NO: 1881320
caucgugagauauggaagu

SEQ ID NO: 2035365 - RNA, 19 nt, Artificial Sequence
  Description of Artificial Sequence: Synthetic oligonucleotide
  Antisense strand to SEQ ID NO: 2035364
acuuccauaucucacgaug

SEQ ID NO: 2035366 - RNA, 19 nt, Artificial Sequence
  Description of Artificial Sequence: Synthetic oligonucleotide
  Sense strand starting at position 540 of SEQ ID NO: 1881320
uauggaaguugagucagaa

SEQ ID NO: 2035367 - RNA, 19 nt, Artificial Sequence
  Description of Artificial Sequence: Synthetic oligonucleotide
  Antisense strand to SEQ ID NO: 2035366
uucugacucaacuuccaua

SEQ ID NO: 2035368 - RNA, 19 nt, Artificial Sequence
  Description of Artificial Sequence: Synthetic oligonucleotide
  Sense strand starting at position 685 of SEQ ID NO: 1881320
gauuccauuugguaguaca

SEQ ID NO: 2035369 - RNA, 19 nt, Artificial Sequence
  Description of Artificial Sequence: Synthetic oligonucleotide
  Antisense strand to SEQ ID NO: 2035368
uguacuaccaaauggaauc

SEQ ID NO: 2035370 - RNA, 19 nt, Artificial Sequence
  Description of Artificial Sequence: Synthetic oligonucleotide
  Sense strand starting at position 728 of SEQ ID NO: 1881320
ggcaguuuccuggaggaag

SEQ ID NO: 2035371 - RNA, 19 nt, Artificial Sequence
  Description of Artificial Sequence: Synthetic oligonucleotide
  Antisense strand to SEQ ID NO: 2035370
cuuccuccaggaaacugcc

SEQ ID NO: 2035372 - RNA, 19 nt, Artificial Sequence
  Description of Artificial Sequence: Synthetic oligonucleotide
  Sense strand starting at position 788 of SEQ ID NO: 1881320
gaaggauuagaguguauag

SEQ ID NO: 2035373 - RNA, 19 nt, Artificial Sequence
  Description of Artificial Sequence: Synthetic oligonucleotide
  Antisense strand to SEQ ID NO: 2035372
cuauacacucuaauccuuc

SEQ ID NO: 2035374 - RNA, 19 nt, Artificial Sequence
  Description of Artificial Sequence: Synthetic oligonucleotide
  Sense strand starting at position 853 of SEQ ID NO: 1881320
agggcagacguagguuaaa

SEQ ID NO: 2035375 - RNA, 19 nt, Artificial Sequence
  Description of Artificial Sequence: Synthetic oligonucleotide
  Antisense strand to SEQ ID NO: 2035374
uuuaaccuacgucugcccu

SEQ ID NO: 2035376 - RNA, 19 nt, Artificial Sequence
  Description of Artificial Sequence: Synthetic oligonucleotide
  Sense strand starting at position 865 of SEQ ID NO: 1881320
gguuaaagguguuuaguuu

SEQ ID NO: 2035377 - RNA, 19 nt, Artificial Sequence
  Description of Artificial Sequence: Synthetic oligonucleotide
  Antisense strand to SEQ ID NO: 2035376
aaacuaaacaccuuuaacc

SEQ ID NO: 2035378 - RNA, 19 nt, Artificial Sequence
  Description of Artificial Sequence: Synthetic oligonucleotide
  Sense strand starting at position 892 of SEQ ID NO: 1881320
aguaaaugggcagauguau

SEQ ID NO: 2035379 - RNA, 19 nt, Artificial Sequence
  Description of Artificial Sequence: Synthetic oligonucleotide
  Antisense strand to SEQ ID NO: 2035378
auacaucugcccauuuacu

SEQ ID NO: 2035380 - RNA, 19 nt, Artificial Sequence
  Description of Artificial Sequence: Synthetic oligonucleotide
  Sense strand starting at position 903 of SEQ ID NO: 1881320
agauguauuccauauacgu

SEQ ID NO: 2035381 - RNA, 19 nt, Artificial Sequence
  Description of Artificial Sequence: Synthetic oligonucleotide
  Antisense strand to SEQ ID NO: 2035380
acguauauggaauacaucu

SEQ ID NO: 2035382 - RNA, 19 nt, Artificial Sequence
  Description of Artificial Sequence: Synthetic oligonucleotide
  Sense strand starting at position 912 of SEQ ID NO: 1881320
ccauauacguucccaguga

SEQ ID NO: 2035383 - RNA, 19 nt, Artificial Sequence
  Description of Artificial Sequence: Synthetic oligonucleotide
  Antisense strand to SEQ ID NO: 2035382
ucacugggaacguauaugg

SEQ ID NO: 2035384 - RNA, 19 nt, Artificial Sequence
  Description of Artificial Sequence: Synthetic oligonucleotide
  Sense strand starting at position 2046 of SEQ ID NO: 1881320
cggcgaucuacguuucagu

SEQ ID NO: 2035385 - RNA, 19 nt, Artificial Sequence
  Description of Artificial Sequence: Synthetic oligonucleotide
  Antisense strand to SEQ ID NO: 2035384
acugaaacguagaucgccg

SEQ ID NO: 2035386 - RNA, 19 nt, Artificial Sequence
  Description of Artificial Sequence: Synthetic oligonucleotide
  Sense strand starting at position 2048 of SEQ ID NO: 1881320
gcgaucuacguuucagucu

SEQ ID NO: 2035387 - RNA, 19 nt, Artificial Sequence
  Description of Artificial Sequence: Synthetic oligonucleotide
  Antisense strand to SEQ ID NO: 2035386
agacugaaacguagaucgc

SEQ ID NO: 2035388 - RNA, 19 nt, Artificial Sequence
  Description of Artificial Sequence: Synthetic oligonucleotide
  Sense strand starting at position 2610 of SEQ ID NO: 1881320
ccgggcauuauccagcuau

SEQ ID NO: 2035389 - RNA, 19 nt, Artificial Sequence
  Description of Artificial Sequence: Synthetic oligonucleotide
  Antisense strand to SEQ ID NO: 2035388
auagcuggauaaugcccgg

SEQ ID NO: 2035390 - RNA, 19 nt, Artificial Sequence
  Description of Artificial Sequence: Synthetic oligonucleotide
  Sense strand starting at position 2661 of SEQ ID NO: 1881320
ccucgauuuccgcguucga

SEQ ID NO: 2035391 - RNA, 19 nt, Artificial Sequence
  Description of Artificial Sequence: Synthetic oligonucleotide
  Antisense strand to SEQ ID NO: 2035390
ucgaacgcggaaaucgagg

SEQ ID NO: 2035392 - RNA, 19 nt, Artificial Sequence
  Description of Artificial Sequence: Synthetic oligonucleotide
  Sense strand starting at position 2728 of SEQ ID NO: 1881320
aagaguccucgccaggaau

SEQ ID NO: 2035393 - RNA, 19 nt, Artificial Sequence
  Description of Artificial Sequence: Synthetic oligonucleotide
  Antisense strand to SEQ ID NO: 2035392
auuccuggcgaggacucuu

SEQ ID NO: 2035394 - RNA, 19 nt, Artificial Sequence
  Description of Artificial Sequence: Synthetic oligonucleotide
  Sense strand starting at position 2744 of SEQ ID NO: 1881320
aauugagaaguauguuuag

SEQ ID NO: 2035395 - RNA, 19 nt, Artificial Sequence
  Description of Artificial Sequence: Synthetic oligonucleotide
  Antisense strand to SEQ ID NO: 2035394
cuaaacauacuucucaauu

SEQ ID NO: 2035396 - RNA, 19 nt, Artificial Sequence
  Description of Artificial Sequence: Synthetic oligonucleotide
  Sense strand starting at position 2747 of SEQ ID NO: 1881320
ugagaaguauguuuaggaa

SEQ ID NO: 2035397 - RNA, 19 nt, Artificial Sequence
  Description of Artificial Sequence: Synthetic oligonucleotide
  Antisense strand to SEQ ID NO: 2035396
uuccuaaacauacuucuca

SEQ ID NO: 2035398 - RNA, 19 nt, Artificial Sequence
  Description of Artificial Sequence: Synthetic oligonucleotide
  Sense strand starting at position 2781 of SEQ ID NO: 1881320
gagagauccugcuccucca

SEQ ID NO: 2035399 - RNA, 19 nt, Artificial Sequence
  Description of Artificial Sequence: Synthetic oligonucleotide
  Antisense strand to SEQ ID NO: 2035398
uggaggagcaggaucucuc

SEQ ID NO: 2035400 - RNA, 19 nt, Artificial Sequence
  Description of Artificial Sequence: Synthetic oligonucleotide
  Sense strand starting at position 2872 of SEQ ID NO: 1881320
guggaagauucuguucccu

SEQ ID NO: 2035401 - RNA, 19 nt, Artificial Sequence
  Description of Artificial Sequence: Synthetic oligonucleotide
  Antisense strand to SEQ ID NO: 2035400
agggaacagaaucuuccac

SEQ ID NO: 2035402 - RNA, 19 nt, Artificial Sequence
  Description of Artificial Sequence: Synthetic oligonucleotide
  Sense strand starting at position 2874 of SEQ ID NO: 1881320
ggaagauucuguucccuuc

SEQ ID NO: 2035403 - RNA, 19 nt, Artificial Sequence
  Description of Artificial Sequence: Synthetic oligonucleotide
  Antisense strand to SEQ ID NO: 2035402
gaagggaacagaaucuucc

SEQ ID NO: 2035404 - RNA, 19 nt, Artificial Sequence
  Description of Artificial Sequence: Synthetic oligonucleotide
  Sense strand starting at position 2908 of SEQ ID NO: 1881320
ggagaaagauuugggaaua

SEQ ID NO: 2035405 - RNA, 19 nt, Artificial Sequence
  Description of Artificial Sequence: Synthetic oligonucleotide
  Antisense strand to SEQ ID NO: 2035404
uauucccaaaucuuucucc

SEQ ID NO: 2035406 - RNA, 19 nt, Artificial Sequence
  Description of Artificial Sequence: Synthetic oligonucleotide
  Sense strand starting at position 2909 of SEQ ID NO: 1881320
gagaaagauuugggaauag

SEQ ID NO: 2035407 - RNA, 19 nt, Artificial Sequence
  Description of Artificial Sequence: Synthetic oligonucleotide
  Antisense strand to SEQ ID NO: 2035406
cuauucccaaaucuuucuc

SEQ ID NO: 2035408 - RNA, 19 nt, Artificial Sequence
  Description of Artificial Sequence: Synthetic oligonucleotide
  Sense strand starting at position 2920 of SEQ ID NO: 1881320
gggaauagauaggaaagaa

SEQ ID NO: 2035409 - RNA, 19 nt, Artificial Sequence
  Description of Artificial Sequence: Synthetic oligonucleotide
  Antisense strand to SEQ ID NO: 2035408
uucuuuccuaucuauuccc

SEQ ID NO: 2035410 - RNA, 19 nt, Artificial Sequence
  Description of Artificial Sequence: Synthetic oligonucleotide
  Sense strand starting at position 3051 of SEQ ID NO: 1881320
acuguaaggugucucggaa

SEQ ID NO: 2035411 - RNA, 19 nt, Artificial Sequence
  Description of Artificial Sequence: Synthetic oligonucleotide
  Antisense strand to SEQ ID NO: 2035410
uuccgagacaccuuacagu

SEQ ID NO: 2035412 - RNA, 19 nt, Artificial Sequence
  Description of Artificial Sequence: Synthetic oligonucleotide
  Sense strand starting at position 3083 of SEQ ID NO: 1881320
cccauuaucggagaacugu

SEQ ID NO: 2035413 - RNA, 19 nt, Artificial Sequence
  Description of Artificial Sequence: Synthetic oligonucleotide
  Antisense strand to SEQ ID NO: 2035412
acaguucuccgauaauggg

SEQ ID NO: 2035414 - RNA, 19 nt, Artificial Sequence
  Description of Artificial Sequence: Synthetic oligonucleotide
  Sense strand starting at position 3091 of SEQ ID NO: 1881320
cggagaacugugugccaga

SEQ ID NO: 2035415 - RNA, 19 nt, Artificial Sequence
  Description of Artificial Sequence: Synthetic oligonucleotide
  Antisense strand to SEQ ID NO: 2035414
ucuggcacacaguucuccg

SEQ ID NO: 2035416 - RNA, 19 nt, Artificial Sequence
  Description of Artificial Sequence: Synthetic oligonucleotide
  Sense strand starting at position 3092 of SEQ ID NO: 1881320
ggagaacugugugccagau

SEQ ID NO: 2035417 - RNA, 19 nt, Artificial Sequence
  Description of Artificial Sequence: Synthetic oligonucleotide
  Antisense strand to SEQ ID NO: 2035416
aucuggcacacaguucucc

SEQ ID NO: 2035418 - RNA, 19 nt, Artificial Sequence
  Description of Artificial Sequence: Synthetic oligonucleotide
  Sense strand starting at position 3182 of SEQ ID NO: 1881320
cucaguaugccuggcagaa

SEQ ID NO: 2035419 - RNA, 19 nt, Artificial Sequence
  Description of Artificial Sequence: Synthetic oligonucleotide
  Antisense strand to SEQ ID NO: 2035418
uucugccaggcauacugag

SEQ ID NO: 2035420 - RNA, 19 nt, Artificial Sequence
  Description of Artificial Sequence: Synthetic oligonucleotide
  Sense strand starting at position 3333 of SEQ ID NO: 1881320
ggguugaguugaguguaga

SEQ ID NO: 2035421 - RNA, 19 nt, Artificial Sequence
  Description of Artificial Sequence: Synthetic oligonucleotide
  Antisense strand to SEQ ID NO: 2035420
ucuacacucaacucaaccc

SEQ ID NO: 2035422 - RNA, 19 nt, Artificial Sequence
  Description of Artificial Sequence: Synthetic oligonucleotide
  Sense strand starting at position 3334 of SEQ ID NO: 1881320
gguugaguugaguguagac

SEQ ID NO: 2035423 - RNA, 19 nt, Artificial Sequence
  Description of Artificial Sequence: Synthetic oligonucleotide
  Antisense strand to SEQ ID NO: 2035422
gucuacacucaacucaacc

SEQ ID NO: 2035424 - RNA, 19 nt, Artificial Sequence
  Description of Artificial Sequence: Synthetic oligonucleotide
  Sense strand starting at position 3372 of SEQ ID NO: 1881320
ucagucaguccugagccau

SEQ ID NO: 2035425 - RNA, 19 nt, Artificial Sequence
  Description of Artificial Sequence: Synthetic oligonucleotide
  Antisense strand to SEQ ID NO: 2035424
auggcucaggacugacuga

SEQ ID NO: 2035426 - RNA, 19 nt, Artificial Sequence
  Description of Artificial Sequence: Synthetic oligonucleotide
  Sense strand starting at position 53 of SEQ ID NO: 1881321
ugcuaagugccagacugua

SEQ ID NO: 2035427 - RNA, 19 nt, Artificial Sequence
  Description of Artificial Sequence: Synthetic oligonucleotide
  Antisense strand to SEQ ID NO: 2035426
uacagucuggcacuuagca

SEQ ID NO: 2035428 - RNA, 19 nt, Artificial Sequence
  Description of Artificial Sequence: Synthetic oligonucleotide
  Sense strand starting at position 66 of SEQ ID NO: 1881321
acuguaugaucuccuggau

SEQ ID NO: 2035429 - RNA, 19 nt, Artificial Sequence
  Description of Artificial Sequence: Synthetic oligonucleotide
  Antisense strand to SEQ ID NO: 2035428
auccaggagaucauacagu

SEQ ID NO: 2035430 - RNA, 19 nt, Artificial Sequence
  Description of Artificial Sequence: Synthetic oligonucleotide
  Sense strand starting at position 69 of SEQ ID NO: 1881321
guaugaucuccuggauucu

SEQ ID NO: 2035431 - RNA, 19 nt, Artificial Sequence
  Description of Artificial Sequence: Synthetic oligonucleotide
  Antisense strand to SEQ ID NO: 2035430
agaauccaggagaucauac

SEQ ID NO: 2035432 - RNA, 19 nt, Artificial Sequence
  Description of Artificial Sequence: Synthetic oligonucleotide
  Sense strand starting at position 90 of SEQ ID NO: 1881321
aaagguugcuguccacaca

SEQ ID NO: 2035433 - RNA, 19 nt, Artificial Sequence
  Description of Artificial Sequence: Synthetic oligonucleotide
  Antisense strand to SEQ ID NO: 2035432
uguguggacagcaaccuuu

SEQ ID NO: 2035434 - RNA, 19 nt, Artificial Sequence
  Description of Artificial Sequence: Synthetic oligonucleotide
  Sense strand starting at position 171 of SEQ ID NO: 1881321
agcuuccuuccagagaaua

SEQ ID NO: 2035435 - RNA, 19 nt, Artificial Sequence
  Description of Artificial Sequence: Synthetic oligonucleotide
  Antisense strand to SEQ ID NO: 2035434
uauucucuggaaggaagcu

SEQ ID NO: 2035436 - RNA, 19 nt, Artificial Sequence
  Description of Artificial Sequence: Synthetic oligonucleotide
  Sense strand starting at position 201 of SEQ ID NO: 1881321
aagcuuuccuggcugugaa

SEQ ID NO: 2035437 - RNA, 19 nt, Artificial Sequence
  Description of Artificial Sequence: Synthetic oligonucleotide
  Antisense strand to SEQ ID NO: 2035436
uucacagccaggaaagcuu

SEQ ID NO: 2035438 - RNA, 19 nt, Artificial Sequence
  Description of Artificial Sequence: Synthetic oligonucleotide
  Sense strand starting at position 204 of SEQ ID NO: 1881321
cuuuccuggcugugaacaa

SEQ ID NO: 2035439 - RNA, 19 nt, Artificial Sequence
  Description of Artificial Sequence: Synthetic oligonucleotide
  Antisense strand to SEQ ID NO: 2035438
uuguucacagccaggaaag

SEQ ID NO: 2035440 - RNA, 19 nt, Artificial Sequence
  Description of Artificial Sequence: Synthetic oligonucleotide
  Sense strand starting at position 235 of SEQ ID NO: 1881321
cuuccuauguguucuaaga

SEQ ID NO: 2035441 - RNA, 19 nt, Artificial Sequence
  Description of Artificial Sequence: Synthetic oligonucleotide
  Antisense strand to SEQ ID NO: 2035440
ucuuagaacacauaggaag

SEQ ID NO: 2035442 - RNA, 19 nt, Artificial Sequence
  Description of Artificial Sequence: Synthetic oligonucleotide
  Sense strand starting at position 305 of SEQ ID NO: 1881321
uagacuguaguuugugaca

SEQ ID NO: 2035443 - RNA, 19 nt, Artificial Sequence
  Description of Artificial Sequence: Synthetic oligonucleotide
  Antisense strand to SEQ ID NO: 2035442
ugucacaaacuacagucua

SEQ ID NO: 2035444 - RNA, 19 nt, Artificial Sequence
  Description of Artificial Sequence: Synthetic oligonucleotide
  Sense strand starting at position 327 of SEQ ID NO: 1881321
ggaucauaaagguguucgu

SEQ ID NO: 2035445 - RNA, 19 nt, Artificial Sequence
  Description of Artificial Sequence: Synthetic oligonucleotide
  Antisense strand to SEQ ID NO: 2035444
acgaacaccuuuaugaucc

SEQ ID NO: 2035446 - RNA, 19 nt, Artificial Sequence
  Description of Artificial Sequence: Synthetic oligonucleotide
  Sense strand starting at position 330 of SEQ ID NO: 1881321
ucauaaagguguucguuag

SEQ ID NO: 2035447 - RNA, 19 nt, Artificial Sequence
  Description of Artificial Sequence: Synthetic oligonucleotide
  Antisense strand to SEQ ID NO: 2035446
cuaacgaacaccuuuauga

SEQ ID NO: 2035448 - RNA, 19 nt, Artificial Sequence
  Description of Artificial Sequence: Synthetic oligonucleotide
  Sense strand starting at position 334 of SEQ ID NO: 1881321
aaagguguucguuagcaau

SEQ ID NO: 2035449 - RNA, 19 nt, Artificial Sequence
  Description of Artificial Sequence: Synthetic oligonucleotide
  Antisense strand to SEQ ID NO: 2035448
auugcuaacgaacaccuuu

SEQ ID NO: 2035450 - RNA, 19 nt, Artificial Sequence
  Description of Artificial Sequence: Synthetic oligonucleotide
  Sense strand starting at position 583 of SEQ ID NO: 1881321
gcuccauagcuuggauacu

SEQ ID NO: 2035451 - RNA, 19 nt, Artificial Sequence
  Description of Artificial Sequence: Synthetic oligonucleotide
  Antisense strand to SEQ ID NO: 2035450
aguauccaagcuauggagc

SEQ ID NO: 2035452 - RNA, 19 nt, Artificial Sequence
  Description of Artificial Sequence: Synthetic oligonucleotide
  Sense strand starting at position 638 of SEQ ID NO: 1881321
gacagugauuaucuaaggu

SEQ ID NO: 2035453 - RNA, 19 nt, Artificial Sequence
  Description of Artificial Sequence: Synthetic oligonucleotide
  Antisense strand to SEQ ID NO: 2035452
accuuagauaaucacuguc

SEQ ID NO: 2035454 - RNA, 19 nt, Artificial Sequence
  Description of Artificial Sequence: Synthetic oligonucleotide
  Sense strand starting at position 672 of SEQ ID NO: 1881321
acaaacugucaacguuaaa

SEQ ID NO: 2035455 - RNA, 19 nt, Artificial Sequence
  Description of Artificial Sequence: Synthetic oligonucleotide
  Antisense strand to SEQ ID NO: 2035454
uuuaacguugacaguuugu

SEQ ID NO: 2035456 - RNA, 19 nt, Artificial Sequence
  Description of Artificial Sequence: Synthetic oligonucleotide
  Sense strand starting at position 724 of SEQ ID NO: 1881321
ccggaagauuaagcauauu

SEQ ID NO: 2035457 - RNA, 19 nt, Artificial Sequence
  Description of Artificial Sequence: Synthetic oligonucleotide
  Antisense strand to SEQ ID NO: 2035456
aauaugcuuaaucuuccgg

SEQ ID NO: 2035458 - RNA, 19 nt, Artificial Sequence
  Description of Artificial Sequence: Synthetic oligonucleotide
  Sense strand starting at position 871 of SEQ ID NO: 1881321
aaagcaacuccgugggaua

SEQ ID NO: 2035459 - RNA, 19 nt, Artificial Sequence
  Description of Artificial Sequence: Synthetic oligonucleotide
  Antisense strand to SEQ ID NO: 2035458
uaucccacggaguugcuuu

SEQ ID NO: 2035460 - RNA, 19 nt, Artificial Sequence
  Description of Artificial Sequence: Synthetic oligonucleotide
  Sense strand starting at position 883 of SEQ ID NO: 1881321
ugggauaguugaccguuaa

SEQ ID NO: 2035461 - RNA, 19 nt, Artificial Sequence
  Description of Artificial Sequence: Synthetic oligonucleotide
  Antisense strand to SEQ ID NO: 2035460
uuaacggucaacuauccca

SEQ ID NO: 2035462 - RNA, 19 nt, Artificial Sequence
  Description of Artificial Sequence: Synthetic oligonucleotide
  Sense strand starting at position 884 of SEQ ID NO: 1881321
gggauaguugaccguuaaa

SEQ ID NO: 2035463 - RNA, 19 nt, Artificial Sequence
  Description of Artificial Sequence: Synthetic oligonucleotide
  Antisense strand to SEQ ID NO: 2035462
uuuaacggucaacuauccc

SEQ ID NO: 2035464 - RNA, 19 nt, Artificial Sequence
  Description of Artificial Sequence: Synthetic oligonucleotide
  Sense strand starting at position 976 of SEQ ID NO: 1881321
ccucguagaagcugggaua

SEQ ID NO: 2035465 - RNA, 19 nt, Artificial Sequence
  Description of Artificial Sequence: Synthetic oligonucleotide
  Antisense strand to SEQ ID NO: 2035464
uaucccagcuucuacgagg

SEQ ID NO: 2035466 - RNA, 19 nt, Artificial Sequence
  Description of Artificial Sequence: Synthetic oligonucleotide
  Sense strand starting at position 1023 of SEQ ID NO: 1881321
uaacguaucgcauaagaca

SEQ ID NO: 2035467 - RNA, 19 nt, Artificial Sequence
  Description of Artificial Sequence: Synthetic oligonucleotide
  Antisense strand to SEQ ID NO: 2035466
ugucuuaugcgauacguua

SEQ ID NO: 2035468 - RNA, 19 nt, Artificial Sequence
  Description of Artificial Sequence: Synthetic oligonucleotide
  Sense strand starting at position 1232 of SEQ ID NO: 1881321
aagccuagucuagagcgaa

SEQ ID NO: 2035469 - RNA, 19 nt, Artificial Sequence
  Description of Artificial Sequence: Synthetic oligonucleotide
  Antisense strand to SEQ ID NO: 2035468
uucgcucuagacuaggcuu

SEQ ID NO: 2035470 - RNA, 19 nt, Artificial Sequence
  Description of Artificial Sequence: Synthetic oligonucleotide
  Sense strand starting at position 1246 of SEQ ID NO: 1881321
gcgaaugcucaacgauuug

SEQ ID NO: 2035471 - RNA, 19 nt, Artificial Sequence
  Description of Artificial Sequence: Synthetic oligonucleotide
  Antisense strand to SEQ ID NO: 2035470
caaaucguugagcauucgc

SEQ ID NO: 2035472 - RNA, 19 nt, Artificial Sequence
  Description of Artificial Sequence: Synthetic oligonucleotide
  Sense strand starting at position 1251 of SEQ ID NO: 1881321
ugcucaacgauuuguugaa

SEQ ID NO: 2035473 - RNA, 19 nt, Artificial Sequence
  Description of Artificial Sequence: Synthetic oligonucleotide
  Antisense strand to SEQ ID NO: 2035472
uucaacaaaucguugagca

SEQ ID NO: 2035474 - RNA, 19 nt, Artificial Sequence
  Description of Artificial Sequence: Synthetic oligonucleotide
  Sense strand starting at position 1605 of SEQ ID NO: 1881321
cuccguugggcugaagauu

SEQ ID NO: 2035475 - RNA, 19 nt, Artificial Sequence
  Description of Artificial Sequence: Synthetic oligonucleotide
  Antisense strand to SEQ ID NO: 2035474
aaucuucagcccaacggag

SEQ ID NO: 2035476 - RNA, 19 nt, Artificial Sequence
  Description of Artificial Sequence: Synthetic oligonucleotide
  Sense strand starting at position 1845 of SEQ ID NO: 1881321
aaccuaccgucguuacaga

SEQ ID NO: 2035477 - RNA, 19 nt, Artificial Sequence
  Description of Artificial Sequence: Synthetic oligonucleotide
  Antisense strand to SEQ ID NO: 2035476
ucuguaacgacgguagguu

SEQ ID NO: 2035478 - RNA, 19 nt, Artificial Sequence
  Description of Artificial Sequence: Synthetic oligonucleotide
  Sense strand starting at position 2076 of SEQ ID NO: 1881321
gggaaauguggucgccaga

SEQ ID NO: 2035479 - RNA, 19 nt, Artificial Sequence
  Description of Artificial Sequence: Synthetic oligonucleotide
  Antisense strand to SEQ ID NO: 2035478
ucuggcgaccacauuuccc

SEQ ID NO: 2035480 - RNA, 19 nt, Artificial Sequence
  Description of Artificial Sequence: Synthetic oligonucleotide
  Sense strand starting at position 2079 of SEQ ID NO: 1881321
aaauguggucgccagacca

SEQ ID NO: 2035481 - RNA, 19 nt, Artificial Sequence
  Description of Artificial Sequence: Synthetic oligonucleotide
  Antisense strand to SEQ ID NO: 2035480
uggucuggcgaccacauuu

SEQ ID NO: 2035482 - RNA, 19 nt, Artificial Sequence
  Description of Artificial Sequence: Synthetic oligonucleotide
  Sense strand starting at position 2148 of SEQ ID NO: 1881321
ucacuacagaguugucgau

SEQ ID NO: 2035483 - RNA, 19 nt, Artificial Sequence
  Description of Artificial Sequence: Synthetic oligonucleotide
  Antisense strand to SEQ ID NO: 2035482
aucgacaacucuguaguga

SEQ ID NO: 2035484 - RNA, 19 nt, Artificial Sequence
  Description of Artificial Sequence: Synthetic oligonucleotide
  Sense strand starting at position 2172 of SEQ ID NO: 1881321
uuugcagaccuggauuagu

SEQ ID NO: 2035485 - RNA, 19 nt, Artificial Sequence
  Description of Artificial Sequence: Synthetic oligonucleotide
  Antisense strand to SEQ ID NO: 2035484
acuaauccaggucugcaaa

SEQ ID NO: 2035486 - RNA, 19 nt, Artificial Sequence
  Description of Artificial Sequence: Synthetic oligonucleotide
  Sense strand starting at position 2200 of SEQ ID NO: 1881321
uccuauuaggcauguuaau

SEQ ID NO: 2035487 - RNA, 19 nt, Artificial Sequence
  Description of Artificial Sequence: Synthetic oligonucleotide
  Antisense strand to SEQ ID NO: 2035486
auuaacaugccuaauagga

SEQ ID NO: 2035488 - RNA, 19 nt, Artificial Sequence
  Description of Artificial Sequence: Synthetic oligonucleotide
  Sense strand starting at position 2322 of SEQ ID NO: 1881321
agugguggcucacucacaa

SEQ ID NO: 2035489 - RNA, 19 nt, Artificial Sequence
  Description of Artificial Sequence: Synthetic oligonucleotide
  Antisense strand to SEQ ID NO: 2035488
uugugagugagccaccacu

SEQ ID NO: 2035490 - RNA, 19 nt, Artificial Sequence
  Description of Artificial Sequence: Synthetic oligonucleotide
  Sense strand starting at position 2537 of SEQ ID NO: 1881321
cugugaucucgucacagca

SEQ ID NO: 2035491 - RNA, 19 nt, Artificial Sequence
  Description of Artificial Sequence: Synthetic oligonucleotide
  Antisense strand to SEQ ID NO: 2035490
ugcugugacgagaucacag

SEQ ID NO: 2035492 - RNA, 19 nt, Artificial Sequence
  Description of Artificial Sequence: Synthetic oligonucleotide
  Sense strand starting at position 3580 of SEQ ID NO: 1881321
acauuaguugaucgcuuua

SEQ ID NO: 2035493 - RNA, 19 nt, Artificial Sequence
  Description of Artificial Sequence: Synthetic oligonucleotide
  Antisense strand to SEQ ID NO: 2035492
uaaagcgaucaacuaaugu

SEQ ID NO: 2035494 - RNA, 19 nt, Artificial Sequence
  Description of Artificial Sequence: Synthetic oligonucleotide
  Sense strand starting at position 3585 of SEQ ID NO: 1881321
aguugaucgcuuuacuaga

SEQ ID NO: 2035495 - RNA, 19 nt, Artificial Sequence
  Description of Artificial Sequence: Synthetic oligonucleotide
  Antisense strand to SEQ ID NO: 2035494
ucuaguaaagcgaucaacu

SEQ ID NO: 2035496 - RNA, 19 nt, Artificial Sequence
  Description of Artificial Sequence: Synthetic oligonucleotide
  Sense strand starting at position 3590 of SEQ ID NO: 1881321
aucgcuuuacuagaugcua

SEQ ID NO: 2035497 - RNA, 19 nt, Artificial Sequence
  Description of Artificial Sequence: Synthetic oligonucleotide
  Antisense strand to SEQ ID NO: 2035496
uagcaucuaguaaagcgau

SEQ ID NO: 2035498 - RNA, 19 nt, Artificial Sequence
  Description of Artificial Sequence: Synthetic oligonucleotide
  Sense strand starting at position 3605 of SEQ ID NO: 1881321
gcuauauuauugcccuaga

SEQ ID NO: 2035499 - RNA, 19 nt, Artificial Sequence
  Description of Artificial Sequence: Synthetic oligonucleotide
  Antisense strand to SEQ ID NO: 2035498
ucuagggcaauaauauagc

SEQ ID NO: 2035500 - RNA, 19 nt, Artificial Sequence
  Description of Artificial Sequence: Synthetic oligonucleotide
  Sense strand starting at position 3618 of SEQ ID NO: 1881321
ccuagaugcuuugcaaaca

SEQ ID NO: 2035501 - RNA, 19 nt, Artificial Sequence
  Description of Artificial Sequence: Synthetic oligonucleotide
  Antisense strand to SEQ ID NO: 2035500
uguuugcaaagcaucuagg

SEQ ID NO: 2035502 - RNA, 19 nt, Artificial Sequence
  Description of Artificial Sequence: Synthetic oligonucleotide
  Sense strand starting at position 3977 of SEQ ID NO: 1881321
ugccuauaccauuaguuac

SEQ ID NO: 2035503 - RNA, 19 nt, Artificial Sequence
  Description of Artificial Sequence: Synthetic oligonucleotide
  Antisense strand to SEQ ID NO: 2035502
guaacuaaugguauaggca

SEQ ID NO: 2035504 - RNA, 19 nt, Artificial Sequence
  Description of Artificial Sequence: Synthetic oligonucleotide
  Sense strand starting at position 3980 of SEQ ID NO: 1881321
cuauaccauuaguuacaga

SEQ ID NO: 2035505 - RNA, 19 nt, Artificial Sequence
  Description of Artificial Sequence: Synthetic oligonucleotide
  Antisense strand to SEQ ID NO: 2035504
ucuguaacuaaugguauag

SEQ ID NO: 2035506 - RNA, 19 nt, Artificial Sequence
  Description of Artificial Sequence: Synthetic oligonucleotide
  Sense strand starting at position 301 of SEQ ID NO: 1881322
gggaaauucccaugcaaca

SEQ ID NO: 2035507 - RNA, 19 nt, Artificial Sequence
  Description of Artificial Sequence: Synthetic oligonucleotide
  Antisense strand to SEQ ID NO: 2035506
uguugcaugggaauuuccc

SEQ ID NO: 2035508 - RNA, 19 nt, Artificial Sequence
  Description of Artificial Sequence: Synthetic oligonucleotide
  Sense strand starting at position 453 of SEQ ID NO: 1881322
gggucaugcauguaaugau

SEQ ID NO: 2035509 - RNA, 19 nt, Artificial Sequence
  Description of Artificial Sequence: Synthetic oligonucleotide
  Antisense strand to SEQ ID NO: 2035508
aucauuacaugcaugaccc

SEQ ID NO: 2035510 - RNA, 19 nt, Artificial Sequence
  Description of Artificial Sequence: Synthetic oligonucleotide
  Sense strand starting at position 1167 of SEQ ID NO: 1881322
gaaugaaagguuugccaug

SEQ ID NO: 2035511 - RNA, 19 nt, Artificial Sequence
  Description of Artificial Sequence: Synthetic oligonucleotide
  Antisense strand to SEQ ID NO: 2035510
cauggcaaaccuuucauuc

SEQ ID NO: 2035512 - RNA, 19 nt, Artificial Sequence
  Description of Artificial Sequence: Synthetic oligonucleotide
  Sense strand starting at position 1216 of SEQ ID NO: 1881322
uuagcaucugaggaacuuu

SEQ ID NO: 2035513 - RNA, 19 nt, Artificial Sequence
  Description of Artificial Sequence: Synthetic oligonucleotide
  Antisense strand to SEQ ID NO: 2035512
aaaguuccucagaugcuaa

SEQ ID NO: 2035514 - RNA, 19 nt, Artificial Sequence
  Description of Artificial Sequence: Synthetic oligonucleotide
  Sense strand starting at position 1262 of SEQ ID NO: 1881322
uuccuuagguaaguaauga

SEQ ID NO: 2035515 - RNA, 19 nt, Artificial Sequence
  Description of Artificial Sequence: Synthetic oligonucleotide
  Antisense strand to SEQ ID NO: 2035514
ucauuacuuaccuaaggaa

SEQ ID NO: 2035516 - RNA, 19 nt, Artificial Sequence
  Description of Artificial Sequence: Synthetic oligonucleotide
  Sense strand starting at position 1326 of SEQ ID NO: 1881322
acuuuaagcguggaaucaa

SEQ ID NO: 2035517 - RNA, 19 nt, Artificial Sequence
  Description of Artificial Sequence: Synthetic oligonucleotide
  Antisense strand to SEQ ID NO: 2035516
uugauuccacgcuuaaagu

SEQ ID NO: 2035518 - RNA, 19 nt, Artificial Sequence
  Description of Artificial Sequence: Synthetic oligonucleotide
  Sense strand starting at position 1445 of SEQ ID NO: 1881322
cuuugucacgcaguguuga

SEQ ID NO: 2035519 - RNA, 19 nt, Artificial Sequence
  Description of Artificial Sequence: Synthetic oligonucleotide
  Antisense strand to SEQ ID NO: 2035518
ucaacacugcgugacaaag

SEQ ID NO: 2035520 - RNA, 19 nt, Artificial Sequence
  Description of Artificial Sequence: Synthetic oligonucleotide
  Sense strand starting at position 1653 of SEQ ID NO: 1881322
auggaacaagucuguacaa

SEQ ID NO: 2035521 - RNA, 19 nt, Artificial Sequence
  Description of Artificial Sequence: Synthetic oligonucleotide
  Antisense strand to SEQ ID NO: 2035520
uuguacagacuuguuccau

SEQ ID NO: 2035522 - RNA, 19 nt, Artificial Sequence
  Description of Artificial Sequence: Synthetic oligonucleotide
  Sense strand starting at position 1654 of SEQ ID NO: 1881322
uggaacaagucuguacaau

SEQ ID NO: 2035523 - RNA, 19 nt, Artificial Sequence
  Description of Artificial Sequence: Synthetic oligonucleotide
  Antisense strand to SEQ ID NO: 2035522
auuguacagacuuguucca

SEQ ID NO: 2035524 - RNA, 19 nt, Artificial Sequence
  Description of Artificial Sequence: Synthetic oligonucleotide
  Sense strand starting at position 1700 of SEQ ID NO: 1881322
guuccaaaggagugacuuu

SEQ ID NO: 2035525 - RNA, 19 nt, Artificial Sequence
  Description of Artificial Sequence: Synthetic oligonucleotide
  Antisense strand to SEQ ID NO: 2035524
aaagucacuccuuuggaac

SEQ ID NO: 2035526 - RNA, 19 nt, Artificial Sequence
  Description of Artificial Sequence: Synthetic oligonucleotide
  Sense strand starting at position 1793 of SEQ ID NO: 1881322
agaauuuguucugccuuua

SEQ ID NO: 2035527 - RNA, 19 nt, Artificial Sequence
  Description of Artificial Sequence: Synthetic oligonucleotide
  Antisense strand to SEQ ID NO: 2035526
uaaaggcagaacaaauucu

SEQ ID NO: 2035528 - RNA, 19 nt, Artificial Sequence
  Description of Artificial Sequence: Synthetic oligonucleotide
  Sense strand starting at position 1921 of SEQ ID NO: 1881322
guccauugagaguaagcuu

SEQ ID NO: 2035529 - RNA, 19 nt, Artificial Sequence
  Description of Artificial Sequence: Synthetic oligonucleotide
  Antisense strand to SEQ ID NO: 2035528
aagcuuacucucaauggac

SEQ ID NO: 2035530 - RNA, 19 nt, Artificial Sequence
  Description of Artificial Sequence: Synthetic oligonucleotide
  Sense strand starting at position 1932 of SEQ ID NO: 1881322
guaagcuuaguauaucaaa

SEQ ID NO: 2035531 - RNA, 19 nt, Artificial Sequence
  Description of Artificial Sequence: Synthetic oligonucleotide
  Antisense strand to SEQ ID NO: 2035530
uuugauauacuaagcuuac

SEQ ID NO: 2035532 - RNA, 19 nt, Artificial Sequence
  Description of Artificial Sequence: Synthetic oligonucleotide
  Sense strand starting at position 2064 of SEQ ID NO: 1881322
accggucuucagggaauau

SEQ ID NO: 2035533 - RNA, 19 nt, Artificial Sequence
  Description of Artificial Sequence: Synthetic oligonucleotide
  Antisense strand to SEQ ID NO: 2035532
auauucccugaagaccggu

SEQ ID NO: 2035534 - RNA, 19 nt, Artificial Sequence
  Description of Artificial Sequence: Synthetic oligonucleotide
  Sense strand starting at position 2075 of SEQ ID NO: 1881322
gggaauauuuaaggacuua

SEQ ID NO: 2035535 - RNA, 19 nt, Artificial Sequence
  Description of Artificial Sequence: Synthetic oligonucleotide
  Antisense strand to SEQ ID NO: 2035534
uaaguccuuaaauauuccc

SEQ ID NO: 2035536 - RNA, 19 nt, Artificial Sequence
  Description of Artificial Sequence: Synthetic oligonucleotide
  Sense strand starting at position 2093 of SEQ ID NO: 1881322
aguggaauuuaugaacaau

SEQ ID NO: 2035537 - RNA, 19 nt, Artificial Sequence
  Description of Artificial Sequence: Synthetic oligonucleotide
  Antisense strand to SEQ ID NO: 2035536
auuguucauaaauuccacu

SEQ ID NO: 2035538 - RNA, 19 nt, Artificial Sequence
  Description of Artificial Sequence: Synthetic oligonucleotide
  Sense strand starting at position 2119 of SEQ ID NO: 1881322
augagauuagccugggagu

SEQ ID NO: 2035539 - RNA, 19 nt, Artificial Sequence
  Description of Artificial Sequence: Synthetic oligonucleotide
  Antisense strand to SEQ ID NO: 2035538
acucccaggcuaaucucau

SEQ ID NO: 2035540 - RNA, 19 nt, Artificial Sequence
  Description of Artificial Sequence: Synthetic oligonucleotide
  Sense strand starting at position 2140 of SEQ ID NO: 1881322
uguccugcagcugucuaau

SEQ ID NO: 2035541 - RNA, 19 nt, Artificial Sequence
  Description of Artificial Sequence: Synthetic oligonucleotide
  Antisense strand to SEQ ID NO: 2035540
auuagacagcugcaggaca

SEQ ID NO: 2035542 - RNA, 19 nt, Artificial Sequence
  Description of Artificial Sequence: Synthetic oligonucleotide
  Sense strand starting at position 2152 of SEQ ID NO: 1881322
gucuaaucuaguuagagug

SEQ ID NO: 2035543 - RNA, 19 nt, Artificial Sequence
  Description of Artificial Sequence: Synthetic oligonucleotide
  Antisense strand to SEQ ID NO: 2035542
cacucuaacuagauuagac

SEQ ID NO: 2035544 - RNA, 19 nt, Artificial Sequence
  Description of Artificial Sequence: Synthetic oligonucleotide
  Sense strand starting at position 2234 of SEQ ID NO: 1881322
guucuucgagguaguguua

SEQ ID NO: 2035545 - RNA, 19 nt, Artificial Sequence
  Description of Artificial Sequence: Synthetic oligonucleotide
  Antisense strand to SEQ ID NO: 2035544
uaacacuaccucgaagaac

SEQ ID NO: 2035546 - RNA, 19 nt, Artificial Sequence
  Description of Artificial Sequence: Synthetic oligonucleotide
  Sense strand starting at position 2366 of SEQ ID NO: 1881322
ggaaguuugcuugacucau

SEQ ID NO: 2035547 - RNA, 19 nt, Artificial Sequence
  Description of Artificial Sequence: Synthetic oligonucleotide
  Antisense strand to SEQ ID NO: 2035546
augagucaagcaaacuucc

SEQ ID NO: 2035548 - RNA, 19 nt, Artificial Sequence
  Description of Artificial Sequence: Synthetic oligonucleotide
  Sense strand starting at position 2398 of SEQ ID NO: 1881322
ugcagcauucugugauuug

SEQ ID NO: 2035549 - RNA, 19 nt, Artificial Sequence
  Description of Artificial Sequence: Synthetic oligonucleotide
  Antisense strand to SEQ ID NO: 2035548
caaaucacagaaugcugca

SEQ ID NO: 2035550 - RNA, 19 nt, Artificial Sequence
  Description of Artificial Sequence: Synthetic oligonucleotide
  Sense strand starting at position 2401 of SEQ ID NO: 1881322
agcauucugugauuugagu

SEQ ID NO: 2035551 - RNA, 19 nt, Artificial Sequence
  Description of Artificial Sequence: Synthetic oligonucleotide
  Antisense strand to SEQ ID NO: 2035550
acucaaaucacagaaugcu

SEQ ID NO: 2035552 - RNA, 19 nt, Artificial Sequence
  Description of Artificial Sequence: Synthetic oligonucleotide
  Sense strand starting at position 2414 of SEQ ID NO: 1881322
uugagucauccaugaaucc

SEQ ID NO: 2035553 - RNA, 19 nt, Artificial Sequence
  Description of Artificial Sequence: Synthetic oligonucleotide
  Antisense strand to SEQ ID NO: 2035552
ggauucauggaugacucaa

SEQ ID NO: 2035554 - RNA, 19 nt, Artificial Sequence
  Description of Artificial Sequence: Synthetic oligonucleotide
  Sense strand starting at position 2446 of SEQ ID NO: 1881322
acauucuuugauugguaau

SEQ ID NO: 2035555 - RNA, 19 nt, Artificial Sequence
  Description of Artificial Sequence: Synthetic oligonucleotide
  Antisense strand to SEQ ID NO: 2035554
auuaccaaucaaagaaugu

SEQ ID NO: 2035556 - RNA, 19 nt, Artificial Sequence
  Description of Artificial Sequence: Synthetic oligonucleotide
  Sense strand starting at position 2484 of SEQ ID NO: 1881322
cucacuaaugaggguauca

SEQ ID NO: 2035557 - RNA, 19 nt, Artificial Sequence
  Description of Artificial Sequence: Synthetic oligonucleotide
  Antisense strand to SEQ ID NO: 2035556
ugauacccucauuagugag

SEQ ID NO: 2035558 - RNA, 19 nt, Artificial Sequence
  Description of Artificial Sequence: Synthetic oligonucleotide
  Sense strand starting at position 2494 of SEQ ID NO: 1881322
aggguaucacuuugacuga

SEQ ID NO: 2035559 - RNA, 19 nt, Artificial Sequence
  Description of Artificial Sequence: Synthetic oligonucleotide
  Antisense strand to SEQ ID NO: 2035558
ucagucaaagugauacccu

SEQ ID NO: 2035560 - RNA, 19 nt, Artificial Sequence
  Description of Artificial Sequence: Synthetic oligonucleotide
  Sense strand starting at position 2657 of SEQ ID NO: 1881322
cuuucuugacaugauagca

SEQ ID NO: 2035561 - RNA, 19 nt, Artificial Sequence
  Description of Artificial Sequence: Synthetic oligonucleotide
  Antisense strand to SEQ ID NO: 2035560
ugcuaucaugucaagaaag

SEQ ID NO: 2035562 - RNA, 19 nt, Artificial Sequence
  Description of Artificial Sequence: Synthetic oligonucleotide
  Sense strand starting at position 2702 of SEQ ID NO: 1881322
augacuaaccuaggaguuu

SEQ ID NO: 2035563 - RNA, 19 nt, Artificial Sequence
  Description of Artificial Sequence: Synthetic oligonucleotide
  Antisense strand to SEQ ID NO: 2035562
aaacuccuagguuagucau

SEQ ID NO: 2035564 - RNA, 19 nt, Artificial Sequence
  Description of Artificial Sequence: Synthetic oligonucleotide
  Sense strand starting at position 2796 of SEQ ID NO: 1881322
uguguaacacauuacaguu

SEQ ID NO: 2035565 - RNA, 19 nt, Artificial Sequence
  Description of Artificial Sequence: Synthetic oligonucleotide
  Antisense strand to SEQ ID NO: 2035564
aacuguaauguguuacaca

SEQ ID NO: 2035566 - RNA, 19 nt, Artificial Sequence
  Description of Artificial Sequence: Synthetic oligonucleotide
  Sense strand starting at position 2869 of SEQ ID NO: 1881322
ggagucucccagcacacau

SEQ ID NO: 2035567 - RNA, 19 nt, Artificial Sequence
  Description of Artificial Sequence: Synthetic oligonucleotide
  Antisense strand to SEQ ID NO: 2035566
augugugcugggagacucc

SEQ ID NO: 2035568 - RNA, 19 nt, Artificial Sequence
  Description of Artificial Sequence: Synthetic oligonucleotide
  Sense strand starting at position 2890 of SEQ ID NO: 1881322
cuccuagugggaugaucua

SEQ ID NO: 2035569 - RNA, 19 nt, Artificial Sequence
  Description of Artificial Sequence: Synthetic oligonucleotide
  Antisense strand to SEQ ID NO: 2035568
uagaucaucccacuaggag

SEQ ID NO: 2035570 - RNA, 19 nt, Artificial Sequence
  Description of Artificial Sequence: Synthetic oligonucleotide
  Sense strand starting at position 3039 of SEQ ID NO: 1881322
ugucuuaaaucuuccagga

SEQ ID NO: 2035571 - RNA, 19 nt, Artificial Sequence
  Description of Artificial Sequence: Synthetic oligonucleotide
  Antisense strand to SEQ ID NO: 2035570
uccuggaagauuuaagaca

SEQ ID NO: 2035572 - RNA, 19 nt, Artificial Sequence
  Description of Artificial Sequence: Synthetic oligonucleotide
  Sense strand starting at position 3139 of SEQ ID NO: 1881322
acuuaaaucuguuugauag

SEQ ID NO: 2035573 - RNA, 19 nt, Artificial Sequence
  Description of Artificial Sequence: Synthetic oligonucleotide
  Antisense strand to SEQ ID NO: 2035572
cuaucaaacagauuuaagu

SEQ ID NO: 2035574 - RNA, 19 nt, Artificial Sequence
  Description of Artificial Sequence: Synthetic oligonucleotide
  Sense strand starting at position 3252 of SEQ ID NO: 1881322
uacucuuggcuagauugau

SEQ ID NO: 2035575 - RNA, 19 nt, Artificial Sequence
  Description of Artificial Sequence: Synthetic oligonucleotide
  Antisense strand to SEQ ID NO: 2035574
aucaaucuagccaagagua

SEQ ID NO: 2035576 - RNA, 19 nt, Artificial Sequence
  Description of Artificial Sequence: Synthetic oligonucleotide
  Sense strand starting at position 3392 of SEQ ID NO: 1881322
ccugguuacucaccuugaa

SEQ ID NO: 2035577 - RNA, 19 nt, Artificial Sequence
  Description of Artificial Sequence: Synthetic oligonucleotide
  Antisense strand to SEQ ID NO: 2035576
uucaaggugaguaaccagg

SEQ ID NO: 2035578 - RNA, 19 nt, Artificial Sequence
  Description of Artificial Sequence: Synthetic oligonucleotide
  Sense strand starting at position 3395 of SEQ ID NO: 1881322
gguuacucaccuugaagag

SEQ ID NO: 2035579 - RNA, 19 nt, Artificial Sequence
  Description of Artificial Sequence: Synthetic oligonucleotide
  Antisense strand to SEQ ID NO: 2035578
cucuucaaggugaguaacc

SEQ ID NO: 2035580 - RNA, 19 nt, Artificial Sequence
  Description of Artificial Sequence: Synthetic oligonucleotide
  Sense strand starting at position 3843 of SEQ ID NO: 1881322
gugcaagucagcguuuagu

SEQ ID NO: 2035581 - RNA, 19 nt, Artificial Sequence
  Description of Artificial Sequence: Synthetic oligonucleotide
  Antisense strand to SEQ ID NO: 2035580
acuaaacgcugacuugcac

SEQ ID NO: 2035582 - RNA, 19 nt, Artificial Sequence
  Description of Artificial Sequence: Synthetic oligonucleotide
  Sense strand starting at position 3845 of SEQ ID NO: 1881322
gcaagucagcguuuagugu

SEQ ID NO: 2035583 - RNA, 19 nt, Artificial Sequence
  Description of Artificial Sequence: Synthetic oligonucleotide
  Antisense strand to SEQ ID NO: 2035582
acacuaaacgcugacuugc

SEQ ID NO: 2035584 - RNA, 19 nt, Artificial Sequence
  Description of Artificial Sequence: Synthetic oligonucleotide
  Sense strand starting at position 3980 of SEQ ID NO: 1881322
ccguauguuguccauuuaa

SEQ ID NO: 2035585 - RNA, 19 nt, Artificial Sequence
  Description of Artificial Sequence: Synthetic oligonucleotide
  Antisense strand to SEQ ID NO: 2035584
uuaaauggacaacauacgg

SEQ ID NO: 2035586 - RNA, 19 nt, Artificial Sequence
  Description of Artificial Sequence: Synthetic oligonucleotide
  Sense strand starting at position 16 of SEQ ID NO: 1881323
gauuauauggugugauuau

SEQ ID NO: 2035587 - RNA, 19 nt, Artificial Sequence
  Description of Artificial Sequence: Synthetic oligonucleotide
  Antisense strand to SEQ ID NO: 2035586
auaaucacaccauauaauc

SEQ ID NO: 2035588 - RNA, 19 nt, Artificial Sequence
  Description of Artificial Sequence: Synthetic oligonucleotide
  Sense strand starting at position 37 of SEQ ID NO: 1881323
agauaauauuucuagguca

SEQ ID NO: 2035589 - RNA, 19 nt, Artificial Sequence
  Description of Artificial Sequence: Synthetic oligonucleotide
  Antisense strand to SEQ ID NO: 2035588
ugaccuagaaauauuaucu

SEQ ID NO: 2035590 - RNA, 19 nt, Artificial Sequence
  Description of Artificial Sequence: Synthetic oligonucleotide
  Sense strand starting at position 165 of SEQ ID NO: 1881323
ugagaaacagcguacauaa

SEQ ID NO: 2035591 - RNA, 19 nt, Artificial Sequence
  Description of Artificial Sequence: Synthetic oligonucleotide
  Antisense strand to SEQ ID NO: 2035590
uuauguacgcuguuucuca

SEQ ID NO: 2035592 - RNA, 19 nt, Artificial Sequence
  Description of Artificial Sequence: Synthetic oligonucleotide
  Sense strand starting at position 194 of SEQ ID NO: 1881323
cuuguuugccuguaagaac

SEQ ID NO: 2035593 - RNA, 19 nt, Artificial Sequence
  Description of Artificial Sequence: Synthetic oligonucleotide
  Antisense strand to SEQ ID NO: 2035592
guucuuacaggcaaacaag

SEQ ID NO: 2035594 - RNA, 19 nt, Artificial Sequence
  Description of Artificial Sequence: Synthetic oligonucleotide
  Sense strand starting at position 318 of SEQ ID NO: 1881323
ggccuaaucccagagaguc

SEQ ID NO: 2035595 - RNA, 19 nt, Artificial Sequence
  Description of Artificial Sequence: Synthetic oligonucleotide
  Antisense strand to SEQ ID NO: 2035594
gacucucugggauuaggcc

SEQ ID NO: 2035596 - RNA, 19 nt, Artificial Sequence
  Description of Artificial Sequence: Synthetic oligonucleotide
  Sense strand starting at position 382 of SEQ ID NO: 1881323
guggcacugaccuagaaua

SEQ ID NO: 2035597 - RNA, 19 nt, Artificial Sequence
  Description of Artificial Sequence: Synthetic oligonucleotide
  Antisense strand to SEQ ID NO: 2035596
uauucuaggucagugccac

SEQ ID NO: 2035598 - RNA, 19 nt, Artificial Sequence
  Description of Artificial Sequence: Synthetic oligonucleotide
  Sense strand starting at position 453 of SEQ ID NO: 1881323
gggauuaauauaggugcua

SEQ ID NO: 2035599 - RNA, 19 nt, Artificial Sequence
  Description of Artificial Sequence: Synthetic oligonucleotide
  Antisense strand to SEQ ID NO: 2035598
uagcaccuauauuaauccc

SEQ ID NO: 2035600 - RNA, 19 nt, Artificial Sequence
  Description of Artificial Sequence: Synthetic oligonucleotide
  Sense strand starting at position 454 of SEQ ID NO: 1881323
ggauuaauauaggugcuaa

SEQ ID NO: 2035601 - RNA, 19 nt, Artificial Sequence
  Description of Artificial Sequence: Synthetic oligonucleotide
  Antisense strand to SEQ ID NO: 2035600
uuagcaccuauauuaaucc

SEQ ID NO: 2035602 - RNA, 19 nt, Artificial Sequence
  Description of Artificial Sequence: Synthetic oligonucleotide
  Sense strand starting at position 631 of SEQ ID NO: 1881323
cuggccuuaggucagauau

SEQ ID NO: 2035603 - RNA, 19 nt, Artificial Sequence
  Description of Artificial Sequence: Synthetic oligonucleotide
  Antisense strand to SEQ ID NO: 2035602
auaucugaccuaaggccag

SEQ ID NO: 2035604 - RNA, 19 nt, Artificial Sequence
  Description of Artificial Sequence: Synthetic oligonucleotide
  Sense strand starting at position 945 of SEQ ID NO: 1881323
ccaggugaacucugucaga

SEQ ID NO: 2035605 - RNA, 19 nt, Artificial Sequence
  Description of Artificial Sequence: Synthetic oligonucleotide
  Antisense strand to SEQ ID NO: 2035604
ucugacagaguucaccugg

SEQ ID NO: 2035606 - RNA, 19 nt, Artificial Sequence
  Description of Artificial Sequence: Synthetic oligonucleotide
  Sense strand starting at position 1010 of SEQ ID NO: 1881323
uuggcaacaucugucacaa

SEQ ID NO: 2035607 - RNA, 19 nt, Artificial Sequence
  Description of Artificial Sequence: Synthetic oligonucleotide
  Antisense strand to SEQ ID NO: 2035606
uugugacagauguugccaa

SEQ ID NO: 2035608 - RNA, 19 nt, Artificial Sequence
  Description of Artificial Sequence: Synthetic oligonucleotide
  Sense strand starting at position 1273 of SEQ ID NO: 1881323
uugucugucccagacaaag

SEQ ID NO: 2035609 - RNA, 19 nt, Artificial Sequence
  Description of Artificial Sequence: Synthetic oligonucleotide
  Antisense strand to SEQ ID NO: 2035608
cuuugucugggacagacaa

SEQ ID NO: 2035610 - RNA, 19 nt, Artificial Sequence
  Description of Artificial Sequence: Synthetic oligonucleotide
  Sense strand starting at position 1275 of SEQ ID NO: 1881323
gucugucccagacaaagua

SEQ ID NO: 2035611 - RNA, 19 nt, Artificial Sequence
  Description of Artificial Sequence: Synthetic oligonucleotide
  Antisense strand to SEQ ID NO: 2035610
uacuuugucugggacagac

SEQ ID NO: 2035612 - RNA, 19 nt, Artificial Sequence
  Description of Artificial Sequence: Synthetic oligonucleotide
  Sense strand starting at position 1341 of SEQ ID NO: 1881323
aguuuacucccugacugua

SEQ ID NO: 2035613 - RNA, 19 nt, Artificial Sequence
  Description of Artificial Sequence: Synthetic oligonucleotide
  Antisense strand to SEQ ID NO: 2035612
uacagucagggaguaaacu

SEQ ID NO: 2035614 - RNA, 19 nt, Artificial Sequence
  Description of Artificial Sequence: Synthetic oligonucleotide
  Sense strand starting at position 1551 of SEQ ID NO: 1881323
aguaacuggucuccuuaca

SEQ ID NO: 2035615 - RNA, 19 nt, Artificial Sequence
  Description of Artificial Sequence: Synthetic oligonucleotide
  Antisense strand to SEQ ID NO: 2035614
uguaaggagaccaguuacu

SEQ ID NO: 2035616 - RNA, 19 nt, Artificial Sequence
  Description of Artificial Sequence: Synthetic oligonucleotide
  Sense strand starting at position 1585 of SEQ ID NO: 1881323
ugccuaguguugcuauuua

SEQ ID NO: 2035617 - RNA, 19 nt, Artificial Sequence
  Description of Artificial Sequence: Synthetic oligonucleotide
  Antisense strand to SEQ ID NO: 2035616
uaaauagcaacacuaggca

SEQ ID NO: 2035618 - RNA, 19 nt, Artificial Sequence
  Description of Artificial Sequence: Synthetic oligonucleotide
  Sense strand starting at position 1690 of SEQ ID NO: 1881323
ugacaucuguaaucaaaug

SEQ ID NO: 2035619 - RNA, 19 nt, Artificial Sequence
  Description of Artificial Sequence: Synthetic oligonucleotide
  Antisense strand to SEQ ID NO: 2035618
cauuugauuacagauguca

SEQ ID NO: 2035620 - RNA, 19 nt, Artificial Sequence
  Description of Artificial Sequence: Synthetic oligonucleotide
  Sense strand starting at position 1889 of SEQ ID NO: 1881323
agacaaccuccaggguauu

SEQ ID NO: 2035621 - RNA, 19 nt, Artificial Sequence
  Description of Artificial Sequence: Synthetic oligonucleotide
  Antisense strand to SEQ ID NO: 2035620
aauacccuggagguugucu

SEQ ID NO: 2035622 - RNA, 19 nt, Artificial Sequence
  Description of Artificial Sequence: Synthetic oligonucleotide
  Sense strand starting at position 1981 of SEQ ID NO: 1881323
agagcaagcuguuuagaau

SEQ ID NO: 2035623 - RNA, 19 nt, Artificial Sequence
  Description of Artificial Sequence: Synthetic oligonucleotide
  Antisense strand to SEQ ID NO: 2035622
auucuaaacagcuugcucu

SEQ ID NO: 2035624 - RNA, 19 nt, Artificial Sequence
  Description of Artificial Sequence: Synthetic oligonucleotide
  Sense strand starting at position 1982 of SEQ ID NO: 1881323
gagcaagcuguuuagaauu

SEQ ID NO: 2035625 - RNA, 19 nt, Artificial Sequence
  Description of Artificial Sequence: Synthetic oligonucleotide
  Antisense strand to SEQ ID NO: 2035624
aauucuaaacagcuugcuc

SEQ ID NO: 2035626 - RNA, 19 nt, Artificial Sequence
  Description of Artificial Sequence: Synthetic oligonucleotide
  Sense strand starting at position 2005 of SEQ ID NO: 1881323
gguuucugggauugugaca

SEQ ID NO: 2035627 - RNA, 19 nt, Artificial Sequence
  Description of Artificial Sequence: Synthetic oligonucleotide
  Antisense strand to SEQ ID NO: 2035626
ugucacaaucccagaaacc

SEQ ID NO: 2035628 - RNA, 19 nt, Artificial Sequence
  Description of Artificial Sequence: Synthetic oligonucleotide
  Sense strand starting at position 2066 of SEQ ID NO: 1881323
aagauaaccugucuugagu

SEQ ID NO: 2035629 - RNA, 19 nt, Artificial Sequence
  Description of Artificial Sequence: Synthetic oligonucleotide
  Antisense strand to SEQ ID NO: 2035628
acucaagacagguuaucuu

SEQ ID NO: 2035630 - RNA, 19 nt, Artificial Sequence
  Description of Artificial Sequence: Synthetic oligonucleotide
  Sense strand starting at position 2098 of SEQ ID NO: 1881323
cgaagucuugcagcugcua

SEQ ID NO: 2035631 - RNA, 19 nt, Artificial Sequence
  Description of Artificial Sequence: Synthetic oligonucleotide
  Antisense strand to SEQ ID NO: 2035630
uagcagcugcaagacuucg

SEQ ID NO: 2035632 - RNA, 19 nt, Artificial Sequence
  Description of Artificial Sequence: Synthetic oligonucleotide
  Sense strand starting at position 2110 of SEQ ID NO: 1881323
gcugcuaagcauuagaaug

SEQ ID NO: 2035633 - RNA, 19 nt, Artificial Sequence
  Description of Artificial Sequence: Synthetic oligonucleotide
  Antisense strand to SEQ ID NO: 2035632
cauucuaaugcuuagcagc

SEQ ID NO: 2035634 - RNA, 19 nt, Artificial Sequence
  Description of Artificial Sequence: Synthetic oligonucleotide
  Sense strand starting at position 2178 of SEQ ID NO: 1881323
ccaucuuaacucugagguu

SEQ ID NO: 2035635 - RNA, 19 nt, Artificial Sequence
  Description of Artificial Sequence: Synthetic oligonucleotide
  Antisense strand to SEQ ID NO: 2035634
aaccucagaguuaagaugg

SEQ ID NO: 2035636 - RNA, 19 nt, Artificial Sequence
  Description of Artificial Sequence: Synthetic oligonucleotide
  Sense strand starting at position 2187 of SEQ ID NO: 1881323
cucugagguuauucuauaa

SEQ ID NO: 2035637 - RNA, 19 nt, Artificial Sequence
  Description of Artificial Sequence: Synthetic oligonucleotide
  Antisense strand to SEQ ID NO: 2035636
uuauagaauaaccucagag

SEQ ID NO: 2035638 - RNA, 19 nt, Artificial Sequence
  Description of Artificial Sequence: Synthetic oligonucleotide
  Sense strand starting at position 2284 of SEQ ID NO: 1881323
aaugaaggccaguaaguau

SEQ ID NO: 2035639 - RNA, 19 nt, Artificial Sequence
  Description of Artificial Sequence: Synthetic oligonucleotide
  Antisense strand to SEQ ID NO: 2035638
auacuuacuggccuucauu

SEQ ID NO: 2035640 - RNA, 19 nt, Artificial Sequence
  Description of Artificial Sequence: Synthetic oligonucleotide
  Sense strand starting at position 2533 of SEQ ID NO: 1881323
ucugauugauuccuacuga

SEQ ID NO: 2035641 - RNA, 19 nt, Artificial Sequence
  Description of Artificial Sequence: Synthetic oligonucleotide
  Antisense strand to SEQ ID NO: 2035640
ucaguaggaaucaaucaga

SEQ ID NO: 2035642 - RNA, 19 nt, Artificial Sequence
  Description of Artificial Sequence: Synthetic oligonucleotide
  Sense strand starting at position 2556 of SEQ ID NO: 1881323
ccuaaaugucuuugugaac

SEQ ID NO: 2035643 - RNA, 19 nt, Artificial Sequence
  Description of Artificial Sequence: Synthetic oligonucleotide
  Antisense strand to SEQ ID NO: 2035642
guucacaaagacauuuagg

SEQ ID NO: 2035644 - RNA, 19 nt, Artificial Sequence
  Description of Artificial Sequence: Synthetic oligonucleotide
  Sense strand starting at position 2557 of SEQ ID NO: 1881323
cuaaaugucuuugugaaca

SEQ ID NO: 2035645 - RNA, 19 nt, Artificial Sequence
  Description of Artificial Sequence: Synthetic oligonucleotide
  Antisense strand to SEQ ID NO: 2035644
uguucacaaagacauuuag

SEQ ID NO: 2035646 - RNA, 19 nt, Artificial Sequence
  Description of Artificial Sequence: Synthetic oligonucleotide
  Sense strand starting at position 2562 of SEQ ID NO: 1881323
ugucuuugugaacaaagcu

SEQ ID NO: 2035647 - RNA, 19 nt, Artificial Sequence
  Description of Artificial Sequence: Synthetic oligonucleotide
  Antisense strand to SEQ ID NO: 2035646
agcuuuguucacaaagaca

SEQ ID NO: 2035648 - RNA, 19 nt, Artificial Sequence
  Description of Artificial Sequence: Synthetic oligonucleotide
  Sense strand starting at position 2667 of SEQ ID NO: 1881323
gagugauagccugaucuuu

SEQ ID NO: 2035649 - RNA, 19 nt, Artificial Sequence
  Description of Artificial Sequence: Synthetic oligonucleotide
  Antisense strand to SEQ ID NO: 2035648
aaagaucaggcuaucacuc

SEQ ID NO: 2035650 - RNA, 19 nt, Artificial Sequence
  Description of Artificial Sequence: Synthetic oligonucleotide
  Sense strand starting at position 2724 of SEQ ID NO: 1881323
caggaagaauugcuuaguu

SEQ ID NO: 2035651 - RNA, 19 nt, Artificial Sequence
  Description of Artificial Sequence: Synthetic oligonucleotide
  Antisense strand to SEQ ID NO: 2035650
aacuaagcaauucuuccug

SEQ ID NO: 2035652 - RNA, 19 nt, Artificial Sequence
  Description of Artificial Sequence: Synthetic oligonucleotide
  Sense strand starting at position 2726 of SEQ ID NO: 1881323
ggaagaauugcuuaguuug

SEQ ID NO: 2035653 - RNA, 19 nt, Artificial Sequence
  Description of Artificial Sequence: Synthetic oligonucleotide
  Antisense strand to SEQ ID NO: 2035652
caaacuaagcaauucuucc

SEQ ID NO: 2035654 - RNA, 19 nt, Artificial Sequence
  Description of Artificial Sequence: Synthetic oligonucleotide
  Sense strand starting at position 3110 of SEQ ID NO: 1881323
ugacacuuugcauauggau

SEQ ID NO: 2035655 - RNA, 19 nt, Artificial Sequence
  Description of Artificial Sequence: Synthetic oligonucleotide
  Antisense strand to SEQ ID NO: 2035654
auccauaugcaaaguguca

SEQ ID NO: 2035656 - RNA, 19 nt, Artificial Sequence
  Description of Artificial Sequence: Synthetic oligonucleotide
  Sense strand starting at position 3118 of SEQ ID NO: 1881323
ugcauauggauggaaguuu

SEQ ID NO: 2035657 - RNA, 19 nt, Artificial Sequence
  Description of Artificial Sequence: Synthetic oligonucleotide
  Antisense strand to SEQ ID NO: 2035656
aaacuuccauccauaugca

SEQ ID NO: 2035658 - RNA, 19 nt, Artificial Sequence
  Description of Artificial Sequence: Synthetic oligonucleotide
  Sense strand starting at position 3287 of SEQ ID NO: 1881323
ucuaacagaguuugguauu

SEQ ID NO: 2035659 - RNA, 19 nt, Artificial Sequence
  Description of Artificial Sequence: Synthetic oligonucleotide
  Antisense strand to SEQ ID NO: 2035658
aauaccaaacucuguuaga

SEQ ID NO: 2035660 - RNA, 19 nt, Artificial Sequence
  Description of Artificial Sequence: Synthetic oligonucleotide
  Sense strand starting at position 3467 of SEQ ID NO: 1881323
cucuuagugguagauugua

SEQ ID NO: 2035661 - RNA, 19 nt, Artificial Sequence
  Description of Artificial Sequence: Synthetic oligonucleotide
  Antisense strand to SEQ ID NO: 2035660
uacaaucuaccacuaagag

SEQ ID NO: 2035662 - RNA, 19 nt, Artificial Sequence
  Description of Artificial Sequence: Synthetic oligonucleotide
  Sense strand starting at position 3881 of SEQ ID NO: 1881323
uccuuccuuguaggauaua

SEQ ID NO: 2035663 - RNA, 19 nt, Artificial Sequence
  Description of Artificial Sequence: Synthetic oligonucleotide
  Antisense strand to SEQ ID NO: 2035662
uauauccuacaaggaagga

SEQ ID NO: 2035664 - RNA, 19 nt, Artificial Sequence
  Description of Artificial Sequence: Synthetic oligonucleotide
  Sense strand starting at position 3903 of SEQ ID NO: 1881323
ucaaauggacauuguauau

SEQ ID NO: 2035665 - RNA, 19 nt, Artificial Sequence
  Description of Artificial Sequence: Synthetic oligonucleotide
  Antisense strand to SEQ ID NO: 2035664
auauacaauguccauuuga

SEQ ID NO: 2035666 - RNA, 19 nt, Artificial Sequence
  Description of Artificial Sequence: Synthetic oligonucleotide
  Sense strand starting at position 17 of SEQ ID NO: 1881324
cugaaagagggauguaagu

SEQ ID NO: 2035667 - RNA, 19 nt, Artificial Sequence
  Description of Artificial Sequence: Synthetic oligonucleotide
  Antisense strand to SEQ ID NO: 2035666
acuuacaucccucuuucag

SEQ ID NO: 2035668 - RNA, 19 nt, Artificial Sequence
  Description of Artificial Sequence: Synthetic oligonucleotide
  Sense strand starting at position 125 of SEQ ID NO: 1881324
uggaaauauaaaggcaagu

SEQ ID NO: 2035669 - RNA, 19 nt, Artificial Sequence
  Description of Artificial Sequence: Synthetic oligonucleotide
  Antisense strand to SEQ ID NO: 2035668
acuugccuuuauauuucca

SEQ ID NO: 2035670 - RNA, 19 nt, Artificial Sequence
  Description of Artificial Sequence: Synthetic oligonucleotide
  Sense strand starting at position 404 of SEQ ID NO: 1881324
uguuccuguccugaaagua

SEQ ID NO: 2035671 - RNA, 19 nt, Artificial Sequence
  Description of Artificial Sequence: Synthetic oligonucleotide
  Antisense strand to SEQ ID NO: 2035670
uacuuucaggacaggaaca

SEQ ID NO: 2035672 - RNA, 19 nt, Artificial Sequence
  Description of Artificial Sequence: Synthetic oligonucleotide
  Sense strand starting at position 428 of SEQ ID NO: 1881324
gagugacuccgguauagga

SEQ ID NO: 2035673 - RNA, 19 nt, Artificial Sequence
  Description of Artificial Sequence: Synthetic oligonucleotide
  Antisense strand to SEQ ID NO: 2035672
uccuauaccggagucacuc

SEQ ID NO: 2035674 - RNA, 19 nt, Artificial Sequence
  Description of Artificial Sequence: Synthetic oligonucleotide
  Sense strand starting at position 532 of SEQ ID NO: 1881324
gagucaggacuuuauuguu

SEQ ID NO: 2035675 - RNA, 19 nt, Artificial Sequence
  Description of Artificial Sequence: Synthetic oligonucleotide
  Antisense strand to SEQ ID NO: 2035674
aacaauaaaguccugacuc

SEQ ID NO: 2035676 - RNA, 19 nt, Artificial Sequence
  Description of Artificial Sequence: Synthetic oligonucleotide
  Sense strand starting at position 537 of SEQ ID NO: 1881324
aggacuuuauuguuugaga

SEQ ID NO: 2035677 - RNA, 19 nt, Artificial Sequence
  Description of Artificial Sequence: Synthetic oligonucleotide
  Antisense strand to SEQ ID NO: 2035676
ucucaaacaauaaaguccu

SEQ ID NO: 2035678 - RNA, 19 nt, Artificial Sequence
  Description of Artificial Sequence: Synthetic oligonucleotide
  Sense strand starting at position 538 of SEQ ID NO: 1881324
ggacuuuauuguuugagaa

SEQ ID NO: 2035679 - RNA, 19 nt, Artificial Sequence
  Description of Artificial Sequence: Synthetic oligonucleotide
  Antisense strand to SEQ ID NO: 2035678
uucucaaacaauaaagucc

SEQ ID NO: 2035680 - RNA, 19 nt, Artificial Sequence
  Description of Artificial Sequence: Synthetic oligonucleotide
  Sense strand starting at position 539 of SEQ ID NO: 1881324
gacuuuauuguuugagaaa

SEQ ID NO: 2035681 - RNA, 19 nt, Artificial Sequence
  Description of Artificial Sequence: Synthetic oligonucleotide
  Antisense strand to SEQ ID NO: 2035680
uuucucaaacaauaaaguc

SEQ ID NO: 2035682 - RNA, 19 nt, Artificial Sequence
  Description of Artificial Sequence: Synthetic oligonucleotide
  Sense strand starting at position 970 of SEQ ID NO: 1881324
uguucuucuugacuaggaa

SEQ ID NO: 2035683 - RNA, 19 nt, Artificial Sequence
  Description of Artificial Sequence: Synthetic oligonucleotide
  Antisense strand to SEQ ID NO: 2035682
uuccuagucaagaagaaca

SEQ ID NO: 2035684 - RNA, 19 nt, Artificial Sequence
  Description of Artificial Sequence: Synthetic oligonucleotide
  Sense strand starting at position 1220 of SEQ ID NO: 1881324
gcagcugauagacaugaca

SEQ ID NO: 2035685 - RNA, 19 nt, Artificial Sequence
  Description of Artificial Sequence: Synthetic oligonucleotide
  Antisense strand to SEQ ID NO: 2035684
ugucaugucuaucagcugc

SEQ ID NO: 2035686 - RNA, 19 nt, Artificial Sequence
  Description of Artificial Sequence: Synthetic oligonucleotide
  Sense strand starting at position 1241 of SEQ ID NO: 1881324
auauuaucauuggugggaa

SEQ ID NO: 2035687 - RNA, 19 nt, Artificial Sequence
  Description of Artificial Sequence: Synthetic oligonucleotide
  Antisense strand to SEQ ID NO: 2035686
uucccaccaaugauaauau

SEQ ID NO: 2035688 - RNA, 19 nt, Artificial Sequence
  Description of Artificial Sequence: Synthetic oligonucleotide
  Sense strand starting at position 1311 of SEQ ID NO: 1881324
caguaaagugauuaaagca

SEQ ID NO: 2035689 - RNA, 19 nt, Artificial Sequence
  Description of Artificial Sequence: Synthetic oligonucleotide
  Antisense strand to SEQ ID NO: 2035688
ugcuuuaaucacuuuacug

SEQ ID NO: 2035690 - RNA, 19 nt, Artificial Sequence
  Description of Artificial Sequence: Synthetic oligonucleotide
  Sense strand starting at position 1319 of SEQ ID NO: 1881324
ugauuaaagcaucaaugca

SEQ ID NO: 2035691 - RNA, 19 nt, Artificial Sequence
  Description of Artificial Sequence: Synthetic oligonucleotide
  Antisense strand to SEQ ID NO: 2035690
ugcauugaugcuuuaauca

SEQ ID NO: 2035692 - RNA, 19 nt, Artificial Sequence
  Description of Artificial Sequence: Synthetic oligonucleotide
  Sense strand starting at position 1499 of SEQ ID NO: 1881324
guccaaucugaugacaugu

SEQ ID NO: 2035693 - RNA, 19 nt, Artificial Sequence
  Description of Artificial Sequence: Synthetic oligonucleotide
  Antisense strand to SEQ ID NO: 2035692
acaugucaucagauuggac

SEQ ID NO: 2035694 - RNA, 19 nt, Artificial Sequence
  Description of Artificial Sequence: Synthetic oligonucleotide
  Sense strand starting at position 1524 of SEQ ID NO: 1881324
aauaguaguccuggaguag

SEQ ID NO: 2035695 - RNA, 19 nt, Artificial Sequence
  Description of Artificial Sequence: Synthetic oligonucleotide
  Antisense strand to SEQ ID NO: 2035694
cuacuccaggacuacuauu

SEQ ID NO: 2035696 - RNA, 19 nt, Artificial Sequence
  Description of Artificial Sequence: Synthetic oligonucleotide
  Sense strand starting at position 1525 of SEQ ID NO: 1881324
auaguaguccuggaguaga

SEQ ID NO: 2035697 - RNA, 19 nt, Artificial Sequence
  Description of Artificial Sequence: Synthetic oligonucleotide
  Antisense strand to SEQ ID NO: 2035696
ucuacuccaggacuacuau

SEQ ID NO: 2035698 - RNA, 19 nt, Artificial Sequence
  Description of Artificial Sequence: Synthetic oligonucleotide
  Sense strand starting at position 1628 of SEQ ID NO: 1881324
uggcucuagcguguuaaca

SEQ ID NO: 2035699 - RNA, 19 nt, Artificial Sequence
  Description of Artificial Sequence: Synthetic oligonucleotide
  Antisense strand to SEQ ID NO: 2035698
uguuaacacgcuagagcca

SEQ ID NO: 2035700 - RNA, 19 nt, Artificial Sequence
  Description of Artificial Sequence: Synthetic oligonucleotide
  Sense strand starting at position 1679 of SEQ ID NO: 1881324
cccuuuaaccagcaagguu

SEQ ID NO: 2035701 - RNA, 19 nt, Artificial Sequence
  Description of Artificial Sequence: Synthetic oligonucleotide
  Antisense strand to SEQ ID NO: 2035700
aaccuugcugguuaaaggg

SEQ ID NO: 2035702 - RNA, 19 nt, Artificial Sequence
  Description of Artificial Sequence: Synthetic oligonucleotide
  Sense strand starting at position 2328 of SEQ ID NO: 1881324
gaagcugaucugcaaggau

SEQ ID NO: 2035703 - RNA, 19 nt, Artificial Sequence
  Description of Artificial Sequence: Synthetic oligonucleotide
  Antisense strand to SEQ ID NO: 2035702
auccuugcagaucagcuuc

SEQ ID NO: 2035704 - RNA, 19 nt, Artificial Sequence
  Description of Artificial Sequence: Synthetic oligonucleotide
  Sense strand starting at position 2814 of SEQ ID NO: 1881324
caagguauggcuugaccca

SEQ ID NO: 2035705 - RNA, 19 nt, Artificial Sequence
  Description of Artificial Sequence: Synthetic oligonucleotide
  Antisense strand to SEQ ID NO: 2035704
ugggucaagccauaccuug

SEQ ID NO: 2035706 - RNA, 19 nt, Artificial Sequence
  Description of Artificial Sequence: Synthetic oligonucleotide
  Sense strand starting at position 2848 of SEQ ID NO: 1881324
cgugguaucguucugcacu

SEQ ID NO: 2035707 - RNA, 19 nt, Artificial Sequence
  Description of Artificial Sequence: Synthetic oligonucleotide
  Antisense strand to SEQ ID NO: 2035706
agugcagaacgauaccacg

SEQ ID NO: 2035708 - RNA, 19 nt, Artificial Sequence
  Description of Artificial Sequence: Synthetic oligonucleotide
  Sense strand starting at position 2860 of SEQ ID NO: 1881324
cugcacuugggaugggaaa

SEQ ID NO: 2035709 - RNA, 19 nt, Artificial Sequence
  Description of Artificial Sequence: Synthetic oligonucleotide
  Antisense strand to SEQ ID NO: 2035708
uuucccaucccaagugcag

SEQ ID NO: 2035710 - RNA, 19 nt, Artificial Sequence
  Description of Artificial Sequence: Synthetic oligonucleotide
  Sense strand starting at position 2945 of SEQ ID NO: 1881324
gugacauaccaauggaguu

SEQ ID NO: 2035711 - RNA, 19 nt, Artificial Sequence
  Description of Artificial Sequence: Synthetic oligonucleotide
  Antisense strand to SEQ ID NO: 2035710
aacuccauugguaugucac

SEQ ID NO: 2035712 - RNA, 19 nt, Artificial Sequence
  Description of Artificial Sequence: Synthetic oligonucleotide
  Sense strand starting at position 3074 of SEQ ID NO: 1881324
cagcauaaaugguccugau

SEQ ID NO: 2035713 - RNA, 19 nt, Artificial Sequence
  Description of Artificial Sequence: Synthetic oligonucleotide
  Antisense strand to SEQ ID NO: 2035712
aucaggaccauuuaugcug

SEQ ID NO: 2035714 - RNA, 19 nt, Artificial Sequence
  Description of Artificial Sequence: Synthetic oligonucleotide
  Sense strand starting at position 3144 of SEQ ID NO: 1881324
cagugauuaccaggcacaa

SEQ ID NO: 2035715 - RNA, 19 nt, Artificial Sequence
  Description of Artificial Sequence: Synthetic oligonucleotide
  Antisense strand to SEQ ID NO: 2035714
uugugccugguaaucacug

SEQ ID NO: 2035716 - RNA, 19 nt, Artificial Sequence
  Description of Artificial Sequence: Synthetic oligonucleotide
  Sense strand starting at position 3381 of SEQ ID NO: 1881324
gaggaugaucagcaugcua

SEQ ID NO: 2035717 - RNA, 19 nt, Artificial Sequence
  Description of Artificial Sequence: Synthetic oligonucleotide
  Antisense strand to SEQ ID NO: 2035716
uagcaugcugaucauccuc

SEQ ID NO: 2035718 - RNA, 19 nt, Artificial Sequence
  Description of Artificial Sequence: Synthetic oligonucleotide
  Sense strand starting at position 3383 of SEQ ID NO: 1881324
ggaugaucagcaugcuaca

SEQ ID NO: 2035719 - RNA, 19 nt, Artificial Sequence
  Description of Artificial Sequence: Synthetic oligonucleotide
  Antisense strand to SEQ ID NO: 2035718
uguagcaugcugaucaucc

SEQ ID NO: 2035720 - RNA, 19 nt, Artificial Sequence
  Description of Artificial Sequence: Synthetic oligonucleotide
  Sense strand starting at position 3403 of SEQ ID NO: 1881324
acugcuuuacaauagaugu

SEQ ID NO: 2035721 - RNA, 19 nt, Artificial Sequence
  Description of Artificial Sequence: Synthetic oligonucleotide
  Antisense strand to SEQ ID NO: 2035720
acaucuauuguaaagcagu

SEQ ID NO: 2035722 - RNA, 19 nt, Artificial Sequence
  Description of Artificial Sequence: Synthetic oligonucleotide
  Sense strand starting at position 3511 of SEQ ID NO: 1881324
ggacuugaauugguuaaau

SEQ ID NO: 2035723 - RNA, 19 nt, Artificial Sequence
  Description of Artificial Sequence: Synthetic oligonucleotide
  Antisense strand to SEQ ID NO: 2035722
auuuaaccaauucaagucc

SEQ ID NO: 2035724 - RNA, 19 nt, Artificial Sequence
  Description of Artificial Sequence: Synthetic oligonucleotide
  Sense strand starting at position 3522 of SEQ ID NO: 1881324
gguuaaauacuuuaggcuu

SEQ ID NO: 2035725 - RNA, 19 nt, Artificial Sequence
  Description of Artificial Sequence: Synthetic oligonucleotide
  Antisense strand to SEQ ID NO: 2035724
aagccuaaaguauuuaacc

SEQ ID NO: 2035726 - RNA, 19 nt, Artificial Sequence
  Description of Artificial Sequence: Synthetic oligonucleotide
  Sense strand starting at position 3629 of SEQ ID NO: 1881324
gcaguuaagacaugaaaga

SEQ ID NO: 2035727 - RNA, 19 nt, Artificial Sequence
  Description of Artificial Sequence: Synthetic oligonucleotide
  Antisense strand to SEQ ID NO: 2035726
ucuuucaugucuuaacugc

SEQ ID NO: 2035728 - RNA, 19 nt, Artificial Sequence
  Description of Artificial Sequence: Synthetic oligonucleotide
  Sense strand starting at position 3646 of SEQ ID NO: 1881324
gacucucaggugugaaauc

SEQ ID NO: 2035729 - RNA, 19 nt, Artificial Sequence
  Description of Artificial Sequence: Synthetic oligonucleotide
  Antisense strand to SEQ ID NO: 2035728
gauuucacaccugagaguc

SEQ ID NO: 2035730 - RNA, 19 nt, Artificial Sequence
  Description of Artificial Sequence: Synthetic oligonucleotide
  Sense strand starting at position 3667 of SEQ ID NO: 1881324
ugcuccgauuugucaauua

SEQ ID NO: 2035731 - RNA, 19 nt, Artificial Sequence
  Description of Artificial Sequence: Synthetic oligonucleotide
  Antisense strand to SEQ ID NO: 2035730
uaauugacaaaucggagca

SEQ ID NO: 2035732 - RNA, 19 nt, Artificial Sequence
  Description of Artificial Sequence: Synthetic oligonucleotide
  Sense strand starting at position 3733 of SEQ ID NO: 1881324
gaguguacgggugauauua

SEQ ID NO: 2035733 - RNA, 19 nt, Artificial Sequence
  Description of Artificial Sequence: Synthetic oligonucleotide
  Antisense strand to SEQ ID NO: 2035732
uaauaucacccguacacuc

SEQ ID NO: 2035734 - RNA, 19 nt, Artificial Sequence
  Description of Artificial Sequence: Synthetic oligonucleotide
  Sense strand starting at position 3798 of SEQ ID NO: 1881324
aauaaauaugccgagagug

SEQ ID NO: 2035735 - RNA, 19 nt, Artificial Sequence
  Description of Artificial Sequence: Synthetic oligonucleotide
  Antisense strand to SEQ ID NO: 2035734
cacucucggcauauuuauu

SEQ ID NO: 2035736 - RNA, 19 nt, Artificial Sequence
  Description of Artificial Sequence: Synthetic oligonucleotide
  Sense strand starting at position 3800 of SEQ ID NO: 1881324
uaaauaugccgagagugaa

SEQ ID NO: 2035737 - RNA, 19 nt, Artificial Sequence
  Description of Artificial Sequence: Synthetic oligonucleotide
  Antisense strand to SEQ ID NO: 2035736
uucacucucggcauauuua

SEQ ID NO: 2035738 - RNA, 19 nt, Artificial Sequence
  Description of Artificial Sequence: Synthetic oligonucleotide
  Sense strand starting at position 3827 of SEQ ID NO: 1881324
gccugaaugaucuaugcug

SEQ ID NO: 2035739 - RNA, 19 nt, Artificial Sequence
  Description of Artificial Sequence: Synthetic oligonucleotide
  Antisense strand to SEQ ID NO: 2035738
cagcauagaucauucaggc

SEQ ID NO: 2035740 - RNA, 19 nt, Artificial Sequence
  Description of Artificial Sequence: Synthetic oligonucleotide
  Sense strand starting at position 3849 of SEQ ID NO: 1881324
ccaggacucggugauguga

SEQ ID NO: 2035741 - RNA, 19 nt, Artificial Sequence
  Description of Artificial Sequence: Synthetic oligonucleotide
  Antisense strand to SEQ ID NO: 2035740
ucacaucaccgaguccugg

SEQ ID NO: 2035742 - RNA, 19 nt, Artificial Sequence
  Description of Artificial Sequence: Synthetic oligonucleotide
  Sense strand starting at position 3863 of SEQ ID NO: 1881324
ugugauuaggguuagguaa

SEQ ID NO: 2035743 - RNA, 19 nt, Artificial Sequence
  Description of Artificial Sequence: Synthetic oligonucleotide
  Antisense strand to SEQ ID NO: 2035742
uuaccuaacccuaaucaca

SEQ ID NO: 2035744 - RNA, 19 nt, Artificial Sequence
  Description of Artificial Sequence: Synthetic oligonucleotide
  Sense strand starting at position 3921 of SEQ ID NO: 1881324
agcaacgccuauuuguaaa

SEQ ID NO: 2035745 - RNA, 19 nt, Artificial Sequence
  Description of Artificial Sequence: Synthetic oligonucleotide
  Antisense strand to SEQ ID NO: 2035744
uuuacaaauaggcguugcu

SEQ ID NO: 2035746 - RNA, 19 nt, Artificial Sequence
  Description of Artificial Sequence: Synthetic oligonucleotide
  Sense strand starting at position 8 of SEQ ID NO: 1881325
cuuauaagccauuaaguga

SEQ ID NO: 2035747 - RNA, 19 nt, Artificial Sequence
  Description of Artificial Sequence: Synthetic oligonucleotide
  Antisense strand to SEQ ID NO: 2035746
ucacuuaauggcuuauaag

SEQ ID NO: 2035748 - RNA, 19 nt, Artificial Sequence
  Description of Artificial Sequence: Synthetic oligonucleotide
  Sense strand starting at position 23 of SEQ ID NO: 1881325
gugacaguuaaguagcaaa

SEQ ID NO: 2035749 - RNA, 19 nt, Artificial Sequence
  Description of Artificial Sequence: Synthetic oligonucleotide
  Antisense strand to SEQ ID NO: 2035748
uuugcuacuuaacugucac

SEQ ID NO: 2035750 - RNA, 19 nt, Artificial Sequence
  Description of Artificial Sequence: Synthetic oligonucleotide
  Sense strand starting at position 454 of SEQ ID NO: 1881325
auggcaaagucacuuccaa

SEQ ID NO: 2035751 - RNA, 19 nt, Artificial Sequence
  Description of Artificial Sequence: Synthetic oligonucleotide
  Antisense strand to SEQ ID NO: 2035750
uuggaagugacuuugccau

SEQ ID NO: 2035752 - RNA, 19 nt, Artificial Sequence
  Description of Artificial Sequence: Synthetic oligonucleotide
  Sense strand starting at position 591 of SEQ ID NO: 1881325
augugugacccucagcuuu

SEQ ID NO: 2035753 - RNA, 19 nt, Artificial Sequence
  Description of Artificial Sequence: Synthetic oligonucleotide
  Antisense strand to SEQ ID NO: 2035752
aaagcugagggucacacau

SEQ ID NO: 2035754 - RNA, 19 nt, Artificial Sequence
  Description of Artificial Sequence: Synthetic oligonucleotide
  Sense strand starting at position 797 of SEQ ID NO: 1881325
gccagugguucaucugaug

SEQ ID NO: 2035755 - RNA, 19 nt, Artificial Sequence
  Description of Artificial Sequence: Synthetic oligonucleotide
  Antisense strand to SEQ ID NO: 2035754
caucagaugaaccacuggc

SEQ ID NO: 2035756 - RNA, 19 nt, Artificial Sequence
  Description of Artificial Sequence: Synthetic oligonucleotide
  Sense strand starting at position 947 of SEQ ID NO: 1881325
agaaaugccucuuacucag

SEQ ID NO: 2035757 - RNA, 19 nt, Artificial Sequence
  Description of Artificial Sequence: Synthetic oligonucleotide
  Antisense strand to SEQ ID NO: 2035756
cugaguaagaggcauuucu

SEQ ID NO: 2035758 - RNA, 19 nt, Artificial Sequence
  Description of Artificial Sequence: Synthetic oligonucleotide
  Sense strand starting at position 1025 of SEQ ID NO: 1881325
acgugaagugaccaaguaa

SEQ ID NO: 2035759 - RNA, 19 nt, Artificial Sequence
  Description of Artificial Sequence: Synthetic oligonucleotide
  Antisense strand to SEQ ID NO: 2035758
uuacuuggucacuucacgu

SEQ ID NO: 2035760 - RNA, 19 nt, Artificial Sequence
  Description of Artificial Sequence: Synthetic oligonucleotide
  Sense strand starting at position 1346 of SEQ ID NO: 1881325
ccguacauccagcaugaau

SEQ ID NO: 2035761 - RNA, 19 nt, Artificial Sequence
  Description of Artificial Sequence: Synthetic oligonucleotide
  Antisense strand to SEQ ID NO: 2035760
auucaugcuggauguacgg

SEQ ID NO: 2035762 - RNA, 19 nt, Artificial Sequence
  Description of Artificial Sequence: Synthetic oligonucleotide
  Sense strand starting at position 1494 of SEQ ID NO: 1881325
gacucaaucccgugaagca

SEQ ID NO: 2035763 - RNA, 19 nt, Artificial Sequence
  Description of Artificial Sequence: Synthetic oligonucleotide
  Antisense strand to SEQ ID NO: 2035762
ugcuucacgggauugaguc

SEQ ID NO: 2035764 - RNA, 19 nt, Artificial Sequence
  Description of Artificial Sequence: Synthetic oligonucleotide
  Sense strand starting at position 1503 of SEQ ID NO: 1881325
ccgugaagcagacaugaca

SEQ ID NO: 2035765 - RNA, 19 nt, Artificial Sequence
  Description of Artificial Sequence: Synthetic oligonucleotide
  Antisense strand to SEQ ID NO: 2035764
ugucaugucugcuucacgg

SEQ ID NO: 2035766 - RNA, 19 nt, Artificial Sequence
  Description of Artificial Sequence: Synthetic oligonucleotide
  Sense strand starting at position 1858 of SEQ ID NO: 1881325
gccugacccucuguaugua

SEQ ID NO: 2035767 - RNA, 19 nt, Artificial Sequence
  Description of Artificial Sequence: Synthetic oligonucleotide
  Antisense strand to SEQ ID NO: 2035766
uacauacagagggucaggc

SEQ ID NO: 2035768 - RNA, 19 nt, Artificial Sequence
  Description of Artificial Sequence: Synthetic oligonucleotide
  Sense strand starting at position 2083 of SEQ ID NO: 1881325
uacggauucgaauagugga

SEQ ID NO: 2035769 - RNA, 19 nt, Artificial Sequence
  Description of Artificial Sequence: Synthetic oligonucleotide
  Antisense strand to SEQ ID NO: 2035768
uccacuauucgaauccgua

SEQ ID NO: 2035770 - RNA, 19 nt, Artificial Sequence
  Description of Artificial Sequence: Synthetic oligonucleotide
  Sense strand starting at position 2127 of SEQ ID NO: 1881325
gcgcuuuccgaacgaggga

SEQ ID NO: 2035771 - RNA, 19 nt, Artificial Sequence
  Description of Artificial Sequence: Synthetic oligonucleotide
  Antisense strand to SEQ ID NO: 2035770
ucccucguucggaaagcgc

SEQ ID NO: 2035772 - RNA, 19 nt, Artificial Sequence
  Description of Artificial Sequence: Synthetic oligonucleotide
  Sense strand starting at position 2191 of SEQ ID NO: 1881325
gcgguucuuacgucccgaa

SEQ ID NO: 2035773 - RNA, 19 nt, Artificial Sequence
  Description of Artificial Sequence: Synthetic oligonucleotide
  Antisense strand to SEQ ID NO: 2035772
uucgggacguaagaaccgc

SEQ ID NO: 2035774 - RNA, 19 nt, Artificial Sequence
  Description of Artificial Sequence: Synthetic oligonucleotide
  Sense strand starting at position 2192 of SEQ ID NO: 1881325
cgguucuuacgucccgaau

SEQ ID NO: 2035775 - RNA, 19 nt, Artificial Sequence
  Description of Artificial Sequence: Synthetic oligonucleotide
  Antisense strand to SEQ ID NO: 2035774
auucgggacguaagaaccg

SEQ ID NO: 2035776 - RNA, 19 nt, Artificial Sequence
  Description of Artificial Sequence: Synthetic oligonucleotide
  Sense strand starting at position 2213 of SEQ ID NO: 1881325
gaacuaauagcgcgucaaa

SEQ ID NO: 2035777 - RNA, 19 nt, Artificial Sequence
  Description of Artificial Sequence: Synthetic oligonucleotide
  Antisense strand to SEQ ID NO: 2035776
uuugacgcgcuauuaguuc

SEQ ID NO: 2035778 - RNA, 19 nt, Artificial Sequence
  Description of Artificial Sequence: Synthetic oligonucleotide
  Sense strand starting at position 2271 of SEQ ID NO: 1881325
agcugagaccaguagaucu

SEQ ID NO: 2035779 - RNA, 19 nt, Artificial Sequence
  Description of Artificial Sequence: Synthetic oligonucleotide
  Antisense strand to SEQ ID NO: 2035778
agaucuacuggucucagcu

SEQ ID NO: 2035780 - RNA, 19 nt, Artificial Sequence
  Description of Artificial Sequence: Synthetic oligonucleotide
  Sense strand starting at position 2279 of SEQ ID NO: 1881325
ccaguagaucuuuggcucu

SEQ ID NO: 2035781 - RNA, 19 nt, Artificial Sequence
  Description of Artificial Sequence: Synthetic oligonucleotide
  Antisense strand to SEQ ID NO: 2035780
agagccaaagaucuacugg

SEQ ID NO: 2035782 - RNA, 19 nt, Artificial Sequence
  Description of Artificial Sequence: Synthetic oligonucleotide
  Sense strand starting at position 2282 of SEQ ID NO: 1881325
guagaucuuuggcucuuga

SEQ ID NO: 2035783 - RNA, 19 nt, Artificial Sequence
  Description of Artificial Sequence: Synthetic oligonucleotide
  Antisense strand to SEQ ID NO: 2035782
ucaagagccaaagaucuac

SEQ ID NO: 2035784 - RNA, 19 nt, Artificial Sequence
  Description of Artificial Sequence: Synthetic oligonucleotide
  Sense strand starting at position 2333 of SEQ ID NO: 1881325
aucaaaguuccugagagcu

SEQ ID NO: 2035785 - RNA, 19 nt, Artificial Sequence
  Description of Artificial Sequence: Synthetic oligonucleotide
  Antisense strand to SEQ ID NO: 2035784
agcucucaggaacuuugau

SEQ ID NO: 2035786 - RNA, 19 nt, Artificial Sequence
  Description of Artificial Sequence: Synthetic oligonucleotide
  Sense strand starting at position 2426 of SEQ ID NO: 1881325
uugguaugagaagguguau

SEQ ID NO: 2035787 - RNA, 19 nt, Artificial Sequence
  Description of Artificial Sequence: Synthetic oligonucleotide
  Antisense strand to SEQ ID NO: 2035786
auacaccuucucauaccaa

SEQ ID NO: 2035788 - RNA, 19 nt, Artificial Sequence
  Description of Artificial Sequence: Synthetic oligonucleotide
  Sense strand starting at position 2501 of SEQ ID NO: 1881325
gacgauugaucagccagga

SEQ ID NO: 2035789 - RNA, 19 nt, Artificial Sequence
  Description of Artificial Sequence: Synthetic oligonucleotide
  Antisense strand to SEQ ID NO: 2035788
uccuggcugaucaaucguc

SEQ ID NO: 2035790 - RNA, 19 nt, Artificial Sequence
  Description of Artificial Sequence: Synthetic oligonucleotide
  Sense strand starting at position 2616 of SEQ ID NO: 1881325
cguucuggaccuuagcaau

SEQ ID NO: 2035791 - RNA, 19 nt, Artificial Sequence
  Description of Artificial Sequence: Synthetic oligonucleotide
  Antisense strand to SEQ ID NO: 2035790
auugcuaagguccagaacg

SEQ ID NO: 2035792 - RNA, 19 nt, Artificial Sequence
  Description of Artificial Sequence: Synthetic oligonucleotide
  Sense strand starting at position 2773 of SEQ ID NO: 1881325
caguguugugaagauugag

SEQ ID NO: 2035793 - RNA, 19 nt, Artificial Sequence
  Description of Artificial Sequence: Synthetic oligonucleotide
  Antisense strand to SEQ ID NO: 2035792
cucaaucuucacaacacug

SEQ ID NO: 2035794 - RNA, 19 nt, Artificial Sequence
  Description of Artificial Sequence: Synthetic oligonucleotide
  Sense strand starting at position 2819 of SEQ ID NO: 1881325
gaggguguccugcauauug

SEQ ID NO: 2035795 - RNA, 19 nt, Artificial Sequence
  Description of Artificial Sequence: Synthetic oligonucleotide
  Antisense strand to SEQ ID NO: 2035794
caauaugcaggacacccuc

SEQ ID NO: 2035796 - RNA, 19 nt, Artificial Sequence
  Description of Artificial Sequence: Synthetic oligonucleotide
  Sense strand starting at position 2982 of SEQ ID NO: 1881325
gugaaagggcagugaacua

SEQ ID NO: 2035797 - RNA, 19 nt, Artificial Sequence
  Description of Artificial Sequence: Synthetic oligonucleotide
  Antisense strand to SEQ ID NO: 2035796
uaguucacugcccuuucac

SEQ ID NO: 2035798 - RNA, 19 nt, Artificial Sequence
  Description of Artificial Sequence: Synthetic oligonucleotide
  Sense strand starting at position 3003 of SEQ ID NO: 1881325
ggucuagagaucuggguuc

SEQ ID NO: 2035799 - RNA, 19 nt, Artificial Sequence
  Description of Artificial Sequence: Synthetic oligonucleotide
  Antisense strand to SEQ ID NO: 2035798
gaacccagaucucuagacc

SEQ ID NO: 2035800 - RNA, 19 nt, Artificial Sequence
  Description of Artificial Sequence: Synthetic oligonucleotide
  Sense strand starting at position 3005 of SEQ ID NO: 1881325
ucuagagaucuggguucua

SEQ ID NO: 2035801 - RNA, 19 nt, Artificial Sequence
  Description of Artificial Sequence: Synthetic oligonucleotide
  Antisense strand to SEQ ID NO: 2035800
uagaacccagaucucuaga

SEQ ID NO: 2035802 - RNA, 19 nt, Artificial Sequence
  Description of Artificial Sequence: Synthetic oligonucleotide
  Sense strand starting at position 3067 of SEQ ID NO: 1881325
cccuuucuucgccugaguu

SEQ ID NO: 2035803 - RNA, 19 nt, Artificial Sequence
  Description of Artificial Sequence: Synthetic oligonucleotide
  Antisense strand to SEQ ID NO: 2035802
aacucaggcgaagaaaggg

SEQ ID NO: 2035804 - RNA, 19 nt, Artificial Sequence
  Description of Artificial Sequence: Synthetic oligonucleotide
  Sense strand starting at position 3069 of SEQ ID NO: 1881325
cuuucuucgccugaguucu

SEQ ID NO: 2035805 - RNA, 19 nt, Artificial Sequence
  Description of Artificial Sequence: Synthetic oligonucleotide
  Antisense strand to SEQ ID NO: 2035804
agaacucaggcgaagaaag

SEQ ID NO: 2035806 - RNA, 19 nt, Artificial Sequence
  Description of Artificial Sequence: Synthetic oligonucleotide
  Sense strand starting at position 3075 of SEQ ID NO: 1881325
ucgccugaguucucucauc

SEQ ID NO: 2035807 - RNA, 19 nt, Artificial Sequence
  Description of Artificial Sequence: Synthetic oligonucleotide
  Antisense strand to SEQ ID NO: 2035806
gaugagagaacucaggcga

SEQ ID NO: 2035808 - RNA, 19 nt, Artificial Sequence
  Description of Artificial Sequence: Synthetic oligonucleotide
  Sense strand starting at position 3080 of SEQ ID NO: 1881325
ugaguucucucaucuguac

SEQ ID NO: 2035809 - RNA, 19 nt, Artificial Sequence
  Description of Artificial Sequence: Synthetic oligonucleotide
  Antisense strand to SEQ ID NO: 2035808
guacagaugagagaacuca

SEQ ID NO: 2035810 - RNA, 19 nt, Artificial Sequence
  Description of Artificial Sequence: Synthetic oligonucleotide
  Sense strand starting at position 3083 of SEQ ID NO: 1881325
guucucucaucuguacaaa

SEQ ID NO: 2035811 - RNA, 19 nt, Artificial Sequence
  Description of Artificial Sequence: Synthetic oligonucleotide
  Antisense strand to SEQ ID NO: 2035810
uuuguacagaugagagaac

SEQ ID NO: 2035812 - RNA, 19 nt, Artificial Sequence
  Description of Artificial Sequence: Synthetic oligonucleotide
  Sense strand starting at position 3132 of SEQ ID NO: 1881325
ucucaaucugauggccaau

SEQ ID NO: 2035813 - RNA, 19 nt, Artificial Sequence
  Description of Artificial Sequence: Synthetic oligonucleotide
  Antisense strand to SEQ ID NO: 2035812
auuggccaucagauugaga

SEQ ID NO: 2035814 - RNA, 19 nt, Artificial Sequence
  Description of Artificial Sequence: Synthetic oligonucleotide
  Sense strand starting at position 3198 of SEQ ID NO: 1881325
uuguuuacugauggagaca

SEQ ID NO: 2035815 - RNA, 19 nt, Artificial Sequence
  Description of Artificial Sequence: Synthetic oligonucleotide
  Antisense strand to SEQ ID NO: 2035814
ugucuccaucaguaaacaa

SEQ ID NO: 2035816 - RNA, 19 nt, Artificial Sequence
  Description of Artificial Sequence: Synthetic oligonucleotide
  Sense strand starting at position 3218 of SEQ ID NO: 1881325
ggaagaggcuuccuaaccu

SEQ ID NO: 2035817 - RNA, 19 nt, Artificial Sequence
  Description of Artificial Sequence: Synthetic oligonucleotide
  Antisense strand to SEQ ID NO: 2035816
agguuaggaagccucuucc

SEQ ID NO: 2035818 - RNA, 19 nt, Artificial Sequence
  Description of Artificial Sequence: Synthetic oligonucleotide
  Sense strand starting at position 3304 of SEQ ID NO: 1881325
ccaggacuuugggaguaaa

SEQ ID NO: 2035819 - RNA, 19 nt, Artificial Sequence
  Description of Artificial Sequence: Synthetic oligonucleotide
  Antisense strand to SEQ ID NO: 2035818
uuuacucccaaaguccugg

SEQ ID NO: 2035820 - RNA, 19 nt, Artificial Sequence
  Description of Artificial Sequence: Synthetic oligonucleotide
  Sense strand starting at position 3614 of SEQ ID NO: 1881325
ggugucgcucgccuguaau

SEQ ID NO: 2035821 - RNA, 19 nt, Artificial Sequence
  Description of Artificial Sequence: Synthetic oligonucleotide
  Antisense strand to SEQ ID NO: 2035820
auuacaggcgagcgacacc

SEQ ID NO: 2035822 - RNA, 19 nt, Artificial Sequence
  Description of Artificial Sequence: Synthetic oligonucleotide
  Sense strand starting at position 3834 of SEQ ID NO: 1881325
guggccucaacuuguaagu

SEQ ID NO: 2035823 - RNA, 19 nt, Artificial Sequence
  Description of Artificial Sequence: Synthetic oligonucleotide
  Antisense strand to SEQ ID NO: 2035822
acuuacaaguugaggccac

SEQ ID NO: 2035824 - RNA, 19 nt, Artificial Sequence
  Description of Artificial Sequence: Synthetic oligonucleotide
  Sense strand starting at position 3844 of SEQ ID NO: 1881325
cuuguaaguuaauucugga

SEQ ID NO: 2035825 - RNA, 19 nt, Artificial Sequence
  Description of Artificial Sequence: Synthetic oligonucleotide
  Antisense strand to SEQ ID NO: 2035824
uccagaauuaacuuacaag

SEQ ID NO: 2035826 - RNA, 19 nt, Artificial Sequence
  Description of Artificial Sequence: Synthetic oligonucleotide
  Sense strand starting at position 11 of SEQ ID NO: 1881326
uagcgaaacuugucuuaaa

SEQ ID NO: 2035827 - RNA, 19 nt, Artificial Sequence
  Description of Artificial Sequence: Synthetic oligonucleotide
  Antisense strand to SEQ ID NO: 2035826
uuuaagacaaguuucgcua

SEQ ID NO: 2035828 - RNA, 19 nt, Artificial Sequence
  Description of Artificial Sequence: Synthetic oligonucleotide
  Sense strand starting at position 40 of SEQ ID NO: 1881326
aagagucuccuggaucagu

SEQ ID NO: 2035829 - RNA, 19 nt, Artificial Sequence
  Description of Artificial Sequence: Synthetic oligonucleotide
  Antisense strand to SEQ ID NO: 2035828
acugauccaggagacucuu

SEQ ID NO: 2035830 - RNA, 19 nt, Artificial Sequence
  Description of Artificial Sequence: Synthetic oligonucleotide
  Sense strand starting at position 43 of SEQ ID NO: 1881326
agucuccuggaucaguuaa

SEQ ID NO: 2035831 - RNA, 19 nt, Artificial Sequence
  Description of Artificial Sequence: Synthetic oligonucleotide
  Antisense strand to SEQ ID NO: 2035830
uuaacugauccaggagacu

SEQ ID NO: 2035832 - RNA, 19 nt, Artificial Sequence
  Description of Artificial Sequence: Synthetic oligonucleotide
  Sense strand starting at position 419 of SEQ ID NO: 1881326
gugggucaugucuaauauc

SEQ ID NO: 2035833 - RNA, 19 nt, Artificial Sequence
  Description of Artificial Sequence: Synthetic oligonucleotide
  Antisense strand to SEQ ID NO: 2035832
gauauuagacaugacccac

SEQ ID NO: 2035834 - RNA, 19 nt, Artificial Sequence
  Description of Artificial Sequence: Synthetic oligonucleotide
  Sense strand starting at position 428 of SEQ ID NO: 1881326
gucuaauaucaaggucuuu

SEQ ID NO: 2035835 - RNA, 19 nt, Artificial Sequence
  Description of Artificial Sequence: Synthetic oligonucleotide
  Antisense strand to SEQ ID NO: 2035834
aaagaccuugauauuagac

SEQ ID NO: 2035836 - RNA, 19 nt, Artificial Sequence
  Description of Artificial Sequence: Synthetic oligonucleotide
  Sense strand starting at position 470 of SEQ ID NO: 1881326
ugaauccaauuguuguaaa

SEQ ID NO: 2035837 - RNA, 19 nt, Artificial Sequence
  Description of Artificial Sequence: Synthetic oligonucleotide
  Antisense strand to SEQ ID NO: 2035836
uuuacaacaauuggauuca

SEQ ID NO: 2035838 - RNA, 19 nt, Artificial Sequence
  Description of Artificial Sequence: Synthetic oligonucleotide
  Sense strand starting at position 527 of SEQ ID NO: 1881326
gagcauaaacugcgaaauc

SEQ ID NO: 2035839 - RNA, 19 nt, Artificial Sequence
  Description of Artificial Sequence: Synthetic oligonucleotide
  Antisense strand to SEQ ID NO: 2035838
gauuucgcaguuuaugcuc

SEQ ID NO: 2035840 - RNA, 19 nt, Artificial Sequence
  Description of Artificial Sequence: Synthetic oligonucleotide
  Sense strand starting at position 538 of SEQ ID NO: 1881326
gcgaaaucucuugauucug

SEQ ID NO: 2035841 - RNA, 19 nt, Artificial Sequence
  Description of Artificial Sequence: Synthetic oligonucleotide
  Antisense strand to SEQ ID NO: 2035840
cagaaucaagagauuucgc

SEQ ID NO: 2035842 - RNA, 19 nt, Artificial Sequence
  Description of Artificial Sequence: Synthetic oligonucleotide
  Sense strand starting at position 540 of SEQ ID NO: 1881326
gaaaucucuugauucuggu

SEQ ID NO: 2035843 - RNA, 19 nt, Artificial Sequence
  Description of Artificial Sequence: Synthetic oligonucleotide
  Antisense strand to SEQ ID NO: 2035842
accagaaucaagagauuuc

SEQ ID NO: 2035844 - RNA, 19 nt, Artificial Sequence
  Description of Artificial Sequence: Synthetic oligonucleotide
  Sense strand starting at position 549 of SEQ ID NO: 1881326
ugauucugguauguuuaca

SEQ ID NO: 2035845 - RNA, 19 nt, Artificial Sequence
  Description of Artificial Sequence: Synthetic oligonucleotide
  Antisense strand to SEQ ID NO: 2035844
uguaaacauaccagaauca

SEQ ID NO: 2035846 - RNA, 19 nt, Artificial Sequence
  Description of Artificial Sequence: Synthetic oligonucleotide
  Sense strand starting at position 774 of SEQ ID NO: 1881326
uggucugaguucuuagaac

SEQ ID NO: 2035847 - RNA, 19 nt, Artificial Sequence
  Description of Artificial Sequence: Synthetic oligonucleotide
  Antisense strand to SEQ ID NO: 2035846
guucuaagaacucagacca

SEQ ID NO: 2035848 - RNA, 19 nt, Artificial Sequence
  Description of Artificial Sequence: Synthetic oligonucleotide
  Sense strand starting at position 809 of SEQ ID NO: 1881326
agauuaagcuguucugaaa

SEQ ID NO: 2035849 - RNA, 19 nt, Artificial Sequence
  Description of Artificial Sequence: Synthetic oligonucleotide
  Antisense strand to SEQ ID NO: 2035848
uuucagaacagcuuaaucu

SEQ ID NO: 2035850 - RNA, 19 nt, Artificial Sequence
  Description of Artificial Sequence: Synthetic oligonucleotide
  Sense strand starting at position 875 of SEQ ID NO: 1881326
acauauuuguaagaggguu

SEQ ID NO: 2035851 - RNA, 19 nt, Artificial Sequence
  Description of Artificial Sequence: Synthetic oligonucleotide
  Antisense strand to SEQ ID NO: 2035850
aacccucuuacaaauaugu

SEQ ID NO: 2035852 - RNA, 19 nt, Artificial Sequence
  Description of Artificial Sequence: Synthetic oligonucleotide
  Sense strand starting at position 883 of SEQ ID NO: 1881326
guaagaggguucuccacaa

SEQ ID NO: 2035853 - RNA, 19 nt, Artificial Sequence
  Description of Artificial Sequence: Synthetic oligonucleotide
  Antisense strand to SEQ ID NO: 2035852
uuguggagaacccucuuac

SEQ ID NO: 2035854 - RNA, 19 nt, Artificial Sequence
  Description of Artificial Sequence: Synthetic oligonucleotide
  Sense strand starting at position 921 of SEQ ID NO: 1881326
acaguaucuucuccaggaa

SEQ ID NO: 2035855 - RNA, 19 nt, Artificial Sequence
  Description of Artificial Sequence: Synthetic oligonucleotide
  Antisense strand to SEQ ID NO: 2035854
uuccuggagaagauacugu

SEQ ID NO: 2035856 - RNA, 19 nt, Artificial Sequence
  Description of Artificial Sequence: Synthetic oligonucleotide
  Sense strand starting at position 924 of SEQ ID NO: 1881326
guaucuucuccaggaaaug

SEQ ID NO: 2035857 - RNA, 19 nt, Artificial Sequence
  Description of Artificial Sequence: Synthetic oligonucleotide
  Antisense strand to SEQ ID NO: 2035856
cauuuccuggagaagauac

SEQ ID NO: 2035858 - RNA, 19 nt, Artificial Sequence
  Description of Artificial Sequence: Synthetic oligonucleotide
  Sense strand starting at position 1231 of SEQ ID NO: 1881326
gguggugaccaagacuauu

SEQ ID NO: 2035859 - RNA, 19 nt, Artificial Sequence
  Description of Artificial Sequence: Synthetic oligonucleotide
  Antisense strand to SEQ ID NO: 2035858
aauagucuuggucaccacc

SEQ ID NO: 2035860 - RNA, 19 nt, Artificial Sequence
  Description of Artificial Sequence: Synthetic oligonucleotide
  Sense strand starting at position 2172 of SEQ ID NO: 1881326
acagauugugcagggauau

SEQ ID NO: 2035861 - RNA, 19 nt, Artificial Sequence
  Description of Artificial Sequence: Synthetic oligonucleotide
  Antisense strand to SEQ ID NO: 2035860
auaucccugcacaaucugu

SEQ ID NO: 2035862 - RNA, 19 nt, Artificial Sequence
  Description of Artificial Sequence: Synthetic oligonucleotide
  Sense strand starting at position 2301 of SEQ ID NO: 1881326
uguugcuaucaccacauua

SEQ ID NO: 2035863 - RNA, 19 nt, Artificial Sequence
  Description of Artificial Sequence: Synthetic oligonucleotide
  Antisense strand to SEQ ID NO: 2035862
uaauguggugauagcaaca

SEQ ID NO: 2035864 - RNA, 19 nt, Artificial Sequence
  Description of Artificial Sequence: Synthetic oligonucleotide
  Sense strand starting at position 2354 of SEQ ID NO: 1881326
gcacaauuauuuguugagu

SEQ ID NO: 2035865 - RNA, 19 nt, Artificial Sequence
  Description of Artificial Sequence: Synthetic oligonucleotide
  Antisense strand to SEQ ID NO: 2035864
acucaacaaauaauugugc

SEQ ID NO: 2035866 - RNA, 19 nt, Artificial Sequence
  Description of Artificial Sequence: Synthetic oligonucleotide
  Sense strand starting at position 2482 of SEQ ID NO: 1881326
uuauguaggaaauguguaa

SEQ ID NO: 2035867 - RNA, 19 nt, Artificial Sequence
  Description of Artificial Sequence: Synthetic oligonucleotide
  Antisense strand to SEQ ID NO: 2035866
uuacacauuuccuacauaa

SEQ ID NO: 2035868 - RNA, 19 nt, Artificial Sequence
  Description of Artificial Sequence: Synthetic oligonucleotide
  Sense strand starting at position 2616 of SEQ ID NO: 1881326
agagauuaauguuugcuuu

SEQ ID NO: 2035869 - RNA, 19 nt, Artificial Sequence
  Description of Artificial Sequence: Synthetic oligonucleotide
  Antisense strand to SEQ ID NO: 2035868
aaagcaaacauuaaucucu

SEQ ID NO: 2035870 - RNA, 19 nt, Artificial Sequence
  Description of Artificial Sequence: Synthetic oligonucleotide
  Sense strand starting at position 2679 of SEQ ID NO: 1881326
guaguaaccucauuacagg

SEQ ID NO: 2035871 - RNA, 19 nt, Artificial Sequence
  Description of Artificial Sequence: Synthetic oligonucleotide
  Antisense strand to SEQ ID NO: 2035870
ccuguaaugagguuacuac

SEQ ID NO: 2035872 - RNA, 19 nt, Artificial Sequence
  Description of Artificial Sequence: Synthetic oligonucleotide
  Sense strand starting at position 2687 of SEQ ID NO: 1881326
cucauuacagguuaucauu

SEQ ID NO: 2035873 - RNA, 19 nt, Artificial Sequence
  Description of Artificial Sequence: Synthetic oligonucleotide
  Antisense strand to SEQ ID NO: 2035872
aaugauaaccuguaaugag

SEQ ID NO: 2035874 - RNA, 19 nt, Artificial Sequence
  Description of Artificial Sequence: Synthetic oligonucleotide
  Sense strand starting at position 2787 of SEQ ID NO: 1881326
cucuaaauauuguuaggca

SEQ ID NO: 2035875 - RNA, 19 nt, Artificial Sequence
  Description of Artificial Sequence: Synthetic oligonucleotide
  Antisense strand to SEQ ID NO: 2035874
ugccuaacaauauuuagag

SEQ ID NO: 2035876 - RNA, 19 nt, Artificial Sequence
  Description of Artificial Sequence: Synthetic oligonucleotide
  Sense strand starting at position 2933 of SEQ ID NO: 1881326
caguacauuugagcuaguu

SEQ ID NO: 2035877 - RNA, 19 nt, Artificial Sequence
  Description of Artificial Sequence: Synthetic oligonucleotide
  Antisense strand to SEQ ID NO: 2035876
aacuagcucaaauguacug

SEQ ID NO: 2035878 - RNA, 19 nt, Artificial Sequence
  Description of Artificial Sequence: Synthetic oligonucleotide
  Sense strand starting at position 3007 of SEQ ID NO: 1881326
agaucacaucguuauuaua

SEQ ID NO: 2035879 - RNA, 19 nt, Artificial Sequence
  Description of Artificial Sequence: Synthetic oligonucleotide
  Antisense strand to SEQ ID NO: 2035878
uauaauaacgaugugaucu

SEQ ID NO: 2035880 - RNA, 19 nt, Artificial Sequence
  Description of Artificial Sequence: Synthetic oligonucleotide
  Sense strand starting at position 3052 of SEQ ID NO: 1881326
ucacauguguuuccaagaa

SEQ ID NO: 2035881 - RNA, 19 nt, Artificial Sequence
  Description of Artificial Sequence: Synthetic oligonucleotide
  Antisense strand to SEQ ID NO: 2035880
uucuuggaaacacauguga

SEQ ID NO: 2035882 - RNA, 19 nt, Artificial Sequence
  Description of Artificial Sequence: Synthetic oligonucleotide
  Sense strand starting at position 3309 of SEQ ID NO: 1881326
gaugcaaaugcguauuugu

SEQ ID NO: 2035883 - RNA, 19 nt, Artificial Sequence
  Description of Artificial Sequence: Synthetic oligonucleotide
  Antisense strand to SEQ ID NO: 2035882
acaaauacgcauuugcauc

SEQ ID NO: 2035884 - RNA, 19 nt, Artificial Sequence
  Description of Artificial Sequence: Synthetic oligonucleotide
  Sense strand starting at position 3312 of SEQ ID NO: 1881326
gcaaaugcguauuuguuga

SEQ ID NO: 2035885 - RNA, 19 nt, Artificial Sequence
  Description of Artificial Sequence: Synthetic oligonucleotide
  Antisense strand to SEQ ID NO: 2035884
ucaacaaauacgcauuugc

SEQ ID NO: 2035886 - RNA, 19 nt, Artificial Sequence
  Description of Artificial Sequence: Synthetic oligonucleotide
  Sense strand starting at position 3317 of SEQ ID NO: 1881326
ugcguauuuguugaguggu

SEQ ID NO: 2035887 - RNA, 19 nt, Artificial Sequence
  Description of Artificial Sequence: Synthetic oligonucleotide
  Antisense strand to SEQ ID NO: 2035886
accacucaacaaauacgca

SEQ ID NO: 2035888 - RNA, 19 nt, Artificial Sequence
  Description of Artificial Sequence: Synthetic oligonucleotide
  Sense strand starting at position 3486 of SEQ ID NO: 1881326
ucaugagagaggugaaguu

SEQ ID NO: 2035889 - RNA, 19 nt, Artificial Sequence
  Description of Artificial Sequence: Synthetic oligonucleotide
  Antisense strand to SEQ ID NO: 2035888
aacuucaccucucucauga

SEQ ID NO: 2035890 - RNA, 19 nt, Artificial Sequence
  Description of Artificial Sequence: Synthetic oligonucleotide
  Sense strand starting at position 3683 of SEQ ID NO: 1881326
ccacacaucugccuagaga

SEQ ID NO: 2035891 - RNA, 19 nt, Artificial Sequence
  Description of Artificial Sequence: Synthetic oligonucleotide
  Antisense strand to SEQ ID NO: 2035890
ucucuaggcagaugugugg

SEQ ID NO: 2035892 - RNA, 19 nt, Artificial Sequence
  Description of Artificial Sequence: Synthetic oligonucleotide
  Sense strand starting at position 3694 of SEQ ID NO: 1881326
ccuagagauggcuguaaau

SEQ ID NO: 2035893 - RNA, 19 nt, Artificial Sequence
  Description of Artificial Sequence: Synthetic oligonucleotide
  Antisense strand to SEQ ID NO: 2035892
auuuacagccaucucuagg

SEQ ID NO: 2035894 - RNA, 19 nt, Artificial Sequence
  Description of Artificial Sequence: Synthetic oligonucleotide
  Sense strand starting at position 3771 of SEQ ID NO: 1881326
uggugagaaguuugaaagu

SEQ ID NO: 2035895 - RNA, 19 nt, Artificial Sequence
  Description of Artificial Sequence: Synthetic oligonucleotide
  Antisense strand to SEQ ID NO: 2035894
acuuucaaacuucucacca

SEQ ID NO: 2035896 - RNA, 19 nt, Artificial Sequence
  Description of Artificial Sequence: Synthetic oligonucleotide
  Sense strand starting at position 3819 of SEQ ID NO: 1881326
aaugguuucgcuggaggaa

SEQ ID NO: 2035897 - RNA, 19 nt, Artificial Sequence
  Description of Artificial Sequence: Synthetic oligonucleotide
  Antisense strand to SEQ ID NO: 2035896
uuccuccagcgaaaccauu

SEQ ID NO: 2035898 - RNA, 19 nt, Artificial Sequence
  Description of Artificial Sequence: Synthetic oligonucleotide
  Sense strand starting at position 3820 of SEQ ID NO: 1881326
augguuucgcuggaggaau

SEQ ID NO: 2035899 - RNA, 19 nt, Artificial Sequence
  Description of Artificial Sequence: Synthetic oligonucleotide
  Antisense strand to SEQ ID NO: 2035898
auuccuccagcgaaaccau

SEQ ID NO: 2035900 - RNA, 19 nt, Artificial Sequence
  Description of Artificial Sequence: Synthetic oligonucleotide
  Sense strand starting at position 3849 of SEQ ID NO: 1881326
cuugcugaggcaugaaauc

SEQ ID NO: 2035901 - RNA, 19 nt, Artificial Sequence
  Description of Artificial Sequence: Synthetic oligonucleotide
  Antisense strand to SEQ ID NO: 2035900
gauuucaugccucagcaag

SEQ ID NO: 2035902 - RNA, 19 nt, Artificial Sequence
  Description of Artificial Sequence: Synthetic oligonucleotide
  Sense strand starting at position 3875 of SEQ ID NO: 1881326
aggugucugcugcaaugaa

SEQ ID NO: 2035903 - RNA, 19 nt, Artificial Sequence
  Description of Artificial Sequence: Synthetic oligonucleotide
  Antisense strand to SEQ ID NO: 2035902
uucauugcagcagacaccu

SEQ ID NO: 2035904 - RNA, 19 nt, Artificial Sequence
  Description of Artificial Sequence: Synthetic oligonucleotide
  Sense strand starting at position 3973 of SEQ ID NO: 1881326
acugcaugucaggagaacu

SEQ ID NO: 2035905 - RNA, 19 nt, Artificial Sequence
  Description of Artificial Sequence: Synthetic oligonucleotide
  Antisense strand to SEQ ID NO: 2035904
aguucuccugacaugcagu

SEQ ID NO: 2035906 - RNA, 19 nt, Artificial Sequence
  Description of Artificial Sequence: Synthetic oligonucleotide
  Sense strand starting at position 207 of SEQ ID NO: 1881327
cuuauuauguccuccauga

SEQ ID NO: 2035907 - RNA, 19 nt, Artificial Sequence
  Description of Artificial Sequence: Synthetic oligonucleotide
  Antisense strand to SEQ ID NO: 2035906
ucauggaggacauaauaag

SEQ ID NO: 2035908 - RNA, 19 nt, Artificial Sequence
  Description of Artificial Sequence: Synthetic oligonucleotide
  Sense strand starting at position 211 of SEQ ID NO: 1881327
uuauguccuccaugacauu

SEQ ID NO: 2035909 - RNA, 19 nt, Artificial Sequence
  Description of Artificial Sequence: Synthetic oligonucleotide
  Antisense strand to SEQ ID NO: 2035908
aaugucauggaggacauaa

SEQ ID NO: 2035910 - RNA, 19 nt, Artificial Sequence
  Description of Artificial Sequence: Synthetic oligonucleotide
  Sense strand starting at position 301 of SEQ ID NO: 1881327
cuugaucuggccuagaacu

SEQ ID NO: 2035911 - RNA, 19 nt, Artificial Sequence
  Description of Artificial Sequence: Synthetic oligonucleotide
  Antisense strand to SEQ ID NO: 2035910
aguucuaggccagaucaag

SEQ ID NO: 2035912 - RNA, 19 nt, Artificial Sequence
  Description of Artificial Sequence: Synthetic oligonucleotide
  Sense strand starting at position 312 of SEQ ID NO: 1881327
cuagaacucugguuggcaa

SEQ ID NO: 2035913 - RNA, 19 nt, Artificial Sequence
  Description of Artificial Sequence: Synthetic oligonucleotide
  Antisense strand to SEQ ID NO: 2035912
uugccaaccagaguucuag

SEQ ID NO: 2035914 - RNA, 19 nt, Artificial Sequence
  Description of Artificial Sequence: Synthetic oligonucleotide
  Sense strand starting at position 407 of SEQ ID NO: 1881327
ggaauacuguccucaccag

SEQ ID NO: 2035915 - RNA, 19 nt, Artificial Sequence
  Description of Artificial Sequence: Synthetic oligonucleotide
  Antisense strand to SEQ ID NO: 2035914
cuggugaggacaguauucc

SEQ ID NO: 2035916 - RNA, 19 nt, Artificial Sequence
  Description of Artificial Sequence: Synthetic oligonucleotide
  Sense strand starting at position 554 of SEQ ID NO: 1881327
auaaccaugccuuagagua

SEQ ID NO: 2035917 - RNA, 19 nt, Artificial Sequence
  Description of Artificial Sequence: Synthetic oligonucleotide
  Antisense strand to SEQ ID NO: 2035916
uacucuaaggcaugguuau

SEQ ID NO: 2035918 - RNA, 19 nt, Artificial Sequence
  Description of Artificial Sequence: Synthetic oligonucleotide
  Sense strand starting at position 597 of SEQ ID NO: 1881327
gguucauguggugaaucua

SEQ ID NO: 2035919 - RNA, 19 nt, Artificial Sequence
  Description of Artificial Sequence: Synthetic oligonucleotide
  Antisense strand to SEQ ID NO: 2035918
uagauucaccacaugaacc

SEQ ID NO: 2035920 - RNA, 19 nt, Artificial Sequence
  Description of Artificial Sequence: Synthetic oligonucleotide
  Sense strand starting at position 745 of SEQ ID NO: 1881327
cugaacagcucugugauca

SEQ ID NO: 2035921 - RNA, 19 nt, Artificial Sequence
  Description of Artificial Sequence: Synthetic oligonucleotide
  Antisense strand to SEQ ID NO: 2035920
ugaucacagagcuguucag

SEQ ID NO: 2035922 - RNA, 19 nt, Artificial Sequence
  Description of Artificial Sequence: Synthetic oligonucleotide
  Sense strand starting at position 746 of SEQ ID NO: 1881327
ugaacagcucugugaucau

SEQ ID NO: 2035923 - RNA, 19 nt, Artificial Sequence
  Description of Artificial Sequence: Synthetic oligonucleotide
  Antisense strand to SEQ ID NO: 2035922
augaucacagagcuguuca

SEQ ID NO: 2035924 - RNA, 19 nt, Artificial Sequence
  Description of Artificial Sequence: Synthetic oligonucleotide
  Sense strand starting at position 784 of SEQ ID NO: 1881327
guggacaaauccuucuguu

SEQ ID NO: 2035925 - RNA, 19 nt, Artificial Sequence
  Description of Artificial Sequence: Synthetic oligonucleotide
  Antisense strand to SEQ ID NO: 2035924
aacagaaggauuuguccac

SEQ ID NO: 2035926 - RNA, 19 nt, Artificial Sequence
  Description of Artificial Sequence: Synthetic oligonucleotide
  Sense strand starting at position 847 of SEQ ID NO: 1881327
ucucgaauuucucaaagaa

SEQ ID NO: 2035927 - RNA, 19 nt, Artificial Sequence
  Description of Artificial Sequence: Synthetic oligonucleotide
  Antisense strand to SEQ ID NO: 2035926
uucuuugagaaauucgaga

SEQ ID NO: 2035928 - RNA, 19 nt, Artificial Sequence
  Description of Artificial Sequence: Synthetic oligonucleotide
  Sense strand starting at position 893 of SEQ ID NO: 1881327
cuuuguucuccuuagaagu

SEQ ID NO: 2035929 - RNA, 19 nt, Artificial Sequence
  Description of Artificial Sequence: Synthetic oligonucleotide
  Antisense strand to SEQ ID NO: 2035928
acuucuaaggagaacaaag

SEQ ID NO: 2035930 - RNA, 19 nt, Artificial Sequence
  Description of Artificial Sequence: Synthetic oligonucleotide
  Sense strand starting at position 1156 of SEQ ID NO: 1881327
auuguaauuucugcagcaa

SEQ ID NO: 2035931 - RNA, 19 nt, Artificial Sequence
  Description of Artificial Sequence: Synthetic oligonucleotide
  Antisense strand to SEQ ID NO: 2035930
uugcugcagaaauuacaau

SEQ ID NO: 2035932 - RNA, 19 nt, Artificial Sequence
  Description of Artificial Sequence: Synthetic oligonucleotide
  Sense strand starting at position 1225 of SEQ ID NO: 1881327
ugccauuauuugguuguga

SEQ ID NO: 2035933 - RNA, 19 nt, Artificial Sequence
  Description of Artificial Sequence: Synthetic oligonucleotide
  Antisense strand to SEQ ID NO: 2035932
ucacaaccaaauaauggca

SEQ ID NO: 2035934 - RNA, 19 nt, Artificial Sequence
  Description of Artificial Sequence: Synthetic oligonucleotide
  Sense strand starting at position 1226 of SEQ ID NO: 1881327
gccauuauuugguugugag

SEQ ID NO: 2035935 - RNA, 19 nt, Artificial Sequence
  Description of Artificial Sequence: Synthetic oligonucleotide
  Antisense strand to SEQ ID NO: 2035934
cucacaaccaaauaauggc

SEQ ID NO: 2035936 - RNA, 19 nt, Artificial Sequence
  Description of Artificial Sequence: Synthetic oligonucleotide
  Sense strand starting at position 1227 of SEQ ID NO: 1881327
ccauuauuugguugugagu

SEQ ID NO: 2035937 - RNA, 19 nt, Artificial Sequence
  Description of Artificial Sequence: Synthetic oligonucleotide
  Antisense strand to SEQ ID NO: 2035936
acucacaaccaaauaaugg

SEQ ID NO: 2035938 - RNA, 19 nt, Artificial Sequence
  Description of Artificial Sequence: Synthetic oligonucleotide
  Sense strand starting at position 1289 of SEQ ID NO: 1881327
auucgaaaggcaugggaau

SEQ ID NO: 2035939 - RNA, 19 nt, Artificial Sequence
  Description of Artificial Sequence: Synthetic oligonucleotide
  Antisense strand to SEQ ID NO: 2035938
auucccaugccuuucgaau

SEQ ID NO: 2035940 - RNA, 19 nt, Artificial Sequence
  Description of Artificial Sequence: Synthetic oligonucleotide
  Sense strand starting at position 1290 of SEQ ID NO: 1881327
uucgaaaggcaugggaaua

SEQ ID NO: 2035941 - RNA, 19 nt, Artificial Sequence
  Description of Artificial Sequence: Synthetic oligonucleotide
  Antisense strand to SEQ ID NO: 2035940
uauucccaugccuuucgaa

SEQ ID NO: 2035942 - RNA, 19 nt, Artificial Sequence
  Description of Artificial Sequence: Synthetic oligonucleotide
  Sense strand starting at position 1515 of SEQ ID NO: 1881327
aucaaagagguuugucauc

SEQ ID NO: 2035943 - RNA, 19 nt, Artificial Sequence
  Description of Artificial Sequence: Synthetic oligonucleotide
  Antisense strand to SEQ ID NO: 2035942
gaugacaaaccucuuugau

SEQ ID NO: 2035944 - RNA, 19 nt, Artificial Sequence
  Description of Artificial Sequence: Synthetic oligonucleotide
  Sense strand starting at position 1517 of SEQ ID NO: 1881327
caaagagguuugucaucuu

SEQ ID NO: 2035945 - RNA, 19 nt, Artificial Sequence
  Description of Artificial Sequence: Synthetic oligonucleotide
  Antisense strand to SEQ ID NO: 2035944
aagaugacaaaccucuuug

SEQ ID NO: 2035946 - RNA, 19 nt, Artificial Sequence
  Description of Artificial Sequence: Synthetic oligonucleotide
  Sense strand starting at position 1598 of SEQ ID NO: 1881327
aaguuccaccuguggaaau

SEQ ID NO: 2035947 - RNA, 19 nt, Artificial Sequence
  Description of Artificial Sequence: Synthetic oligonucleotide
  Antisense strand to SEQ ID NO: 2035946
auuuccacagguggaacuu

SEQ ID NO: 2035948 - RNA, 19 nt, Artificial Sequence
  Description of Artificial Sequence: Synthetic oligonucleotide
  Sense strand starting at position 1600 of SEQ ID NO: 1881327
guuccaccuguggaaauua

SEQ ID NO: 2035949 - RNA, 19 nt, Artificial Sequence
  Description of Artificial Sequence: Synthetic oligonucleotide
  Antisense strand to SEQ ID NO: 2035948
uaauuuccacagguggaac

SEQ ID NO: 2035950 - RNA, 19 nt, Artificial Sequence
  Description of Artificial Sequence: Synthetic oligonucleotide
  Sense strand starting at position 1610 of SEQ ID NO: 1881327
uggaaauuaguguguuaaa

SEQ ID NO: 2035951 - RNA, 19 nt, Artificial Sequence
  Description of Artificial Sequence: Synthetic oligonucleotide
  Antisense strand to SEQ ID NO: 2035950
uuuaacacacuaauuucca

SEQ ID NO: 2035952 - RNA, 19 nt, Artificial Sequence
  Description of Artificial Sequence: Synthetic oligonucleotide
  Sense strand starting at position 1611 of SEQ ID NO: 1881327
ggaaauuaguguguuaaau

SEQ ID NO: 2035953 - RNA, 19 nt, Artificial Sequence
  Description of Artificial Sequence: Synthetic oligonucleotide
  Antisense strand to SEQ ID NO: 2035952
auuuaacacacuaauuucc

SEQ ID NO: 2035954 - RNA, 19 nt, Artificial Sequence
  Description of Artificial Sequence: Synthetic oligonucleotide
  Sense strand starting at position 2193 of SEQ ID NO: 1881327
guguuaacuguuuaucuga

SEQ ID NO: 2035955 - RNA, 19 nt, Artificial Sequence
  Description of Artificial Sequence: Synthetic oligonucleotide
  Antisense strand to SEQ ID NO: 2035954
ucagauaaacaguuaacac

SEQ ID NO: 2035956 - RNA, 19 nt, Artificial Sequence
  Description of Artificial Sequence: Synthetic oligonucleotide
  Sense strand starting at position 2195 of SEQ ID NO: 1881327
guuaacuguuuaucugaaa

SEQ ID NO: 2035957 - RNA, 19 nt, Artificial Sequence
  Description of Artificial Sequence: Synthetic oligonucleotide
  Antisense strand to SEQ ID NO: 2035956
uuucagauaaacaguuaac

SEQ ID NO: 2035958 - RNA, 19 nt, Artificial Sequence
  Description of Artificial Sequence: Synthetic oligonucleotide
  Sense strand starting at position 2245 of SEQ ID NO: 1881327
cugguaacccuaggacuaa

SEQ ID NO: 2035959 - RNA, 19 nt, Artificial Sequence
  Description of Artificial Sequence: Synthetic oligonucleotide
  Antisense strand to SEQ ID NO: 2035958
uuaguccuaggguuaccag

SEQ ID NO: 2035960 - RNA, 19 nt, Artificial Sequence
  Description of Artificial Sequence: Synthetic oligonucleotide
  Sense strand starting at position 2276 of SEQ ID NO: 1881327
gauaauuucugucagauga

SEQ ID NO: 2035961 - RNA, 19 nt, Artificial Sequence
  Description of Artificial Sequence: Synthetic oligonucleotide
  Antisense strand to SEQ ID NO: 2035960
ucaucugacagaaauuauc

SEQ ID NO: 2035962 - RNA, 19 nt, Artificial Sequence
  Description of Artificial Sequence: Synthetic oligonucleotide
  Sense strand starting at position 2283 of SEQ ID NO: 1881327
ucugucagaugacucaauu

SEQ ID NO: 2035963 - RNA, 19 nt, Artificial Sequence
  Description of Artificial Sequence: Synthetic oligonucleotide
  Antisense strand to SEQ ID NO: 2035962
aauugagucaucugacaga

SEQ ID NO: 2035964 - RNA, 19 nt, Artificial Sequence
  Description of Artificial Sequence: Synthetic oligonucleotide
  Sense strand starting at position 2306 of SEQ ID NO: 1881327
uguuauagauugccugaga

SEQ ID NO: 2035965 - RNA, 19 nt, Artificial Sequence
  Description of Artificial Sequence: Synthetic oligonucleotide
  Antisense strand to SEQ ID NO: 2035964
ucucaggcaaucuauaaca

SEQ ID NO: 2035966 - RNA, 19 nt, Artificial Sequence
  Description of Artificial Sequence: Synthetic oligonucleotide
  Sense strand starting at position 2307 of SEQ ID NO: 1881327
guuauagauugccugagau

SEQ ID NO: 2035967 - RNA, 19 nt, Artificial Sequence
  Description of Artificial Sequence: Synthetic oligonucleotide
  Antisense strand to SEQ ID NO: 2035966
aucucaggcaaucuauaac

SEQ ID NO: 2035968 - RNA, 19 nt, Artificial Sequence
  Description of Artificial Sequence: Synthetic oligonucleotide
  Sense strand starting at position 2341 of SEQ ID NO: 1881327
gagugaucauaaguugaca

SEQ ID NO: 2035969 - RNA, 19 nt, Artificial Sequence
  Description of Artificial Sequence: Synthetic oligonucleotide
  Antisense strand to SEQ ID NO: 2035968
ugucaacuuaugaucacuc

SEQ ID NO: 2035970 - RNA, 19 nt, Artificial Sequence
  Description of Artificial Sequence: Synthetic oligonucleotide
  Sense strand starting at position 2376 of SEQ ID NO: 1881327
gaacuaauuguuggucaag

SEQ ID NO: 2035971 - RNA, 19 nt, Artificial Sequence
  Description of Artificial Sequence: Synthetic oligonucleotide
  Antisense strand to SEQ ID NO: 2035970
cuugaccaacaauuaguuc

SEQ ID NO: 2035972 - RNA, 19 nt, Artificial Sequence
  Description of Artificial Sequence: Synthetic oligonucleotide
  Sense strand starting at position 2377 of SEQ ID NO: 1881327
aacuaauuguuggucaagu

SEQ ID NO: 2035973 - RNA, 19 nt, Artificial Sequence
  Description of Artificial Sequence: Synthetic oligonucleotide
  Antisense strand to SEQ ID NO: 2035972
acuugaccaacaauuaguu

SEQ ID NO: 2035974 - RNA, 19 nt, Artificial Sequence
  Description of Artificial Sequence: Synthetic oligonucleotide
  Sense strand starting at position 2623 of SEQ ID NO: 1881327
aagguaaggcaguguauuu

SEQ ID NO: 2035975 - RNA, 19 nt, Artificial Sequence
  Description of Artificial Sequence: Synthetic oligonucleotide
  Antisense strand to SEQ ID NO: 2035974
aaauacacugccuuaccuu

SEQ ID NO: 2035976 - RNA, 19 nt, Artificial Sequence
  Description of Artificial Sequence: Synthetic oligonucleotide
  Sense strand starting at position 2825 of SEQ ID NO: 1881327
acaauaugggccugguaca

SEQ ID NO: 2035977 - RNA, 19 nt, Artificial Sequence
  Description of Artificial Sequence: Synthetic oligonucleotide
  Antisense strand to SEQ ID NO: 2035976
uguaccaggcccauauugu

SEQ ID NO: 2035978 - RNA, 19 nt, Artificial Sequence
  Description of Artificial Sequence: Synthetic oligonucleotide
  Sense strand starting at position 2921 of SEQ ID NO: 1881327
ucaucaauggugugggaau

SEQ ID NO: 2035979 - RNA, 19 nt, Artificial Sequence
  Description of Artificial Sequence: Synthetic oligonucleotide
  Antisense strand to SEQ ID NO: 2035978
auucccacaccauugauga

SEQ ID NO: 2035980 - RNA, 19 nt, Artificial Sequence
  Description of Artificial Sequence: Synthetic oligonucleotide
  Sense strand starting at position 3187 of SEQ ID NO: 1881327
gcuuaagaagcagaauacu

SEQ ID NO: 2035981 - RNA, 19 nt, Artificial Sequence
  Description of Artificial Sequence: Synthetic oligonucleotide
  Antisense strand to SEQ ID NO: 2035980
aguauucugcuucuuaagc

SEQ ID NO: 2035982 - RNA, 19 nt, Artificial Sequence
  Description of Artificial Sequence: Synthetic oligonucleotide
  Sense strand starting at position 3780 of SEQ ID NO: 1881327
aguuucucacagcagagau

SEQ ID NO: 2035983 - RNA, 19 nt, Artificial Sequence
  Description of Artificial Sequence: Synthetic oligonucleotide
  Antisense strand to SEQ ID NO: 2035982
aucucugcugugagaaacu

SEQ ID NO: 2035984 - RNA, 19 nt, Artificial Sequence
  Description of Artificial Sequence: Synthetic oligonucleotide
  Sense strand starting at position 3967 of SEQ ID NO: 1881327
uagguagccuuucuggaaa

SEQ ID NO: 2035985 - RNA, 19 nt, Artificial Sequence
  Description of Artificial Sequence: Synthetic oligonucleotide
  Antisense strand to SEQ ID NO: 2035984
uuuccagaaaggcuaccua

SEQ ID NO: 2035986 - RNA, 19 nt, Artificial Sequence
  Description of Artificial Sequence: Synthetic oligonucleotide
  Sense strand starting at position 207 of SEQ ID NO: 1881328
cuuauuauguccuccauga

SEQ ID NO: 2035987 - RNA, 19 nt, Artificial Sequence
  Description of Artificial Sequence: Synthetic oligonucleotide
  Antisense strand to SEQ ID NO: 2035986
ucauggaggacauaauaag

SEQ ID NO: 2035988 - RNA, 19 nt, Artificial Sequence
  Description of Artificial Sequence: Synthetic oligonucleotide
  Sense strand starting at position 211 of SEQ ID NO: 1881328
uuauguccuccaugacauu

SEQ ID NO: 2035989 - RNA, 19 nt, Artificial Sequence
  Description of Artificial Sequence: Synthetic oligonucleotide
  Antisense strand to SEQ ID NO: 2035988
aaugucauggaggacauaa

SEQ ID NO: 2035990 - RNA, 19 nt, Artificial Sequence
  Description of Artificial Sequence: Synthetic oligonucleotide
  Sense strand starting at position 301 of SEQ ID NO: 1881328
cuugaucuggccuagaacu

SEQ ID NO: 2035991 - RNA, 19 nt, Artificial Sequence
  Description of Artificial Sequence: Synthetic oligonucleotide
  Antisense strand to SEQ ID NO: 2035990
aguucuaggccagaucaag

SEQ ID NO: 2035992 - RNA, 19 nt, Artificial Sequence
  Description of Artificial Sequence: Synthetic oligonucleotide
  Sense strand starting at position 312 of SEQ ID NO: 1881328
cuagaacucugguuggcaa

SEQ ID NO: 2035993 - RNA, 19 nt, Artificial Sequence
  Description of Artificial Sequence: Synthetic oligonucleotide
  Antisense strand to SEQ ID NO: 2035992
uugccaaccagaguucuag

SEQ ID NO: 2035994 - RNA, 19 nt, Artificial Sequence
  Description of Artificial Sequence: Synthetic oligonucleotide
  Sense strand starting at position 407 of SEQ ID NO: 1881328
ggaauacuguccucaccag

SEQ ID NO: 2035995 - RNA, 19 nt, Artificial Sequence
  Description of Artificial Sequence: Synthetic oligonucleotide
  Antisense strand to SEQ ID NO: 2035994
cuggugaggacaguauucc

SEQ ID NO: 2035996 - RNA, 19 nt, Artificial Sequence
  Description of Artificial Sequence: Synthetic oligonucleotide
  Sense strand starting at position 554 of SEQ ID NO: 1881328
auaaccaugccuuagagua

SEQ ID NO: 2035997 - RNA, 19 nt, Artificial Sequence
  Description of Artificial Sequence: Synthetic oligonucleotide
  Antisense strand to SEQ ID NO: 2035996
uacucuaaggcaugguuau

SEQ ID NO: 2035998 - RNA, 19 nt, Artificial Sequence
  Description of Artificial Sequence: Synthetic oligonucleotide
  Sense strand starting at position 597 of SEQ ID NO: 1881328
gguucauguggugaaucua

SEQ ID NO: 2035999 - RNA, 19 nt, Artificial Sequence
  Description of Artificial Sequence: Synthetic oligonucleotide
  Antisense strand to SEQ ID NO: 2035998
uagauucaccacaugaacc

SEQ ID NO: 2036000 - RNA, 19 nt, Artificial Sequence
  Description of Artificial Sequence: Synthetic oligonucleotide
  Sense strand starting at position 745 of SEQ ID NO: 1881328
cugaacagcucugugauca

SEQ ID NO: 2036001 - RNA, 19 nt, Artificial Sequence
  Description of Artificial Sequence: Synthetic oligonucleotide
  Antisense strand to SEQ ID NO: 2036000
ugaucacagagcuguucag

SEQ ID NO: 2036002 - RNA, 19 nt, Artificial Sequence
  Description of Artificial Sequence: Synthetic oligonucleotide
  Sense strand starting at position 746 of SEQ ID NO: 1881328
ugaacagcucugugaucau

SEQ ID NO: 2036003 - RNA, 19 nt, Artificial Sequence
  Description of Artificial Sequence: Synthetic oligonucleotide
  Antisense strand to SEQ ID NO: 2036002
augaucacagagcuguuca

SEQ ID NO: 2036004 - RNA, 19 nt, Artificial Sequence
  Description of Artificial Sequence: Synthetic oligonucleotide
  Sense strand starting at position 784 of SEQ ID NO: 1881328
guggacaaauccuucuguu

SEQ ID NO: 2036005 - RNA, 19 nt, Artificial Sequence
  Description of Artificial Sequence: Synthetic oligonucleotide
  Antisense strand to SEQ ID NO: 2036004
aacagaaggauuuguccac

SEQ ID NO: 2036006 - RNA, 19 nt, Artificial Sequence
  Description of Artificial Sequence: Synthetic oligonucleotide
  Sense strand starting at position 847 of SEQ ID NO: 1881328
ucucgaauuucucaaagaa

SEQ ID NO: 2036007 - RNA, 19 nt, Artificial Sequence
  Description of Artificial Sequence: Synthetic oligonucleotide
  Antisense strand to SEQ ID NO: 2036006
uucuuugagaaauucgaga

SEQ ID NO: 2036008 - RNA, 19 nt, Artificial Sequence
  Description of Artificial Sequence: Synthetic oligonucleotide
  Sense strand starting at position 893 of SEQ ID NO: 1881328
cuuuguucuccuuagaagu

SEQ ID NO: 2036009 - RNA, 19 nt, Artificial Sequence
  Description of Artificial Sequence: Synthetic oligonucleotide
  Antisense strand to SEQ ID NO: 2036008
acuucuaaggagaacaaag

SEQ ID NO: 2036010 - RNA, 19 nt, Artificial Sequence
  Description of Artificial Sequence: Synthetic oligonucleotide
  Sense strand starting at position 1156 of SEQ ID NO: 1881328
auuguaauuucugcagcaa

SEQ ID NO: 2036011 - RNA, 19 nt, Artificial Sequence
  Description of Artificial Sequence: Synthetic oligonucleotide
  Antisense strand to SEQ ID NO: 2036010
uugcugcagaaauuacaau

SEQ ID NO: 2036012 - RNA, 19 nt, Artificial Sequence
  Description of Artificial Sequence: Synthetic oligonucleotide
  Sense strand starting at position 1225 of SEQ ID NO: 1881328
ugccauuauuugguuguga

SEQ ID NO: 2036013 - RNA, 19 nt, Artificial Sequence
  Description of Artificial Sequence: Synthetic oligonucleotide
  Antisense strand to SEQ ID NO: 2036012
ucacaaccaaauaauggca

SEQ ID NO: 2036014 - RNA, 19 nt, Artificial Sequence
  Description of Artificial Sequence: Synthetic oligonucleotide
  Sense strand starting at position 1226 of SEQ ID NO: 1881328
gccauuauuugguugugag

SEQ ID NO: 2036015 - RNA, 19 nt, Artificial Sequence
  Description of Artificial Sequence: Synthetic oligonucleotide
  Antisense strand to SEQ ID NO: 2036014
cucacaaccaaauaauggc

SEQ ID NO: 2036016 - RNA, 19 nt, Artificial Sequence
  Description of Artificial Sequence: Synthetic oligonucleotide
  Sense strand starting at position 1227 of SEQ ID NO: 1881328
ccauuauuugguugugagu

SEQ ID NO: 2036017 - RNA, 19 nt, Artificial Sequence
  Description of Artificial Sequence: Synthetic oligonucleotide
  Antisense strand to SEQ ID NO: 2036016
acucacaaccaaauaaugg

SEQ ID NO: 2036018 - RNA, 19 nt, Artificial Sequence
  Description of Artificial Sequence: Synthetic oligonucleotide
  Sense strand starting at position 1289 of SEQ ID NO: 1881328
auucgaaaggcaugggaau

SEQ ID NO: 2036019 - RNA, 19 nt, Artificial Sequence
  Description of Artificial Sequence: Synthetic oligonucleotide
  Antisense strand to SEQ ID NO: 2036018
auucccaugccuuucgaau

SEQ ID NO: 2036020 - RNA, 19 nt, Artificial Sequence
  Description of Artificial Sequence: Synthetic oligonucleotide
  Sense strand starting at position 1290 of SEQ ID NO: 1881328
uucgaaaggcaugggaaua

SEQ ID NO: 2036021 - RNA, 19 nt, Artificial Sequence
  Description of Artificial Sequence: Synthetic oligonucleotide
  Antisense strand to SEQ ID NO: 2036020
uauucccaugccuuucgaa

SEQ ID NO: 2036022 - RNA, 19 nt, Artificial Sequence
  Description of Artificial Sequence: Synthetic oligonucleotide
  Sense strand starting at position 1515 of SEQ ID NO: 1881328
aucaaagagguuugucauc

SEQ ID NO: 2036023 - RNA, 19 nt, Artificial Sequence
  Description of Artificial Sequence: Synthetic oligonucleotide
  Antisense strand to SEQ ID NO: 2036022
gaugacaaaccucuuugau

SEQ ID NO: 2036024 - RNA, 19 nt, Artificial Sequence
  Description of Artificial Sequence: Synthetic oligonucleotide
  Sense strand starting at position 1517 of SEQ ID NO: 1881328
caaagagguuugucaucuu

SEQ ID NO: 2036025 - RNA, 19 nt, Artificial Sequence
  Description of Artificial Sequence: Synthetic oligonucleotide
  Antisense strand to SEQ ID NO: 2036024
aagaugacaaaccucuuug

SEQ ID NO: 2036026 - RNA, 19 nt, Artificial Sequence
  Description of Artificial Sequence: Synthetic oligonucleotide
  Sense strand starting at position 1598 of SEQ ID NO: 1881328
aaguuccaccuguggaaau

SEQ ID NO: 2036027 - RNA, 19 nt, Artificial Sequence
  Description of Artificial Sequence: Synthetic oligonucleotide
  Antisense strand to SEQ ID NO: 2036026
auuuccacagguggaacuu

SEQ ID NO: 2036028 - RNA, 19 nt, Artificial Sequence
  Description of Artificial Sequence: Synthetic oligonucleotide
  Sense strand starting at position 1600 of SEQ ID NO: 1881328
guuccaccuguggaaauua

SEQ ID NO: 2036029 - RNA, 19 nt, Artificial Sequence
  Description of Artificial Sequence: Synthetic oligonucleotide
  Antisense strand to SEQ ID NO: 2036028
uaauuuccacagguggaac

SEQ ID NO: 2036030 - RNA, 19 nt, Artificial Sequence
  Description of Artificial Sequence: Synthetic oligonucleotide
  Sense strand starting at position 1610 of SEQ ID NO: 1881328
uggaaauuaguguguuaaa

SEQ ID NO: 2036031 - RNA, 19 nt, Artificial Sequence
  Description of Artificial Sequence: Synthetic oligonucleotide
  Antisense strand to SEQ ID NO: 2036030
uuuaacacacuaauuucca

SEQ ID NO: 2036032 - RNA, 19 nt, Artificial Sequence
  Description of Artificial Sequence: Synthetic oligonucleotide
  Sense strand starting at position 1611 of SEQ ID NO: 1881328
ggaaauuaguguguuaaau

SEQ ID NO: 2036033 - RNA, 19 nt, Artificial Sequence
  Description of Artificial Sequence: Synthetic oligonucleotide
  Antisense strand to SEQ ID NO: 2036032
auuuaacacacuaauuucc

SEQ ID NO: 2036034 - RNA, 19 nt, Artificial Sequence
  Description of Artificial Sequence: Synthetic oligonucleotide
  Sense strand starting at position 2193 of SEQ ID NO: 1881328
guguuaacuguuuaucuga

SEQ ID NO: 2036035 - RNA, 19 nt, Artificial Sequence
  Description of Artificial Sequence: Synthetic oligonucleotide
  Antisense strand to SEQ ID NO: 2036034
ucagauaaacaguuaacac

SEQ ID NO: 2036036 - RNA, 19 nt, Artificial Sequence
  Description of Artificial Sequence: Synthetic oligonucleotide
  Sense strand starting at position 2195 of SEQ ID NO: 1881328
guuaacuguuuaucugaaa

SEQ ID NO: 2036037 - RNA, 19 nt, Artificial Sequence
  Description of Artificial Sequence: Synthetic oligonucleotide
  Antisense strand to SEQ ID NO: 2036036
uuucagauaaacaguuaac

SEQ ID NO: 2036038 - RNA, 19 nt, Artificial Sequence
  Description of Artificial Sequence: Synthetic oligonucleotide
  Sense strand starting at position 2245 of SEQ ID NO: 1881328
cugguaacccuaggacuaa

SEQ ID NO: 2036039 - RNA, 19 nt, Artificial Sequence
  Description of Artificial Sequence: Synthetic oligonucleotide
  Antisense strand to SEQ ID NO: 2036038
uuaguccuaggguuaccag

SEQ ID NO: 2036040 - RNA, 19 nt, Artificial Sequence
  Description of Artificial Sequence: Synthetic oligonucleotide
  Sense strand starting at position 2276 of SEQ ID NO: 1881328
gauaauuucugucagauga

SEQ ID NO: 2036041 - RNA, 19 nt, Artificial Sequence
  Description of Artificial Sequence: Synthetic oligonucleotide
  Antisense strand to SEQ ID NO: 2036040
ucaucugacagaaauuauc

SEQ ID NO: 2036042 - RNA, 19 nt, Artificial Sequence
  Description of Artificial Sequence: Synthetic oligonucleotide
  Sense strand starting at position 2283 of SEQ ID NO: 1881328
ucugucagaugacucaauu

SEQ ID NO: 2036043 - RNA, 19 nt, Artificial Sequence
  Description of Artificial Sequence: Synthetic oligonucleotide
  Antisense strand to SEQ ID NO: 2036042
aauugagucaucugacaga

SEQ ID NO: 2036044 - RNA, 19 nt, Artificial Sequence
  Description of Artificial Sequence: Synthetic oligonucleotide
  Sense strand starting at position 2306 of SEQ ID NO: 1881328
uguuauagauugccugaga

SEQ ID NO: 2036045 - RNA, 19 nt, Artificial Sequence
  Description of Artificial Sequence: Synthetic oligonucleotide
  Antisense strand to SEQ ID NO: 2036044
ucucaggcaaucuauaaca

SEQ ID NO: 2036046 - RNA, 19 nt, Artificial Sequence
  Description of Artificial Sequence: Synthetic oligonucleotide
  Sense strand starting at position 2307 of SEQ ID NO: 1881328
guuauagauugccugagau

SEQ ID NO: 2036047 - RNA, 19 nt, Artificial Sequence
  Description of Artificial Sequence: Synthetic oligonucleotide
  Antisense strand to SEQ ID NO: 2036046
aucucaggcaaucuauaac

SEQ ID NO: 2036048 - RNA, 19 nt, Artificial Sequence
  Description of Artificial Sequence: Synthetic oligonucleotide
  Sense strand starting at position 2341 of SEQ ID NO: 1881328
gagugaucauaaguugaca

SEQ ID NO: 2036049 - RNA, 19 nt, Artificial Sequence
  Description of Artificial Sequence: Synthetic oligonucleotide
  Antisense strand to SEQ ID NO: 2036048
ugucaacuuaugaucacuc

SEQ ID NO: 2036050 - RNA, 19 nt, Artificial Sequence
  Description of Artificial Sequence: Synthetic oligonucleotide
  Sense strand starting at position 2376 of SEQ ID NO: 1881328
gaacuaauuguuggucaag

SEQ ID NO: 2036051 - RNA, 19 nt, Artificial Sequence
  Description of Artificial Sequence: Synthetic oligonucleotide
  Antisense strand to SEQ ID NO: 2036050
cuugaccaacaauuaguuc

SEQ ID NO: 2036052 - RNA, 19 nt, Artificial Sequence
  Description of Artificial Sequence: Synthetic oligonucleotide
  Sense strand starting at position 2377 of SEQ ID NO: 1881328
aacuaauuguuggucaagu

SEQ ID NO: 2036053 - RNA, 19 nt, Artificial Sequence
  Description of Artificial Sequence: Synthetic oligonucleotide
  Antisense strand to SEQ ID NO: 2036052
acuugaccaacaauuaguu

SEQ ID NO: 2036054 - RNA, 19 nt, Artificial Sequence
  Description of Artificial Sequence: Synthetic oligonucleotide
  Sense strand starting at position 2623 of SEQ ID NO: 1881328
aagguaaggcaguguauuu

SEQ ID NO: 2036055 - RNA, 19 nt, Artificial Sequence
  Description of Artificial Sequence: Synthetic oligonucleotide
  Antisense strand to SEQ ID NO: 2036054
aaauacacugccuuaccuu

SEQ ID NO: 2036056 - RNA, 19 nt, Artificial Sequence
  Description of Artificial Sequence: Synthetic oligonucleotide
  Sense strand starting at position 2825 of SEQ ID NO: 1881328
acaauaugggccugguaca

SEQ ID NO: 2036057 - RNA, 19 nt, Artificial Sequence
  Description of Artificial Sequence: Synthetic oligonucleotide
  Antisense strand to SEQ ID NO: 2036056
uguaccaggcccauauugu

SEQ ID NO: 2036058 - RNA, 19 nt, Artificial Sequence
  Description of Artificial Sequence: Synthetic oligonucleotide
  Sense strand starting at position 2921 of SEQ ID NO: 1881328
ucaucaauggugugggaau

SEQ ID NO: 2036059 - RNA, 19 nt, Artificial Sequence
  Description of Artificial Sequence: Synthetic oligonucleotide
  Antisense strand to SEQ ID NO: 2036058
auucccacaccauugauga

SEQ ID NO: 2036060 - RNA, 19 nt, Artificial Sequence
  Description of Artificial Sequence: Synthetic oligonucleotide
  Sense strand starting at position 3187 of SEQ ID NO: 1881328
gcuuaagaagcagaauacu

SEQ ID NO: 2036061 - RNA, 19 nt, Artificial Sequence
  Description of Artificial Sequence: Synthetic oligonucleotide
  Antisense strand to SEQ ID NO: 2036060
aguauucugcuucuuaagc

SEQ ID NO: 2036062 - RNA, 19 nt, Artificial Sequence
  Description of Artificial Sequence: Synthetic oligonucleotide
  Sense strand starting at position 3780 of SEQ ID NO: 1881328
aguuucucacagcagagau

SEQ ID NO: 2036063 - RNA, 19 nt, Artificial Sequence
  Description of Artificial Sequence: Synthetic oligonucleotide
  Antisense strand to SEQ ID NO: 2036062
aucucugcugugagaaacu

SEQ ID NO: 2036064 - RNA, 19 nt, Artificial Sequence
  Description of Artificial Sequence: Synthetic oligonucleotide
  Sense strand starting at position 3967 of SEQ ID NO: 1881328
uagguagccuuucuggaaa

SEQ ID NO: 2036065 - RNA, 19 nt, Artificial Sequence
  Description of Artificial Sequence: Synthetic oligonucleotide
  Antisense strand to SEQ ID NO: 2036064
uuuccagaaaggcuaccua

SEQ ID NO: 2036066 - RNA, 19 nt, Artificial Sequence
  Description of Artificial Sequence: Synthetic oligonucleotide
  Sense strand starting at position 1487 of SEQ ID NO: 1881329
ucuugacuucugcagcuuu

SEQ ID NO: 2036067 - RNA, 19 nt, Artificial Sequence
  Description of Artificial Sequence: Synthetic oligonucleotide
  Antisense strand to SEQ ID NO: 2036066
aaagcugcagaagucaaga

SEQ ID NO: 2036068 - RNA, 19 nt, Artificial Sequence
  Description of Artificial Sequence: Synthetic oligonucleotide
  Sense strand starting at position 1790 of SEQ ID NO: 1881329
ugaguucuuguuugauuga

SEQ ID NO: 2036069 - RNA, 19 nt, Artificial Sequence
  Description of Artificial Sequence: Synthetic oligonucleotide
  Antisense strand to SEQ ID NO: 2036068
ucaaucaaacaagaacuca

SEQ ID NO: 2036070 - RNA, 19 nt, Artificial Sequence
  Description of Artificial Sequence: Synthetic oligonucleotide
  Sense strand starting at position 1793 of SEQ ID NO: 1881329
guucuuguuugauugaacu

SEQ ID NO: 2036071 - RNA, 19 nt, Artificial Sequence
  Description of Artificial Sequence: Synthetic oligonucleotide
  Antisense strand to SEQ ID NO: 2036070
aguucaaucaaacaagaac

SEQ ID NO: 2036072 - RNA, 19 nt, Artificial Sequence
  Description of Artificial Sequence: Synthetic oligonucleotide
  Sense strand starting at position 1876 of SEQ ID NO: 1881329
ucaacuauguggucaauua

SEQ ID NO: 2036073 - RNA, 19 nt, Artificial Sequence
  Description of Artificial Sequence: Synthetic oligonucleotide
  Antisense strand to SEQ ID NO: 2036072
uaauugaccacauaguuga

SEQ ID NO: 2036074 - RNA, 19 nt, Artificial Sequence
  Description of Artificial Sequence: Synthetic oligonucleotide
  Sense strand starting at position 1955 of SEQ ID NO: 1881329
cucugugucguuccaaugu

SEQ ID NO: 2036075 - RNA, 19 nt, Artificial Sequence
  Description of Artificial Sequence: Synthetic oligonucleotide
  Antisense strand to SEQ ID NO: 2036074
acauuggaacgacacagag

SEQ ID NO: 2036076 - RNA, 19 nt, Artificial Sequence
  Description of Artificial Sequence: Synthetic oligonucleotide
  Sense strand starting at position 1964 of SEQ ID NO: 1881329
guuccaauguuaguauaug

SEQ ID NO: 2036077 - RNA, 19 nt, Artificial Sequence
  Description of Artificial Sequence: Synthetic oligonucleotide
  Antisense strand to SEQ ID NO: 2036076
cauauacuaacauuggaac

SEQ ID NO: 2036078 - RNA, 19 nt, Artificial Sequence
  Description of Artificial Sequence: Synthetic oligonucleotide
  Sense strand starting at position 1989 of SEQ ID NO: 1881329
cgaagugagcaccacaaau

SEQ ID NO: 2036079 - RNA, 19 nt, Artificial Sequence
  Description of Artificial Sequence: Synthetic oligonucleotide
  Antisense strand to SEQ ID NO: 2036078
auuuguggugcucacuucg

SEQ ID NO: 2036080 - RNA, 19 nt, Artificial Sequence
  Description of Artificial Sequence: Synthetic oligonucleotide
  Sense strand starting at position 2048 of SEQ ID NO: 1881329
ugggaaacauucuccagua

SEQ ID NO: 2036081 - RNA, 19 nt, Artificial Sequence
  Description of Artificial Sequence: Synthetic oligonucleotide
  Antisense strand to SEQ ID NO: 2036080
uacuggagaauguuuccca

SEQ ID NO: 2036082 - RNA, 19 nt, Artificial Sequence
  Description of Artificial Sequence: Synthetic oligonucleotide
  Sense strand starting at position 2049 of SEQ ID NO: 1881329
gggaaacauucuccaguau

SEQ ID NO: 2036083 - RNA, 19 nt, Artificial Sequence
  Description of Artificial Sequence: Synthetic oligonucleotide
  Antisense strand to SEQ ID NO: 2036082
auacuggagaauguuuccc

SEQ ID NO: 2036084 - RNA, 19 nt, Artificial Sequence
  Description of Artificial Sequence: Synthetic oligonucleotide
  Sense strand starting at position 2171 of SEQ ID NO: 1881329
augaguguugaagauguua

SEQ ID NO: 2036085 - RNA, 19 nt, Artificial Sequence
  Description of Artificial Sequence: Synthetic oligonucleotide
  Antisense strand to SEQ ID NO: 2036084
uaacaucuucaacacucau

SEQ ID NO: 2036086 - RNA, 19 nt, Artificial Sequence
  Description of Artificial Sequence: Synthetic oligonucleotide
  Sense strand starting at position 2173 of SEQ ID NO: 1881329
gaguguugaagauguuaau

SEQ ID NO: 2036087 - RNA, 19 nt, Artificial Sequence
  Description of Artificial Sequence: Synthetic oligonucleotide
  Antisense strand to SEQ ID NO: 2036086
auuaacaucuucaacacuc

SEQ ID NO: 2036088 - RNA, 19 nt, Artificial Sequence
  Description of Artificial Sequence: Synthetic oligonucleotide
  Sense strand starting at position 2313 of SEQ ID NO: 1881329
gaaguuagaugcccuauau

SEQ ID NO: 2036089 - RNA, 19 nt, Artificial Sequence
  Description of Artificial Sequence: Synthetic oligonucleotide
  Antisense strand to SEQ ID NO: 2036088
auauagggcaucuaacuuc

SEQ ID NO: 2036090 - RNA, 19 nt, Artificial Sequence
  Description of Artificial Sequence: Synthetic oligonucleotide
  Sense strand starting at position 2325 of SEQ ID NO: 1881329
ccuauauugcuaggacaac

SEQ ID NO: 2036091 - RNA, 19 nt, Artificial Sequence
  Description of Artificial Sequence: Synthetic oligonucleotide
  Antisense strand to SEQ ID NO: 2036090
guuguccuagcaauauagg

SEQ ID NO: 2036092 - RNA, 19 nt, Artificial Sequence
  Description of Artificial Sequence: Synthetic oligonucleotide
  Sense strand starting at position 2357 of SEQ ID NO: 1881329
caauauuagccauagguug

SEQ ID NO: 2036093 - RNA, 19 nt, Artificial Sequence
  Description of Artificial Sequence: Synthetic oligonucleotide
  Antisense strand to SEQ ID NO: 2036092
caaccuauggcuaauauug

SEQ ID NO: 2036094 - RNA, 19 nt, Artificial Sequence
  Description of Artificial Sequence: Synthetic oligonucleotide
  Sense strand starting at position 2433 of SEQ ID NO: 1881329
guauaaagugcuuagaaug

SEQ ID NO: 2036095 - RNA, 19 nt, Artificial Sequence
  Description of Artificial Sequence: Synthetic oligonucleotide
  Antisense strand to SEQ ID NO: 2036094
cauucuaagcacuuuauac

SEQ ID NO: 2036096 - RNA, 19 nt, Artificial Sequence
  Description of Artificial Sequence: Synthetic oligonucleotide
  Sense strand starting at position 2445 of SEQ ID NO: 1881329
uagaaugagcucuggauuc

SEQ ID NO: 2036097 - RNA, 19 nt, Artificial Sequence
  Description of Artificial Sequence: Synthetic oligonucleotide
  Antisense strand to SEQ ID NO: 2036096
gaauccagagcucauucua

SEQ ID NO: 2036098 - RNA, 19 nt, Artificial Sequence
  Description of Artificial Sequence: Synthetic oligonucleotide
  Sense strand starting at position 2610 of SEQ ID NO: 1881329
cucagaucguguccuuaac

SEQ ID NO: 2036099 - RNA, 19 nt, Artificial Sequence
  Description of Artificial Sequence: Synthetic oligonucleotide
  Antisense strand to SEQ ID NO: 2036098
guuaaggacacgaucugag

SEQ ID NO: 2036100 - RNA, 19 nt, Artificial Sequence
  Description of Artificial Sequence: Synthetic oligonucleotide
  Sense strand starting at position 2629 of SEQ ID NO: 1881329
gccagguguguggucgaau

SEQ ID NO: 2036101 - RNA, 19 nt, Artificial Sequence
  Description of Artificial Sequence: Synthetic oligonucleotide
  Antisense strand to SEQ ID NO: 2036100
auucgaccacacaccuggc

SEQ ID NO: 2036102 - RNA, 19 nt, Artificial Sequence
  Description of Artificial Sequence: Synthetic oligonucleotide
  Sense strand starting at position 2641 of SEQ ID NO: 1881329
gucgaauugccucaggagu

SEQ ID NO: 2036103 - RNA, 19 nt, Artificial Sequence
  Description of Artificial Sequence: Synthetic oligonucleotide
  Antisense strand to SEQ ID NO: 2036102
acuccugaggcaauucgac

SEQ ID NO: 2036104 - RNA, 19 nt, Artificial Sequence
  Description of Artificial Sequence: Synthetic oligonucleotide
  Sense strand starting at position 2865 of SEQ ID NO: 1881329
gcccauguacuaggcaaua

SEQ ID NO: 2036105 - RNA, 19 nt, Artificial Sequence
  Description of Artificial Sequence: Synthetic oligonucleotide
  Antisense strand to SEQ ID NO: 2036104
uauugccuaguacaugggc

SEQ ID NO: 2036106 - RNA, 19 nt, Artificial Sequence
  Description of Artificial Sequence: Synthetic oligonucleotide
  Sense strand starting at position 2878 of SEQ ID NO: 1881329
gcaauaacuaggcagguua

SEQ ID NO: 2036107 - RNA, 19 nt, Artificial Sequence
  Description of Artificial Sequence: Synthetic oligonucleotide
  Antisense strand to SEQ ID NO: 2036106
uaaccugccuaguuauugc

SEQ ID NO: 2036108 - RNA, 19 nt, Artificial Sequence
  Description of Artificial Sequence: Synthetic oligonucleotide
  Sense strand starting at position 2915 of SEQ ID NO: 1881329
gcaaguuauuugcccauaa

SEQ ID NO: 2036109 - RNA, 19 nt, Artificial Sequence
  Description of Artificial Sequence: Synthetic oligonucleotide
  Antisense strand to SEQ ID NO: 2036108
uuaugggcaaauaacuugc

SEQ ID NO: 2036110 - RNA, 19 nt, Artificial Sequence
  Description of Artificial Sequence: Synthetic oligonucleotide
  Sense strand starting at position 2926 of SEQ ID NO: 1881329
gcccauaacuaggcaaguu

SEQ ID NO: 2036111 - RNA, 19 nt, Artificial Sequence
  Description of Artificial Sequence: Synthetic oligonucleotide
  Antisense strand to SEQ ID NO: 2036110
aacuugccuaguuaugggc

SEQ ID NO: 2036112 - RNA, 19 nt, Artificial Sequence
  Description of Artificial Sequence: Synthetic oligonucleotide
  Sense strand starting at position 2944 of SEQ ID NO: 1881329
uauuuauguugugucucau

SEQ ID NO: 2036113 - RNA, 19 nt, Artificial Sequence
  Description of Artificial Sequence: Synthetic oligonucleotide
  Antisense strand to SEQ ID NO: 2036112
augagacacaacauaaaua

SEQ ID NO: 2036114 - RNA, 19 nt, Artificial Sequence
  Description of Artificial Sequence: Synthetic oligonucleotide
  Sense strand starting at position 3091 of SEQ ID NO: 1881329
gugguaacugcagaagcuu

SEQ ID NO: 2036115 - RNA, 19 nt, Artificial Sequence
  Description of Artificial Sequence: Synthetic oligonucleotide
  Antisense strand to SEQ ID NO: 2036114
aagcuucugcaguuaccac

SEQ ID NO: 2036116 - RNA, 19 nt, Artificial Sequence
  Description of Artificial Sequence: Synthetic oligonucleotide
  Sense strand starting at position 3140 of SEQ ID NO: 1881329
gcauuccaucuguguagag

SEQ ID NO: 2036117 - RNA, 19 nt, Artificial Sequence
  Description of Artificial Sequence: Synthetic oligonucleotide
  Antisense strand to SEQ ID NO: 2036116
cucuacacagauggaaugc

SEQ ID NO: 2036118 - RNA, 19 nt, Artificial Sequence
  Description of Artificial Sequence: Synthetic oligonucleotide
  Sense strand starting at position 3150 of SEQ ID NO: 1881329
uguguagagaugugaaacu

SEQ ID NO: 2036119 - RNA, 19 nt, Artificial Sequence
  Description of Artificial Sequence: Synthetic oligonucleotide
  Antisense strand to SEQ ID NO: 2036118
aguuucacaucucuacaca

SEQ ID NO: 2036120 - RNA, 19 nt, Artificial Sequence
  Description of Artificial Sequence: Synthetic oligonucleotide
  Sense strand starting at position 3235 of SEQ ID NO: 1881329
guagaauagugacuaagau

SEQ ID NO: 2036121 - RNA, 19 nt, Artificial Sequence
  Description of Artificial Sequence: Synthetic oligonucleotide
  Antisense strand to SEQ ID NO: 2036120
aucuuagucacuauucuac

SEQ ID NO: 2036122 - RNA, 19 nt, Artificial Sequence
  Description of Artificial Sequence: Synthetic oligonucleotide
  Sense strand starting at position 3242 of SEQ ID NO: 1881329
agugacuaagauuagcauu

SEQ ID NO: 2036123 - RNA, 19 nt, Artificial Sequence
  Description of Artificial Sequence: Synthetic oligonucleotide
  Antisense strand to SEQ ID NO: 2036122
aaugcuaaucuuagucacu

SEQ ID NO: 2036124 - RNA, 19 nt, Artificial Sequence
  Description of Artificial Sequence: Synthetic oligonucleotide
  Sense strand starting at position 3319 of SEQ ID NO: 1881329
guugcuaaguuccuuaaau

SEQ ID NO: 2036125 - RNA, 19 nt, Artificial Sequence
  Description of Artificial Sequence: Synthetic oligonucleotide
  Antisense strand to SEQ ID NO: 2036124
auuuaaggaacuuagcaac

SEQ ID NO: 2036126 - RNA, 19 nt, Artificial Sequence
  Description of Artificial Sequence: Synthetic oligonucleotide
  Sense strand starting at position 3320 of SEQ ID NO: 1881329
uugcuaaguuccuuaaaug

SEQ ID NO: 2036127 - RNA, 19 nt, Artificial Sequence
  Description of Artificial Sequence: Synthetic oligonucleotide
  Antisense strand to SEQ ID NO: 2036126
cauuuaaggaacuuagcaa

SEQ ID NO: 2036128 - RNA, 19 nt, Artificial Sequence
  Description of Artificial Sequence: Synthetic oligonucleotide
  Sense strand starting at position 3356 of SEQ ID NO: 1881329
uuuggaauuuccuaaaguc

SEQ ID NO: 2036129 - RNA, 19 nt, Artificial Sequence
  Description of Artificial Sequence: Synthetic oligonucleotide
  Antisense strand to SEQ ID NO: 2036128
gacuuuaggaaauuccaaa

SEQ ID NO: 2036130 - RNA, 19 nt, Artificial Sequence
  Description of Artificial Sequence: Synthetic oligonucleotide
  Sense strand starting at position 3516 of SEQ ID NO: 1881329
auccguuccuaaucuguaa

SEQ ID NO: 2036131 - RNA, 19 nt, Artificial Sequence
  Description of Artificial Sequence: Synthetic oligonucleotide
  Antisense strand to SEQ ID NO: 2036130
uuacagauuaggaacggau

SEQ ID NO: 2036132 - RNA, 19 nt, Artificial Sequence
  Description of Artificial Sequence: Synthetic oligonucleotide
  Sense strand starting at position 3520 of SEQ ID NO: 1881329
guuccuaaucuguaagcuu

SEQ ID NO: 2036133 - RNA, 19 nt, Artificial Sequence
  Description of Artificial Sequence: Synthetic oligonucleotide
  Antisense strand to SEQ ID NO: 2036132
aagcuuacagauuaggaac

SEQ ID NO: 2036134 - RNA, 19 nt, Artificial Sequence
  Description of Artificial Sequence: Synthetic oligonucleotide
  Sense strand starting at position 3724 of SEQ ID NO: 1881329
accucagauuccuccugua

SEQ ID NO: 2036135 - RNA, 19 nt, Artificial Sequence
  Description of Artificial Sequence: Synthetic oligonucleotide
  Antisense strand to SEQ ID NO: 2036134
uacaggaggaaucugaggu

SEQ ID NO: 2036136 - RNA, 19 nt, Artificial Sequence
  Description of Artificial Sequence: Synthetic oligonucleotide
  Sense strand starting at position 3729 of SEQ ID NO: 1881329
agauuccuccuguaucacu

SEQ ID NO: 2036137 - RNA, 19 nt, Artificial Sequence
  Description of Artificial Sequence: Synthetic oligonucleotide
  Antisense strand to SEQ ID NO: 2036136
agugauacaggaggaaucu

SEQ ID NO: 2036138 - RNA, 19 nt, Artificial Sequence
  Description of Artificial Sequence: Synthetic oligonucleotide
  Sense strand starting at position 3823 of SEQ ID NO: 1881329
uuccuagaaucaguguguu

SEQ ID NO: 2036139 - RNA, 19 nt, Artificial Sequence
  Description of Artificial Sequence: Synthetic oligonucleotide
  Antisense strand to SEQ ID NO: 2036138
aacacacugauucuaggaa

SEQ ID NO: 2036140 - RNA, 19 nt, Artificial Sequence
  Description of Artificial Sequence: Synthetic oligonucleotide
  Sense strand starting at position 3826 of SEQ ID NO: 1881329
cuagaaucaguguguuaug

SEQ ID NO: 2036141 - RNA, 19 nt, Artificial Sequence
  Description of Artificial Sequence: Synthetic oligonucleotide
  Antisense strand to SEQ ID NO: 2036140
cauaacacacugauucuag

SEQ ID NO: 2036142 - RNA, 19 nt, Artificial Sequence
  Description of Artificial Sequence: Synthetic oligonucleotide
  Sense strand starting at position 3827 of SEQ ID NO: 1881329
uagaaucaguguguuaugu

SEQ ID NO: 2036143 - RNA, 19 nt, Artificial Sequence
  Description of Artificial Sequence: Synthetic oligonucleotide
  Antisense strand to SEQ ID NO: 2036142
acauaacacacugauucua

SEQ ID NO: 2036144 - RNA, 19 nt, Artificial Sequence
  Description of Artificial Sequence: Synthetic oligonucleotide
  Sense strand starting at position 3861 of SEQ ID NO: 1881329
gugguuuccuaacucaucu

SEQ ID NO: 2036145 - RNA, 19 nt, Artificial Sequence
  Description of Artificial Sequence: Synthetic oligonucleotide
  Antisense strand to SEQ ID NO: 2036144
agaugaguuaggaaaccac

SEQ ID NO: 2036146 - RNA, 19 nt, Artificial Sequence
  Description of Artificial Sequence: Synthetic oligonucleotide
  Sense strand starting at position 13 of SEQ ID NO: 1881330
ugagauuugugacacuuga

SEQ ID NO: 2036147 - RNA, 19 nt, Artificial Sequence
  Description of Artificial Sequence: Synthetic oligonucleotide
  Antisense strand to SEQ ID NO: 2036146
ucaagugucacaaaucuca

SEQ ID NO: 2036148 - RNA, 19 nt, Artificial Sequence
  Description of Artificial Sequence: Synthetic oligonucleotide
  Sense strand starting at position 81 of SEQ ID NO: 1881330
ucugaaaucccuggagcca

SEQ ID NO: 2036149 - RNA, 19 nt, Artificial Sequence
  Description of Artificial Sequence: Synthetic oligonucleotide
  Antisense strand to SEQ ID NO: 2036148
uggcuccagggauuucaga

SEQ ID NO: 2036150 - RNA, 19 nt, Artificial Sequence
  Description of Artificial Sequence: Synthetic oligonucleotide
  Sense strand starting at position 126 of SEQ ID NO: 1881330
gugauucuugaguaguaaa

SEQ ID NO: 2036151 - RNA, 19 nt, Artificial Sequence
  Description of Artificial Sequence: Synthetic oligonucleotide
  Antisense strand to SEQ ID NO: 2036150
uuuacuacucaagaaucac

SEQ ID NO: 2036152 - RNA, 19 nt, Artificial Sequence
  Description of Artificial Sequence: Synthetic oligonucleotide
  Sense strand starting at position 166 of SEQ ID NO: 1881330
cuauaaugcccucagaagu

SEQ ID NO: 2036153 - RNA, 19 nt, Artificial Sequence
  Description of Artificial Sequence: Synthetic oligonucleotide
  Antisense strand to SEQ ID NO: 2036152
acuucugagggcauuauag

SEQ ID NO: 2036154 - RNA, 19 nt, Artificial Sequence
  Description of Artificial Sequence: Synthetic oligonucleotide
  Sense strand starting at position 337 of SEQ ID NO: 1881330
uaagaaucacugggccaga

SEQ ID NO: 2036155 - RNA, 19 nt, Artificial Sequence
  Description of Artificial Sequence: Synthetic oligonucleotide
  Antisense strand to SEQ ID NO: 2036154
ucuggcccagugauucuua

SEQ ID NO: 2036156 - RNA, 19 nt, Artificial Sequence
  Description of Artificial Sequence: Synthetic oligonucleotide
  Sense strand starting at position 682 of SEQ ID NO: 1881330
cucaaauauguaugguuua

SEQ ID NO: 2036157 - RNA, 19 nt, Artificial Sequence
  Description of Artificial Sequence: Synthetic oligonucleotide
  Antisense strand to SEQ ID NO: 2036156
uaaaccauacauauuugag

SEQ ID NO: 2036158 - RNA, 19 nt, Artificial Sequence
  Description of Artificial Sequence: Synthetic oligonucleotide
  Sense strand starting at position 687 of SEQ ID NO: 1881330
auauguaugguuuaggcau

SEQ ID NO: 2036159 - RNA, 19 nt, Artificial Sequence
  Description of Artificial Sequence: Synthetic oligonucleotide
  Antisense strand to SEQ ID NO: 2036158
augccuaaaccauacauau

SEQ ID NO: 2036160 - RNA, 19 nt, Artificial Sequence
  Description of Artificial Sequence: Synthetic oligonucleotide
  Sense strand starting at position 784 of SEQ ID NO: 1881330
uugagacuuguugauguau

SEQ ID NO: 2036161 - RNA, 19 nt, Artificial Sequence
  Description of Artificial Sequence: Synthetic oligonucleotide
  Antisense strand to SEQ ID NO: 2036160
auacaucaacaagucucaa

SEQ ID NO: 2036162 - RNA, 19 nt, Artificial Sequence
  Description of Artificial Sequence: Synthetic oligonucleotide
  Sense strand starting at position 846 of SEQ ID NO: 1881330
guaaauauacugcaguuua

SEQ ID NO: 2036163 - RNA, 19 nt, Artificial Sequence
  Description of Artificial Sequence: Synthetic oligonucleotide
  Antisense strand to SEQ ID NO: 2036162
uaaacugcaguauauuuac

SEQ ID NO: 2036164 - RNA, 19 nt, Artificial Sequence
  Description of Artificial Sequence: Synthetic oligonucleotide
  Sense strand starting at position 873 of SEQ ID NO: 1881330
gucuccuaucuguagacau

SEQ ID NO: 2036165 - RNA, 19 nt, Artificial Sequence
  Description of Artificial Sequence: Synthetic oligonucleotide
  Antisense strand to SEQ ID NO: 2036164
augucuacagauaggagac

SEQ ID NO: 2036166 - RNA, 19 nt, Artificial Sequence
  Description of Artificial Sequence: Synthetic oligonucleotide
  Sense strand starting at position 923 of SEQ ID NO: 1881330
gauaauguugaauguacau

SEQ ID NO: 2036167 - RNA, 19 nt, Artificial Sequence
  Description of Artificial Sequence: Synthetic oligonucleotide
  Antisense strand to SEQ ID NO: 2036166
auguacauucaacauuauc

SEQ ID NO: 2036168 - RNA, 19 nt, Artificial Sequence
  Description of Artificial Sequence: Synthetic oligonucleotide
  Sense strand starting at position 1061 of SEQ ID NO: 1881330
ccaguugaaucagcaauca

SEQ ID NO: 2036169 - RNA, 19 nt, Artificial Sequence
  Description of Artificial Sequence: Synthetic oligonucleotide
  Antisense strand to SEQ ID NO: 2036168
ugauugcugauucaacugg

SEQ ID NO: 2036170 - RNA, 19 nt, Artificial Sequence
  Description of Artificial Sequence: Synthetic oligonucleotide
  Sense strand starting at position 2071 of SEQ ID NO: 1881330
gguuaugaacucuguauag

SEQ ID NO: 2036171 - RNA, 19 nt, Artificial Sequence
  Description of Artificial Sequence: Synthetic oligonucleotide
  Antisense strand to SEQ ID NO: 2036170
cuauacagaguucauaacc

SEQ ID NO: 2036172 - RNA, 19 nt, Artificial Sequence
  Description of Artificial Sequence: Synthetic oligonucleotide
  Sense strand starting at position 2073 of SEQ ID NO: 1881330
uuaugaacucuguauagug

SEQ ID NO: 2036173 - RNA, 19 nt, Artificial Sequence
  Description of Artificial Sequence: Synthetic oligonucleotide
  Antisense strand to SEQ ID NO: 2036172
cacuauacagaguucauaa

SEQ ID NO: 2036174 - RNA, 19 nt, Artificial Sequence
  Description of Artificial Sequence: Synthetic oligonucleotide
  Sense strand starting at position 2095 of SEQ ID NO: 1881330
gacacuaaaugcgcuagaa

SEQ ID NO: 2036175 - RNA, 19 nt, Artificial Sequence
  Description of Artificial Sequence: Synthetic oligonucleotide
  Antisense strand to SEQ ID NO: 2036174
uucuagcgcauuuaguguc

SEQ ID NO: 2036176 - RNA, 19 nt, Artificial Sequence
  Description of Artificial Sequence: Synthetic oligonucleotide
  Sense strand starting at position 2099 of SEQ ID NO: 1881330
cuaaaugcgcuagaauaau

SEQ ID NO: 2036177 - RNA, 19 nt, Artificial Sequence
  Description of Artificial Sequence: Synthetic oligonucleotide
  Antisense strand to SEQ ID NO: 2036176
auuauucuagcgcauuuag

SEQ ID NO: 2036178 - RNA, 19 nt, Artificial Sequence
  Description of Artificial Sequence: Synthetic oligonucleotide
  Sense strand starting at position 2116 of SEQ ID NO: 1881330
auauaaucagaguguugug

SEQ ID NO: 2036179 - RNA, 19 nt, Artificial Sequence
  Description of Artificial Sequence: Synthetic oligonucleotide
  Antisense strand to SEQ ID NO: 2036178
cacaacacucugauuauau

SEQ ID NO: 2036180 - RNA, 19 nt, Artificial Sequence
  Description of Artificial Sequence: Synthetic oligonucleotide
  Sense strand starting at position 2173 of SEQ ID NO: 1881330
uaguuauguguauacugag

SEQ ID NO: 2036181 - RNA, 19 nt, Artificial Sequence
  Description of Artificial Sequence: Synthetic oligonucleotide
  Antisense strand to SEQ ID NO: 2036180
cucaguauacacauaacua

SEQ ID NO: 2036182 - RNA, 19 nt, Artificial Sequence
  Description of Artificial Sequence: Synthetic oligonucleotide
  Sense strand starting at position 2179 of SEQ ID NO: 1881330
uguguauacugagucagga

SEQ ID NO: 2036183 - RNA, 19 nt, Artificial Sequence
  Description of Artificial Sequence: Synthetic oligonucleotide
  Antisense strand to SEQ ID NO: 2036182
uccugacucaguauacaca

SEQ ID NO: 2036184 - RNA, 19 nt, Artificial Sequence
  Description of Artificial Sequence: Synthetic oligonucleotide
  Sense strand starting at position 2218 of SEQ ID NO: 1881330
guggguccugaccaaagau

SEQ ID NO: 2036185 - RNA, 19 nt, Artificial Sequence
  Description of Artificial Sequence: Synthetic oligonucleotide
  Antisense strand to SEQ ID NO: 2036184
aucuuuggucaggacccac

SEQ ID NO: 2036186 - RNA, 19 nt, Artificial Sequence
  Description of Artificial Sequence: Synthetic oligonucleotide
  Sense strand starting at position 2299 of SEQ ID NO: 1881330
gugugacuugacuagguuu

SEQ ID NO: 2036187 - RNA, 19 nt, Artificial Sequence
  Description of Artificial Sequence: Synthetic oligonucleotide
  Antisense strand to SEQ ID NO: 2036186
aaaccuagucaagucacac

SEQ ID NO: 2036188 - RNA, 19 nt, Artificial Sequence
  Description of Artificial Sequence: Synthetic oligonucleotide
  Sense strand starting at position 2305 of SEQ ID NO: 1881330
cuugacuagguuugucaga

SEQ ID NO: 2036189 - RNA, 19 nt, Artificial Sequence
  Description of Artificial Sequence: Synthetic oligonucleotide
  Antisense strand to SEQ ID NO: 2036188
ucugacaaaccuagucaag

SEQ ID NO: 2036190 - RNA, 19 nt, Artificial Sequence
  Description of Artificial Sequence: Synthetic oligonucleotide
  Sense strand starting at position 2306 of SEQ ID NO: 1881330
uugacuagguuugucagau

SEQ ID NO: 2036191 - RNA, 19 nt, Artificial Sequence
  Description of Artificial Sequence: Synthetic oligonucleotide
  Antisense strand to SEQ ID NO: 2036190
aucugacaaaccuagucaa

SEQ ID NO: 2036192 - RNA, 19 nt, Artificial Sequence
  Description of Artificial Sequence: Synthetic oligonucleotide
  Sense strand starting at position 2307 of SEQ ID NO: 1881330
ugacuagguuugucagauu

SEQ ID NO: 2036193 - RNA, 19 nt, Artificial Sequence
  Description of Artificial Sequence: Synthetic oligonucleotide
  Antisense strand to SEQ ID NO: 2036192
aaucugacaaaccuaguca

SEQ ID NO: 2036194 - RNA, 19 nt, Artificial Sequence
  Description of Artificial Sequence: Synthetic oligonucleotide
  Sense strand starting at position 2411 of SEQ ID NO: 1881330
gugaaauacuagcucauug

SEQ ID NO: 2036195 - RNA, 19 nt, Artificial Sequence
  Description of Artificial Sequence: Synthetic oligonucleotide
  Antisense strand to SEQ ID NO: 2036194
caaugagcuaguauuucac

SEQ ID NO: 2036196 - RNA, 19 nt, Artificial Sequence
  Description of Artificial Sequence: Synthetic oligonucleotide
  Sense strand starting at position 2440 of SEQ ID NO: 1881330
uggccuuucccugauuacu

SEQ ID NO: 2036197 - RNA, 19 nt, Artificial Sequence
  Description of Artificial Sequence: Synthetic oligonucleotide
  Antisense strand to SEQ ID NO: 2036196
aguaaucagggaaaggcca

SEQ ID NO: 2036198 - RNA, 19 nt, Artificial Sequence
  Description of Artificial Sequence: Synthetic oligonucleotide
  Sense strand starting at position 2480 of SEQ ID NO: 1881330
ggguuaauugaccauucuu

SEQ ID NO: 2036199 - RNA, 19 nt, Artificial Sequence
  Description of Artificial Sequence: Synthetic oligonucleotide
  Antisense strand to SEQ ID NO: 2036198
aagaauggucaauuaaccc

SEQ ID NO: 2036200 - RNA, 19 nt, Artificial Sequence
  Description of Artificial Sequence: Synthetic oligonucleotide
  Sense strand starting at position 2495 of SEQ ID NO: 1881330
ucuugugugcuuucuguga

SEQ ID NO: 2036201 - RNA, 19 nt, Artificial Sequence
  Description of Artificial Sequence: Synthetic oligonucleotide
  Antisense strand to SEQ ID NO: 2036200
ucacagaaagcacacaaga

SEQ ID NO: 2036202 - RNA, 19 nt, Artificial Sequence
  Description of Artificial Sequence: Synthetic oligonucleotide
  Sense strand starting at position 2773 of SEQ ID NO: 1881330
ugaagaccugcccaugauu

SEQ ID NO: 2036203 - RNA, 19 nt, Artificial Sequence
  Description of Artificial Sequence: Synthetic oligonucleotide
  Antisense strand to SEQ ID NO: 2036202
aaucaugggcaggucuuca

SEQ ID NO: 2036204 - RNA, 19 nt, Artificial Sequence
  Description of Artificial Sequence: Synthetic oligonucleotide
  Sense strand starting at position 2935 of SEQ ID NO: 1881330
ccuuguagucuauacacua

SEQ ID NO: 2036205 - RNA, 19 nt, Artificial Sequence
  Description of Artificial Sequence: Synthetic oligonucleotide
  Antisense strand to SEQ ID NO: 2036204
uaguguauagacuacaagg

SEQ ID NO: 2036206 - RNA, 19 nt, Artificial Sequence
  Description of Artificial Sequence: Synthetic oligonucleotide
  Sense strand starting at position 2981 of SEQ ID NO: 1881330
gauaguauuccaggaugug

SEQ ID NO: 2036207 - RNA, 19 nt, Artificial Sequence
  Description of Artificial Sequence: Synthetic oligonucleotide
  Antisense strand to SEQ ID NO: 2036206
cacauccuggaauacuauc

SEQ ID NO: 2036208 - RNA, 19 nt, Artificial Sequence
  Description of Artificial Sequence: Synthetic oligonucleotide
  Sense strand starting at position 2984 of SEQ ID NO: 1881330
aguauuccaggaugugauu

SEQ ID NO: 2036209 - RNA, 19 nt, Artificial Sequence
  Description of Artificial Sequence: Synthetic oligonucleotide
  Antisense strand to SEQ ID NO: 2036208
aaucacauccuggaauacu

SEQ ID NO: 2036210 - RNA, 19 nt, Artificial Sequence
  Description of Artificial Sequence: Synthetic oligonucleotide
  Sense strand starting at position 3057 of SEQ ID NO: 1881330
uaugguggauuugaucaau

SEQ ID NO: 2036211 - RNA, 19 nt, Artificial Sequence
  Description of Artificial Sequence: Synthetic oligonucleotide
  Antisense strand to SEQ ID NO: 2036210
auugaucaaauccaccaua

SEQ ID NO: 2036212 - RNA, 19 nt, Artificial Sequence
  Description of Artificial Sequence: Synthetic oligonucleotide
  Sense strand starting at position 3492 of SEQ ID NO: 1881330
cuuugagcuagcuggauuu

SEQ ID NO: 2036213 - RNA, 19 nt, Artificial Sequence
  Description of Artificial Sequence: Synthetic oligonucleotide
  Antisense strand to SEQ ID NO: 2036212
aaauccagcuagcucaaag

SEQ ID NO: 2036214 - RNA, 19 nt, Artificial Sequence
  Description of Artificial Sequence: Synthetic oligonucleotide
  Sense strand starting at position 3550 of SEQ ID NO: 1881330
uucuuuaaacuuggauagu

SEQ ID NO: 2036215 - RNA, 19 nt, Artificial Sequence
  Description of Artificial Sequence: Synthetic oligonucleotide
  Antisense strand to SEQ ID NO: 2036214
acuauccaaguuuaaagaa

SEQ ID NO: 2036216 - RNA, 19 nt, Artificial Sequence
  Description of Artificial Sequence: Synthetic oligonucleotide
  Sense strand starting at position 3654 of SEQ ID NO: 1881330
cuguguucucugcuuuauu

SEQ ID NO: 2036217 - RNA, 19 nt, Artificial Sequence
  Description of Artificial Sequence: Synthetic oligonucleotide
  Antisense strand to SEQ ID NO: 2036216
aauaaagcagagaacacag

SEQ ID NO: 2036218 - RNA, 19 nt, Artificial Sequence
  Description of Artificial Sequence: Synthetic oligonucleotide
  Sense strand starting at position 3665 of SEQ ID NO: 1881330
gcuuuauuccauuagguua

SEQ ID NO: 2036219 - RNA, 19 nt, Artificial Sequence
  Description of Artificial Sequence: Synthetic oligonucleotide
  Antisense strand to SEQ ID NO: 2036218
uaaccuaauggaauaaagc

SEQ ID NO: 2036220 - RNA, 19 nt, Artificial Sequence
  Description of Artificial Sequence: Synthetic oligonucleotide
  Sense strand starting at position 3678 of SEQ ID NO: 1881330
agguuauuugucuguaccu

SEQ ID NO: 2036221 - RNA, 19 nt, Artificial Sequence
  Description of Artificial Sequence: Synthetic oligonucleotide
  Antisense strand to SEQ ID NO: 2036220
agguacagacaaauaaccu

SEQ ID NO: 2036222 - RNA, 19 nt, Artificial Sequence
  Description of Artificial Sequence: Synthetic oligonucleotide
  Sense strand starting at position 3679 of SEQ ID NO: 1881330
gguuauuugucuguaccug

SEQ ID NO: 2036223 - RNA, 19 nt, Artificial Sequence
  Description of Artificial Sequence: Synthetic oligonucleotide
  Antisense strand to SEQ ID NO: 2036222
cagguacagacaaauaacc

SEQ ID NO: 2036224 - RNA, 19 nt, Artificial Sequence
  Description of Artificial Sequence: Synthetic oligonucleotide
  Sense strand starting at position 3796 of SEQ ID NO: 1881330
gugauaugucuuggaucau

SEQ ID NO: 2036225 - RNA, 19 nt, Artificial Sequence
  Description of Artificial Sequence: Synthetic oligonucleotide
  Antisense strand to SEQ ID NO: 2036224
augauccaagacauaucac

SEQ ID NO: 2036226 - RNA, 19 nt, Artificial Sequence
  Description of Artificial Sequence: Synthetic oligonucleotide
  Sense strand starting at position 207 of SEQ ID NO: 1881331
cuuauuauguccuccauga

SEQ ID NO: 2036227 - RNA, 19 nt, Artificial Sequence
  Description of Artificial Sequence: Synthetic oligonucleotide
  Antisense strand to SEQ ID NO: 2036226
ucauggaggacauaauaag

SEQ ID NO: 2036228 - RNA, 19 nt, Artificial Sequence
  Description of Artificial Sequence: Synthetic oligonucleotide
  Sense strand starting at position 211 of SEQ ID NO: 1881331
uuauguccuccaugacauu

SEQ ID NO: 2036229 - RNA, 19 nt, Artificial Sequence
  Description of Artificial Sequence: Synthetic oligonucleotide
  Antisense strand to SEQ ID NO: 2036228
aaugucauggaggacauaa

SEQ ID NO: 2036230 - RNA, 19 nt, Artificial Sequence
  Description of Artificial Sequence: Synthetic oligonucleotide
  Sense strand starting at position 301 of SEQ ID NO: 1881331
cuugaucuggccuagaacu

SEQ ID NO: 2036231 - RNA, 19 nt, Artificial Sequence
  Description of Artificial Sequence: Synthetic oligonucleotide
  Antisense strand to SEQ ID NO: 2036230
aguucuaggccagaucaag

SEQ ID NO: 2036232 - RNA, 19 nt, Artificial Sequence
  Description of Artificial Sequence: Synthetic oligonucleotide
  Sense strand starting at position 312 of SEQ ID NO: 1881331
cuagaacucugguuggcaa

SEQ ID NO: 2036233 - RNA, 19 nt, Artificial Sequence
  Description of Artificial Sequence: Synthetic oligonucleotide
  Antisense strand to SEQ ID NO: 2036232
uugccaaccagaguucuag

SEQ ID NO: 2036234 - RNA, 19 nt, Artificial Sequence
  Description of Artificial Sequence: Synthetic oligonucleotide
  Sense strand starting at position 407 of SEQ ID NO: 1881331
ggaauacuguccucaccag

SEQ ID NO: 2036235 - RNA, 19 nt, Artificial Sequence
  Description of Artificial Sequence: Synthetic oligonucleotide
  Antisense strand to SEQ ID NO: 2036234
cuggugaggacaguauucc

SEQ ID NO: 2036236 - RNA, 19 nt, Artificial Sequence
  Description of Artificial Sequence: Synthetic oligonucleotide
  Sense strand starting at position 554 of SEQ ID NO: 1881331
auaaccaugccuuagagua

SEQ ID NO: 2036237 - RNA, 19 nt, Artificial Sequence
  Description of Artificial Sequence: Synthetic oligonucleotide
  Antisense strand to SEQ ID NO: 2036236
uacucuaaggcaugguuau

SEQ ID NO: 2036238 - RNA, 19 nt, Artificial Sequence
  Description of Artificial Sequence: Synthetic oligonucleotide
  Sense strand starting at position 597 of SEQ ID NO: 1881331
gguucauguggugaaucua

SEQ ID NO: 2036239 - RNA, 19 nt, Artificial Sequence
  Description of Artificial Sequence: Synthetic oligonucleotide
  Antisense strand to SEQ ID NO: 2036238
uagauucaccacaugaacc

SEQ ID NO: 2036240 - RNA, 19 nt, Artificial Sequence
  Description of Artificial Sequence: Synthetic oligonucleotide
  Sense strand starting at position 745 of SEQ ID NO: 1881331
cugaacagcucugugauca

SEQ ID NO: 2036241 - RNA, 19 nt, Artificial Sequence
  Description of Artificial Sequence: Synthetic oligonucleotide
  Antisense strand to SEQ ID NO: 2036240
ugaucacagagcuguucag

SEQ ID NO: 2036242 - RNA, 19 nt, Artificial Sequence
  Description of Artificial Sequence: Synthetic oligonucleotide
  Sense strand starting at position 746 of SEQ ID NO: 1881331
ugaacagcucugugaucau

SEQ ID NO: 2036243 - RNA, 19 nt, Artificial Sequence
  Description of Artificial Sequence: Synthetic oligonucleotide
  Antisense strand to SEQ ID NO: 2036242
augaucacagagcuguuca

SEQ ID NO: 2036244 - RNA, 19 nt, Artificial Sequence
  Description of Artificial Sequence: Synthetic oligonucleotide
  Sense strand starting at position 784 of SEQ ID NO: 1881331
guggacaaauccuucuguu

SEQ ID NO: 2036245 - RNA, 19 nt, Artificial Sequence
  Description of Artificial Sequence: Synthetic oligonucleotide
  Antisense strand to SEQ ID NO: 2036244
aacagaaggauuuguccac

SEQ ID NO: 2036246 - RNA, 19 nt, Artificial Sequence
  Description of Artificial Sequence: Synthetic oligonucleotide
  Sense strand starting at position 847 of SEQ ID NO: 1881331
ucucgaauuucucaaagaa

SEQ ID NO: 2036247 - RNA, 19 nt, Artificial Sequence
  Description of Artificial Sequence: Synthetic oligonucleotide
  Antisense strand to SEQ ID NO: 2036246
uucuuugagaaauucgaga

SEQ ID NO: 2036248 - RNA, 19 nt, Artificial Sequence
  Description of Artificial Sequence: Synthetic oligonucleotide
  Sense strand starting at position 893 of SEQ ID NO: 1881331
cuuuguucuccuuagaagu

SEQ ID NO: 2036249 - RNA, 19 nt, Artificial Sequence
  Description of Artificial Sequence: Synthetic oligonucleotide
  Antisense strand to SEQ ID NO: 2036248
acuucuaaggagaacaaag

SEQ ID NO: 2036250 - RNA, 19 nt, Artificial Sequence
  Description of Artificial Sequence: Synthetic oligonucleotide
  Sense strand starting at position 1156 of SEQ ID NO: 1881331
auuguaauuucugcagcaa

SEQ ID NO: 2036251 - RNA, 19 nt, Artificial Sequence
  Description of Artificial Sequence: Synthetic oligonucleotide
  Antisense strand to SEQ ID NO: 2036250
uugcugcagaaauuacaau

SEQ ID NO: 2036252 - RNA, 19 nt, Artificial Sequence
  Description of Artificial Sequence: Synthetic oligonucleotide
  Sense strand starting at position 1225 of SEQ ID NO: 1881331
ugccauuauuugguuguga

SEQ ID NO: 2036253 - RNA, 19 nt, Artificial Sequence
  Description of Artificial Sequence: Synthetic oligonucleotide
  Antisense strand to SEQ ID NO: 2036252
ucacaaccaaauaauggca

SEQ ID NO: 2036254 - RNA, 19 nt, Artificial Sequence
  Description of Artificial Sequence: Synthetic oligonucleotide
  Sense strand starting at position 1226 of SEQ ID NO: 1881331
gccauuauuugguugugag

SEQ ID NO: 2036255 - RNA, 19 nt, Artificial Sequence
  Description of Artificial Sequence: Synthetic oligonucleotide
  Antisense strand to SEQ ID NO: 2036254
cucacaaccaaauaauggc

SEQ ID NO: 2036256 - RNA, 19 nt, Artificial Sequence
  Description of Artificial Sequence: Synthetic oligonucleotide
  Sense strand starting at position 1227 of SEQ ID NO: 1881331
ccauuauuugguugugagu

SEQ ID NO: 2036257 - RNA, 19 nt, Artificial Sequence
  Description of Artificial Sequence: Synthetic oligonucleotide
  Antisense strand to SEQ ID NO: 2036256
acucacaaccaaauaaugg

SEQ ID NO: 2036258 - RNA, 19 nt, Artificial Sequence
  Description of Artificial Sequence: Synthetic oligonucleotide
  Sense strand starting at position 1289 of SEQ ID NO: 1881331
auucgaaaggcaugggaau

SEQ ID NO: 2036259 - RNA, 19 nt, Artificial Sequence
  Description of Artificial Sequence: Synthetic oligonucleotide
  Antisense strand to SEQ ID NO: 2036258
auucccaugccuuucgaau

SEQ ID NO: 2036260 - RNA, 19 nt, Artificial Sequence
  Description of Artificial Sequence: Synthetic oligonucleotide
  Sense strand starting at position 1290 of SEQ ID NO: 1881331
uucgaaaggcaugggaaua

SEQ ID NO: 2036261 - RNA, 19 nt, Artificial Sequence
  Description of Artificial Sequence: Synthetic oligonucleotide
  Antisense strand to SEQ ID NO: 2036260
uauucccaugccuuucgaa

SEQ ID NO: 2036262 - RNA, 19 nt, Artificial Sequence
  Description of Artificial Sequence: Synthetic oligonucleotide
  Sense strand starting at position 1515 of SEQ ID NO: 1881331
aucaaagagguuugucauc

SEQ ID NO: 2036263 - RNA, 19 nt, Artificial Sequence
  Description of Artificial Sequence: Synthetic oligonucleotide
  Antisense strand to SEQ ID NO: 2036262
gaugacaaaccucuuugau

SEQ ID NO: 2036264 - RNA, 19 nt, Artificial Sequence
  Description of Artificial Sequence: Synthetic oligonucleotide
  Sense strand starting at position 1517 of SEQ ID NO: 1881331
caaagagguuugucaucuu

SEQ ID NO: 2036265 - RNA, 19 nt, Artificial Sequence
  Description of Artificial Sequence: Synthetic oligonucleotide
  Antisense strand to SEQ ID NO: 2036264
aagaugacaaaccucuuug

SEQ ID NO: 2036266 - RNA, 19 nt, Artificial Sequence
  Description of Artificial Sequence: Synthetic oligonucleotide
  Sense strand starting at position 1598 of SEQ ID NO: 1881331
aaguuccaccuguggaaau

SEQ ID NO: 2036267 - RNA, 19 nt, Artificial Sequence
  Description of Artificial Sequence: Synthetic oligonucleotide
  Antisense strand to SEQ ID NO: 2036266
auuuccacagguggaacuu

SEQ ID NO: 2036268 - RNA, 19 nt, Artificial Sequence
  Description of Artificial Sequence: Synthetic oligonucleotide
  Sense strand starting at position 1600 of SEQ ID NO: 1881331
guuccaccuguggaaauua

SEQ ID NO: 2036269 - RNA, 19 nt, Artificial Sequence
  Description of Artificial Sequence: Synthetic oligonucleotide
  Antisense strand to SEQ ID NO: 2036268
uaauuuccacagguggaac

SEQ ID NO: 2036270 - RNA, 19 nt, Artificial Sequence
  Description of Artificial Sequence: Synthetic oligonucleotide
  Sense strand starting at position 1610 of SEQ ID NO: 1881331
uggaaauuaguguguuaaa

SEQ ID NO: 2036271 - RNA, 19 nt, Artificial Sequence
  Description of Artificial Sequence: Synthetic oligonucleotide
  Antisense strand to SEQ ID NO: 2036270
uuuaacacacuaauuucca

SEQ ID NO: 2036272 - RNA, 19 nt, Artificial Sequence
  Description of Artificial Sequence: Synthetic oligonucleotide
  Sense strand starting at position 1611 of SEQ ID NO: 1881331
ggaaauuaguguguuaaau

SEQ ID NO: 2036273 - RNA, 19 nt, Artificial Sequence
  Description of Artificial Sequence: Synthetic oligonucleotide
  Antisense strand to SEQ ID NO: 2036272
auuuaacacacuaauuucc

SEQ ID NO: 2036274 - RNA, 19 nt, Artificial Sequence
  Description of Artificial Sequence: Synthetic oligonucleotide
  Sense strand starting at position 2193 of SEQ ID NO: 1881331
guguuaacuguuuaucuga

SEQ ID NO: 2036275 - RNA, 19 nt, Artificial Sequence
  Description of Artificial Sequence: Synthetic oligonucleotide
  Antisense strand to SEQ ID NO: 2036274
ucagauaaacaguuaacac

SEQ ID NO: 2036276 - RNA, 19 nt, Artificial Sequence
  Description of Artificial Sequence: Synthetic oligonucleotide
  Sense strand starting at position 2195 of SEQ ID NO: 1881331
guuaacuguuuaucugaaa

SEQ ID NO: 2036277 - RNA, 19 nt, Artificial Sequence
  Description of Artificial Sequence: Synthetic oligonucleotide
  Antisense strand to SEQ ID NO: 2036276
uuucagauaaacaguuaac

SEQ ID NO: 2036278 - RNA, 19 nt, Artificial Sequence
  Description of Artificial Sequence: Synthetic oligonucleotide
  Sense strand starting at position 2245 of SEQ ID NO: 1881331
cugguaacccuaggacuaa

SEQ ID NO: 2036279 - RNA, 19 nt, Artificial Sequence
  Description of Artificial Sequence: Synthetic oligonucleotide
  Antisense strand to SEQ ID NO: 2036278
uuaguccuaggguuaccag

SEQ ID NO: 2036280 - RNA, 19 nt, Artificial Sequence
  Description of Artificial Sequence: Synthetic oligonucleotide
  Sense strand starting at position 2276 of SEQ ID NO: 1881331
gauaauuucugucagauga

SEQ ID NO: 2036281 - RNA, 19 nt, Artificial Sequence
  Description of Artificial Sequence: Synthetic oligonucleotide
  Antisense strand to SEQ ID NO: 2036280
ucaucugacagaaauuauc

SEQ ID NO: 2036282 - RNA, 19 nt, Artificial Sequence
  Description of Artificial Sequence: Synthetic oligonucleotide
  Sense strand starting at position 2283 of SEQ ID NO: 1881331
ucugucagaugacucaauu

SEQ ID NO: 2036283 - RNA, 19 nt, Artificial Sequence
  Description of Artificial Sequence: Synthetic oligonucleotide
  Antisense strand to SEQ ID NO: 2036282
aauugagucaucugacaga

SEQ ID NO: 2036284 - RNA, 19 nt, Artificial Sequence
  Description of Artificial Sequence: Synthetic oligonucleotide
  Sense strand starting at position 2306 of SEQ ID NO: 1881331
uguuauagauugccugaga

SEQ ID NO: 2036285 - RNA, 19 nt, Artificial Sequence
  Description of Artificial Sequence: Synthetic oligonucleotide
  Antisense strand to SEQ ID NO: 2036284
ucucaggcaaucuauaaca

SEQ ID NO: 2036286 - RNA, 19 nt, Artificial Sequence
  Description of Artificial Sequence: Synthetic oligonucleotide
  Sense strand starting at position 2307 of SEQ ID NO: 1881331
guuauagauugccugagau

SEQ ID NO: 2036287 - RNA, 19 nt, Artificial Sequence
  Description of Artificial Sequence: Synthetic oligonucleotide
  Antisense strand to SEQ ID NO: 2036286
aucucaggcaaucuauaac

SEQ ID NO: 2036288 - RNA, 19 nt, Artificial Sequence
  Description of Artificial Sequence: Synthetic oligonucleotide
  Sense strand starting at position 2341 of SEQ ID NO: 1881331
gagugaucauaaguugaca

SEQ ID NO: 2036289 - RNA, 19 nt, Artificial Sequence
  Description of Artificial Sequence: Synthetic oligonucleotide
  Antisense strand to SEQ ID NO: 2036288
ugucaacuuaugaucacuc

SEQ ID NO: 2036290 - RNA, 19 nt, Artificial Sequence
  Description of Artificial Sequence: Synthetic oligonucleotide
  Sense strand starting at position 2376 of SEQ ID NO: 1881331
gaacuaauuguuggucaag

SEQ ID NO: 2036291 - RNA, 19 nt, Artificial Sequence
  Description of Artificial Sequence: Synthetic oligonucleotide
  Antisense strand to SEQ ID NO: 2036290
cuugaccaacaauuaguuc

SEQ ID NO: 2036292 - RNA, 19 nt, Artificial Sequence
  Description of Artificial Sequence: Synthetic oligonucleotide
  Sense strand starting at position 2377 of SEQ ID NO: 1881331
aacuaauuguuggucaagu

SEQ ID NO: 2036293 - RNA, 19 nt, Artificial Sequence
  Description of Artificial Sequence: Synthetic oligonucleotide
  Antisense strand to SEQ ID NO: 2036292
acuugaccaacaauuaguu

SEQ ID NO: 2036294 - RNA, 19 nt, Artificial Sequence
  Description of Artificial Sequence: Synthetic oligonucleotide
  Sense strand starting at position 2623 of SEQ ID NO: 1881331
aagguaaggcaguguauuu

SEQ ID NO: 2036295 - RNA, 19 nt, Artificial Sequence
  Description of Artificial Sequence: Synthetic oligonucleotide
  Antisense strand to SEQ ID NO: 2036294
aaauacacugccuuaccuu

SEQ ID NO: 2036296 - RNA, 19 nt, Artificial Sequence
  Description of Artificial Sequence: Synthetic oligonucleotide
  Sense strand starting at position 2825 of SEQ ID NO: 1881331
acaauaugggccugguaca

SEQ ID NO: 2036297 - RNA, 19 nt, Artificial Sequence
  Description of Artificial Sequence: Synthetic oligonucleotide
  Antisense strand to SEQ ID NO: 2036296
uguaccaggcccauauugu

SEQ ID NO: 2036298 - RNA, 19 nt, Artificial Sequence
  Description of Artificial Sequence: Synthetic oligonucleotide
  Sense strand starting at position 2921 of SEQ ID NO: 1881331
ucaucaauggugugggaau

SEQ ID NO: 2036299 - RNA, 19 nt, Artificial Sequence
  Description of Artificial Sequence: Synthetic oligonucleotide
  Antisense strand to SEQ ID NO: 2036298
auucccacaccauugauga

SEQ ID NO: 2036300 - RNA, 19 nt, Artificial Sequence
  Description of Artificial Sequence: Synthetic oligonucleotide
  Sense strand starting at position 3187 of SEQ ID NO: 1881331
gcuuaagaagcagaauacu

SEQ ID NO: 2036301 - RNA, 19 nt, Artificial Sequence
  Description of Artificial Sequence: Synthetic oligonucleotide
  Antisense strand to SEQ ID NO: 2036300
aguauucugcuucuuaagc

SEQ ID NO: 2036302 - RNA, 19 nt, Artificial Sequence
  Description of Artificial Sequence: Synthetic oligonucleotide
  Sense strand starting at position 3780 of SEQ ID NO: 1881331
aguuucucacagcagagau

SEQ ID NO: 2036303 - RNA, 19 nt, Artificial Sequence
  Description of Artificial Sequence: Synthetic oligonucleotide
  Antisense strand to SEQ ID NO: 2036302
aucucugcugugagaaacu

SEQ ID NO: 2036304 - RNA, 19 nt, Artificial Sequence
  Description of Artificial Sequence: Synthetic oligonucleotide
  Sense strand starting at position 3967 of SEQ ID NO: 1881331
uagguagccuuucuggaaa

SEQ ID NO: 2036305 - RNA, 19 nt, Artificial Sequence
  Description of Artificial Sequence: Synthetic oligonucleotide
  Antisense strand to SEQ ID NO: 2036304
uuuccagaaaggcuaccua

SEQ ID NO: 2036306 - RNA, 19 nt, Artificial Sequence
  Description of Artificial Sequence: Synthetic oligonucleotide
  Sense strand starting at position 207 of SEQ ID NO: 1881332
cuuauuauguccuccauga

SEQ ID NO: 2036307 - RNA, 19 nt, Artificial Sequence
  Description of Artificial Sequence: Synthetic oligonucleotide
  Antisense strand to SEQ ID NO: 2036306
ucauggaggacauaauaag

SEQ ID NO: 2036308 - RNA, 19 nt, Artificial Sequence
  Description of Artificial Sequence: Synthetic oligonucleotide
  Sense strand starting at position 211 of SEQ ID NO: 1881332
uuauguccuccaugacauu

SEQ ID NO: 2036309 - RNA, 19 nt, Artificial Sequence
  Description of Artificial Sequence: Synthetic oligonucleotide
  Antisense strand to SEQ ID NO: 2036308
aaugucauggaggacauaa

SEQ ID NO: 2036310 - RNA, 19 nt, Artificial Sequence
  Description of Artificial Sequence: Synthetic oligonucleotide
  Sense strand starting at position 301 of SEQ ID NO: 1881332
cuugaucuggccuagaacu

SEQ ID NO: 2036311 - RNA, 19 nt, Artificial Sequence
  Description of Artificial Sequence: Synthetic oligonucleotide
  Antisense strand to SEQ ID NO: 2036310
aguucuaggccagaucaag

SEQ ID NO: 2036312 - RNA, 19 nt, Artificial Sequence
  Description of Artificial Sequence: Synthetic oligonucleotide
  Sense strand starting at position 312 of SEQ ID NO: 1881332
cuagaacucugguuggcaa

SEQ ID NO: 2036313 - RNA, 19 nt, Artificial Sequence
  Description of Artificial Sequence: Synthetic oligonucleotide
  Antisense strand to SEQ ID NO: 2036312
uugccaaccagaguucuag

SEQ ID NO: 2036314 - RNA, 19 nt, Artificial Sequence
  Description of Artificial Sequence: Synthetic oligonucleotide
  Sense strand starting at position 407 of SEQ ID NO: 1881332
ggaauacuguccucaccag

SEQ ID NO: 2036315 - RNA, 19 nt, Artificial Sequence
  Description of Artificial Sequence: Synthetic oligonucleotide
  Antisense strand to SEQ ID NO: 2036314
cuggugaggacaguauucc

SEQ ID NO: 2036316 - RNA, 19 nt, Artificial Sequence
  Description of Artificial Sequence: Synthetic oligonucleotide
  Sense strand starting at position 554 of SEQ ID NO: 1881332
auaaccaugccuuagagua

SEQ ID NO: 2036317 - RNA, 19 nt, Artificial Sequence
  Description of Artificial Sequence: Synthetic oligonucleotide
  Antisense strand to SEQ ID NO: 2036316
uacucuaaggcaugguuau

SEQ ID NO: 2036318 - RNA, 19 nt, Artificial Sequence
  Description of Artificial Sequence: Synthetic oligonucleotide
  Sense strand starting at position 597 of SEQ ID NO: 1881332
gguucauguggugaaucua

SEQ ID NO: 2036319 - RNA, 19 nt, Artificial Sequence
  Description of Artificial Sequence: Synthetic oligonucleotide
  Antisense strand to SEQ ID NO: 2036318
uagauucaccacaugaacc

SEQ ID NO: 2036320 - RNA, 19 nt, Artificial Sequence
  Description of Artificial Sequence: Synthetic oligonucleotide
  Sense strand starting at position 745 of SEQ ID NO: 1881332
cugaacagcucugugauca

SEQ ID NO: 2036321 - RNA, 19 nt, Artificial Sequence
  Description of Artificial Sequence: Synthetic oligonucleotide
  Antisense strand to SEQ ID NO: 2036320
ugaucacagagcuguucag

SEQ ID NO: 2036322 - RNA, 19 nt, Artificial Sequence
  Description of Artificial Sequence: Synthetic oligonucleotide
  Sense strand starting at position 746 of SEQ ID NO: 1881332
ugaacagcucugugaucau

SEQ ID NO: 2036323 - RNA, 19 nt, Artificial Sequence
  Description of Artificial Sequence: Synthetic oligonucleotide
  Antisense strand to SEQ ID NO: 2036322
augaucacagagcuguuca

SEQ ID NO: 2036324 - RNA, 19 nt, Artificial Sequence
  Description of Artificial Sequence: Synthetic oligonucleotide
  Sense strand starting at position 784 of SEQ ID NO: 1881332
guggacaaauccuucuguu

SEQ ID NO: 2036325 - RNA, 19 nt, Artificial Sequence
  Description of Artificial Sequence: Synthetic oligonucleotide
  Antisense strand to SEQ ID NO: 2036324
aacagaaggauuuguccac

SEQ ID NO: 2036326 - RNA, 19 nt, Artificial Sequence
  Description of Artificial Sequence: Synthetic oligonucleotide
  Sense strand starting at position 847 of SEQ ID NO: 1881332
ucucgaauuucucaaagaa

SEQ ID NO: 2036327 - RNA, 19 nt, Artificial Sequence
  Description of Artificial Sequence: Synthetic oligonucleotide
  Antisense strand to SEQ ID NO: 2036326
uucuuugagaaauucgaga

SEQ ID NO: 2036328 - RNA, 19 nt, Artificial Sequence
  Description of Artificial Sequence: Synthetic oligonucleotide
  Sense strand starting at position 893 of SEQ ID NO: 1881332
cuuuguucuccuuagaagu

SEQ ID NO: 2036329 - RNA, 19 nt, Artificial Sequence
  Description of Artificial Sequence: Synthetic oligonucleotide
  Antisense strand to SEQ ID NO: 2036328
acuucuaaggagaacaaag

SEQ ID NO: 2036330 - RNA, 19 nt, Artificial Sequence
  Description of Artificial Sequence: Synthetic oligonucleotide
  Sense strand starting at position 1156 of SEQ ID NO: 1881332
auuguaauuucugcagcaa

SEQ ID NO: 2036331 - RNA, 19 nt, Artificial Sequence
  Description of Artificial Sequence: Synthetic oligonucleotide
  Antisense strand to SEQ ID NO: 2036330
uugcugcagaaauuacaau

SEQ ID NO: 2036332 - RNA, 19 nt, Artificial Sequence
  Description of Artificial Sequence: Synthetic oligonucleotide
  Sense strand starting at position 1225 of SEQ ID NO: 1881332
ugccauuauuugguuguga

SEQ ID NO: 2036333 - RNA, 19 nt, Artificial Sequence
  Description of Artificial Sequence: Synthetic oligonucleotide
  Antisense strand to SEQ ID NO: 2036332
ucacaaccaaauaauggca

SEQ ID NO: 2036334 - RNA, 19 nt, Artificial Sequence
  Description of Artificial Sequence: Synthetic oligonucleotide
  Sense strand starting at position 1226 of SEQ ID NO: 1881332
gccauuauuugguugugag

SEQ ID NO: 2036335 - RNA, 19 nt, Artificial Sequence
  Description of Artificial Sequence: Synthetic oligonucleotide
  Antisense strand to SEQ ID NO: 2036334
cucacaaccaaauaauggc

SEQ ID NO: 2036336 - RNA, 19 nt, Artificial Sequence
  Description of Artificial Sequence: Synthetic oligonucleotide
  Sense strand starting at position 1227 of SEQ ID NO: 1881332
ccauuauuugguugugagu

SEQ ID NO: 2036337 - RNA, 19 nt, Artificial Sequence
  Description of Artificial Sequence: Synthetic oligonucleotide
  Antisense strand to SEQ ID NO: 2036336
acucacaaccaaauaaugg

SEQ ID NO: 2036338 - RNA, 19 nt, Artificial Sequence
  Description of Artificial Sequence: Synthetic oligonucleotide
  Sense strand starting at position 1289 of SEQ ID NO: 1881332
auucgaaaggcaugggaau

SEQ ID NO: 2036339 - RNA, 19 nt, Artificial Sequence
  Description of Artificial Sequence: Synthetic oligonucleotide
  Antisense strand to SEQ ID NO: 2036338
auucccaugccuuucgaau

SEQ ID NO: 2036340 - RNA, 19 nt, Artificial Sequence
  Description of Artificial Sequence: Synthetic oligonucleotide
  Sense strand starting at position 1290 of SEQ ID NO: 1881332
uucgaaaggcaugggaaua

SEQ ID NO: 2036341 - RNA, 19 nt, Artificial Sequence
  Description of Artificial Sequence: Synthetic oligonucleotide
  Antisense strand to SEQ ID NO: 2036340
uauucccaugccuuucgaa

SEQ ID NO: 2036342 - RNA, 19 nt, Artificial Sequence
  Description of Artificial Sequence: Synthetic oligonucleotide
  Sense strand starting at position 1515 of SEQ ID NO: 1881332
aucaaagagguuugucauc

SEQ ID NO: 2036343 - RNA, 19 nt, Artificial Sequence
  Description of Artificial Sequence: Synthetic oligonucleotide
  Antisense strand to SEQ ID NO: 2036342
gaugacaaaccucuuugau

SEQ ID NO: 2036344 - RNA, 19 nt, Artificial Sequence
  Description of Artificial Sequence: Synthetic oligonucleotide
  Sense strand starting at position 1517 of SEQ ID NO: 1881332
caaagagguuugucaucuu

SEQ ID NO: 2036345 - RNA, 19 nt, Artificial Sequence
  Description of Artificial Sequence: Synthetic oligonucleotide
  Antisense strand to SEQ ID NO: 2036344
aagaugacaaaccucuuug

SEQ ID NO: 2036346 - RNA, 19 nt, Artificial Sequence
  Description of Artificial Sequence: Synthetic oligonucleotide
  Sense strand starting at position 1598 of SEQ ID NO: 1881332
aaguuccaccuguggaaau

SEQ ID NO: 2036347 - RNA, 19 nt, Artificial Sequence
  Description of Artificial Sequence: Synthetic oligonucleotide
  Antisense strand to SEQ ID NO: 2036346
auuuccacagguggaacuu

SEQ ID NO: 2036348 - RNA, 19 nt, Artificial Sequence
  Description of Artificial Sequence: Synthetic oligonucleotide
  Sense strand starting at position 1600 of SEQ ID NO: 1881332
guuccaccuguggaaauua

SEQ ID NO: 2036349 - RNA, 19 nt, Artificial Sequence
  Description of Artificial Sequence: Synthetic oligonucleotide
  Antisense strand to SEQ ID NO: 2036348
uaauuuccacagguggaac

SEQ ID NO: 2036350 - RNA, 19 nt, Artificial Sequence
  Description of Artificial Sequence: Synthetic oligonucleotide
  Sense strand starting at position 1610 of SEQ ID NO: 1881332
uggaaauuaguguguuaaa

SEQ ID NO: 2036351 - RNA, 19 nt, Artificial Sequence
  Description of Artificial Sequence: Synthetic oligonucleotide
  Antisense strand to SEQ ID NO: 2036350
uuuaacacacuaauuucca

SEQ ID NO: 2036352 - RNA, 19 nt, Artificial Sequence
  Description of Artificial Sequence: Synthetic oligonucleotide
  Sense strand starting at position 1611 of SEQ ID NO: 1881332
ggaaauuaguguguuaaau

SEQ ID NO: 2036353 - RNA, 19 nt, Artificial Sequence
  Description of Artificial Sequence: Synthetic oligonucleotide
  Antisense strand to SEQ ID NO: 2036352
auuuaacacacuaauuucc

SEQ ID NO: 2036354 - RNA, 19 nt, Artificial Sequence
  Description of Artificial Sequence: Synthetic oligonucleotide
  Sense strand starting at position 2193 of SEQ ID NO: 1881332
guguuaacuguuuaucuga

SEQ ID NO: 2036355 - RNA, 19 nt, Artificial Sequence
  Description of Artificial Sequence: Synthetic oligonucleotide
  Antisense strand to SEQ ID NO: 2036354
ucagauaaacaguuaacac

SEQ ID NO: 2036356 - RNA, 19 nt, Artificial Sequence
  Description of Artificial Sequence: Synthetic oligonucleotide
  Sense strand starting at position 2195 of SEQ ID NO: 1881332
guuaacuguuuaucugaaa

SEQ ID NO: 2036357 - RNA, 19 nt, Artificial Sequence
  Description of Artificial Sequence: Synthetic oligonucleotide
  Antisense strand to SEQ ID NO: 2036356
uuucagauaaacaguuaac

SEQ ID NO: 2036358 - RNA, 19 nt, Artificial Sequence
  Description of Artificial Sequence: Synthetic oligonucleotide
  Sense strand starting at position 2245 of SEQ ID NO: 1881332
cugguaacccuaggacuaa

SEQ ID NO: 2036359 - RNA, 19 nt, Artificial Sequence
  Description of Artificial Sequence: Synthetic oligonucleotide
  Antisense strand to SEQ ID NO: 2036358
uuaguccuaggguuaccag

SEQ ID NO: 2036360 - RNA, 19 nt, Artificial Sequence
  Description of Artificial Sequence: Synthetic oligonucleotide
  Sense strand starting at position 2276 of SEQ ID NO: 1881332
gauaauuucugucagauga

SEQ ID NO: 2036361 - RNA, 19 nt, Artificial Sequence
  Description of Artificial Sequence: Synthetic oligonucleotide
  Antisense strand to SEQ ID NO: 2036360
ucaucugacagaaauuauc

SEQ ID NO: 2036362 - RNA, 19 nt, Artificial Sequence
  Description of Artificial Sequence: Synthetic oligonucleotide
  Sense strand starting at position 2283 of SEQ ID NO: 1881332
ucugucagaugacucaauu

SEQ ID NO: 2036363 - RNA, 19 nt, Artificial Sequence
  Description of Artificial Sequence: Synthetic oligonucleotide
  Antisense strand to SEQ ID NO: 2036362
aauugagucaucugacaga

SEQ ID NO: 2036364 - RNA, 19 nt, Artificial Sequence
  Description of Artificial Sequence: Synthetic oligonucleotide
  Sense strand starting at position 2306 of SEQ ID NO: 1881332
uguuauagauugccugaga

SEQ ID NO: 2036365 - RNA, 19 nt, Artificial Sequence
  Description of Artificial Sequence: Synthetic oligonucleotide
  Antisense strand to SEQ ID NO: 2036364
ucucaggcaaucuauaaca

SEQ ID NO: 2036366 - RNA, 19 nt, Artificial Sequence
  Description of Artificial Sequence: Synthetic oligonucleotide
  Sense strand starting at position 2307 of SEQ ID NO: 1881332
guuauagauugccugagau

SEQ ID NO: 2036367 - RNA, 19 nt, Artificial Sequence
  Description of Artificial Sequence: Synthetic oligonucleotide
  Antisense strand to SEQ ID NO: 2036366
aucucaggcaaucuauaac

SEQ ID NO: 2036368 - RNA, 19 nt, Artificial Sequence
  Description of Artificial Sequence: Synthetic oligonucleotide
  Sense strand starting at position 2341 of SEQ ID NO: 1881332
gagugaucauaaguugaca

SEQ ID NO: 2036369 - RNA, 19 nt, Artificial Sequence
  Description of Artificial Sequence: Synthetic oligonucleotide
  Antisense strand to SEQ ID NO: 2036368
ugucaacuuaugaucacuc

SEQ ID NO: 2036370 - RNA, 19 nt, Artificial Sequence
  Description of Artificial Sequence: Synthetic oligonucleotide
  Sense strand starting at position 2376 of SEQ ID NO: 1881332
gaacuaauuguuggucaag

SEQ ID NO: 2036371 - RNA, 19 nt, Artificial Sequence
  Description of Artificial Sequence: Synthetic oligonucleotide
  Antisense strand to SEQ ID NO: 2036370
cuugaccaacaauuaguuc

SEQ ID NO: 2036372 - RNA, 19 nt, Artificial Sequence
  Description of Artificial Sequence: Synthetic oligonucleotide
  Sense strand starting at position 2377 of SEQ ID NO: 1881332
aacuaauuguuggucaagu

SEQ ID NO: 2036373 - RNA, 19 nt, Artificial Sequence
  Description of Artificial Sequence: Synthetic oligonucleotide
  Antisense strand to SEQ ID NO: 2036372
acuugaccaacaauuaguu

SEQ ID NO: 2036374 - RNA, 19 nt, Artificial Sequence
  Description of Artificial Sequence: Synthetic oligonucleotide
  Sense strand starting at position 2623 of SEQ ID NO: 1881332
aagguaaggcaguguauuu

SEQ ID NO: 2036375 - RNA, 19 nt, Artificial Sequence
  Description of Artificial Sequence: Synthetic oligonucleotide
  Antisense strand to SEQ ID NO: 2036374
aaauacacugccuuaccuu

SEQ ID NO: 2036376 - RNA, 19 nt, Artificial Sequence
  Description of Artificial Sequence: Synthetic oligonucleotide
  Sense strand starting at position 2825 of SEQ ID NO: 1881332
acaauaugggccugguaca

SEQ ID NO: 2036377 - RNA, 19 nt, Artificial Sequence
  Description of Artificial Sequence: Synthetic oligonucleotide
  Antisense strand to SEQ ID NO: 2036376
uguaccaggcccauauugu

SEQ ID NO: 2036378 - RNA, 19 nt, Artificial Sequence
  Description of Artificial Sequence: Synthetic oligonucleotide
  Sense strand starting at position 2921 of SEQ ID NO: 1881332
ucaucaauggugugggaau

SEQ ID NO: 2036379 - RNA, 19 nt, Artificial Sequence
  Description of Artificial Sequence: Synthetic oligonucleotide
  Antisense strand to SEQ ID NO: 2036378
auucccacaccauugauga

SEQ ID NO: 2036380 - RNA, 19 nt, Artificial Sequence
  Description of Artificial Sequence: Synthetic oligonucleotide
  Sense strand starting at position 3187 of SEQ ID NO: 1881332
gcuuaagaagcagaauacu

SEQ ID NO: 2036381 - RNA, 19 nt, Artificial Sequence
  Description of Artificial Sequence: Synthetic oligonucleotide
  Antisense strand to SEQ ID NO: 2036380
aguauucugcuucuuaagc

SEQ ID NO: 2036382 - RNA, 19 nt, Artificial Sequence
  Description of Artificial Sequence: Synthetic oligonucleotide
  Sense strand starting at position 3780 of SEQ ID NO: 1881332
aguuucucacagcagagau

SEQ ID NO: 2036383 - RNA, 19 nt, Artificial Sequence
  Description of Artificial Sequence: Synthetic oligonucleotide
  Antisense strand to SEQ ID NO: 2036382
aucucugcugugagaaacu

SEQ ID NO: 2036384 - RNA, 19 nt, Artificial Sequence
  Description of Artificial Sequence: Synthetic oligonucleotide
  Sense strand starting at position 3967 of SEQ ID NO: 1881332
uagguagccuuucuggaaa

SEQ ID NO: 2036385 - RNA, 19 nt, Artificial Sequence
  Description of Artificial Sequence: Synthetic oligonucleotide
  Antisense strand to SEQ ID NO: 2036384
uuuccagaaaggcuaccua

SEQ ID NO: 2036386 - RNA, 19 nt, Artificial Sequence
  Description of Artificial Sequence: Synthetic oligonucleotide
  Sense strand starting at position 207 of SEQ ID NO: 1881333
cuuauuauguccuccauga

SEQ ID NO: 2036387 - RNA, 19 nt, Artificial Sequence
  Description of Artificial Sequence: Synthetic oligonucleotide
  Antisense strand to SEQ ID NO: 2036386
ucauggaggacauaauaag

SEQ ID NO: 2036388 - RNA, 19 nt, Artificial Sequence
  Description of Artificial Sequence: Synthetic oligonucleotide
  Sense strand starting at position 211 of SEQ ID NO: 1881333
uuauguccuccaugacauu

SEQ ID NO: 2036389 - RNA, 19 nt, Artificial Sequence
  Description of Artificial Sequence: Synthetic oligonucleotide
  Antisense strand to SEQ ID NO: 2036388
aaugucauggaggacauaa

SEQ ID NO: 2036390 - RNA, 19 nt, Artificial Sequence
  Description of Artificial Sequence: Synthetic oligonucleotide
  Sense strand starting at position 301 of SEQ ID NO: 1881333
cuugaucuggccuagaacu

SEQ ID NO: 2036391 - RNA, 19 nt, Artificial Sequence
  Description of Artificial Sequence: Synthetic oligonucleotide
  Antisense strand to SEQ ID NO: 2036390
aguucuaggccagaucaag

SEQ ID NO: 2036392 - RNA, 19 nt, Artificial Sequence
  Description of Artificial Sequence: Synthetic oligonucleotide
  Sense strand starting at position 312 of SEQ ID NO: 1881333
cuagaacucugguuggcaa

SEQ ID NO: 2036393 - RNA, 19 nt, Artificial Sequence
  Description of Artificial Sequence: Synthetic oligonucleotide
  Antisense strand to SEQ ID NO: 2036392
uugccaaccagaguucuag

SEQ ID NO: 2036394 - RNA, 19 nt, Artificial Sequence
  Description of Artificial Sequence: Synthetic oligonucleotide
  Sense strand starting at position 407 of SEQ ID NO: 1881333
ggaauacuguccucaccag

SEQ ID NO: 2036395 - RNA, 19 nt, Artificial Sequence
  Description of Artificial Sequence: Synthetic oligonucleotide
  Antisense strand to SEQ ID NO: 2036394
cuggugaggacaguauucc

SEQ ID NO: 2036396 - RNA, 19 nt, Artificial Sequence
  Description of Artificial Sequence: Synthetic oligonucleotide
  Sense strand starting at position 554 of SEQ ID NO: 1881333
auaaccaugccuuagagua

SEQ ID NO: 2036397 - RNA, 19 nt, Artificial Sequence
  Description of Artificial Sequence: Synthetic oligonucleotide
  Antisense strand to SEQ ID NO: 2036396
uacucuaaggcaugguuau

SEQ ID NO: 2036398 - RNA, 19 nt, Artificial Sequence
  Description of Artificial Sequence: Synthetic oligonucleotide
  Sense strand starting at position 597 of SEQ ID NO: 1881333
gguucauguggugaaucua

SEQ ID NO: 2036399 - RNA, 19 nt, Artificial Sequence
  Description of Artificial Sequence: Synthetic oligonucleotide
  Antisense strand to SEQ ID NO: 2036398
uagauucaccacaugaacc

SEQ ID NO: 2036400 - RNA, 19 nt, Artificial Sequence
  Description of Artificial Sequence: Synthetic oligonucleotide
  Sense strand starting at position 745 of SEQ ID NO: 1881333
cugaacagcucugugauca

SEQ ID NO: 2036401 - RNA, 19 nt, Artificial Sequence
  Description of Artificial Sequence: Synthetic oligonucleotide
  Antisense strand to SEQ ID NO: 2036400
ugaucacagagcuguucag

SEQ ID NO: 2036402 - RNA, 19 nt, Artificial Sequence
  Description of Artificial Sequence: Synthetic oligonucleotide
  Sense strand starting at position 746 of SEQ ID NO: 1881333
ugaacagcucugugaucau

SEQ ID NO: 2036403 - RNA, 19 nt, Artificial Sequence
  Description of Artificial Sequence: Synthetic oligonucleotide
  Antisense strand to SEQ ID NO: 2036402
augaucacagagcuguuca

SEQ ID NO: 2036404 - RNA, 19 nt, Artificial Sequence
  Description of Artificial Sequence: Synthetic oligonucleotide
  Sense strand starting at position 784 of SEQ ID NO: 1881333
guggacaaauccuucuguu

SEQ ID NO: 2036405 - RNA, 19 nt, Artificial Sequence
  Description of Artificial Sequence: Synthetic oligonucleotide
  Antisense strand to SEQ ID NO: 2036404
aacagaaggauuuguccac

SEQ ID NO: 2036406 - RNA, 19 nt, Artificial Sequence
  Description of Artificial Sequence: Synthetic oligonucleotide
  Sense strand starting at position 847 of SEQ ID NO: 1881333
ucucgaauuucucaaagaa

SEQ ID NO: 2036407 - RNA, 19 nt, Artificial Sequence
  Description of Artificial Sequence: Synthetic oligonucleotide
  Antisense strand to SEQ ID NO: 2036406
uucuuugagaaauucgaga

SEQ ID NO: 2036408 - RNA, 19 nt, Artificial Sequence
  Description of Artificial Sequence: Synthetic oligonucleotide
  Sense strand starting at position 893 of SEQ ID NO: 1881333
cuuuguucuccuuagaagu

SEQ ID NO: 2036409 - RNA, 19 nt, Artificial Sequence
  Description of Artificial Sequence: Synthetic oligonucleotide
  Antisense strand to SEQ ID NO: 2036408
acuucuaaggagaacaaag

SEQ ID NO: 2036410 - RNA, 19 nt, Artificial Sequence
  Description of Artificial Sequence: Synthetic oligonucleotide
  Sense strand starting at position 1156 of SEQ ID NO: 1881333
auuguaauuucugcagcaa

SEQ ID NO: 2036411 - RNA, 19 nt, Artificial Sequence
  Description of Artificial Sequence: Synthetic oligonucleotide
  Antisense strand to SEQ ID NO: 2036410
uugcugcagaaauuacaau

SEQ ID NO: 2036412 - RNA, 19 nt, Artificial Sequence
  Description of Artificial Sequence: Synthetic oligonucleotide
  Sense strand starting at position 1225 of SEQ ID NO: 1881333
ugccauuauuugguuguga

SEQ ID NO: 2036413 - RNA, 19 nt, Artificial Sequence
  Description of Artificial Sequence: Synthetic oligonucleotide
  Antisense strand to SEQ ID NO: 2036412
ucacaaccaaauaauggca

SEQ ID NO: 2036414 - RNA, 19 nt, Artificial Sequence
  Description of Artificial Sequence: Synthetic oligonucleotide
  Sense strand starting at position 1226 of SEQ ID NO: 1881333
gccauuauuugguugugag

SEQ ID NO: 2036415 - RNA, 19 nt, Artificial Sequence
  Description of Artificial Sequence: Synthetic oligonucleotide
  Antisense strand to SEQ ID NO: 2036414
cucacaaccaaauaauggc

SEQ ID NO: 2036416 - RNA, 19 nt, Artificial Sequence
  Description of Artificial Sequence: Synthetic oligonucleotide
  Sense strand starting at position 1227 of SEQ ID NO: 1881333
ccauuauuugguugugagu

SEQ ID NO: 2036417 - RNA, 19 nt, Artificial Sequence
  Description of Artificial Sequence: Synthetic oligonucleotide
  Antisense strand to SEQ ID NO: 2036416
acucacaaccaaauaaugg

SEQ ID NO: 2036418 - RNA, 19 nt, Artificial Sequence
  Description of Artificial Sequence: Synthetic oligonucleotide
  Sense strand starting at position 1289 of SEQ ID NO: 1881333
auucgaaaggcaugggaau

SEQ ID NO: 2036419 - RNA, 19 nt, Artificial Sequence
  Description of Artificial Sequence: Synthetic oligonucleotide
  Antisense strand to SEQ ID NO: 2036418
auucccaugccuuucgaau

SEQ ID NO: 2036420 - RNA, 19 nt, Artificial Sequence
  Description of Artificial Sequence: Synthetic oligonucleotide
  Sense strand starting at position 1290 of SEQ ID NO: 1881333
uucgaaaggcaugggaaua

SEQ ID NO: 2036421 - RNA, 19 nt, Artificial Sequence
  Description of Artificial Sequence: Synthetic oligonucleotide
  Antisense strand to SEQ ID NO: 2036420
uauucccaugccuuucgaa

SEQ ID NO: 2036422 - RNA, 19 nt, Artificial Sequence
  Description of Artificial Sequence: Synthetic oligonucleotide
  Sense strand starting at position 1515 of SEQ ID NO: 1881333
aucaaagagguuugucauc

SEQ ID NO: 2036423 - RNA, 19 nt, Artificial Sequence
  Description of Artificial Sequence: Synthetic oligonucleotide
  Antisense strand to SEQ ID NO: 2036422
gaugacaaaccucuuugau

SEQ ID NO: 2036424 - RNA, 19 nt, Artificial Sequence
  Description of Artificial Sequence: Synthetic oligonucleotide
  Sense strand starting at position 1517 of SEQ ID NO: 1881333
caaagagguuugucaucuu

SEQ ID NO: 2036425 - RNA, 19 nt, Artificial Sequence
  Description of Artificial Sequence: Synthetic oligonucleotide
  Antisense strand to SEQ ID NO: 2036424
aagaugacaaaccucuuug

SEQ ID NO: 2036426 - RNA, 19 nt, Artificial Sequence
  Description of Artificial Sequence: Synthetic oligonucleotide
  Sense strand starting at position 1598 of SEQ ID NO: 1881333
aaguuccaccuguggaaau

SEQ ID NO: 2036427 - RNA, 19 nt, Artificial Sequence
  Description of Artificial Sequence: Synthetic oligonucleotide
  Antisense strand to SEQ ID NO: 2036426
auuuccacagguggaacuu

SEQ ID NO: 2036428 - RNA, 19 nt, Artificial Sequence
  Description of Artificial Sequence: Synthetic oligonucleotide
  Sense strand starting at position 1600 of SEQ ID NO: 1881333
guuccaccuguggaaauua

SEQ ID NO: 2036429 - RNA, 19 nt, Artificial Sequence
  Description of Artificial Sequence: Synthetic oligonucleotide
  Antisense strand to SEQ ID NO: 2036428
uaauuuccacagguggaac

SEQ ID NO: 2036430 - RNA, 19 nt, Artificial Sequence
  Description of Artificial Sequence: Synthetic oligonucleotide
  Sense strand starting at position 1610 of SEQ ID NO: 1881333
uggaaauuaguguguuaaa

SEQ ID NO: 2036431 - RNA, 19 nt, Artificial Sequence
  Description of Artificial Sequence: Synthetic oligonucleotide
  Antisense strand to SEQ ID NO: 2036430
uuuaacacacuaauuucca

SEQ ID NO: 2036432 - RNA, 19 nt, Artificial Sequence
  Description of Artificial Sequence: Synthetic oligonucleotide
  Sense strand starting at position 1611 of SEQ ID NO: 1881333
ggaaauuaguguguuaaau

SEQ ID NO: 2036433 - RNA, 19 nt, Artificial Sequence
  Description of Artificial Sequence: Synthetic oligonucleotide
  Antisense strand to SEQ ID NO: 2036432
auuuaacacacuaauuucc

SEQ ID NO: 2036434 - RNA, 19 nt, Artificial Sequence
  Description of Artificial Sequence: Synthetic oligonucleotide
  Sense strand starting at position 2193 of SEQ ID NO: 1881333
guguuaacuguuuaucuga

SEQ ID NO: 2036435 - RNA, 19 nt, Artificial Sequence
  Description of Artificial Sequence: Synthetic oligonucleotide
  Antisense strand to SEQ ID NO: 2036434
ucagauaaacaguuaacac

SEQ ID NO: 2036436 - RNA, 19 nt, Artificial Sequence
  Description of Artificial Sequence: Synthetic oligonucleotide
  Sense strand starting at position 2195 of SEQ ID NO: 1881333
guuaacuguuuaucugaaa

SEQ ID NO: 2036437 - RNA, 19 nt, Artificial Sequence
  Description of Artificial Sequence: Synthetic oligonucleotide
  Antisense strand to SEQ ID NO: 2036436
uuucagauaaacaguuaac

SEQ ID NO: 2036438 - RNA, 19 nt, Artificial Sequence
  Description of Artificial Sequence: Synthetic oligonucleotide
  Sense strand starting at position 2245 of SEQ ID NO: 1881333
cugguaacccuaggacuaa

SEQ ID NO: 2036439 - RNA, 19 nt, Artificial Sequence
  Description of Artificial Sequence: Synthetic oligonucleotide
  Antisense strand to SEQ ID NO: 2036438
uuaguccuaggguuaccag

SEQ ID NO: 2036440 - RNA, 19 nt, Artificial Sequence
  Description of Artificial Sequence: Synthetic oligonucleotide
  Sense strand starting at position 2276 of SEQ ID NO: 1881333
gauaauuucugucagauga

SEQ ID NO: 2036441 - RNA, 19 nt, Artificial Sequence
  Description of Artificial Sequence: Synthetic oligonucleotide
  Antisense strand to SEQ ID NO: 2036440
ucaucugacagaaauuauc

SEQ ID NO: 2036442 - RNA, 19 nt, Artificial Sequence
  Description of Artificial Sequence: Synthetic oligonucleotide
  Sense strand starting at position 2283 of SEQ ID NO: 1881333
ucugucagaugacucaauu

SEQ ID NO: 2036443 - RNA, 19 nt, Artificial Sequence
  Description of Artificial Sequence: Synthetic oligonucleotide
  Antisense strand to SEQ ID NO: 2036442
aauugagucaucugacaga

SEQ ID NO: 2036444 - RNA, 19 nt, Artificial Sequence
  Description of Artificial Sequence: Synthetic oligonucleotide
  Sense strand starting at position 2306 of SEQ ID NO: 1881333
uguuauagauugccugaga

SEQ ID NO: 2036445 - RNA, 19 nt, Artificial Sequence
  Description of Artificial Sequence: Synthetic oligonucleotide
  Antisense strand to SEQ ID NO: 2036444
ucucaggcaaucuauaaca

SEQ ID NO: 2036446 - RNA, 19 nt, Artificial Sequence
  Description of Artificial Sequence: Synthetic oligonucleotide
  Sense strand starting at position 2307 of SEQ ID NO: 1881333
guuauagauugccugagau

SEQ ID NO: 2036447 - RNA, 19 nt, Artificial Sequence
  Description of Artificial Sequence: Synthetic oligonucleotide
  Antisense strand to SEQ ID NO: 2036446
aucucaggcaaucuauaac

SEQ ID NO: 2036448 - RNA, 19 nt, Artificial Sequence
  Description of Artificial Sequence: Synthetic oligonucleotide
  Sense strand starting at position 2341 of SEQ ID NO: 1881333
gagugaucauaaguugaca

SEQ ID NO: 2036449 - RNA, 19 nt, Artificial Sequence
  Description of Artificial Sequence: Synthetic oligonucleotide
  Antisense strand to SEQ ID NO: 2036448
ugucaacuuaugaucacuc

SEQ ID NO: 2036450 - RNA, 19 nt, Artificial Sequence
  Description of Artificial Sequence: Synthetic oligonucleotide
  Sense strand starting at position 2376 of SEQ ID NO: 1881333
gaacuaauuguuggucaag

SEQ ID NO: 2036451 - RNA, 19 nt, Artificial Sequence
  Description of Artificial Sequence: Synthetic oligonucleotide
  Antisense strand to SEQ ID NO: 2036450
cuugaccaacaauuaguuc

SEQ ID NO: 2036452 - RNA, 19 nt, Artificial Sequence
  Description of Artificial Sequence: Synthetic oligonucleotide
  Sense strand starting at position 2377 of SEQ ID NO: 1881333
aacuaauuguuggucaagu

SEQ ID NO: 2036453 - RNA, 19 nt, Artificial Sequence
  Description of Artificial Sequence: Synthetic oligonucleotide
  Antisense strand to SEQ ID NO: 2036452
acuugaccaacaauuaguu

SEQ ID NO: 2036454 - RNA, 19 nt, Artificial Sequence
  Description of Artificial Sequence: Synthetic oligonucleotide
  Sense strand starting at position 2623 of SEQ ID NO: 1881333
aagguaaggcaguguauuu

SEQ ID NO: 2036455 - RNA, 19 nt, Artificial Sequence
  Description of Artificial Sequence: Synthetic oligonucleotide
  Antisense strand to SEQ ID NO: 2036454
aaauacacugccuuaccuu

SEQ ID NO: 2036456 - RNA, 19 nt, Artificial Sequence
  Description of Artificial Sequence: Synthetic oligonucleotide
  Sense strand starting at position 2825 of SEQ ID NO: 1881333
acaauaugggccugguaca

SEQ ID NO: 2036457 - RNA, 19 nt, Artificial Sequence
  Description of Artificial Sequence: Synthetic oligonucleotide
  Antisense strand to SEQ ID NO: 2036456
uguaccaggcccauauugu

SEQ ID NO: 2036458 - RNA, 19 nt, Artificial Sequence
  Description of Artificial Sequence: Synthetic oligonucleotide
  Sense strand starting at position 2921 of SEQ ID NO: 1881333
ucaucaauggugugggaau

SEQ ID NO: 2036459 - RNA, 19 nt, Artificial Sequence
  Description of Artificial Sequence: Synthetic oligonucleotide
  Antisense strand to SEQ ID NO: 2036458
auucccacaccauugauga

SEQ ID NO: 2036460 - RNA, 19 nt, Artificial Sequence
  Description of Artificial Sequence: Synthetic oligonucleotide
  Sense strand starting at position 3187 of SEQ ID NO: 1881333
gcuuaagaagcagaauacu

SEQ ID NO: 2036461 - RNA, 19 nt, Artificial Sequence
  Description of Artificial Sequence: Synthetic oligonucleotide
  Antisense strand to SEQ ID NO: 2036460
aguauucugcuucuuaagc

SEQ ID NO: 2036462 - RNA, 19 nt, Artificial Sequence
  Description of Artificial Sequence: Synthetic oligonucleotide
  Sense strand starting at position 3780 of SEQ ID NO: 1881333
aguuucucacagcagagau

SEQ ID NO: 2036463 - RNA, 19 nt, Artificial Sequence
  Description of Artificial Sequence: Synthetic oligonucleotide
  Antisense strand to SEQ ID NO: 2036462
aucucugcugugagaaacu

SEQ ID NO: 2036464 - RNA, 19 nt, Artificial Sequence
  Description of Artificial Sequence: Synthetic oligonucleotide
  Sense strand starting at position 3967 of SEQ ID NO: 1881333
uagguagccuuucuggaaa

SEQ ID NO: 2036465 - RNA, 19 nt, Artificial Sequence
  Description of Artificial Sequence: Synthetic oligonucleotide
  Antisense strand to SEQ ID NO: 2036464
uuuccagaaaggcuaccua

SEQ ID NO: 2036466 - RNA, 19 nt, Artificial Sequence
  Description of Artificial Sequence: Synthetic oligonucleotide
  Sense strand starting at position 136 of SEQ ID NO: 1881334
guaccugucacaggguaaa

SEQ ID NO: 2036467 - RNA, 19 nt, Artificial Sequence
  Description of Artificial Sequence: Synthetic oligonucleotide
  Antisense strand to SEQ ID NO: 2036466
uuuacccugugacagguac

SEQ ID NO: 2036468 - RNA, 19 nt, Artificial Sequence
  Description of Artificial Sequence: Synthetic oligonucleotide
  Sense strand starting at position 172 of SEQ ID NO: 1881334
cuucuaauucccuagguag

SEQ ID NO: 2036469 - RNA, 19 nt, Artificial Sequence
  Description of Artificial Sequence: Synthetic oligonucleotide
  Antisense strand to SEQ ID NO: 2036468
cuaccuagggaauuagaag

SEQ ID NO: 2036470 - RNA, 19 nt, Artificial Sequence
  Description of Artificial Sequence: Synthetic oligonucleotide
  Sense strand starting at position 414 of SEQ ID NO: 1881334
ggcccaugauauccuugaa

SEQ ID NO: 2036471 - RNA, 19 nt, Artificial Sequence
  Description of Artificial Sequence: Synthetic oligonucleotide
  Antisense strand to SEQ ID NO: 2036470
uucaaggauaucaugggcc

SEQ ID NO: 2036472 - RNA, 19 nt, Artificial Sequence
  Description of Artificial Sequence: Synthetic oligonucleotide
  Sense strand starting at position 417 of SEQ ID NO: 1881334
ccaugauauccuugaaggc

SEQ ID NO: 2036473 - RNA, 19 nt, Artificial Sequence
  Description of Artificial Sequence: Synthetic oligonucleotide
  Antisense strand to SEQ ID NO: 2036472
gccuucaaggauaucaugg

SEQ ID NO: 2036474 - RNA, 19 nt, Artificial Sequence
  Description of Artificial Sequence: Synthetic oligonucleotide
  Sense strand starting at position 464 of SEQ ID NO: 1881334
agagcuccugacgaucaaa

SEQ ID NO: 2036475 - RNA, 19 nt, Artificial Sequence
  Description of Artificial Sequence: Synthetic oligonucleotide
  Antisense strand to SEQ ID NO: 2036474
uuugaucgucaggagcucu

SEQ ID NO: 2036476 - RNA, 19 nt, Artificial Sequence
  Description of Artificial Sequence: Synthetic oligonucleotide
  Sense strand starting at position 604 of SEQ ID NO: 1881334
gggucauggcaaugaauga

SEQ ID NO: 2036477 - RNA, 19 nt, Artificial Sequence
  Description of Artificial Sequence: Synthetic oligonucleotide
  Antisense strand to SEQ ID NO: 2036476
ucauucauugccaugaccc

SEQ ID NO: 2036478 - RNA, 19 nt, Artificial Sequence
  Description of Artificial Sequence: Synthetic oligonucleotide
  Sense strand starting at position 788 of SEQ ID NO: 1881334
ugcccuucucccuauggaa

SEQ ID NO: 2036479 - RNA, 19 nt, Artificial Sequence
  Description of Artificial Sequence: Synthetic oligonucleotide
  Antisense strand to SEQ ID NO: 2036478
uuccauagggagaagggca

SEQ ID NO: 2036480 - RNA, 19 nt, Artificial Sequence
  Description of Artificial Sequence: Synthetic oligonucleotide
  Sense strand starting at position 983 of SEQ ID NO: 1881334
cugacauggcccuguaaag

SEQ ID NO: 2036481 - RNA, 19 nt, Artificial Sequence
  Description of Artificial Sequence: Synthetic oligonucleotide
  Antisense strand to SEQ ID NO: 2036480
cuuuacagggccaugucag

SEQ ID NO: 2036482 - RNA, 19 nt, Artificial Sequence
  Description of Artificial Sequence: Synthetic oligonucleotide
  Sense strand starting at position 1020 of SEQ ID NO: 1881334
aucuacguccuguagugaa

SEQ ID NO: 2036483 - RNA, 19 nt, Artificial Sequence
  Description of Artificial Sequence: Synthetic oligonucleotide
  Antisense strand to SEQ ID NO: 2036482
uucacuacaggacguagau

SEQ ID NO: 2036484 - RNA, 19 nt, Artificial Sequence
  Description of Artificial Sequence: Synthetic oligonucleotide
  Sense strand starting at position 1126 of SEQ ID NO: 1881334
acgaucuacucucuuugaa

SEQ ID NO: 2036485 - RNA, 19 nt, Artificial Sequence
  Description of Artificial Sequence: Synthetic oligonucleotide
  Antisense strand to SEQ ID NO: 2036484
uucaaagagaguagaucgu

SEQ ID NO: 2036486 - RNA, 19 nt, Artificial Sequence
  Description of Artificial Sequence: Synthetic oligonucleotide
  Sense strand starting at position 1605 of SEQ ID NO: 1881334
gcagauggccacggauuaa

SEQ ID NO: 2036487 - RNA, 19 nt, Artificial Sequence
  Description of Artificial Sequence: Synthetic oligonucleotide
  Antisense strand to SEQ ID NO: 2036486
uuaauccguggccaucugc

SEQ ID NO: 2036488 - RNA, 19 nt, Artificial Sequence
  Description of Artificial Sequence: Synthetic oligonucleotide
  Sense strand starting at position 2079 of SEQ ID NO: 1881334
gaaagagugcugcagaaau

SEQ ID NO: 2036489 - RNA, 19 nt, Artificial Sequence
  Description of Artificial Sequence: Synthetic oligonucleotide
  Antisense strand to SEQ ID NO: 2036488
auuucugcagcacucuuuc

SEQ ID NO: 2036490 - RNA, 19 nt, Artificial Sequence
  Description of Artificial Sequence: Synthetic oligonucleotide
  Sense strand starting at position 2184 of SEQ ID NO: 1881334
uuggaauucuuucugaguu

SEQ ID NO: 2036491 - RNA, 19 nt, Artificial Sequence
  Description of Artificial Sequence: Synthetic oligonucleotide
  Antisense strand to SEQ ID NO: 2036490
aacucagaaagaauuccaa

SEQ ID NO: 2036492 - RNA, 19 nt, Artificial Sequence
  Description of Artificial Sequence: Synthetic oligonucleotide
  Sense strand starting at position 2188 of SEQ ID NO: 1881334
aauucuuucugaguugaga

SEQ ID NO: 2036493 - RNA, 19 nt, Artificial Sequence
  Description of Artificial Sequence: Synthetic oligonucleotide
  Antisense strand to SEQ ID NO: 2036492
ucucaacucagaaagaauu

SEQ ID NO: 2036494 - RNA, 19 nt, Artificial Sequence
  Description of Artificial Sequence: Synthetic oligonucleotide
  Sense strand starting at position 2197 of SEQ ID NO: 1881334
ugaguugagaccuggugua

SEQ ID NO: 2036495 - RNA, 19 nt, Artificial Sequence
  Description of Artificial Sequence: Synthetic oligonucleotide
  Antisense strand to SEQ ID NO: 2036494
uacaccaggucucaacuca

SEQ ID NO: 2036496 - RNA, 19 nt, Artificial Sequence
  Description of Artificial Sequence: Synthetic oligonucleotide
  Sense strand starting at position 2223 of SEQ ID NO: 1881334
aucuacuuccgccagaagu

SEQ ID NO: 2036497 - RNA, 19 nt, Artificial Sequence
  Description of Artificial Sequence: Synthetic oligonucleotide
  Antisense strand to SEQ ID NO: 2036496
acuucuggcggaaguagau

SEQ ID NO: 2036498 - RNA, 19 nt, Artificial Sequence
  Description of Artificial Sequence: Synthetic oligonucleotide
  Sense strand starting at position 2656 of SEQ ID NO: 1881334
uuaagcuuguucuugauuu

SEQ ID NO: 2036499 - RNA, 19 nt, Artificial Sequence
  Description of Artificial Sequence: Synthetic oligonucleotide
  Antisense strand to SEQ ID NO: 2036498
aaaucaagaacaagcuuaa

SEQ ID NO: 2036500 - RNA, 19 nt, Artificial Sequence
  Description of Artificial Sequence: Synthetic oligonucleotide
  Sense strand starting at position 2660 of SEQ ID NO: 1881334
gcuuguucuugauuugcuu

SEQ ID NO: 2036501 - RNA, 19 nt, Artificial Sequence
  Description of Artificial Sequence: Synthetic oligonucleotide
  Antisense strand to SEQ ID NO: 2036500
aagcaaaucaagaacaagc

SEQ ID NO: 2036502 - RNA, 19 nt, Artificial Sequence
  Description of Artificial Sequence: Synthetic oligonucleotide
  Sense strand starting at position 2666 of SEQ ID NO: 1881334
ucuugauuugcuuagcuuu

SEQ ID NO: 2036503 - RNA, 19 nt, Artificial Sequence
  Description of Artificial Sequence: Synthetic oligonucleotide
  Antisense strand to SEQ ID NO: 2036502
aaagcuaagcaaaucaaga

SEQ ID NO: 2036504 - RNA, 19 nt, Artificial Sequence
  Description of Artificial Sequence: Synthetic oligonucleotide
  Sense strand starting at position 3105 of SEQ ID NO: 1881334
gcgaucuugacagggauag

SEQ ID NO: 2036505 - RNA, 19 nt, Artificial Sequence
  Description of Artificial Sequence: Synthetic oligonucleotide
  Antisense strand to SEQ ID NO: 2036504
cuaucccugucaagaucgc

SEQ ID NO: 2036506 - RNA, 19 nt, Artificial Sequence
  Description of Artificial Sequence: Synthetic oligonucleotide
  Sense strand starting at position 3106 of SEQ ID NO: 1881334
cgaucuugacagggauagu

SEQ ID NO: 2036507 - RNA, 19 nt, Artificial Sequence
  Description of Artificial Sequence: Synthetic oligonucleotide
  Antisense strand to SEQ ID NO: 2036506
acuaucccugucaagaucg

SEQ ID NO: 2036508 - RNA, 19 nt, Artificial Sequence
  Description of Artificial Sequence: Synthetic oligonucleotide
  Sense strand starting at position 3117 of SEQ ID NO: 1881334
gggauaguuccagggacca

SEQ ID NO: 2036509 - RNA, 19 nt, Artificial Sequence
  Description of Artificial Sequence: Synthetic oligonucleotide
  Antisense strand to SEQ ID NO: 2036508
uggucccuggaacuauccc

SEQ ID NO: 2036510 - RNA, 19 nt, Artificial Sequence
  Description of Artificial Sequence: Synthetic oligonucleotide
  Sense strand starting at position 3160 of SEQ ID NO: 1881334
uuguauugaugacugaaug

SEQ ID NO: 2036511 - RNA, 19 nt, Artificial Sequence
  Description of Artificial Sequence: Synthetic oligonucleotide
  Antisense strand to SEQ ID NO: 2036510
cauucagucaucaauacaa

SEQ ID NO: 2036512 - RNA, 19 nt, Artificial Sequence
  Description of Artificial Sequence: Synthetic oligonucleotide
  Sense strand starting at position 3161 of SEQ ID NO: 1881334
uguauugaugacugaauga

SEQ ID NO: 2036513 - RNA, 19 nt, Artificial Sequence
  Description of Artificial Sequence: Synthetic oligonucleotide
  Antisense strand to SEQ ID NO: 2036512
ucauucagucaucaauaca

SEQ ID NO: 2036514 - RNA, 19 nt, Artificial Sequence
  Description of Artificial Sequence: Synthetic oligonucleotide
  Sense strand starting at position 3185 of SEQ ID NO: 1881334
aggugagaaggguguguua

SEQ ID NO: 2036515 - RNA, 19 nt, Artificial Sequence
  Description of Artificial Sequence: Synthetic oligonucleotide
  Antisense strand to SEQ ID NO: 2036514
uaacacacccuucucaccu

SEQ ID NO: 2036516 - RNA, 19 nt, Artificial Sequence
  Description of Artificial Sequence: Synthetic oligonucleotide
  Sense strand starting at position 3187 of SEQ ID NO: 1881334
gugagaaggguguguuaac

SEQ ID NO: 2036517 - RNA, 19 nt, Artificial Sequence
  Description of Artificial Sequence: Synthetic oligonucleotide
  Antisense strand to SEQ ID NO: 2036516
guuaacacacccuucucac

SEQ ID NO: 2036518 - RNA, 19 nt, Artificial Sequence
  Description of Artificial Sequence: Synthetic oligonucleotide
  Sense strand starting at position 3188 of SEQ ID NO: 1881334
ugagaaggguguguuaaca

SEQ ID NO: 2036519 - RNA, 19 nt, Artificial Sequence
  Description of Artificial Sequence: Synthetic oligonucleotide
  Antisense strand to SEQ ID NO: 2036518
uguuaacacacccuucuca

SEQ ID NO: 2036520 - RNA, 19 nt, Artificial Sequence
  Description of Artificial Sequence: Synthetic oligonucleotide
  Sense strand starting at position 3202 of SEQ ID NO: 1881334
uaacaacuccauggugaga

SEQ ID NO: 2036521 - RNA, 19 nt, Artificial Sequence
  Description of Artificial Sequence: Synthetic oligonucleotide
  Antisense strand to SEQ ID NO: 2036520
ucucaccauggaguuguua

SEQ ID NO: 2036522 - RNA, 19 nt, Artificial Sequence
  Description of Artificial Sequence: Synthetic oligonucleotide
  Sense strand starting at position 3260 of SEQ ID NO: 1881334
agagaaguggaaugucuga

SEQ ID NO: 2036523 - RNA, 19 nt, Artificial Sequence
  Description of Artificial Sequence: Synthetic oligonucleotide
  Antisense strand to SEQ ID NO: 2036522
ucagacauuccacuucucu

SEQ ID NO: 2036524 - RNA, 19 nt, Artificial Sequence
  Description of Artificial Sequence: Synthetic oligonucleotide
  Sense strand starting at position 3423 of SEQ ID NO: 1881334
ccugaaugaugccugucau

SEQ ID NO: 2036525 - RNA, 19 nt, Artificial Sequence
  Description of Artificial Sequence: Synthetic oligonucleotide
  Antisense strand to SEQ ID NO: 2036524
augacaggcaucauucagg

SEQ ID NO: 2036526 - RNA, 19 nt, Artificial Sequence
  Description of Artificial Sequence: Synthetic oligonucleotide
  Sense strand starting at position 3424 of SEQ ID NO: 1881334
cugaaugaugccugucaug

SEQ ID NO: 2036527 - RNA, 19 nt, Artificial Sequence
  Description of Artificial Sequence: Synthetic oligonucleotide
  Antisense strand to SEQ ID NO: 2036526
caugacaggcaucauucag

SEQ ID NO: 2036528 - RNA, 19 nt, Artificial Sequence
  Description of Artificial Sequence: Synthetic oligonucleotide
  Sense strand starting at position 3451 of SEQ ID NO: 1881334
ggucuugauugggucaagu

SEQ ID NO: 2036529 - RNA, 19 nt, Artificial Sequence
  Description of Artificial Sequence: Synthetic oligonucleotide
  Antisense strand to SEQ ID NO: 2036528
acuugacccaaucaagacc

SEQ ID NO: 2036530 - RNA, 19 nt, Artificial Sequence
  Description of Artificial Sequence: Synthetic oligonucleotide
  Sense strand starting at position 3676 of SEQ ID NO: 1881334
ugcagucaucccuggaaua

SEQ ID NO: 2036531 - RNA, 19 nt, Artificial Sequence
  Description of Artificial Sequence: Synthetic oligonucleotide
  Antisense strand to SEQ ID NO: 2036530
uauuccagggaugacugca

SEQ ID NO: 2036532 - RNA, 19 nt, Artificial Sequence
  Description of Artificial Sequence: Synthetic oligonucleotide
  Sense strand starting at position 3677 of SEQ ID NO: 1881334
gcagucaucccuggaauag

SEQ ID NO: 2036533 - RNA, 19 nt, Artificial Sequence
  Description of Artificial Sequence: Synthetic oligonucleotide
  Antisense strand to SEQ ID NO: 2036532
cuauuccagggaugacugc

SEQ ID NO: 2036534 - RNA, 19 nt, Artificial Sequence
  Description of Artificial Sequence: Synthetic oligonucleotide
  Sense strand starting at position 3698 of SEQ ID NO: 1881334
cagggaacguaccuguauu

SEQ ID NO: 2036535 - RNA, 19 nt, Artificial Sequence
  Description of Artificial Sequence: Synthetic oligonucleotide
  Antisense strand to SEQ ID NO: 2036534
aauacagguacguucccug

SEQ ID NO: 2036536 - RNA, 19 nt, Artificial Sequence
  Description of Artificial Sequence: Synthetic oligonucleotide
  Sense strand starting at position 3786 of SEQ ID NO: 1881334
ggaauagcccagggaaugu

SEQ ID NO: 2036537 - RNA, 19 nt, Artificial Sequence
  Description of Artificial Sequence: Synthetic oligonucleotide
  Antisense strand to SEQ ID NO: 2036536
acauucccugggcuauucc

SEQ ID NO: 2036538 - RNA, 19 nt, Artificial Sequence
  Description of Artificial Sequence: Synthetic oligonucleotide
  Sense strand starting at position 3795 of SEQ ID NO: 1881334
cagggaauguaccuguauu

SEQ ID NO: 2036539 - RNA, 19 nt, Artificial Sequence
  Description of Artificial Sequence: Synthetic oligonucleotide
  Antisense strand to SEQ ID NO: 2036538
aauacagguacauucccug

SEQ ID NO: 2036540 - RNA, 19 nt, Artificial Sequence
  Description of Artificial Sequence: Synthetic oligonucleotide
  Sense strand starting at position 3842 of SEQ ID NO: 1881334
acagcuccugagcaagaaa

SEQ ID NO: 2036541 - RNA, 19 nt, Artificial Sequence
  Description of Artificial Sequence: Synthetic oligonucleotide
  Antisense strand to SEQ ID NO: 2036540
uuucuugcucaggagcugu

SEQ ID NO: 2036542 - RNA, 19 nt, Artificial Sequence
  Description of Artificial Sequence: Synthetic oligonucleotide
  Sense strand starting at position 3845 of SEQ ID NO: 1881334
gcuccugagcaagaaauca

SEQ ID NO: 2036543 - RNA, 19 nt, Artificial Sequence
  Description of Artificial Sequence: Synthetic oligonucleotide
  Antisense strand to SEQ ID NO: 2036542
ugauuucuugcucaggagc

SEQ ID NO: 2036544 - RNA, 19 nt, Artificial Sequence
  Description of Artificial Sequence: Synthetic oligonucleotide
  Sense strand starting at position 3956 of SEQ ID NO: 1881334
acgucauuccuuggacaca

SEQ ID NO: 2036545 - RNA, 19 nt, Artificial Sequence
  Description of Artificial Sequence: Synthetic oligonucleotide
  Antisense strand to SEQ ID NO: 2036544
uguguccaaggaaugacgu

SEQ ID NO: 2036546 - RNA, 19 nt, Artificial Sequence
  Description of Artificial Sequence: Synthetic oligonucleotide
  Sense strand starting at position 16 of SEQ ID NO: 1881335
gugguauaggccuauauau

SEQ ID NO: 2036547 - RNA, 19 nt, Artificial Sequence
  Description of Artificial Sequence: Synthetic oligonucleotide
  Antisense strand to SEQ ID NO: 2036546
auauauaggccuauaccac

SEQ ID NO: 2036548 - RNA, 19 nt, Artificial Sequence
  Description of Artificial Sequence: Synthetic oligonucleotide
  Sense strand starting at position 18 of SEQ ID NO: 1881335
gguauaggccuauauauuc

SEQ ID NO: 2036549 - RNA, 19 nt, Artificial Sequence
  Description of Artificial Sequence: Synthetic oligonucleotide
  Antisense strand to SEQ ID NO: 2036548
gaauauauaggccuauacc

SEQ ID NO: 2036550 - RNA, 19 nt, Artificial Sequence
  Description of Artificial Sequence: Synthetic oligonucleotide
  Sense strand starting at position 60 of SEQ ID NO: 1881335
agcggaaauaguuaccuga

SEQ ID NO: 2036551 - RNA, 19 nt, Artificial Sequence
  Description of Artificial Sequence: Synthetic oligonucleotide
  Antisense strand to SEQ ID NO: 2036550
ucagguaacuauuuccgcu

SEQ ID NO: 2036552 - RNA, 19 nt, Artificial Sequence
  Description of Artificial Sequence: Synthetic oligonucleotide
  Sense strand starting at position 62 of SEQ ID NO: 1881335
cggaaauaguuaccugaug

SEQ ID NO: 2036553 - RNA, 19 nt, Artificial Sequence
  Description of Artificial Sequence: Synthetic oligonucleotide
  Antisense strand to SEQ ID NO: 2036552
caucagguaacuauuuccg

SEQ ID NO: 2036554 - RNA, 19 nt, Artificial Sequence
  Description of Artificial Sequence: Synthetic oligonucleotide
  Sense strand starting at position 178 of SEQ ID NO: 1881335
uaguguuacugccuugaug

SEQ ID NO: 2036555 - RNA, 19 nt, Artificial Sequence
  Description of Artificial Sequence: Synthetic oligonucleotide
  Antisense strand to SEQ ID NO: 2036554
caucaaggcaguaacacua

SEQ ID NO: 2036556 - RNA, 19 nt, Artificial Sequence
  Description of Artificial Sequence: Synthetic oligonucleotide
  Sense strand starting at position 180 of SEQ ID NO: 1881335
guguuacugccuugaugga

SEQ ID NO: 2036557 - RNA, 19 nt, Artificial Sequence
  Description of Artificial Sequence: Synthetic oligonucleotide
  Antisense strand to SEQ ID NO: 2036556
uccaucaaggcaguaacac

SEQ ID NO: 2036558 - RNA, 19 nt, Artificial Sequence
  Description of Artificial Sequence: Synthetic oligonucleotide
  Sense strand starting at position 318 of SEQ ID NO: 1881335
acucaaugcuacuuacgau

SEQ ID NO: 2036559 - RNA, 19 nt, Artificial Sequence
  Description of Artificial Sequence: Synthetic oligonucleotide
  Antisense strand to SEQ ID NO: 2036558
aucguaaguagcauugagu

SEQ ID NO: 2036560 - RNA, 19 nt, Artificial Sequence
  Description of Artificial Sequence: Synthetic oligonucleotide
  Sense strand starting at position 432 of SEQ ID NO: 1881335
gaggauaccugggaaauua

SEQ ID NO: 2036561 - RNA, 19 nt, Artificial Sequence
  Description of Artificial Sequence: Synthetic oligonucleotide
  Antisense strand to SEQ ID NO: 2036560
uaauuucccagguauccuc

SEQ ID NO: 2036562 - RNA, 19 nt, Artificial Sequence
  Description of Artificial Sequence: Synthetic oligonucleotide
  Sense strand starting at position 454 of SEQ ID NO: 1881335
uguacagacugguauuaaa

SEQ ID NO: 2036563 - RNA, 19 nt, Artificial Sequence
  Description of Artificial Sequence: Synthetic oligonucleotide
  Antisense strand to SEQ ID NO: 2036562
uuuaauaccagucuguaca

SEQ ID NO: 2036564 - RNA, 19 nt, Artificial Sequence
  Description of Artificial Sequence: Synthetic oligonucleotide
  Sense strand starting at position 457 of SEQ ID NO: 1881335
acagacugguauuaaauau

SEQ ID NO: 2036565 - RNA, 19 nt, Artificial Sequence
  Description of Artificial Sequence: Synthetic oligonucleotide
  Antisense strand to SEQ ID NO: 2036564
auauuuaauaccagucugu

SEQ ID NO: 2036566 - RNA, 19 nt, Artificial Sequence
  Description of Artificial Sequence: Synthetic oligonucleotide
  Sense strand starting at position 509 of SEQ ID NO: 1881335
aaguuacugucaucgucau

SEQ ID NO: 2036567 - RNA, 19 nt, Artificial Sequence
  Description of Artificial Sequence: Synthetic oligonucleotide
  Antisense strand to SEQ ID NO: 2036566
augacgaugacaguaacuu

SEQ ID NO: 2036568 - RNA, 19 nt, Artificial Sequence
  Description of Artificial Sequence: Synthetic oligonucleotide
  Sense strand starting at position 515 of SEQ ID NO: 1881335
cugucaucgucaucuuuaa

SEQ ID NO: 2036569 - RNA, 19 nt, Artificial Sequence
  Description of Artificial Sequence: Synthetic oligonucleotide
  Antisense strand to SEQ ID NO: 2036568
uuaaagaugacgaugacag

SEQ ID NO: 2036570 - RNA, 19 nt, Artificial Sequence
  Description of Artificial Sequence: Synthetic oligonucleotide
  Sense strand starting at position 527 of SEQ ID NO: 1881335
ucuuuaaagucagucuugu

SEQ ID NO: 2036571 - RNA, 19 nt, Artificial Sequence
  Description of Artificial Sequence: Synthetic oligonucleotide
  Antisense strand to SEQ ID NO: 2036570
acaagacugacuuuaaaga

SEQ ID NO: 2036572 - RNA, 19 nt, Artificial Sequence
  Description of Artificial Sequence: Synthetic oligonucleotide
  Sense strand starting at position 588 of SEQ ID NO: 1881335
agugcuuugggucgaagca

SEQ ID NO: 2036573 - RNA, 19 nt, Artificial Sequence
  Description of Artificial Sequence: Synthetic oligonucleotide
  Antisense strand to SEQ ID NO: 2036572
ugcuucgacccaaagcacu

SEQ ID NO: 2036574 - RNA, 19 nt, Artificial Sequence
  Description of Artificial Sequence: Synthetic oligonucleotide
  Sense strand starting at position 589 of SEQ ID NO: 1881335
gugcuuugggucgaagcaa

SEQ ID NO: 2036575 - RNA, 19 nt, Artificial Sequence
  Description of Artificial Sequence: Synthetic oligonucleotide
  Antisense strand to SEQ ID NO: 2036574
uugcuucgacccaaagcac

SEQ ID NO: 2036576 - RNA, 19 nt, Artificial Sequence
  Description of Artificial Sequence: Synthetic oligonucleotide
  Sense strand starting at position 604 of SEQ ID NO: 1881335
gcaauucucgcuccucagu

SEQ ID NO: 2036577 - RNA, 19 nt, Artificial Sequence
  Description of Artificial Sequence: Synthetic oligonucleotide
  Antisense strand to SEQ ID NO: 2036576
acugaggagcgagaauugc

SEQ ID NO: 2036578 - RNA, 19 nt, Artificial Sequence
  Description of Artificial Sequence: Synthetic oligonucleotide
  Sense strand starting at position 992 of SEQ ID NO: 1881335
ggccaaaguccuuagagca

SEQ ID NO: 2036579 - RNA, 19 nt, Artificial Sequence
  Description of Artificial Sequence: Synthetic oligonucleotide
  Antisense strand to SEQ ID NO: 2036578
ugcucuaaggacuuuggcc

SEQ ID NO: 2036580 - RNA, 19 nt, Artificial Sequence
  Description of Artificial Sequence: Synthetic oligonucleotide
  Sense strand starting at position 1182 of SEQ ID NO: 1881335
ugggaaagaucuuccucca

SEQ ID NO: 2036581 - RNA, 19 nt, Artificial Sequence
  Description of Artificial Sequence: Synthetic oligonucleotide
  Antisense strand to SEQ ID NO: 2036580
uggaggaagaucuuuccca

SEQ ID NO: 2036582 - RNA, 19 nt, Artificial Sequence
  Description of Artificial Sequence: Synthetic oligonucleotide
  Sense strand starting at position 1311 of SEQ ID NO: 1881335
cccugcuuucuucuucgua

SEQ ID NO: 2036583 - RNA, 19 nt, Artificial Sequence
  Description of Artificial Sequence: Synthetic oligonucleotide
  Antisense strand to SEQ ID NO: 2036582
uacgaagaagaaagcaggg

SEQ ID NO: 2036584 - RNA, 19 nt, Artificial Sequence
  Description of Artificial Sequence: Synthetic oligonucleotide
  Sense strand starting at position 1349 of SEQ ID NO: 1881335
acaauuauguaacucguuu

SEQ ID NO: 2036585 - RNA, 19 nt, Artificial Sequence
  Description of Artificial Sequence: Synthetic oligonucleotide
  Antisense strand to SEQ ID NO: 2036584
aaacgaguuacauaauugu

SEQ ID NO: 2036586 - RNA, 19 nt, Artificial Sequence
  Description of Artificial Sequence: Synthetic oligonucleotide
  Sense strand starting at position 1353 of SEQ ID NO: 1881335
uuauguaacucguuuaucu

SEQ ID NO: 2036587 - RNA, 19 nt, Artificial Sequence
  Description of Artificial Sequence: Synthetic oligonucleotide
  Antisense strand to SEQ ID NO: 2036586
agauaaacgaguuacauaa

SEQ ID NO: 2036588 - RNA, 19 nt, Artificial Sequence
  Description of Artificial Sequence: Synthetic oligonucleotide
  Sense strand starting at position 1355 of SEQ ID NO: 1881335
auguaacucguuuaucuuu

SEQ ID NO: 2036589 - RNA, 19 nt, Artificial Sequence
  Description of Artificial Sequence: Synthetic oligonucleotide
  Antisense strand to SEQ ID NO: 2036588
aaagauaaacgaguuacau

SEQ ID NO: 2036590 - RNA, 19 nt, Artificial Sequence
  Description of Artificial Sequence: Synthetic oligonucleotide
  Sense strand starting at position 1357 of SEQ ID NO: 1881335
guaacucguuuaucuuuau

SEQ ID NO: 2036591 - RNA, 19 nt, Artificial Sequence
  Description of Artificial Sequence: Synthetic oligonucleotide
  Antisense strand to SEQ ID NO: 2036590
auaaagauaaacgaguuac

SEQ ID NO: 2036592 - RNA, 19 nt, Artificial Sequence
  Description of Artificial Sequence: Synthetic oligonucleotide
  Sense strand starting at position 1361 of SEQ ID NO: 1881335
cucguuuaucuuuaucugu

SEQ ID NO: 2036593 - RNA, 19 nt, Artificial Sequence
  Description of Artificial Sequence: Synthetic oligonucleotide
  Antisense strand to SEQ ID NO: 2036592
acagauaaagauaaacgag

SEQ ID NO: 2036594 - RNA, 19 nt, Artificial Sequence
  Description of Artificial Sequence: Synthetic oligonucleotide
  Sense strand starting at position 1478 of SEQ ID NO: 1881335
gggcgugcgacguacaauu

SEQ ID NO: 2036595 - RNA, 19 nt, Artificial Sequence
  Description of Artificial Sequence: Synthetic oligonucleotide
  Antisense strand to SEQ ID NO: 2036594
aauuguacgucgcacgccc

SEQ ID NO: 2036596 - RNA, 19 nt, Artificial Sequence
  Description of Artificial Sequence: Synthetic oligonucleotide
  Sense strand starting at position 2083 of SEQ ID NO: 1881335
ugguguccacuccgggaaa

SEQ ID NO: 2036597 - RNA, 19 nt, Artificial Sequence
  Description of Artificial Sequence: Synthetic oligonucleotide
  Antisense strand to SEQ ID NO: 2036596
uuucccggaguggacacca

SEQ ID NO: 2036598 - RNA, 19 nt, Artificial Sequence
  Description of Artificial Sequence: Synthetic oligonucleotide
  Sense strand starting at position 2096 of SEQ ID NO: 1881335
gggaaagccgugugugcaa

SEQ ID NO: 2036599 - RNA, 19 nt, Artificial Sequence
  Description of Artificial Sequence: Synthetic oligonucleotide
  Antisense strand to SEQ ID NO: 2036598
uugcacacacggcuuuccc

SEQ ID NO: 2036600 - RNA, 19 nt, Artificial Sequence
  Description of Artificial Sequence: Synthetic oligonucleotide
  Sense strand starting at position 2491 of SEQ ID NO: 1881335
gcaacugcgcccgagucau

SEQ ID NO: 2036601 - RNA, 19 nt, Artificial Sequence
  Description of Artificial Sequence: Synthetic oligonucleotide
  Antisense strand to SEQ ID NO: 2036600
augacucgggcgcaguugc

SEQ ID NO: 2036602 - RNA, 19 nt, Artificial Sequence
  Description of Artificial Sequence: Synthetic oligonucleotide
  Sense strand starting at position 3033 of SEQ ID NO: 1881335
cucagugucccuugugacu

SEQ ID NO: 2036603 - RNA, 19 nt, Artificial Sequence
  Description of Artificial Sequence: Synthetic oligonucleotide
  Antisense strand to SEQ ID NO: 2036602
agucacaagggacacugag

SEQ ID NO: 2036604 - RNA, 19 nt, Artificial Sequence
  Description of Artificial Sequence: Synthetic oligonucleotide
  Sense strand starting at position 3059 of SEQ ID NO: 1881335
cauaguagguguucuaucu

SEQ ID NO: 2036605 - RNA, 19 nt, Artificial Sequence
  Description of Artificial Sequence: Synthetic oligonucleotide
  Antisense strand to SEQ ID NO: 2036604
agauagaacaccuacuaug

SEQ ID NO: 2036606 - RNA, 19 nt, Artificial Sequence
  Description of Artificial Sequence: Synthetic oligonucleotide
  Sense strand starting at position 3142 of SEQ ID NO: 1881335
uuacauaugucaucucaug

SEQ ID NO: 2036607 - RNA, 19 nt, Artificial Sequence
  Description of Artificial Sequence: Synthetic oligonucleotide
  Antisense strand to SEQ ID NO: 2036606
caugagaugacauauguaa

SEQ ID NO: 2036608 - RNA, 19 nt, Artificial Sequence
  Description of Artificial Sequence: Synthetic oligonucleotide
  Sense strand starting at position 3166 of SEQ ID NO: 1881335
cucacacaauccugagaug

SEQ ID NO: 2036609 - RNA, 19 nt, Artificial Sequence
  Description of Artificial Sequence: Synthetic oligonucleotide
  Antisense strand to SEQ ID NO: 2036608
caucucaggauugugugag

SEQ ID NO: 2036610 - RNA, 19 nt, Artificial Sequence
  Description of Artificial Sequence: Synthetic oligonucleotide
  Sense strand starting at position 3169 of SEQ ID NO: 1881335
acacaauccugagauggcu

SEQ ID NO: 2036611 - RNA, 19 nt, Artificial Sequence
  Description of Artificial Sequence: Synthetic oligonucleotide
  Antisense strand to SEQ ID NO: 2036610
agccaucucaggauugugu

SEQ ID NO: 2036612 - RNA, 19 nt, Artificial Sequence
  Description of Artificial Sequence: Synthetic oligonucleotide
  Sense strand starting at position 3175 of SEQ ID NO: 1881335
uccugagauggcuauuacu

SEQ ID NO: 2036613 - RNA, 19 nt, Artificial Sequence
  Description of Artificial Sequence: Synthetic oligonucleotide
  Antisense strand to SEQ ID NO: 2036612
aguaauagccaucucagga

SEQ ID NO: 2036614 - RNA, 19 nt, Artificial Sequence
  Description of Artificial Sequence: Synthetic oligonucleotide
  Sense strand starting at position 3178 of SEQ ID NO: 1881335
ugagauggcuauuacuaug

SEQ ID NO: 2036615 - RNA, 19 nt, Artificial Sequence
  Description of Artificial Sequence: Synthetic oligonucleotide
  Antisense strand to SEQ ID NO: 2036614
cauaguaauagccaucuca

SEQ ID NO: 2036616 - RNA, 19 nt, Artificial Sequence
  Description of Artificial Sequence: Synthetic oligonucleotide
  Sense strand starting at position 3183 of SEQ ID NO: 1881335
uggcuauuacuaugaucau

SEQ ID NO: 2036617 - RNA, 19 nt, Artificial Sequence
  Description of Artificial Sequence: Synthetic oligonucleotide
  Antisense strand to SEQ ID NO: 2036616
augaucauaguaauagcca

SEQ ID NO: 2036618 - RNA, 19 nt, Artificial Sequence
  Description of Artificial Sequence: Synthetic oligonucleotide
  Sense strand starting at position 3520 of SEQ ID NO: 1881335
aggcuaaguuauuugcuca

SEQ ID NO: 2036619 - RNA, 19 nt, Artificial Sequence
  Description of Artificial Sequence: Synthetic oligonucleotide
  Antisense strand to SEQ ID NO: 2036618
ugagcaaauaacuuagccu

SEQ ID NO: 2036620 - RNA, 19 nt, Artificial Sequence
  Description of Artificial Sequence: Synthetic oligonucleotide
  Sense strand starting at position 3590 of SEQ ID NO: 1881335
uccauacugcacuguauua

SEQ ID NO: 2036621 - RNA, 19 nt, Artificial Sequence
  Description of Artificial Sequence: Synthetic oligonucleotide
  Antisense strand to SEQ ID NO: 2036620
uaauacagugcaguaugga

SEQ ID NO: 2036622 - RNA, 19 nt, Artificial Sequence
  Description of Artificial Sequence: Synthetic oligonucleotide
  Sense strand starting at position 3825 of SEQ ID NO: 1881335
gggaucuccuuccucaauu

SEQ ID NO: 2036623 - RNA, 19 nt, Artificial Sequence
  Description of Artificial Sequence: Synthetic oligonucleotide
  Antisense strand to SEQ ID NO: 2036622
aauugaggaaggagauccc

SEQ ID NO: 2036624 - RNA, 19 nt, Artificial Sequence
  Description of Artificial Sequence: Synthetic oligonucleotide
  Sense strand starting at position 3952 of SEQ ID NO: 1881335
gcuuguuccagauguggga

SEQ ID NO: 2036625 - RNA, 19 nt, Artificial Sequence
  Description of Artificial Sequence: Synthetic oligonucleotide
  Antisense strand to SEQ ID NO: 2036624
ucccacaucuggaacaagc

SEQ ID NO: 2036626 - RNA, 19 nt, Artificial Sequence
  Description of Artificial Sequence: Synthetic oligonucleotide
  Sense strand starting at position 1252 of SEQ ID NO: 1881336
gccucuucggucuuugcaa

SEQ ID NO: 2036627 - RNA, 19 nt, Artificial Sequence
  Description of Artificial Sequence: Synthetic oligonucleotide
  Antisense strand to SEQ ID NO: 2036626
uugcaaagaccgaagaggc

SEQ ID NO: 2036628 - RNA, 19 nt, Artificial Sequence
  Description of Artificial Sequence: Synthetic oligonucleotide
  Sense strand starting at position 2151 of SEQ ID NO: 1881336
agcccagggauccgagauu

SEQ ID NO: 2036629 - RNA, 19 nt, Artificial Sequence
  Description of Artificial Sequence: Synthetic oligonucleotide
  Antisense strand to SEQ ID NO: 2036628
aaucucggaucccugggcu

SEQ ID NO: 2036630 - RNA, 19 nt, Artificial Sequence
  Description of Artificial Sequence: Synthetic oligonucleotide
  Sense strand starting at position 2191 of SEQ ID NO: 1881336
uugggaagucgcgacgaaa

SEQ ID NO: 2036631 - RNA, 19 nt, Artificial Sequence
  Description of Artificial Sequence: Synthetic oligonucleotide
  Antisense strand to SEQ ID NO: 2036630
uuucgucgcgacuucccaa

SEQ ID NO: 2036632 - RNA, 19 nt, Artificial Sequence
  Description of Artificial Sequence: Synthetic oligonucleotide
  Sense strand starting at position 2523 of SEQ ID NO: 1881336
ugaaacauaucacauggaa

SEQ ID NO: 2036633 - RNA, 19 nt, Artificial Sequence
  Description of Artificial Sequence: Synthetic oligonucleotide
  Antisense strand to SEQ ID NO: 2036632
uuccaugugauauguuuca

SEQ ID NO: 2036634 - RNA, 19 nt, Artificial Sequence
  Description of Artificial Sequence: Synthetic oligonucleotide
  Sense strand starting at position 2596 of SEQ ID NO: 1881336
guguucuuaucacuuuaau

SEQ ID NO: 2036635 - RNA, 19 nt, Artificial Sequence
  Description of Artificial Sequence: Synthetic oligonucleotide
  Antisense strand to SEQ ID NO: 2036634
auuaaagugauaagaacac

SEQ ID NO: 2036636 - RNA, 19 nt, Artificial Sequence
  Description of Artificial Sequence: Synthetic oligonucleotide
  Sense strand starting at position 2617 of SEQ ID NO: 1881336
cugcuaucugaggacagua

SEQ ID NO: 2036637 - RNA, 19 nt, Artificial Sequence
  Description of Artificial Sequence: Synthetic oligonucleotide
  Antisense strand to SEQ ID NO: 2036636
uacuguccucagauagcag

SEQ ID NO: 2036638 - RNA, 19 nt, Artificial Sequence
  Description of Artificial Sequence: Synthetic oligonucleotide
  Sense strand starting at position 2625 of SEQ ID NO: 1881336
ugaggacaguauguuaaau

SEQ ID NO: 2036639 - RNA, 19 nt, Artificial Sequence
  Description of Artificial Sequence: Synthetic oligonucleotide
  Antisense strand to SEQ ID NO: 2036638
auuuaacauacuguccuca

SEQ ID NO: 2036640 - RNA, 19 nt, Artificial Sequence
  Description of Artificial Sequence: Synthetic oligonucleotide
  Sense strand starting at position 2665 of SEQ ID NO: 1881336
ggaauaggaccuugcucuu

SEQ ID NO: 2036641 - RNA, 19 nt, Artificial Sequence
  Description of Artificial Sequence: Synthetic oligonucleotide
  Antisense strand to SEQ ID NO: 2036640
aagagcaagguccuauucc

SEQ ID NO: 2036642 - RNA, 19 nt, Artificial Sequence
  Description of Artificial Sequence: Synthetic oligonucleotide
  Sense strand starting at position 2710 of SEQ ID NO: 1881336
gcaguaccuccaggaauag

SEQ ID NO: 2036643 - RNA, 19 nt, Artificial Sequence
  Description of Artificial Sequence: Synthetic oligonucleotide
  Antisense strand to SEQ ID NO: 2036642
cuauuccuggagguacugc

SEQ ID NO: 2036644 - RNA, 19 nt, Artificial Sequence
  Description of Artificial Sequence: Synthetic oligonucleotide
  Sense strand starting at position 2858 of SEQ ID NO: 1881336
aagugaguugcagauacaa

SEQ ID NO: 2036645 - RNA, 19 nt, Artificial Sequence
  Description of Artificial Sequence: Synthetic oligonucleotide
  Antisense strand to SEQ ID NO: 2036644
uuguaucugcaacucacuu

SEQ ID NO: 2036646 - RNA, 19 nt, Artificial Sequence
  Description of Artificial Sequence: Synthetic oligonucleotide
  Sense strand starting at position 2860 of SEQ ID NO: 1881336
gugaguugcagauacaaca

SEQ ID NO: 2036647 - RNA, 19 nt, Artificial Sequence
  Description of Artificial Sequence: Synthetic oligonucleotide
  Antisense strand to SEQ ID NO: 2036646
uguuguaucugcaacucac

SEQ ID NO: 2036648 - RNA, 19 nt, Artificial Sequence
  Description of Artificial Sequence: Synthetic oligonucleotide
  Sense strand starting at position 2881 of SEQ ID NO: 1881336
cucuguaaauaguuaagca

SEQ ID NO: 2036649 - RNA, 19 nt, Artificial Sequence
  Description of Artificial Sequence: Synthetic oligonucleotide
  Antisense strand to SEQ ID NO: 2036648
ugcuuaacuauuuacagag

SEQ ID NO: 2036650 - RNA, 19 nt, Artificial Sequence
  Description of Artificial Sequence: Synthetic oligonucleotide
  Sense strand starting at position 2888 of SEQ ID NO: 1881336
aauaguuaagcauguguau

SEQ ID NO: 2036651 - RNA, 19 nt, Artificial Sequence
  Description of Artificial Sequence: Synthetic oligonucleotide
  Antisense strand to SEQ ID NO: 2036650
auacacaugcuuaacuauu

SEQ ID NO: 2036652 - RNA, 19 nt, Artificial Sequence
  Description of Artificial Sequence: Synthetic oligonucleotide
  Sense strand starting at position 2891 of SEQ ID NO: 1881336
aguuaagcauguguauaau

SEQ ID NO: 2036653 - RNA, 19 nt, Artificial Sequence
  Description of Artificial Sequence: Synthetic oligonucleotide
  Antisense strand to SEQ ID NO: 2036652
auuauacacaugcuuaacu

SEQ ID NO: 2036654 - RNA, 19 nt, Artificial Sequence
  Description of Artificial Sequence: Synthetic oligonucleotide
  Sense strand starting at position 2897 of SEQ ID NO: 1881336
gcauguguauaauuaucua

SEQ ID NO: 2036655 - RNA, 19 nt, Artificial Sequence
  Description of Artificial Sequence: Synthetic oligonucleotide
  Antisense strand to SEQ ID NO: 2036654
uagauaauuauacacaugc

SEQ ID NO: 2036656 - RNA, 19 nt, Artificial Sequence
  Description of Artificial Sequence: Synthetic oligonucleotide
  Sense strand starting at position 2900 of SEQ ID NO: 1881336
uguguauaauuaucuagag

SEQ ID NO: 2036657 - RNA, 19 nt, Artificial Sequence
  Description of Artificial Sequence: Synthetic oligonucleotide
  Antisense strand to SEQ ID NO: 2036656
cucuagauaauuauacaca

SEQ ID NO: 2036658 - RNA, 19 nt, Artificial Sequence
  Description of Artificial Sequence: Synthetic oligonucleotide
  Sense strand starting at position 2901 of SEQ ID NO: 1881336
guguauaauuaucuagagu

SEQ ID NO: 2036659 - RNA, 19 nt, Artificial Sequence
  Description of Artificial Sequence: Synthetic oligonucleotide
  Antisense strand to SEQ ID NO: 2036658
acucuagauaauuauacac

SEQ ID NO: 2036660 - RNA, 19 nt, Artificial Sequence
  Description of Artificial Sequence: Synthetic oligonucleotide
  Sense strand starting at position 2920 of SEQ ID NO: 1881336
ucaguacuugauuaugguu

SEQ ID NO: 2036661 - RNA, 19 nt, Artificial Sequence
  Description of Artificial Sequence: Synthetic oligonucleotide
  Antisense strand to SEQ ID NO: 2036660
aaccauaaucaaguacuga

SEQ ID NO: 2036662 - RNA, 19 nt, Artificial Sequence
  Description of Artificial Sequence: Synthetic oligonucleotide
  Sense strand starting at position 3302 of SEQ ID NO: 1881336
aguggagcacuccaugagu

SEQ ID NO: 2036663 - RNA, 19 nt, Artificial Sequence
  Description of Artificial Sequence: Synthetic oligonucleotide
  Antisense strand to SEQ ID NO: 2036662
acucauggagugcuccacu

SEQ ID NO: 2036664 - RNA, 19 nt, Artificial Sequence
  Description of Artificial Sequence: Synthetic oligonucleotide
  Sense strand starting at position 3305 of SEQ ID NO: 1881336
ggagcacuccaugaguucu

SEQ ID NO: 2036665 - RNA, 19 nt, Artificial Sequence
  Description of Artificial Sequence: Synthetic oligonucleotide
  Antisense strand to SEQ ID NO: 2036664
agaacucauggagugcucc

SEQ ID NO: 2036666 - RNA, 19 nt, Artificial Sequence
  Description of Artificial Sequence: Synthetic oligonucleotide
  Sense strand starting at position 3335 of SEQ ID NO: 1881336
cccaaaucccagugaagga

SEQ ID NO: 2036667 - RNA, 19 nt, Artificial Sequence
  Description of Artificial Sequence: Synthetic oligonucleotide
  Antisense strand to SEQ ID NO: 2036666
uccuucacugggauuuggg

SEQ ID NO: 2036668 - RNA, 19 nt, Artificial Sequence
  Description of Artificial Sequence: Synthetic oligonucleotide
  Sense strand starting at position 3367 of SEQ ID NO: 1881336
cagaaaguuccuugugcca

SEQ ID NO: 2036669 - RNA, 19 nt, Artificial Sequence
  Description of Artificial Sequence: Synthetic oligonucleotide
  Antisense strand to SEQ ID NO: 2036668
uggcacaaggaacuuucug

SEQ ID NO: 2036670 - RNA, 19 nt, Artificial Sequence
  Description of Artificial Sequence: Synthetic oligonucleotide
  Sense strand starting at position 3400 of SEQ ID NO: 1881336
agaggcaaccacuguuaga

SEQ ID NO: 2036671 - RNA, 19 nt, Artificial Sequence
  Description of Artificial Sequence: Synthetic oligonucleotide
  Antisense strand to SEQ ID NO: 2036670
ucuaacagugguugccucu

SEQ ID NO: 2036672 - RNA, 19 nt, Artificial Sequence
  Description of Artificial Sequence: Synthetic oligonucleotide
  Sense strand starting at position 3520 of SEQ ID NO: 1881336
ccugaauguuguguguaug

SEQ ID NO: 2036673 - RNA, 19 nt, Artificial Sequence
  Description of Artificial Sequence: Synthetic oligonucleotide
  Antisense strand to SEQ ID NO: 2036672
cauacacacaacauucagg

SEQ ID NO: 2036674 - RNA, 19 nt, Artificial Sequence
  Description of Artificial Sequence: Synthetic oligonucleotide
  Sense strand starting at position 3523 of SEQ ID NO: 1881336
gaauguuguguguauggau

SEQ ID NO: 2036675 - RNA, 19 nt, Artificial Sequence
  Description of Artificial Sequence: Synthetic oligonucleotide
  Antisense strand to SEQ ID NO: 2036674
auccauacacacaacauuc

SEQ ID NO: 2036676 - RNA, 19 nt, Artificial Sequence
  Description of Artificial Sequence: Synthetic oligonucleotide
  Sense strand starting at position 3577 of SEQ ID NO: 1881336
guggauccaccacauguau

SEQ ID NO: 2036677 - RNA, 19 nt, Artificial Sequence
  Description of Artificial Sequence: Synthetic oligonucleotide
  Antisense strand to SEQ ID NO: 2036676
auacaugugguggauccac

SEQ ID NO: 2036678 - RNA, 19 nt, Artificial Sequence
  Description of Artificial Sequence: Synthetic oligonucleotide
  Sense strand starting at position 3664 of SEQ ID NO: 1881336
gucuuuguauaggcauaua

SEQ ID NO: 2036679 - RNA, 19 nt, Artificial Sequence
  Description of Artificial Sequence: Synthetic oligonucleotide
  Antisense strand to SEQ ID NO: 2036678
uauaugccuauacaaagac

SEQ ID NO: 2036680 - RNA, 19 nt, Artificial Sequence
  Description of Artificial Sequence: Synthetic oligonucleotide
  Sense strand starting at position 3729 of SEQ ID NO: 1881336
ggguaaguguaugucuagu

SEQ ID NO: 2036681 - RNA, 19 nt, Artificial Sequence
  Description of Artificial Sequence: Synthetic oligonucleotide
  Antisense strand to SEQ ID NO: 2036680
acuagacauacacuuaccc

SEQ ID NO: 2036682 - RNA, 19 nt, Artificial Sequence
  Description of Artificial Sequence: Synthetic oligonucleotide
  Sense strand starting at position 3753 of SEQ ID NO: 1881336
gggaaauugcuacaccuuu

SEQ ID NO: 2036683 - RNA, 19 nt, Artificial Sequence
  Description of Artificial Sequence: Synthetic oligonucleotide
  Antisense strand to SEQ ID NO: 2036682
aaagguguagcaauuuccc

SEQ ID NO: 2036684 - RNA, 19 nt, Artificial Sequence
  Description of Artificial Sequence: Synthetic oligonucleotide
  Sense strand starting at position 3773 of SEQ ID NO: 1881336
ccugauguagucuauuagu

SEQ ID NO: 2036685 - RNA, 19 nt, Artificial Sequence
  Description of Artificial Sequence: Synthetic oligonucleotide
  Antisense strand to SEQ ID NO: 2036684
acuaauagacuacaucagg

SEQ ID NO: 2036686 - RNA, 19 nt, Artificial Sequence
  Description of Artificial Sequence: Synthetic oligonucleotide
  Sense strand starting at position 3782 of SEQ ID NO: 1881336
gucuauuagucacuuccua

SEQ ID NO: 2036687 - RNA, 19 nt, Artificial Sequence
  Description of Artificial Sequence: Synthetic oligonucleotide
  Antisense strand to SEQ ID NO: 2036686
uaggaagugacuaauagac

SEQ ID NO: 2036688 - RNA, 19 nt, Artificial Sequence
  Description of Artificial Sequence: Synthetic oligonucleotide
  Sense strand starting at position 3835 of SEQ ID NO: 1881336
uuguuucuugcuuucugua

SEQ ID NO: 2036689 - RNA, 19 nt, Artificial Sequence
  Description of Artificial Sequence: Synthetic oligonucleotide
  Antisense strand to SEQ ID NO: 2036688
uacagaaagcaagaaacaa

SEQ ID NO: 2036690 - RNA, 19 nt, Artificial Sequence
  Description of Artificial Sequence: Synthetic oligonucleotide
  Sense strand starting at position 3836 of SEQ ID NO: 1881336
uguuucuugcuuucuguau

SEQ ID NO: 2036691 - RNA, 19 nt, Artificial Sequence
  Description of Artificial Sequence: Synthetic oligonucleotide
  Antisense strand to SEQ ID NO: 2036690
auacagaaagcaagaaaca

SEQ ID NO: 2036692 - RNA, 19 nt, Artificial Sequence
  Description of Artificial Sequence: Synthetic oligonucleotide
  Sense strand starting at position 3848 of SEQ ID NO: 1881336
ucuguauucuuccuugaca

SEQ ID NO: 2036693 - RNA, 19 nt, Artificial Sequence
  Description of Artificial Sequence: Synthetic oligonucleotide
  Antisense strand to SEQ ID NO: 2036692
ugucaaggaagaauacaga

SEQ ID NO: 2036694 - RNA, 19 nt, Artificial Sequence
  Description of Artificial Sequence: Synthetic oligonucleotide
  Sense strand starting at position 3849 of SEQ ID NO: 1881336
cuguauucuuccuugacag

SEQ ID NO: 2036695 - RNA, 19 nt, Artificial Sequence
  Description of Artificial Sequence: Synthetic oligonucleotide
  Antisense strand to SEQ ID NO: 2036694
cugucaaggaagaauacag

SEQ ID NO: 2036696 - RNA, 19 nt, Artificial Sequence
  Description of Artificial Sequence: Synthetic oligonucleotide
  Sense strand starting at position 3851 of SEQ ID NO: 1881336
guauucuuccuugacagca

SEQ ID NO: 2036697 - RNA, 19 nt, Artificial Sequence
  Description of Artificial Sequence: Synthetic oligonucleotide
  Antisense strand to SEQ ID NO: 2036696
ugcugucaaggaagaauac

SEQ ID NO: 2036698 - RNA, 19 nt, Artificial Sequence
  Description of Artificial Sequence: Synthetic oligonucleotide
  Sense strand starting at position 3864 of SEQ ID NO: 1881336
acagcauaucuuggagauu

SEQ ID NO: 2036699 - RNA, 19 nt, Artificial Sequence
  Description of Artificial Sequence: Synthetic oligonucleotide
  Antisense strand to SEQ ID NO: 2036698
aaucuccaagauaugcugu

SEQ ID NO: 2036700 - RNA, 19 nt, Artificial Sequence
  Description of Artificial Sequence: Synthetic oligonucleotide
  Sense strand starting at position 3867 of SEQ ID NO: 1881336
gcauaucuuggagauucuu

SEQ ID NO: 2036701 - RNA, 19 nt, Artificial Sequence
  Description of Artificial Sequence: Synthetic oligonucleotide
  Antisense strand to SEQ ID NO: 2036700
aagaaucuccaagauaugc

SEQ ID NO: 2036702 - RNA, 19 nt, Artificial Sequence
  Description of Artificial Sequence: Synthetic oligonucleotide
  Sense strand starting at position 3873 of SEQ ID NO: 1881336
cuuggagauucuucuaacu

SEQ ID NO: 2036703 - RNA, 19 nt, Artificial Sequence
  Description of Artificial Sequence: Synthetic oligonucleotide
  Antisense strand to SEQ ID NO: 2036702
aguuagaagaaucuccaag

SEQ ID NO: 2036704 - RNA, 19 nt, Artificial Sequence
  Description of Artificial Sequence: Synthetic oligonucleotide
  Sense strand starting at position 3974 of SEQ ID NO: 1881336
agauguuucuagccuuauu

SEQ ID NO: 2036705 - RNA, 19 nt, Artificial Sequence
  Description of Artificial Sequence: Synthetic oligonucleotide
  Antisense strand to SEQ ID NO: 2036704
aauaaggcuagaaacaucu

SEQ ID NO: 2036706 - RNA, 19 nt, Artificial Sequence
  Description of Artificial Sequence: Synthetic oligonucleotide
  Sense strand starting at position 9 of SEQ ID NO: 1881337
cacagauauuguuacuggu

SEQ ID NO: 2036707 - RNA, 19 nt, Artificial Sequence
  Description of Artificial Sequence: Synthetic oligonucleotide
  Antisense strand to SEQ ID NO: 2036706
accaguaacaauaucugug

SEQ ID NO: 2036708 - RNA, 19 nt, Artificial Sequence
  Description of Artificial Sequence: Synthetic oligonucleotide
  Sense strand starting at position 15 of SEQ ID NO: 1881337
uauuguuacugguuaggaa

SEQ ID NO: 2036709 - RNA, 19 nt, Artificial Sequence
  Description of Artificial Sequence: Synthetic oligonucleotide
  Antisense strand to SEQ ID NO: 2036708
uuccuaaccaguaacaaua

SEQ ID NO: 2036710 - RNA, 19 nt, Artificial Sequence
  Description of Artificial Sequence: Synthetic oligonucleotide
  Sense strand starting at position 190 of SEQ ID NO: 1881337
gggcacuuguaucuuuaaa

SEQ ID NO: 2036711 - RNA, 19 nt, Artificial Sequence
  Description of Artificial Sequence: Synthetic oligonucleotide
  Antisense strand to SEQ ID NO: 2036710
uuuaaagauacaagugccc

SEQ ID NO: 2036712 - RNA, 19 nt, Artificial Sequence
  Description of Artificial Sequence: Synthetic oligonucleotide
  Sense strand starting at position 256 of SEQ ID NO: 1881337
auuccuauauguuuggaau

SEQ ID NO: 2036713 - RNA, 19 nt, Artificial Sequence
  Description of Artificial Sequence: Synthetic oligonucleotide
  Antisense strand to SEQ ID NO: 2036712
auuccaaacauauaggaau

SEQ ID NO: 2036714 - RNA, 19 nt, Artificial Sequence
  Description of Artificial Sequence: Synthetic oligonucleotide
  Sense strand starting at position 257 of SEQ ID NO: 1881337
uuccuauauguuuggaauu

SEQ ID NO: 2036715 - RNA, 19 nt, Artificial Sequence
  Description of Artificial Sequence: Synthetic oligonucleotide
  Antisense strand to SEQ ID NO: 2036714
aauuccaaacauauaggaa

SEQ ID NO: 2036716 - RNA, 19 nt, Artificial Sequence
  Description of Artificial Sequence: Synthetic oligonucleotide
  Sense strand starting at position 272 of SEQ ID NO: 1881337
aauuguggucucggcauaa

SEQ ID NO: 2036717 - RNA, 19 nt, Artificial Sequence
  Description of Artificial Sequence: Synthetic oligonucleotide
  Antisense strand to SEQ ID NO: 2036716
uuaugccgagaccacaauu

SEQ ID NO: 2036718 - RNA, 19 nt, Artificial Sequence
  Description of Artificial Sequence: Synthetic oligonucleotide
  Sense strand starting at position 313 of SEQ ID NO: 1881337
augaauaacuuccagugaa

SEQ ID NO: 2036719 - RNA, 19 nt, Artificial Sequence
  Description of Artificial Sequence: Synthetic oligonucleotide
  Antisense strand to SEQ ID NO: 2036718
uucacuggaaguuauucau

SEQ ID NO: 2036720 - RNA, 19 nt, Artificial Sequence
  Description of Artificial Sequence: Synthetic oligonucleotide
  Sense strand starting at position 421 of SEQ ID NO: 1881337
guugauguguuugucacca

SEQ ID NO: 2036721 - RNA, 19 nt, Artificial Sequence
  Description of Artificial Sequence: Synthetic oligonucleotide
  Antisense strand to SEQ ID NO: 2036720
uggugacaaacacaucaac

SEQ ID NO: 2036722 - RNA, 19 nt, Artificial Sequence
  Description of Artificial Sequence: Synthetic oligonucleotide
  Sense strand starting at position 440 of SEQ ID NO: 1881337
gggcuugaaagucgaauca

SEQ ID NO: 2036723 - RNA, 19 nt, Artificial Sequence
  Description of Artificial Sequence: Synthetic oligonucleotide
  Antisense strand to SEQ ID NO: 2036722
ugauucgacuuucaagccc

SEQ ID NO: 2036724 - RNA, 19 nt, Artificial Sequence
  Description of Artificial Sequence: Synthetic oligonucleotide
  Sense strand starting at position 452 of SEQ ID NO: 1881337
cgaaucaaccacuguguaa

SEQ ID NO: 2036725 - RNA, 19 nt, Artificial Sequence
  Description of Artificial Sequence: Synthetic oligonucleotide
  Antisense strand to SEQ ID NO: 2036724
uuacacagugguugauucg

SEQ ID NO: 2036726 - RNA, 19 nt, Artificial Sequence
  Description of Artificial Sequence: Synthetic oligonucleotide
  Sense strand starting at position 633 of SEQ ID NO: 1881337
auggaaaucuuagcaaucu

SEQ ID NO: 2036727 - RNA, 19 nt, Artificial Sequence
  Description of Artificial Sequence: Synthetic oligonucleotide
  Antisense strand to SEQ ID NO: 2036726
agauugcuaagauuuccau

SEQ ID NO: 2036728 - RNA, 19 nt, Artificial Sequence
  Description of Artificial Sequence: Synthetic oligonucleotide
  Sense strand starting at position 634 of SEQ ID NO: 1881337
uggaaaucuuagcaaucuc

SEQ ID NO: 2036729 - RNA, 19 nt, Artificial Sequence
  Description of Artificial Sequence: Synthetic oligonucleotide
  Antisense strand to SEQ ID NO: 2036728
gagauugcuaagauuucca

SEQ ID NO: 2036730 - RNA, 19 nt, Artificial Sequence
  Description of Artificial Sequence: Synthetic oligonucleotide
  Sense strand starting at position 699 of SEQ ID NO: 1881337
gggacuuaaugagagagca

SEQ ID NO: 2036731 - RNA, 19 nt, Artificial Sequence
  Description of Artificial Sequence: Synthetic oligonucleotide
  Antisense strand to SEQ ID NO: 2036730
ugcucucucauuaaguccc

SEQ ID NO: 2036732 - RNA, 19 nt, Artificial Sequence
  Description of Artificial Sequence: Synthetic oligonucleotide
  Sense strand starting at position 711 of SEQ ID NO: 1881337
gagagcaagccuuguguga

SEQ ID NO: 2036733 - RNA, 19 nt, Artificial Sequence
  Description of Artificial Sequence: Synthetic oligonucleotide
  Antisense strand to SEQ ID NO: 2036732
ucacacaaggcuugcucuc

SEQ ID NO: 2036734 - RNA, 19 nt, Artificial Sequence
  Description of Artificial Sequence: Synthetic oligonucleotide
  Sense strand starting at position 716 of SEQ ID NO: 1881337
caagccuugugugaaagga

SEQ ID NO: 2036735 - RNA, 19 nt, Artificial Sequence
  Description of Artificial Sequence: Synthetic oligonucleotide
  Antisense strand to SEQ ID NO: 2036734
uccuuucacacaaggcuug

SEQ ID NO: 2036736 - RNA, 19 nt, Artificial Sequence
  Description of Artificial Sequence: Synthetic oligonucleotide
  Sense strand starting at position 720 of SEQ ID NO: 1881337
ccuugugugaaaggaauuc

SEQ ID NO: 2036737 - RNA, 19 nt, Artificial Sequence
  Description of Artificial Sequence: Synthetic oligonucleotide
  Antisense strand to SEQ ID NO: 2036736
gaauuccuuucacacaagg

SEQ ID NO: 2036738 - RNA, 19 nt, Artificial Sequence
  Description of Artificial Sequence: Synthetic oligonucleotide
  Sense strand starting at position 773 of SEQ ID NO: 1881337
gcucuacaguccuuauugu

SEQ ID NO: 2036739 - RNA, 19 nt, Artificial Sequence
  Description of Artificial Sequence: Synthetic oligonucleotide
  Antisense strand to SEQ ID NO: 2036738
acaauaaggacuguagagc

SEQ ID NO: 2036740 - RNA, 19 nt, Artificial Sequence
  Description of Artificial Sequence: Synthetic oligonucleotide
  Sense strand starting at position 906 of SEQ ID NO: 1881337
cugcaaucccuuugaguaa

SEQ ID NO: 2036741 - RNA, 19 nt, Artificial Sequence
  Description of Artificial Sequence: Synthetic oligonucleotide
  Antisense strand to SEQ ID NO: 2036740
uuacucaaagggauugcag

SEQ ID NO: 2036742 - RNA, 19 nt, Artificial Sequence
  Description of Artificial Sequence: Synthetic oligonucleotide
  Sense strand starting at position 907 of SEQ ID NO: 1881337
ugcaaucccuuugaguaaa

SEQ ID NO: 2036743 - RNA, 19 nt, Artificial Sequence
  Description of Artificial Sequence: Synthetic oligonucleotide
  Antisense strand to SEQ ID NO: 2036742
uuuacucaaagggauugca

SEQ ID NO: 2036744 - RNA, 19 nt, Artificial Sequence
  Description of Artificial Sequence: Synthetic oligonucleotide
  Sense strand starting at position 917 of SEQ ID NO: 1881337
uugaguaaacaguaguaau

SEQ ID NO: 2036745 - RNA, 19 nt, Artificial Sequence
  Description of Artificial Sequence: Synthetic oligonucleotide
  Antisense strand to SEQ ID NO: 2036744
auuacuacuguuuacucaa

SEQ ID NO: 2036746 - RNA, 19 nt, Artificial Sequence
  Description of Artificial Sequence: Synthetic oligonucleotide
  Sense strand starting at position 1239 of SEQ ID NO: 1881337
cgucuuguuccaguggguu

SEQ ID NO: 2036747 - RNA, 19 nt, Artificial Sequence
  Description of Artificial Sequence: Synthetic oligonucleotide
  Antisense strand to SEQ ID NO: 2036746
aacccacuggaacaagacg

SEQ ID NO: 2036748 - RNA, 19 nt, Artificial Sequence
  Description of Artificial Sequence: Synthetic oligonucleotide
  Sense strand starting at position 1243 of SEQ ID NO: 1881337
uuguuccaguggguugaaa

SEQ ID NO: 2036749 - RNA, 19 nt, Artificial Sequence
  Description of Artificial Sequence: Synthetic oligonucleotide
  Antisense strand to SEQ ID NO: 2036748
uuucaacccacuggaacaa

SEQ ID NO: 2036750 - RNA, 19 nt, Artificial Sequence
  Description of Artificial Sequence: Synthetic oligonucleotide
  Sense strand starting at position 1468 of SEQ ID NO: 1881337
caucgucucgaccgaacau

SEQ ID NO: 2036751 - RNA, 19 nt, Artificial Sequence
  Description of Artificial Sequence: Synthetic oligonucleotide
  Antisense strand to SEQ ID NO: 2036750
auguucggucgagacgaug

SEQ ID NO: 2036752 - RNA, 19 nt, Artificial Sequence
  Description of Artificial Sequence: Synthetic oligonucleotide
  Sense strand starting at position 1469 of SEQ ID NO: 1881337
aucgucucgaccgaacauu

SEQ ID NO: 2036753 - RNA, 19 nt, Artificial Sequence
  Description of Artificial Sequence: Synthetic oligonucleotide
  Antisense strand to SEQ ID NO: 2036752
aauguucggucgagacgau

SEQ ID NO: 2036754 - RNA, 19 nt, Artificial Sequence
  Description of Artificial Sequence: Synthetic oligonucleotide
  Sense strand starting at position 1479 of SEQ ID NO: 1881337
ccgaacauugacggagaaa

SEQ ID NO: 2036755 - RNA, 19 nt, Artificial Sequence
  Description of Artificial Sequence: Synthetic oligonucleotide
  Antisense strand to SEQ ID NO: 2036754
uuucuccgucaauguucgg

SEQ ID NO: 2036756 - RNA, 19 nt, Artificial Sequence
  Description of Artificial Sequence: Synthetic oligonucleotide
  Sense strand starting at position 2456 of SEQ ID NO: 1881337
gaagucaaguugcaauuaa

SEQ ID NO: 2036757 - RNA, 19 nt, Artificial Sequence
  Description of Artificial Sequence: Synthetic oligonucleotide
  Antisense strand to SEQ ID NO: 2036756
uuaauugcaacuugacuuc

SEQ ID NO: 2036758 - RNA, 19 nt, Artificial Sequence
  Description of Artificial Sequence: Synthetic oligonucleotide
  Sense strand starting at position 2620 of SEQ ID NO: 1881337
guccaugccugagugaguu

SEQ ID NO: 2036759 - RNA, 19 nt, Artificial Sequence
  Description of Artificial Sequence: Synthetic oligonucleotide
  Antisense strand to SEQ ID NO: 2036758
aacucacucaggcauggac

SEQ ID NO: 2036760 - RNA, 19 nt, Artificial Sequence
  Description of Artificial Sequence: Synthetic oligonucleotide
  Sense strand starting at position 3118 of SEQ ID NO: 1881337
ucgcgagucugcucagcau

SEQ ID NO: 2036761 - RNA, 19 nt, Artificial Sequence
  Description of Artificial Sequence: Synthetic oligonucleotide
  Antisense strand to SEQ ID NO: 2036760
augcugagcagacucgcga

SEQ ID NO: 2036762 - RNA, 19 nt, Artificial Sequence
  Description of Artificial Sequence: Synthetic oligonucleotide
  Sense strand starting at position 3185 of SEQ ID NO: 1881337
gauuguaagcaucggcgaa

SEQ ID NO: 2036763 - RNA, 19 nt, Artificial Sequence
  Description of Artificial Sequence: Synthetic oligonucleotide
  Antisense strand to SEQ ID NO: 2036762
uucgccgaugcuuacaauc

SEQ ID NO: 2036764 - RNA, 19 nt, Artificial Sequence
  Description of Artificial Sequence: Synthetic oligonucleotide
  Sense strand starting at position 3212 of SEQ ID NO: 1881337
ugggaaguuuguggcaacu

SEQ ID NO: 2036765 - RNA, 19 nt, Artificial Sequence
  Description of Artificial Sequence: Synthetic oligonucleotide
  Antisense strand to SEQ ID NO: 2036764
aguugccacaaacuuccca

SEQ ID NO: 2036766 - RNA, 19 nt, Artificial Sequence
  Description of Artificial Sequence: Synthetic oligonucleotide
  Sense strand starting at position 3356 of SEQ ID NO: 1881337
gcgugaauguggguuugga

SEQ ID NO: 2036767 - RNA, 19 nt, Artificial Sequence
  Description of Artificial Sequence: Synthetic oligonucleotide
  Antisense strand to SEQ ID NO: 2036766
uccaaacccacauucacgc

SEQ ID NO: 2036768 - RNA, 19 nt, Artificial Sequence
  Description of Artificial Sequence: Synthetic oligonucleotide
  Sense strand starting at position 3617 of SEQ ID NO: 1881337
gcaguuuccucuugggaug

SEQ ID NO: 2036769 - RNA, 19 nt, Artificial Sequence
  Description of Artificial Sequence: Synthetic oligonucleotide
  Antisense strand to SEQ ID NO: 2036768
caucccaagaggaaacugc

SEQ ID NO: 2036770 - RNA, 19 nt, Artificial Sequence
  Description of Artificial Sequence: Synthetic oligonucleotide
  Sense strand starting at position 3618 of SEQ ID NO: 1881337
caguuuccucuugggauga

SEQ ID NO: 2036771 - RNA, 19 nt, Artificial Sequence
  Description of Artificial Sequence: Synthetic oligonucleotide
  Antisense strand to SEQ ID NO: 2036770
ucaucccaagaggaaacug

SEQ ID NO: 2036772 - RNA, 19 nt, Artificial Sequence
  Description of Artificial Sequence: Synthetic oligonucleotide
  Sense strand starting at position 3666 of SEQ ID NO: 1881337
uagggaucuccuugaaagu

SEQ ID NO: 2036773 - RNA, 19 nt, Artificial Sequence
  Description of Artificial Sequence: Synthetic oligonucleotide
  Antisense strand to SEQ ID NO: 2036772
acuuucaaggagaucccua

SEQ ID NO: 2036774 - RNA, 19 nt, Artificial Sequence
  Description of Artificial Sequence: Synthetic oligonucleotide
  Sense strand starting at position 3797 of SEQ ID NO: 1881337
cgaacuuucucaguggcau

SEQ ID NO: 2036775 - RNA, 19 nt, Artificial Sequence
  Description of Artificial Sequence: Synthetic oligonucleotide
  Antisense strand to SEQ ID NO: 2036774
augccacugagaaaguucg

SEQ ID NO: 2036776 - RNA, 19 nt, Artificial Sequence
  Description of Artificial Sequence: Synthetic oligonucleotide
  Sense strand starting at position 3798 of SEQ ID NO: 1881337
gaacuuucucaguggcauu

SEQ ID NO: 2036777 - RNA, 19 nt, Artificial Sequence
  Description of Artificial Sequence: Synthetic oligonucleotide
  Antisense strand to SEQ ID NO: 2036776
aaugccacugagaaaguuc

SEQ ID NO: 2036778 - RNA, 19 nt, Artificial Sequence
  Description of Artificial Sequence: Synthetic oligonucleotide
  Sense strand starting at position 3818 of SEQ ID NO: 1881337
cggacuuacaagcaaaugu

SEQ ID NO: 2036779 - RNA, 19 nt, Artificial Sequence
  Description of Artificial Sequence: Synthetic oligonucleotide
  Antisense strand to SEQ ID NO: 2036778
acauuugcuuguaaguccg

SEQ ID NO: 2036780 - RNA, 19 nt, Artificial Sequence
  Description of Artificial Sequence: Synthetic oligonucleotide
  Sense strand starting at position 3825 of SEQ ID NO: 1881337
acaagcaaauguucuaaga

SEQ ID NO: 2036781 - RNA, 19 nt, Artificial Sequence
  Description of Artificial Sequence: Synthetic oligonucleotide
  Antisense strand to SEQ ID NO: 2036780
ucuuagaacauuugcuugu

SEQ ID NO: 2036782 - RNA, 19 nt, Artificial Sequence
  Description of Artificial Sequence: Synthetic oligonucleotide
  Sense strand starting at position 3846 of SEQ ID NO: 1881337
uggacuccacaugguuaua

SEQ ID NO: 2036783 - RNA, 19 nt, Artificial Sequence
  Description of Artificial Sequence: Synthetic oligonucleotide
  Antisense strand to SEQ ID NO: 2036782
uauaaccauguggagucca

SEQ ID NO: 2036784 - RNA, 19 nt, Artificial Sequence
  Description of Artificial Sequence: Synthetic oligonucleotide
  Sense strand starting at position 3909 of SEQ ID NO: 1881337
accuuacugcucugacuga

SEQ ID NO: 2036785 - RNA, 19 nt, Artificial Sequence
  Description of Artificial Sequence: Synthetic oligonucleotide
  Antisense strand to SEQ ID NO: 2036784
ucagucagagcaguaaggu

SEQ ID NO: 2036786 - RNA, 19 nt, Artificial Sequence
  Description of Artificial Sequence: Synthetic oligonucleotide
  Sense strand starting at position 334 of SEQ ID NO: 1881338
cuguaauugcgauaaacug

SEQ ID NO: 2036787 - RNA, 19 nt, Artificial Sequence
  Description of Artificial Sequence: Synthetic oligonucleotide
  Antisense strand to SEQ ID NO: 2036786
caguuuaucgcaauuacag

SEQ ID NO: 2036788 - RNA, 19 nt, Artificial Sequence
  Description of Artificial Sequence: Synthetic oligonucleotide
  Sense strand starting at position 364 of SEQ ID NO: 1881338
ugcuaauaugagcaugaga

SEQ ID NO: 2036789 - RNA, 19 nt, Artificial Sequence
  Description of Artificial Sequence: Synthetic oligonucleotide
  Antisense strand to SEQ ID NO: 2036788
ucucaugcucauauuagca

SEQ ID NO: 2036790 - RNA, 19 nt, Artificial Sequence
  Description of Artificial Sequence: Synthetic oligonucleotide
  Sense strand starting at position 532 of SEQ ID NO: 1881338
uuagaauacuauguaagca

SEQ ID NO: 2036791 - RNA, 19 nt, Artificial Sequence
  Description of Artificial Sequence: Synthetic oligonucleotide
  Antisense strand to SEQ ID NO: 2036790
ugcuuacauaguauucuaa

SEQ ID NO: 2036792 - RNA, 19 nt, Artificial Sequence
  Description of Artificial Sequence: Synthetic oligonucleotide
  Sense strand starting at position 561 of SEQ ID NO: 1881338
acaguaacgauaugaaagu

SEQ ID NO: 2036793 - RNA, 19 nt, Artificial Sequence
  Description of Artificial Sequence: Synthetic oligonucleotide
  Antisense strand to SEQ ID NO: 2036792
acuuucauaucguuacugu

SEQ ID NO: 2036794 - RNA, 19 nt, Artificial Sequence
  Description of Artificial Sequence: Synthetic oligonucleotide
  Sense strand starting at position 574 of SEQ ID NO: 1881338
gaaaguuuaguauggccua

SEQ ID NO: 2036795 - RNA, 19 nt, Artificial Sequence
  Description of Artificial Sequence: Synthetic oligonucleotide
  Antisense strand to SEQ ID NO: 2036794
uaggccauacuaaacuuuc

SEQ ID NO: 2036796 - RNA, 19 nt, Artificial Sequence
  Description of Artificial Sequence: Synthetic oligonucleotide
  Sense strand starting at position 579 of SEQ ID NO: 1881338
uuuaguauggccuaggaua

SEQ ID NO: 2036797 - RNA, 19 nt, Artificial Sequence
  Description of Artificial Sequence: Synthetic oligonucleotide
  Antisense strand to SEQ ID NO: 2036796
uauccuaggccauacuaaa

SEQ ID NO: 2036798 - RNA, 19 nt, Artificial Sequence
  Description of Artificial Sequence: Synthetic oligonucleotide
  Sense strand starting at position 581 of SEQ ID NO: 1881338
uaguauggccuaggauaau

SEQ ID NO: 2036799 - RNA, 19 nt, Artificial Sequence
  Description of Artificial Sequence: Synthetic oligonucleotide
  Antisense strand to SEQ ID NO: 2036798
auuauccuaggccauacua

SEQ ID NO: 2036800 - RNA, 19 nt, Artificial Sequence
  Description of Artificial Sequence: Synthetic oligonucleotide
  Sense strand starting at position 852 of SEQ ID NO: 1881338
gguguauuaucauugguac

SEQ ID NO: 2036801 - RNA, 19 nt, Artificial Sequence
  Description of Artificial Sequence: Synthetic oligonucleotide
  Antisense strand to SEQ ID NO: 2036800
guaccaaugauaauacacc

SEQ ID NO: 2036802 - RNA, 19 nt, Artificial Sequence
  Description of Artificial Sequence: Synthetic oligonucleotide
  Sense strand starting at position 853 of SEQ ID NO: 1881338
guguauuaucauugguaca

SEQ ID NO: 2036803 - RNA, 19 nt, Artificial Sequence
  Description of Artificial Sequence: Synthetic oligonucleotide
  Antisense strand to SEQ ID NO: 2036802
uguaccaaugauaauacac

SEQ ID NO: 2036804 - RNA, 19 nt, Artificial Sequence
  Description of Artificial Sequence: Synthetic oligonucleotide
  Sense strand starting at position 855 of SEQ ID NO: 1881338
guauuaucauugguacaag

SEQ ID NO: 2036805 - RNA, 19 nt, Artificial Sequence
  Description of Artificial Sequence: Synthetic oligonucleotide
  Antisense strand to SEQ ID NO: 2036804
cuuguaccaaugauaauac

SEQ ID NO: 2036806 - RNA, 19 nt, Artificial Sequence
  Description of Artificial Sequence: Synthetic oligonucleotide
  Sense strand starting at position 866 of SEQ ID NO: 1881338
gguacaagauuggcaucaa

SEQ ID NO: 2036807 - RNA, 19 nt, Artificial Sequence
  Description of Artificial Sequence: Synthetic oligonucleotide
  Antisense strand to SEQ ID NO: 2036806
uugaugccaaucuuguacc

SEQ ID NO: 2036808 - RNA, 19 nt, Artificial Sequence
  Description of Artificial Sequence: Synthetic oligonucleotide
  Sense strand starting at position 906 of SEQ ID NO: 1881338
gauuuccugcagugauguu

SEQ ID NO: 2036809 - RNA, 19 nt, Artificial Sequence
  Description of Artificial Sequence: Synthetic oligonucleotide
  Antisense strand to SEQ ID NO: 2036808
aacaucacugcaggaaauc

SEQ ID NO: 2036810 - RNA, 19 nt, Artificial Sequence
  Description of Artificial Sequence: Synthetic oligonucleotide
  Sense strand starting at position 953 of SEQ ID NO: 1881338
acaagagcauuugaauauu

SEQ ID NO: 2036811 - RNA, 19 nt, Artificial Sequence
  Description of Artificial Sequence: Synthetic oligonucleotide
  Antisense strand to SEQ ID NO: 2036810
aauauucaaaugcucuugu

SEQ ID NO: 2036812 - RNA, 19 nt, Artificial Sequence
  Description of Artificial Sequence: Synthetic oligonucleotide
  Sense strand starting at position 1046 of SEQ ID NO: 1881338
cgaaaugagcuccauaaua

SEQ ID NO: 2036813 - RNA, 19 nt, Artificial Sequence
  Description of Artificial Sequence: Synthetic oligonucleotide
  Antisense strand to SEQ ID NO: 2036812
uauuauggagcucauuucg

SEQ ID NO: 2036814 - RNA, 19 nt, Artificial Sequence
  Description of Artificial Sequence: Synthetic oligonucleotide
  Sense strand starting at position 1150 of SEQ ID NO: 1881338
gaacuaacccuucggaaga

SEQ ID NO: 2036815 - RNA, 19 nt, Artificial Sequence
  Description of Artificial Sequence: Synthetic oligonucleotide
  Antisense strand to SEQ ID NO: 2036814
ucuuccgaaggguuaguuc

SEQ ID NO: 2036816 - RNA, 19 nt, Artificial Sequence
  Description of Artificial Sequence: Synthetic oligonucleotide
  Sense strand starting at position 1587 of SEQ ID NO: 1881338
guggccuuacgcguuauaa

SEQ ID NO: 2036817 - RNA, 19 nt, Artificial Sequence
  Description of Artificial Sequence: Synthetic oligonucleotide
  Antisense strand to SEQ ID NO: 2036816
uuauaacgcguaaggccac

SEQ ID NO: 2036818 - RNA, 19 nt, Artificial Sequence
  Description of Artificial Sequence: Synthetic oligonucleotide
  Sense strand starting at position 1588 of SEQ ID NO: 1881338
uggccuuacgcguuauaau

SEQ ID NO: 2036819 - RNA, 19 nt, Artificial Sequence
  Description of Artificial Sequence: Synthetic oligonucleotide
  Antisense strand to SEQ ID NO: 2036818
auuauaacgcguaaggcca

SEQ ID NO: 2036820 - RNA, 19 nt, Artificial Sequence
  Description of Artificial Sequence: Synthetic oligonucleotide
  Sense strand starting at position 1595 of SEQ ID NO: 1881338
acgcguuauaaucauagau

SEQ ID NO: 2036821 - RNA, 19 nt, Artificial Sequence
  Description of Artificial Sequence: Synthetic oligonucleotide
  Antisense strand to SEQ ID NO: 2036820
aucuaugauuauaacgcgu

SEQ ID NO: 2036822 - RNA, 19 nt, Artificial Sequence
  Description of Artificial Sequence: Synthetic oligonucleotide
  Sense strand starting at position 1697 of SEQ ID NO: 1881338
augaaccuguuagagauuu

SEQ ID NO: 2036823 - RNA, 19 nt, Artificial Sequence
  Description of Artificial Sequence: Synthetic oligonucleotide
  Antisense strand to SEQ ID NO: 2036822
aaaucucuaacagguucau

SEQ ID NO: 2036824 - RNA, 19 nt, Artificial Sequence
  Description of Artificial Sequence: Synthetic oligonucleotide
  Sense strand starting at position 1741 of SEQ ID NO: 1881338
cuguucuuggguuauaauc

SEQ ID NO: 2036825 - RNA, 19 nt, Artificial Sequence
  Description of Artificial Sequence: Synthetic oligonucleotide
  Antisense strand to SEQ ID NO: 2036824
gauuauaacccaagaacag

SEQ ID NO: 2036826 - RNA, 19 nt, Artificial Sequence
  Description of Artificial Sequence: Synthetic oligonucleotide
  Sense strand starting at position 1749 of SEQ ID NO: 1881338
ggguuauaaucauuggcaa

SEQ ID NO: 2036827 - RNA, 19 nt, Artificial Sequence
  Description of Artificial Sequence: Synthetic oligonucleotide
  Antisense strand to SEQ ID NO: 2036826
uugccaaugauuauaaccc

SEQ ID NO: 2036828 - RNA, 19 nt, Artificial Sequence
  Description of Artificial Sequence: Synthetic oligonucleotide
  Sense strand starting at position 1750 of SEQ ID NO: 1881338
gguuauaaucauuggcaau

SEQ ID NO: 2036829 - RNA, 19 nt, Artificial Sequence
  Description of Artificial Sequence: Synthetic oligonucleotide
  Antisense strand to SEQ ID NO: 2036828
auugccaaugauuauaacc

SEQ ID NO: 2036830 - RNA, 19 nt, Artificial Sequence
  Description of Artificial Sequence: Synthetic oligonucleotide
  Sense strand starting at position 1752 of SEQ ID NO: 1881338
uuauaaucauuggcaaugu

SEQ ID NO: 2036831 - RNA, 19 nt, Artificial Sequence
  Description of Artificial Sequence: Synthetic oligonucleotide
  Antisense strand to SEQ ID NO: 2036830
acauugccaaugauuauaa

SEQ ID NO: 2036832 - RNA, 19 nt, Artificial Sequence
  Description of Artificial Sequence: Synthetic oligonucleotide
  Sense strand starting at position 1756 of SEQ ID NO: 1881338
aaucauuggcaauguugua

SEQ ID NO: 2036833 - RNA, 19 nt, Artificial Sequence
  Description of Artificial Sequence: Synthetic oligonucleotide
  Antisense strand to SEQ ID NO: 2036832
uacaacauugccaaugauu

SEQ ID NO: 2036834 - RNA, 19 nt, Artificial Sequence
  Description of Artificial Sequence: Synthetic oligonucleotide
  Sense strand starting at position 2050 of SEQ ID NO: 1881338
uauuaaugcuuguuaugga

SEQ ID NO: 2036835 - RNA, 19 nt, Artificial Sequence
  Description of Artificial Sequence: Synthetic oligonucleotide
  Antisense strand to SEQ ID NO: 2036834
uccauaacaagcauuaaua

SEQ ID NO: 2036836 - RNA, 19 nt, Artificial Sequence
  Description of Artificial Sequence: Synthetic oligonucleotide
  Sense strand starting at position 2055 of SEQ ID NO: 1881338
augcuuguuauggagagua

SEQ ID NO: 2036837 - RNA, 19 nt, Artificial Sequence
  Description of Artificial Sequence: Synthetic oligonucleotide
  Antisense strand to SEQ ID NO: 2036836
uacucuccauaacaagcau

SEQ ID NO: 2036838 - RNA, 19 nt, Artificial Sequence
  Description of Artificial Sequence: Synthetic oligonucleotide
  Sense strand starting at position 2057 of SEQ ID NO: 1881338
gcuuguuauggagaguaaa

SEQ ID NO: 2036839 - RNA, 19 nt, Artificial Sequence
  Description of Artificial Sequence: Synthetic oligonucleotide
  Antisense strand to SEQ ID NO: 2036838
uuuacucuccauaacaagc

SEQ ID NO: 2036840 - RNA, 19 nt, Artificial Sequence
  Description of Artificial Sequence: Synthetic oligonucleotide
  Sense strand starting at position 2085 of SEQ ID NO: 1881338
uucucuugaugucuaaaug

SEQ ID NO: 2036841 - RNA, 19 nt, Artificial Sequence
  Description of Artificial Sequence: Synthetic oligonucleotide
  Antisense strand to SEQ ID NO: 2036840
cauuuagacaucaagagaa

SEQ ID NO: 2036842 - RNA, 19 nt, Artificial Sequence
  Description of Artificial Sequence: Synthetic oligonucleotide
  Sense strand starting at position 2086 of SEQ ID NO: 1881338
ucucuugaugucuaaauga

SEQ ID NO: 2036843 - RNA, 19 nt, Artificial Sequence
  Description of Artificial Sequence: Synthetic oligonucleotide
  Antisense strand to SEQ ID NO: 2036842
ucauuuagacaucaagaga

SEQ ID NO: 2036844 - RNA, 19 nt, Artificial Sequence
  Description of Artificial Sequence: Synthetic oligonucleotide
  Sense strand starting at position 2183 of SEQ ID NO: 1881338
gcuaucuauuaaguaguau

SEQ ID NO: 2036845 - RNA, 19 nt, Artificial Sequence
  Description of Artificial Sequence: Synthetic oligonucleotide
  Antisense strand to SEQ ID NO: 2036844
auacuacuuaauagauagc

SEQ ID NO: 2036846 - RNA, 19 nt, Artificial Sequence
  Description of Artificial Sequence: Synthetic oligonucleotide
  Sense strand starting at position 2260 of SEQ ID NO: 1881338
gugaaagagcaucacaguu

SEQ ID NO: 2036847 - RNA, 19 nt, Artificial Sequence
  Description of Artificial Sequence: Synthetic oligonucleotide
  Antisense strand to SEQ ID NO: 2036846
aacugugaugcucuuucac

SEQ ID NO: 2036848 - RNA, 19 nt, Artificial Sequence
  Description of Artificial Sequence: Synthetic oligonucleotide
  Sense strand starting at position 2697 of SEQ ID NO: 1881338
aggcauguuagguaccuua

SEQ ID NO: 2036849 - RNA, 19 nt, Artificial Sequence
  Description of Artificial Sequence: Synthetic oligonucleotide
  Antisense strand to SEQ ID NO: 2036848
uaagguaccuaacaugccu

SEQ ID NO: 2036850 - RNA, 19 nt, Artificial Sequence
  Description of Artificial Sequence: Synthetic oligonucleotide
  Sense strand starting at position 3145 of SEQ ID NO: 1881338
gagcuuauauuauuguaag

SEQ ID NO: 2036851 - RNA, 19 nt, Artificial Sequence
  Description of Artificial Sequence: Synthetic oligonucleotide
  Antisense strand to SEQ ID NO: 2036850
cuuacaauaauauaagcuc

SEQ ID NO: 2036852 - RNA, 19 nt, Artificial Sequence
  Description of Artificial Sequence: Synthetic oligonucleotide
  Sense strand starting at position 3155 of SEQ ID NO: 1881338
uauuguaagagaggaguca

SEQ ID NO: 2036853 - RNA, 19 nt, Artificial Sequence
  Description of Artificial Sequence: Synthetic oligonucleotide
  Antisense strand to SEQ ID NO: 2036852
ugacuccucucuuacaaua

SEQ ID NO: 2036854 - RNA, 19 nt, Artificial Sequence
  Description of Artificial Sequence: Synthetic oligonucleotide
  Sense strand starting at position 3322 of SEQ ID NO: 1881338
acacuuaagcccuggaguu

SEQ ID NO: 2036855 - RNA, 19 nt, Artificial Sequence
  Description of Artificial Sequence: Synthetic oligonucleotide
  Antisense strand to SEQ ID NO: 2036854
aacuccagggcuuaagugu

SEQ ID NO: 2036856 - RNA, 19 nt, Artificial Sequence
  Description of Artificial Sequence: Synthetic oligonucleotide
  Sense strand starting at position 3559 of SEQ ID NO: 1881338
ugccuuucugaaggaaaga

SEQ ID NO: 2036857 - RNA, 19 nt, Artificial Sequence
  Description of Artificial Sequence: Synthetic oligonucleotide
  Antisense strand to SEQ ID NO: 2036856
ucuuuccuucagaaaggca

SEQ ID NO: 2036858 - RNA, 19 nt, Artificial Sequence
  Description of Artificial Sequence: Synthetic oligonucleotide
  Sense strand starting at position 3802 of SEQ ID NO: 1881338
agaguuguguaacuauuac

SEQ ID NO: 2036859 - RNA, 19 nt, Artificial Sequence
  Description of Artificial Sequence: Synthetic oligonucleotide
  Antisense strand to SEQ ID NO: 2036858
guaauaguuacacaacucu

SEQ ID NO: 2036860 - RNA, 19 nt, Artificial Sequence
  Description of Artificial Sequence: Synthetic oligonucleotide
  Sense strand starting at position 3863 of SEQ ID NO: 1881338
accuguauccauuagugau

SEQ ID NO: 2036861 - RNA, 19 nt, Artificial Sequence
  Description of Artificial Sequence: Synthetic oligonucleotide
  Antisense strand to SEQ ID NO: 2036860
aucacuaauggauacaggu

SEQ ID NO: 2036862 - RNA, 19 nt, Artificial Sequence
  Description of Artificial Sequence: Synthetic oligonucleotide
  Sense strand starting at position 3901 of SEQ ID NO: 1881338
ucccuaggucccuggaaga

SEQ ID NO: 2036863 - RNA, 19 nt, Artificial Sequence
  Description of Artificial Sequence: Synthetic oligonucleotide
  Antisense strand to SEQ ID NO: 2036862
ucuuccagggaccuaggga

SEQ ID NO: 2036864 - RNA, 19 nt, Artificial Sequence
  Description of Artificial Sequence: Synthetic oligonucleotide
  Sense strand starting at position 3922 of SEQ ID NO: 1881338
cuaugccugucucuaagau

SEQ ID NO: 2036865 - RNA, 19 nt, Artificial Sequence
  Description of Artificial Sequence: Synthetic oligonucleotide
  Antisense strand to SEQ ID NO: 2036864
aucuuagagacaggcauag

SEQ ID NO: 2036866 - RNA, 19 nt, Artificial Sequence
  Description of Artificial Sequence: Synthetic oligonucleotide
  Sense strand starting at position 2218 of SEQ ID NO: 1881339
gggagauguugggcaccaa

SEQ ID NO: 2036867 - RNA, 19 nt, Artificial Sequence
  Description of Artificial Sequence: Synthetic oligonucleotide
  Antisense strand to SEQ ID NO: 2036866
uuggugcccaacaucuccc

SEQ ID NO: 2036868 - RNA, 19 nt, Artificial Sequence
  Description of Artificial Sequence: Synthetic oligonucleotide
  Sense strand starting at position 2484 of SEQ ID NO: 1881339
gcgggaaucuugcucuguu

SEQ ID NO: 2036869 - RNA, 19 nt, Artificial Sequence
  Description of Artificial Sequence: Synthetic oligonucleotide
  Antisense strand to SEQ ID NO: 2036868
aacagagcaagauucccgc

SEQ ID NO: 2036870 - RNA, 19 nt, Artificial Sequence
  Description of Artificial Sequence: Synthetic oligonucleotide
  Sense strand starting at position 2485 of SEQ ID NO: 1881339
cgggaaucuugcucuguug

SEQ ID NO: 2036871 - RNA, 19 nt, Artificial Sequence
  Description of Artificial Sequence: Synthetic oligonucleotide
  Antisense strand to SEQ ID NO: 2036870
caacagagcaagauucccg

SEQ ID NO: 2036872 - RNA, 19 nt, Artificial Sequence
  Description of Artificial Sequence: Synthetic oligonucleotide
  Sense strand starting at position 2617 of SEQ ID NO: 1881339
gguagaucccuuuggcuca

SEQ ID NO: 2036873 - RNA, 19 nt, Artificial Sequence
  Description of Artificial Sequence: Synthetic oligonucleotide
  Antisense strand to SEQ ID NO: 2036872
ugagccaaagggaucuacc

SEQ ID NO: 2036874 - RNA, 19 nt, Artificial Sequence
  Description of Artificial Sequence: Synthetic oligonucleotide
  Sense strand starting at position 3178 of SEQ ID NO: 1881339
aagagauucucccgcggag

SEQ ID NO: 2036875 - RNA, 19 nt, Artificial Sequence
  Description of Artificial Sequence: Synthetic oligonucleotide
  Antisense strand to SEQ ID NO: 2036874
cuccgcgggagaaucucuu

SEQ ID NO: 2036876 - RNA, 19 nt, Artificial Sequence
  Description of Artificial Sequence: Synthetic oligonucleotide
  Sense strand starting at position 226 of SEQ ID NO: 1881340
guaacaagugcagagacau

SEQ ID NO: 2036877 - RNA, 19 nt, Artificial Sequence
  Description of Artificial Sequence: Synthetic oligonucleotide
  Antisense strand to SEQ ID NO: 2036876
augucucugcacuuguuac

SEQ ID NO: 2036878 - RNA, 19 nt, Artificial Sequence
  Description of Artificial Sequence: Synthetic oligonucleotide
  Sense strand starting at position 374 of SEQ ID NO: 1881340
gcacgacuuucuguaggaa

SEQ ID NO: 2036879 - RNA, 19 nt, Artificial Sequence
  Description of Artificial Sequence: Synthetic oligonucleotide
  Antisense strand to SEQ ID NO: 2036878
uuccuacagaaagucgugc

SEQ ID NO: 2036880 - RNA, 19 nt, Artificial Sequence
  Description of Artificial Sequence: Synthetic oligonucleotide
  Sense strand starting at position 375 of SEQ ID NO: 1881340
cacgacuuucuguaggaaa

SEQ ID NO: 2036881 - RNA, 19 nt, Artificial Sequence
  Description of Artificial Sequence: Synthetic oligonucleotide
  Antisense strand to SEQ ID NO: 2036880
uuuccuacagaaagucgug

SEQ ID NO: 2036882 - RNA, 19 nt, Artificial Sequence
  Description of Artificial Sequence: Synthetic oligonucleotide
  Sense strand starting at position 487 of SEQ ID NO: 1881340
gggccuuagucugcagaag

SEQ ID NO: 2036883 - RNA, 19 nt, Artificial Sequence
  Description of Artificial Sequence: Synthetic oligonucleotide
  Antisense strand to SEQ ID NO: 2036882
cuucugcagacuaaggccc

SEQ ID NO: 2036884 - RNA, 19 nt, Artificial Sequence
  Description of Artificial Sequence: Synthetic oligonucleotide
  Sense strand starting at position 736 of SEQ ID NO: 1881340
acaggauggcuguaugacu

SEQ ID NO: 2036885 - RNA, 19 nt, Artificial Sequence
  Description of Artificial Sequence: Synthetic oligonucleotide
  Antisense strand to SEQ ID NO: 2036884
agucauacagccauccugu

SEQ ID NO: 2036886 - RNA, 19 nt, Artificial Sequence
  Description of Artificial Sequence: Synthetic oligonucleotide
  Sense strand starting at position 855 of SEQ ID NO: 1881340
ugguuccucuauugagauu

SEQ ID NO: 2036887 - RNA, 19 nt, Artificial Sequence
  Description of Artificial Sequence: Synthetic oligonucleotide
  Antisense strand to SEQ ID NO: 2036886
aaucucaauagaggaacca

SEQ ID NO: 2036888 - RNA, 19 nt, Artificial Sequence
  Description of Artificial Sequence: Synthetic oligonucleotide
  Sense strand starting at position 985 of SEQ ID NO: 1881340
gaaggccgauucugaagau

SEQ ID NO: 2036889 - RNA, 19 nt, Artificial Sequence
  Description of Artificial Sequence: Synthetic oligonucleotide
  Antisense strand to SEQ ID NO: 2036888
aucuucagaaucggccuuc

SEQ ID NO: 2036890 - RNA, 19 nt, Artificial Sequence
  Description of Artificial Sequence: Synthetic oligonucleotide
  Sense strand starting at position 989 of SEQ ID NO: 1881340
gccgauucugaagaugcaa

SEQ ID NO: 2036891 - RNA, 19 nt, Artificial Sequence
  Description of Artificial Sequence: Synthetic oligonucleotide
  Antisense strand to SEQ ID NO: 2036890
uugcaucuucagaaucggc

SEQ ID NO: 2036892 - RNA, 19 nt, Artificial Sequence
  Description of Artificial Sequence: Synthetic oligonucleotide
  Sense strand starting at position 997 of SEQ ID NO: 1881340
ugaagaugcaaucguagag

SEQ ID NO: 2036893 - RNA, 19 nt, Artificial Sequence
  Description of Artificial Sequence: Synthetic oligonucleotide
  Antisense strand to SEQ ID NO: 2036892
cucuacgauugcaucuuca

SEQ ID NO: 2036894 - RNA, 19 nt, Artificial Sequence
  Description of Artificial Sequence: Synthetic oligonucleotide
  Sense strand starting at position 1063 of SEQ ID NO: 1881340
ugaccaucauccuggacua

SEQ ID NO: 2036895 - RNA, 19 nt, Artificial Sequence
  Description of Artificial Sequence: Synthetic oligonucleotide
  Antisense strand to SEQ ID NO: 2036894
uaguccaggaugaugguca

SEQ ID NO: 2036896 - RNA, 19 nt, Artificial Sequence
  Description of Artificial Sequence: Synthetic oligonucleotide
  Sense strand starting at position 1153 of SEQ ID NO: 1881340
cccugagcucuccgucuga

SEQ ID NO: 2036897 - RNA, 19 nt, Artificial Sequence
  Description of Artificial Sequence: Synthetic oligonucleotide
  Antisense strand to SEQ ID NO: 2036896
ucagacggagagcucaggg

SEQ ID NO: 2036898 - RNA, 19 nt, Artificial Sequence
  Description of Artificial Sequence: Synthetic oligonucleotide
  Sense strand starting at position 2182 of SEQ ID NO: 1881340
gggagauguugggcaccaa

SEQ ID NO: 2036899 - RNA, 19 nt, Artificial Sequence
  Description of Artificial Sequence: Synthetic oligonucleotide
  Antisense strand to SEQ ID NO: 2036898
uuggugcccaacaucuccc

SEQ ID NO: 2036900 - RNA, 19 nt, Artificial Sequence
  Description of Artificial Sequence: Synthetic oligonucleotide
  Sense strand starting at position 2568 of SEQ ID NO: 1881340
cuuugaaagcuggguagau

SEQ ID NO: 2036901 - RNA, 19 nt, Artificial Sequence
  Description of Artificial Sequence: Synthetic oligonucleotide
  Antisense strand to SEQ ID NO: 2036900
aucuacccagcuuucaaag

SEQ ID NO: 2036902 - RNA, 19 nt, Artificial Sequence
  Description of Artificial Sequence: Synthetic oligonucleotide
  Sense strand starting at position 2580 of SEQ ID NO: 1881340
gguagaucccuuuggcuca

SEQ ID NO: 2036903 - RNA, 19 nt, Artificial Sequence
  Description of Artificial Sequence: Synthetic oligonucleotide
  Antisense strand to SEQ ID NO: 2036902
ugagccaaagggaucuacc

SEQ ID NO: 2036904 - RNA, 19 nt, Artificial Sequence
  Description of Artificial Sequence: Synthetic oligonucleotide
  Sense strand starting at position 2600 of SEQ ID NO: 1881340
acgccuuucugcuagcuua

SEQ ID NO: 2036905 - RNA, 19 nt, Artificial Sequence
  Description of Artificial Sequence: Synthetic oligonucleotide
  Antisense strand to SEQ ID NO: 2036904
uaagcuagcagaaaggcgu

SEQ ID NO: 2036906 - RNA, 19 nt, Artificial Sequence
  Description of Artificial Sequence: Synthetic oligonucleotide
  Sense strand starting at position 2610 of SEQ ID NO: 1881340
gcuagcuuacccugauucu

SEQ ID NO: 2036907 - RNA, 19 nt, Artificial Sequence
  Description of Artificial Sequence: Synthetic oligonucleotide
  Antisense strand to SEQ ID NO: 2036906
agaaucaggguaagcuagc

SEQ ID NO: 2036908 - RNA, 19 nt, Artificial Sequence
  Description of Artificial Sequence: Synthetic oligonucleotide
  Sense strand starting at position 2736 of SEQ ID NO: 1881340
guaaguauguuuccugucu

SEQ ID NO: 2036909 - RNA, 19 nt, Artificial Sequence
  Description of Artificial Sequence: Synthetic oligonucleotide
  Antisense strand to SEQ ID NO: 2036908
agacaggaaacauacuuac

SEQ ID NO: 2036910 - RNA, 19 nt, Artificial Sequence
  Description of Artificial Sequence: Synthetic oligonucleotide
  Sense strand starting at position 2768 of SEQ ID NO: 1881340
aaaucuucgucuugugcau

SEQ ID NO: 2036911 - RNA, 19 nt, Artificial Sequence
  Description of Artificial Sequence: Synthetic oligonucleotide
  Antisense strand to SEQ ID NO: 2036910
augcacaagacgaagauuu

SEQ ID NO: 2036912 - RNA, 19 nt, Artificial Sequence
  Description of Artificial Sequence: Synthetic oligonucleotide
  Sense strand starting at position 2774 of SEQ ID NO: 1881340
ucgucuugugcaucauguu

SEQ ID NO: 2036913 - RNA, 19 nt, Artificial Sequence
  Description of Artificial Sequence: Synthetic oligonucleotide
  Antisense strand to SEQ ID NO: 2036912
aacaugaugcacaagacga

SEQ ID NO: 2036914 - RNA, 19 nt, Artificial Sequence
  Description of Artificial Sequence: Synthetic oligonucleotide
  Sense strand starting at position 2775 of SEQ ID NO: 1881340
cgucuugugcaucauguuu

SEQ ID NO: 2036915 - RNA, 19 nt, Artificial Sequence
  Description of Artificial Sequence: Synthetic oligonucleotide
  Antisense strand to SEQ ID NO: 2036914
aaacaugaugcacaagacg

SEQ ID NO: 2036916 - RNA, 19 nt, Artificial Sequence
  Description of Artificial Sequence: Synthetic oligonucleotide
  Sense strand starting at position 2777 of SEQ ID NO: 1881340
ucuugugcaucauguuuaa

SEQ ID NO: 2036917 - RNA, 19 nt, Artificial Sequence
  Description of Artificial Sequence: Synthetic oligonucleotide
  Antisense strand to SEQ ID NO: 2036916
uuaaacaugaugcacaaga

SEQ ID NO: 2036918 - RNA, 19 nt, Artificial Sequence
  Description of Artificial Sequence: Synthetic oligonucleotide
  Sense strand starting at position 2780 of SEQ ID NO: 1881340
ugugcaucauguuuaacaa

SEQ ID NO: 2036919 - RNA, 19 nt, Artificial Sequence
  Description of Artificial Sequence: Synthetic oligonucleotide
  Antisense strand to SEQ ID NO: 2036918
uuguuaaacaugaugcaca

SEQ ID NO: 2036920 - RNA, 19 nt, Artificial Sequence
  Description of Artificial Sequence: Synthetic oligonucleotide
  Sense strand starting at position 2781 of SEQ ID NO: 1881340
gugcaucauguuuaacaau

SEQ ID NO: 2036921 - RNA, 19 nt, Artificial Sequence
  Description of Artificial Sequence: Synthetic oligonucleotide
  Antisense strand to SEQ ID NO: 2036920
auuguuaaacaugaugcac

SEQ ID NO: 2036922 - RNA, 19 nt, Artificial Sequence
  Description of Artificial Sequence: Synthetic oligonucleotide
  Sense strand starting at position 2837 of SEQ ID NO: 1881340
uacugauauuuggguuguu

SEQ ID NO: 2036923 - RNA, 19 nt, Artificial Sequence
  Description of Artificial Sequence: Synthetic oligonucleotide
  Antisense strand to SEQ ID NO: 2036922
aacaacccaaauaucagua

SEQ ID NO: 2036924 - RNA, 19 nt, Artificial Sequence
  Description of Artificial Sequence: Synthetic oligonucleotide
  Sense strand starting at position 2885 of SEQ ID NO: 1881340
agaacauauuugugaccau

SEQ ID NO: 2036925 - RNA, 19 nt, Artificial Sequence
  Description of Artificial Sequence: Synthetic oligonucleotide
  Antisense strand to SEQ ID NO: 2036924
auggucacaaauauguucu

SEQ ID NO: 2036926 - RNA, 19 nt, Artificial Sequence
  Description of Artificial Sequence: Synthetic oligonucleotide
  Sense strand starting at position 3023 of SEQ ID NO: 1881340
cuggguuaguuaccuaauu

SEQ ID NO: 2036927 - RNA, 19 nt, Artificial Sequence
  Description of Artificial Sequence: Synthetic oligonucleotide
  Antisense strand to SEQ ID NO: 2036926
aauuagguaacuaacccag

SEQ ID NO: 2036928 - RNA, 19 nt, Artificial Sequence
  Description of Artificial Sequence: Synthetic oligonucleotide
  Sense strand starting at position 3135 of SEQ ID NO: 1881340
aagagauucucccgcggag

SEQ ID NO: 2036929 - RNA, 19 nt, Artificial Sequence
  Description of Artificial Sequence: Synthetic oligonucleotide
  Antisense strand to SEQ ID NO: 2036928
cuccgcgggagaaucucuu

SEQ ID NO: 2036930 - RNA, 19 nt, Artificial Sequence
  Description of Artificial Sequence: Synthetic oligonucleotide
  Sense strand starting at position 3203 of SEQ ID NO: 1881340
gcaagacuauauugcuuua

SEQ ID NO: 2036931 - RNA, 19 nt, Artificial Sequence
  Description of Artificial Sequence: Synthetic oligonucleotide
  Antisense strand to SEQ ID NO: 2036930
uaaagcaauauagucuugc

SEQ ID NO: 2036932 - RNA, 19 nt, Artificial Sequence
  Description of Artificial Sequence: Synthetic oligonucleotide
  Sense strand starting at position 3231 of SEQ ID NO: 1881340
gccggcuaucuggagagau

SEQ ID NO: 2036933 - RNA, 19 nt, Artificial Sequence
  Description of Artificial Sequence: Synthetic oligonucleotide
  Antisense strand to SEQ ID NO: 2036932
aucucuccagauagccggc

SEQ ID NO: 2036934 - RNA, 19 nt, Artificial Sequence
  Description of Artificial Sequence: Synthetic oligonucleotide
  Sense strand starting at position 3235 of SEQ ID NO: 1881340
gcuaucuggagagaugcaa

SEQ ID NO: 2036935 - RNA, 19 nt, Artificial Sequence
  Description of Artificial Sequence: Synthetic oligonucleotide
  Antisense strand to SEQ ID NO: 2036934
uugcaucucuccagauagc

SEQ ID NO: 2036936 - RNA, 19 nt, Artificial Sequence
  Description of Artificial Sequence: Synthetic oligonucleotide
  Sense strand starting at position 3396 of SEQ ID NO: 1881340
ccagguagauugugucaac

SEQ ID NO: 2036937 - RNA, 19 nt, Artificial Sequence
  Description of Artificial Sequence: Synthetic oligonucleotide
  Antisense strand to SEQ ID NO: 2036936
guugacacaaucuaccugg

SEQ ID NO: 2036938 - RNA, 19 nt, Artificial Sequence
  Description of Artificial Sequence: Synthetic oligonucleotide
  Sense strand starting at position 3397 of SEQ ID NO: 1881340
cagguagauugugucaacu

SEQ ID NO: 2036939 - RNA, 19 nt, Artificial Sequence
  Description of Artificial Sequence: Synthetic oligonucleotide
  Antisense strand to SEQ ID NO: 2036938
aguugacacaaucuaccug

SEQ ID NO: 2036940 - RNA, 19 nt, Artificial Sequence
  Description of Artificial Sequence: Synthetic oligonucleotide
  Sense strand starting at position 3399 of SEQ ID NO: 1881340
gguagauugugucaacuca

SEQ ID NO: 2036941 - RNA, 19 nt, Artificial Sequence
  Description of Artificial Sequence: Synthetic oligonucleotide
  Antisense strand to SEQ ID NO: 2036940
ugaguugacacaaucuacc

SEQ ID NO: 2036942 - RNA, 19 nt, Artificial Sequence
  Description of Artificial Sequence: Synthetic oligonucleotide
  Sense strand starting at position 3419 of SEQ ID NO: 1881340
agucaaugcgcuuaugaaa

SEQ ID NO: 2036943 - RNA, 19 nt, Artificial Sequence
  Description of Artificial Sequence: Synthetic oligonucleotide
  Antisense strand to SEQ ID NO: 2036942
uuucauaagcgcauugacu

SEQ ID NO: 2036944 - RNA, 19 nt, Artificial Sequence
  Description of Artificial Sequence: Synthetic oligonucleotide
  Sense strand starting at position 3515 of SEQ ID NO: 1881340
cugucucugaguuguggga

SEQ ID NO: 2036945 - RNA, 19 nt, Artificial Sequence
  Description of Artificial Sequence: Synthetic oligonucleotide
  Antisense strand to SEQ ID NO: 2036944
ucccacaacucagagacag

SEQ ID NO: 2036946 - RNA, 19 nt, Artificial Sequence
  Description of Artificial Sequence: Synthetic oligonucleotide
  Sense strand starting at position 3702 of SEQ ID NO: 1881340
gguacacugucuucuccaa

SEQ ID NO: 2036947 - RNA, 19 nt, Artificial Sequence
  Description of Artificial Sequence: Synthetic oligonucleotide
  Antisense strand to SEQ ID NO: 2036946
uuggagaagacaguguacc

SEQ ID NO: 2036948 - RNA, 19 nt, Artificial Sequence
  Description of Artificial Sequence: Synthetic oligonucleotide
  Sense strand starting at position 3843 of SEQ ID NO: 1881340
uguggaagcauccgcguua

SEQ ID NO: 2036949 - RNA, 19 nt, Artificial Sequence
  Description of Artificial Sequence: Synthetic oligonucleotide
  Antisense strand to SEQ ID NO: 2036948
uaacgcggaugcuuccaca

SEQ ID NO: 2036950 - RNA, 19 nt, Artificial Sequence
  Description of Artificial Sequence: Synthetic oligonucleotide
  Sense strand starting at position 3846 of SEQ ID NO: 1881340
ggaagcauccgcguuaguu

SEQ ID NO: 2036951 - RNA, 19 nt, Artificial Sequence
  Description of Artificial Sequence: Synthetic oligonucleotide
  Antisense strand to SEQ ID NO: 2036950
aacuaacgcggaugcuucc

SEQ ID NO: 2036952 - RNA, 19 nt, Artificial Sequence
  Description of Artificial Sequence: Synthetic oligonucleotide
  Sense strand starting at position 3847 of SEQ ID NO: 1881340
gaagcauccgcguuaguuc

SEQ ID NO: 2036953 - RNA, 19 nt, Artificial Sequence
  Description of Artificial Sequence: Synthetic oligonucleotide
  Antisense strand to SEQ ID NO: 2036952
gaacuaacgcggaugcuuc

SEQ ID NO: 2036954 - RNA, 19 nt, Artificial Sequence
  Description of Artificial Sequence: Synthetic oligonucleotide
  Sense strand starting at position 3956 of SEQ ID NO: 1881340
gugugugcacguuuaaguu

SEQ ID NO: 2036955 - RNA, 19 nt, Artificial Sequence
  Description of Artificial Sequence: Synthetic oligonucleotide
  Antisense strand to SEQ ID NO: 2036954
aacuuaaacgugcacacac

SEQ ID NO: 2036956 - RNA, 19 nt, Artificial Sequence
  Description of Artificial Sequence: Synthetic oligonucleotide
  Sense strand starting at position 362 of SEQ ID NO: 1881341
cagcauguuuggguuguga

SEQ ID NO: 2036957 - RNA, 19 nt, Artificial Sequence
  Description of Artificial Sequence: Synthetic oligonucleotide
  Antisense strand to SEQ ID NO: 2036956
ucacaacccaaacaugcug

SEQ ID NO: 2036958 - RNA, 19 nt, Artificial Sequence
  Description of Artificial Sequence: Synthetic oligonucleotide
  Sense strand starting at position 364 of SEQ ID NO: 1881341
gcauguuuggguugugaag

SEQ ID NO: 2036959 - RNA, 19 nt, Artificial Sequence
  Description of Artificial Sequence: Synthetic oligonucleotide
  Antisense strand to SEQ ID NO: 2036958
cuucacaacccaaacaugc

SEQ ID NO: 2036960 - RNA, 19 nt, Artificial Sequence
  Description of Artificial Sequence: Synthetic oligonucleotide
  Sense strand starting at position 366 of SEQ ID NO: 1881341
auguuuggguugugaagag

SEQ ID NO: 2036961 - RNA, 19 nt, Artificial Sequence
  Description of Artificial Sequence: Synthetic oligonucleotide
  Antisense strand to SEQ ID NO: 2036960
cucuucacaacccaaacau

SEQ ID NO: 2036962 - RNA, 19 nt, Artificial Sequence
  Description of Artificial Sequence: Synthetic oligonucleotide
  Sense strand starting at position 529 of SEQ ID NO: 1881341
gacccugaccugugccaau

SEQ ID NO: 2036963 - RNA, 19 nt, Artificial Sequence
  Description of Artificial Sequence: Synthetic oligonucleotide
  Antisense strand to SEQ ID NO: 2036962
auuggcacaggucaggguc

SEQ ID NO: 2036964 - RNA, 19 nt, Artificial Sequence
  Description of Artificial Sequence: Synthetic oligonucleotide
  Sense strand starting at position 860 of SEQ ID NO: 1881341
agaacccugcccugagaau

SEQ ID NO: 2036965 - RNA, 19 nt, Artificial Sequence
  Description of Artificial Sequence: Synthetic oligonucleotide
  Antisense strand to SEQ ID NO: 2036964
auucucagggcaggguucu

SEQ ID NO: 2036966 - RNA, 19 nt, Artificial Sequence
  Description of Artificial Sequence: Synthetic oligonucleotide
  Sense strand starting at position 885 of SEQ ID NO: 1881341
ggagaucagccuugcccua

SEQ ID NO: 2036967 - RNA, 19 nt, Artificial Sequence
  Description of Artificial Sequence: Synthetic oligonucleotide
  Antisense strand to SEQ ID NO: 2036966
uagggcaaggcugaucucc

SEQ ID NO: 2036968 - RNA, 19 nt, Artificial Sequence
  Description of Artificial Sequence: Synthetic oligonucleotide
  Sense strand starting at position 918 of SEQ ID NO: 1881341
ggaaacaagccuugucuua

SEQ ID NO: 2036969 - RNA, 19 nt, Artificial Sequence
  Description of Artificial Sequence: Synthetic oligonucleotide
  Antisense strand to SEQ ID NO: 2036968
uaagacaaggcuuguuucc

SEQ ID NO: 2036970 - RNA, 19 nt, Artificial Sequence
  Description of Artificial Sequence: Synthetic oligonucleotide
  Sense strand starting at position 923 of SEQ ID NO: 1881341
caagccuugucuuaugaug

SEQ ID NO: 2036971 - RNA, 19 nt, Artificial Sequence
  Description of Artificial Sequence: Synthetic oligonucleotide
  Antisense strand to SEQ ID NO: 2036970
caucauaagacaaggcuug

SEQ ID NO: 2036972 - RNA, 19 nt, Artificial Sequence
  Description of Artificial Sequence: Synthetic oligonucleotide
  Sense strand starting at position 925 of SEQ ID NO: 1881341
agccuugucuuaugaugga

SEQ ID NO: 2036973 - RNA, 19 nt, Artificial Sequence
  Description of Artificial Sequence: Synthetic oligonucleotide
  Antisense strand to SEQ ID NO: 2036972
uccaucauaagacaaggcu

SEQ ID NO: 2036974 - RNA, 19 nt, Artificial Sequence
  Description of Artificial Sequence: Synthetic oligonucleotide
  Sense strand starting at position 928 of SEQ ID NO: 1881341
cuugucuuaugauggaaac

SEQ ID NO: 2036975 - RNA, 19 nt, Artificial Sequence
  Description of Artificial Sequence: Synthetic oligonucleotide
  Antisense strand to SEQ ID NO: 2036974
guuuccaucauaagacaag

SEQ ID NO: 2036976 - RNA, 19 nt, Artificial Sequence
  Description of Artificial Sequence: Synthetic oligonucleotide
  Sense strand starting at position 930 of SEQ ID NO: 1881341
ugucuuaugauggaaacgu

SEQ ID NO: 2036977 - RNA, 19 nt, Artificial Sequence
  Description of Artificial Sequence: Synthetic oligonucleotide
  Antisense strand to SEQ ID NO: 2036976
acguuuccaucauaagaca

SEQ ID NO: 2036978 - RNA, 19 nt, Artificial Sequence
  Description of Artificial Sequence: Synthetic oligonucleotide
  Sense strand starting at position 1039 of SEQ ID NO: 1881341
agcagaagucccugggcua

SEQ ID NO: 2036979 - RNA, 19 nt, Artificial Sequence
  Description of Artificial Sequence: Synthetic oligonucleotide
  Antisense strand to SEQ ID NO: 2036978
uagcccagggacuucugcu

SEQ ID NO: 2036980 - RNA, 19 nt, Artificial Sequence
  Description of Artificial Sequence: Synthetic oligonucleotide
  Sense strand starting at position 1580 of SEQ ID NO: 1881341
gucguucugccgggacgau

SEQ ID NO: 2036981 - RNA, 19 nt, Artificial Sequence
  Description of Artificial Sequence: Synthetic oligonucleotide
  Antisense strand to SEQ ID NO: 2036980
aucgucccggcagaacgac

SEQ ID NO: 2036982 - RNA, 19 nt, Artificial Sequence
  Description of Artificial Sequence: Synthetic oligonucleotide
  Sense strand starting at position 2361 of SEQ ID NO: 1881341
agauuacagucagagccua

SEQ ID NO: 2036983 - RNA, 19 nt, Artificial Sequence
  Description of Artificial Sequence: Synthetic oligonucleotide
  Antisense strand to SEQ ID NO: 2036982
uaggcucugacuguaaucu

SEQ ID NO: 2036984 - RNA, 19 nt, Artificial Sequence
  Description of Artificial Sequence: Synthetic oligonucleotide
  Sense strand starting at position 2541 of SEQ ID NO: 1881341
accaucaugccggacuaau

SEQ ID NO: 2036985 - RNA, 19 nt, Artificial Sequence
  Description of Artificial Sequence: Synthetic oligonucleotide
  Antisense strand to SEQ ID NO: 2036984
auuaguccggcaugauggu

SEQ ID NO: 2036986 - RNA, 19 nt, Artificial Sequence
  Description of Artificial Sequence: Synthetic oligonucleotide
  Sense strand starting at position 3030 of SEQ ID NO: 1881341
agcccaggcugguaugaaa

SEQ ID NO: 2036987 - RNA, 19 nt, Artificial Sequence
  Description of Artificial Sequence: Synthetic oligonucleotide
  Antisense strand to SEQ ID NO: 2036986
uuucauaccagccugggcu

SEQ ID NO: 2036988 - RNA, 19 nt, Artificial Sequence
  Description of Artificial Sequence: Synthetic oligonucleotide
  Sense strand starting at position 3041 of SEQ ID NO: 1881341
guaugaaacuccugucuuc

SEQ ID NO: 2036989 - RNA, 19 nt, Artificial Sequence
  Description of Artificial Sequence: Synthetic oligonucleotide
  Antisense strand to SEQ ID NO: 2036988
gaagacaggaguuucauac

SEQ ID NO: 2036990 - RNA, 19 nt, Artificial Sequence
  Description of Artificial Sequence: Synthetic oligonucleotide
  Sense strand starting at position 3180 of SEQ ID NO: 1881341
cauugcuagcucugcaagu

SEQ ID NO: 2036991 - RNA, 19 nt, Artificial Sequence
  Description of Artificial Sequence: Synthetic oligonucleotide
  Antisense strand to SEQ ID NO: 2036990
acuugcagagcuagcaaug

SEQ ID NO: 2036992 - RNA, 19 nt, Artificial Sequence
  Description of Artificial Sequence: Synthetic oligonucleotide
  Sense strand starting at position 3196 of SEQ ID NO: 1881341
agucuauuccuuugcuugu

SEQ ID NO: 2036993 - RNA, 19 nt, Artificial Sequence
  Description of Artificial Sequence: Synthetic oligonucleotide
  Antisense strand to SEQ ID NO: 2036992
acaagcaaaggaauagacu

SEQ ID NO: 2036994 - RNA, 19 nt, Artificial Sequence
  Description of Artificial Sequence: Synthetic oligonucleotide
  Sense strand starting at position 3271 of SEQ ID NO: 1881341
cuggaaugcucaucccuaa

SEQ ID NO: 2036995 - RNA, 19 nt, Artificial Sequence
  Description of Artificial Sequence: Synthetic oligonucleotide
  Antisense strand to SEQ ID NO: 2036994
uuagggaugagcauuccag

SEQ ID NO: 2036996 - RNA, 19 nt, Artificial Sequence
  Description of Artificial Sequence: Synthetic oligonucleotide
  Sense strand starting at position 3303 of SEQ ID NO: 1881341
gcugucuugugcuugggaa

SEQ ID NO: 2036997 - RNA, 19 nt, Artificial Sequence
  Description of Artificial Sequence: Synthetic oligonucleotide
  Antisense strand to SEQ ID NO: 2036996
uucccaagcacaagacagc

SEQ ID NO: 2036998 - RNA, 19 nt, Artificial Sequence
  Description of Artificial Sequence: Synthetic oligonucleotide
  Sense strand starting at position 3305 of SEQ ID NO: 1881341
ugucuugugcuugggaauu

SEQ ID NO: 2036999 - RNA, 19 nt, Artificial Sequence
  Description of Artificial Sequence: Synthetic oligonucleotide
  Antisense strand to SEQ ID NO: 2036998
aauucccaagcacaagaca

SEQ ID NO: 2037000 - RNA, 19 nt, Artificial Sequence
  Description of Artificial Sequence: Synthetic oligonucleotide
  Sense strand starting at position 3316 of SEQ ID NO: 1881341
ugggaauuagcucauacuc

SEQ ID NO: 2037001 - RNA, 19 nt, Artificial Sequence
  Description of Artificial Sequence: Synthetic oligonucleotide
  Antisense strand to SEQ ID NO: 2037000
gaguaugagcuaauuccca

SEQ ID NO: 2037002 - RNA, 19 nt, Artificial Sequence
  Description of Artificial Sequence: Synthetic oligonucleotide
  Sense strand starting at position 3422 of SEQ ID NO: 1881341
ggccauuggacuugaucuu

SEQ ID NO: 2037003 - RNA, 19 nt, Artificial Sequence
  Description of Artificial Sequence: Synthetic oligonucleotide
  Antisense strand to SEQ ID NO: 2037002
aagaucaaguccaauggcc

SEQ ID NO: 2037004 - RNA, 19 nt, Artificial Sequence
  Description of Artificial Sequence: Synthetic oligonucleotide
  Sense strand starting at position 3423 of SEQ ID NO: 1881341
gccauuggacuugaucuua

SEQ ID NO: 2037005 - RNA, 19 nt, Artificial Sequence
  Description of Artificial Sequence: Synthetic oligonucleotide
  Antisense strand to SEQ ID NO: 2037004
uaagaucaaguccaauggc

SEQ ID NO: 2037006 - RNA, 19 nt, Artificial Sequence
  Description of Artificial Sequence: Synthetic oligonucleotide
  Sense strand starting at position 3428 of SEQ ID NO: 1881341
uggacuugaucuuaucaug

SEQ ID NO: 2037007 - RNA, 19 nt, Artificial Sequence
  Description of Artificial Sequence: Synthetic oligonucleotide
  Antisense strand to SEQ ID NO: 2037006
caugauaagaucaagucca

SEQ ID NO: 2037008 - RNA, 19 nt, Artificial Sequence
  Description of Artificial Sequence: Synthetic oligonucleotide
  Sense strand starting at position 3431 of SEQ ID NO: 1881341
acuugaucuuaucauguau

SEQ ID NO: 2037009 - RNA, 19 nt, Artificial Sequence
  Description of Artificial Sequence: Synthetic oligonucleotide
  Antisense strand to SEQ ID NO: 2037008
auacaugauaagaucaagu

SEQ ID NO: 2037010 - RNA, 19 nt, Artificial Sequence
  Description of Artificial Sequence: Synthetic oligonucleotide
  Sense strand starting at position 3433 of SEQ ID NO: 1881341
uugaucuuaucauguaugu

SEQ ID NO: 2037011 - RNA, 19 nt, Artificial Sequence
  Description of Artificial Sequence: Synthetic oligonucleotide
  Antisense strand to SEQ ID NO: 2037010
acauacaugauaagaucaa

SEQ ID NO: 2037012 - RNA, 19 nt, Artificial Sequence
  Description of Artificial Sequence: Synthetic oligonucleotide
  Sense strand starting at position 3437 of SEQ ID NO: 1881341
ucuuaucauguaugugauc

SEQ ID NO: 2037013 - RNA, 19 nt, Artificial Sequence
  Description of Artificial Sequence: Synthetic oligonucleotide
  Antisense strand to SEQ ID NO: 2037012
gaucacauacaugauaaga

SEQ ID NO: 2037014 - RNA, 19 nt, Artificial Sequence
  Description of Artificial Sequence: Synthetic oligonucleotide
  Sense strand starting at position 3442 of SEQ ID NO: 1881341
ucauguaugugaucuguga

SEQ ID NO: 2037015 - RNA, 19 nt, Artificial Sequence
  Description of Artificial Sequence: Synthetic oligonucleotide
  Antisense strand to SEQ ID NO: 2037014
ucacagaucacauacauga

SEQ ID NO: 2037016 - RNA, 19 nt, Artificial Sequence
  Description of Artificial Sequence: Synthetic oligonucleotide
  Sense strand starting at position 3444 of SEQ ID NO: 1881341
auguaugugaucugugaac

SEQ ID NO: 2037017 - RNA, 19 nt, Artificial Sequence
  Description of Artificial Sequence: Synthetic oligonucleotide
  Antisense strand to SEQ ID NO: 2037016
guucacagaucacauacau

SEQ ID NO: 2037018 - RNA, 19 nt, Artificial Sequence
  Description of Artificial Sequence: Synthetic oligonucleotide
  Sense strand starting at position 3446 of SEQ ID NO: 1881341
guaugugaucugugaacuc

SEQ ID NO: 2037019 - RNA, 19 nt, Artificial Sequence
  Description of Artificial Sequence: Synthetic oligonucleotide
  Antisense strand to SEQ ID NO: 2037018
gaguucacagaucacauac

SEQ ID NO: 2037020 - RNA, 19 nt, Artificial Sequence
  Description of Artificial Sequence: Synthetic oligonucleotide
  Sense strand starting at position 3464 of SEQ ID NO: 1881341
caaagaggucacggucaua

SEQ ID NO: 2037021 - RNA, 19 nt, Artificial Sequence
  Description of Artificial Sequence: Synthetic oligonucleotide
  Antisense strand to SEQ ID NO: 2037020
uaugaccgugaccucuuug

SEQ ID NO: 2037022 - RNA, 19 nt, Artificial Sequence
  Description of Artificial Sequence: Synthetic oligonucleotide
  Sense strand starting at position 3503 of SEQ ID NO: 1881341
gacgccagugccugauuaa

SEQ ID NO: 2037023 - RNA, 19 nt, Artificial Sequence
  Description of Artificial Sequence: Synthetic oligonucleotide
  Antisense strand to SEQ ID NO: 2037022
uuaaucaggcacuggcguc

SEQ ID NO: 2037024 - RNA, 19 nt, Artificial Sequence
  Description of Artificial Sequence: Synthetic oligonucleotide
  Sense strand starting at position 3504 of SEQ ID NO: 1881341
acgccagugccugauuaag

SEQ ID NO: 2037025 - RNA, 19 nt, Artificial Sequence
  Description of Artificial Sequence: Synthetic oligonucleotide
  Antisense strand to SEQ ID NO: 2037024
cuuaaucaggcacuggcgu

SEQ ID NO: 2037026 - RNA, 19 nt, Artificial Sequence
  Description of Artificial Sequence: Synthetic oligonucleotide
  Sense strand starting at position 3506 of SEQ ID NO: 1881341
gccagugccugauuaagga

SEQ ID NO: 2037027 - RNA, 19 nt, Artificial Sequence
  Description of Artificial Sequence: Synthetic oligonucleotide
  Antisense strand to SEQ ID NO: 2037026
uccuuaaucaggcacuggc

SEQ ID NO: 2037028 - RNA, 19 nt, Artificial Sequence
  Description of Artificial Sequence: Synthetic oligonucleotide
  Sense strand starting at position 3513 of SEQ ID NO: 1881341
ccugauuaaggaggguauu

SEQ ID NO: 2037029 - RNA, 19 nt, Artificial Sequence
  Description of Artificial Sequence: Synthetic oligonucleotide
  Antisense strand to SEQ ID NO: 2037028
aauacccuccuuaaucagg

SEQ ID NO: 2037030 - RNA, 19 nt, Artificial Sequence
  Description of Artificial Sequence: Synthetic oligonucleotide
  Sense strand starting at position 3876 of SEQ ID NO: 1881341
gggacuuugugagguucua

SEQ ID NO: 2037031 - RNA, 19 nt, Artificial Sequence
  Description of Artificial Sequence: Synthetic oligonucleotide
  Antisense strand to SEQ ID NO: 2037030
uagaaccucacaaaguccc

SEQ ID NO: 2037032 - RNA, 19 nt, Artificial Sequence
  Description of Artificial Sequence: Synthetic oligonucleotide
  Sense strand starting at position 111 of SEQ ID NO: 1881342
ggugcugagauuuggcaca

SEQ ID NO: 2037033 - RNA, 19 nt, Artificial Sequence
  Description of Artificial Sequence: Synthetic oligonucleotide
  Antisense strand to SEQ ID NO: 2037032
ugugccaaaucucagcacc

SEQ ID NO: 2037034 - RNA, 19 nt, Artificial Sequence
  Description of Artificial Sequence: Synthetic oligonucleotide
  Sense strand starting at position 343 of SEQ ID NO: 1881342
uccagaauccucgaggagu

SEQ ID NO: 2037035 - RNA, 19 nt, Artificial Sequence
  Description of Artificial Sequence: Synthetic oligonucleotide
  Antisense strand to SEQ ID NO: 2037034
acuccucgaggauucugga

SEQ ID NO: 2037036 - RNA, 19 nt, Artificial Sequence
  Description of Artificial Sequence: Synthetic oligonucleotide
  Sense strand starting at position 345 of SEQ ID NO: 1881342
cagaauccucgaggaguuc

SEQ ID NO: 2037037 - RNA, 19 nt, Artificial Sequence
  Description of Artificial Sequence: Synthetic oligonucleotide
  Antisense strand to SEQ ID NO: 2037036
gaacuccucgaggauucug

SEQ ID NO: 2037038 - RNA, 19 nt, Artificial Sequence
  Description of Artificial Sequence: Synthetic oligonucleotide
  Sense strand starting at position 617 of SEQ ID NO: 1881342
gguugacucccaggcuauu

SEQ ID NO: 2037039 - RNA, 19 nt, Artificial Sequence
  Description of Artificial Sequence: Synthetic oligonucleotide
  Antisense strand to SEQ ID NO: 2037038
aauagccugggagucaacc

SEQ ID NO: 2037040 - RNA, 19 nt, Artificial Sequence
  Description of Artificial Sequence: Synthetic oligonucleotide
  Sense strand starting at position 670 of SEQ ID NO: 1881342
uaccguuucccagagugaa

SEQ ID NO: 2037041 - RNA, 19 nt, Artificial Sequence
  Description of Artificial Sequence: Synthetic oligonucleotide
  Antisense strand to SEQ ID NO: 2037040
uucacucugggaaacggua

SEQ ID NO: 2037042 - RNA, 19 nt, Artificial Sequence
  Description of Artificial Sequence: Synthetic oligonucleotide
  Sense strand starting at position 828 of SEQ ID NO: 1881342
gguggaaagcuguaaacag

SEQ ID NO: 2037043 - RNA, 19 nt, Artificial Sequence
  Description of Artificial Sequence: Synthetic oligonucleotide
  Antisense strand to SEQ ID NO: 2037042
cuguuuacagcuuuccacc

SEQ ID NO: 2037044 - RNA, 19 nt, Artificial Sequence
  Description of Artificial Sequence: Synthetic oligonucleotide
  Sense strand starting at position 848 of SEQ ID NO: 1881342
caaagaauguugucugcuu

SEQ ID NO: 2037045 - RNA, 19 nt, Artificial Sequence
  Description of Artificial Sequence: Synthetic oligonucleotide
  Antisense strand to SEQ ID NO: 2037044
aagcagacaacauucuuug

SEQ ID NO: 2037046 - RNA, 19 nt, Artificial Sequence
  Description of Artificial Sequence: Synthetic oligonucleotide
  Sense strand starting at position 909 of SEQ ID NO: 1881342
ggcagcuacuccuggagua

SEQ ID NO: 2037047 - RNA, 19 nt, Artificial Sequence
  Description of Artificial Sequence: Synthetic oligonucleotide
  Antisense strand to SEQ ID NO: 2037046
uacuccaggaguagcugcc

SEQ ID NO: 2037048 - RNA, 19 nt, Artificial Sequence
  Description of Artificial Sequence: Synthetic oligonucleotide
  Sense strand starting at position 965 of SEQ ID NO: 1881342
agggaucuguccuuccacu

SEQ ID NO: 2037049 - RNA, 19 nt, Artificial Sequence
  Description of Artificial Sequence: Synthetic oligonucleotide
  Antisense strand to SEQ ID NO: 2037048
aguggaaggacagaucccu

SEQ ID NO: 2037050 - RNA, 19 nt, Artificial Sequence
  Description of Artificial Sequence: Synthetic oligonucleotide
  Sense strand starting at position 1269 of SEQ ID NO: 1881342
auucucaagcccugguaua

SEQ ID NO: 2037051 - RNA, 19 nt, Artificial Sequence
  Description of Artificial Sequence: Synthetic oligonucleotide
  Antisense strand to SEQ ID NO: 2037050
uauaccagggcuugagaau

SEQ ID NO: 2037052 - RNA, 19 nt, Artificial Sequence
  Description of Artificial Sequence: Synthetic oligonucleotide
  Sense strand starting at position 1270 of SEQ ID NO: 1881342
uucucaagcccugguauau

SEQ ID NO: 2037053 - RNA, 19 nt, Artificial Sequence
  Description of Artificial Sequence: Synthetic oligonucleotide
  Antisense strand to SEQ ID NO: 2037052
auauaccagggcuugagaa

SEQ ID NO: 2037054 - RNA, 19 nt, Artificial Sequence
  Description of Artificial Sequence: Synthetic oligonucleotide
  Sense strand starting at position 1407 of SEQ ID NO: 1881342
ccaggucauucccaacuga

SEQ ID NO: 2037055 - RNA, 19 nt, Artificial Sequence
  Description of Artificial Sequence: Synthetic oligonucleotide
  Antisense strand to SEQ ID NO: 2037054
ucaguugggaaugaccugg

SEQ ID NO: 2037056 - RNA, 19 nt, Artificial Sequence
  Description of Artificial Sequence: Synthetic oligonucleotide
  Sense strand starting at position 1561 of SEQ ID NO: 1881342
ccaaccucucagcagagau

SEQ ID NO: 2037057 - RNA, 19 nt, Artificial Sequence
  Description of Artificial Sequence: Synthetic oligonucleotide
  Antisense strand to SEQ ID NO: 2037056
aucucugcugagagguugg

SEQ ID NO: 2037058 - RNA, 19 nt, Artificial Sequence
  Description of Artificial Sequence: Synthetic oligonucleotide
  Sense strand starting at position 1693 of SEQ ID NO: 1881342
cuaucuggcugucauggua

SEQ ID NO: 2037059 - RNA, 19 nt, Artificial Sequence
  Description of Artificial Sequence: Synthetic oligonucleotide
  Antisense strand to SEQ ID NO: 2037058
uaccaugacagccagauag

SEQ ID NO: 2037060 - RNA, 19 nt, Artificial Sequence
  Description of Artificial Sequence: Synthetic oligonucleotide
  Sense strand starting at position 1696 of SEQ ID NO: 1881342
ucuggcugucaugguagaa

SEQ ID NO: 2037061 - RNA, 19 nt, Artificial Sequence
  Description of Artificial Sequence: Synthetic oligonucleotide
  Antisense strand to SEQ ID NO: 2037060
uucuaccaugacagccaga

SEQ ID NO: 2037062 - RNA, 19 nt, Artificial Sequence
  Description of Artificial Sequence: Synthetic oligonucleotide
  Sense strand starting at position 1917 of SEQ ID NO: 1881342
gggagagguugagauauug

SEQ ID NO: 2037063 - RNA, 19 nt, Artificial Sequence
  Description of Artificial Sequence: Synthetic oligonucleotide
  Antisense strand to SEQ ID NO: 2037062
caauaucucaaccucuccc

SEQ ID NO: 2037064 - RNA, 19 nt, Artificial Sequence
  Description of Artificial Sequence: Synthetic oligonucleotide
  Sense strand starting at position 2937 of SEQ ID NO: 1881342
acuucucccucugaggaau

SEQ ID NO: 2037065 - RNA, 19 nt, Artificial Sequence
  Description of Artificial Sequence: Synthetic oligonucleotide
  Antisense strand to SEQ ID NO: 2037064
auuccucagagggagaagu

SEQ ID NO: 2037066 - RNA, 19 nt, Artificial Sequence
  Description of Artificial Sequence: Synthetic oligonucleotide
  Sense strand starting at position 2955 of SEQ ID NO: 1881342
uggagugauugaugcugca

SEQ ID NO: 2037067 - RNA, 19 nt, Artificial Sequence
  Description of Artificial Sequence: Synthetic oligonucleotide
  Antisense strand to SEQ ID NO: 2037066
ugcagcaucaaucacucca

SEQ ID NO: 2037068 - RNA, 19 nt, Artificial Sequence
  Description of Artificial Sequence: Synthetic oligonucleotide
  Sense strand starting at position 2958 of SEQ ID NO: 1881342
agugauugaugcugcaguu

SEQ ID NO: 2037069 - RNA, 19 nt, Artificial Sequence
  Description of Artificial Sequence: Synthetic oligonucleotide
  Antisense strand to SEQ ID NO: 2037068
aacugcagcaucaaucacu

SEQ ID NO: 2037070 - RNA, 19 nt, Artificial Sequence
  Description of Artificial Sequence: Synthetic oligonucleotide
  Sense strand starting at position 2976 of SEQ ID NO: 1881342
uggauuugcucacuugcau

SEQ ID NO: 2037071 - RNA, 19 nt, Artificial Sequence
  Description of Artificial Sequence: Synthetic oligonucleotide
  Antisense strand to SEQ ID NO: 2037070
augcaagugagcaaaucca

SEQ ID NO: 2037072 - RNA, 19 nt, Artificial Sequence
  Description of Artificial Sequence: Synthetic oligonucleotide
  Sense strand starting at position 2988 of SEQ ID NO: 1881342
cuugcaugcccagagacau

SEQ ID NO: 2037073 - RNA, 19 nt, Artificial Sequence
  Description of Artificial Sequence: Synthetic oligonucleotide
  Antisense strand to SEQ ID NO: 2037072
augucucugggcaugcaag

SEQ ID NO: 2037074 - RNA, 19 nt, Artificial Sequence
  Description of Artificial Sequence: Synthetic oligonucleotide
  Sense strand starting at position 3001 of SEQ ID NO: 1881342
agacaugucuauucuuaug

SEQ ID NO: 2037075 - RNA, 19 nt, Artificial Sequence
  Description of Artificial Sequence: Synthetic oligonucleotide
  Antisense strand to SEQ ID NO: 2037074
cauaagaauagacaugucu

SEQ ID NO: 2037076 - RNA, 19 nt, Artificial Sequence
  Description of Artificial Sequence: Synthetic oligonucleotide
  Sense strand starting at position 3049 of SEQ ID NO: 1881342
gcaacacaucugugugcaa

SEQ ID NO: 2037077 - RNA, 19 nt, Artificial Sequence
  Description of Artificial Sequence: Synthetic oligonucleotide
  Antisense strand to SEQ ID NO: 2037076
uugcacacagauguguugc

SEQ ID NO: 2037078 - RNA, 19 nt, Artificial Sequence
  Description of Artificial Sequence: Synthetic oligonucleotide
  Sense strand starting at position 3084 of SEQ ID NO: 1881342
acauauguacugcauggau

SEQ ID NO: 2037079 - RNA, 19 nt, Artificial Sequence
  Description of Artificial Sequence: Synthetic oligonucleotide
  Antisense strand to SEQ ID NO: 2037078
auccaugcaguacauaugu

SEQ ID NO: 2037080 - RNA, 19 nt, Artificial Sequence
  Description of Artificial Sequence: Synthetic oligonucleotide
  Sense strand starting at position 3142 of SEQ ID NO: 1881342
acacaugugcaauaugaca

SEQ ID NO: 2037081 - RNA, 19 nt, Artificial Sequence
  Description of Artificial Sequence: Synthetic oligonucleotide
  Antisense strand to SEQ ID NO: 2037080
ugucauauugcacaugugu

SEQ ID NO: 2037082 - RNA, 19 nt, Artificial Sequence
  Description of Artificial Sequence: Synthetic oligonucleotide
  Sense strand starting at position 3454 of SEQ ID NO: 1881342
uugucuaugucucccagua

SEQ ID NO: 2037083 - RNA, 19 nt, Artificial Sequence
  Description of Artificial Sequence: Synthetic oligonucleotide
  Antisense strand to SEQ ID NO: 2037082
uacugggagacauagacaa

SEQ ID NO: 2037084 - RNA, 19 nt, Artificial Sequence
  Description of Artificial Sequence: Synthetic oligonucleotide
  Sense strand starting at position 3456 of SEQ ID NO: 1881342
gucuaugucucccaguauc

SEQ ID NO: 2037085 - RNA, 19 nt, Artificial Sequence
  Description of Artificial Sequence: Synthetic oligonucleotide
  Antisense strand to SEQ ID NO: 2037084
gauacugggagacauagac

SEQ ID NO: 2037086 - RNA, 19 nt, Artificial Sequence
  Description of Artificial Sequence: Synthetic oligonucleotide
  Sense strand starting at position 3506 of SEQ ID NO: 1881342
gguggcacauugugaauua

SEQ ID NO: 2037087 - RNA, 19 nt, Artificial Sequence
  Description of Artificial Sequence: Synthetic oligonucleotide
  Antisense strand to SEQ ID NO: 2037086
uaauucacaaugugccacc

SEQ ID NO: 2037088 - RNA, 19 nt, Artificial Sequence
  Description of Artificial Sequence: Synthetic oligonucleotide
  Sense strand starting at position 3507 of SEQ ID NO: 1881342
guggcacauugugaauuaa

SEQ ID NO: 2037089 - RNA, 19 nt, Artificial Sequence
  Description of Artificial Sequence: Synthetic oligonucleotide
  Antisense strand to SEQ ID NO: 2037088
uuaauucacaaugugccac

SEQ ID NO: 2037090 - RNA, 19 nt, Artificial Sequence
  Description of Artificial Sequence: Synthetic oligonucleotide
  Sense strand starting at position 3518 of SEQ ID NO: 1881342
ugaauuaaugucugugagu

SEQ ID NO: 2037091 - RNA, 19 nt, Artificial Sequence
  Description of Artificial Sequence: Synthetic oligonucleotide
  Antisense strand to SEQ ID NO: 2037090
acucacagacauuaauuca

SEQ ID NO: 2037092 - RNA, 19 nt, Artificial Sequence
  Description of Artificial Sequence: Synthetic oligonucleotide
  Sense strand starting at position 3519 of SEQ ID NO: 1881342
gaauuaaugucugugagug

SEQ ID NO: 2037093 - RNA, 19 nt, Artificial Sequence
  Description of Artificial Sequence: Synthetic oligonucleotide
  Antisense strand to SEQ ID NO: 2037092
cacucacagacauuaauuc

SEQ ID NO: 2037094 - RNA, 19 nt, Artificial Sequence
  Description of Artificial Sequence: Synthetic oligonucleotide
  Sense strand starting at position 3520 of SEQ ID NO: 1881342
aauuaaugucugugagugu

SEQ ID NO: 2037095 - RNA, 19 nt, Artificial Sequence
  Description of Artificial Sequence: Synthetic oligonucleotide
  Antisense strand to SEQ ID NO: 2037094
acacucacagacauuaauu

SEQ ID NO: 2037096 - RNA, 19 nt, Artificial Sequence
  Description of Artificial Sequence: Synthetic oligonucleotide
  Sense strand starting at position 3523 of SEQ ID NO: 1881342
uaaugucugugagugugua

SEQ ID NO: 2037097 - RNA, 19 nt, Artificial Sequence
  Description of Artificial Sequence: Synthetic oligonucleotide
  Antisense strand to SEQ ID NO: 2037096
uacacacucacagacauua

SEQ ID NO: 2037098 - RNA, 19 nt, Artificial Sequence
  Description of Artificial Sequence: Synthetic oligonucleotide
  Sense strand starting at position 3551 of SEQ ID NO: 1881342
ggagauuacugggaagggu

SEQ ID NO: 2037099 - RNA, 19 nt, Artificial Sequence
  Description of Artificial Sequence: Synthetic oligonucleotide
  Antisense strand to SEQ ID NO: 2037098
acccuucccaguaaucucc

SEQ ID NO: 2037100 - RNA, 19 nt, Artificial Sequence
  Description of Artificial Sequence: Synthetic oligonucleotide
  Sense strand starting at position 785 of SEQ ID NO: 1881343
acccgaguugcugaaguuu

SEQ ID NO: 2037101 - RNA, 19 nt, Artificial Sequence
  Description of Artificial Sequence: Synthetic oligonucleotide
  Antisense strand to SEQ ID NO: 2037100
aaacuucagcaacucgggu

SEQ ID NO: 2037102 - RNA, 19 nt, Artificial Sequence
  Description of Artificial Sequence: Synthetic oligonucleotide
  Sense strand starting at position 1736 of SEQ ID NO: 1881343
gccagaacuggccggauua

SEQ ID NO: 2037103 - RNA, 19 nt, Artificial Sequence
  Description of Artificial Sequence: Synthetic oligonucleotide
  Antisense strand to SEQ ID NO: 2037102
uaauccggccaguucuggc

SEQ ID NO: 2037104 - RNA, 19 nt, Artificial Sequence
  Description of Artificial Sequence: Synthetic oligonucleotide
  Sense strand starting at position 1747 of SEQ ID NO: 1881343
ccggauuaggguuaaccuu

SEQ ID NO: 2037105 - RNA, 19 nt, Artificial Sequence
  Description of Artificial Sequence: Synthetic oligonucleotide
  Antisense strand to SEQ ID NO: 2037104
aagguuaacccuaauccgg

SEQ ID NO: 2037106 - RNA, 19 nt, Artificial Sequence
  Description of Artificial Sequence: Synthetic oligonucleotide
  Sense strand starting at position 1753 of SEQ ID NO: 1881343
uaggguuaaccuugcaaac

SEQ ID NO: 2037107 - RNA, 19 nt, Artificial Sequence
  Description of Artificial Sequence: Synthetic oligonucleotide
  Antisense strand to SEQ ID NO: 2037106
guuugcaagguuaacccua

SEQ ID NO: 2037108 - RNA, 19 nt, Artificial Sequence
  Description of Artificial Sequence: Synthetic oligonucleotide
  Sense strand starting at position 1762 of SEQ ID NO: 1881343
ccuugcaaacuguacgaua

SEQ ID NO: 2037109 - RNA, 19 nt, Artificial Sequence
  Description of Artificial Sequence: Synthetic oligonucleotide
  Antisense strand to SEQ ID NO: 2037108
uaucguacaguuugcaagg

SEQ ID NO: 2037110 - RNA, 19 nt, Artificial Sequence
  Description of Artificial Sequence: Synthetic oligonucleotide
  Sense strand starting at position 1963 of SEQ ID NO: 1881343
gaagguuuagcgcaaucac

SEQ ID NO: 2037111 - RNA, 19 nt, Artificial Sequence
  Description of Artificial Sequence: Synthetic oligonucleotide
  Antisense strand to SEQ ID NO: 2037110
gugauugcgcuaaaccuuc

SEQ ID NO: 2037112 - RNA, 19 nt, Artificial Sequence
  Description of Artificial Sequence: Synthetic oligonucleotide
  Sense strand starting at position 1989 of SEQ ID NO: 1881343
gaggccgaauuguuuacaa

SEQ ID NO: 2037113 - RNA, 19 nt, Artificial Sequence
  Description of Artificial Sequence: Synthetic oligonucleotide
  Antisense strand to SEQ ID NO: 2037112
uuguaaacaauucggccuc

SEQ ID NO: 2037114 - RNA, 19 nt, Artificial Sequence
  Description of Artificial Sequence: Synthetic oligonucleotide
  Sense strand starting at position 1991 of SEQ ID NO: 1881343
ggccgaauuguuuacaagu

SEQ ID NO: 2037115 - RNA, 19 nt, Artificial Sequence
  Description of Artificial Sequence: Synthetic oligonucleotide
  Antisense strand to SEQ ID NO: 2037114
acuuguaaacaauucggcc

SEQ ID NO: 2037116 - RNA, 19 nt, Artificial Sequence
  Description of Artificial Sequence: Synthetic oligonucleotide
  Sense strand starting at position 1999 of SEQ ID NO: 1881343
uguuuacaaguuuaaguga

SEQ ID NO: 2037117 - RNA, 19 nt, Artificial Sequence
  Description of Artificial Sequence: Synthetic oligonucleotide
  Antisense strand to SEQ ID NO: 2037116
ucacuuaaacuuguaaaca

SEQ ID NO: 2037118 - RNA, 19 nt, Artificial Sequence
  Description of Artificial Sequence: Synthetic oligonucleotide
  Sense strand starting at position 2006 of SEQ ID NO: 1881343
aaguuuaagugaucuagug

SEQ ID NO: 2037119 - RNA, 19 nt, Artificial Sequence
  Description of Artificial Sequence: Synthetic oligonucleotide
  Antisense strand to SEQ ID NO: 2037118
cacuagaucacuuaaacuu

SEQ ID NO: 2037120 - RNA, 19 nt, Artificial Sequence
  Description of Artificial Sequence: Synthetic oligonucleotide
  Sense strand starting at position 2008 of SEQ ID NO: 1881343
guuuaagugaucuaguguu

SEQ ID NO: 2037121 - RNA, 19 nt, Artificial Sequence
  Description of Artificial Sequence: Synthetic oligonucleotide
  Antisense strand to SEQ ID NO: 2037120
aacacuagaucacuuaaac

SEQ ID NO: 2037122 - RNA, 19 nt, Artificial Sequence
  Description of Artificial Sequence: Synthetic oligonucleotide
  Sense strand starting at position 2014 of SEQ ID NO: 1881343
gugaucuaguguuucugau

SEQ ID NO: 2037123 - RNA, 19 nt, Artificial Sequence
  Description of Artificial Sequence: Synthetic oligonucleotide
  Antisense strand to SEQ ID NO: 2037122
aucagaaacacuagaucac

SEQ ID NO: 2037124 - RNA, 19 nt, Artificial Sequence
  Description of Artificial Sequence: Synthetic oligonucleotide
  Sense strand starting at position 2021 of SEQ ID NO: 1881343
aguguuucugauggcuaga

SEQ ID NO: 2037125 - RNA, 19 nt, Artificial Sequence
  Description of Artificial Sequence: Synthetic oligonucleotide
  Antisense strand to SEQ ID NO: 2037124
ucuagccaucagaaacacu

SEQ ID NO: 2037126 - RNA, 19 nt, Artificial Sequence
  Description of Artificial Sequence: Synthetic oligonucleotide
  Sense strand starting at position 2107 of SEQ ID NO: 1881343
aagggagcccucugcugaa

SEQ ID NO: 2037127 - RNA, 19 nt, Artificial Sequence
  Description of Artificial Sequence: Synthetic oligonucleotide
  Antisense strand to SEQ ID NO: 2037126
uucagcagagggcucccuu

SEQ ID NO: 2037128 - RNA, 19 nt, Artificial Sequence
  Description of Artificial Sequence: Synthetic oligonucleotide
  Sense strand starting at position 2285 of SEQ ID NO: 1881343
gacuuucuagaguaugcca

SEQ ID NO: 2037129 - RNA, 19 nt, Artificial Sequence
  Description of Artificial Sequence: Synthetic oligonucleotide
  Antisense strand to SEQ ID NO: 2037128
uggcauacucuagaaaguc

SEQ ID NO: 2037130 - RNA, 19 nt, Artificial Sequence
  Description of Artificial Sequence: Synthetic oligonucleotide
  Sense strand starting at position 2318 of SEQ ID NO: 1881343
agaacaaagucugagugaa

SEQ ID NO: 2037131 - RNA, 19 nt, Artificial Sequence
  Description of Artificial Sequence: Synthetic oligonucleotide
  Antisense strand to SEQ ID NO: 2037130
uucacucagacuuuguucu

SEQ ID NO: 2037132 - RNA, 19 nt, Artificial Sequence
  Description of Artificial Sequence: Synthetic oligonucleotide
  Sense strand starting at position 2460 of SEQ ID NO: 1881343
agcaguuugacaggauaau

SEQ ID NO: 2037133 - RNA, 19 nt, Artificial Sequence
  Description of Artificial Sequence: Synthetic oligonucleotide
  Antisense strand to SEQ ID NO: 2037132
auuauccugucaaacugcu

SEQ ID NO: 2037134 - RNA, 19 nt, Artificial Sequence
  Description of Artificial Sequence: Synthetic oligonucleotide
  Sense strand starting at position 2469 of SEQ ID NO: 1881343
acaggauaaugggaaagaa

SEQ ID NO: 2037135 - RNA, 19 nt, Artificial Sequence
  Description of Artificial Sequence: Synthetic oligonucleotide
  Antisense strand to SEQ ID NO: 2037134
uucuuucccauuauccugu

SEQ ID NO: 2037136 - RNA, 19 nt, Artificial Sequence
  Description of Artificial Sequence: Synthetic oligonucleotide
  Sense strand starting at position 2786 of SEQ ID NO: 1881343
gacaaugagcucuggacca

SEQ ID NO: 2037137 - RNA, 19 nt, Artificial Sequence
  Description of Artificial Sequence: Synthetic oligonucleotide
  Antisense strand to SEQ ID NO: 2037136
ugguccagagcucauuguc

SEQ ID NO: 2037138 - RNA, 19 nt, Artificial Sequence
  Description of Artificial Sequence: Synthetic oligonucleotide
  Sense strand starting at position 2830 of SEQ ID NO: 1881343
agggauaggucuccugauc

SEQ ID NO: 2037139 - RNA, 19 nt, Artificial Sequence
  Description of Artificial Sequence: Synthetic oligonucleotide
  Antisense strand to SEQ ID NO: 2037138
gaucaggagaccuaucccu

SEQ ID NO: 2037140 - RNA, 19 nt, Artificial Sequence
  Description of Artificial Sequence: Synthetic oligonucleotide
  Sense strand starting at position 2842 of SEQ ID NO: 1881343
ccugaucuccaccguggaa

SEQ ID NO: 2037141 - RNA, 19 nt, Artificial Sequence
  Description of Artificial Sequence: Synthetic oligonucleotide
  Antisense strand to SEQ ID NO: 2037140
uuccacgguggagaucagg

SEQ ID NO: 2037142 - RNA, 19 nt, Artificial Sequence
  Description of Artificial Sequence: Synthetic oligonucleotide
  Sense strand starting at position 2943 of SEQ ID NO: 1881343
auagaaguaugugcaauau

SEQ ID NO: 2037143 - RNA, 19 nt, Artificial Sequence
  Description of Artificial Sequence: Synthetic oligonucleotide
  Antisense strand to SEQ ID NO: 2037142
auauugcacauacuucuau

SEQ ID NO: 2037144 - RNA, 19 nt, Artificial Sequence
  Description of Artificial Sequence: Synthetic oligonucleotide
  Sense strand starting at position 2947 of SEQ ID NO: 1881343
aaguaugugcaauauagag

SEQ ID NO: 2037145 - RNA, 19 nt, Artificial Sequence
  Description of Artificial Sequence: Synthetic oligonucleotide
  Antisense strand to SEQ ID NO: 2037144
cucuauauugcacauacuu

SEQ ID NO: 2037146 - RNA, 19 nt, Artificial Sequence
  Description of Artificial Sequence: Synthetic oligonucleotide
  Sense strand starting at position 2949 of SEQ ID NO: 1881343
guaugugcaauauagagau

SEQ ID NO: 2037147 - RNA, 19 nt, Artificial Sequence
  Description of Artificial Sequence: Synthetic oligonucleotide
  Antisense strand to SEQ ID NO: 2037146
aucucuauauugcacauac

SEQ ID NO: 2037148 - RNA, 19 nt, Artificial Sequence
  Description of Artificial Sequence: Synthetic oligonucleotide
  Sense strand starting at position 3035 of SEQ ID NO: 1881343
gcuuccaauuugucugguu

SEQ ID NO: 2037149 - RNA, 19 nt, Artificial Sequence
  Description of Artificial Sequence: Synthetic oligonucleotide
  Antisense strand to SEQ ID NO: 2037148
aaccagacaaauuggaagc

SEQ ID NO: 2037150 - RNA, 19 nt, Artificial Sequence
  Description of Artificial Sequence: Synthetic oligonucleotide
  Sense strand starting at position 3095 of SEQ ID NO: 1881343
acagcucucccuugaaaga

SEQ ID NO: 2037151 - RNA, 19 nt, Artificial Sequence
  Description of Artificial Sequence: Synthetic oligonucleotide
  Antisense strand to SEQ ID NO: 2037150
ucuuucaagggagagcugu

SEQ ID NO: 2037152 - RNA, 19 nt, Artificial Sequence
  Description of Artificial Sequence: Synthetic oligonucleotide
  Sense strand starting at position 3399 of SEQ ID NO: 1881343
gcaacauugggcuaauuaa

SEQ ID NO: 2037153 - RNA, 19 nt, Artificial Sequence
  Description of Artificial Sequence: Synthetic oligonucleotide
  Antisense strand to SEQ ID NO: 2037152
uuaauuagcccaauguugc

SEQ ID NO: 2037154 - RNA, 19 nt, Artificial Sequence
  Description of Artificial Sequence: Synthetic oligonucleotide
  Sense strand starting at position 3406 of SEQ ID NO: 1881343
ugggcuaauuaauccuaau

SEQ ID NO: 2037155 - RNA, 19 nt, Artificial Sequence
  Description of Artificial Sequence: Synthetic oligonucleotide
  Antisense strand to SEQ ID NO: 2037154
auuaggauuaauuagccca

SEQ ID NO: 2037156 - RNA, 19 nt, Artificial Sequence
  Description of Artificial Sequence: Synthetic oligonucleotide
  Sense strand starting at position 3443 of SEQ ID NO: 1881343
auugauuaacagugauuac

SEQ ID NO: 2037157 - RNA, 19 nt, Artificial Sequence
  Description of Artificial Sequence: Synthetic oligonucleotide
  Antisense strand to SEQ ID NO: 2037156
guaaucacuguuaaucaau

SEQ ID NO: 2037158 - RNA, 19 nt, Artificial Sequence
  Description of Artificial Sequence: Synthetic oligonucleotide
  Sense strand starting at position 3454 of SEQ ID NO: 1881343
gugauuacucaagagcucu

SEQ ID NO: 2037159 - RNA, 19 nt, Artificial Sequence
  Description of Artificial Sequence: Synthetic oligonucleotide
  Antisense strand to SEQ ID NO: 2037158
agagcucuugaguaaucac

SEQ ID NO: 2037160 - RNA, 19 nt, Artificial Sequence
  Description of Artificial Sequence: Synthetic oligonucleotide
  Sense strand starting at position 3538 of SEQ ID NO: 1881343
ccaccugcucuuuggcaaa

SEQ ID NO: 2037161 - RNA, 19 nt, Artificial Sequence
  Description of Artificial Sequence: Synthetic oligonucleotide
  Antisense strand to SEQ ID NO: 2037160
uuugccaaagagcaggugg

SEQ ID NO: 2037162 - RNA, 19 nt, Artificial Sequence
  Description of Artificial Sequence: Synthetic oligonucleotide
  Sense strand starting at position 3555 of SEQ ID NO: 1881343
aacccagccugguuagaau

SEQ ID NO: 2037163 - RNA, 19 nt, Artificial Sequence
  Description of Artificial Sequence: Synthetic oligonucleotide
  Antisense strand to SEQ ID NO: 2037162
auucuaaccaggcuggguu

SEQ ID NO: 2037164 - RNA, 19 nt, Artificial Sequence
  Description of Artificial Sequence: Synthetic oligonucleotide
  Sense strand starting at position 3564 of SEQ ID NO: 1881343
ugguuagaaucucugaauc

SEQ ID NO: 2037165 - RNA, 19 nt, Artificial Sequence
  Description of Artificial Sequence: Synthetic oligonucleotide
  Antisense strand to SEQ ID NO: 2037164
gauucagagauucuaacca

SEQ ID NO: 2037166 - RNA, 19 nt, Artificial Sequence
  Description of Artificial Sequence: Synthetic oligonucleotide
  Sense strand starting at position 3674 of SEQ ID NO: 1881343
auaagauaauugcuucugu

SEQ ID NO: 2037167 - RNA, 19 nt, Artificial Sequence
  Description of Artificial Sequence: Synthetic oligonucleotide
  Antisense strand to SEQ ID NO: 2037166
acagaagcaauuaucuuau

SEQ ID NO: 2037168 - RNA, 19 nt, Artificial Sequence
  Description of Artificial Sequence: Synthetic oligonucleotide
  Sense strand starting at position 3679 of SEQ ID NO: 1881343
auaauugcuucuguuagga

SEQ ID NO: 2037169 - RNA, 19 nt, Artificial Sequence
  Description of Artificial Sequence: Synthetic oligonucleotide
  Antisense strand to SEQ ID NO: 2037168
uccuaacagaagcaauuau

SEQ ID NO: 2037170 - RNA, 19 nt, Artificial Sequence
  Description of Artificial Sequence: Synthetic oligonucleotide
  Sense strand starting at position 3687 of SEQ ID NO: 1881343
uucuguuaggagcaauucu

SEQ ID NO: 2037171 - RNA, 19 nt, Artificial Sequence
  Description of Artificial Sequence: Synthetic oligonucleotide
  Antisense strand to SEQ ID NO: 2037170
agaauugcuccuaacagaa

SEQ ID NO: 2037172 - RNA, 19 nt, Artificial Sequence
  Description of Artificial Sequence: Synthetic oligonucleotide
  Sense strand starting at position 3694 of SEQ ID NO: 1881343
aggagcaauucuucuucua

SEQ ID NO: 2037173 - RNA, 19 nt, Artificial Sequence
  Description of Artificial Sequence: Synthetic oligonucleotide
  Antisense strand to SEQ ID NO: 2037172
uagaagaagaauugcuccu

SEQ ID NO: 2037174 - RNA, 19 nt, Artificial Sequence
  Description of Artificial Sequence: Synthetic oligonucleotide
  Sense strand starting at position 3777 of SEQ ID NO: 1881343
aagcuaaagagcggugaau

SEQ ID NO: 2037175 - RNA, 19 nt, Artificial Sequence
  Description of Artificial Sequence: Synthetic oligonucleotide
  Antisense strand to SEQ ID NO: 2037174
auucaccgcucuuuagcuu

SEQ ID NO: 2037176 - RNA, 19 nt, Artificial Sequence
  Description of Artificial Sequence: Synthetic oligonucleotide
  Sense strand starting at position 3779 of SEQ ID NO: 1881343
gcuaaagagcggugaauau

SEQ ID NO: 2037177 - RNA, 19 nt, Artificial Sequence
  Description of Artificial Sequence: Synthetic oligonucleotide
  Antisense strand to SEQ ID NO: 2037176
auauucaccgcucuuuagc

SEQ ID NO: 2037178 - RNA, 19 nt, Artificial Sequence
  Description of Artificial Sequence: Synthetic oligonucleotide
  Sense strand starting at position 3866 of SEQ ID NO: 1881343
gaaagaguuuaagaaauag

SEQ ID NO: 2037179 - RNA, 19 nt, Artificial Sequence
  Description of Artificial Sequence: Synthetic oligonucleotide
  Antisense strand to SEQ ID NO: 2037178
cuauuucuuaaacucuuuc

SEQ ID NO: 2037180 - RNA, 19 nt, Artificial Sequence
  Description of Artificial Sequence: Synthetic oligonucleotide
  Sense strand starting at position 18 of SEQ ID NO: 1881345
gaaauugcccuggaggguu

SEQ ID NO: 2037181 - RNA, 19 nt, Artificial Sequence
  Description of Artificial Sequence: Synthetic oligonucleotide
  Antisense strand to SEQ ID NO: 2037180
aacccuccagggcaauuuc

SEQ ID NO: 2037182 - RNA, 19 nt, Artificial Sequence
  Description of Artificial Sequence: Synthetic oligonucleotide
  Sense strand starting at position 757 of SEQ ID NO: 1881345
ggacacauguucucagcau

SEQ ID NO: 2037183 - RNA, 19 nt, Artificial Sequence
  Description of Artificial Sequence: Synthetic oligonucleotide
  Antisense strand to SEQ ID NO: 2037182
augcugagaacaugugucc

SEQ ID NO: 2037184 - RNA, 19 nt, Artificial Sequence
  Description of Artificial Sequence: Synthetic oligonucleotide
  Sense strand starting at position 861 of SEQ ID NO: 1881345
ccuugacaucuuugaaagc

SEQ ID NO: 2037185 - RNA, 19 nt, Artificial Sequence
  Description of Artificial Sequence: Synthetic oligonucleotide
  Antisense strand to SEQ ID NO: 2037184
gcuuucaaagaugucaagg

SEQ ID NO: 2037186 - RNA, 19 nt, Artificial Sequence
  Description of Artificial Sequence: Synthetic oligonucleotide
  Sense strand starting at position 938 of SEQ ID NO: 1881345
gcagauaggguucauuguu

SEQ ID NO: 2037187 - RNA, 19 nt, Artificial Sequence
  Description of Artificial Sequence: Synthetic oligonucleotide
  Antisense strand to SEQ ID NO: 2037186
aacaaugaacccuaucugc

SEQ ID NO: 2037188 - RNA, 19 nt, Artificial Sequence
  Description of Artificial Sequence: Synthetic oligonucleotide
  Sense strand starting at position 945 of SEQ ID NO: 1881345
ggguucauuguugauaaug

SEQ ID NO: 2037189 - RNA, 19 nt, Artificial Sequence
  Description of Artificial Sequence: Synthetic oligonucleotide
  Antisense strand to SEQ ID NO: 2037188
cauuaucaacaaugaaccc

SEQ ID NO: 2037190 - RNA, 19 nt, Artificial Sequence
  Description of Artificial Sequence: Synthetic oligonucleotide
  Sense strand starting at position 954 of SEQ ID NO: 1881345
guugauaauggauguuaaa

SEQ ID NO: 2037191 - RNA, 19 nt, Artificial Sequence
  Description of Artificial Sequence: Synthetic oligonucleotide
  Antisense strand to SEQ ID NO: 2037190
uuuaacauccauuaucaac

SEQ ID NO: 2037192 - RNA, 19 nt, Artificial Sequence
  Description of Artificial Sequence: Synthetic oligonucleotide
  Sense strand starting at position 1037 of SEQ ID NO: 1881345
uagcuaagaugucuaagcu

SEQ ID NO: 2037193 - RNA, 19 nt, Artificial Sequence
  Description of Artificial Sequence: Synthetic oligonucleotide
  Antisense strand to SEQ ID NO: 2037192
agcuuagacaucuuagcua

SEQ ID NO: 2037194 - RNA, 19 nt, Artificial Sequence
  Description of Artificial Sequence: Synthetic oligonucleotide
  Sense strand starting at position 1115 of SEQ ID NO: 1881345
auuccuuauuccuugggua

SEQ ID NO: 2037195 - RNA, 19 nt, Artificial Sequence
  Description of Artificial Sequence: Synthetic oligonucleotide
  Antisense strand to SEQ ID NO: 2037194
uacccaaggaauaaggaau

SEQ ID NO: 2037196 - RNA, 19 nt, Artificial Sequence
  Description of Artificial Sequence: Synthetic oligonucleotide
  Sense strand starting at position 1116 of SEQ ID NO: 1881345
uuccuuauuccuuggguaa

SEQ ID NO: 2037197 - RNA, 19 nt, Artificial Sequence
  Description of Artificial Sequence: Synthetic oligonucleotide
  Antisense strand to SEQ ID NO: 2037196
uuacccaaggaauaaggaa

SEQ ID NO: 2037198 - RNA, 19 nt, Artificial Sequence
  Description of Artificial Sequence: Synthetic oligonucleotide
  Sense strand starting at position 1117 of SEQ ID NO: 1881345
uccuuauuccuuggguaac

SEQ ID NO: 2037199 - RNA, 19 nt, Artificial Sequence
  Description of Artificial Sequence: Synthetic oligonucleotide
  Antisense strand to SEQ ID NO: 2037198
guuacccaaggaauaagga

SEQ ID NO: 2037200 - RNA, 19 nt, Artificial Sequence
  Description of Artificial Sequence: Synthetic oligonucleotide
  Sense strand starting at position 1472 of SEQ ID NO: 1881345
uagaaagggcuuugaggua

SEQ ID NO: 2037201 - RNA, 19 nt, Artificial Sequence
  Description of Artificial Sequence: Synthetic oligonucleotide
  Antisense strand to SEQ ID NO: 2037200
uaccucaaagcccuuucua

SEQ ID NO: 2037202 - RNA, 19 nt, Artificial Sequence
  Description of Artificial Sequence: Synthetic oligonucleotide
  Sense strand starting at position 1477 of SEQ ID NO: 1881345
agggcuuugagguaguuaa

SEQ ID NO: 2037203 - RNA, 19 nt, Artificial Sequence
  Description of Artificial Sequence: Synthetic oligonucleotide
  Antisense strand to SEQ ID NO: 2037202
uuaacuaccucaaagcccu

SEQ ID NO: 2037204 - RNA, 19 nt, Artificial Sequence
  Description of Artificial Sequence: Synthetic oligonucleotide
  Sense strand starting at position 1595 of SEQ ID NO: 1881345
gcuggaagacucuaaggcu

SEQ ID NO: 2037205 - RNA, 19 nt, Artificial Sequence
  Description of Artificial Sequence: Synthetic oligonucleotide
  Antisense strand to SEQ ID NO: 2037204
agccuuagagucuuccagc

SEQ ID NO: 2037206 - RNA, 19 nt, Artificial Sequence
  Description of Artificial Sequence: Synthetic oligonucleotide
  Sense strand starting at position 1706 of SEQ ID NO: 1881345
ccggcugcgauccauuaau

SEQ ID NO: 2037207 - RNA, 19 nt, Artificial Sequence
  Description of Artificial Sequence: Synthetic oligonucleotide
  Antisense strand to SEQ ID NO: 2037206
auuaauggaucgcagccgg

SEQ ID NO: 2037208 - RNA, 19 nt, Artificial Sequence
  Description of Artificial Sequence: Synthetic oligonucleotide
  Sense strand starting at position 1737 of SEQ ID NO: 1881345
uuauccuaccugugagaga

SEQ ID NO: 2037209 - RNA, 19 nt, Artificial Sequence
  Description of Artificial Sequence: Synthetic oligonucleotide
  Antisense strand to SEQ ID NO: 2037208
ucucucacagguaggauaa

SEQ ID NO: 2037210 - RNA, 19 nt, Artificial Sequence
  Description of Artificial Sequence: Synthetic oligonucleotide
  Sense strand starting at position 2345 of SEQ ID NO: 1881345
guucguuucuucucaggag

SEQ ID NO: 2037211 - RNA, 19 nt, Artificial Sequence
  Description of Artificial Sequence: Synthetic oligonucleotide
  Antisense strand to SEQ ID NO: 2037210
cuccugagaagaaacgaac

SEQ ID NO: 2037212 - RNA, 19 nt, Artificial Sequence
  Description of Artificial Sequence: Synthetic oligonucleotide
  Sense strand starting at position 2527 of SEQ ID NO: 1881345
gaggucauuuguccagguu

SEQ ID NO: 2037213 - RNA, 19 nt, Artificial Sequence
  Description of Artificial Sequence: Synthetic oligonucleotide
  Antisense strand to SEQ ID NO: 2037212
aaccuggacaaaugaccuc

SEQ ID NO: 2037214 - RNA, 19 nt, Artificial Sequence
  Description of Artificial Sequence: Synthetic oligonucleotide
  Sense strand starting at position 2643 of SEQ ID NO: 1881345
ccgggaaguugacugacau

SEQ ID NO: 2037215 - RNA, 19 nt, Artificial Sequence
  Description of Artificial Sequence: Synthetic oligonucleotide
  Antisense strand to SEQ ID NO: 2037214
augucagucaacuucccgg

SEQ ID NO: 2037216 - RNA, 19 nt, Artificial Sequence
  Description of Artificial Sequence: Synthetic oligonucleotide
  Sense strand starting at position 2644 of SEQ ID NO: 1881345
cgggaaguugacugacaug

SEQ ID NO: 2037217 - RNA, 19 nt, Artificial Sequence
  Description of Artificial Sequence: Synthetic oligonucleotide
  Antisense strand to SEQ ID NO: 2037216
caugucagucaacuucccg

SEQ ID NO: 2037218 - RNA, 19 nt, Artificial Sequence
  Description of Artificial Sequence: Synthetic oligonucleotide
  Sense strand starting at position 2649 of SEQ ID NO: 1881345
aguugacugacaugugaua

SEQ ID NO: 2037219 - RNA, 19 nt, Artificial Sequence
  Description of Artificial Sequence: Synthetic oligonucleotide
  Antisense strand to SEQ ID NO: 2037218
uaucacaugucagucaacu

SEQ ID NO: 2037220 - RNA, 19 nt, Artificial Sequence
  Description of Artificial Sequence: Synthetic oligonucleotide
  Sense strand starting at position 2662 of SEQ ID NO: 1881345
gugauaggguuugugccaa

SEQ ID NO: 2037221 - RNA, 19 nt, Artificial Sequence
  Description of Artificial Sequence: Synthetic oligonucleotide
  Antisense strand to SEQ ID NO: 2037220
uuggcacaaacccuaucac

SEQ ID NO: 2037222 - RNA, 19 nt, Artificial Sequence
  Description of Artificial Sequence: Synthetic oligonucleotide
  Sense strand starting at position 2668 of SEQ ID NO: 1881345
ggguuugugccaaggcgau

SEQ ID NO: 2037223 - RNA, 19 nt, Artificial Sequence
  Description of Artificial Sequence: Synthetic oligonucleotide
  Antisense strand to SEQ ID NO: 2037222
aucgccuuggcacaaaccc

SEQ ID NO: 2037224 - RNA, 19 nt, Artificial Sequence
  Description of Artificial Sequence: Synthetic oligonucleotide
  Sense strand starting at position 2827 of SEQ ID NO: 1881345
uucugauagccucaagacu

SEQ ID NO: 2037225 - RNA, 19 nt, Artificial Sequence
  Description of Artificial Sequence: Synthetic oligonucleotide
  Antisense strand to SEQ ID NO: 2037224
agucuugaggcuaucagaa

SEQ ID NO: 2037226 - RNA, 19 nt, Artificial Sequence
  Description of Artificial Sequence: Synthetic oligonucleotide
  Sense strand starting at position 2875 of SEQ ID NO: 1881345
acugaagcucucugacaug

SEQ ID NO: 2037227 - RNA, 19 nt, Artificial Sequence
  Description of Artificial Sequence: Synthetic oligonucleotide
  Antisense strand to SEQ ID NO: 2037226
caugucagagagcuucagu

SEQ ID NO: 2037228 - RNA, 19 nt, Artificial Sequence
  Description of Artificial Sequence: Synthetic oligonucleotide
  Sense strand starting at position 3203 of SEQ ID NO: 1881345
agacauucguuucuauuga

SEQ ID NO: 2037229 - RNA, 19 nt, Artificial Sequence
  Description of Artificial Sequence: Synthetic oligonucleotide
  Antisense strand to SEQ ID NO: 2037228
ucaauagaaacgaaugucu

SEQ ID NO: 2037230 - RNA, 19 nt, Artificial Sequence
  Description of Artificial Sequence: Synthetic oligonucleotide
  Sense strand starting at position 3308 of SEQ ID NO: 1881345
cguugucugccuuuccaga

SEQ ID NO: 2037231 - RNA, 19 nt, Artificial Sequence
  Description of Artificial Sequence: Synthetic oligonucleotide
  Antisense strand to SEQ ID NO: 2037230
ucuggaaaggcagacaacg

SEQ ID NO: 2037232 - RNA, 19 nt, Artificial Sequence
  Description of Artificial Sequence: Synthetic oligonucleotide
  Sense strand starting at position 3380 of SEQ ID NO: 1881345
gagaguaagcuguauccca

SEQ ID NO: 2037233 - RNA, 19 nt, Artificial Sequence
  Description of Artificial Sequence: Synthetic oligonucleotide
  Antisense strand to SEQ ID NO: 2037232
ugggauacagcuuacucuc

SEQ ID NO: 2037234 - RNA, 19 nt, Artificial Sequence
  Description of Artificial Sequence: Synthetic oligonucleotide
  Sense strand starting at position 3542 of SEQ ID NO: 1881345
gucccauuggccuaaaugu

SEQ ID NO: 2037235 - RNA, 19 nt, Artificial Sequence
  Description of Artificial Sequence: Synthetic oligonucleotide
  Antisense strand to SEQ ID NO: 2037234
acauuuaggccaaugggac

SEQ ID NO: 2037236 - RNA, 19 nt, Artificial Sequence
  Description of Artificial Sequence: Synthetic oligonucleotide
  Sense strand starting at position 3551 of SEQ ID NO: 1881345
gccuaaauguguuuccauc

SEQ ID NO: 2037237 - RNA, 19 nt, Artificial Sequence
  Description of Artificial Sequence: Synthetic oligonucleotide
  Antisense strand to SEQ ID NO: 2037236
gauggaaacacauuuaggc

SEQ ID NO: 2037238 - RNA, 19 nt, Artificial Sequence
  Description of Artificial Sequence: Synthetic oligonucleotide
  Sense strand starting at position 3553 of SEQ ID NO: 1881345
cuaaauguguuuccaucuu

SEQ ID NO: 2037239 - RNA, 19 nt, Artificial Sequence
  Description of Artificial Sequence: Synthetic oligonucleotide
  Antisense strand to SEQ ID NO: 2037238
aagauggaaacacauuuag

SEQ ID NO: 2037240 - RNA, 19 nt, Artificial Sequence
  Description of Artificial Sequence: Synthetic oligonucleotide
  Sense strand starting at position 3571 of SEQ ID NO: 1881345
ugcagaccuuuccuuguua

SEQ ID NO: 2037241 - RNA, 19 nt, Artificial Sequence
  Description of Artificial Sequence: Synthetic oligonucleotide
  Antisense strand to SEQ ID NO: 2037240
uaacaaggaaaggucugca

SEQ ID NO: 2037242 - RNA, 19 nt, Artificial Sequence
  Description of Artificial Sequence: Synthetic oligonucleotide
  Sense strand starting at position 3609 of SEQ ID NO: 1881345
cugccugacuguuucugaa

SEQ ID NO: 2037243 - RNA, 19 nt, Artificial Sequence
  Description of Artificial Sequence: Synthetic oligonucleotide
  Antisense strand to SEQ ID NO: 2037242
uucagaaacagucaggcag

SEQ ID NO: 2037244 - RNA, 19 nt, Artificial Sequence
  Description of Artificial Sequence: Synthetic oligonucleotide
  Sense strand starting at position 3630 of SEQ ID NO: 1881345
gugggugugauucaggguu

SEQ ID NO: 2037245 - RNA, 19 nt, Artificial Sequence
  Description of Artificial Sequence: Synthetic oligonucleotide
  Antisense strand to SEQ ID NO: 2037244
aacccugaaucacacccac

SEQ ID NO: 2037246 - RNA, 19 nt, Artificial Sequence
  Description of Artificial Sequence: Synthetic oligonucleotide
  Sense strand starting at position 3728 of SEQ ID NO: 1881345
aggauuaggucaccagucu

SEQ ID NO: 2037247 - RNA, 19 nt, Artificial Sequence
  Description of Artificial Sequence: Synthetic oligonucleotide
  Antisense strand to SEQ ID NO: 2037246
agacuggugaccuaauccu

SEQ ID NO: 2037248 - RNA, 19 nt, Artificial Sequence
  Description of Artificial Sequence: Synthetic oligonucleotide
  Sense strand starting at position 3756 of SEQ ID NO: 1881345
aucagacguuucuccucaa

SEQ ID NO: 2037249 - RNA, 19 nt, Artificial Sequence
  Description of Artificial Sequence: Synthetic oligonucleotide
  Antisense strand to SEQ ID NO: 2037248
uugaggagaaacgucugau

SEQ ID NO: 2037250 - RNA, 19 nt, Artificial Sequence
  Description of Artificial Sequence: Synthetic oligonucleotide
  Sense strand starting at position 3757 of SEQ ID NO: 1881345
ucagacguuucuccucaaa

SEQ ID NO: 2037251 - RNA, 19 nt, Artificial Sequence
  Description of Artificial Sequence: Synthetic oligonucleotide
  Antisense strand to SEQ ID NO: 2037250
uuugaggagaaacgucuga

SEQ ID NO: 2037252 - RNA, 19 nt, Artificial Sequence
  Description of Artificial Sequence: Synthetic oligonucleotide
  Sense strand starting at position 3759 of SEQ ID NO: 1881345
agacguuucuccucaaauc

SEQ ID NO: 2037253 - RNA, 19 nt, Artificial Sequence
  Description of Artificial Sequence: Synthetic oligonucleotide
  Antisense strand to SEQ ID NO: 2037252
gauuugaggagaaacgucu

SEQ ID NO: 2037254 - RNA, 19 nt, Artificial Sequence
  Description of Artificial Sequence: Synthetic oligonucleotide
  Sense strand starting at position 3791 of SEQ ID NO: 1881345
ucagcuaaugauugagcau

SEQ ID NO: 2037255 - RNA, 19 nt, Artificial Sequence
  Description of Artificial Sequence: Synthetic oligonucleotide
  Antisense strand to SEQ ID NO: 2037254
augcucaaucauuagcuga

SEQ ID NO: 2037256 - RNA, 19 nt, Artificial Sequence
  Description of Artificial Sequence: Synthetic oligonucleotide
  Sense strand starting at position 3887 of SEQ ID NO: 1881345
cuuuaaaguuaacugggaa

SEQ ID NO: 2037257 - RNA, 19 nt, Artificial Sequence
  Description of Artificial Sequence: Synthetic oligonucleotide
  Antisense strand to SEQ ID NO: 2037256
uucccaguuaacuuuaaag

SEQ ID NO: 2037258 - RNA, 19 nt, Artificial Sequence
  Description of Artificial Sequence: Synthetic oligonucleotide
  Sense strand starting at position 3943 of SEQ ID NO: 1881345
ccaguuacucuguauuccu

SEQ ID NO: 2037259 - RNA, 19 nt, Artificial Sequence
  Description of Artificial Sequence: Synthetic oligonucleotide
  Antisense strand to SEQ ID NO: 2037258
aggaauacagaguaacugg

SEQ ID NO: 2037260 - RNA, 19 nt, Artificial Sequence
  Description of Artificial Sequence: Synthetic oligonucleotide
  Sense strand starting at position 448 of SEQ ID NO: 1881344
ggacacauguucucagcau

SEQ ID NO: 2037261 - RNA, 19 nt, Artificial Sequence
  Description of Artificial Sequence: Synthetic oligonucleotide
  Antisense strand to SEQ ID NO: 2037260
augcugagaacaugugucc

SEQ ID NO: 2037262 - RNA, 19 nt, Artificial Sequence
  Description of Artificial Sequence: Synthetic oligonucleotide
  Sense strand starting at position 552 of SEQ ID NO: 1881344
ccuugacaucuuugaaagc

SEQ ID NO: 2037263 - RNA, 19 nt, Artificial Sequence
  Description of Artificial Sequence: Synthetic oligonucleotide
  Antisense strand to SEQ ID NO: 2037262
gcuuucaaagaugucaagg

SEQ ID NO: 2037264 - RNA, 19 nt, Artificial Sequence
  Description of Artificial Sequence: Synthetic oligonucleotide
  Sense strand starting at position 629 of SEQ ID NO: 1881344
gcagauaggguucauuguu

SEQ ID NO: 2037265 - RNA, 19 nt, Artificial Sequence
  Description of Artificial Sequence: Synthetic oligonucleotide
  Antisense strand to SEQ ID NO: 2037264
aacaaugaacccuaucugc

SEQ ID NO: 2037266 - RNA, 19 nt, Artificial Sequence
  Description of Artificial Sequence: Synthetic oligonucleotide
  Sense strand starting at position 636 of SEQ ID NO: 1881344
ggguucauuguugauaaug

SEQ ID NO: 2037267 - RNA, 19 nt, Artificial Sequence
  Description of Artificial Sequence: Synthetic oligonucleotide
  Antisense strand to SEQ ID NO: 2037266
cauuaucaacaaugaaccc

SEQ ID NO: 2037268 - RNA, 19 nt, Artificial Sequence
  Description of Artificial Sequence: Synthetic oligonucleotide
  Sense strand starting at position 645 of SEQ ID NO: 1881344
guugauaauggauguuaaa

SEQ ID NO: 2037269 - RNA, 19 nt, Artificial Sequence
  Description of Artificial Sequence: Synthetic oligonucleotide
  Antisense strand to SEQ ID NO: 2037268
uuuaacauccauuaucaac

SEQ ID NO: 2037270 - RNA, 19 nt, Artificial Sequence
  Description of Artificial Sequence: Synthetic oligonucleotide
  Sense strand starting at position 806 of SEQ ID NO: 1881344
auuccuuauuccuugggua

SEQ ID NO: 2037271 - RNA, 19 nt, Artificial Sequence
  Description of Artificial Sequence: Synthetic oligonucleotide
  Antisense strand to SEQ ID NO: 2037270
uacccaaggaauaaggaau

SEQ ID NO: 2037272 - RNA, 19 nt, Artificial Sequence
  Description of Artificial Sequence: Synthetic oligonucleotide
  Sense strand starting at position 807 of SEQ ID NO: 1881344
uuccuuauuccuuggguaa

SEQ ID NO: 2037273 - RNA, 19 nt, Artificial Sequence
  Description of Artificial Sequence: Synthetic oligonucleotide
  Antisense strand to SEQ ID NO: 2037272
uuacccaaggaauaaggaa

SEQ ID NO: 2037274 - RNA, 19 nt, Artificial Sequence
  Description of Artificial Sequence: Synthetic oligonucleotide
  Sense strand starting at position 808 of SEQ ID NO: 1881344
uccuuauuccuuggguaac

SEQ ID NO: 2037275 - RNA, 19 nt, Artificial Sequence
  Description of Artificial Sequence: Synthetic oligonucleotide
  Antisense strand to SEQ ID NO: 2037274
guuacccaaggaauaagga

SEQ ID NO: 2037276 - RNA, 19 nt, Artificial Sequence
  Description of Artificial Sequence: Synthetic oligonucleotide
  Sense strand starting at position 1163 of SEQ ID NO: 1881344
uagaaagggcuuugaggua

SEQ ID NO: 2037277 - RNA, 19 nt, Artificial Sequence
  Description of Artificial Sequence: Synthetic oligonucleotide
  Antisense strand to SEQ ID NO: 2037276
uaccucaaagcccuuucua

SEQ ID NO: 2037278 - RNA, 19 nt, Artificial Sequence
  Description of Artificial Sequence: Synthetic oligonucleotide
  Sense strand starting at position 1168 of SEQ ID NO: 1881344
agggcuuugagguaguuaa

SEQ ID NO: 2037279 - RNA, 19 nt, Artificial Sequence
  Description of Artificial Sequence: Synthetic oligonucleotide
  Antisense strand to SEQ ID NO: 2037278
uuaacuaccucaaagcccu

SEQ ID NO: 2037280 - RNA, 19 nt, Artificial Sequence
  Description of Artificial Sequence: Synthetic oligonucleotide
  Sense strand starting at position 1286 of SEQ ID NO: 1881344
gcuggaagacucuaaggcu

SEQ ID NO: 2037281 - RNA, 19 nt, Artificial Sequence
  Description of Artificial Sequence: Synthetic oligonucleotide
  Antisense strand to SEQ ID NO: 2037280
agccuuagagucuuccagc

SEQ ID NO: 2037282 - RNA, 19 nt, Artificial Sequence
  Description of Artificial Sequence: Synthetic oligonucleotide
  Sense strand starting at position 1428 of SEQ ID NO: 1881344
uuauccuaccugugagaga

SEQ ID NO: 2037283 - RNA, 19 nt, Artificial Sequence
  Description of Artificial Sequence: Synthetic oligonucleotide
  Antisense strand to SEQ ID NO: 2037282
ucucucacagguaggauaa

SEQ ID NO: 2037284 - RNA, 19 nt, Artificial Sequence
  Description of Artificial Sequence: Synthetic oligonucleotide
  Sense strand starting at position 2218 of SEQ ID NO: 1881344
gaggucauuuguccagguu

SEQ ID NO: 2037285 - RNA, 19 nt, Artificial Sequence
  Description of Artificial Sequence: Synthetic oligonucleotide
  Antisense strand to SEQ ID NO: 2037284
aaccuggacaaaugaccuc

SEQ ID NO: 2037286 - RNA, 19 nt, Artificial Sequence
  Description of Artificial Sequence: Synthetic oligonucleotide
  Sense strand starting at position 2334 of SEQ ID NO: 1881344
ccgggaaguugacugacau

SEQ ID NO: 2037287 - RNA, 19 nt, Artificial Sequence
  Description of Artificial Sequence: Synthetic oligonucleotide
  Antisense strand to SEQ ID NO: 2037286
augucagucaacuucccgg

SEQ ID NO: 2037288 - RNA, 19 nt, Artificial Sequence
  Description of Artificial Sequence: Synthetic oligonucleotide
  Sense strand starting at position 2335 of SEQ ID NO: 1881344
cgggaaguugacugacaug

SEQ ID NO: 2037289 - RNA, 19 nt, Artificial Sequence
  Description of Artificial Sequence: Synthetic oligonucleotide
  Antisense strand to SEQ ID NO: 2037288
caugucagucaacuucccg

SEQ ID NO: 2037290 - RNA, 19 nt, Artificial Sequence
  Description of Artificial Sequence: Synthetic oligonucleotide
  Sense strand starting at position 2340 of SEQ ID NO: 1881344
aguugacugacaugugaua

SEQ ID NO: 2037291 - RNA, 19 nt, Artificial Sequence
  Description of Artificial Sequence: Synthetic oligonucleotide
  Antisense strand to SEQ ID NO: 2037290
uaucacaugucagucaacu

SEQ ID NO: 2037292 - RNA, 19 nt, Artificial Sequence
  Description of Artificial Sequence: Synthetic oligonucleotide
  Sense strand starting at position 2359 of SEQ ID NO: 1881344
ggguuugugccaaggcgau

SEQ ID NO: 2037293 - RNA, 19 nt, Artificial Sequence
  Description of Artificial Sequence: Synthetic oligonucleotide
  Antisense strand to SEQ ID NO: 2037292
aucgccuuggcacaaaccc

SEQ ID NO: 2037294 - RNA, 19 nt, Artificial Sequence
  Description of Artificial Sequence: Synthetic oligonucleotide
  Sense strand starting at position 2518 of SEQ ID NO: 1881344
uucugauagccucaagacu

SEQ ID NO: 2037295 - RNA, 19 nt, Artificial Sequence
  Description of Artificial Sequence: Synthetic oligonucleotide
  Antisense strand to SEQ ID NO: 2037294
agucuugaggcuaucagaa

SEQ ID NO: 2037296 - RNA, 19 nt, Artificial Sequence
  Description of Artificial Sequence: Synthetic oligonucleotide
  Sense strand starting at position 2566 of SEQ ID NO: 1881344
acugaagcucucugacaug

SEQ ID NO: 2037297 - RNA, 19 nt, Artificial Sequence
  Description of Artificial Sequence: Synthetic oligonucleotide
  Antisense strand to SEQ ID NO: 2037296
caugucagagagcuucagu

SEQ ID NO: 2037298 - RNA, 19 nt, Artificial Sequence
  Description of Artificial Sequence: Synthetic oligonucleotide
  Sense strand starting at position 2894 of SEQ ID NO: 1881344
agacauucguuucuauuga

SEQ ID NO: 2037299 - RNA, 19 nt, Artificial Sequence
  Description of Artificial Sequence: Synthetic oligonucleotide
  Antisense strand to SEQ ID NO: 2037298
ucaauagaaacgaaugucu

SEQ ID NO: 2037300 - RNA, 19 nt, Artificial Sequence
  Description of Artificial Sequence: Synthetic oligonucleotide
  Sense strand starting at position 2999 of SEQ ID NO: 1881344
cguugucugccuuuccaga

SEQ ID NO: 2037301 - RNA, 19 nt, Artificial Sequence
  Description of Artificial Sequence: Synthetic oligonucleotide
  Antisense strand to SEQ ID NO: 2037300
ucuggaaaggcagacaacg

SEQ ID NO: 2037302 - RNA, 19 nt, Artificial Sequence
  Description of Artificial Sequence: Synthetic oligonucleotide
  Sense strand starting at position 3071 of SEQ ID NO: 1881344
gagaguaagcuguauccca

SEQ ID NO: 2037303 - RNA, 19 nt, Artificial Sequence
  Description of Artificial Sequence: Synthetic oligonucleotide
  Antisense strand to SEQ ID NO: 2037302
ugggauacagcuuacucuc

SEQ ID NO: 2037304 - RNA, 19 nt, Artificial Sequence
  Description of Artificial Sequence: Synthetic oligonucleotide
  Sense strand starting at position 3233 of SEQ ID NO: 1881344
gucccauuggccuaaaugu

SEQ ID NO: 2037305 - RNA, 19 nt, Artificial Sequence
  Description of Artificial Sequence: Synthetic oligonucleotide
  Antisense strand to SEQ ID NO: 2037304
acauuuaggccaaugggac

SEQ ID NO: 2037306 - RNA, 19 nt, Artificial Sequence
  Description of Artificial Sequence: Synthetic oligonucleotide
  Sense strand starting at position 3244 of SEQ ID NO: 1881344
cuaaauguguuuccaucuu

SEQ ID NO: 2037307 - RNA, 19 nt, Artificial Sequence
  Description of Artificial Sequence: Synthetic oligonucleotide
  Antisense strand to SEQ ID NO: 2037306
aagauggaaacacauuuag

SEQ ID NO: 2037308 - RNA, 19 nt, Artificial Sequence
  Description of Artificial Sequence: Synthetic oligonucleotide
  Sense strand starting at position 3321 of SEQ ID NO: 1881344
gugggugugauucaggguu

SEQ ID NO: 2037309 - RNA, 19 nt, Artificial Sequence
  Description of Artificial Sequence: Synthetic oligonucleotide
  Antisense strand to SEQ ID NO: 2037308
aacccugaaucacacccac

SEQ ID NO: 2037310 - RNA, 19 nt, Artificial Sequence
  Description of Artificial Sequence: Synthetic oligonucleotide
  Sense strand starting at position 3419 of SEQ ID NO: 1881344
aggauuaggucaccagucu

SEQ ID NO: 2037311 - RNA, 19 nt, Artificial Sequence
  Description of Artificial Sequence: Synthetic oligonucleotide
  Antisense strand to SEQ ID NO: 2037310
agacuggugaccuaauccu

SEQ ID NO: 2037312 - RNA, 19 nt, Artificial Sequence
  Description of Artificial Sequence: Synthetic oligonucleotide
  Sense strand starting at position 3447 of SEQ ID NO: 1881344
aucagacguuucuccucaa

SEQ ID NO: 2037313 - RNA, 19 nt, Artificial Sequence
  Description of Artificial Sequence: Synthetic oligonucleotide
  Antisense strand to SEQ ID NO: 2037312
uugaggagaaacgucugau

SEQ ID NO: 2037314 - RNA, 19 nt, Artificial Sequence
  Description of Artificial Sequence: Synthetic oligonucleotide
  Sense strand starting at position 3448 of SEQ ID NO: 1881344
ucagacguuucuccucaaa

SEQ ID NO: 2037315 - RNA, 19 nt, Artificial Sequence
  Description of Artificial Sequence: Synthetic oligonucleotide
  Antisense strand to SEQ ID NO: 2037314
uuugaggagaaacgucuga

SEQ ID NO: 2037316 - RNA, 19 nt, Artificial Sequence
  Description of Artificial Sequence: Synthetic oligonucleotide
  Sense strand starting at position 3450 of SEQ ID NO: 1881344
agacguuucuccucaaauc

SEQ ID NO: 2037317 - RNA, 19 nt, Artificial Sequence
  Description of Artificial Sequence: Synthetic oligonucleotide
  Antisense strand to SEQ ID NO: 2037316
gauuugaggagaaacgucu

SEQ ID NO: 2037318 - RNA, 19 nt, Artificial Sequence
  Description of Artificial Sequence: Synthetic oligonucleotide
  Sense strand starting at position 3482 of SEQ ID NO: 1881344
ucagcuaaugauugagcau

SEQ ID NO: 2037319 - RNA, 19 nt, Artificial Sequence
  Description of Artificial Sequence: Synthetic oligonucleotide
  Antisense strand to SEQ ID NO: 2037318
augcucaaucauuagcuga

SEQ ID NO: 2037320 - RNA, 19 nt, Artificial Sequence
  Description of Artificial Sequence: Synthetic oligonucleotide
  Sense strand starting at position 3578 of SEQ ID NO: 1881344
cuuuaaaguuaacugggaa

SEQ ID NO: 2037321 - RNA, 19 nt, Artificial Sequence
  Description of Artificial Sequence: Synthetic oligonucleotide
  Antisense strand to SEQ ID NO: 2037320
uucccaguuaacuuuaaag

SEQ ID NO: 2037322 - RNA, 19 nt, Artificial Sequence
  Description of Artificial Sequence: Synthetic oligonucleotide
  Sense strand starting at position 3634 of SEQ ID NO: 1881344
ccaguuacucuguauuccu

SEQ ID NO: 2037323 - RNA, 19 nt, Artificial Sequence
  Description of Artificial Sequence: Synthetic oligonucleotide
  Antisense strand to SEQ ID NO: 2037322
aggaauacagaguaacugg

SEQ ID NO: 2037324 - RNA, 19 nt, Artificial Sequence
  Description of Artificial Sequence: Synthetic oligonucleotide
  Sense strand starting at position 3743 of SEQ ID NO: 1881344
guccuaggcucucucauuu

SEQ ID NO: 2037325 - RNA, 19 nt, Artificial Sequence
  Description of Artificial Sequence: Synthetic oligonucleotide
  Antisense strand to SEQ ID NO: 2037324
aaaugagagagccuaggac

SEQ ID NO: 2037326 - RNA, 19 nt, Artificial Sequence
  Description of Artificial Sequence: Synthetic oligonucleotide
  Sense strand starting at position 3756 of SEQ ID NO: 1881344
ucauuucuugcuuggacuu

SEQ ID NO: 2037327 - RNA, 19 nt, Artificial Sequence
  Description of Artificial Sequence: Synthetic oligonucleotide
  Antisense strand to SEQ ID NO: 2037326
aaguccaagcaagaaauga

SEQ ID NO: 2037328 - RNA, 19 nt, Artificial Sequence
  Description of Artificial Sequence: Synthetic oligonucleotide
  Sense strand starting at position 3776 of SEQ ID NO: 1881344
ggaaguucuuugcuuuaag

SEQ ID NO: 2037329 - RNA, 19 nt, Artificial Sequence
  Description of Artificial Sequence: Synthetic oligonucleotide
  Antisense strand to SEQ ID NO: 2037328
cuuaaagcaaagaacuucc

SEQ ID NO: 2037330 - RNA, 19 nt, Artificial Sequence
  Description of Artificial Sequence: Synthetic oligonucleotide
  Sense strand starting at position 3847 of SEQ ID NO: 1881344
cuuugaagauccuugucca

SEQ ID NO: 2037331 - RNA, 19 nt, Artificial Sequence
  Description of Artificial Sequence: Synthetic oligonucleotide
  Antisense strand to SEQ ID NO: 2037330
uggacaaggaucuucaaag

SEQ ID NO: 2037332 - RNA, 19 nt, Artificial Sequence
  Description of Artificial Sequence: Synthetic oligonucleotide
  Sense strand starting at position 3850 of SEQ ID NO: 1881344
ugaagauccuuguccaguu

SEQ ID NO: 2037333 - RNA, 19 nt, Artificial Sequence
  Description of Artificial Sequence: Synthetic oligonucleotide
  Antisense strand to SEQ ID NO: 2037332
aacuggacaaggaucuuca

SEQ ID NO: 2037334 - RNA, 19 nt, Artificial Sequence
  Description of Artificial Sequence: Synthetic oligonucleotide
  Sense strand starting at position 3851 of SEQ ID NO: 1881344
gaagauccuuguccaguua

SEQ ID NO: 2037335 - RNA, 19 nt, Artificial Sequence
  Description of Artificial Sequence: Synthetic oligonucleotide
  Antisense strand to SEQ ID NO: 2037334
uaacuggacaaggaucuuc

SEQ ID NO: 2037336 - RNA, 19 nt, Artificial Sequence
  Description of Artificial Sequence: Synthetic oligonucleotide
  Sense strand starting at position 3858 of SEQ ID NO: 1881344
cuuguccaguuauuauauu

SEQ ID NO: 2037337 - RNA, 19 nt, Artificial Sequence
  Description of Artificial Sequence: Synthetic oligonucleotide
  Antisense strand to SEQ ID NO: 2037336
aauauaauaacuggacaag

SEQ ID NO: 2037338 - RNA, 19 nt, Artificial Sequence
  Description of Artificial Sequence: Synthetic oligonucleotide
  Sense strand starting at position 3924 of SEQ ID NO: 1881344
ucuauauucugucuuauga

SEQ ID NO: 2037339 - RNA, 19 nt, Artificial Sequence
  Description of Artificial Sequence: Synthetic oligonucleotide
  Antisense strand to SEQ ID NO: 2037338
ucauaagacagaauauaga

SEQ ID NO: 2037340 - RNA, 19 nt, Artificial Sequence
  Description of Artificial Sequence: Synthetic oligonucleotide
  Sense strand starting at position 189 of SEQ ID NO: 1881346
aggauaguauuugaauaag

SEQ ID NO: 2037341 - RNA, 19 nt, Artificial Sequence
  Description of Artificial Sequence: Synthetic oligonucleotide
  Antisense strand to SEQ ID NO: 2037340
cuuauucaaauacuauccu

SEQ ID NO: 2037342 - RNA, 19 nt, Artificial Sequence
  Description of Artificial Sequence: Synthetic oligonucleotide
  Sense strand starting at position 260 of SEQ ID NO: 1881346
cugagaagcuuucuaguua

SEQ ID NO: 2037343 - RNA, 19 nt, Artificial Sequence
  Description of Artificial Sequence: Synthetic oligonucleotide
  Antisense strand to SEQ ID NO: 2037342
uaacuagaaagcuucucag

SEQ ID NO: 2037344 - RNA, 19 nt, Artificial Sequence
  Description of Artificial Sequence: Synthetic oligonucleotide
  Sense strand starting at position 349 of SEQ ID NO: 1881346
cgguucuacuucucugaau

SEQ ID NO: 2037345 - RNA, 19 nt, Artificial Sequence
  Description of Artificial Sequence: Synthetic oligonucleotide
  Antisense strand to SEQ ID NO: 2037344
auucagagaaguagaaccg

SEQ ID NO: 2037346 - RNA, 19 nt, Artificial Sequence
  Description of Artificial Sequence: Synthetic oligonucleotide
  Sense strand starting at position 350 of SEQ ID NO: 1881346
gguucuacuucucugaauc

SEQ ID NO: 2037347 - RNA, 19 nt, Artificial Sequence
  Description of Artificial Sequence: Synthetic oligonucleotide
  Antisense strand to SEQ ID NO: 2037346
gauucagagaaguagaacc

SEQ ID NO: 2037348 - RNA, 19 nt, Artificial Sequence
  Description of Artificial Sequence: Synthetic oligonucleotide
  Sense strand starting at position 362 of SEQ ID NO: 1881346
cugaaucuguacucaauga

SEQ ID NO: 2037349 - RNA, 19 nt, Artificial Sequence
  Description of Artificial Sequence: Synthetic oligonucleotide
  Antisense strand to SEQ ID NO: 2037348
ucauugaguacagauucag

SEQ ID NO: 2037350 - RNA, 19 nt, Artificial Sequence
  Description of Artificial Sequence: Synthetic oligonucleotide
  Sense strand starting at position 899 of SEQ ID NO: 1881346
gagcaucaugacugcacua

SEQ ID NO: 2037351 - RNA, 19 nt, Artificial Sequence
  Description of Artificial Sequence: Synthetic oligonucleotide
  Antisense strand to SEQ ID NO: 2037350
uagugcagucaugaugcuc

SEQ ID NO: 2037352 - RNA, 19 nt, Artificial Sequence
  Description of Artificial Sequence: Synthetic oligonucleotide
  Sense strand starting at position 901 of SEQ ID NO: 1881346
gcaucaugacugcacuaaa

SEQ ID NO: 2037353 - RNA, 19 nt, Artificial Sequence
  Description of Artificial Sequence: Synthetic oligonucleotide
  Antisense strand to SEQ ID NO: 2037352
uuuagugcagucaugaugc

SEQ ID NO: 2037354 - RNA, 19 nt, Artificial Sequence
  Description of Artificial Sequence: Synthetic oligonucleotide
  Sense strand starting at position 986 of SEQ ID NO: 1881346
gauauaagccaucaguuga

SEQ ID NO: 2037355 - RNA, 19 nt, Artificial Sequence
  Description of Artificial Sequence: Synthetic oligonucleotide
  Antisense strand to SEQ ID NO: 2037354
ucaacugauggcuuauauc

SEQ ID NO: 2037356 - RNA, 19 nt, Artificial Sequence
  Description of Artificial Sequence: Synthetic oligonucleotide
  Sense strand starting at position 996 of SEQ ID NO: 1881346
aucaguugaucacugacaa

SEQ ID NO: 2037357 - RNA, 19 nt, Artificial Sequence
  Description of Artificial Sequence: Synthetic oligonucleotide
  Antisense strand to SEQ ID NO: 2037356
uugucagugaucaacugau

SEQ ID NO: 2037358 - RNA, 19 nt, Artificial Sequence
  Description of Artificial Sequence: Synthetic oligonucleotide
  Sense strand starting at position 997 of SEQ ID NO: 1881346
ucaguugaucacugacaag

SEQ ID NO: 2037359 - RNA, 19 nt, Artificial Sequence
  Description of Artificial Sequence: Synthetic oligonucleotide
  Antisense strand to SEQ ID NO: 2037358
cuugucagugaucaacuga

SEQ ID NO: 2037360 - RNA, 19 nt, Artificial Sequence
  Description of Artificial Sequence: Synthetic oligonucleotide
  Sense strand starting at position 1286 of SEQ ID NO: 1881346
uucguagcaguuuaaagaa

SEQ ID NO: 2037361 - RNA, 19 nt, Artificial Sequence
  Description of Artificial Sequence: Synthetic oligonucleotide
  Antisense strand to SEQ ID NO: 2037360
uucuuuaaacugcuacgaa

SEQ ID NO: 2037362 - RNA, 19 nt, Artificial Sequence
  Description of Artificial Sequence: Synthetic oligonucleotide
  Sense strand starting at position 1314 of SEQ ID NO: 1881346
caguauaugucaguuugau

SEQ ID NO: 2037363 - RNA, 19 nt, Artificial Sequence
  Description of Artificial Sequence: Synthetic oligonucleotide
  Antisense strand to SEQ ID NO: 2037362
aucaaacugacauauacug

SEQ ID NO: 2037364 - RNA, 19 nt, Artificial Sequence
  Description of Artificial Sequence: Synthetic oligonucleotide
  Sense strand starting at position 1323 of SEQ ID NO: 1881346
ucaguuugauagcuuggau

SEQ ID NO: 2037365 - RNA, 19 nt, Artificial Sequence
  Description of Artificial Sequence: Synthetic oligonucleotide
  Antisense strand to SEQ ID NO: 2037364
auccaagcuaucaaacuga

SEQ ID NO: 2037366 - RNA, 19 nt, Artificial Sequence
  Description of Artificial Sequence: Synthetic oligonucleotide
  Sense strand starting at position 1326 of SEQ ID NO: 1881346
guuugauagcuuggaugau

SEQ ID NO: 2037367 - RNA, 19 nt, Artificial Sequence
  Description of Artificial Sequence: Synthetic oligonucleotide
  Antisense strand to SEQ ID NO: 2037366
aucauccaagcuaucaaac

SEQ ID NO: 2037368 - RNA, 19 nt, Artificial Sequence
  Description of Artificial Sequence: Synthetic oligonucleotide
  Sense strand starting at position 1352 of SEQ ID NO: 1881346
ccagucauuuggcagggaa

SEQ ID NO: 2037369 - RNA, 19 nt, Artificial Sequence
  Description of Artificial Sequence: Synthetic oligonucleotide
  Antisense strand to SEQ ID NO: 2037368
uucccugccaaaugacugg

SEQ ID NO: 2037370 - RNA, 19 nt, Artificial Sequence
  Description of Artificial Sequence: Synthetic oligonucleotide
  Sense strand starting at position 1993 of SEQ ID NO: 1881346
accaguaagugaucuacuu

SEQ ID NO: 2037371 - RNA, 19 nt, Artificial Sequence
  Description of Artificial Sequence: Synthetic oligonucleotide
  Antisense strand to SEQ ID NO: 2037370
aaguagaucacuuacuggu

SEQ ID NO: 2037372 - RNA, 19 nt, Artificial Sequence
  Description of Artificial Sequence: Synthetic oligonucleotide
  Sense strand starting at position 2001 of SEQ ID NO: 1881346
gugaucuacuuguuuaccu

SEQ ID NO: 2037373 - RNA, 19 nt, Artificial Sequence
  Description of Artificial Sequence: Synthetic oligonucleotide
  Antisense strand to SEQ ID NO: 2037372
agguaaacaaguagaucac

SEQ ID NO: 2037374 - RNA, 19 nt, Artificial Sequence
  Description of Artificial Sequence: Synthetic oligonucleotide
  Sense strand starting at position 2031 of SEQ ID NO: 1881346
guucgugauaaaugaucac

SEQ ID NO: 2037375 - RNA, 19 nt, Artificial Sequence
  Description of Artificial Sequence: Synthetic oligonucleotide
  Antisense strand to SEQ ID NO: 2037374
gugaucauuuaucacgaac

SEQ ID NO: 2037376 - RNA, 19 nt, Artificial Sequence
  Description of Artificial Sequence: Synthetic oligonucleotide
  Sense strand starting at position 2042 of SEQ ID NO: 1881346
augaucacuccugaugcuu

SEQ ID NO: 2037377 - RNA, 19 nt, Artificial Sequence
  Description of Artificial Sequence: Synthetic oligonucleotide
  Antisense strand to SEQ ID NO: 2037376
aagcaucaggagugaucau

SEQ ID NO: 2037378 - RNA, 19 nt, Artificial Sequence
  Description of Artificial Sequence: Synthetic oligonucleotide
  Sense strand starting at position 2089 of SEQ ID NO: 1881346
gguggagguuggagacuua

SEQ ID NO: 2037379 - RNA, 19 nt, Artificial Sequence
  Description of Artificial Sequence: Synthetic oligonucleotide
  Antisense strand to SEQ ID NO: 2037378
uaagucuccaaccuccacc

SEQ ID NO: 2037380 - RNA, 19 nt, Artificial Sequence
  Description of Artificial Sequence: Synthetic oligonucleotide
  Sense strand starting at position 2116 of SEQ ID NO: 1881346
cucucuuugguggaaguua

SEQ ID NO: 2037381 - RNA, 19 nt, Artificial Sequence
  Description of Artificial Sequence: Synthetic oligonucleotide
  Antisense strand to SEQ ID NO: 2037380
uaacuuccaccaaagagag

SEQ ID NO: 2037382 - RNA, 19 nt, Artificial Sequence
  Description of Artificial Sequence: Synthetic oligonucleotide
  Sense strand starting at position 2128 of SEQ ID NO: 1881346
gaaguuauggucugauuaa

SEQ ID NO: 2037383 - RNA, 19 nt, Artificial Sequence
  Description of Artificial Sequence: Synthetic oligonucleotide
  Antisense strand to SEQ ID NO: 2037382
uuaaucagaccauaacuuc

SEQ ID NO: 2037384 - RNA, 19 nt, Artificial Sequence
  Description of Artificial Sequence: Synthetic oligonucleotide
  Sense strand starting at position 2160 of SEQ ID NO: 1881346
ggguguggaaaucacaguu

SEQ ID NO: 2037385 - RNA, 19 nt, Artificial Sequence
  Description of Artificial Sequence: Synthetic oligonucleotide
  Antisense strand to SEQ ID NO: 2037384
aacugugauuuccacaccc

SEQ ID NO: 2037386 - RNA, 19 nt, Artificial Sequence
  Description of Artificial Sequence: Synthetic oligonucleotide
  Sense strand starting at position 2166 of SEQ ID NO: 1881346
ggaaaucacaguuguauug

SEQ ID NO: 2037387 - RNA, 19 nt, Artificial Sequence
  Description of Artificial Sequence: Synthetic oligonucleotide
  Antisense strand to SEQ ID NO: 2037386
caauacaacugugauuucc

SEQ ID NO: 2037388 - RNA, 19 nt, Artificial Sequence
  Description of Artificial Sequence: Synthetic oligonucleotide
  Sense strand starting at position 2199 of SEQ ID NO: 1881346
agagauugcuuguuaugga

SEQ ID NO: 2037389 - RNA, 19 nt, Artificial Sequence
  Description of Artificial Sequence: Synthetic oligonucleotide
  Antisense strand to SEQ ID NO: 2037388
uccauaacaagcaaucucu

SEQ ID NO: 2037390 - RNA, 19 nt, Artificial Sequence
  Description of Artificial Sequence: Synthetic oligonucleotide
  Sense strand starting at position 2285 of SEQ ID NO: 1881346
guugaauugaaguagcuuu

SEQ ID NO: 2037391 - RNA, 19 nt, Artificial Sequence
  Description of Artificial Sequence: Synthetic oligonucleotide
  Antisense strand to SEQ ID NO: 2037390
aaagcuacuucaauucaac

SEQ ID NO: 2037392 - RNA, 19 nt, Artificial Sequence
  Description of Artificial Sequence: Synthetic oligonucleotide
  Sense strand starting at position 2347 of SEQ ID NO: 1881346
ugaauccagugacuuguua

SEQ ID NO: 2037393 - RNA, 19 nt, Artificial Sequence
  Description of Artificial Sequence: Synthetic oligonucleotide
  Antisense strand to SEQ ID NO: 2037392
uaacaagucacuggauuca

SEQ ID NO: 2037394 - RNA, 19 nt, Artificial Sequence
  Description of Artificial Sequence: Synthetic oligonucleotide
  Sense strand starting at position 2415 of SEQ ID NO: 1881346
auaaucuucuaguuaguga

SEQ ID NO: 2037395 - RNA, 19 nt, Artificial Sequence
  Description of Artificial Sequence: Synthetic oligonucleotide
  Antisense strand to SEQ ID NO: 2037394
ucacuaacuagaagauuau

SEQ ID NO: 2037396 - RNA, 19 nt, Artificial Sequence
  Description of Artificial Sequence: Synthetic oligonucleotide
  Sense strand starting at position 2418 of SEQ ID NO: 1881346
aucuucuaguuagugaaga

SEQ ID NO: 2037397 - RNA, 19 nt, Artificial Sequence
  Description of Artificial Sequence: Synthetic oligonucleotide
  Antisense strand to SEQ ID NO: 2037396
ucuucacuaacuagaagau

SEQ ID NO: 2037398 - RNA, 19 nt, Artificial Sequence
  Description of Artificial Sequence: Synthetic oligonucleotide
  Sense strand starting at position 2441 of SEQ ID NO: 1881346
cucaauugauaggcuuagu

SEQ ID NO: 2037399 - RNA, 19 nt, Artificial Sequence
  Description of Artificial Sequence: Synthetic oligonucleotide
  Antisense strand to SEQ ID NO: 2037398
acuaagccuaucaauugag

SEQ ID NO: 2037400 - RNA, 19 nt, Artificial Sequence
  Description of Artificial Sequence: Synthetic oligonucleotide
  Sense strand starting at position 2444 of SEQ ID NO: 1881346
aauugauaggcuuaguauu

SEQ ID NO: 2037401 - RNA, 19 nt, Artificial Sequence
  Description of Artificial Sequence: Synthetic oligonucleotide
  Antisense strand to SEQ ID NO: 2037400
aauacuaagccuaucaauu

SEQ ID NO: 2037402 - RNA, 19 nt, Artificial Sequence
  Description of Artificial Sequence: Synthetic oligonucleotide
  Sense strand starting at position 2675 of SEQ ID NO: 1881346
ugugaaguauagguguuau

SEQ ID NO: 2037403 - RNA, 19 nt, Artificial Sequence
  Description of Artificial Sequence: Synthetic oligonucleotide
  Antisense strand to SEQ ID NO: 2037402
auaacaccuauacuucaca

SEQ ID NO: 2037404 - RNA, 19 nt, Artificial Sequence
  Description of Artificial Sequence: Synthetic oligonucleotide
  Sense strand starting at position 2703 of SEQ ID NO: 1881346
uuuguuuguaaggagauua

SEQ ID NO: 2037405 - RNA, 19 nt, Artificial Sequence
  Description of Artificial Sequence: Synthetic oligonucleotide
  Antisense strand to SEQ ID NO: 2037404
uaaucuccuuacaaacaaa

SEQ ID NO: 2037406 - RNA, 19 nt, Artificial Sequence
  Description of Artificial Sequence: Synthetic oligonucleotide
  Sense strand starting at position 3151 of SEQ ID NO: 1881346
ugucaaaguguugauaauu

SEQ ID NO: 2037407 - RNA, 19 nt, Artificial Sequence
  Description of Artificial Sequence: Synthetic oligonucleotide
  Antisense strand to SEQ ID NO: 2037406
aauuaucaacacuuugaca

SEQ ID NO: 2037408 - RNA, 19 nt, Artificial Sequence
  Description of Artificial Sequence: Synthetic oligonucleotide
  Sense strand starting at position 3203 of SEQ ID NO: 1881346
guuauugccaucuuugugu

SEQ ID NO: 2037409 - RNA, 19 nt, Artificial Sequence
  Description of Artificial Sequence: Synthetic oligonucleotide
  Antisense strand to SEQ ID NO: 2037408
acacaaagauggcaauaac

SEQ ID NO: 2037410 - RNA, 19 nt, Artificial Sequence
  Description of Artificial Sequence: Synthetic oligonucleotide
  Sense strand starting at position 3560 of SEQ ID NO: 1881346
gugagccuguauccauaaa

SEQ ID NO: 2037411 - RNA, 19 nt, Artificial Sequence
  Description of Artificial Sequence: Synthetic oligonucleotide
  Antisense strand to SEQ ID NO: 2037410
uuuauggauacaggcucac

SEQ ID NO: 2037412 - RNA, 19 nt, Artificial Sequence
  Description of Artificial Sequence: Synthetic oligonucleotide
  Sense strand starting at position 3645 of SEQ ID NO: 1881346
agaguuuaaucccuagacg

SEQ ID NO: 2037413 - RNA, 19 nt, Artificial Sequence
  Description of Artificial Sequence: Synthetic oligonucleotide
  Antisense strand to SEQ ID NO: 2037412
cgucuagggauuaaacucu

SEQ ID NO: 2037414 - RNA, 19 nt, Artificial Sequence
  Description of Artificial Sequence: Synthetic oligonucleotide
  Sense strand starting at position 3646 of SEQ ID NO: 1881346
gaguuuaaucccuagacgu

SEQ ID NO: 2037415 - RNA, 19 nt, Artificial Sequence
  Description of Artificial Sequence: Synthetic oligonucleotide
  Antisense strand to SEQ ID NO: 2037414
acgucuagggauuaaacuc

SEQ ID NO: 2037416 - RNA, 19 nt, Artificial Sequence
  Description of Artificial Sequence: Synthetic oligonucleotide
  Sense strand starting at position 3648 of SEQ ID NO: 1881346
guuuaaucccuagacgucu

SEQ ID NO: 2037417 - RNA, 19 nt, Artificial Sequence
  Description of Artificial Sequence: Synthetic oligonucleotide
  Antisense strand to SEQ ID NO: 2037416
agacgucuagggauuaaac

SEQ ID NO: 2037418 - RNA, 19 nt, Artificial Sequence
  Description of Artificial Sequence: Synthetic oligonucleotide
  Sense strand starting at position 3707 of SEQ ID NO: 1881346
gagucagaaucugcaucuu

SEQ ID NO: 2037419 - RNA, 19 nt, Artificial Sequence
  Description of Artificial Sequence: Synthetic oligonucleotide
  Antisense strand to SEQ ID NO: 2037418
aagaugcagauucugacuc

SEQ ID NO: 2037420 - RNA, 19 nt, Artificial Sequence
  Description of Artificial Sequence: Synthetic oligonucleotide
  Sense strand starting at position 2110 of SEQ ID NO: 1881347
auuggccagucuuguaauu

SEQ ID NO: 2037421 - RNA, 19 nt, Artificial Sequence
  Description of Artificial Sequence: Synthetic oligonucleotide
  Antisense strand to SEQ ID NO: 2037420
aauuacaagacuggccaau

SEQ ID NO: 2037422 - RNA, 19 nt, Artificial Sequence
  Description of Artificial Sequence: Synthetic oligonucleotide
  Sense strand starting at position 2112 of SEQ ID NO: 1881347
uggccagucuuguaauuug

SEQ ID NO: 2037423 - RNA, 19 nt, Artificial Sequence
  Description of Artificial Sequence: Synthetic oligonucleotide
  Antisense strand to SEQ ID NO: 2037422
caaauuacaagacuggcca

SEQ ID NO: 2037424 - RNA, 19 nt, Artificial Sequence
  Description of Artificial Sequence: Synthetic oligonucleotide
  Sense strand starting at position 2119 of SEQ ID NO: 1881347
ucuuguaauuugggucuca

SEQ ID NO: 2037425 - RNA, 19 nt, Artificial Sequence
  Description of Artificial Sequence: Synthetic oligonucleotide
  Antisense strand to SEQ ID NO: 2037424
ugagacccaaauuacaaga

SEQ ID NO: 2037426 - RNA, 19 nt, Artificial Sequence
  Description of Artificial Sequence: Synthetic oligonucleotide
  Sense strand starting at position 2163 of SEQ ID NO: 1881347
gaauuugacuagugaccuu

SEQ ID NO: 2037427 - RNA, 19 nt, Artificial Sequence
  Description of Artificial Sequence: Synthetic oligonucleotide
  Antisense strand to SEQ ID NO: 2037426
aaggucacuagucaaauuc

SEQ ID NO: 2037428 - RNA, 19 nt, Artificial Sequence
  Description of Artificial Sequence: Synthetic oligonucleotide
  Sense strand starting at position 2238 of SEQ ID NO: 1881347
cacugagacuugcuugacu

SEQ ID NO: 2037429 - RNA, 19 nt, Artificial Sequence
  Description of Artificial Sequence: Synthetic oligonucleotide
  Antisense strand to SEQ ID NO: 2037428
agucaagcaagucucagug

SEQ ID NO: 2037430 - RNA, 19 nt, Artificial Sequence
  Description of Artificial Sequence: Synthetic oligonucleotide
  Sense strand starting at position 2240 of SEQ ID NO: 1881347
cugagacuugcuugacuua

SEQ ID NO: 2037431 - RNA, 19 nt, Artificial Sequence
  Description of Artificial Sequence: Synthetic oligonucleotide
  Antisense strand to SEQ ID NO: 2037430
uaagucaagcaagucucag

SEQ ID NO: 2037432 - RNA, 19 nt, Artificial Sequence
  Description of Artificial Sequence: Synthetic oligonucleotide
  Sense strand starting at position 2382 of SEQ ID NO: 1881347
acuagaaauuucuagguac

SEQ ID NO: 2037433 - RNA, 19 nt, Artificial Sequence
  Description of Artificial Sequence: Synthetic oligonucleotide
  Antisense strand to SEQ ID NO: 2037432
guaccuagaaauuucuagu

SEQ ID NO: 2037434 - RNA, 19 nt, Artificial Sequence
  Description of Artificial Sequence: Synthetic oligonucleotide
  Sense strand starting at position 2395 of SEQ ID NO: 1881347
agguacuucucgcagagaa

SEQ ID NO: 2037435 - RNA, 19 nt, Artificial Sequence
  Description of Artificial Sequence: Synthetic oligonucleotide
  Antisense strand to SEQ ID NO: 2037434
uucucugcgagaaguaccu

SEQ ID NO: 2037436 - RNA, 19 nt, Artificial Sequence
  Description of Artificial Sequence: Synthetic oligonucleotide
  Sense strand starting at position 2397 of SEQ ID NO: 1881347
guacuucucgcagagaaug

SEQ ID NO: 2037437 - RNA, 19 nt, Artificial Sequence
  Description of Artificial Sequence: Synthetic oligonucleotide
  Antisense strand to SEQ ID NO: 2037436
cauucucugcgagaaguac

SEQ ID NO: 2037438 - RNA, 19 nt, Artificial Sequence
  Description of Artificial Sequence: Synthetic oligonucleotide
  Sense strand starting at position 2491 of SEQ ID NO: 1881347
ucaguagcacuagaguauu

SEQ ID NO: 2037439 - RNA, 19 nt, Artificial Sequence
  Description of Artificial Sequence: Synthetic oligonucleotide
  Antisense strand to SEQ ID NO: 2037438
aauacucuagugcuacuga

SEQ ID NO: 2037440 - RNA, 19 nt, Artificial Sequence
  Description of Artificial Sequence: Synthetic oligonucleotide
  Sense strand starting at position 2497 of SEQ ID NO: 1881347
gcacuagaguauuccuuau

SEQ ID NO: 2037441 - RNA, 19 nt, Artificial Sequence
  Description of Artificial Sequence: Synthetic oligonucleotide
  Antisense strand to SEQ ID NO: 2037440
auaaggaauacucuagugc

SEQ ID NO: 2037442 - RNA, 19 nt, Artificial Sequence
  Description of Artificial Sequence: Synthetic oligonucleotide
  Sense strand starting at position 2503 of SEQ ID NO: 1881347
gaguauuccuuaugggcau

SEQ ID NO: 2037443 - RNA, 19 nt, Artificial Sequence
  Description of Artificial Sequence: Synthetic oligonucleotide
  Antisense strand to SEQ ID NO: 2037442
augcccauaaggaauacuc

SEQ ID NO: 2037444 - RNA, 19 nt, Artificial Sequence
  Description of Artificial Sequence: Synthetic oligonucleotide
  Sense strand starting at position 2577 of SEQ ID NO: 1881347
gcuugucuccuacaccaga

SEQ ID NO: 2037445 - RNA, 19 nt, Artificial Sequence
  Description of Artificial Sequence: Synthetic oligonucleotide
  Antisense strand to SEQ ID NO: 2037444
ucugguguaggagacaagc

SEQ ID NO: 2037446 - RNA, 19 nt, Artificial Sequence
  Description of Artificial Sequence: Synthetic oligonucleotide
  Sense strand starting at position 2726 of SEQ ID NO: 1881347
auuauacucuucugggaau

SEQ ID NO: 2037447 - RNA, 19 nt, Artificial Sequence
  Description of Artificial Sequence: Synthetic oligonucleotide
  Antisense strand to SEQ ID NO: 2037446
auucccagaagaguauaau

SEQ ID NO: 2037448 - RNA, 19 nt, Artificial Sequence
  Description of Artificial Sequence: Synthetic oligonucleotide
  Sense strand starting at position 2727 of SEQ ID NO: 1881347
uuauacucuucugggaauu

SEQ ID NO: 2037449 - RNA, 19 nt, Artificial Sequence
  Description of Artificial Sequence: Synthetic oligonucleotide
  Antisense strand to SEQ ID NO: 2037448
aauucccagaagaguauaa

SEQ ID NO: 2037450 - RNA, 19 nt, Artificial Sequence
  Description of Artificial Sequence: Synthetic oligonucleotide
  Sense strand starting at position 2729 of SEQ ID NO: 1881347
auacucuucugggaauucu

SEQ ID NO: 2037451 - RNA, 19 nt, Artificial Sequence
  Description of Artificial Sequence: Synthetic oligonucleotide
  Antisense strand to SEQ ID NO: 2037450
agaauucccagaagaguau

SEQ ID NO: 2037452 - RNA, 19 nt, Artificial Sequence
  Description of Artificial Sequence: Synthetic oligonucleotide
  Sense strand starting at position 2784 of SEQ ID NO: 1881347
uuucuuguaucuccuguua

SEQ ID NO: 2037453 - RNA, 19 nt, Artificial Sequence
  Description of Artificial Sequence: Synthetic oligonucleotide
  Antisense strand to SEQ ID NO: 2037452
uaacaggagauacaagaaa

SEQ ID NO: 2037454 - RNA, 19 nt, Artificial Sequence
  Description of Artificial Sequence: Synthetic oligonucleotide
  Sense strand starting at position 2786 of SEQ ID NO: 1881347
ucuuguaucuccuguuagu

SEQ ID NO: 2037455 - RNA, 19 nt, Artificial Sequence
  Description of Artificial Sequence: Synthetic oligonucleotide
  Antisense strand to SEQ ID NO: 2037454
acuaacaggagauacaaga

SEQ ID NO: 2037456 - RNA, 19 nt, Artificial Sequence
  Description of Artificial Sequence: Synthetic oligonucleotide
  Sense strand starting at position 2789 of SEQ ID NO: 1881347
uguaucuccuguuagucua

SEQ ID NO: 2037457 - RNA, 19 nt, Artificial Sequence
  Description of Artificial Sequence: Synthetic oligonucleotide
  Antisense strand to SEQ ID NO: 2037456
uagacuaacaggagauaca

SEQ ID NO: 2037458 - RNA, 19 nt, Artificial Sequence
  Description of Artificial Sequence: Synthetic oligonucleotide
  Sense strand starting at position 2796 of SEQ ID NO: 1881347
ccuguuagucuauguauuu

SEQ ID NO: 2037459 - RNA, 19 nt, Artificial Sequence
  Description of Artificial Sequence: Synthetic oligonucleotide
  Antisense strand to SEQ ID NO: 2037458
aaauacauagacuaacagg

SEQ ID NO: 2037460 - RNA, 19 nt, Artificial Sequence
  Description of Artificial Sequence: Synthetic oligonucleotide
  Sense strand starting at position 2878 of SEQ ID NO: 1881347
ucacgugacucuugacuuu

SEQ ID NO: 2037461 - RNA, 19 nt, Artificial Sequence
  Description of Artificial Sequence: Synthetic oligonucleotide
  Antisense strand to SEQ ID NO: 2037460
aaagucaagagucacguga

SEQ ID NO: 2037462 - RNA, 19 nt, Artificial Sequence
  Description of Artificial Sequence: Synthetic oligonucleotide
  Sense strand starting at position 2910 of SEQ ID NO: 1881347
cuuacuauaccacguugau

SEQ ID NO: 2037463 - RNA, 19 nt, Artificial Sequence
  Description of Artificial Sequence: Synthetic oligonucleotide
  Antisense strand to SEQ ID NO: 2037462
aucaacgugguauaguaag

SEQ ID NO: 2037464 - RNA, 19 nt, Artificial Sequence
  Description of Artificial Sequence: Synthetic oligonucleotide
  Sense strand starting at position 2919 of SEQ ID NO: 1881347
ccacguugauuccagaucu

SEQ ID NO: 2037465 - RNA, 19 nt, Artificial Sequence
  Description of Artificial Sequence: Synthetic oligonucleotide
  Antisense strand to SEQ ID NO: 2037464
agaucuggaaucaacgugg

SEQ ID NO: 2037466 - RNA, 19 nt, Artificial Sequence
  Description of Artificial Sequence: Synthetic oligonucleotide
  Sense strand starting at position 2946 of SEQ ID NO: 1881347
ugggcaauuuaauguguca

SEQ ID NO: 2037467 - RNA, 19 nt, Artificial Sequence
  Description of Artificial Sequence: Synthetic oligonucleotide
  Antisense strand to SEQ ID NO: 2037466
ugacacauuaaauugccca

SEQ ID NO: 2037468 - RNA, 19 nt, Artificial Sequence
  Description of Artificial Sequence: Synthetic oligonucleotide
  Sense strand starting at position 2995 of SEQ ID NO: 1881347
cuguccaugugcugaauua

SEQ ID NO: 2037469 - RNA, 19 nt, Artificial Sequence
  Description of Artificial Sequence: Synthetic oligonucleotide
  Antisense strand to SEQ ID NO: 2037468
uaauucagcacauggacag

SEQ ID NO: 2037470 - RNA, 19 nt, Artificial Sequence
  Description of Artificial Sequence: Synthetic oligonucleotide
  Sense strand starting at position 2996 of SEQ ID NO: 1881347
uguccaugugcugaauuag

SEQ ID NO: 2037471 - RNA, 19 nt, Artificial Sequence
  Description of Artificial Sequence: Synthetic oligonucleotide
  Antisense strand to SEQ ID NO: 2037470
cuaauucagcacauggaca

SEQ ID NO: 2037472 - RNA, 19 nt, Artificial Sequence
  Description of Artificial Sequence: Synthetic oligonucleotide
  Sense strand starting at position 3002 of SEQ ID NO: 1881347
ugugcugaauuagaaacuu

SEQ ID NO: 2037473 - RNA, 19 nt, Artificial Sequence
  Description of Artificial Sequence: Synthetic oligonucleotide
  Antisense strand to SEQ ID NO: 2037472
aaguuucuaauucagcaca

SEQ ID NO: 2037474 - RNA, 19 nt, Artificial Sequence
  Description of Artificial Sequence: Synthetic oligonucleotide
  Sense strand starting at position 3044 of SEQ ID NO: 1881347
acuggucugucuguuauuu

SEQ ID NO: 2037475 - RNA, 19 nt, Artificial Sequence
  Description of Artificial Sequence: Synthetic oligonucleotide
  Antisense strand to SEQ ID NO: 2037474
aaauaacagacagaccagu

SEQ ID NO: 2037476 - RNA, 19 nt, Artificial Sequence
  Description of Artificial Sequence: Synthetic oligonucleotide
  Sense strand starting at position 3046 of SEQ ID NO: 1881347
uggucugucuguuauuuag

SEQ ID NO: 2037477 - RNA, 19 nt, Artificial Sequence
  Description of Artificial Sequence: Synthetic oligonucleotide
  Antisense strand to SEQ ID NO: 2037476
cuaaauaacagacagacca

SEQ ID NO: 2037478 - RNA, 19 nt, Artificial Sequence
  Description of Artificial Sequence: Synthetic oligonucleotide
  Sense strand starting at position 3048 of SEQ ID NO: 1881347
gucugucuguuauuuagaa

SEQ ID NO: 2037479 - RNA, 19 nt, Artificial Sequence
  Description of Artificial Sequence: Synthetic oligonucleotide
  Antisense strand to SEQ ID NO: 2037478
uucuaaauaacagacagac

SEQ ID NO: 2037480 - RNA, 19 nt, Artificial Sequence
  Description of Artificial Sequence: Synthetic oligonucleotide
  Sense strand starting at position 3144 of SEQ ID NO: 1881347
gacugugggugccauuaga

SEQ ID NO: 2037481 - RNA, 19 nt, Artificial Sequence
  Description of Artificial Sequence: Synthetic oligonucleotide
  Antisense strand to SEQ ID NO: 2037480
ucuaauggcacccacaguc

SEQ ID NO: 2037482 - RNA, 19 nt, Artificial Sequence
  Description of Artificial Sequence: Synthetic oligonucleotide
  Sense strand starting at position 3199 of SEQ ID NO: 1881347
gcuugugaacccugggcaa

SEQ ID NO: 2037483 - RNA, 19 nt, Artificial Sequence
  Description of Artificial Sequence: Synthetic oligonucleotide
  Antisense strand to SEQ ID NO: 2037482
uugcccaggguucacaagc

SEQ ID NO: 2037484 - RNA, 19 nt, Artificial Sequence
  Description of Artificial Sequence: Synthetic oligonucleotide
  Sense strand starting at position 3244 of SEQ ID NO: 1881347
ccucaauuguaagaaguac

SEQ ID NO: 2037485 - RNA, 19 nt, Artificial Sequence
  Description of Artificial Sequence: Synthetic oligonucleotide
  Antisense strand to SEQ ID NO: 2037484
guacuucuuacaauugagg

SEQ ID NO: 2037486 - RNA, 19 nt, Artificial Sequence
  Description of Artificial Sequence: Synthetic oligonucleotide
  Sense strand starting at position 8 of SEQ ID NO: 1881348
guuggaauaugagcuccaa

SEQ ID NO: 2037487 - RNA, 19 nt, Artificial Sequence
  Description of Artificial Sequence: Synthetic oligonucleotide
  Antisense strand to SEQ ID NO: 2037486
uuggagcucauauuccaac

SEQ ID NO: 2037488 - RNA, 19 nt, Artificial Sequence
  Description of Artificial Sequence: Synthetic oligonucleotide
  Sense strand starting at position 187 of SEQ ID NO: 1881348
acaggaauguuagcugaca

SEQ ID NO: 2037489 - RNA, 19 nt, Artificial Sequence
  Description of Artificial Sequence: Synthetic oligonucleotide
  Antisense strand to SEQ ID NO: 2037488
ugucagcuaacauuccugu

SEQ ID NO: 2037490 - RNA, 19 nt, Artificial Sequence
  Description of Artificial Sequence: Synthetic oligonucleotide
  Sense strand starting at position 188 of SEQ ID NO: 1881348
caggaauguuagcugacaa

SEQ ID NO: 2037491 - RNA, 19 nt, Artificial Sequence
  Description of Artificial Sequence: Synthetic oligonucleotide
  Antisense strand to SEQ ID NO: 2037490
uugucagcuaacauuccug

SEQ ID NO: 2037492 - RNA, 19 nt, Artificial Sequence
  Description of Artificial Sequence: Synthetic oligonucleotide
  Sense strand starting at position 189 of SEQ ID NO: 1881348
aggaauguuagcugacaaa

SEQ ID NO: 2037493 - RNA, 19 nt, Artificial Sequence
  Description of Artificial Sequence: Synthetic oligonucleotide
  Antisense strand to SEQ ID NO: 2037492
uuugucagcuaacauuccu

SEQ ID NO: 2037494 - RNA, 19 nt, Artificial Sequence
  Description of Artificial Sequence: Synthetic oligonucleotide
  Sense strand starting at position 638 of SEQ ID NO: 1881348
cuacaagucuggcuaagac

SEQ ID NO: 2037495 - RNA, 19 nt, Artificial Sequence
  Description of Artificial Sequence: Synthetic oligonucleotide
  Antisense strand to SEQ ID NO: 2037494
gucuuagccagacuuguag

SEQ ID NO: 2037496 - RNA, 19 nt, Artificial Sequence
  Description of Artificial Sequence: Synthetic oligonucleotide
  Sense strand starting at position 810 of SEQ ID NO: 1881348
uucgauaauuaagugacua

SEQ ID NO: 2037497 - RNA, 19 nt, Artificial Sequence
  Description of Artificial Sequence: Synthetic oligonucleotide
  Antisense strand to SEQ ID NO: 2037496
uagucacuuaauuaucgaa

SEQ ID NO: 2037498 - RNA, 19 nt, Artificial Sequence
  Description of Artificial Sequence: Synthetic oligonucleotide
  Sense strand starting at position 947 of SEQ ID NO: 1881348
ucuaguauccucuaccaga

SEQ ID NO: 2037499 - RNA, 19 nt, Artificial Sequence
  Description of Artificial Sequence: Synthetic oligonucleotide
  Antisense strand to SEQ ID NO: 2037498
ucugguagaggauacuaga

SEQ ID NO: 2037500 - RNA, 19 nt, Artificial Sequence
  Description of Artificial Sequence: Synthetic oligonucleotide
  Sense strand starting at position 1116 of SEQ ID NO: 1881348
cuaggcuuggagcagaaau

SEQ ID NO: 2037501 - RNA, 19 nt, Artificial Sequence
  Description of Artificial Sequence: Synthetic oligonucleotide
  Antisense strand to SEQ ID NO: 2037500
auuucugcuccaagccuag

SEQ ID NO: 2037502 - RNA, 19 nt, Artificial Sequence
  Description of Artificial Sequence: Synthetic oligonucleotide
  Sense strand starting at position 1141 of SEQ ID NO: 1881348
uuauguauugaaugaacag

SEQ ID NO: 2037503 - RNA, 19 nt, Artificial Sequence
  Description of Artificial Sequence: Synthetic oligonucleotide
  Antisense strand to SEQ ID NO: 2037502
cuguucauucaauacauaa

SEQ ID NO: 2037504 - RNA, 19 nt, Artificial Sequence
  Description of Artificial Sequence: Synthetic oligonucleotide
  Sense strand starting at position 1283 of SEQ ID NO: 1881348
uucccaagaucucuagagu

SEQ ID NO: 2037505 - RNA, 19 nt, Artificial Sequence
  Description of Artificial Sequence: Synthetic oligonucleotide
  Antisense strand to SEQ ID NO: 2037504
acucuagagaucuugggaa

SEQ ID NO: 2037506 - RNA, 19 nt, Artificial Sequence
  Description of Artificial Sequence: Synthetic oligonucleotide
  Sense strand starting at position 1286 of SEQ ID NO: 1881348
ccaagaucucuagaguagu

SEQ ID NO: 2037507 - RNA, 19 nt, Artificial Sequence
  Description of Artificial Sequence: Synthetic oligonucleotide
  Antisense strand to SEQ ID NO: 2037506
acuacucuagagaucuugg

SEQ ID NO: 2037508 - RNA, 19 nt, Artificial Sequence
  Description of Artificial Sequence: Synthetic oligonucleotide
  Sense strand starting at position 1327 of SEQ ID NO: 1881348
guuaacaguguauaauaga

SEQ ID NO: 2037509 - RNA, 19 nt, Artificial Sequence
  Description of Artificial Sequence: Synthetic oligonucleotide
  Antisense strand to SEQ ID NO: 2037508
ucuauuauacacuguuaac

SEQ ID NO: 2037510 - RNA, 19 nt, Artificial Sequence
  Description of Artificial Sequence: Synthetic oligonucleotide
  Sense strand starting at position 2078 of SEQ ID NO: 1881348
ucgggauccuaaucggaua

SEQ ID NO: 2037511 - RNA, 19 nt, Artificial Sequence
  Description of Artificial Sequence: Synthetic oligonucleotide
  Antisense strand to SEQ ID NO: 2037510
uauccgauuaggaucccga

SEQ ID NO: 2037512 - RNA, 19 nt, Artificial Sequence
  Description of Artificial Sequence: Synthetic oligonucleotide
  Sense strand starting at position 2079 of SEQ ID NO: 1881348
cgggauccuaaucggauau

SEQ ID NO: 2037513 - RNA, 19 nt, Artificial Sequence
  Description of Artificial Sequence: Synthetic oligonucleotide
  Antisense strand to SEQ ID NO: 2037512
auauccgauuaggaucccg

SEQ ID NO: 2037514 - RNA, 19 nt, Artificial Sequence
  Description of Artificial Sequence: Synthetic oligonucleotide
  Sense strand starting at position 2080 of SEQ ID NO: 1881348
gggauccuaaucggauauu

SEQ ID NO: 2037515 - RNA, 19 nt, Artificial Sequence
  Description of Artificial Sequence: Synthetic oligonucleotide
  Antisense strand to SEQ ID NO: 2037514
aauauccgauuaggauccc

SEQ ID NO: 2037516 - RNA, 19 nt, Artificial Sequence
  Description of Artificial Sequence: Synthetic oligonucleotide
  Sense strand starting at position 2208 of SEQ ID NO: 1881348
guuuccugaccggaguuaa

SEQ ID NO: 2037517 - RNA, 19 nt, Artificial Sequence
  Description of Artificial Sequence: Synthetic oligonucleotide
  Antisense strand to SEQ ID NO: 2037516
uuaacuccggucaggaaac

SEQ ID NO: 2037518 - RNA, 19 nt, Artificial Sequence
  Description of Artificial Sequence: Synthetic oligonucleotide
  Sense strand starting at position 2285 of SEQ ID NO: 1881348
ucaguuauuuaccugcuca

SEQ ID NO: 2037519 - RNA, 19 nt, Artificial Sequence
  Description of Artificial Sequence: Synthetic oligonucleotide
  Antisense strand to SEQ ID NO: 2037518
ugagcagguaaauaacuga

SEQ ID NO: 2037520 - RNA, 19 nt, Artificial Sequence
  Description of Artificial Sequence: Synthetic oligonucleotide
  Sense strand starting at position 2289 of SEQ ID NO: 1881348
uuauuuaccugcucauguu

SEQ ID NO: 2037521 - RNA, 19 nt, Artificial Sequence
  Description of Artificial Sequence: Synthetic oligonucleotide
  Antisense strand to SEQ ID NO: 2037520
aacaugagcagguaaauaa

SEQ ID NO: 2037522 - RNA, 19 nt, Artificial Sequence
  Description of Artificial Sequence: Synthetic oligonucleotide
  Sense strand starting at position 2324 of SEQ ID NO: 1881348
auguguacaccucaaagca

SEQ ID NO: 2037523 - RNA, 19 nt, Artificial Sequence
  Description of Artificial Sequence: Synthetic oligonucleotide
  Antisense strand to SEQ ID NO: 2037522
ugcuuugagguguacacau

SEQ ID NO: 2037524 - RNA, 19 nt, Artificial Sequence
  Description of Artificial Sequence: Synthetic oligonucleotide
  Sense strand starting at position 2362 of SEQ ID NO: 1881348
uaacauuucuuggagugga

SEQ ID NO: 2037525 - RNA, 19 nt, Artificial Sequence
  Description of Artificial Sequence: Synthetic oligonucleotide
  Antisense strand to SEQ ID NO: 2037524
uccacuccaagaaauguua

SEQ ID NO: 2037526 - RNA, 19 nt, Artificial Sequence
  Description of Artificial Sequence: Synthetic oligonucleotide
  Sense strand starting at position 2377 of SEQ ID NO: 1881348
uggaccugucuuuauuaaa

SEQ ID NO: 2037527 - RNA, 19 nt, Artificial Sequence
  Description of Artificial Sequence: Synthetic oligonucleotide
  Antisense strand to SEQ ID NO: 2037526
uuuaauaaagacaggucca

SEQ ID NO: 2037528 - RNA, 19 nt, Artificial Sequence
  Description of Artificial Sequence: Synthetic oligonucleotide
  Sense strand starting at position 2502 of SEQ ID NO: 1881348
cuaugaugucagcaacacu

SEQ ID NO: 2037529 - RNA, 19 nt, Artificial Sequence
  Description of Artificial Sequence: Synthetic oligonucleotide
  Antisense strand to SEQ ID NO: 2037528
aguguugcugacaucauag

SEQ ID NO: 2037530 - RNA, 19 nt, Artificial Sequence
  Description of Artificial Sequence: Synthetic oligonucleotide
  Sense strand starting at position 2566 of SEQ ID NO: 1881348
gacucaauguggcuacaga

SEQ ID NO: 2037531 - RNA, 19 nt, Artificial Sequence
  Description of Artificial Sequence: Synthetic oligonucleotide
  Antisense strand to SEQ ID NO: 2037530
ucuguagccacauugaguc

SEQ ID NO: 2037532 - RNA, 19 nt, Artificial Sequence
  Description of Artificial Sequence: Synthetic oligonucleotide
  Sense strand starting at position 2757 of SEQ ID NO: 1881348
uagaaaugauacgcagaau

SEQ ID NO: 2037533 - RNA, 19 nt, Artificial Sequence
  Description of Artificial Sequence: Synthetic oligonucleotide
  Antisense strand to SEQ ID NO: 2037532
auucugcguaucauuucua

SEQ ID NO: 2037534 - RNA, 19 nt, Artificial Sequence
  Description of Artificial Sequence: Synthetic oligonucleotide
  Sense strand starting at position 2780 of SEQ ID NO: 1881348
uuagguguuagauggaauu

SEQ ID NO: 2037535 - RNA, 19 nt, Artificial Sequence
  Description of Artificial Sequence: Synthetic oligonucleotide
  Antisense strand to SEQ ID NO: 2037534
aauuccaucuaacaccuaa

SEQ ID NO: 2037536 - RNA, 19 nt, Artificial Sequence
  Description of Artificial Sequence: Synthetic oligonucleotide
  Sense strand starting at position 2856 of SEQ ID NO: 1881348
cuguaaaguggcgauaaug

SEQ ID NO: 2037537 - RNA, 19 nt, Artificial Sequence
  Description of Artificial Sequence: Synthetic oligonucleotide
  Antisense strand to SEQ ID NO: 2037536
cauuaucgccacuuuacag

SEQ ID NO: 2037538 - RNA, 19 nt, Artificial Sequence
  Description of Artificial Sequence: Synthetic oligonucleotide
  Sense strand starting at position 2867 of SEQ ID NO: 1881348
cgauaaugauagucacuuu

SEQ ID NO: 2037539 - RNA, 19 nt, Artificial Sequence
  Description of Artificial Sequence: Synthetic oligonucleotide
  Antisense strand to SEQ ID NO: 2037538
aaagugacuaucauuaucg

SEQ ID NO: 2037540 - RNA, 19 nt, Artificial Sequence
  Description of Artificial Sequence: Synthetic oligonucleotide
  Sense strand starting at position 2945 of SEQ ID NO: 1881348
uaguuccuggcucauagaa

SEQ ID NO: 2037541 - RNA, 19 nt, Artificial Sequence
  Description of Artificial Sequence: Synthetic oligonucleotide
  Antisense strand to SEQ ID NO: 2037540
uucuaugagccaggaacua

SEQ ID NO: 2037542 - RNA, 19 nt, Artificial Sequence
  Description of Artificial Sequence: Synthetic oligonucleotide
  Sense strand starting at position 2968 of SEQ ID NO: 1881348
cucucuaaaggugauggua

SEQ ID NO: 2037543 - RNA, 19 nt, Artificial Sequence
  Description of Artificial Sequence: Synthetic oligonucleotide
  Antisense strand to SEQ ID NO: 2037542
uaccaucaccuuuagagag

SEQ ID NO: 2037544 - RNA, 19 nt, Artificial Sequence
  Description of Artificial Sequence: Synthetic oligonucleotide
  Sense strand starting at position 2987 of SEQ ID NO: 1881348
auguuauuucccugcuuac

SEQ ID NO: 2037545 - RNA, 19 nt, Artificial Sequence
  Description of Artificial Sequence: Synthetic oligonucleotide
  Antisense strand to SEQ ID NO: 2037544
guaagcagggaaauaacau

SEQ ID NO: 2037546 - RNA, 19 nt, Artificial Sequence
  Description of Artificial Sequence: Synthetic oligonucleotide
  Sense strand starting at position 3219 of SEQ ID NO: 1881348
ugucaaugccagcagaaga

SEQ ID NO: 2037547 - RNA, 19 nt, Artificial Sequence
  Description of Artificial Sequence: Synthetic oligonucleotide
  Antisense strand to SEQ ID NO: 2037546
ucuucugcuggcauugaca

SEQ ID NO: 2037548 - RNA, 19 nt, Artificial Sequence
  Description of Artificial Sequence: Synthetic oligonucleotide
  Sense strand starting at position 3381 of SEQ ID NO: 1881348
caacauaaucaugguggua

SEQ ID NO: 2037549 - RNA, 19 nt, Artificial Sequence
  Description of Artificial Sequence: Synthetic oligonucleotide
  Antisense strand to SEQ ID NO: 2037548
uaccaccaugauuauguug

SEQ ID NO: 2037550 - RNA, 19 nt, Artificial Sequence
  Description of Artificial Sequence: Synthetic oligonucleotide
  Sense strand starting at position 3688 of SEQ ID NO: 1881348
gucuauuucugcguaacaa

SEQ ID NO: 2037551 - RNA, 19 nt, Artificial Sequence
  Description of Artificial Sequence: Synthetic oligonucleotide
  Antisense strand to SEQ ID NO: 2037550
uuguuacgcagaaauagac

SEQ ID NO: 2037552 - RNA, 19 nt, Artificial Sequence
  Description of Artificial Sequence: Synthetic oligonucleotide
  Sense strand starting at position 3786 of SEQ ID NO: 1881348
gagucauuuagcugggugu

SEQ ID NO: 2037553 - RNA, 19 nt, Artificial Sequence
  Description of Artificial Sequence: Synthetic oligonucleotide
  Antisense strand to SEQ ID NO: 2037552
acacccagcuaaaugacuc

SEQ ID NO: 2037554 - RNA, 19 nt, Artificial Sequence
  Description of Artificial Sequence: Synthetic oligonucleotide
  Sense strand starting at position 3787 of SEQ ID NO: 1881348
agucauuuagcuggguguu

SEQ ID NO: 2037555 - RNA, 19 nt, Artificial Sequence
  Description of Artificial Sequence: Synthetic oligonucleotide
  Antisense strand to SEQ ID NO: 2037554
aacacccagcuaaaugacu

SEQ ID NO: 2037556 - RNA, 19 nt, Artificial Sequence
  Description of Artificial Sequence: Synthetic oligonucleotide
  Sense strand starting at position 3789 of SEQ ID NO: 1881348
ucauuuagcuggguguuua

SEQ ID NO: 2037557 - RNA, 19 nt, Artificial Sequence
  Description of Artificial Sequence: Synthetic oligonucleotide
  Antisense strand to SEQ ID NO: 2037556
uaaacacccagcuaaauga

SEQ ID NO: 2037558 - RNA, 19 nt, Artificial Sequence
  Description of Artificial Sequence: Synthetic oligonucleotide
  Sense strand starting at position 3790 of SEQ ID NO: 1881348
cauuuagcuggguguuuaa

SEQ ID NO: 2037559 - RNA, 19 nt, Artificial Sequence
  Description of Artificial Sequence: Synthetic oligonucleotide
  Antisense strand to SEQ ID NO: 2037558
uuaaacacccagcuaaaug

SEQ ID NO: 2037560 - RNA, 19 nt, Artificial Sequence
  Description of Artificial Sequence: Synthetic oligonucleotide
  Sense strand starting at position 3803 of SEQ ID NO: 1881348
guuuaagacucagaaauuu

SEQ ID NO: 2037561 - RNA, 19 nt, Artificial Sequence
  Description of Artificial Sequence: Synthetic oligonucleotide
  Antisense strand to SEQ ID NO: 2037560
aaauuucugagucuuaaac

SEQ ID NO: 2037562 - RNA, 19 nt, Artificial Sequence
  Description of Artificial Sequence: Synthetic oligonucleotide
  Sense strand starting at position 3845 of SEQ ID NO: 1881348
uggccagggccauaucaua

SEQ ID NO: 2037563 - RNA, 19 nt, Artificial Sequence
  Description of Artificial Sequence: Synthetic oligonucleotide
  Antisense strand to SEQ ID NO: 2037562
uaugauauggcccuggcca

SEQ ID NO: 2037564 - RNA, 19 nt, Artificial Sequence
  Description of Artificial Sequence: Synthetic oligonucleotide
  Sense strand starting at position 3909 of SEQ ID NO: 1881348
ccauaacuggcagauuagu

SEQ ID NO: 2037565 - RNA, 19 nt, Artificial Sequence
  Description of Artificial Sequence: Synthetic oligonucleotide
  Antisense strand to SEQ ID NO: 2037564
acuaaucugccaguuaugg

SEQ ID NO: 2037566 - RNA, 19 nt, Artificial Sequence
  Description of Artificial Sequence: Synthetic oligonucleotide
  Sense strand starting at position 272 of SEQ ID NO: 1881349
aaaggauccugcuuaggca

SEQ ID NO: 2037567 - RNA, 19 nt, Artificial Sequence
  Description of Artificial Sequence: Synthetic oligonucleotide
  Antisense strand to SEQ ID NO: 2037566
ugccuaagcaggauccuuu

SEQ ID NO: 2037568 - RNA, 19 nt, Artificial Sequence
  Description of Artificial Sequence: Synthetic oligonucleotide
  Sense strand starting at position 393 of SEQ ID NO: 1881349
ggacaauuguccucuguua

SEQ ID NO: 2037569 - RNA, 19 nt, Artificial Sequence
  Description of Artificial Sequence: Synthetic oligonucleotide
  Antisense strand to SEQ ID NO: 2037568
uaacagaggacaauugucc

SEQ ID NO: 2037570 - RNA, 19 nt, Artificial Sequence
  Description of Artificial Sequence: Synthetic oligonucleotide
  Sense strand starting at position 395 of SEQ ID NO: 1881349
acaauuguccucuguuaau

SEQ ID NO: 2037571 - RNA, 19 nt, Artificial Sequence
  Description of Artificial Sequence: Synthetic oligonucleotide
  Antisense strand to SEQ ID NO: 2037570
auuaacagaggacaauugu

SEQ ID NO: 2037572 - RNA, 19 nt, Artificial Sequence
  Description of Artificial Sequence: Synthetic oligonucleotide
  Sense strand starting at position 747 of SEQ ID NO: 1881349
aaggguaagucugcagauc

SEQ ID NO: 2037573 - RNA, 19 nt, Artificial Sequence
  Description of Artificial Sequence: Synthetic oligonucleotide
  Antisense strand to SEQ ID NO: 2037572
gaucugcagacuuacccuu

SEQ ID NO: 2037574 - RNA, 19 nt, Artificial Sequence
  Description of Artificial Sequence: Synthetic oligonucleotide
  Sense strand starting at position 748 of SEQ ID NO: 1881349
aggguaagucugcagauca

SEQ ID NO: 2037575 - RNA, 19 nt, Artificial Sequence
  Description of Artificial Sequence: Synthetic oligonucleotide
  Antisense strand to SEQ ID NO: 2037574
ugaucugcagacuuacccu

SEQ ID NO: 2037576 - RNA, 19 nt, Artificial Sequence
  Description of Artificial Sequence: Synthetic oligonucleotide
  Sense strand starting at position 917 of SEQ ID NO: 1881349
gaugacagugcuggucaga

SEQ ID NO: 2037577 - RNA, 19 nt, Artificial Sequence
  Description of Artificial Sequence: Synthetic oligonucleotide
  Antisense strand to SEQ ID NO: 2037576
ucugaccagcacugucauc

SEQ ID NO: 2037578 - RNA, 19 nt, Artificial Sequence
  Description of Artificial Sequence: Synthetic oligonucleotide
  Sense strand starting at position 1204 of SEQ ID NO: 1881349
gcuugucagauguacauga

SEQ ID NO: 2037579 - RNA, 19 nt, Artificial Sequence
  Description of Artificial Sequence: Synthetic oligonucleotide
  Antisense strand to SEQ ID NO: 2037578
ucauguacaucugacaagc

SEQ ID NO: 2037580 - RNA, 19 nt, Artificial Sequence
  Description of Artificial Sequence: Synthetic oligonucleotide
  Sense strand starting at position 1271 of SEQ ID NO: 1881349
gccugucuccgagaucaau

SEQ ID NO: 2037581 - RNA, 19 nt, Artificial Sequence
  Description of Artificial Sequence: Synthetic oligonucleotide
  Antisense strand to SEQ ID NO: 2037580
auugaucucggagacaggc

SEQ ID NO: 2037582 - RNA, 19 nt, Artificial Sequence
  Description of Artificial Sequence: Synthetic oligonucleotide
  Sense strand starting at position 1289 of SEQ ID NO: 1881349
uaagauuguagaggucaug

SEQ ID NO: 2037583 - RNA, 19 nt, Artificial Sequence
  Description of Artificial Sequence: Synthetic oligonucleotide
  Antisense strand to SEQ ID NO: 2037582
caugaccucuacaaucuua

SEQ ID NO: 2037584 - RNA, 19 nt, Artificial Sequence
  Description of Artificial Sequence: Synthetic oligonucleotide
  Sense strand starting at position 1295 of SEQ ID NO: 1881349
uguagaggucauggaacau

SEQ ID NO: 2037585 - RNA, 19 nt, Artificial Sequence
  Description of Artificial Sequence: Synthetic oligonucleotide
  Antisense strand to SEQ ID NO: 2037584
auguuccaugaccucuaca

SEQ ID NO: 2037586 - RNA, 19 nt, Artificial Sequence
  Description of Artificial Sequence: Synthetic oligonucleotide
  Sense strand starting at position 1307 of SEQ ID NO: 1881349
ggaacaugccacgacaguu

SEQ ID NO: 2037587 - RNA, 19 nt, Artificial Sequence
  Description of Artificial Sequence: Synthetic oligonucleotide
  Antisense strand to SEQ ID NO: 2037586
aacugucguggcauguucc

SEQ ID NO: 2037588 - RNA, 19 nt, Artificial Sequence
  Description of Artificial Sequence: Synthetic oligonucleotide
  Sense strand starting at position 1581 of SEQ ID NO: 1881349
gggaacuugguuugucuuu

SEQ ID NO: 2037589 - RNA, 19 nt, Artificial Sequence
  Description of Artificial Sequence: Synthetic oligonucleotide
  Antisense strand to SEQ ID NO: 2037588
aaagacaaaccaaguuccc

SEQ ID NO: 2037590 - RNA, 19 nt, Artificial Sequence
  Description of Artificial Sequence: Synthetic oligonucleotide
  Sense strand starting at position 1643 of SEQ ID NO: 1881349
uagcaucuccugugagaca

SEQ ID NO: 2037591 - RNA, 19 nt, Artificial Sequence
  Description of Artificial Sequence: Synthetic oligonucleotide
  Antisense strand to SEQ ID NO: 2037590
ugucucacaggagaugcua

SEQ ID NO: 2037592 - RNA, 19 nt, Artificial Sequence
  Description of Artificial Sequence: Synthetic oligonucleotide
  Sense strand starting at position 1911 of SEQ ID NO: 1881349
uucugcuucugaguagaua

SEQ ID NO: 2037593 - RNA, 19 nt, Artificial Sequence
  Description of Artificial Sequence: Synthetic oligonucleotide
  Antisense strand to SEQ ID NO: 2037592
uaucuacucagaagcagaa

SEQ ID NO: 2037594 - RNA, 19 nt, Artificial Sequence
  Description of Artificial Sequence: Synthetic oligonucleotide
  Sense strand starting at position 1912 of SEQ ID NO: 1881349
ucugcuucugaguagauac

SEQ ID NO: 2037595 - RNA, 19 nt, Artificial Sequence
  Description of Artificial Sequence: Synthetic oligonucleotide
  Antisense strand to SEQ ID NO: 2037594
guaucuacucagaagcaga

SEQ ID NO: 2037596 - RNA, 19 nt, Artificial Sequence
  Description of Artificial Sequence: Synthetic oligonucleotide
  Sense strand starting at position 2137 of SEQ ID NO: 1881349
ugaggauauuaugucaagu

SEQ ID NO: 2037597 - RNA, 19 nt, Artificial Sequence
  Description of Artificial Sequence: Synthetic oligonucleotide
  Antisense strand to SEQ ID NO: 2037596
acuugacauaauauccuca

SEQ ID NO: 2037598 - RNA, 19 nt, Artificial Sequence
  Description of Artificial Sequence: Synthetic oligonucleotide
  Sense strand starting at position 2178 of SEQ ID NO: 1881349
acaaauaguguuugaucuu

SEQ ID NO: 2037599 - RNA, 19 nt, Artificial Sequence
  Description of Artificial Sequence: Synthetic oligonucleotide
  Antisense strand to SEQ ID NO: 2037598
aagaucaaacacuauuugu

SEQ ID NO: 2037600 - RNA, 19 nt, Artificial Sequence
  Description of Artificial Sequence: Synthetic oligonucleotide
  Sense strand starting at position 2187 of SEQ ID NO: 1881349
guuugaucuugcuuauaug

SEQ ID NO: 2037601 - RNA, 19 nt, Artificial Sequence
  Description of Artificial Sequence: Synthetic oligonucleotide
  Antisense strand to SEQ ID NO: 2037600
cauauaagcaagaucaaac

SEQ ID NO: 2037602 - RNA, 19 nt, Artificial Sequence
  Description of Artificial Sequence: Synthetic oligonucleotide
  Sense strand starting at position 2188 of SEQ ID NO: 1881349
uuugaucuugcuuauauga

SEQ ID NO: 2037603 - RNA, 19 nt, Artificial Sequence
  Description of Artificial Sequence: Synthetic oligonucleotide
  Antisense strand to SEQ ID NO: 2037602
ucauauaagcaagaucaaa

SEQ ID NO: 2037604 - RNA, 19 nt, Artificial Sequence
  Description of Artificial Sequence: Synthetic oligonucleotide
  Sense strand starting at position 2199 of SEQ ID NO: 1881349
uuauaugaguucccuagag

SEQ ID NO: 2037605 - RNA, 19 nt, Artificial Sequence
  Description of Artificial Sequence: Synthetic oligonucleotide
  Antisense strand to SEQ ID NO: 2037604
cucuagggaacucauauaa

SEQ ID NO: 2037606 - RNA, 19 nt, Artificial Sequence
  Description of Artificial Sequence: Synthetic oligonucleotide
  Sense strand starting at position 2201 of SEQ ID NO: 1881349
auaugaguucccuagagua

SEQ ID NO: 2037607 - RNA, 19 nt, Artificial Sequence
  Description of Artificial Sequence: Synthetic oligonucleotide
  Antisense strand to SEQ ID NO: 2037606
uacucuagggaacucauau

SEQ ID NO: 2037608 - RNA, 19 nt, Artificial Sequence
  Description of Artificial Sequence: Synthetic oligonucleotide
  Sense strand starting at position 2203 of SEQ ID NO: 1881349
augaguucccuagaguaau

SEQ ID NO: 2037609 - RNA, 19 nt, Artificial Sequence
  Description of Artificial Sequence: Synthetic oligonucleotide
  Antisense strand to SEQ ID NO: 2037608
auuacucuagggaacucau

SEQ ID NO: 2037610 - RNA, 19 nt, Artificial Sequence
  Description of Artificial Sequence: Synthetic oligonucleotide
  Sense strand starting at position 2206 of SEQ ID NO: 1881349
aguucccuagaguaaucaa

SEQ ID NO: 2037611 - RNA, 19 nt, Artificial Sequence
  Description of Artificial Sequence: Synthetic oligonucleotide
  Antisense strand to SEQ ID NO: 2037610
uugauuacucuagggaacu

SEQ ID NO: 2037612 - RNA, 19 nt, Artificial Sequence
  Description of Artificial Sequence: Synthetic oligonucleotide
  Sense strand starting at position 2376 of SEQ ID NO: 1881349
auguacucccauuguuaag

SEQ ID NO: 2037613 - RNA, 19 nt, Artificial Sequence
  Description of Artificial Sequence: Synthetic oligonucleotide
  Antisense strand to SEQ ID NO: 2037612
cuuaacaaugggaguacau

SEQ ID NO: 2037614 - RNA, 19 nt, Artificial Sequence
  Description of Artificial Sequence: Synthetic oligonucleotide
  Sense strand starting at position 2438 of SEQ ID NO: 1881349
gcuacauuauggguauacu

SEQ ID NO: 2037615 - RNA, 19 nt, Artificial Sequence
  Description of Artificial Sequence: Synthetic oligonucleotide
  Antisense strand to SEQ ID NO: 2037614
aguauacccauaauguagc

SEQ ID NO: 2037616 - RNA, 19 nt, Artificial Sequence
  Description of Artificial Sequence: Synthetic oligonucleotide
  Sense strand starting at position 2439 of SEQ ID NO: 1881349
cuacauuauggguauacuu

SEQ ID NO: 2037617 - RNA, 19 nt, Artificial Sequence
  Description of Artificial Sequence: Synthetic oligonucleotide
  Antisense strand to SEQ ID NO: 2037616
aaguauacccauaauguag

SEQ ID NO: 2037618 - RNA, 19 nt, Artificial Sequence
  Description of Artificial Sequence: Synthetic oligonucleotide
  Sense strand starting at position 2496 of SEQ ID NO: 1881349
guaaauguuguguguauuu

SEQ ID NO: 2037619 - RNA, 19 nt, Artificial Sequence
  Description of Artificial Sequence: Synthetic oligonucleotide
  Antisense strand to SEQ ID NO: 2037618
aaauacacacaacauuuac

SEQ ID NO: 2037620 - RNA, 19 nt, Artificial Sequence
  Description of Artificial Sequence: Synthetic oligonucleotide
  Sense strand starting at position 2623 of SEQ ID NO: 1881349
gagaacaagcccuguaagu

SEQ ID NO: 2037621 - RNA, 19 nt, Artificial Sequence
  Description of Artificial Sequence: Synthetic oligonucleotide
  Antisense strand to SEQ ID NO: 2037620
acuuacagggcuuguucuc

SEQ ID NO: 2037622 - RNA, 19 nt, Artificial Sequence
  Description of Artificial Sequence: Synthetic oligonucleotide
  Sense strand starting at position 2625 of SEQ ID NO: 1881349
gaacaagcccuguaagugu

SEQ ID NO: 2037623 - RNA, 19 nt, Artificial Sequence
  Description of Artificial Sequence: Synthetic oligonucleotide
  Antisense strand to SEQ ID NO: 2037622
acacuuacagggcuuguuc

SEQ ID NO: 2037624 - RNA, 19 nt, Artificial Sequence
  Description of Artificial Sequence: Synthetic oligonucleotide
  Sense strand starting at position 2652 of SEQ ID NO: 1881349
gucguugcagugagaguua

SEQ ID NO: 2037625 - RNA, 19 nt, Artificial Sequence
  Description of Artificial Sequence: Synthetic oligonucleotide
  Antisense strand to SEQ ID NO: 2037624
uaacucucacugcaacgac

SEQ ID NO: 2037626 - RNA, 19 nt, Artificial Sequence
  Description of Artificial Sequence: Synthetic oligonucleotide
  Sense strand starting at position 2654 of SEQ ID NO: 1881349
cguugcagugagaguuaga

SEQ ID NO: 2037627 - RNA, 19 nt, Artificial Sequence
  Description of Artificial Sequence: Synthetic oligonucleotide
  Antisense strand to SEQ ID NO: 2037626
ucuaacucucacugcaacg

SEQ ID NO: 2037628 - RNA, 19 nt, Artificial Sequence
  Description of Artificial Sequence: Synthetic oligonucleotide
  Sense strand starting at position 2661 of SEQ ID NO: 1881349
gugagaguuagaugggcaa

SEQ ID NO: 2037629 - RNA, 19 nt, Artificial Sequence
  Description of Artificial Sequence: Synthetic oligonucleotide
  Antisense strand to SEQ ID NO: 2037628
uugcccaucuaacucucac

SEQ ID NO: 2037630 - RNA, 19 nt, Artificial Sequence
  Description of Artificial Sequence: Synthetic oligonucleotide
  Sense strand starting at position 2728 of SEQ ID NO: 1881349
uuggaaggcuguucucaca

SEQ ID NO: 2037631 - RNA, 19 nt, Artificial Sequence
  Description of Artificial Sequence: Synthetic oligonucleotide
  Antisense strand to SEQ ID NO: 2037630
ugugagaacagccuuccaa

SEQ ID NO: 2037632 - RNA, 19 nt, Artificial Sequence
  Description of Artificial Sequence: Synthetic oligonucleotide
  Sense strand starting at position 3084 of SEQ ID NO: 1881349
gguggaguucugggaguga

SEQ ID NO: 2037633 - RNA, 19 nt, Artificial Sequence
  Description of Artificial Sequence: Synthetic oligonucleotide
  Antisense strand to SEQ ID NO: 2037632
ucacucccagaacuccacc

SEQ ID NO: 2037634 - RNA, 19 nt, Artificial Sequence
  Description of Artificial Sequence: Synthetic oligonucleotide
  Sense strand starting at position 3088 of SEQ ID NO: 1881349
gaguucugggagugaguau

SEQ ID NO: 2037635 - RNA, 19 nt, Artificial Sequence
  Description of Artificial Sequence: Synthetic oligonucleotide
  Antisense strand to SEQ ID NO: 2037634
auacucacucccagaacuc

SEQ ID NO: 2037636 - RNA, 19 nt, Artificial Sequence
  Description of Artificial Sequence: Synthetic oligonucleotide
  Sense strand starting at position 3344 of SEQ ID NO: 1881349
uacaguugcguacaauauu

SEQ ID NO: 2037637 - RNA, 19 nt, Artificial Sequence
  Description of Artificial Sequence: Synthetic oligonucleotide
  Antisense strand to SEQ ID NO: 2037636
aauauuguacgcaacugua

SEQ ID NO: 2037638 - RNA, 19 nt, Artificial Sequence
  Description of Artificial Sequence: Synthetic oligonucleotide
  Sense strand starting at position 3458 of SEQ ID NO: 1881349
gcaaguacacgcuaugaua

SEQ ID NO: 2037639 - RNA, 19 nt, Artificial Sequence
  Description of Artificial Sequence: Synthetic oligonucleotide
  Antisense strand to SEQ ID NO: 2037638
uaucauagcguguacuugc

SEQ ID NO: 2037640 - RNA, 19 nt, Artificial Sequence
  Description of Artificial Sequence: Synthetic oligonucleotide
  Sense strand starting at position 3541 of SEQ ID NO: 1881349
acaugacuauacuugcaga

SEQ ID NO: 2037641 - RNA, 19 nt, Artificial Sequence
  Description of Artificial Sequence: Synthetic oligonucleotide
  Antisense strand to SEQ ID NO: 2037640
ucugcaaguauagucaugu

SEQ ID NO: 2037642 - RNA, 19 nt, Artificial Sequence
  Description of Artificial Sequence: Synthetic oligonucleotide
  Sense strand starting at position 3795 of SEQ ID NO: 1881349
cagauaauguggccauagu

SEQ ID NO: 2037643 - RNA, 19 nt, Artificial Sequence
  Description of Artificial Sequence: Synthetic oligonucleotide
  Antisense strand to SEQ ID NO: 2037642
acuauggccacauuaucug

SEQ ID NO: 2037644 - RNA, 19 nt, Artificial Sequence
  Description of Artificial Sequence: Synthetic oligonucleotide
  Sense strand starting at position 3969 of SEQ ID NO: 1881349
ccuagagucacucggaaua

SEQ ID NO: 2037645 - RNA, 19 nt, Artificial Sequence
  Description of Artificial Sequence: Synthetic oligonucleotide
  Antisense strand to SEQ ID NO: 2037644
uauuccgagugacucuagg

SEQ ID NO: 2037646 - RNA, 19 nt, Artificial Sequence
  Description of Artificial Sequence: Synthetic oligonucleotide
  Sense strand starting at position 14 of SEQ ID NO: 1881350
accucuggucccugguuua

SEQ ID NO: 2037647 - RNA, 19 nt, Artificial Sequence
  Description of Artificial Sequence: Synthetic oligonucleotide
  Antisense strand to SEQ ID NO: 2037646
uaaaccagggaccagaggu

SEQ ID NO: 2037648 - RNA, 19 nt, Artificial Sequence
  Description of Artificial Sequence: Synthetic oligonucleotide
  Sense strand starting at position 21 of SEQ ID NO: 1881350
gucccugguuuacucuaua

SEQ ID NO: 2037649 - RNA, 19 nt, Artificial Sequence
  Description of Artificial Sequence: Synthetic oligonucleotide
  Antisense strand to SEQ ID NO: 2037648
uauagaguaaaccagggac

SEQ ID NO: 2037650 - RNA, 19 nt, Artificial Sequence
  Description of Artificial Sequence: Synthetic oligonucleotide
  Sense strand starting at position 252 of SEQ ID NO: 1881350
ccacaaucccugggugacu

SEQ ID NO: 2037651 - RNA, 19 nt, Artificial Sequence
  Description of Artificial Sequence: Synthetic oligonucleotide
  Antisense strand to SEQ ID NO: 2037650
agucacccagggauugugg

SEQ ID NO: 2037652 - RNA, 19 nt, Artificial Sequence
  Description of Artificial Sequence: Synthetic oligonucleotide
  Sense strand starting at position 335 of SEQ ID NO: 1881350
acuccuucuggcuaggaga

SEQ ID NO: 2037653 - RNA, 19 nt, Artificial Sequence
  Description of Artificial Sequence: Synthetic oligonucleotide
  Antisense strand to SEQ ID NO: 2037652
ucuccuagccagaaggagu

SEQ ID NO: 2037654 - RNA, 19 nt, Artificial Sequence
  Description of Artificial Sequence: Synthetic oligonucleotide
  Sense strand starting at position 411 of SEQ ID NO: 1881350
agaucuccucagugacauu

SEQ ID NO: 2037655 - RNA, 19 nt, Artificial Sequence
  Description of Artificial Sequence: Synthetic oligonucleotide
  Antisense strand to SEQ ID NO: 2037654
aaugucacugaggagaucu

SEQ ID NO: 2037656 - RNA, 19 nt, Artificial Sequence
  Description of Artificial Sequence: Synthetic oligonucleotide
  Sense strand starting at position 435 of SEQ ID NO: 1881350
gaacgucagcugugccaaa

SEQ ID NO: 2037657 - RNA, 19 nt, Artificial Sequence
  Description of Artificial Sequence: Synthetic oligonucleotide
  Antisense strand to SEQ ID NO: 2037656
uuuggcacagcugacguuc

SEQ ID NO: 2037658 - RNA, 19 nt, Artificial Sequence
  Description of Artificial Sequence: Synthetic oligonucleotide
  Sense strand starting at position 482 of SEQ ID NO: 1881350
ggagccaugcgccaguaaa

SEQ ID NO: 2037659 - RNA, 19 nt, Artificial Sequence
  Description of Artificial Sequence: Synthetic oligonucleotide
  Antisense strand to SEQ ID NO: 2037658
uuuacuggcgcauggcucc

SEQ ID NO: 2037660 - RNA, 19 nt, Artificial Sequence
  Description of Artificial Sequence: Synthetic oligonucleotide
  Sense strand starting at position 523 of SEQ ID NO: 1881350
ucaagugucugggcaauua

SEQ ID NO: 2037661 - RNA, 19 nt, Artificial Sequence
  Description of Artificial Sequence: Synthetic oligonucleotide
  Antisense strand to SEQ ID NO: 2037660
uaauugcccagacacuuga

SEQ ID NO: 2037662 - RNA, 19 nt, Artificial Sequence
  Description of Artificial Sequence: Synthetic oligonucleotide
  Sense strand starting at position 532 of SEQ ID NO: 1881350
ugggcaauuacugagcuga

SEQ ID NO: 2037663 - RNA, 19 nt, Artificial Sequence
  Description of Artificial Sequence: Synthetic oligonucleotide
  Antisense strand to SEQ ID NO: 2037662
ucagcucaguaauugccca

SEQ ID NO: 2037664 - RNA, 19 nt, Artificial Sequence
  Description of Artificial Sequence: Synthetic oligonucleotide
  Sense strand starting at position 534 of SEQ ID NO: 1881350
ggcaauuacugagcugauu

SEQ ID NO: 2037665 - RNA, 19 nt, Artificial Sequence
  Description of Artificial Sequence: Synthetic oligonucleotide
  Antisense strand to SEQ ID NO: 2037664
aaucagcucaguaauugcc

SEQ ID NO: 2037666 - RNA, 19 nt, Artificial Sequence
  Description of Artificial Sequence: Synthetic oligonucleotide
  Sense strand starting at position 763 of SEQ ID NO: 1881350
ggaggaggucccuggaauu

SEQ ID NO: 2037667 - RNA, 19 nt, Artificial Sequence
  Description of Artificial Sequence: Synthetic oligonucleotide
  Antisense strand to SEQ ID NO: 2037666
aauuccagggaccuccucc

SEQ ID NO: 2037668 - RNA, 19 nt, Artificial Sequence
  Description of Artificial Sequence: Synthetic oligonucleotide
  Sense strand starting at position 813 of SEQ ID NO: 1881350
acgagaaucuccuacucaa

SEQ ID NO: 2037669 - RNA, 19 nt, Artificial Sequence
  Description of Artificial Sequence: Synthetic oligonucleotide
  Antisense strand to SEQ ID NO: 2037668
uugaguaggagauucucgu

SEQ ID NO: 2037670 - RNA, 19 nt, Artificial Sequence
  Description of Artificial Sequence: Synthetic oligonucleotide
  Sense strand starting at position 2604 of SEQ ID NO: 1881350
ggcuguuaugaagauccaa

SEQ ID NO: 2037671 - RNA, 19 nt, Artificial Sequence
  Description of Artificial Sequence: Synthetic oligonucleotide
  Antisense strand to SEQ ID NO: 2037670
uuggaucuucauaacagcc

SEQ ID NO: 2037672 - RNA, 19 nt, Artificial Sequence
  Description of Artificial Sequence: Synthetic oligonucleotide
  Sense strand starting at position 2622 of SEQ ID NO: 1881350
agguuaacagcguagagaa

SEQ ID NO: 2037673 - RNA, 19 nt, Artificial Sequence
  Description of Artificial Sequence: Synthetic oligonucleotide
  Antisense strand to SEQ ID NO: 2037672
uucucuacgcuguuaaccu

SEQ ID NO: 2037674 - RNA, 19 nt, Artificial Sequence
  Description of Artificial Sequence: Synthetic oligonucleotide
  Sense strand starting at position 2680 of SEQ ID NO: 1881350
gucagcuaaugugacuauu

SEQ ID NO: 2037675 - RNA, 19 nt, Artificial Sequence
  Description of Artificial Sequence: Synthetic oligonucleotide
  Antisense strand to SEQ ID NO: 2037674
aauagucacauuagcugac

SEQ ID NO: 2037676 - RNA, 19 nt, Artificial Sequence
  Description of Artificial Sequence: Synthetic oligonucleotide
  Sense strand starting at position 2720 of SEQ ID NO: 1881350
ugccauuauucuuguccuu

SEQ ID NO: 2037677 - RNA, 19 nt, Artificial Sequence
  Description of Artificial Sequence: Synthetic oligonucleotide
  Antisense strand to SEQ ID NO: 2037676
aaggacaagaauaauggca

SEQ ID NO: 2037678 - RNA, 19 nt, Artificial Sequence
  Description of Artificial Sequence: Synthetic oligonucleotide
  Sense strand starting at position 2731 of SEQ ID NO: 1881350
uuguccuuauuugaaugaa

SEQ ID NO: 2037679 - RNA, 19 nt, Artificial Sequence
  Description of Artificial Sequence: Synthetic oligonucleotide
  Antisense strand to SEQ ID NO: 2037678
uucauucaaauaaggacaa

SEQ ID NO: 2037680 - RNA, 19 nt, Artificial Sequence
  Description of Artificial Sequence: Synthetic oligonucleotide
  Sense strand starting at position 2887 of SEQ ID NO: 1881350
agccgauccuuccaccauu

SEQ ID NO: 2037681 - RNA, 19 nt, Artificial Sequence
  Description of Artificial Sequence: Synthetic oligonucleotide
  Antisense strand to SEQ ID NO: 2037680
aaugguggaaggaucggcu

SEQ ID NO: 2037682 - RNA, 19 nt, Artificial Sequence
  Description of Artificial Sequence: Synthetic oligonucleotide
  Sense strand starting at position 3597 of SEQ ID NO: 1881350
ugagcacucuccuuugagu

SEQ ID NO: 2037683 - RNA, 19 nt, Artificial Sequence
  Description of Artificial Sequence: Synthetic oligonucleotide
  Antisense strand to SEQ ID NO: 2037682
acucaaaggagagugcuca

SEQ ID NO: 2037684 - RNA, 19 nt, Artificial Sequence
  Description of Artificial Sequence: Synthetic oligonucleotide
  Sense strand starting at position 3701 of SEQ ID NO: 1881350
cuaugagguucccucauga

SEQ ID NO: 2037685 - RNA, 19 nt, Artificial Sequence
  Description of Artificial Sequence: Synthetic oligonucleotide
  Antisense strand to SEQ ID NO: 2037684
ucaugagggaaccucauag

SEQ ID NO: 2037686 - RNA, 19 nt, Artificial Sequence
  Description of Artificial Sequence: Synthetic oligonucleotide
  Sense strand starting at position 3705 of SEQ ID NO: 1881350
gagguucccucaugaacug

SEQ ID NO: 2037687 - RNA, 19 nt, Artificial Sequence
  Description of Artificial Sequence: Synthetic oligonucleotide
  Antisense strand to SEQ ID NO: 2037686
caguucaugagggaaccuc

SEQ ID NO: 2037688 - RNA, 19 nt, Artificial Sequence
  Description of Artificial Sequence: Synthetic oligonucleotide
  Sense strand starting at position 3762 of SEQ ID NO: 1881350
gugcauguguggucgcaca

SEQ ID NO: 2037689 - RNA, 19 nt, Artificial Sequence
  Description of Artificial Sequence: Synthetic oligonucleotide
  Antisense strand to SEQ ID NO: 2037688
ugugcgaccacacaugcac

SEQ ID NO: 2037690 - RNA, 19 nt, Artificial Sequence
  Description of Artificial Sequence: Synthetic oligonucleotide
  Sense strand starting at position 3826 of SEQ ID NO: 1881350
ggacuccaggauugaaguu

SEQ ID NO: 2037691 - RNA, 19 nt, Artificial Sequence
  Description of Artificial Sequence: Synthetic oligonucleotide
  Antisense strand to SEQ ID NO: 2037690
aacuucaauccuggagucc

SEQ ID NO: 2037692 - RNA, 19 nt, Artificial Sequence
  Description of Artificial Sequence: Synthetic oligonucleotide
  Sense strand starting at position 3897 of SEQ ID NO: 1881350
ggaagcaaguucuagcaga

SEQ ID NO: 2037693 - RNA, 19 nt, Artificial Sequence
  Description of Artificial Sequence: Synthetic oligonucleotide
  Antisense strand to SEQ ID NO: 2037692
ucugcuagaacuugcuucc

SEQ ID NO: 2037694 - RNA, 19 nt, Artificial Sequence
  Description of Artificial Sequence: Synthetic oligonucleotide
  Sense strand starting at position 3934 of SEQ ID NO: 1881350
gccugagagcaagguuguu

SEQ ID NO: 2037695 - RNA, 19 nt, Artificial Sequence
  Description of Artificial Sequence: Synthetic oligonucleotide
  Antisense strand to SEQ ID NO: 2037694
aacaaccuugcucucaggc

SEQ ID NO: 2037696 - RNA, 19 nt, Artificial Sequence
  Description of Artificial Sequence: Synthetic oligonucleotide
  Sense strand starting at position 180 of SEQ ID NO: 1881351
agugaaucuguccacuuaa

SEQ ID NO: 2037697 - RNA, 19 nt, Artificial Sequence
  Description of Artificial Sequence: Synthetic oligonucleotide
  Antisense strand to SEQ ID NO: 2037696
uuaaguggacagauucacu

SEQ ID NO: 2037698 - RNA, 19 nt, Artificial Sequence
  Description of Artificial Sequence: Synthetic oligonucleotide
  Sense strand starting at position 352 of SEQ ID NO: 1881351
ugguuagaccauugaucac

SEQ ID NO: 2037699 - RNA, 19 nt, Artificial Sequence
  Description of Artificial Sequence: Synthetic oligonucleotide
  Antisense strand to SEQ ID NO: 2037698
gugaucaauggucuaacca

SEQ ID NO: 2037700 - RNA, 19 nt, Artificial Sequence
  Description of Artificial Sequence: Synthetic oligonucleotide
  Sense strand starting at position 391 of SEQ ID NO: 1881351
gauagaauauugcugaggu

SEQ ID NO: 2037701 - RNA, 19 nt, Artificial Sequence
  Description of Artificial Sequence: Synthetic oligonucleotide
  Antisense strand to SEQ ID NO: 2037700
accucagcaauauucuauc

SEQ ID NO: 2037702 - RNA, 19 nt, Artificial Sequence
  Description of Artificial Sequence: Synthetic oligonucleotide
  Sense strand starting at position 446 of SEQ ID NO: 1881351
aaagacuccuuguugggaa

SEQ ID NO: 2037703 - RNA, 19 nt, Artificial Sequence
  Description of Artificial Sequence: Synthetic oligonucleotide
  Antisense strand to SEQ ID NO: 2037702
uucccaacaaggagucuuu

SEQ ID NO: 2037704 - RNA, 19 nt, Artificial Sequence
  Description of Artificial Sequence: Synthetic oligonucleotide
  Sense strand starting at position 504 of SEQ ID NO: 1881351
cuagguaaauauucuaggu

SEQ ID NO: 2037705 - RNA, 19 nt, Artificial Sequence
  Description of Artificial Sequence: Synthetic oligonucleotide
  Antisense strand to SEQ ID NO: 2037704
accuagaauauuuaccuag

SEQ ID NO: 2037706 - RNA, 19 nt, Artificial Sequence
  Description of Artificial Sequence: Synthetic oligonucleotide
  Sense strand starting at position 522 of SEQ ID NO: 1881351
uguauauucucugucauuu

SEQ ID NO: 2037707 - RNA, 19 nt, Artificial Sequence
  Description of Artificial Sequence: Synthetic oligonucleotide
  Antisense strand to SEQ ID NO: 2037706
aaaugacagagaauauaca

SEQ ID NO: 2037708 - RNA, 19 nt, Artificial Sequence
  Description of Artificial Sequence: Synthetic oligonucleotide
  Sense strand starting at position 610 of SEQ ID NO: 1881351
ugaagaaucagugguagac

SEQ ID NO: 2037709 - RNA, 19 nt, Artificial Sequence
  Description of Artificial Sequence: Synthetic oligonucleotide
  Antisense strand to SEQ ID NO: 2037708
gucuaccacugauucuuca

SEQ ID NO: 2037710 - RNA, 19 nt, Artificial Sequence
  Description of Artificial Sequence: Synthetic oligonucleotide
  Sense strand starting at position 1133 of SEQ ID NO: 1881351
cugcccauaucagucauuu

SEQ ID NO: 2037711 - RNA, 19 nt, Artificial Sequence
  Description of Artificial Sequence: Synthetic oligonucleotide
  Antisense strand to SEQ ID NO: 2037710
aaaugacugauaugggcag

SEQ ID NO: 2037712 - RNA, 19 nt, Artificial Sequence
  Description of Artificial Sequence: Synthetic oligonucleotide
  Sense strand starting at position 1191 of SEQ ID NO: 1881351
aguuguagauuugagaaac

SEQ ID NO: 2037713 - RNA, 19 nt, Artificial Sequence
  Description of Artificial Sequence: Synthetic oligonucleotide
  Antisense strand to SEQ ID NO: 2037712
guuucucaaaucuacaacu

SEQ ID NO: 2037714 - RNA, 19 nt, Artificial Sequence
  Description of Artificial Sequence: Synthetic oligonucleotide
  Sense strand starting at position 1285 of SEQ ID NO: 1881351
gggauuauaucaucuagca

SEQ ID NO: 2037715 - RNA, 19 nt, Artificial Sequence
  Description of Artificial Sequence: Synthetic oligonucleotide
  Antisense strand to SEQ ID NO: 2037714
ugcuagaugauauaauccc

SEQ ID NO: 2037716 - RNA, 19 nt, Artificial Sequence
  Description of Artificial Sequence: Synthetic oligonucleotide
  Sense strand starting at position 1364 of SEQ ID NO: 1881351
aagagagaugcaugguuaa

SEQ ID NO: 2037717 - RNA, 19 nt, Artificial Sequence
  Description of Artificial Sequence: Synthetic oligonucleotide
  Antisense strand to SEQ ID NO: 2037716
uuaaccaugcaucucucuu

SEQ ID NO: 2037718 - RNA, 19 nt, Artificial Sequence
  Description of Artificial Sequence: Synthetic oligonucleotide
  Sense strand starting at position 1395 of SEQ ID NO: 1881351
uguauauuugcaugcacau

SEQ ID NO: 2037719 - RNA, 19 nt, Artificial Sequence
  Description of Artificial Sequence: Synthetic oligonucleotide
  Antisense strand to SEQ ID NO: 2037718
augugcaugcaaauauaca

SEQ ID NO: 2037720 - RNA, 19 nt, Artificial Sequence
  Description of Artificial Sequence: Synthetic oligonucleotide
  Sense strand starting at position 1457 of SEQ ID NO: 1881351
ccaccugagugauuaaaua

SEQ ID NO: 2037721 - RNA, 19 nt, Artificial Sequence
  Description of Artificial Sequence: Synthetic oligonucleotide
  Antisense strand to SEQ ID NO: 2037720
uauuuaaucacucaggugg

SEQ ID NO: 2037722 - RNA, 19 nt, Artificial Sequence
  Description of Artificial Sequence: Synthetic oligonucleotide
  Sense strand starting at position 1739 of SEQ ID NO: 1881351
auacaucagcaauaagguu

SEQ ID NO: 2037723 - RNA, 19 nt, Artificial Sequence
  Description of Artificial Sequence: Synthetic oligonucleotide
  Antisense strand to SEQ ID NO: 2037722
aaccuuauugcugauguau

SEQ ID NO: 2037724 - RNA, 19 nt, Artificial Sequence
  Description of Artificial Sequence: Synthetic oligonucleotide
  Sense strand starting at position 1746 of SEQ ID NO: 1881351
agcaauaagguuuauaagu

SEQ ID NO: 2037725 - RNA, 19 nt, Artificial Sequence
  Description of Artificial Sequence: Synthetic oligonucleotide
  Antisense strand to SEQ ID NO: 2037724
acuuauaaaccuuauugcu

SEQ ID NO: 2037726 - RNA, 19 nt, Artificial Sequence
  Description of Artificial Sequence: Synthetic oligonucleotide
  Sense strand starting at position 1755 of SEQ ID NO: 1881351
guuuauaagugaccucaug

SEQ ID NO: 2037727 - RNA, 19 nt, Artificial Sequence
  Description of Artificial Sequence: Synthetic oligonucleotide
  Antisense strand to SEQ ID NO: 2037726
caugaggucacuuauaaac

SEQ ID NO: 2037728 - RNA, 19 nt, Artificial Sequence
  Description of Artificial Sequence: Synthetic oligonucleotide
  Sense strand starting at position 1775 of SEQ ID NO: 1881351
ggaaucaucuagcuucuua

SEQ ID NO: 2037729 - RNA, 19 nt, Artificial Sequence
  Description of Artificial Sequence: Synthetic oligonucleotide
  Antisense strand to SEQ ID NO: 2037728
uaagaagcuagaugauucc

SEQ ID NO: 2037730 - RNA, 19 nt, Artificial Sequence
  Description of Artificial Sequence: Synthetic oligonucleotide
  Sense strand starting at position 1807 of SEQ ID NO: 1881351
uggucauaaggguggauca

SEQ ID NO: 2037731 - RNA, 19 nt, Artificial Sequence
  Description of Artificial Sequence: Synthetic oligonucleotide
  Antisense strand to SEQ ID NO: 2037730
ugauccacccuuaugacca

SEQ ID NO: 2037732 - RNA, 19 nt, Artificial Sequence
  Description of Artificial Sequence: Synthetic oligonucleotide
  Sense strand starting at position 2117 of SEQ ID NO: 1881351
caaugauggucaguaaagu

SEQ ID NO: 2037733 - RNA, 19 nt, Artificial Sequence
  Description of Artificial Sequence: Synthetic oligonucleotide
  Antisense strand to SEQ ID NO: 2037732
acuuuacugaccaucauug

SEQ ID NO: 2037734 - RNA, 19 nt, Artificial Sequence
  Description of Artificial Sequence: Synthetic oligonucleotide
  Sense strand starting at position 2123 of SEQ ID NO: 1881351
uggucaguaaaguaugaac

SEQ ID NO: 2037735 - RNA, 19 nt, Artificial Sequence
  Description of Artificial Sequence: Synthetic oligonucleotide
  Antisense strand to SEQ ID NO: 2037734
guucauacuuuacugacca

SEQ ID NO: 2037736 - RNA, 19 nt, Artificial Sequence
  Description of Artificial Sequence: Synthetic oligonucleotide
  Sense strand starting at position 2217 of SEQ ID NO: 1881351
gcgguauucccauaacaca

SEQ ID NO: 2037737 - RNA, 19 nt, Artificial Sequence
  Description of Artificial Sequence: Synthetic oligonucleotide
  Antisense strand to SEQ ID NO: 2037736
uguguuaugggaauaccgc

SEQ ID NO: 2037738 - RNA, 19 nt, Artificial Sequence
  Description of Artificial Sequence: Synthetic oligonucleotide
  Sense strand starting at position 2635 of SEQ ID NO: 1881351
gguaucugaagcuaauguu

SEQ ID NO: 2037739 - RNA, 19 nt, Artificial Sequence
  Description of Artificial Sequence: Synthetic oligonucleotide
  Antisense strand to SEQ ID NO: 2037738
aacauuagcuucagauacc

SEQ ID NO: 2037740 - RNA, 19 nt, Artificial Sequence
  Description of Artificial Sequence: Synthetic oligonucleotide
  Sense strand starting at position 2850 of SEQ ID NO: 1881351
cuuguaacucaauacaguu

SEQ ID NO: 2037741 - RNA, 19 nt, Artificial Sequence
  Description of Artificial Sequence: Synthetic oligonucleotide
  Antisense strand to SEQ ID NO: 2037740
aacuguauugaguuacaag

SEQ ID NO: 2037742 - RNA, 19 nt, Artificial Sequence
  Description of Artificial Sequence: Synthetic oligonucleotide
  Sense strand starting at position 2952 of SEQ ID NO: 1881351
ucagguauauauucucaag

SEQ ID NO: 2037743 - RNA, 19 nt, Artificial Sequence
  Description of Artificial Sequence: Synthetic oligonucleotide
  Antisense strand to SEQ ID NO: 2037742
cuugagaauauauaccuga

SEQ ID NO: 2037744 - RNA, 19 nt, Artificial Sequence
  Description of Artificial Sequence: Synthetic oligonucleotide
  Sense strand starting at position 2954 of SEQ ID NO: 1881351
agguauauauucucaagac

SEQ ID NO: 2037745 - RNA, 19 nt, Artificial Sequence
  Description of Artificial Sequence: Synthetic oligonucleotide
  Antisense strand to SEQ ID NO: 2037744
gucuugagaauauauaccu

SEQ ID NO: 2037746 - RNA, 19 nt, Artificial Sequence
  Description of Artificial Sequence: Synthetic oligonucleotide
  Sense strand starting at position 3099 of SEQ ID NO: 1881351
cugagauacauccagcgaa

SEQ ID NO: 2037747 - RNA, 19 nt, Artificial Sequence
  Description of Artificial Sequence: Synthetic oligonucleotide
  Antisense strand to SEQ ID NO: 2037746
uucgcuggauguaucucag

SEQ ID NO: 2037748 - RNA, 19 nt, Artificial Sequence
  Description of Artificial Sequence: Synthetic oligonucleotide
  Sense strand starting at position 3232 of SEQ ID NO: 1881351
agaauuaaguguccuauuc

SEQ ID NO: 2037749 - RNA, 19 nt, Artificial Sequence
  Description of Artificial Sequence: Synthetic oligonucleotide
  Antisense strand to SEQ ID NO: 2037748
gaauaggacacuuaauucu

SEQ ID NO: 2037750 - RNA, 19 nt, Artificial Sequence
  Description of Artificial Sequence: Synthetic oligonucleotide
  Sense strand starting at position 3277 of SEQ ID NO: 1881351
agugauaaaguucagguga

SEQ ID NO: 2037751 - RNA, 19 nt, Artificial Sequence
  Description of Artificial Sequence: Synthetic oligonucleotide
  Antisense strand to SEQ ID NO: 2037750
ucaccugaacuuuaucacu

SEQ ID NO: 2037752 - RNA, 19 nt, Artificial Sequence
  Description of Artificial Sequence: Synthetic oligonucleotide
  Sense strand starting at position 3291 of SEQ ID NO: 1881351
ggugauccuaaaugcagaa

SEQ ID NO: 2037753 - RNA, 19 nt, Artificial Sequence
  Description of Artificial Sequence: Synthetic oligonucleotide
  Antisense strand to SEQ ID NO: 2037752
uucugcauuuaggaucacc

SEQ ID NO: 2037754 - RNA, 19 nt, Artificial Sequence
  Description of Artificial Sequence: Synthetic oligonucleotide
  Sense strand starting at position 3336 of SEQ ID NO: 1881351
ugcacuaaugacuagcaaa

SEQ ID NO: 2037755 - RNA, 19 nt, Artificial Sequence
  Description of Artificial Sequence: Synthetic oligonucleotide
  Antisense strand to SEQ ID NO: 2037754
uuugcuagucauuagugca

SEQ ID NO: 2037756 - RNA, 19 nt, Artificial Sequence
  Description of Artificial Sequence: Synthetic oligonucleotide
  Sense strand starting at position 3453 of SEQ ID NO: 1881351
auuucuggauguuaagaga

SEQ ID NO: 2037757 - RNA, 19 nt, Artificial Sequence
  Description of Artificial Sequence: Synthetic oligonucleotide
  Antisense strand to SEQ ID NO: 2037756
ucucuuaacauccagaaau

SEQ ID NO: 2037758 - RNA, 19 nt, Artificial Sequence
  Description of Artificial Sequence: Synthetic oligonucleotide
  Sense strand starting at position 3464 of SEQ ID NO: 1881351
uuaagagaaucuuuaguga

SEQ ID NO: 2037759 - RNA, 19 nt, Artificial Sequence
  Description of Artificial Sequence: Synthetic oligonucleotide
  Antisense strand to SEQ ID NO: 2037758
ucacuaaagauucucuuaa

SEQ ID NO: 2037760 - RNA, 19 nt, Artificial Sequence
  Description of Artificial Sequence: Synthetic oligonucleotide
  Sense strand starting at position 3467 of SEQ ID NO: 1881351
agagaaucuuuagugagug

SEQ ID NO: 2037761 - RNA, 19 nt, Artificial Sequence
  Description of Artificial Sequence: Synthetic oligonucleotide
  Antisense strand to SEQ ID NO: 2037760
cacucacuaaagauucucu

SEQ ID NO: 2037762 - RNA, 19 nt, Artificial Sequence
  Description of Artificial Sequence: Synthetic oligonucleotide
  Sense strand starting at position 3471 of SEQ ID NO: 1881351
aaucuuuagugaguggaga

SEQ ID NO: 2037763 - RNA, 19 nt, Artificial Sequence
  Description of Artificial Sequence: Synthetic oligonucleotide
  Antisense strand to SEQ ID NO: 2037762
ucuccacucacuaaagauu

SEQ ID NO: 2037764 - RNA, 19 nt, Artificial Sequence
  Description of Artificial Sequence: Synthetic oligonucleotide
  Sense strand starting at position 3472 of SEQ ID NO: 1881351
aucuuuagugaguggagau

SEQ ID NO: 2037765 - RNA, 19 nt, Artificial Sequence
  Description of Artificial Sequence: Synthetic oligonucleotide
  Antisense strand to SEQ ID NO: 2037764
aucuccacucacuaaagau

SEQ ID NO: 2037766 - RNA, 19 nt, Artificial Sequence
  Description of Artificial Sequence: Synthetic oligonucleotide
  Sense strand starting at position 3473 of SEQ ID NO: 1881351
ucuuuagugaguggagaua

SEQ ID NO: 2037767 - RNA, 19 nt, Artificial Sequence
  Description of Artificial Sequence: Synthetic oligonucleotide
  Antisense strand to SEQ ID NO: 2037766
uaucuccacucacuaaaga

SEQ ID NO: 2037768 - RNA, 19 nt, Artificial Sequence
  Description of Artificial Sequence: Synthetic oligonucleotide
  Sense strand starting at position 3706 of SEQ ID NO: 1881351
agugguugcaauggagaau

SEQ ID NO: 2037769 - RNA, 19 nt, Artificial Sequence
  Description of Artificial Sequence: Synthetic oligonucleotide
  Antisense strand to SEQ ID NO: 2037768
auucuccauugcaaccacu

SEQ ID NO: 2037770 - RNA, 19 nt, Artificial Sequence
  Description of Artificial Sequence: Synthetic oligonucleotide
  Sense strand starting at position 3715 of SEQ ID NO: 1881351
aauggagaaugaucuuguu

SEQ ID NO: 2037771 - RNA, 19 nt, Artificial Sequence
  Description of Artificial Sequence: Synthetic oligonucleotide
  Antisense strand to SEQ ID NO: 2037770
aacaagaucauucuccauu

SEQ ID NO: 2037772 - RNA, 19 nt, Artificial Sequence
  Description of Artificial Sequence: Synthetic oligonucleotide
  Sense strand starting at position 3847 of SEQ ID NO: 1881351
aauguugaaucagcaggua

SEQ ID NO: 2037773 - RNA, 19 nt, Artificial Sequence
  Description of Artificial Sequence: Synthetic oligonucleotide
  Antisense strand to SEQ ID NO: 2037772
uaccugcugauucaacauu

SEQ ID NO: 2037774 - RNA, 19 nt, Artificial Sequence
  Description of Artificial Sequence: Synthetic oligonucleotide
  Sense strand starting at position 3905 of SEQ ID NO: 1881351
aauguauuccugugagaga

SEQ ID NO: 2037775 - RNA, 19 nt, Artificial Sequence
  Description of Artificial Sequence: Synthetic oligonucleotide
  Antisense strand to SEQ ID NO: 2037774
ucucucacaggaauacauu

SEQ ID NO: 2037776 - RNA, 19 nt, Artificial Sequence
  Description of Artificial Sequence: Synthetic oligonucleotide
  Sense strand starting at position 9 of SEQ ID NO: 1881352
cuuaguuacuuguauguua

SEQ ID NO: 2037777 - RNA, 19 nt, Artificial Sequence
  Description of Artificial Sequence: Synthetic oligonucleotide
  Antisense strand to SEQ ID NO: 2037776
uaacauacaaguaacuaag

SEQ ID NO: 2037778 - RNA, 19 nt, Artificial Sequence
  Description of Artificial Sequence: Synthetic oligonucleotide
  Sense strand starting at position 57 of SEQ ID NO: 1881352
gcagauaaaugguuuagaa

SEQ ID NO: 2037779 - RNA, 19 nt, Artificial Sequence
  Description of Artificial Sequence: Synthetic oligonucleotide
  Antisense strand to SEQ ID NO: 2037778
uucuaaaccauuuaucugc

SEQ ID NO: 2037780 - RNA, 19 nt, Artificial Sequence
  Description of Artificial Sequence: Synthetic oligonucleotide
  Sense strand starting at position 93 of SEQ ID NO: 1881352
ucaucauuguaguaauucu

SEQ ID NO: 2037781 - RNA, 19 nt, Artificial Sequence
  Description of Artificial Sequence: Synthetic oligonucleotide
  Antisense strand to SEQ ID NO: 2037780
agaauuacuacaaugauga

SEQ ID NO: 2037782 - RNA, 19 nt, Artificial Sequence
  Description of Artificial Sequence: Synthetic oligonucleotide
  Sense strand starting at position 102 of SEQ ID NO: 1881352
uaguaauucuaagagguaa

SEQ ID NO: 2037783 - RNA, 19 nt, Artificial Sequence
  Description of Artificial Sequence: Synthetic oligonucleotide
  Antisense strand to SEQ ID NO: 2037782
uuaccucuuagaauuacua

SEQ ID NO: 2037784 - RNA, 19 nt, Artificial Sequence
  Description of Artificial Sequence: Synthetic oligonucleotide
  Sense strand starting at position 116 of SEQ ID NO: 1881352
gguaaucaaagucagguau

SEQ ID NO: 2037785 - RNA, 19 nt, Artificial Sequence
  Description of Artificial Sequence: Synthetic oligonucleotide
  Antisense strand to SEQ ID NO: 2037784
auaccugacuuugauuacc

SEQ ID NO: 2037786 - RNA, 19 nt, Artificial Sequence
  Description of Artificial Sequence: Synthetic oligonucleotide
  Sense strand starting at position 184 of SEQ ID NO: 1881352
caagcaaguugcugaguga

SEQ ID NO: 2037787 - RNA, 19 nt, Artificial Sequence
  Description of Artificial Sequence: Synthetic oligonucleotide
  Antisense strand to SEQ ID NO: 2037786
ucacucagcaacuugcuug

SEQ ID NO: 2037788 - RNA, 19 nt, Artificial Sequence
  Description of Artificial Sequence: Synthetic oligonucleotide
  Sense strand starting at position 185 of SEQ ID NO: 1881352
aagcaaguugcugagugaa

SEQ ID NO: 2037789 - RNA, 19 nt, Artificial Sequence
  Description of Artificial Sequence: Synthetic oligonucleotide
  Antisense strand to SEQ ID NO: 2037788
uucacucagcaacuugcuu

SEQ ID NO: 2037790 - RNA, 19 nt, Artificial Sequence
  Description of Artificial Sequence: Synthetic oligonucleotide
  Sense strand starting at position 187 of SEQ ID NO: 1881352
gcaaguugcugagugaaca

SEQ ID NO: 2037791 - RNA, 19 nt, Artificial Sequence
  Description of Artificial Sequence: Synthetic oligonucleotide
  Antisense strand to SEQ ID NO: 2037790
uguucacucagcaacuugc

SEQ ID NO: 2037792 - RNA, 19 nt, Artificial Sequence
  Description of Artificial Sequence: Synthetic oligonucleotide
  Sense strand starting at position 188 of SEQ ID NO: 1881352
caaguugcugagugaacau

SEQ ID NO: 2037793 - RNA, 19 nt, Artificial Sequence
  Description of Artificial Sequence: Synthetic oligonucleotide
  Antisense strand to SEQ ID NO: 2037792
auguucacucagcaacuug

SEQ ID NO: 2037794 - RNA, 19 nt, Artificial Sequence
  Description of Artificial Sequence: Synthetic oligonucleotide
  Sense strand starting at position 237 of SEQ ID NO: 1881352
gggaaagacucaugucgau

SEQ ID NO: 2037795 - RNA, 19 nt, Artificial Sequence
  Description of Artificial Sequence: Synthetic oligonucleotide
  Antisense strand to SEQ ID NO: 2037794
aucgacaugagucuuuccc

SEQ ID NO: 2037796 - RNA, 19 nt, Artificial Sequence
  Description of Artificial Sequence: Synthetic oligonucleotide
  Sense strand starting at position 240 of SEQ ID NO: 1881352
aaagacucaugucgaucaa

SEQ ID NO: 2037797 - RNA, 19 nt, Artificial Sequence
  Description of Artificial Sequence: Synthetic oligonucleotide
  Antisense strand to SEQ ID NO: 2037796
uugaucgacaugagucuuu

SEQ ID NO: 2037798 - RNA, 19 nt, Artificial Sequence
  Description of Artificial Sequence: Synthetic oligonucleotide
  Sense strand starting at position 402 of SEQ ID NO: 1881352
gguuuauguucuuaaacug

SEQ ID NO: 2037799 - RNA, 19 nt, Artificial Sequence
  Description of Artificial Sequence: Synthetic oligonucleotide
  Antisense strand to SEQ ID NO: 2037798
caguuuaagaacauaaacc

SEQ ID NO: 2037800 - RNA, 19 nt, Artificial Sequence
  Description of Artificial Sequence: Synthetic oligonucleotide
  Sense strand starting at position 528 of SEQ ID NO: 1881352
guaguuagaagagaaguuu

SEQ ID NO: 2037801 - RNA, 19 nt, Artificial Sequence
  Description of Artificial Sequence: Synthetic oligonucleotide
  Antisense strand to SEQ ID NO: 2037800
aaacuucucuucuaacuac

SEQ ID NO: 2037802 - RNA, 19 nt, Artificial Sequence
  Description of Artificial Sequence: Synthetic oligonucleotide
  Sense strand starting at position 649 of SEQ ID NO: 1881352
cacgccauucuagaugaga

SEQ ID NO: 2037803 - RNA, 19 nt, Artificial Sequence
  Description of Artificial Sequence: Synthetic oligonucleotide
  Antisense strand to SEQ ID NO: 2037802
ucucaucuagaauggcgug

SEQ ID NO: 2037804 - RNA, 19 nt, Artificial Sequence
  Description of Artificial Sequence: Synthetic oligonucleotide
  Sense strand starting at position 651 of SEQ ID NO: 1881352
cgccauucuagaugagauu

SEQ ID NO: 2037805 - RNA, 19 nt, Artificial Sequence
  Description of Artificial Sequence: Synthetic oligonucleotide
  Antisense strand to SEQ ID NO: 2037804
aaucucaucuagaauggcg

SEQ ID NO: 2037806 - RNA, 19 nt, Artificial Sequence
  Description of Artificial Sequence: Synthetic oligonucleotide
  Sense strand starting at position 751 of SEQ ID NO: 1881352
guauacaugcaccgaaaca

SEQ ID NO: 2037807 - RNA, 19 nt, Artificial Sequence
  Description of Artificial Sequence: Synthetic oligonucleotide
  Antisense strand to SEQ ID NO: 2037806
uguuucggugcauguauac

SEQ ID NO: 2037808 - RNA, 19 nt, Artificial Sequence
  Description of Artificial Sequence: Synthetic oligonucleotide
  Sense strand starting at position 937 of SEQ ID NO: 1881352
gaggauggauaucaauauu

SEQ ID NO: 2037809 - RNA, 19 nt, Artificial Sequence
  Description of Artificial Sequence: Synthetic oligonucleotide
  Antisense strand to SEQ ID NO: 2037808
aauauugauauccauccuc

SEQ ID NO: 2037810 - RNA, 19 nt, Artificial Sequence
  Description of Artificial Sequence: Synthetic oligonucleotide
  Sense strand starting at position 1009 of SEQ ID NO: 1881352
gccgacauguacugauaaa

SEQ ID NO: 2037811 - RNA, 19 nt, Artificial Sequence
  Description of Artificial Sequence: Synthetic oligonucleotide
  Antisense strand to SEQ ID NO: 2037810
uuuaucaguacaugucggc

SEQ ID NO: 2037812 - RNA, 19 nt, Artificial Sequence
  Description of Artificial Sequence: Synthetic oligonucleotide
  Sense strand starting at position 1041 of SEQ ID NO: 1881352
gaagcagauuugcagucau

SEQ ID NO: 2037813 - RNA, 19 nt, Artificial Sequence
  Description of Artificial Sequence: Synthetic oligonucleotide
  Antisense strand to SEQ ID NO: 2037812
augacugcaaaucugcuuc

SEQ ID NO: 2037814 - RNA, 19 nt, Artificial Sequence
  Description of Artificial Sequence: Synthetic oligonucleotide
  Sense strand starting at position 1055 of SEQ ID NO: 1881352
gucauagagcuuugcaaga

SEQ ID NO: 2037815 - RNA, 19 nt, Artificial Sequence
  Description of Artificial Sequence: Synthetic oligonucleotide
  Antisense strand to SEQ ID NO: 2037814
ucuugcaaagcucuaugac

SEQ ID NO: 2037816 - RNA, 19 nt, Artificial Sequence
  Description of Artificial Sequence: Synthetic oligonucleotide
  Sense strand starting at position 1060 of SEQ ID NO: 1881352
agagcuuugcaagacacau

SEQ ID NO: 2037817 - RNA, 19 nt, Artificial Sequence
  Description of Artificial Sequence: Synthetic oligonucleotide
  Antisense strand to SEQ ID NO: 2037816
augugucuugcaaagcucu

SEQ ID NO: 2037818 - RNA, 19 nt, Artificial Sequence
  Description of Artificial Sequence: Synthetic oligonucleotide
  Sense strand starting at position 1180 of SEQ ID NO: 1881352
gaguaaaucuaagcauguc

SEQ ID NO: 2037819 - RNA, 19 nt, Artificial Sequence
  Description of Artificial Sequence: Synthetic oligonucleotide
  Antisense strand to SEQ ID NO: 2037818
gacaugcuuagauuuacuc

SEQ ID NO: 2037820 - RNA, 19 nt, Artificial Sequence
  Description of Artificial Sequence: Synthetic oligonucleotide
  Sense strand starting at position 1186 of SEQ ID NO: 1881352
aucuaagcaugucaugaaa

SEQ ID NO: 2037821 - RNA, 19 nt, Artificial Sequence
  Description of Artificial Sequence: Synthetic oligonucleotide
  Antisense strand to SEQ ID NO: 2037820
uuucaugacaugcuuagau

SEQ ID NO: 2037822 - RNA, 19 nt, Artificial Sequence
  Description of Artificial Sequence: Synthetic oligonucleotide
  Sense strand starting at position 1228 of SEQ ID NO: 1881352
uaauaacucugugaacgga

SEQ ID NO: 2037823 - RNA, 19 nt, Artificial Sequence
  Description of Artificial Sequence: Synthetic oligonucleotide
  Antisense strand to SEQ ID NO: 2037822
uccguucacagaguuauua

SEQ ID NO: 2037824 - RNA, 19 nt, Artificial Sequence
  Description of Artificial Sequence: Synthetic oligonucleotide
  Sense strand starting at position 1346 of SEQ ID NO: 1881352
ucauaugcuugauuaagga

SEQ ID NO: 2037825 - RNA, 19 nt, Artificial Sequence
  Description of Artificial Sequence: Synthetic oligonucleotide
  Antisense strand to SEQ ID NO: 2037824
uccuuaaucaagcauauga

SEQ ID NO: 2037826 - RNA, 19 nt, Artificial Sequence
  Description of Artificial Sequence: Synthetic oligonucleotide
  Sense strand starting at position 1350 of SEQ ID NO: 1881352
augcuugauuaaggacaaa

SEQ ID NO: 2037827 - RNA, 19 nt, Artificial Sequence
  Description of Artificial Sequence: Synthetic oligonucleotide
  Antisense strand to SEQ ID NO: 2037826
uuuguccuuaaucaagcau

SEQ ID NO: 2037828 - RNA, 19 nt, Artificial Sequence
  Description of Artificial Sequence: Synthetic oligonucleotide
  Sense strand starting at position 1631 of SEQ ID NO: 1881352
ggugcauuaaaguaaggga

SEQ ID NO: 2037829 - RNA, 19 nt, Artificial Sequence
  Description of Artificial Sequence: Synthetic oligonucleotide
  Antisense strand to SEQ ID NO: 2037828
ucccuuacuuuaaugcacc

SEQ ID NO: 2037830 - RNA, 19 nt, Artificial Sequence
  Description of Artificial Sequence: Synthetic oligonucleotide
  Sense strand starting at position 1634 of SEQ ID NO: 1881352
gcauuaaaguaagggauga

SEQ ID NO: 2037831 - RNA, 19 nt, Artificial Sequence
  Description of Artificial Sequence: Synthetic oligonucleotide
  Antisense strand to SEQ ID NO: 2037830
ucaucccuuacuuuaaugc

SEQ ID NO: 2037832 - RNA, 19 nt, Artificial Sequence
  Description of Artificial Sequence: Synthetic oligonucleotide
  Sense strand starting at position 1668 of SEQ ID NO: 1881352
aaauguauggauggugaua

SEQ ID NO: 2037833 - RNA, 19 nt, Artificial Sequence
  Description of Artificial Sequence: Synthetic oligonucleotide
  Antisense strand to SEQ ID NO: 2037832
uaucaccauccauacauuu

SEQ ID NO: 2037834 - RNA, 19 nt, Artificial Sequence
  Description of Artificial Sequence: Synthetic oligonucleotide
  Sense strand starting at position 1670 of SEQ ID NO: 1881352
auguauggauggugauauu

SEQ ID NO: 2037835 - RNA, 19 nt, Artificial Sequence
  Description of Artificial Sequence: Synthetic oligonucleotide
  Antisense strand to SEQ ID NO: 2037834
aauaucaccauccauacau

SEQ ID NO: 2037836 - RNA, 19 nt, Artificial Sequence
  Description of Artificial Sequence: Synthetic oligonucleotide
  Sense strand starting at position 1673 of SEQ ID NO: 1881352
uauggauggugauauugga

SEQ ID NO: 2037837 - RNA, 19 nt, Artificial Sequence
  Description of Artificial Sequence: Synthetic oligonucleotide
  Antisense strand to SEQ ID NO: 2037836
uccaauaucaccauccaua

SEQ ID NO: 2037838 - RNA, 19 nt, Artificial Sequence
  Description of Artificial Sequence: Synthetic oligonucleotide
  Sense strand starting at position 1831 of SEQ ID NO: 1881352
gcugcaucacccugcguaa

SEQ ID NO: 2037839 - RNA, 19 nt, Artificial Sequence
  Description of Artificial Sequence: Synthetic oligonucleotide
  Antisense strand to SEQ ID NO: 2037838
uuacgcagggugaugcagc

SEQ ID NO: 2037840 - RNA, 19 nt, Artificial Sequence
  Description of Artificial Sequence: Synthetic oligonucleotide
  Sense strand starting at position 1833 of SEQ ID NO: 1881352
ugcaucacccugcguaaga

SEQ ID NO: 2037841 - RNA, 19 nt, Artificial Sequence
  Description of Artificial Sequence: Synthetic oligonucleotide
  Antisense strand to SEQ ID NO: 2037840
ucuuacgcagggugaugca

SEQ ID NO: 2037842 - RNA, 19 nt, Artificial Sequence
  Description of Artificial Sequence: Synthetic oligonucleotide
  Sense strand starting at position 1834 of SEQ ID NO: 1881352
gcaucacccugcguaagau

SEQ ID NO: 2037843 - RNA, 19 nt, Artificial Sequence
  Description of Artificial Sequence: Synthetic oligonucleotide
  Antisense strand to SEQ ID NO: 2037842
aucuuacgcagggugaugc

SEQ ID NO: 2037844 - RNA, 19 nt, Artificial Sequence
  Description of Artificial Sequence: Synthetic oligonucleotide
  Sense strand starting at position 481 of SEQ ID NO: 1881353
cugccaauucuguguaaga

SEQ ID NO: 2037845 - RNA, 19 nt, Artificial Sequence
  Description of Artificial Sequence: Synthetic oligonucleotide
  Antisense strand to SEQ ID NO: 2037844
ucuuacacagaauuggcag

SEQ ID NO: 2037846 - RNA, 19 nt, Artificial Sequence
  Description of Artificial Sequence: Synthetic oligonucleotide
  Sense strand starting at position 482 of SEQ ID NO: 1881353
ugccaauucuguguaagaa

SEQ ID NO: 2037847 - RNA, 19 nt, Artificial Sequence
  Description of Artificial Sequence: Synthetic oligonucleotide
  Antisense strand to SEQ ID NO: 2037846
uucuuacacagaauuggca

SEQ ID NO: 2037848 - RNA, 19 nt, Artificial Sequence
  Description of Artificial Sequence: Synthetic oligonucleotide
  Sense strand starting at position 483 of SEQ ID NO: 1881353
gccaauucuguguaagaaa

SEQ ID NO: 2037849 - RNA, 19 nt, Artificial Sequence
  Description of Artificial Sequence: Synthetic oligonucleotide
  Antisense strand to SEQ ID NO: 2037848
uuucuuacacagaauuggc

SEQ ID NO: 2037850 - RNA, 19 nt, Artificial Sequence
  Description of Artificial Sequence: Synthetic oligonucleotide
  Sense strand starting at position 504 of SEQ ID NO: 1881353
gaaucagaacguuacuucu

SEQ ID NO: 2037851 - RNA, 19 nt, Artificial Sequence
  Description of Artificial Sequence: Synthetic oligonucleotide
  Antisense strand to SEQ ID NO: 2037850
agaaguaacguucugauuc

SEQ ID NO: 2037852 - RNA, 19 nt, Artificial Sequence
  Description of Artificial Sequence: Synthetic oligonucleotide
  Sense strand starting at position 506 of SEQ ID NO: 1881353
aucagaacguuacuucuca

SEQ ID NO: 2037853 - RNA, 19 nt, Artificial Sequence
  Description of Artificial Sequence: Synthetic oligonucleotide
  Antisense strand to SEQ ID NO: 2037852
ugagaaguaacguucugau

SEQ ID NO: 2037854 - RNA, 19 nt, Artificial Sequence
  Description of Artificial Sequence: Synthetic oligonucleotide
  Sense strand starting at position 582 of SEQ ID NO: 1881353
acuuaucaagguuauaguu

SEQ ID NO: 2037855 - RNA, 19 nt, Artificial Sequence
  Description of Artificial Sequence: Synthetic oligonucleotide
  Antisense strand to SEQ ID NO: 2037854
aacuauaaccuugauaagu

SEQ ID NO: 2037856 - RNA, 19 nt, Artificial Sequence
  Description of Artificial Sequence: Synthetic oligonucleotide
  Sense strand starting at position 592 of SEQ ID NO: 1881353
guuauaguucgugcuucua

SEQ ID NO: 2037857 - RNA, 19 nt, Artificial Sequence
  Description of Artificial Sequence: Synthetic oligonucleotide
  Antisense strand to SEQ ID NO: 2037856
uagaagcacgaacuauaac

SEQ ID NO: 2037858 - RNA, 19 nt, Artificial Sequence
  Description of Artificial Sequence: Synthetic oligonucleotide
  Sense strand starting at position 626 of SEQ ID NO: 1881353
gcuaaugcauaucuagaga

SEQ ID NO: 2037859 - RNA, 19 nt, Artificial Sequence
  Description of Artificial Sequence: Synthetic oligonucleotide
  Antisense strand to SEQ ID NO: 2037858
ucucuagauaugcauuagc

SEQ ID NO: 2037860 - RNA, 19 nt, Artificial Sequence
  Description of Artificial Sequence: Synthetic oligonucleotide
  Sense strand starting at position 715 of SEQ ID NO: 1881353
caggcaucuugagcauuau

SEQ ID NO: 2037861 - RNA, 19 nt, Artificial Sequence
  Description of Artificial Sequence: Synthetic oligonucleotide
  Antisense strand to SEQ ID NO: 2037860
auaaugcucaagaugccug

SEQ ID NO: 2037862 - RNA, 19 nt, Artificial Sequence
  Description of Artificial Sequence: Synthetic oligonucleotide
  Sense strand starting at position 716 of SEQ ID NO: 1881353
aggcaucuugagcauuauu

SEQ ID NO: 2037863 - RNA, 19 nt, Artificial Sequence
  Description of Artificial Sequence: Synthetic oligonucleotide
  Antisense strand to SEQ ID NO: 2037862
aauaaugcucaagaugccu

SEQ ID NO: 2037864 - RNA, 19 nt, Artificial Sequence
  Description of Artificial Sequence: Synthetic oligonucleotide
  Sense strand starting at position 849 of SEQ ID NO: 1881353
gcaguuauguaauccauuu

SEQ ID NO: 2037865 - RNA, 19 nt, Artificial Sequence
  Description of Artificial Sequence: Synthetic oligonucleotide
  Antisense strand to SEQ ID NO: 2037864
aaauggauuacauaacugc

SEQ ID NO: 2037866 - RNA, 19 nt, Artificial Sequence
  Description of Artificial Sequence: Synthetic oligonucleotide
  Sense strand starting at position 952 of SEQ ID NO: 1881353
acaaauauuugguauggua

SEQ ID NO: 2037867 - RNA, 19 nt, Artificial Sequence
  Description of Artificial Sequence: Synthetic oligonucleotide
  Antisense strand to SEQ ID NO: 2037866
uaccauaccaaauauuugu

SEQ ID NO: 2037868 - RNA, 19 nt, Artificial Sequence
  Description of Artificial Sequence: Synthetic oligonucleotide
  Sense strand starting at position 1025 of SEQ ID NO: 1881353
cucuaaacguguuuaacug

SEQ ID NO: 2037869 - RNA, 19 nt, Artificial Sequence
  Description of Artificial Sequence: Synthetic oligonucleotide
  Antisense strand to SEQ ID NO: 2037868
caguuaaacacguuuagag

SEQ ID NO: 2037870 - RNA, 19 nt, Artificial Sequence
  Description of Artificial Sequence: Synthetic oligonucleotide
  Sense strand starting at position 1029 of SEQ ID NO: 1881353
aaacguguuuaacugccaa

SEQ ID NO: 2037871 - RNA, 19 nt, Artificial Sequence
  Description of Artificial Sequence: Synthetic oligonucleotide
  Antisense strand to SEQ ID NO: 2037870
uuggcaguuaaacacguuu

SEQ ID NO: 2037872 - RNA, 19 nt, Artificial Sequence
  Description of Artificial Sequence: Synthetic oligonucleotide
  Sense strand starting at position 1049 of SEQ ID NO: 1881353
cagcuaccugcauguuaga

SEQ ID NO: 2037873 - RNA, 19 nt, Artificial Sequence
  Description of Artificial Sequence: Synthetic oligonucleotide
  Antisense strand to SEQ ID NO: 2037872
ucuaacaugcagguagcug

SEQ ID NO: 2037874 - RNA, 19 nt, Artificial Sequence
  Description of Artificial Sequence: Synthetic oligonucleotide
  Sense strand starting at position 1214 of SEQ ID NO: 1881353
cagugugcuguuucgcuua

SEQ ID NO: 2037875 - RNA, 19 nt, Artificial Sequence
  Description of Artificial Sequence: Synthetic oligonucleotide
  Antisense strand to SEQ ID NO: 2037874
uaagcgaaacagcacacug

SEQ ID NO: 2037876 - RNA, 19 nt, Artificial Sequence
  Description of Artificial Sequence: Synthetic oligonucleotide
  Sense strand starting at position 1291 of SEQ ID NO: 1881353
gcugcuaucgacuccugua

SEQ ID NO: 2037877 - RNA, 19 nt, Artificial Sequence
  Description of Artificial Sequence: Synthetic oligonucleotide
  Antisense strand to SEQ ID NO: 2037876
uacaggagucgauagcagc

SEQ ID NO: 2037878 - RNA, 19 nt, Artificial Sequence
  Description of Artificial Sequence: Synthetic oligonucleotide
  Sense strand starting at position 1534 of SEQ ID NO: 1881353
ccacaaucugggcaauguu

SEQ ID NO: 2037879 - RNA, 19 nt, Artificial Sequence
  Description of Artificial Sequence: Synthetic oligonucleotide
  Antisense strand to SEQ ID NO: 2037878
aacauugcccagauugugg

SEQ ID NO: 2037880 - RNA, 19 nt, Artificial Sequence
  Description of Artificial Sequence: Synthetic oligonucleotide
  Sense strand starting at position 1643 of SEQ ID NO: 1881353
auuccuugauuugauguua

SEQ ID NO: 2037881 - RNA, 19 nt, Artificial Sequence
  Description of Artificial Sequence: Synthetic oligonucleotide
  Antisense strand to SEQ ID NO: 2037880
uaacaucaaaucaaggaau

SEQ ID NO: 2037882 - RNA, 19 nt, Artificial Sequence
  Description of Artificial Sequence: Synthetic oligonucleotide
  Sense strand starting at position 1712 of SEQ ID NO: 1881353
ccaagaugcuggcuucuca

SEQ ID NO: 2037883 - RNA, 19 nt, Artificial Sequence
  Description of Artificial Sequence: Synthetic oligonucleotide
  Antisense strand to SEQ ID NO: 2037882
ugagaagccagcaucuugg

SEQ ID NO: 2037884 - RNA, 19 nt, Artificial Sequence
  Description of Artificial Sequence: Synthetic oligonucleotide
  Sense strand starting at position 1723 of SEQ ID NO: 1881353
gcuucucaccugugaauau

SEQ ID NO: 2037885 - RNA, 19 nt, Artificial Sequence
  Description of Artificial Sequence: Synthetic oligonucleotide
  Antisense strand to SEQ ID NO: 2037884
auauucacaggugagaagc

SEQ ID NO: 2037886 - RNA, 19 nt, Artificial Sequence
  Description of Artificial Sequence: Synthetic oligonucleotide
  Sense strand starting at position 2111 of SEQ ID NO: 1881353
gucaccaugcugcaaauua

SEQ ID NO: 2037887 - RNA, 19 nt, Artificial Sequence
  Description of Artificial Sequence: Synthetic oligonucleotide
  Antisense strand to SEQ ID NO: 2037886
uaauuugcagcauggugac

SEQ ID NO: 2037888 - RNA, 19 nt, Artificial Sequence
  Description of Artificial Sequence: Synthetic oligonucleotide
  Sense strand starting at position 2151 of SEQ ID NO: 1881353
accagucaggucgguauuu

SEQ ID NO: 2037889 - RNA, 19 nt, Artificial Sequence
  Description of Artificial Sequence: Synthetic oligonucleotide
  Antisense strand to SEQ ID NO: 2037888
aaauaccgaccugacuggu

SEQ ID NO: 2037890 - RNA, 19 nt, Artificial Sequence
  Description of Artificial Sequence: Synthetic oligonucleotide
  Sense strand starting at position 2152 of SEQ ID NO: 1881353
ccagucaggucgguauuua

SEQ ID NO: 2037891 - RNA, 19 nt, Artificial Sequence
  Description of Artificial Sequence: Synthetic oligonucleotide
  Antisense strand to SEQ ID NO: 2037890
uaaauaccgaccugacugg

SEQ ID NO: 2037892 - RNA, 19 nt, Artificial Sequence
  Description of Artificial Sequence: Synthetic oligonucleotide
  Sense strand starting at position 2301 of SEQ ID NO: 1881353
ucugaauccugcuuuagug

SEQ ID NO: 2037893 - RNA, 19 nt, Artificial Sequence
  Description of Artificial Sequence: Synthetic oligonucleotide
  Antisense strand to SEQ ID NO: 2037892
cacuaaagcaggauucaga

SEQ ID NO: 2037894 - RNA, 19 nt, Artificial Sequence
  Description of Artificial Sequence: Synthetic oligonucleotide
  Sense strand starting at position 2305 of SEQ ID NO: 1881353
aauccugcuuuaguggaaa

SEQ ID NO: 2037895 - RNA, 19 nt, Artificial Sequence
  Description of Artificial Sequence: Synthetic oligonucleotide
  Antisense strand to SEQ ID NO: 2037894
uuuccacuaaagcaggauu

SEQ ID NO: 2037896 - RNA, 19 nt, Artificial Sequence
  Description of Artificial Sequence: Synthetic oligonucleotide
  Sense strand starting at position 2479 of SEQ ID NO: 1881353
cuuccauuccuguaauguu

SEQ ID NO: 2037897 - RNA, 19 nt, Artificial Sequence
  Description of Artificial Sequence: Synthetic oligonucleotide
  Antisense strand to SEQ ID NO: 2037896
aacauuacaggaauggaag

SEQ ID NO: 2037898 - RNA, 19 nt, Artificial Sequence
  Description of Artificial Sequence: Synthetic oligonucleotide
  Sense strand starting at position 2486 of SEQ ID NO: 1881353
uccuguaauguuuagaagu

SEQ ID NO: 2037899 - RNA, 19 nt, Artificial Sequence
  Description of Artificial Sequence: Synthetic oligonucleotide
  Antisense strand to SEQ ID NO: 2037898
acuucuaaacauuacagga

SEQ ID NO: 2037900 - RNA, 19 nt, Artificial Sequence
  Description of Artificial Sequence: Synthetic oligonucleotide
  Sense strand starting at position 2606 of SEQ ID NO: 1881353
gcacuuagagcccagaguu

SEQ ID NO: 2037901 - RNA, 19 nt, Artificial Sequence
  Description of Artificial Sequence: Synthetic oligonucleotide
  Antisense strand to SEQ ID NO: 2037900
aacucugggcucuaagugc

SEQ ID NO: 2037902 - RNA, 19 nt, Artificial Sequence
  Description of Artificial Sequence: Synthetic oligonucleotide
  Sense strand starting at position 2742 of SEQ ID NO: 1881353
ucauucuguuaggucuaau

SEQ ID NO: 2037903 - RNA, 19 nt, Artificial Sequence
  Description of Artificial Sequence: Synthetic oligonucleotide
  Antisense strand to SEQ ID NO: 2037902
auuagaccuaacagaauga

SEQ ID NO: 2037904 - RNA, 19 nt, Artificial Sequence
  Description of Artificial Sequence: Synthetic oligonucleotide
  Sense strand starting at position 2745 of SEQ ID NO: 1881353
uucuguuaggucuaaugag

SEQ ID NO: 2037905 - RNA, 19 nt, Artificial Sequence
  Description of Artificial Sequence: Synthetic oligonucleotide
  Antisense strand to SEQ ID NO: 2037904
cucauuagaccuaacagaa

SEQ ID NO: 2037906 - RNA, 19 nt, Artificial Sequence
  Description of Artificial Sequence: Synthetic oligonucleotide
  Sense strand starting at position 2753 of SEQ ID NO: 1881353
ggucuaaugagauauugca

SEQ ID NO: 2037907 - RNA, 19 nt, Artificial Sequence
  Description of Artificial Sequence: Synthetic oligonucleotide
  Antisense strand to SEQ ID NO: 2037906
ugcaauaucucauuagacc

SEQ ID NO: 2037908 - RNA, 19 nt, Artificial Sequence
  Description of Artificial Sequence: Synthetic oligonucleotide
  Sense strand starting at position 3190 of SEQ ID NO: 1881353
ugucuuacuacggaaugaa

SEQ ID NO: 2037909 - RNA, 19 nt, Artificial Sequence
  Description of Artificial Sequence: Synthetic oligonucleotide
  Antisense strand to SEQ ID NO: 2037908
uucauuccguaguaagaca

SEQ ID NO: 2037910 - RNA, 19 nt, Artificial Sequence
  Description of Artificial Sequence: Synthetic oligonucleotide
  Sense strand starting at position 3209 of SEQ ID NO: 1881353
gguagacagaguuaugcau

SEQ ID NO: 2037911 - RNA, 19 nt, Artificial Sequence
  Description of Artificial Sequence: Synthetic oligonucleotide
  Antisense strand to SEQ ID NO: 2037910
augcauaacucugucuacc

SEQ ID NO: 2037912 - RNA, 19 nt, Artificial Sequence
  Description of Artificial Sequence: Synthetic oligonucleotide
  Sense strand starting at position 3329 of SEQ ID NO: 1881353
aguaaugcuuaccugaaua

SEQ ID NO: 2037913 - RNA, 19 nt, Artificial Sequence
  Description of Artificial Sequence: Synthetic oligonucleotide
  Antisense strand to SEQ ID NO: 2037912
uauucagguaagcauuacu

SEQ ID NO: 2037914 - RNA, 19 nt, Artificial Sequence
  Description of Artificial Sequence: Synthetic oligonucleotide
  Sense strand starting at position 3482 of SEQ ID NO: 1881353
agaucuacucagugauaca

SEQ ID NO: 2037915 - RNA, 19 nt, Artificial Sequence
  Description of Artificial Sequence: Synthetic oligonucleotide
  Antisense strand to SEQ ID NO: 2037914
uguaucacugaguagaucu

SEQ ID NO: 2037916 - RNA, 19 nt, Artificial Sequence
  Description of Artificial Sequence: Synthetic oligonucleotide
  Sense strand starting at position 3550 of SEQ ID NO: 1881353
agacaauacuuacaaaggu

SEQ ID NO: 2037917 - RNA, 19 nt, Artificial Sequence
  Description of Artificial Sequence: Synthetic oligonucleotide
  Antisense strand to SEQ ID NO: 2037916
accuuuguaaguauugucu

SEQ ID NO: 2037918 - RNA, 19 nt, Artificial Sequence
  Description of Artificial Sequence: Synthetic oligonucleotide
  Sense strand starting at position 3749 of SEQ ID NO: 1881353
auuauuauuccgcagaacu

SEQ ID NO: 2037919 - RNA, 19 nt, Artificial Sequence
  Description of Artificial Sequence: Synthetic oligonucleotide
  Antisense strand to SEQ ID NO: 2037918
aguucugcggaauaauaau

SEQ ID NO: 2037920 - RNA, 19 nt, Artificial Sequence
  Description of Artificial Sequence: Synthetic oligonucleotide
  Sense strand starting at position 3759 of SEQ ID NO: 1881353
cgcagaacuccaggaucaa

SEQ ID NO: 2037921 - RNA, 19 nt, Artificial Sequence
  Description of Artificial Sequence: Synthetic oligonucleotide
  Antisense strand to SEQ ID NO: 2037920
uugauccuggaguucugcg

SEQ ID NO: 2037922 - RNA, 19 nt, Artificial Sequence
  Description of Artificial Sequence: Synthetic oligonucleotide
  Sense strand starting at position 3971 of SEQ ID NO: 1881353
agaauaacguuuccuacau

SEQ ID NO: 2037923 - RNA, 19 nt, Artificial Sequence
  Description of Artificial Sequence: Synthetic oligonucleotide
  Antisense strand to SEQ ID NO: 2037922
auguaggaaacguuauucu

SEQ ID NO: 2037924 - RNA, 19 nt, Artificial Sequence
  Description of Artificial Sequence: Synthetic oligonucleotide
  Sense strand starting at position 65 of SEQ ID NO: 1881354
cugaguaucucccuugaga

SEQ ID NO: 2037925 - RNA, 19 nt, Artificial Sequence
  Description of Artificial Sequence: Synthetic oligonucleotide
  Antisense strand to SEQ ID NO: 2037924
ucucaagggagauacucag

SEQ ID NO: 2037926 - RNA, 19 nt, Artificial Sequence
  Description of Artificial Sequence: Synthetic oligonucleotide
  Sense strand starting at position 67 of SEQ ID NO: 1881354
gaguaucucccuugagaag

SEQ ID NO: 2037927 - RNA, 19 nt, Artificial Sequence
  Description of Artificial Sequence: Synthetic oligonucleotide
  Antisense strand to SEQ ID NO: 2037926
cuucucaagggagauacuc

SEQ ID NO: 2037928 - RNA, 19 nt, Artificial Sequence
  Description of Artificial Sequence: Synthetic oligonucleotide
  Sense strand starting at position 342 of SEQ ID NO: 1881354
ucauccaguguugaacaau

SEQ ID NO: 2037929 - RNA, 19 nt, Artificial Sequence
  Description of Artificial Sequence: Synthetic oligonucleotide
  Antisense strand to SEQ ID NO: 2037928
auuguucaacacuggauga

SEQ ID NO: 2037930 - RNA, 19 nt, Artificial Sequence
  Description of Artificial Sequence: Synthetic oligonucleotide
  Sense strand starting at position 345 of SEQ ID NO: 1881354
uccaguguugaacaauaau

SEQ ID NO: 2037931 - RNA, 19 nt, Artificial Sequence
  Description of Artificial Sequence: Synthetic oligonucleotide
  Antisense strand to SEQ ID NO: 2037930
auuauuguucaacacugga

SEQ ID NO: 2037932 - RNA, 19 nt, Artificial Sequence
  Description of Artificial Sequence: Synthetic oligonucleotide
  Sense strand starting at position 567 of SEQ ID NO: 1881354
uguuuagauuucuauagga

SEQ ID NO: 2037933 - RNA, 19 nt, Artificial Sequence
  Description of Artificial Sequence: Synthetic oligonucleotide
  Antisense strand to SEQ ID NO: 2037932
uccuauagaaaucuaaaca

SEQ ID NO: 2037934 - RNA, 19 nt, Artificial Sequence
  Description of Artificial Sequence: Synthetic oligonucleotide
  Sense strand starting at position 679 of SEQ ID NO: 1881354
ucccuaauguucuuugaga

SEQ ID NO: 2037935 - RNA, 19 nt, Artificial Sequence
  Description of Artificial Sequence: Synthetic oligonucleotide
  Antisense strand to SEQ ID NO: 2037934
ucucaaagaacauuaggga

SEQ ID NO: 2037936 - RNA, 19 nt, Artificial Sequence
  Description of Artificial Sequence: Synthetic oligonucleotide
  Sense strand starting at position 680 of SEQ ID NO: 1881354
cccuaauguucuuugagaa

SEQ ID NO: 2037937 - RNA, 19 nt, Artificial Sequence
  Description of Artificial Sequence: Synthetic oligonucleotide
  Antisense strand to SEQ ID NO: 2037936
uucucaaagaacauuaggg

SEQ ID NO: 2037938 - RNA, 19 nt, Artificial Sequence
  Description of Artificial Sequence: Synthetic oligonucleotide
  Sense strand starting at position 681 of SEQ ID NO: 1881354
ccuaauguucuuugagaaa

SEQ ID NO: 2037939 - RNA, 19 nt, Artificial Sequence
  Description of Artificial Sequence: Synthetic oligonucleotide
  Antisense strand to SEQ ID NO: 2037938
uuucucaaagaacauuagg

SEQ ID NO: 2037940 - RNA, 19 nt, Artificial Sequence
  Description of Artificial Sequence: Synthetic oligonucleotide
  Sense strand starting at position 855 of SEQ ID NO: 1881354
gcuguaauggcagaauaag

SEQ ID NO: 2037941 - RNA, 19 nt, Artificial Sequence
  Description of Artificial Sequence: Synthetic oligonucleotide
  Antisense strand to SEQ ID NO: 2037940
cuuauucugccauuacagc

SEQ ID NO: 2037942 - RNA, 19 nt, Artificial Sequence
  Description of Artificial Sequence: Synthetic oligonucleotide
  Sense strand starting at position 863 of SEQ ID NO: 1881354
ggcagaauaaguuaguucu

SEQ ID NO: 2037943 - RNA, 19 nt, Artificial Sequence
  Description of Artificial Sequence: Synthetic oligonucleotide
  Antisense strand to SEQ ID NO: 2037942
agaacuaacuuauucugcc

SEQ ID NO: 2037944 - RNA, 19 nt, Artificial Sequence
  Description of Artificial Sequence: Synthetic oligonucleotide
  Sense strand starting at position 876 of SEQ ID NO: 1881354
aguucucucaugggcaaga

SEQ ID NO: 2037945 - RNA, 19 nt, Artificial Sequence
  Description of Artificial Sequence: Synthetic oligonucleotide
  Antisense strand to SEQ ID NO: 2037944
ucuugcccaugagagaacu

SEQ ID NO: 2037946 - RNA, 19 nt, Artificial Sequence
  Description of Artificial Sequence: Synthetic oligonucleotide
  Sense strand starting at position 980 of SEQ ID NO: 1881354
gcuggaguuccauaaucuu

SEQ ID NO: 2037947 - RNA, 19 nt, Artificial Sequence
  Description of Artificial Sequence: Synthetic oligonucleotide
  Antisense strand to SEQ ID NO: 2037946
aagauuauggaacuccagc

SEQ ID NO: 2037948 - RNA, 19 nt, Artificial Sequence
  Description of Artificial Sequence: Synthetic oligonucleotide
  Sense strand starting at position 1078 of SEQ ID NO: 1881354
acuugcaguguuuaagaaa

SEQ ID NO: 2037949 - RNA, 19 nt, Artificial Sequence
  Description of Artificial Sequence: Synthetic oligonucleotide
  Antisense strand to SEQ ID NO: 2037948
uuucuuaaacacugcaagu

SEQ ID NO: 2037950 - RNA, 19 nt, Artificial Sequence
  Description of Artificial Sequence: Synthetic oligonucleotide
  Sense strand starting at position 1140 of SEQ ID NO: 1881354
cagaauucccaagguggua

SEQ ID NO: 2037951 - RNA, 19 nt, Artificial Sequence
  Description of Artificial Sequence: Synthetic oligonucleotide
  Antisense strand to SEQ ID NO: 2037950
uaccaccuugggaauucug

SEQ ID NO: 2037952 - RNA, 19 nt, Artificial Sequence
  Description of Artificial Sequence: Synthetic oligonucleotide
  Sense strand starting at position 1153 of SEQ ID NO: 1881354
gugguaaucuaaucacaua

SEQ ID NO: 2037953 - RNA, 19 nt, Artificial Sequence
  Description of Artificial Sequence: Synthetic oligonucleotide
  Antisense strand to SEQ ID NO: 2037952
uaugugauuagauuaccac

SEQ ID NO: 2037954 - RNA, 19 nt, Artificial Sequence
  Description of Artificial Sequence: Synthetic oligonucleotide
  Sense strand starting at position 1211 of SEQ ID NO: 1881354
uuagaugguucccuaguaa

SEQ ID NO: 2037955 - RNA, 19 nt, Artificial Sequence
  Description of Artificial Sequence: Synthetic oligonucleotide
  Antisense strand to SEQ ID NO: 2037954
uuacuagggaaccaucuaa

SEQ ID NO: 2037956 - RNA, 19 nt, Artificial Sequence
  Description of Artificial Sequence: Synthetic oligonucleotide
  Sense strand starting at position 1300 of SEQ ID NO: 1881354
uuagucauagcagauuacu

SEQ ID NO: 2037957 - RNA, 19 nt, Artificial Sequence
  Description of Artificial Sequence: Synthetic oligonucleotide
  Antisense strand to SEQ ID NO: 2037956
aguaaucugcuaugacuaa

SEQ ID NO: 2037958 - RNA, 19 nt, Artificial Sequence
  Description of Artificial Sequence: Synthetic oligonucleotide
  Sense strand starting at position 1306 of SEQ ID NO: 1881354
auagcagauuacuccauga

SEQ ID NO: 2037959 - RNA, 19 nt, Artificial Sequence
  Description of Artificial Sequence: Synthetic oligonucleotide
  Antisense strand to SEQ ID NO: 2037958
ucauggaguaaucugcuau

SEQ ID NO: 2037960 - RNA, 19 nt, Artificial Sequence
  Description of Artificial Sequence: Synthetic oligonucleotide
  Sense strand starting at position 1308 of SEQ ID NO: 1881354
agcagauuacuccaugagu

SEQ ID NO: 2037961 - RNA, 19 nt, Artificial Sequence
  Description of Artificial Sequence: Synthetic oligonucleotide
  Antisense strand to SEQ ID NO: 2037960
acucauggaguaaucugcu

SEQ ID NO: 2037962 - RNA, 19 nt, Artificial Sequence
  Description of Artificial Sequence: Synthetic oligonucleotide
  Sense strand starting at position 1885 of SEQ ID NO: 1881354
uuauccagccacugaugaa

SEQ ID NO: 2037963 - RNA, 19 nt, Artificial Sequence
  Description of Artificial Sequence: Synthetic oligonucleotide
  Antisense strand to SEQ ID NO: 2037962
uucaucaguggcuggauaa

SEQ ID NO: 2037964 - RNA, 19 nt, Artificial Sequence
  Description of Artificial Sequence: Synthetic oligonucleotide
  Sense strand starting at position 2024 of SEQ ID NO: 1881354
cucuuuaugcucuaagaag

SEQ ID NO: 2037965 - RNA, 19 nt, Artificial Sequence
  Description of Artificial Sequence: Synthetic oligonucleotide
  Antisense strand to SEQ ID NO: 2037964
cuucuuagagcauaaagag

SEQ ID NO: 2037966 - RNA, 19 nt, Artificial Sequence
  Description of Artificial Sequence: Synthetic oligonucleotide
  Sense strand starting at position 2036 of SEQ ID NO: 1881354
uaagaaguuuaagugacuu

SEQ ID NO: 2037967 - RNA, 19 nt, Artificial Sequence
  Description of Artificial Sequence: Synthetic oligonucleotide
  Antisense strand to SEQ ID NO: 2037966
aagucacuuaaacuucuua

SEQ ID NO: 2037968 - RNA, 19 nt, Artificial Sequence
  Description of Artificial Sequence: Synthetic oligonucleotide
  Sense strand starting at position 2076 of SEQ ID NO: 1881354
ccaguaacuguguaccaaa

SEQ ID NO: 2037969 - RNA, 19 nt, Artificial Sequence
  Description of Artificial Sequence: Synthetic oligonucleotide
  Antisense strand to SEQ ID NO: 2037968
uuugguacacaguuacugg

SEQ ID NO: 2037970 - RNA, 19 nt, Artificial Sequence
  Description of Artificial Sequence: Synthetic oligonucleotide
  Sense strand starting at position 2083 of SEQ ID NO: 1881354
cuguguaccaaauggagaa

SEQ ID NO: 2037971 - RNA, 19 nt, Artificial Sequence
  Description of Artificial Sequence: Synthetic oligonucleotide
  Antisense strand to SEQ ID NO: 2037970
uucuccauuugguacacag

SEQ ID NO: 2037972 - RNA, 19 nt, Artificial Sequence
  Description of Artificial Sequence: Synthetic oligonucleotide
  Sense strand starting at position 2174 of SEQ ID NO: 1881354
gugggaaggugaagaaauu

SEQ ID NO: 2037973 - RNA, 19 nt, Artificial Sequence
  Description of Artificial Sequence: Synthetic oligonucleotide
  Antisense strand to SEQ ID NO: 2037972
aauuucuucaccuucccac

SEQ ID NO: 2037974 - RNA, 19 nt, Artificial Sequence
  Description of Artificial Sequence: Synthetic oligonucleotide
  Sense strand starting at position 2206 of SEQ ID NO: 1881354
gcagcuucucuguuauggu

SEQ ID NO: 2037975 - RNA, 19 nt, Artificial Sequence
  Description of Artificial Sequence: Synthetic oligonucleotide
  Antisense strand to SEQ ID NO: 2037974
accauaacagagaagcugc

SEQ ID NO: 2037976 - RNA, 19 nt, Artificial Sequence
  Description of Artificial Sequence: Synthetic oligonucleotide
  Sense strand starting at position 2953 of SEQ ID NO: 1881354
cucagauguuuccuacuua

SEQ ID NO: 2037977 - RNA, 19 nt, Artificial Sequence
  Description of Artificial Sequence: Synthetic oligonucleotide
  Antisense strand to SEQ ID NO: 2037976
uaaguaggaaacaucugag

SEQ ID NO: 2037978 - RNA, 19 nt, Artificial Sequence
  Description of Artificial Sequence: Synthetic oligonucleotide
  Sense strand starting at position 2996 of SEQ ID NO: 1881354
acugaagaucccuguaaag

SEQ ID NO: 2037979 - RNA, 19 nt, Artificial Sequence
  Description of Artificial Sequence: Synthetic oligonucleotide
  Antisense strand to SEQ ID NO: 2037978
cuuuacagggaucuucagu

SEQ ID NO: 2037980 - RNA, 19 nt, Artificial Sequence
  Description of Artificial Sequence: Synthetic oligonucleotide
  Sense strand starting at position 3057 of SEQ ID NO: 1881354
ccuacuugaucagugauga

SEQ ID NO: 2037981 - RNA, 19 nt, Artificial Sequence
  Description of Artificial Sequence: Synthetic oligonucleotide
  Antisense strand to SEQ ID NO: 2037980
ucaucacugaucaaguagg

SEQ ID NO: 2037982 - RNA, 19 nt, Artificial Sequence
  Description of Artificial Sequence: Synthetic oligonucleotide
  Sense strand starting at position 3058 of SEQ ID NO: 1881354
cuacuugaucagugaugaa

SEQ ID NO: 2037983 - RNA, 19 nt, Artificial Sequence
  Description of Artificial Sequence: Synthetic oligonucleotide
  Antisense strand to SEQ ID NO: 2037982
uucaucacugaucaaguag

SEQ ID NO: 2037984 - RNA, 19 nt, Artificial Sequence
  Description of Artificial Sequence: Synthetic oligonucleotide
  Sense strand starting at position 3092 of SEQ ID NO: 1881354
caagucagucaugguggaa

SEQ ID NO: 2037985 - RNA, 19 nt, Artificial Sequence
  Description of Artificial Sequence: Synthetic oligonucleotide
  Antisense strand to SEQ ID NO: 2037984
uuccaccaugacugacuug

SEQ ID NO: 2037986 - RNA, 19 nt, Artificial Sequence
  Description of Artificial Sequence: Synthetic oligonucleotide
  Sense strand starting at position 3209 of SEQ ID NO: 1881354
accugaaaugcagguauau

SEQ ID NO: 2037987 - RNA, 19 nt, Artificial Sequence
  Description of Artificial Sequence: Synthetic oligonucleotide
  Antisense strand to SEQ ID NO: 2037986
auauaccugcauuucaggu

SEQ ID NO: 2037988 - RNA, 19 nt, Artificial Sequence
  Description of Artificial Sequence: Synthetic oligonucleotide
  Sense strand starting at position 3218 of SEQ ID NO: 1881354
gcagguauaugauuucugu

SEQ ID NO: 2037989 - RNA, 19 nt, Artificial Sequence
  Description of Artificial Sequence: Synthetic oligonucleotide
  Antisense strand to SEQ ID NO: 2037988
acagaaaucauauaccugc

SEQ ID NO: 2037990 - RNA, 19 nt, Artificial Sequence
  Description of Artificial Sequence: Synthetic oligonucleotide
  Sense strand starting at position 3545 of SEQ ID NO: 1881354
ccauauugccaugagcuau

SEQ ID NO: 2037991 - RNA, 19 nt, Artificial Sequence
  Description of Artificial Sequence: Synthetic oligonucleotide
  Antisense strand to SEQ ID NO: 2037990
auagcucauggcaauaugg

SEQ ID NO: 2037992 - RNA, 19 nt, Artificial Sequence
  Description of Artificial Sequence: Synthetic oligonucleotide
  Sense strand starting at position 3593 of SEQ ID NO: 1881354
uauagauaagggugaguua

SEQ ID NO: 2037993 - RNA, 19 nt, Artificial Sequence
  Description of Artificial Sequence: Synthetic oligonucleotide
  Antisense strand to SEQ ID NO: 2037992
uaacucacccuuaucuaua

SEQ ID NO: 2037994 - RNA, 19 nt, Artificial Sequence
  Description of Artificial Sequence: Synthetic oligonucleotide
  Sense strand starting at position 3751 of SEQ ID NO: 1881354
aaucaaaucgcuggaaaug

SEQ ID NO: 2037995 - RNA, 19 nt, Artificial Sequence
  Description of Artificial Sequence: Synthetic oligonucleotide
  Antisense strand to SEQ ID NO: 2037994
cauuuccagcgauuugauu

SEQ ID NO: 2037996 - RNA, 19 nt, Artificial Sequence
  Description of Artificial Sequence: Synthetic oligonucleotide
  Sense strand starting at position 3848 of SEQ ID NO: 1881354
cagcaaaucggagagguau

SEQ ID NO: 2037997 - RNA, 19 nt, Artificial Sequence
  Description of Artificial Sequence: Synthetic oligonucleotide
  Antisense strand to SEQ ID NO: 2037996
auaccucuccgauuugcug

SEQ ID NO: 2037998 - RNA, 19 nt, Artificial Sequence
  Description of Artificial Sequence: Synthetic oligonucleotide
  Sense strand starting at position 3850 of SEQ ID NO: 1881354
gcaaaucggagagguauga

SEQ ID NO: 2037999 - RNA, 19 nt, Artificial Sequence
  Description of Artificial Sequence: Synthetic oligonucleotide
  Antisense strand to SEQ ID NO: 2037998
ucauaccucuccgauuugc

SEQ ID NO: 2038000 - RNA, 19 nt, Artificial Sequence
  Description of Artificial Sequence: Synthetic oligonucleotide
  Sense strand starting at position 3913 of SEQ ID NO: 1881354
aauagauaguaugugaucu

SEQ ID NO: 2038001 - RNA, 19 nt, Artificial Sequence
  Description of Artificial Sequence: Synthetic oligonucleotide
  Antisense strand to SEQ ID NO: 2038000
agaucacauacuaucuauu

SEQ ID NO: 2038002 - RNA, 19 nt, Artificial Sequence
  Description of Artificial Sequence: Synthetic oligonucleotide
  Sense strand starting at position 3917 of SEQ ID NO: 1881354
gauaguaugugaucuuaaa

SEQ ID NO: 2038003 - RNA, 19 nt, Artificial Sequence
  Description of Artificial Sequence: Synthetic oligonucleotide
  Antisense strand to SEQ ID NO: 2038002
uuuaagaucacauacuauc

SEQ ID NO: 2038004 - RNA, 19 nt, Artificial Sequence
  Description of Artificial Sequence: Synthetic oligonucleotide
  Sense strand starting at position 34 of SEQ ID NO: 1881355
ccguccugucaacauugaa

SEQ ID NO: 2038005 - RNA, 19 nt, Artificial Sequence
  Description of Artificial Sequence: Synthetic oligonucleotide
  Antisense strand to SEQ ID NO: 2038004
uucaauguugacaggacgg

SEQ ID NO: 2038006 - RNA, 19 nt, Artificial Sequence
  Description of Artificial Sequence: Synthetic oligonucleotide
  Sense strand starting at position 254 of SEQ ID NO: 1881355
ggcagagguucucuuugag

SEQ ID NO: 2038007 - RNA, 19 nt, Artificial Sequence
  Description of Artificial Sequence: Synthetic oligonucleotide
  Antisense strand to SEQ ID NO: 2038006
cucaaagagaaccucugcc

SEQ ID NO: 2038008 - RNA, 19 nt, Artificial Sequence
  Description of Artificial Sequence: Synthetic oligonucleotide
  Sense strand starting at position 257 of SEQ ID NO: 1881355
agagguucucuuugagaca

SEQ ID NO: 2038009 - RNA, 19 nt, Artificial Sequence
  Description of Artificial Sequence: Synthetic oligonucleotide
  Antisense strand to SEQ ID NO: 2038008
ugucucaaagagaaccucu

SEQ ID NO: 2038010 - RNA, 19 nt, Artificial Sequence
  Description of Artificial Sequence: Synthetic oligonucleotide
  Sense strand starting at position 691 of SEQ ID NO: 1881355
cgucaugacuggcuaagau

SEQ ID NO: 2038011 - RNA, 19 nt, Artificial Sequence
  Description of Artificial Sequence: Synthetic oligonucleotide
  Antisense strand to SEQ ID NO: 2038010
aucuuagccagucaugacg

SEQ ID NO: 2038012 - RNA, 19 nt, Artificial Sequence
  Description of Artificial Sequence: Synthetic oligonucleotide
  Sense strand starting at position 799 of SEQ ID NO: 1881355
cuagauauuuaguggcaca

SEQ ID NO: 2038013 - RNA, 19 nt, Artificial Sequence
  Description of Artificial Sequence: Synthetic oligonucleotide
  Antisense strand to SEQ ID NO: 2038012
ugugccacuaaauaucuag

SEQ ID NO: 2038014 - RNA, 19 nt, Artificial Sequence
  Description of Artificial Sequence: Synthetic oligonucleotide
  Sense strand starting at position 863 of SEQ ID NO: 1881355
cccagcauguauguugaaa

SEQ ID NO: 2038015 - RNA, 19 nt, Artificial Sequence
  Description of Artificial Sequence: Synthetic oligonucleotide
  Antisense strand to SEQ ID NO: 2038014
uuucaacauacaugcuggg

SEQ ID NO: 2038016 - RNA, 19 nt, Artificial Sequence
  Description of Artificial Sequence: Synthetic oligonucleotide
  Sense strand starting at position 1110 of SEQ ID NO: 1881355
cugcaaugagccgauauca

SEQ ID NO: 2038017 - RNA, 19 nt, Artificial Sequence
  Description of Artificial Sequence: Synthetic oligonucleotide
  Antisense strand to SEQ ID NO: 2038016
ugauaucggcucauugcag

SEQ ID NO: 2038018 - RNA, 19 nt, Artificial Sequence
  Description of Artificial Sequence: Synthetic oligonucleotide
  Sense strand starting at position 1165 of SEQ ID NO: 1881355
gcgagagacugucuugaag

SEQ ID NO: 2038019 - RNA, 19 nt, Artificial Sequence
  Description of Artificial Sequence: Synthetic oligonucleotide
  Antisense strand to SEQ ID NO: 2038018
cuucaagacagucucucgc

SEQ ID NO: 2038020 - RNA, 19 nt, Artificial Sequence
  Description of Artificial Sequence: Synthetic oligonucleotide
  Sense strand starting at position 1205 of SEQ ID NO: 1881355
aaaggaaggucauagguca

SEQ ID NO: 2038021 - RNA, 19 nt, Artificial Sequence
  Description of Artificial Sequence: Synthetic oligonucleotide
  Antisense strand to SEQ ID NO: 2038020
ugaccuaugaccuuccuuu

SEQ ID NO: 2038022 - RNA, 19 nt, Artificial Sequence
  Description of Artificial Sequence: Synthetic oligonucleotide
  Sense strand starting at position 1227 of SEQ ID NO: 1881355
gggcgauuucuauggcuca

SEQ ID NO: 2038023 - RNA, 19 nt, Artificial Sequence
  Description of Artificial Sequence: Synthetic oligonucleotide
  Antisense strand to SEQ ID NO: 2038022
ugagccauagaaaucgccc

SEQ ID NO: 2038024 - RNA, 19 nt, Artificial Sequence
  Description of Artificial Sequence: Synthetic oligonucleotide
  Sense strand starting at position 1258 of SEQ ID NO: 1881355
aucucuuaacaguggaguu

SEQ ID NO: 2038025 - RNA, 19 nt, Artificial Sequence
  Description of Artificial Sequence: Synthetic oligonucleotide
  Antisense strand to SEQ ID NO: 2038024
aacuccacuguuaagagau

SEQ ID NO: 2038026 - RNA, 19 nt, Artificial Sequence
  Description of Artificial Sequence: Synthetic oligonucleotide
  Sense strand starting at position 1565 of SEQ ID NO: 1881355
gcgcccggccugaguuauu

SEQ ID NO: 2038027 - RNA, 19 nt, Artificial Sequence
  Description of Artificial Sequence: Synthetic oligonucleotide
  Antisense strand to SEQ ID NO: 2038026
aauaacucaggccgggcgc

SEQ ID NO: 2038028 - RNA, 19 nt, Artificial Sequence
  Description of Artificial Sequence: Synthetic oligonucleotide
  Sense strand starting at position 1597 of SEQ ID NO: 1881355
gucuuucuaugucucacaa

SEQ ID NO: 2038029 - RNA, 19 nt, Artificial Sequence
  Description of Artificial Sequence: Synthetic oligonucleotide
  Antisense strand to SEQ ID NO: 2038028
uugugagacauagaaagac

SEQ ID NO: 2038030 - RNA, 19 nt, Artificial Sequence
  Description of Artificial Sequence: Synthetic oligonucleotide
  Sense strand starting at position 1609 of SEQ ID NO: 1881355
cucacaaugucuguaagcu

SEQ ID NO: 2038031 - RNA, 19 nt, Artificial Sequence
  Description of Artificial Sequence: Synthetic oligonucleotide
  Antisense strand to SEQ ID NO: 2038030
agcuuacagacauugugag

SEQ ID NO: 2038032 - RNA, 19 nt, Artificial Sequence
  Description of Artificial Sequence: Synthetic oligonucleotide
  Sense strand starting at position 1610 of SEQ ID NO: 1881355
ucacaaugucuguaagcuu

SEQ ID NO: 2038033 - RNA, 19 nt, Artificial Sequence
  Description of Artificial Sequence: Synthetic oligonucleotide
  Antisense strand to SEQ ID NO: 2038032
aagcuuacagacauuguga

SEQ ID NO: 2038034 - RNA, 19 nt, Artificial Sequence
  Description of Artificial Sequence: Synthetic oligonucleotide
  Sense strand starting at position 1617 of SEQ ID NO: 1881355
gucuguaagcuuuauuucu

SEQ ID NO: 2038035 - RNA, 19 nt, Artificial Sequence
  Description of Artificial Sequence: Synthetic oligonucleotide
  Antisense strand to SEQ ID NO: 2038034
agaaauaaagcuuacagac

SEQ ID NO: 2038036 - RNA, 19 nt, Artificial Sequence
  Description of Artificial Sequence: Synthetic oligonucleotide
  Sense strand starting at position 1840 of SEQ ID NO: 1881355
ucucaaguuuacucuaugu

SEQ ID NO: 2038037 - RNA, 19 nt, Artificial Sequence
  Description of Artificial Sequence: Synthetic oligonucleotide
  Antisense strand to SEQ ID NO: 2038036
acauagaguaaacuugaga

SEQ ID NO: 2038038 - RNA, 19 nt, Artificial Sequence
  Description of Artificial Sequence: Synthetic oligonucleotide
  Sense strand starting at position 1844 of SEQ ID NO: 1881355
aaguuuacucuauguggca

SEQ ID NO: 2038039 - RNA, 19 nt, Artificial Sequence
  Description of Artificial Sequence: Synthetic oligonucleotide
  Antisense strand to SEQ ID NO: 2038038
ugccacauagaguaaacuu

SEQ ID NO: 2038040 - RNA, 19 nt, Artificial Sequence
  Description of Artificial Sequence: Synthetic oligonucleotide
  Sense strand starting at position 2053 of SEQ ID NO: 1881355
auuccaucauugguucuua

SEQ ID NO: 2038041 - RNA, 19 nt, Artificial Sequence
  Description of Artificial Sequence: Synthetic oligonucleotide
  Antisense strand to SEQ ID NO: 2038040
uaagaaccaaugauggaau

SEQ ID NO: 2038042 - RNA, 19 nt, Artificial Sequence
  Description of Artificial Sequence: Synthetic oligonucleotide
  Sense strand starting at position 2173 of SEQ ID NO: 1881355
uugguagcuuuaucucuaa

SEQ ID NO: 2038043 - RNA, 19 nt, Artificial Sequence
  Description of Artificial Sequence: Synthetic oligonucleotide
  Antisense strand to SEQ ID NO: 2038042
uuagagauaaagcuaccaa

SEQ ID NO: 2038044 - RNA, 19 nt, Artificial Sequence
  Description of Artificial Sequence: Synthetic oligonucleotide
  Sense strand starting at position 2195 of SEQ ID NO: 1881355
aaguaagugccuuagccaa

SEQ ID NO: 2038045 - RNA, 19 nt, Artificial Sequence
  Description of Artificial Sequence: Synthetic oligonucleotide
  Antisense strand to SEQ ID NO: 2038044
uuggcuaaggcacuuacuu

SEQ ID NO: 2038046 - RNA, 19 nt, Artificial Sequence
  Description of Artificial Sequence: Synthetic oligonucleotide
  Sense strand starting at position 2296 of SEQ ID NO: 1881355
ucaauagccuguguaagua

SEQ ID NO: 2038047 - RNA, 19 nt, Artificial Sequence
  Description of Artificial Sequence: Synthetic oligonucleotide
  Antisense strand to SEQ ID NO: 2038046
uacuuacacaggcuauuga

SEQ ID NO: 2038048 - RNA, 19 nt, Artificial Sequence
  Description of Artificial Sequence: Synthetic oligonucleotide
  Sense strand starting at position 2304 of SEQ ID NO: 1881355
cuguguaaguaccuaugaa

SEQ ID NO: 2038049 - RNA, 19 nt, Artificial Sequence
  Description of Artificial Sequence: Synthetic oligonucleotide
  Antisense strand to SEQ ID NO: 2038048
uucauagguacuuacacag

SEQ ID NO: 2038050 - RNA, 19 nt, Artificial Sequence
  Description of Artificial Sequence: Synthetic oligonucleotide
  Sense strand starting at position 2305 of SEQ ID NO: 1881355
uguguaaguaccuaugaag

SEQ ID NO: 2038051 - RNA, 19 nt, Artificial Sequence
  Description of Artificial Sequence: Synthetic oligonucleotide
  Antisense strand to SEQ ID NO: 2038050
cuucauagguacuuacaca

SEQ ID NO: 2038052 - RNA, 19 nt, Artificial Sequence
  Description of Artificial Sequence: Synthetic oligonucleotide
  Sense strand starting at position 2562 of SEQ ID NO: 1881355
uguacuuacagcuggagua

SEQ ID NO: 2038053 - RNA, 19 nt, Artificial Sequence
  Description of Artificial Sequence: Synthetic oligonucleotide
  Antisense strand to SEQ ID NO: 2038052
uacuccagcuguaaguaca

SEQ ID NO: 2038054 - RNA, 19 nt, Artificial Sequence
  Description of Artificial Sequence: Synthetic oligonucleotide
  Sense strand starting at position 2563 of SEQ ID NO: 1881355
guacuuacagcuggaguaa

SEQ ID NO: 2038055 - RNA, 19 nt, Artificial Sequence
  Description of Artificial Sequence: Synthetic oligonucleotide
  Antisense strand to SEQ ID NO: 2038054
uuacuccagcuguaaguac

SEQ ID NO: 2038056 - RNA, 19 nt, Artificial Sequence
  Description of Artificial Sequence: Synthetic oligonucleotide
  Sense strand starting at position 2800 of SEQ ID NO: 1881355
ucauuccauugaguuaagu

SEQ ID NO: 2038057 - RNA, 19 nt, Artificial Sequence
  Description of Artificial Sequence: Synthetic oligonucleotide
  Antisense strand to SEQ ID NO: 2038056
acuuaacucaauggaauga

SEQ ID NO: 2038058 - RNA, 19 nt, Artificial Sequence
  Description of Artificial Sequence: Synthetic oligonucleotide
  Sense strand starting at position 2861 of SEQ ID NO: 1881355
gugucaggcauugagcuua

SEQ ID NO: 2038059 - RNA, 19 nt, Artificial Sequence
  Description of Artificial Sequence: Synthetic oligonucleotide
  Antisense strand to SEQ ID NO: 2038058
uaagcucaaugccugacac

SEQ ID NO: 2038060 - RNA, 19 nt, Artificial Sequence
  Description of Artificial Sequence: Synthetic oligonucleotide
  Sense strand starting at position 2873 of SEQ ID NO: 1881355
gagcuuacaguguagugaa

SEQ ID NO: 2038061 - RNA, 19 nt, Artificial Sequence
  Description of Artificial Sequence: Synthetic oligonucleotide
  Antisense strand to SEQ ID NO: 2038060
uucacuacacuguaagcuc

SEQ ID NO: 2038062 - RNA, 19 nt, Artificial Sequence
  Description of Artificial Sequence: Synthetic oligonucleotide
  Sense strand starting at position 2880 of SEQ ID NO: 1881355
caguguagugaaggguaaa

SEQ ID NO: 2038063 - RNA, 19 nt, Artificial Sequence
  Description of Artificial Sequence: Synthetic oligonucleotide
  Antisense strand to SEQ ID NO: 2038062
uuuacccuucacuacacug

SEQ ID NO: 2038064 - RNA, 19 nt, Artificial Sequence
  Description of Artificial Sequence: Synthetic oligonucleotide
  Sense strand starting at position 2968 of SEQ ID NO: 1881355
ggcagaguaaccgaguaau

SEQ ID NO: 2038065 - RNA, 19 nt, Artificial Sequence
  Description of Artificial Sequence: Synthetic oligonucleotide
  Antisense strand to SEQ ID NO: 2038064
auuacucgguuacucugcc

SEQ ID NO: 2038066 - RNA, 19 nt, Artificial Sequence
  Description of Artificial Sequence: Synthetic oligonucleotide
  Sense strand starting at position 2994 of SEQ ID NO: 1881355
cacgaaauuagcgaaugga

SEQ ID NO: 2038067 - RNA, 19 nt, Artificial Sequence
  Description of Artificial Sequence: Synthetic oligonucleotide
  Antisense strand to SEQ ID NO: 2038066
uccauucgcuaauuucgug

SEQ ID NO: 2038068 - RNA, 19 nt, Artificial Sequence
  Description of Artificial Sequence: Synthetic oligonucleotide
  Sense strand starting at position 2997 of SEQ ID NO: 1881355
gaaauuagcgaauggaaau

SEQ ID NO: 2038069 - RNA, 19 nt, Artificial Sequence
  Description of Artificial Sequence: Synthetic oligonucleotide
  Antisense strand to SEQ ID NO: 2038068
auuuccauucgcuaauuuc

SEQ ID NO: 2038070 - RNA, 19 nt, Artificial Sequence
  Description of Artificial Sequence: Synthetic oligonucleotide
  Sense strand starting at position 3023 of SEQ ID NO: 1881355
uucucaagauaggaauuaa

SEQ ID NO: 2038071 - RNA, 19 nt, Artificial Sequence
  Description of Artificial Sequence: Synthetic oligonucleotide
  Antisense strand to SEQ ID NO: 2038070
uuaauuccuaucuugagaa

SEQ ID NO: 2038072 - RNA, 19 nt, Artificial Sequence
  Description of Artificial Sequence: Synthetic oligonucleotide
  Sense strand starting at position 3085 of SEQ ID NO: 1881355
agcagccauguuuggaaua

SEQ ID NO: 2038073 - RNA, 19 nt, Artificial Sequence
  Description of Artificial Sequence: Synthetic oligonucleotide
  Antisense strand to SEQ ID NO: 2038072
uauuccaaacauggcugcu

SEQ ID NO: 2038074 - RNA, 19 nt, Artificial Sequence
  Description of Artificial Sequence: Synthetic oligonucleotide
  Sense strand starting at position 3090 of SEQ ID NO: 1881355
ccauguuuggaauaugcaa

SEQ ID NO: 2038075 - RNA, 19 nt, Artificial Sequence
  Description of Artificial Sequence: Synthetic oligonucleotide
  Antisense strand to SEQ ID NO: 2038074
uugcauauuccaaacaugg

SEQ ID NO: 2038076 - RNA, 19 nt, Artificial Sequence
  Description of Artificial Sequence: Synthetic oligonucleotide
  Sense strand starting at position 3194 of SEQ ID NO: 1881355
ucaccacuuguuugucuaa

SEQ ID NO: 2038077 - RNA, 19 nt, Artificial Sequence
  Description of Artificial Sequence: Synthetic oligonucleotide
  Antisense strand to SEQ ID NO: 2038076
uuagacaaacaagugguga

SEQ ID NO: 2038078 - RNA, 19 nt, Artificial Sequence
  Description of Artificial Sequence: Synthetic oligonucleotide
  Sense strand starting at position 3343 of SEQ ID NO: 1881355
ggauguuagcccgcuuucu

SEQ ID NO: 2038079 - RNA, 19 nt, Artificial Sequence
  Description of Artificial Sequence: Synthetic oligonucleotide
  Antisense strand to SEQ ID NO: 2038078
agaaagcgggcuaacaucc

SEQ ID NO: 2038080 - RNA, 19 nt, Artificial Sequence
  Description of Artificial Sequence: Synthetic oligonucleotide
  Sense strand starting at position 3685 of SEQ ID NO: 1881355
aaaugacguccuuauguac

SEQ ID NO: 2038081 - RNA, 19 nt, Artificial Sequence
  Description of Artificial Sequence: Synthetic oligonucleotide
  Antisense strand to SEQ ID NO: 2038080
guacauaaggacgucauuu

SEQ ID NO: 2038082 - RNA, 19 nt, Artificial Sequence
  Description of Artificial Sequence: Synthetic oligonucleotide
  Sense strand starting at position 3707 of SEQ ID NO: 1881355
guugucagccaauggcaaa

SEQ ID NO: 2038083 - RNA, 19 nt, Artificial Sequence
  Description of Artificial Sequence: Synthetic oligonucleotide
  Antisense strand to SEQ ID NO: 2038082
uuugccauuggcugacaac

SEQ ID NO: 2038084 - RNA, 19 nt, Artificial Sequence
  Description of Artificial Sequence: Synthetic oligonucleotide
  Sense strand starting at position 217 of SEQ ID NO: 1881356
ggcaauuaaugucucucaa

SEQ ID NO: 2038085 - RNA, 19 nt, Artificial Sequence
  Description of Artificial Sequence: Synthetic oligonucleotide
  Antisense strand to SEQ ID NO: 2038084
uugagagacauuaauugcc

SEQ ID NO: 2038086 - RNA, 19 nt, Artificial Sequence
  Description of Artificial Sequence: Synthetic oligonucleotide
  Sense strand starting at position 260 of SEQ ID NO: 1881356
cagggcuuccaggaauagu

SEQ ID NO: 2038087 - RNA, 19 nt, Artificial Sequence
  Description of Artificial Sequence: Synthetic oligonucleotide
  Antisense strand to SEQ ID NO: 2038086
acuauuccuggaagcccug

SEQ ID NO: 2038088 - RNA, 19 nt, Artificial Sequence
  Description of Artificial Sequence: Synthetic oligonucleotide
  Sense strand starting at position 263 of SEQ ID NO: 1881356
ggcuuccaggaauaguuaa

SEQ ID NO: 2038089 - RNA, 19 nt, Artificial Sequence
  Description of Artificial Sequence: Synthetic oligonucleotide
  Antisense strand to SEQ ID NO: 2038088
uuaacuauuccuggaagcc

SEQ ID NO: 2038090 - RNA, 19 nt, Artificial Sequence
  Description of Artificial Sequence: Synthetic oligonucleotide
  Sense strand starting at position 270 of SEQ ID NO: 1881356
aggaauaguuaaccuaagu

SEQ ID NO: 2038091 - RNA, 19 nt, Artificial Sequence
  Description of Artificial Sequence: Synthetic oligonucleotide
  Antisense strand to SEQ ID NO: 2038090
acuuagguuaacuauuccu

SEQ ID NO: 2038092 - RNA, 19 nt, Artificial Sequence
  Description of Artificial Sequence: Synthetic oligonucleotide
  Sense strand starting at position 327 of SEQ ID NO: 1881356
agaacuuaccuacgcaaau

SEQ ID NO: 2038093 - RNA, 19 nt, Artificial Sequence
  Description of Artificial Sequence: Synthetic oligonucleotide
  Antisense strand to SEQ ID NO: 2038092
auuugcguagguaaguucu

SEQ ID NO: 2038094 - RNA, 19 nt, Artificial Sequence
  Description of Artificial Sequence: Synthetic oligonucleotide
  Sense strand starting at position 456 of SEQ ID NO: 1881356
gaaggaagcucagggaaau

SEQ ID NO: 2038095 - RNA, 19 nt, Artificial Sequence
  Description of Artificial Sequence: Synthetic oligonucleotide
  Antisense strand to SEQ ID NO: 2038094
auuucccugagcuuccuuc

SEQ ID NO: 2038096 - RNA, 19 nt, Artificial Sequence
  Description of Artificial Sequence: Synthetic oligonucleotide
  Sense strand starting at position 503 of SEQ ID NO: 1881356
uacagugggcuuuagaagu

SEQ ID NO: 2038097 - RNA, 19 nt, Artificial Sequence
  Description of Artificial Sequence: Synthetic oligonucleotide
  Antisense strand to SEQ ID NO: 2038096
acuucuaaagcccacugua

SEQ ID NO: 2038098 - RNA, 19 nt, Artificial Sequence
  Description of Artificial Sequence: Synthetic oligonucleotide
  Sense strand starting at position 509 of SEQ ID NO: 1881356
gggcuuuagaaguacaacu

SEQ ID NO: 2038099 - RNA, 19 nt, Artificial Sequence
  Description of Artificial Sequence: Synthetic oligonucleotide
  Antisense strand to SEQ ID NO: 2038098
aguuguacuucuaaagccc

SEQ ID NO: 2038100 - RNA, 19 nt, Artificial Sequence
  Description of Artificial Sequence: Synthetic oligonucleotide
  Sense strand starting at position 809 of SEQ ID NO: 1881356
ucagcucuguccucaaugu

SEQ ID NO: 2038101 - RNA, 19 nt, Artificial Sequence
  Description of Artificial Sequence: Synthetic oligonucleotide
  Antisense strand to SEQ ID NO: 2038100
acauugaggacagagcuga

SEQ ID NO: 2038102 - RNA, 19 nt, Artificial Sequence
  Description of Artificial Sequence: Synthetic oligonucleotide
  Sense strand starting at position 813 of SEQ ID NO: 1881356
cucuguccucaauguagua

SEQ ID NO: 2038103 - RNA, 19 nt, Artificial Sequence
  Description of Artificial Sequence: Synthetic oligonucleotide
  Antisense strand to SEQ ID NO: 2038102
uacuacauugaggacagag

SEQ ID NO: 2038104 - RNA, 19 nt, Artificial Sequence
  Description of Artificial Sequence: Synthetic oligonucleotide
  Sense strand starting at position 850 of SEQ ID NO: 1881356
ccaacagcagucuaucaga

SEQ ID NO: 2038105 - RNA, 19 nt, Artificial Sequence
  Description of Artificial Sequence: Synthetic oligonucleotide
  Antisense strand to SEQ ID NO: 2038104
ucugauagacugcuguugg

SEQ ID NO: 2038106 - RNA, 19 nt, Artificial Sequence
  Description of Artificial Sequence: Synthetic oligonucleotide
  Sense strand starting at position 1224 of SEQ ID NO: 1881356
caguccaagucguccaauu

SEQ ID NO: 2038107 - RNA, 19 nt, Artificial Sequence
  Description of Artificial Sequence: Synthetic oligonucleotide
  Antisense strand to SEQ ID NO: 2038106
aauuggacgacuuggacug

SEQ ID NO: 2038108 - RNA, 19 nt, Artificial Sequence
  Description of Artificial Sequence: Synthetic oligonucleotide
  Sense strand starting at position 1234 of SEQ ID NO: 1881356
cguccaauuugcuuaugua

SEQ ID NO: 2038109 - RNA, 19 nt, Artificial Sequence
  Description of Artificial Sequence: Synthetic oligonucleotide
  Antisense strand to SEQ ID NO: 2038108
uacauaagcaaauuggacg

SEQ ID NO: 2038110 - RNA, 19 nt, Artificial Sequence
  Description of Artificial Sequence: Synthetic oligonucleotide
  Sense strand starting at position 1253 of SEQ ID NO: 1881356
accacaagccuuuggagaa

SEQ ID NO: 2038111 - RNA, 19 nt, Artificial Sequence
  Description of Artificial Sequence: Synthetic oligonucleotide
  Antisense strand to SEQ ID NO: 2038110
uucuccaaaggcuuguggu

SEQ ID NO: 2038112 - RNA, 19 nt, Artificial Sequence
  Description of Artificial Sequence: Synthetic oligonucleotide
  Sense strand starting at position 1396 of SEQ ID NO: 1881356
gagugagcucccugccaag

SEQ ID NO: 2038113 - RNA, 19 nt, Artificial Sequence
  Description of Artificial Sequence: Synthetic oligonucleotide
  Antisense strand to SEQ ID NO: 2038112
cuuggcagggagcucacuc

SEQ ID NO: 2038114 - RNA, 19 nt, Artificial Sequence
  Description of Artificial Sequence: Synthetic oligonucleotide
  Sense strand starting at position 1410 of SEQ ID NO: 1881356
ccaagaguggcagauuauu

SEQ ID NO: 2038115 - RNA, 19 nt, Artificial Sequence
  Description of Artificial Sequence: Synthetic oligonucleotide
  Antisense strand to SEQ ID NO: 2038114
aauaaucugccacucuugg

SEQ ID NO: 2038116 - RNA, 19 nt, Artificial Sequence
  Description of Artificial Sequence: Synthetic oligonucleotide
  Sense strand starting at position 1473 of SEQ ID NO: 1881356
gcucuuacaucaucuaggu

SEQ ID NO: 2038117 - RNA, 19 nt, Artificial Sequence
  Description of Artificial Sequence: Synthetic oligonucleotide
  Antisense strand to SEQ ID NO: 2038116
accuagaugauguaagagc

SEQ ID NO: 2038118 - RNA, 19 nt, Artificial Sequence
  Description of Artificial Sequence: Synthetic oligonucleotide
  Sense strand starting at position 1575 of SEQ ID NO: 1881356
cuggaaucauagggauuga

SEQ ID NO: 2038119 - RNA, 19 nt, Artificial Sequence
  Description of Artificial Sequence: Synthetic oligonucleotide
  Antisense strand to SEQ ID NO: 2038118
ucaaucccuaugauuccag

SEQ ID NO: 2038120 - RNA, 19 nt, Artificial Sequence
  Description of Artificial Sequence: Synthetic oligonucleotide
  Sense strand starting at position 1604 of SEQ ID NO: 1881356
ccuggacacuggcauuuaa

SEQ ID NO: 2038121 - RNA, 19 nt, Artificial Sequence
  Description of Artificial Sequence: Synthetic oligonucleotide
  Antisense strand to SEQ ID NO: 2038120
uuaaaugccaguguccagg

SEQ ID NO: 2038122 - RNA, 19 nt, Artificial Sequence
  Description of Artificial Sequence: Synthetic oligonucleotide
  Sense strand starting at position 1828 of SEQ ID NO: 1881356
gcugucaugcaguaauguu

SEQ ID NO: 2038123 - RNA, 19 nt, Artificial Sequence
  Description of Artificial Sequence: Synthetic oligonucleotide
  Antisense strand to SEQ ID NO: 2038122
aacauuacugcaugacagc

SEQ ID NO: 2038124 - RNA, 19 nt, Artificial Sequence
  Description of Artificial Sequence: Synthetic oligonucleotide
  Sense strand starting at position 2319 of SEQ ID NO: 1881356
guuagugguacucgauauu

SEQ ID NO: 2038125 - RNA, 19 nt, Artificial Sequence
  Description of Artificial Sequence: Synthetic oligonucleotide
  Antisense strand to SEQ ID NO: 2038124
aauaucgaguaccacuaac

SEQ ID NO: 2038126 - RNA, 19 nt, Artificial Sequence
  Description of Artificial Sequence: Synthetic oligonucleotide
  Sense strand starting at position 2322 of SEQ ID NO: 1881356
agugguacucgauauucca

SEQ ID NO: 2038127 - RNA, 19 nt, Artificial Sequence
  Description of Artificial Sequence: Synthetic oligonucleotide
  Antisense strand to SEQ ID NO: 2038126
uggaauaucgaguaccacu

SEQ ID NO: 2038128 - RNA, 19 nt, Artificial Sequence
  Description of Artificial Sequence: Synthetic oligonucleotide
  Sense strand starting at position 2329 of SEQ ID NO: 1881356
cucgauauuccacagcaac

SEQ ID NO: 2038129 - RNA, 19 nt, Artificial Sequence
  Description of Artificial Sequence: Synthetic oligonucleotide
  Antisense strand to SEQ ID NO: 2038128
guugcuguggaauaucgag

SEQ ID NO: 2038130 - RNA, 19 nt, Artificial Sequence
  Description of Artificial Sequence: Synthetic oligonucleotide
  Sense strand starting at position 2537 of SEQ ID NO: 1881356
ucuagaugcucaguauauu

SEQ ID NO: 2038131 - RNA, 19 nt, Artificial Sequence
  Description of Artificial Sequence: Synthetic oligonucleotide
  Antisense strand to SEQ ID NO: 2038130
aauauacugagcaucuaga

SEQ ID NO: 2038132 - RNA, 19 nt, Artificial Sequence
  Description of Artificial Sequence: Synthetic oligonucleotide
  Sense strand starting at position 2630 of SEQ ID NO: 1881356
caaacuaugugguccuagu

SEQ ID NO: 2038133 - RNA, 19 nt, Artificial Sequence
  Description of Artificial Sequence: Synthetic oligonucleotide
  Antisense strand to SEQ ID NO: 2038132
acuaggaccacauaguuug

SEQ ID NO: 2038134 - RNA, 19 nt, Artificial Sequence
  Description of Artificial Sequence: Synthetic oligonucleotide
  Sense strand starting at position 2697 of SEQ ID NO: 1881356
ccguccugucaacauugaa

SEQ ID NO: 2038135 - RNA, 19 nt, Artificial Sequence
  Description of Artificial Sequence: Synthetic oligonucleotide
  Antisense strand to SEQ ID NO: 2038134
uucaauguugacaggacgg

SEQ ID NO: 2038136 - RNA, 19 nt, Artificial Sequence
  Description of Artificial Sequence: Synthetic oligonucleotide
  Sense strand starting at position 2917 of SEQ ID NO: 1881356
ggcagagguucucuuugag

SEQ ID NO: 2038137 - RNA, 19 nt, Artificial Sequence
  Description of Artificial Sequence: Synthetic oligonucleotide
  Antisense strand to SEQ ID NO: 2038136
cucaaagagaaccucugcc

SEQ ID NO: 2038138 - RNA, 19 nt, Artificial Sequence
  Description of Artificial Sequence: Synthetic oligonucleotide
  Sense strand starting at position 2920 of SEQ ID NO: 1881356
agagguucucuuugagaca

SEQ ID NO: 2038139 - RNA, 19 nt, Artificial Sequence
  Description of Artificial Sequence: Synthetic oligonucleotide
  Antisense strand to SEQ ID NO: 2038138
ugucucaaagagaaccucu

SEQ ID NO: 2038140 - RNA, 19 nt, Artificial Sequence
  Description of Artificial Sequence: Synthetic oligonucleotide
  Sense strand starting at position 2921 of SEQ ID NO: 1881356
gagguucucuuugagacaa

SEQ ID NO: 2038141 - RNA, 19 nt, Artificial Sequence
  Description of Artificial Sequence: Synthetic oligonucleotide
  Antisense strand to SEQ ID NO: 2038140
uugucucaaagagaaccuc

SEQ ID NO: 2038142 - RNA, 19 nt, Artificial Sequence
  Description of Artificial Sequence: Synthetic oligonucleotide
  Sense strand starting at position 3345 of SEQ ID NO: 1881356
ggugcaugccgucaugacu

SEQ ID NO: 2038143 - RNA, 19 nt, Artificial Sequence
  Description of Artificial Sequence: Synthetic oligonucleotide
  Antisense strand to SEQ ID NO: 2038142
agucaugacggcaugcacc

SEQ ID NO: 2038144 - RNA, 19 nt, Artificial Sequence
  Description of Artificial Sequence: Synthetic oligonucleotide
  Sense strand starting at position 3351 of SEQ ID NO: 1881356
ugccgucaugacuggcuaa

SEQ ID NO: 2038145 - RNA, 19 nt, Artificial Sequence
  Description of Artificial Sequence: Synthetic oligonucleotide
  Antisense strand to SEQ ID NO: 2038144
uuagccagucaugacggca

SEQ ID NO: 2038146 - RNA, 19 nt, Artificial Sequence
  Description of Artificial Sequence: Synthetic oligonucleotide
  Sense strand starting at position 3354 of SEQ ID NO: 1881356
cgucaugacuggcuaagau

SEQ ID NO: 2038147 - RNA, 19 nt, Artificial Sequence
  Description of Artificial Sequence: Synthetic oligonucleotide
  Antisense strand to SEQ ID NO: 2038146
aucuuagccagucaugacg

SEQ ID NO: 2038148 - RNA, 19 nt, Artificial Sequence
  Description of Artificial Sequence: Synthetic oligonucleotide
  Sense strand starting at position 3462 of SEQ ID NO: 1881356
cuagauauuuaguggcaca

SEQ ID NO: 2038149 - RNA, 19 nt, Artificial Sequence
  Description of Artificial Sequence: Synthetic oligonucleotide
  Antisense strand to SEQ ID NO: 2038148
ugugccacuaaauaucuag

SEQ ID NO: 2038150 - RNA, 19 nt, Artificial Sequence
  Description of Artificial Sequence: Synthetic oligonucleotide
  Sense strand starting at position 3526 of SEQ ID NO: 1881356
cccagcauguauguugaaa

SEQ ID NO: 2038151 - RNA, 19 nt, Artificial Sequence
  Description of Artificial Sequence: Synthetic oligonucleotide
  Antisense strand to SEQ ID NO: 2038150
uuucaacauacaugcuggg

SEQ ID NO: 2038152 - RNA, 19 nt, Artificial Sequence
  Description of Artificial Sequence: Synthetic oligonucleotide
  Sense strand starting at position 3773 of SEQ ID NO: 1881356
cugcaaugagccgauauca

SEQ ID NO: 2038153 - RNA, 19 nt, Artificial Sequence
  Description of Artificial Sequence: Synthetic oligonucleotide
  Antisense strand to SEQ ID NO: 2038152
ugauaucggcucauugcag

SEQ ID NO: 2038154 - RNA, 19 nt, Artificial Sequence
  Description of Artificial Sequence: Synthetic oligonucleotide
  Sense strand starting at position 3828 of SEQ ID NO: 1881356
gcgagagacugucuugaag

SEQ ID NO: 2038155 - RNA, 19 nt, Artificial Sequence
  Description of Artificial Sequence: Synthetic oligonucleotide
  Antisense strand to SEQ ID NO: 2038154
cuucaagacagucucucgc

SEQ ID NO: 2038156 - RNA, 19 nt, Artificial Sequence
  Description of Artificial Sequence: Synthetic oligonucleotide
  Sense strand starting at position 3830 of SEQ ID NO: 1881356
gagagacugucuugaagga

SEQ ID NO: 2038157 - RNA, 19 nt, Artificial Sequence
  Description of Artificial Sequence: Synthetic oligonucleotide
  Antisense strand to SEQ ID NO: 2038156
uccuucaagacagucucuc

SEQ ID NO: 2038158 - RNA, 19 nt, Artificial Sequence
  Description of Artificial Sequence: Synthetic oligonucleotide
  Sense strand starting at position 3868 of SEQ ID NO: 1881356
aaaggaaggucauagguca

SEQ ID NO: 2038159 - RNA, 19 nt, Artificial Sequence
  Description of Artificial Sequence: Synthetic oligonucleotide
  Antisense strand to SEQ ID NO: 2038158
ugaccuaugaccuuccuuu

SEQ ID NO: 2038160 - RNA, 19 nt, Artificial Sequence
  Description of Artificial Sequence: Synthetic oligonucleotide
  Sense strand starting at position 3890 of SEQ ID NO: 1881356
gggcgauuucuauggcuca

SEQ ID NO: 2038161 - RNA, 19 nt, Artificial Sequence
  Description of Artificial Sequence: Synthetic oligonucleotide
  Antisense strand to SEQ ID NO: 2038160
ugagccauagaaaucgccc

SEQ ID NO: 2038162 - RNA, 19 nt, Artificial Sequence
  Description of Artificial Sequence: Synthetic oligonucleotide
  Sense strand starting at position 3921 of SEQ ID NO: 1881356
aucucuuaacaguggaguu

SEQ ID NO: 2038163 - RNA, 19 nt, Artificial Sequence
  Description of Artificial Sequence: Synthetic oligonucleotide
  Antisense strand to SEQ ID NO: 2038162
aacuccacuguuaagagau

SEQ ID NO: 2038164 - RNA, 19 nt, Artificial Sequence
  Description of Artificial Sequence: Synthetic oligonucleotide
  Sense strand starting at position 167 of SEQ ID NO: 1881357
cugccaauucuguguaaga

SEQ ID NO: 2038165 - RNA, 19 nt, Artificial Sequence
  Description of Artificial Sequence: Synthetic oligonucleotide
  Antisense strand to SEQ ID NO: 2038164
ucuuacacagaauuggcag

SEQ ID NO: 2038166 - RNA, 19 nt, Artificial Sequence
  Description of Artificial Sequence: Synthetic oligonucleotide
  Sense strand starting at position 168 of SEQ ID NO: 1881357
ugccaauucuguguaagaa

SEQ ID NO: 2038167 - RNA, 19 nt, Artificial Sequence
  Description of Artificial Sequence: Synthetic oligonucleotide
  Antisense strand to SEQ ID NO: 2038166
uucuuacacagaauuggca

SEQ ID NO: 2038168 - RNA, 19 nt, Artificial Sequence
  Description of Artificial Sequence: Synthetic oligonucleotide
  Sense strand starting at position 169 of SEQ ID NO: 1881357
gccaauucuguguaagaaa

SEQ ID NO: 2038169 - RNA, 19 nt, Artificial Sequence
  Description of Artificial Sequence: Synthetic oligonucleotide
  Antisense strand to SEQ ID NO: 2038168
uuucuuacacagaauuggc

SEQ ID NO: 2038170 - RNA, 19 nt, Artificial Sequence
  Description of Artificial Sequence: Synthetic oligonucleotide
  Sense strand starting at position 190 of SEQ ID NO: 1881357
gaaucagaacguuacuucu

SEQ ID NO: 2038171 - RNA, 19 nt, Artificial Sequence
  Description of Artificial Sequence: Synthetic oligonucleotide
  Antisense strand to SEQ ID NO: 2038170
agaaguaacguucugauuc

SEQ ID NO: 2038172 - RNA, 19 nt, Artificial Sequence
  Description of Artificial Sequence: Synthetic oligonucleotide
  Sense strand starting at position 192 of SEQ ID NO: 1881357
aucagaacguuacuucuca

SEQ ID NO: 2038173 - RNA, 19 nt, Artificial Sequence
  Description of Artificial Sequence: Synthetic oligonucleotide
  Antisense strand to SEQ ID NO: 2038172
ugagaaguaacguucugau

SEQ ID NO: 2038174 - RNA, 19 nt, Artificial Sequence
  Description of Artificial Sequence: Synthetic oligonucleotide
  Sense strand starting at position 268 of SEQ ID NO: 1881357
acuuaucaagguuauaguu

SEQ ID NO: 2038175 - RNA, 19 nt, Artificial Sequence
  Description of Artificial Sequence: Synthetic oligonucleotide
  Antisense strand to SEQ ID NO: 2038174
aacuauaaccuugauaagu

SEQ ID NO: 2038176 - RNA, 19 nt, Artificial Sequence
  Description of Artificial Sequence: Synthetic oligonucleotide
  Sense strand starting at position 278 of SEQ ID NO: 1881357
guuauaguucgugcuucua

SEQ ID NO: 2038177 - RNA, 19 nt, Artificial Sequence
  Description of Artificial Sequence: Synthetic oligonucleotide
  Antisense strand to SEQ ID NO: 2038176
uagaagcacgaacuauaac

SEQ ID NO: 2038178 - RNA, 19 nt, Artificial Sequence
  Description of Artificial Sequence: Synthetic oligonucleotide
  Sense strand starting at position 312 of SEQ ID NO: 1881357
gcuaaugcauaucuagaga

SEQ ID NO: 2038179 - RNA, 19 nt, Artificial Sequence
  Description of Artificial Sequence: Synthetic oligonucleotide
  Antisense strand to SEQ ID NO: 2038178
ucucuagauaugcauuagc

SEQ ID NO: 2038180 - RNA, 19 nt, Artificial Sequence
  Description of Artificial Sequence: Synthetic oligonucleotide
  Sense strand starting at position 401 of SEQ ID NO: 1881357
caggcaucuugagcauuau

SEQ ID NO: 2038181 - RNA, 19 nt, Artificial Sequence
  Description of Artificial Sequence: Synthetic oligonucleotide
  Antisense strand to SEQ ID NO: 2038180
auaaugcucaagaugccug

SEQ ID NO: 2038182 - RNA, 19 nt, Artificial Sequence
  Description of Artificial Sequence: Synthetic oligonucleotide
  Sense strand starting at position 402 of SEQ ID NO: 1881357
aggcaucuugagcauuauu

SEQ ID NO: 2038183 - RNA, 19 nt, Artificial Sequence
  Description of Artificial Sequence: Synthetic oligonucleotide
  Antisense strand to SEQ ID NO: 2038182
aauaaugcucaagaugccu

SEQ ID NO: 2038184 - RNA, 19 nt, Artificial Sequence
  Description of Artificial Sequence: Synthetic oligonucleotide
  Sense strand starting at position 535 of SEQ ID NO: 1881357
gcaguuauguaauccauuu

SEQ ID NO: 2038185 - RNA, 19 nt, Artificial Sequence
  Description of Artificial Sequence: Synthetic oligonucleotide
  Antisense strand to SEQ ID NO: 2038184
aaauggauuacauaacugc

SEQ ID NO: 2038186 - RNA, 19 nt, Artificial Sequence
  Description of Artificial Sequence: Synthetic oligonucleotide
  Sense strand starting at position 638 of SEQ ID NO: 1881357
acaaauauuugguauggua

SEQ ID NO: 2038187 - RNA, 19 nt, Artificial Sequence
  Description of Artificial Sequence: Synthetic oligonucleotide
  Antisense strand to SEQ ID NO: 2038186
uaccauaccaaauauuugu

SEQ ID NO: 2038188 - RNA, 19 nt, Artificial Sequence
  Description of Artificial Sequence: Synthetic oligonucleotide
  Sense strand starting at position 711 of SEQ ID NO: 1881357
cucuaaacguguuuaacug

SEQ ID NO: 2038189 - RNA, 19 nt, Artificial Sequence
  Description of Artificial Sequence: Synthetic oligonucleotide
  Antisense strand to SEQ ID NO: 2038188
caguuaaacacguuuagag

SEQ ID NO: 2038190 - RNA, 19 nt, Artificial Sequence
  Description of Artificial Sequence: Synthetic oligonucleotide
  Sense strand starting at position 900 of SEQ ID NO: 1881357
cagugugcuguuucgcuua

SEQ ID NO: 2038191 - RNA, 19 nt, Artificial Sequence
  Description of Artificial Sequence: Synthetic oligonucleotide
  Antisense strand to SEQ ID NO: 2038190
uaagcgaaacagcacacug

SEQ ID NO: 2038192 - RNA, 19 nt, Artificial Sequence
  Description of Artificial Sequence: Synthetic oligonucleotide
  Sense strand starting at position 977 of SEQ ID NO: 1881357
gcugcuaucgacuccugua

SEQ ID NO: 2038193 - RNA, 19 nt, Artificial Sequence
  Description of Artificial Sequence: Synthetic oligonucleotide
  Antisense strand to SEQ ID NO: 2038192
uacaggagucgauagcagc

SEQ ID NO: 2038194 - RNA, 19 nt, Artificial Sequence
  Description of Artificial Sequence: Synthetic oligonucleotide
  Sense strand starting at position 1220 of SEQ ID NO: 1881357
ccacaaucugggcaauguu

SEQ ID NO: 2038195 - RNA, 19 nt, Artificial Sequence
  Description of Artificial Sequence: Synthetic oligonucleotide
  Antisense strand to SEQ ID NO: 2038194
aacauugcccagauugugg

SEQ ID NO: 2038196 - RNA, 19 nt, Artificial Sequence
  Description of Artificial Sequence: Synthetic oligonucleotide
  Sense strand starting at position 1329 of SEQ ID NO: 1881357
auuccuugauuugauguua

SEQ ID NO: 2038197 - RNA, 19 nt, Artificial Sequence
  Description of Artificial Sequence: Synthetic oligonucleotide
  Antisense strand to SEQ ID NO: 2038196
uaacaucaaaucaaggaau

SEQ ID NO: 2038198 - RNA, 19 nt, Artificial Sequence
  Description of Artificial Sequence: Synthetic oligonucleotide
  Sense strand starting at position 1398 of SEQ ID NO: 1881357
ccaagaugcuggcuucuca

SEQ ID NO: 2038199 - RNA, 19 nt, Artificial Sequence
  Description of Artificial Sequence: Synthetic oligonucleotide
  Antisense strand to SEQ ID NO: 2038198
ugagaagccagcaucuugg

SEQ ID NO: 2038200 - RNA, 19 nt, Artificial Sequence
  Description of Artificial Sequence: Synthetic oligonucleotide
  Sense strand starting at position 1409 of SEQ ID NO: 1881357
gcuucucaccugugaauau

SEQ ID NO: 2038201 - RNA, 19 nt, Artificial Sequence
  Description of Artificial Sequence: Synthetic oligonucleotide
  Antisense strand to SEQ ID NO: 2038200
auauucacaggugagaagc

SEQ ID NO: 2038202 - RNA, 19 nt, Artificial Sequence
  Description of Artificial Sequence: Synthetic oligonucleotide
  Sense strand starting at position 1797 of SEQ ID NO: 1881357
gucaccaugcugcaaauua

SEQ ID NO: 2038203 - RNA, 19 nt, Artificial Sequence
  Description of Artificial Sequence: Synthetic oligonucleotide
  Antisense strand to SEQ ID NO: 2038202
uaauuugcagcauggugac

SEQ ID NO: 2038204 - RNA, 19 nt, Artificial Sequence
  Description of Artificial Sequence: Synthetic oligonucleotide
  Sense strand starting at position 1837 of SEQ ID NO: 1881357
accagucaggucgguauuu

SEQ ID NO: 2038205 - RNA, 19 nt, Artificial Sequence
  Description of Artificial Sequence: Synthetic oligonucleotide
  Antisense strand to SEQ ID NO: 2038204
aaauaccgaccugacuggu

SEQ ID NO: 2038206 - RNA, 19 nt, Artificial Sequence
  Description of Artificial Sequence: Synthetic oligonucleotide
  Sense strand starting at position 1838 of SEQ ID NO: 1881357
ccagucaggucgguauuua

SEQ ID NO: 2038207 - RNA, 19 nt, Artificial Sequence
  Description of Artificial Sequence: Synthetic oligonucleotide
  Antisense strand to SEQ ID NO: 2038206
uaaauaccgaccugacugg

SEQ ID NO: 2038208 - RNA, 19 nt, Artificial Sequence
  Description of Artificial Sequence: Synthetic oligonucleotide
  Sense strand starting at position 1987 of SEQ ID NO: 1881357
ucugaauccugcuuuagug

SEQ ID NO: 2038209 - RNA, 19 nt, Artificial Sequence
  Description of Artificial Sequence: Synthetic oligonucleotide
  Antisense strand to SEQ ID NO: 2038208
cacuaaagcaggauucaga

SEQ ID NO: 2038210 - RNA, 19 nt, Artificial Sequence
  Description of Artificial Sequence: Synthetic oligonucleotide
  Sense strand starting at position 1991 of SEQ ID NO: 1881357
aauccugcuuuaguggaaa

SEQ ID NO: 2038211 - RNA, 19 nt, Artificial Sequence
  Description of Artificial Sequence: Synthetic oligonucleotide
  Antisense strand to SEQ ID NO: 2038210
uuuccacuaaagcaggauu

SEQ ID NO: 2038212 - RNA, 19 nt, Artificial Sequence
  Description of Artificial Sequence: Synthetic oligonucleotide
  Sense strand starting at position 2165 of SEQ ID NO: 1881357
cuuccauuccuguaauguu

SEQ ID NO: 2038213 - RNA, 19 nt, Artificial Sequence
  Description of Artificial Sequence: Synthetic oligonucleotide
  Antisense strand to SEQ ID NO: 2038212
aacauuacaggaauggaag

SEQ ID NO: 2038214 - RNA, 19 nt, Artificial Sequence
  Description of Artificial Sequence: Synthetic oligonucleotide
  Sense strand starting at position 2172 of SEQ ID NO: 1881357
uccuguaauguuuagaagu

SEQ ID NO: 2038215 - RNA, 19 nt, Artificial Sequence
  Description of Artificial Sequence: Synthetic oligonucleotide
  Antisense strand to SEQ ID NO: 2038214
acuucuaaacauuacagga

SEQ ID NO: 2038216 - RNA, 19 nt, Artificial Sequence
  Description of Artificial Sequence: Synthetic oligonucleotide
  Sense strand starting at position 2292 of SEQ ID NO: 1881357
gcacuuagagcccagaguu

SEQ ID NO: 2038217 - RNA, 19 nt, Artificial Sequence
  Description of Artificial Sequence: Synthetic oligonucleotide
  Antisense strand to SEQ ID NO: 2038216
aacucugggcucuaagugc

SEQ ID NO: 2038218 - RNA, 19 nt, Artificial Sequence
  Description of Artificial Sequence: Synthetic oligonucleotide
  Sense strand starting at position 2428 of SEQ ID NO: 1881357
ucauucuguuaggucuaau

SEQ ID NO: 2038219 - RNA, 19 nt, Artificial Sequence
  Description of Artificial Sequence: Synthetic oligonucleotide
  Antisense strand to SEQ ID NO: 2038218
auuagaccuaacagaauga

SEQ ID NO: 2038220 - RNA, 19 nt, Artificial Sequence
  Description of Artificial Sequence: Synthetic oligonucleotide
  Sense strand starting at position 2431 of SEQ ID NO: 1881357
uucuguuaggucuaaugag

SEQ ID NO: 2038221 - RNA, 19 nt, Artificial Sequence
  Description of Artificial Sequence: Synthetic oligonucleotide
  Antisense strand to SEQ ID NO: 2038220
cucauuagaccuaacagaa

SEQ ID NO: 2038222 - RNA, 19 nt, Artificial Sequence
  Description of Artificial Sequence: Synthetic oligonucleotide
  Sense strand starting at position 2439 of SEQ ID NO: 1881357
ggucuaaugagauauugca

SEQ ID NO: 2038223 - RNA, 19 nt, Artificial Sequence
  Description of Artificial Sequence: Synthetic oligonucleotide
  Antisense strand to SEQ ID NO: 2038222
ugcaauaucucauuagacc

SEQ ID NO: 2038224 - RNA, 19 nt, Artificial Sequence
  Description of Artificial Sequence: Synthetic oligonucleotide
  Sense strand starting at position 2876 of SEQ ID NO: 1881357
ugucuuacuacggaaugaa

SEQ ID NO: 2038225 - RNA, 19 nt, Artificial Sequence
  Description of Artificial Sequence: Synthetic oligonucleotide
  Antisense strand to SEQ ID NO: 2038224
uucauuccguaguaagaca

SEQ ID NO: 2038226 - RNA, 19 nt, Artificial Sequence
  Description of Artificial Sequence: Synthetic oligonucleotide
  Sense strand starting at position 2895 of SEQ ID NO: 1881357
gguagacagaguuaugcau

SEQ ID NO: 2038227 - RNA, 19 nt, Artificial Sequence
  Description of Artificial Sequence: Synthetic oligonucleotide
  Antisense strand to SEQ ID NO: 2038226
augcauaacucugucuacc

SEQ ID NO: 2038228 - RNA, 19 nt, Artificial Sequence
  Description of Artificial Sequence: Synthetic oligonucleotide
  Sense strand starting at position 3015 of SEQ ID NO: 1881357
aguaaugcuuaccugaaua

SEQ ID NO: 2038229 - RNA, 19 nt, Artificial Sequence
  Description of Artificial Sequence: Synthetic oligonucleotide
  Antisense strand to SEQ ID NO: 2038228
uauucagguaagcauuacu

SEQ ID NO: 2038230 - RNA, 19 nt, Artificial Sequence
  Description of Artificial Sequence: Synthetic oligonucleotide
  Sense strand starting at position 3168 of SEQ ID NO: 1881357
agaucuacucagugauaca

SEQ ID NO: 2038231 - RNA, 19 nt, Artificial Sequence
  Description of Artificial Sequence: Synthetic oligonucleotide
  Antisense strand to SEQ ID NO: 2038230
uguaucacugaguagaucu

SEQ ID NO: 2038232 - RNA, 19 nt, Artificial Sequence
  Description of Artificial Sequence: Synthetic oligonucleotide
  Sense strand starting at position 3435 of SEQ ID NO: 1881357
auuauuauuccgcagaacu

SEQ ID NO: 2038233 - RNA, 19 nt, Artificial Sequence
  Description of Artificial Sequence: Synthetic oligonucleotide
  Antisense strand to SEQ ID NO: 2038232
aguucugcggaauaauaau

SEQ ID NO: 2038234 - RNA, 19 nt, Artificial Sequence
  Description of Artificial Sequence: Synthetic oligonucleotide
  Sense strand starting at position 3445 of SEQ ID NO: 1881357
cgcagaacuccaggaucaa

SEQ ID NO: 2038235 - RNA, 19 nt, Artificial Sequence
  Description of Artificial Sequence: Synthetic oligonucleotide
  Antisense strand to SEQ ID NO: 2038234
uugauccuggaguucugcg

SEQ ID NO: 2038236 - RNA, 19 nt, Artificial Sequence
  Description of Artificial Sequence: Synthetic oligonucleotide
  Sense strand starting at position 3657 of SEQ ID NO: 1881357
agaauaacguuuccuacau

SEQ ID NO: 2038237 - RNA, 19 nt, Artificial Sequence
  Description of Artificial Sequence: Synthetic oligonucleotide
  Antisense strand to SEQ ID NO: 2038236
auguaggaaacguuauucu

SEQ ID NO: 2038238 - RNA, 19 nt, Artificial Sequence
  Description of Artificial Sequence: Synthetic oligonucleotide
  Sense strand starting at position 3760 of SEQ ID NO: 1881357
gguauugugccuuauauaa

SEQ ID NO: 2038239 - RNA, 19 nt, Artificial Sequence
  Description of Artificial Sequence: Synthetic oligonucleotide
  Antisense strand to SEQ ID NO: 2038238
uuauauaaggcacaauacc

SEQ ID NO: 2038240 - RNA, 19 nt, Artificial Sequence
  Description of Artificial Sequence: Synthetic oligonucleotide
  Sense strand starting at position 3796 of SEQ ID NO: 1881357
ccuacagcuuuauuaggaa

SEQ ID NO: 2038241 - RNA, 19 nt, Artificial Sequence
  Description of Artificial Sequence: Synthetic oligonucleotide
  Antisense strand to SEQ ID NO: 2038240
uuccuaauaaagcuguagg

SEQ ID NO: 2038242 - RNA, 19 nt, Artificial Sequence
  Description of Artificial Sequence: Synthetic oligonucleotide
  Sense strand starting at position 3829 of SEQ ID NO: 1881357
ccaauauagcagugagcuu

SEQ ID NO: 2038243 - RNA, 19 nt, Artificial Sequence
  Description of Artificial Sequence: Synthetic oligonucleotide
  Antisense strand to SEQ ID NO: 2038242
aagcucacugcuauauugg

SEQ ID NO: 2038244 - RNA, 19 nt, Artificial Sequence
  Description of Artificial Sequence: Synthetic oligonucleotide
  Sense strand starting at position 20 of SEQ ID NO: 1881358
ccucuacaccuuuguguaa

SEQ ID NO: 2038245 - RNA, 19 nt, Artificial Sequence
  Description of Artificial Sequence: Synthetic oligonucleotide
  Antisense strand to SEQ ID NO: 2038244
uuacacaaagguguagagg

SEQ ID NO: 2038246 - RNA, 19 nt, Artificial Sequence
  Description of Artificial Sequence: Synthetic oligonucleotide
  Sense strand starting at position 152 of SEQ ID NO: 1881358
gucugagguccauguuuga

SEQ ID NO: 2038247 - RNA, 19 nt, Artificial Sequence
  Description of Artificial Sequence: Synthetic oligonucleotide
  Antisense strand to SEQ ID NO: 2038246
ucaaacauggaccucagac

SEQ ID NO: 2038248 - RNA, 19 nt, Artificial Sequence
  Description of Artificial Sequence: Synthetic oligonucleotide
  Sense strand starting at position 303 of SEQ ID NO: 1881358
uaaccaauucucgacgaga

SEQ ID NO: 2038249 - RNA, 19 nt, Artificial Sequence
  Description of Artificial Sequence: Synthetic oligonucleotide
  Antisense strand to SEQ ID NO: 2038248
ucucgucgagaauugguua

SEQ ID NO: 2038250 - RNA, 19 nt, Artificial Sequence
  Description of Artificial Sequence: Synthetic oligonucleotide
  Sense strand starting at position 305 of SEQ ID NO: 1881358
accaauucucgacgagaaa

SEQ ID NO: 2038251 - RNA, 19 nt, Artificial Sequence
  Description of Artificial Sequence: Synthetic oligonucleotide
  Antisense strand to SEQ ID NO: 2038250
uuucucgucgagaauuggu

SEQ ID NO: 2038252 - RNA, 19 nt, Artificial Sequence
  Description of Artificial Sequence: Synthetic oligonucleotide
  Sense strand starting at position 306 of SEQ ID NO: 1881358
ccaauucucgacgagaaac

SEQ ID NO: 2038253 - RNA, 19 nt, Artificial Sequence
  Description of Artificial Sequence: Synthetic oligonucleotide
  Antisense strand to SEQ ID NO: 2038252
guuucucgucgagaauugg

SEQ ID NO: 2038254 - RNA, 19 nt, Artificial Sequence
  Description of Artificial Sequence: Synthetic oligonucleotide
  Sense strand starting at position 371 of SEQ ID NO: 1881358
caauguaugccuuaugugu

SEQ ID NO: 2038255 - RNA, 19 nt, Artificial Sequence
  Description of Artificial Sequence: Synthetic oligonucleotide
  Antisense strand to SEQ ID NO: 2038254
acacauaaggcauacauug

SEQ ID NO: 2038256 - RNA, 19 nt, Artificial Sequence
  Description of Artificial Sequence: Synthetic oligonucleotide
  Sense strand starting at position 375 of SEQ ID NO: 1881358
guaugccuuauguguauuu

SEQ ID NO: 2038257 - RNA, 19 nt, Artificial Sequence
  Description of Artificial Sequence: Synthetic oligonucleotide
  Antisense strand to SEQ ID NO: 2038256
aaauacacauaaggcauac

SEQ ID NO: 2038258 - RNA, 19 nt, Artificial Sequence
  Description of Artificial Sequence: Synthetic oligonucleotide
  Sense strand starting at position 385 of SEQ ID NO: 1881358
uguguauuugauugauguc

SEQ ID NO: 2038259 - RNA, 19 nt, Artificial Sequence
  Description of Artificial Sequence: Synthetic oligonucleotide
  Antisense strand to SEQ ID NO: 2038258
gacaucaaucaaauacaca

SEQ ID NO: 2038260 - RNA, 19 nt, Artificial Sequence
  Description of Artificial Sequence: Synthetic oligonucleotide
  Sense strand starting at position 452 of SEQ ID NO: 1881358
ggacacauauucuuagggu

SEQ ID NO: 2038261 - RNA, 19 nt, Artificial Sequence
  Description of Artificial Sequence: Synthetic oligonucleotide
  Antisense strand to SEQ ID NO: 2038260
acccuaagaauaugugucc

SEQ ID NO: 2038262 - RNA, 19 nt, Artificial Sequence
  Description of Artificial Sequence: Synthetic oligonucleotide
  Sense strand starting at position 608 of SEQ ID NO: 1881358
uauuguaguaguggaaagu

SEQ ID NO: 2038263 - RNA, 19 nt, Artificial Sequence
  Description of Artificial Sequence: Synthetic oligonucleotide
  Antisense strand to SEQ ID NO: 2038262
acuuuccacuacuacaaua

SEQ ID NO: 2038264 - RNA, 19 nt, Artificial Sequence
  Description of Artificial Sequence: Synthetic oligonucleotide
  Sense strand starting at position 617 of SEQ ID NO: 1881358
aguggaaaguggcuauuau

SEQ ID NO: 2038265 - RNA, 19 nt, Artificial Sequence
  Description of Artificial Sequence: Synthetic oligonucleotide
  Antisense strand to SEQ ID NO: 2038264
auaauagccacuuuccacu

SEQ ID NO: 2038266 - RNA, 19 nt, Artificial Sequence
  Description of Artificial Sequence: Synthetic oligonucleotide
  Sense strand starting at position 618 of SEQ ID NO: 1881358
guggaaaguggcuauuauu

SEQ ID NO: 2038267 - RNA, 19 nt, Artificial Sequence
  Description of Artificial Sequence: Synthetic oligonucleotide
  Antisense strand to SEQ ID NO: 2038266
aauaauagccacuuuccac

SEQ ID NO: 2038268 - RNA, 19 nt, Artificial Sequence
  Description of Artificial Sequence: Synthetic oligonucleotide
  Sense strand starting at position 811 of SEQ ID NO: 1881358
ucccaagaguuuguagagu

SEQ ID NO: 2038269 - RNA, 19 nt, Artificial Sequence
  Description of Artificial Sequence: Synthetic oligonucleotide
  Antisense strand to SEQ ID NO: 2038268
acucuacaaacucuuggga

SEQ ID NO: 2038270 - RNA, 19 nt, Artificial Sequence
  Description of Artificial Sequence: Synthetic oligonucleotide
  Sense strand starting at position 855 of SEQ ID NO: 1881358
gcaaacuucugaucacuga

SEQ ID NO: 2038271 - RNA, 19 nt, Artificial Sequence
  Description of Artificial Sequence: Synthetic oligonucleotide
  Antisense strand to SEQ ID NO: 2038270
ucagugaucagaaguuugc

SEQ ID NO: 2038272 - RNA, 19 nt, Artificial Sequence
  Description of Artificial Sequence: Synthetic oligonucleotide
  Sense strand starting at position 1071 of SEQ ID NO: 1881358
gccaguuacgcugaaggaa

SEQ ID NO: 2038273 - RNA, 19 nt, Artificial Sequence
  Description of Artificial Sequence: Synthetic oligonucleotide
  Antisense strand to SEQ ID NO: 2038272
uuccuucagcguaacuggc

SEQ ID NO: 2038274 - RNA, 19 nt, Artificial Sequence
  Description of Artificial Sequence: Synthetic oligonucleotide
  Sense strand starting at position 1253 of SEQ ID NO: 1881358
ggcuuuagccacuagggau

SEQ ID NO: 2038275 - RNA, 19 nt, Artificial Sequence
  Description of Artificial Sequence: Synthetic oligonucleotide
  Antisense strand to SEQ ID NO: 2038274
aucccuaguggcuaaagcc

SEQ ID NO: 2038276 - RNA, 19 nt, Artificial Sequence
  Description of Artificial Sequence: Synthetic oligonucleotide
  Sense strand starting at position 1591 of SEQ ID NO: 1881358
gccaguucaucggucaaag

SEQ ID NO: 2038277 - RNA, 19 nt, Artificial Sequence
  Description of Artificial Sequence: Synthetic oligonucleotide
  Antisense strand to SEQ ID NO: 2038276
cuuugaccgaugaacuggc

SEQ ID NO: 2038278 - RNA, 19 nt, Artificial Sequence
  Description of Artificial Sequence: Synthetic oligonucleotide
  Sense strand starting at position 1608 of SEQ ID NO: 1881358
agauaauccugacuaggug

SEQ ID NO: 2038279 - RNA, 19 nt, Artificial Sequence
  Description of Artificial Sequence: Synthetic oligonucleotide
  Antisense strand to SEQ ID NO: 2038278
caccuagucaggauuaucu

SEQ ID NO: 2038280 - RNA, 19 nt, Artificial Sequence
  Description of Artificial Sequence: Synthetic oligonucleotide
  Sense strand starting at position 1960 of SEQ ID NO: 1881358
gcagaauacuaggcacucu

SEQ ID NO: 2038281 - RNA, 19 nt, Artificial Sequence
  Description of Artificial Sequence: Synthetic oligonucleotide
  Antisense strand to SEQ ID NO: 2038280
agagugccuaguauucugc

SEQ ID NO: 2038282 - RNA, 19 nt, Artificial Sequence
  Description of Artificial Sequence: Synthetic oligonucleotide
  Sense strand starting at position 2158 of SEQ ID NO: 1881358
cuacuugaaccugagucuu

SEQ ID NO: 2038283 - RNA, 19 nt, Artificial Sequence
  Description of Artificial Sequence: Synthetic oligonucleotide
  Antisense strand to SEQ ID NO: 2038282
aagacucagguucaaguag

SEQ ID NO: 2038284 - RNA, 19 nt, Artificial Sequence
  Description of Artificial Sequence: Synthetic oligonucleotide
  Sense strand starting at position 2224 of SEQ ID NO: 1881358
gugccugucacaggguaaa

SEQ ID NO: 2038285 - RNA, 19 nt, Artificial Sequence
  Description of Artificial Sequence: Synthetic oligonucleotide
  Antisense strand to SEQ ID NO: 2038284
uuuacccugugacaggcac

SEQ ID NO: 2038286 - RNA, 19 nt, Artificial Sequence
  Description of Artificial Sequence: Synthetic oligonucleotide
  Sense strand starting at position 2255 of SEQ ID NO: 1881358
ccuucuaauucccuaggga

SEQ ID NO: 2038287 - RNA, 19 nt, Artificial Sequence
  Description of Artificial Sequence: Synthetic oligonucleotide
  Antisense strand to SEQ ID NO: 2038286
ucccuagggaauuagaagg

SEQ ID NO: 2038288 - RNA, 19 nt, Artificial Sequence
  Description of Artificial Sequence: Synthetic oligonucleotide
  Sense strand starting at position 2379 of SEQ ID NO: 1881358
ggucuuccgagccauugau

SEQ ID NO: 2038289 - RNA, 19 nt, Artificial Sequence
  Description of Artificial Sequence: Synthetic oligonucleotide
  Antisense strand to SEQ ID NO: 2038288
aucaauggcucggaagacc

SEQ ID NO: 2038290 - RNA, 19 nt, Artificial Sequence
  Description of Artificial Sequence: Synthetic oligonucleotide
  Sense strand starting at position 2385 of SEQ ID NO: 1881358
ccgagccauugauuuccua

SEQ ID NO: 2038291 - RNA, 19 nt, Artificial Sequence
  Description of Artificial Sequence: Synthetic oligonucleotide
  Antisense strand to SEQ ID NO: 2038290
uaggaaaucaauggcucgg

SEQ ID NO: 2038292 - RNA, 19 nt, Artificial Sequence
  Description of Artificial Sequence: Synthetic oligonucleotide
  Sense strand starting at position 2494 of SEQ ID NO: 1881358
ggcccaugauauccucgaa

SEQ ID NO: 2038293 - RNA, 19 nt, Artificial Sequence
  Description of Artificial Sequence: Synthetic oligonucleotide
  Antisense strand to SEQ ID NO: 2038292
uucgaggauaucaugggcc

SEQ ID NO: 2038294 - RNA, 19 nt, Artificial Sequence
  Description of Artificial Sequence: Synthetic oligonucleotide
  Sense strand starting at position 2498 of SEQ ID NO: 1881358
caugauauccucgaaggca

SEQ ID NO: 2038295 - RNA, 19 nt, Artificial Sequence
  Description of Artificial Sequence: Synthetic oligonucleotide
  Antisense strand to SEQ ID NO: 2038294
ugccuucgaggauaucaug

SEQ ID NO: 2038296 - RNA, 19 nt, Artificial Sequence
  Description of Artificial Sequence: Synthetic oligonucleotide
  Sense strand starting at position 3019 of SEQ ID NO: 1881358
cggauugccacggauuaac

SEQ ID NO: 2038297 - RNA, 19 nt, Artificial Sequence
  Description of Artificial Sequence: Synthetic oligonucleotide
  Antisense strand to SEQ ID NO: 2038296
guuaauccguggcaauccg

SEQ ID NO: 2038298 - RNA, 19 nt, Artificial Sequence
  Description of Artificial Sequence: Synthetic oligonucleotide
  Sense strand starting at position 3267 of SEQ ID NO: 1881358
ugagaaauguauucuaccu

SEQ ID NO: 2038299 - RNA, 19 nt, Artificial Sequence
  Description of Artificial Sequence: Synthetic oligonucleotide
  Antisense strand to SEQ ID NO: 2038298
agguagaauacauuucuca

SEQ ID NO: 2038300 - RNA, 19 nt, Artificial Sequence
  Description of Artificial Sequence: Synthetic oligonucleotide
  Sense strand starting at position 3279 of SEQ ID NO: 1881358
ucuaccuauccuugggacu

SEQ ID NO: 2038301 - RNA, 19 nt, Artificial Sequence
  Description of Artificial Sequence: Synthetic oligonucleotide
  Antisense strand to SEQ ID NO: 2038300
agucccaaggauagguaga

SEQ ID NO: 2038302 - RNA, 19 nt, Artificial Sequence
  Description of Artificial Sequence: Synthetic oligonucleotide
  Sense strand starting at position 3280 of SEQ ID NO: 1881358
cuaccuauccuugggacua

SEQ ID NO: 2038303 - RNA, 19 nt, Artificial Sequence
  Description of Artificial Sequence: Synthetic oligonucleotide
  Antisense strand to SEQ ID NO: 2038302
uagucccaaggauagguag

SEQ ID NO: 2038304 - RNA, 19 nt, Artificial Sequence
  Description of Artificial Sequence: Synthetic oligonucleotide
  Sense strand starting at position 3299 of SEQ ID NO: 1881358
cguagaaauuuggaauucu

SEQ ID NO: 2038305 - RNA, 19 nt, Artificial Sequence
  Description of Artificial Sequence: Synthetic oligonucleotide
  Antisense strand to SEQ ID NO: 2038304
agaauuccaaauuucuacg

SEQ ID NO: 2038306 - RNA, 19 nt, Artificial Sequence
  Description of Artificial Sequence: Synthetic oligonucleotide
  Sense strand starting at position 3308 of SEQ ID NO: 1881358
uuggaauucuuucugagcu

SEQ ID NO: 2038307 - RNA, 19 nt, Artificial Sequence
  Description of Artificial Sequence: Synthetic oligonucleotide
  Antisense strand to SEQ ID NO: 2038306
agcucagaaagaauuccaa

SEQ ID NO: 2038308 - RNA, 19 nt, Artificial Sequence
  Description of Artificial Sequence: Synthetic oligonucleotide
  Sense strand starting at position 3324 of SEQ ID NO: 1881358
gcuaauaagaccuggugga

SEQ ID NO: 2038309 - RNA, 19 nt, Artificial Sequence
  Description of Artificial Sequence: Synthetic oligonucleotide
  Antisense strand to SEQ ID NO: 2038308
uccaccaggucuuauuagc

SEQ ID NO: 2038310 - RNA, 19 nt, Artificial Sequence
  Description of Artificial Sequence: Synthetic oligonucleotide
  Sense strand starting at position 3425 of SEQ ID NO: 1881358
gccucuuaguggucagaag

SEQ ID NO: 2038311 - RNA, 19 nt, Artificial Sequence
  Description of Artificial Sequence: Synthetic oligonucleotide
  Antisense strand to SEQ ID NO: 2038310
cuucugaccacuaagaggc

SEQ ID NO: 2038312 - RNA, 19 nt, Artificial Sequence
  Description of Artificial Sequence: Synthetic oligonucleotide
  Sense strand starting at position 3426 of SEQ ID NO: 1881358
ccucuuaguggucagaaga

SEQ ID NO: 2038313 - RNA, 19 nt, Artificial Sequence
  Description of Artificial Sequence: Synthetic oligonucleotide
  Antisense strand to SEQ ID NO: 2038312
ucuucugaccacuaagagg

SEQ ID NO: 2038314 - RNA, 19 nt, Artificial Sequence
  Description of Artificial Sequence: Synthetic oligonucleotide
  Sense strand starting at position 3510 of SEQ ID NO: 1881358
gcuaacaugcgauggaguu

SEQ ID NO: 2038315 - RNA, 19 nt, Artificial Sequence
  Description of Artificial Sequence: Synthetic oligonucleotide
  Antisense strand to SEQ ID NO: 2038314
aacuccaucgcauguuagc

SEQ ID NO: 2038316 - RNA, 19 nt, Artificial Sequence
  Description of Artificial Sequence: Synthetic oligonucleotide
  Sense strand starting at position 3772 of SEQ ID NO: 1881358
cgagcuacugccuagaugu

SEQ ID NO: 2038317 - RNA, 19 nt, Artificial Sequence
  Description of Artificial Sequence: Synthetic oligonucleotide
  Antisense strand to SEQ ID NO: 2038316
acaucuaggcaguagcucg

SEQ ID NO: 2038318 - RNA, 19 nt, Artificial Sequence
  Description of Artificial Sequence: Synthetic oligonucleotide
  Sense strand starting at position 3774 of SEQ ID NO: 1881358
agcuacugccuagauguuu

SEQ ID NO: 2038319 - RNA, 19 nt, Artificial Sequence
  Description of Artificial Sequence: Synthetic oligonucleotide
  Antisense strand to SEQ ID NO: 2038318
aaacaucuaggcaguagcu

SEQ ID NO: 2038320 - RNA, 19 nt, Artificial Sequence
  Description of Artificial Sequence: Synthetic oligonucleotide
  Sense strand starting at position 3924 of SEQ ID NO: 1881358
agaugcucuugauuuguuu

SEQ ID NO: 2038321 - RNA, 19 nt, Artificial Sequence
  Description of Artificial Sequence: Synthetic oligonucleotide
  Antisense strand to SEQ ID NO: 2038320
aaacaaaucaagagcaucu

SEQ ID NO: 2038322 - RNA, 19 nt, Artificial Sequence
  Description of Artificial Sequence: Synthetic oligonucleotide
  Sense strand starting at position 3961 of SEQ ID NO: 1881358
aagauuauugugcaaauug

SEQ ID NO: 2038323 - RNA, 19 nt, Artificial Sequence
  Description of Artificial Sequence: Synthetic oligonucleotide
  Antisense strand to SEQ ID NO: 2038322
caauuugcacaauaaucuu

SEQ ID NO: 2038324 - RNA, 19 nt, Artificial Sequence
  Description of Artificial Sequence: Synthetic oligonucleotide
  Sense strand starting at position 72 of SEQ ID NO: 1881359
acucuccaccuuuguguaa

SEQ ID NO: 2038325 - RNA, 19 nt, Artificial Sequence
  Description of Artificial Sequence: Synthetic oligonucleotide
  Antisense strand to SEQ ID NO: 2038324
uuacacaaagguggagagu

SEQ ID NO: 2038326 - RNA, 19 nt, Artificial Sequence
  Description of Artificial Sequence: Synthetic oligonucleotide
  Sense strand starting at position 73 of SEQ ID NO: 1881359
cucuccaccuuuguguaaa

SEQ ID NO: 2038327 - RNA, 19 nt, Artificial Sequence
  Description of Artificial Sequence: Synthetic oligonucleotide
  Antisense strand to SEQ ID NO: 2038326
uuuacacaaagguggagag

SEQ ID NO: 2038328 - RNA, 19 nt, Artificial Sequence
  Description of Artificial Sequence: Synthetic oligonucleotide
  Sense strand starting at position 76 of SEQ ID NO: 1881359
uccaccuuuguguaaagua

SEQ ID NO: 2038329 - RNA, 19 nt, Artificial Sequence
  Description of Artificial Sequence: Synthetic oligonucleotide
  Antisense strand to SEQ ID NO: 2038328
uacuuuacacaaaggugga

SEQ ID NO: 2038330 - RNA, 19 nt, Artificial Sequence
  Description of Artificial Sequence: Synthetic oligonucleotide
  Sense strand starting at position 84 of SEQ ID NO: 1881359
uguguaaaguacucucugu

SEQ ID NO: 2038331 - RNA, 19 nt, Artificial Sequence
  Description of Artificial Sequence: Synthetic oligonucleotide
  Antisense strand to SEQ ID NO: 2038330
acagagaguacuuuacaca

SEQ ID NO: 2038332 - RNA, 19 nt, Artificial Sequence
  Description of Artificial Sequence: Synthetic oligonucleotide
  Sense strand starting at position 91 of SEQ ID NO: 1881359
aguacucucuguccacaaa

SEQ ID NO: 2038333 - RNA, 19 nt, Artificial Sequence
  Description of Artificial Sequence: Synthetic oligonucleotide
  Antisense strand to SEQ ID NO: 2038332
uuuguggacagagaguacu

SEQ ID NO: 2038334 - RNA, 19 nt, Artificial Sequence
  Description of Artificial Sequence: Synthetic oligonucleotide
  Sense strand starting at position 202 of SEQ ID NO: 1881359
aagucugaggccuauguuu

SEQ ID NO: 2038335 - RNA, 19 nt, Artificial Sequence
  Description of Artificial Sequence: Synthetic oligonucleotide
  Antisense strand to SEQ ID NO: 2038334
aaacauaggccucagacuu

SEQ ID NO: 2038336 - RNA, 19 nt, Artificial Sequence
  Description of Artificial Sequence: Synthetic oligonucleotide
  Sense strand starting at position 204 of SEQ ID NO: 1881359
gucugaggccuauguuuga

SEQ ID NO: 2038337 - RNA, 19 nt, Artificial Sequence
  Description of Artificial Sequence: Synthetic oligonucleotide
  Antisense strand to SEQ ID NO: 2038336
ucaaacauaggccucagac

SEQ ID NO: 2038338 - RNA, 19 nt, Artificial Sequence
  Description of Artificial Sequence: Synthetic oligonucleotide
  Sense strand starting at position 208 of SEQ ID NO: 1881359
gaggccuauguuugaucuu

SEQ ID NO: 2038339 - RNA, 19 nt, Artificial Sequence
  Description of Artificial Sequence: Synthetic oligonucleotide
  Antisense strand to SEQ ID NO: 2038338
aagaucaaacauaggccuc

SEQ ID NO: 2038340 - RNA, 19 nt, Artificial Sequence
  Description of Artificial Sequence: Synthetic oligonucleotide
  Sense strand starting at position 294 of SEQ ID NO: 1881359
cggugauuacugcuguguu

SEQ ID NO: 2038341 - RNA, 19 nt, Artificial Sequence
  Description of Artificial Sequence: Synthetic oligonucleotide
  Antisense strand to SEQ ID NO: 2038340
aacacagcaguaaucaccg

SEQ ID NO: 2038342 - RNA, 19 nt, Artificial Sequence
  Description of Artificial Sequence: Synthetic oligonucleotide
  Sense strand starting at position 306 of SEQ ID NO: 1881359
cuguguucacugugucaag

SEQ ID NO: 2038343 - RNA, 19 nt, Artificial Sequence
  Description of Artificial Sequence: Synthetic oligonucleotide
  Antisense strand to SEQ ID NO: 2038342
cuugacacagugaacacag

SEQ ID NO: 2038344 - RNA, 19 nt, Artificial Sequence
  Description of Artificial Sequence: Synthetic oligonucleotide
  Sense strand starting at position 783 of SEQ ID NO: 1881359
ucccaagaguuuccagagu

SEQ ID NO: 2038345 - RNA, 19 nt, Artificial Sequence
  Description of Artificial Sequence: Synthetic oligonucleotide
  Antisense strand to SEQ ID NO: 2038344
acucuggaaacucuuggga

SEQ ID NO: 2038346 - RNA, 19 nt, Artificial Sequence
  Description of Artificial Sequence: Synthetic oligonucleotide
  Sense strand starting at position 987 of SEQ ID NO: 1881359
accaaugcugggcaucaua

SEQ ID NO: 2038347 - RNA, 19 nt, Artificial Sequence
  Description of Artificial Sequence: Synthetic oligonucleotide
  Antisense strand to SEQ ID NO: 2038346
uaugaugcccagcauuggu

SEQ ID NO: 2038348 - RNA, 19 nt, Artificial Sequence
  Description of Artificial Sequence: Synthetic oligonucleotide
  Sense strand starting at position 1063 of SEQ ID NO: 1881359
accaguuacgcugaaggaa

SEQ ID NO: 2038349 - RNA, 19 nt, Artificial Sequence
  Description of Artificial Sequence: Synthetic oligonucleotide
  Antisense strand to SEQ ID NO: 2038348
uuccuucagcguaacuggu

SEQ ID NO: 2038350 - RNA, 19 nt, Artificial Sequence
  Description of Artificial Sequence: Synthetic oligonucleotide
  Sense strand starting at position 1095 of SEQ ID NO: 1881359
ggguuagcaucugugcaga

SEQ ID NO: 2038351 - RNA, 19 nt, Artificial Sequence
  Description of Artificial Sequence: Synthetic oligonucleotide
  Antisense strand to SEQ ID NO: 2038350
ucugcacagaugcuaaccc

SEQ ID NO: 2038352 - RNA, 19 nt, Artificial Sequence
  Description of Artificial Sequence: Synthetic oligonucleotide
  Sense strand starting at position 1097 of SEQ ID NO: 1881359
guuagcaucugugcagacu

SEQ ID NO: 2038353 - RNA, 19 nt, Artificial Sequence
  Description of Artificial Sequence: Synthetic oligonucleotide
  Antisense strand to SEQ ID NO: 2038352
agucugcacagaugcuaac

SEQ ID NO: 2038354 - RNA, 19 nt, Artificial Sequence
  Description of Artificial Sequence: Synthetic oligonucleotide
  Sense strand starting at position 1601 of SEQ ID NO: 1881359
agguaauccugacuaggug

SEQ ID NO: 2038355 - RNA, 19 nt, Artificial Sequence
  Description of Artificial Sequence: Synthetic oligonucleotide
  Antisense strand to SEQ ID NO: 2038354
caccuagucaggauuaccu

SEQ ID NO: 2038356 - RNA, 19 nt, Artificial Sequence
  Description of Artificial Sequence: Synthetic oligonucleotide
  Sense strand starting at position 1602 of SEQ ID NO: 1881359
gguaauccugacuagguga

SEQ ID NO: 2038357 - RNA, 19 nt, Artificial Sequence
  Description of Artificial Sequence: Synthetic oligonucleotide
  Antisense strand to SEQ ID NO: 2038356
ucaccuagucaggauuacc

SEQ ID NO: 2038358 - RNA, 19 nt, Artificial Sequence
  Description of Artificial Sequence: Synthetic oligonucleotide
  Sense strand starting at position 1639 of SEQ ID NO: 1881359
guuggaaacuccuuucuuc

SEQ ID NO: 2038359 - RNA, 19 nt, Artificial Sequence
  Description of Artificial Sequence: Synthetic oligonucleotide
  Antisense strand to SEQ ID NO: 2038358
gaagaaaggaguuuccaac

SEQ ID NO: 2038360 - RNA, 19 nt, Artificial Sequence
  Description of Artificial Sequence: Synthetic oligonucleotide
  Sense strand starting at position 1715 of SEQ ID NO: 1881359
acuggugccggaugaauuu

SEQ ID NO: 2038361 - RNA, 19 nt, Artificial Sequence
  Description of Artificial Sequence: Synthetic oligonucleotide
  Antisense strand to SEQ ID NO: 2038360
aaauucauccggcaccagu

SEQ ID NO: 2038362 - RNA, 19 nt, Artificial Sequence
  Description of Artificial Sequence: Synthetic oligonucleotide
  Sense strand starting at position 1724 of SEQ ID NO: 1881359
ggaugaauuucuugguucu

SEQ ID NO: 2038363 - RNA, 19 nt, Artificial Sequence
  Description of Artificial Sequence: Synthetic oligonucleotide
  Antisense strand to SEQ ID NO: 2038362
agaaccaagaaauucaucc

SEQ ID NO: 2038364 - RNA, 19 nt, Artificial Sequence
  Description of Artificial Sequence: Synthetic oligonucleotide
  Sense strand starting at position 1960 of SEQ ID NO: 1881359
gcagaauacuaggcagucu

SEQ ID NO: 2038365 - RNA, 19 nt, Artificial Sequence
  Description of Artificial Sequence: Synthetic oligonucleotide
  Antisense strand to SEQ ID NO: 2038364
agacugccuaguauucugc

SEQ ID NO: 2038366 - RNA, 19 nt, Artificial Sequence
  Description of Artificial Sequence: Synthetic oligonucleotide
  Sense strand starting at position 2200 of SEQ ID NO: 1881359
gacgacauugugugcugaa

SEQ ID NO: 2038367 - RNA, 19 nt, Artificial Sequence
  Description of Artificial Sequence: Synthetic oligonucleotide
  Antisense strand to SEQ ID NO: 2038366
uucagcacacaaugucguc

SEQ ID NO: 2038368 - RNA, 19 nt, Artificial Sequence
  Description of Artificial Sequence: Synthetic oligonucleotide
  Sense strand starting at position 2201 of SEQ ID NO: 1881359
acgacauugugugcugaau

SEQ ID NO: 2038369 - RNA, 19 nt, Artificial Sequence
  Description of Artificial Sequence: Synthetic oligonucleotide
  Antisense strand to SEQ ID NO: 2038368
auucagcacacaaugucgu

SEQ ID NO: 2038370 - RNA, 19 nt, Artificial Sequence
  Description of Artificial Sequence: Synthetic oligonucleotide
  Sense strand starting at position 2227 of SEQ ID NO: 1881359
guaccugucacaggguaaa

SEQ ID NO: 2038371 - RNA, 19 nt, Artificial Sequence
  Description of Artificial Sequence: Synthetic oligonucleotide
  Antisense strand to SEQ ID NO: 2038370
uuuacccugugacagguac

SEQ ID NO: 2038372 - RNA, 19 nt, Artificial Sequence
  Description of Artificial Sequence: Synthetic oligonucleotide
  Sense strand starting at position 2263 of SEQ ID NO: 1881359
cuucuaauucccuagguag

SEQ ID NO: 2038373 - RNA, 19 nt, Artificial Sequence
  Description of Artificial Sequence: Synthetic oligonucleotide
  Antisense strand to SEQ ID NO: 2038372
cuaccuagggaauuagaag

SEQ ID NO: 2038374 - RNA, 19 nt, Artificial Sequence
  Description of Artificial Sequence: Synthetic oligonucleotide
  Sense strand starting at position 2505 of SEQ ID NO: 1881359
ggcccaugauauccuugaa

SEQ ID NO: 2038375 - RNA, 19 nt, Artificial Sequence
  Description of Artificial Sequence: Synthetic oligonucleotide
  Antisense strand to SEQ ID NO: 2038374
uucaaggauaucaugggcc

SEQ ID NO: 2038376 - RNA, 19 nt, Artificial Sequence
  Description of Artificial Sequence: Synthetic oligonucleotide
  Sense strand starting at position 2508 of SEQ ID NO: 1881359
ccaugauauccuugaaggc

SEQ ID NO: 2038377 - RNA, 19 nt, Artificial Sequence
  Description of Artificial Sequence: Synthetic oligonucleotide
  Antisense strand to SEQ ID NO: 2038376
gccuucaaggauaucaugg

SEQ ID NO: 2038378 - RNA, 19 nt, Artificial Sequence
  Description of Artificial Sequence: Synthetic oligonucleotide
  Sense strand starting at position 2555 of SEQ ID NO: 1881359
agagcuccugacgaucaaa

SEQ ID NO: 2038379 - RNA, 19 nt, Artificial Sequence
  Description of Artificial Sequence: Synthetic oligonucleotide
  Antisense strand to SEQ ID NO: 2038378
uuugaucgucaggagcucu

SEQ ID NO: 2038380 - RNA, 19 nt, Artificial Sequence
  Description of Artificial Sequence: Synthetic oligonucleotide
  Sense strand starting at position 2695 of SEQ ID NO: 1881359
gggucauggcaaugaauga

SEQ ID NO: 2038381 - RNA, 19 nt, Artificial Sequence
  Description of Artificial Sequence: Synthetic oligonucleotide
  Antisense strand to SEQ ID NO: 2038380
ucauucauugccaugaccc

SEQ ID NO: 2038382 - RNA, 19 nt, Artificial Sequence
  Description of Artificial Sequence: Synthetic oligonucleotide
  Sense strand starting at position 2730 of SEQ ID NO: 1881359
aucaguaagcacgguauaa

SEQ ID NO: 2038383 - RNA, 19 nt, Artificial Sequence
  Description of Artificial Sequence: Synthetic oligonucleotide
  Antisense strand to SEQ ID NO: 2038382
uuauaccgugcuuacugau

SEQ ID NO: 2038384 - RNA, 19 nt, Artificial Sequence
  Description of Artificial Sequence: Synthetic oligonucleotide
  Sense strand starting at position 2860 of SEQ ID NO: 1881359
ggucgaacuugccucauua

SEQ ID NO: 2038385 - RNA, 19 nt, Artificial Sequence
  Description of Artificial Sequence: Synthetic oligonucleotide
  Antisense strand to SEQ ID NO: 2038384
uaaugaggcaaguucgacc

SEQ ID NO: 2038386 - RNA, 19 nt, Artificial Sequence
  Description of Artificial Sequence: Synthetic oligonucleotide
  Sense strand starting at position 2879 of SEQ ID NO: 1881359
ugcccuucucccuauggaa

SEQ ID NO: 2038387 - RNA, 19 nt, Artificial Sequence
  Description of Artificial Sequence: Synthetic oligonucleotide
  Antisense strand to SEQ ID NO: 2038386
uuccauagggagaagggca

SEQ ID NO: 2038388 - RNA, 19 nt, Artificial Sequence
  Description of Artificial Sequence: Synthetic oligonucleotide
  Sense strand starting at position 2908 of SEQ ID NO: 1881359
gcugaccagcguuagcauu

SEQ ID NO: 2038389 - RNA, 19 nt, Artificial Sequence
  Description of Artificial Sequence: Synthetic oligonucleotide
  Antisense strand to SEQ ID NO: 2038388
aaugcuaacgcuggucagc

SEQ ID NO: 2038390 - RNA, 19 nt, Artificial Sequence
  Description of Artificial Sequence: Synthetic oligonucleotide
  Sense strand starting at position 2910 of SEQ ID NO: 1881359
ugaccagcguuagcauuaa

SEQ ID NO: 2038391 - RNA, 19 nt, Artificial Sequence
  Description of Artificial Sequence: Synthetic oligonucleotide
  Antisense strand to SEQ ID NO: 2038390
uuaaugcuaacgcugguca

SEQ ID NO: 2038392 - RNA, 19 nt, Artificial Sequence
  Description of Artificial Sequence: Synthetic oligonucleotide
  Sense strand starting at position 3074 of SEQ ID NO: 1881359
cugacauggcccuguaaag

SEQ ID NO: 2038393 - RNA, 19 nt, Artificial Sequence
  Description of Artificial Sequence: Synthetic oligonucleotide
  Antisense strand to SEQ ID NO: 2038392
cuuuacagggccaugucag

SEQ ID NO: 2038394 - RNA, 19 nt, Artificial Sequence
  Description of Artificial Sequence: Synthetic oligonucleotide
  Sense strand starting at position 3111 of SEQ ID NO: 1881359
aucuacguccuguagugaa

SEQ ID NO: 2038395 - RNA, 19 nt, Artificial Sequence
  Description of Artificial Sequence: Synthetic oligonucleotide
  Antisense strand to SEQ ID NO: 2038394
uucacuacaggacguagau

SEQ ID NO: 2038396 - RNA, 19 nt, Artificial Sequence
  Description of Artificial Sequence: Synthetic oligonucleotide
  Sense strand starting at position 3145 of SEQ ID NO: 1881359
aggucuucucccugagcca

SEQ ID NO: 2038397 - RNA, 19 nt, Artificial Sequence
  Description of Artificial Sequence: Synthetic oligonucleotide
  Antisense strand to SEQ ID NO: 2038396
uggcucagggagaagaccu

SEQ ID NO: 2038398 - RNA, 19 nt, Artificial Sequence
  Description of Artificial Sequence: Synthetic oligonucleotide
  Sense strand starting at position 3217 of SEQ ID NO: 1881359
acgaucuacucucuuugaa

SEQ ID NO: 2038399 - RNA, 19 nt, Artificial Sequence
  Description of Artificial Sequence: Synthetic oligonucleotide
  Antisense strand to SEQ ID NO: 2038398
uucaaagagaguagaucgu

SEQ ID NO: 2038400 - RNA, 19 nt, Artificial Sequence
  Description of Artificial Sequence: Synthetic oligonucleotide
  Sense strand starting at position 3695 of SEQ ID NO: 1881359
cgcagauggccacggauua

SEQ ID NO: 2038401 - RNA, 19 nt, Artificial Sequence
  Description of Artificial Sequence: Synthetic oligonucleotide
  Antisense strand to SEQ ID NO: 2038400
uaauccguggccaucugcg

SEQ ID NO: 2038402 - RNA, 19 nt, Artificial Sequence
  Description of Artificial Sequence: Synthetic oligonucleotide
  Sense strand starting at position 3696 of SEQ ID NO: 1881359
gcagauggccacggauuaa

SEQ ID NO: 2038403 - RNA, 19 nt, Artificial Sequence
  Description of Artificial Sequence: Synthetic oligonucleotide
  Antisense strand to SEQ ID NO: 2038402
uuaauccguggccaucugc

SEQ ID NO: 2038404 - RNA, 19 nt, Artificial Sequence
  Description of Artificial Sequence: Synthetic oligonucleotide
  Sense strand starting at position 14 of SEQ ID NO: 1881360
acaaauauuugguauggua

SEQ ID NO: 2038405 - RNA, 19 nt, Artificial Sequence
  Description of Artificial Sequence: Synthetic oligonucleotide
  Antisense strand to SEQ ID NO: 2038404
uaccauaccaaauauuugu

SEQ ID NO: 2038406 - RNA, 19 nt, Artificial Sequence
  Description of Artificial Sequence: Synthetic oligonucleotide
  Sense strand starting at position 87 of SEQ ID NO: 1881360
cucuaaacguguuuaacug

SEQ ID NO: 2038407 - RNA, 19 nt, Artificial Sequence
  Description of Artificial Sequence: Synthetic oligonucleotide
  Antisense strand to SEQ ID NO: 2038406
caguuaaacacguuuagag

SEQ ID NO: 2038408 - RNA, 19 nt, Artificial Sequence
  Description of Artificial Sequence: Synthetic oligonucleotide
  Sense strand starting at position 91 of SEQ ID NO: 1881360
aaacguguuuaacugccaa

SEQ ID NO: 2038409 - RNA, 19 nt, Artificial Sequence
  Description of Artificial Sequence: Synthetic oligonucleotide
  Antisense strand to SEQ ID NO: 2038408
uuggcaguuaaacacguuu

SEQ ID NO: 2038410 - RNA, 19 nt, Artificial Sequence
  Description of Artificial Sequence: Synthetic oligonucleotide
  Sense strand starting at position 111 of SEQ ID NO: 1881360
cagcuaccugcauguuaga

SEQ ID NO: 2038411 - RNA, 19 nt, Artificial Sequence
  Description of Artificial Sequence: Synthetic oligonucleotide
  Antisense strand to SEQ ID NO: 2038410
ucuaacaugcagguagcug

SEQ ID NO: 2038412 - RNA, 19 nt, Artificial Sequence
  Description of Artificial Sequence: Synthetic oligonucleotide
  Sense strand starting at position 276 of SEQ ID NO: 1881360
cagugugcuguuucgcuua

SEQ ID NO: 2038413 - RNA, 19 nt, Artificial Sequence
  Description of Artificial Sequence: Synthetic oligonucleotide
  Antisense strand to SEQ ID NO: 2038412
uaagcgaaacagcacacug

SEQ ID NO: 2038414 - RNA, 19 nt, Artificial Sequence
  Description of Artificial Sequence: Synthetic oligonucleotide
  Sense strand starting at position 353 of SEQ ID NO: 1881360
gcugcuaucgacuccugua

SEQ ID NO: 2038415 - RNA, 19 nt, Artificial Sequence
  Description of Artificial Sequence: Synthetic oligonucleotide
  Antisense strand to SEQ ID NO: 2038414
uacaggagucgauagcagc

SEQ ID NO: 2038416 - RNA, 19 nt, Artificial Sequence
  Description of Artificial Sequence: Synthetic oligonucleotide
  Sense strand starting at position 596 of SEQ ID NO: 1881360
ccacaaucugggcaauguu

SEQ ID NO: 2038417 - RNA, 19 nt, Artificial Sequence
  Description of Artificial Sequence: Synthetic oligonucleotide
  Antisense strand to SEQ ID NO: 2038416
aacauugcccagauugugg

SEQ ID NO: 2038418 - RNA, 19 nt, Artificial Sequence
  Description of Artificial Sequence: Synthetic oligonucleotide
  Sense strand starting at position 705 of SEQ ID NO: 1881360
auuccuugauuugauguua

SEQ ID NO: 2038419 - RNA, 19 nt, Artificial Sequence
  Description of Artificial Sequence: Synthetic oligonucleotide
  Antisense strand to SEQ ID NO: 2038418
uaacaucaaaucaaggaau

SEQ ID NO: 2038420 - RNA, 19 nt, Artificial Sequence
  Description of Artificial Sequence: Synthetic oligonucleotide
  Sense strand starting at position 774 of SEQ ID NO: 1881360
ccaagaugcuggcuucuca

SEQ ID NO: 2038421 - RNA, 19 nt, Artificial Sequence
  Description of Artificial Sequence: Synthetic oligonucleotide
  Antisense strand to SEQ ID NO: 2038420
ugagaagccagcaucuugg

SEQ ID NO: 2038422 - RNA, 19 nt, Artificial Sequence
  Description of Artificial Sequence: Synthetic oligonucleotide
  Sense strand starting at position 785 of SEQ ID NO: 1881360
gcuucucaccugugaauau

SEQ ID NO: 2038423 - RNA, 19 nt, Artificial Sequence
  Description of Artificial Sequence: Synthetic oligonucleotide
  Antisense strand to SEQ ID NO: 2038422
auauucacaggugagaagc

SEQ ID NO: 2038424 - RNA, 19 nt, Artificial Sequence
  Description of Artificial Sequence: Synthetic oligonucleotide
  Sense strand starting at position 1173 of SEQ ID NO: 1881360
gucaccaugcugcaaauua

SEQ ID NO: 2038425 - RNA, 19 nt, Artificial Sequence
  Description of Artificial Sequence: Synthetic oligonucleotide
  Antisense strand to SEQ ID NO: 2038424
uaauuugcagcauggugac

SEQ ID NO: 2038426 - RNA, 19 nt, Artificial Sequence
  Description of Artificial Sequence: Synthetic oligonucleotide
  Sense strand starting at position 1213 of SEQ ID NO: 1881360
accagucaggucgguauuu

SEQ ID NO: 2038427 - RNA, 19 nt, Artificial Sequence
  Description of Artificial Sequence: Synthetic oligonucleotide
  Antisense strand to SEQ ID NO: 2038426
aaauaccgaccugacuggu

SEQ ID NO: 2038428 - RNA, 19 nt, Artificial Sequence
  Description of Artificial Sequence: Synthetic oligonucleotide
  Sense strand starting at position 1214 of SEQ ID NO: 1881360
ccagucaggucgguauuua

SEQ ID NO: 2038429 - RNA, 19 nt, Artificial Sequence
  Description of Artificial Sequence: Synthetic oligonucleotide
  Antisense strand to SEQ ID NO: 2038428
uaaauaccgaccugacugg

SEQ ID NO: 2038430 - RNA, 19 nt, Artificial Sequence
  Description of Artificial Sequence: Synthetic oligonucleotide
  Sense strand starting at position 1363 of SEQ ID NO: 1881360
ucugaauccugcuuuagug

SEQ ID NO: 2038431 - RNA, 19 nt, Artificial Sequence
  Description of Artificial Sequence: Synthetic oligonucleotide
  Antisense strand to SEQ ID NO: 2038430
cacuaaagcaggauucaga

SEQ ID NO: 2038432 - RNA, 19 nt, Artificial Sequence
  Description of Artificial Sequence: Synthetic oligonucleotide
  Sense strand starting at position 1367 of SEQ ID NO: 1881360
aauccugcuuuaguggaaa

SEQ ID NO: 2038433 - RNA, 19 nt, Artificial Sequence
  Description of Artificial Sequence: Synthetic oligonucleotide
  Antisense strand to SEQ ID NO: 2038432
uuuccacuaaagcaggauu

SEQ ID NO: 2038434 - RNA, 19 nt, Artificial Sequence
  Description of Artificial Sequence: Synthetic oligonucleotide
  Sense strand starting at position 1541 of SEQ ID NO: 1881360
cuuccauuccuguaauguu

SEQ ID NO: 2038435 - RNA, 19 nt, Artificial Sequence
  Description of Artificial Sequence: Synthetic oligonucleotide
  Antisense strand to SEQ ID NO: 2038434
aacauuacaggaauggaag

SEQ ID NO: 2038436 - RNA, 19 nt, Artificial Sequence
  Description of Artificial Sequence: Synthetic oligonucleotide
  Sense strand starting at position 1548 of SEQ ID NO: 1881360
uccuguaauguuuagaagu

SEQ ID NO: 2038437 - RNA, 19 nt, Artificial Sequence
  Description of Artificial Sequence: Synthetic oligonucleotide
  Antisense strand to SEQ ID NO: 2038436
acuucuaaacauuacagga

SEQ ID NO: 2038438 - RNA, 19 nt, Artificial Sequence
  Description of Artificial Sequence: Synthetic oligonucleotide
  Sense strand starting at position 1668 of SEQ ID NO: 1881360
gcacuuagagcccagaguu

SEQ ID NO: 2038439 - RNA, 19 nt, Artificial Sequence
  Description of Artificial Sequence: Synthetic oligonucleotide
  Antisense strand to SEQ ID NO: 2038438
aacucugggcucuaagugc

SEQ ID NO: 2038440 - RNA, 19 nt, Artificial Sequence
  Description of Artificial Sequence: Synthetic oligonucleotide
  Sense strand starting at position 1804 of SEQ ID NO: 1881360
ucauucuguuaggucuaau

SEQ ID NO: 2038441 - RNA, 19 nt, Artificial Sequence
  Description of Artificial Sequence: Synthetic oligonucleotide
  Antisense strand to SEQ ID NO: 2038440
auuagaccuaacagaauga

SEQ ID NO: 2038442 - RNA, 19 nt, Artificial Sequence
  Description of Artificial Sequence: Synthetic oligonucleotide
  Sense strand starting at position 1807 of SEQ ID NO: 1881360
uucuguuaggucuaaugag

SEQ ID NO: 2038443 - RNA, 19 nt, Artificial Sequence
  Description of Artificial Sequence: Synthetic oligonucleotide
  Antisense strand to SEQ ID NO: 2038442
cucauuagaccuaacagaa

SEQ ID NO: 2038444 - RNA, 19 nt, Artificial Sequence
  Description of Artificial Sequence: Synthetic oligonucleotide
  Sense strand starting at position 1815 of SEQ ID NO: 1881360
ggucuaaugagauauugca

SEQ ID NO: 2038445 - RNA, 19 nt, Artificial Sequence
  Description of Artificial Sequence: Synthetic oligonucleotide
  Antisense strand to SEQ ID NO: 2038444
ugcaauaucucauuagacc

SEQ ID NO: 2038446 - RNA, 19 nt, Artificial Sequence
  Description of Artificial Sequence: Synthetic oligonucleotide
  Sense strand starting at position 2252 of SEQ ID NO: 1881360
ugucuuacuacggaaugaa

SEQ ID NO: 2038447 - RNA, 19 nt, Artificial Sequence
  Description of Artificial Sequence: Synthetic oligonucleotide
  Antisense strand to SEQ ID NO: 2038446
uucauuccguaguaagaca

SEQ ID NO: 2038448 - RNA, 19 nt, Artificial Sequence
  Description of Artificial Sequence: Synthetic oligonucleotide
  Sense strand starting at position 2271 of SEQ ID NO: 1881360
gguagacagaguuaugcau

SEQ ID NO: 2038449 - RNA, 19 nt, Artificial Sequence
  Description of Artificial Sequence: Synthetic oligonucleotide
  Antisense strand to SEQ ID NO: 2038448
augcauaacucugucuacc

SEQ ID NO: 2038450 - RNA, 19 nt, Artificial Sequence
  Description of Artificial Sequence: Synthetic oligonucleotide
  Sense strand starting at position 2391 of SEQ ID NO: 1881360
aguaaugcuuaccugaaua

SEQ ID NO: 2038451 - RNA, 19 nt, Artificial Sequence
  Description of Artificial Sequence: Synthetic oligonucleotide
  Antisense strand to SEQ ID NO: 2038450
uauucagguaagcauuacu

SEQ ID NO: 2038452 - RNA, 19 nt, Artificial Sequence
  Description of Artificial Sequence: Synthetic oligonucleotide
  Sense strand starting at position 2544 of SEQ ID NO: 1881360
agaucuacucagugauaca

SEQ ID NO: 2038453 - RNA, 19 nt, Artificial Sequence
  Description of Artificial Sequence: Synthetic oligonucleotide
  Antisense strand to SEQ ID NO: 2038452
uguaucacugaguagaucu

SEQ ID NO: 2038454 - RNA, 19 nt, Artificial Sequence
  Description of Artificial Sequence: Synthetic oligonucleotide
  Sense strand starting at position 2612 of SEQ ID NO: 1881360
agacaauacuuacaaaggu

SEQ ID NO: 2038455 - RNA, 19 nt, Artificial Sequence
  Description of Artificial Sequence: Synthetic oligonucleotide
  Antisense strand to SEQ ID NO: 2038454
accuuuguaaguauugucu

SEQ ID NO: 2038456 - RNA, 19 nt, Artificial Sequence
  Description of Artificial Sequence: Synthetic oligonucleotide
  Sense strand starting at position 2811 of SEQ ID NO: 1881360
auuauuauuccgcagaacu

SEQ ID NO: 2038457 - RNA, 19 nt, Artificial Sequence
  Description of Artificial Sequence: Synthetic oligonucleotide
  Antisense strand to SEQ ID NO: 2038456
aguucugcggaauaauaau

SEQ ID NO: 2038458 - RNA, 19 nt, Artificial Sequence
  Description of Artificial Sequence: Synthetic oligonucleotide
  Sense strand starting at position 2821 of SEQ ID NO: 1881360
cgcagaacuccaggaucaa

SEQ ID NO: 2038459 - RNA, 19 nt, Artificial Sequence
  Description of Artificial Sequence: Synthetic oligonucleotide
  Antisense strand to SEQ ID NO: 2038458
uugauccuggaguucugcg

SEQ ID NO: 2038460 - RNA, 19 nt, Artificial Sequence
  Description of Artificial Sequence: Synthetic oligonucleotide
  Sense strand starting at position 3033 of SEQ ID NO: 1881360
agaauaacguuuccuacau

SEQ ID NO: 2038461 - RNA, 19 nt, Artificial Sequence
  Description of Artificial Sequence: Synthetic oligonucleotide
  Antisense strand to SEQ ID NO: 2038460
auguaggaaacguuauucu

SEQ ID NO: 2038462 - RNA, 19 nt, Artificial Sequence
  Description of Artificial Sequence: Synthetic oligonucleotide
  Sense strand starting at position 3079 of SEQ ID NO: 1881360
uagugaaauuuauguucug

SEQ ID NO: 2038463 - RNA, 19 nt, Artificial Sequence
  Description of Artificial Sequence: Synthetic oligonucleotide
  Antisense strand to SEQ ID NO: 2038462
cagaacauaaauuucacua

SEQ ID NO: 2038464 - RNA, 19 nt, Artificial Sequence
  Description of Artificial Sequence: Synthetic oligonucleotide
  Sense strand starting at position 3134 of SEQ ID NO: 1881360
aggguauugugccuuauau

SEQ ID NO: 2038465 - RNA, 19 nt, Artificial Sequence
  Description of Artificial Sequence: Synthetic oligonucleotide
  Antisense strand to SEQ ID NO: 2038464
auauaaggcacaauacccu

SEQ ID NO: 2038466 - RNA, 19 nt, Artificial Sequence
  Description of Artificial Sequence: Synthetic oligonucleotide
  Sense strand starting at position 3136 of SEQ ID NO: 1881360
gguauugugccuuauauaa

SEQ ID NO: 2038467 - RNA, 19 nt, Artificial Sequence
  Description of Artificial Sequence: Synthetic oligonucleotide
  Antisense strand to SEQ ID NO: 2038466
uuauauaaggcacaauacc

SEQ ID NO: 2038468 - RNA, 19 nt, Artificial Sequence
  Description of Artificial Sequence: Synthetic oligonucleotide
  Sense strand starting at position 3172 of SEQ ID NO: 1881360
ccuacagcuuuauuaggaa

SEQ ID NO: 2038469 - RNA, 19 nt, Artificial Sequence
  Description of Artificial Sequence: Synthetic oligonucleotide
  Antisense strand to SEQ ID NO: 2038468
uuccuaauaaagcuguagg

SEQ ID NO: 2038470 - RNA, 19 nt, Artificial Sequence
  Description of Artificial Sequence: Synthetic oligonucleotide
  Sense strand starting at position 3205 of SEQ ID NO: 1881360
ccaauauagcagugagcuu

SEQ ID NO: 2038471 - RNA, 19 nt, Artificial Sequence
  Description of Artificial Sequence: Synthetic oligonucleotide
  Antisense strand to SEQ ID NO: 2038470
aagcucacugcuauauugg

SEQ ID NO: 2038472 - RNA, 19 nt, Artificial Sequence
  Description of Artificial Sequence: Synthetic oligonucleotide
  Sense strand starting at position 3275 of SEQ ID NO: 1881360
gguaacaugucacugcagu

SEQ ID NO: 2038473 - RNA, 19 nt, Artificial Sequence
  Description of Artificial Sequence: Synthetic oligonucleotide
  Antisense strand to SEQ ID NO: 2038472
acugcagugacauguuacc

SEQ ID NO: 2038474 - RNA, 19 nt, Artificial Sequence
  Description of Artificial Sequence: Synthetic oligonucleotide
  Sense strand starting at position 3276 of SEQ ID NO: 1881360
guaacaugucacugcaguu

SEQ ID NO: 2038475 - RNA, 19 nt, Artificial Sequence
  Description of Artificial Sequence: Synthetic oligonucleotide
  Antisense strand to SEQ ID NO: 2038474
aacugcagugacauguuac

SEQ ID NO: 2038476 - RNA, 19 nt, Artificial Sequence
  Description of Artificial Sequence: Synthetic oligonucleotide
  Sense strand starting at position 3778 of SEQ ID NO: 1881360
uguauuccauuuggaacau

SEQ ID NO: 2038477 - RNA, 19 nt, Artificial Sequence
  Description of Artificial Sequence: Synthetic oligonucleotide
  Antisense strand to SEQ ID NO: 2038476
auguuccaaauggaauaca

SEQ ID NO: 2038478 - RNA, 19 nt, Artificial Sequence
  Description of Artificial Sequence: Synthetic oligonucleotide
  Sense strand starting at position 3779 of SEQ ID NO: 1881360
guauuccauuuggaacauu

SEQ ID NO: 2038479 - RNA, 19 nt, Artificial Sequence
  Description of Artificial Sequence: Synthetic oligonucleotide
  Antisense strand to SEQ ID NO: 2038478
aauguuccaaauggaauac

SEQ ID NO: 2038480 - RNA, 19 nt, Artificial Sequence
  Description of Artificial Sequence: Synthetic oligonucleotide
  Sense strand starting at position 3790 of SEQ ID NO: 1881360
ggaacauuaugcccaaaua

SEQ ID NO: 2038481 - RNA, 19 nt, Artificial Sequence
  Description of Artificial Sequence: Synthetic oligonucleotide
  Antisense strand to SEQ ID NO: 2038480
uauuugggcauaauguucc

SEQ ID NO: 2038482 - RNA, 19 nt, Artificial Sequence
  Description of Artificial Sequence: Synthetic oligonucleotide
  Sense strand starting at position 3806 of SEQ ID NO: 1881360
auaaucaagugaucagcaa

SEQ ID NO: 2038483 - RNA, 19 nt, Artificial Sequence
  Description of Artificial Sequence: Synthetic oligonucleotide
  Antisense strand to SEQ ID NO: 2038482
uugcugaucacuugauuau

SEQ ID NO: 2038484 - RNA, 19 nt, Artificial Sequence
  Description of Artificial Sequence: Synthetic oligonucleotide
  Sense strand starting at position 26 of SEQ ID NO: 1881361
agguauaagcaagaagcua

SEQ ID NO: 2038485 - RNA, 19 nt, Artificial Sequence
  Description of Artificial Sequence: Synthetic oligonucleotide
  Antisense strand to SEQ ID NO: 2038484
uagcuucuugcuuauaccu

SEQ ID NO: 2038486 - RNA, 19 nt, Artificial Sequence
  Description of Artificial Sequence: Synthetic oligonucleotide
  Sense strand starting at position 34 of SEQ ID NO: 1881361
gcaagaagcuaguauuuga

SEQ ID NO: 2038487 - RNA, 19 nt, Artificial Sequence
  Description of Artificial Sequence: Synthetic oligonucleotide
  Antisense strand to SEQ ID NO: 2038486
ucaaauacuagcuucuugc

SEQ ID NO: 2038488 - RNA, 19 nt, Artificial Sequence
  Description of Artificial Sequence: Synthetic oligonucleotide
  Sense strand starting at position 42 of SEQ ID NO: 1881361
cuaguauuugagugagccu

SEQ ID NO: 2038489 - RNA, 19 nt, Artificial Sequence
  Description of Artificial Sequence: Synthetic oligonucleotide
  Antisense strand to SEQ ID NO: 2038488
aggcucacucaaauacuag

SEQ ID NO: 2038490 - RNA, 19 nt, Artificial Sequence
  Description of Artificial Sequence: Synthetic oligonucleotide
  Sense strand starting at position 101 of SEQ ID NO: 1881361
uggagagcuggcuaaacuu

SEQ ID NO: 2038491 - RNA, 19 nt, Artificial Sequence
  Description of Artificial Sequence: Synthetic oligonucleotide
  Antisense strand to SEQ ID NO: 2038490
aaguuuagccagcucucca

SEQ ID NO: 2038492 - RNA, 19 nt, Artificial Sequence
  Description of Artificial Sequence: Synthetic oligonucleotide
  Sense strand starting at position 322 of SEQ ID NO: 1881361
ucuggcaacuuaccugaua

SEQ ID NO: 2038493 - RNA, 19 nt, Artificial Sequence
  Description of Artificial Sequence: Synthetic oligonucleotide
  Antisense strand to SEQ ID NO: 2038492
uaucagguaaguugccaga

SEQ ID NO: 2038494 - RNA, 19 nt, Artificial Sequence
  Description of Artificial Sequence: Synthetic oligonucleotide
  Sense strand starting at position 323 of SEQ ID NO: 1881361
cuggcaacuuaccugauaa

SEQ ID NO: 2038495 - RNA, 19 nt, Artificial Sequence
  Description of Artificial Sequence: Synthetic oligonucleotide
  Antisense strand to SEQ ID NO: 2038494
uuaucagguaaguugccag

SEQ ID NO: 2038496 - RNA, 19 nt, Artificial Sequence
  Description of Artificial Sequence: Synthetic oligonucleotide
  Sense strand starting at position 405 of SEQ ID NO: 1881361
ucagaugaucucuggcuga

SEQ ID NO: 2038497 - RNA, 19 nt, Artificial Sequence
  Description of Artificial Sequence: Synthetic oligonucleotide
  Antisense strand to SEQ ID NO: 2038496
ucagccagagaucaucuga

SEQ ID NO: 2038498 - RNA, 19 nt, Artificial Sequence
  Description of Artificial Sequence: Synthetic oligonucleotide
  Sense strand starting at position 408 of SEQ ID NO: 1881361
gaugaucucuggcugaaau

SEQ ID NO: 2038499 - RNA, 19 nt, Artificial Sequence
  Description of Artificial Sequence: Synthetic oligonucleotide
  Antisense strand to SEQ ID NO: 2038498
auuucagccagagaucauc

SEQ ID NO: 2038500 - RNA, 19 nt, Artificial Sequence
  Description of Artificial Sequence: Synthetic oligonucleotide
  Sense strand starting at position 409 of SEQ ID NO: 1881361
augaucucuggcugaaauc

SEQ ID NO: 2038501 - RNA, 19 nt, Artificial Sequence
  Description of Artificial Sequence: Synthetic oligonucleotide
  Antisense strand to SEQ ID NO: 2038500
gauuucagccagagaucau

SEQ ID NO: 2038502 - RNA, 19 nt, Artificial Sequence
  Description of Artificial Sequence: Synthetic oligonucleotide
  Sense strand starting at position 410 of SEQ ID NO: 1881361
ugaucucuggcugaaauca

SEQ ID NO: 2038503 - RNA, 19 nt, Artificial Sequence
  Description of Artificial Sequence: Synthetic oligonucleotide
  Antisense strand to SEQ ID NO: 2038502
ugauuucagccagagauca

SEQ ID NO: 2038504 - RNA, 19 nt, Artificial Sequence
  Description of Artificial Sequence: Synthetic oligonucleotide
  Sense strand starting at position 528 of SEQ ID NO: 1881361
aaaggauaccuugguuauc

SEQ ID NO: 2038505 - RNA, 19 nt, Artificial Sequence
  Description of Artificial Sequence: Synthetic oligonucleotide
  Antisense strand to SEQ ID NO: 2038504
gauaaccaagguauccuuu

SEQ ID NO: 2038506 - RNA, 19 nt, Artificial Sequence
  Description of Artificial Sequence: Synthetic oligonucleotide
  Sense strand starting at position 529 of SEQ ID NO: 1881361
aaggauaccuugguuaucu

SEQ ID NO: 2038507 - RNA, 19 nt, Artificial Sequence
  Description of Artificial Sequence: Synthetic oligonucleotide
  Antisense strand to SEQ ID NO: 2038506
agauaaccaagguauccuu

SEQ ID NO: 2038508 - RNA, 19 nt, Artificial Sequence
  Description of Artificial Sequence: Synthetic oligonucleotide
  Sense strand starting at position 530 of SEQ ID NO: 1881361
aggauaccuugguuaucuu

SEQ ID NO: 2038509 - RNA, 19 nt, Artificial Sequence
  Description of Artificial Sequence: Synthetic oligonucleotide
  Antisense strand to SEQ ID NO: 2038508
aagauaaccaagguauccu

SEQ ID NO: 2038510 - RNA, 19 nt, Artificial Sequence
  Description of Artificial Sequence: Synthetic oligonucleotide
  Sense strand starting at position 1117 of SEQ ID NO: 1881361
ccauacugcccguaucuua

SEQ ID NO: 2038511 - RNA, 19 nt, Artificial Sequence
  Description of Artificial Sequence: Synthetic oligonucleotide
  Antisense strand to SEQ ID NO: 2038510
uaagauacgggcaguaugg

SEQ ID NO: 2038512 - RNA, 19 nt, Artificial Sequence
  Description of Artificial Sequence: Synthetic oligonucleotide
  Sense strand starting at position 1173 of SEQ ID NO: 1881361
ccuuguauugcucacuuga

SEQ ID NO: 2038513 - RNA, 19 nt, Artificial Sequence
  Description of Artificial Sequence: Synthetic oligonucleotide
  Antisense strand to SEQ ID NO: 2038512
ucaagugagcaauacaagg

SEQ ID NO: 2038514 - RNA, 19 nt, Artificial Sequence
  Description of Artificial Sequence: Synthetic oligonucleotide
  Sense strand starting at position 1175 of SEQ ID NO: 1881361
uuguauugcucacuugaaa

SEQ ID NO: 2038515 - RNA, 19 nt, Artificial Sequence
  Description of Artificial Sequence: Synthetic oligonucleotide
  Antisense strand to SEQ ID NO: 2038514
uuucaagugagcaauacaa

SEQ ID NO: 2038516 - RNA, 19 nt, Artificial Sequence
  Description of Artificial Sequence: Synthetic oligonucleotide
  Sense strand starting at position 1204 of SEQ ID NO: 1881361
agacucaacgucuggauua

SEQ ID NO: 2038517 - RNA, 19 nt, Artificial Sequence
  Description of Artificial Sequence: Synthetic oligonucleotide
  Antisense strand to SEQ ID NO: 2038516
uaauccagacguugagucu

SEQ ID NO: 2038518 - RNA, 19 nt, Artificial Sequence
  Description of Artificial Sequence: Synthetic oligonucleotide
  Sense strand starting at position 1206 of SEQ ID NO: 1881361
acucaacgucuggauuaca

SEQ ID NO: 2038519 - RNA, 19 nt, Artificial Sequence
  Description of Artificial Sequence: Synthetic oligonucleotide
  Antisense strand to SEQ ID NO: 2038518
uguaauccagacguugagu

SEQ ID NO: 2038520 - RNA, 19 nt, Artificial Sequence
  Description of Artificial Sequence: Synthetic oligonucleotide
  Sense strand starting at position 1239 of SEQ ID NO: 1881361
agagcuauguuuccagaau

SEQ ID NO: 2038521 - RNA, 19 nt, Artificial Sequence
  Description of Artificial Sequence: Synthetic oligonucleotide
  Antisense strand to SEQ ID NO: 2038520
auucuggaaacauagcucu

SEQ ID NO: 2038522 - RNA, 19 nt, Artificial Sequence
  Description of Artificial Sequence: Synthetic oligonucleotide
  Sense strand starting at position 1730 of SEQ ID NO: 1881361
gggaauuugucacacuguc

SEQ ID NO: 2038523 - RNA, 19 nt, Artificial Sequence
  Description of Artificial Sequence: Synthetic oligonucleotide
  Antisense strand to SEQ ID NO: 2038522
gacagugugacaaauuccc

SEQ ID NO: 2038524 - RNA, 19 nt, Artificial Sequence
  Description of Artificial Sequence: Synthetic oligonucleotide
  Sense strand starting at position 1745 of SEQ ID NO: 1881361
ugucaucacuuccuagaug

SEQ ID NO: 2038525 - RNA, 19 nt, Artificial Sequence
  Description of Artificial Sequence: Synthetic oligonucleotide
  Antisense strand to SEQ ID NO: 2038524
caucuaggaagugaugaca

SEQ ID NO: 2038526 - RNA, 19 nt, Artificial Sequence
  Description of Artificial Sequence: Synthetic oligonucleotide
  Sense strand starting at position 1773 of SEQ ID NO: 1881361
acacaauaagcuggguaua

SEQ ID NO: 2038527 - RNA, 19 nt, Artificial Sequence
  Description of Artificial Sequence: Synthetic oligonucleotide
  Antisense strand to SEQ ID NO: 2038526
uauacccagcuuauugugu

SEQ ID NO: 2038528 - RNA, 19 nt, Artificial Sequence
  Description of Artificial Sequence: Synthetic oligonucleotide
  Sense strand starting at position 1820 of SEQ ID NO: 1881361
guaaauacugaauggcaaa

SEQ ID NO: 2038529 - RNA, 19 nt, Artificial Sequence
  Description of Artificial Sequence: Synthetic oligonucleotide
  Antisense strand to SEQ ID NO: 2038528
uuugccauucaguauuuac

SEQ ID NO: 2038530 - RNA, 19 nt, Artificial Sequence
  Description of Artificial Sequence: Synthetic oligonucleotide
  Sense strand starting at position 1852 of SEQ ID NO: 1881361
ccaguugagucaguuguaa

SEQ ID NO: 2038531 - RNA, 19 nt, Artificial Sequence
  Description of Artificial Sequence: Synthetic oligonucleotide
  Antisense strand to SEQ ID NO: 2038530
uuacaacugacucaacugg

SEQ ID NO: 2038532 - RNA, 19 nt, Artificial Sequence
  Description of Artificial Sequence: Synthetic oligonucleotide
  Sense strand starting at position 1894 of SEQ ID NO: 1881361
uagcacugucucuggcaaa

SEQ ID NO: 2038533 - RNA, 19 nt, Artificial Sequence
  Description of Artificial Sequence: Synthetic oligonucleotide
  Antisense strand to SEQ ID NO: 2038532
uuugccagagacagugcua

SEQ ID NO: 2038534 - RNA, 19 nt, Artificial Sequence
  Description of Artificial Sequence: Synthetic oligonucleotide
  Sense strand starting at position 1923 of SEQ ID NO: 1881361
ucuggcuuugcugagauca

SEQ ID NO: 2038535 - RNA, 19 nt, Artificial Sequence
  Description of Artificial Sequence: Synthetic oligonucleotide
  Antisense strand to SEQ ID NO: 2038534
ugaucucagcaaagccaga

SEQ ID NO: 2038536 - RNA, 19 nt, Artificial Sequence
  Description of Artificial Sequence: Synthetic oligonucleotide
  Sense strand starting at position 2256 of SEQ ID NO: 1881361
gaguacuggcauuauccau

SEQ ID NO: 2038537 - RNA, 19 nt, Artificial Sequence
  Description of Artificial Sequence: Synthetic oligonucleotide
  Antisense strand to SEQ ID NO: 2038536
auggauaaugccaguacuc

SEQ ID NO: 2038538 - RNA, 19 nt, Artificial Sequence
  Description of Artificial Sequence: Synthetic oligonucleotide
  Sense strand starting at position 2325 of SEQ ID NO: 1881361
gaagaauguugacccucau

SEQ ID NO: 2038539 - RNA, 19 nt, Artificial Sequence
  Description of Artificial Sequence: Synthetic oligonucleotide
  Antisense strand to SEQ ID NO: 2038538
augagggucaacauucuuc

SEQ ID NO: 2038540 - RNA, 19 nt, Artificial Sequence
  Description of Artificial Sequence: Synthetic oligonucleotide
  Sense strand starting at position 2378 of SEQ ID NO: 1881361
cucagcagucucugaucaa

SEQ ID NO: 2038541 - RNA, 19 nt, Artificial Sequence
  Description of Artificial Sequence: Synthetic oligonucleotide
  Antisense strand to SEQ ID NO: 2038540
uugaucagagacugcugag

SEQ ID NO: 2038542 - RNA, 19 nt, Artificial Sequence
  Description of Artificial Sequence: Synthetic oligonucleotide
  Sense strand starting at position 2381 of SEQ ID NO: 1881361
agcagucucugaucaagau

SEQ ID NO: 2038543 - RNA, 19 nt, Artificial Sequence
  Description of Artificial Sequence: Synthetic oligonucleotide
  Antisense strand to SEQ ID NO: 2038542
aucuugaucagagacugcu

SEQ ID NO: 2038544 - RNA, 19 nt, Artificial Sequence
  Description of Artificial Sequence: Synthetic oligonucleotide
  Sense strand starting at position 2382 of SEQ ID NO: 1881361
gcagucucugaucaagaug

SEQ ID NO: 2038545 - RNA, 19 nt, Artificial Sequence
  Description of Artificial Sequence: Synthetic oligonucleotide
  Antisense strand to SEQ ID NO: 2038544
caucuugaucagagacugc

SEQ ID NO: 2038546 - RNA, 19 nt, Artificial Sequence
  Description of Artificial Sequence: Synthetic oligonucleotide
  Sense strand starting at position 2615 of SEQ ID NO: 1881361
agaccuuuagccugacacu

SEQ ID NO: 2038547 - RNA, 19 nt, Artificial Sequence
  Description of Artificial Sequence: Synthetic oligonucleotide
  Antisense strand to SEQ ID NO: 2038546
agugucaggcuaaaggucu

SEQ ID NO: 2038548 - RNA, 19 nt, Artificial Sequence
  Description of Artificial Sequence: Synthetic oligonucleotide
  Sense strand starting at position 2925 of SEQ ID NO: 1881361
gacgcaaguuuacccauau

SEQ ID NO: 2038549 - RNA, 19 nt, Artificial Sequence
  Description of Artificial Sequence: Synthetic oligonucleotide
  Antisense strand to SEQ ID NO: 2038548
auauggguaaacuugcguc

SEQ ID NO: 2038550 - RNA, 19 nt, Artificial Sequence
  Description of Artificial Sequence: Synthetic oligonucleotide
  Sense strand starting at position 2926 of SEQ ID NO: 1881361
acgcaaguuuacccauaua

SEQ ID NO: 2038551 - RNA, 19 nt, Artificial Sequence
  Description of Artificial Sequence: Synthetic oligonucleotide
  Antisense strand to SEQ ID NO: 2038550
uauauggguaaacuugcgu

SEQ ID NO: 2038552 - RNA, 19 nt, Artificial Sequence
  Description of Artificial Sequence: Synthetic oligonucleotide
  Sense strand starting at position 3224 of SEQ ID NO: 1881361
aguuguuaaauagguaaga

SEQ ID NO: 2038553 - RNA, 19 nt, Artificial Sequence
  Description of Artificial Sequence: Synthetic oligonucleotide
  Antisense strand to SEQ ID NO: 2038552
ucuuaccuauuuaacaacu

SEQ ID NO: 2038554 - RNA, 19 nt, Artificial Sequence
  Description of Artificial Sequence: Synthetic oligonucleotide
  Sense strand starting at position 3225 of SEQ ID NO: 1881361
guuguuaaauagguaagau

SEQ ID NO: 2038555 - RNA, 19 nt, Artificial Sequence
  Description of Artificial Sequence: Synthetic oligonucleotide
  Antisense strand to SEQ ID NO: 2038554
aucuuaccuauuuaacaac

SEQ ID NO: 2038556 - RNA, 19 nt, Artificial Sequence
  Description of Artificial Sequence: Synthetic oligonucleotide
  Sense strand starting at position 3255 of SEQ ID NO: 1881361
ucaguugucuuccucccaa

SEQ ID NO: 2038557 - RNA, 19 nt, Artificial Sequence
  Description of Artificial Sequence: Synthetic oligonucleotide
  Antisense strand to SEQ ID NO: 2038556
uugggaggaagacaacuga

SEQ ID NO: 2038558 - RNA, 19 nt, Artificial Sequence
  Description of Artificial Sequence: Synthetic oligonucleotide
  Sense strand starting at position 3762 of SEQ ID NO: 1881361
aggugaaccagugacuagu

SEQ ID NO: 2038559 - RNA, 19 nt, Artificial Sequence
  Description of Artificial Sequence: Synthetic oligonucleotide
  Antisense strand to SEQ ID NO: 2038558
acuagucacugguucaccu

SEQ ID NO: 2038560 - RNA, 19 nt, Artificial Sequence
  Description of Artificial Sequence: Synthetic oligonucleotide
  Sense strand starting at position 3773 of SEQ ID NO: 1881361
ugacuaguguuguuaccuu

SEQ ID NO: 2038561 - RNA, 19 nt, Artificial Sequence
  Description of Artificial Sequence: Synthetic oligonucleotide
  Antisense strand to SEQ ID NO: 2038560
aagguaacaacacuaguca

SEQ ID NO: 2038562 - RNA, 19 nt, Artificial Sequence
  Description of Artificial Sequence: Synthetic oligonucleotide
  Sense strand starting at position 3781 of SEQ ID NO: 1881361
guuguuaccuuacucugaa

SEQ ID NO: 2038563 - RNA, 19 nt, Artificial Sequence
  Description of Artificial Sequence: Synthetic oligonucleotide
  Antisense strand to SEQ ID NO: 2038562
uucagaguaagguaacaac

SEQ ID NO: 2038564 - RNA, 19 nt, Artificial Sequence
  Description of Artificial Sequence: Synthetic oligonucleotide
  Sense strand starting at position 20 of SEQ ID NO: 1881362
agcauacccgacuguucua

SEQ ID NO: 2038565 - RNA, 19 nt, Artificial Sequence
  Description of Artificial Sequence: Synthetic oligonucleotide
  Antisense strand to SEQ ID NO: 2038564
uagaacagucggguaugcu

SEQ ID NO: 2038566 - RNA, 19 nt, Artificial Sequence
  Description of Artificial Sequence: Synthetic oligonucleotide
  Sense strand starting at position 222 of SEQ ID NO: 1881362
ugaugaaagcccugucucu

SEQ ID NO: 2038567 - RNA, 19 nt, Artificial Sequence
  Description of Artificial Sequence: Synthetic oligonucleotide
  Antisense strand to SEQ ID NO: 2038566
agagacagggcuuucauca

SEQ ID NO: 2038568 - RNA, 19 nt, Artificial Sequence
  Description of Artificial Sequence: Synthetic oligonucleotide
  Sense strand starting at position 539 of SEQ ID NO: 1881362
gcagacuucuaucuggcaa

SEQ ID NO: 2038569 - RNA, 19 nt, Artificial Sequence
  Description of Artificial Sequence: Synthetic oligonucleotide
  Antisense strand to SEQ ID NO: 2038568
uugccagauagaagucugc

SEQ ID NO: 2038570 - RNA, 19 nt, Artificial Sequence
  Description of Artificial Sequence: Synthetic oligonucleotide
  Sense strand starting at position 590 of SEQ ID NO: 1881362
caucacuuccucugaggga

SEQ ID NO: 2038571 - RNA, 19 nt, Artificial Sequence
  Description of Artificial Sequence: Synthetic oligonucleotide
  Antisense strand to SEQ ID NO: 2038570
ucccucagaggaagugaug

SEQ ID NO: 2038572 - RNA, 19 nt, Artificial Sequence
  Description of Artificial Sequence: Synthetic oligonucleotide
  Sense strand starting at position 687 of SEQ ID NO: 1881362
cuagcacuggcuuaaaucu

SEQ ID NO: 2038573 - RNA, 19 nt, Artificial Sequence
  Description of Artificial Sequence: Synthetic oligonucleotide
  Antisense strand to SEQ ID NO: 2038572
agauuuaagccagugcuag

SEQ ID NO: 2038574 - RNA, 19 nt, Artificial Sequence
  Description of Artificial Sequence: Synthetic oligonucleotide
  Sense strand starting at position 694 of SEQ ID NO: 1881362
uggcuuaaaucucugcuuu

SEQ ID NO: 2038575 - RNA, 19 nt, Artificial Sequence
  Description of Artificial Sequence: Synthetic oligonucleotide
  Antisense strand to SEQ ID NO: 2038574
aaagcagagauuuaagcca

SEQ ID NO: 2038576 - RNA, 19 nt, Artificial Sequence
  Description of Artificial Sequence: Synthetic oligonucleotide
  Sense strand starting at position 1239 of SEQ ID NO: 1881362
guuggcacuuaugaaauuu

SEQ ID NO: 2038577 - RNA, 19 nt, Artificial Sequence
  Description of Artificial Sequence: Synthetic oligonucleotide
  Antisense strand to SEQ ID NO: 2038576
aaauuucauaagugccaac

SEQ ID NO: 2038578 - RNA, 19 nt, Artificial Sequence
  Description of Artificial Sequence: Synthetic oligonucleotide
  Sense strand starting at position 1282 of SEQ ID NO: 1881362
ugauguuuagggcaagauc

SEQ ID NO: 2038579 - RNA, 19 nt, Artificial Sequence
  Description of Artificial Sequence: Synthetic oligonucleotide
  Antisense strand to SEQ ID NO: 2038578
gaucuugcccuaaacauca

SEQ ID NO: 2038580 - RNA, 19 nt, Artificial Sequence
  Description of Artificial Sequence: Synthetic oligonucleotide
  Sense strand starting at position 1524 of SEQ ID NO: 1881362
agguauaagcaagaagcua

SEQ ID NO: 2038581 - RNA, 19 nt, Artificial Sequence
  Description of Artificial Sequence: Synthetic oligonucleotide
  Antisense strand to SEQ ID NO: 2038580
uagcuucuugcuuauaccu

SEQ ID NO: 2038582 - RNA, 19 nt, Artificial Sequence
  Description of Artificial Sequence: Synthetic oligonucleotide
  Sense strand starting at position 1532 of SEQ ID NO: 1881362
gcaagaagcuaguauuuga

SEQ ID NO: 2038583 - RNA, 19 nt, Artificial Sequence
  Description of Artificial Sequence: Synthetic oligonucleotide
  Antisense strand to SEQ ID NO: 2038582
ucaaauacuagcuucuugc

SEQ ID NO: 2038584 - RNA, 19 nt, Artificial Sequence
  Description of Artificial Sequence: Synthetic oligonucleotide
  Sense strand starting at position 1540 of SEQ ID NO: 1881362
cuaguauuugagugagccu

SEQ ID NO: 2038585 - RNA, 19 nt, Artificial Sequence
  Description of Artificial Sequence: Synthetic oligonucleotide
  Antisense strand to SEQ ID NO: 2038584
aggcucacucaaauacuag

SEQ ID NO: 2038586 - RNA, 19 nt, Artificial Sequence
  Description of Artificial Sequence: Synthetic oligonucleotide
  Sense strand starting at position 1599 of SEQ ID NO: 1881362
uggagagcuggcuaaacuu

SEQ ID NO: 2038587 - RNA, 19 nt, Artificial Sequence
  Description of Artificial Sequence: Synthetic oligonucleotide
  Antisense strand to SEQ ID NO: 2038586
aaguuuagccagcucucca

SEQ ID NO: 2038588 - RNA, 19 nt, Artificial Sequence
  Description of Artificial Sequence: Synthetic oligonucleotide
  Sense strand starting at position 1820 of SEQ ID NO: 1881362
ucuggcaacuuaccugaua

SEQ ID NO: 2038589 - RNA, 19 nt, Artificial Sequence
  Description of Artificial Sequence: Synthetic oligonucleotide
  Antisense strand to SEQ ID NO: 2038588
uaucagguaaguugccaga

SEQ ID NO: 2038590 - RNA, 19 nt, Artificial Sequence
  Description of Artificial Sequence: Synthetic oligonucleotide
  Sense strand starting at position 1821 of SEQ ID NO: 1881362
cuggcaacuuaccugauaa

SEQ ID NO: 2038591 - RNA, 19 nt, Artificial Sequence
  Description of Artificial Sequence: Synthetic oligonucleotide
  Antisense strand to SEQ ID NO: 2038590
uuaucagguaaguugccag

SEQ ID NO: 2038592 - RNA, 19 nt, Artificial Sequence
  Description of Artificial Sequence: Synthetic oligonucleotide
  Sense strand starting at position 1903 of SEQ ID NO: 1881362
ucagaugaucucuggcuga

SEQ ID NO: 2038593 - RNA, 19 nt, Artificial Sequence
  Description of Artificial Sequence: Synthetic oligonucleotide
  Antisense strand to SEQ ID NO: 2038592
ucagccagagaucaucuga

SEQ ID NO: 2038594 - RNA, 19 nt, Artificial Sequence
  Description of Artificial Sequence: Synthetic oligonucleotide
  Sense strand starting at position 1906 of SEQ ID NO: 1881362
gaugaucucuggcugaaau

SEQ ID NO: 2038595 - RNA, 19 nt, Artificial Sequence
  Description of Artificial Sequence: Synthetic oligonucleotide
  Antisense strand to SEQ ID NO: 2038594
auuucagccagagaucauc

SEQ ID NO: 2038596 - RNA, 19 nt, Artificial Sequence
  Description of Artificial Sequence: Synthetic oligonucleotide
  Sense strand starting at position 1907 of SEQ ID NO: 1881362
augaucucuggcugaaauc

SEQ ID NO: 2038597 - RNA, 19 nt, Artificial Sequence
  Description of Artificial Sequence: Synthetic oligonucleotide
  Antisense strand to SEQ ID NO: 2038596
gauuucagccagagaucau

SEQ ID NO: 2038598 - RNA, 19 nt, Artificial Sequence
  Description of Artificial Sequence: Synthetic oligonucleotide
  Sense strand starting at position 1908 of SEQ ID NO: 1881362
ugaucucuggcugaaauca

SEQ ID NO: 2038599 - RNA, 19 nt, Artificial Sequence
  Description of Artificial Sequence: Synthetic oligonucleotide
  Antisense strand to SEQ ID NO: 2038598
ugauuucagccagagauca

SEQ ID NO: 2038600 - RNA, 19 nt, Artificial Sequence
  Description of Artificial Sequence: Synthetic oligonucleotide
  Sense strand starting at position 2026 of SEQ ID NO: 1881362
aaaggauaccuugguuauc

SEQ ID NO: 2038601 - RNA, 19 nt, Artificial Sequence
  Description of Artificial Sequence: Synthetic oligonucleotide
  Antisense strand to SEQ ID NO: 2038600
gauaaccaagguauccuuu

SEQ ID NO: 2038602 - RNA, 19 nt, Artificial Sequence
  Description of Artificial Sequence: Synthetic oligonucleotide
  Sense strand starting at position 2027 of SEQ ID NO: 1881362
aaggauaccuugguuaucu

SEQ ID NO: 2038603 - RNA, 19 nt, Artificial Sequence
  Description of Artificial Sequence: Synthetic oligonucleotide
  Antisense strand to SEQ ID NO: 2038602
agauaaccaagguauccuu

SEQ ID NO: 2038604 - RNA, 19 nt, Artificial Sequence
  Description of Artificial Sequence: Synthetic oligonucleotide
  Sense strand starting at position 2028 of SEQ ID NO: 1881362
aggauaccuugguuaucuu

SEQ ID NO: 2038605 - RNA, 19 nt, Artificial Sequence
  Description of Artificial Sequence: Synthetic oligonucleotide
  Antisense strand to SEQ ID NO: 2038604
aagauaaccaagguauccu

SEQ ID NO: 2038606 - RNA, 19 nt, Artificial Sequence
  Description of Artificial Sequence: Synthetic oligonucleotide
  Sense strand starting at position 2615 of SEQ ID NO: 1881362
ccauacugcccguaucuua

SEQ ID NO: 2038607 - RNA, 19 nt, Artificial Sequence
  Description of Artificial Sequence: Synthetic oligonucleotide
  Antisense strand to SEQ ID NO: 2038606
uaagauacgggcaguaugg

SEQ ID NO: 2038608 - RNA, 19 nt, Artificial Sequence
  Description of Artificial Sequence: Synthetic oligonucleotide
  Sense strand starting at position 2671 of SEQ ID NO: 1881362
ccuuguauugcucacuuga

SEQ ID NO: 2038609 - RNA, 19 nt, Artificial Sequence
  Description of Artificial Sequence: Synthetic oligonucleotide
  Antisense strand to SEQ ID NO: 2038608
ucaagugagcaauacaagg

SEQ ID NO: 2038610 - RNA, 19 nt, Artificial Sequence
  Description of Artificial Sequence: Synthetic oligonucleotide
  Sense strand starting at position 2673 of SEQ ID NO: 1881362
uuguauugcucacuugaaa

SEQ ID NO: 2038611 - RNA, 19 nt, Artificial Sequence
  Description of Artificial Sequence: Synthetic oligonucleotide
  Antisense strand to SEQ ID NO: 2038610
uuucaagugagcaauacaa

SEQ ID NO: 2038612 - RNA, 19 nt, Artificial Sequence
  Description of Artificial Sequence: Synthetic oligonucleotide
  Sense strand starting at position 2702 of SEQ ID NO: 1881362
agacucaacgucuggauua

SEQ ID NO: 2038613 - RNA, 19 nt, Artificial Sequence
  Description of Artificial Sequence: Synthetic oligonucleotide
  Antisense strand to SEQ ID NO: 2038612
uaauccagacguugagucu

SEQ ID NO: 2038614 - RNA, 19 nt, Artificial Sequence
  Description of Artificial Sequence: Synthetic oligonucleotide
  Sense strand starting at position 2704 of SEQ ID NO: 1881362
acucaacgucuggauuaca

SEQ ID NO: 2038615 - RNA, 19 nt, Artificial Sequence
  Description of Artificial Sequence: Synthetic oligonucleotide
  Antisense strand to SEQ ID NO: 2038614
uguaauccagacguugagu

SEQ ID NO: 2038616 - RNA, 19 nt, Artificial Sequence
  Description of Artificial Sequence: Synthetic oligonucleotide
  Sense strand starting at position 2737 of SEQ ID NO: 1881362
agagcuauguuuccagaau

SEQ ID NO: 2038617 - RNA, 19 nt, Artificial Sequence
  Description of Artificial Sequence: Synthetic oligonucleotide
  Antisense strand to SEQ ID NO: 2038616
auucuggaaacauagcucu

SEQ ID NO: 2038618 - RNA, 19 nt, Artificial Sequence
  Description of Artificial Sequence: Synthetic oligonucleotide
  Sense strand starting at position 3031 of SEQ ID NO: 1881362
gcagccaauuguuucuuaa

SEQ ID NO: 2038619 - RNA, 19 nt, Artificial Sequence
  Description of Artificial Sequence: Synthetic oligonucleotide
  Antisense strand to SEQ ID NO: 2038618
uuaagaaacaauuggcugc

SEQ ID NO: 2038620 - RNA, 19 nt, Artificial Sequence
  Description of Artificial Sequence: Synthetic oligonucleotide
  Sense strand starting at position 3228 of SEQ ID NO: 1881362
gggaauuugucacacuguc

SEQ ID NO: 2038621 - RNA, 19 nt, Artificial Sequence
  Description of Artificial Sequence: Synthetic oligonucleotide
  Antisense strand to SEQ ID NO: 2038620
gacagugugacaaauuccc

SEQ ID NO: 2038622 - RNA, 19 nt, Artificial Sequence
  Description of Artificial Sequence: Synthetic oligonucleotide
  Sense strand starting at position 3243 of SEQ ID NO: 1881362
ugucaucacuuccuagaug

SEQ ID NO: 2038623 - RNA, 19 nt, Artificial Sequence
  Description of Artificial Sequence: Synthetic oligonucleotide
  Antisense strand to SEQ ID NO: 2038622
caucuaggaagugaugaca

SEQ ID NO: 2038624 - RNA, 19 nt, Artificial Sequence
  Description of Artificial Sequence: Synthetic oligonucleotide
  Sense strand starting at position 3271 of SEQ ID NO: 1881362
acacaauaagcuggguaua

SEQ ID NO: 2038625 - RNA, 19 nt, Artificial Sequence
  Description of Artificial Sequence: Synthetic oligonucleotide
  Antisense strand to SEQ ID NO: 2038624
uauacccagcuuauugugu

SEQ ID NO: 2038626 - RNA, 19 nt, Artificial Sequence
  Description of Artificial Sequence: Synthetic oligonucleotide
  Sense strand starting at position 3318 of SEQ ID NO: 1881362
guaaauacugaauggcaaa

SEQ ID NO: 2038627 - RNA, 19 nt, Artificial Sequence
  Description of Artificial Sequence: Synthetic oligonucleotide
  Antisense strand to SEQ ID NO: 2038626
uuugccauucaguauuuac

SEQ ID NO: 2038628 - RNA, 19 nt, Artificial Sequence
  Description of Artificial Sequence: Synthetic oligonucleotide
  Sense strand starting at position 3350 of SEQ ID NO: 1881362
ccaguugagucaguuguaa

SEQ ID NO: 2038629 - RNA, 19 nt, Artificial Sequence
  Description of Artificial Sequence: Synthetic oligonucleotide
  Antisense strand to SEQ ID NO: 2038628
uuacaacugacucaacugg

SEQ ID NO: 2038630 - RNA, 19 nt, Artificial Sequence
  Description of Artificial Sequence: Synthetic oligonucleotide
  Sense strand starting at position 3392 of SEQ ID NO: 1881362
uagcacugucucuggcaaa

SEQ ID NO: 2038631 - RNA, 19 nt, Artificial Sequence
  Description of Artificial Sequence: Synthetic oligonucleotide
  Antisense strand to SEQ ID NO: 2038630
uuugccagagacagugcua

SEQ ID NO: 2038632 - RNA, 19 nt, Artificial Sequence
  Description of Artificial Sequence: Synthetic oligonucleotide
  Sense strand starting at position 3421 of SEQ ID NO: 1881362
ucuggcuuugcugagauca

SEQ ID NO: 2038633 - RNA, 19 nt, Artificial Sequence
  Description of Artificial Sequence: Synthetic oligonucleotide
  Antisense strand to SEQ ID NO: 2038632
ugaucucagcaaagccaga

SEQ ID NO: 2038634 - RNA, 19 nt, Artificial Sequence
  Description of Artificial Sequence: Synthetic oligonucleotide
  Sense strand starting at position 3754 of SEQ ID NO: 1881362
gaguacuggcauuauccau

SEQ ID NO: 2038635 - RNA, 19 nt, Artificial Sequence
  Description of Artificial Sequence: Synthetic oligonucleotide
  Antisense strand to SEQ ID NO: 2038634
auggauaaugccaguacuc

SEQ ID NO: 2038636 - RNA, 19 nt, Artificial Sequence
  Description of Artificial Sequence: Synthetic oligonucleotide
  Sense strand starting at position 3823 of SEQ ID NO: 1881362
gaagaauguugacccucau

SEQ ID NO: 2038637 - RNA, 19 nt, Artificial Sequence
  Description of Artificial Sequence: Synthetic oligonucleotide
  Antisense strand to SEQ ID NO: 2038636
augagggucaacauucuuc

SEQ ID NO: 2038638 - RNA, 19 nt, Artificial Sequence
  Description of Artificial Sequence: Synthetic oligonucleotide
  Sense strand starting at position 3876 of SEQ ID NO: 1881362
cucagcagucucugaucaa

SEQ ID NO: 2038639 - RNA, 19 nt, Artificial Sequence
  Description of Artificial Sequence: Synthetic oligonucleotide
  Antisense strand to SEQ ID NO: 2038638
uugaucagagacugcugag

SEQ ID NO: 2038640 - RNA, 19 nt, Artificial Sequence
  Description of Artificial Sequence: Synthetic oligonucleotide
  Sense strand starting at position 3879 of SEQ ID NO: 1881362
agcagucucugaucaagau

SEQ ID NO: 2038641 - RNA, 19 nt, Artificial Sequence
  Description of Artificial Sequence: Synthetic oligonucleotide
  Antisense strand to SEQ ID NO: 2038640
aucuugaucagagacugcu

SEQ ID NO: 2038642 - RNA, 19 nt, Artificial Sequence
  Description of Artificial Sequence: Synthetic oligonucleotide
  Sense strand starting at position 3880 of SEQ ID NO: 1881362
gcagucucugaucaagaug

SEQ ID NO: 2038643 - RNA, 19 nt, Artificial Sequence
  Description of Artificial Sequence: Synthetic oligonucleotide
  Antisense strand to SEQ ID NO: 2038642
caucuugaucagagacugc

SEQ ID NO: 2038644 - RNA, 19 nt, Artificial Sequence
  Description of Artificial Sequence: Synthetic oligonucleotide
  Sense strand starting at position 373 of SEQ ID NO: 1881363
ugucuuacuacggaaugaa

SEQ ID NO: 2038645 - RNA, 19 nt, Artificial Sequence
  Description of Artificial Sequence: Synthetic oligonucleotide
  Antisense strand to SEQ ID NO: 2038644
uucauuccguaguaagaca

SEQ ID NO: 2038646 - RNA, 19 nt, Artificial Sequence
  Description of Artificial Sequence: Synthetic oligonucleotide
  Sense strand starting at position 392 of SEQ ID NO: 1881363
gguagacagaguuaugcau

SEQ ID NO: 2038647 - RNA, 19 nt, Artificial Sequence
  Description of Artificial Sequence: Synthetic oligonucleotide
  Antisense strand to SEQ ID NO: 2038646
augcauaacucugucuacc

SEQ ID NO: 2038648 - RNA, 19 nt, Artificial Sequence
  Description of Artificial Sequence: Synthetic oligonucleotide
  Sense strand starting at position 512 of SEQ ID NO: 1881363
aguaaugcuuaccugaaua

SEQ ID NO: 2038649 - RNA, 19 nt, Artificial Sequence
  Description of Artificial Sequence: Synthetic oligonucleotide
  Antisense strand to SEQ ID NO: 2038648
uauucagguaagcauuacu

SEQ ID NO: 2038650 - RNA, 19 nt, Artificial Sequence
  Description of Artificial Sequence: Synthetic oligonucleotide
  Sense strand starting at position 665 of SEQ ID NO: 1881363
agaucuacucagugauaca

SEQ ID NO: 2038651 - RNA, 19 nt, Artificial Sequence
  Description of Artificial Sequence: Synthetic oligonucleotide
  Antisense strand to SEQ ID NO: 2038650
uguaucacugaguagaucu

SEQ ID NO: 2038652 - RNA, 19 nt, Artificial Sequence
  Description of Artificial Sequence: Synthetic oligonucleotide
  Sense strand starting at position 733 of SEQ ID NO: 1881363
agacaauacuuacaaaggu

SEQ ID NO: 2038653 - RNA, 19 nt, Artificial Sequence
  Description of Artificial Sequence: Synthetic oligonucleotide
  Antisense strand to SEQ ID NO: 2038652
accuuuguaaguauugucu

SEQ ID NO: 2038654 - RNA, 19 nt, Artificial Sequence
  Description of Artificial Sequence: Synthetic oligonucleotide
  Sense strand starting at position 932 of SEQ ID NO: 1881363
auuauuauuccgcagaacu

SEQ ID NO: 2038655 - RNA, 19 nt, Artificial Sequence
  Description of Artificial Sequence: Synthetic oligonucleotide
  Antisense strand to SEQ ID NO: 2038654
aguucugcggaauaauaau

SEQ ID NO: 2038656 - RNA, 19 nt, Artificial Sequence
  Description of Artificial Sequence: Synthetic oligonucleotide
  Sense strand starting at position 942 of SEQ ID NO: 1881363
cgcagaacuccaggaucaa

SEQ ID NO: 2038657 - RNA, 19 nt, Artificial Sequence
  Description of Artificial Sequence: Synthetic oligonucleotide
  Antisense strand to SEQ ID NO: 2038656
uugauccuggaguucugcg

SEQ ID NO: 2038658 - RNA, 19 nt, Artificial Sequence
  Description of Artificial Sequence: Synthetic oligonucleotide
  Sense strand starting at position 1154 of SEQ ID NO: 1881363
agaauaacguuuccuacau

SEQ ID NO: 2038659 - RNA, 19 nt, Artificial Sequence
  Description of Artificial Sequence: Synthetic oligonucleotide
  Antisense strand to SEQ ID NO: 2038658
auguaggaaacguuauucu

SEQ ID NO: 2038660 - RNA, 19 nt, Artificial Sequence
  Description of Artificial Sequence: Synthetic oligonucleotide
  Sense strand starting at position 1200 of SEQ ID NO: 1881363
uagugaaauuuauguucug

SEQ ID NO: 2038661 - RNA, 19 nt, Artificial Sequence
  Description of Artificial Sequence: Synthetic oligonucleotide
  Antisense strand to SEQ ID NO: 2038660
cagaacauaaauuucacua

SEQ ID NO: 2038662 - RNA, 19 nt, Artificial Sequence
  Description of Artificial Sequence: Synthetic oligonucleotide
  Sense strand starting at position 1255 of SEQ ID NO: 1881363
aggguauugugccuuauau

SEQ ID NO: 2038663 - RNA, 19 nt, Artificial Sequence
  Description of Artificial Sequence: Synthetic oligonucleotide
  Antisense strand to SEQ ID NO: 2038662
auauaaggcacaauacccu

SEQ ID NO: 2038664 - RNA, 19 nt, Artificial Sequence
  Description of Artificial Sequence: Synthetic oligonucleotide
  Sense strand starting at position 1257 of SEQ ID NO: 1881363
gguauugugccuuauauaa

SEQ ID NO: 2038665 - RNA, 19 nt, Artificial Sequence
  Description of Artificial Sequence: Synthetic oligonucleotide
  Antisense strand to SEQ ID NO: 2038664
uuauauaaggcacaauacc

SEQ ID NO: 2038666 - RNA, 19 nt, Artificial Sequence
  Description of Artificial Sequence: Synthetic oligonucleotide
  Sense strand starting at position 1293 of SEQ ID NO: 1881363
ccuacagcuuuauuaggaa

SEQ ID NO: 2038667 - RNA, 19 nt, Artificial Sequence
  Description of Artificial Sequence: Synthetic oligonucleotide
  Antisense strand to SEQ ID NO: 2038666
uuccuaauaaagcuguagg

SEQ ID NO: 2038668 - RNA, 19 nt, Artificial Sequence
  Description of Artificial Sequence: Synthetic oligonucleotide
  Sense strand starting at position 1326 of SEQ ID NO: 1881363
ccaauauagcagugagcuu

SEQ ID NO: 2038669 - RNA, 19 nt, Artificial Sequence
  Description of Artificial Sequence: Synthetic oligonucleotide
  Antisense strand to SEQ ID NO: 2038668
aagcucacugcuauauugg

SEQ ID NO: 2038670 - RNA, 19 nt, Artificial Sequence
  Description of Artificial Sequence: Synthetic oligonucleotide
  Sense strand starting at position 1396 of SEQ ID NO: 1881363
gguaacaugucacugcagu

SEQ ID NO: 2038671 - RNA, 19 nt, Artificial Sequence
  Description of Artificial Sequence: Synthetic oligonucleotide
  Antisense strand to SEQ ID NO: 2038670
acugcagugacauguuacc

SEQ ID NO: 2038672 - RNA, 19 nt, Artificial Sequence
  Description of Artificial Sequence: Synthetic oligonucleotide
  Sense strand starting at position 1397 of SEQ ID NO: 1881363
guaacaugucacugcaguu

SEQ ID NO: 2038673 - RNA, 19 nt, Artificial Sequence
  Description of Artificial Sequence: Synthetic oligonucleotide
  Antisense strand to SEQ ID NO: 2038672
aacugcagugacauguuac

SEQ ID NO: 2038674 - RNA, 19 nt, Artificial Sequence
  Description of Artificial Sequence: Synthetic oligonucleotide
  Sense strand starting at position 1899 of SEQ ID NO: 1881363
uguauuccauuuggaacau

SEQ ID NO: 2038675 - RNA, 19 nt, Artificial Sequence
  Description of Artificial Sequence: Synthetic oligonucleotide
  Antisense strand to SEQ ID NO: 2038674
auguuccaaauggaauaca

SEQ ID NO: 2038676 - RNA, 19 nt, Artificial Sequence
  Description of Artificial Sequence: Synthetic oligonucleotide
  Sense strand starting at position 1900 of SEQ ID NO: 1881363
guauuccauuuggaacauu

SEQ ID NO: 2038677 - RNA, 19 nt, Artificial Sequence
  Description of Artificial Sequence: Synthetic oligonucleotide
  Antisense strand to SEQ ID NO: 2038676
aauguuccaaauggaauac

SEQ ID NO: 2038678 - RNA, 19 nt, Artificial Sequence
  Description of Artificial Sequence: Synthetic oligonucleotide
  Sense strand starting at position 1911 of SEQ ID NO: 1881363
ggaacauuaugcccaaaua

SEQ ID NO: 2038679 - RNA, 19 nt, Artificial Sequence
  Description of Artificial Sequence: Synthetic oligonucleotide
  Antisense strand to SEQ ID NO: 2038678
uauuugggcauaauguucc

SEQ ID NO: 2038680 - RNA, 19 nt, Artificial Sequence
  Description of Artificial Sequence: Synthetic oligonucleotide
  Sense strand starting at position 1927 of SEQ ID NO: 1881363
auaaucaagugaucagcaa

SEQ ID NO: 2038681 - RNA, 19 nt, Artificial Sequence
  Description of Artificial Sequence: Synthetic oligonucleotide
  Antisense strand to SEQ ID NO: 2038680
uugcugaucacuugauuau

SEQ ID NO: 2038682 - RNA, 19 nt, Artificial Sequence
  Description of Artificial Sequence: Synthetic oligonucleotide
  Sense strand starting at position 2225 of SEQ ID NO: 1881363
ccaguugcucuguaaguua

SEQ ID NO: 2038683 - RNA, 19 nt, Artificial Sequence
  Description of Artificial Sequence: Synthetic oligonucleotide
  Antisense strand to SEQ ID NO: 2038682
uaacuuacagagcaacugg

SEQ ID NO: 2038684 - RNA, 19 nt, Artificial Sequence
  Description of Artificial Sequence: Synthetic oligonucleotide
  Sense strand starting at position 2228 of SEQ ID NO: 1881363
guugcucuguaaguuagaa

SEQ ID NO: 2038685 - RNA, 19 nt, Artificial Sequence
  Description of Artificial Sequence: Synthetic oligonucleotide
  Antisense strand to SEQ ID NO: 2038684
uucuaacuuacagagcaac

SEQ ID NO: 2038686 - RNA, 19 nt, Artificial Sequence
  Description of Artificial Sequence: Synthetic oligonucleotide
  Sense strand starting at position 2307 of SEQ ID NO: 1881363
aaccguuucuuaccucgau

SEQ ID NO: 2038687 - RNA, 19 nt, Artificial Sequence
  Description of Artificial Sequence: Synthetic oligonucleotide
  Antisense strand to SEQ ID NO: 2038686
aucgagguaagaaacgguu

SEQ ID NO: 2038688 - RNA, 19 nt, Artificial Sequence
  Description of Artificial Sequence: Synthetic oligonucleotide
  Sense strand starting at position 2311 of SEQ ID NO: 1881363
guuucuuaccucgaugaca

SEQ ID NO: 2038689 - RNA, 19 nt, Artificial Sequence
  Description of Artificial Sequence: Synthetic oligonucleotide
  Antisense strand to SEQ ID NO: 2038688
ugucaucgagguaagaaac

SEQ ID NO: 2038690 - RNA, 19 nt, Artificial Sequence
  Description of Artificial Sequence: Synthetic oligonucleotide
  Sense strand starting at position 2359 of SEQ ID NO: 1881363
auguucucugcugacaaga

SEQ ID NO: 2038691 - RNA, 19 nt, Artificial Sequence
  Description of Artificial Sequence: Synthetic oligonucleotide
  Antisense strand to SEQ ID NO: 2038690
ucuugucagcagagaacau

SEQ ID NO: 2038692 - RNA, 19 nt, Artificial Sequence
  Description of Artificial Sequence: Synthetic oligonucleotide
  Sense strand starting at position 2424 of SEQ ID NO: 1881363
agcgcauagcccuuugcaa

SEQ ID NO: 2038693 - RNA, 19 nt, Artificial Sequence
  Description of Artificial Sequence: Synthetic oligonucleotide
  Antisense strand to SEQ ID NO: 2038692
uugcaaagggcuaugcgcu

SEQ ID NO: 2038694 - RNA, 19 nt, Artificial Sequence
  Description of Artificial Sequence: Synthetic oligonucleotide
  Sense strand starting at position 3031 of SEQ ID NO: 1881363
acaggagugcuguacccua

SEQ ID NO: 2038695 - RNA, 19 nt, Artificial Sequence
  Description of Artificial Sequence: Synthetic oligonucleotide
  Antisense strand to SEQ ID NO: 2038694
uaggguacagcacuccugu

SEQ ID NO: 2038696 - RNA, 19 nt, Artificial Sequence
  Description of Artificial Sequence: Synthetic oligonucleotide
  Sense strand starting at position 3036 of SEQ ID NO: 1881363
agugcuguacccuaagaaa

SEQ ID NO: 2038697 - RNA, 19 nt, Artificial Sequence
  Description of Artificial Sequence: Synthetic oligonucleotide
  Antisense strand to SEQ ID NO: 2038696
uuucuuaggguacagcacu

SEQ ID NO: 2038698 - RNA, 19 nt, Artificial Sequence
  Description of Artificial Sequence: Synthetic oligonucleotide
  Sense strand starting at position 3267 of SEQ ID NO: 1881363
ccguuucuugcggaggaau

SEQ ID NO: 2038699 - RNA, 19 nt, Artificial Sequence
  Description of Artificial Sequence: Synthetic oligonucleotide
  Antisense strand to SEQ ID NO: 2038698
auuccuccgcaagaaacgg

SEQ ID NO: 2038700 - RNA, 19 nt, Artificial Sequence
  Description of Artificial Sequence: Synthetic oligonucleotide
  Sense strand starting at position 3268 of SEQ ID NO: 1881363
cguuucuugcggaggaauu

SEQ ID NO: 2038701 - RNA, 19 nt, Artificial Sequence
  Description of Artificial Sequence: Synthetic oligonucleotide
  Antisense strand to SEQ ID NO: 2038700
aauuccuccgcaagaaacg

SEQ ID NO: 2038702 - RNA, 19 nt, Artificial Sequence
  Description of Artificial Sequence: Synthetic oligonucleotide
  Sense strand starting at position 3269 of SEQ ID NO: 1881363
guuucuugcggaggaauuu

SEQ ID NO: 2038703 - RNA, 19 nt, Artificial Sequence
  Description of Artificial Sequence: Synthetic oligonucleotide
  Antisense strand to SEQ ID NO: 2038702
aaauuccuccgcaagaaac

SEQ ID NO: 2038704 - RNA, 19 nt, Artificial Sequence
  Description of Artificial Sequence: Synthetic oligonucleotide
  Sense strand starting at position 3328 of SEQ ID NO: 1881363
ggucguuaccucggauaaa

SEQ ID NO: 2038705 - RNA, 19 nt, Artificial Sequence
  Description of Artificial Sequence: Synthetic oligonucleotide
  Antisense strand to SEQ ID NO: 2038704
uuuauccgagguaacgacc

SEQ ID NO: 2038706 - RNA, 19 nt, Artificial Sequence
  Description of Artificial Sequence: Synthetic oligonucleotide
  Sense strand starting at position 3370 of SEQ ID NO: 1881363
acccaaaugugguaauuuc

SEQ ID NO: 2038707 - RNA, 19 nt, Artificial Sequence
  Description of Artificial Sequence: Synthetic oligonucleotide
  Antisense strand to SEQ ID NO: 2038706
gaaauuaccacauuugggu

SEQ ID NO: 2038708 - RNA, 19 nt, Artificial Sequence
  Description of Artificial Sequence: Synthetic oligonucleotide
  Sense strand starting at position 3377 of SEQ ID NO: 1881363
ugugguaauuucucgauau

SEQ ID NO: 2038709 - RNA, 19 nt, Artificial Sequence
  Description of Artificial Sequence: Synthetic oligonucleotide
  Antisense strand to SEQ ID NO: 2038708
auaucgagaaauuaccaca

SEQ ID NO: 2038710 - RNA, 19 nt, Artificial Sequence
  Description of Artificial Sequence: Synthetic oligonucleotide
  Sense strand starting at position 3458 of SEQ ID NO: 1881363
agaauauagcugcggaguu

SEQ ID NO: 2038711 - RNA, 19 nt, Artificial Sequence
  Description of Artificial Sequence: Synthetic oligonucleotide
  Antisense strand to SEQ ID NO: 2038710
aacuccgcagcuauauucu

SEQ ID NO: 2038712 - RNA, 19 nt, Artificial Sequence
  Description of Artificial Sequence: Synthetic oligonucleotide
  Sense strand starting at position 3468 of SEQ ID NO: 1881363
ugcggaguuaguuaaaccu

SEQ ID NO: 2038713 - RNA, 19 nt, Artificial Sequence
  Description of Artificial Sequence: Synthetic oligonucleotide
  Antisense strand to SEQ ID NO: 2038712
agguuuaacuaacuccgca

SEQ ID NO: 2038714 - RNA, 19 nt, Artificial Sequence
  Description of Artificial Sequence: Synthetic oligonucleotide
  Sense strand starting at position 3713 of SEQ ID NO: 1881363
ugaagaccugccuggcauu

SEQ ID NO: 2038715 - RNA, 19 nt, Artificial Sequence
  Description of Artificial Sequence: Synthetic oligonucleotide
  Antisense strand to SEQ ID NO: 2038714
aaugccaggcaggucuuca

SEQ ID NO: 2038716 - RNA, 19 nt, Artificial Sequence
  Description of Artificial Sequence: Synthetic oligonucleotide
  Sense strand starting at position 3820 of SEQ ID NO: 1881363
ccgguuuaccgguacauuu

SEQ ID NO: 2038717 - RNA, 19 nt, Artificial Sequence
  Description of Artificial Sequence: Synthetic oligonucleotide
  Antisense strand to SEQ ID NO: 2038716
aaauguaccgguaaaccgg

SEQ ID NO: 2038718 - RNA, 19 nt, Artificial Sequence
  Description of Artificial Sequence: Synthetic oligonucleotide
  Sense strand starting at position 3859 of SEQ ID NO: 1881363
uggagugucauuugcagau

SEQ ID NO: 2038719 - RNA, 19 nt, Artificial Sequence
  Description of Artificial Sequence: Synthetic oligonucleotide
  Antisense strand to SEQ ID NO: 2038718
aucugcaaaugacacucca

SEQ ID NO: 2038720 - RNA, 19 nt, Artificial Sequence
  Description of Artificial Sequence: Synthetic oligonucleotide
  Sense strand starting at position 3863 of SEQ ID NO: 1881363
gugucauuugcagaugucu

SEQ ID NO: 2038721 - RNA, 19 nt, Artificial Sequence
  Description of Artificial Sequence: Synthetic oligonucleotide
  Antisense strand to SEQ ID NO: 2038720
agacaucugcaaaugacac

SEQ ID NO: 2038722 - RNA, 19 nt, Artificial Sequence
  Description of Artificial Sequence: Synthetic oligonucleotide
  Sense strand starting at position 3871 of SEQ ID NO: 1881363
ugcagaugucucuggagug

SEQ ID NO: 2038723 - RNA, 19 nt, Artificial Sequence
  Description of Artificial Sequence: Synthetic oligonucleotide
  Antisense strand to SEQ ID NO: 2038722
cacuccagagacaucugca

SEQ ID NO: 2038724 - RNA, 19 nt, Artificial Sequence
  Description of Artificial Sequence: Synthetic oligonucleotide
  Sense strand starting at position 104 of SEQ ID NO: 1881364
ucgcuucacugugggaaga

SEQ ID NO: 2038725 - RNA, 19 nt, Artificial Sequence
  Description of Artificial Sequence: Synthetic oligonucleotide
  Antisense strand to SEQ ID NO: 2038724
ucuucccacagugaagcga

SEQ ID NO: 2038726 - RNA, 19 nt, Artificial Sequence
  Description of Artificial Sequence: Synthetic oligonucleotide
  Sense strand starting at position 471 of SEQ ID NO: 1881364
ucaagcuacuccuggaaga

SEQ ID NO: 2038727 - RNA, 19 nt, Artificial Sequence
  Description of Artificial Sequence: Synthetic oligonucleotide
  Antisense strand to SEQ ID NO: 2038726
ucuuccaggaguagcuuga

SEQ ID NO: 2038728 - RNA, 19 nt, Artificial Sequence
  Description of Artificial Sequence: Synthetic oligonucleotide
  Sense strand starting at position 563 of SEQ ID NO: 1881364
gggccuuguucuuagcaua

SEQ ID NO: 2038729 - RNA, 19 nt, Artificial Sequence
  Description of Artificial Sequence: Synthetic oligonucleotide
  Antisense strand to SEQ ID NO: 2038728
uaugcuaagaacaaggccc

SEQ ID NO: 2038730 - RNA, 19 nt, Artificial Sequence
  Description of Artificial Sequence: Synthetic oligonucleotide
  Sense strand starting at position 566 of SEQ ID NO: 1881364
ccuuguucuuagcauaaug

SEQ ID NO: 2038731 - RNA, 19 nt, Artificial Sequence
  Description of Artificial Sequence: Synthetic oligonucleotide
  Antisense strand to SEQ ID NO: 2038730
cauuaugcuaagaacaagg

SEQ ID NO: 2038732 - RNA, 19 nt, Artificial Sequence
  Description of Artificial Sequence: Synthetic oligonucleotide
  Sense strand starting at position 571 of SEQ ID NO: 1881364
uucuuagcauaaugaguau

SEQ ID NO: 2038733 - RNA, 19 nt, Artificial Sequence
  Description of Artificial Sequence: Synthetic oligonucleotide
  Antisense strand to SEQ ID NO: 2038732
auacucauuaugcuaagaa

SEQ ID NO: 2038734 - RNA, 19 nt, Artificial Sequence
  Description of Artificial Sequence: Synthetic oligonucleotide
  Sense strand starting at position 617 of SEQ ID NO: 1881364
caggacagguaugaagaaa

SEQ ID NO: 2038735 - RNA, 19 nt, Artificial Sequence
  Description of Artificial Sequence: Synthetic oligonucleotide
  Antisense strand to SEQ ID NO: 2038734
uuucuucauaccuguccug

SEQ ID NO: 2038736 - RNA, 19 nt, Artificial Sequence
  Description of Artificial Sequence: Synthetic oligonucleotide
  Sense strand starting at position 679 of SEQ ID NO: 1881364
cagugugaauaacaaagau

SEQ ID NO: 2038737 - RNA, 19 nt, Artificial Sequence
  Description of Artificial Sequence: Synthetic oligonucleotide
  Antisense strand to SEQ ID NO: 2038736
aucuuuguuauucacacug

SEQ ID NO: 2038738 - RNA, 19 nt, Artificial Sequence
  Description of Artificial Sequence: Synthetic oligonucleotide
  Sense strand starting at position 1189 of SEQ ID NO: 1881364
guagaaucauagguccaac

SEQ ID NO: 2038739 - RNA, 19 nt, Artificial Sequence
  Description of Artificial Sequence: Synthetic oligonucleotide
  Antisense strand to SEQ ID NO: 2038738
guuggaccuaugauucuac

SEQ ID NO: 2038740 - RNA, 19 nt, Artificial Sequence
  Description of Artificial Sequence: Synthetic oligonucleotide
  Sense strand starting at position 1368 of SEQ ID NO: 1881364
ugcugugacuguguuccaa

SEQ ID NO: 2038741 - RNA, 19 nt, Artificial Sequence
  Description of Artificial Sequence: Synthetic oligonucleotide
  Antisense strand to SEQ ID NO: 2038740
uuggaacacagucacagca

SEQ ID NO: 2038742 - RNA, 19 nt, Artificial Sequence
  Description of Artificial Sequence: Synthetic oligonucleotide
  Sense strand starting at position 1493 of SEQ ID NO: 1881364
gguccugggauguaugaau

SEQ ID NO: 2038743 - RNA, 19 nt, Artificial Sequence
  Description of Artificial Sequence: Synthetic oligonucleotide
  Antisense strand to SEQ ID NO: 2038742
auucauacaucccaggacc

SEQ ID NO: 2038744 - RNA, 19 nt, Artificial Sequence
  Description of Artificial Sequence: Synthetic oligonucleotide
  Sense strand starting at position 1504 of SEQ ID NO: 1881364
guaugaaugggcuggaucu

SEQ ID NO: 2038745 - RNA, 19 nt, Artificial Sequence
  Description of Artificial Sequence: Synthetic oligonucleotide
  Antisense strand to SEQ ID NO: 2038744
agauccagcccauucauac

SEQ ID NO: 2038746 - RNA, 19 nt, Artificial Sequence
  Description of Artificial Sequence: Synthetic oligonucleotide
  Sense strand starting at position 1572 of SEQ ID NO: 1881364
gguccagacuaaugggagu

SEQ ID NO: 2038747 - RNA, 19 nt, Artificial Sequence
  Description of Artificial Sequence: Synthetic oligonucleotide
  Antisense strand to SEQ ID NO: 2038746
acucccauuagucuggacc

SEQ ID NO: 2038748 - RNA, 19 nt, Artificial Sequence
  Description of Artificial Sequence: Synthetic oligonucleotide
  Sense strand starting at position 1612 of SEQ ID NO: 1881364
gcaguccugucuccagcaa

SEQ ID NO: 2038749 - RNA, 19 nt, Artificial Sequence
  Description of Artificial Sequence: Synthetic oligonucleotide
  Antisense strand to SEQ ID NO: 2038748
uugcuggagacaggacugc

SEQ ID NO: 2038750 - RNA, 19 nt, Artificial Sequence
  Description of Artificial Sequence: Synthetic oligonucleotide
  Sense strand starting at position 1632 of SEQ ID NO: 1881364
ccaaccaguuagucuaaga

SEQ ID NO: 2038751 - RNA, 19 nt, Artificial Sequence
  Description of Artificial Sequence: Synthetic oligonucleotide
  Antisense strand to SEQ ID NO: 2038750
ucuuagacuaacugguugg

SEQ ID NO: 2038752 - RNA, 19 nt, Artificial Sequence
  Description of Artificial Sequence: Synthetic oligonucleotide
  Sense strand starting at position 1637 of SEQ ID NO: 1881364
caguuagucuaagaggaaa

SEQ ID NO: 2038753 - RNA, 19 nt, Artificial Sequence
  Description of Artificial Sequence: Synthetic oligonucleotide
  Antisense strand to SEQ ID NO: 2038752
uuuccucuuagacuaacug

SEQ ID NO: 2038754 - RNA, 19 nt, Artificial Sequence
  Description of Artificial Sequence: Synthetic oligonucleotide
  Sense strand starting at position 1639 of SEQ ID NO: 1881364
guuagucuaagaggaaaca

SEQ ID NO: 2038755 - RNA, 19 nt, Artificial Sequence
  Description of Artificial Sequence: Synthetic oligonucleotide
  Antisense strand to SEQ ID NO: 2038754
uguuuccucuuagacuaac

SEQ ID NO: 2038756 - RNA, 19 nt, Artificial Sequence
  Description of Artificial Sequence: Synthetic oligonucleotide
  Sense strand starting at position 1702 of SEQ ID NO: 1881364
aucuaaaccugagcugaau

SEQ ID NO: 2038757 - RNA, 19 nt, Artificial Sequence
  Description of Artificial Sequence: Synthetic oligonucleotide
  Antisense strand to SEQ ID NO: 2038756
auucagcucagguuuagau

SEQ ID NO: 2038758 - RNA, 19 nt, Artificial Sequence
  Description of Artificial Sequence: Synthetic oligonucleotide
  Sense strand starting at position 2208 of SEQ ID NO: 1881364
cccaauugcucuguggaga

SEQ ID NO: 2038759 - RNA, 19 nt, Artificial Sequence
  Description of Artificial Sequence: Synthetic oligonucleotide
  Antisense strand to SEQ ID NO: 2038758
ucuccacagagcaauuggg

SEQ ID NO: 2038760 - RNA, 19 nt, Artificial Sequence
  Description of Artificial Sequence: Synthetic oligonucleotide
  Sense strand starting at position 2238 of SEQ ID NO: 1881364
ucacgaugaugucagggaa

SEQ ID NO: 2038761 - RNA, 19 nt, Artificial Sequence
  Description of Artificial Sequence: Synthetic oligonucleotide
  Antisense strand to SEQ ID NO: 2038760
uucccugacaucaucguga

SEQ ID NO: 2038762 - RNA, 19 nt, Artificial Sequence
  Description of Artificial Sequence: Synthetic oligonucleotide
  Sense strand starting at position 2513 of SEQ ID NO: 1881364
ccaucauugugggcucagu

SEQ ID NO: 2038763 - RNA, 19 nt, Artificial Sequence
  Description of Artificial Sequence: Synthetic oligonucleotide
  Antisense strand to SEQ ID NO: 2038762
acugagcccacaaugaugg

SEQ ID NO: 2038764 - RNA, 19 nt, Artificial Sequence
  Description of Artificial Sequence: Synthetic oligonucleotide
  Sense strand starting at position 3227 of SEQ ID NO: 1881364
cguccugagccagagaaau

SEQ ID NO: 2038765 - RNA, 19 nt, Artificial Sequence
  Description of Artificial Sequence: Synthetic oligonucleotide
  Antisense strand to SEQ ID NO: 2038764
auuucucuggcucaggacg

SEQ ID NO: 2038766 - RNA, 19 nt, Artificial Sequence
  Description of Artificial Sequence: Synthetic oligonucleotide
  Sense strand starting at position 3283 of SEQ ID NO: 1881364
cugaguagcaucuggguaa

SEQ ID NO: 2038767 - RNA, 19 nt, Artificial Sequence
  Description of Artificial Sequence: Synthetic oligonucleotide
  Antisense strand to SEQ ID NO: 2038766
uuacccagaugcuacucag

SEQ ID NO: 2038768 - RNA, 19 nt, Artificial Sequence
  Description of Artificial Sequence: Synthetic oligonucleotide
  Sense strand starting at position 3287 of SEQ ID NO: 1881364
guagcaucuggguaaggga

SEQ ID NO: 2038769 - RNA, 19 nt, Artificial Sequence
  Description of Artificial Sequence: Synthetic oligonucleotide
  Antisense strand to SEQ ID NO: 2038768
ucccuuacccagaugcuac

SEQ ID NO: 2038770 - RNA, 19 nt, Artificial Sequence
  Description of Artificial Sequence: Synthetic oligonucleotide
  Sense strand starting at position 3310 of SEQ ID NO: 1881364
gguaaguggugaguggaau

SEQ ID NO: 2038771 - RNA, 19 nt, Artificial Sequence
  Description of Artificial Sequence: Synthetic oligonucleotide
  Antisense strand to SEQ ID NO: 2038770
auuccacucaccacuuacc

SEQ ID NO: 2038772 - RNA, 19 nt, Artificial Sequence
  Description of Artificial Sequence: Synthetic oligonucleotide
  Sense strand starting at position 3314 of SEQ ID NO: 1881364
aguggugaguggaaucgau

SEQ ID NO: 2038773 - RNA, 19 nt, Artificial Sequence
  Description of Artificial Sequence: Synthetic oligonucleotide
  Antisense strand to SEQ ID NO: 2038772
aucgauuccacucaccacu

SEQ ID NO: 2038774 - RNA, 19 nt, Artificial Sequence
  Description of Artificial Sequence: Synthetic oligonucleotide
  Sense strand starting at position 3495 of SEQ ID NO: 1881364
agcuguaggucagagagaa

SEQ ID NO: 2038775 - RNA, 19 nt, Artificial Sequence
  Description of Artificial Sequence: Synthetic oligonucleotide
  Antisense strand to SEQ ID NO: 2038774
uucucucugaccuacagcu

SEQ ID NO: 2038776 - RNA, 19 nt, Artificial Sequence
  Description of Artificial Sequence: Synthetic oligonucleotide
  Sense strand starting at position 3507 of SEQ ID NO: 1881364
gagagaaugucacacucaa

SEQ ID NO: 2038777 - RNA, 19 nt, Artificial Sequence
  Description of Artificial Sequence: Synthetic oligonucleotide
  Antisense strand to SEQ ID NO: 2038776
uugagugugacauucucuc

SEQ ID NO: 2038778 - RNA, 19 nt, Artificial Sequence
  Description of Artificial Sequence: Synthetic oligonucleotide
  Sense strand starting at position 3647 of SEQ ID NO: 1881364
gcuggacucaaggagucuu

SEQ ID NO: 2038779 - RNA, 19 nt, Artificial Sequence
  Description of Artificial Sequence: Synthetic oligonucleotide
  Antisense strand to SEQ ID NO: 2038778
aagacuccuugaguccagc

SEQ ID NO: 2038780 - RNA, 19 nt, Artificial Sequence
  Description of Artificial Sequence: Synthetic oligonucleotide
  Sense strand starting at position 3655 of SEQ ID NO: 1881364
caaggagucuugggaauag

SEQ ID NO: 2038781 - RNA, 19 nt, Artificial Sequence
  Description of Artificial Sequence: Synthetic oligonucleotide
  Antisense strand to SEQ ID NO: 2038780
cuauucccaagacuccuug

SEQ ID NO: 2038782 - RNA, 19 nt, Artificial Sequence
  Description of Artificial Sequence: Synthetic oligonucleotide
  Sense strand starting at position 3943 of SEQ ID NO: 1881364
cagugagggucucagaaca

SEQ ID NO: 2038783 - RNA, 19 nt, Artificial Sequence
  Description of Artificial Sequence: Synthetic oligonucleotide
  Antisense strand to SEQ ID NO: 2038782
uguucugagacccucacug

SEQ ID NO: 2038784 - RNA, 19 nt, Artificial Sequence
  Description of Artificial Sequence: Synthetic oligonucleotide
  Sense strand starting at position 2 of SEQ ID NO: 1881365
aaagaugugucagcuaggu

SEQ ID NO: 2038785 - RNA, 19 nt, Artificial Sequence
  Description of Artificial Sequence: Synthetic oligonucleotide
  Antisense strand to SEQ ID NO: 2038784
accuagcugacacaucuuu

SEQ ID NO: 2038786 - RNA, 19 nt, Artificial Sequence
  Description of Artificial Sequence: Synthetic oligonucleotide
  Sense strand starting at position 4 of SEQ ID NO: 1881365
agaugugucagcuagguaa

SEQ ID NO: 2038787 - RNA, 19 nt, Artificial Sequence
  Description of Artificial Sequence: Synthetic oligonucleotide
  Antisense strand to SEQ ID NO: 2038786
uuaccuagcugacacaucu

SEQ ID NO: 2038788 - RNA, 19 nt, Artificial Sequence
  Description of Artificial Sequence: Synthetic oligonucleotide
  Sense strand starting at position 6 of SEQ ID NO: 1881365
augugucagcuagguaaag

SEQ ID NO: 2038789 - RNA, 19 nt, Artificial Sequence
  Description of Artificial Sequence: Synthetic oligonucleotide
  Antisense strand to SEQ ID NO: 2038788
cuuuaccuagcugacacau

SEQ ID NO: 2038790 - RNA, 19 nt, Artificial Sequence
  Description of Artificial Sequence: Synthetic oligonucleotide
  Sense strand starting at position 7 of SEQ ID NO: 1881365
ugugucagcuagguaaaga

SEQ ID NO: 2038791 - RNA, 19 nt, Artificial Sequence
  Description of Artificial Sequence: Synthetic oligonucleotide
  Antisense strand to SEQ ID NO: 2038790
ucuuuaccuagcugacaca

SEQ ID NO: 2038792 - RNA, 19 nt, Artificial Sequence
  Description of Artificial Sequence: Synthetic oligonucleotide
  Sense strand starting at position 8 of SEQ ID NO: 1881365
gugucagcuagguaaagau

SEQ ID NO: 2038793 - RNA, 19 nt, Artificial Sequence
  Description of Artificial Sequence: Synthetic oligonucleotide
  Antisense strand to SEQ ID NO: 2038792
aucuuuaccuagcugacac

SEQ ID NO: 2038794 - RNA, 19 nt, Artificial Sequence
  Description of Artificial Sequence: Synthetic oligonucleotide
  Sense strand starting at position 45 of SEQ ID NO: 1881365
gcagucagcuucccagaca

SEQ ID NO: 2038795 - RNA, 19 nt, Artificial Sequence
  Description of Artificial Sequence: Synthetic oligonucleotide
  Antisense strand to SEQ ID NO: 2038794
ugucugggaagcugacugc

SEQ ID NO: 2038796 - RNA, 19 nt, Artificial Sequence
  Description of Artificial Sequence: Synthetic oligonucleotide
  Sense strand starting at position 211 of SEQ ID NO: 1881365
uguggccugaucuguaaau

SEQ ID NO: 2038797 - RNA, 19 nt, Artificial Sequence
  Description of Artificial Sequence: Synthetic oligonucleotide
  Antisense strand to SEQ ID NO: 2038796
auuuacagaucaggccaca

SEQ ID NO: 2038798 - RNA, 19 nt, Artificial Sequence
  Description of Artificial Sequence: Synthetic oligonucleotide
  Sense strand starting at position 212 of SEQ ID NO: 1881365
guggccugaucuguaaaua

SEQ ID NO: 2038799 - RNA, 19 nt, Artificial Sequence
  Description of Artificial Sequence: Synthetic oligonucleotide
  Antisense strand to SEQ ID NO: 2038798
uauuuacagaucaggccac

SEQ ID NO: 2038800 - RNA, 19 nt, Artificial Sequence
  Description of Artificial Sequence: Synthetic oligonucleotide
  Sense strand starting at position 213 of SEQ ID NO: 1881365
uggccugaucuguaaauaa

SEQ ID NO: 2038801 - RNA, 19 nt, Artificial Sequence
  Description of Artificial Sequence: Synthetic oligonucleotide
  Antisense strand to SEQ ID NO: 2038800
uuauuuacagaucaggcca

SEQ ID NO: 2038802 - RNA, 19 nt, Artificial Sequence
  Description of Artificial Sequence: Synthetic oligonucleotide
  Sense strand starting at position 735 of SEQ ID NO: 1881365
gcccuugucugcucauuua

SEQ ID NO: 2038803 - RNA, 19 nt, Artificial Sequence
  Description of Artificial Sequence: Synthetic oligonucleotide
  Antisense strand to SEQ ID NO: 2038802
uaaaugagcagacaagggc

SEQ ID NO: 2038804 - RNA, 19 nt, Artificial Sequence
  Description of Artificial Sequence: Synthetic oligonucleotide
  Sense strand starting at position 777 of SEQ ID NO: 1881365
aaauuaacucuuuggaggu

SEQ ID NO: 2038805 - RNA, 19 nt, Artificial Sequence
  Description of Artificial Sequence: Synthetic oligonucleotide
  Antisense strand to SEQ ID NO: 2038804
accuccaaagaguuaauuu

SEQ ID NO: 2038806 - RNA, 19 nt, Artificial Sequence
  Description of Artificial Sequence: Synthetic oligonucleotide
  Sense strand starting at position 781 of SEQ ID NO: 1881365
uaacucuuuggagguacau

SEQ ID NO: 2038807 - RNA, 19 nt, Artificial Sequence
  Description of Artificial Sequence: Synthetic oligonucleotide
  Antisense strand to SEQ ID NO: 2038806
auguaccuccaaagaguua

SEQ ID NO: 2038808 - RNA, 19 nt, Artificial Sequence
  Description of Artificial Sequence: Synthetic oligonucleotide
  Sense strand starting at position 797 of SEQ ID NO: 1881365
cauauaacgggaugugcaa

SEQ ID NO: 2038809 - RNA, 19 nt, Artificial Sequence
  Description of Artificial Sequence: Synthetic oligonucleotide
  Antisense strand to SEQ ID NO: 2038808
uugcacaucccguuauaug

SEQ ID NO: 2038810 - RNA, 19 nt, Artificial Sequence
  Description of Artificial Sequence: Synthetic oligonucleotide
  Sense strand starting at position 860 of SEQ ID NO: 1881365
aguuccuuccauuauguau

SEQ ID NO: 2038811 - RNA, 19 nt, Artificial Sequence
  Description of Artificial Sequence: Synthetic oligonucleotide
  Antisense strand to SEQ ID NO: 2038810
auacauaauggaaggaacu

SEQ ID NO: 2038812 - RNA, 19 nt, Artificial Sequence
  Description of Artificial Sequence: Synthetic oligonucleotide
  Sense strand starting at position 1095 of SEQ ID NO: 1881365
gcccuugauggcugggaaa

SEQ ID NO: 2038813 - RNA, 19 nt, Artificial Sequence
  Description of Artificial Sequence: Synthetic oligonucleotide
  Antisense strand to SEQ ID NO: 2038812
uuucccagccaucaagggc

SEQ ID NO: 2038814 - RNA, 19 nt, Artificial Sequence
  Description of Artificial Sequence: Synthetic oligonucleotide
  Sense strand starting at position 1097 of SEQ ID NO: 1881365
ccuugauggcugggaaaga

SEQ ID NO: 2038815 - RNA, 19 nt, Artificial Sequence
  Description of Artificial Sequence: Synthetic oligonucleotide
  Antisense strand to SEQ ID NO: 2038814
ucuuucccagccaucaagg

SEQ ID NO: 2038816 - RNA, 19 nt, Artificial Sequence
  Description of Artificial Sequence: Synthetic oligonucleotide
  Sense strand starting at position 1355 of SEQ ID NO: 1881365
aaagaagguuuauucuagu

SEQ ID NO: 2038817 - RNA, 19 nt, Artificial Sequence
  Description of Artificial Sequence: Synthetic oligonucleotide
  Antisense strand to SEQ ID NO: 2038816
acuagaauaaaccuucuuu

SEQ ID NO: 2038818 - RNA, 19 nt, Artificial Sequence
  Description of Artificial Sequence: Synthetic oligonucleotide
  Sense strand starting at position 1364 of SEQ ID NO: 1881365
uuauucuaguggucaccaa

SEQ ID NO: 2038819 - RNA, 19 nt, Artificial Sequence
  Description of Artificial Sequence: Synthetic oligonucleotide
  Antisense strand to SEQ ID NO: 2038818
uuggugaccacuagaauaa

SEQ ID NO: 2038820 - RNA, 19 nt, Artificial Sequence
  Description of Artificial Sequence: Synthetic oligonucleotide
  Sense strand starting at position 1588 of SEQ ID NO: 1881365
cugacaugccaguacuuua

SEQ ID NO: 2038821 - RNA, 19 nt, Artificial Sequence
  Description of Artificial Sequence: Synthetic oligonucleotide
  Antisense strand to SEQ ID NO: 2038820
uaaaguacuggcaugucag

SEQ ID NO: 2038822 - RNA, 19 nt, Artificial Sequence
  Description of Artificial Sequence: Synthetic oligonucleotide
  Sense strand starting at position 1856 of SEQ ID NO: 1881365
uugcaugcuccugaaagaa

SEQ ID NO: 2038823 - RNA, 19 nt, Artificial Sequence
  Description of Artificial Sequence: Synthetic oligonucleotide
  Antisense strand to SEQ ID NO: 2038822
uucuuucaggagcaugcaa

SEQ ID NO: 2038824 - RNA, 19 nt, Artificial Sequence
  Description of Artificial Sequence: Synthetic oligonucleotide
  Sense strand starting at position 1898 of SEQ ID NO: 1881365
uuggucuauuuggagguua

SEQ ID NO: 2038825 - RNA, 19 nt, Artificial Sequence
  Description of Artificial Sequence: Synthetic oligonucleotide
  Antisense strand to SEQ ID NO: 2038824
uaaccuccaaauagaccaa

SEQ ID NO: 2038826 - RNA, 19 nt, Artificial Sequence
  Description of Artificial Sequence: Synthetic oligonucleotide
  Sense strand starting at position 2018 of SEQ ID NO: 1881365
agcauacccgacuguucua

SEQ ID NO: 2038827 - RNA, 19 nt, Artificial Sequence
  Description of Artificial Sequence: Synthetic oligonucleotide
  Antisense strand to SEQ ID NO: 2038826
uagaacagucggguaugcu

SEQ ID NO: 2038828 - RNA, 19 nt, Artificial Sequence
  Description of Artificial Sequence: Synthetic oligonucleotide
  Sense strand starting at position 2220 of SEQ ID NO: 1881365
ugaugaaagcccugucucu

SEQ ID NO: 2038829 - RNA, 19 nt, Artificial Sequence
  Description of Artificial Sequence: Synthetic oligonucleotide
  Antisense strand to SEQ ID NO: 2038828
agagacagggcuuucauca

SEQ ID NO: 2038830 - RNA, 19 nt, Artificial Sequence
  Description of Artificial Sequence: Synthetic oligonucleotide
  Sense strand starting at position 2537 of SEQ ID NO: 1881365
gcagacuucuaucuggcaa

SEQ ID NO: 2038831 - RNA, 19 nt, Artificial Sequence
  Description of Artificial Sequence: Synthetic oligonucleotide
  Antisense strand to SEQ ID NO: 2038830
uugccagauagaagucugc

SEQ ID NO: 2038832 - RNA, 19 nt, Artificial Sequence
  Description of Artificial Sequence: Synthetic oligonucleotide
  Sense strand starting at position 2588 of SEQ ID NO: 1881365
caucacuuccucugaggga

SEQ ID NO: 2038833 - RNA, 19 nt, Artificial Sequence
  Description of Artificial Sequence: Synthetic oligonucleotide
  Antisense strand to SEQ ID NO: 2038832
ucccucagaggaagugaug

SEQ ID NO: 2038834 - RNA, 19 nt, Artificial Sequence
  Description of Artificial Sequence: Synthetic oligonucleotide
  Sense strand starting at position 2685 of SEQ ID NO: 1881365
cuagcacuggcuuaaaucu

SEQ ID NO: 2038835 - RNA, 19 nt, Artificial Sequence
  Description of Artificial Sequence: Synthetic oligonucleotide
  Antisense strand to SEQ ID NO: 2038834
agauuuaagccagugcuag

SEQ ID NO: 2038836 - RNA, 19 nt, Artificial Sequence
  Description of Artificial Sequence: Synthetic oligonucleotide
  Sense strand starting at position 2692 of SEQ ID NO: 1881365
uggcuuaaaucucugcuuu

SEQ ID NO: 2038837 - RNA, 19 nt, Artificial Sequence
  Description of Artificial Sequence: Synthetic oligonucleotide
  Antisense strand to SEQ ID NO: 2038836
aaagcagagauuuaagcca

SEQ ID NO: 2038838 - RNA, 19 nt, Artificial Sequence
  Description of Artificial Sequence: Synthetic oligonucleotide
  Sense strand starting at position 2693 of SEQ ID NO: 1881365
ggcuuaaaucucugcuuuc

SEQ ID NO: 2038839 - RNA, 19 nt, Artificial Sequence
  Description of Artificial Sequence: Synthetic oligonucleotide
  Antisense strand to SEQ ID NO: 2038838
gaaagcagagauuuaagcc

SEQ ID NO: 2038840 - RNA, 19 nt, Artificial Sequence
  Description of Artificial Sequence: Synthetic oligonucleotide
  Sense strand starting at position 3237 of SEQ ID NO: 1881365
guuggcacuuaugaaauuu

SEQ ID NO: 2038841 - RNA, 19 nt, Artificial Sequence
  Description of Artificial Sequence: Synthetic oligonucleotide
  Antisense strand to SEQ ID NO: 2038840
aaauuucauaagugccaac

SEQ ID NO: 2038842 - RNA, 19 nt, Artificial Sequence
  Description of Artificial Sequence: Synthetic oligonucleotide
  Sense strand starting at position 3280 of SEQ ID NO: 1881365
ugauguuuagggcaagauc

SEQ ID NO: 2038843 - RNA, 19 nt, Artificial Sequence
  Description of Artificial Sequence: Synthetic oligonucleotide
  Antisense strand to SEQ ID NO: 2038842
gaucuugcccuaaacauca

SEQ ID NO: 2038844 - RNA, 19 nt, Artificial Sequence
  Description of Artificial Sequence: Synthetic oligonucleotide
  Sense strand starting at position 3522 of SEQ ID NO: 1881365
agguauaagcaagaagcua

SEQ ID NO: 2038845 - RNA, 19 nt, Artificial Sequence
  Description of Artificial Sequence: Synthetic oligonucleotide
  Antisense strand to SEQ ID NO: 2038844
uagcuucuugcuuauaccu

SEQ ID NO: 2038846 - RNA, 19 nt, Artificial Sequence
  Description of Artificial Sequence: Synthetic oligonucleotide
  Sense strand starting at position 3530 of SEQ ID NO: 1881365
gcaagaagcuaguauuuga

SEQ ID NO: 2038847 - RNA, 19 nt, Artificial Sequence
  Description of Artificial Sequence: Synthetic oligonucleotide
  Antisense strand to SEQ ID NO: 2038846
ucaaauacuagcuucuugc

SEQ ID NO: 2038848 - RNA, 19 nt, Artificial Sequence
  Description of Artificial Sequence: Synthetic oligonucleotide
  Sense strand starting at position 3538 of SEQ ID NO: 1881365
cuaguauuugagugagccu

SEQ ID NO: 2038849 - RNA, 19 nt, Artificial Sequence
  Description of Artificial Sequence: Synthetic oligonucleotide
  Antisense strand to SEQ ID NO: 2038848
aggcucacucaaauacuag

SEQ ID NO: 2038850 - RNA, 19 nt, Artificial Sequence
  Description of Artificial Sequence: Synthetic oligonucleotide
  Sense strand starting at position 3597 of SEQ ID NO: 1881365
uggagagcuggcuaaacuu

SEQ ID NO: 2038851 - RNA, 19 nt, Artificial Sequence
  Description of Artificial Sequence: Synthetic oligonucleotide
  Antisense strand to SEQ ID NO: 2038850
aaguuuagccagcucucca

SEQ ID NO: 2038852 - RNA, 19 nt, Artificial Sequence
  Description of Artificial Sequence: Synthetic oligonucleotide
  Sense strand starting at position 3818 of SEQ ID NO: 1881365
ucuggcaacuuaccugaua

SEQ ID NO: 2038853 - RNA, 19 nt, Artificial Sequence
  Description of Artificial Sequence: Synthetic oligonucleotide
  Antisense strand to SEQ ID NO: 2038852
uaucagguaaguugccaga

SEQ ID NO: 2038854 - RNA, 19 nt, Artificial Sequence
  Description of Artificial Sequence: Synthetic oligonucleotide
  Sense strand starting at position 3819 of SEQ ID NO: 1881365
cuggcaacuuaccugauaa

SEQ ID NO: 2038855 - RNA, 19 nt, Artificial Sequence
  Description of Artificial Sequence: Synthetic oligonucleotide
  Antisense strand to SEQ ID NO: 2038854
uuaucagguaaguugccag

SEQ ID NO: 2038856 - RNA, 19 nt, Artificial Sequence
  Description of Artificial Sequence: Synthetic oligonucleotide
  Sense strand starting at position 3901 of SEQ ID NO: 1881365
ucagaugaucucuggcuga

SEQ ID NO: 2038857 - RNA, 19 nt, Artificial Sequence
  Description of Artificial Sequence: Synthetic oligonucleotide
  Antisense strand to SEQ ID NO: 2038856
ucagccagagaucaucuga

SEQ ID NO: 2038858 - RNA, 19 nt, Artificial Sequence
  Description of Artificial Sequence: Synthetic oligonucleotide
  Sense strand starting at position 3904 of SEQ ID NO: 1881365
gaugaucucuggcugaaau

SEQ ID NO: 2038859 - RNA, 19 nt, Artificial Sequence
  Description of Artificial Sequence: Synthetic oligonucleotide
  Antisense strand to SEQ ID NO: 2038858
auuucagccagagaucauc

SEQ ID NO: 2038860 - RNA, 19 nt, Artificial Sequence
  Description of Artificial Sequence: Synthetic oligonucleotide
  Sense strand starting at position 3905 of SEQ ID NO: 1881365
augaucucuggcugaaauc

SEQ ID NO: 2038861 - RNA, 19 nt, Artificial Sequence
  Description of Artificial Sequence: Synthetic oligonucleotide
  Antisense strand to SEQ ID NO: 2038860
gauuucagccagagaucau

SEQ ID NO: 2038862 - RNA, 19 nt, Artificial Sequence
  Description of Artificial Sequence: Synthetic oligonucleotide
  Sense strand starting at position 3906 of SEQ ID NO: 1881365
ugaucucuggcugaaauca

SEQ ID NO: 2038863 - RNA, 19 nt, Artificial Sequence
  Description of Artificial Sequence: Synthetic oligonucleotide
  Antisense strand to SEQ ID NO: 2038862
ugauuucagccagagauca

SEQ ID NO: 2038864 - RNA, 19 nt, Artificial Sequence
  Description of Artificial Sequence: Synthetic oligonucleotide
  Sense strand starting at position 1182 of SEQ ID NO: 1881366
ccguguccuguguuguauu

SEQ ID NO: 2038865 - RNA, 19 nt, Artificial Sequence
  Description of Artificial Sequence: Synthetic oligonucleotide
  Antisense strand to SEQ ID NO: 2038864
aauacaacacaggacacgg

SEQ ID NO: 2038866 - RNA, 19 nt, Artificial Sequence
  Description of Artificial Sequence: Synthetic oligonucleotide
  Sense strand starting at position 1198 of SEQ ID NO: 1881366
auugcuucucaugagugua

SEQ ID NO: 2038867 - RNA, 19 nt, Artificial Sequence
  Description of Artificial Sequence: Synthetic oligonucleotide
  Antisense strand to SEQ ID NO: 2038866
uacacucaugagaagcaau

SEQ ID NO: 2038868 - RNA, 19 nt, Artificial Sequence
  Description of Artificial Sequence: Synthetic oligonucleotide
  Sense strand starting at position 1310 of SEQ ID NO: 1881366
guuuaaacucauggcuaca

SEQ ID NO: 2038869 - RNA, 19 nt, Artificial Sequence
  Description of Artificial Sequence: Synthetic oligonucleotide
  Antisense strand to SEQ ID NO: 2038868
uguagccaugaguuuaaac

SEQ ID NO: 2038870 - RNA, 19 nt, Artificial Sequence
  Description of Artificial Sequence: Synthetic oligonucleotide
  Sense strand starting at position 1344 of SEQ ID NO: 1881366
cagggugcccauuaaguau

SEQ ID NO: 2038871 - RNA, 19 nt, Artificial Sequence
  Description of Artificial Sequence: Synthetic oligonucleotide
  Antisense strand to SEQ ID NO: 2038870
auacuuaaugggcacccug

SEQ ID NO: 2038872 - RNA, 19 nt, Artificial Sequence
  Description of Artificial Sequence: Synthetic oligonucleotide
  Sense strand starting at position 1516 of SEQ ID NO: 1881366
cuguuacugugauuccaag

SEQ ID NO: 2038873 - RNA, 19 nt, Artificial Sequence
  Description of Artificial Sequence: Synthetic oligonucleotide
  Antisense strand to SEQ ID NO: 2038872
cuuggaaucacaguaacag

SEQ ID NO: 2038874 - RNA, 19 nt, Artificial Sequence
  Description of Artificial Sequence: Synthetic oligonucleotide
  Sense strand starting at position 1616 of SEQ ID NO: 1881366
ugcccuuuggcauacuuua

SEQ ID NO: 2038875 - RNA, 19 nt, Artificial Sequence
  Description of Artificial Sequence: Synthetic oligonucleotide
  Antisense strand to SEQ ID NO: 2038874
uaaaguaugccaaagggca

SEQ ID NO: 2038876 - RNA, 19 nt, Artificial Sequence
  Description of Artificial Sequence: Synthetic oligonucleotide
  Sense strand starting at position 1702 of SEQ ID NO: 1881366
guuagaauuugaugaauug

SEQ ID NO: 2038877 - RNA, 19 nt, Artificial Sequence
  Description of Artificial Sequence: Synthetic oligonucleotide
  Antisense strand to SEQ ID NO: 2038876
caauucaucaaauucuaac

SEQ ID NO: 2038878 - RNA, 19 nt, Artificial Sequence
  Description of Artificial Sequence: Synthetic oligonucleotide
  Sense strand starting at position 1711 of SEQ ID NO: 1881366
ugaugaauugcucacuuuc

SEQ ID NO: 2038879 - RNA, 19 nt, Artificial Sequence
  Description of Artificial Sequence: Synthetic oligonucleotide
  Antisense strand to SEQ ID NO: 2038878
gaaagugagcaauucauca

SEQ ID NO: 2038880 - RNA, 19 nt, Artificial Sequence
  Description of Artificial Sequence: Synthetic oligonucleotide
  Sense strand starting at position 1866 of SEQ ID NO: 1881366
agugacuccugaucucagu

SEQ ID NO: 2038881 - RNA, 19 nt, Artificial Sequence
  Description of Artificial Sequence: Synthetic oligonucleotide
  Antisense strand to SEQ ID NO: 2038880
acugagaucaggagucacu

SEQ ID NO: 2038882 - RNA, 19 nt, Artificial Sequence
  Description of Artificial Sequence: Synthetic oligonucleotide
  Sense strand starting at position 1876 of SEQ ID NO: 1881366
gaucucaguuagucuagua

SEQ ID NO: 2038883 - RNA, 19 nt, Artificial Sequence
  Description of Artificial Sequence: Synthetic oligonucleotide
  Antisense strand to SEQ ID NO: 2038882
uacuagacuaacugagauc

SEQ ID NO: 2038884 - RNA, 19 nt, Artificial Sequence
  Description of Artificial Sequence: Synthetic oligonucleotide
  Sense strand starting at position 2153 of SEQ ID NO: 1881366
ucaguuuaugagcaaaucu

SEQ ID NO: 2038885 - RNA, 19 nt, Artificial Sequence
  Description of Artificial Sequence: Synthetic oligonucleotide
  Antisense strand to SEQ ID NO: 2038884
agauuugcucauaaacuga

SEQ ID NO: 2038886 - RNA, 19 nt, Artificial Sequence
  Description of Artificial Sequence: Synthetic oligonucleotide
  Sense strand starting at position 2185 of SEQ ID NO: 1881366
acaguugacuccuucucau

SEQ ID NO: 2038887 - RNA, 19 nt, Artificial Sequence
  Description of Artificial Sequence: Synthetic oligonucleotide
  Antisense strand to SEQ ID NO: 2038886
augagaaggagucaacugu

SEQ ID NO: 2038888 - RNA, 19 nt, Artificial Sequence
  Description of Artificial Sequence: Synthetic oligonucleotide
  Sense strand starting at position 2275 of SEQ ID NO: 1881366
gcccuugucuuucucauuu

SEQ ID NO: 2038889 - RNA, 19 nt, Artificial Sequence
  Description of Artificial Sequence: Synthetic oligonucleotide
  Antisense strand to SEQ ID NO: 2038888
aaaugagaaagacaagggc

SEQ ID NO: 2038890 - RNA, 19 nt, Artificial Sequence
  Description of Artificial Sequence: Synthetic oligonucleotide
  Sense strand starting at position 2298 of SEQ ID NO: 1881366
uccacuuagcaguaugaga

SEQ ID NO: 2038891 - RNA, 19 nt, Artificial Sequence
  Description of Artificial Sequence: Synthetic oligonucleotide
  Antisense strand to SEQ ID NO: 2038890
ucucauacugcuaagugga

SEQ ID NO: 2038892 - RNA, 19 nt, Artificial Sequence
  Description of Artificial Sequence: Synthetic oligonucleotide
  Sense strand starting at position 2300 of SEQ ID NO: 1881366
cacuuagcaguaugagaga

SEQ ID NO: 2038893 - RNA, 19 nt, Artificial Sequence
  Description of Artificial Sequence: Synthetic oligonucleotide
  Antisense strand to SEQ ID NO: 2038892
ucucucauacugcuaagug

SEQ ID NO: 2038894 - RNA, 19 nt, Artificial Sequence
  Description of Artificial Sequence: Synthetic oligonucleotide
  Sense strand starting at position 2491 of SEQ ID NO: 1881366
acgaccuaucuuggugaau

SEQ ID NO: 2038895 - RNA, 19 nt, Artificial Sequence
  Description of Artificial Sequence: Synthetic oligonucleotide
  Antisense strand to SEQ ID NO: 2038894
auucaccaagauaggucgu

SEQ ID NO: 2038896 - RNA, 19 nt, Artificial Sequence
  Description of Artificial Sequence: Synthetic oligonucleotide
  Sense strand starting at position 2492 of SEQ ID NO: 1881366
cgaccuaucuuggugaaug

SEQ ID NO: 2038897 - RNA, 19 nt, Artificial Sequence
  Description of Artificial Sequence: Synthetic oligonucleotide
  Antisense strand to SEQ ID NO: 2038896
cauucaccaagauaggucg

SEQ ID NO: 2038898 - RNA, 19 nt, Artificial Sequence
  Description of Artificial Sequence: Synthetic oligonucleotide
  Sense strand starting at position 2500 of SEQ ID NO: 1881366
cuuggugaauguuuccuga

SEQ ID NO: 2038899 - RNA, 19 nt, Artificial Sequence
  Description of Artificial Sequence: Synthetic oligonucleotide
  Antisense strand to SEQ ID NO: 2038898
ucaggaaacauucaccaag

SEQ ID NO: 2038900 - RNA, 19 nt, Artificial Sequence
  Description of Artificial Sequence: Synthetic oligonucleotide
  Sense strand starting at position 2503 of SEQ ID NO: 1881366
ggugaauguuuccugagug

SEQ ID NO: 2038901 - RNA, 19 nt, Artificial Sequence
  Description of Artificial Sequence: Synthetic oligonucleotide
  Antisense strand to SEQ ID NO: 2038900
cacucaggaaacauucacc

SEQ ID NO: 2038902 - RNA, 19 nt, Artificial Sequence
  Description of Artificial Sequence: Synthetic oligonucleotide
  Sense strand starting at position 2511 of SEQ ID NO: 1881366
uuuccugagugcuuggaaa

SEQ ID NO: 2038903 - RNA, 19 nt, Artificial Sequence
  Description of Artificial Sequence: Synthetic oligonucleotide
  Antisense strand to SEQ ID NO: 2038902
uuuccaagcacucaggaaa

SEQ ID NO: 2038904 - RNA, 19 nt, Artificial Sequence
  Description of Artificial Sequence: Synthetic oligonucleotide
  Sense strand starting at position 2743 of SEQ ID NO: 1881366
uaagauuguuacgucauau

SEQ ID NO: 2038905 - RNA, 19 nt, Artificial Sequence
  Description of Artificial Sequence: Synthetic oligonucleotide
  Antisense strand to SEQ ID NO: 2038904
auaugacguaacaaucuua

SEQ ID NO: 2038906 - RNA, 19 nt, Artificial Sequence
  Description of Artificial Sequence: Synthetic oligonucleotide
  Sense strand starting at position 2753 of SEQ ID NO: 1881366
acgucauaucaaugaauug

SEQ ID NO: 2038907 - RNA, 19 nt, Artificial Sequence
  Description of Artificial Sequence: Synthetic oligonucleotide
  Antisense strand to SEQ ID NO: 2038906
caauucauugauaugacgu

SEQ ID NO: 2038908 - RNA, 19 nt, Artificial Sequence
  Description of Artificial Sequence: Synthetic oligonucleotide
  Sense strand starting at position 2794 of SEQ ID NO: 1881366
ccuucuuuaugacugguaa

SEQ ID NO: 2038909 - RNA, 19 nt, Artificial Sequence
  Description of Artificial Sequence: Synthetic oligonucleotide
  Antisense strand to SEQ ID NO: 2038908
uuaccagucauaaagaagg

SEQ ID NO: 2038910 - RNA, 19 nt, Artificial Sequence
  Description of Artificial Sequence: Synthetic oligonucleotide
  Sense strand starting at position 2795 of SEQ ID NO: 1881366
cuucuuuaugacugguaaa

SEQ ID NO: 2038911 - RNA, 19 nt, Artificial Sequence
  Description of Artificial Sequence: Synthetic oligonucleotide
  Antisense strand to SEQ ID NO: 2038910
uuuaccagucauaaagaag

SEQ ID NO: 2038912 - RNA, 19 nt, Artificial Sequence
  Description of Artificial Sequence: Synthetic oligonucleotide
  Sense strand starting at position 2827 of SEQ ID NO: 1881366
aaucuacuuugugugauag

SEQ ID NO: 2038913 - RNA, 19 nt, Artificial Sequence
  Description of Artificial Sequence: Synthetic oligonucleotide
  Antisense strand to SEQ ID NO: 2038912
cuaucacacaaaguagauu

SEQ ID NO: 2038914 - RNA, 19 nt, Artificial Sequence
  Description of Artificial Sequence: Synthetic oligonucleotide
  Sense strand starting at position 2839 of SEQ ID NO: 1881366
gugauagugauacaguaac

SEQ ID NO: 2038915 - RNA, 19 nt, Artificial Sequence
  Description of Artificial Sequence: Synthetic oligonucleotide
  Antisense strand to SEQ ID NO: 2038914
guuacuguaucacuaucac

SEQ ID NO: 2038916 - RNA, 19 nt, Artificial Sequence
  Description of Artificial Sequence: Synthetic oligonucleotide
  Sense strand starting at position 2908 of SEQ ID NO: 1881366
uuaaccuauugugucuuua

SEQ ID NO: 2038917 - RNA, 19 nt, Artificial Sequence
  Description of Artificial Sequence: Synthetic oligonucleotide
  Antisense strand to SEQ ID NO: 2038916
uaaagacacaauagguuaa

SEQ ID NO: 2038918 - RNA, 19 nt, Artificial Sequence
  Description of Artificial Sequence: Synthetic oligonucleotide
  Sense strand starting at position 2989 of SEQ ID NO: 1881366
aaaugucugucuuugauug

SEQ ID NO: 2038919 - RNA, 19 nt, Artificial Sequence
  Description of Artificial Sequence: Synthetic oligonucleotide
  Antisense strand to SEQ ID NO: 2038918
caaucaaagacagacauuu

SEQ ID NO: 2038920 - RNA, 19 nt, Artificial Sequence
  Description of Artificial Sequence: Synthetic oligonucleotide
  Sense strand starting at position 2990 of SEQ ID NO: 1881366
aaugucugucuuugauuga

SEQ ID NO: 2038921 - RNA, 19 nt, Artificial Sequence
  Description of Artificial Sequence: Synthetic oligonucleotide
  Antisense strand to SEQ ID NO: 2038920
ucaaucaaagacagacauu

SEQ ID NO: 2038922 - RNA, 19 nt, Artificial Sequence
  Description of Artificial Sequence: Synthetic oligonucleotide
  Sense strand starting at position 3037 of SEQ ID NO: 1881366
uugucaauaugguugaguu

SEQ ID NO: 2038923 - RNA, 19 nt, Artificial Sequence
  Description of Artificial Sequence: Synthetic oligonucleotide
  Antisense strand to SEQ ID NO: 2038922
aacucaaccauauugacaa

SEQ ID NO: 2038924 - RNA, 19 nt, Artificial Sequence
  Description of Artificial Sequence: Synthetic oligonucleotide
  Sense strand starting at position 3039 of SEQ ID NO: 1881366
gucaauaugguugaguuua

SEQ ID NO: 2038925 - RNA, 19 nt, Artificial Sequence
  Description of Artificial Sequence: Synthetic oligonucleotide
  Antisense strand to SEQ ID NO: 2038924
uaaacucaaccauauugac

SEQ ID NO: 2038926 - RNA, 19 nt, Artificial Sequence
  Description of Artificial Sequence: Synthetic oligonucleotide
  Sense strand starting at position 3041 of SEQ ID NO: 1881366
caauaugguugaguuuaaa

SEQ ID NO: 2038927 - RNA, 19 nt, Artificial Sequence
  Description of Artificial Sequence: Synthetic oligonucleotide
  Antisense strand to SEQ ID NO: 2038926
uuuaaacucaaccauauug

SEQ ID NO: 2038928 - RNA, 19 nt, Artificial Sequence
  Description of Artificial Sequence: Synthetic oligonucleotide
  Sense strand starting at position 3053 of SEQ ID NO: 1881366
guuuaaaccuaccuaguuu

SEQ ID NO: 2038929 - RNA, 19 nt, Artificial Sequence
  Description of Artificial Sequence: Synthetic oligonucleotide
  Antisense strand to SEQ ID NO: 2038928
aaacuagguagguuuaaac

SEQ ID NO: 2038930 - RNA, 19 nt, Artificial Sequence
  Description of Artificial Sequence: Synthetic oligonucleotide
  Sense strand starting at position 3317 of SEQ ID NO: 1881366
auacuacuguugucauaca

SEQ ID NO: 2038931 - RNA, 19 nt, Artificial Sequence
  Description of Artificial Sequence: Synthetic oligonucleotide
  Antisense strand to SEQ ID NO: 2038930
uguaugacaacaguaguau

SEQ ID NO: 2038932 - RNA, 19 nt, Artificial Sequence
  Description of Artificial Sequence: Synthetic oligonucleotide
  Sense strand starting at position 3574 of SEQ ID NO: 1881366
aagauauuaucauugggua

SEQ ID NO: 2038933 - RNA, 19 nt, Artificial Sequence
  Description of Artificial Sequence: Synthetic oligonucleotide
  Antisense strand to SEQ ID NO: 2038932
uacccaaugauaauaucuu

SEQ ID NO: 2038934 - RNA, 19 nt, Artificial Sequence
  Description of Artificial Sequence: Synthetic oligonucleotide
  Sense strand starting at position 3575 of SEQ ID NO: 1881366
agauauuaucauuggguau

SEQ ID NO: 2038935 - RNA, 19 nt, Artificial Sequence
  Description of Artificial Sequence: Synthetic oligonucleotide
  Antisense strand to SEQ ID NO: 2038934
auacccaaugauaauaucu

SEQ ID NO: 2038936 - RNA, 19 nt, Artificial Sequence
  Description of Artificial Sequence: Synthetic oligonucleotide
  Sense strand starting at position 3664 of SEQ ID NO: 1881366
uguauucgugugagaagua

SEQ ID NO: 2038937 - RNA, 19 nt, Artificial Sequence
  Description of Artificial Sequence: Synthetic oligonucleotide
  Antisense strand to SEQ ID NO: 2038936
uacuucucacacgaauaca

SEQ ID NO: 2038938 - RNA, 19 nt, Artificial Sequence
  Description of Artificial Sequence: Synthetic oligonucleotide
  Sense strand starting at position 3669 of SEQ ID NO: 1881366
ucgugugagaaguauugga

SEQ ID NO: 2038939 - RNA, 19 nt, Artificial Sequence
  Description of Artificial Sequence: Synthetic oligonucleotide
  Antisense strand to SEQ ID NO: 2038938
uccaauacuucucacacga

SEQ ID NO: 2038940 - RNA, 19 nt, Artificial Sequence
  Description of Artificial Sequence: Synthetic oligonucleotide
  Sense strand starting at position 3803 of SEQ ID NO: 1881366
ggcaauaccucucuaggga

SEQ ID NO: 2038941 - RNA, 19 nt, Artificial Sequence
  Description of Artificial Sequence: Synthetic oligonucleotide
  Antisense strand to SEQ ID NO: 2038940
ucccuagagagguauugcc

SEQ ID NO: 2038942 - RNA, 19 nt, Artificial Sequence
  Description of Artificial Sequence: Synthetic oligonucleotide
  Sense strand starting at position 3951 of SEQ ID NO: 1881366
aguacugaucaguacucaa

SEQ ID NO: 2038943 - RNA, 19 nt, Artificial Sequence
  Description of Artificial Sequence: Synthetic oligonucleotide
  Antisense strand to SEQ ID NO: 2038942
uugaguacugaucaguacu

SEQ ID NO: 2038944 - RNA, 19 nt, Artificial Sequence
  Description of Artificial Sequence: Synthetic oligonucleotide
  Sense strand starting at position 288 of SEQ ID NO: 1881367
cuuauauacccagguaugu

SEQ ID NO: 2038945 - RNA, 19 nt, Artificial Sequence
  Description of Artificial Sequence: Synthetic oligonucleotide
  Antisense strand to SEQ ID NO: 2038944
acauaccuggguauauaag

SEQ ID NO: 2038946 - RNA, 19 nt, Artificial Sequence
  Description of Artificial Sequence: Synthetic oligonucleotide
  Sense strand starting at position 342 of SEQ ID NO: 1881367
cugcuuagcuggucucuaa

SEQ ID NO: 2038947 - RNA, 19 nt, Artificial Sequence
  Description of Artificial Sequence: Synthetic oligonucleotide
  Antisense strand to SEQ ID NO: 2038946
uuagagaccagcuaagcag

SEQ ID NO: 2038948 - RNA, 19 nt, Artificial Sequence
  Description of Artificial Sequence: Synthetic oligonucleotide
  Sense strand starting at position 345 of SEQ ID NO: 1881367
cuuagcuggucucuaaacu

SEQ ID NO: 2038949 - RNA, 19 nt, Artificial Sequence
  Description of Artificial Sequence: Synthetic oligonucleotide
  Antisense strand to SEQ ID NO: 2038948
aguuuagagaccagcuaag

SEQ ID NO: 2038950 - RNA, 19 nt, Artificial Sequence
  Description of Artificial Sequence: Synthetic oligonucleotide
  Sense strand starting at position 346 of SEQ ID NO: 1881367
uuagcuggucucuaaacuu

SEQ ID NO: 2038951 - RNA, 19 nt, Artificial Sequence
  Description of Artificial Sequence: Synthetic oligonucleotide
  Antisense strand to SEQ ID NO: 2038950
aaguuuagagaccagcuaa

SEQ ID NO: 2038952 - RNA, 19 nt, Artificial Sequence
  Description of Artificial Sequence: Synthetic oligonucleotide
  Sense strand starting at position 694 of SEQ ID NO: 1881367
guagcugagggaugagaau

SEQ ID NO: 2038953 - RNA, 19 nt, Artificial Sequence
  Description of Artificial Sequence: Synthetic oligonucleotide
  Antisense strand to SEQ ID NO: 2038952
auucucaucccucagcuac

SEQ ID NO: 2038954 - RNA, 19 nt, Artificial Sequence
  Description of Artificial Sequence: Synthetic oligonucleotide
  Sense strand starting at position 777 of SEQ ID NO: 1881367
ugacaaagacuaugucuca

SEQ ID NO: 2038955 - RNA, 19 nt, Artificial Sequence
  Description of Artificial Sequence: Synthetic oligonucleotide
  Antisense strand to SEQ ID NO: 2038954
ugagacauagucuuuguca

SEQ ID NO: 2038956 - RNA, 19 nt, Artificial Sequence
  Description of Artificial Sequence: Synthetic oligonucleotide
  Sense strand starting at position 913 of SEQ ID NO: 1881367
ggugaagugagcuguguga

SEQ ID NO: 2038957 - RNA, 19 nt, Artificial Sequence
  Description of Artificial Sequence: Synthetic oligonucleotide
  Antisense strand to SEQ ID NO: 2038956
ucacacagcucacuucacc

SEQ ID NO: 2038958 - RNA, 19 nt, Artificial Sequence
  Description of Artificial Sequence: Synthetic oligonucleotide
  Sense strand starting at position 917 of SEQ ID NO: 1881367
aagugagcugugugagcaa

SEQ ID NO: 2038959 - RNA, 19 nt, Artificial Sequence
  Description of Artificial Sequence: Synthetic oligonucleotide
  Antisense strand to SEQ ID NO: 2038958
uugcucacacagcucacuu

SEQ ID NO: 2038960 - RNA, 19 nt, Artificial Sequence
  Description of Artificial Sequence: Synthetic oligonucleotide
  Sense strand starting at position 982 of SEQ ID NO: 1881367
ugcaguuaguuucuuaaag

SEQ ID NO: 2038961 - RNA, 19 nt, Artificial Sequence
  Description of Artificial Sequence: Synthetic oligonucleotide
  Antisense strand to SEQ ID NO: 2038960
cuuuaagaaacuaacugca

SEQ ID NO: 2038962 - RNA, 19 nt, Artificial Sequence
  Description of Artificial Sequence: Synthetic oligonucleotide
  Sense strand starting at position 983 of SEQ ID NO: 1881367
gcaguuaguuucuuaaagg

SEQ ID NO: 2038963 - RNA, 19 nt, Artificial Sequence
  Description of Artificial Sequence: Synthetic oligonucleotide
  Antisense strand to SEQ ID NO: 2038962
ccuuuaagaaacuaacugc

SEQ ID NO: 2038964 - RNA, 19 nt, Artificial Sequence
  Description of Artificial Sequence: Synthetic oligonucleotide
  Sense strand starting at position 984 of SEQ ID NO: 1881367
caguuaguuucuuaaaggu

SEQ ID NO: 2038965 - RNA, 19 nt, Artificial Sequence
  Description of Artificial Sequence: Synthetic oligonucleotide
  Antisense strand to SEQ ID NO: 2038964
accuuuaagaaacuaacug

SEQ ID NO: 2038966 - RNA, 19 nt, Artificial Sequence
  Description of Artificial Sequence: Synthetic oligonucleotide
  Sense strand starting at position 1017 of SEQ ID NO: 1881367
gucuacaaaucuugaauug

SEQ ID NO: 2038967 - RNA, 19 nt, Artificial Sequence
  Description of Artificial Sequence: Synthetic oligonucleotide
  Antisense strand to SEQ ID NO: 2038966
caauucaagauuuguagac

SEQ ID NO: 2038968 - RNA, 19 nt, Artificial Sequence
  Description of Artificial Sequence: Synthetic oligonucleotide
  Sense strand starting at position 1026 of SEQ ID NO: 1881367
ucuugaauuguauaugcaa

SEQ ID NO: 2038969 - RNA, 19 nt, Artificial Sequence
  Description of Artificial Sequence: Synthetic oligonucleotide
  Antisense strand to SEQ ID NO: 2038968
uugcauauacaauucaaga

SEQ ID NO: 2038970 - RNA, 19 nt, Artificial Sequence
  Description of Artificial Sequence: Synthetic oligonucleotide
  Sense strand starting at position 1029 of SEQ ID NO: 1881367
ugaauuguauaugcaaaca

SEQ ID NO: 2038971 - RNA, 19 nt, Artificial Sequence
  Description of Artificial Sequence: Synthetic oligonucleotide
  Antisense strand to SEQ ID NO: 2038970
uguuugcauauacaauuca

SEQ ID NO: 2038972 - RNA, 19 nt, Artificial Sequence
  Description of Artificial Sequence: Synthetic oligonucleotide
  Sense strand starting at position 1039 of SEQ ID NO: 1881367
augcaaacacuuuguaaug

SEQ ID NO: 2038973 - RNA, 19 nt, Artificial Sequence
  Description of Artificial Sequence: Synthetic oligonucleotide
  Antisense strand to SEQ ID NO: 2038972
cauuacaaaguguuugcau

SEQ ID NO: 2038974 - RNA, 19 nt, Artificial Sequence
  Description of Artificial Sequence: Synthetic oligonucleotide
  Sense strand starting at position 1040 of SEQ ID NO: 1881367
ugcaaacacuuuguaauga

SEQ ID NO: 2038975 - RNA, 19 nt, Artificial Sequence
  Description of Artificial Sequence: Synthetic oligonucleotide
  Antisense strand to SEQ ID NO: 2038974
ucauuacaaaguguuugca

SEQ ID NO: 2038976 - RNA, 19 nt, Artificial Sequence
  Description of Artificial Sequence: Synthetic oligonucleotide
  Sense strand starting at position 1041 of SEQ ID NO: 1881367
gcaaacacuuuguaaugaa

SEQ ID NO: 2038977 - RNA, 19 nt, Artificial Sequence
  Description of Artificial Sequence: Synthetic oligonucleotide
  Antisense strand to SEQ ID NO: 2038976
uucauuacaaaguguuugc

SEQ ID NO: 2038978 - RNA, 19 nt, Artificial Sequence
  Description of Artificial Sequence: Synthetic oligonucleotide
  Sense strand starting at position 1144 of SEQ ID NO: 1881367
guacauggguuaucaauaa

SEQ ID NO: 2038979 - RNA, 19 nt, Artificial Sequence
  Description of Artificial Sequence: Synthetic oligonucleotide
  Antisense strand to SEQ ID NO: 2038978
uuauugauaacccauguac

SEQ ID NO: 2038980 - RNA, 19 nt, Artificial Sequence
  Description of Artificial Sequence: Synthetic oligonucleotide
  Sense strand starting at position 1148 of SEQ ID NO: 1881367
auggguuaucaauaagucu

SEQ ID NO: 2038981 - RNA, 19 nt, Artificial Sequence
  Description of Artificial Sequence: Synthetic oligonucleotide
  Antisense strand to SEQ ID NO: 2038980
agacuuauugauaacccau

SEQ ID NO: 2038982 - RNA, 19 nt, Artificial Sequence
  Description of Artificial Sequence: Synthetic oligonucleotide
  Sense strand starting at position 1427 of SEQ ID NO: 1881367
cugaaacaucagcguucuu

SEQ ID NO: 2038983 - RNA, 19 nt, Artificial Sequence
  Description of Artificial Sequence: Synthetic oligonucleotide
  Antisense strand to SEQ ID NO: 2038982
aagaacgcugauguuucag

SEQ ID NO: 2038984 - RNA, 19 nt, Artificial Sequence
  Description of Artificial Sequence: Synthetic oligonucleotide
  Sense strand starting at position 2330 of SEQ ID NO: 1881367
aguuauuauugggucuguu

SEQ ID NO: 2038985 - RNA, 19 nt, Artificial Sequence
  Description of Artificial Sequence: Synthetic oligonucleotide
  Antisense strand to SEQ ID NO: 2038984
aacagacccaauaauaacu

SEQ ID NO: 2038986 - RNA, 19 nt, Artificial Sequence
  Description of Artificial Sequence: Synthetic oligonucleotide
  Sense strand starting at position 2417 of SEQ ID NO: 1881367
agguaauacuugcaaguuu

SEQ ID NO: 2038987 - RNA, 19 nt, Artificial Sequence
  Description of Artificial Sequence: Synthetic oligonucleotide
  Antisense strand to SEQ ID NO: 2038986
aaacuugcaaguauuaccu

SEQ ID NO: 2038988 - RNA, 19 nt, Artificial Sequence
  Description of Artificial Sequence: Synthetic oligonucleotide
  Sense strand starting at position 2810 of SEQ ID NO: 1881367
uguuguaaguguuucauga

SEQ ID NO: 2038989 - RNA, 19 nt, Artificial Sequence
  Description of Artificial Sequence: Synthetic oligonucleotide
  Antisense strand to SEQ ID NO: 2038988
ucaugaaacacuuacaaca

SEQ ID NO: 2038990 - RNA, 19 nt, Artificial Sequence
  Description of Artificial Sequence: Synthetic oligonucleotide
  Sense strand starting at position 2832 of SEQ ID NO: 1881367
ccuggagaccucugauaau

SEQ ID NO: 2038991 - RNA, 19 nt, Artificial Sequence
  Description of Artificial Sequence: Synthetic oligonucleotide
  Antisense strand to SEQ ID NO: 2038990
auuaucagaggucuccagg

SEQ ID NO: 2038992 - RNA, 19 nt, Artificial Sequence
  Description of Artificial Sequence: Synthetic oligonucleotide
  Sense strand starting at position 2921 of SEQ ID NO: 1881367
augggaaaugcucacuggu

SEQ ID NO: 2038993 - RNA, 19 nt, Artificial Sequence
  Description of Artificial Sequence: Synthetic oligonucleotide
  Antisense strand to SEQ ID NO: 2038992
accagugagcauuucccau

SEQ ID NO: 2038994 - RNA, 19 nt, Artificial Sequence
  Description of Artificial Sequence: Synthetic oligonucleotide
  Sense strand starting at position 2930 of SEQ ID NO: 1881367
gcucacuggugguaacaga

SEQ ID NO: 2038995 - RNA, 19 nt, Artificial Sequence
  Description of Artificial Sequence: Synthetic oligonucleotide
  Antisense strand to SEQ ID NO: 2038994
ucuguuaccaccagugagc

SEQ ID NO: 2038996 - RNA, 19 nt, Artificial Sequence
  Description of Artificial Sequence: Synthetic oligonucleotide
  Sense strand starting at position 3060 of SEQ ID NO: 1881367
ccuggaaugcuuuaucugu

SEQ ID NO: 2038997 - RNA, 19 nt, Artificial Sequence
  Description of Artificial Sequence: Synthetic oligonucleotide
  Antisense strand to SEQ ID NO: 2038996
acagauaaagcauuccagg

SEQ ID NO: 2038998 - RNA, 19 nt, Artificial Sequence
  Description of Artificial Sequence: Synthetic oligonucleotide
  Sense strand starting at position 3067 of SEQ ID NO: 1881367
ugcuuuaucuguccuggga

SEQ ID NO: 2038999 - RNA, 19 nt, Artificial Sequence
  Description of Artificial Sequence: Synthetic oligonucleotide
  Antisense strand to SEQ ID NO: 2038998
ucccaggacagauaaagca

SEQ ID NO: 2039000 - RNA, 19 nt, Artificial Sequence
  Description of Artificial Sequence: Synthetic oligonucleotide
  Sense strand starting at position 3070 of SEQ ID NO: 1881367
uuuaucuguccugggagca

SEQ ID NO: 2039001 - RNA, 19 nt, Artificial Sequence
  Description of Artificial Sequence: Synthetic oligonucleotide
  Antisense strand to SEQ ID NO: 2039000
ugcucccaggacagauaaa

SEQ ID NO: 2039002 - RNA, 19 nt, Artificial Sequence
  Description of Artificial Sequence: Synthetic oligonucleotide
  Sense strand starting at position 3071 of SEQ ID NO: 1881367
uuaucuguccugggagcaa

SEQ ID NO: 2039003 - RNA, 19 nt, Artificial Sequence
  Description of Artificial Sequence: Synthetic oligonucleotide
  Antisense strand to SEQ ID NO: 2039002
uugcucccaggacagauaa

SEQ ID NO: 2039004 - RNA, 19 nt, Artificial Sequence
  Description of Artificial Sequence: Synthetic oligonucleotide
  Sense strand starting at position 3365 of SEQ ID NO: 1881367
ggcggagguugaucucagu

SEQ ID NO: 2039005 - RNA, 19 nt, Artificial Sequence
  Description of Artificial Sequence: Synthetic oligonucleotide
  Antisense strand to SEQ ID NO: 2039004
acugagaucaaccuccgcc

SEQ ID NO: 2039006 - RNA, 19 nt, Artificial Sequence
  Description of Artificial Sequence: Synthetic oligonucleotide
  Sense strand starting at position 3466 of SEQ ID NO: 1881367
gcagaauggaucugauggu

SEQ ID NO: 2039007 - RNA, 19 nt, Artificial Sequence
  Description of Artificial Sequence: Synthetic oligonucleotide
  Antisense strand to SEQ ID NO: 2039006
accaucagauccauucugc

SEQ ID NO: 2039008 - RNA, 19 nt, Artificial Sequence
  Description of Artificial Sequence: Synthetic oligonucleotide
  Sense strand starting at position 3467 of SEQ ID NO: 1881367
cagaauggaucugaugguu

SEQ ID NO: 2039009 - RNA, 19 nt, Artificial Sequence
  Description of Artificial Sequence: Synthetic oligonucleotide
  Antisense strand to SEQ ID NO: 2039008
aaccaucagauccauucug

SEQ ID NO: 2039010 - RNA, 19 nt, Artificial Sequence
  Description of Artificial Sequence: Synthetic oligonucleotide
  Sense strand starting at position 3470 of SEQ ID NO: 1881367
aauggaucugaugguuauu

SEQ ID NO: 2039011 - RNA, 19 nt, Artificial Sequence
  Description of Artificial Sequence: Synthetic oligonucleotide
  Antisense strand to SEQ ID NO: 2039010
aauaaccaucagauccauu

SEQ ID NO: 2039012 - RNA, 19 nt, Artificial Sequence
  Description of Artificial Sequence: Synthetic oligonucleotide
  Sense strand starting at position 3512 of SEQ ID NO: 1881367
auacauguuaauuguggga

SEQ ID NO: 2039013 - RNA, 19 nt, Artificial Sequence
  Description of Artificial Sequence: Synthetic oligonucleotide
  Antisense strand to SEQ ID NO: 2039012
ucccacaauuaacauguau

SEQ ID NO: 2039014 - RNA, 19 nt, Artificial Sequence
  Description of Artificial Sequence: Synthetic oligonucleotide
  Sense strand starting at position 3514 of SEQ ID NO: 1881367
acauguuaauugugggaaa

SEQ ID NO: 2039015 - RNA, 19 nt, Artificial Sequence
  Description of Artificial Sequence: Synthetic oligonucleotide
  Antisense strand to SEQ ID NO: 2039014
uuucccacaauuaacaugu

SEQ ID NO: 2039016 - RNA, 19 nt, Artificial Sequence
  Description of Artificial Sequence: Synthetic oligonucleotide
  Sense strand starting at position 3565 of SEQ ID NO: 1881367
ccacaaguuaagcgugaga

SEQ ID NO: 2039017 - RNA, 19 nt, Artificial Sequence
  Description of Artificial Sequence: Synthetic oligonucleotide
  Antisense strand to SEQ ID NO: 2039016
ucucacgcuuaacuugugg

SEQ ID NO: 2039018 - RNA, 19 nt, Artificial Sequence
  Description of Artificial Sequence: Synthetic oligonucleotide
  Sense strand starting at position 3567 of SEQ ID NO: 1881367
acaaguuaagcgugagaaa

SEQ ID NO: 2039019 - RNA, 19 nt, Artificial Sequence
  Description of Artificial Sequence: Synthetic oligonucleotide
  Antisense strand to SEQ ID NO: 2039018
uuucucacgcuuaacuugu

SEQ ID NO: 2039020 - RNA, 19 nt, Artificial Sequence
  Description of Artificial Sequence: Synthetic oligonucleotide
  Sense strand starting at position 3804 of SEQ ID NO: 1881367
ggaagaaucgccugaaccu

SEQ ID NO: 2039021 - RNA, 19 nt, Artificial Sequence
  Description of Artificial Sequence: Synthetic oligonucleotide
  Antisense strand to SEQ ID NO: 2039020
agguucaggcgauucuucc

SEQ ID NO: 2039022 - RNA, 19 nt, Artificial Sequence
  Description of Artificial Sequence: Synthetic oligonucleotide
  Sense strand starting at position 3835 of SEQ ID NO: 1881367
guugcagugaauugagcaa

SEQ ID NO: 2039023 - RNA, 19 nt, Artificial Sequence
  Description of Artificial Sequence: Synthetic oligonucleotide
  Antisense strand to SEQ ID NO: 2039022
uugcucaauucacugcaac

SEQ ID NO: 2039024 - RNA, 19 nt, Artificial Sequence
  Description of Artificial Sequence: Synthetic oligonucleotide
  Sense strand starting at position 21 of SEQ ID NO: 1881370
aaaugugucuguuugauag

SEQ ID NO: 2039025 - RNA, 19 nt, Artificial Sequence
  Description of Artificial Sequence: Synthetic oligonucleotide
  Antisense strand to SEQ ID NO: 2039024
cuaucaaacagacacauuu

SEQ ID NO: 2039026 - RNA, 19 nt, Artificial Sequence
  Description of Artificial Sequence: Synthetic oligonucleotide
  Sense strand starting at position 206 of SEQ ID NO: 1881370
gaggcaauaucuuuaggaa

SEQ ID NO: 2039027 - RNA, 19 nt, Artificial Sequence
  Description of Artificial Sequence: Synthetic oligonucleotide
  Antisense strand to SEQ ID NO: 2039026
uuccuaaagauauugccuc

SEQ ID NO: 2039028 - RNA, 19 nt, Artificial Sequence
  Description of Artificial Sequence: Synthetic oligonucleotide
  Sense strand starting at position 317 of SEQ ID NO: 1881370
cuggaaacccuuuguagua

SEQ ID NO: 2039029 - RNA, 19 nt, Artificial Sequence
  Description of Artificial Sequence: Synthetic oligonucleotide
  Antisense strand to SEQ ID NO: 2039028
uacuacaaaggguuuccag

SEQ ID NO: 2039030 - RNA, 19 nt, Artificial Sequence
  Description of Artificial Sequence: Synthetic oligonucleotide
  Sense strand starting at position 318 of SEQ ID NO: 1881370
uggaaacccuuuguaguaa

SEQ ID NO: 2039031 - RNA, 19 nt, Artificial Sequence
  Description of Artificial Sequence: Synthetic oligonucleotide
  Antisense strand to SEQ ID NO: 2039030
uuacuacaaaggguuucca

SEQ ID NO: 2039032 - RNA, 19 nt, Artificial Sequence
  Description of Artificial Sequence: Synthetic oligonucleotide
  Sense strand starting at position 374 of SEQ ID NO: 1881370
cuuauaauugacugacagu

SEQ ID NO: 2039033 - RNA, 19 nt, Artificial Sequence
  Description of Artificial Sequence: Synthetic oligonucleotide
  Antisense strand to SEQ ID NO: 2039032
acugucagucaauuauaag

SEQ ID NO: 2039034 - RNA, 19 nt, Artificial Sequence
  Description of Artificial Sequence: Synthetic oligonucleotide
  Sense strand starting at position 490 of SEQ ID NO: 1881370
ggguuaagcaagcaucauc

SEQ ID NO: 2039035 - RNA, 19 nt, Artificial Sequence
  Description of Artificial Sequence: Synthetic oligonucleotide
  Antisense strand to SEQ ID NO: 2039034
gaugaugcuugcuuaaccc

SEQ ID NO: 2039036 - RNA, 19 nt, Artificial Sequence
  Description of Artificial Sequence: Synthetic oligonucleotide
  Sense strand starting at position 518 of SEQ ID NO: 1881370
uccuaauucccagguuaga

SEQ ID NO: 2039037 - RNA, 19 nt, Artificial Sequence
  Description of Artificial Sequence: Synthetic oligonucleotide
  Antisense strand to SEQ ID NO: 2039036
ucuaaccugggaauuagga

SEQ ID NO: 2039038 - RNA, 19 nt, Artificial Sequence
  Description of Artificial Sequence: Synthetic oligonucleotide
  Sense strand starting at position 627 of SEQ ID NO: 1881370
ggagaauagccuuaagugu

SEQ ID NO: 2039039 - RNA, 19 nt, Artificial Sequence
  Description of Artificial Sequence: Synthetic oligonucleotide
  Antisense strand to SEQ ID NO: 2039038
acacuuaaggcuauucucc

SEQ ID NO: 2039040 - RNA, 19 nt, Artificial Sequence
  Description of Artificial Sequence: Synthetic oligonucleotide
  Sense strand starting at position 705 of SEQ ID NO: 1881370
gauaaagguuugucuccca

SEQ ID NO: 2039041 - RNA, 19 nt, Artificial Sequence
  Description of Artificial Sequence: Synthetic oligonucleotide
  Antisense strand to SEQ ID NO: 2039040
ugggagacaaaccuuuauc

SEQ ID NO: 2039042 - RNA, 19 nt, Artificial Sequence
  Description of Artificial Sequence: Synthetic oligonucleotide
  Sense strand starting at position 735 of SEQ ID NO: 1881370
ggucaucuugcuuaaguua

SEQ ID NO: 2039043 - RNA, 19 nt, Artificial Sequence
  Description of Artificial Sequence: Synthetic oligonucleotide
  Antisense strand to SEQ ID NO: 2039042
uaacuuaagcaagaugacc

SEQ ID NO: 2039044 - RNA, 19 nt, Artificial Sequence
  Description of Artificial Sequence: Synthetic oligonucleotide
  Sense strand starting at position 744 of SEQ ID NO: 1881370
gcuuaaguuaaggagacuu

SEQ ID NO: 2039045 - RNA, 19 nt, Artificial Sequence
  Description of Artificial Sequence: Synthetic oligonucleotide
  Antisense strand to SEQ ID NO: 2039044
aagucuccuuaacuuaagc

SEQ ID NO: 2039046 - RNA, 19 nt, Artificial Sequence
  Description of Artificial Sequence: Synthetic oligonucleotide
  Sense strand starting at position 837 of SEQ ID NO: 1881370
aggcauauuucgccuauga

SEQ ID NO: 2039047 - RNA, 19 nt, Artificial Sequence
  Description of Artificial Sequence: Synthetic oligonucleotide
  Antisense strand to SEQ ID NO: 2039046
ucauaggcgaaauaugccu

SEQ ID NO: 2039048 - RNA, 19 nt, Artificial Sequence
  Description of Artificial Sequence: Synthetic oligonucleotide
  Sense strand starting at position 958 of SEQ ID NO: 1881370
guuaguaaauuguuaccca

SEQ ID NO: 2039049 - RNA, 19 nt, Artificial Sequence
  Description of Artificial Sequence: Synthetic oligonucleotide
  Antisense strand to SEQ ID NO: 2039048
uggguaacaauuuacuaac

SEQ ID NO: 2039050 - RNA, 19 nt, Artificial Sequence
  Description of Artificial Sequence: Synthetic oligonucleotide
  Sense strand starting at position 961 of SEQ ID NO: 1881370
aguaaauuguuacccauaa

SEQ ID NO: 2039051 - RNA, 19 nt, Artificial Sequence
  Description of Artificial Sequence: Synthetic oligonucleotide
  Antisense strand to SEQ ID NO: 2039050
uuauggguaacaauuuacu

SEQ ID NO: 2039052 - RNA, 19 nt, Artificial Sequence
  Description of Artificial Sequence: Synthetic oligonucleotide
  Sense strand starting at position 962 of SEQ ID NO: 1881370
guaaauuguuacccauaaa

SEQ ID NO: 2039053 - RNA, 19 nt, Artificial Sequence
  Description of Artificial Sequence: Synthetic oligonucleotide
  Antisense strand to SEQ ID NO: 2039052
uuuauggguaacaauuuac

SEQ ID NO: 2039054 - RNA, 19 nt, Artificial Sequence
  Description of Artificial Sequence: Synthetic oligonucleotide
  Sense strand starting at position 1054 of SEQ ID NO: 1881370
acacguugagcgcuguauu

SEQ ID NO: 2039055 - RNA, 19 nt, Artificial Sequence
  Description of Artificial Sequence: Synthetic oligonucleotide
  Antisense strand to SEQ ID NO: 2039054
aauacagcgcucaacgugu

SEQ ID NO: 2039056 - RNA, 19 nt, Artificial Sequence
  Description of Artificial Sequence: Synthetic oligonucleotide
  Sense strand starting at position 1233 of SEQ ID NO: 1881370
gcaagugagaauuauguac

SEQ ID NO: 2039057 - RNA, 19 nt, Artificial Sequence
  Description of Artificial Sequence: Synthetic oligonucleotide
  Antisense strand to SEQ ID NO: 2039056
guacauaauucucacuugc

SEQ ID NO: 2039058 - RNA, 19 nt, Artificial Sequence
  Description of Artificial Sequence: Synthetic oligonucleotide
  Sense strand starting at position 1254 of SEQ ID NO: 1881370
ucauguugaggucaauuga

SEQ ID NO: 2039059 - RNA, 19 nt, Artificial Sequence
  Description of Artificial Sequence: Synthetic oligonucleotide
  Antisense strand to SEQ ID NO: 2039058
ucaauugaccucaacauga

SEQ ID NO: 2039060 - RNA, 19 nt, Artificial Sequence
  Description of Artificial Sequence: Synthetic oligonucleotide
  Sense strand starting at position 1393 of SEQ ID NO: 1881370
gucaauuacuuacuggaau

SEQ ID NO: 2039061 - RNA, 19 nt, Artificial Sequence
  Description of Artificial Sequence: Synthetic oligonucleotide
  Antisense strand to SEQ ID NO: 2039060
auuccaguaaguaauugac

SEQ ID NO: 2039062 - RNA, 19 nt, Artificial Sequence
  Description of Artificial Sequence: Synthetic oligonucleotide
  Sense strand starting at position 1521 of SEQ ID NO: 1881370
agugauguacugcaaaguu

SEQ ID NO: 2039063 - RNA, 19 nt, Artificial Sequence
  Description of Artificial Sequence: Synthetic oligonucleotide
  Antisense strand to SEQ ID NO: 2039062
aacuuugcaguacaucacu

SEQ ID NO: 2039064 - RNA, 19 nt, Artificial Sequence
  Description of Artificial Sequence: Synthetic oligonucleotide
  Sense strand starting at position 1565 of SEQ ID NO: 1881370
cagagaaguugugcaaaua

SEQ ID NO: 2039065 - RNA, 19 nt, Artificial Sequence
  Description of Artificial Sequence: Synthetic oligonucleotide
  Antisense strand to SEQ ID NO: 2039064
uauuugcacaacuucucug

SEQ ID NO: 2039066 - RNA, 19 nt, Artificial Sequence
  Description of Artificial Sequence: Synthetic oligonucleotide
  Sense strand starting at position 2038 of SEQ ID NO: 1881370
gaaaccaugggcuggauua

SEQ ID NO: 2039067 - RNA, 19 nt, Artificial Sequence
  Description of Artificial Sequence: Synthetic oligonucleotide
  Antisense strand to SEQ ID NO: 2039066
uaauccagcccaugguuuc

SEQ ID NO: 2039068 - RNA, 19 nt, Artificial Sequence
  Description of Artificial Sequence: Synthetic oligonucleotide
  Sense strand starting at position 2208 of SEQ ID NO: 1881370
augaaaucuugcuuacagc

SEQ ID NO: 2039069 - RNA, 19 nt, Artificial Sequence
  Description of Artificial Sequence: Synthetic oligonucleotide
  Antisense strand to SEQ ID NO: 2039068
gcuguaagcaagauuucau

SEQ ID NO: 2039070 - RNA, 19 nt, Artificial Sequence
  Description of Artificial Sequence: Synthetic oligonucleotide
  Sense strand starting at position 2209 of SEQ ID NO: 1881370
ugaaaucuugcuuacagca

SEQ ID NO: 2039071 - RNA, 19 nt, Artificial Sequence
  Description of Artificial Sequence: Synthetic oligonucleotide
  Antisense strand to SEQ ID NO: 2039070
ugcuguaagcaagauuuca

SEQ ID NO: 2039072 - RNA, 19 nt, Artificial Sequence
  Description of Artificial Sequence: Synthetic oligonucleotide
  Sense strand starting at position 2445 of SEQ ID NO: 1881370
aaggcaugagugcaaagua

SEQ ID NO: 2039073 - RNA, 19 nt, Artificial Sequence
  Description of Artificial Sequence: Synthetic oligonucleotide
  Antisense strand to SEQ ID NO: 2039072
uacuuugcacucaugccuu

SEQ ID NO: 2039074 - RNA, 19 nt, Artificial Sequence
  Description of Artificial Sequence: Synthetic oligonucleotide
  Sense strand starting at position 2484 of SEQ ID NO: 1881370
aauacauguguuggguuau

SEQ ID NO: 2039075 - RNA, 19 nt, Artificial Sequence
  Description of Artificial Sequence: Synthetic oligonucleotide
  Antisense strand to SEQ ID NO: 2039074
auaacccaacacauguauu

SEQ ID NO: 2039076 - RNA, 19 nt, Artificial Sequence
  Description of Artificial Sequence: Synthetic oligonucleotide
  Sense strand starting at position 2682 of SEQ ID NO: 1881370
agaaguuaugccuauuaac

SEQ ID NO: 2039077 - RNA, 19 nt, Artificial Sequence
  Description of Artificial Sequence: Synthetic oligonucleotide
  Antisense strand to SEQ ID NO: 2039076
guuaauaggcauaacuucu

SEQ ID NO: 2039078 - RNA, 19 nt, Artificial Sequence
  Description of Artificial Sequence: Synthetic oligonucleotide
  Sense strand starting at position 2785 of SEQ ID NO: 1881370
cacagaagugauuguuccu

SEQ ID NO: 2039079 - RNA, 19 nt, Artificial Sequence
  Description of Artificial Sequence: Synthetic oligonucleotide
  Antisense strand to SEQ ID NO: 2039078
aggaacaaucacuucugug

SEQ ID NO: 2039080 - RNA, 19 nt, Artificial Sequence
  Description of Artificial Sequence: Synthetic oligonucleotide
  Sense strand starting at position 2790 of SEQ ID NO: 1881370
aagugauuguuccuaccag

SEQ ID NO: 2039081 - RNA, 19 nt, Artificial Sequence
  Description of Artificial Sequence: Synthetic oligonucleotide
  Antisense strand to SEQ ID NO: 2039080
cugguaggaacaaucacuu

SEQ ID NO: 2039082 - RNA, 19 nt, Artificial Sequence
  Description of Artificial Sequence: Synthetic oligonucleotide
  Sense strand starting at position 2824 of SEQ ID NO: 1881370
ucugcaauugaccaauuga

SEQ ID NO: 2039083 - RNA, 19 nt, Artificial Sequence
  Description of Artificial Sequence: Synthetic oligonucleotide
  Antisense strand to SEQ ID NO: 2039082
ucaauuggucaauugcaga

SEQ ID NO: 2039084 - RNA, 19 nt, Artificial Sequence
  Description of Artificial Sequence: Synthetic oligonucleotide
  Sense strand starting at position 2845 of SEQ ID NO: 1881370
acugauugaugguuaucuu

SEQ ID NO: 2039085 - RNA, 19 nt, Artificial Sequence
  Description of Artificial Sequence: Synthetic oligonucleotide
  Antisense strand to SEQ ID NO: 2039084
aagauaaccaucaaucagu

SEQ ID NO: 2039086 - RNA, 19 nt, Artificial Sequence
  Description of Artificial Sequence: Synthetic oligonucleotide
  Sense strand starting at position 2846 of SEQ ID NO: 1881370
cugauugaugguuaucuuu

SEQ ID NO: 2039087 - RNA, 19 nt, Artificial Sequence
  Description of Artificial Sequence: Synthetic oligonucleotide
  Antisense strand to SEQ ID NO: 2039086
aaagauaaccaucaaucag

SEQ ID NO: 2039088 - RNA, 19 nt, Artificial Sequence
  Description of Artificial Sequence: Synthetic oligonucleotide
  Sense strand starting at position 2889 of SEQ ID NO: 1881370
ccaucacuauagcuaugua

SEQ ID NO: 2039089 - RNA, 19 nt, Artificial Sequence
  Description of Artificial Sequence: Synthetic oligonucleotide
  Antisense strand to SEQ ID NO: 2039088
uacauagcuauagugaugg

SEQ ID NO: 2039090 - RNA, 19 nt, Artificial Sequence
  Description of Artificial Sequence: Synthetic oligonucleotide
  Sense strand starting at position 2892 of SEQ ID NO: 1881370
ucacuauagcuauguacag

SEQ ID NO: 2039091 - RNA, 19 nt, Artificial Sequence
  Description of Artificial Sequence: Synthetic oligonucleotide
  Antisense strand to SEQ ID NO: 2039090
cuguacauagcuauaguga

SEQ ID NO: 2039092 - RNA, 19 nt, Artificial Sequence
  Description of Artificial Sequence: Synthetic oligonucleotide
  Sense strand starting at position 2909 of SEQ ID NO: 1881370
aguaaaugccuccagagua

SEQ ID NO: 2039093 - RNA, 19 nt, Artificial Sequence
  Description of Artificial Sequence: Synthetic oligonucleotide
  Antisense strand to SEQ ID NO: 2039092
uacucuggaggcauuuacu

SEQ ID NO: 2039094 - RNA, 19 nt, Artificial Sequence
  Description of Artificial Sequence: Synthetic oligonucleotide
  Sense strand starting at position 2923 of SEQ ID NO: 1881370
gaguaaauugcaugauucu

SEQ ID NO: 2039095 - RNA, 19 nt, Artificial Sequence
  Description of Artificial Sequence: Synthetic oligonucleotide
  Antisense strand to SEQ ID NO: 2039094
agaaucaugcaauuuacuc

SEQ ID NO: 2039096 - RNA, 19 nt, Artificial Sequence
  Description of Artificial Sequence: Synthetic oligonucleotide
  Sense strand starting at position 2924 of SEQ ID NO: 1881370
aguaaauugcaugauucua

SEQ ID NO: 2039097 - RNA, 19 nt, Artificial Sequence
  Description of Artificial Sequence: Synthetic oligonucleotide
  Antisense strand to SEQ ID NO: 2039096
uagaaucaugcaauuuacu

SEQ ID NO: 2039098 - RNA, 19 nt, Artificial Sequence
  Description of Artificial Sequence: Synthetic oligonucleotide
  Sense strand starting at position 3155 of SEQ ID NO: 1881370
uaggcaugugagcacagau

SEQ ID NO: 2039099 - RNA, 19 nt, Artificial Sequence
  Description of Artificial Sequence: Synthetic oligonucleotide
  Antisense strand to SEQ ID NO: 2039098
aucugugcucacaugccua

SEQ ID NO: 2039100 - RNA, 19 nt, Artificial Sequence
  Description of Artificial Sequence: Synthetic oligonucleotide
  Sense strand starting at position 3503 of SEQ ID NO: 1881370
acaugaaagcucugaaucu

SEQ ID NO: 2039101 - RNA, 19 nt, Artificial Sequence
  Description of Artificial Sequence: Synthetic oligonucleotide
  Antisense strand to SEQ ID NO: 2039100
agauucagagcuuucaugu

SEQ ID NO: 2039102 - RNA, 19 nt, Artificial Sequence
  Description of Artificial Sequence: Synthetic oligonucleotide
  Sense strand starting at position 3512 of SEQ ID NO: 1881370
cucugaaucuugucaagga

SEQ ID NO: 2039103 - RNA, 19 nt, Artificial Sequence
  Description of Artificial Sequence: Synthetic oligonucleotide
  Antisense strand to SEQ ID NO: 2039102
uccuugacaagauucagag

SEQ ID NO: 2039104 - RNA, 19 nt, Artificial Sequence
  Description of Artificial Sequence: Synthetic oligonucleotide
  Sense strand starting at position 48 of SEQ ID NO: 1881368
ugaacaaaggcuuggucaa

SEQ ID NO: 2039105 - RNA, 19 nt, Artificial Sequence
  Description of Artificial Sequence: Synthetic oligonucleotide
  Antisense strand to SEQ ID NO: 2039104
uugaccaagccuuuguuca

SEQ ID NO: 2039106 - RNA, 19 nt, Artificial Sequence
  Description of Artificial Sequence: Synthetic oligonucleotide
  Sense strand starting at position 111 of SEQ ID NO: 1881368
cuguauaucggauauugca

SEQ ID NO: 2039107 - RNA, 19 nt, Artificial Sequence
  Description of Artificial Sequence: Synthetic oligonucleotide
  Antisense strand to SEQ ID NO: 2039106
ugcaauauccgauauacag

SEQ ID NO: 2039108 - RNA, 19 nt, Artificial Sequence
  Description of Artificial Sequence: Synthetic oligonucleotide
  Sense strand starting at position 181 of SEQ ID NO: 1881368
gacggauuauuguuacauu

SEQ ID NO: 2039109 - RNA, 19 nt, Artificial Sequence
  Description of Artificial Sequence: Synthetic oligonucleotide
  Antisense strand to SEQ ID NO: 2039108
aauguaacaauaauccguc

SEQ ID NO: 2039110 - RNA, 19 nt, Artificial Sequence
  Description of Artificial Sequence: Synthetic oligonucleotide
  Sense strand starting at position 274 of SEQ ID NO: 1881368
uugccagagcaauaguauu

SEQ ID NO: 2039111 - RNA, 19 nt, Artificial Sequence
  Description of Artificial Sequence: Synthetic oligonucleotide
  Antisense strand to SEQ ID NO: 2039110
aauacuauugcucuggcaa

SEQ ID NO: 2039112 - RNA, 19 nt, Artificial Sequence
  Description of Artificial Sequence: Synthetic oligonucleotide
  Sense strand starting at position 572 of SEQ ID NO: 1881368
gacugauaccuuuggugga

SEQ ID NO: 2039113 - RNA, 19 nt, Artificial Sequence
  Description of Artificial Sequence: Synthetic oligonucleotide
  Antisense strand to SEQ ID NO: 2039112
uccaccaaagguaucaguc

SEQ ID NO: 2039114 - RNA, 19 nt, Artificial Sequence
  Description of Artificial Sequence: Synthetic oligonucleotide
  Sense strand starting at position 574 of SEQ ID NO: 1881368
cugauaccuuugguggaau

SEQ ID NO: 2039115 - RNA, 19 nt, Artificial Sequence
  Description of Artificial Sequence: Synthetic oligonucleotide
  Antisense strand to SEQ ID NO: 2039114
auuccaccaaagguaucag

SEQ ID NO: 2039116 - RNA, 19 nt, Artificial Sequence
  Description of Artificial Sequence: Synthetic oligonucleotide
  Sense strand starting at position 576 of SEQ ID NO: 1881368
gauaccuuugguggaauau

SEQ ID NO: 2039117 - RNA, 19 nt, Artificial Sequence
  Description of Artificial Sequence: Synthetic oligonucleotide
  Antisense strand to SEQ ID NO: 2039116
auauuccaccaaagguauc

SEQ ID NO: 2039118 - RNA, 19 nt, Artificial Sequence
  Description of Artificial Sequence: Synthetic oligonucleotide
  Sense strand starting at position 774 of SEQ ID NO: 1881368
guaaguacauuucuuguua

SEQ ID NO: 2039119 - RNA, 19 nt, Artificial Sequence
  Description of Artificial Sequence: Synthetic oligonucleotide
  Antisense strand to SEQ ID NO: 2039118
uaacaagaaauguacuuac

SEQ ID NO: 2039120 - RNA, 19 nt, Artificial Sequence
  Description of Artificial Sequence: Synthetic oligonucleotide
  Sense strand starting at position 881 of SEQ ID NO: 1881368
agagaauguugcuugacaa

SEQ ID NO: 2039121 - RNA, 19 nt, Artificial Sequence
  Description of Artificial Sequence: Synthetic oligonucleotide
  Antisense strand to SEQ ID NO: 2039120
uugucaagcaacauucucu

SEQ ID NO: 2039122 - RNA, 19 nt, Artificial Sequence
  Description of Artificial Sequence: Synthetic oligonucleotide
  Sense strand starting at position 882 of SEQ ID NO: 1881368
gagaauguugcuugacaaa

SEQ ID NO: 2039123 - RNA, 19 nt, Artificial Sequence
  Description of Artificial Sequence: Synthetic oligonucleotide
  Antisense strand to SEQ ID NO: 2039122
uuugucaagcaacauucuc

SEQ ID NO: 2039124 - RNA, 19 nt, Artificial Sequence
  Description of Artificial Sequence: Synthetic oligonucleotide
  Sense strand starting at position 1049 of SEQ ID NO: 1881368
ugcacaggaugucuaugau

SEQ ID NO: 2039125 - RNA, 19 nt, Artificial Sequence
  Description of Artificial Sequence: Synthetic oligonucleotide
  Antisense strand to SEQ ID NO: 2039124
aucauagacauccugugca

SEQ ID NO: 2039126 - RNA, 19 nt, Artificial Sequence
  Description of Artificial Sequence: Synthetic oligonucleotide
  Sense strand starting at position 1052 of SEQ ID NO: 1881368
acaggaugucuaugauucu

SEQ ID NO: 2039127 - RNA, 19 nt, Artificial Sequence
  Description of Artificial Sequence: Synthetic oligonucleotide
  Antisense strand to SEQ ID NO: 2039126
agaaucauagacauccugu

SEQ ID NO: 2039128 - RNA, 19 nt, Artificial Sequence
  Description of Artificial Sequence: Synthetic oligonucleotide
  Sense strand starting at position 1055 of SEQ ID NO: 1881368
ggaugucuaugauucuauu

SEQ ID NO: 2039129 - RNA, 19 nt, Artificial Sequence
  Description of Artificial Sequence: Synthetic oligonucleotide
  Antisense strand to SEQ ID NO: 2039128
aauagaaucauagacaucc

SEQ ID NO: 2039130 - RNA, 19 nt, Artificial Sequence
  Description of Artificial Sequence: Synthetic oligonucleotide
  Sense strand starting at position 1091 of SEQ ID NO: 1881368
gcacauuaaguacaguaaa

SEQ ID NO: 2039131 - RNA, 19 nt, Artificial Sequence
  Description of Artificial Sequence: Synthetic oligonucleotide
  Antisense strand to SEQ ID NO: 2039130
uuuacuguacuuaaugugc

SEQ ID NO: 2039132 - RNA, 19 nt, Artificial Sequence
  Description of Artificial Sequence: Synthetic oligonucleotide
  Sense strand starting at position 1203 of SEQ ID NO: 1881368
aguucuuaugugcauauaa

SEQ ID NO: 2039133 - RNA, 19 nt, Artificial Sequence
  Description of Artificial Sequence: Synthetic oligonucleotide
  Antisense strand to SEQ ID NO: 2039132
uuauaugcacauaagaacu

SEQ ID NO: 2039134 - RNA, 19 nt, Artificial Sequence
  Description of Artificial Sequence: Synthetic oligonucleotide
  Sense strand starting at position 1205 of SEQ ID NO: 1881368
uucuuaugugcauauaaga

SEQ ID NO: 2039135 - RNA, 19 nt, Artificial Sequence
  Description of Artificial Sequence: Synthetic oligonucleotide
  Antisense strand to SEQ ID NO: 2039134
ucuuauaugcacauaagaa

SEQ ID NO: 2039136 - RNA, 19 nt, Artificial Sequence
  Description of Artificial Sequence: Synthetic oligonucleotide
  Sense strand starting at position 1232 of SEQ ID NO: 1881368
aggcaaaguuccucaaagu

SEQ ID NO: 2039137 - RNA, 19 nt, Artificial Sequence
  Description of Artificial Sequence: Synthetic oligonucleotide
  Antisense strand to SEQ ID NO: 2039136
acuuugaggaacuuugccu

SEQ ID NO: 2039138 - RNA, 19 nt, Artificial Sequence
  Description of Artificial Sequence: Synthetic oligonucleotide
  Sense strand starting at position 1233 of SEQ ID NO: 1881368
ggcaaaguuccucaaagua

SEQ ID NO: 2039139 - RNA, 19 nt, Artificial Sequence
  Description of Artificial Sequence: Synthetic oligonucleotide
  Antisense strand to SEQ ID NO: 2039138
uacuuugaggaacuuugcc

SEQ ID NO: 2039140 - RNA, 19 nt, Artificial Sequence
  Description of Artificial Sequence: Synthetic oligonucleotide
  Sense strand starting at position 1427 of SEQ ID NO: 1881368
aaaugccaugaguauguau

SEQ ID NO: 2039141 - RNA, 19 nt, Artificial Sequence
  Description of Artificial Sequence: Synthetic oligonucleotide
  Antisense strand to SEQ ID NO: 2039140
auacauacucauggcauuu

SEQ ID NO: 2039142 - RNA, 19 nt, Artificial Sequence
  Description of Artificial Sequence: Synthetic oligonucleotide
  Sense strand starting at position 1430 of SEQ ID NO: 1881368
ugccaugaguauguauaaa

SEQ ID NO: 2039143 - RNA, 19 nt, Artificial Sequence
  Description of Artificial Sequence: Synthetic oligonucleotide
  Antisense strand to SEQ ID NO: 2039142
uuuauacauacucauggca

SEQ ID NO: 2039144 - RNA, 19 nt, Artificial Sequence
  Description of Artificial Sequence: Synthetic oligonucleotide
  Sense strand starting at position 1531 of SEQ ID NO: 1881368
agcuaaggauacuugaauu

SEQ ID NO: 2039145 - RNA, 19 nt, Artificial Sequence
  Description of Artificial Sequence: Synthetic oligonucleotide
  Antisense strand to SEQ ID NO: 2039144
aauucaaguauccuuagcu

SEQ ID NO: 2039146 - RNA, 19 nt, Artificial Sequence
  Description of Artificial Sequence: Synthetic oligonucleotide
  Sense strand starting at position 1688 of SEQ ID NO: 1881368
uacgucuggcaauaucaua

SEQ ID NO: 2039147 - RNA, 19 nt, Artificial Sequence
  Description of Artificial Sequence: Synthetic oligonucleotide
  Antisense strand to SEQ ID NO: 2039146
uaugauauugccagacgua

SEQ ID NO: 2039148 - RNA, 19 nt, Artificial Sequence
  Description of Artificial Sequence: Synthetic oligonucleotide
  Sense strand starting at position 1739 of SEQ ID NO: 1881368
ugauauuaaccuugguuau

SEQ ID NO: 2039149 - RNA, 19 nt, Artificial Sequence
  Description of Artificial Sequence: Synthetic oligonucleotide
  Antisense strand to SEQ ID NO: 2039148
auaaccaagguuaauauca

SEQ ID NO: 2039150 - RNA, 19 nt, Artificial Sequence
  Description of Artificial Sequence: Synthetic oligonucleotide
  Sense strand starting at position 2007 of SEQ ID NO: 1881368
ucagucgcauauuuaauua

SEQ ID NO: 2039151 - RNA, 19 nt, Artificial Sequence
  Description of Artificial Sequence: Synthetic oligonucleotide
  Antisense strand to SEQ ID NO: 2039150
uaauuaaauaugcgacuga

SEQ ID NO: 2039152 - RNA, 19 nt, Artificial Sequence
  Description of Artificial Sequence: Synthetic oligonucleotide
  Sense strand starting at position 2067 of SEQ ID NO: 1881368
ccaaucucucgugagucaa

SEQ ID NO: 2039153 - RNA, 19 nt, Artificial Sequence
  Description of Artificial Sequence: Synthetic oligonucleotide
  Antisense strand to SEQ ID NO: 2039152
uugacucacgagagauugg

SEQ ID NO: 2039154 - RNA, 19 nt, Artificial Sequence
  Description of Artificial Sequence: Synthetic oligonucleotide
  Sense strand starting at position 2172 of SEQ ID NO: 1881368
gaggcagaauaaucugcuu

SEQ ID NO: 2039155 - RNA, 19 nt, Artificial Sequence
  Description of Artificial Sequence: Synthetic oligonucleotide
  Antisense strand to SEQ ID NO: 2039154
aagcagauuauucugccuc

SEQ ID NO: 2039156 - RNA, 19 nt, Artificial Sequence
  Description of Artificial Sequence: Synthetic oligonucleotide
  Sense strand starting at position 2175 of SEQ ID NO: 1881368
gcagaauaaucugcuuuaa

SEQ ID NO: 2039157 - RNA, 19 nt, Artificial Sequence
  Description of Artificial Sequence: Synthetic oligonucleotide
  Antisense strand to SEQ ID NO: 2039156
uuaaagcagauuauucugc

SEQ ID NO: 2039158 - RNA, 19 nt, Artificial Sequence
  Description of Artificial Sequence: Synthetic oligonucleotide
  Sense strand starting at position 2694 of SEQ ID NO: 1881368
gcgcuaagaacuuugcugu

SEQ ID NO: 2039159 - RNA, 19 nt, Artificial Sequence
  Description of Artificial Sequence: Synthetic oligonucleotide
  Antisense strand to SEQ ID NO: 2039158
acagcaaaguucuuagcgc

SEQ ID NO: 2039160 - RNA, 19 nt, Artificial Sequence
  Description of Artificial Sequence: Synthetic oligonucleotide
  Sense strand starting at position 2697 of SEQ ID NO: 1881368
cuaagaacuuugcugugaa

SEQ ID NO: 2039161 - RNA, 19 nt, Artificial Sequence
  Description of Artificial Sequence: Synthetic oligonucleotide
  Antisense strand to SEQ ID NO: 2039160
uucacagcaaaguucuuag

SEQ ID NO: 2039162 - RNA, 19 nt, Artificial Sequence
  Description of Artificial Sequence: Synthetic oligonucleotide
  Sense strand starting at position 2700 of SEQ ID NO: 1881368
agaacuuugcugugaacau

SEQ ID NO: 2039163 - RNA, 19 nt, Artificial Sequence
  Description of Artificial Sequence: Synthetic oligonucleotide
  Antisense strand to SEQ ID NO: 2039162
auguucacagcaaaguucu

SEQ ID NO: 2039164 - RNA, 19 nt, Artificial Sequence
  Description of Artificial Sequence: Synthetic oligonucleotide
  Sense strand starting at position 2849 of SEQ ID NO: 1881368
aaagauaacugggaggauu

SEQ ID NO: 2039165 - RNA, 19 nt, Artificial Sequence
  Description of Artificial Sequence: Synthetic oligonucleotide
  Antisense strand to SEQ ID NO: 2039164
aauccucccaguuaucuuu

SEQ ID NO: 2039166 - RNA, 19 nt, Artificial Sequence
  Description of Artificial Sequence: Synthetic oligonucleotide
  Sense strand starting at position 2900 of SEQ ID NO: 1881368
gucuuaagguaucucacaa

SEQ ID NO: 2039167 - RNA, 19 nt, Artificial Sequence
  Description of Artificial Sequence: Synthetic oligonucleotide
  Antisense strand to SEQ ID NO: 2039166
uugugagauaccuuaagac

SEQ ID NO: 2039168 - RNA, 19 nt, Artificial Sequence
  Description of Artificial Sequence: Synthetic oligonucleotide
  Sense strand starting at position 2952 of SEQ ID NO: 1881368
ggagauggcccuuagucaa

SEQ ID NO: 2039169 - RNA, 19 nt, Artificial Sequence
  Description of Artificial Sequence: Synthetic oligonucleotide
  Antisense strand to SEQ ID NO: 2039168
uugacuaagggccaucucc

SEQ ID NO: 2039170 - RNA, 19 nt, Artificial Sequence
  Description of Artificial Sequence: Synthetic oligonucleotide
  Sense strand starting at position 3168 of SEQ ID NO: 1881368
ccauuacuacccgagcuua

SEQ ID NO: 2039171 - RNA, 19 nt, Artificial Sequence
  Description of Artificial Sequence: Synthetic oligonucleotide
  Antisense strand to SEQ ID NO: 2039170
uaagcucggguaguaaugg

SEQ ID NO: 2039172 - RNA, 19 nt, Artificial Sequence
  Description of Artificial Sequence: Synthetic oligonucleotide
  Sense strand starting at position 3198 of SEQ ID NO: 1881368
cgguuauagcuauagagga

SEQ ID NO: 2039173 - RNA, 19 nt, Artificial Sequence
  Description of Artificial Sequence: Synthetic oligonucleotide
  Antisense strand to SEQ ID NO: 2039172
uccucuauagcuauaaccg

SEQ ID NO: 2039174 - RNA, 19 nt, Artificial Sequence
  Description of Artificial Sequence: Synthetic oligonucleotide
  Sense strand starting at position 3392 of SEQ ID NO: 1881368
aacaguaucugguuauagu

SEQ ID NO: 2039175 - RNA, 19 nt, Artificial Sequence
  Description of Artificial Sequence: Synthetic oligonucleotide
  Antisense strand to SEQ ID NO: 2039174
acuauaaccagauacuguu

SEQ ID NO: 2039176 - RNA, 19 nt, Artificial Sequence
  Description of Artificial Sequence: Synthetic oligonucleotide
  Sense strand starting at position 3393 of SEQ ID NO: 1881368
acaguaucugguuauagua

SEQ ID NO: 2039177 - RNA, 19 nt, Artificial Sequence
  Description of Artificial Sequence: Synthetic oligonucleotide
  Antisense strand to SEQ ID NO: 2039176
uacuauaaccagauacugu

SEQ ID NO: 2039178 - RNA, 19 nt, Artificial Sequence
  Description of Artificial Sequence: Synthetic oligonucleotide
  Sense strand starting at position 3677 of SEQ ID NO: 1881368
aguuaaguuacaugagggu

SEQ ID NO: 2039179 - RNA, 19 nt, Artificial Sequence
  Description of Artificial Sequence: Synthetic oligonucleotide
  Antisense strand to SEQ ID NO: 2039178
acccucauguaacuuaacu

SEQ ID NO: 2039180 - RNA, 19 nt, Artificial Sequence
  Description of Artificial Sequence: Synthetic oligonucleotide
  Sense strand starting at position 3790 of SEQ ID NO: 1881368
guaucaaggccuuauaaga

SEQ ID NO: 2039181 - RNA, 19 nt, Artificial Sequence
  Description of Artificial Sequence: Synthetic oligonucleotide
  Antisense strand to SEQ ID NO: 2039180
ucuuauaaggccuugauac

SEQ ID NO: 2039182 - RNA, 19 nt, Artificial Sequence
  Description of Artificial Sequence: Synthetic oligonucleotide
  Sense strand starting at position 3883 of SEQ ID NO: 1881368
acaagcauuggccaagaua

SEQ ID NO: 2039183 - RNA, 19 nt, Artificial Sequence
  Description of Artificial Sequence: Synthetic oligonucleotide
  Antisense strand to SEQ ID NO: 2039182
uaucuuggccaaugcuugu

SEQ ID NO: 2039184 - RNA, 19 nt, Artificial Sequence
  Description of Artificial Sequence: Synthetic oligonucleotide
  Sense strand starting at position 90 of SEQ ID NO: 1881369
gcaucauacccauguagac

SEQ ID NO: 2039185 - RNA, 19 nt, Artificial Sequence
  Description of Artificial Sequence: Synthetic oligonucleotide
  Antisense strand to SEQ ID NO: 2039184
gucuacauggguaugaugc

SEQ ID NO: 2039186 - RNA, 19 nt, Artificial Sequence
  Description of Artificial Sequence: Synthetic oligonucleotide
  Sense strand starting at position 125 of SEQ ID NO: 1881369
ucgcuauugcaggaagaau

SEQ ID NO: 2039187 - RNA, 19 nt, Artificial Sequence
  Description of Artificial Sequence: Synthetic oligonucleotide
  Antisense strand to SEQ ID NO: 2039186
auucuuccugcaauagcga

SEQ ID NO: 2039188 - RNA, 19 nt, Artificial Sequence
  Description of Artificial Sequence: Synthetic oligonucleotide
  Sense strand starting at position 461 of SEQ ID NO: 1881369
gaauuuauauucgauguga

SEQ ID NO: 2039189 - RNA, 19 nt, Artificial Sequence
  Description of Artificial Sequence: Synthetic oligonucleotide
  Antisense strand to SEQ ID NO: 2039188
ucacaucgaauauaaauuc

SEQ ID NO: 2039190 - RNA, 19 nt, Artificial Sequence
  Description of Artificial Sequence: Synthetic oligonucleotide
  Sense strand starting at position 465 of SEQ ID NO: 1881369
uuauauucgaugugaggaa

SEQ ID NO: 2039191 - RNA, 19 nt, Artificial Sequence
  Description of Artificial Sequence: Synthetic oligonucleotide
  Antisense strand to SEQ ID NO: 2039190
uuccucacaucgaauauaa

SEQ ID NO: 2039192 - RNA, 19 nt, Artificial Sequence
  Description of Artificial Sequence: Synthetic oligonucleotide
  Sense strand starting at position 469 of SEQ ID NO: 1881369
auucgaugugaggaauagu

SEQ ID NO: 2039193 - RNA, 19 nt, Artificial Sequence
  Description of Artificial Sequence: Synthetic oligonucleotide
  Antisense strand to SEQ ID NO: 2039192
acuauuccucacaucgaau

SEQ ID NO: 2039194 - RNA, 19 nt, Artificial Sequence
  Description of Artificial Sequence: Synthetic oligonucleotide
  Sense strand starting at position 478 of SEQ ID NO: 1881369
gaggaauaguuagaaggga

SEQ ID NO: 2039195 - RNA, 19 nt, Artificial Sequence
  Description of Artificial Sequence: Synthetic oligonucleotide
  Antisense strand to SEQ ID NO: 2039194
ucccuucuaacuauuccuc

SEQ ID NO: 2039196 - RNA, 19 nt, Artificial Sequence
  Description of Artificial Sequence: Synthetic oligonucleotide
  Sense strand starting at position 511 of SEQ ID NO: 1881369
cgcagagaccucugugaaa

SEQ ID NO: 2039197 - RNA, 19 nt, Artificial Sequence
  Description of Artificial Sequence: Synthetic oligonucleotide
  Antisense strand to SEQ ID NO: 2039196
uuucacagaggucucugcg

SEQ ID NO: 2039198 - RNA, 19 nt, Artificial Sequence
  Description of Artificial Sequence: Synthetic oligonucleotide
  Sense strand starting at position 855 of SEQ ID NO: 1881369
uggcauguacucuaaucca

SEQ ID NO: 2039199 - RNA, 19 nt, Artificial Sequence
  Description of Artificial Sequence: Synthetic oligonucleotide
  Antisense strand to SEQ ID NO: 2039198
uggauuagaguacaugcca

SEQ ID NO: 2039200 - RNA, 19 nt, Artificial Sequence
  Description of Artificial Sequence: Synthetic oligonucleotide
  Sense strand starting at position 894 of SEQ ID NO: 1881369
gcauaugucugucuuauuu

SEQ ID NO: 2039201 - RNA, 19 nt, Artificial Sequence
  Description of Artificial Sequence: Synthetic oligonucleotide
  Antisense strand to SEQ ID NO: 2039200
aaauaagacagacauaugc

SEQ ID NO: 2039202 - RNA, 19 nt, Artificial Sequence
  Description of Artificial Sequence: Synthetic oligonucleotide
  Sense strand starting at position 1179 of SEQ ID NO: 1881369
aacuauaaaugugugagga

SEQ ID NO: 2039203 - RNA, 19 nt, Artificial Sequence
  Description of Artificial Sequence: Synthetic oligonucleotide
  Antisense strand to SEQ ID NO: 2039202
uccucacacauuuauaguu

SEQ ID NO: 2039204 - RNA, 19 nt, Artificial Sequence
  Description of Artificial Sequence: Synthetic oligonucleotide
  Sense strand starting at position 1180 of SEQ ID NO: 1881369
acuauaaaugugugaggaa

SEQ ID NO: 2039205 - RNA, 19 nt, Artificial Sequence
  Description of Artificial Sequence: Synthetic oligonucleotide
  Antisense strand to SEQ ID NO: 2039204
uuccucacacauuuauagu

SEQ ID NO: 2039206 - RNA, 19 nt, Artificial Sequence
  Description of Artificial Sequence: Synthetic oligonucleotide
  Sense strand starting at position 1193 of SEQ ID NO: 1881369
gaggaagauugugugguau

SEQ ID NO: 2039207 - RNA, 19 nt, Artificial Sequence
  Description of Artificial Sequence: Synthetic oligonucleotide
  Antisense strand to SEQ ID NO: 2039206
auaccacacaaucuuccuc

SEQ ID NO: 2039208 - RNA, 19 nt, Artificial Sequence
  Description of Artificial Sequence: Synthetic oligonucleotide
  Sense strand starting at position 1377 of SEQ ID NO: 1881369
aacaguaauugugugauaa

SEQ ID NO: 2039209 - RNA, 19 nt, Artificial Sequence
  Description of Artificial Sequence: Synthetic oligonucleotide
  Antisense strand to SEQ ID NO: 2039208
uuaucacacaauuacuguu

SEQ ID NO: 2039210 - RNA, 19 nt, Artificial Sequence
  Description of Artificial Sequence: Synthetic oligonucleotide
  Sense strand starting at position 1464 of SEQ ID NO: 1881369
caaggcaugcaugaugauu

SEQ ID NO: 2039211 - RNA, 19 nt, Artificial Sequence
  Description of Artificial Sequence: Synthetic oligonucleotide
  Antisense strand to SEQ ID NO: 2039210
aaucaucaugcaugccuug

SEQ ID NO: 2039212 - RNA, 19 nt, Artificial Sequence
  Description of Artificial Sequence: Synthetic oligonucleotide
  Sense strand starting at position 1657 of SEQ ID NO: 1881369
ggaaguauuaguugucuaa

SEQ ID NO: 2039213 - RNA, 19 nt, Artificial Sequence
  Description of Artificial Sequence: Synthetic oligonucleotide
  Antisense strand to SEQ ID NO: 2039212
uuagacaacuaauacuucc

SEQ ID NO: 2039214 - RNA, 19 nt, Artificial Sequence
  Description of Artificial Sequence: Synthetic oligonucleotide
  Sense strand starting at position 1827 of SEQ ID NO: 1881369
ugagcauccugauugagca

SEQ ID NO: 2039215 - RNA, 19 nt, Artificial Sequence
  Description of Artificial Sequence: Synthetic oligonucleotide
  Antisense strand to SEQ ID NO: 2039214
ugcucaaucaggaugcuca

SEQ ID NO: 2039216 - RNA, 19 nt, Artificial Sequence
  Description of Artificial Sequence: Synthetic oligonucleotide
  Sense strand starting at position 1828 of SEQ ID NO: 1881369
gagcauccugauugagcaa

SEQ ID NO: 2039217 - RNA, 19 nt, Artificial Sequence
  Description of Artificial Sequence: Synthetic oligonucleotide
  Antisense strand to SEQ ID NO: 2039216
uugcucaaucaggaugcuc

SEQ ID NO: 2039218 - RNA, 19 nt, Artificial Sequence
  Description of Artificial Sequence: Synthetic oligonucleotide
  Sense strand starting at position 1849 of SEQ ID NO: 1881369
auccgacuucgguaucacu

SEQ ID NO: 2039219 - RNA, 19 nt, Artificial Sequence
  Description of Artificial Sequence: Synthetic oligonucleotide
  Antisense strand to SEQ ID NO: 2039218
agugauaccgaagucggau

SEQ ID NO: 2039220 - RNA, 19 nt, Artificial Sequence
  Description of Artificial Sequence: Synthetic oligonucleotide
  Sense strand starting at position 2303 of SEQ ID NO: 1881369
cucagugaaugagcuuuau

SEQ ID NO: 2039221 - RNA, 19 nt, Artificial Sequence
  Description of Artificial Sequence: Synthetic oligonucleotide
  Antisense strand to SEQ ID NO: 2039220
auaaagcucauucacugag

SEQ ID NO: 2039222 - RNA, 19 nt, Artificial Sequence
  Description of Artificial Sequence: Synthetic oligonucleotide
  Sense strand starting at position 2307 of SEQ ID NO: 1881369
gugaaugagcuuuaucugu

SEQ ID NO: 2039223 - RNA, 19 nt, Artificial Sequence
  Description of Artificial Sequence: Synthetic oligonucleotide
  Antisense strand to SEQ ID NO: 2039222
acagauaaagcucauucac

SEQ ID NO: 2039224 - RNA, 19 nt, Artificial Sequence
  Description of Artificial Sequence: Synthetic oligonucleotide
  Sense strand starting at position 2352 of SEQ ID NO: 1881369
agcauuucuguuggcuuaa

SEQ ID NO: 2039225 - RNA, 19 nt, Artificial Sequence
  Description of Artificial Sequence: Synthetic oligonucleotide
  Antisense strand to SEQ ID NO: 2039224
uuaagccaacagaaaugcu

SEQ ID NO: 2039226 - RNA, 19 nt, Artificial Sequence
  Description of Artificial Sequence: Synthetic oligonucleotide
  Sense strand starting at position 2353 of SEQ ID NO: 1881369
gcauuucuguuggcuuaaa

SEQ ID NO: 2039227 - RNA, 19 nt, Artificial Sequence
  Description of Artificial Sequence: Synthetic oligonucleotide
  Antisense strand to SEQ ID NO: 2039226
uuuaagccaacagaaaugc

SEQ ID NO: 2039228 - RNA, 19 nt, Artificial Sequence
  Description of Artificial Sequence: Synthetic oligonucleotide
  Sense strand starting at position 2392 of SEQ ID NO: 1881369
guuugccauuucucaugua

SEQ ID NO: 2039229 - RNA, 19 nt, Artificial Sequence
  Description of Artificial Sequence: Synthetic oligonucleotide
  Antisense strand to SEQ ID NO: 2039228
uacaugagaaauggcaaac

SEQ ID NO: 2039230 - RNA, 19 nt, Artificial Sequence
  Description of Artificial Sequence: Synthetic oligonucleotide
  Sense strand starting at position 2561 of SEQ ID NO: 1881369
gcuauucuccuagacaaag

SEQ ID NO: 2039231 - RNA, 19 nt, Artificial Sequence
  Description of Artificial Sequence: Synthetic oligonucleotide
  Antisense strand to SEQ ID NO: 2039230
cuuugucuaggagaauagc

SEQ ID NO: 2039232 - RNA, 19 nt, Artificial Sequence
  Description of Artificial Sequence: Synthetic oligonucleotide
  Sense strand starting at position 2606 of SEQ ID NO: 1881369
guacuuuaggccugaucaa

SEQ ID NO: 2039233 - RNA, 19 nt, Artificial Sequence
  Description of Artificial Sequence: Synthetic oligonucleotide
  Antisense strand to SEQ ID NO: 2039232
uugaucaggccuaaaguac

SEQ ID NO: 2039234 - RNA, 19 nt, Artificial Sequence
  Description of Artificial Sequence: Synthetic oligonucleotide
  Sense strand starting at position 2648 of SEQ ID NO: 1881369
ugagaugacuaacaaagga

SEQ ID NO: 2039235 - RNA, 19 nt, Artificial Sequence
  Description of Artificial Sequence: Synthetic oligonucleotide
  Antisense strand to SEQ ID NO: 2039234
uccuuuguuagucaucuca

SEQ ID NO: 2039236 - RNA, 19 nt, Artificial Sequence
  Description of Artificial Sequence: Synthetic oligonucleotide
  Sense strand starting at position 2671 of SEQ ID NO: 1881369
acacaugagugaccucaua

SEQ ID NO: 2039237 - RNA, 19 nt, Artificial Sequence
  Description of Artificial Sequence: Synthetic oligonucleotide
  Antisense strand to SEQ ID NO: 2039236
uaugaggucacucaugugu

SEQ ID NO: 2039238 - RNA, 19 nt, Artificial Sequence
  Description of Artificial Sequence: Synthetic oligonucleotide
  Sense strand starting at position 2790 of SEQ ID NO: 1881369
agagcaauagucuguaauu

SEQ ID NO: 2039239 - RNA, 19 nt, Artificial Sequence
  Description of Artificial Sequence: Synthetic oligonucleotide
  Antisense strand to SEQ ID NO: 2039238
aauuacagacuauugcucu

SEQ ID NO: 2039240 - RNA, 19 nt, Artificial Sequence
  Description of Artificial Sequence: Synthetic oligonucleotide
  Sense strand starting at position 2792 of SEQ ID NO: 1881369
agcaauagucuguaauucu

SEQ ID NO: 2039241 - RNA, 19 nt, Artificial Sequence
  Description of Artificial Sequence: Synthetic oligonucleotide
  Antisense strand to SEQ ID NO: 2039240
agaauuacagacuauugcu

SEQ ID NO: 2039242 - RNA, 19 nt, Artificial Sequence
  Description of Artificial Sequence: Synthetic oligonucleotide
  Sense strand starting at position 2888 of SEQ ID NO: 1881369
aguggucugcuauaaaccu

SEQ ID NO: 2039243 - RNA, 19 nt, Artificial Sequence
  Description of Artificial Sequence: Synthetic oligonucleotide
  Antisense strand to SEQ ID NO: 2039242
agguuuauagcagaccacu

SEQ ID NO: 2039244 - RNA, 19 nt, Artificial Sequence
  Description of Artificial Sequence: Synthetic oligonucleotide
  Sense strand starting at position 3091 of SEQ ID NO: 1881369
ccagcuucuugccugauuu

SEQ ID NO: 2039245 - RNA, 19 nt, Artificial Sequence
  Description of Artificial Sequence: Synthetic oligonucleotide
  Antisense strand to SEQ ID NO: 2039244
aaaucaggcaagaagcugg

SEQ ID NO: 2039246 - RNA, 19 nt, Artificial Sequence
  Description of Artificial Sequence: Synthetic oligonucleotide
  Sense strand starting at position 3250 of SEQ ID NO: 1881369
agugaagggugagugauua

SEQ ID NO: 2039247 - RNA, 19 nt, Artificial Sequence
  Description of Artificial Sequence: Synthetic oligonucleotide
  Antisense strand to SEQ ID NO: 2039246
uaaucacucacccuucacu

SEQ ID NO: 2039248 - RNA, 19 nt, Artificial Sequence
  Description of Artificial Sequence: Synthetic oligonucleotide
  Sense strand starting at position 3446 of SEQ ID NO: 1881369
aagaaauuaucuucgaacg

SEQ ID NO: 2039249 - RNA, 19 nt, Artificial Sequence
  Description of Artificial Sequence: Synthetic oligonucleotide
  Antisense strand to SEQ ID NO: 2039248
cguucgaagauaauuucuu

SEQ ID NO: 2039250 - RNA, 19 nt, Artificial Sequence
  Description of Artificial Sequence: Synthetic oligonucleotide
  Sense strand starting at position 3447 of SEQ ID NO: 1881369
agaaauuaucuucgaacga

SEQ ID NO: 2039251 - RNA, 19 nt, Artificial Sequence
  Description of Artificial Sequence: Synthetic oligonucleotide
  Antisense strand to SEQ ID NO: 2039250
ucguucgaagauaauuucu

SEQ ID NO: 2039252 - RNA, 19 nt, Artificial Sequence
  Description of Artificial Sequence: Synthetic oligonucleotide
  Sense strand starting at position 3451 of SEQ ID NO: 1881369
auuaucuucgaacgauaaa

SEQ ID NO: 2039253 - RNA, 19 nt, Artificial Sequence
  Description of Artificial Sequence: Synthetic oligonucleotide
  Antisense strand to SEQ ID NO: 2039252
uuuaucguucgaagauaau

SEQ ID NO: 2039254 - RNA, 19 nt, Artificial Sequence
  Description of Artificial Sequence: Synthetic oligonucleotide
  Sense strand starting at position 3486 of SEQ ID NO: 1881369
aguuacuauuaccuggaaa

SEQ ID NO: 2039255 - RNA, 19 nt, Artificial Sequence
  Description of Artificial Sequence: Synthetic oligonucleotide
  Antisense strand to SEQ ID NO: 2039254
uuuccagguaauaguaacu

SEQ ID NO: 2039256 - RNA, 19 nt, Artificial Sequence
  Description of Artificial Sequence: Synthetic oligonucleotide
  Sense strand starting at position 3488 of SEQ ID NO: 1881369
uuacuauuaccuggaaaug

SEQ ID NO: 2039257 - RNA, 19 nt, Artificial Sequence
  Description of Artificial Sequence: Synthetic oligonucleotide
  Antisense strand to SEQ ID NO: 2039256
cauuuccagguaauaguaa

SEQ ID NO: 2039258 - RNA, 19 nt, Artificial Sequence
  Description of Artificial Sequence: Synthetic oligonucleotide
  Sense strand starting at position 3823 of SEQ ID NO: 1881369
cguuuauguauggaccaau

SEQ ID NO: 2039259 - RNA, 19 nt, Artificial Sequence
  Description of Artificial Sequence: Synthetic oligonucleotide
  Antisense strand to SEQ ID NO: 2039258
auugguccauacauaaacg

SEQ ID NO: 2039260 - RNA, 19 nt, Artificial Sequence
  Description of Artificial Sequence: Synthetic oligonucleotide
  Sense strand starting at position 3852 of SEQ ID NO: 1881369
uguaguauuaucugaggua

SEQ ID NO: 2039261 - RNA, 19 nt, Artificial Sequence
  Description of Artificial Sequence: Synthetic oligonucleotide
  Antisense strand to SEQ ID NO: 2039260
uaccucagauaauacuaca

SEQ ID NO: 2039262 - RNA, 19 nt, Artificial Sequence
  Description of Artificial Sequence: Synthetic oligonucleotide
  Sense strand starting at position 3903 of SEQ ID NO: 1881369
uggacuuucuauguucuua

SEQ ID NO: 2039263 - RNA, 19 nt, Artificial Sequence
  Description of Artificial Sequence: Synthetic oligonucleotide
  Antisense strand to SEQ ID NO: 2039262
uaagaacauagaaagucca

SEQ ID NO: 2039264 - RNA, 19 nt, Artificial Sequence
  Description of Artificial Sequence: Synthetic oligonucleotide
  Sense strand starting at position 314 of SEQ ID NO: 1881371
cuaaaucagcggugggaaa

SEQ ID NO: 2039265 - RNA, 19 nt, Artificial Sequence
  Description of Artificial Sequence: Synthetic oligonucleotide
  Antisense strand to SEQ ID NO: 2039264
uuucccaccgcugauuuag

SEQ ID NO: 2039266 - RNA, 19 nt, Artificial Sequence
  Description of Artificial Sequence: Synthetic oligonucleotide
  Sense strand starting at position 315 of SEQ ID NO: 1881371
uaaaucagcggugggaaau

SEQ ID NO: 2039267 - RNA, 19 nt, Artificial Sequence
  Description of Artificial Sequence: Synthetic oligonucleotide
  Antisense strand to SEQ ID NO: 2039266
auuucccaccgcugauuua

SEQ ID NO: 2039268 - RNA, 19 nt, Artificial Sequence
  Description of Artificial Sequence: Synthetic oligonucleotide
  Sense strand starting at position 316 of SEQ ID NO: 1881371
aaaucagcggugggaaaua

SEQ ID NO: 2039269 - RNA, 19 nt, Artificial Sequence
  Description of Artificial Sequence: Synthetic oligonucleotide
  Antisense strand to SEQ ID NO: 2039268
uauuucccaccgcugauuu

SEQ ID NO: 2039270 - RNA, 19 nt, Artificial Sequence
  Description of Artificial Sequence: Synthetic oligonucleotide
  Sense strand starting at position 327 of SEQ ID NO: 1881371
gggaaauaguuucuaccug

SEQ ID NO: 2039271 - RNA, 19 nt, Artificial Sequence
  Description of Artificial Sequence: Synthetic oligonucleotide
  Antisense strand to SEQ ID NO: 2039270
cagguagaaacuauuuccc

SEQ ID NO: 2039272 - RNA, 19 nt, Artificial Sequence
  Description of Artificial Sequence: Synthetic oligonucleotide
  Sense strand starting at position 1407 of SEQ ID NO: 1881371
gagggagucuuaccaggcu

SEQ ID NO: 2039273 - RNA, 19 nt, Artificial Sequence
  Description of Artificial Sequence: Synthetic oligonucleotide
  Antisense strand to SEQ ID NO: 2039272
agccugguaagacucccuc

SEQ ID NO: 2039274 - RNA, 19 nt, Artificial Sequence
  Description of Artificial Sequence: Synthetic oligonucleotide
  Sense strand starting at position 1413 of SEQ ID NO: 1881371
gucuuaccaggcugugaaa

SEQ ID NO: 2039275 - RNA, 19 nt, Artificial Sequence
  Description of Artificial Sequence: Synthetic oligonucleotide
  Antisense strand to SEQ ID NO: 2039274
uuucacagccugguaagac

SEQ ID NO: 2039276 - RNA, 19 nt, Artificial Sequence
  Description of Artificial Sequence: Synthetic oligonucleotide
  Sense strand starting at position 1551 of SEQ ID NO: 1881371
ggccauuaauaguuaaagu

SEQ ID NO: 2039277 - RNA, 19 nt, Artificial Sequence
  Description of Artificial Sequence: Synthetic oligonucleotide
  Antisense strand to SEQ ID NO: 2039276
acuuuaacuauuaauggcc

SEQ ID NO: 2039278 - RNA, 19 nt, Artificial Sequence
  Description of Artificial Sequence: Synthetic oligonucleotide
  Sense strand starting at position 1637 of SEQ ID NO: 1881371
gguauaauuuaaggagagu

SEQ ID NO: 2039279 - RNA, 19 nt, Artificial Sequence
  Description of Artificial Sequence: Synthetic oligonucleotide
  Antisense strand to SEQ ID NO: 2039278
acucuccuuaaauuauacc

SEQ ID NO: 2039280 - RNA, 19 nt, Artificial Sequence
  Description of Artificial Sequence: Synthetic oligonucleotide
  Sense strand starting at position 1685 of SEQ ID NO: 1881371
gugccagccuugucaauuu

SEQ ID NO: 2039281 - RNA, 19 nt, Artificial Sequence
  Description of Artificial Sequence: Synthetic oligonucleotide
  Antisense strand to SEQ ID NO: 2039280
aaauugacaaggcuggcac

SEQ ID NO: 2039282 - RNA, 19 nt, Artificial Sequence
  Description of Artificial Sequence: Synthetic oligonucleotide
  Sense strand starting at position 1986 of SEQ ID NO: 1881371
gucugcuguaguuuaguua

SEQ ID NO: 2039283 - RNA, 19 nt, Artificial Sequence
  Description of Artificial Sequence: Synthetic oligonucleotide
  Antisense strand to SEQ ID NO: 2039282
uaacuaaacuacagcagac

SEQ ID NO: 2039284 - RNA, 19 nt, Artificial Sequence
  Description of Artificial Sequence: Synthetic oligonucleotide
  Sense strand starting at position 2182 of SEQ ID NO: 1881371
uuagccauggcucgggaaa

SEQ ID NO: 2039285 - RNA, 19 nt, Artificial Sequence
  Description of Artificial Sequence: Synthetic oligonucleotide
  Antisense strand to SEQ ID NO: 2039284
uuucccgagccauggcuaa

SEQ ID NO: 2039286 - RNA, 19 nt, Artificial Sequence
  Description of Artificial Sequence: Synthetic oligonucleotide
  Sense strand starting at position 2268 of SEQ ID NO: 1881371
ugaaguaagaaucguuguu

SEQ ID NO: 2039287 - RNA, 19 nt, Artificial Sequence
  Description of Artificial Sequence: Synthetic oligonucleotide
  Antisense strand to SEQ ID NO: 2039286
aacaacgauucuuacuuca

SEQ ID NO: 2039288 - RNA, 19 nt, Artificial Sequence
  Description of Artificial Sequence: Synthetic oligonucleotide
  Sense strand starting at position 2270 of SEQ ID NO: 1881371
aaguaagaaucguuguuug

SEQ ID NO: 2039289 - RNA, 19 nt, Artificial Sequence
  Description of Artificial Sequence: Synthetic oligonucleotide
  Antisense strand to SEQ ID NO: 2039288
caaacaacgauucuuacuu

SEQ ID NO: 2039290 - RNA, 19 nt, Artificial Sequence
  Description of Artificial Sequence: Synthetic oligonucleotide
  Sense strand starting at position 2273 of SEQ ID NO: 1881371
uaagaaucguuguuuguga

SEQ ID NO: 2039291 - RNA, 19 nt, Artificial Sequence
  Description of Artificial Sequence: Synthetic oligonucleotide
  Antisense strand to SEQ ID NO: 2039290
ucacaaacaacgauucuua

SEQ ID NO: 2039292 - RNA, 19 nt, Artificial Sequence
  Description of Artificial Sequence: Synthetic oligonucleotide
  Sense strand starting at position 2275 of SEQ ID NO: 1881371
agaaucguuguuugugaca

SEQ ID NO: 2039293 - RNA, 19 nt, Artificial Sequence
  Description of Artificial Sequence: Synthetic oligonucleotide
  Antisense strand to SEQ ID NO: 2039292
ugucacaaacaacgauucu

SEQ ID NO: 2039294 - RNA, 19 nt, Artificial Sequence
  Description of Artificial Sequence: Synthetic oligonucleotide
  Sense strand starting at position 2282 of SEQ ID NO: 1881371
uuguuugugacagugcgua

SEQ ID NO: 2039295 - RNA, 19 nt, Artificial Sequence
  Description of Artificial Sequence: Synthetic oligonucleotide
  Antisense strand to SEQ ID NO: 2039294
uacgcacugucacaaacaa

SEQ ID NO: 2039296 - RNA, 19 nt, Artificial Sequence
  Description of Artificial Sequence: Synthetic oligonucleotide
  Sense strand starting at position 2309 of SEQ ID NO: 1881371
aguccaucgaguugaaguu

SEQ ID NO: 2039297 - RNA, 19 nt, Artificial Sequence
  Description of Artificial Sequence: Synthetic oligonucleotide
  Antisense strand to SEQ ID NO: 2039296
aacuucaacucgauggacu

SEQ ID NO: 2039298 - RNA, 19 nt, Artificial Sequence
  Description of Artificial Sequence: Synthetic oligonucleotide
  Sense strand starting at position 2310 of SEQ ID NO: 1881371
guccaucgaguugaaguua

SEQ ID NO: 2039299 - RNA, 19 nt, Artificial Sequence
  Description of Artificial Sequence: Synthetic oligonucleotide
  Antisense strand to SEQ ID NO: 2039298
uaacuucaacucgauggac

SEQ ID NO: 2039300 - RNA, 19 nt, Artificial Sequence
  Description of Artificial Sequence: Synthetic oligonucleotide
  Sense strand starting at position 2322 of SEQ ID NO: 1881371
gaaguuauuucugagagca

SEQ ID NO: 2039301 - RNA, 19 nt, Artificial Sequence
  Description of Artificial Sequence: Synthetic oligonucleotide
  Antisense strand to SEQ ID NO: 2039300
ugcucucagaaauaacuuc

SEQ ID NO: 2039302 - RNA, 19 nt, Artificial Sequence
  Description of Artificial Sequence: Synthetic oligonucleotide
  Sense strand starting at position 2324 of SEQ ID NO: 1881371
aguuauuucugagagcacu

SEQ ID NO: 2039303 - RNA, 19 nt, Artificial Sequence
  Description of Artificial Sequence: Synthetic oligonucleotide
  Antisense strand to SEQ ID NO: 2039302
agugcucucagaaauaacu

SEQ ID NO: 2039304 - RNA, 19 nt, Artificial Sequence
  Description of Artificial Sequence: Synthetic oligonucleotide
  Sense strand starting at position 2392 of SEQ ID NO: 1881371
gccugaaguguaggaggaa

SEQ ID NO: 2039305 - RNA, 19 nt, Artificial Sequence
  Description of Artificial Sequence: Synthetic oligonucleotide
  Antisense strand to SEQ ID NO: 2039304
uuccuccuacacuucaggc

SEQ ID NO: 2039306 - RNA, 19 nt, Artificial Sequence
  Description of Artificial Sequence: Synthetic oligonucleotide
  Sense strand starting at position 2500 of SEQ ID NO: 1881371
gggacugucccuuauauug

SEQ ID NO: 2039307 - RNA, 19 nt, Artificial Sequence
  Description of Artificial Sequence: Synthetic oligonucleotide
  Antisense strand to SEQ ID NO: 2039306
caauauaagggacaguccc

SEQ ID NO: 2039308 - RNA, 19 nt, Artificial Sequence
  Description of Artificial Sequence: Synthetic oligonucleotide
  Sense strand starting at position 2509 of SEQ ID NO: 1881371
ccuuauauugcagaugcuu

SEQ ID NO: 2039309 - RNA, 19 nt, Artificial Sequence
  Description of Artificial Sequence: Synthetic oligonucleotide
  Antisense strand to SEQ ID NO: 2039308
aagcaucugcaauauaagg

SEQ ID NO: 2039310 - RNA, 19 nt, Artificial Sequence
  Description of Artificial Sequence: Synthetic oligonucleotide
  Sense strand starting at position 2557 of SEQ ID NO: 1881371
gguaguacucuccagucau

SEQ ID NO: 2039311 - RNA, 19 nt, Artificial Sequence
  Description of Artificial Sequence: Synthetic oligonucleotide
  Antisense strand to SEQ ID NO: 2039310
augacuggagaguacuacc

SEQ ID NO: 2039312 - RNA, 19 nt, Artificial Sequence
  Description of Artificial Sequence: Synthetic oligonucleotide
  Sense strand starting at position 2567 of SEQ ID NO: 1881371
uccagucauuguguugacu

SEQ ID NO: 2039313 - RNA, 19 nt, Artificial Sequence
  Description of Artificial Sequence: Synthetic oligonucleotide
  Antisense strand to SEQ ID NO: 2039312
agucaacacaaugacugga

SEQ ID NO: 2039314 - RNA, 19 nt, Artificial Sequence
  Description of Artificial Sequence: Synthetic oligonucleotide
  Sense strand starting at position 2570 of SEQ ID NO: 1881371
agucauuguguugacuuaa

SEQ ID NO: 2039315 - RNA, 19 nt, Artificial Sequence
  Description of Artificial Sequence: Synthetic oligonucleotide
  Antisense strand to SEQ ID NO: 2039314
uuaagucaacacaaugacu

SEQ ID NO: 2039316 - RNA, 19 nt, Artificial Sequence
  Description of Artificial Sequence: Synthetic oligonucleotide
  Sense strand starting at position 2652 of SEQ ID NO: 1881371
gggccugaguguucuagaa

SEQ ID NO: 2039317 - RNA, 19 nt, Artificial Sequence
  Description of Artificial Sequence: Synthetic oligonucleotide
  Antisense strand to SEQ ID NO: 2039316
uucuagaacacucaggccc

SEQ ID NO: 2039318 - RNA, 19 nt, Artificial Sequence
  Description of Artificial Sequence: Synthetic oligonucleotide
  Sense strand starting at position 2656 of SEQ ID NO: 1881371
cugaguguucuagaagggu

SEQ ID NO: 2039319 - RNA, 19 nt, Artificial Sequence
  Description of Artificial Sequence: Synthetic oligonucleotide
  Antisense strand to SEQ ID NO: 2039318
acccuucuagaacacucag

SEQ ID NO: 2039320 - RNA, 19 nt, Artificial Sequence
  Description of Artificial Sequence: Synthetic oligonucleotide
  Sense strand starting at position 2664 of SEQ ID NO: 1881371
ucuagaagggucuguggaa

SEQ ID NO: 2039321 - RNA, 19 nt, Artificial Sequence
  Description of Artificial Sequence: Synthetic oligonucleotide
  Antisense strand to SEQ ID NO: 2039320
uuccacagacccuucuaga

SEQ ID NO: 2039322 - RNA, 19 nt, Artificial Sequence
  Description of Artificial Sequence: Synthetic oligonucleotide
  Sense strand starting at position 2733 of SEQ ID NO: 1881371
ggcugauacaucugcagug

SEQ ID NO: 2039323 - RNA, 19 nt, Artificial Sequence
  Description of Artificial Sequence: Synthetic oligonucleotide
  Antisense strand to SEQ ID NO: 2039322
cacugcagauguaucagcc

SEQ ID NO: 2039324 - RNA, 19 nt, Artificial Sequence
  Description of Artificial Sequence: Synthetic oligonucleotide
  Sense strand starting at position 2816 of SEQ ID NO: 1881371
ccagcuggagaguauauau

SEQ ID NO: 2039325 - RNA, 19 nt, Artificial Sequence
  Description of Artificial Sequence: Synthetic oligonucleotide
  Antisense strand to SEQ ID NO: 2039324
auauauacucuccagcugg

SEQ ID NO: 2039326 - RNA, 19 nt, Artificial Sequence
  Description of Artificial Sequence: Synthetic oligonucleotide
  Sense strand starting at position 3001 of SEQ ID NO: 1881371
gagcguuggccaguguaag

SEQ ID NO: 2039327 - RNA, 19 nt, Artificial Sequence
  Description of Artificial Sequence: Synthetic oligonucleotide
  Antisense strand to SEQ ID NO: 2039326
cuuacacuggccaacgcuc

SEQ ID NO: 2039328 - RNA, 19 nt, Artificial Sequence
  Description of Artificial Sequence: Synthetic oligonucleotide
  Sense strand starting at position 3267 of SEQ ID NO: 1881371
gagugaucuuccuuacugg

SEQ ID NO: 2039329 - RNA, 19 nt, Artificial Sequence
  Description of Artificial Sequence: Synthetic oligonucleotide
  Antisense strand to SEQ ID NO: 2039328
ccaguaaggaagaucacuc

SEQ ID NO: 2039330 - RNA, 19 nt, Artificial Sequence
  Description of Artificial Sequence: Synthetic oligonucleotide
  Sense strand starting at position 3355 of SEQ ID NO: 1881371
cagagaucugggugucccu

SEQ ID NO: 2039331 - RNA, 19 nt, Artificial Sequence
  Description of Artificial Sequence: Synthetic oligonucleotide
  Antisense strand to SEQ ID NO: 2039330
agggacacccagaucucug

SEQ ID NO: 2039332 - RNA, 19 nt, Artificial Sequence
  Description of Artificial Sequence: Synthetic oligonucleotide
  Sense strand starting at position 3364 of SEQ ID NO: 1881371
gggugucccugauuccagu

SEQ ID NO: 2039333 - RNA, 19 nt, Artificial Sequence
  Description of Artificial Sequence: Synthetic oligonucleotide
  Antisense strand to SEQ ID NO: 2039332
acuggaaucagggacaccc

SEQ ID NO: 2039334 - RNA, 19 nt, Artificial Sequence
  Description of Artificial Sequence: Synthetic oligonucleotide
  Sense strand starting at position 3463 of SEQ ID NO: 1881371
ggcagaggucuguguucaa

SEQ ID NO: 2039335 - RNA, 19 nt, Artificial Sequence
  Description of Artificial Sequence: Synthetic oligonucleotide
  Antisense strand to SEQ ID NO: 2039334
uugaacacagaccucugcc

SEQ ID NO: 2039336 - RNA, 19 nt, Artificial Sequence
  Description of Artificial Sequence: Synthetic oligonucleotide
  Sense strand starting at position 3489 of SEQ ID NO: 1881371
gcuuccuccuaacuaguga

SEQ ID NO: 2039337 - RNA, 19 nt, Artificial Sequence
  Description of Artificial Sequence: Synthetic oligonucleotide
  Antisense strand to SEQ ID NO: 2039336
ucacuaguuaggaggaagc

SEQ ID NO: 2039338 - RNA, 19 nt, Artificial Sequence
  Description of Artificial Sequence: Synthetic oligonucleotide
  Sense strand starting at position 3606 of SEQ ID NO: 1881371
ggccgaacagcguagauuu

SEQ ID NO: 2039339 - RNA, 19 nt, Artificial Sequence
  Description of Artificial Sequence: Synthetic oligonucleotide
  Antisense strand to SEQ ID NO: 2039338
aaaucuacgcuguucggcc

SEQ ID NO: 2039340 - RNA, 19 nt, Artificial Sequence
  Description of Artificial Sequence: Synthetic oligonucleotide
  Sense strand starting at position 3753 of SEQ ID NO: 1881371
uuugaucguuuguugaaau

SEQ ID NO: 2039341 - RNA, 19 nt, Artificial Sequence
  Description of Artificial Sequence: Synthetic oligonucleotide
  Antisense strand to SEQ ID NO: 2039340
auuucaacaaacgaucaaa

SEQ ID NO: 2039342 - RNA, 19 nt, Artificial Sequence
  Description of Artificial Sequence: Synthetic oligonucleotide
  Sense strand starting at position 3975 of SEQ ID NO: 1881371
gcuuguugugccuuugacu

SEQ ID NO: 2039343 - RNA, 19 nt, Artificial Sequence
  Description of Artificial Sequence: Synthetic oligonucleotide
  Antisense strand to SEQ ID NO: 2039342
agucaaaggcacaacaagc

SEQ ID NO: 2039344 - RNA, 19 nt, Artificial Sequence
  Description of Artificial Sequence: Synthetic oligonucleotide
  Sense strand starting at position 184 of SEQ ID NO: 1881372
gacucaggguuccuagacu

SEQ ID NO: 2039345 - RNA, 19 nt, Artificial Sequence
  Description of Artificial Sequence: Synthetic oligonucleotide
  Antisense strand to SEQ ID NO: 2039344
agucuaggaacccugaguc

SEQ ID NO: 2039346 - RNA, 19 nt, Artificial Sequence
  Description of Artificial Sequence: Synthetic oligonucleotide
  Sense strand starting at position 191 of SEQ ID NO: 1881372
gguuccuagacuuguaaug

SEQ ID NO: 2039347 - RNA, 19 nt, Artificial Sequence
  Description of Artificial Sequence: Synthetic oligonucleotide
  Antisense strand to SEQ ID NO: 2039346
cauuacaagucuaggaacc

SEQ ID NO: 2039348 - RNA, 19 nt, Artificial Sequence
  Description of Artificial Sequence: Synthetic oligonucleotide
  Sense strand starting at position 328 of SEQ ID NO: 1881372
ccugaucauuucguagagu

SEQ ID NO: 2039349 - RNA, 19 nt, Artificial Sequence
  Description of Artificial Sequence: Synthetic oligonucleotide
  Antisense strand to SEQ ID NO: 2039348
acucuacgaaaugaucagg

SEQ ID NO: 2039350 - RNA, 19 nt, Artificial Sequence
  Description of Artificial Sequence: Synthetic oligonucleotide
  Sense strand starting at position 399 of SEQ ID NO: 1881372
gccaacgaaucuuugauca

SEQ ID NO: 2039351 - RNA, 19 nt, Artificial Sequence
  Description of Artificial Sequence: Synthetic oligonucleotide
  Antisense strand to SEQ ID NO: 2039350
ugaucaaagauucguuggc

SEQ ID NO: 2039352 - RNA, 19 nt, Artificial Sequence
  Description of Artificial Sequence: Synthetic oligonucleotide
  Sense strand starting at position 404 of SEQ ID NO: 1881372
cgaaucuuugaucaauccu

SEQ ID NO: 2039353 - RNA, 19 nt, Artificial Sequence
  Description of Artificial Sequence: Synthetic oligonucleotide
  Antisense strand to SEQ ID NO: 2039352
aggauugaucaaagauucg

SEQ ID NO: 2039354 - RNA, 19 nt, Artificial Sequence
  Description of Artificial Sequence: Synthetic oligonucleotide
  Sense strand starting at position 475 of SEQ ID NO: 1881372
gguuaagugacuugagcaa

SEQ ID NO: 2039355 - RNA, 19 nt, Artificial Sequence
  Description of Artificial Sequence: Synthetic oligonucleotide
  Antisense strand to SEQ ID NO: 2039354
uugcucaagucacuuaacc

SEQ ID NO: 2039356 - RNA, 19 nt, Artificial Sequence
  Description of Artificial Sequence: Synthetic oligonucleotide
  Sense strand starting at position 522 of SEQ ID NO: 1881372
uagguuugaguccagaucu

SEQ ID NO: 2039357 - RNA, 19 nt, Artificial Sequence
  Description of Artificial Sequence: Synthetic oligonucleotide
  Antisense strand to SEQ ID NO: 2039356
agaucuggacucaaaccua

SEQ ID NO: 2039358 - RNA, 19 nt, Artificial Sequence
  Description of Artificial Sequence: Synthetic oligonucleotide
  Sense strand starting at position 788 of SEQ ID NO: 1881372
cuaaguuuaguauagguua

SEQ ID NO: 2039359 - RNA, 19 nt, Artificial Sequence
  Description of Artificial Sequence: Synthetic oligonucleotide
  Antisense strand to SEQ ID NO: 2039358
uaaccuauacuaaacuuag

SEQ ID NO: 2039360 - RNA, 19 nt, Artificial Sequence
  Description of Artificial Sequence: Synthetic oligonucleotide
  Sense strand starting at position 905 of SEQ ID NO: 1881372
caagucuggugacuaugaa

SEQ ID NO: 2039361 - RNA, 19 nt, Artificial Sequence
  Description of Artificial Sequence: Synthetic oligonucleotide
  Antisense strand to SEQ ID NO: 2039360
uucauagucaccagacuug

SEQ ID NO: 2039362 - RNA, 19 nt, Artificial Sequence
  Description of Artificial Sequence: Synthetic oligonucleotide
  Sense strand starting at position 937 of SEQ ID NO: 1881372
cauggaucucucuggauuc

SEQ ID NO: 2039363 - RNA, 19 nt, Artificial Sequence
  Description of Artificial Sequence: Synthetic oligonucleotide
  Antisense strand to SEQ ID NO: 2039362
gaauccagagagauccaug

SEQ ID NO: 2039364 - RNA, 19 nt, Artificial Sequence
  Description of Artificial Sequence: Synthetic oligonucleotide
  Sense strand starting at position 1307 of SEQ ID NO: 1881372
uuuaaauagcucugagaau

SEQ ID NO: 2039365 - RNA, 19 nt, Artificial Sequence
  Description of Artificial Sequence: Synthetic oligonucleotide
  Antisense strand to SEQ ID NO: 2039364
auucucagagcuauuuaaa

SEQ ID NO: 2039366 - RNA, 19 nt, Artificial Sequence
  Description of Artificial Sequence: Synthetic oligonucleotide
  Sense strand starting at position 1329 of SEQ ID NO: 1881372
uuguauuucugucccggua

SEQ ID NO: 2039367 - RNA, 19 nt, Artificial Sequence
  Description of Artificial Sequence: Synthetic oligonucleotide
  Antisense strand to SEQ ID NO: 2039366
uaccgggacagaaauacaa

SEQ ID NO: 2039368 - RNA, 19 nt, Artificial Sequence
  Description of Artificial Sequence: Synthetic oligonucleotide
  Sense strand starting at position 1403 of SEQ ID NO: 1881372
ccguuugcuagagaaagau

SEQ ID NO: 2039369 - RNA, 19 nt, Artificial Sequence
  Description of Artificial Sequence: Synthetic oligonucleotide
  Antisense strand to SEQ ID NO: 2039368
aucuuucucuagcaaacgg

SEQ ID NO: 2039370 - RNA, 19 nt, Artificial Sequence
  Description of Artificial Sequence: Synthetic oligonucleotide
  Sense strand starting at position 1442 of SEQ ID NO: 1881372
gaccuuucuguagaguuaa

SEQ ID NO: 2039371 - RNA, 19 nt, Artificial Sequence
  Description of Artificial Sequence: Synthetic oligonucleotide
  Antisense strand to SEQ ID NO: 2039370
uuaacucuacagaaagguc

SEQ ID NO: 2039372 - RNA, 19 nt, Artificial Sequence
  Description of Artificial Sequence: Synthetic oligonucleotide
  Sense strand starting at position 1478 of SEQ ID NO: 1881372
auccaauugugauugaaau

SEQ ID NO: 2039373 - RNA, 19 nt, Artificial Sequence
  Description of Artificial Sequence: Synthetic oligonucleotide
  Antisense strand to SEQ ID NO: 2039372
auuucaaucacaauuggau

SEQ ID NO: 2039374 - RNA, 19 nt, Artificial Sequence
  Description of Artificial Sequence: Synthetic oligonucleotide
  Sense strand starting at position 1479 of SEQ ID NO: 1881372
uccaauugugauugaaaua

SEQ ID NO: 2039375 - RNA, 19 nt, Artificial Sequence
  Description of Artificial Sequence: Synthetic oligonucleotide
  Antisense strand to SEQ ID NO: 2039374
uauuucaaucacaauugga

SEQ ID NO: 2039376 - RNA, 19 nt, Artificial Sequence
  Description of Artificial Sequence: Synthetic oligonucleotide
  Sense strand starting at position 1693 of SEQ ID NO: 1881372
guaggcuuuacacacgaga

SEQ ID NO: 2039377 - RNA, 19 nt, Artificial Sequence
  Description of Artificial Sequence: Synthetic oligonucleotide
  Antisense strand to SEQ ID NO: 2039376
ucucguguguaaagccuac

SEQ ID NO: 2039378 - RNA, 19 nt, Artificial Sequence
  Description of Artificial Sequence: Synthetic oligonucleotide
  Sense strand starting at position 1800 of SEQ ID NO: 1881372
agcuacagagcuuauuaga

SEQ ID NO: 2039379 - RNA, 19 nt, Artificial Sequence
  Description of Artificial Sequence: Synthetic oligonucleotide
  Antisense strand to SEQ ID NO: 2039378
ucuaauaagcucuguagcu

SEQ ID NO: 2039380 - RNA, 19 nt, Artificial Sequence
  Description of Artificial Sequence: Synthetic oligonucleotide
  Sense strand starting at position 2088 of SEQ ID NO: 1881372
gggaaacaucuauaucguu

SEQ ID NO: 2039381 - RNA, 19 nt, Artificial Sequence
  Description of Artificial Sequence: Synthetic oligonucleotide
  Antisense strand to SEQ ID NO: 2039380
aacgauauagauguuuccc

SEQ ID NO: 2039382 - RNA, 19 nt, Artificial Sequence
  Description of Artificial Sequence: Synthetic oligonucleotide
  Sense strand starting at position 2146 of SEQ ID NO: 1881372
gggagcuccucuuccacaa

SEQ ID NO: 2039383 - RNA, 19 nt, Artificial Sequence
  Description of Artificial Sequence: Synthetic oligonucleotide
  Antisense strand to SEQ ID NO: 2039382
uuguggaagaggagcuccc

SEQ ID NO: 2039384 - RNA, 19 nt, Artificial Sequence
  Description of Artificial Sequence: Synthetic oligonucleotide
  Sense strand starting at position 2305 of SEQ ID NO: 1881372
gucagagugccugacaacu

SEQ ID NO: 2039385 - RNA, 19 nt, Artificial Sequence
  Description of Artificial Sequence: Synthetic oligonucleotide
  Antisense strand to SEQ ID NO: 2039384
aguugucaggcacucugac

SEQ ID NO: 2039386 - RNA, 19 nt, Artificial Sequence
  Description of Artificial Sequence: Synthetic oligonucleotide
  Sense strand starting at position 2455 of SEQ ID NO: 1881372
cucugagaucuugagcauc

SEQ ID NO: 2039387 - RNA, 19 nt, Artificial Sequence
  Description of Artificial Sequence: Synthetic oligonucleotide
  Antisense strand to SEQ ID NO: 2039386
gaugcucaagaucucagag

SEQ ID NO: 2039388 - RNA, 19 nt, Artificial Sequence
  Description of Artificial Sequence: Synthetic oligonucleotide
  Sense strand starting at position 2457 of SEQ ID NO: 1881372
cugagaucuugagcaucac

SEQ ID NO: 2039389 - RNA, 19 nt, Artificial Sequence
  Description of Artificial Sequence: Synthetic oligonucleotide
  Antisense strand to SEQ ID NO: 2039388
gugaugcucaagaucucag

SEQ ID NO: 2039390 - RNA, 19 nt, Artificial Sequence
  Description of Artificial Sequence: Synthetic oligonucleotide
  Sense strand starting at position 2497 of SEQ ID NO: 1881372
gaaacaaagcugggauugu

SEQ ID NO: 2039391 - RNA, 19 nt, Artificial Sequence
  Description of Artificial Sequence: Synthetic oligonucleotide
  Antisense strand to SEQ ID NO: 2039390
acaaucccagcuuuguuuc

SEQ ID NO: 2039392 - RNA, 19 nt, Artificial Sequence
  Description of Artificial Sequence: Synthetic oligonucleotide
  Sense strand starting at position 2613 of SEQ ID NO: 1881372
ugugaaacaucuuuggauu

SEQ ID NO: 2039393 - RNA, 19 nt, Artificial Sequence
  Description of Artificial Sequence: Synthetic oligonucleotide
  Antisense strand to SEQ ID NO: 2039392
aauccaaagauguuucaca

SEQ ID NO: 2039394 - RNA, 19 nt, Artificial Sequence
  Description of Artificial Sequence: Synthetic oligonucleotide
  Sense strand starting at position 2616 of SEQ ID NO: 1881372
gaaacaucuuuggauuugu

SEQ ID NO: 2039395 - RNA, 19 nt, Artificial Sequence
  Description of Artificial Sequence: Synthetic oligonucleotide
  Antisense strand to SEQ ID NO: 2039394
acaaauccaaagauguuuc

SEQ ID NO: 2039396 - RNA, 19 nt, Artificial Sequence
  Description of Artificial Sequence: Synthetic oligonucleotide
  Sense strand starting at position 2683 of SEQ ID NO: 1881372
accucagcccuuggaagau

SEQ ID NO: 2039397 - RNA, 19 nt, Artificial Sequence
  Description of Artificial Sequence: Synthetic oligonucleotide
  Antisense strand to SEQ ID NO: 2039396
aucuuccaagggcugaggu

SEQ ID NO: 2039398 - RNA, 19 nt, Artificial Sequence
  Description of Artificial Sequence: Synthetic oligonucleotide
  Sense strand starting at position 3135 of SEQ ID NO: 1881372
gugacucaguccucacaaa

SEQ ID NO: 2039399 - RNA, 19 nt, Artificial Sequence
  Description of Artificial Sequence: Synthetic oligonucleotide
  Antisense strand to SEQ ID NO: 2039398
uuugugaggacugagucac

SEQ ID NO: 2039400 - RNA, 19 nt, Artificial Sequence
  Description of Artificial Sequence: Synthetic oligonucleotide
  Sense strand starting at position 3179 of SEQ ID NO: 1881372
cuggauuucugauacuuga

SEQ ID NO: 2039401 - RNA, 19 nt, Artificial Sequence
  Description of Artificial Sequence: Synthetic oligonucleotide
  Antisense strand to SEQ ID NO: 2039400
ucaaguaucagaaauccag

SEQ ID NO: 2039402 - RNA, 19 nt, Artificial Sequence
  Description of Artificial Sequence: Synthetic oligonucleotide
  Sense strand starting at position 3272 of SEQ ID NO: 1881372
gccuuuauacaugaagcaa

SEQ ID NO: 2039403 - RNA, 19 nt, Artificial Sequence
  Description of Artificial Sequence: Synthetic oligonucleotide
  Antisense strand to SEQ ID NO: 2039402
uugcuucauguauaaaggc

SEQ ID NO: 2039404 - RNA, 19 nt, Artificial Sequence
  Description of Artificial Sequence: Synthetic oligonucleotide
  Sense strand starting at position 3352 of SEQ ID NO: 1881372
cuuucucugcguguauauu

SEQ ID NO: 2039405 - RNA, 19 nt, Artificial Sequence
  Description of Artificial Sequence: Synthetic oligonucleotide
  Antisense strand to SEQ ID NO: 2039404
aauauacacgcagagaaag

SEQ ID NO: 2039406 - RNA, 19 nt, Artificial Sequence
  Description of Artificial Sequence: Synthetic oligonucleotide
  Sense strand starting at position 3353 of SEQ ID NO: 1881372
uuucucugcguguauauuu

SEQ ID NO: 2039407 - RNA, 19 nt, Artificial Sequence
  Description of Artificial Sequence: Synthetic oligonucleotide
  Antisense strand to SEQ ID NO: 2039406
aaauauacacgcagagaaa

SEQ ID NO: 2039408 - RNA, 19 nt, Artificial Sequence
  Description of Artificial Sequence: Synthetic oligonucleotide
  Sense strand starting at position 3511 of SEQ ID NO: 1881372
cuauuacaucuugaguacu

SEQ ID NO: 2039409 - RNA, 19 nt, Artificial Sequence
  Description of Artificial Sequence: Synthetic oligonucleotide
  Antisense strand to SEQ ID NO: 2039408
aguacucaagauguaauag

SEQ ID NO: 2039410 - RNA, 19 nt, Artificial Sequence
  Description of Artificial Sequence: Synthetic oligonucleotide
  Sense strand starting at position 3513 of SEQ ID NO: 1881372
auuacaucuugaguacuuu

SEQ ID NO: 2039411 - RNA, 19 nt, Artificial Sequence
  Description of Artificial Sequence: Synthetic oligonucleotide
  Antisense strand to SEQ ID NO: 2039410
aaaguacucaagauguaau

SEQ ID NO: 2039412 - RNA, 19 nt, Artificial Sequence
  Description of Artificial Sequence: Synthetic oligonucleotide
  Sense strand starting at position 3706 of SEQ ID NO: 1881372
ggaagugcugaucagcaga

SEQ ID NO: 2039413 - RNA, 19 nt, Artificial Sequence
  Description of Artificial Sequence: Synthetic oligonucleotide
  Antisense strand to SEQ ID NO: 2039412
ucugcugaucagcacuucc

SEQ ID NO: 2039414 - RNA, 19 nt, Artificial Sequence
  Description of Artificial Sequence: Synthetic oligonucleotide
  Sense strand starting at position 3708 of SEQ ID NO: 1881372
aagugcugaucagcagaaa

SEQ ID NO: 2039415 - RNA, 19 nt, Artificial Sequence
  Description of Artificial Sequence: Synthetic oligonucleotide
  Antisense strand to SEQ ID NO: 2039414
uuucugcugaucagcacuu

SEQ ID NO: 2039416 - RNA, 19 nt, Artificial Sequence
  Description of Artificial Sequence: Synthetic oligonucleotide
  Sense strand starting at position 3709 of SEQ ID NO: 1881372
agugcugaucagcagaaau

SEQ ID NO: 2039417 - RNA, 19 nt, Artificial Sequence
  Description of Artificial Sequence: Synthetic oligonucleotide
  Antisense strand to SEQ ID NO: 2039416
auuucugcugaucagcacu

SEQ ID NO: 2039418 - RNA, 19 nt, Artificial Sequence
  Description of Artificial Sequence: Synthetic oligonucleotide
  Sense strand starting at position 3711 of SEQ ID NO: 1881372
ugcugaucagcagaaauga

SEQ ID NO: 2039419 - RNA, 19 nt, Artificial Sequence
  Description of Artificial Sequence: Synthetic oligonucleotide
  Antisense strand to SEQ ID NO: 2039418
ucauuucugcugaucagca

SEQ ID NO: 2039420 - RNA, 19 nt, Artificial Sequence
  Description of Artificial Sequence: Synthetic oligonucleotide
  Sense strand starting at position 3745 of SEQ ID NO: 1881372
cgcuacuuagaucacauaa

SEQ ID NO: 2039421 - RNA, 19 nt, Artificial Sequence
  Description of Artificial Sequence: Synthetic oligonucleotide
  Antisense strand to SEQ ID NO: 2039420
uuaugugaucuaaguagcg

SEQ ID NO: 2039422 - RNA, 19 nt, Artificial Sequence
  Description of Artificial Sequence: Synthetic oligonucleotide
  Sense strand starting at position 3888 of SEQ ID NO: 1881372
gggcaaguaauguacccau

SEQ ID NO: 2039423 - RNA, 19 nt, Artificial Sequence
  Description of Artificial Sequence: Synthetic oligonucleotide
  Antisense strand to SEQ ID NO: 2039422
auggguacauuacuugccc

SEQ ID NO: 2039424 - RNA, 19 nt, Artificial Sequence
  Description of Artificial Sequence: Synthetic oligonucleotide
  Sense strand starting at position 411 of SEQ ID NO: 1881373
cuauccugaugucucaaga

SEQ ID NO: 2039425 - RNA, 19 nt, Artificial Sequence
  Description of Artificial Sequence: Synthetic oligonucleotide
  Antisense strand to SEQ ID NO: 2039424
ucuugagacaucaggauag

SEQ ID NO: 2039426 - RNA, 19 nt, Artificial Sequence
  Description of Artificial Sequence: Synthetic oligonucleotide
  Sense strand starting at position 450 of SEQ ID NO: 1881373
aucuguguggguuauguca

SEQ ID NO: 2039427 - RNA, 19 nt, Artificial Sequence
  Description of Artificial Sequence: Synthetic oligonucleotide
  Antisense strand to SEQ ID NO: 2039426
ugacauaacccacacagau

SEQ ID NO: 2039428 - RNA, 19 nt, Artificial Sequence
  Description of Artificial Sequence: Synthetic oligonucleotide
  Sense strand starting at position 459 of SEQ ID NO: 1881373
gguuaugucaaaggcaauc

SEQ ID NO: 2039429 - RNA, 19 nt, Artificial Sequence
  Description of Artificial Sequence: Synthetic oligonucleotide
  Antisense strand to SEQ ID NO: 2039428
gauugccuuugacauaacc

SEQ ID NO: 2039430 - RNA, 19 nt, Artificial Sequence
  Description of Artificial Sequence: Synthetic oligonucleotide
  Sense strand starting at position 504 of SEQ ID NO: 1881373
aucugaacccauugaguuu

SEQ ID NO: 2039431 - RNA, 19 nt, Artificial Sequence
  Description of Artificial Sequence: Synthetic oligonucleotide
  Antisense strand to SEQ ID NO: 2039430
aaacucaauggguucagau

SEQ ID NO: 2039432 - RNA, 19 nt, Artificial Sequence
  Description of Artificial Sequence: Synthetic oligonucleotide
  Sense strand starting at position 1184 of SEQ ID NO: 1881373
gcccaucacagaugaagga

SEQ ID NO: 2039433 - RNA, 19 nt, Artificial Sequence
  Description of Artificial Sequence: Synthetic oligonucleotide
  Antisense strand to SEQ ID NO: 2039432
uccuucaucugugaugggc

SEQ ID NO: 2039434 - RNA, 19 nt, Artificial Sequence
  Description of Artificial Sequence: Synthetic oligonucleotide
  Sense strand starting at position 1197 of SEQ ID NO: 1881373
gaaggacuuuguuccaguu

SEQ ID NO: 2039435 - RNA, 19 nt, Artificial Sequence
  Description of Artificial Sequence: Synthetic oligonucleotide
  Antisense strand to SEQ ID NO: 2039434
aacuggaacaaaguccuuc

SEQ ID NO: 2039436 - RNA, 19 nt, Artificial Sequence
  Description of Artificial Sequence: Synthetic oligonucleotide
  Sense strand starting at position 1315 of SEQ ID NO: 1881373
ggagcuaugacuugaaugu

SEQ ID NO: 2039437 - RNA, 19 nt, Artificial Sequence
  Description of Artificial Sequence: Synthetic oligonucleotide
  Antisense strand to SEQ ID NO: 2039436
acauucaagucauagcucc

SEQ ID NO: 2039438 - RNA, 19 nt, Artificial Sequence
  Description of Artificial Sequence: Synthetic oligonucleotide
  Sense strand starting at position 1316 of SEQ ID NO: 1881373
gagcuaugacuugaauguu

SEQ ID NO: 2039439 - RNA, 19 nt, Artificial Sequence
  Description of Artificial Sequence: Synthetic oligonucleotide
  Antisense strand to SEQ ID NO: 2039438
aacauucaagucauagcuc

SEQ ID NO: 2039440 - RNA, 19 nt, Artificial Sequence
  Description of Artificial Sequence: Synthetic oligonucleotide
  Sense strand starting at position 1322 of SEQ ID NO: 1881373
ugacuugaauguuucuaga

SEQ ID NO: 2039441 - RNA, 19 nt, Artificial Sequence
  Description of Artificial Sequence: Synthetic oligonucleotide
  Antisense strand to SEQ ID NO: 2039440
ucuagaaacauucaaguca

SEQ ID NO: 2039442 - RNA, 19 nt, Artificial Sequence
  Description of Artificial Sequence: Synthetic oligonucleotide
  Sense strand starting at position 1324 of SEQ ID NO: 1881373
acuugaauguuucuagaca

SEQ ID NO: 2039443 - RNA, 19 nt, Artificial Sequence
  Description of Artificial Sequence: Synthetic oligonucleotide
  Antisense strand to SEQ ID NO: 2039442
ugucuagaaacauucaagu

SEQ ID NO: 2039444 - RNA, 19 nt, Artificial Sequence
  Description of Artificial Sequence: Synthetic oligonucleotide
  Sense strand starting at position 1332 of SEQ ID NO: 1881373
guuucuagacaaggaauua

SEQ ID NO: 2039445 - RNA, 19 nt, Artificial Sequence
  Description of Artificial Sequence: Synthetic oligonucleotide
  Antisense strand to SEQ ID NO: 2039444
uaauuccuugucuagaaac

SEQ ID NO: 2039446 - RNA, 19 nt, Artificial Sequence
  Description of Artificial Sequence: Synthetic oligonucleotide
  Sense strand starting at position 1344 of SEQ ID NO: 1881373
ggaauuauuugacaaacac

SEQ ID NO: 2039447 - RNA, 19 nt, Artificial Sequence
  Description of Artificial Sequence: Synthetic oligonucleotide
  Antisense strand to SEQ ID NO: 2039446
guguuugucaaauaauucc

SEQ ID NO: 2039448 - RNA, 19 nt, Artificial Sequence
  Description of Artificial Sequence: Synthetic oligonucleotide
  Sense strand starting at position 1399 of SEQ ID NO: 1881373
acauuaauaacguaggguu

SEQ ID NO: 2039449 - RNA, 19 nt, Artificial Sequence
  Description of Artificial Sequence: Synthetic oligonucleotide
  Antisense strand to SEQ ID NO: 2039448
aacccuacguuauuaaugu

SEQ ID NO: 2039450 - RNA, 19 nt, Artificial Sequence
  Description of Artificial Sequence: Synthetic oligonucleotide
  Sense strand starting at position 1460 of SEQ ID NO: 1881373
cuucguucucccuaaagua

SEQ ID NO: 2039451 - RNA, 19 nt, Artificial Sequence
  Description of Artificial Sequence: Synthetic oligonucleotide
  Antisense strand to SEQ ID NO: 2039450
uacuuuagggagaacgaag

SEQ ID NO: 2039452 - RNA, 19 nt, Artificial Sequence
  Description of Artificial Sequence: Synthetic oligonucleotide
  Sense strand starting at position 2838 of SEQ ID NO: 1881373
ggucucuuaccguauaaag

SEQ ID NO: 2039453 - RNA, 19 nt, Artificial Sequence
  Description of Artificial Sequence: Synthetic oligonucleotide
  Antisense strand to SEQ ID NO: 2039452
cuuuauacgguaagagacc

SEQ ID NO: 2039454 - RNA, 19 nt, Artificial Sequence
  Description of Artificial Sequence: Synthetic oligonucleotide
  Sense strand starting at position 2840 of SEQ ID NO: 1881373
ucucuuaccguauaaaguu

SEQ ID NO: 2039455 - RNA, 19 nt, Artificial Sequence
  Description of Artificial Sequence: Synthetic oligonucleotide
  Antisense strand to SEQ ID NO: 2039454
aacuuuauacgguaagaga

SEQ ID NO: 2039456 - RNA, 19 nt, Artificial Sequence
  Description of Artificial Sequence: Synthetic oligonucleotide
  Sense strand starting at position 2933 of SEQ ID NO: 1881373
ggaggacggugaguaaauu

SEQ ID NO: 2039457 - RNA, 19 nt, Artificial Sequence
  Description of Artificial Sequence: Synthetic oligonucleotide
  Antisense strand to SEQ ID NO: 2039456
aauuuacucaccguccucc

SEQ ID NO: 2039458 - RNA, 19 nt, Artificial Sequence
  Description of Artificial Sequence: Synthetic oligonucleotide
  Sense strand starting at position 2954 of SEQ ID NO: 1881373
aguguuugggcugcuguua

SEQ ID NO: 2039459 - RNA, 19 nt, Artificial Sequence
  Description of Artificial Sequence: Synthetic oligonucleotide
  Antisense strand to SEQ ID NO: 2039458
uaacagcagcccaaacacu

SEQ ID NO: 2039460 - RNA, 19 nt, Artificial Sequence
  Description of Artificial Sequence: Synthetic oligonucleotide
  Sense strand starting at position 2955 of SEQ ID NO: 1881373
guguuugggcugcuguuaa

SEQ ID NO: 2039461 - RNA, 19 nt, Artificial Sequence
  Description of Artificial Sequence: Synthetic oligonucleotide
  Antisense strand to SEQ ID NO: 2039460
uuaacagcagcccaaacac

SEQ ID NO: 2039462 - RNA, 19 nt, Artificial Sequence
  Description of Artificial Sequence: Synthetic oligonucleotide
  Sense strand starting at position 2987 of SEQ ID NO: 1881373
ggagaagcaacuugucauu

SEQ ID NO: 2039463 - RNA, 19 nt, Artificial Sequence
  Description of Artificial Sequence: Synthetic oligonucleotide
  Antisense strand to SEQ ID NO: 2039462
aaugacaaguugcuucucc

SEQ ID NO: 2039464 - RNA, 19 nt, Artificial Sequence
  Description of Artificial Sequence: Synthetic oligonucleotide
  Sense strand starting at position 3194 of SEQ ID NO: 1881373
gagguugcuguugaaaggu

SEQ ID NO: 2039465 - RNA, 19 nt, Artificial Sequence
  Description of Artificial Sequence: Synthetic oligonucleotide
  Antisense strand to SEQ ID NO: 2039464
accuuucaacagcaaccuc

SEQ ID NO: 2039466 - RNA, 19 nt, Artificial Sequence
  Description of Artificial Sequence: Synthetic oligonucleotide
  Sense strand starting at position 3200 of SEQ ID NO: 1881373
gcuguugaaagguaauguu

SEQ ID NO: 2039467 - RNA, 19 nt, Artificial Sequence
  Description of Artificial Sequence: Synthetic oligonucleotide
  Antisense strand to SEQ ID NO: 2039466
aacauuaccuuucaacagc

SEQ ID NO: 2039468 - RNA, 19 nt, Artificial Sequence
  Description of Artificial Sequence: Synthetic oligonucleotide
  Sense strand starting at position 3273 of SEQ ID NO: 1881373
cagaaaucacaccgagucu

SEQ ID NO: 2039469 - RNA, 19 nt, Artificial Sequence
  Description of Artificial Sequence: Synthetic oligonucleotide
  Antisense strand to SEQ ID NO: 2039468
agacucggugugauuucug

SEQ ID NO: 2039470 - RNA, 19 nt, Artificial Sequence
  Description of Artificial Sequence: Synthetic oligonucleotide
  Sense strand starting at position 3337 of SEQ ID NO: 1881373
ugaguagguggauaguuaa

SEQ ID NO: 2039471 - RNA, 19 nt, Artificial Sequence
  Description of Artificial Sequence: Synthetic oligonucleotide
  Antisense strand to SEQ ID NO: 2039470
uuaacuauccaccuacuca

SEQ ID NO: 2039472 - RNA, 19 nt, Artificial Sequence
  Description of Artificial Sequence: Synthetic oligonucleotide
  Sense strand starting at position 3350 of SEQ ID NO: 1881373
aguuaaggaaacuguagau

SEQ ID NO: 2039473 - RNA, 19 nt, Artificial Sequence
  Description of Artificial Sequence: Synthetic oligonucleotide
  Antisense strand to SEQ ID NO: 2039472
aucuacaguuuccuuaacu

SEQ ID NO: 2039474 - RNA, 19 nt, Artificial Sequence
  Description of Artificial Sequence: Synthetic oligonucleotide
  Sense strand starting at position 3359 of SEQ ID NO: 1881373
aacuguagaucugcugaaa

SEQ ID NO: 2039475 - RNA, 19 nt, Artificial Sequence
  Description of Artificial Sequence: Synthetic oligonucleotide
  Antisense strand to SEQ ID NO: 2039474
uuucagcagaucuacaguu

SEQ ID NO: 2039476 - RNA, 19 nt, Artificial Sequence
  Description of Artificial Sequence: Synthetic oligonucleotide
  Sense strand starting at position 3362 of SEQ ID NO: 1881373
uguagaucugcugaaagcu

SEQ ID NO: 2039477 - RNA, 19 nt, Artificial Sequence
  Description of Artificial Sequence: Synthetic oligonucleotide
  Antisense strand to SEQ ID NO: 2039476
agcuuucagcagaucuaca

SEQ ID NO: 2039478 - RNA, 19 nt, Artificial Sequence
  Description of Artificial Sequence: Synthetic oligonucleotide
  Sense strand starting at position 3412 of SEQ ID NO: 1881373
accuuugaaccucguaacu

SEQ ID NO: 2039479 - RNA, 19 nt, Artificial Sequence
  Description of Artificial Sequence: Synthetic oligonucleotide
  Antisense strand to SEQ ID NO: 2039478
aguuacgagguucaaaggu

SEQ ID NO: 2039480 - RNA, 19 nt, Artificial Sequence
  Description of Artificial Sequence: Synthetic oligonucleotide
  Sense strand starting at position 3546 of SEQ ID NO: 1881373
uguuaaauauuugggaaca

SEQ ID NO: 2039481 - RNA, 19 nt, Artificial Sequence
  Description of Artificial Sequence: Synthetic oligonucleotide
  Antisense strand to SEQ ID NO: 2039480
uguucccaaauauuuaaca

SEQ ID NO: 2039482 - RNA, 19 nt, Artificial Sequence
  Description of Artificial Sequence: Synthetic oligonucleotide
  Sense strand starting at position 3547 of SEQ ID NO: 1881373
guuaaauauuugggaacau

SEQ ID NO: 2039483 - RNA, 19 nt, Artificial Sequence
  Description of Artificial Sequence: Synthetic oligonucleotide
  Antisense strand to SEQ ID NO: 2039482
auguucccaaauauuuaac

SEQ ID NO: 2039484 - RNA, 19 nt, Artificial Sequence
  Description of Artificial Sequence: Synthetic oligonucleotide
  Sense strand starting at position 3548 of SEQ ID NO: 1881373
uuaaauauuugggaacauc

SEQ ID NO: 2039485 - RNA, 19 nt, Artificial Sequence
  Description of Artificial Sequence: Synthetic oligonucleotide
  Antisense strand to SEQ ID NO: 2039484
gauguucccaaauauuuaa

SEQ ID NO: 2039486 - RNA, 19 nt, Artificial Sequence
  Description of Artificial Sequence: Synthetic oligonucleotide
  Sense strand starting at position 3740 of SEQ ID NO: 1881373
cacagagggucuuuggaua

SEQ ID NO: 2039487 - RNA, 19 nt, Artificial Sequence
  Description of Artificial Sequence: Synthetic oligonucleotide
  Antisense strand to SEQ ID NO: 2039486
uauccaaagacccucugug

SEQ ID NO: 2039488 - RNA, 19 nt, Artificial Sequence
  Description of Artificial Sequence: Synthetic oligonucleotide
  Sense strand starting at position 3759 of SEQ ID NO: 1881373
auggcaacuuugcuuauaa

SEQ ID NO: 2039489 - RNA, 19 nt, Artificial Sequence
  Description of Artificial Sequence: Synthetic oligonucleotide
  Antisense strand to SEQ ID NO: 2039488
uuauaagcaaaguugccau

SEQ ID NO: 2039490 - RNA, 19 nt, Artificial Sequence
  Description of Artificial Sequence: Synthetic oligonucleotide
  Sense strand starting at position 3760 of SEQ ID NO: 1881373
uggcaacuuugcuuauaag

SEQ ID NO: 2039491 - RNA, 19 nt, Artificial Sequence
  Description of Artificial Sequence: Synthetic oligonucleotide
  Antisense strand to SEQ ID NO: 2039490
cuuauaagcaaaguugcca

SEQ ID NO: 2039492 - RNA, 19 nt, Artificial Sequence
  Description of Artificial Sequence: Synthetic oligonucleotide
  Sense strand starting at position 3761 of SEQ ID NO: 1881373
ggcaacuuugcuuauaaga

SEQ ID NO: 2039493 - RNA, 19 nt, Artificial Sequence
  Description of Artificial Sequence: Synthetic oligonucleotide
  Antisense strand to SEQ ID NO: 2039492
ucuuauaagcaaaguugcc

SEQ ID NO: 2039494 - RNA, 19 nt, Artificial Sequence
  Description of Artificial Sequence: Synthetic oligonucleotide
  Sense strand starting at position 3868 of SEQ ID NO: 1881373
uugugaugucgcuuuccuu

SEQ ID NO: 2039495 - RNA, 19 nt, Artificial Sequence
  Description of Artificial Sequence: Synthetic oligonucleotide
  Antisense strand to SEQ ID NO: 2039494
aaggaaagcgacaucacaa

SEQ ID NO: 2039496 - RNA, 19 nt, Artificial Sequence
  Description of Artificial Sequence: Synthetic oligonucleotide
  Sense strand starting at position 3916 of SEQ ID NO: 1881373
gucucagucccagauugca

SEQ ID NO: 2039497 - RNA, 19 nt, Artificial Sequence
  Description of Artificial Sequence: Synthetic oligonucleotide
  Antisense strand to SEQ ID NO: 2039496
ugcaaucugggacugagac

SEQ ID NO: 2039498 - RNA, 19 nt, Artificial Sequence
  Description of Artificial Sequence: Synthetic oligonucleotide
  Sense strand starting at position 3924 of SEQ ID NO: 1881373
cccagauugcaccauaugu

SEQ ID NO: 2039499 - RNA, 19 nt, Artificial Sequence
  Description of Artificial Sequence: Synthetic oligonucleotide
  Antisense strand to SEQ ID NO: 2039498
acauauggugcaaucuggg

SEQ ID NO: 2039500 - RNA, 19 nt, Artificial Sequence
  Description of Artificial Sequence: Synthetic oligonucleotide
  Sense strand starting at position 3934 of SEQ ID NO: 1881373
accauauguuguuuacaug

SEQ ID NO: 2039501 - RNA, 19 nt, Artificial Sequence
  Description of Artificial Sequence: Synthetic oligonucleotide
  Antisense strand to SEQ ID NO: 2039500
cauguaaacaacauauggu

SEQ ID NO: 2039502 - RNA, 19 nt, Artificial Sequence
  Description of Artificial Sequence: Synthetic oligonucleotide
  Sense strand starting at position 3944 of SEQ ID NO: 1881373
guuuacauggugcaguaaa

SEQ ID NO: 2039503 - RNA, 19 nt, Artificial Sequence
  Description of Artificial Sequence: Synthetic oligonucleotide
  Antisense strand to SEQ ID NO: 2039502
uuuacugcaccauguaaac

SEQ ID NO: 2039504 - RNA, 19 nt, Artificial Sequence
  Description of Artificial Sequence: Synthetic oligonucleotide
  Sense strand starting at position 20 of SEQ ID NO: 1881374
uugcuuagacucgcguaaa

SEQ ID NO: 2039505 - RNA, 19 nt, Artificial Sequence
  Description of Artificial Sequence: Synthetic oligonucleotide
  Antisense strand to SEQ ID NO: 2039504
uuuacgcgagucuaagcaa

SEQ ID NO: 2039506 - RNA, 19 nt, Artificial Sequence
  Description of Artificial Sequence: Synthetic oligonucleotide
  Sense strand starting at position 23 of SEQ ID NO: 1881374
cuuagacucgcguaaacuc

SEQ ID NO: 2039507 - RNA, 19 nt, Artificial Sequence
  Description of Artificial Sequence: Synthetic oligonucleotide
  Antisense strand to SEQ ID NO: 2039506
gaguuuacgcgagucuaag

SEQ ID NO: 2039508 - RNA, 19 nt, Artificial Sequence
  Description of Artificial Sequence: Synthetic oligonucleotide
  Sense strand starting at position 32 of SEQ ID NO: 1881374
gcguaaacucugugaaagg

SEQ ID NO: 2039509 - RNA, 19 nt, Artificial Sequence
  Description of Artificial Sequence: Synthetic oligonucleotide
  Antisense strand to SEQ ID NO: 2039508
ccuuucacagaguuuacgc

SEQ ID NO: 2039510 - RNA, 19 nt, Artificial Sequence
  Description of Artificial Sequence: Synthetic oligonucleotide
  Sense strand starting at position 354 of SEQ ID NO: 1881374
agcuguguccuccaccaca

SEQ ID NO: 2039511 - RNA, 19 nt, Artificial Sequence
  Description of Artificial Sequence: Synthetic oligonucleotide
  Antisense strand to SEQ ID NO: 2039510
ugugguggaggacacagcu

SEQ ID NO: 2039512 - RNA, 19 nt, Artificial Sequence
  Description of Artificial Sequence: Synthetic oligonucleotide
  Sense strand starting at position 421 of SEQ ID NO: 1881374
ccuuaacuguggccaaaua

SEQ ID NO: 2039513 - RNA, 19 nt, Artificial Sequence
  Description of Artificial Sequence: Synthetic oligonucleotide
  Antisense strand to SEQ ID NO: 2039512
uauuuggccacaguuaagg

SEQ ID NO: 2039514 - RNA, 19 nt, Artificial Sequence
  Description of Artificial Sequence: Synthetic oligonucleotide
  Sense strand starting at position 422 of SEQ ID NO: 1881374
cuuaacuguggccaaauaa

SEQ ID NO: 2039515 - RNA, 19 nt, Artificial Sequence
  Description of Artificial Sequence: Synthetic oligonucleotide
  Antisense strand to SEQ ID NO: 2039514
uuauuuggccacaguuaag

SEQ ID NO: 2039516 - RNA, 19 nt, Artificial Sequence
  Description of Artificial Sequence: Synthetic oligonucleotide
  Sense strand starting at position 453 of SEQ ID NO: 1881374
gauugagaccugugucagg

SEQ ID NO: 2039517 - RNA, 19 nt, Artificial Sequence
  Description of Artificial Sequence: Synthetic oligonucleotide
  Antisense strand to SEQ ID NO: 2039516
ccugacacaggucucaauc

SEQ ID NO: 2039518 - RNA, 19 nt, Artificial Sequence
  Description of Artificial Sequence: Synthetic oligonucleotide
  Sense strand starting at position 513 of SEQ ID NO: 1881374
cucugauuacugggcuuaa

SEQ ID NO: 2039519 - RNA, 19 nt, Artificial Sequence
  Description of Artificial Sequence: Synthetic oligonucleotide
  Antisense strand to SEQ ID NO: 2039518
uuaagcccaguaaucagag

SEQ ID NO: 2039520 - RNA, 19 nt, Artificial Sequence
  Description of Artificial Sequence: Synthetic oligonucleotide
  Sense strand starting at position 514 of SEQ ID NO: 1881374
ucugauuacugggcuuaaa

SEQ ID NO: 2039521 - RNA, 19 nt, Artificial Sequence
  Description of Artificial Sequence: Synthetic oligonucleotide
  Antisense strand to SEQ ID NO: 2039520
uuuaagcccaguaaucaga

SEQ ID NO: 2039522 - RNA, 19 nt, Artificial Sequence
  Description of Artificial Sequence: Synthetic oligonucleotide
  Sense strand starting at position 614 of SEQ ID NO: 1881374
agacccucgcgguaaagau

SEQ ID NO: 2039523 - RNA, 19 nt, Artificial Sequence
  Description of Artificial Sequence: Synthetic oligonucleotide
  Antisense strand to SEQ ID NO: 2039522
aucuuuaccgcgagggucu

SEQ ID NO: 2039524 - RNA, 19 nt, Artificial Sequence
  Description of Artificial Sequence: Synthetic oligonucleotide
  Sense strand starting at position 626 of SEQ ID NO: 1881374
uaaagauggcgugaccaga

SEQ ID NO: 2039525 - RNA, 19 nt, Artificial Sequence
  Description of Artificial Sequence: Synthetic oligonucleotide
  Antisense strand to SEQ ID NO: 2039524
ucuggucacgccaucuuua

SEQ ID NO: 2039526 - RNA, 19 nt, Artificial Sequence
  Description of Artificial Sequence: Synthetic oligonucleotide
  Sense strand starting at position 2096 of SEQ ID NO: 1881374
gaguuuccuguuuaagaug

SEQ ID NO: 2039527 - RNA, 19 nt, Artificial Sequence
  Description of Artificial Sequence: Synthetic oligonucleotide
  Antisense strand to SEQ ID NO: 2039526
caucuuaaacaggaaacuc

SEQ ID NO: 2039528 - RNA, 19 nt, Artificial Sequence
  Description of Artificial Sequence: Synthetic oligonucleotide
  Sense strand starting at position 2715 of SEQ ID NO: 1881374
ggucaaauccgugggucaa

SEQ ID NO: 2039529 - RNA, 19 nt, Artificial Sequence
  Description of Artificial Sequence: Synthetic oligonucleotide
  Antisense strand to SEQ ID NO: 2039528
uugacccacggauuugacc

SEQ ID NO: 2039530 - RNA, 19 nt, Artificial Sequence
  Description of Artificial Sequence: Synthetic oligonucleotide
  Sense strand starting at position 2716 of SEQ ID NO: 1881374
gucaaauccgugggucaag

SEQ ID NO: 2039531 - RNA, 19 nt, Artificial Sequence
  Description of Artificial Sequence: Synthetic oligonucleotide
  Antisense strand to SEQ ID NO: 2039530
cuugacccacggauuugac

SEQ ID NO: 2039532 - RNA, 19 nt, Artificial Sequence
  Description of Artificial Sequence: Synthetic oligonucleotide
  Sense strand starting at position 2797 of SEQ ID NO: 1881374
gcauuagaccauugacccu

SEQ ID NO: 2039533 - RNA, 19 nt, Artificial Sequence
  Description of Artificial Sequence: Synthetic oligonucleotide
  Antisense strand to SEQ ID NO: 2039532
agggucaauggucuaaugc

SEQ ID NO: 2039534 - RNA, 19 nt, Artificial Sequence
  Description of Artificial Sequence: Synthetic oligonucleotide
  Sense strand starting at position 2825 of SEQ ID NO: 1881374
cuccuuguugauggagaau

SEQ ID NO: 2039535 - RNA, 19 nt, Artificial Sequence
  Description of Artificial Sequence: Synthetic oligonucleotide
  Antisense strand to SEQ ID NO: 2039534
auucuccaucaacaaggag

SEQ ID NO: 2039536 - RNA, 19 nt, Artificial Sequence
  Description of Artificial Sequence: Synthetic oligonucleotide
  Sense strand starting at position 2869 of SEQ ID NO: 1881374
cuggauagcgauuggaacu

SEQ ID NO: 2039537 - RNA, 19 nt, Artificial Sequence
  Description of Artificial Sequence: Synthetic oligonucleotide
  Antisense strand to SEQ ID NO: 2039536
aguuccaaucgcuauccag

SEQ ID NO: 2039538 - RNA, 19 nt, Artificial Sequence
  Description of Artificial Sequence: Synthetic oligonucleotide
  Sense strand starting at position 2870 of SEQ ID NO: 1881374
uggauagcgauuggaacuu

SEQ ID NO: 2039539 - RNA, 19 nt, Artificial Sequence
  Description of Artificial Sequence: Synthetic oligonucleotide
  Antisense strand to SEQ ID NO: 2039538
aaguuccaaucgcuaucca

SEQ ID NO: 2039540 - RNA, 19 nt, Artificial Sequence
  Description of Artificial Sequence: Synthetic oligonucleotide
  Sense strand starting at position 2883 of SEQ ID NO: 1881374
gaacuuggccucuagcaga

SEQ ID NO: 2039541 - RNA, 19 nt, Artificial Sequence
  Description of Artificial Sequence: Synthetic oligonucleotide
  Antisense strand to SEQ ID NO: 2039540
ucugcuagaggccaaguuc

SEQ ID NO: 2039542 - RNA, 19 nt, Artificial Sequence
  Description of Artificial Sequence: Synthetic oligonucleotide
  Sense strand starting at position 3072 of SEQ ID NO: 1881374
aguuaaugaccuugccuau

SEQ ID NO: 2039543 - RNA, 19 nt, Artificial Sequence
  Description of Artificial Sequence: Synthetic oligonucleotide
  Antisense strand to SEQ ID NO: 2039542
auaggcaaggucauuaacu

SEQ ID NO: 2039544 - RNA, 19 nt, Artificial Sequence
  Description of Artificial Sequence: Synthetic oligonucleotide
  Sense strand starting at position 3141 of SEQ ID NO: 1881374
ccaggaugugcauaguaua

SEQ ID NO: 2039545 - RNA, 19 nt, Artificial Sequence
  Description of Artificial Sequence: Synthetic oligonucleotide
  Antisense strand to SEQ ID NO: 2039544
uauacuaugcacauccugg

SEQ ID NO: 2039546 - RNA, 19 nt, Artificial Sequence
  Description of Artificial Sequence: Synthetic oligonucleotide
  Sense strand starting at position 3207 of SEQ ID NO: 1881374
cucuaaacuuugguuauga

SEQ ID NO: 2039547 - RNA, 19 nt, Artificial Sequence
  Description of Artificial Sequence: Synthetic oligonucleotide
  Antisense strand to SEQ ID NO: 2039546
ucauaaccaaaguuuagag

SEQ ID NO: 2039548 - RNA, 19 nt, Artificial Sequence
  Description of Artificial Sequence: Synthetic oligonucleotide
  Sense strand starting at position 3220 of SEQ ID NO: 1881374
uuaugacaucugugagcua

SEQ ID NO: 2039549 - RNA, 19 nt, Artificial Sequence
  Description of Artificial Sequence: Synthetic oligonucleotide
  Antisense strand to SEQ ID NO: 2039548
uagcucacagaugucauaa

SEQ ID NO: 2039550 - RNA, 19 nt, Artificial Sequence
  Description of Artificial Sequence: Synthetic oligonucleotide
  Sense strand starting at position 3333 of SEQ ID NO: 1881374
uuaauaggugcuugacagu

SEQ ID NO: 2039551 - RNA, 19 nt, Artificial Sequence
  Description of Artificial Sequence: Synthetic oligonucleotide
  Antisense strand to SEQ ID NO: 2039550
acugucaagcaccuauuaa

SEQ ID NO: 2039552 - RNA, 19 nt, Artificial Sequence
  Description of Artificial Sequence: Synthetic oligonucleotide
  Sense strand starting at position 3349 of SEQ ID NO: 1881374
aguauagugagguagcaaa

SEQ ID NO: 2039553 - RNA, 19 nt, Artificial Sequence
  Description of Artificial Sequence: Synthetic oligonucleotide
  Antisense strand to SEQ ID NO: 2039552
uuugcuaccucacuauacu

SEQ ID NO: 2039554 - RNA, 19 nt, Artificial Sequence
  Description of Artificial Sequence: Synthetic oligonucleotide
  Sense strand starting at position 3480 of SEQ ID NO: 1881374
gaacuagggugcuuaccau

SEQ ID NO: 2039555 - RNA, 19 nt, Artificial Sequence
  Description of Artificial Sequence: Synthetic oligonucleotide
  Antisense strand to SEQ ID NO: 2039554
augguaagcacccuaguuc

SEQ ID NO: 2039556 - RNA, 19 nt, Artificial Sequence
  Description of Artificial Sequence: Synthetic oligonucleotide
  Sense strand starting at position 3487 of SEQ ID NO: 1881374
ggugcuuaccaugagugua

SEQ ID NO: 2039557 - RNA, 19 nt, Artificial Sequence
  Description of Artificial Sequence: Synthetic oligonucleotide
  Antisense strand to SEQ ID NO: 2039556
uacacucaugguaagcacc

SEQ ID NO: 2039558 - RNA, 19 nt, Artificial Sequence
  Description of Artificial Sequence: Synthetic oligonucleotide
  Sense strand starting at position 3492 of SEQ ID NO: 1881374
uuaccaugaguguagacuu

SEQ ID NO: 2039559 - RNA, 19 nt, Artificial Sequence
  Description of Artificial Sequence: Synthetic oligonucleotide
  Antisense strand to SEQ ID NO: 2039558
aagucuacacucaugguaa

SEQ ID NO: 2039560 - RNA, 19 nt, Artificial Sequence
  Description of Artificial Sequence: Synthetic oligonucleotide
  Sense strand starting at position 3509 of SEQ ID NO: 1881374
uugaauugaugagaaacau

SEQ ID NO: 2039561 - RNA, 19 nt, Artificial Sequence
  Description of Artificial Sequence: Synthetic oligonucleotide
  Antisense strand to SEQ ID NO: 2039560
auguuucucaucaauucaa

SEQ ID NO: 2039562 - RNA, 19 nt, Artificial Sequence
  Description of Artificial Sequence: Synthetic oligonucleotide
  Sense strand starting at position 3578 of SEQ ID NO: 1881374
cagaguguuuagcugaaau

SEQ ID NO: 2039563 - RNA, 19 nt, Artificial Sequence
  Description of Artificial Sequence: Synthetic oligonucleotide
  Antisense strand to SEQ ID NO: 2039562
auuucagcuaaacacucug

SEQ ID NO: 2039564 - RNA, 19 nt, Artificial Sequence
  Description of Artificial Sequence: Synthetic oligonucleotide
  Sense strand starting at position 3580 of SEQ ID NO: 1881374
gaguguuuagcugaaauau

SEQ ID NO: 2039565 - RNA, 19 nt, Artificial Sequence
  Description of Artificial Sequence: Synthetic oligonucleotide
  Antisense strand to SEQ ID NO: 2039564
auauuucagcuaaacacuc

SEQ ID NO: 2039566 - RNA, 19 nt, Artificial Sequence
  Description of Artificial Sequence: Synthetic oligonucleotide
  Sense strand starting at position 3667 of SEQ ID NO: 1881374
gagauacucuugguuuguc

SEQ ID NO: 2039567 - RNA, 19 nt, Artificial Sequence
  Description of Artificial Sequence: Synthetic oligonucleotide
  Antisense strand to SEQ ID NO: 2039566
gacaaaccaagaguaucuc

SEQ ID NO: 2039568 - RNA, 19 nt, Artificial Sequence
  Description of Artificial Sequence: Synthetic oligonucleotide
  Sense strand starting at position 3668 of SEQ ID NO: 1881374
agauacucuugguuuguca

SEQ ID NO: 2039569 - RNA, 19 nt, Artificial Sequence
  Description of Artificial Sequence: Synthetic oligonucleotide
  Antisense strand to SEQ ID NO: 2039568
ugacaaaccaagaguaucu

SEQ ID NO: 2039570 - RNA, 19 nt, Artificial Sequence
  Description of Artificial Sequence: Synthetic oligonucleotide
  Sense strand starting at position 3671 of SEQ ID NO: 1881374
uacucuugguuugucaaga

SEQ ID NO: 2039571 - RNA, 19 nt, Artificial Sequence
  Description of Artificial Sequence: Synthetic oligonucleotide
  Antisense strand to SEQ ID NO: 2039570
ucuugacaaaccaagagua

SEQ ID NO: 2039572 - RNA, 19 nt, Artificial Sequence
  Description of Artificial Sequence: Synthetic oligonucleotide
  Sense strand starting at position 3672 of SEQ ID NO: 1881374
acucuugguuugucaagaa

SEQ ID NO: 2039573 - RNA, 19 nt, Artificial Sequence
  Description of Artificial Sequence: Synthetic oligonucleotide
  Antisense strand to SEQ ID NO: 2039572
uucuugacaaaccaagagu

SEQ ID NO: 2039574 - RNA, 19 nt, Artificial Sequence
  Description of Artificial Sequence: Synthetic oligonucleotide
  Sense strand starting at position 3763 of SEQ ID NO: 1881374
uucuguaaauucuuagaag

SEQ ID NO: 2039575 - RNA, 19 nt, Artificial Sequence
  Description of Artificial Sequence: Synthetic oligonucleotide
  Antisense strand to SEQ ID NO: 2039574
cuucuaagaauuuacagaa

SEQ ID NO: 2039576 - RNA, 19 nt, Artificial Sequence
  Description of Artificial Sequence: Synthetic oligonucleotide
  Sense strand starting at position 3819 of SEQ ID NO: 1881374
guguccaagaacuggaaau

SEQ ID NO: 2039577 - RNA, 19 nt, Artificial Sequence
  Description of Artificial Sequence: Synthetic oligonucleotide
  Antisense strand to SEQ ID NO: 2039576
auuuccaguucuuggacac

SEQ ID NO: 2039578 - RNA, 19 nt, Artificial Sequence
  Description of Artificial Sequence: Synthetic oligonucleotide
  Sense strand starting at position 3918 of SEQ ID NO: 1881374
caacgauacagugagaguu

SEQ ID NO: 2039579 - RNA, 19 nt, Artificial Sequence
  Description of Artificial Sequence: Synthetic oligonucleotide
  Antisense strand to SEQ ID NO: 2039578
aacucucacuguaucguug

SEQ ID NO: 2039580 - RNA, 19 nt, Artificial Sequence
  Description of Artificial Sequence: Synthetic oligonucleotide
  Sense strand starting at position 3937 of SEQ ID NO: 1881374
uguggcauuccagaguaaa

SEQ ID NO: 2039581 - RNA, 19 nt, Artificial Sequence
  Description of Artificial Sequence: Synthetic oligonucleotide
  Antisense strand to SEQ ID NO: 2039580
uuuacucuggaaugccaca

SEQ ID NO: 2039582 - RNA, 19 nt, Artificial Sequence
  Description of Artificial Sequence: Synthetic oligonucleotide
  Sense strand starting at position 3948 of SEQ ID NO: 1881374
agaguaaaggcuuaccuuu

SEQ ID NO: 2039583 - RNA, 19 nt, Artificial Sequence
  Description of Artificial Sequence: Synthetic oligonucleotide
  Antisense strand to SEQ ID NO: 2039582
aaagguaagccuuuacucu

SEQ ID NO: 2039584 - RNA, 19 nt, Artificial Sequence
  Description of Artificial Sequence: Synthetic oligonucleotide
  Sense strand starting at position 148 of SEQ ID NO: 1881375
agaagucaguggcuuggaa

SEQ ID NO: 2039585 - RNA, 19 nt, Artificial Sequence
  Description of Artificial Sequence: Synthetic oligonucleotide
  Antisense strand to SEQ ID NO: 2039584
uuccaagccacugacuucu

SEQ ID NO: 2039586 - RNA, 19 nt, Artificial Sequence
  Description of Artificial Sequence: Synthetic oligonucleotide
  Sense strand starting at position 179 of SEQ ID NO: 1881375
aaauuugggucauaaguaa

SEQ ID NO: 2039587 - RNA, 19 nt, Artificial Sequence
  Description of Artificial Sequence: Synthetic oligonucleotide
  Antisense strand to SEQ ID NO: 2039586
uuacuuaugacccaaauuu

SEQ ID NO: 2039588 - RNA, 19 nt, Artificial Sequence
  Description of Artificial Sequence: Synthetic oligonucleotide
  Sense strand starting at position 200 of SEQ ID NO: 1881375
caacuaagagcugguauca

SEQ ID NO: 2039589 - RNA, 19 nt, Artificial Sequence
  Description of Artificial Sequence: Synthetic oligonucleotide
  Antisense strand to SEQ ID NO: 2039588
ugauaccagcucuuaguug

SEQ ID NO: 2039590 - RNA, 19 nt, Artificial Sequence
  Description of Artificial Sequence: Synthetic oligonucleotide
  Sense strand starting at position 257 of SEQ ID NO: 1881375
acaggugaucuuuagugau

SEQ ID NO: 2039591 - RNA, 19 nt, Artificial Sequence
  Description of Artificial Sequence: Synthetic oligonucleotide
  Antisense strand to SEQ ID NO: 2039590
aucacuaaagaucaccugu

SEQ ID NO: 2039592 - RNA, 19 nt, Artificial Sequence
  Description of Artificial Sequence: Synthetic oligonucleotide
  Sense strand starting at position 281 of SEQ ID NO: 1881375
ugagauagcugagcuccaa

SEQ ID NO: 2039593 - RNA, 19 nt, Artificial Sequence
  Description of Artificial Sequence: Synthetic oligonucleotide
  Antisense strand to SEQ ID NO: 2039592
uuggagcucagcuaucuca

SEQ ID NO: 2039594 - RNA, 19 nt, Artificial Sequence
  Description of Artificial Sequence: Synthetic oligonucleotide
  Sense strand starting at position 357 of SEQ ID NO: 1881375
gugaaagugcuacauaaau

SEQ ID NO: 2039595 - RNA, 19 nt, Artificial Sequence
  Description of Artificial Sequence: Synthetic oligonucleotide
  Antisense strand to SEQ ID NO: 2039594
auuuauguagcacuuucac

SEQ ID NO: 2039596 - RNA, 19 nt, Artificial Sequence
  Description of Artificial Sequence: Synthetic oligonucleotide
  Sense strand starting at position 409 of SEQ ID NO: 1881375
cacauaagcugaguaagua

SEQ ID NO: 2039597 - RNA, 19 nt, Artificial Sequence
  Description of Artificial Sequence: Synthetic oligonucleotide
  Antisense strand to SEQ ID NO: 2039596
uacuuacucagcuuaugug

SEQ ID NO: 2039598 - RNA, 19 nt, Artificial Sequence
  Description of Artificial Sequence: Synthetic oligonucleotide
  Sense strand starting at position 410 of SEQ ID NO: 1881375
acauaagcugaguaaguaa

SEQ ID NO: 2039599 - RNA, 19 nt, Artificial Sequence
  Description of Artificial Sequence: Synthetic oligonucleotide
  Antisense strand to SEQ ID NO: 2039598
uuacuuacucagcuuaugu

SEQ ID NO: 2039600 - RNA, 19 nt, Artificial Sequence
  Description of Artificial Sequence: Synthetic oligonucleotide
  Sense strand starting at position 488 of SEQ ID NO: 1881375
acauauggcuagcuaaaga

SEQ ID NO: 2039601 - RNA, 19 nt, Artificial Sequence
  Description of Artificial Sequence: Synthetic oligonucleotide
  Antisense strand to SEQ ID NO: 2039600
ucuuuagcuagccauaugu

SEQ ID NO: 2039602 - RNA, 19 nt, Artificial Sequence
  Description of Artificial Sequence: Synthetic oligonucleotide
  Sense strand starting at position 769 of SEQ ID NO: 1881375
gaucacugcccuugggaca

SEQ ID NO: 2039603 - RNA, 19 nt, Artificial Sequence
  Description of Artificial Sequence: Synthetic oligonucleotide
  Antisense strand to SEQ ID NO: 2039602
ugucccaagggcagugauc

SEQ ID NO: 2039604 - RNA, 19 nt, Artificial Sequence
  Description of Artificial Sequence: Synthetic oligonucleotide
  Sense strand starting at position 835 of SEQ ID NO: 1881375
gcuuuaguccuguuuccuu

SEQ ID NO: 2039605 - RNA, 19 nt, Artificial Sequence
  Description of Artificial Sequence: Synthetic oligonucleotide
  Antisense strand to SEQ ID NO: 2039604
aaggaaacaggacuaaagc

SEQ ID NO: 2039606 - RNA, 19 nt, Artificial Sequence
  Description of Artificial Sequence: Synthetic oligonucleotide
  Sense strand starting at position 888 of SEQ ID NO: 1881375
aaggucuuauuaucagaug

SEQ ID NO: 2039607 - RNA, 19 nt, Artificial Sequence
  Description of Artificial Sequence: Synthetic oligonucleotide
  Antisense strand to SEQ ID NO: 2039606
caucugauaauaagaccuu

SEQ ID NO: 2039608 - RNA, 19 nt, Artificial Sequence
  Description of Artificial Sequence: Synthetic oligonucleotide
  Sense strand starting at position 917 of SEQ ID NO: 1881375
uguggugcuaccuaaagau

SEQ ID NO: 2039609 - RNA, 19 nt, Artificial Sequence
  Description of Artificial Sequence: Synthetic oligonucleotide
  Antisense strand to SEQ ID NO: 2039608
aucuuuagguagcaccaca

SEQ ID NO: 2039610 - RNA, 19 nt, Artificial Sequence
  Description of Artificial Sequence: Synthetic oligonucleotide
  Sense strand starting at position 1045 of SEQ ID NO: 1881375
uucugaggcaaauguuaga

SEQ ID NO: 2039611 - RNA, 19 nt, Artificial Sequence
  Description of Artificial Sequence: Synthetic oligonucleotide
  Antisense strand to SEQ ID NO: 2039610
ucuaacauuugccucagaa

SEQ ID NO: 2039612 - RNA, 19 nt, Artificial Sequence
  Description of Artificial Sequence: Synthetic oligonucleotide
  Sense strand starting at position 1071 of SEQ ID NO: 1881375
aggacaagauuuggaaauu

SEQ ID NO: 2039613 - RNA, 19 nt, Artificial Sequence
  Description of Artificial Sequence: Synthetic oligonucleotide
  Antisense strand to SEQ ID NO: 2039612
aauuuccaaaucuuguccu

SEQ ID NO: 2039614 - RNA, 19 nt, Artificial Sequence
  Description of Artificial Sequence: Synthetic oligonucleotide
  Sense strand starting at position 1105 of SEQ ID NO: 1881375
gcuuucuaucggucagucu

SEQ ID NO: 2039615 - RNA, 19 nt, Artificial Sequence
  Description of Artificial Sequence: Synthetic oligonucleotide
  Antisense strand to SEQ ID NO: 2039614
agacugaccgauagaaagc

SEQ ID NO: 2039616 - RNA, 19 nt, Artificial Sequence
  Description of Artificial Sequence: Synthetic oligonucleotide
  Sense strand starting at position 1186 of SEQ ID NO: 1881375
gugguagcagaaugaacau

SEQ ID NO: 2039617 - RNA, 19 nt, Artificial Sequence
  Description of Artificial Sequence: Synthetic oligonucleotide
  Antisense strand to SEQ ID NO: 2039616
auguucauucugcuaccac

SEQ ID NO: 2039618 - RNA, 19 nt, Artificial Sequence
  Description of Artificial Sequence: Synthetic oligonucleotide
  Sense strand starting at position 1234 of SEQ ID NO: 1881375
ucagucuaccguuagauga

SEQ ID NO: 2039619 - RNA, 19 nt, Artificial Sequence
  Description of Artificial Sequence: Synthetic oligonucleotide
  Antisense strand to SEQ ID NO: 2039618
ucaucuaacgguagacuga

SEQ ID NO: 2039620 - RNA, 19 nt, Artificial Sequence
  Description of Artificial Sequence: Synthetic oligonucleotide
  Sense strand starting at position 1302 of SEQ ID NO: 1881375
gaaaucuaaggaugcugua

SEQ ID NO: 2039621 - RNA, 19 nt, Artificial Sequence
  Description of Artificial Sequence: Synthetic oligonucleotide
  Antisense strand to SEQ ID NO: 2039620
uacagcauccuuagauuuc

SEQ ID NO: 2039622 - RNA, 19 nt, Artificial Sequence
  Description of Artificial Sequence: Synthetic oligonucleotide
  Sense strand starting at position 1428 of SEQ ID NO: 1881375
aggcaaggucauuauucuu

SEQ ID NO: 2039623 - RNA, 19 nt, Artificial Sequence
  Description of Artificial Sequence: Synthetic oligonucleotide
  Antisense strand to SEQ ID NO: 2039622
aagaauaaugaccuugccu

SEQ ID NO: 2039624 - RNA, 19 nt, Artificial Sequence
  Description of Artificial Sequence: Synthetic oligonucleotide
  Sense strand starting at position 1434 of SEQ ID NO: 1881375
ggucauuauucuuuccaag

SEQ ID NO: 2039625 - RNA, 19 nt, Artificial Sequence
  Description of Artificial Sequence: Synthetic oligonucleotide
  Antisense strand to SEQ ID NO: 2039624
cuuggaaagaauaaugacc

SEQ ID NO: 2039626 - RNA, 19 nt, Artificial Sequence
  Description of Artificial Sequence: Synthetic oligonucleotide
  Sense strand starting at position 1496 of SEQ ID NO: 1881375
acugaagagaguuguuaug

SEQ ID NO: 2039627 - RNA, 19 nt, Artificial Sequence
  Description of Artificial Sequence: Synthetic oligonucleotide
  Antisense strand to SEQ ID NO: 2039626
cauaacaacucucuucagu

SEQ ID NO: 2039628 - RNA, 19 nt, Artificial Sequence
  Description of Artificial Sequence: Synthetic oligonucleotide
  Sense strand starting at position 1498 of SEQ ID NO: 1881375
ugaagagaguuguuaugag

SEQ ID NO: 2039629 - RNA, 19 nt, Artificial Sequence
  Description of Artificial Sequence: Synthetic oligonucleotide
  Antisense strand to SEQ ID NO: 2039628
cucauaacaacucucuuca

SEQ ID NO: 2039630 - RNA, 19 nt, Artificial Sequence
  Description of Artificial Sequence: Synthetic oligonucleotide
  Sense strand starting at position 1551 of SEQ ID NO: 1881375
cacaaugccuagguugaaa

SEQ ID NO: 2039631 - RNA, 19 nt, Artificial Sequence
  Description of Artificial Sequence: Synthetic oligonucleotide
  Antisense strand to SEQ ID NO: 2039630
uuucaaccuaggcauugug

SEQ ID NO: 2039632 - RNA, 19 nt, Artificial Sequence
  Description of Artificial Sequence: Synthetic oligonucleotide
  Sense strand starting at position 1638 of SEQ ID NO: 1881375
cugaaaggauaguugcauu

SEQ ID NO: 2039633 - RNA, 19 nt, Artificial Sequence
  Description of Artificial Sequence: Synthetic oligonucleotide
  Antisense strand to SEQ ID NO: 2039632
aaugcaacuauccuuucag

SEQ ID NO: 2039634 - RNA, 19 nt, Artificial Sequence
  Description of Artificial Sequence: Synthetic oligonucleotide
  Sense strand starting at position 1723 of SEQ ID NO: 1881375
auugaagcaucagugaaau

SEQ ID NO: 2039635 - RNA, 19 nt, Artificial Sequence
  Description of Artificial Sequence: Synthetic oligonucleotide
  Antisense strand to SEQ ID NO: 2039634
auuucacugaugcuucaau

SEQ ID NO: 2039636 - RNA, 19 nt, Artificial Sequence
  Description of Artificial Sequence: Synthetic oligonucleotide
  Sense strand starting at position 1725 of SEQ ID NO: 1881375
ugaagcaucagugaaaugu

SEQ ID NO: 2039637 - RNA, 19 nt, Artificial Sequence
  Description of Artificial Sequence: Synthetic oligonucleotide
  Antisense strand to SEQ ID NO: 2039636
acauuucacugaugcuuca

SEQ ID NO: 2039638 - RNA, 19 nt, Artificial Sequence
  Description of Artificial Sequence: Synthetic oligonucleotide
  Sense strand starting at position 1833 of SEQ ID NO: 1881375
gguuaaacccagugaaauu

SEQ ID NO: 2039639 - RNA, 19 nt, Artificial Sequence
  Description of Artificial Sequence: Synthetic oligonucleotide
  Antisense strand to SEQ ID NO: 2039638
aauuucacuggguuuaacc

SEQ ID NO: 2039640 - RNA, 19 nt, Artificial Sequence
  Description of Artificial Sequence: Synthetic oligonucleotide
  Sense strand starting at position 1844 of SEQ ID NO: 1881375
gugaaauucgauuaccucu

SEQ ID NO: 2039641 - RNA, 19 nt, Artificial Sequence
  Description of Artificial Sequence: Synthetic oligonucleotide
  Antisense strand to SEQ ID NO: 2039640
agagguaaucgaauuucac

SEQ ID NO: 2039642 - RNA, 19 nt, Artificial Sequence
  Description of Artificial Sequence: Synthetic oligonucleotide
  Sense strand starting at position 1939 of SEQ ID NO: 1881375
cagcaauugcucgccgacu

SEQ ID NO: 2039643 - RNA, 19 nt, Artificial Sequence
  Description of Artificial Sequence: Synthetic oligonucleotide
  Antisense strand to SEQ ID NO: 2039642
agucggcgagcaauugcug

SEQ ID NO: 2039644 - RNA, 19 nt, Artificial Sequence
  Description of Artificial Sequence: Synthetic oligonucleotide
  Sense strand starting at position 1953 of SEQ ID NO: 1881375
cgacuaguuccucacaaga

SEQ ID NO: 2039645 - RNA, 19 nt, Artificial Sequence
  Description of Artificial Sequence: Synthetic oligonucleotide
  Antisense strand to SEQ ID NO: 2039644
ucuugugaggaacuagucg

SEQ ID NO: 2039646 - RNA, 19 nt, Artificial Sequence
  Description of Artificial Sequence: Synthetic oligonucleotide
  Sense strand starting at position 1997 of SEQ ID NO: 1881375
gguucuguugaaugacaug

SEQ ID NO: 2039647 - RNA, 19 nt, Artificial Sequence
  Description of Artificial Sequence: Synthetic oligonucleotide
  Antisense strand to SEQ ID NO: 2039646
caugucauucaacagaacc

SEQ ID NO: 2039648 - RNA, 19 nt, Artificial Sequence
  Description of Artificial Sequence: Synthetic oligonucleotide
  Sense strand starting at position 2011 of SEQ ID NO: 1881375
acaugcucuguuuagaaag

SEQ ID NO: 2039649 - RNA, 19 nt, Artificial Sequence
  Description of Artificial Sequence: Synthetic oligonucleotide
  Antisense strand to SEQ ID NO: 2039648
cuuucuaaacagagcaugu

SEQ ID NO: 2039650 - RNA, 19 nt, Artificial Sequence
  Description of Artificial Sequence: Synthetic oligonucleotide
  Sense strand starting at position 2398 of SEQ ID NO: 1881375
ccagcuauacaucaucagu

SEQ ID NO: 2039651 - RNA, 19 nt, Artificial Sequence
  Description of Artificial Sequence: Synthetic oligonucleotide
  Antisense strand to SEQ ID NO: 2039650
acugaugauguauagcugg

SEQ ID NO: 2039652 - RNA, 19 nt, Artificial Sequence
  Description of Artificial Sequence: Synthetic oligonucleotide
  Sense strand starting at position 2404 of SEQ ID NO: 1881375
auacaucaucaguguuaau

SEQ ID NO: 2039653 - RNA, 19 nt, Artificial Sequence
  Description of Artificial Sequence: Synthetic oligonucleotide
  Antisense strand to SEQ ID NO: 2039652
auuaacacugaugauguau

SEQ ID NO: 2039654 - RNA, 19 nt, Artificial Sequence
  Description of Artificial Sequence: Synthetic oligonucleotide
  Sense strand starting at position 2677 of SEQ ID NO: 1881375
cuaucaagcgcagauaauu

SEQ ID NO: 2039655 - RNA, 19 nt, Artificial Sequence
  Description of Artificial Sequence: Synthetic oligonucleotide
  Antisense strand to SEQ ID NO: 2039654
aauuaucugcgcuugauag

SEQ ID NO: 2039656 - RNA, 19 nt, Artificial Sequence
  Description of Artificial Sequence: Synthetic oligonucleotide
  Sense strand starting at position 2750 of SEQ ID NO: 1881375
ucugaucuuugucucaaga

SEQ ID NO: 2039657 - RNA, 19 nt, Artificial Sequence
  Description of Artificial Sequence: Synthetic oligonucleotide
  Antisense strand to SEQ ID NO: 2039656
ucuugagacaaagaucaga

SEQ ID NO: 2039658 - RNA, 19 nt, Artificial Sequence
  Description of Artificial Sequence: Synthetic oligonucleotide
  Sense strand starting at position 2942 of SEQ ID NO: 1881375
guacguguucuuuccuguu

SEQ ID NO: 2039659 - RNA, 19 nt, Artificial Sequence
  Description of Artificial Sequence: Synthetic oligonucleotide
  Antisense strand to SEQ ID NO: 2039658
aacaggaaagaacacguac

SEQ ID NO: 2039660 - RNA, 19 nt, Artificial Sequence
  Description of Artificial Sequence: Synthetic oligonucleotide
  Sense strand starting at position 2965 of SEQ ID NO: 1881375
aagcuuuaucgggacauaa

SEQ ID NO: 2039661 - RNA, 19 nt, Artificial Sequence
  Description of Artificial Sequence: Synthetic oligonucleotide
  Antisense strand to SEQ ID NO: 2039660
uuaugucccgauaaagcuu

SEQ ID NO: 2039662 - RNA, 19 nt, Artificial Sequence
  Description of Artificial Sequence: Synthetic oligonucleotide
  Sense strand starting at position 2967 of SEQ ID NO: 1881375
gcuuuaucgggacauaauu

SEQ ID NO: 2039663 - RNA, 19 nt, Artificial Sequence
  Description of Artificial Sequence: Synthetic oligonucleotide
  Antisense strand to SEQ ID NO: 2039662
aauuaugucccgauaaagc

SEQ ID NO: 2039664 - RNA, 19 nt, Artificial Sequence
  Description of Artificial Sequence: Synthetic oligonucleotide
  Sense strand starting at position 73 of SEQ ID NO: 1881376
gaggaucaugcauauucuu

SEQ ID NO: 2039665 - RNA, 19 nt, Artificial Sequence
  Description of Artificial Sequence: Synthetic oligonucleotide
  Antisense strand to SEQ ID NO: 2039664
aagaauaugcaugauccuc

SEQ ID NO: 2039666 - RNA, 19 nt, Artificial Sequence
  Description of Artificial Sequence: Synthetic oligonucleotide
  Sense strand starting at position 194 of SEQ ID NO: 1881376
ucccauaacuuguugcagu

SEQ ID NO: 2039667 - RNA, 19 nt, Artificial Sequence
  Description of Artificial Sequence: Synthetic oligonucleotide
  Antisense strand to SEQ ID NO: 2039666
acugcaacaaguuauggga

SEQ ID NO: 2039668 - RNA, 19 nt, Artificial Sequence
  Description of Artificial Sequence: Synthetic oligonucleotide
  Sense strand starting at position 239 of SEQ ID NO: 1881376
ggguuaucaccuggguuuc

SEQ ID NO: 2039669 - RNA, 19 nt, Artificial Sequence
  Description of Artificial Sequence: Synthetic oligonucleotide
  Antisense strand to SEQ ID NO: 2039668
gaaacccaggugauaaccc

SEQ ID NO: 2039670 - RNA, 19 nt, Artificial Sequence
  Description of Artificial Sequence: Synthetic oligonucleotide
  Sense strand starting at position 407 of SEQ ID NO: 1881376
cagacuugaagucguggaa

SEQ ID NO: 2039671 - RNA, 19 nt, Artificial Sequence
  Description of Artificial Sequence: Synthetic oligonucleotide
  Antisense strand to SEQ ID NO: 2039670
uuccacgacuucaagucug

SEQ ID NO: 2039672 - RNA, 19 nt, Artificial Sequence
  Description of Artificial Sequence: Synthetic oligonucleotide
  Sense strand starting at position 448 of SEQ ID NO: 1881376
ucacucauggcccaggaua

SEQ ID NO: 2039673 - RNA, 19 nt, Artificial Sequence
  Description of Artificial Sequence: Synthetic oligonucleotide
  Antisense strand to SEQ ID NO: 2039672
uauccugggccaugaguga

SEQ ID NO: 2039674 - RNA, 19 nt, Artificial Sequence
  Description of Artificial Sequence: Synthetic oligonucleotide
  Sense strand starting at position 495 of SEQ ID NO: 1881376
gggccauugaugggagaca

SEQ ID NO: 2039675 - RNA, 19 nt, Artificial Sequence
  Description of Artificial Sequence: Synthetic oligonucleotide
  Antisense strand to SEQ ID NO: 2039674
ugucucccaucaauggccc

SEQ ID NO: 2039676 - RNA, 19 nt, Artificial Sequence
  Description of Artificial Sequence: Synthetic oligonucleotide
  Sense strand starting at position 623 of SEQ ID NO: 1881376
gcacuuaacuggguaccaa

SEQ ID NO: 2039677 - RNA, 19 nt, Artificial Sequence
  Description of Artificial Sequence: Synthetic oligonucleotide
  Antisense strand to SEQ ID NO: 2039676
uugguacccaguuaagugc

SEQ ID NO: 2039678 - RNA, 19 nt, Artificial Sequence
  Description of Artificial Sequence: Synthetic oligonucleotide
  Sense strand starting at position 648 of SEQ ID NO: 1881376
ugcagagcacuuuaucagu

SEQ ID NO: 2039679 - RNA, 19 nt, Artificial Sequence
  Description of Artificial Sequence: Synthetic oligonucleotide
  Antisense strand to SEQ ID NO: 2039678
acugauaaagugcucugca

SEQ ID NO: 2039680 - RNA, 19 nt, Artificial Sequence
  Description of Artificial Sequence: Synthetic oligonucleotide
  Sense strand starting at position 704 of SEQ ID NO: 1881376
ggaccauugugaucucguu

SEQ ID NO: 2039681 - RNA, 19 nt, Artificial Sequence
  Description of Artificial Sequence: Synthetic oligonucleotide
  Antisense strand to SEQ ID NO: 2039680
aacgagaucacaauggucc

SEQ ID NO: 2039682 - RNA, 19 nt, Artificial Sequence
  Description of Artificial Sequence: Synthetic oligonucleotide
  Sense strand starting at position 767 of SEQ ID NO: 1881376
cuaugcuuccaagaugcaa

SEQ ID NO: 2039683 - RNA, 19 nt, Artificial Sequence
  Description of Artificial Sequence: Synthetic oligonucleotide
  Antisense strand to SEQ ID NO: 2039682
uugcaucuuggaagcauag

SEQ ID NO: 2039684 - RNA, 19 nt, Artificial Sequence
  Description of Artificial Sequence: Synthetic oligonucleotide
  Sense strand starting at position 893 of SEQ ID NO: 1881376
cugcuaagacuuugaguuc

SEQ ID NO: 2039685 - RNA, 19 nt, Artificial Sequence
  Description of Artificial Sequence: Synthetic oligonucleotide
  Antisense strand to SEQ ID NO: 2039684
gaacucaaagucuuagcag

SEQ ID NO: 2039686 - RNA, 19 nt, Artificial Sequence
  Description of Artificial Sequence: Synthetic oligonucleotide
  Sense strand starting at position 896 of SEQ ID NO: 1881376
cuaagacuuugaguuccaa

SEQ ID NO: 2039687 - RNA, 19 nt, Artificial Sequence
  Description of Artificial Sequence: Synthetic oligonucleotide
  Antisense strand to SEQ ID NO: 2039686
uuggaacucaaagucuuag

SEQ ID NO: 2039688 - RNA, 19 nt, Artificial Sequence
  Description of Artificial Sequence: Synthetic oligonucleotide
  Sense strand starting at position 927 of SEQ ID NO: 1881376
uaccauguucucugggacu

SEQ ID NO: 2039689 - RNA, 19 nt, Artificial Sequence
  Description of Artificial Sequence: Synthetic oligonucleotide
  Antisense strand to SEQ ID NO: 2039688
agucccagagaacauggua

SEQ ID NO: 2039690 - RNA, 19 nt, Artificial Sequence
  Description of Artificial Sequence: Synthetic oligonucleotide
  Sense strand starting at position 929 of SEQ ID NO: 1881376
ccauguucucugggacucu

SEQ ID NO: 2039691 - RNA, 19 nt, Artificial Sequence
  Description of Artificial Sequence: Synthetic oligonucleotide
  Antisense strand to SEQ ID NO: 2039690
agagucccagagaacaugg

SEQ ID NO: 2039692 - RNA, 19 nt, Artificial Sequence
  Description of Artificial Sequence: Synthetic oligonucleotide
  Sense strand starting at position 983 of SEQ ID NO: 1881376
uucucuagucacuaacagu

SEQ ID NO: 2039693 - RNA, 19 nt, Artificial Sequence
  Description of Artificial Sequence: Synthetic oligonucleotide
  Antisense strand to SEQ ID NO: 2039692
acuguuagugacuagagaa

SEQ ID NO: 2039694 - RNA, 19 nt, Artificial Sequence
  Description of Artificial Sequence: Synthetic oligonucleotide
  Sense strand starting at position 989 of SEQ ID NO: 1881376
agucacuaacagugguuua

SEQ ID NO: 2039695 - RNA, 19 nt, Artificial Sequence
  Description of Artificial Sequence: Synthetic oligonucleotide
  Antisense strand to SEQ ID NO: 2039694
uaaaccacuguuagugacu

SEQ ID NO: 2039696 - RNA, 19 nt, Artificial Sequence
  Description of Artificial Sequence: Synthetic oligonucleotide
  Sense strand starting at position 992 of SEQ ID NO: 1881376
cacuaacagugguuuagaa

SEQ ID NO: 2039697 - RNA, 19 nt, Artificial Sequence
  Description of Artificial Sequence: Synthetic oligonucleotide
  Antisense strand to SEQ ID NO: 2039696
uucuaaaccacuguuagug

SEQ ID NO: 2039698 - RNA, 19 nt, Artificial Sequence
  Description of Artificial Sequence: Synthetic oligonucleotide
  Sense strand starting at position 1076 of SEQ ID NO: 1881376
cccugaacauguuauuuga

SEQ ID NO: 2039699 - RNA, 19 nt, Artificial Sequence
  Description of Artificial Sequence: Synthetic oligonucleotide
  Antisense strand to SEQ ID NO: 2039698
ucaaauaacauguucaggg

SEQ ID NO: 2039700 - RNA, 19 nt, Artificial Sequence
  Description of Artificial Sequence: Synthetic oligonucleotide
  Sense strand starting at position 1136 of SEQ ID NO: 1881376
aaagaagucucggucuguu

SEQ ID NO: 2039701 - RNA, 19 nt, Artificial Sequence
  Description of Artificial Sequence: Synthetic oligonucleotide
  Antisense strand to SEQ ID NO: 2039700
aacagaccgagacuucuuu

SEQ ID NO: 2039702 - RNA, 19 nt, Artificial Sequence
  Description of Artificial Sequence: Synthetic oligonucleotide
  Sense strand starting at position 1228 of SEQ ID NO: 1881376
aagagaugaugcccgucaa

SEQ ID NO: 2039703 - RNA, 19 nt, Artificial Sequence
  Description of Artificial Sequence: Synthetic oligonucleotide
  Antisense strand to SEQ ID NO: 2039702
uugacgggcaucaucucuu

SEQ ID NO: 2039704 - RNA, 19 nt, Artificial Sequence
  Description of Artificial Sequence: Synthetic oligonucleotide
  Sense strand starting at position 1229 of SEQ ID NO: 1881376
agagaugaugcccgucaag

SEQ ID NO: 2039705 - RNA, 19 nt, Artificial Sequence
  Description of Artificial Sequence: Synthetic oligonucleotide
  Antisense strand to SEQ ID NO: 2039704
cuugacgggcaucaucucu

SEQ ID NO: 2039706 - RNA, 19 nt, Artificial Sequence
  Description of Artificial Sequence: Synthetic oligonucleotide
  Sense strand starting at position 2361 of SEQ ID NO: 1881376
uuuccugagcccuguagga

SEQ ID NO: 2039707 - RNA, 19 nt, Artificial Sequence
  Description of Artificial Sequence: Synthetic oligonucleotide
  Antisense strand to SEQ ID NO: 2039706
uccuacagggcucaggaaa

SEQ ID NO: 2039708 - RNA, 19 nt, Artificial Sequence
  Description of Artificial Sequence: Synthetic oligonucleotide
  Sense strand starting at position 2410 of SEQ ID NO: 1881376
gagcauuucgaggguacgu

SEQ ID NO: 2039709 - RNA, 19 nt, Artificial Sequence
  Description of Artificial Sequence: Synthetic oligonucleotide
  Antisense strand to SEQ ID NO: 2039708
acguacccucgaaaugcuc

SEQ ID NO: 2039710 - RNA, 19 nt, Artificial Sequence
  Description of Artificial Sequence: Synthetic oligonucleotide
  Sense strand starting at position 2423 of SEQ ID NO: 1881376
guacguagucggccucuua

SEQ ID NO: 2039711 - RNA, 19 nt, Artificial Sequence
  Description of Artificial Sequence: Synthetic oligonucleotide
  Antisense strand to SEQ ID NO: 2039710
uaagaggccgacuacguac

SEQ ID NO: 2039712 - RNA, 19 nt, Artificial Sequence
  Description of Artificial Sequence: Synthetic oligonucleotide
  Sense strand starting at position 2632 of SEQ ID NO: 1881376
ggcccuuccuggucagaac

SEQ ID NO: 2039713 - RNA, 19 nt, Artificial Sequence
  Description of Artificial Sequence: Synthetic oligonucleotide
  Antisense strand to SEQ ID NO: 2039712
guucugaccaggaagggcc

SEQ ID NO: 2039714 - RNA, 19 nt, Artificial Sequence
  Description of Artificial Sequence: Synthetic oligonucleotide
  Sense strand starting at position 2660 of SEQ ID NO: 1881376
ucagccuuaguguauguua

SEQ ID NO: 2039715 - RNA, 19 nt, Artificial Sequence
  Description of Artificial Sequence: Synthetic oligonucleotide
  Antisense strand to SEQ ID NO: 2039714
uaacauacacuaaggcuga

SEQ ID NO: 2039716 - RNA, 19 nt, Artificial Sequence
  Description of Artificial Sequence: Synthetic oligonucleotide
  Sense strand starting at position 2770 of SEQ ID NO: 1881376
gugggcauuccugggaguu

SEQ ID NO: 2039717 - RNA, 19 nt, Artificial Sequence
  Description of Artificial Sequence: Synthetic oligonucleotide
  Antisense strand to SEQ ID NO: 2039716
aacucccaggaaugcccac

SEQ ID NO: 2039718 - RNA, 19 nt, Artificial Sequence
  Description of Artificial Sequence: Synthetic oligonucleotide
  Sense strand starting at position 2771 of SEQ ID NO: 1881376
ugggcauuccugggaguug

SEQ ID NO: 2039719 - RNA, 19 nt, Artificial Sequence
  Description of Artificial Sequence: Synthetic oligonucleotide
  Antisense strand to SEQ ID NO: 2039718
caacucccaggaaugccca

SEQ ID NO: 2039720 - RNA, 19 nt, Artificial Sequence
  Description of Artificial Sequence: Synthetic oligonucleotide
  Sense strand starting at position 2788 of SEQ ID NO: 1881376
ugugacuuuggaugaccau

SEQ ID NO: 2039721 - RNA, 19 nt, Artificial Sequence
  Description of Artificial Sequence: Synthetic oligonucleotide
  Antisense strand to SEQ ID NO: 2039720
auggucauccaaagucaca

SEQ ID NO: 2039722 - RNA, 19 nt, Artificial Sequence
  Description of Artificial Sequence: Synthetic oligonucleotide
  Sense strand starting at position 2910 of SEQ ID NO: 1881376
caagguuugccuggauauc

SEQ ID NO: 2039723 - RNA, 19 nt, Artificial Sequence
  Description of Artificial Sequence: Synthetic oligonucleotide
  Antisense strand to SEQ ID NO: 2039722
gauauccaggcaaaccuug

SEQ ID NO: 2039724 - RNA, 19 nt, Artificial Sequence
  Description of Artificial Sequence: Synthetic oligonucleotide
  Sense strand starting at position 2911 of SEQ ID NO: 1881376
aagguuugccuggauaucu

SEQ ID NO: 2039725 - RNA, 19 nt, Artificial Sequence
  Description of Artificial Sequence: Synthetic oligonucleotide
  Antisense strand to SEQ ID NO: 2039724
agauauccaggcaaaccuu

SEQ ID NO: 2039726 - RNA, 19 nt, Artificial Sequence
  Description of Artificial Sequence: Synthetic oligonucleotide
  Sense strand starting at position 3181 of SEQ ID NO: 1881376
guuuacuuucuauaacugu

SEQ ID NO: 2039727 - RNA, 19 nt, Artificial Sequence
  Description of Artificial Sequence: Synthetic oligonucleotide
  Antisense strand to SEQ ID NO: 2039726
acaguuauagaaaguaaac

SEQ ID NO: 2039728 - RNA, 19 nt, Artificial Sequence
  Description of Artificial Sequence: Synthetic oligonucleotide
  Sense strand starting at position 3681 of SEQ ID NO: 1881376
aagucaaguuguguaacca

SEQ ID NO: 2039729 - RNA, 19 nt, Artificial Sequence
  Description of Artificial Sequence: Synthetic oligonucleotide
  Antisense strand to SEQ ID NO: 2039728
ugguuacacaacuugacuu

SEQ ID NO: 2039730 - RNA, 19 nt, Artificial Sequence
  Description of Artificial Sequence: Synthetic oligonucleotide
  Sense strand starting at position 3759 of SEQ ID NO: 1881376
uguaaucaguccucuccuu

SEQ ID NO: 2039731 - RNA, 19 nt, Artificial Sequence
  Description of Artificial Sequence: Synthetic oligonucleotide
  Antisense strand to SEQ ID NO: 2039730
aaggagaggacugauuaca

SEQ ID NO: 2039732 - RNA, 19 nt, Artificial Sequence
  Description of Artificial Sequence: Synthetic oligonucleotide
  Sense strand starting at position 3843 of SEQ ID NO: 1881376
uggaauucuuuaguaugca

SEQ ID NO: 2039733 - RNA, 19 nt, Artificial Sequence
  Description of Artificial Sequence: Synthetic oligonucleotide
  Antisense strand to SEQ ID NO: 2039732
ugcauacuaaagaauucca

SEQ ID NO: 2039734 - RNA, 19 nt, Artificial Sequence
  Description of Artificial Sequence: Synthetic oligonucleotide
  Sense strand starting at position 3869 of SEQ ID NO: 1881376
aaguguggcuucuuaccau

SEQ ID NO: 2039735 - RNA, 19 nt, Artificial Sequence
  Description of Artificial Sequence: Synthetic oligonucleotide
  Antisense strand to SEQ ID NO: 2039734
augguaagaagccacacuu

SEQ ID NO: 2039736 - RNA, 19 nt, Artificial Sequence
  Description of Artificial Sequence: Synthetic oligonucleotide
  Sense strand starting at position 3872 of SEQ ID NO: 1881376
uguggcuucuuaccauaau

SEQ ID NO: 2039737 - RNA, 19 nt, Artificial Sequence
  Description of Artificial Sequence: Synthetic oligonucleotide
  Antisense strand to SEQ ID NO: 2039736
auuaugguaagaagccaca

SEQ ID NO: 2039738 - RNA, 19 nt, Artificial Sequence
  Description of Artificial Sequence: Synthetic oligonucleotide
  Sense strand starting at position 3897 of SEQ ID NO: 1881376
gagagucaaccauguugug

SEQ ID NO: 2039739 - RNA, 19 nt, Artificial Sequence
  Description of Artificial Sequence: Synthetic oligonucleotide
  Antisense strand to SEQ ID NO: 2039738
cacaacaugguugacucuc

SEQ ID NO: 2039740 - RNA, 19 nt, Artificial Sequence
  Description of Artificial Sequence: Synthetic oligonucleotide
  Sense strand starting at position 3904 of SEQ ID NO: 1881376
aaccauguuguguguauca

SEQ ID NO: 2039741 - RNA, 19 nt, Artificial Sequence
  Description of Artificial Sequence: Synthetic oligonucleotide
  Antisense strand to SEQ ID NO: 2039740
ugauacacacaacaugguu

SEQ ID NO: 2039742 - RNA, 19 nt, Artificial Sequence
  Description of Artificial Sequence: Synthetic oligonucleotide
  Sense strand starting at position 3971 of SEQ ID NO: 1881376
accacaguucguuggaagu

SEQ ID NO: 2039743 - RNA, 19 nt, Artificial Sequence
  Description of Artificial Sequence: Synthetic oligonucleotide
  Antisense strand to SEQ ID NO: 2039742
acuuccaacgaacuguggu

SEQ ID NO: 2039744 - RNA, 19 nt, Artificial Sequence
  Description of Artificial Sequence: Synthetic oligonucleotide
  Sense strand starting at position 28 of SEQ ID NO: 1881377
ugacaaaucugagucuuga

SEQ ID NO: 2039745 - RNA, 19 nt, Artificial Sequence
  Description of Artificial Sequence: Synthetic oligonucleotide
  Antisense strand to SEQ ID NO: 2039744
ucaagacucagauuuguca

SEQ ID NO: 2039746 - RNA, 19 nt, Artificial Sequence
  Description of Artificial Sequence: Synthetic oligonucleotide
  Sense strand starting at position 119 of SEQ ID NO: 1881377
aggaaagugcucuguggau

SEQ ID NO: 2039747 - RNA, 19 nt, Artificial Sequence
  Description of Artificial Sequence: Synthetic oligonucleotide
  Antisense strand to SEQ ID NO: 2039746
auccacagagcacuuuccu

SEQ ID NO: 2039748 - RNA, 19 nt, Artificial Sequence
  Description of Artificial Sequence: Synthetic oligonucleotide
  Sense strand starting at position 121 of SEQ ID NO: 1881377
gaaagugcucuguggauau

SEQ ID NO: 2039749 - RNA, 19 nt, Artificial Sequence
  Description of Artificial Sequence: Synthetic oligonucleotide
  Antisense strand to SEQ ID NO: 2039748
auauccacagagcacuuuc

SEQ ID NO: 2039750 - RNA, 19 nt, Artificial Sequence
  Description of Artificial Sequence: Synthetic oligonucleotide
  Sense strand starting at position 142 of SEQ ID NO: 1881377
gagccagcauguucuggaa

SEQ ID NO: 2039751 - RNA, 19 nt, Artificial Sequence
  Description of Artificial Sequence: Synthetic oligonucleotide
  Antisense strand to SEQ ID NO: 2039750
uuccagaacaugcuggcuc

SEQ ID NO: 2039752 - RNA, 19 nt, Artificial Sequence
  Description of Artificial Sequence: Synthetic oligonucleotide
  Sense strand starting at position 157 of SEQ ID NO: 1881377
ggaagcugccgucagauau

SEQ ID NO: 2039753 - RNA, 19 nt, Artificial Sequence
  Description of Artificial Sequence: Synthetic oligonucleotide
  Antisense strand to SEQ ID NO: 2039752
auaucugacggcagcuucc

SEQ ID NO: 2039754 - RNA, 19 nt, Artificial Sequence
  Description of Artificial Sequence: Synthetic oligonucleotide
  Sense strand starting at position 163 of SEQ ID NO: 1881377
ugccgucagauaugacuga

SEQ ID NO: 2039755 - RNA, 19 nt, Artificial Sequence
  Description of Artificial Sequence: Synthetic oligonucleotide
  Antisense strand to SEQ ID NO: 2039754
ucagucauaucugacggca

SEQ ID NO: 2039756 - RNA, 19 nt, Artificial Sequence
  Description of Artificial Sequence: Synthetic oligonucleotide
  Sense strand starting at position 377 of SEQ ID NO: 1881377
gugagaaagauguaggugu

SEQ ID NO: 2039757 - RNA, 19 nt, Artificial Sequence
  Description of Artificial Sequence: Synthetic oligonucleotide
  Antisense strand to SEQ ID NO: 2039756
acaccuacaucuuucucac

SEQ ID NO: 2039758 - RNA, 19 nt, Artificial Sequence
  Description of Artificial Sequence: Synthetic oligonucleotide
  Sense strand starting at position 381 of SEQ ID NO: 1881377
gaaagauguagguguugga

SEQ ID NO: 2039759 - RNA, 19 nt, Artificial Sequence
  Description of Artificial Sequence: Synthetic oligonucleotide
  Antisense strand to SEQ ID NO: 2039758
uccaacaccuacaucuuuc

SEQ ID NO: 2039760 - RNA, 19 nt, Artificial Sequence
  Description of Artificial Sequence: Synthetic oligonucleotide
  Sense strand starting at position 391 of SEQ ID NO: 1881377
gguguuggaaucuacaacu

SEQ ID NO: 2039761 - RNA, 19 nt, Artificial Sequence
  Description of Artificial Sequence: Synthetic oligonucleotide
  Antisense strand to SEQ ID NO: 2039760
aguuguagauuccaacacc

SEQ ID NO: 2039762 - RNA, 19 nt, Artificial Sequence
  Description of Artificial Sequence: Synthetic oligonucleotide
  Sense strand starting at position 469 of SEQ ID NO: 1881377
cagggaauuccaggucuau

SEQ ID NO: 2039763 - RNA, 19 nt, Artificial Sequence
  Description of Artificial Sequence: Synthetic oligonucleotide
  Antisense strand to SEQ ID NO: 2039762
auagaccuggaauucccug

SEQ ID NO: 2039764 - RNA, 19 nt, Artificial Sequence
  Description of Artificial Sequence: Synthetic oligonucleotide
  Sense strand starting at position 724 of SEQ ID NO: 1881377
auaguaguguaagugggaa

SEQ ID NO: 2039765 - RNA, 19 nt, Artificial Sequence
  Description of Artificial Sequence: Synthetic oligonucleotide
  Antisense strand to SEQ ID NO: 2039764
uucccacuuacacuacuau

SEQ ID NO: 2039766 - RNA, 19 nt, Artificial Sequence
  Description of Artificial Sequence: Synthetic oligonucleotide
  Sense strand starting at position 794 of SEQ ID NO: 1881377
gcaggauguuaaucagaag

SEQ ID NO: 2039767 - RNA, 19 nt, Artificial Sequence
  Description of Artificial Sequence: Synthetic oligonucleotide
  Antisense strand to SEQ ID NO: 2039766
cuucugauuaacauccugc

SEQ ID NO: 2039768 - RNA, 19 nt, Artificial Sequence
  Description of Artificial Sequence: Synthetic oligonucleotide
  Sense strand starting at position 948 of SEQ ID NO: 1881377
caaacagaccguuguuaaa

SEQ ID NO: 2039769 - RNA, 19 nt, Artificial Sequence
  Description of Artificial Sequence: Synthetic oligonucleotide
  Antisense strand to SEQ ID NO: 2039768
uuuaacaacggucuguuug

SEQ ID NO: 2039770 - RNA, 19 nt, Artificial Sequence
  Description of Artificial Sequence: Synthetic oligonucleotide
  Sense strand starting at position 1056 of SEQ ID NO: 1881377
cgccaacuuccugaaguca

SEQ ID NO: 2039771 - RNA, 19 nt, Artificial Sequence
  Description of Artificial Sequence: Synthetic oligonucleotide
  Antisense strand to SEQ ID NO: 2039770
ugacuucaggaaguuggcg

SEQ ID NO: 2039772 - RNA, 19 nt, Artificial Sequence
  Description of Artificial Sequence: Synthetic oligonucleotide
  Sense strand starting at position 1148 of SEQ ID NO: 1881377
cugggacguuucuuaaauu

SEQ ID NO: 2039773 - RNA, 19 nt, Artificial Sequence
  Description of Artificial Sequence: Synthetic oligonucleotide
  Antisense strand to SEQ ID NO: 2039772
aauuuaagaaacgucccag

SEQ ID NO: 2039774 - RNA, 19 nt, Artificial Sequence
  Description of Artificial Sequence: Synthetic oligonucleotide
  Sense strand starting at position 1263 of SEQ ID NO: 1881377
cgauguccagccgacuaaa

SEQ ID NO: 2039775 - RNA, 19 nt, Artificial Sequence
  Description of Artificial Sequence: Synthetic oligonucleotide
  Antisense strand to SEQ ID NO: 2039774
uuuagucggcuggacaucg

SEQ ID NO: 2039776 - RNA, 19 nt, Artificial Sequence
  Description of Artificial Sequence: Synthetic oligonucleotide
  Sense strand starting at position 1377 of SEQ ID NO: 1881377
ccacguggauuccuaagua

SEQ ID NO: 2039777 - RNA, 19 nt, Artificial Sequence
  Description of Artificial Sequence: Synthetic oligonucleotide
  Antisense strand to SEQ ID NO: 2039776
uacuuaggaauccacgugg

SEQ ID NO: 2039778 - RNA, 19 nt, Artificial Sequence
  Description of Artificial Sequence: Synthetic oligonucleotide
  Sense strand starting at position 1381 of SEQ ID NO: 1881377
guggauuccuaaguauccu

SEQ ID NO: 2039779 - RNA, 19 nt, Artificial Sequence
  Description of Artificial Sequence: Synthetic oligonucleotide
  Antisense strand to SEQ ID NO: 2039778
aggauacuuaggaauccac

SEQ ID NO: 2039780 - RNA, 19 nt, Artificial Sequence
  Description of Artificial Sequence: Synthetic oligonucleotide
  Sense strand starting at position 1790 of SEQ ID NO: 1881377
ggcgguuuagggugggaaa

SEQ ID NO: 2039781 - RNA, 19 nt, Artificial Sequence
  Description of Artificial Sequence: Synthetic oligonucleotide
  Antisense strand to SEQ ID NO: 2039780
uuucccacccuaaaccgcc

SEQ ID NO: 2039782 - RNA, 19 nt, Artificial Sequence
  Description of Artificial Sequence: Synthetic oligonucleotide
  Sense strand starting at position 2095 of SEQ ID NO: 1881377
uagguugcgacuuggacaa

SEQ ID NO: 2039783 - RNA, 19 nt, Artificial Sequence
  Description of Artificial Sequence: Synthetic oligonucleotide
  Antisense strand to SEQ ID NO: 2039782
uuguccaagucgcaaccua

SEQ ID NO: 2039784 - RNA, 19 nt, Artificial Sequence
  Description of Artificial Sequence: Synthetic oligonucleotide
  Sense strand starting at position 2189 of SEQ ID NO: 1881377
cgguuuaaagaaugacuau

SEQ ID NO: 2039785 - RNA, 19 nt, Artificial Sequence
  Description of Artificial Sequence: Synthetic oligonucleotide
  Antisense strand to SEQ ID NO: 2039784
auagucauucuuuaaaccg

SEQ ID NO: 2039786 - RNA, 19 nt, Artificial Sequence
  Description of Artificial Sequence: Synthetic oligonucleotide
  Sense strand starting at position 2274 of SEQ ID NO: 1881377
ugaaauggacaguguagua

SEQ ID NO: 2039787 - RNA, 19 nt, Artificial Sequence
  Description of Artificial Sequence: Synthetic oligonucleotide
  Antisense strand to SEQ ID NO: 2039786
uacuacacuguccauuuca

SEQ ID NO: 2039788 - RNA, 19 nt, Artificial Sequence
  Description of Artificial Sequence: Synthetic oligonucleotide
  Sense strand starting at position 2344 of SEQ ID NO: 1881377
auugcagauuucgaagauu

SEQ ID NO: 2039789 - RNA, 19 nt, Artificial Sequence
  Description of Artificial Sequence: Synthetic oligonucleotide
  Antisense strand to SEQ ID NO: 2039788
aaucuucgaaaucugcaau

SEQ ID NO: 2039790 - RNA, 19 nt, Artificial Sequence
  Description of Artificial Sequence: Synthetic oligonucleotide
  Sense strand starting at position 2405 of SEQ ID NO: 1881377
agagaauaccaccgucaag

SEQ ID NO: 2039791 - RNA, 19 nt, Artificial Sequence
  Description of Artificial Sequence: Synthetic oligonucleotide
  Antisense strand to SEQ ID NO: 2039790
cuugacggugguauucucu

SEQ ID NO: 2039792 - RNA, 19 nt, Artificial Sequence
  Description of Artificial Sequence: Synthetic oligonucleotide
  Sense strand starting at position 2408 of SEQ ID NO: 1881377
gaauaccaccgucaagauu

SEQ ID NO: 2039793 - RNA, 19 nt, Artificial Sequence
  Description of Artificial Sequence: Synthetic oligonucleotide
  Antisense strand to SEQ ID NO: 2039792
aaucuugacggugguauuc

SEQ ID NO: 2039794 - RNA, 19 nt, Artificial Sequence
  Description of Artificial Sequence: Synthetic oligonucleotide
  Sense strand starting at position 2485 of SEQ ID NO: 1881377
cacagacguucucugauac

SEQ ID NO: 2039795 - RNA, 19 nt, Artificial Sequence
  Description of Artificial Sequence: Synthetic oligonucleotide
  Antisense strand to SEQ ID NO: 2039794
guaucagagaacgucugug

SEQ ID NO: 2039796 - RNA, 19 nt, Artificial Sequence
  Description of Artificial Sequence: Synthetic oligonucleotide
  Sense strand starting at position 2486 of SEQ ID NO: 1881377
acagacguucucugauacu

SEQ ID NO: 2039797 - RNA, 19 nt, Artificial Sequence
  Description of Artificial Sequence: Synthetic oligonucleotide
  Antisense strand to SEQ ID NO: 2039796
aguaucagagaacgucugu

SEQ ID NO: 2039798 - RNA, 19 nt, Artificial Sequence
  Description of Artificial Sequence: Synthetic oligonucleotide
  Sense strand starting at position 2683 of SEQ ID NO: 1881377
guuugacuuccaggacaga

SEQ ID NO: 2039799 - RNA, 19 nt, Artificial Sequence
  Description of Artificial Sequence: Synthetic oligonucleotide
  Antisense strand to SEQ ID NO: 2039798
ucuguccuggaagucaaac

SEQ ID NO: 2039800 - RNA, 19 nt, Artificial Sequence
  Description of Artificial Sequence: Synthetic oligonucleotide
  Sense strand starting at position 2780 of SEQ ID NO: 1881377
ucagguaauguugacacau

SEQ ID NO: 2039801 - RNA, 19 nt, Artificial Sequence
  Description of Artificial Sequence: Synthetic oligonucleotide
  Antisense strand to SEQ ID NO: 2039800
augugucaacauuaccuga

SEQ ID NO: 2039802 - RNA, 19 nt, Artificial Sequence
  Description of Artificial Sequence: Synthetic oligonucleotide
  Sense strand starting at position 2782 of SEQ ID NO: 1881377
agguaauguugacacauuu

SEQ ID NO: 2039803 - RNA, 19 nt, Artificial Sequence
  Description of Artificial Sequence: Synthetic oligonucleotide
  Antisense strand to SEQ ID NO: 2039802
aaaugugucaacauuaccu

SEQ ID NO: 2039804 - RNA, 19 nt, Artificial Sequence
  Description of Artificial Sequence: Synthetic oligonucleotide
  Sense strand starting at position 2885 of SEQ ID NO: 1881377
gagguaaagccaggugaua

SEQ ID NO: 2039805 - RNA, 19 nt, Artificial Sequence
  Description of Artificial Sequence: Synthetic oligonucleotide
  Antisense strand to SEQ ID NO: 2039804
uaucaccuggcuuuaccuc

SEQ ID NO: 2039806 - RNA, 19 nt, Artificial Sequence
  Description of Artificial Sequence: Synthetic oligonucleotide
  Sense strand starting at position 3022 of SEQ ID NO: 1881377
acauguuagccugaauugu

SEQ ID NO: 2039807 - RNA, 19 nt, Artificial Sequence
  Description of Artificial Sequence: Synthetic oligonucleotide
  Antisense strand to SEQ ID NO: 2039806
acaauucaggcuaacaugu

SEQ ID NO: 2039808 - RNA, 19 nt, Artificial Sequence
  Description of Artificial Sequence: Synthetic oligonucleotide
  Sense strand starting at position 3050 of SEQ ID NO: 1881377
auuagacaguuguuaucau

SEQ ID NO: 2039809 - RNA, 19 nt, Artificial Sequence
  Description of Artificial Sequence: Synthetic oligonucleotide
  Antisense strand to SEQ ID NO: 2039808
augauaacaacugucuaau

SEQ ID NO: 2039810 - RNA, 19 nt, Artificial Sequence
  Description of Artificial Sequence: Synthetic oligonucleotide
  Sense strand starting at position 3253 of SEQ ID NO: 1881377
agaguagaauuuggguaau

SEQ ID NO: 2039811 - RNA, 19 nt, Artificial Sequence
  Description of Artificial Sequence: Synthetic oligonucleotide
  Antisense strand to SEQ ID NO: 2039810
auuacccaaauucuacucu

SEQ ID NO: 2039812 - RNA, 19 nt, Artificial Sequence
  Description of Artificial Sequence: Synthetic oligonucleotide
  Sense strand starting at position 3718 of SEQ ID NO: 1881377
ucucgaaauccugaccucu

SEQ ID NO: 2039813 - RNA, 19 nt, Artificial Sequence
  Description of Artificial Sequence: Synthetic oligonucleotide
  Antisense strand to SEQ ID NO: 2039812
agaggucaggauuucgaga

SEQ ID NO: 2039814 - RNA, 19 nt, Artificial Sequence
  Description of Artificial Sequence: Synthetic oligonucleotide
  Sense strand starting at position 3841 of SEQ ID NO: 1881377
ugaggcagguucucuaaga

SEQ ID NO: 2039815 - RNA, 19 nt, Artificial Sequence
  Description of Artificial Sequence: Synthetic oligonucleotide
  Antisense strand to SEQ ID NO: 2039814
ucuuagagaaccugccuca

SEQ ID NO: 2039816 - RNA, 19 nt, Artificial Sequence
  Description of Artificial Sequence: Synthetic oligonucleotide
  Sense strand starting at position 3842 of SEQ ID NO: 1881377
gaggcagguucucuaagau

SEQ ID NO: 2039817 - RNA, 19 nt, Artificial Sequence
  Description of Artificial Sequence: Synthetic oligonucleotide
  Antisense strand to SEQ ID NO: 2039816
aucuuagagaaccugccuc

SEQ ID NO: 2039818 - RNA, 19 nt, Artificial Sequence
  Description of Artificial Sequence: Synthetic oligonucleotide
  Sense strand starting at position 3848 of SEQ ID NO: 1881377
gguucucuaagaugaugau

SEQ ID NO: 2039819 - RNA, 19 nt, Artificial Sequence
  Description of Artificial Sequence: Synthetic oligonucleotide
  Antisense strand to SEQ ID NO: 2039818
aucaucaucuuagagaacc

SEQ ID NO: 2039820 - RNA, 19 nt, Artificial Sequence
  Description of Artificial Sequence: Synthetic oligonucleotide
  Sense strand starting at position 3901 of SEQ ID NO: 1881377
agcaguaaauguuccaaag

SEQ ID NO: 2039821 - RNA, 19 nt, Artificial Sequence
  Description of Artificial Sequence: Synthetic oligonucleotide
  Antisense strand to SEQ ID NO: 2039820
cuuuggaacauuuacugcu

SEQ ID NO: 2039822 - RNA, 19 nt, Artificial Sequence
  Description of Artificial Sequence: Synthetic oligonucleotide
  Sense strand starting at position 3981 of SEQ ID NO: 1881377
ggucuuuaccaccauguuu

SEQ ID NO: 2039823 - RNA, 19 nt, Artificial Sequence
  Description of Artificial Sequence: Synthetic oligonucleotide
  Antisense strand to SEQ ID NO: 2039822
aaacauggugguaaagacc

SEQ ID NO: 2039824 - RNA, 19 nt, Artificial Sequence
  Description of Artificial Sequence: Synthetic oligonucleotide
  Sense strand starting at position 403 of SEQ ID NO: 1881378
cuuagaucaccuugaguaa

SEQ ID NO: 2039825 - RNA, 19 nt, Artificial Sequence
  Description of Artificial Sequence: Synthetic oligonucleotide
  Antisense strand to SEQ ID NO: 2039824
uuacucaaggugaucuaag

SEQ ID NO: 2039826 - RNA, 19 nt, Artificial Sequence
  Description of Artificial Sequence: Synthetic oligonucleotide
  Sense strand starting at position 406 of SEQ ID NO: 1881378
agaucaccuugaguaaacu

SEQ ID NO: 2039827 - RNA, 19 nt, Artificial Sequence
  Description of Artificial Sequence: Synthetic oligonucleotide
  Antisense strand to SEQ ID NO: 2039826
aguuuacucaaggugaucu

SEQ ID NO: 2039828 - RNA, 19 nt, Artificial Sequence
  Description of Artificial Sequence: Synthetic oligonucleotide
  Sense strand starting at position 439 of SEQ ID NO: 1881378
cugagcuacuuccucaaga

SEQ ID NO: 2039829 - RNA, 19 nt, Artificial Sequence
  Description of Artificial Sequence: Synthetic oligonucleotide
  Antisense strand to SEQ ID NO: 2039828
ucuugaggaaguagcucag

SEQ ID NO: 2039830 - RNA, 19 nt, Artificial Sequence
  Description of Artificial Sequence: Synthetic oligonucleotide
  Sense strand starting at position 607 of SEQ ID NO: 1881378
auguaucugcuagacaauu

SEQ ID NO: 2039831 - RNA, 19 nt, Artificial Sequence
  Description of Artificial Sequence: Synthetic oligonucleotide
  Antisense strand to SEQ ID NO: 2039830
aauugucuagcagauacau

SEQ ID NO: 2039832 - RNA, 19 nt, Artificial Sequence
  Description of Artificial Sequence: Synthetic oligonucleotide
  Sense strand starting at position 727 of SEQ ID NO: 1881378
aggcuaucacccuaaaggu

SEQ ID NO: 2039833 - RNA, 19 nt, Artificial Sequence
  Description of Artificial Sequence: Synthetic oligonucleotide
  Antisense strand to SEQ ID NO: 2039832
accuuuagggugauagccu

SEQ ID NO: 2039834 - RNA, 19 nt, Artificial Sequence
  Description of Artificial Sequence: Synthetic oligonucleotide
  Sense strand starting at position 848 of SEQ ID NO: 1881378
gugauaagugggcagaaug

SEQ ID NO: 2039835 - RNA, 19 nt, Artificial Sequence
  Description of Artificial Sequence: Synthetic oligonucleotide
  Antisense strand to SEQ ID NO: 2039834
cauucugcccacuuaucac

SEQ ID NO: 2039836 - RNA, 19 nt, Artificial Sequence
  Description of Artificial Sequence: Synthetic oligonucleotide
  Sense strand starting at position 927 of SEQ ID NO: 1881378
ccaauucuugugggagacu

SEQ ID NO: 2039837 - RNA, 19 nt, Artificial Sequence
  Description of Artificial Sequence: Synthetic oligonucleotide
  Antisense strand to SEQ ID NO: 2039836
agucucccacaagaauugg

SEQ ID NO: 2039838 - RNA, 19 nt, Artificial Sequence
  Description of Artificial Sequence: Synthetic oligonucleotide
  Sense strand starting at position 1111 of SEQ ID NO: 1881378
ggcauaaaccgaugaccau

SEQ ID NO: 2039839 - RNA, 19 nt, Artificial Sequence
  Description of Artificial Sequence: Synthetic oligonucleotide
  Antisense strand to SEQ ID NO: 2039838
auggucaucgguuuaugcc

SEQ ID NO: 2039840 - RNA, 19 nt, Artificial Sequence
  Description of Artificial Sequence: Synthetic oligonucleotide
  Sense strand starting at position 1112 of SEQ ID NO: 1881378
gcauaaaccgaugaccauu

SEQ ID NO: 2039841 - RNA, 19 nt, Artificial Sequence
  Description of Artificial Sequence: Synthetic oligonucleotide
  Antisense strand to SEQ ID NO: 2039840
aauggucaucgguuuaugc

SEQ ID NO: 2039842 - RNA, 19 nt, Artificial Sequence
  Description of Artificial Sequence: Synthetic oligonucleotide
  Sense strand starting at position 1237 of SEQ ID NO: 1881378
gggacuggucgagaucuac

SEQ ID NO: 2039843 - RNA, 19 nt, Artificial Sequence
  Description of Artificial Sequence: Synthetic oligonucleotide
  Antisense strand to SEQ ID NO: 2039842
guagaucucgaccaguccc

SEQ ID NO: 2039844 - RNA, 19 nt, Artificial Sequence
  Description of Artificial Sequence: Synthetic oligonucleotide
  Sense strand starting at position 1246 of SEQ ID NO: 1881378
cgagaucuaccuugggaga

SEQ ID NO: 2039845 - RNA, 19 nt, Artificial Sequence
  Description of Artificial Sequence: Synthetic oligonucleotide
  Antisense strand to SEQ ID NO: 2039844
ucucccaagguagaucucg

SEQ ID NO: 2039846 - RNA, 19 nt, Artificial Sequence
  Description of Artificial Sequence: Synthetic oligonucleotide
  Sense strand starting at position 1829 of SEQ ID NO: 1881378
uuguuugcucuagaaugaa

SEQ ID NO: 2039847 - RNA, 19 nt, Artificial Sequence
  Description of Artificial Sequence: Synthetic oligonucleotide
  Antisense strand to SEQ ID NO: 2039846
uucauucuagagcaaacaa

SEQ ID NO: 2039848 - RNA, 19 nt, Artificial Sequence
  Description of Artificial Sequence: Synthetic oligonucleotide
  Sense strand starting at position 1837 of SEQ ID NO: 1881378
ucuagaaugaacgguggaa

SEQ ID NO: 2039849 - RNA, 19 nt, Artificial Sequence
  Description of Artificial Sequence: Synthetic oligonucleotide
  Antisense strand to SEQ ID NO: 2039848
uuccaccguucauucuaga

SEQ ID NO: 2039850 - RNA, 19 nt, Artificial Sequence
  Description of Artificial Sequence: Synthetic oligonucleotide
  Sense strand starting at position 2011 of SEQ ID NO: 1881378
cgggcgagucggcuuauaa

SEQ ID NO: 2039851 - RNA, 19 nt, Artificial Sequence
  Description of Artificial Sequence: Synthetic oligonucleotide
  Antisense strand to SEQ ID NO: 2039850
uuauaagccgacucgcccg

SEQ ID NO: 2039852 - RNA, 19 nt, Artificial Sequence
  Description of Artificial Sequence: Synthetic oligonucleotide
  Sense strand starting at position 2182 of SEQ ID NO: 1881378
aaggcuuugcgucuuuacu

SEQ ID NO: 2039853 - RNA, 19 nt, Artificial Sequence
  Description of Artificial Sequence: Synthetic oligonucleotide
  Antisense strand to SEQ ID NO: 2039852
aguaaagacgcaaagccuu

SEQ ID NO: 2039854 - RNA, 19 nt, Artificial Sequence
  Description of Artificial Sequence: Synthetic oligonucleotide
  Sense strand starting at position 2183 of SEQ ID NO: 1881378
aggcuuugcgucuuuacuu

SEQ ID NO: 2039855 - RNA, 19 nt, Artificial Sequence
  Description of Artificial Sequence: Synthetic oligonucleotide
  Antisense strand to SEQ ID NO: 2039854
aaguaaagacgcaaagccu

SEQ ID NO: 2039856 - RNA, 19 nt, Artificial Sequence
  Description of Artificial Sequence: Synthetic oligonucleotide
  Sense strand starting at position 2218 of SEQ ID NO: 1881378
gugaaacuaacuugaggua

SEQ ID NO: 2039857 - RNA, 19 nt, Artificial Sequence
  Description of Artificial Sequence: Synthetic oligonucleotide
  Antisense strand to SEQ ID NO: 2039856
uaccucaaguuaguuucac

SEQ ID NO: 2039858 - RNA, 19 nt, Artificial Sequence
  Description of Artificial Sequence: Synthetic oligonucleotide
  Sense strand starting at position 2230 of SEQ ID NO: 1881378
ugagguaucagagggccuu

SEQ ID NO: 2039859 - RNA, 19 nt, Artificial Sequence
  Description of Artificial Sequence: Synthetic oligonucleotide
  Antisense strand to SEQ ID NO: 2039858
aaggcccucugauaccuca

SEQ ID NO: 2039860 - RNA, 19 nt, Artificial Sequence
  Description of Artificial Sequence: Synthetic oligonucleotide
  Sense strand starting at position 2231 of SEQ ID NO: 1881378
gagguaucagagggccuuu

SEQ ID NO: 2039861 - RNA, 19 nt, Artificial Sequence
  Description of Artificial Sequence: Synthetic oligonucleotide
  Antisense strand to SEQ ID NO: 2039860
aaaggcccucugauaccuc

SEQ ID NO: 2039862 - RNA, 19 nt, Artificial Sequence
  Description of Artificial Sequence: Synthetic oligonucleotide
  Sense strand starting at position 2368 of SEQ ID NO: 1881378
uuuggagaacuuugugaaa

SEQ ID NO: 2039863 - RNA, 19 nt, Artificial Sequence
  Description of Artificial Sequence: Synthetic oligonucleotide
  Antisense strand to SEQ ID NO: 2039862
uuucacaaaguucuccaaa

SEQ ID NO: 2039864 - RNA, 19 nt, Artificial Sequence
  Description of Artificial Sequence: Synthetic oligonucleotide
  Sense strand starting at position 2434 of SEQ ID NO: 1881378
agugggaugcguccgaguu

SEQ ID NO: 2039865 - RNA, 19 nt, Artificial Sequence
  Description of Artificial Sequence: Synthetic oligonucleotide
  Antisense strand to SEQ ID NO: 2039864
aacucggacgcaucccacu

SEQ ID NO: 2039866 - RNA, 19 nt, Artificial Sequence
  Description of Artificial Sequence: Synthetic oligonucleotide
  Sense strand starting at position 2501 of SEQ ID NO: 1881378
agcagaggauggcuuuaau

SEQ ID NO: 2039867 - RNA, 19 nt, Artificial Sequence
  Description of Artificial Sequence: Synthetic oligonucleotide
  Antisense strand to SEQ ID NO: 2039866
auuaaagccauccucugcu

SEQ ID NO: 2039868 - RNA, 19 nt, Artificial Sequence
  Description of Artificial Sequence: Synthetic oligonucleotide
  Sense strand starting at position 2523 of SEQ ID NO: 1881378
guguaacuacuacauuauu

SEQ ID NO: 2039869 - RNA, 19 nt, Artificial Sequence
  Description of Artificial Sequence: Synthetic oligonucleotide
  Antisense strand to SEQ ID NO: 2039868
aauaauguaguaguuacac

SEQ ID NO: 2039870 - RNA, 19 nt, Artificial Sequence
  Description of Artificial Sequence: Synthetic oligonucleotide
  Sense strand starting at position 2594 of SEQ ID NO: 1881378
uugacuuugcuuuaaagua

SEQ ID NO: 2039871 - RNA, 19 nt, Artificial Sequence
  Description of Artificial Sequence: Synthetic oligonucleotide
  Antisense strand to SEQ ID NO: 2039870
uacuuuaaagcaaagucaa

SEQ ID NO: 2039872 - RNA, 19 nt, Artificial Sequence
  Description of Artificial Sequence: Synthetic oligonucleotide
  Sense strand starting at position 2616 of SEQ ID NO: 1881378
cugugucuugaugagguaa

SEQ ID NO: 2039873 - RNA, 19 nt, Artificial Sequence
  Description of Artificial Sequence: Synthetic oligonucleotide
  Antisense strand to SEQ ID NO: 2039872
uuaccucaucaagacacag

SEQ ID NO: 2039874 - RNA, 19 nt, Artificial Sequence
  Description of Artificial Sequence: Synthetic oligonucleotide
  Sense strand starting at position 3048 of SEQ ID NO: 1881378
uagauaaacuccguggagu

SEQ ID NO: 2039875 - RNA, 19 nt, Artificial Sequence
  Description of Artificial Sequence: Synthetic oligonucleotide
  Antisense strand to SEQ ID NO: 2039874
acuccacggaguuuaucua

SEQ ID NO: 2039876 - RNA, 19 nt, Artificial Sequence
  Description of Artificial Sequence: Synthetic oligonucleotide
  Sense strand starting at position 3049 of SEQ ID NO: 1881378
agauaaacuccguggaguu

SEQ ID NO: 2039877 - RNA, 19 nt, Artificial Sequence
  Description of Artificial Sequence: Synthetic oligonucleotide
  Antisense strand to SEQ ID NO: 2039876
aacuccacggaguuuaucu

SEQ ID NO: 2039878 - RNA, 19 nt, Artificial Sequence
  Description of Artificial Sequence: Synthetic oligonucleotide
  Sense strand starting at position 3050 of SEQ ID NO: 1881378
gauaaacuccguggaguug

SEQ ID NO: 2039879 - RNA, 19 nt, Artificial Sequence
  Description of Artificial Sequence: Synthetic oligonucleotide
  Antisense strand to SEQ ID NO: 2039878
caacuccacggaguuuauc

SEQ ID NO: 2039880 - RNA, 19 nt, Artificial Sequence
  Description of Artificial Sequence: Synthetic oligonucleotide
  Sense strand starting at position 3192 of SEQ ID NO: 1881378
gacagaaucugacuccugu

SEQ ID NO: 2039881 - RNA, 19 nt, Artificial Sequence
  Description of Artificial Sequence: Synthetic oligonucleotide
  Antisense strand to SEQ ID NO: 2039880
acaggagucagauucuguc

SEQ ID NO: 2039882 - RNA, 19 nt, Artificial Sequence
  Description of Artificial Sequence: Synthetic oligonucleotide
  Sense strand starting at position 3341 of SEQ ID NO: 1881378
cuaaguaggcacuaaaucu

SEQ ID NO: 2039883 - RNA, 19 nt, Artificial Sequence
  Description of Artificial Sequence: Synthetic oligonucleotide
  Antisense strand to SEQ ID NO: 2039882
agauuuagugccuacuuag

SEQ ID NO: 2039884 - RNA, 19 nt, Artificial Sequence
  Description of Artificial Sequence: Synthetic oligonucleotide
  Sense strand starting at position 3397 of SEQ ID NO: 1881378
gcuuauaaucuugaguaca

SEQ ID NO: 2039885 - RNA, 19 nt, Artificial Sequence
  Description of Artificial Sequence: Synthetic oligonucleotide
  Antisense strand to SEQ ID NO: 2039884
uguacucaagauuauaagc

SEQ ID NO: 2039886 - RNA, 19 nt, Artificial Sequence
  Description of Artificial Sequence: Synthetic oligonucleotide
  Sense strand starting at position 3399 of SEQ ID NO: 1881378
uuauaaucuugaguacaag

SEQ ID NO: 2039887 - RNA, 19 nt, Artificial Sequence
  Description of Artificial Sequence: Synthetic oligonucleotide
  Antisense strand to SEQ ID NO: 2039886
cuuguacucaagauuauaa

SEQ ID NO: 2039888 - RNA, 19 nt, Artificial Sequence
  Description of Artificial Sequence: Synthetic oligonucleotide
  Sense strand starting at position 3411 of SEQ ID NO: 1881378
guacaagacuuggcacuuu

SEQ ID NO: 2039889 - RNA, 19 nt, Artificial Sequence
  Description of Artificial Sequence: Synthetic oligonucleotide
  Antisense strand to SEQ ID NO: 2039888
aaagugccaagucuuguac

SEQ ID NO: 2039890 - RNA, 19 nt, Artificial Sequence
  Description of Artificial Sequence: Synthetic oligonucleotide
  Sense strand starting at position 3425 of SEQ ID NO: 1881378
acuuuauauguggacuagu

SEQ ID NO: 2039891 - RNA, 19 nt, Artificial Sequence
  Description of Artificial Sequence: Synthetic oligonucleotide
  Antisense strand to SEQ ID NO: 2039890
acuaguccacauauaaagu

SEQ ID NO: 2039892 - RNA, 19 nt, Artificial Sequence
  Description of Artificial Sequence: Synthetic oligonucleotide
  Sense strand starting at position 3428 of SEQ ID NO: 1881378
uuauauguggacuaguaac

SEQ ID NO: 2039893 - RNA, 19 nt, Artificial Sequence
  Description of Artificial Sequence: Synthetic oligonucleotide
  Antisense strand to SEQ ID NO: 2039892
guuacuaguccacauauaa

SEQ ID NO: 2039894 - RNA, 19 nt, Artificial Sequence
  Description of Artificial Sequence: Synthetic oligonucleotide
  Sense strand starting at position 3434 of SEQ ID NO: 1881378
guggacuaguaacuuucua

SEQ ID NO: 2039895 - RNA, 19 nt, Artificial Sequence
  Description of Artificial Sequence: Synthetic oligonucleotide
  Antisense strand to SEQ ID NO: 2039894
uagaaaguuacuaguccac

SEQ ID NO: 2039896 - RNA, 19 nt, Artificial Sequence
  Description of Artificial Sequence: Synthetic oligonucleotide
  Sense strand starting at position 3625 of SEQ ID NO: 1881378
gcuagucauagcgcuuguu

SEQ ID NO: 2039897 - RNA, 19 nt, Artificial Sequence
  Description of Artificial Sequence: Synthetic oligonucleotide
  Antisense strand to SEQ ID NO: 2039896
aacaagcgcuaugacuagc

SEQ ID NO: 2039898 - RNA, 19 nt, Artificial Sequence
  Description of Artificial Sequence: Synthetic oligonucleotide
  Sense strand starting at position 3627 of SEQ ID NO: 1881378
uagucauagcgcuuguucu

SEQ ID NO: 2039899 - RNA, 19 nt, Artificial Sequence
  Description of Artificial Sequence: Synthetic oligonucleotide
  Antisense strand to SEQ ID NO: 2039898
agaacaagcgcuaugacua

SEQ ID NO: 2039900 - RNA, 19 nt, Artificial Sequence
  Description of Artificial Sequence: Synthetic oligonucleotide
  Sense strand starting at position 3635 of SEQ ID NO: 1881378
gcgcuuguucugcucuaua

SEQ ID NO: 2039901 - RNA, 19 nt, Artificial Sequence
  Description of Artificial Sequence: Synthetic oligonucleotide
  Antisense strand to SEQ ID NO: 2039900
uauagagcagaacaagcgc

SEQ ID NO: 2039902 - RNA, 19 nt, Artificial Sequence
  Description of Artificial Sequence: Synthetic oligonucleotide
  Sense strand starting at position 3651 of SEQ ID NO: 1881378
auaugagcucuugacuuga

SEQ ID NO: 2039903 - RNA, 19 nt, Artificial Sequence
  Description of Artificial Sequence: Synthetic oligonucleotide
  Antisense strand to SEQ ID NO: 2039902
ucaagucaagagcucauau

SEQ ID NO: 2039904 - RNA, 19 nt, Artificial Sequence
  Description of Artificial Sequence: Synthetic oligonucleotide
  Sense strand starting at position 29 of SEQ ID NO: 1881379
guggaauacuuagcucugu

SEQ ID NO: 2039905 - RNA, 19 nt, Artificial Sequence
  Description of Artificial Sequence: Synthetic oligonucleotide
  Antisense strand to SEQ ID NO: 2039904
acagagcuaaguauuccac

SEQ ID NO: 2039906 - RNA, 19 nt, Artificial Sequence
  Description of Artificial Sequence: Synthetic oligonucleotide
  Sense strand starting at position 33 of SEQ ID NO: 1881379
aauacuuagcucuguggaa

SEQ ID NO: 2039907 - RNA, 19 nt, Artificial Sequence
  Description of Artificial Sequence: Synthetic oligonucleotide
  Antisense strand to SEQ ID NO: 2039906
uuccacagagcuaaguauu

SEQ ID NO: 2039908 - RNA, 19 nt, Artificial Sequence
  Description of Artificial Sequence: Synthetic oligonucleotide
  Sense strand starting at position 34 of SEQ ID NO: 1881379
auacuuagcucuguggaau

SEQ ID NO: 2039909 - RNA, 19 nt, Artificial Sequence
  Description of Artificial Sequence: Synthetic oligonucleotide
  Antisense strand to SEQ ID NO: 2039908
auuccacagagcuaaguau

SEQ ID NO: 2039910 - RNA, 19 nt, Artificial Sequence
  Description of Artificial Sequence: Synthetic oligonucleotide
  Sense strand starting at position 35 of SEQ ID NO: 1881379
uacuuagcucuguggaauu

SEQ ID NO: 2039911 - RNA, 19 nt, Artificial Sequence
  Description of Artificial Sequence: Synthetic oligonucleotide
  Antisense strand to SEQ ID NO: 2039910
aauuccacagagcuaagua

SEQ ID NO: 2039912 - RNA, 19 nt, Artificial Sequence
  Description of Artificial Sequence: Synthetic oligonucleotide
  Sense strand starting at position 157 of SEQ ID NO: 1881379
ucuaaacuuucggugucaa

SEQ ID NO: 2039913 - RNA, 19 nt, Artificial Sequence
  Description of Artificial Sequence: Synthetic oligonucleotide
  Antisense strand to SEQ ID NO: 2039912
uugacaccgaaaguuuaga

SEQ ID NO: 2039914 - RNA, 19 nt, Artificial Sequence
  Description of Artificial Sequence: Synthetic oligonucleotide
  Sense strand starting at position 158 of SEQ ID NO: 1881379
cuaaacuuucggugucaag

SEQ ID NO: 2039915 - RNA, 19 nt, Artificial Sequence
  Description of Artificial Sequence: Synthetic oligonucleotide
  Antisense strand to SEQ ID NO: 2039914
cuugacaccgaaaguuuag

SEQ ID NO: 2039916 - RNA, 19 nt, Artificial Sequence
  Description of Artificial Sequence: Synthetic oligonucleotide
  Sense strand starting at position 181 of SEQ ID NO: 1881379
ugagguguugcccacuagu

SEQ ID NO: 2039917 - RNA, 19 nt, Artificial Sequence
  Description of Artificial Sequence: Synthetic oligonucleotide
  Antisense strand to SEQ ID NO: 2039916
acuagugggcaacaccuca

SEQ ID NO: 2039918 - RNA, 19 nt, Artificial Sequence
  Description of Artificial Sequence: Synthetic oligonucleotide
  Sense strand starting at position 254 of SEQ ID NO: 1881379
cucaucuugucuccaguaa

SEQ ID NO: 2039919 - RNA, 19 nt, Artificial Sequence
  Description of Artificial Sequence: Synthetic oligonucleotide
  Antisense strand to SEQ ID NO: 2039918
uuacuggagacaagaugag

SEQ ID NO: 2039920 - RNA, 19 nt, Artificial Sequence
  Description of Artificial Sequence: Synthetic oligonucleotide
  Sense strand starting at position 258 of SEQ ID NO: 1881379
ucuugucuccaguaacuuu

SEQ ID NO: 2039921 - RNA, 19 nt, Artificial Sequence
  Description of Artificial Sequence: Synthetic oligonucleotide
  Antisense strand to SEQ ID NO: 2039920
aaaguuacuggagacaaga

SEQ ID NO: 2039922 - RNA, 19 nt, Artificial Sequence
  Description of Artificial Sequence: Synthetic oligonucleotide
  Sense strand starting at position 333 of SEQ ID NO: 1881379
ccaggcacugucuaaaugu

SEQ ID NO: 2039923 - RNA, 19 nt, Artificial Sequence
  Description of Artificial Sequence: Synthetic oligonucleotide
  Antisense strand to SEQ ID NO: 2039922
acauuuagacagugccugg

SEQ ID NO: 2039924 - RNA, 19 nt, Artificial Sequence
  Description of Artificial Sequence: Synthetic oligonucleotide
  Sense strand starting at position 414 of SEQ ID NO: 1881379
caaguaguuagagguuaag

SEQ ID NO: 2039925 - RNA, 19 nt, Artificial Sequence
  Description of Artificial Sequence: Synthetic oligonucleotide
  Antisense strand to SEQ ID NO: 2039924
cuuaaccucuaacuacuug

SEQ ID NO: 2039926 - RNA, 19 nt, Artificial Sequence
  Description of Artificial Sequence: Synthetic oligonucleotide
  Sense strand starting at position 433 of SEQ ID NO: 1881379
agacuugcccaagguaaca

SEQ ID NO: 2039927 - RNA, 19 nt, Artificial Sequence
  Description of Artificial Sequence: Synthetic oligonucleotide
  Antisense strand to SEQ ID NO: 2039926
uguuaccuugggcaagucu

SEQ ID NO: 2039928 - RNA, 19 nt, Artificial Sequence
  Description of Artificial Sequence: Synthetic oligonucleotide
  Sense strand starting at position 574 of SEQ ID NO: 1881379
gcauuaaauccuuguugga

SEQ ID NO: 2039929 - RNA, 19 nt, Artificial Sequence
  Description of Artificial Sequence: Synthetic oligonucleotide
  Antisense strand to SEQ ID NO: 2039928
uccaacaaggauuuaaugc

SEQ ID NO: 2039930 - RNA, 19 nt, Artificial Sequence
  Description of Artificial Sequence: Synthetic oligonucleotide
  Sense strand starting at position 576 of SEQ ID NO: 1881379
auuaaauccuuguuggaca

SEQ ID NO: 2039931 - RNA, 19 nt, Artificial Sequence
  Description of Artificial Sequence: Synthetic oligonucleotide
  Antisense strand to SEQ ID NO: 2039930
uguccaacaaggauuuaau

SEQ ID NO: 2039932 - RNA, 19 nt, Artificial Sequence
  Description of Artificial Sequence: Synthetic oligonucleotide
  Sense strand starting at position 590 of SEQ ID NO: 1881379
ggacaucucugagcccaaa

SEQ ID NO: 2039933 - RNA, 19 nt, Artificial Sequence
  Description of Artificial Sequence: Synthetic oligonucleotide
  Antisense strand to SEQ ID NO: 2039932
uuugggcucagagaugucc

SEQ ID NO: 2039934 - RNA, 19 nt, Artificial Sequence
  Description of Artificial Sequence: Synthetic oligonucleotide
  Sense strand starting at position 691 of SEQ ID NO: 1881379
cuuccugucuccucaagga

SEQ ID NO: 2039935 - RNA, 19 nt, Artificial Sequence
  Description of Artificial Sequence: Synthetic oligonucleotide
  Antisense strand to SEQ ID NO: 2039934
uccuugaggagacaggaag

SEQ ID NO: 2039936 - RNA, 19 nt, Artificial Sequence
  Description of Artificial Sequence: Synthetic oligonucleotide
  Sense strand starting at position 974 of SEQ ID NO: 1881379
ggaaauaaccacugagcca

SEQ ID NO: 2039937 - RNA, 19 nt, Artificial Sequence
  Description of Artificial Sequence: Synthetic oligonucleotide
  Antisense strand to SEQ ID NO: 2039936
uggcucagugguuauuucc

SEQ ID NO: 2039938 - RNA, 19 nt, Artificial Sequence
  Description of Artificial Sequence: Synthetic oligonucleotide
  Sense strand starting at position 1534 of SEQ ID NO: 1881379
cuuaaaggacgcuaaaguu

SEQ ID NO: 2039939 - RNA, 19 nt, Artificial Sequence
  Description of Artificial Sequence: Synthetic oligonucleotide
  Antisense strand to SEQ ID NO: 2039938
aacuuuagcguccuuuaag

SEQ ID NO: 2039940 - RNA, 19 nt, Artificial Sequence
  Description of Artificial Sequence: Synthetic oligonucleotide
  Sense strand starting at position 2147 of SEQ ID NO: 1881379
gguugcugagguugauuua

SEQ ID NO: 2039941 - RNA, 19 nt, Artificial Sequence
  Description of Artificial Sequence: Synthetic oligonucleotide
  Antisense strand to SEQ ID NO: 2039940
uaaaucaaccucagcaacc

SEQ ID NO: 2039942 - RNA, 19 nt, Artificial Sequence
  Description of Artificial Sequence: Synthetic oligonucleotide
  Sense strand starting at position 2150 of SEQ ID NO: 1881379
ugcugagguugauuuagca

SEQ ID NO: 2039943 - RNA, 19 nt, Artificial Sequence
  Description of Artificial Sequence: Synthetic oligonucleotide
  Antisense strand to SEQ ID NO: 2039942
ugcuaaaucaaccucagca

SEQ ID NO: 2039944 - RNA, 19 nt, Artificial Sequence
  Description of Artificial Sequence: Synthetic oligonucleotide
  Sense strand starting at position 2382 of SEQ ID NO: 1881379
guggcuucgcaacagacuu

SEQ ID NO: 2039945 - RNA, 19 nt, Artificial Sequence
  Description of Artificial Sequence: Synthetic oligonucleotide
  Antisense strand to SEQ ID NO: 2039944
aagucuguugcgaagccac

SEQ ID NO: 2039946 - RNA, 19 nt, Artificial Sequence
  Description of Artificial Sequence: Synthetic oligonucleotide
  Sense strand starting at position 2474 of SEQ ID NO: 1881379
uucugcauagcgcaaauau

SEQ ID NO: 2039947 - RNA, 19 nt, Artificial Sequence
  Description of Artificial Sequence: Synthetic oligonucleotide
  Antisense strand to SEQ ID NO: 2039946
auauuugcgcuaugcagaa

SEQ ID NO: 2039948 - RNA, 19 nt, Artificial Sequence
  Description of Artificial Sequence: Synthetic oligonucleotide
  Sense strand starting at position 2518 of SEQ ID NO: 1881379
ucccacuuccgugaguaua

SEQ ID NO: 2039949 - RNA, 19 nt, Artificial Sequence
  Description of Artificial Sequence: Synthetic oligonucleotide
  Antisense strand to SEQ ID NO: 2039948
uauacucacggaaguggga

SEQ ID NO: 2039950 - RNA, 19 nt, Artificial Sequence
  Description of Artificial Sequence: Synthetic oligonucleotide
  Sense strand starting at position 2520 of SEQ ID NO: 1881379
ccacuuccgugaguauauu

SEQ ID NO: 2039951 - RNA, 19 nt, Artificial Sequence
  Description of Artificial Sequence: Synthetic oligonucleotide
  Antisense strand to SEQ ID NO: 2039950
aauauacucacggaagugg

SEQ ID NO: 2039952 - RNA, 19 nt, Artificial Sequence
  Description of Artificial Sequence: Synthetic oligonucleotide
  Sense strand starting at position 2629 of SEQ ID NO: 1881379
guucacguuccaugggaau

SEQ ID NO: 2039953 - RNA, 19 nt, Artificial Sequence
  Description of Artificial Sequence: Synthetic oligonucleotide
  Antisense strand to SEQ ID NO: 2039952
auucccauggaacgugaac

SEQ ID NO: 2039954 - RNA, 19 nt, Artificial Sequence
  Description of Artificial Sequence: Synthetic oligonucleotide
  Sense strand starting at position 2711 of SEQ ID NO: 1881379
gugguuuagcgguaacuua

SEQ ID NO: 2039955 - RNA, 19 nt, Artificial Sequence
  Description of Artificial Sequence: Synthetic oligonucleotide
  Antisense strand to SEQ ID NO: 2039954
uaaguuaccgcuaaaccac

SEQ ID NO: 2039956 - RNA, 19 nt, Artificial Sequence
  Description of Artificial Sequence: Synthetic oligonucleotide
  Sense strand starting at position 2729 of SEQ ID NO: 1881379
acgugauucccacgucaag

SEQ ID NO: 2039957 - RNA, 19 nt, Artificial Sequence
  Description of Artificial Sequence: Synthetic oligonucleotide
  Antisense strand to SEQ ID NO: 2039956
cuugacgugggaaucacgu

SEQ ID NO: 2039958 - RNA, 19 nt, Artificial Sequence
  Description of Artificial Sequence: Synthetic oligonucleotide
  Sense strand starting at position 2782 of SEQ ID NO: 1881379
ucaaauuucugaggaccua

SEQ ID NO: 2039959 - RNA, 19 nt, Artificial Sequence
  Description of Artificial Sequence: Synthetic oligonucleotide
  Antisense strand to SEQ ID NO: 2039958
uagguccucagaaauuuga

SEQ ID NO: 2039960 - RNA, 19 nt, Artificial Sequence
  Description of Artificial Sequence: Synthetic oligonucleotide
  Sense strand starting at position 2884 of SEQ ID NO: 1881379
aggugacaacuaugcucau

SEQ ID NO: 2039961 - RNA, 19 nt, Artificial Sequence
  Description of Artificial Sequence: Synthetic oligonucleotide
  Antisense strand to SEQ ID NO: 2039960
augagcauaguugucaccu

SEQ ID NO: 2039962 - RNA, 19 nt, Artificial Sequence
  Description of Artificial Sequence: Synthetic oligonucleotide
  Sense strand starting at position 2885 of SEQ ID NO: 1881379
ggugacaacuaugcucaua

SEQ ID NO: 2039963 - RNA, 19 nt, Artificial Sequence
  Description of Artificial Sequence: Synthetic oligonucleotide
  Antisense strand to SEQ ID NO: 2039962
uaugagcauaguugucacc

SEQ ID NO: 2039964 - RNA, 19 nt, Artificial Sequence
  Description of Artificial Sequence: Synthetic oligonucleotide
  Sense strand starting at position 2887 of SEQ ID NO: 1881379
ugacaacuaugcucauaag

SEQ ID NO: 2039965 - RNA, 19 nt, Artificial Sequence
  Description of Artificial Sequence: Synthetic oligonucleotide
  Antisense strand to SEQ ID NO: 2039964
cuuaugagcauaguuguca

SEQ ID NO: 2039966 - RNA, 19 nt, Artificial Sequence
  Description of Artificial Sequence: Synthetic oligonucleotide
  Sense strand starting at position 2898 of SEQ ID NO: 1881379
cucauaagcuuggcuacaa

SEQ ID NO: 2039967 - RNA, 19 nt, Artificial Sequence
  Description of Artificial Sequence: Synthetic oligonucleotide
  Antisense strand to SEQ ID NO: 2039966
uuguagccaagcuuaugag

SEQ ID NO: 2039968 - RNA, 19 nt, Artificial Sequence
  Description of Artificial Sequence: Synthetic oligonucleotide
  Sense strand starting at position 2935 of SEQ ID NO: 1881379
cuacuuugguauccugaca

SEQ ID NO: 2039969 - RNA, 19 nt, Artificial Sequence
  Description of Artificial Sequence: Synthetic oligonucleotide
  Antisense strand to SEQ ID NO: 2039968
ugucaggauaccaaaguag

SEQ ID NO: 2039970 - RNA, 19 nt, Artificial Sequence
  Description of Artificial Sequence: Synthetic oligonucleotide
  Sense strand starting at position 3031 of SEQ ID NO: 1881379
ggugguucaccuuguggau

SEQ ID NO: 2039971 - RNA, 19 nt, Artificial Sequence
  Description of Artificial Sequence: Synthetic oligonucleotide
  Antisense strand to SEQ ID NO: 2039970
auccacaaggugaaccacc

SEQ ID NO: 2039972 - RNA, 19 nt, Artificial Sequence
  Description of Artificial Sequence: Synthetic oligonucleotide
  Sense strand starting at position 3292 of SEQ ID NO: 1881379
uggucaaacccucagcuua

SEQ ID NO: 2039973 - RNA, 19 nt, Artificial Sequence
  Description of Artificial Sequence: Synthetic oligonucleotide
  Antisense strand to SEQ ID NO: 2039972
uaagcugaggguuugacca

SEQ ID NO: 2039974 - RNA, 19 nt, Artificial Sequence
  Description of Artificial Sequence: Synthetic oligonucleotide
  Sense strand starting at position 3459 of SEQ ID NO: 1881379
aggaaaccauuauaaggaa

SEQ ID NO: 2039975 - RNA, 19 nt, Artificial Sequence
  Description of Artificial Sequence: Synthetic oligonucleotide
  Antisense strand to SEQ ID NO: 2039974
uuccuuauaaugguuuccu

SEQ ID NO: 2039976 - RNA, 19 nt, Artificial Sequence
  Description of Artificial Sequence: Synthetic oligonucleotide
  Sense strand starting at position 3471 of SEQ ID NO: 1881379
uaaggaagugcccauucuu

SEQ ID NO: 2039977 - RNA, 19 nt, Artificial Sequence
  Description of Artificial Sequence: Synthetic oligonucleotide
  Antisense strand to SEQ ID NO: 2039976
aagaaugggcacuuccuua

SEQ ID NO: 2039978 - RNA, 19 nt, Artificial Sequence
  Description of Artificial Sequence: Synthetic oligonucleotide
  Sense strand starting at position 3770 of SEQ ID NO: 1881379
uuguaacaggucugaggaa

SEQ ID NO: 2039979 - RNA, 19 nt, Artificial Sequence
  Description of Artificial Sequence: Synthetic oligonucleotide
  Antisense strand to SEQ ID NO: 2039978
uuccucagaccuguuacaa

SEQ ID NO: 2039980 - RNA, 19 nt, Artificial Sequence
  Description of Artificial Sequence: Synthetic oligonucleotide
  Sense strand starting at position 3860 of SEQ ID NO: 1881379
cuaucaugaguccagacuu

SEQ ID NO: 2039981 - RNA, 19 nt, Artificial Sequence
  Description of Artificial Sequence: Synthetic oligonucleotide
  Antisense strand to SEQ ID NO: 2039980
aagucuggacucaugauag

SEQ ID NO: 2039982 - RNA, 19 nt, Artificial Sequence
  Description of Artificial Sequence: Synthetic oligonucleotide
  Sense strand starting at position 3900 of SEQ ID NO: 1881379
uccucuguccaaggaauca

SEQ ID NO: 2039983 - RNA, 19 nt, Artificial Sequence
  Description of Artificial Sequence: Synthetic oligonucleotide
  Antisense strand to SEQ ID NO: 2039982
ugauuccuuggacagagga

SEQ ID NO: 2039984 - RNA, 19 nt, Artificial Sequence
  Description of Artificial Sequence: Synthetic oligonucleotide
  Sense strand starting at position 42 of SEQ ID NO: 1881380
cuaagcuucccagacuuga

SEQ ID NO: 2039985 - RNA, 19 nt, Artificial Sequence
  Description of Artificial Sequence: Synthetic oligonucleotide
  Antisense strand to SEQ ID NO: 2039984
ucaagucugggaagcuuag

SEQ ID NO: 2039986 - RNA, 19 nt, Artificial Sequence
  Description of Artificial Sequence: Synthetic oligonucleotide
  Sense strand starting at position 105 of SEQ ID NO: 1881380
aagaaacagugaguaguaa

SEQ ID NO: 2039987 - RNA, 19 nt, Artificial Sequence
  Description of Artificial Sequence: Synthetic oligonucleotide
  Antisense strand to SEQ ID NO: 2039986
uuacuacucacuguuucuu

SEQ ID NO: 2039988 - RNA, 19 nt, Artificial Sequence
  Description of Artificial Sequence: Synthetic oligonucleotide
  Sense strand starting at position 202 of SEQ ID NO: 1881380
agagcagucccaggaacau

SEQ ID NO: 2039989 - RNA, 19 nt, Artificial Sequence
  Description of Artificial Sequence: Synthetic oligonucleotide
  Antisense strand to SEQ ID NO: 2039988
auguuccugggacugcucu

SEQ ID NO: 2039990 - RNA, 19 nt, Artificial Sequence
  Description of Artificial Sequence: Synthetic oligonucleotide
  Sense strand starting at position 351 of SEQ ID NO: 1881380
cccagagaagacuguuuaa

SEQ ID NO: 2039991 - RNA, 19 nt, Artificial Sequence
  Description of Artificial Sequence: Synthetic oligonucleotide
  Antisense strand to SEQ ID NO: 2039990
uuaaacagucuucucuggg

SEQ ID NO: 2039992 - RNA, 19 nt, Artificial Sequence
  Description of Artificial Sequence: Synthetic oligonucleotide
  Sense strand starting at position 481 of SEQ ID NO: 1881380
guggaauacuuagcucugu

SEQ ID NO: 2039993 - RNA, 19 nt, Artificial Sequence
  Description of Artificial Sequence: Synthetic oligonucleotide
  Antisense strand to SEQ ID NO: 2039992
acagagcuaaguauuccac

SEQ ID NO: 2039994 - RNA, 19 nt, Artificial Sequence
  Description of Artificial Sequence: Synthetic oligonucleotide
  Sense strand starting at position 485 of SEQ ID NO: 1881380
aauacuuagcucuguggaa

SEQ ID NO: 2039995 - RNA, 19 nt, Artificial Sequence
  Description of Artificial Sequence: Synthetic oligonucleotide
  Antisense strand to SEQ ID NO: 2039994
uuccacagagcuaaguauu

SEQ ID NO: 2039996 - RNA, 19 nt, Artificial Sequence
  Description of Artificial Sequence: Synthetic oligonucleotide
  Sense strand starting at position 486 of SEQ ID NO: 1881380
auacuuagcucuguggaau

SEQ ID NO: 2039997 - RNA, 19 nt, Artificial Sequence
  Description of Artificial Sequence: Synthetic oligonucleotide
  Antisense strand to SEQ ID NO: 2039996
auuccacagagcuaaguau

SEQ ID NO: 2039998 - RNA, 19 nt, Artificial Sequence
  Description of Artificial Sequence: Synthetic oligonucleotide
  Sense strand starting at position 487 of SEQ ID NO: 1881380
uacuuagcucuguggaauu

SEQ ID NO: 2039999 - RNA, 19 nt, Artificial Sequence
  Description of Artificial Sequence: Synthetic oligonucleotide
  Antisense strand to SEQ ID NO: 2039998
aauuccacagagcuaagua

SEQ ID NO: 2040000 - RNA, 19 nt, Artificial Sequence
  Description of Artificial Sequence: Synthetic oligonucleotide
  Sense strand starting at position 609 of SEQ ID NO: 1881380
ucuaaacuuucggugucaa

SEQ ID NO: 2040001 - RNA, 19 nt, Artificial Sequence
  Description of Artificial Sequence: Synthetic oligonucleotide
  Antisense strand to SEQ ID NO: 2040000
uugacaccgaaaguuuaga

SEQ ID NO: 2040002 - RNA, 19 nt, Artificial Sequence
  Description of Artificial Sequence: Synthetic oligonucleotide
  Sense strand starting at position 610 of SEQ ID NO: 1881380
cuaaacuuucggugucaag

SEQ ID NO: 2040003 - RNA, 19 nt, Artificial Sequence
  Description of Artificial Sequence: Synthetic oligonucleotide
  Antisense strand to SEQ ID NO: 2040002
cuugacaccgaaaguuuag

SEQ ID NO: 2040004 - RNA, 19 nt, Artificial Sequence
  Description of Artificial Sequence: Synthetic oligonucleotide
  Sense strand starting at position 633 of SEQ ID NO: 1881380
ugagguguugcccacuagu

SEQ ID NO: 2040005 - RNA, 19 nt, Artificial Sequence
  Description of Artificial Sequence: Synthetic oligonucleotide
  Antisense strand to SEQ ID NO: 2040004
acuagugggcaacaccuca

SEQ ID NO: 2040006 - RNA, 19 nt, Artificial Sequence
  Description of Artificial Sequence: Synthetic oligonucleotide
  Sense strand starting at position 706 of SEQ ID NO: 1881380
cucaucuugucuccaguaa

SEQ ID NO: 2040007 - RNA, 19 nt, Artificial Sequence
  Description of Artificial Sequence: Synthetic oligonucleotide
  Antisense strand to SEQ ID NO: 2040006
uuacuggagacaagaugag

SEQ ID NO: 2040008 - RNA, 19 nt, Artificial Sequence
  Description of Artificial Sequence: Synthetic oligonucleotide
  Sense strand starting at position 710 of SEQ ID NO: 1881380
ucuugucuccaguaacuuu

SEQ ID NO: 2040009 - RNA, 19 nt, Artificial Sequence
  Description of Artificial Sequence: Synthetic oligonucleotide
  Antisense strand to SEQ ID NO: 2040008
aaaguuacuggagacaaga

SEQ ID NO: 2040010 - RNA, 19 nt, Artificial Sequence
  Description of Artificial Sequence: Synthetic oligonucleotide
  Sense strand starting at position 785 of SEQ ID NO: 1881380
ccaggcacugucuaaaugu

SEQ ID NO: 2040011 - RNA, 19 nt, Artificial Sequence
  Description of Artificial Sequence: Synthetic oligonucleotide
  Antisense strand to SEQ ID NO: 2040010
acauuuagacagugccugg

SEQ ID NO: 2040012 - RNA, 19 nt, Artificial Sequence
  Description of Artificial Sequence: Synthetic oligonucleotide
  Sense strand starting at position 866 of SEQ ID NO: 1881380
caaguaguuagagguuaag

SEQ ID NO: 2040013 - RNA, 19 nt, Artificial Sequence
  Description of Artificial Sequence: Synthetic oligonucleotide
  Antisense strand to SEQ ID NO: 2040012
cuuaaccucuaacuacuug

SEQ ID NO: 2040014 - RNA, 19 nt, Artificial Sequence
  Description of Artificial Sequence: Synthetic oligonucleotide
  Sense strand starting at position 885 of SEQ ID NO: 1881380
agacuugcccaagguaaca

SEQ ID NO: 2040015 - RNA, 19 nt, Artificial Sequence
  Description of Artificial Sequence: Synthetic oligonucleotide
  Antisense strand to SEQ ID NO: 2040014
uguuaccuugggcaagucu

SEQ ID NO: 2040016 - RNA, 19 nt, Artificial Sequence
  Description of Artificial Sequence: Synthetic oligonucleotide
  Sense strand starting at position 1026 of SEQ ID NO: 1881380
gcauuaaauccuuguugga

SEQ ID NO: 2040017 - RNA, 19 nt, Artificial Sequence
  Description of Artificial Sequence: Synthetic oligonucleotide
  Antisense strand to SEQ ID NO: 2040016
uccaacaaggauuuaaugc

SEQ ID NO: 2040018 - RNA, 19 nt, Artificial Sequence
  Description of Artificial Sequence: Synthetic oligonucleotide
  Sense strand starting at position 1028 of SEQ ID NO: 1881380
auuaaauccuuguuggaca

SEQ ID NO: 2040019 - RNA, 19 nt, Artificial Sequence
  Description of Artificial Sequence: Synthetic oligonucleotide
  Antisense strand to SEQ ID NO: 2040018
uguccaacaaggauuuaau

SEQ ID NO: 2040020 - RNA, 19 nt, Artificial Sequence
  Description of Artificial Sequence: Synthetic oligonucleotide
  Sense strand starting at position 1042 of SEQ ID NO: 1881380
ggacaucucugagcccaaa

SEQ ID NO: 2040021 - RNA, 19 nt, Artificial Sequence
  Description of Artificial Sequence: Synthetic oligonucleotide
  Antisense strand to SEQ ID NO: 2040020
uuugggcucagagaugucc

SEQ ID NO: 2040022 - RNA, 19 nt, Artificial Sequence
  Description of Artificial Sequence: Synthetic oligonucleotide
  Sense strand starting at position 1143 of SEQ ID NO: 1881380
cuuccugucuccucaagga

SEQ ID NO: 2040023 - RNA, 19 nt, Artificial Sequence
  Description of Artificial Sequence: Synthetic oligonucleotide
  Antisense strand to SEQ ID NO: 2040022
uccuugaggagacaggaag

SEQ ID NO: 2040024 - RNA, 19 nt, Artificial Sequence
  Description of Artificial Sequence: Synthetic oligonucleotide
  Sense strand starting at position 1426 of SEQ ID NO: 1881380
ggaaauaaccacugagcca

SEQ ID NO: 2040025 - RNA, 19 nt, Artificial Sequence
  Description of Artificial Sequence: Synthetic oligonucleotide
  Antisense strand to SEQ ID NO: 2040024
uggcucagugguuauuucc

SEQ ID NO: 2040026 - RNA, 19 nt, Artificial Sequence
  Description of Artificial Sequence: Synthetic oligonucleotide
  Sense strand starting at position 1986 of SEQ ID NO: 1881380
cuuaaaggacgcuaaaguu

SEQ ID NO: 2040027 - RNA, 19 nt, Artificial Sequence
  Description of Artificial Sequence: Synthetic oligonucleotide
  Antisense strand to SEQ ID NO: 2040026
aacuuuagcguccuuuaag

SEQ ID NO: 2040028 - RNA, 19 nt, Artificial Sequence
  Description of Artificial Sequence: Synthetic oligonucleotide
  Sense strand starting at position 2599 of SEQ ID NO: 1881380
gguugcugagguugauuua

SEQ ID NO: 2040029 - RNA, 19 nt, Artificial Sequence
  Description of Artificial Sequence: Synthetic oligonucleotide
  Antisense strand to SEQ ID NO: 2040028
uaaaucaaccucagcaacc

SEQ ID NO: 2040030 - RNA, 19 nt, Artificial Sequence
  Description of Artificial Sequence: Synthetic oligonucleotide
  Sense strand starting at position 2602 of SEQ ID NO: 1881380
ugcugagguugauuuagca

SEQ ID NO: 2040031 - RNA, 19 nt, Artificial Sequence
  Description of Artificial Sequence: Synthetic oligonucleotide
  Antisense strand to SEQ ID NO: 2040030
ugcuaaaucaaccucagca

SEQ ID NO: 2040032 - RNA, 19 nt, Artificial Sequence
  Description of Artificial Sequence: Synthetic oligonucleotide
  Sense strand starting at position 2834 of SEQ ID NO: 1881380
guggcuucgcaacagacuu

SEQ ID NO: 2040033 - RNA, 19 nt, Artificial Sequence
  Description of Artificial Sequence: Synthetic oligonucleotide
  Antisense strand to SEQ ID NO: 2040032
aagucuguugcgaagccac

SEQ ID NO: 2040034 - RNA, 19 nt, Artificial Sequence
  Description of Artificial Sequence: Synthetic oligonucleotide
  Sense strand starting at position 2926 of SEQ ID NO: 1881380
uucugcauagcgcaaauau

SEQ ID NO: 2040035 - RNA, 19 nt, Artificial Sequence
  Description of Artificial Sequence: Synthetic oligonucleotide
  Antisense strand to SEQ ID NO: 2040034
auauuugcgcuaugcagaa

SEQ ID NO: 2040036 - RNA, 19 nt, Artificial Sequence
  Description of Artificial Sequence: Synthetic oligonucleotide
  Sense strand starting at position 2970 of SEQ ID NO: 1881380
ucccacuuccgugaguaua

SEQ ID NO: 2040037 - RNA, 19 nt, Artificial Sequence
  Description of Artificial Sequence: Synthetic oligonucleotide
  Antisense strand to SEQ ID NO: 2040036
uauacucacggaaguggga

SEQ ID NO: 2040038 - RNA, 19 nt, Artificial Sequence
  Description of Artificial Sequence: Synthetic oligonucleotide
  Sense strand starting at position 2972 of SEQ ID NO: 1881380
ccacuuccgugaguauauu

SEQ ID NO: 2040039 - RNA, 19 nt, Artificial Sequence
  Description of Artificial Sequence: Synthetic oligonucleotide
  Antisense strand to SEQ ID NO: 2040038
aauauacucacggaagugg

SEQ ID NO: 2040040 - RNA, 19 nt, Artificial Sequence
  Description of Artificial Sequence: Synthetic oligonucleotide
  Sense strand starting at position 3081 of SEQ ID NO: 1881380
guucacguuccaugggaau

SEQ ID NO: 2040041 - RNA, 19 nt, Artificial Sequence
  Description of Artificial Sequence: Synthetic oligonucleotide
  Antisense strand to SEQ ID NO: 2040040
auucccauggaacgugaac

SEQ ID NO: 2040042 - RNA, 19 nt, Artificial Sequence
  Description of Artificial Sequence: Synthetic oligonucleotide
  Sense strand starting at position 3163 of SEQ ID NO: 1881380
gugguuuagcgguaacuua

SEQ ID NO: 2040043 - RNA, 19 nt, Artificial Sequence
  Description of Artificial Sequence: Synthetic oligonucleotide
  Antisense strand to SEQ ID NO: 2040042
uaaguuaccgcuaaaccac

SEQ ID NO: 2040044 - RNA, 19 nt, Artificial Sequence
  Description of Artificial Sequence: Synthetic oligonucleotide
  Sense strand starting at position 3234 of SEQ ID NO: 1881380
ucaaauuucugaggaccua

SEQ ID NO: 2040045 - RNA, 19 nt, Artificial Sequence
  Description of Artificial Sequence: Synthetic oligonucleotide
  Antisense strand to SEQ ID NO: 2040044
uagguccucagaaauuuga

SEQ ID NO: 2040046 - RNA, 19 nt, Artificial Sequence
  Description of Artificial Sequence: Synthetic oligonucleotide
  Sense strand starting at position 3336 of SEQ ID NO: 1881380
aggugacaacuaugcucau

SEQ ID NO: 2040047 - RNA, 19 nt, Artificial Sequence
  Description of Artificial Sequence: Synthetic oligonucleotide
  Antisense strand to SEQ ID NO: 2040046
augagcauaguugucaccu

SEQ ID NO: 2040048 - RNA, 19 nt, Artificial Sequence
  Description of Artificial Sequence: Synthetic oligonucleotide
  Sense strand starting at position 3337 of SEQ ID NO: 1881380
ggugacaacuaugcucaua

SEQ ID NO: 2040049 - RNA, 19 nt, Artificial Sequence
  Description of Artificial Sequence: Synthetic oligonucleotide
  Antisense strand to SEQ ID NO: 2040048
uaugagcauaguugucacc

SEQ ID NO: 2040050 - RNA, 19 nt, Artificial Sequence
  Description of Artificial Sequence: Synthetic oligonucleotide
  Sense strand starting at position 3339 of SEQ ID NO: 1881380
ugacaacuaugcucauaag

SEQ ID NO: 2040051 - RNA, 19 nt, Artificial Sequence
  Description of Artificial Sequence: Synthetic oligonucleotide
  Antisense strand to SEQ ID NO: 2040050
cuuaugagcauaguuguca

SEQ ID NO: 2040052 - RNA, 19 nt, Artificial Sequence
  Description of Artificial Sequence: Synthetic oligonucleotide
  Sense strand starting at position 3350 of SEQ ID NO: 1881380
cucauaagcuuggcuacaa

SEQ ID NO: 2040053 - RNA, 19 nt, Artificial Sequence
  Description of Artificial Sequence: Synthetic oligonucleotide
  Antisense strand to SEQ ID NO: 2040052
uuguagccaagcuuaugag

SEQ ID NO: 2040054 - RNA, 19 nt, Artificial Sequence
  Description of Artificial Sequence: Synthetic oligonucleotide
  Sense strand starting at position 3387 of SEQ ID NO: 1881380
cuacuuugguauccugaca

SEQ ID NO: 2040055 - RNA, 19 nt, Artificial Sequence
  Description of Artificial Sequence: Synthetic oligonucleotide
  Antisense strand to SEQ ID NO: 2040054
ugucaggauaccaaaguag

SEQ ID NO: 2040056 - RNA, 19 nt, Artificial Sequence
  Description of Artificial Sequence: Synthetic oligonucleotide
  Sense strand starting at position 3483 of SEQ ID NO: 1881380
ggugguucaccuuguggau

SEQ ID NO: 2040057 - RNA, 19 nt, Artificial Sequence
  Description of Artificial Sequence: Synthetic oligonucleotide
  Antisense strand to SEQ ID NO: 2040056
auccacaaggugaaccacc

SEQ ID NO: 2040058 - RNA, 19 nt, Artificial Sequence
  Description of Artificial Sequence: Synthetic oligonucleotide
  Sense strand starting at position 3744 of SEQ ID NO: 1881380
uggucaaacccucagcuua

SEQ ID NO: 2040059 - RNA, 19 nt, Artificial Sequence
  Description of Artificial Sequence: Synthetic oligonucleotide
  Antisense strand to SEQ ID NO: 2040058
uaagcugaggguuugacca

SEQ ID NO: 2040060 - RNA, 19 nt, Artificial Sequence
  Description of Artificial Sequence: Synthetic oligonucleotide
  Sense strand starting at position 3911 of SEQ ID NO: 1881380
aggaaaccauuauaaggaa

SEQ ID NO: 2040061 - RNA, 19 nt, Artificial Sequence
  Description of Artificial Sequence: Synthetic oligonucleotide
  Antisense strand to SEQ ID NO: 2040060
uuccuuauaaugguuuccu

SEQ ID NO: 2040062 - RNA, 19 nt, Artificial Sequence
  Description of Artificial Sequence: Synthetic oligonucleotide
  Sense strand starting at position 3923 of SEQ ID NO: 1881380
uaaggaagugcccauucuu

SEQ ID NO: 2040063 - RNA, 19 nt, Artificial Sequence
  Description of Artificial Sequence: Synthetic oligonucleotide
  Antisense strand to SEQ ID NO: 2040062
aagaaugggcacuuccuua

SEQ ID NO: 2040064 - RNA, 19 nt, Artificial Sequence
  Description of Artificial Sequence: Synthetic oligonucleotide
  Sense strand starting at position 132 of SEQ ID NO: 1881381
uggacuaggcuuugggauu

SEQ ID NO: 2040065 - RNA, 19 nt, Artificial Sequence
  Description of Artificial Sequence: Synthetic oligonucleotide
  Antisense strand to SEQ ID NO: 2040064
aaucccaaagccuagucca

SEQ ID NO: 2040066 - RNA, 19 nt, Artificial Sequence
  Description of Artificial Sequence: Synthetic oligonucleotide
  Sense strand starting at position 320 of SEQ ID NO: 1881381
gagaaagccuccucgaagu

SEQ ID NO: 2040067 - RNA, 19 nt, Artificial Sequence
  Description of Artificial Sequence: Synthetic oligonucleotide
  Antisense strand to SEQ ID NO: 2040066
acuucgaggaggcuuucuc

SEQ ID NO: 2040068 - RNA, 19 nt, Artificial Sequence
  Description of Artificial Sequence: Synthetic oligonucleotide
  Sense strand starting at position 322 of SEQ ID NO: 1881381
gaaagccuccucgaaguua

SEQ ID NO: 2040069 - RNA, 19 nt, Artificial Sequence
  Description of Artificial Sequence: Synthetic oligonucleotide
  Antisense strand to SEQ ID NO: 2040068
uaacuucgaggaggcuuuc

SEQ ID NO: 2040070 - RNA, 19 nt, Artificial Sequence
  Description of Artificial Sequence: Synthetic oligonucleotide
  Sense strand starting at position 362 of SEQ ID NO: 1881381
uagauauuggacugguguu

SEQ ID NO: 2040071 - RNA, 19 nt, Artificial Sequence
  Description of Artificial Sequence: Synthetic oligonucleotide
  Antisense strand to SEQ ID NO: 2040070
aacaccaguccaauaucua

SEQ ID NO: 2040072 - RNA, 19 nt, Artificial Sequence
  Description of Artificial Sequence: Synthetic oligonucleotide
  Sense strand starting at position 435 of SEQ ID NO: 1881381
ugacaaguauugcuagaau

SEQ ID NO: 2040073 - RNA, 19 nt, Artificial Sequence
  Description of Artificial Sequence: Synthetic oligonucleotide
  Antisense strand to SEQ ID NO: 2040072
auucuagcaauacuuguca

SEQ ID NO: 2040074 - RNA, 19 nt, Artificial Sequence
  Description of Artificial Sequence: Synthetic oligonucleotide
  Sense strand starting at position 460 of SEQ ID NO: 1881381
aguuaugagccagagaucu

SEQ ID NO: 2040075 - RNA, 19 nt, Artificial Sequence
  Description of Artificial Sequence: Synthetic oligonucleotide
  Antisense strand to SEQ ID NO: 2040074
agaucucuggcucauaacu

SEQ ID NO: 2040076 - RNA, 19 nt, Artificial Sequence
  Description of Artificial Sequence: Synthetic oligonucleotide
  Sense strand starting at position 518 of SEQ ID NO: 1881381
ugugguguuaaucagauug

SEQ ID NO: 2040077 - RNA, 19 nt, Artificial Sequence
  Description of Artificial Sequence: Synthetic oligonucleotide
  Antisense strand to SEQ ID NO: 2040076
caaucugauuaacaccaca

SEQ ID NO: 2040078 - RNA, 19 nt, Artificial Sequence
  Description of Artificial Sequence: Synthetic oligonucleotide
  Sense strand starting at position 525 of SEQ ID NO: 1881381
uuaaucagauuggcauuaa

SEQ ID NO: 2040079 - RNA, 19 nt, Artificial Sequence
  Description of Artificial Sequence: Synthetic oligonucleotide
  Antisense strand to SEQ ID NO: 2040078
uuaaugccaaucugauuaa

SEQ ID NO: 2040080 - RNA, 19 nt, Artificial Sequence
  Description of Artificial Sequence: Synthetic oligonucleotide
  Sense strand starting at position 1192 of SEQ ID NO: 1881381
agggaaauuugugagguag

SEQ ID NO: 2040081 - RNA, 19 nt, Artificial Sequence
  Description of Artificial Sequence: Synthetic oligonucleotide
  Antisense strand to SEQ ID NO: 2040080
cuaccucacaaauuucccu

SEQ ID NO: 2040082 - RNA, 19 nt, Artificial Sequence
  Description of Artificial Sequence: Synthetic oligonucleotide
  Sense strand starting at position 1307 of SEQ ID NO: 1881381
ucuauuuauugagauugag

SEQ ID NO: 2040083 - RNA, 19 nt, Artificial Sequence
  Description of Artificial Sequence: Synthetic oligonucleotide
  Antisense strand to SEQ ID NO: 2040082
cucaaucucaauaaauaga

SEQ ID NO: 2040084 - RNA, 19 nt, Artificial Sequence
  Description of Artificial Sequence: Synthetic oligonucleotide
  Sense strand starting at position 1315 of SEQ ID NO: 1881381
uugagauugagauguccaa

SEQ ID NO: 2040085 - RNA, 19 nt, Artificial Sequence
  Description of Artificial Sequence: Synthetic oligonucleotide
  Antisense strand to SEQ ID NO: 2040084
uuggacaucucaaucucaa

SEQ ID NO: 2040086 - RNA, 19 nt, Artificial Sequence
  Description of Artificial Sequence: Synthetic oligonucleotide
  Sense strand starting at position 1344 of SEQ ID NO: 1881381
ggcuuugucagaugggaga

SEQ ID NO: 2040087 - RNA, 19 nt, Artificial Sequence
  Description of Artificial Sequence: Synthetic oligonucleotide
  Antisense strand to SEQ ID NO: 2040086
ucucccaucugacaaagcc

SEQ ID NO: 2040088 - RNA, 19 nt, Artificial Sequence
  Description of Artificial Sequence: Synthetic oligonucleotide
  Sense strand starting at position 1346 of SEQ ID NO: 1881381
cuuugucagaugggagaua

SEQ ID NO: 2040089 - RNA, 19 nt, Artificial Sequence
  Description of Artificial Sequence: Synthetic oligonucleotide
  Antisense strand to SEQ ID NO: 2040088
uaucucccaucugacaaag

SEQ ID NO: 2040090 - RNA, 19 nt, Artificial Sequence
  Description of Artificial Sequence: Synthetic oligonucleotide
  Sense strand starting at position 1385 of SEQ ID NO: 1881381
aaguaaugacugcagucaa

SEQ ID NO: 2040091 - RNA, 19 nt, Artificial Sequence
  Description of Artificial Sequence: Synthetic oligonucleotide
  Antisense strand to SEQ ID NO: 2040090
uugacugcagucauuacuu

SEQ ID NO: 2040092 - RNA, 19 nt, Artificial Sequence
  Description of Artificial Sequence: Synthetic oligonucleotide
  Sense strand starting at position 1550 of SEQ ID NO: 1881381
uugcauugaguccaacaca

SEQ ID NO: 2040093 - RNA, 19 nt, Artificial Sequence
  Description of Artificial Sequence: Synthetic oligonucleotide
  Antisense strand to SEQ ID NO: 2040092
uguguuggacucaaugcaa

SEQ ID NO: 2040094 - RNA, 19 nt, Artificial Sequence
  Description of Artificial Sequence: Synthetic oligonucleotide
  Sense strand starting at position 2168 of SEQ ID NO: 1881381
aaugaaagccagugucaua

SEQ ID NO: 2040095 - RNA, 19 nt, Artificial Sequence
  Description of Artificial Sequence: Synthetic oligonucleotide
  Antisense strand to SEQ ID NO: 2040094
uaugacacuggcuuucauu

SEQ ID NO: 2040096 - RNA, 19 nt, Artificial Sequence
  Description of Artificial Sequence: Synthetic oligonucleotide
  Sense strand starting at position 2179 of SEQ ID NO: 1881381
gugucauauccuuaaccuc

SEQ ID NO: 2040097 - RNA, 19 nt, Artificial Sequence
  Description of Artificial Sequence: Synthetic oligonucleotide
  Antisense strand to SEQ ID NO: 2040096
gagguuaaggauaugacac

SEQ ID NO: 2040098 - RNA, 19 nt, Artificial Sequence
  Description of Artificial Sequence: Synthetic oligonucleotide
  Sense strand starting at position 2375 of SEQ ID NO: 1881381
ggaguuugcgaccauccua

SEQ ID NO: 2040099 - RNA, 19 nt, Artificial Sequence
  Description of Artificial Sequence: Synthetic oligonucleotide
  Antisense strand to SEQ ID NO: 2040098
uaggauggucgcaaacucc

SEQ ID NO: 2040100 - RNA, 19 nt, Artificial Sequence
  Description of Artificial Sequence: Synthetic oligonucleotide
  Sense strand starting at position 2680 of SEQ ID NO: 1881381
uggacaaugugguuuaggu

SEQ ID NO: 2040101 - RNA, 19 nt, Artificial Sequence
  Description of Artificial Sequence: Synthetic oligonucleotide
  Antisense strand to SEQ ID NO: 2040100
accuaaaccacauugucca

SEQ ID NO: 2040102 - RNA, 19 nt, Artificial Sequence
  Description of Artificial Sequence: Synthetic oligonucleotide
  Sense strand starting at position 2847 of SEQ ID NO: 1881381
agcugaaaugagugguaug

SEQ ID NO: 2040103 - RNA, 19 nt, Artificial Sequence
  Description of Artificial Sequence: Synthetic oligonucleotide
  Antisense strand to SEQ ID NO: 2040102
cauaccacucauuucagcu

SEQ ID NO: 2040104 - RNA, 19 nt, Artificial Sequence
  Description of Artificial Sequence: Synthetic oligonucleotide
  Sense strand starting at position 2867 of SEQ ID NO: 1881381
gugauccgucaacaaguau

SEQ ID NO: 2040105 - RNA, 19 nt, Artificial Sequence
  Description of Artificial Sequence: Synthetic oligonucleotide
  Antisense strand to SEQ ID NO: 2040104
auacuuguugacggaucac

SEQ ID NO: 2040106 - RNA, 19 nt, Artificial Sequence
  Description of Artificial Sequence: Synthetic oligonucleotide
  Sense strand starting at position 2978 of SEQ ID NO: 1881381
agccauagugugcaaucaa

SEQ ID NO: 2040107 - RNA, 19 nt, Artificial Sequence
  Description of Artificial Sequence: Synthetic oligonucleotide
  Antisense strand to SEQ ID NO: 2040106
uugauugcacacuauggcu

SEQ ID NO: 2040108 - RNA, 19 nt, Artificial Sequence
  Description of Artificial Sequence: Synthetic oligonucleotide
  Sense strand starting at position 3025 of SEQ ID NO: 1881381
gaauguaauuaaguucuga

SEQ ID NO: 2040109 - RNA, 19 nt, Artificial Sequence
  Description of Artificial Sequence: Synthetic oligonucleotide
  Antisense strand to SEQ ID NO: 2040108
ucagaacuuaauuacauuc

SEQ ID NO: 2040110 - RNA, 19 nt, Artificial Sequence
  Description of Artificial Sequence: Synthetic oligonucleotide
  Sense strand starting at position 3317 of SEQ ID NO: 1881381
aggagacugaauuguccuu

SEQ ID NO: 2040111 - RNA, 19 nt, Artificial Sequence
  Description of Artificial Sequence: Synthetic oligonucleotide
  Antisense strand to SEQ ID NO: 2040110
aaggacaauucagucuccu

SEQ ID NO: 2040112 - RNA, 19 nt, Artificial Sequence
  Description of Artificial Sequence: Synthetic oligonucleotide
  Sense strand starting at position 3329 of SEQ ID NO: 1881381
uguccuuugugggcauuua

SEQ ID NO: 2040113 - RNA, 19 nt, Artificial Sequence
  Description of Artificial Sequence: Synthetic oligonucleotide
  Antisense strand to SEQ ID NO: 2040112
uaaaugcccacaaaggaca

SEQ ID NO: 2040114 - RNA, 19 nt, Artificial Sequence
  Description of Artificial Sequence: Synthetic oligonucleotide
  Sense strand starting at position 3346 of SEQ ID NO: 1881381
uagaaaugauaggaggauu

SEQ ID NO: 2040115 - RNA, 19 nt, Artificial Sequence
  Description of Artificial Sequence: Synthetic oligonucleotide
  Antisense strand to SEQ ID NO: 2040114
aauccuccuaucauuucua

SEQ ID NO: 2040116 - RNA, 19 nt, Artificial Sequence
  Description of Artificial Sequence: Synthetic oligonucleotide
  Sense strand starting at position 3361 of SEQ ID NO: 1881381
gauuguaagcaggagaguu

SEQ ID NO: 2040117 - RNA, 19 nt, Artificial Sequence
  Description of Artificial Sequence: Synthetic oligonucleotide
  Antisense strand to SEQ ID NO: 2040116
aacucuccugcuuacaauc

SEQ ID NO: 2040118 - RNA, 19 nt, Artificial Sequence
  Description of Artificial Sequence: Synthetic oligonucleotide
  Sense strand starting at position 3400 of SEQ ID NO: 1881381
agaucauucugaguugcau

SEQ ID NO: 2040119 - RNA, 19 nt, Artificial Sequence
  Description of Artificial Sequence: Synthetic oligonucleotide
  Antisense strand to SEQ ID NO: 2040118
augcaacucagaaugaucu

SEQ ID NO: 2040120 - RNA, 19 nt, Artificial Sequence
  Description of Artificial Sequence: Synthetic oligonucleotide
  Sense strand starting at position 3482 of SEQ ID NO: 1881381
agagaaaugugggcuugga

SEQ ID NO: 2040121 - RNA, 19 nt, Artificial Sequence
  Description of Artificial Sequence: Synthetic oligonucleotide
  Antisense strand to SEQ ID NO: 2040120
uccaagcccacauuucucu

SEQ ID NO: 2040122 - RNA, 19 nt, Artificial Sequence
  Description of Artificial Sequence: Synthetic oligonucleotide
  Sense strand starting at position 3496 of SEQ ID NO: 1881381
uuggauuagagcgauguua

SEQ ID NO: 2040123 - RNA, 19 nt, Artificial Sequence
  Description of Artificial Sequence: Synthetic oligonucleotide
  Antisense strand to SEQ ID NO: 2040122
uaacaucgcucuaauccaa

SEQ ID NO: 2040124 - RNA, 19 nt, Artificial Sequence
  Description of Artificial Sequence: Synthetic oligonucleotide
  Sense strand starting at position 3508 of SEQ ID NO: 1881381
gauguuaguguggaagaua

SEQ ID NO: 2040125 - RNA, 19 nt, Artificial Sequence
  Description of Artificial Sequence: Synthetic oligonucleotide
  Antisense strand to SEQ ID NO: 2040124
uaucuuccacacuaacauc

SEQ ID NO: 2040126 - RNA, 19 nt, Artificial Sequence
  Description of Artificial Sequence: Synthetic oligonucleotide
  Sense strand starting at position 3523 of SEQ ID NO: 1881381
gauagaaguggaugcucuu

SEQ ID NO: 2040127 - RNA, 19 nt, Artificial Sequence
  Description of Artificial Sequence: Synthetic oligonucleotide
  Antisense strand to SEQ ID NO: 2040126
aagagcauccacuucuauc

SEQ ID NO: 2040128 - RNA, 19 nt, Artificial Sequence
  Description of Artificial Sequence: Synthetic oligonucleotide
  Sense strand starting at position 3526 of SEQ ID NO: 1881381
agaaguggaugcucuugau

SEQ ID NO: 2040129 - RNA, 19 nt, Artificial Sequence
  Description of Artificial Sequence: Synthetic oligonucleotide
  Antisense strand to SEQ ID NO: 2040128
aucaagagcauccacuucu

SEQ ID NO: 2040130 - RNA, 19 nt, Artificial Sequence
  Description of Artificial Sequence: Synthetic oligonucleotide
  Sense strand starting at position 3530 of SEQ ID NO: 1881381
guggaugcucuugauaucu

SEQ ID NO: 2040131 - RNA, 19 nt, Artificial Sequence
  Description of Artificial Sequence: Synthetic oligonucleotide
  Antisense strand to SEQ ID NO: 2040130
agauaucaagagcauccac

SEQ ID NO: 2040132 - RNA, 19 nt, Artificial Sequence
  Description of Artificial Sequence: Synthetic oligonucleotide
  Sense strand starting at position 3591 of SEQ ID NO: 1881381
guccauggagcuuacauaa

SEQ ID NO: 2040133 - RNA, 19 nt, Artificial Sequence
  Description of Artificial Sequence: Synthetic oligonucleotide
  Antisense strand to SEQ ID NO: 2040132
uuauguaagcuccauggac

SEQ ID NO: 2040134 - RNA, 19 nt, Artificial Sequence
  Description of Artificial Sequence: Synthetic oligonucleotide
  Sense strand starting at position 3626 of SEQ ID NO: 1881381
caaauuugaugugccugua

SEQ ID NO: 2040135 - RNA, 19 nt, Artificial Sequence
  Description of Artificial Sequence: Synthetic oligonucleotide
  Antisense strand to SEQ ID NO: 2040134
uacaggcacaucaaauuug

SEQ ID NO: 2040136 - RNA, 19 nt, Artificial Sequence
  Description of Artificial Sequence: Synthetic oligonucleotide
  Sense strand starting at position 3629 of SEQ ID NO: 1881381
auuugaugugccuguauca

SEQ ID NO: 2040137 - RNA, 19 nt, Artificial Sequence
  Description of Artificial Sequence: Synthetic oligonucleotide
  Antisense strand to SEQ ID NO: 2040136
ugauacaggcacaucaaau

SEQ ID NO: 2040138 - RNA, 19 nt, Artificial Sequence
  Description of Artificial Sequence: Synthetic oligonucleotide
  Sense strand starting at position 3729 of SEQ ID NO: 1881381
cugcacucaguuugaggaa

SEQ ID NO: 2040139 - RNA, 19 nt, Artificial Sequence
  Description of Artificial Sequence: Synthetic oligonucleotide
  Antisense strand to SEQ ID NO: 2040138
uuccucaaacugagugcag

SEQ ID NO: 2040140 - RNA, 19 nt, Artificial Sequence
  Description of Artificial Sequence: Synthetic oligonucleotide
  Sense strand starting at position 3770 of SEQ ID NO: 1881381
uagcuacuagacuggauau

SEQ ID NO: 2040141 - RNA, 19 nt, Artificial Sequence
  Description of Artificial Sequence: Synthetic oligonucleotide
  Antisense strand to SEQ ID NO: 2040140
auauccagucuaguagcua

SEQ ID NO: 2040142 - RNA, 19 nt, Artificial Sequence
  Description of Artificial Sequence: Synthetic oligonucleotide
  Sense strand starting at position 3821 of SEQ ID NO: 1881381
aguagaggucuuuggaagu

SEQ ID NO: 2040143 - RNA, 19 nt, Artificial Sequence
  Description of Artificial Sequence: Synthetic oligonucleotide
  Antisense strand to SEQ ID NO: 2040142
acuuccaaagaccucuacu

SEQ ID NO: 2040144 - RNA, 19 nt, Artificial Sequence
  Description of Artificial Sequence: Synthetic oligonucleotide
  Sense strand starting at position 116 of SEQ ID NO: 1881382
ggaccugaggagugucuca

SEQ ID NO: 2040145 - RNA, 19 nt, Artificial Sequence
  Description of Artificial Sequence: Synthetic oligonucleotide
  Antisense strand to SEQ ID NO: 2040144
ugagacacuccucaggucc

SEQ ID NO: 2040146 - RNA, 19 nt, Artificial Sequence
  Description of Artificial Sequence: Synthetic oligonucleotide
  Sense strand starting at position 237 of SEQ ID NO: 1881382
ggccguggugguuaagaga

SEQ ID NO: 2040147 - RNA, 19 nt, Artificial Sequence
  Description of Artificial Sequence: Synthetic oligonucleotide
  Antisense strand to SEQ ID NO: 2040146
ucucuuaaccaccacggcc

SEQ ID NO: 2040148 - RNA, 19 nt, Artificial Sequence
  Description of Artificial Sequence: Synthetic oligonucleotide
  Sense strand starting at position 246 of SEQ ID NO: 1881382
gguuaagagagcugccaga

SEQ ID NO: 2040149 - RNA, 19 nt, Artificial Sequence
  Description of Artificial Sequence: Synthetic oligonucleotide
  Antisense strand to SEQ ID NO: 2040148
ucuggcagcucucuuaacc

SEQ ID NO: 2040150 - RNA, 19 nt, Artificial Sequence
  Description of Artificial Sequence: Synthetic oligonucleotide
  Sense strand starting at position 1114 of SEQ ID NO: 1881382
cgcccaaggaguugacauu

SEQ ID NO: 2040151 - RNA, 19 nt, Artificial Sequence
  Description of Artificial Sequence: Synthetic oligonucleotide
  Antisense strand to SEQ ID NO: 2040150
aaugucaacuccuugggcg

SEQ ID NO: 2040152 - RNA, 19 nt, Artificial Sequence
  Description of Artificial Sequence: Synthetic oligonucleotide
  Sense strand starting at position 1271 of SEQ ID NO: 1881382
gggauuaacuuugcaugaa

SEQ ID NO: 2040153 - RNA, 19 nt, Artificial Sequence
  Description of Artificial Sequence: Synthetic oligonucleotide
  Antisense strand to SEQ ID NO: 2040152
uucaugcaaaguuaauccc

SEQ ID NO: 2040154 - RNA, 19 nt, Artificial Sequence
  Description of Artificial Sequence: Synthetic oligonucleotide
  Sense strand starting at position 2245 of SEQ ID NO: 1881382
augaccauugugggauuau

SEQ ID NO: 2040155 - RNA, 19 nt, Artificial Sequence
  Description of Artificial Sequence: Synthetic oligonucleotide
  Antisense strand to SEQ ID NO: 2040154
auaaucccacaauggucau

SEQ ID NO: 2040156 - RNA, 19 nt, Artificial Sequence
  Description of Artificial Sequence: Synthetic oligonucleotide
  Sense strand starting at position 2254 of SEQ ID NO: 1881382
gugggauuauuauuagugu

SEQ ID NO: 2040157 - RNA, 19 nt, Artificial Sequence
  Description of Artificial Sequence: Synthetic oligonucleotide
  Antisense strand to SEQ ID NO: 2040156
acacuaauaauaaucccac

SEQ ID NO: 2040158 - RNA, 19 nt, Artificial Sequence
  Description of Artificial Sequence: Synthetic oligonucleotide
  Sense strand starting at position 2415 of SEQ ID NO: 1881382
aaggaaagaguuugcauga

SEQ ID NO: 2040159 - RNA, 19 nt, Artificial Sequence
  Description of Artificial Sequence: Synthetic oligonucleotide
  Antisense strand to SEQ ID NO: 2040158
ucaugcaaacucuuuccuu

SEQ ID NO: 2040160 - RNA, 19 nt, Artificial Sequence
  Description of Artificial Sequence: Synthetic oligonucleotide
  Sense strand starting at position 2416 of SEQ ID NO: 1881382
aggaaagaguuugcaugaa

SEQ ID NO: 2040161 - RNA, 19 nt, Artificial Sequence
  Description of Artificial Sequence: Synthetic oligonucleotide
  Antisense strand to SEQ ID NO: 2040160
uucaugcaaacucuuuccu

SEQ ID NO: 2040162 - RNA, 19 nt, Artificial Sequence
  Description of Artificial Sequence: Synthetic oligonucleotide
  Sense strand starting at position 2501 of SEQ ID NO: 1881382
cuguguaaucaguaaauau

SEQ ID NO: 2040163 - RNA, 19 nt, Artificial Sequence
  Description of Artificial Sequence: Synthetic oligonucleotide
  Antisense strand to SEQ ID NO: 2040162
auauuuacugauuacacag

SEQ ID NO: 2040164 - RNA, 19 nt, Artificial Sequence
  Description of Artificial Sequence: Synthetic oligonucleotide
  Sense strand starting at position 2578 of SEQ ID NO: 1881382
uuuaaagaccuguguggaa

SEQ ID NO: 2040165 - RNA, 19 nt, Artificial Sequence
  Description of Artificial Sequence: Synthetic oligonucleotide
  Antisense strand to SEQ ID NO: 2040164
uuccacacaggucuuuaaa

SEQ ID NO: 2040166 - RNA, 19 nt, Artificial Sequence
  Description of Artificial Sequence: Synthetic oligonucleotide
  Sense strand starting at position 2580 of SEQ ID NO: 1881382
uaaagaccuguguggaagu

SEQ ID NO: 2040167 - RNA, 19 nt, Artificial Sequence
  Description of Artificial Sequence: Synthetic oligonucleotide
  Antisense strand to SEQ ID NO: 2040166
acuuccacacaggucuuua

SEQ ID NO: 2040168 - RNA, 19 nt, Artificial Sequence
  Description of Artificial Sequence: Synthetic oligonucleotide
  Sense strand starting at position 2616 of SEQ ID NO: 1881382
ccuugcacaguguauuaau

SEQ ID NO: 2040169 - RNA, 19 nt, Artificial Sequence
  Description of Artificial Sequence: Synthetic oligonucleotide
  Antisense strand to SEQ ID NO: 2040168
auuaauacacugugcaagg

SEQ ID NO: 2040170 - RNA, 19 nt, Artificial Sequence
  Description of Artificial Sequence: Synthetic oligonucleotide
  Sense strand starting at position 2639 of SEQ ID NO: 1881382
agcacagcaguuuauauaa

SEQ ID NO: 2040171 - RNA, 19 nt, Artificial Sequence
  Description of Artificial Sequence: Synthetic oligonucleotide
  Antisense strand to SEQ ID NO: 2040170
uuauauaaacugcugugcu

SEQ ID NO: 2040172 - RNA, 19 nt, Artificial Sequence
  Description of Artificial Sequence: Synthetic oligonucleotide
  Sense strand starting at position 2742 of SEQ ID NO: 1881382
gaauguauagcaugcaaug

SEQ ID NO: 2040173 - RNA, 19 nt, Artificial Sequence
  Description of Artificial Sequence: Synthetic oligonucleotide
  Antisense strand to SEQ ID NO: 2040172
cauugcaugcuauacauuc

SEQ ID NO: 2040174 - RNA, 19 nt, Artificial Sequence
  Description of Artificial Sequence: Synthetic oligonucleotide
  Sense strand starting at position 3031 of SEQ ID NO: 1881382
gacauuggugaacgaucau

SEQ ID NO: 2040175 - RNA, 19 nt, Artificial Sequence
  Description of Artificial Sequence: Synthetic oligonucleotide
  Antisense strand to SEQ ID NO: 2040174
augaucguucaccaauguc

SEQ ID NO: 2040176 - RNA, 19 nt, Artificial Sequence
  Description of Artificial Sequence: Synthetic oligonucleotide
  Sense strand starting at position 3055 of SEQ ID NO: 1881382
auuugagcauguuaaagaa

SEQ ID NO: 2040177 - RNA, 19 nt, Artificial Sequence
  Description of Artificial Sequence: Synthetic oligonucleotide
  Antisense strand to SEQ ID NO: 2040176
uucuuuaacaugcucaaau

SEQ ID NO: 2040178 - RNA, 19 nt, Artificial Sequence
  Description of Artificial Sequence: Synthetic oligonucleotide
  Sense strand starting at position 3102 of SEQ ID NO: 1881382
cucagagguuuauuauaua

SEQ ID NO: 2040179 - RNA, 19 nt, Artificial Sequence
  Description of Artificial Sequence: Synthetic oligonucleotide
  Antisense strand to SEQ ID NO: 2040178
uauauaauaaaccucugag

SEQ ID NO: 2040180 - RNA, 19 nt, Artificial Sequence
  Description of Artificial Sequence: Synthetic oligonucleotide
  Sense strand starting at position 3127 of SEQ ID NO: 1881382
gugagaccaucugcuagua

SEQ ID NO: 2040181 - RNA, 19 nt, Artificial Sequence
  Description of Artificial Sequence: Synthetic oligonucleotide
  Antisense strand to SEQ ID NO: 2040180
uacuagcagauggucucac

SEQ ID NO: 2040182 - RNA, 19 nt, Artificial Sequence
  Description of Artificial Sequence: Synthetic oligonucleotide
  Sense strand starting at position 3189 of SEQ ID NO: 1881382
uacugaguauagcuacaga

SEQ ID NO: 2040183 - RNA, 19 nt, Artificial Sequence
  Description of Artificial Sequence: Synthetic oligonucleotide
  Antisense strand to SEQ ID NO: 2040182
ucuguagcuauacucagua

SEQ ID NO: 2040184 - RNA, 19 nt, Artificial Sequence
  Description of Artificial Sequence: Synthetic oligonucleotide
  Sense strand starting at position 3192 of SEQ ID NO: 1881382
ugaguauagcuacagaacu

SEQ ID NO: 2040185 - RNA, 19 nt, Artificial Sequence
  Description of Artificial Sequence: Synthetic oligonucleotide
  Antisense strand to SEQ ID NO: 2040184
aguucuguagcuauacuca

SEQ ID NO: 2040186 - RNA, 19 nt, Artificial Sequence
  Description of Artificial Sequence: Synthetic oligonucleotide
  Sense strand starting at position 3227 of SEQ ID NO: 1881382
auaauuccuguuggcauua

SEQ ID NO: 2040187 - RNA, 19 nt, Artificial Sequence
  Description of Artificial Sequence: Synthetic oligonucleotide
  Antisense strand to SEQ ID NO: 2040186
uaaugccaacaggaauuau

SEQ ID NO: 2040188 - RNA, 19 nt, Artificial Sequence
  Description of Artificial Sequence: Synthetic oligonucleotide
  Sense strand starting at position 3349 of SEQ ID NO: 1881382
guaguaaauucugccauaa

SEQ ID NO: 2040189 - RNA, 19 nt, Artificial Sequence
  Description of Artificial Sequence: Synthetic oligonucleotide
  Antisense strand to SEQ ID NO: 2040188
uuauggcagaauuuacuac

SEQ ID NO: 2040190 - RNA, 19 nt, Artificial Sequence
  Description of Artificial Sequence: Synthetic oligonucleotide
  Sense strand starting at position 3395 of SEQ ID NO: 1881382
auccauuaucuuugggaaa

SEQ ID NO: 2040191 - RNA, 19 nt, Artificial Sequence
  Description of Artificial Sequence: Synthetic oligonucleotide
  Antisense strand to SEQ ID NO: 2040190
uuucccaaagauaauggau

SEQ ID NO: 2040192 - RNA, 19 nt, Artificial Sequence
  Description of Artificial Sequence: Synthetic oligonucleotide
  Sense strand starting at position 3402 of SEQ ID NO: 1881382
aucuuugggaaaggugauu

SEQ ID NO: 2040193 - RNA, 19 nt, Artificial Sequence
  Description of Artificial Sequence: Synthetic oligonucleotide
  Antisense strand to SEQ ID NO: 2040192
aaucaccuuucccaaagau

SEQ ID NO: 2040194 - RNA, 19 nt, Artificial Sequence
  Description of Artificial Sequence: Synthetic oligonucleotide
  Sense strand starting at position 3439 of SEQ ID NO: 1881382
agcagagaaagcuguggau

SEQ ID NO: 2040195 - RNA, 19 nt, Artificial Sequence
  Description of Artificial Sequence: Synthetic oligonucleotide
  Antisense strand to SEQ ID NO: 2040194
auccacagcuuucucugcu

SEQ ID NO: 2040196 - RNA, 19 nt, Artificial Sequence
  Description of Artificial Sequence: Synthetic oligonucleotide
  Sense strand starting at position 3441 of SEQ ID NO: 1881382
cagagaaagcuguggauuc

SEQ ID NO: 2040197 - RNA, 19 nt, Artificial Sequence
  Description of Artificial Sequence: Synthetic oligonucleotide
  Antisense strand to SEQ ID NO: 2040196
gaauccacagcuuucucug

SEQ ID NO: 2040198 - RNA, 19 nt, Artificial Sequence
  Description of Artificial Sequence: Synthetic oligonucleotide
  Sense strand starting at position 3483 of SEQ ID NO: 1881382
aguuguuuaaagcaugagu

SEQ ID NO: 2040199 - RNA, 19 nt, Artificial Sequence
  Description of Artificial Sequence: Synthetic oligonucleotide
  Antisense strand to SEQ ID NO: 2040198
acucaugcuuuaaacaacu

SEQ ID NO: 2040200 - RNA, 19 nt, Artificial Sequence
  Description of Artificial Sequence: Synthetic oligonucleotide
  Sense strand starting at position 3485 of SEQ ID NO: 1881382
uuguuuaaagcaugaguug

SEQ ID NO: 2040201 - RNA, 19 nt, Artificial Sequence
  Description of Artificial Sequence: Synthetic oligonucleotide
  Antisense strand to SEQ ID NO: 2040200
caacucaugcuuuaaacaa

SEQ ID NO: 2040202 - RNA, 19 nt, Artificial Sequence
  Description of Artificial Sequence: Synthetic oligonucleotide
  Sense strand starting at position 3486 of SEQ ID NO: 1881382
uguuuaaagcaugaguugu

SEQ ID NO: 2040203 - RNA, 19 nt, Artificial Sequence
  Description of Artificial Sequence: Synthetic oligonucleotide
  Antisense strand to SEQ ID NO: 2040202
acaacucaugcuuuaaaca

SEQ ID NO: 2040204 - RNA, 19 nt, Artificial Sequence
  Description of Artificial Sequence: Synthetic oligonucleotide
  Sense strand starting at position 3569 of SEQ ID NO: 1881382
gaguaaaggugauugguuu

SEQ ID NO: 2040205 - RNA, 19 nt, Artificial Sequence
  Description of Artificial Sequence: Synthetic oligonucleotide
  Antisense strand to SEQ ID NO: 2040204
aaaccaaucaccuuuacuc

SEQ ID NO: 2040206 - RNA, 19 nt, Artificial Sequence
  Description of Artificial Sequence: Synthetic oligonucleotide
  Sense strand starting at position 3603 of SEQ ID NO: 1881382
cucauucuaguguaagauu

SEQ ID NO: 2040207 - RNA, 19 nt, Artificial Sequence
  Description of Artificial Sequence: Synthetic oligonucleotide
  Antisense strand to SEQ ID NO: 2040206
aaucuuacacuagaaugag

SEQ ID NO: 2040208 - RNA, 19 nt, Artificial Sequence
  Description of Artificial Sequence: Synthetic oligonucleotide
  Sense strand starting at position 3777 of SEQ ID NO: 1881382
ucaauugaugcuuguugau

SEQ ID NO: 2040209 - RNA, 19 nt, Artificial Sequence
  Description of Artificial Sequence: Synthetic oligonucleotide
  Antisense strand to SEQ ID NO: 2040208
aucaacaagcaucaauuga

SEQ ID NO: 2040210 - RNA, 19 nt, Artificial Sequence
  Description of Artificial Sequence: Synthetic oligonucleotide
  Sense strand starting at position 3789 of SEQ ID NO: 1881382
uguugaucgccuguauccu

SEQ ID NO: 2040211 - RNA, 19 nt, Artificial Sequence
  Description of Artificial Sequence: Synthetic oligonucleotide
  Antisense strand to SEQ ID NO: 2040210
aggauacaggcgaucaaca

SEQ ID NO: 2040212 - RNA, 19 nt, Artificial Sequence
  Description of Artificial Sequence: Synthetic oligonucleotide
  Sense strand starting at position 3798 of SEQ ID NO: 1881382
ccuguauccuugccuagaa

SEQ ID NO: 2040213 - RNA, 19 nt, Artificial Sequence
  Description of Artificial Sequence: Synthetic oligonucleotide
  Antisense strand to SEQ ID NO: 2040212
uucuaggcaaggauacagg

SEQ ID NO: 2040214 - RNA, 19 nt, Artificial Sequence
  Description of Artificial Sequence: Synthetic oligonucleotide
  Sense strand starting at position 3800 of SEQ ID NO: 1881382
uguauccuugccuagaaua

SEQ ID NO: 2040215 - RNA, 19 nt, Artificial Sequence
  Description of Artificial Sequence: Synthetic oligonucleotide
  Antisense strand to SEQ ID NO: 2040214
uauucuaggcaaggauaca

SEQ ID NO: 2040216 - RNA, 19 nt, Artificial Sequence
  Description of Artificial Sequence: Synthetic oligonucleotide
  Sense strand starting at position 3904 of SEQ ID NO: 1881382
cuggauaacucuuugguga

SEQ ID NO: 2040217 - RNA, 19 nt, Artificial Sequence
  Description of Artificial Sequence: Synthetic oligonucleotide
  Antisense strand to SEQ ID NO: 2040216
ucaccaaagaguuauccag

SEQ ID NO: 2040218 - RNA, 19 nt, Artificial Sequence
  Description of Artificial Sequence: Synthetic oligonucleotide
  Sense strand starting at position 3905 of SEQ ID NO: 1881382
uggauaacucuuuggugaa

SEQ ID NO: 2040219 - RNA, 19 nt, Artificial Sequence
  Description of Artificial Sequence: Synthetic oligonucleotide
  Antisense strand to SEQ ID NO: 2040218
uucaccaaagaguuaucca

SEQ ID NO: 2040220 - RNA, 19 nt, Artificial Sequence
  Description of Artificial Sequence: Synthetic oligonucleotide
  Sense strand starting at position 3907 of SEQ ID NO: 1881382
gauaacucuuuggugaaua

SEQ ID NO: 2040221 - RNA, 19 nt, Artificial Sequence
  Description of Artificial Sequence: Synthetic oligonucleotide
  Antisense strand to SEQ ID NO: 2040220
uauucaccaaagaguuauc

SEQ ID NO: 2040222 - RNA, 19 nt, Artificial Sequence
  Description of Artificial Sequence: Synthetic oligonucleotide
  Sense strand starting at position 3927 of SEQ ID NO: 1881382
auuaaugauuguguccaaa

SEQ ID NO: 2040223 - RNA, 19 nt, Artificial Sequence
  Description of Artificial Sequence: Synthetic oligonucleotide
  Antisense strand to SEQ ID NO: 2040222
uuuggacacaaucauuaau

SEQ ID NO: 2040224 - RNA, 19 nt, Artificial Sequence
  Description of Artificial Sequence: Synthetic oligonucleotide
  Sense strand starting at position 30 of SEQ ID NO: 1881383
ucuguaaagcaguagucaa

SEQ ID NO: 2040225 - RNA, 19 nt, Artificial Sequence
  Description of Artificial Sequence: Synthetic oligonucleotide
  Antisense strand to SEQ ID NO: 2040224
uugacuacugcuuuacaga

SEQ ID NO: 2040226 - RNA, 19 nt, Artificial Sequence
  Description of Artificial Sequence: Synthetic oligonucleotide
  Sense strand starting at position 45 of SEQ ID NO: 1881383
ucaagaucaccuggacugu

SEQ ID NO: 2040227 - RNA, 19 nt, Artificial Sequence
  Description of Artificial Sequence: Synthetic oligonucleotide
  Antisense strand to SEQ ID NO: 2040226
acaguccaggugaucuuga

SEQ ID NO: 2040228 - RNA, 19 nt, Artificial Sequence
  Description of Artificial Sequence: Synthetic oligonucleotide
  Sense strand starting at position 206 of SEQ ID NO: 1881383
gaaccaaucugucugguuu

SEQ ID NO: 2040229 - RNA, 19 nt, Artificial Sequence
  Description of Artificial Sequence: Synthetic oligonucleotide
  Antisense strand to SEQ ID NO: 2040228
aaaccagacagauugguuc

SEQ ID NO: 2040230 - RNA, 19 nt, Artificial Sequence
  Description of Artificial Sequence: Synthetic oligonucleotide
  Sense strand starting at position 314 of SEQ ID NO: 1881383
ugggaucaaguaugaguga

SEQ ID NO: 2040231 - RNA, 19 nt, Artificial Sequence
  Description of Artificial Sequence: Synthetic oligonucleotide
  Antisense strand to SEQ ID NO: 2040230
ucacucauacuugauccca

SEQ ID NO: 2040232 - RNA, 19 nt, Artificial Sequence
  Description of Artificial Sequence: Synthetic oligonucleotide
  Sense strand starting at position 319 of SEQ ID NO: 1881383
ucaaguaugagugagaguu

SEQ ID NO: 2040233 - RNA, 19 nt, Artificial Sequence
  Description of Artificial Sequence: Synthetic oligonucleotide
  Antisense strand to SEQ ID NO: 2040232
aacucucacucauacuuga

SEQ ID NO: 2040234 - RNA, 19 nt, Artificial Sequence
  Description of Artificial Sequence: Synthetic oligonucleotide
  Sense strand starting at position 325 of SEQ ID NO: 1881383
augagugagaguugcuaag

SEQ ID NO: 2040235 - RNA, 19 nt, Artificial Sequence
  Description of Artificial Sequence: Synthetic oligonucleotide
  Antisense strand to SEQ ID NO: 2040234
cuuagcaacucucacucau

SEQ ID NO: 2040236 - RNA, 19 nt, Artificial Sequence
  Description of Artificial Sequence: Synthetic oligonucleotide
  Sense strand starting at position 327 of SEQ ID NO: 1881383
gagugagaguugcuaagau

SEQ ID NO: 2040237 - RNA, 19 nt, Artificial Sequence
  Description of Artificial Sequence: Synthetic oligonucleotide
  Antisense strand to SEQ ID NO: 2040236
aucuuagcaacucucacuc

SEQ ID NO: 2040238 - RNA, 19 nt, Artificial Sequence
  Description of Artificial Sequence: Synthetic oligonucleotide
  Sense strand starting at position 395 of SEQ ID NO: 1881383
gagggaagcacugguuucu

SEQ ID NO: 2040239 - RNA, 19 nt, Artificial Sequence
  Description of Artificial Sequence: Synthetic oligonucleotide
  Antisense strand to SEQ ID NO: 2040238
agaaaccagugcuucccuc

SEQ ID NO: 2040240 - RNA, 19 nt, Artificial Sequence
  Description of Artificial Sequence: Synthetic oligonucleotide
  Sense strand starting at position 477 of SEQ ID NO: 1881383
agggucucaaaugguauaa

SEQ ID NO: 2040241 - RNA, 19 nt, Artificial Sequence
  Description of Artificial Sequence: Synthetic oligonucleotide
  Antisense strand to SEQ ID NO: 2040240
uuauaccauuugagacccu

SEQ ID NO: 2040242 - RNA, 19 nt, Artificial Sequence
  Description of Artificial Sequence: Synthetic oligonucleotide
  Sense strand starting at position 514 of SEQ ID NO: 1881383
uuaugucugucucuagaaa

SEQ ID NO: 2040243 - RNA, 19 nt, Artificial Sequence
  Description of Artificial Sequence: Synthetic oligonucleotide
  Antisense strand to SEQ ID NO: 2040242
uuucuagagacagacauaa

SEQ ID NO: 2040244 - RNA, 19 nt, Artificial Sequence
  Description of Artificial Sequence: Synthetic oligonucleotide
  Sense strand starting at position 564 of SEQ ID NO: 1881383
cgcagucucguugcauaaa

SEQ ID NO: 2040245 - RNA, 19 nt, Artificial Sequence
  Description of Artificial Sequence: Synthetic oligonucleotide
  Antisense strand to SEQ ID NO: 2040244
uuuaugcaacgagacugcg

SEQ ID NO: 2040246 - RNA, 19 nt, Artificial Sequence
  Description of Artificial Sequence: Synthetic oligonucleotide
  Sense strand starting at position 649 of SEQ ID NO: 1881383
caacucuaguccgugggaa

SEQ ID NO: 2040247 - RNA, 19 nt, Artificial Sequence
  Description of Artificial Sequence: Synthetic oligonucleotide
  Antisense strand to SEQ ID NO: 2040246
uucccacggacuagaguug

SEQ ID NO: 2040248 - RNA, 19 nt, Artificial Sequence
  Description of Artificial Sequence: Synthetic oligonucleotide
  Sense strand starting at position 651 of SEQ ID NO: 1881383
acucuaguccgugggaaga

SEQ ID NO: 2040249 - RNA, 19 nt, Artificial Sequence
  Description of Artificial Sequence: Synthetic oligonucleotide
  Antisense strand to SEQ ID NO: 2040248
ucuucccacggacuagagu

SEQ ID NO: 2040250 - RNA, 19 nt, Artificial Sequence
  Description of Artificial Sequence: Synthetic oligonucleotide
  Sense strand starting at position 773 of SEQ ID NO: 1881383
gcccauaaucgagaagcga

SEQ ID NO: 2040251 - RNA, 19 nt, Artificial Sequence
  Description of Artificial Sequence: Synthetic oligonucleotide
  Antisense strand to SEQ ID NO: 2040250
ucgcuucucgauuaugggc

SEQ ID NO: 2040252 - RNA, 19 nt, Artificial Sequence
  Description of Artificial Sequence: Synthetic oligonucleotide
  Sense strand starting at position 1350 of SEQ ID NO: 1881383
caaucaggugucgaagaca

SEQ ID NO: 2040253 - RNA, 19 nt, Artificial Sequence
  Description of Artificial Sequence: Synthetic oligonucleotide
  Antisense strand to SEQ ID NO: 2040252
ugucuucgacaccugauug

SEQ ID NO: 2040254 - RNA, 19 nt, Artificial Sequence
  Description of Artificial Sequence: Synthetic oligonucleotide
  Sense strand starting at position 1679 of SEQ ID NO: 1881383
cucccucugcgagagcaau

SEQ ID NO: 2040255 - RNA, 19 nt, Artificial Sequence
  Description of Artificial Sequence: Synthetic oligonucleotide
  Antisense strand to SEQ ID NO: 2040254
auugcucucgcagagggag

SEQ ID NO: 2040256 - RNA, 19 nt, Artificial Sequence
  Description of Artificial Sequence: Synthetic oligonucleotide
  Sense strand starting at position 1823 of SEQ ID NO: 1881383
cccgacuucccacgggaaa

SEQ ID NO: 2040257 - RNA, 19 nt, Artificial Sequence
  Description of Artificial Sequence: Synthetic oligonucleotide
  Antisense strand to SEQ ID NO: 2040256
uuucccgugggaagucggg

SEQ ID NO: 2040258 - RNA, 19 nt, Artificial Sequence
  Description of Artificial Sequence: Synthetic oligonucleotide
  Sense strand starting at position 2805 of SEQ ID NO: 1881383
uuaccuuucccuugaggag

SEQ ID NO: 2040259 - RNA, 19 nt, Artificial Sequence
  Description of Artificial Sequence: Synthetic oligonucleotide
  Antisense strand to SEQ ID NO: 2040258
cuccucaagggaaagguaa

SEQ ID NO: 2040260 - RNA, 19 nt, Artificial Sequence
  Description of Artificial Sequence: Synthetic oligonucleotide
  Sense strand starting at position 2843 of SEQ ID NO: 1881383
gcucgaaauacacaggcau

SEQ ID NO: 2040261 - RNA, 19 nt, Artificial Sequence
  Description of Artificial Sequence: Synthetic oligonucleotide
  Antisense strand to SEQ ID NO: 2040260
augccuguguauuucgagc

SEQ ID NO: 2040262 - RNA, 19 nt, Artificial Sequence
  Description of Artificial Sequence: Synthetic oligonucleotide
  Sense strand starting at position 2908 of SEQ ID NO: 1881383
ggccuugugacagacaacu

SEQ ID NO: 2040263 - RNA, 19 nt, Artificial Sequence
  Description of Artificial Sequence: Synthetic oligonucleotide
  Antisense strand to SEQ ID NO: 2040262
aguugucugucacaaggcc

SEQ ID NO: 2040264 - RNA, 19 nt, Artificial Sequence
  Description of Artificial Sequence: Synthetic oligonucleotide
  Sense strand starting at position 3090 of SEQ ID NO: 1881383
gagauagccucguugaaug

SEQ ID NO: 2040265 - RNA, 19 nt, Artificial Sequence
  Description of Artificial Sequence: Synthetic oligonucleotide
  Antisense strand to SEQ ID NO: 2040264
cauucaacgaggcuaucuc

SEQ ID NO: 2040266 - RNA, 19 nt, Artificial Sequence
  Description of Artificial Sequence: Synthetic oligonucleotide
  Sense strand starting at position 3125 of SEQ ID NO: 1881383
ggaguugagccagauugug

SEQ ID NO: 2040267 - RNA, 19 nt, Artificial Sequence
  Description of Artificial Sequence: Synthetic oligonucleotide
  Antisense strand to SEQ ID NO: 2040266
cacaaucuggcucaacucc

SEQ ID NO: 2040268 - RNA, 19 nt, Artificial Sequence
  Description of Artificial Sequence: Synthetic oligonucleotide
  Sense strand starting at position 3266 of SEQ ID NO: 1881383
aggaaagagcccugguuca

SEQ ID NO: 2040269 - RNA, 19 nt, Artificial Sequence
  Description of Artificial Sequence: Synthetic oligonucleotide
  Antisense strand to SEQ ID NO: 2040268
ugaaccagggcucuuuccu

SEQ ID NO: 2040270 - RNA, 19 nt, Artificial Sequence
  Description of Artificial Sequence: Synthetic oligonucleotide
  Sense strand starting at position 3288 of SEQ ID NO: 1881383
agguaaaucgcaugagagg

SEQ ID NO: 2040271 - RNA, 19 nt, Artificial Sequence
  Description of Artificial Sequence: Synthetic oligonucleotide
  Antisense strand to SEQ ID NO: 2040270
ccucucaugcgauuuaccu

SEQ ID NO: 2040272 - RNA, 19 nt, Artificial Sequence
  Description of Artificial Sequence: Synthetic oligonucleotide
  Sense strand starting at position 3295 of SEQ ID NO: 1881383
ucgcaugagagggaaaguu

SEQ ID NO: 2040273 - RNA, 19 nt, Artificial Sequence
  Description of Artificial Sequence: Synthetic oligonucleotide
  Antisense strand to SEQ ID NO: 2040272
aacuuucccucucaugcga

SEQ ID NO: 2040274 - RNA, 19 nt, Artificial Sequence
  Description of Artificial Sequence: Synthetic oligonucleotide
  Sense strand starting at position 3381 of SEQ ID NO: 1881383
gcgucaguggucuuucucu

SEQ ID NO: 2040275 - RNA, 19 nt, Artificial Sequence
  Description of Artificial Sequence: Synthetic oligonucleotide
  Antisense strand to SEQ ID NO: 2040274
agagaaagaccacugacgc

SEQ ID NO: 2040276 - RNA, 19 nt, Artificial Sequence
  Description of Artificial Sequence: Synthetic oligonucleotide
  Sense strand starting at position 3389 of SEQ ID NO: 1881383
ggucuuucucuuggauaug

SEQ ID NO: 2040277 - RNA, 19 nt, Artificial Sequence
  Description of Artificial Sequence: Synthetic oligonucleotide
  Antisense strand to SEQ ID NO: 2040276
cauauccaagagaaagacc

SEQ ID NO: 2040278 - RNA, 19 nt, Artificial Sequence
  Description of Artificial Sequence: Synthetic oligonucleotide
  Sense strand starting at position 3475 of SEQ ID NO: 1881383
auguuacuugugcaaugua

SEQ ID NO: 2040279 - RNA, 19 nt, Artificial Sequence
  Description of Artificial Sequence: Synthetic oligonucleotide
  Antisense strand to SEQ ID NO: 2040278
uacauugcacaaguaacau

SEQ ID NO: 2040280 - RNA, 19 nt, Artificial Sequence
  Description of Artificial Sequence: Synthetic oligonucleotide
  Sense strand starting at position 3652 of SEQ ID NO: 1881383
augacauauuugugaccaa

SEQ ID NO: 2040281 - RNA, 19 nt, Artificial Sequence
  Description of Artificial Sequence: Synthetic oligonucleotide
  Antisense strand to SEQ ID NO: 2040280
uuggucacaaauaugucau

SEQ ID NO: 2040282 - RNA, 19 nt, Artificial Sequence
  Description of Artificial Sequence: Synthetic oligonucleotide
  Sense strand starting at position 3653 of SEQ ID NO: 1881383
ugacauauuugugaccaag

SEQ ID NO: 2040283 - RNA, 19 nt, Artificial Sequence
  Description of Artificial Sequence: Synthetic oligonucleotide
  Antisense strand to SEQ ID NO: 2040282
cuuggucacaaauauguca

SEQ ID NO: 2040284 - RNA, 19 nt, Artificial Sequence
  Description of Artificial Sequence: Synthetic oligonucleotide
  Sense strand starting at position 3664 of SEQ ID NO: 1881383
ugaccaaggucauauuuac

SEQ ID NO: 2040285 - RNA, 19 nt, Artificial Sequence
  Description of Artificial Sequence: Synthetic oligonucleotide
  Antisense strand to SEQ ID NO: 2040284
guaaauaugaccuugguca

SEQ ID NO: 2040286 - RNA, 19 nt, Artificial Sequence
  Description of Artificial Sequence: Synthetic oligonucleotide
  Sense strand starting at position 3683 of SEQ ID NO: 1881383
auuucuuuguuggacagau

SEQ ID NO: 2040287 - RNA, 19 nt, Artificial Sequence
  Description of Artificial Sequence: Synthetic oligonucleotide
  Antisense strand to SEQ ID NO: 2040286
aucuguccaacaaagaaau

SEQ ID NO: 2040288 - RNA, 19 nt, Artificial Sequence
  Description of Artificial Sequence: Synthetic oligonucleotide
  Sense strand starting at position 3685 of SEQ ID NO: 1881383
uucuuuguuggacagaugu

SEQ ID NO: 2040289 - RNA, 19 nt, Artificial Sequence
  Description of Artificial Sequence: Synthetic oligonucleotide
  Antisense strand to SEQ ID NO: 2040288
acaucuguccaacaaagaa

SEQ ID NO: 2040290 - RNA, 19 nt, Artificial Sequence
  Description of Artificial Sequence: Synthetic oligonucleotide
  Sense strand starting at position 3687 of SEQ ID NO: 1881383
cuuuguuggacagauguua

SEQ ID NO: 2040291 - RNA, 19 nt, Artificial Sequence
  Description of Artificial Sequence: Synthetic oligonucleotide
  Antisense strand to SEQ ID NO: 2040290
uaacaucuguccaacaaag

SEQ ID NO: 2040292 - RNA, 19 nt, Artificial Sequence
  Description of Artificial Sequence: Synthetic oligonucleotide
  Sense strand starting at position 3702 of SEQ ID NO: 1881383
guuacauagcuauacuugu

SEQ ID NO: 2040293 - RNA, 19 nt, Artificial Sequence
  Description of Artificial Sequence: Synthetic oligonucleotide
  Antisense strand to SEQ ID NO: 2040292
acaaguauagcuauguaac

SEQ ID NO: 2040294 - RNA, 19 nt, Artificial Sequence
  Description of Artificial Sequence: Synthetic oligonucleotide
  Sense strand starting at position 3765 of SEQ ID NO: 1881383
gagaguguguacucccuau

SEQ ID NO: 2040295 - RNA, 19 nt, Artificial Sequence
  Description of Artificial Sequence: Synthetic oligonucleotide
  Antisense strand to SEQ ID NO: 2040294
auagggaguacacacucuc

SEQ ID NO: 2040296 - RNA, 19 nt, Artificial Sequence
  Description of Artificial Sequence: Synthetic oligonucleotide
  Sense strand starting at position 3861 of SEQ ID NO: 1881383
augugugggaucugagcua

SEQ ID NO: 2040297 - RNA, 19 nt, Artificial Sequence
  Description of Artificial Sequence: Synthetic oligonucleotide
  Antisense strand to SEQ ID NO: 2040296
uagcucagaucccacacau

SEQ ID NO: 2040298 - RNA, 19 nt, Artificial Sequence
  Description of Artificial Sequence: Synthetic oligonucleotide
  Sense strand starting at position 3868 of SEQ ID NO: 1881383
ggaucugagcuaggacuaa

SEQ ID NO: 2040299 - RNA, 19 nt, Artificial Sequence
  Description of Artificial Sequence: Synthetic oligonucleotide
  Antisense strand to SEQ ID NO: 2040298
uuaguccuagcucagaucc

SEQ ID NO: 2040300 - RNA, 19 nt, Artificial Sequence
  Description of Artificial Sequence: Synthetic oligonucleotide
  Sense strand starting at position 3890 of SEQ ID NO: 1881383
agagaauacccacguaauc

SEQ ID NO: 2040301 - RNA, 19 nt, Artificial Sequence
  Description of Artificial Sequence: Synthetic oligonucleotide
  Antisense strand to SEQ ID NO: 2040300
gauuacguggguauucucu

SEQ ID NO: 2040302 - RNA, 19 nt, Artificial Sequence
  Description of Artificial Sequence: Synthetic oligonucleotide
  Sense strand starting at position 3909 of SEQ ID NO: 1881383
agagguuucugggcuccau

SEQ ID NO: 2040303 - RNA, 19 nt, Artificial Sequence
  Description of Artificial Sequence: Synthetic oligonucleotide
  Antisense strand to SEQ ID NO: 2040302
auggagcccagaaaccucu

SEQ ID NO: 2040304 - RNA, 19 nt, Artificial Sequence
  Description of Artificial Sequence: Synthetic oligonucleotide
  Sense strand starting at position 104 of SEQ ID NO: 1881384
uccguaugugguguguauu

SEQ ID NO: 2040305 - RNA, 19 nt, Artificial Sequence
  Description of Artificial Sequence: Synthetic oligonucleotide
  Antisense strand to SEQ ID NO: 2040304
aauacacaccacauacgga

SEQ ID NO: 2040306 - RNA, 19 nt, Artificial Sequence
  Description of Artificial Sequence: Synthetic oligonucleotide
  Sense strand starting at position 107 of SEQ ID NO: 1881384
guaugugguguguauuuca

SEQ ID NO: 2040307 - RNA, 19 nt, Artificial Sequence
  Description of Artificial Sequence: Synthetic oligonucleotide
  Antisense strand to SEQ ID NO: 2040306
ugaaauacacaccacauac

SEQ ID NO: 2040308 - RNA, 19 nt, Artificial Sequence
  Description of Artificial Sequence: Synthetic oligonucleotide
  Sense strand starting at position 146 of SEQ ID NO: 1881384
ugaggacaggcgugaaguu

SEQ ID NO: 2040309 - RNA, 19 nt, Artificial Sequence
  Description of Artificial Sequence: Synthetic oligonucleotide
  Antisense strand to SEQ ID NO: 2040308
aacuucacgccuguccuca

SEQ ID NO: 2040310 - RNA, 19 nt, Artificial Sequence
  Description of Artificial Sequence: Synthetic oligonucleotide
  Sense strand starting at position 168 of SEQ ID NO: 1881384
gcuacaugccugguacgua

SEQ ID NO: 2040311 - RNA, 19 nt, Artificial Sequence
  Description of Artificial Sequence: Synthetic oligonucleotide
  Antisense strand to SEQ ID NO: 2040310
uacguaccaggcauguagc

SEQ ID NO: 2040312 - RNA, 19 nt, Artificial Sequence
  Description of Artificial Sequence: Synthetic oligonucleotide
  Sense strand starting at position 173 of SEQ ID NO: 1881384
augccugguacguaauaga

SEQ ID NO: 2040313 - RNA, 19 nt, Artificial Sequence
  Description of Artificial Sequence: Synthetic oligonucleotide
  Antisense strand to SEQ ID NO: 2040312
ucuauuacguaccaggcau

SEQ ID NO: 2040314 - RNA, 19 nt, Artificial Sequence
  Description of Artificial Sequence: Synthetic oligonucleotide
  Sense strand starting at position 199 of SEQ ID NO: 1881384
acagacauuugcugaauga

SEQ ID NO: 2040315 - RNA, 19 nt, Artificial Sequence
  Description of Artificial Sequence: Synthetic oligonucleotide
  Antisense strand to SEQ ID NO: 2040314
ucauucagcaaaugucugu

SEQ ID NO: 2040316 - RNA, 19 nt, Artificial Sequence
  Description of Artificial Sequence: Synthetic oligonucleotide
  Sense strand starting at position 214 of SEQ ID NO: 1881384
augaauaaguuagucacua

SEQ ID NO: 2040317 - RNA, 19 nt, Artificial Sequence
  Description of Artificial Sequence: Synthetic oligonucleotide
  Antisense strand to SEQ ID NO: 2040316
uagugacuaacuuauucau

SEQ ID NO: 2040318 - RNA, 19 nt, Artificial Sequence
  Description of Artificial Sequence: Synthetic oligonucleotide
  Sense strand starting at position 215 of SEQ ID NO: 1881384
ugaauaaguuagucacuac

SEQ ID NO: 2040319 - RNA, 19 nt, Artificial Sequence
  Description of Artificial Sequence: Synthetic oligonucleotide
  Antisense strand to SEQ ID NO: 2040318
guagugacuaacuuauuca

SEQ ID NO: 2040320 - RNA, 19 nt, Artificial Sequence
  Description of Artificial Sequence: Synthetic oligonucleotide
  Sense strand starting at position 311 of SEQ ID NO: 1881384
guacaaggcccacgaaaua

SEQ ID NO: 2040321 - RNA, 19 nt, Artificial Sequence
  Description of Artificial Sequence: Synthetic oligonucleotide
  Antisense strand to SEQ ID NO: 2040320
uauuucgugggccuuguac

SEQ ID NO: 2040322 - RNA, 19 nt, Artificial Sequence
  Description of Artificial Sequence: Synthetic oligonucleotide
  Sense strand starting at position 410 of SEQ ID NO: 1881384
agccguuugcuuccucaca

SEQ ID NO: 2040323 - RNA, 19 nt, Artificial Sequence
  Description of Artificial Sequence: Synthetic oligonucleotide
  Antisense strand to SEQ ID NO: 2040322
ugugaggaagcaaacggcu

SEQ ID NO: 2040324 - RNA, 19 nt, Artificial Sequence
  Description of Artificial Sequence: Synthetic oligonucleotide
  Sense strand starting at position 499 of SEQ ID NO: 1881384
cgggucguuccguuucaca

SEQ ID NO: 2040325 - RNA, 19 nt, Artificial Sequence
  Description of Artificial Sequence: Synthetic oligonucleotide
  Antisense strand to SEQ ID NO: 2040324
ugugaaacggaacgacccg

SEQ ID NO: 2040326 - RNA, 19 nt, Artificial Sequence
  Description of Artificial Sequence: Synthetic oligonucleotide
  Sense strand starting at position 501 of SEQ ID NO: 1881384
ggucguuccguuucacauc

SEQ ID NO: 2040327 - RNA, 19 nt, Artificial Sequence
  Description of Artificial Sequence: Synthetic oligonucleotide
  Antisense strand to SEQ ID NO: 2040326
gaugugaaacggaacgacc

SEQ ID NO: 2040328 - RNA, 19 nt, Artificial Sequence
  Description of Artificial Sequence: Synthetic oligonucleotide
  Sense strand starting at position 533 of SEQ ID NO: 1881384
cugggucuucucggaacaa

SEQ ID NO: 2040329 - RNA, 19 nt, Artificial Sequence
  Description of Artificial Sequence: Synthetic oligonucleotide
  Antisense strand to SEQ ID NO: 2040328
uuguuccgagaagacccag

SEQ ID NO: 2040330 - RNA, 19 nt, Artificial Sequence
  Description of Artificial Sequence: Synthetic oligonucleotide
  Sense strand starting at position 2106 of SEQ ID NO: 1881384
gaggauguguucuucucau

SEQ ID NO: 2040331 - RNA, 19 nt, Artificial Sequence
  Description of Artificial Sequence: Synthetic oligonucleotide
  Antisense strand to SEQ ID NO: 2040330
augagaagaacacauccuc

SEQ ID NO: 2040332 - RNA, 19 nt, Artificial Sequence
  Description of Artificial Sequence: Synthetic oligonucleotide
  Sense strand starting at position 2223 of SEQ ID NO: 1881384
uguuuccgaguuugaugaa

SEQ ID NO: 2040333 - RNA, 19 nt, Artificial Sequence
  Description of Artificial Sequence: Synthetic oligonucleotide
  Antisense strand to SEQ ID NO: 2040332
uucaucaaacucggaaaca

SEQ ID NO: 2040334 - RNA, 19 nt, Artificial Sequence
  Description of Artificial Sequence: Synthetic oligonucleotide
  Sense strand starting at position 2232 of SEQ ID NO: 1881384
guuugaugaaagggcaaua

SEQ ID NO: 2040335 - RNA, 19 nt, Artificial Sequence
  Description of Artificial Sequence: Synthetic oligonucleotide
  Antisense strand to SEQ ID NO: 2040334
uauugcccuuucaucaaac

SEQ ID NO: 2040336 - RNA, 19 nt, Artificial Sequence
  Description of Artificial Sequence: Synthetic oligonucleotide
  Sense strand starting at position 2329 of SEQ ID NO: 1881384
uaccuugauuggguuugau

SEQ ID NO: 2040337 - RNA, 19 nt, Artificial Sequence
  Description of Artificial Sequence: Synthetic oligonucleotide
  Antisense strand to SEQ ID NO: 2040336
aucaaacccaaucaaggua

SEQ ID NO: 2040338 - RNA, 19 nt, Artificial Sequence
  Description of Artificial Sequence: Synthetic oligonucleotide
  Sense strand starting at position 2341 of SEQ ID NO: 1881384
guuugauaggagugguuag

SEQ ID NO: 2040339 - RNA, 19 nt, Artificial Sequence
  Description of Artificial Sequence: Synthetic oligonucleotide
  Antisense strand to SEQ ID NO: 2040338
cuaaccacuccuaucaaac

SEQ ID NO: 2040340 - RNA, 19 nt, Artificial Sequence
  Description of Artificial Sequence: Synthetic oligonucleotide
  Sense strand starting at position 2342 of SEQ ID NO: 1881384
uuugauaggagugguuaga

SEQ ID NO: 2040341 - RNA, 19 nt, Artificial Sequence
  Description of Artificial Sequence: Synthetic oligonucleotide
  Antisense strand to SEQ ID NO: 2040340
ucuaaccacuccuaucaaa

SEQ ID NO: 2040342 - RNA, 19 nt, Artificial Sequence
  Description of Artificial Sequence: Synthetic oligonucleotide
  Sense strand starting at position 2642 of SEQ ID NO: 1881384
uucugaauuugauggacuu

SEQ ID NO: 2040343 - RNA, 19 nt, Artificial Sequence
  Description of Artificial Sequence: Synthetic oligonucleotide
  Antisense strand to SEQ ID NO: 2040342
aaguccaucaaauucagaa

SEQ ID NO: 2040344 - RNA, 19 nt, Artificial Sequence
  Description of Artificial Sequence: Synthetic oligonucleotide
  Sense strand starting at position 2734 of SEQ ID NO: 1881384
guuguugacccacaaacaa

SEQ ID NO: 2040345 - RNA, 19 nt, Artificial Sequence
  Description of Artificial Sequence: Synthetic oligonucleotide
  Antisense strand to SEQ ID NO: 2040344
uuguuugugggucaacaac

SEQ ID NO: 2040346 - RNA, 19 nt, Artificial Sequence
  Description of Artificial Sequence: Synthetic oligonucleotide
  Sense strand starting at position 2825 of SEQ ID NO: 1881384
gugugcauugugguagcua

SEQ ID NO: 2040347 - RNA, 19 nt, Artificial Sequence
  Description of Artificial Sequence: Synthetic oligonucleotide
  Antisense strand to SEQ ID NO: 2040346
uagcuaccacaaugcacac

SEQ ID NO: 2040348 - RNA, 19 nt, Artificial Sequence
  Description of Artificial Sequence: Synthetic oligonucleotide
  Sense strand starting at position 2864 of SEQ ID NO: 1881384
ggaugcauauuugauuaag

SEQ ID NO: 2040349 - RNA, 19 nt, Artificial Sequence
  Description of Artificial Sequence: Synthetic oligonucleotide
  Antisense strand to SEQ ID NO: 2040348
cuuaaucaaauaugcaucc

SEQ ID NO: 2040350 - RNA, 19 nt, Artificial Sequence
  Description of Artificial Sequence: Synthetic oligonucleotide
  Sense strand starting at position 2875 of SEQ ID NO: 1881384
ugauuaagucaugggaccu

SEQ ID NO: 2040351 - RNA, 19 nt, Artificial Sequence
  Description of Artificial Sequence: Synthetic oligonucleotide
  Antisense strand to SEQ ID NO: 2040350
aggucccaugacuuaauca

SEQ ID NO: 2040352 - RNA, 19 nt, Artificial Sequence
  Description of Artificial Sequence: Synthetic oligonucleotide
  Sense strand starting at position 2887 of SEQ ID NO: 1881384
gggaccuugcgucacagau

SEQ ID NO: 2040353 - RNA, 19 nt, Artificial Sequence
  Description of Artificial Sequence: Synthetic oligonucleotide
  Antisense strand to SEQ ID NO: 2040352
aucugugacgcaagguccc

SEQ ID NO: 2040354 - RNA, 19 nt, Artificial Sequence
  Description of Artificial Sequence: Synthetic oligonucleotide
  Sense strand starting at position 2935 of SEQ ID NO: 1881384
aggauuaauugcucaucac

SEQ ID NO: 2040355 - RNA, 19 nt, Artificial Sequence
  Description of Artificial Sequence: Synthetic oligonucleotide
  Antisense strand to SEQ ID NO: 2040354
gugaugagcaauuaauccu

SEQ ID NO: 2040356 - RNA, 19 nt, Artificial Sequence
  Description of Artificial Sequence: Synthetic oligonucleotide
  Sense strand starting at position 2936 of SEQ ID NO: 1881384
ggauuaauugcucaucacc

SEQ ID NO: 2040357 - RNA, 19 nt, Artificial Sequence
  Description of Artificial Sequence: Synthetic oligonucleotide
  Antisense strand to SEQ ID NO: 2040356
ggugaugagcaauuaaucc

SEQ ID NO: 2040358 - RNA, 19 nt, Artificial Sequence
  Description of Artificial Sequence: Synthetic oligonucleotide
  Sense strand starting at position 2970 of SEQ ID NO: 1881384
ggcacaaucucaguaaaug

SEQ ID NO: 2040359 - RNA, 19 nt, Artificial Sequence
  Description of Artificial Sequence: Synthetic oligonucleotide
  Antisense strand to SEQ ID NO: 2040358
cauuuacugagauugugcc

SEQ ID NO: 2040360 - RNA, 19 nt, Artificial Sequence
  Description of Artificial Sequence: Synthetic oligonucleotide
  Sense strand starting at position 2971 of SEQ ID NO: 1881384
gcacaaucucaguaaaugu

SEQ ID NO: 2040361 - RNA, 19 nt, Artificial Sequence
  Description of Artificial Sequence: Synthetic oligonucleotide
  Antisense strand to SEQ ID NO: 2040360
acauuuacugagauugugc

SEQ ID NO: 2040362 - RNA, 19 nt, Artificial Sequence
  Description of Artificial Sequence: Synthetic oligonucleotide
  Sense strand starting at position 3244 of SEQ ID NO: 1881384
gggcuucuguuacuaaaca

SEQ ID NO: 2040363 - RNA, 19 nt, Artificial Sequence
  Description of Artificial Sequence: Synthetic oligonucleotide
  Antisense strand to SEQ ID NO: 2040362
uguuuaguaacagaagccc

SEQ ID NO: 2040364 - RNA, 19 nt, Artificial Sequence
  Description of Artificial Sequence: Synthetic oligonucleotide
  Sense strand starting at position 3267 of SEQ ID NO: 1881384
cuuguauuccaucagaagc

SEQ ID NO: 2040365 - RNA, 19 nt, Artificial Sequence
  Description of Artificial Sequence: Synthetic oligonucleotide
  Antisense strand to SEQ ID NO: 2040364
gcuucugauggaauacaag

SEQ ID NO: 2040366 - RNA, 19 nt, Artificial Sequence
  Description of Artificial Sequence: Synthetic oligonucleotide
  Sense strand starting at position 3273 of SEQ ID NO: 1881384
uuccaucagaagcgguaau

SEQ ID NO: 2040367 - RNA, 19 nt, Artificial Sequence
  Description of Artificial Sequence: Synthetic oligonucleotide
  Antisense strand to SEQ ID NO: 2040366
auuaccgcuucugauggaa

SEQ ID NO: 2040368 - RNA, 19 nt, Artificial Sequence
  Description of Artificial Sequence: Synthetic oligonucleotide
  Sense strand starting at position 3318 of SEQ ID NO: 1881384
cuuaacauucuuggauagu

SEQ ID NO: 2040369 - RNA, 19 nt, Artificial Sequence
  Description of Artificial Sequence: Synthetic oligonucleotide
  Antisense strand to SEQ ID NO: 2040368
acuauccaagaauguuaag

SEQ ID NO: 2040370 - RNA, 19 nt, Artificial Sequence
  Description of Artificial Sequence: Synthetic oligonucleotide
  Sense strand starting at position 3379 of SEQ ID NO: 1881384
ggcuuucucccauagaaca

SEQ ID NO: 2040371 - RNA, 19 nt, Artificial Sequence
  Description of Artificial Sequence: Synthetic oligonucleotide
  Antisense strand to SEQ ID NO: 2040370
uguucuaugggagaaagcc

SEQ ID NO: 2040372 - RNA, 19 nt, Artificial Sequence
  Description of Artificial Sequence: Synthetic oligonucleotide
  Sense strand starting at position 3553 of SEQ ID NO: 1881384
ccgcaaagcugaguggaaa

SEQ ID NO: 2040373 - RNA, 19 nt, Artificial Sequence
  Description of Artificial Sequence: Synthetic oligonucleotide
  Antisense strand to SEQ ID NO: 2040372
uuuccacucagcuuugcgg

SEQ ID NO: 2040374 - RNA, 19 nt, Artificial Sequence
  Description of Artificial Sequence: Synthetic oligonucleotide
  Sense strand starting at position 3554 of SEQ ID NO: 1881384
cgcaaagcugaguggaaau

SEQ ID NO: 2040375 - RNA, 19 nt, Artificial Sequence
  Description of Artificial Sequence: Synthetic oligonucleotide
  Antisense strand to SEQ ID NO: 2040374
auuuccacucagcuuugcg

SEQ ID NO: 2040376 - RNA, 19 nt, Artificial Sequence
  Description of Artificial Sequence: Synthetic oligonucleotide
  Sense strand starting at position 3572 of SEQ ID NO: 1881384
ugugguuucccugcuguca

SEQ ID NO: 2040377 - RNA, 19 nt, Artificial Sequence
  Description of Artificial Sequence: Synthetic oligonucleotide
  Antisense strand to SEQ ID NO: 2040376
ugacagcagggaaaccaca

SEQ ID NO: 2040378 - RNA, 19 nt, Artificial Sequence
  Description of Artificial Sequence: Synthetic oligonucleotide
  Sense strand starting at position 3573 of SEQ ID NO: 1881384
gugguuucccugcugucau

SEQ ID NO: 2040379 - RNA, 19 nt, Artificial Sequence
  Description of Artificial Sequence: Synthetic oligonucleotide
  Antisense strand to SEQ ID NO: 2040378
augacagcagggaaaccac

SEQ ID NO: 2040380 - RNA, 19 nt, Artificial Sequence
  Description of Artificial Sequence: Synthetic oligonucleotide
  Sense strand starting at position 3827 of SEQ ID NO: 1881384
guauaagaggaaugguuuc

SEQ ID NO: 2040381 - RNA, 19 nt, Artificial Sequence
  Description of Artificial Sequence: Synthetic oligonucleotide
  Antisense strand to SEQ ID NO: 2040380
gaaaccauuccucuuauac

SEQ ID NO: 2040382 - RNA, 19 nt, Artificial Sequence
  Description of Artificial Sequence: Synthetic oligonucleotide
  Sense strand starting at position 3908 of SEQ ID NO: 1881384
guuuguaaaugaucaucuu

SEQ ID NO: 2040383 - RNA, 19 nt, Artificial Sequence
  Description of Artificial Sequence: Synthetic oligonucleotide
  Antisense strand to SEQ ID NO: 2040382
aagaugaucauuuacaaac

SEQ ID NO: 2040384 - RNA, 19 nt, Artificial Sequence
  Description of Artificial Sequence: Synthetic oligonucleotide
  Sense strand starting at position 15 of SEQ ID NO: 1881385
uuuaucuagcccugaaaga

SEQ ID NO: 2040385 - RNA, 19 nt, Artificial Sequence
  Description of Artificial Sequence: Synthetic oligonucleotide
  Antisense strand to SEQ ID NO: 2040384
ucuuucagggcuagauaaa

SEQ ID NO: 2040386 - RNA, 19 nt, Artificial Sequence
  Description of Artificial Sequence: Synthetic oligonucleotide
  Sense strand starting at position 16 of SEQ ID NO: 1881385
uuaucuagcccugaaagau

SEQ ID NO: 2040387 - RNA, 19 nt, Artificial Sequence
  Description of Artificial Sequence: Synthetic oligonucleotide
  Antisense strand to SEQ ID NO: 2040386
aucuuucagggcuagauaa

SEQ ID NO: 2040388 - RNA, 19 nt, Artificial Sequence
  Description of Artificial Sequence: Synthetic oligonucleotide
  Sense strand starting at position 25 of SEQ ID NO: 1881385
ccugaaagaugcucagaug

SEQ ID NO: 2040389 - RNA, 19 nt, Artificial Sequence
  Description of Artificial Sequence: Synthetic oligonucleotide
  Antisense strand to SEQ ID NO: 2040388
caucugagcaucuuucagg

SEQ ID NO: 2040390 - RNA, 19 nt, Artificial Sequence
  Description of Artificial Sequence: Synthetic oligonucleotide
  Sense strand starting at position 34 of SEQ ID NO: 1881385
ugcucagaugugcaauacu

SEQ ID NO: 2040391 - RNA, 19 nt, Artificial Sequence
  Description of Artificial Sequence: Synthetic oligonucleotide
  Antisense strand to SEQ ID NO: 2040390
aguauugcacaucugagca

SEQ ID NO: 2040392 - RNA, 19 nt, Artificial Sequence
  Description of Artificial Sequence: Synthetic oligonucleotide
  Sense strand starting at position 37 of SEQ ID NO: 1881385
ucagaugugcaauacuacu

SEQ ID NO: 2040393 - RNA, 19 nt, Artificial Sequence
  Description of Artificial Sequence: Synthetic oligonucleotide
  Antisense strand to SEQ ID NO: 2040392
aguaguauugcacaucuga

SEQ ID NO: 2040394 - RNA, 19 nt, Artificial Sequence
  Description of Artificial Sequence: Synthetic oligonucleotide
  Sense strand starting at position 43 of SEQ ID NO: 1881385
gugcaauacuacuuaguug

SEQ ID NO: 2040395 - RNA, 19 nt, Artificial Sequence
  Description of Artificial Sequence: Synthetic oligonucleotide
  Antisense strand to SEQ ID NO: 2040394
caacuaaguaguauugcac

SEQ ID NO: 2040396 - RNA, 19 nt, Artificial Sequence
  Description of Artificial Sequence: Synthetic oligonucleotide
  Sense strand starting at position 49 of SEQ ID NO: 1881385
uacuacuuaguuggguaau

SEQ ID NO: 2040397 - RNA, 19 nt, Artificial Sequence
  Description of Artificial Sequence: Synthetic oligonucleotide
  Antisense strand to SEQ ID NO: 2040396
auuacccaacuaaguagua

SEQ ID NO: 2040398 - RNA, 19 nt, Artificial Sequence
  Description of Artificial Sequence: Synthetic oligonucleotide
  Sense strand starting at position 332 of SEQ ID NO: 1881385
cugagaacagggugucuua

SEQ ID NO: 2040399 - RNA, 19 nt, Artificial Sequence
  Description of Artificial Sequence: Synthetic oligonucleotide
  Antisense strand to SEQ ID NO: 2040398
uaagacacccuguucucag

SEQ ID NO: 2040400 - RNA, 19 nt, Artificial Sequence
  Description of Artificial Sequence: Synthetic oligonucleotide
  Sense strand starting at position 341 of SEQ ID NO: 1881385
gggugucuuagaggcacaa

SEQ ID NO: 2040401 - RNA, 19 nt, Artificial Sequence
  Description of Artificial Sequence: Synthetic oligonucleotide
  Antisense strand to SEQ ID NO: 2040400
uugugccucuaagacaccc

SEQ ID NO: 2040402 - RNA, 19 nt, Artificial Sequence
  Description of Artificial Sequence: Synthetic oligonucleotide
  Sense strand starting at position 368 of SEQ ID NO: 1881385
ugcguauccacccagaaag

SEQ ID NO: 2040403 - RNA, 19 nt, Artificial Sequence
  Description of Artificial Sequence: Synthetic oligonucleotide
  Antisense strand to SEQ ID NO: 2040402
cuuucuggguggauacgca

SEQ ID NO: 2040404 - RNA, 19 nt, Artificial Sequence
  Description of Artificial Sequence: Synthetic oligonucleotide
  Sense strand starting at position 437 of SEQ ID NO: 1881385
gccagaaucuugucugucu

SEQ ID NO: 2040405 - RNA, 19 nt, Artificial Sequence
  Description of Artificial Sequence: Synthetic oligonucleotide
  Antisense strand to SEQ ID NO: 2040404
agacagacaagauucuggc

SEQ ID NO: 2040406 - RNA, 19 nt, Artificial Sequence
  Description of Artificial Sequence: Synthetic oligonucleotide
  Sense strand starting at position 439 of SEQ ID NO: 1881385
cagaaucuugucugucuga

SEQ ID NO: 2040407 - RNA, 19 nt, Artificial Sequence
  Description of Artificial Sequence: Synthetic oligonucleotide
  Antisense strand to SEQ ID NO: 2040406
ucagacagacaagauucug

SEQ ID NO: 2040408 - RNA, 19 nt, Artificial Sequence
  Description of Artificial Sequence: Synthetic oligonucleotide
  Sense strand starting at position 440 of SEQ ID NO: 1881385
agaaucuugucugucugaa

SEQ ID NO: 2040409 - RNA, 19 nt, Artificial Sequence
  Description of Artificial Sequence: Synthetic oligonucleotide
  Antisense strand to SEQ ID NO: 2040408
uucagacagacaagauucu

SEQ ID NO: 2040410 - RNA, 19 nt, Artificial Sequence
  Description of Artificial Sequence: Synthetic oligonucleotide
  Sense strand starting at position 458 of SEQ ID NO: 1881385
aacagagcuuguuugggaa

SEQ ID NO: 2040411 - RNA, 19 nt, Artificial Sequence
  Description of Artificial Sequence: Synthetic oligonucleotide
  Antisense strand to SEQ ID NO: 2040410
uucccaaacaagcucuguu

SEQ ID NO: 2040412 - RNA, 19 nt, Artificial Sequence
  Description of Artificial Sequence: Synthetic oligonucleotide
  Sense strand starting at position 482 of SEQ ID NO: 1881385
cgagaaaucauccaucacg

SEQ ID NO: 2040413 - RNA, 19 nt, Artificial Sequence
  Description of Artificial Sequence: Synthetic oligonucleotide
  Antisense strand to SEQ ID NO: 2040412
cgugauggaugauuucucg

SEQ ID NO: 2040414 - RNA, 19 nt, Artificial Sequence
  Description of Artificial Sequence: Synthetic oligonucleotide
  Sense strand starting at position 637 of SEQ ID NO: 1881385
ggaagcaggcucugaagua

SEQ ID NO: 2040415 - RNA, 19 nt, Artificial Sequence
  Description of Artificial Sequence: Synthetic oligonucleotide
  Antisense strand to SEQ ID NO: 2040414
uacuucagagccugcuucc

SEQ ID NO: 2040416 - RNA, 19 nt, Artificial Sequence
  Description of Artificial Sequence: Synthetic oligonucleotide
  Sense strand starting at position 707 of SEQ ID NO: 1881385
cacgguggcccucauuaau

SEQ ID NO: 2040417 - RNA, 19 nt, Artificial Sequence
  Description of Artificial Sequence: Synthetic oligonucleotide
  Antisense strand to SEQ ID NO: 2040416
auuaaugagggccaccgug

SEQ ID NO: 2040418 - RNA, 19 nt, Artificial Sequence
  Description of Artificial Sequence: Synthetic oligonucleotide
  Sense strand starting at position 710 of SEQ ID NO: 1881385
gguggcccucauuaauuau

SEQ ID NO: 2040419 - RNA, 19 nt, Artificial Sequence
  Description of Artificial Sequence: Synthetic oligonucleotide
  Antisense strand to SEQ ID NO: 2040418
auaauuaaugagggccacc

SEQ ID NO: 2040420 - RNA, 19 nt, Artificial Sequence
  Description of Artificial Sequence: Synthetic oligonucleotide
  Sense strand starting at position 820 of SEQ ID NO: 1881385
agcuccugccugggagaua

SEQ ID NO: 2040421 - RNA, 19 nt, Artificial Sequence
  Description of Artificial Sequence: Synthetic oligonucleotide
  Antisense strand to SEQ ID NO: 2040420
uaucucccaggcaggagcu

SEQ ID NO: 2040422 - RNA, 19 nt, Artificial Sequence
  Description of Artificial Sequence: Synthetic oligonucleotide
  Sense strand starting at position 1220 of SEQ ID NO: 1881385
aucagaucucccugugugu

SEQ ID NO: 2040423 - RNA, 19 nt, Artificial Sequence
  Description of Artificial Sequence: Synthetic oligonucleotide
  Antisense strand to SEQ ID NO: 2040422
acacacagggagaucugau

SEQ ID NO: 2040424 - RNA, 19 nt, Artificial Sequence
  Description of Artificial Sequence: Synthetic oligonucleotide
  Sense strand starting at position 1222 of SEQ ID NO: 1881385
cagaucucccuguguguaa

SEQ ID NO: 2040425 - RNA, 19 nt, Artificial Sequence
  Description of Artificial Sequence: Synthetic oligonucleotide
  Antisense strand to SEQ ID NO: 2040424
uuacacacagggagaucug

SEQ ID NO: 2040426 - RNA, 19 nt, Artificial Sequence
  Description of Artificial Sequence: Synthetic oligonucleotide
  Sense strand starting at position 1349 of SEQ ID NO: 1881385
ucuguagaacagcaguaau

SEQ ID NO: 2040427 - RNA, 19 nt, Artificial Sequence
  Description of Artificial Sequence: Synthetic oligonucleotide
  Antisense strand to SEQ ID NO: 2040426
auuacugcuguucuacaga

SEQ ID NO: 2040428 - RNA, 19 nt, Artificial Sequence
  Description of Artificial Sequence: Synthetic oligonucleotide
  Sense strand starting at position 1810 of SEQ ID NO: 1881385
gcuugugguagcucuccau

SEQ ID NO: 2040429 - RNA, 19 nt, Artificial Sequence
  Description of Artificial Sequence: Synthetic oligonucleotide
  Antisense strand to SEQ ID NO: 2040428
auggagagcuaccacaagc

SEQ ID NO: 2040430 - RNA, 19 nt, Artificial Sequence
  Description of Artificial Sequence: Synthetic oligonucleotide
  Sense strand starting at position 2146 of SEQ ID NO: 1881385
cugggcuccugacucgaaa

SEQ ID NO: 2040431 - RNA, 19 nt, Artificial Sequence
  Description of Artificial Sequence: Synthetic oligonucleotide
  Antisense strand to SEQ ID NO: 2040430
uuucgagucaggagcccag

SEQ ID NO: 2040432 - RNA, 19 nt, Artificial Sequence
  Description of Artificial Sequence: Synthetic oligonucleotide
  Sense strand starting at position 2187 of SEQ ID NO: 1881385
cacaguccuccguggacuu

SEQ ID NO: 2040433 - RNA, 19 nt, Artificial Sequence
  Description of Artificial Sequence: Synthetic oligonucleotide
  Antisense strand to SEQ ID NO: 2040432
aaguccacggaggacugug

SEQ ID NO: 2040434 - RNA, 19 nt, Artificial Sequence
  Description of Artificial Sequence: Synthetic oligonucleotide
  Sense strand starting at position 2199 of SEQ ID NO: 1881385
uggacuugucacggcgaau

SEQ ID NO: 2040435 - RNA, 19 nt, Artificial Sequence
  Description of Artificial Sequence: Synthetic oligonucleotide
  Antisense strand to SEQ ID NO: 2040434
auucgccgugacaagucca

SEQ ID NO: 2040436 - RNA, 19 nt, Artificial Sequence
  Description of Artificial Sequence: Synthetic oligonucleotide
  Sense strand starting at position 2702 of SEQ ID NO: 1881385
agugauuacagcugccuga

SEQ ID NO: 2040437 - RNA, 19 nt, Artificial Sequence
  Description of Artificial Sequence: Synthetic oligonucleotide
  Antisense strand to SEQ ID NO: 2040436
ucaggcagcuguaaucacu

SEQ ID NO: 2040438 - RNA, 19 nt, Artificial Sequence
  Description of Artificial Sequence: Synthetic oligonucleotide
  Sense strand starting at position 2907 of SEQ ID NO: 1881385
gccggauuauagguaugag

SEQ ID NO: 2040439 - RNA, 19 nt, Artificial Sequence
  Description of Artificial Sequence: Synthetic oligonucleotide
  Antisense strand to SEQ ID NO: 2040438
cucauaccuauaauccggc

SEQ ID NO: 2040440 - RNA, 19 nt, Artificial Sequence
  Description of Artificial Sequence: Synthetic oligonucleotide
  Sense strand starting at position 2996 of SEQ ID NO: 1881385
gauagugguagccaugaca

SEQ ID NO: 2040441 - RNA, 19 nt, Artificial Sequence
  Description of Artificial Sequence: Synthetic oligonucleotide
  Antisense strand to SEQ ID NO: 2040440
ugucauggcuaccacuauc

SEQ ID NO: 2040442 - RNA, 19 nt, Artificial Sequence
  Description of Artificial Sequence: Synthetic oligonucleotide
  Sense strand starting at position 3098 of SEQ ID NO: 1881385
ggagauuauuggguuugcu

SEQ ID NO: 2040443 - RNA, 19 nt, Artificial Sequence
  Description of Artificial Sequence: Synthetic oligonucleotide
  Antisense strand to SEQ ID NO: 2040442
agcaaacccaauaaucucc

SEQ ID NO: 2040444 - RNA, 19 nt, Artificial Sequence
  Description of Artificial Sequence: Synthetic oligonucleotide
  Sense strand starting at position 3166 of SEQ ID NO: 1881385
augguucccagagguauga

SEQ ID NO: 2040445 - RNA, 19 nt, Artificial Sequence
  Description of Artificial Sequence: Synthetic oligonucleotide
  Antisense strand to SEQ ID NO: 2040444
ucauaccucugggaaccau

SEQ ID NO: 2040446 - RNA, 19 nt, Artificial Sequence
  Description of Artificial Sequence: Synthetic oligonucleotide
  Sense strand starting at position 3252 of SEQ ID NO: 1881385
acacuuggccagugaggua

SEQ ID NO: 2040447 - RNA, 19 nt, Artificial Sequence
  Description of Artificial Sequence: Synthetic oligonucleotide
  Antisense strand to SEQ ID NO: 2040446
uaccucacuggccaagugu

SEQ ID NO: 2040448 - RNA, 19 nt, Artificial Sequence
  Description of Artificial Sequence: Synthetic oligonucleotide
  Sense strand starting at position 3267 of SEQ ID NO: 1881385
gguacauacugccuacaau

SEQ ID NO: 2040449 - RNA, 19 nt, Artificial Sequence
  Description of Artificial Sequence: Synthetic oligonucleotide
  Antisense strand to SEQ ID NO: 2040448
auuguaggcaguauguacc

SEQ ID NO: 2040450 - RNA, 19 nt, Artificial Sequence
  Description of Artificial Sequence: Synthetic oligonucleotide
  Sense strand starting at position 3440 of SEQ ID NO: 1881385
cucagagagcucuggcuca

SEQ ID NO: 2040451 - RNA, 19 nt, Artificial Sequence
  Description of Artificial Sequence: Synthetic oligonucleotide
  Antisense strand to SEQ ID NO: 2040450
ugagccagagcucucugag

SEQ ID NO: 2040452 - RNA, 19 nt, Artificial Sequence
  Description of Artificial Sequence: Synthetic oligonucleotide
  Sense strand starting at position 3459 of SEQ ID NO: 1881385
ugaggcgauugacugaauu

SEQ ID NO: 2040453 - RNA, 19 nt, Artificial Sequence
  Description of Artificial Sequence: Synthetic oligonucleotide
  Antisense strand to SEQ ID NO: 2040452
aauucagucaaucgccuca

SEQ ID NO: 2040454 - RNA, 19 nt, Artificial Sequence
  Description of Artificial Sequence: Synthetic oligonucleotide
  Sense strand starting at position 3704 of SEQ ID NO: 1881385
gcugcucacugucuggaaa

SEQ ID NO: 2040455 - RNA, 19 nt, Artificial Sequence
  Description of Artificial Sequence: Synthetic oligonucleotide
  Antisense strand to SEQ ID NO: 2040454
uuuccagacagugagcagc

SEQ ID NO: 2040456 - RNA, 19 nt, Artificial Sequence
  Description of Artificial Sequence: Synthetic oligonucleotide
  Sense strand starting at position 3744 of SEQ ID NO: 1881385
uuugaaagcucugugccuu

SEQ ID NO: 2040457 - RNA, 19 nt, Artificial Sequence
  Description of Artificial Sequence: Synthetic oligonucleotide
  Antisense strand to SEQ ID NO: 2040456
aaggcacagagcuuucaaa

SEQ ID NO: 2040458 - RNA, 19 nt, Artificial Sequence
  Description of Artificial Sequence: Synthetic oligonucleotide
  Sense strand starting at position 3844 of SEQ ID NO: 1881385
ucacucuggucucugacaa

SEQ ID NO: 2040459 - RNA, 19 nt, Artificial Sequence
  Description of Artificial Sequence: Synthetic oligonucleotide
  Antisense strand to SEQ ID NO: 2040458
uugucagagaccagaguga

SEQ ID NO: 2040460 - RNA, 19 nt, Artificial Sequence
  Description of Artificial Sequence: Synthetic oligonucleotide
  Sense strand starting at position 3969 of SEQ ID NO: 1881385
ccugguguuccacaugaau

SEQ ID NO: 2040461 - RNA, 19 nt, Artificial Sequence
  Description of Artificial Sequence: Synthetic oligonucleotide
  Antisense strand to SEQ ID NO: 2040460
auucauguggaacaccagg

SEQ ID NO: 2040462 - RNA, 19 nt, Artificial Sequence
  Description of Artificial Sequence: Synthetic oligonucleotide
  Sense strand starting at position 3971 of SEQ ID NO: 1881385
ugguguuccacaugaaugg

SEQ ID NO: 2040463 - RNA, 19 nt, Artificial Sequence
  Description of Artificial Sequence: Synthetic oligonucleotide
  Antisense strand to SEQ ID NO: 2040462
ccauucauguggaacacca

SEQ ID NO: 2040464 - RNA, 19 nt, Artificial Sequence
  Description of Artificial Sequence: Synthetic oligonucleotide
  Sense strand starting at position 80 of SEQ ID NO: 1881386
cugggcuugucucacauuu

SEQ ID NO: 2040465 - RNA, 19 nt, Artificial Sequence
  Description of Artificial Sequence: Synthetic oligonucleotide
  Antisense strand to SEQ ID NO: 2040464
aaaugugagacaagcccag

SEQ ID NO: 2040466 - RNA, 19 nt, Artificial Sequence
  Description of Artificial Sequence: Synthetic oligonucleotide
  Sense strand starting at position 119 of SEQ ID NO: 1881386
cagggucauggcuaggaua

SEQ ID NO: 2040467 - RNA, 19 nt, Artificial Sequence
  Description of Artificial Sequence: Synthetic oligonucleotide
  Antisense strand to SEQ ID NO: 2040466
uauccuagccaugacccug

SEQ ID NO: 2040468 - RNA, 19 nt, Artificial Sequence
  Description of Artificial Sequence: Synthetic oligonucleotide
  Sense strand starting at position 121 of SEQ ID NO: 1881386
gggucauggcuaggauaug

SEQ ID NO: 2040469 - RNA, 19 nt, Artificial Sequence
  Description of Artificial Sequence: Synthetic oligonucleotide
  Antisense strand to SEQ ID NO: 2040468
cauauccuagccaugaccc

SEQ ID NO: 2040470 - RNA, 19 nt, Artificial Sequence
  Description of Artificial Sequence: Synthetic oligonucleotide
  Sense strand starting at position 130 of SEQ ID NO: 1881386
cuaggauaugccugauaug

SEQ ID NO: 2040471 - RNA, 19 nt, Artificial Sequence
  Description of Artificial Sequence: Synthetic oligonucleotide
  Antisense strand to SEQ ID NO: 2040470
cauaucaggcauauccuag

SEQ ID NO: 2040472 - RNA, 19 nt, Artificial Sequence
  Description of Artificial Sequence: Synthetic oligonucleotide
  Sense strand starting at position 133 of SEQ ID NO: 1881386
ggauaugccugauauggag

SEQ ID NO: 2040473 - RNA, 19 nt, Artificial Sequence
  Description of Artificial Sequence: Synthetic oligonucleotide
  Antisense strand to SEQ ID NO: 2040472
cuccauaucaggcauaucc

SEQ ID NO: 2040474 - RNA, 19 nt, Artificial Sequence
  Description of Artificial Sequence: Synthetic oligonucleotide
  Sense strand starting at position 135 of SEQ ID NO: 1881386
auaugccugauauggagaa

SEQ ID NO: 2040475 - RNA, 19 nt, Artificial Sequence
  Description of Artificial Sequence: Synthetic oligonucleotide
  Antisense strand to SEQ ID NO: 2040474
uucuccauaucaggcauau

SEQ ID NO: 2040476 - RNA, 19 nt, Artificial Sequence
  Description of Artificial Sequence: Synthetic oligonucleotide
  Sense strand starting at position 139 of SEQ ID NO: 1881386
gccugauauggagaagcuu

SEQ ID NO: 2040477 - RNA, 19 nt, Artificial Sequence
  Description of Artificial Sequence: Synthetic oligonucleotide
  Antisense strand to SEQ ID NO: 2040476
aagcuucuccauaucaggc

SEQ ID NO: 2040478 - RNA, 19 nt, Artificial Sequence
  Description of Artificial Sequence: Synthetic oligonucleotide
  Sense strand starting at position 147 of SEQ ID NO: 1881386
uggagaagcuucucuugcu

SEQ ID NO: 2040479 - RNA, 19 nt, Artificial Sequence
  Description of Artificial Sequence: Synthetic oligonucleotide
  Antisense strand to SEQ ID NO: 2040478
agcaagagaagcuucucca

SEQ ID NO: 2040480 - RNA, 19 nt, Artificial Sequence
  Description of Artificial Sequence: Synthetic oligonucleotide
  Sense strand starting at position 649 of SEQ ID NO: 1881386
gguccuuggcacuaagaca

SEQ ID NO: 2040481 - RNA, 19 nt, Artificial Sequence
  Description of Artificial Sequence: Synthetic oligonucleotide
  Antisense strand to SEQ ID NO: 2040480
ugucuuagugccaaggacc

SEQ ID NO: 2040482 - RNA, 19 nt, Artificial Sequence
  Description of Artificial Sequence: Synthetic oligonucleotide
  Sense strand starting at position 708 of SEQ ID NO: 1881386
ucaggaacugcauauagua

SEQ ID NO: 2040483 - RNA, 19 nt, Artificial Sequence
  Description of Artificial Sequence: Synthetic oligonucleotide
  Antisense strand to SEQ ID NO: 2040482
uacuauaugcaguuccuga

SEQ ID NO: 2040484 - RNA, 19 nt, Artificial Sequence
  Description of Artificial Sequence: Synthetic oligonucleotide
  Sense strand starting at position 729 of SEQ ID NO: 1881386
gaacaugacagcgauucga

SEQ ID NO: 2040485 - RNA, 19 nt, Artificial Sequence
  Description of Artificial Sequence: Synthetic oligonucleotide
  Antisense strand to SEQ ID NO: 2040484
ucgaaucgcugucauguuc

SEQ ID NO: 2040486 - RNA, 19 nt, Artificial Sequence
  Description of Artificial Sequence: Synthetic oligonucleotide
  Sense strand starting at position 854 of SEQ ID NO: 1881386
gcagcauagccagauccua

SEQ ID NO: 2040487 - RNA, 19 nt, Artificial Sequence
  Description of Artificial Sequence: Synthetic oligonucleotide
  Antisense strand to SEQ ID NO: 2040486
uaggaucuggcuaugcugc

SEQ ID NO: 2040488 - RNA, 19 nt, Artificial Sequence
  Description of Artificial Sequence: Synthetic oligonucleotide
  Sense strand starting at position 1034 of SEQ ID NO: 1881386
cccugucucaagugggaaa

SEQ ID NO: 2040489 - RNA, 19 nt, Artificial Sequence
  Description of Artificial Sequence: Synthetic oligonucleotide
  Antisense strand to SEQ ID NO: 2040488
uuucccacuugagacaggg

SEQ ID NO: 2040490 - RNA, 19 nt, Artificial Sequence
  Description of Artificial Sequence: Synthetic oligonucleotide
  Sense strand starting at position 2548 of SEQ ID NO: 1881386
aaugguuggcccugggaaa

SEQ ID NO: 2040491 - RNA, 19 nt, Artificial Sequence
  Description of Artificial Sequence: Synthetic oligonucleotide
  Antisense strand to SEQ ID NO: 2040490
uuucccagggccaaccauu

SEQ ID NO: 2040492 - RNA, 19 nt, Artificial Sequence
  Description of Artificial Sequence: Synthetic oligonucleotide
  Sense strand starting at position 2568 of SEQ ID NO: 1881386
ccgcgauggcguccugagu

SEQ ID NO: 2040493 - RNA, 19 nt, Artificial Sequence
  Description of Artificial Sequence: Synthetic oligonucleotide
  Antisense strand to SEQ ID NO: 2040492
acucaggacgccaucgcgg

SEQ ID NO: 2040494 - RNA, 19 nt, Artificial Sequence
  Description of Artificial Sequence: Synthetic oligonucleotide
  Sense strand starting at position 2569 of SEQ ID NO: 1881386
cgcgauggcguccugagua

SEQ ID NO: 2040495 - RNA, 19 nt, Artificial Sequence
  Description of Artificial Sequence: Synthetic oligonucleotide
  Antisense strand to SEQ ID NO: 2040494
uacucaggacgccaucgcg

SEQ ID NO: 2040496 - RNA, 19 nt, Artificial Sequence
  Description of Artificial Sequence: Synthetic oligonucleotide
  Sense strand starting at position 2640 of SEQ ID NO: 1881386
ccgugauucgagggugacu

SEQ ID NO: 2040497 - RNA, 19 nt, Artificial Sequence
  Description of Artificial Sequence: Synthetic oligonucleotide
  Antisense strand to SEQ ID NO: 2040496
agucacccucgaaucacgg

SEQ ID NO: 2040498 - RNA, 19 nt, Artificial Sequence
  Description of Artificial Sequence: Synthetic oligonucleotide
  Sense strand starting at position 2757 of SEQ ID NO: 1881386
gcgagcccucgcuaggauu

SEQ ID NO: 2040499 - RNA, 19 nt, Artificial Sequence
  Description of Artificial Sequence: Synthetic oligonucleotide
  Antisense strand to SEQ ID NO: 2040498
aauccuagcgagggcucgc

SEQ ID NO: 2040500 - RNA, 19 nt, Artificial Sequence
  Description of Artificial Sequence: Synthetic oligonucleotide
  Sense strand starting at position 2759 of SEQ ID NO: 1881386
gagcccucgcuaggauuaa

SEQ ID NO: 2040501 - RNA, 19 nt, Artificial Sequence
  Description of Artificial Sequence: Synthetic oligonucleotide
  Antisense strand to SEQ ID NO: 2040500
uuaauccuagcgagggcuc

SEQ ID NO: 2040502 - RNA, 19 nt, Artificial Sequence
  Description of Artificial Sequence: Synthetic oligonucleotide
  Sense strand starting at position 2797 of SEQ ID NO: 1881386
aggguacucagcuagguuu

SEQ ID NO: 2040503 - RNA, 19 nt, Artificial Sequence
  Description of Artificial Sequence: Synthetic oligonucleotide
  Antisense strand to SEQ ID NO: 2040502
aaaccuagcugaguacccu

SEQ ID NO: 2040504 - RNA, 19 nt, Artificial Sequence
  Description of Artificial Sequence: Synthetic oligonucleotide
  Sense strand starting at position 2803 of SEQ ID NO: 1881386
cucagcuagguuugugaga

SEQ ID NO: 2040505 - RNA, 19 nt, Artificial Sequence
  Description of Artificial Sequence: Synthetic oligonucleotide
  Antisense strand to SEQ ID NO: 2040504
ucucacaaaccuagcugag

SEQ ID NO: 2040506 - RNA, 19 nt, Artificial Sequence
  Description of Artificial Sequence: Synthetic oligonucleotide
  Sense strand starting at position 2804 of SEQ ID NO: 1881386
ucagcuagguuugugagau

SEQ ID NO: 2040507 - RNA, 19 nt, Artificial Sequence
  Description of Artificial Sequence: Synthetic oligonucleotide
  Antisense strand to SEQ ID NO: 2040506
aucucacaaaccuagcuga

SEQ ID NO: 2040508 - RNA, 19 nt, Artificial Sequence
  Description of Artificial Sequence: Synthetic oligonucleotide
  Sense strand starting at position 2814 of SEQ ID NO: 1881386
uugugagaucacuaacuuu

SEQ ID NO: 2040509 - RNA, 19 nt, Artificial Sequence
  Description of Artificial Sequence: Synthetic oligonucleotide
  Antisense strand to SEQ ID NO: 2040508
aaaguuagugaucucacaa

SEQ ID NO: 2040510 - RNA, 19 nt, Artificial Sequence
  Description of Artificial Sequence: Synthetic oligonucleotide
  Sense strand starting at position 3000 of SEQ ID NO: 1881386
guacucagcuagguuugua

SEQ ID NO: 2040511 - RNA, 19 nt, Artificial Sequence
  Description of Artificial Sequence: Synthetic oligonucleotide
  Antisense strand to SEQ ID NO: 2040510
uacaaaccuagcugaguac

SEQ ID NO: 2040512 - RNA, 19 nt, Artificial Sequence
  Description of Artificial Sequence: Synthetic oligonucleotide
  Sense strand starting at position 3003 of SEQ ID NO: 1881386
cucagcuagguuuguaaga

SEQ ID NO: 2040513 - RNA, 19 nt, Artificial Sequence
  Description of Artificial Sequence: Synthetic oligonucleotide
  Antisense strand to SEQ ID NO: 2040512
ucuuacaaaccuagcugag

SEQ ID NO: 2040514 - RNA, 19 nt, Artificial Sequence
  Description of Artificial Sequence: Synthetic oligonucleotide
  Sense strand starting at position 3004 of SEQ ID NO: 1881386
ucagcuagguuuguaagau

SEQ ID NO: 2040515 - RNA, 19 nt, Artificial Sequence
  Description of Artificial Sequence: Synthetic oligonucleotide
  Antisense strand to SEQ ID NO: 2040514
aucuuacaaaccuagcuga

SEQ ID NO: 2040516 - RNA, 19 nt, Artificial Sequence
  Description of Artificial Sequence: Synthetic oligonucleotide
  Sense strand starting at position 3215 of SEQ ID NO: 1881386
gguacucagguuuguaaga

SEQ ID NO: 2040517 - RNA, 19 nt, Artificial Sequence
  Description of Artificial Sequence: Synthetic oligonucleotide
  Antisense strand to SEQ ID NO: 2040516
ucuuacaaaccugaguacc

SEQ ID NO: 2040518 - RNA, 19 nt, Artificial Sequence
  Description of Artificial Sequence: Synthetic oligonucleotide
  Sense strand starting at position 3216 of SEQ ID NO: 1881386
guacucagguuuguaagau

SEQ ID NO: 2040519 - RNA, 19 nt, Artificial Sequence
  Description of Artificial Sequence: Synthetic oligonucleotide
  Antisense strand to SEQ ID NO: 2040518
aucuuacaaaccugaguac

SEQ ID NO: 2040520 - RNA, 19 nt, Artificial Sequence
  Description of Artificial Sequence: Synthetic oligonucleotide
  Sense strand starting at position 3528 of SEQ ID NO: 1881386
cccauauuugcuuggcaaa

SEQ ID NO: 2040521 - RNA, 19 nt, Artificial Sequence
  Description of Artificial Sequence: Synthetic oligonucleotide
  Antisense strand to SEQ ID NO: 2040520
uuugccaagcaaauauggg

SEQ ID NO: 2040522 - RNA, 19 nt, Artificial Sequence
  Description of Artificial Sequence: Synthetic oligonucleotide
  Sense strand starting at position 3531 of SEQ ID NO: 1881386
auauuugcuuggcaaauau

SEQ ID NO: 2040523 - RNA, 19 nt, Artificial Sequence
  Description of Artificial Sequence: Synthetic oligonucleotide
  Antisense strand to SEQ ID NO: 2040522
auauuugccaagcaaauau

SEQ ID NO: 2040524 - RNA, 19 nt, Artificial Sequence
  Description of Artificial Sequence: Synthetic oligonucleotide
  Sense strand starting at position 3684 of SEQ ID NO: 1881386
acccucaguuaucuuggua

SEQ ID NO: 2040525 - RNA, 19 nt, Artificial Sequence
  Description of Artificial Sequence: Synthetic oligonucleotide
  Antisense strand to SEQ ID NO: 2040524
uaccaagauaacugagggu

SEQ ID NO: 2040526 - RNA, 19 nt, Artificial Sequence
  Description of Artificial Sequence: Synthetic oligonucleotide
  Sense strand starting at position 3706 of SEQ ID NO: 1881386
gguucugaaugcccagaau

SEQ ID NO: 2040527 - RNA, 19 nt, Artificial Sequence
  Description of Artificial Sequence: Synthetic oligonucleotide
  Antisense strand to SEQ ID NO: 2040526
auucugggcauucagaacc

SEQ ID NO: 2040528 - RNA, 19 nt, Artificial Sequence
  Description of Artificial Sequence: Synthetic oligonucleotide
  Sense strand starting at position 3770 of SEQ ID NO: 1881386
ugugaaagcgugcagaaca

SEQ ID NO: 2040529 - RNA, 19 nt, Artificial Sequence
  Description of Artificial Sequence: Synthetic oligonucleotide
  Antisense strand to SEQ ID NO: 2040528
uguucugcacgcuuucaca

SEQ ID NO: 2040530 - RNA, 19 nt, Artificial Sequence
  Description of Artificial Sequence: Synthetic oligonucleotide
  Sense strand starting at position 3831 of SEQ ID NO: 1881386
guaugagaagcucauuauu

SEQ ID NO: 2040531 - RNA, 19 nt, Artificial Sequence
  Description of Artificial Sequence: Synthetic oligonucleotide
  Antisense strand to SEQ ID NO: 2040530
aauaaugagcuucucauac

SEQ ID NO: 2040532 - RNA, 19 nt, Artificial Sequence
  Description of Artificial Sequence: Synthetic oligonucleotide
  Sense strand starting at position 3841 of SEQ ID NO: 1881386
cucauuauuggauguauug

SEQ ID NO: 2040533 - RNA, 19 nt, Artificial Sequence
  Description of Artificial Sequence: Synthetic oligonucleotide
  Antisense strand to SEQ ID NO: 2040532
caauacauccaauaaugag

SEQ ID NO: 2040534 - RNA, 19 nt, Artificial Sequence
  Description of Artificial Sequence: Synthetic oligonucleotide
  Sense strand starting at position 3853 of SEQ ID NO: 1881386
uguauugaguugccuaaua

SEQ ID NO: 2040535 - RNA, 19 nt, Artificial Sequence
  Description of Artificial Sequence: Synthetic oligonucleotide
  Antisense strand to SEQ ID NO: 2040534
uauuaggcaacucaauaca

SEQ ID NO: 2040536 - RNA, 19 nt, Artificial Sequence
  Description of Artificial Sequence: Synthetic oligonucleotide
  Sense strand starting at position 3883 of SEQ ID NO: 1881386
ggagcaugaguuggaaugu

SEQ ID NO: 2040537 - RNA, 19 nt, Artificial Sequence
  Description of Artificial Sequence: Synthetic oligonucleotide
  Antisense strand to SEQ ID NO: 2040536
acauuccaacucaugcucc

SEQ ID NO: 2040538 - RNA, 19 nt, Artificial Sequence
  Description of Artificial Sequence: Synthetic oligonucleotide
  Sense strand starting at position 3889 of SEQ ID NO: 1881386
ugaguuggaauguguugaa

SEQ ID NO: 2040539 - RNA, 19 nt, Artificial Sequence
  Description of Artificial Sequence: Synthetic oligonucleotide
  Antisense strand to SEQ ID NO: 2040538
uucaacacauuccaacuca

SEQ ID NO: 2040540 - RNA, 19 nt, Artificial Sequence
  Description of Artificial Sequence: Synthetic oligonucleotide
  Sense strand starting at position 3934 of SEQ ID NO: 1881386
acacauguggccuaugauu

SEQ ID NO: 2040541 - RNA, 19 nt, Artificial Sequence
  Description of Artificial Sequence: Synthetic oligonucleotide
  Antisense strand to SEQ ID NO: 2040540
aaucauaggccacaugugu

SEQ ID NO: 2040542 - RNA, 19 nt, Artificial Sequence
  Description of Artificial Sequence: Synthetic oligonucleotide
  Sense strand starting at position 3943 of SEQ ID NO: 1881386
gccuaugauuugucuuaau

SEQ ID NO: 2040543 - RNA, 19 nt, Artificial Sequence
  Description of Artificial Sequence: Synthetic oligonucleotide
  Antisense strand to SEQ ID NO: 2040542
auuaagacaaaucauaggc

SEQ ID NO: 2040544 - RNA, 19 nt, Artificial Sequence
  Description of Artificial Sequence: Synthetic oligonucleotide
  Sense strand starting at position 152 of SEQ ID NO: 1881387
ugcggcuucgugugaauuu

SEQ ID NO: 2040545 - RNA, 19 nt, Artificial Sequence
  Description of Artificial Sequence: Synthetic oligonucleotide
  Antisense strand to SEQ ID NO: 2040544
aaauucacacgaagccgca

SEQ ID NO: 2040546 - RNA, 19 nt, Artificial Sequence
  Description of Artificial Sequence: Synthetic oligonucleotide
  Sense strand starting at position 230 of SEQ ID NO: 1881387
aaaugugaaccaggagguu

SEQ ID NO: 2040547 - RNA, 19 nt, Artificial Sequence
  Description of Artificial Sequence: Synthetic oligonucleotide
  Antisense strand to SEQ ID NO: 2040546
aaccuccugguucacauuu

SEQ ID NO: 2040548 - RNA, 19 nt, Artificial Sequence
  Description of Artificial Sequence: Synthetic oligonucleotide
  Sense strand starting at position 260 of SEQ ID NO: 1881387
ggccuaauuugauaucuga

SEQ ID NO: 2040549 - RNA, 19 nt, Artificial Sequence
  Description of Artificial Sequence: Synthetic oligonucleotide
  Antisense strand to SEQ ID NO: 2040548
ucagauaucaaauuaggcc

SEQ ID NO: 2040550 - RNA, 19 nt, Artificial Sequence
  Description of Artificial Sequence: Synthetic oligonucleotide
  Sense strand starting at position 284 of SEQ ID NO: 1881387
caagcaagaucagaaggua

SEQ ID NO: 2040551 - RNA, 19 nt, Artificial Sequence
  Description of Artificial Sequence: Synthetic oligonucleotide
  Antisense strand to SEQ ID NO: 2040550
uaccuucugaucuugcuug

SEQ ID NO: 2040552 - RNA, 19 nt, Artificial Sequence
  Description of Artificial Sequence: Synthetic oligonucleotide
  Sense strand starting at position 365 of SEQ ID NO: 1881387
cacgucaucggcuagaugu

SEQ ID NO: 2040553 - RNA, 19 nt, Artificial Sequence
  Description of Artificial Sequence: Synthetic oligonucleotide
  Antisense strand to SEQ ID NO: 2040552
acaucuagccgaugacgug

SEQ ID NO: 2040554 - RNA, 19 nt, Artificial Sequence
  Description of Artificial Sequence: Synthetic oligonucleotide
  Sense strand starting at position 373 of SEQ ID NO: 1881387
cggcuagauguccaggcaa

SEQ ID NO: 2040555 - RNA, 19 nt, Artificial Sequence
  Description of Artificial Sequence: Synthetic oligonucleotide
  Antisense strand to SEQ ID NO: 2040554
uugccuggacaucuagccg

SEQ ID NO: 2040556 - RNA, 19 nt, Artificial Sequence
  Description of Artificial Sequence: Synthetic oligonucleotide
  Sense strand starting at position 375 of SEQ ID NO: 1881387
gcuagauguccaggcaaca

SEQ ID NO: 2040557 - RNA, 19 nt, Artificial Sequence
  Description of Artificial Sequence: Synthetic oligonucleotide
  Antisense strand to SEQ ID NO: 2040556
uguugccuggacaucuagc

SEQ ID NO: 2040558 - RNA, 19 nt, Artificial Sequence
  Description of Artificial Sequence: Synthetic oligonucleotide
  Sense strand starting at position 393 of SEQ ID NO: 1881387
aacagaagugaucggcuca

SEQ ID NO: 2040559 - RNA, 19 nt, Artificial Sequence
  Description of Artificial Sequence: Synthetic oligonucleotide
  Antisense strand to SEQ ID NO: 2040558
ugagccgaucacuucuguu

SEQ ID NO: 2040560 - RNA, 19 nt, Artificial Sequence
  Description of Artificial Sequence: Synthetic oligonucleotide
  Sense strand starting at position 394 of SEQ ID NO: 1881387
acagaagugaucggcucaa

SEQ ID NO: 2040561 - RNA, 19 nt, Artificial Sequence
  Description of Artificial Sequence: Synthetic oligonucleotide
  Antisense strand to SEQ ID NO: 2040560
uugagccgaucacuucugu

SEQ ID NO: 2040562 - RNA, 19 nt, Artificial Sequence
  Description of Artificial Sequence: Synthetic oligonucleotide
  Sense strand starting at position 406 of SEQ ID NO: 1881387
ggcucaauuccauggagga

SEQ ID NO: 2040563 - RNA, 19 nt, Artificial Sequence
  Description of Artificial Sequence: Synthetic oligonucleotide
  Antisense strand to SEQ ID NO: 2040562
uccuccauggaauugagcc

SEQ ID NO: 2040564 - RNA, 19 nt, Artificial Sequence
  Description of Artificial Sequence: Synthetic oligonucleotide
  Sense strand starting at position 407 of SEQ ID NO: 1881387
gcucaauuccauggaggaa

SEQ ID NO: 2040565 - RNA, 19 nt, Artificial Sequence
  Description of Artificial Sequence: Synthetic oligonucleotide
  Antisense strand to SEQ ID NO: 2040564
uuccuccauggaauugagc

SEQ ID NO: 2040566 - RNA, 19 nt, Artificial Sequence
  Description of Artificial Sequence: Synthetic oligonucleotide
  Sense strand starting at position 499 of SEQ ID NO: 1881387
ucggauauuuauuaaguga

SEQ ID NO: 2040567 - RNA, 19 nt, Artificial Sequence
  Description of Artificial Sequence: Synthetic oligonucleotide
  Antisense strand to SEQ ID NO: 2040566
ucacuuaauaaauauccga

SEQ ID NO: 2040568 - RNA, 19 nt, Artificial Sequence
  Description of Artificial Sequence: Synthetic oligonucleotide
  Sense strand starting at position 928 of SEQ ID NO: 1881387
aguaaugucaggugacuau

SEQ ID NO: 2040569 - RNA, 19 nt, Artificial Sequence
  Description of Artificial Sequence: Synthetic oligonucleotide
  Antisense strand to SEQ ID NO: 2040568
auagucaccugacauuacu

SEQ ID NO: 2040570 - RNA, 19 nt, Artificial Sequence
  Description of Artificial Sequence: Synthetic oligonucleotide
  Sense strand starting at position 965 of SEQ ID NO: 1881387
uuguuacacugucuuucua

SEQ ID NO: 2040571 - RNA, 19 nt, Artificial Sequence
  Description of Artificial Sequence: Synthetic oligonucleotide
  Antisense strand to SEQ ID NO: 2040570
uagaaagacaguguaacaa

SEQ ID NO: 2040572 - RNA, 19 nt, Artificial Sequence
  Description of Artificial Sequence: Synthetic oligonucleotide
  Sense strand starting at position 967 of SEQ ID NO: 1881387
guuacacugucuuucuaaa

SEQ ID NO: 2040573 - RNA, 19 nt, Artificial Sequence
  Description of Artificial Sequence: Synthetic oligonucleotide
  Antisense strand to SEQ ID NO: 2040572
uuuagaaagacaguguaac

SEQ ID NO: 2040574 - RNA, 19 nt, Artificial Sequence
  Description of Artificial Sequence: Synthetic oligonucleotide
  Sense strand starting at position 1202 of SEQ ID NO: 1881387
ugcgcacgacuucaguaaa

SEQ ID NO: 2040575 - RNA, 19 nt, Artificial Sequence
  Description of Artificial Sequence: Synthetic oligonucleotide
  Antisense strand to SEQ ID NO: 2040574
uuuacugaagucgugcgca

SEQ ID NO: 2040576 - RNA, 19 nt, Artificial Sequence
  Description of Artificial Sequence: Synthetic oligonucleotide
  Sense strand starting at position 1267 of SEQ ID NO: 1881387
cgccaagucaagggucuaa

SEQ ID NO: 2040577 - RNA, 19 nt, Artificial Sequence
  Description of Artificial Sequence: Synthetic oligonucleotide
  Antisense strand to SEQ ID NO: 2040576
uuagacccuugacuuggcg

SEQ ID NO: 2040578 - RNA, 19 nt, Artificial Sequence
  Description of Artificial Sequence: Synthetic oligonucleotide
  Sense strand starting at position 1287 of SEQ ID NO: 1881387
agcacauuugggugucuca

SEQ ID NO: 2040579 - RNA, 19 nt, Artificial Sequence
  Description of Artificial Sequence: Synthetic oligonucleotide
  Antisense strand to SEQ ID NO: 2040578
ugagacacccaaaugugcu

SEQ ID NO: 2040580 - RNA, 19 nt, Artificial Sequence
  Description of Artificial Sequence: Synthetic oligonucleotide
  Sense strand starting at position 1461 of SEQ ID NO: 1881387
gaaggcaaggauugaguuu

SEQ ID NO: 2040581 - RNA, 19 nt, Artificial Sequence
  Description of Artificial Sequence: Synthetic oligonucleotide
  Antisense strand to SEQ ID NO: 2040580
aaacucaauccuugccuuc

SEQ ID NO: 2040582 - RNA, 19 nt, Artificial Sequence
  Description of Artificial Sequence: Synthetic oligonucleotide
  Sense strand starting at position 1654 of SEQ ID NO: 1881387
caggaagaguauucuaggu

SEQ ID NO: 2040583 - RNA, 19 nt, Artificial Sequence
  Description of Artificial Sequence: Synthetic oligonucleotide
  Antisense strand to SEQ ID NO: 2040582
accuagaauacucuuccug

SEQ ID NO: 2040584 - RNA, 19 nt, Artificial Sequence
  Description of Artificial Sequence: Synthetic oligonucleotide
  Sense strand starting at position 1658 of SEQ ID NO: 1881387
aagaguauucuaggugcaa

SEQ ID NO: 2040585 - RNA, 19 nt, Artificial Sequence
  Description of Artificial Sequence: Synthetic oligonucleotide
  Antisense strand to SEQ ID NO: 2040584
uugcaccuagaauacucuu

SEQ ID NO: 2040586 - RNA, 19 nt, Artificial Sequence
  Description of Artificial Sequence: Synthetic oligonucleotide
  Sense strand starting at position 1659 of SEQ ID NO: 1881387
agaguauucuaggugcaaa

SEQ ID NO: 2040587 - RNA, 19 nt, Artificial Sequence
  Description of Artificial Sequence: Synthetic oligonucleotide
  Antisense strand to SEQ ID NO: 2040586
uuugcaccuagaauacucu

SEQ ID NO: 2040588 - RNA, 19 nt, Artificial Sequence
  Description of Artificial Sequence: Synthetic oligonucleotide
  Sense strand starting at position 1660 of SEQ ID NO: 1881387
gaguauucuaggugcaaag

SEQ ID NO: 2040589 - RNA, 19 nt, Artificial Sequence
  Description of Artificial Sequence: Synthetic oligonucleotide
  Antisense strand to SEQ ID NO: 2040588
cuuugcaccuagaauacuc

SEQ ID NO: 2040590 - RNA, 19 nt, Artificial Sequence
  Description of Artificial Sequence: Synthetic oligonucleotide
  Sense strand starting at position 1949 of SEQ ID NO: 1881387
uugucuuuccaggacucuu

SEQ ID NO: 2040591 - RNA, 19 nt, Artificial Sequence
  Description of Artificial Sequence: Synthetic oligonucleotide
  Antisense strand to SEQ ID NO: 2040590
aagaguccuggaaagacaa

SEQ ID NO: 2040592 - RNA, 19 nt, Artificial Sequence
  Description of Artificial Sequence: Synthetic oligonucleotide
  Sense strand starting at position 1979 of SEQ ID NO: 1881387
cagggaggcucuguauaua

SEQ ID NO: 2040593 - RNA, 19 nt, Artificial Sequence
  Description of Artificial Sequence: Synthetic oligonucleotide
  Antisense strand to SEQ ID NO: 2040592
uauauacagagccucccug

SEQ ID NO: 2040594 - RNA, 19 nt, Artificial Sequence
  Description of Artificial Sequence: Synthetic oligonucleotide
  Sense strand starting at position 1988 of SEQ ID NO: 1881387
ucuguauauacguagaggu

SEQ ID NO: 2040595 - RNA, 19 nt, Artificial Sequence
  Description of Artificial Sequence: Synthetic oligonucleotide
  Antisense strand to SEQ ID NO: 2040594
accucuacguauauacaga

SEQ ID NO: 2040596 - RNA, 19 nt, Artificial Sequence
  Description of Artificial Sequence: Synthetic oligonucleotide
  Sense strand starting at position 1990 of SEQ ID NO: 1881387
uguauauacguagagguca

SEQ ID NO: 2040597 - RNA, 19 nt, Artificial Sequence
  Description of Artificial Sequence: Synthetic oligonucleotide
  Antisense strand to SEQ ID NO: 2040596
ugaccucuacguauauaca

SEQ ID NO: 2040598 - RNA, 19 nt, Artificial Sequence
  Description of Artificial Sequence: Synthetic oligonucleotide
  Sense strand starting at position 2162 of SEQ ID NO: 1881387
cuccgcuguccugaugagu

SEQ ID NO: 2040599 - RNA, 19 nt, Artificial Sequence
  Description of Artificial Sequence: Synthetic oligonucleotide
  Antisense strand to SEQ ID NO: 2040598
acucaucaggacagcggag

SEQ ID NO: 2040600 - RNA, 19 nt, Artificial Sequence
  Description of Artificial Sequence: Synthetic oligonucleotide
  Sense strand starting at position 2171 of SEQ ID NO: 1881387
ccugaugagucacuggaug

SEQ ID NO: 2040601 - RNA, 19 nt, Artificial Sequence
  Description of Artificial Sequence: Synthetic oligonucleotide
  Antisense strand to SEQ ID NO: 2040600
cauccagugacucaucagg

SEQ ID NO: 2040602 - RNA, 19 nt, Artificial Sequence
  Description of Artificial Sequence: Synthetic oligonucleotide
  Sense strand starting at position 2173 of SEQ ID NO: 1881387
ugaugagucacuggaugca

SEQ ID NO: 2040603 - RNA, 19 nt, Artificial Sequence
  Description of Artificial Sequence: Synthetic oligonucleotide
  Antisense strand to SEQ ID NO: 2040602
ugcauccagugacucauca

SEQ ID NO: 2040604 - RNA, 19 nt, Artificial Sequence
  Description of Artificial Sequence: Synthetic oligonucleotide
  Sense strand starting at position 2182 of SEQ ID NO: 1881387
acuggaugcacccgugaga

SEQ ID NO: 2040605 - RNA, 19 nt, Artificial Sequence
  Description of Artificial Sequence: Synthetic oligonucleotide
  Antisense strand to SEQ ID NO: 2040604
ucucacgggugcauccagu

SEQ ID NO: 2040606 - RNA, 19 nt, Artificial Sequence
  Description of Artificial Sequence: Synthetic oligonucleotide
  Sense strand starting at position 2278 of SEQ ID NO: 1881387
cgaagaauuucggcucuuu

SEQ ID NO: 2040607 - RNA, 19 nt, Artificial Sequence
  Description of Artificial Sequence: Synthetic oligonucleotide
  Antisense strand to SEQ ID NO: 2040606
aaagagccgaaauucuucg

SEQ ID NO: 2040608 - RNA, 19 nt, Artificial Sequence
  Description of Artificial Sequence: Synthetic oligonucleotide
  Sense strand starting at position 2389 of SEQ ID NO: 1881387
guacuagacgucuaacuuu

SEQ ID NO: 2040609 - RNA, 19 nt, Artificial Sequence
  Description of Artificial Sequence: Synthetic oligonucleotide
  Antisense strand to SEQ ID NO: 2040608
aaaguuagacgucuaguac

SEQ ID NO: 2040610 - RNA, 19 nt, Artificial Sequence
  Description of Artificial Sequence: Synthetic oligonucleotide
  Sense strand starting at position 2780 of SEQ ID NO: 1881387
gugggagauccgugacccu

SEQ ID NO: 2040611 - RNA, 19 nt, Artificial Sequence
  Description of Artificial Sequence: Synthetic oligonucleotide
  Antisense strand to SEQ ID NO: 2040610
agggucacggaucucccac

SEQ ID NO: 2040612 - RNA, 19 nt, Artificial Sequence
  Description of Artificial Sequence: Synthetic oligonucleotide
  Sense strand starting at position 2857 of SEQ ID NO: 1881387
auuucuuuacuccgaguua

SEQ ID NO: 2040613 - RNA, 19 nt, Artificial Sequence
  Description of Artificial Sequence: Synthetic oligonucleotide
  Antisense strand to SEQ ID NO: 2040612
uaacucggaguaaagaaau

SEQ ID NO: 2040614 - RNA, 19 nt, Artificial Sequence
  Description of Artificial Sequence: Synthetic oligonucleotide
  Sense strand starting at position 2873 of SEQ ID NO: 1881387
uuagguacuucuuucucua

SEQ ID NO: 2040615 - RNA, 19 nt, Artificial Sequence
  Description of Artificial Sequence: Synthetic oligonucleotide
  Antisense strand to SEQ ID NO: 2040614
uagagaaagaaguaccuaa

SEQ ID NO: 2040616 - RNA, 19 nt, Artificial Sequence
  Description of Artificial Sequence: Synthetic oligonucleotide
  Sense strand starting at position 3269 of SEQ ID NO: 1881387
aauguuaaagucugaugaa

SEQ ID NO: 2040617 - RNA, 19 nt, Artificial Sequence
  Description of Artificial Sequence: Synthetic oligonucleotide
  Antisense strand to SEQ ID NO: 2040616
uucaucagacuuuaacauu

SEQ ID NO: 2040618 - RNA, 19 nt, Artificial Sequence
  Description of Artificial Sequence: Synthetic oligonucleotide
  Sense strand starting at position 3272 of SEQ ID NO: 1881387
guuaaagucugaugaauuu

SEQ ID NO: 2040619 - RNA, 19 nt, Artificial Sequence
  Description of Artificial Sequence: Synthetic oligonucleotide
  Antisense strand to SEQ ID NO: 2040618
aaauucaucagacuuuaac

SEQ ID NO: 2040620 - RNA, 19 nt, Artificial Sequence
  Description of Artificial Sequence: Synthetic oligonucleotide
  Sense strand starting at position 3293 of SEQ ID NO: 1881387
acauguauacccuggugaa

SEQ ID NO: 2040621 - RNA, 19 nt, Artificial Sequence
  Description of Artificial Sequence: Synthetic oligonucleotide
  Antisense strand to SEQ ID NO: 2040620
uucaccaggguauacaugu

SEQ ID NO: 2040622 - RNA, 19 nt, Artificial Sequence
  Description of Artificial Sequence: Synthetic oligonucleotide
  Sense strand starting at position 3294 of SEQ ID NO: 1881387
cauguauacccuggugaac

SEQ ID NO: 2040623 - RNA, 19 nt, Artificial Sequence
  Description of Artificial Sequence: Synthetic oligonucleotide
  Antisense strand to SEQ ID NO: 2040622
guucaccaggguauacaug

SEQ ID NO: 2040624 - RNA, 19 nt, Artificial Sequence
  Description of Artificial Sequence: Synthetic oligonucleotide
  Sense strand starting at position 263 of SEQ ID NO: 1881388
ucacuugacacgugaggau

SEQ ID NO: 2040625 - RNA, 19 nt, Artificial Sequence
  Description of Artificial Sequence: Synthetic oligonucleotide
  Antisense strand to SEQ ID NO: 2040624
auccucacgugucaaguga

SEQ ID NO: 2040626 - RNA, 19 nt, Artificial Sequence
  Description of Artificial Sequence: Synthetic oligonucleotide
  Sense strand starting at position 328 of SEQ ID NO: 1881388
cuaaccauaucaguaguuu

SEQ ID NO: 2040627 - RNA, 19 nt, Artificial Sequence
  Description of Artificial Sequence: Synthetic oligonucleotide
  Antisense strand to SEQ ID NO: 2040626
aaacuacugauaugguuag

SEQ ID NO: 2040628 - RNA, 19 nt, Artificial Sequence
  Description of Artificial Sequence: Synthetic oligonucleotide
  Sense strand starting at position 334 of SEQ ID NO: 1881388
auaucaguaguuuaagcau

SEQ ID NO: 2040629 - RNA, 19 nt, Artificial Sequence
  Description of Artificial Sequence: Synthetic oligonucleotide
  Antisense strand to SEQ ID NO: 2040628
augcuuaaacuacugauau

SEQ ID NO: 2040630 - RNA, 19 nt, Artificial Sequence
  Description of Artificial Sequence: Synthetic oligonucleotide
  Sense strand starting at position 398 of SEQ ID NO: 1881388
gaggguugcaaugauuaug

SEQ ID NO: 2040631 - RNA, 19 nt, Artificial Sequence
  Description of Artificial Sequence: Synthetic oligonucleotide
  Antisense strand to SEQ ID NO: 2040630
cauaaucauugcaacccuc

SEQ ID NO: 2040632 - RNA, 19 nt, Artificial Sequence
  Description of Artificial Sequence: Synthetic oligonucleotide
  Sense strand starting at position 450 of SEQ ID NO: 1881388
cucugucaccaguggaauc

SEQ ID NO: 2040633 - RNA, 19 nt, Artificial Sequence
  Description of Artificial Sequence: Synthetic oligonucleotide
  Antisense strand to SEQ ID NO: 2040632
gauuccacuggugacagag

SEQ ID NO: 2040634 - RNA, 19 nt, Artificial Sequence
  Description of Artificial Sequence: Synthetic oligonucleotide
  Sense strand starting at position 461 of SEQ ID NO: 1881388
guggaauccugucucuaag

SEQ ID NO: 2040635 - RNA, 19 nt, Artificial Sequence
  Description of Artificial Sequence: Synthetic oligonucleotide
  Antisense strand to SEQ ID NO: 2040634
cuuagagacaggauuccac

SEQ ID NO: 2040636 - RNA, 19 nt, Artificial Sequence
  Description of Artificial Sequence: Synthetic oligonucleotide
  Sense strand starting at position 727 of SEQ ID NO: 1881388
guaugugucccgcccucua

SEQ ID NO: 2040637 - RNA, 19 nt, Artificial Sequence
  Description of Artificial Sequence: Synthetic oligonucleotide
  Antisense strand to SEQ ID NO: 2040636
uagagggcgggacacauac

SEQ ID NO: 2040638 - RNA, 19 nt, Artificial Sequence
  Description of Artificial Sequence: Synthetic oligonucleotide
  Sense strand starting at position 765 of SEQ ID NO: 1881388
agacucuagauucgugaac

SEQ ID NO: 2040639 - RNA, 19 nt, Artificial Sequence
  Description of Artificial Sequence: Synthetic oligonucleotide
  Antisense strand to SEQ ID NO: 2040638
guucacgaaucuagagucu

SEQ ID NO: 2040640 - RNA, 19 nt, Artificial Sequence
  Description of Artificial Sequence: Synthetic oligonucleotide
  Sense strand starting at position 997 of SEQ ID NO: 1881388
ccuagaaaguuagucuaac

SEQ ID NO: 2040641 - RNA, 19 nt, Artificial Sequence
  Description of Artificial Sequence: Synthetic oligonucleotide
  Antisense strand to SEQ ID NO: 2040640
guuagacuaacuuucuagg

SEQ ID NO: 2040642 - RNA, 19 nt, Artificial Sequence
  Description of Artificial Sequence: Synthetic oligonucleotide
  Sense strand starting at position 998 of SEQ ID NO: 1881388
cuagaaaguuagucuaaca

SEQ ID NO: 2040643 - RNA, 19 nt, Artificial Sequence
  Description of Artificial Sequence: Synthetic oligonucleotide
  Antisense strand to SEQ ID NO: 2040642
uguuagacuaacuuucuag

SEQ ID NO: 2040644 - RNA, 19 nt, Artificial Sequence
  Description of Artificial Sequence: Synthetic oligonucleotide
  Sense strand starting at position 1058 of SEQ ID NO: 1881388
ucaggaucuggcuggguaa

SEQ ID NO: 2040645 - RNA, 19 nt, Artificial Sequence
  Description of Artificial Sequence: Synthetic oligonucleotide
  Antisense strand to SEQ ID NO: 2040644
uuacccagccagauccuga

SEQ ID NO: 2040646 - RNA, 19 nt, Artificial Sequence
  Description of Artificial Sequence: Synthetic oligonucleotide
  Sense strand starting at position 1059 of SEQ ID NO: 1881388
caggaucuggcuggguaaa

SEQ ID NO: 2040647 - RNA, 19 nt, Artificial Sequence
  Description of Artificial Sequence: Synthetic oligonucleotide
  Antisense strand to SEQ ID NO: 2040646
uuuacccagccagauccug

SEQ ID NO: 2040648 - RNA, 19 nt, Artificial Sequence
  Description of Artificial Sequence: Synthetic oligonucleotide
  Sense strand starting at position 2136 of SEQ ID NO: 1881388
guuugcuuucuccaccaga

SEQ ID NO: 2040649 - RNA, 19 nt, Artificial Sequence
  Description of Artificial Sequence: Synthetic oligonucleotide
  Antisense strand to SEQ ID NO: 2040648
ucugguggagaaagcaaac

SEQ ID NO: 2040650 - RNA, 19 nt, Artificial Sequence
  Description of Artificial Sequence: Synthetic oligonucleotide
  Sense strand starting at position 2178 of SEQ ID NO: 1881388
ggguaucacugagcugaag

SEQ ID NO: 2040651 - RNA, 19 nt, Artificial Sequence
  Description of Artificial Sequence: Synthetic oligonucleotide
  Antisense strand to SEQ ID NO: 2040650
cuucagcucagugauaccc

SEQ ID NO: 2040652 - RNA, 19 nt, Artificial Sequence
  Description of Artificial Sequence: Synthetic oligonucleotide
  Sense strand starting at position 2289 of SEQ ID NO: 1881388
cugugcaucgcggcuaaua

SEQ ID NO: 2040653 - RNA, 19 nt, Artificial Sequence
  Description of Artificial Sequence: Synthetic oligonucleotide
  Antisense strand to SEQ ID NO: 2040652
uauuagccgcgaugcacag

SEQ ID NO: 2040654 - RNA, 19 nt, Artificial Sequence
  Description of Artificial Sequence: Synthetic oligonucleotide
  Sense strand starting at position 2290 of SEQ ID NO: 1881388
ugugcaucgcggcuaauau

SEQ ID NO: 2040655 - RNA, 19 nt, Artificial Sequence
  Description of Artificial Sequence: Synthetic oligonucleotide
  Antisense strand to SEQ ID NO: 2040654
auauuagccgcgaugcaca

SEQ ID NO: 2040656 - RNA, 19 nt, Artificial Sequence
  Description of Artificial Sequence: Synthetic oligonucleotide
  Sense strand starting at position 2405 of SEQ ID NO: 1881388
gcugguaagucauucagga

SEQ ID NO: 2040657 - RNA, 19 nt, Artificial Sequence
  Description of Artificial Sequence: Synthetic oligonucleotide
  Antisense strand to SEQ ID NO: 2040656
uccugaaugacuuaccagc

SEQ ID NO: 2040658 - RNA, 19 nt, Artificial Sequence
  Description of Artificial Sequence: Synthetic oligonucleotide
  Sense strand starting at position 2440 of SEQ ID NO: 1881388
uccuguuuccuagauguuu

SEQ ID NO: 2040659 - RNA, 19 nt, Artificial Sequence
  Description of Artificial Sequence: Synthetic oligonucleotide
  Antisense strand to SEQ ID NO: 2040658
aaacaucuaggaaacagga

SEQ ID NO: 2040660 - RNA, 19 nt, Artificial Sequence
  Description of Artificial Sequence: Synthetic oligonucleotide
  Sense strand starting at position 2558 of SEQ ID NO: 1881388
gcgagauugguacaguaua

SEQ ID NO: 2040661 - RNA, 19 nt, Artificial Sequence
  Description of Artificial Sequence: Synthetic oligonucleotide
  Antisense strand to SEQ ID NO: 2040660
uauacuguaccaaucucgc

SEQ ID NO: 2040662 - RNA, 19 nt, Artificial Sequence
  Description of Artificial Sequence: Synthetic oligonucleotide
  Sense strand starting at position 2660 of SEQ ID NO: 1881388
ggaaacagauauucgcuuu

SEQ ID NO: 2040663 - RNA, 19 nt, Artificial Sequence
  Description of Artificial Sequence: Synthetic oligonucleotide
  Antisense strand to SEQ ID NO: 2040662
aaagcgaauaucuguuucc

SEQ ID NO: 2040664 - RNA, 19 nt, Artificial Sequence
  Description of Artificial Sequence: Synthetic oligonucleotide
  Sense strand starting at position 2763 of SEQ ID NO: 1881388
ugguucucugccuaaauca

SEQ ID NO: 2040665 - RNA, 19 nt, Artificial Sequence
  Description of Artificial Sequence: Synthetic oligonucleotide
  Antisense strand to SEQ ID NO: 2040664
ugauuuaggcagagaacca

SEQ ID NO: 2040666 - RNA, 19 nt, Artificial Sequence
  Description of Artificial Sequence: Synthetic oligonucleotide
  Sense strand starting at position 2841 of SEQ ID NO: 1881388
aaugaauugugagugcauu

SEQ ID NO: 2040667 - RNA, 19 nt, Artificial Sequence
  Description of Artificial Sequence: Synthetic oligonucleotide
  Antisense strand to SEQ ID NO: 2040666
aaugcacucacaauucauu

SEQ ID NO: 2040668 - RNA, 19 nt, Artificial Sequence
  Description of Artificial Sequence: Synthetic oligonucleotide
  Sense strand starting at position 2946 of SEQ ID NO: 1881388
ggugucugaagcuaauagu

SEQ ID NO: 2040669 - RNA, 19 nt, Artificial Sequence
  Description of Artificial Sequence: Synthetic oligonucleotide
  Antisense strand to SEQ ID NO: 2040668
acuauuagcuucagacacc

SEQ ID NO: 2040670 - RNA, 19 nt, Artificial Sequence
  Description of Artificial Sequence: Synthetic oligonucleotide
  Sense strand starting at position 2957 of SEQ ID NO: 1881388
cuaauaguggaauguguua

SEQ ID NO: 2040671 - RNA, 19 nt, Artificial Sequence
  Description of Artificial Sequence: Synthetic oligonucleotide
  Antisense strand to SEQ ID NO: 2040670
uaacacauuccacuauuag

SEQ ID NO: 2040672 - RNA, 19 nt, Artificial Sequence
  Description of Artificial Sequence: Synthetic oligonucleotide
  Sense strand starting at position 3094 of SEQ ID NO: 1881388
uuuaaagugcugggauuaa

SEQ ID NO: 2040673 - RNA, 19 nt, Artificial Sequence
  Description of Artificial Sequence: Synthetic oligonucleotide
  Antisense strand to SEQ ID NO: 2040672
uuaaucccagcacuuuaaa

SEQ ID NO: 2040674 - RNA, 19 nt, Artificial Sequence
  Description of Artificial Sequence: Synthetic oligonucleotide
  Sense strand starting at position 3138 of SEQ ID NO: 1881388
augguaccauacgugauaa

SEQ ID NO: 2040675 - RNA, 19 nt, Artificial Sequence
  Description of Artificial Sequence: Synthetic oligonucleotide
  Antisense strand to SEQ ID NO: 2040674
uuaucacguaugguaccau

SEQ ID NO: 2040676 - RNA, 19 nt, Artificial Sequence
  Description of Artificial Sequence: Synthetic oligonucleotide
  Sense strand starting at position 3139 of SEQ ID NO: 1881388
ugguaccauacgugauaaa

SEQ ID NO: 2040677 - RNA, 19 nt, Artificial Sequence
  Description of Artificial Sequence: Synthetic oligonucleotide
  Antisense strand to SEQ ID NO: 2040676
uuuaucacguaugguacca

SEQ ID NO: 2040678 - RNA, 19 nt, Artificial Sequence
  Description of Artificial Sequence: Synthetic oligonucleotide
  Sense strand starting at position 3140 of SEQ ID NO: 1881388
gguaccauacgugauaaau

SEQ ID NO: 2040679 - RNA, 19 nt, Artificial Sequence
  Description of Artificial Sequence: Synthetic oligonucleotide
  Antisense strand to SEQ ID NO: 2040678
auuuaucacguaugguacc

SEQ ID NO: 2040680 - RNA, 19 nt, Artificial Sequence
  Description of Artificial Sequence: Synthetic oligonucleotide
  Sense strand starting at position 3204 of SEQ ID NO: 1881388
cugauuauggcauggcaaa

SEQ ID NO: 2040681 - RNA, 19 nt, Artificial Sequence
  Description of Artificial Sequence: Synthetic oligonucleotide
  Antisense strand to SEQ ID NO: 2040680
uuugccaugccauaaucag

SEQ ID NO: 2040682 - RNA, 19 nt, Artificial Sequence
  Description of Artificial Sequence: Synthetic oligonucleotide
  Sense strand starting at position 3205 of SEQ ID NO: 1881388
ugauuauggcauggcaaau

SEQ ID NO: 2040683 - RNA, 19 nt, Artificial Sequence
  Description of Artificial Sequence: Synthetic oligonucleotide
  Antisense strand to SEQ ID NO: 2040682
auuugccaugccauaauca

SEQ ID NO: 2040684 - RNA, 19 nt, Artificial Sequence
  Description of Artificial Sequence: Synthetic oligonucleotide
  Sense strand starting at position 3385 of SEQ ID NO: 1881388
gcccgucugccucaaauuu

SEQ ID NO: 2040685 - RNA, 19 nt, Artificial Sequence
  Description of Artificial Sequence: Synthetic oligonucleotide
  Antisense strand to SEQ ID NO: 2040684
aaauuugaggcagacgggc

SEQ ID NO: 2040686 - RNA, 19 nt, Artificial Sequence
  Description of Artificial Sequence: Synthetic oligonucleotide
  Sense strand starting at position 3468 of SEQ ID NO: 1881388
cgaucuugaaccugaagua

SEQ ID NO: 2040687 - RNA, 19 nt, Artificial Sequence
  Description of Artificial Sequence: Synthetic oligonucleotide
  Antisense strand to SEQ ID NO: 2040686
uacuucagguucaagaucg

SEQ ID NO: 2040688 - RNA, 19 nt, Artificial Sequence
  Description of Artificial Sequence: Synthetic oligonucleotide
  Sense strand starting at position 3553 of SEQ ID NO: 1881388
ggaagcaguuaauauuuau

SEQ ID NO: 2040689 - RNA, 19 nt, Artificial Sequence
  Description of Artificial Sequence: Synthetic oligonucleotide
  Antisense strand to SEQ ID NO: 2040688
auaaauauuaacugcuucc

SEQ ID NO: 2040690 - RNA, 19 nt, Artificial Sequence
  Description of Artificial Sequence: Synthetic oligonucleotide
  Sense strand starting at position 3736 of SEQ ID NO: 1881388
guggaauaaacacguuuac

SEQ ID NO: 2040691 - RNA, 19 nt, Artificial Sequence
  Description of Artificial Sequence: Synthetic oligonucleotide
  Antisense strand to SEQ ID NO: 2040690
guaaacguguuuauuccac

SEQ ID NO: 2040692 - RNA, 19 nt, Artificial Sequence
  Description of Artificial Sequence: Synthetic oligonucleotide
  Sense strand starting at position 3863 of SEQ ID NO: 1881388
agguuuacauucuuugaga

SEQ ID NO: 2040693 - RNA, 19 nt, Artificial Sequence
  Description of Artificial Sequence: Synthetic oligonucleotide
  Antisense strand to SEQ ID NO: 2040692
ucucaaagaauguaaaccu

SEQ ID NO: 2040694 - RNA, 19 nt, Artificial Sequence
  Description of Artificial Sequence: Synthetic oligonucleotide
  Sense strand starting at position 3864 of SEQ ID NO: 1881388
gguuuacauucuuugagau

SEQ ID NO: 2040695 - RNA, 19 nt, Artificial Sequence
  Description of Artificial Sequence: Synthetic oligonucleotide
  Antisense strand to SEQ ID NO: 2040694
aucucaaagaauguaaacc

SEQ ID NO: 2040696 - RNA, 19 nt, Artificial Sequence
  Description of Artificial Sequence: Synthetic oligonucleotide
  Sense strand starting at position 3877 of SEQ ID NO: 1881388
ugagauaucuggucaaccu

SEQ ID NO: 2040697 - RNA, 19 nt, Artificial Sequence
  Description of Artificial Sequence: Synthetic oligonucleotide
  Antisense strand to SEQ ID NO: 2040696
agguugaccagauaucuca

SEQ ID NO: 2040698 - RNA, 19 nt, Artificial Sequence
  Description of Artificial Sequence: Synthetic oligonucleotide
  Sense strand starting at position 3905 of SEQ ID NO: 1881388
caguuaaugucauuggaaa

SEQ ID NO: 2040699 - RNA, 19 nt, Artificial Sequence
  Description of Artificial Sequence: Synthetic oligonucleotide
  Antisense strand to SEQ ID NO: 2040698
uuuccaaugacauuaacug

SEQ ID NO: 2040700 - RNA, 19 nt, Artificial Sequence
  Description of Artificial Sequence: Synthetic oligonucleotide
  Sense strand starting at position 3906 of SEQ ID NO: 1881388
aguuaaugucauuggaaau

SEQ ID NO: 2040701 - RNA, 19 nt, Artificial Sequence
  Description of Artificial Sequence: Synthetic oligonucleotide
  Antisense strand to SEQ ID NO: 2040700
auuuccaaugacauuaacu

SEQ ID NO: 2040702 - RNA, 19 nt, Artificial Sequence
  Description of Artificial Sequence: Synthetic oligonucleotide
  Sense strand starting at position 3957 of SEQ ID NO: 1881388
cccauaugagccugagcaa

SEQ ID NO: 2040703 - RNA, 19 nt, Artificial Sequence
  Description of Artificial Sequence: Synthetic oligonucleotide
  Antisense strand to SEQ ID NO: 2040702
uugcucaggcucauauggg

SEQ ID NO: 2040704 - RNA, 19 nt, Artificial Sequence
  Description of Artificial Sequence: Synthetic oligonucleotide
  Sense strand starting at position 60 of SEQ ID NO: 1881389
ugaacugaguccucaaaga

SEQ ID NO: 2040705 - RNA, 19 nt, Artificial Sequence
  Description of Artificial Sequence: Synthetic oligonucleotide
  Antisense strand to SEQ ID NO: 2040704
ucuuugaggacucaguuca

SEQ ID NO: 2040706 - RNA, 19 nt, Artificial Sequence
  Description of Artificial Sequence: Synthetic oligonucleotide
  Sense strand starting at position 86 of SEQ ID NO: 1881389
ggagauugcuacuuuaauc

SEQ ID NO: 2040707 - RNA, 19 nt, Artificial Sequence
  Description of Artificial Sequence: Synthetic oligonucleotide
  Antisense strand to SEQ ID NO: 2040706
gauuaaaguagcaaucucc

SEQ ID NO: 2040708 - RNA, 19 nt, Artificial Sequence
  Description of Artificial Sequence: Synthetic oligonucleotide
  Sense strand starting at position 124 of SEQ ID NO: 1881389
gcacuauuacaguagguuu

SEQ ID NO: 2040709 - RNA, 19 nt, Artificial Sequence
  Description of Artificial Sequence: Synthetic oligonucleotide
  Antisense strand to SEQ ID NO: 2040708
aaaccuacuguaauagugc

SEQ ID NO: 2040710 - RNA, 19 nt, Artificial Sequence
  Description of Artificial Sequence: Synthetic oligonucleotide
  Sense strand starting at position 260 of SEQ ID NO: 1881389
uuagaauugacuugguuga

SEQ ID NO: 2040711 - RNA, 19 nt, Artificial Sequence
  Description of Artificial Sequence: Synthetic oligonucleotide
  Antisense strand to SEQ ID NO: 2040710
ucaaccaagucaauucuaa

SEQ ID NO: 2040712 - RNA, 19 nt, Artificial Sequence
  Description of Artificial Sequence: Synthetic oligonucleotide
  Sense strand starting at position 261 of SEQ ID NO: 1881389
uagaauugacuugguugaa

SEQ ID NO: 2040713 - RNA, 19 nt, Artificial Sequence
  Description of Artificial Sequence: Synthetic oligonucleotide
  Antisense strand to SEQ ID NO: 2040712
uucaaccaagucaauucua

SEQ ID NO: 2040714 - RNA, 19 nt, Artificial Sequence
  Description of Artificial Sequence: Synthetic oligonucleotide
  Sense strand starting at position 382 of SEQ ID NO: 1881389
ggaguauauggagaguugu

SEQ ID NO: 2040715 - RNA, 19 nt, Artificial Sequence
  Description of Artificial Sequence: Synthetic oligonucleotide
  Antisense strand to SEQ ID NO: 2040714
acaacucuccauauacucc

SEQ ID NO: 2040716 - RNA, 19 nt, Artificial Sequence
  Description of Artificial Sequence: Synthetic oligonucleotide
  Sense strand starting at position 488 of SEQ ID NO: 1881389
uuggcucuccgagauagga

SEQ ID NO: 2040717 - RNA, 19 nt, Artificial Sequence
  Description of Artificial Sequence: Synthetic oligonucleotide
  Antisense strand to SEQ ID NO: 2040716
uccuaucucggagagccaa

SEQ ID NO: 2040718 - RNA, 19 nt, Artificial Sequence
  Description of Artificial Sequence: Synthetic oligonucleotide
  Sense strand starting at position 490 of SEQ ID NO: 1881389
ggcucuccgagauaggaau

SEQ ID NO: 2040719 - RNA, 19 nt, Artificial Sequence
  Description of Artificial Sequence: Synthetic oligonucleotide
  Antisense strand to SEQ ID NO: 2040718
auuccuaucucggagagcc

SEQ ID NO: 2040720 - RNA, 19 nt, Artificial Sequence
  Description of Artificial Sequence: Synthetic oligonucleotide
  Sense strand starting at position 519 of SEQ ID NO: 1881389
guaacaccugccuaaguua

SEQ ID NO: 2040721 - RNA, 19 nt, Artificial Sequence
  Description of Artificial Sequence: Synthetic oligonucleotide
  Antisense strand to SEQ ID NO: 2040720
uaacuuaggcagguguuac

SEQ ID NO: 2040722 - RNA, 19 nt, Artificial Sequence
  Description of Artificial Sequence: Synthetic oligonucleotide
  Sense strand starting at position 764 of SEQ ID NO: 1881389
uaaauauuggagggcuacu

SEQ ID NO: 2040723 - RNA, 19 nt, Artificial Sequence
  Description of Artificial Sequence: Synthetic oligonucleotide
  Antisense strand to SEQ ID NO: 2040722
aguagcccuccaauauuua

SEQ ID NO: 2040724 - RNA, 19 nt, Artificial Sequence
  Description of Artificial Sequence: Synthetic oligonucleotide
  Sense strand starting at position 774 of SEQ ID NO: 1881389
agggcuacucucuacaacu

SEQ ID NO: 2040725 - RNA, 19 nt, Artificial Sequence
  Description of Artificial Sequence: Synthetic oligonucleotide
  Antisense strand to SEQ ID NO: 2040724
aguuguagagaguagcccu

SEQ ID NO: 2040726 - RNA, 19 nt, Artificial Sequence
  Description of Artificial Sequence: Synthetic oligonucleotide
  Sense strand starting at position 853 of SEQ ID NO: 1881389
uagaauugagucuggcaaa

SEQ ID NO: 2040727 - RNA, 19 nt, Artificial Sequence
  Description of Artificial Sequence: Synthetic oligonucleotide
  Antisense strand to SEQ ID NO: 2040726
uuugccagacucaauucua

SEQ ID NO: 2040728 - RNA, 19 nt, Artificial Sequence
  Description of Artificial Sequence: Synthetic oligonucleotide
  Sense strand starting at position 1258 of SEQ ID NO: 1881389
uuggauuaucucugaaggu

SEQ ID NO: 2040729 - RNA, 19 nt, Artificial Sequence
  Description of Artificial Sequence: Synthetic oligonucleotide
  Antisense strand to SEQ ID NO: 2040728
accuucagagauaauccaa

SEQ ID NO: 2040730 - RNA, 19 nt, Artificial Sequence
  Description of Artificial Sequence: Synthetic oligonucleotide
  Sense strand starting at position 1498 of SEQ ID NO: 1881389
ucauuugugcacugccaga

SEQ ID NO: 2040731 - RNA, 19 nt, Artificial Sequence
  Description of Artificial Sequence: Synthetic oligonucleotide
  Antisense strand to SEQ ID NO: 2040730
ucuggcagugcacaaauga

SEQ ID NO: 2040732 - RNA, 19 nt, Artificial Sequence
  Description of Artificial Sequence: Synthetic oligonucleotide
  Sense strand starting at position 1513 of SEQ ID NO: 1881389
cagagaaagcuuggauggu

SEQ ID NO: 2040733 - RNA, 19 nt, Artificial Sequence
  Description of Artificial Sequence: Synthetic oligonucleotide
  Antisense strand to SEQ ID NO: 2040732
accauccaagcuuucucug

SEQ ID NO: 2040734 - RNA, 19 nt, Artificial Sequence
  Description of Artificial Sequence: Synthetic oligonucleotide
  Sense strand starting at position 1632 of SEQ ID NO: 1881389
cauacuugguuuccgagaa

SEQ ID NO: 2040735 - RNA, 19 nt, Artificial Sequence
  Description of Artificial Sequence: Synthetic oligonucleotide
  Antisense strand to SEQ ID NO: 2040734
uucucggaaaccaaguaug

SEQ ID NO: 2040736 - RNA, 19 nt, Artificial Sequence
  Description of Artificial Sequence: Synthetic oligonucleotide
  Sense strand starting at position 1636 of SEQ ID NO: 1881389
cuugguuuccgagaauaac

SEQ ID NO: 2040737 - RNA, 19 nt, Artificial Sequence
  Description of Artificial Sequence: Synthetic oligonucleotide
  Antisense strand to SEQ ID NO: 2040736
guuauucucggaaaccaag

SEQ ID NO: 2040738 - RNA, 19 nt, Artificial Sequence
  Description of Artificial Sequence: Synthetic oligonucleotide
  Sense strand starting at position 1647 of SEQ ID NO: 1881389
agaauaacgcugcaaauga

SEQ ID NO: 2040739 - RNA, 19 nt, Artificial Sequence
  Description of Artificial Sequence: Synthetic oligonucleotide
  Antisense strand to SEQ ID NO: 2040738
ucauuugcagcguuauucu

SEQ ID NO: 2040740 - RNA, 19 nt, Artificial Sequence
  Description of Artificial Sequence: Synthetic oligonucleotide
  Sense strand starting at position 1667 of SEQ ID NO: 1881389
gacagcuaccacugggaau

SEQ ID NO: 2040741 - RNA, 19 nt, Artificial Sequence
  Description of Artificial Sequence: Synthetic oligonucleotide
  Antisense strand to SEQ ID NO: 2040740
auucccagugguagcuguc

SEQ ID NO: 2040742 - RNA, 19 nt, Artificial Sequence
  Description of Artificial Sequence: Synthetic oligonucleotide
  Sense strand starting at position 1750 of SEQ ID NO: 1881389
gucucagagaagugacuuu

SEQ ID NO: 2040743 - RNA, 19 nt, Artificial Sequence
  Description of Artificial Sequence: Synthetic oligonucleotide
  Antisense strand to SEQ ID NO: 2040742
aaagucacuucucugagac

SEQ ID NO: 2040744 - RNA, 19 nt, Artificial Sequence
  Description of Artificial Sequence: Synthetic oligonucleotide
  Sense strand starting at position 1906 of SEQ ID NO: 1881389
aggagaacucugugcugaa

SEQ ID NO: 2040745 - RNA, 19 nt, Artificial Sequence
  Description of Artificial Sequence: Synthetic oligonucleotide
  Antisense strand to SEQ ID NO: 2040744
uucagcacagaguucuccu

SEQ ID NO: 2040746 - RNA, 19 nt, Artificial Sequence
  Description of Artificial Sequence: Synthetic oligonucleotide
  Sense strand starting at position 1907 of SEQ ID NO: 1881389
ggagaacucugugcugaau

SEQ ID NO: 2040747 - RNA, 19 nt, Artificial Sequence
  Description of Artificial Sequence: Synthetic oligonucleotide
  Antisense strand to SEQ ID NO: 2040746
auucagcacagaguucucc

SEQ ID NO: 2040748 - RNA, 19 nt, Artificial Sequence
  Description of Artificial Sequence: Synthetic oligonucleotide
  Sense strand starting at position 1996 of SEQ ID NO: 1881389
gcaaaugaauaguuugacu

SEQ ID NO: 2040749 - RNA, 19 nt, Artificial Sequence
  Description of Artificial Sequence: Synthetic oligonucleotide
  Antisense strand to SEQ ID NO: 2040748
agucaaacuauucauuugc

SEQ ID NO: 2040750 - RNA, 19 nt, Artificial Sequence
  Description of Artificial Sequence: Synthetic oligonucleotide
  Sense strand starting at position 2001 of SEQ ID NO: 1881389
ugaauaguuugacucugag

SEQ ID NO: 2040751 - RNA, 19 nt, Artificial Sequence
  Description of Artificial Sequence: Synthetic oligonucleotide
  Antisense strand to SEQ ID NO: 2040750
cucagagucaaacuauuca

SEQ ID NO: 2040752 - RNA, 19 nt, Artificial Sequence
  Description of Artificial Sequence: Synthetic oligonucleotide
  Sense strand starting at position 2004 of SEQ ID NO: 1881389
auaguuugacucugagaau

SEQ ID NO: 2040753 - RNA, 19 nt, Artificial Sequence
  Description of Artificial Sequence: Synthetic oligonucleotide
  Antisense strand to SEQ ID NO: 2040752
auucucagagucaaacuau

SEQ ID NO: 2040754 - RNA, 19 nt, Artificial Sequence
  Description of Artificial Sequence: Synthetic oligonucleotide
  Sense strand starting at position 2163 of SEQ ID NO: 1881389
gguugaaagaaucgcuuaa

SEQ ID NO: 2040755 - RNA, 19 nt, Artificial Sequence
  Description of Artificial Sequence: Synthetic oligonucleotide
  Antisense strand to SEQ ID NO: 2040754
uuaagcgauucuuucaacc

SEQ ID NO: 2040756 - RNA, 19 nt, Artificial Sequence
  Description of Artificial Sequence: Synthetic oligonucleotide
  Sense strand starting at position 2165 of SEQ ID NO: 1881389
uugaaagaaucgcuuaaag

SEQ ID NO: 2040757 - RNA, 19 nt, Artificial Sequence
  Description of Artificial Sequence: Synthetic oligonucleotide
  Antisense strand to SEQ ID NO: 2040756
cuuuaagcgauucuuucaa

SEQ ID NO: 2040758 - RNA, 19 nt, Artificial Sequence
  Description of Artificial Sequence: Synthetic oligonucleotide
  Sense strand starting at position 2554 of SEQ ID NO: 1881389
acgugacagaacugaauau

SEQ ID NO: 2040759 - RNA, 19 nt, Artificial Sequence
  Description of Artificial Sequence: Synthetic oligonucleotide
  Antisense strand to SEQ ID NO: 2040758
auauucaguucugucacgu

SEQ ID NO: 2040760 - RNA, 19 nt, Artificial Sequence
  Description of Artificial Sequence: Synthetic oligonucleotide
  Sense strand starting at position 2577 of SEQ ID NO: 1881389
uuaagacuguuucugacuu

SEQ ID NO: 2040761 - RNA, 19 nt, Artificial Sequence
  Description of Artificial Sequence: Synthetic oligonucleotide
  Antisense strand to SEQ ID NO: 2040760
aagucagaaacagucuuaa

SEQ ID NO: 2040762 - RNA, 19 nt, Artificial Sequence
  Description of Artificial Sequence: Synthetic oligonucleotide
  Sense strand starting at position 2581 of SEQ ID NO: 1881389
gacuguuucugacuugaaa

SEQ ID NO: 2040763 - RNA, 19 nt, Artificial Sequence
  Description of Artificial Sequence: Synthetic oligonucleotide
  Antisense strand to SEQ ID NO: 2040762
uuucaagucagaaacaguc

SEQ ID NO: 2040764 - RNA, 19 nt, Artificial Sequence
  Description of Artificial Sequence: Synthetic oligonucleotide
  Sense strand starting at position 2708 of SEQ ID NO: 1881389
uaguguggcauguauaaag

SEQ ID NO: 2040765 - RNA, 19 nt, Artificial Sequence
  Description of Artificial Sequence: Synthetic oligonucleotide
  Antisense strand to SEQ ID NO: 2040764
cuuuauacaugccacacua

SEQ ID NO: 2040766 - RNA, 19 nt, Artificial Sequence
  Description of Artificial Sequence: Synthetic oligonucleotide
  Sense strand starting at position 3174 of SEQ ID NO: 1881389
guaaauacguuucuacaaa

SEQ ID NO: 2040767 - RNA, 19 nt, Artificial Sequence
  Description of Artificial Sequence: Synthetic oligonucleotide
  Antisense strand to SEQ ID NO: 2040766
uuuguagaaacguauuuac

SEQ ID NO: 2040768 - RNA, 19 nt, Artificial Sequence
  Description of Artificial Sequence: Synthetic oligonucleotide
  Sense strand starting at position 3526 of SEQ ID NO: 1881389
acuguauucccauaguaau

SEQ ID NO: 2040769 - RNA, 19 nt, Artificial Sequence
  Description of Artificial Sequence: Synthetic oligonucleotide
  Antisense strand to SEQ ID NO: 2040768
auuacuaugggaauacagu

SEQ ID NO: 2040770 - RNA, 19 nt, Artificial Sequence
  Description of Artificial Sequence: Synthetic oligonucleotide
  Sense strand starting at position 3752 of SEQ ID NO: 1881389
ugauauuuccagugcugcu

SEQ ID NO: 2040771 - RNA, 19 nt, Artificial Sequence
  Description of Artificial Sequence: Synthetic oligonucleotide
  Antisense strand to SEQ ID NO: 2040770
agcagcacuggaaauauca

SEQ ID NO: 2040772 - RNA, 19 nt, Artificial Sequence
  Description of Artificial Sequence: Synthetic oligonucleotide
  Sense strand starting at position 3838 of SEQ ID NO: 1881389
ugaccaauggguugugaaa

SEQ ID NO: 2040773 - RNA, 19 nt, Artificial Sequence
  Description of Artificial Sequence: Synthetic oligonucleotide
  Antisense strand to SEQ ID NO: 2040772
uuucacaacccauugguca

SEQ ID NO: 2040774 - RNA, 19 nt, Artificial Sequence
  Description of Artificial Sequence: Synthetic oligonucleotide
  Sense strand starting at position 3858 of SEQ ID NO: 1881389
aaaggaagugaguguguaa

SEQ ID NO: 2040775 - RNA, 19 nt, Artificial Sequence
  Description of Artificial Sequence: Synthetic oligonucleotide
  Antisense strand to SEQ ID NO: 2040774
uuacacacucacuuccuuu

SEQ ID NO: 2040776 - RNA, 19 nt, Artificial Sequence
  Description of Artificial Sequence: Synthetic oligonucleotide
  Sense strand starting at position 3870 of SEQ ID NO: 1881389
uguguaaccuaagucaaag

SEQ ID NO: 2040777 - RNA, 19 nt, Artificial Sequence
  Description of Artificial Sequence: Synthetic oligonucleotide
  Antisense strand to SEQ ID NO: 2040776
cuuugacuuagguuacaca

SEQ ID NO: 2040778 - RNA, 19 nt, Artificial Sequence
  Description of Artificial Sequence: Synthetic oligonucleotide
  Sense strand starting at position 3887 of SEQ ID NO: 1881389
agcauuuaauugcuaaugu

SEQ ID NO: 2040779 - RNA, 19 nt, Artificial Sequence
  Description of Artificial Sequence: Synthetic oligonucleotide
  Antisense strand to SEQ ID NO: 2040778
acauuagcaauuaaaugcu

SEQ ID NO: 2040780 - RNA, 19 nt, Artificial Sequence
  Description of Artificial Sequence: Synthetic oligonucleotide
  Sense strand starting at position 3973 of SEQ ID NO: 1881389
uggaucaaaucugcuuuga

SEQ ID NO: 2040781 - RNA, 19 nt, Artificial Sequence
  Description of Artificial Sequence: Synthetic oligonucleotide
  Antisense strand to SEQ ID NO: 2040780
ucaaagcagauuugaucca

SEQ ID NO: 2040782 - RNA, 19 nt, Artificial Sequence
  Description of Artificial Sequence: Synthetic oligonucleotide
  Sense strand starting at position 3981 of SEQ ID NO: 1881389
aucugcuuugauuggauaa

SEQ ID NO: 2040783 - RNA, 19 nt, Artificial Sequence
  Description of Artificial Sequence: Synthetic oligonucleotide
  Antisense strand to SEQ ID NO: 2040782
uuauccaaucaaagcagau

SEQ ID NO: 2040784 - RNA, 19 nt, Artificial Sequence
  Description of Artificial Sequence: Synthetic oligonucleotide
  Sense strand starting at position 1532 of SEQ ID NO: 1881390
uugucugauucucccauga

SEQ ID NO: 2040785 - RNA, 19 nt, Artificial Sequence
  Description of Artificial Sequence: Synthetic oligonucleotide
  Antisense strand to SEQ ID NO: 2040784
ucaugggagaaucagacaa

SEQ ID NO: 2040786 - RNA, 19 nt, Artificial Sequence
  Description of Artificial Sequence: Synthetic oligonucleotide
  Sense strand starting at position 1536 of SEQ ID NO: 1881390
cugauucucccaugaaugu

SEQ ID NO: 2040787 - RNA, 19 nt, Artificial Sequence
  Description of Artificial Sequence: Synthetic oligonucleotide
  Antisense strand to SEQ ID NO: 2040786
acauucaugggagaaucag

SEQ ID NO: 2040788 - RNA, 19 nt, Artificial Sequence
  Description of Artificial Sequence: Synthetic oligonucleotide
  Sense strand starting at position 1537 of SEQ ID NO: 1881390
ugauucucccaugaauguu

SEQ ID NO: 2040789 - RNA, 19 nt, Artificial Sequence
  Description of Artificial Sequence: Synthetic oligonucleotide
  Antisense strand to SEQ ID NO: 2040788
aacauucaugggagaauca

SEQ ID NO: 2040790 - RNA, 19 nt, Artificial Sequence
  Description of Artificial Sequence: Synthetic oligonucleotide
  Sense strand starting at position 1623 of SEQ ID NO: 1881390
gcuccuugaacacggaaga

SEQ ID NO: 2040791 - RNA, 19 nt, Artificial Sequence
  Description of Artificial Sequence: Synthetic oligonucleotide
  Antisense strand to SEQ ID NO: 2040790
ucuuccguguucaaggagc

SEQ ID NO: 2040792 - RNA, 19 nt, Artificial Sequence
  Description of Artificial Sequence: Synthetic oligonucleotide
  Sense strand starting at position 1802 of SEQ ID NO: 1881390
ggccuugcgacucaaauag

SEQ ID NO: 2040793 - RNA, 19 nt, Artificial Sequence
  Description of Artificial Sequence: Synthetic oligonucleotide
  Antisense strand to SEQ ID NO: 2040792
cuauuugagucgcaaggcc

SEQ ID NO: 2040794 - RNA, 19 nt, Artificial Sequence
  Description of Artificial Sequence: Synthetic oligonucleotide
  Sense strand starting at position 1821 of SEQ ID NO: 1881390
ggagaacaaacgugugauc

SEQ ID NO: 2040795 - RNA, 19 nt, Artificial Sequence
  Description of Artificial Sequence: Synthetic oligonucleotide
  Antisense strand to SEQ ID NO: 2040794
gaucacacguuuguucucc

SEQ ID NO: 2040796 - RNA, 19 nt, Artificial Sequence
  Description of Artificial Sequence: Synthetic oligonucleotide
  Sense strand starting at position 1823 of SEQ ID NO: 1881390
agaacaaacgugugaucca

SEQ ID NO: 2040797 - RNA, 19 nt, Artificial Sequence
  Description of Artificial Sequence: Synthetic oligonucleotide
  Antisense strand to SEQ ID NO: 2040796
uggaucacacguuuguucu

SEQ ID NO: 2040798 - RNA, 19 nt, Artificial Sequence
  Description of Artificial Sequence: Synthetic oligonucleotide
  Sense strand starting at position 1851 of SEQ ID NO: 1881390
gcagaaauccgacgaaacc

SEQ ID NO: 2040799 - RNA, 19 nt, Artificial Sequence
  Description of Artificial Sequence: Synthetic oligonucleotide
  Antisense strand to SEQ ID NO: 2040798
gguuucgucggauuucugc

SEQ ID NO: 2040800 - RNA, 19 nt, Artificial Sequence
  Description of Artificial Sequence: Synthetic oligonucleotide
  Sense strand starting at position 2610 of SEQ ID NO: 1881390
cggcucauuccgcugucau

SEQ ID NO: 2040801 - RNA, 19 nt, Artificial Sequence
  Description of Artificial Sequence: Synthetic oligonucleotide
  Antisense strand to SEQ ID NO: 2040800
augacagcggaaugagccg

SEQ ID NO: 2040802 - RNA, 19 nt, Artificial Sequence
  Description of Artificial Sequence: Synthetic oligonucleotide
  Sense strand starting at position 2743 of SEQ ID NO: 1881390
agccgguucccgucggaau

SEQ ID NO: 2040803 - RNA, 19 nt, Artificial Sequence
  Description of Artificial Sequence: Synthetic oligonucleotide
  Antisense strand to SEQ ID NO: 2040802
auuccgacgggaaccggcu

SEQ ID NO: 2040804 - RNA, 19 nt, Artificial Sequence
  Description of Artificial Sequence: Synthetic oligonucleotide
  Sense strand starting at position 2788 of SEQ ID NO: 1881390
cauggcgucccagaaguua

SEQ ID NO: 2040805 - RNA, 19 nt, Artificial Sequence
  Description of Artificial Sequence: Synthetic oligonucleotide
  Antisense strand to SEQ ID NO: 2040804
uaacuucugggacgccaug

SEQ ID NO: 2040806 - RNA, 19 nt, Artificial Sequence
  Description of Artificial Sequence: Synthetic oligonucleotide
  Sense strand starting at position 3012 of SEQ ID NO: 1881390
gcgaguugcaccuucccua

SEQ ID NO: 2040807 - RNA, 19 nt, Artificial Sequence
  Description of Artificial Sequence: Synthetic oligonucleotide
  Antisense strand to SEQ ID NO: 2040806
uagggaaggugcaacucgc

SEQ ID NO: 2040808 - RNA, 19 nt, Artificial Sequence
  Description of Artificial Sequence: Synthetic oligonucleotide
  Sense strand starting at position 3035 of SEQ ID NO: 1881390
gccagagauucguuuauag

SEQ ID NO: 2040809 - RNA, 19 nt, Artificial Sequence
  Description of Artificial Sequence: Synthetic oligonucleotide
  Antisense strand to SEQ ID NO: 2040808
cuauaaacgaaucucuggc

SEQ ID NO: 2040810 - RNA, 19 nt, Artificial Sequence
  Description of Artificial Sequence: Synthetic oligonucleotide
  Sense strand starting at position 3037 of SEQ ID NO: 1881390
cagagauucguuuauagcu

SEQ ID NO: 2040811 - RNA, 19 nt, Artificial Sequence
  Description of Artificial Sequence: Synthetic oligonucleotide
  Antisense strand to SEQ ID NO: 2040810
agcuauaaacgaaucucug

SEQ ID NO: 2040812 - RNA, 19 nt, Artificial Sequence
  Description of Artificial Sequence: Synthetic oligonucleotide
  Sense strand starting at position 3043 of SEQ ID NO: 1881390
uucguuuauagcuugcgaa

SEQ ID NO: 2040813 - RNA, 19 nt, Artificial Sequence
  Description of Artificial Sequence: Synthetic oligonucleotide
  Antisense strand to SEQ ID NO: 2040812
uucgcaagcuauaaacgaa

SEQ ID NO: 2040814 - RNA, 19 nt, Artificial Sequence
  Description of Artificial Sequence: Synthetic oligonucleotide
  Sense strand starting at position 3045 of SEQ ID NO: 1881390
cguuuauagcuugcgaauc

SEQ ID NO: 2040815 - RNA, 19 nt, Artificial Sequence
  Description of Artificial Sequence: Synthetic oligonucleotide
  Antisense strand to SEQ ID NO: 2040814
gauucgcaagcuauaaacg

SEQ ID NO: 2040816 - RNA, 19 nt, Artificial Sequence
  Description of Artificial Sequence: Synthetic oligonucleotide
  Sense strand starting at position 3091 of SEQ ID NO: 1881390
uaucauuugugguugguuu

SEQ ID NO: 2040817 - RNA, 19 nt, Artificial Sequence
  Description of Artificial Sequence: Synthetic oligonucleotide
  Antisense strand to SEQ ID NO: 2040816
aaaccaaccacaaaugaua

SEQ ID NO: 2040818 - RNA, 19 nt, Artificial Sequence
  Description of Artificial Sequence: Synthetic oligonucleotide
  Sense strand starting at position 3123 of SEQ ID NO: 1881390
acaacauucuuggugagga

SEQ ID NO: 2040819 - RNA, 19 nt, Artificial Sequence
  Description of Artificial Sequence: Synthetic oligonucleotide
  Antisense strand to SEQ ID NO: 2040818
uccucaccaagaauguugu

SEQ ID NO: 2040820 - RNA, 19 nt, Artificial Sequence
  Description of Artificial Sequence: Synthetic oligonucleotide
  Sense strand starting at position 3152 of SEQ ID NO: 1881390
gaaucugccacggagugaa

SEQ ID NO: 2040821 - RNA, 19 nt, Artificial Sequence
  Description of Artificial Sequence: Synthetic oligonucleotide
  Antisense strand to SEQ ID NO: 2040820
uucacuccguggcagauuc

SEQ ID NO: 2040822 - RNA, 19 nt, Artificial Sequence
  Description of Artificial Sequence: Synthetic oligonucleotide
  Sense strand starting at position 3270 of SEQ ID NO: 1881390
guaccuguaccauaagcau

SEQ ID NO: 2040823 - RNA, 19 nt, Artificial Sequence
  Description of Artificial Sequence: Synthetic oligonucleotide
  Antisense strand to SEQ ID NO: 2040822
augcuuaugguacagguac

SEQ ID NO: 2040824 - RNA, 19 nt, Artificial Sequence
  Description of Artificial Sequence: Synthetic oligonucleotide
  Sense strand starting at position 3279 of SEQ ID NO: 1881390
ccauaagcaucucuacgaa

SEQ ID NO: 2040825 - RNA, 19 nt, Artificial Sequence
  Description of Artificial Sequence: Synthetic oligonucleotide
  Antisense strand to SEQ ID NO: 2040824
uucguagagaugcuuaugg

SEQ ID NO: 2040826 - RNA, 19 nt, Artificial Sequence
  Description of Artificial Sequence: Synthetic oligonucleotide
  Sense strand starting at position 3289 of SEQ ID NO: 1881390
cucuacgaaaggugugaau

SEQ ID NO: 2040827 - RNA, 19 nt, Artificial Sequence
  Description of Artificial Sequence: Synthetic oligonucleotide
  Antisense strand to SEQ ID NO: 2040826
auucacaccuuucguagag

SEQ ID NO: 2040828 - RNA, 19 nt, Artificial Sequence
  Description of Artificial Sequence: Synthetic oligonucleotide
  Sense strand starting at position 3291 of SEQ ID NO: 1881390
cuacgaaaggugugaauuc

SEQ ID NO: 2040829 - RNA, 19 nt, Artificial Sequence
  Description of Artificial Sequence: Synthetic oligonucleotide
  Antisense strand to SEQ ID NO: 2040828
gaauucacaccuuucguag

SEQ ID NO: 2040830 - RNA, 19 nt, Artificial Sequence
  Description of Artificial Sequence: Synthetic oligonucleotide
  Sense strand starting at position 3298 of SEQ ID NO: 1881390
aggugugaauuccuaaauu

SEQ ID NO: 2040831 - RNA, 19 nt, Artificial Sequence
  Description of Artificial Sequence: Synthetic oligonucleotide
  Antisense strand to SEQ ID NO: 2040830
aauuuaggaauucacaccu

SEQ ID NO: 2040832 - RNA, 19 nt, Artificial Sequence
  Description of Artificial Sequence: Synthetic oligonucleotide
  Sense strand starting at position 3474 of SEQ ID NO: 1881390
acuagugucaugugacaaa

SEQ ID NO: 2040833 - RNA, 19 nt, Artificial Sequence
  Description of Artificial Sequence: Synthetic oligonucleotide
  Antisense strand to SEQ ID NO: 2040832
uuugucacaugacacuagu

SEQ ID NO: 2040834 - RNA, 19 nt, Artificial Sequence
  Description of Artificial Sequence: Synthetic oligonucleotide
  Sense strand starting at position 3530 of SEQ ID NO: 1881390
guccucuaccaacagaguu

SEQ ID NO: 2040835 - RNA, 19 nt, Artificial Sequence
  Description of Artificial Sequence: Synthetic oligonucleotide
  Antisense strand to SEQ ID NO: 2040834
aacucuguugguagaggac

SEQ ID NO: 2040836 - RNA, 19 nt, Artificial Sequence
  Description of Artificial Sequence: Synthetic oligonucleotide
  Sense strand starting at position 3538 of SEQ ID NO: 1881390
ccaacagaguuggcuugua

SEQ ID NO: 2040837 - RNA, 19 nt, Artificial Sequence
  Description of Artificial Sequence: Synthetic oligonucleotide
  Antisense strand to SEQ ID NO: 2040836
uacaagccaacucuguugg

SEQ ID NO: 2040838 - RNA, 19 nt, Artificial Sequence
  Description of Artificial Sequence: Synthetic oligonucleotide
  Sense strand starting at position 3579 of SEQ ID NO: 1881390
cuggcuaguguagaaagau

SEQ ID NO: 2040839 - RNA, 19 nt, Artificial Sequence
  Description of Artificial Sequence: Synthetic oligonucleotide
  Antisense strand to SEQ ID NO: 2040838
aucuuucuacacuagccag

SEQ ID NO: 2040840 - RNA, 19 nt, Artificial Sequence
  Description of Artificial Sequence: Synthetic oligonucleotide
  Sense strand starting at position 3657 of SEQ ID NO: 1881390
gcuuauagauugcugauca

SEQ ID NO: 2040841 - RNA, 19 nt, Artificial Sequence
  Description of Artificial Sequence: Synthetic oligonucleotide
  Antisense strand to SEQ ID NO: 2040840
ugaucagcaaucuauaagc

SEQ ID NO: 2040842 - RNA, 19 nt, Artificial Sequence
  Description of Artificial Sequence: Synthetic oligonucleotide
  Sense strand starting at position 3665 of SEQ ID NO: 1881390
auugcugaucagcagcaua

SEQ ID NO: 2040843 - RNA, 19 nt, Artificial Sequence
  Description of Artificial Sequence: Synthetic oligonucleotide
  Antisense strand to SEQ ID NO: 2040842
uaugcugcugaucagcaau

SEQ ID NO: 2040844 - RNA, 19 nt, Artificial Sequence
  Description of Artificial Sequence: Synthetic oligonucleotide
  Sense strand starting at position 3713 of SEQ ID NO: 1881390
gcaugugauguagaacugu

SEQ ID NO: 2040845 - RNA, 19 nt, Artificial Sequence
  Description of Artificial Sequence: Synthetic oligonucleotide
  Antisense strand to SEQ ID NO: 2040844
acaguucuacaucacaugc

SEQ ID NO: 2040846 - RNA, 19 nt, Artificial Sequence
  Description of Artificial Sequence: Synthetic oligonucleotide
  Sense strand starting at position 3774 of SEQ ID NO: 1881390
cuguguacuguguauaaga

SEQ ID NO: 2040847 - RNA, 19 nt, Artificial Sequence
  Description of Artificial Sequence: Synthetic oligonucleotide
  Antisense strand to SEQ ID NO: 2040846
ucuuauacacaguacacag

SEQ ID NO: 2040848 - RNA, 19 nt, Artificial Sequence
  Description of Artificial Sequence: Synthetic oligonucleotide
  Sense strand starting at position 3776 of SEQ ID NO: 1881390
guguacuguguauaagaau

SEQ ID NO: 2040849 - RNA, 19 nt, Artificial Sequence
  Description of Artificial Sequence: Synthetic oligonucleotide
  Antisense strand to SEQ ID NO: 2040848
auucuuauacacaguacac

SEQ ID NO: 2040850 - RNA, 19 nt, Artificial Sequence
  Description of Artificial Sequence: Synthetic oligonucleotide
  Sense strand starting at position 3782 of SEQ ID NO: 1881390
uguguauaagaaugagauu

SEQ ID NO: 2040851 - RNA, 19 nt, Artificial Sequence
  Description of Artificial Sequence: Synthetic oligonucleotide
  Antisense strand to SEQ ID NO: 2040850
aaucucauucuuauacaca

SEQ ID NO: 2040852 - RNA, 19 nt, Artificial Sequence
  Description of Artificial Sequence: Synthetic oligonucleotide
  Sense strand starting at position 3785 of SEQ ID NO: 1881390
guauaagaaugagauuucu

SEQ ID NO: 2040853 - RNA, 19 nt, Artificial Sequence
  Description of Artificial Sequence: Synthetic oligonucleotide
  Antisense strand to SEQ ID NO: 2040852
agaaaucucauucuuauac

SEQ ID NO: 2040854 - RNA, 19 nt, Artificial Sequence
  Description of Artificial Sequence: Synthetic oligonucleotide
  Sense strand starting at position 3794 of SEQ ID NO: 1881390
ugagauuucucagagcauu

SEQ ID NO: 2040855 - RNA, 19 nt, Artificial Sequence
  Description of Artificial Sequence: Synthetic oligonucleotide
  Antisense strand to SEQ ID NO: 2040854
aaugcucugagaaaucuca

SEQ ID NO: 2040856 - RNA, 19 nt, Artificial Sequence
  Description of Artificial Sequence: Synthetic oligonucleotide
  Sense strand starting at position 3892 of SEQ ID NO: 1881390
agaccuguagucuacaauu

SEQ ID NO: 2040857 - RNA, 19 nt, Artificial Sequence
  Description of Artificial Sequence: Synthetic oligonucleotide
  Antisense strand to SEQ ID NO: 2040856
aauuguagacuacaggucu

SEQ ID NO: 2040858 - RNA, 19 nt, Artificial Sequence
  Description of Artificial Sequence: Synthetic oligonucleotide
  Sense strand starting at position 3902 of SEQ ID NO: 1881390
ucuacaauuugaugaagaa

SEQ ID NO: 2040859 - RNA, 19 nt, Artificial Sequence
  Description of Artificial Sequence: Synthetic oligonucleotide
  Antisense strand to SEQ ID NO: 2040858
uucuucaucaaauuguaga

SEQ ID NO: 2040860 - RNA, 19 nt, Artificial Sequence
  Description of Artificial Sequence: Synthetic oligonucleotide
  Sense strand starting at position 3928 of SEQ ID NO: 1881390
gcccuagacuaguugguga

SEQ ID NO: 2040861 - RNA, 19 nt, Artificial Sequence
  Description of Artificial Sequence: Synthetic oligonucleotide
  Antisense strand to SEQ ID NO: 2040860
ucaccaacuagucuagggc

SEQ ID NO: 2040862 - RNA, 19 nt, Artificial Sequence
  Description of Artificial Sequence: Synthetic oligonucleotide
  Sense strand starting at position 3967 of SEQ ID NO: 1881390
cugggccuucuugauagua

SEQ ID NO: 2040863 - RNA, 19 nt, Artificial Sequence
  Description of Artificial Sequence: Synthetic oligonucleotide
  Antisense strand to SEQ ID NO: 2040862
uacuaucaagaaggcccag

SEQ ID NO: 2040864 - RNA, 19 nt, Artificial Sequence
  Description of Artificial Sequence: Synthetic oligonucleotide
  Sense strand starting at position 196 of SEQ ID NO: 1881391
acgauagacuacucaacuu

SEQ ID NO: 2040865 - RNA, 19 nt, Artificial Sequence
  Description of Artificial Sequence: Synthetic oligonucleotide
  Antisense strand to SEQ ID NO: 2040864
aaguugaguagucuaucgu

SEQ ID NO: 2040866 - RNA, 19 nt, Artificial Sequence
  Description of Artificial Sequence: Synthetic oligonucleotide
  Sense strand starting at position 285 of SEQ ID NO: 1881391
gcuuaacuagcagauuaaa

SEQ ID NO: 2040867 - RNA, 19 nt, Artificial Sequence
  Description of Artificial Sequence: Synthetic oligonucleotide
  Antisense strand to SEQ ID NO: 2040866
uuuaaucugcuaguuaagc

SEQ ID NO: 2040868 - RNA, 19 nt, Artificial Sequence
  Description of Artificial Sequence: Synthetic oligonucleotide
  Sense strand starting at position 417 of SEQ ID NO: 1881391
cuaguaugagaaggccuaa

SEQ ID NO: 2040869 - RNA, 19 nt, Artificial Sequence
  Description of Artificial Sequence: Synthetic oligonucleotide
  Antisense strand to SEQ ID NO: 2040868
uuaggccuucucauacuag

SEQ ID NO: 2040870 - RNA, 19 nt, Artificial Sequence
  Description of Artificial Sequence: Synthetic oligonucleotide
  Sense strand starting at position 535 of SEQ ID NO: 1881391
agauaugcauacucagauu

SEQ ID NO: 2040871 - RNA, 19 nt, Artificial Sequence
  Description of Artificial Sequence: Synthetic oligonucleotide
  Antisense strand to SEQ ID NO: 2040870
aaucugaguaugcauaucu

SEQ ID NO: 2040872 - RNA, 19 nt, Artificial Sequence
  Description of Artificial Sequence: Synthetic oligonucleotide
  Sense strand starting at position 554 of SEQ ID NO: 1881391
cugggaauacugugagucu

SEQ ID NO: 2040873 - RNA, 19 nt, Artificial Sequence
  Description of Artificial Sequence: Synthetic oligonucleotide
  Antisense strand to SEQ ID NO: 2040872
agacucacaguauucccag

SEQ ID NO: 2040874 - RNA, 19 nt, Artificial Sequence
  Description of Artificial Sequence: Synthetic oligonucleotide
  Sense strand starting at position 557 of SEQ ID NO: 1881391
ggaauacugugagucucaa

SEQ ID NO: 2040875 - RNA, 19 nt, Artificial Sequence
  Description of Artificial Sequence: Synthetic oligonucleotide
  Antisense strand to SEQ ID NO: 2040874
uugagacucacaguauucc

SEQ ID NO: 2040876 - RNA, 19 nt, Artificial Sequence
  Description of Artificial Sequence: Synthetic oligonucleotide
  Sense strand starting at position 1002 of SEQ ID NO: 1881391
augguugacuucucaacag

SEQ ID NO: 2040877 - RNA, 19 nt, Artificial Sequence
  Description of Artificial Sequence: Synthetic oligonucleotide
  Antisense strand to SEQ ID NO: 2040876
cuguugagaagucaaccau

SEQ ID NO: 2040878 - RNA, 19 nt, Artificial Sequence
  Description of Artificial Sequence: Synthetic oligonucleotide
  Sense strand starting at position 1674 of SEQ ID NO: 1881391
auccaaaugucaguaagca

SEQ ID NO: 2040879 - RNA, 19 nt, Artificial Sequence
  Description of Artificial Sequence: Synthetic oligonucleotide
  Antisense strand to SEQ ID NO: 2040878
ugcuuacugacauuuggau

SEQ ID NO: 2040880 - RNA, 19 nt, Artificial Sequence
  Description of Artificial Sequence: Synthetic oligonucleotide
  Sense strand starting at position 1675 of SEQ ID NO: 1881391
uccaaaugucaguaagcac

SEQ ID NO: 2040881 - RNA, 19 nt, Artificial Sequence
  Description of Artificial Sequence: Synthetic oligonucleotide
  Antisense strand to SEQ ID NO: 2040880
gugcuuacugacauuugga

SEQ ID NO: 2040882 - RNA, 19 nt, Artificial Sequence
  Description of Artificial Sequence: Synthetic oligonucleotide
  Sense strand starting at position 1721 of SEQ ID NO: 1881391
aguuaagugcuccacaauu

SEQ ID NO: 2040883 - RNA, 19 nt, Artificial Sequence
  Description of Artificial Sequence: Synthetic oligonucleotide
  Antisense strand to SEQ ID NO: 2040882
aauuguggagcacuuaacu

SEQ ID NO: 2040884 - RNA, 19 nt, Artificial Sequence
  Description of Artificial Sequence: Synthetic oligonucleotide
  Sense strand starting at position 1814 of SEQ ID NO: 1881391
agucuuacccgugaacaua

SEQ ID NO: 2040885 - RNA, 19 nt, Artificial Sequence
  Description of Artificial Sequence: Synthetic oligonucleotide
  Antisense strand to SEQ ID NO: 2040884
uauguucacggguaagacu

SEQ ID NO: 2040886 - RNA, 19 nt, Artificial Sequence
  Description of Artificial Sequence: Synthetic oligonucleotide
  Sense strand starting at position 1822 of SEQ ID NO: 1881391
ccgugaacauaguucuaaa

SEQ ID NO: 2040887 - RNA, 19 nt, Artificial Sequence
  Description of Artificial Sequence: Synthetic oligonucleotide
  Antisense strand to SEQ ID NO: 2040886
uuuagaacuauguucacgg

SEQ ID NO: 2040888 - RNA, 19 nt, Artificial Sequence
  Description of Artificial Sequence: Synthetic oligonucleotide
  Sense strand starting at position 1999 of SEQ ID NO: 1881391
uugagauugucucuuaaua

SEQ ID NO: 2040889 - RNA, 19 nt, Artificial Sequence
  Description of Artificial Sequence: Synthetic oligonucleotide
  Antisense strand to SEQ ID NO: 2040888
uauuaagagacaaucucaa

SEQ ID NO: 2040890 - RNA, 19 nt, Artificial Sequence
  Description of Artificial Sequence: Synthetic oligonucleotide
  Sense strand starting at position 2087 of SEQ ID NO: 1881391
acaguauuaugaguaauga

SEQ ID NO: 2040891 - RNA, 19 nt, Artificial Sequence
  Description of Artificial Sequence: Synthetic oligonucleotide
  Antisense strand to SEQ ID NO: 2040890
ucauuacucauaauacugu

SEQ ID NO: 2040892 - RNA, 19 nt, Artificial Sequence
  Description of Artificial Sequence: Synthetic oligonucleotide
  Sense strand starting at position 2106 of SEQ ID NO: 1881391
ggugcuugugggaguuauu

SEQ ID NO: 2040893 - RNA, 19 nt, Artificial Sequence
  Description of Artificial Sequence: Synthetic oligonucleotide
  Antisense strand to SEQ ID NO: 2040892
aauaacucccacaagcacc

SEQ ID NO: 2040894 - RNA, 19 nt, Artificial Sequence
  Description of Artificial Sequence: Synthetic oligonucleotide
  Sense strand starting at position 2109 of SEQ ID NO: 1881391
gcuugugggaguuauugaa

SEQ ID NO: 2040895 - RNA, 19 nt, Artificial Sequence
  Description of Artificial Sequence: Synthetic oligonucleotide
  Antisense strand to SEQ ID NO: 2040894
uucaauaacucccacaagc

SEQ ID NO: 2040896 - RNA, 19 nt, Artificial Sequence
  Description of Artificial Sequence: Synthetic oligonucleotide
  Sense strand starting at position 2200 of SEQ ID NO: 1881391
guaauuugucuauguugcu

SEQ ID NO: 2040897 - RNA, 19 nt, Artificial Sequence
  Description of Artificial Sequence: Synthetic oligonucleotide
  Antisense strand to SEQ ID NO: 2040896
agcaacauagacaaauuac

SEQ ID NO: 2040898 - RNA, 19 nt, Artificial Sequence
  Description of Artificial Sequence: Synthetic oligonucleotide
  Sense strand starting at position 2210 of SEQ ID NO: 1881391
uauguugcuguggacagau

SEQ ID NO: 2040899 - RNA, 19 nt, Artificial Sequence
  Description of Artificial Sequence: Synthetic oligonucleotide
  Antisense strand to SEQ ID NO: 2040898
aucuguccacagcaacaua

SEQ ID NO: 2040900 - RNA, 19 nt, Artificial Sequence
  Description of Artificial Sequence: Synthetic oligonucleotide
  Sense strand starting at position 2212 of SEQ ID NO: 1881391
uguugcuguggacagauua

SEQ ID NO: 2040901 - RNA, 19 nt, Artificial Sequence
  Description of Artificial Sequence: Synthetic oligonucleotide
  Antisense strand to SEQ ID NO: 2040900
uaaucuguccacagcaaca

SEQ ID NO: 2040902 - RNA, 19 nt, Artificial Sequence
  Description of Artificial Sequence: Synthetic oligonucleotide
  Sense strand starting at position 2329 of SEQ ID NO: 1881391
uaagcuuugcucgugucua

SEQ ID NO: 2040903 - RNA, 19 nt, Artificial Sequence
  Description of Artificial Sequence: Synthetic oligonucleotide
  Antisense strand to SEQ ID NO: 2040902
uagacacgagcaaagcuua

SEQ ID NO: 2040904 - RNA, 19 nt, Artificial Sequence
  Description of Artificial Sequence: Synthetic oligonucleotide
  Sense strand starting at position 2331 of SEQ ID NO: 1881391
agcuuugcucgugucuaga

SEQ ID NO: 2040905 - RNA, 19 nt, Artificial Sequence
  Description of Artificial Sequence: Synthetic oligonucleotide
  Antisense strand to SEQ ID NO: 2040904
ucuagacacgagcaaagcu

SEQ ID NO: 2040906 - RNA, 19 nt, Artificial Sequence
  Description of Artificial Sequence: Synthetic oligonucleotide
  Sense strand starting at position 2344 of SEQ ID NO: 1881391
ucuagaaauuuggaacagu

SEQ ID NO: 2040907 - RNA, 19 nt, Artificial Sequence
  Description of Artificial Sequence: Synthetic oligonucleotide
  Antisense strand to SEQ ID NO: 2040906
acuguuccaaauuucuaga

SEQ ID NO: 2040908 - RNA, 19 nt, Artificial Sequence
  Description of Artificial Sequence: Synthetic oligonucleotide
  Sense strand starting at position 2554 of SEQ ID NO: 1881391
agagcuguuacugaguaaa

SEQ ID NO: 2040909 - RNA, 19 nt, Artificial Sequence
  Description of Artificial Sequence: Synthetic oligonucleotide
  Antisense strand to SEQ ID NO: 2040908
uuuacucaguaacagcucu

SEQ ID NO: 2040910 - RNA, 19 nt, Artificial Sequence
  Description of Artificial Sequence: Synthetic oligonucleotide
  Sense strand starting at position 2557 of SEQ ID NO: 1881391
gcuguuacugaguaaagga

SEQ ID NO: 2040911 - RNA, 19 nt, Artificial Sequence
  Description of Artificial Sequence: Synthetic oligonucleotide
  Antisense strand to SEQ ID NO: 2040910
uccuuuacucaguaacagc

SEQ ID NO: 2040912 - RNA, 19 nt, Artificial Sequence
  Description of Artificial Sequence: Synthetic oligonucleotide
  Sense strand starting at position 2588 of SEQ ID NO: 1881391
ggaugaaacucucugguag

SEQ ID NO: 2040913 - RNA, 19 nt, Artificial Sequence
  Description of Artificial Sequence: Synthetic oligonucleotide
  Antisense strand to SEQ ID NO: 2040912
cuaccagagaguuucaucc

SEQ ID NO: 2040914 - RNA, 19 nt, Artificial Sequence
  Description of Artificial Sequence: Synthetic oligonucleotide
  Sense strand starting at position 2589 of SEQ ID NO: 1881391
gaugaaacucucugguagu

SEQ ID NO: 2040915 - RNA, 19 nt, Artificial Sequence
  Description of Artificial Sequence: Synthetic oligonucleotide
  Antisense strand to SEQ ID NO: 2040914
acuaccagagaguuucauc

SEQ ID NO: 2040916 - RNA, 19 nt, Artificial Sequence
  Description of Artificial Sequence: Synthetic oligonucleotide
  Sense strand starting at position 2605 of SEQ ID NO: 1881391
aguuaaguaguguaucuaa

SEQ ID NO: 2040917 - RNA, 19 nt, Artificial Sequence
  Description of Artificial Sequence: Synthetic oligonucleotide
  Antisense strand to SEQ ID NO: 2040916
uuagauacacuacuuaacu

SEQ ID NO: 2040918 - RNA, 19 nt, Artificial Sequence
  Description of Artificial Sequence: Synthetic oligonucleotide
  Sense strand starting at position 2719 of SEQ ID NO: 1881391
acaacuuacuuaguguaua

SEQ ID NO: 2040919 - RNA, 19 nt, Artificial Sequence
  Description of Artificial Sequence: Synthetic oligonucleotide
  Antisense strand to SEQ ID NO: 2040918
uauacacuaaguaaguugu

SEQ ID NO: 2040920 - RNA, 19 nt, Artificial Sequence
  Description of Artificial Sequence: Synthetic oligonucleotide
  Sense strand starting at position 2722 of SEQ ID NO: 1881391
acuuacuuaguguauaaca

SEQ ID NO: 2040921 - RNA, 19 nt, Artificial Sequence
  Description of Artificial Sequence: Synthetic oligonucleotide
  Antisense strand to SEQ ID NO: 2040920
uguuauacacuaaguaagu

SEQ ID NO: 2040922 - RNA, 19 nt, Artificial Sequence
  Description of Artificial Sequence: Synthetic oligonucleotide
  Sense strand starting at position 2852 of SEQ ID NO: 1881391
uccugagucccauagugaa

SEQ ID NO: 2040923 - RNA, 19 nt, Artificial Sequence
  Description of Artificial Sequence: Synthetic oligonucleotide
  Antisense strand to SEQ ID NO: 2040922
uucacuaugggacucagga

SEQ ID NO: 2040924 - RNA, 19 nt, Artificial Sequence
  Description of Artificial Sequence: Synthetic oligonucleotide
  Sense strand starting at position 2892 of SEQ ID NO: 1881391
uagacuguauguuuaugau

SEQ ID NO: 2040925 - RNA, 19 nt, Artificial Sequence
  Description of Artificial Sequence: Synthetic oligonucleotide
  Antisense strand to SEQ ID NO: 2040924
aucauaaacauacagucua

SEQ ID NO: 2040926 - RNA, 19 nt, Artificial Sequence
  Description of Artificial Sequence: Synthetic oligonucleotide
  Sense strand starting at position 3067 of SEQ ID NO: 1881391
guuugaagacauggugaga

SEQ ID NO: 2040927 - RNA, 19 nt, Artificial Sequence
  Description of Artificial Sequence: Synthetic oligonucleotide
  Antisense strand to SEQ ID NO: 2040926
ucucaccaugucuucaaac

SEQ ID NO: 2040928 - RNA, 19 nt, Artificial Sequence
  Description of Artificial Sequence: Synthetic oligonucleotide
  Sense strand starting at position 3086 of SEQ ID NO: 1881391
agguauggucuaugaacca

SEQ ID NO: 2040929 - RNA, 19 nt, Artificial Sequence
  Description of Artificial Sequence: Synthetic oligonucleotide
  Antisense strand to SEQ ID NO: 2040928
ugguucauagaccauaccu

SEQ ID NO: 2040930 - RNA, 19 nt, Artificial Sequence
  Description of Artificial Sequence: Synthetic oligonucleotide
  Sense strand starting at position 3472 of SEQ ID NO: 1881391
agaggugcauucccuagaa

SEQ ID NO: 2040931 - RNA, 19 nt, Artificial Sequence
  Description of Artificial Sequence: Synthetic oligonucleotide
  Antisense strand to SEQ ID NO: 2040930
uucuagggaaugcaccucu

SEQ ID NO: 2040932 - RNA, 19 nt, Artificial Sequence
  Description of Artificial Sequence: Synthetic oligonucleotide
  Sense strand starting at position 3671 of SEQ ID NO: 1881391
ccugaagaacguuauccaa

SEQ ID NO: 2040933 - RNA, 19 nt, Artificial Sequence
  Description of Artificial Sequence: Synthetic oligonucleotide
  Antisense strand to SEQ ID NO: 2040932
uuggauaacguucuucagg

SEQ ID NO: 2040934 - RNA, 19 nt, Artificial Sequence
  Description of Artificial Sequence: Synthetic oligonucleotide
  Sense strand starting at position 3673 of SEQ ID NO: 1881391
ugaagaacguuauccaaga

SEQ ID NO: 2040935 - RNA, 19 nt, Artificial Sequence
  Description of Artificial Sequence: Synthetic oligonucleotide
  Antisense strand to SEQ ID NO: 2040934
ucuuggauaacguucuuca

SEQ ID NO: 2040936 - RNA, 19 nt, Artificial Sequence
  Description of Artificial Sequence: Synthetic oligonucleotide
  Sense strand starting at position 3674 of SEQ ID NO: 1881391
gaagaacguuauccaagag

SEQ ID NO: 2040937 - RNA, 19 nt, Artificial Sequence
  Description of Artificial Sequence: Synthetic oligonucleotide
  Antisense strand to SEQ ID NO: 2040936
cucuuggauaacguucuuc

SEQ ID NO: 2040938 - RNA, 19 nt, Artificial Sequence
  Description of Artificial Sequence: Synthetic oligonucleotide
  Sense strand starting at position 3708 of SEQ ID NO: 1881391
agaauuguuauguaggcaa

SEQ ID NO: 2040939 - RNA, 19 nt, Artificial Sequence
  Description of Artificial Sequence: Synthetic oligonucleotide
  Antisense strand to SEQ ID NO: 2040938
uugccuacauaacaauucu

SEQ ID NO: 2040940 - RNA, 19 nt, Artificial Sequence
  Description of Artificial Sequence: Synthetic oligonucleotide
  Sense strand starting at position 3831 of SEQ ID NO: 1881391
uuaguauuugcaggcccau

SEQ ID NO: 2040941 - RNA, 19 nt, Artificial Sequence
  Description of Artificial Sequence: Synthetic oligonucleotide
  Antisense strand to SEQ ID NO: 2040940
augggccugcaaauacuaa

SEQ ID NO: 2040942 - RNA, 19 nt, Artificial Sequence
  Description of Artificial Sequence: Synthetic oligonucleotide
  Sense strand starting at position 3966 of SEQ ID NO: 1881391
agaccuuauuggccuuaau

SEQ ID NO: 2040943 - RNA, 19 nt, Artificial Sequence
  Description of Artificial Sequence: Synthetic oligonucleotide
  Antisense strand to SEQ ID NO: 2040942
auuaaggccaauaaggucu

SEQ ID NO: 2040944 - RNA, 19 nt, Artificial Sequence
  Description of Artificial Sequence: Synthetic oligonucleotide
  Sense strand starting at position 70 of SEQ ID NO: 1881392
aaagucuugcguuuguuau

SEQ ID NO: 2040945 - RNA, 19 nt, Artificial Sequence
  Description of Artificial Sequence: Synthetic oligonucleotide
  Antisense strand to SEQ ID NO: 2040944
auaacaaacgcaagacuuu

SEQ ID NO: 2040946 - RNA, 19 nt, Artificial Sequence
  Description of Artificial Sequence: Synthetic oligonucleotide
  Sense strand starting at position 183 of SEQ ID NO: 1881392
augaaaguacuuugcaaua

SEQ ID NO: 2040947 - RNA, 19 nt, Artificial Sequence
  Description of Artificial Sequence: Synthetic oligonucleotide
  Antisense strand to SEQ ID NO: 2040946
uauugcaaaguacuuucau

SEQ ID NO: 2040948 - RNA, 19 nt, Artificial Sequence
  Description of Artificial Sequence: Synthetic oligonucleotide
  Sense strand starting at position 250 of SEQ ID NO: 1881392
uggaucagagucuagugua

SEQ ID NO: 2040949 - RNA, 19 nt, Artificial Sequence
  Description of Artificial Sequence: Synthetic oligonucleotide
  Antisense strand to SEQ ID NO: 2040948
uacacuagacucugaucca

SEQ ID NO: 2040950 - RNA, 19 nt, Artificial Sequence
  Description of Artificial Sequence: Synthetic oligonucleotide
  Sense strand starting at position 255 of SEQ ID NO: 1881392
cagagucuaguguacuaga

SEQ ID NO: 2040951 - RNA, 19 nt, Artificial Sequence
  Description of Artificial Sequence: Synthetic oligonucleotide
  Antisense strand to SEQ ID NO: 2040950
ucuaguacacuagacucug

SEQ ID NO: 2040952 - RNA, 19 nt, Artificial Sequence
  Description of Artificial Sequence: Synthetic oligonucleotide
  Sense strand starting at position 260 of SEQ ID NO: 1881392
ucuaguguacuagauauua

SEQ ID NO: 2040953 - RNA, 19 nt, Artificial Sequence
  Description of Artificial Sequence: Synthetic oligonucleotide
  Antisense strand to SEQ ID NO: 2040952
uaauaucuaguacacuaga

SEQ ID NO: 2040954 - RNA, 19 nt, Artificial Sequence
  Description of Artificial Sequence: Synthetic oligonucleotide
  Sense strand starting at position 359 of SEQ ID NO: 1881392
uguucuuauuugguguuau

SEQ ID NO: 2040955 - RNA, 19 nt, Artificial Sequence
  Description of Artificial Sequence: Synthetic oligonucleotide
  Antisense strand to SEQ ID NO: 2040954
auaacaccaaauaagaaca

SEQ ID NO: 2040956 - RNA, 19 nt, Artificial Sequence
  Description of Artificial Sequence: Synthetic oligonucleotide
  Sense strand starting at position 387 of SEQ ID NO: 1881392
ugugaacugcacuaagaca

SEQ ID NO: 2040957 - RNA, 19 nt, Artificial Sequence
  Description of Artificial Sequence: Synthetic oligonucleotide
  Antisense strand to SEQ ID NO: 2040956
ugucuuagugcaguucaca

SEQ ID NO: 2040958 - RNA, 19 nt, Artificial Sequence
  Description of Artificial Sequence: Synthetic oligonucleotide
  Sense strand starting at position 830 of SEQ ID NO: 1881392
aaaugugucuaauuuacgu

SEQ ID NO: 2040959 - RNA, 19 nt, Artificial Sequence
  Description of Artificial Sequence: Synthetic oligonucleotide
  Antisense strand to SEQ ID NO: 2040958
acguaaauuagacacauuu

SEQ ID NO: 2040960 - RNA, 19 nt, Artificial Sequence
  Description of Artificial Sequence: Synthetic oligonucleotide
  Sense strand starting at position 873 of SEQ ID NO: 1881392
ggcagugauagccagaaac

SEQ ID NO: 2040961 - RNA, 19 nt, Artificial Sequence
  Description of Artificial Sequence: Synthetic oligonucleotide
  Antisense strand to SEQ ID NO: 2040960
guuucuggcuaucacugcc

SEQ ID NO: 2040962 - RNA, 19 nt, Artificial Sequence
  Description of Artificial Sequence: Synthetic oligonucleotide
  Sense strand starting at position 1053 of SEQ ID NO: 1881392
aggagugugcaucacuuga

SEQ ID NO: 2040963 - RNA, 19 nt, Artificial Sequence
  Description of Artificial Sequence: Synthetic oligonucleotide
  Antisense strand to SEQ ID NO: 2040962
ucaagugaugcacacuccu

SEQ ID NO: 2040964 - RNA, 19 nt, Artificial Sequence
  Description of Artificial Sequence: Synthetic oligonucleotide
  Sense strand starting at position 1268 of SEQ ID NO: 1881392
agaacaagagucugucaca

SEQ ID NO: 2040965 - RNA, 19 nt, Artificial Sequence
  Description of Artificial Sequence: Synthetic oligonucleotide
  Antisense strand to SEQ ID NO: 2040964
ugugacagacucuuguucu

SEQ ID NO: 2040966 - RNA, 19 nt, Artificial Sequence
  Description of Artificial Sequence: Synthetic oligonucleotide
  Sense strand starting at position 1269 of SEQ ID NO: 1881392
gaacaagagucugucacaa

SEQ ID NO: 2040967 - RNA, 19 nt, Artificial Sequence
  Description of Artificial Sequence: Synthetic oligonucleotide
  Antisense strand to SEQ ID NO: 2040966
uugugacagacucuuguuc

SEQ ID NO: 2040968 - RNA, 19 nt, Artificial Sequence
  Description of Artificial Sequence: Synthetic oligonucleotide
  Sense strand starting at position 1450 of SEQ ID NO: 1881392
gugucagaagaguauucua

SEQ ID NO: 2040969 - RNA, 19 nt, Artificial Sequence
  Description of Artificial Sequence: Synthetic oligonucleotide
  Antisense strand to SEQ ID NO: 2040968
uagaauacucuucugacac

SEQ ID NO: 2040970 - RNA, 19 nt, Artificial Sequence
  Description of Artificial Sequence: Synthetic oligonucleotide
  Sense strand starting at position 1614 of SEQ ID NO: 1881392
agucuagcuccuuaggaga

SEQ ID NO: 2040971 - RNA, 19 nt, Artificial Sequence
  Description of Artificial Sequence: Synthetic oligonucleotide
  Antisense strand to SEQ ID NO: 2040970
ucuccuaaggagcuagacu

SEQ ID NO: 2040972 - RNA, 19 nt, Artificial Sequence
  Description of Artificial Sequence: Synthetic oligonucleotide
  Sense strand starting at position 1698 of SEQ ID NO: 1881392
cgccguuacguaccugaga

SEQ ID NO: 2040973 - RNA, 19 nt, Artificial Sequence
  Description of Artificial Sequence: Synthetic oligonucleotide
  Antisense strand to SEQ ID NO: 2040972
ucucagguacguaacggcg

SEQ ID NO: 2040974 - RNA, 19 nt, Artificial Sequence
  Description of Artificial Sequence: Synthetic oligonucleotide
  Sense strand starting at position 1714 of SEQ ID NO: 1881392
agagaugugccugcgcuuu

SEQ ID NO: 2040975 - RNA, 19 nt, Artificial Sequence
  Description of Artificial Sequence: Synthetic oligonucleotide
  Antisense strand to SEQ ID NO: 2040974
aaagcgcaggcacaucucu

SEQ ID NO: 2040976 - RNA, 19 nt, Artificial Sequence
  Description of Artificial Sequence: Synthetic oligonucleotide
  Sense strand starting at position 1738 of SEQ ID NO: 1881392
acaggcugagcuugagaaa

SEQ ID NO: 2040977 - RNA, 19 nt, Artificial Sequence
  Description of Artificial Sequence: Synthetic oligonucleotide
  Antisense strand to SEQ ID NO: 2040976
uuucucaagcucagccugu

SEQ ID NO: 2040978 - RNA, 19 nt, Artificial Sequence
  Description of Artificial Sequence: Synthetic oligonucleotide
  Sense strand starting at position 1774 of SEQ ID NO: 1881392
aagaaauggcggcacgaaa

SEQ ID NO: 2040979 - RNA, 19 nt, Artificial Sequence
  Description of Artificial Sequence: Synthetic oligonucleotide
  Antisense strand to SEQ ID NO: 2040978
uuucgugccgccauuucuu

SEQ ID NO: 2040980 - RNA, 19 nt, Artificial Sequence
  Description of Artificial Sequence: Synthetic oligonucleotide
  Sense strand starting at position 2228 of SEQ ID NO: 1881392
ccuccacuucuucgaaaga

SEQ ID NO: 2040981 - RNA, 19 nt, Artificial Sequence
  Description of Artificial Sequence: Synthetic oligonucleotide
  Antisense strand to SEQ ID NO: 2040980
ucuuucgaagaaguggagg

SEQ ID NO: 2040982 - RNA, 19 nt, Artificial Sequence
  Description of Artificial Sequence: Synthetic oligonucleotide
  Sense strand starting at position 2262 of SEQ ID NO: 1881392
uuuagaacccagcauuagu

SEQ ID NO: 2040983 - RNA, 19 nt, Artificial Sequence
  Description of Artificial Sequence: Synthetic oligonucleotide
  Antisense strand to SEQ ID NO: 2040982
acuaaugcuggguucuaaa

SEQ ID NO: 2040984 - RNA, 19 nt, Artificial Sequence
  Description of Artificial Sequence: Synthetic oligonucleotide
  Sense strand starting at position 2283 of SEQ ID NO: 1881392
gcgcauaagaaauaaugga

SEQ ID NO: 2040985 - RNA, 19 nt, Artificial Sequence
  Description of Artificial Sequence: Synthetic oligonucleotide
  Antisense strand to SEQ ID NO: 2040984
uccauuauuucuuaugcgc

SEQ ID NO: 2040986 - RNA, 19 nt, Artificial Sequence
  Description of Artificial Sequence: Synthetic oligonucleotide
  Sense strand starting at position 2331 of SEQ ID NO: 1881392
uguugaggucauuagauug

SEQ ID NO: 2040987 - RNA, 19 nt, Artificial Sequence
  Description of Artificial Sequence: Synthetic oligonucleotide
  Antisense strand to SEQ ID NO: 2040986
caaucuaaugaccucaaca

SEQ ID NO: 2040988 - RNA, 19 nt, Artificial Sequence
  Description of Artificial Sequence: Synthetic oligonucleotide
  Sense strand starting at position 2336 of SEQ ID NO: 1881392
aggucauuagauuguaaau

SEQ ID NO: 2040989 - RNA, 19 nt, Artificial Sequence
  Description of Artificial Sequence: Synthetic oligonucleotide
  Antisense strand to SEQ ID NO: 2040988
auuuacaaucuaaugaccu

SEQ ID NO: 2040990 - RNA, 19 nt, Artificial Sequence
  Description of Artificial Sequence: Synthetic oligonucleotide
  Sense strand starting at position 2492 of SEQ ID NO: 1881392
aguaguauuggguaguuaa

SEQ ID NO: 2040991 - RNA, 19 nt, Artificial Sequence
  Description of Artificial Sequence: Synthetic oligonucleotide
  Antisense strand to SEQ ID NO: 2040990
uuaacuacccaauacuacu

SEQ ID NO: 2040992 - RNA, 19 nt, Artificial Sequence
  Description of Artificial Sequence: Synthetic oligonucleotide
  Sense strand starting at position 2512 of SEQ ID NO: 1881392
acauauuaccagugguuaa

SEQ ID NO: 2040993 - RNA, 19 nt, Artificial Sequence
  Description of Artificial Sequence: Synthetic oligonucleotide
  Antisense strand to SEQ ID NO: 2040992
uuaaccacugguaauaugu

SEQ ID NO: 2040994 - RNA, 19 nt, Artificial Sequence
  Description of Artificial Sequence: Synthetic oligonucleotide
  Sense strand starting at position 2537 of SEQ ID NO: 1881392
ugagguuggaaauguggau

SEQ ID NO: 2040995 - RNA, 19 nt, Artificial Sequence
  Description of Artificial Sequence: Synthetic oligonucleotide
  Antisense strand to SEQ ID NO: 2040994
auccacauuuccaaccuca

SEQ ID NO: 2040996 - RNA, 19 nt, Artificial Sequence
  Description of Artificial Sequence: Synthetic oligonucleotide
  Sense strand starting at position 2604 of SEQ ID NO: 1881392
uguauccuguaaucaauga

SEQ ID NO: 2040997 - RNA, 19 nt, Artificial Sequence
  Description of Artificial Sequence: Synthetic oligonucleotide
  Antisense strand to SEQ ID NO: 2040996
ucauugauuacaggauaca

SEQ ID NO: 2040998 - RNA, 19 nt, Artificial Sequence
  Description of Artificial Sequence: Synthetic oligonucleotide
  Sense strand starting at position 2679 of SEQ ID NO: 1881392
aggucaaaucuauguuuaa

SEQ ID NO: 2040999 - RNA, 19 nt, Artificial Sequence
  Description of Artificial Sequence: Synthetic oligonucleotide
  Antisense strand to SEQ ID NO: 2040998
uuaaacauagauuugaccu

SEQ ID NO: 2041000 - RNA, 19 nt, Artificial Sequence
  Description of Artificial Sequence: Synthetic oligonucleotide
  Sense strand starting at position 2680 of SEQ ID NO: 1881392
ggucaaaucuauguuuaaa

SEQ ID NO: 2041001 - RNA, 19 nt, Artificial Sequence
  Description of Artificial Sequence: Synthetic oligonucleotide
  Antisense strand to SEQ ID NO: 2041000
uuuaaacauagauuugacc

SEQ ID NO: 2041002 - RNA, 19 nt, Artificial Sequence
  Description of Artificial Sequence: Synthetic oligonucleotide
  Sense strand starting at position 2732 of SEQ ID NO: 1881392
gaacgaaggcagugaaaua

SEQ ID NO: 2041003 - RNA, 19 nt, Artificial Sequence
  Description of Artificial Sequence: Synthetic oligonucleotide
  Antisense strand to SEQ ID NO: 2041002
uauuucacugccuucguuc

SEQ ID NO: 2041004 - RNA, 19 nt, Artificial Sequence
  Description of Artificial Sequence: Synthetic oligonucleotide
  Sense strand starting at position 2743 of SEQ ID NO: 1881392
gugaaauaauucccaggca

SEQ ID NO: 2041005 - RNA, 19 nt, Artificial Sequence
  Description of Artificial Sequence: Synthetic oligonucleotide
  Antisense strand to SEQ ID NO: 2041004
ugccugggaauuauuucac

SEQ ID NO: 2041006 - RNA, 19 nt, Artificial Sequence
  Description of Artificial Sequence: Synthetic oligonucleotide
  Sense strand starting at position 2912 of SEQ ID NO: 1881392
ugcugagaauauccugaua

SEQ ID NO: 2041007 - RNA, 19 nt, Artificial Sequence
  Description of Artificial Sequence: Synthetic oligonucleotide
  Antisense strand to SEQ ID NO: 2041006
uaucaggauauucucagca

SEQ ID NO: 2041008 - RNA, 19 nt, Artificial Sequence
  Description of Artificial Sequence: Synthetic oligonucleotide
  Sense strand starting at position 2972 of SEQ ID NO: 1881392
agaggagauuaagcaucuu

SEQ ID NO: 2041009 - RNA, 19 nt, Artificial Sequence
  Description of Artificial Sequence: Synthetic oligonucleotide
  Antisense strand to SEQ ID NO: 2041008
aagaugcuuaaucuccucu

SEQ ID NO: 2041010 - RNA, 19 nt, Artificial Sequence
  Description of Artificial Sequence: Synthetic oligonucleotide
  Sense strand starting at position 3205 of SEQ ID NO: 1881392
ggaggacacucucuugacu

SEQ ID NO: 2041011 - RNA, 19 nt, Artificial Sequence
  Description of Artificial Sequence: Synthetic oligonucleotide
  Antisense strand to SEQ ID NO: 2041010
agucaagagaguguccucc

SEQ ID NO: 2041012 - RNA, 19 nt, Artificial Sequence
  Description of Artificial Sequence: Synthetic oligonucleotide
  Sense strand starting at position 3305 of SEQ ID NO: 1881392
cugagauggccacagugau

SEQ ID NO: 2041013 - RNA, 19 nt, Artificial Sequence
  Description of Artificial Sequence: Synthetic oligonucleotide
  Antisense strand to SEQ ID NO: 2041012
aucacuguggccaucucag

SEQ ID NO: 2041014 - RNA, 19 nt, Artificial Sequence
  Description of Artificial Sequence: Synthetic oligonucleotide
  Sense strand starting at position 3607 of SEQ ID NO: 1881392
gugugaauaauuuguguuc

SEQ ID NO: 2041015 - RNA, 19 nt, Artificial Sequence
  Description of Artificial Sequence: Synthetic oligonucleotide
  Antisense strand to SEQ ID NO: 2041014
gaacacaaauuauucacac

SEQ ID NO: 2041016 - RNA, 19 nt, Artificial Sequence
  Description of Artificial Sequence: Synthetic oligonucleotide
  Sense strand starting at position 3608 of SEQ ID NO: 1881392
ugugaauaauuuguguucu

SEQ ID NO: 2041017 - RNA, 19 nt, Artificial Sequence
  Description of Artificial Sequence: Synthetic oligonucleotide
  Antisense strand to SEQ ID NO: 2041016
agaacacaaauuauucaca

SEQ ID NO: 2041018 - RNA, 19 nt, Artificial Sequence
  Description of Artificial Sequence: Synthetic oligonucleotide
  Sense strand starting at position 3660 of SEQ ID NO: 1881392
cgagaacccugagauauuu

SEQ ID NO: 2041019 - RNA, 19 nt, Artificial Sequence
  Description of Artificial Sequence: Synthetic oligonucleotide
  Antisense strand to SEQ ID NO: 2041018
aaauaucucaggguucucg

SEQ ID NO: 2041020 - RNA, 19 nt, Artificial Sequence
  Description of Artificial Sequence: Synthetic oligonucleotide
  Sense strand starting at position 3668 of SEQ ID NO: 1881392
cugagauauuuguaaagau

SEQ ID NO: 2041021 - RNA, 19 nt, Artificial Sequence
  Description of Artificial Sequence: Synthetic oligonucleotide
  Antisense strand to SEQ ID NO: 2041020
aucuuuacaaauaucucag

SEQ ID NO: 2041022 - RNA, 19 nt, Artificial Sequence
  Description of Artificial Sequence: Synthetic oligonucleotide
  Sense strand starting at position 3958 of SEQ ID NO: 1881392
uauguuuagggcuauuaua

SEQ ID NO: 2041023 - RNA, 19 nt, Artificial Sequence
  Description of Artificial Sequence: Synthetic oligonucleotide
  Antisense strand to SEQ ID NO: 2041022
uauaauagcccuaaacaua

SEQ ID NO: 2041024 - RNA, 19 nt, Artificial Sequence
  Description of Artificial Sequence: Synthetic oligonucleotide
  Sense strand starting at position 113 of SEQ ID NO: 1881393
ucauuuaauuccuagggag

SEQ ID NO: 2041025 - RNA, 19 nt, Artificial Sequence
  Description of Artificial Sequence: Synthetic oligonucleotide
  Antisense strand to SEQ ID NO: 2041024
cucccuaggaauuaaauga

SEQ ID NO: 2041026 - RNA, 19 nt, Artificial Sequence
  Description of Artificial Sequence: Synthetic oligonucleotide
  Sense strand starting at position 384 of SEQ ID NO: 1881393
gcucauugagggcacaaau

SEQ ID NO: 2041027 - RNA, 19 nt, Artificial Sequence
  Description of Artificial Sequence: Synthetic oligonucleotide
  Antisense strand to SEQ ID NO: 2041026
auuugugcccucaaugagc

SEQ ID NO: 2041028 - RNA, 19 nt, Artificial Sequence
  Description of Artificial Sequence: Synthetic oligonucleotide
  Sense strand starting at position 775 of SEQ ID NO: 1881393
aaaccaauguugguagacu

SEQ ID NO: 2041029 - RNA, 19 nt, Artificial Sequence
  Description of Artificial Sequence: Synthetic oligonucleotide
  Antisense strand to SEQ ID NO: 2041028
agucuaccaacauugguuu

SEQ ID NO: 2041030 - RNA, 19 nt, Artificial Sequence
  Description of Artificial Sequence: Synthetic oligonucleotide
  Sense strand starting at position 857 of SEQ ID NO: 1881393
uuacuucuugcagagugga

SEQ ID NO: 2041031 - RNA, 19 nt, Artificial Sequence
  Description of Artificial Sequence: Synthetic oligonucleotide
  Antisense strand to SEQ ID NO: 2041030
uccacucugcaagaaguaa

SEQ ID NO: 2041032 - RNA, 19 nt, Artificial Sequence
  Description of Artificial Sequence: Synthetic oligonucleotide
  Sense strand starting at position 896 of SEQ ID NO: 1881393
ccagaaaucugccuggagu

SEQ ID NO: 2041033 - RNA, 19 nt, Artificial Sequence
  Description of Artificial Sequence: Synthetic oligonucleotide
  Antisense strand to SEQ ID NO: 2041032
acuccaggcagauuucugg

SEQ ID NO: 2041034 - RNA, 19 nt, Artificial Sequence
  Description of Artificial Sequence: Synthetic oligonucleotide
  Sense strand starting at position 897 of SEQ ID NO: 1881393
cagaaaucugccuggaguu

SEQ ID NO: 2041035 - RNA, 19 nt, Artificial Sequence
  Description of Artificial Sequence: Synthetic oligonucleotide
  Antisense strand to SEQ ID NO: 2041034
aacuccaggcagauuucug

SEQ ID NO: 2041036 - RNA, 19 nt, Artificial Sequence
  Description of Artificial Sequence: Synthetic oligonucleotide
  Sense strand starting at position 898 of SEQ ID NO: 1881393
agaaaucugccuggaguug

SEQ ID NO: 2041037 - RNA, 19 nt, Artificial Sequence
  Description of Artificial Sequence: Synthetic oligonucleotide
  Antisense strand to SEQ ID NO: 2041036
caacuccaggcagauuucu

SEQ ID NO: 2041038 - RNA, 19 nt, Artificial Sequence
  Description of Artificial Sequence: Synthetic oligonucleotide
  Sense strand starting at position 899 of SEQ ID NO: 1881393
gaaaucugccuggaguuga

SEQ ID NO: 2041039 - RNA, 19 nt, Artificial Sequence
  Description of Artificial Sequence: Synthetic oligonucleotide
  Antisense strand to SEQ ID NO: 2041038
ucaacuccaggcagauuuc

SEQ ID NO: 2041040 - RNA, 19 nt, Artificial Sequence
  Description of Artificial Sequence: Synthetic oligonucleotide
  Sense strand starting at position 1090 of SEQ ID NO: 1881393
uucucacucugaguagaac

SEQ ID NO: 2041041 - RNA, 19 nt, Artificial Sequence
  Description of Artificial Sequence: Synthetic oligonucleotide
  Antisense strand to SEQ ID NO: 2041040
guucuacucagagugagaa

SEQ ID NO: 2041042 - RNA, 19 nt, Artificial Sequence
  Description of Artificial Sequence: Synthetic oligonucleotide
  Sense strand starting at position 1091 of SEQ ID NO: 1881393
ucucacucugaguagaacu

SEQ ID NO: 2041043 - RNA, 19 nt, Artificial Sequence
  Description of Artificial Sequence: Synthetic oligonucleotide
  Antisense strand to SEQ ID NO: 2041042
aguucuacucagagugaga

SEQ ID NO: 2041044 - RNA, 19 nt, Artificial Sequence
  Description of Artificial Sequence: Synthetic oligonucleotide
  Sense strand starting at position 1154 of SEQ ID NO: 1881393
uugucuuuccuggaucuca

SEQ ID NO: 2041045 - RNA, 19 nt, Artificial Sequence
  Description of Artificial Sequence: Synthetic oligonucleotide
  Antisense strand to SEQ ID NO: 2041044
ugagauccaggaaagacaa

SEQ ID NO: 2041046 - RNA, 19 nt, Artificial Sequence
  Description of Artificial Sequence: Synthetic oligonucleotide
  Sense strand starting at position 1163 of SEQ ID NO: 1881393
cuggaucucagagggaguu

SEQ ID NO: 2041047 - RNA, 19 nt, Artificial Sequence
  Description of Artificial Sequence: Synthetic oligonucleotide
  Antisense strand to SEQ ID NO: 2041046
aacucccucugagauccag

SEQ ID NO: 2041048 - RNA, 19 nt, Artificial Sequence
  Description of Artificial Sequence: Synthetic oligonucleotide
  Sense strand starting at position 1197 of SEQ ID NO: 1881393
agacacaaugcuugaaugu

SEQ ID NO: 2041049 - RNA, 19 nt, Artificial Sequence
  Description of Artificial Sequence: Synthetic oligonucleotide
  Antisense strand to SEQ ID NO: 2041048
acauucaagcauugugucu

SEQ ID NO: 2041050 - RNA, 19 nt, Artificial Sequence
  Description of Artificial Sequence: Synthetic oligonucleotide
  Sense strand starting at position 1218 of SEQ ID NO: 1881393
ggcaauauugaagaucugu

SEQ ID NO: 2041051 - RNA, 19 nt, Artificial Sequence
  Description of Artificial Sequence: Synthetic oligonucleotide
  Antisense strand to SEQ ID NO: 2041050
acagaucuucaauauugcc

SEQ ID NO: 2041052 - RNA, 19 nt, Artificial Sequence
  Description of Artificial Sequence: Synthetic oligonucleotide
  Sense strand starting at position 1233 of SEQ ID NO: 1881393
cuguaucuuggacacuuua

SEQ ID NO: 2041053 - RNA, 19 nt, Artificial Sequence
  Description of Artificial Sequence: Synthetic oligonucleotide
  Antisense strand to SEQ ID NO: 2041052
uaaaguguccaagauacag

SEQ ID NO: 2041054 - RNA, 19 nt, Artificial Sequence
  Description of Artificial Sequence: Synthetic oligonucleotide
  Sense strand starting at position 1519 of SEQ ID NO: 1881393
aguggcagucgucuguaau

SEQ ID NO: 2041055 - RNA, 19 nt, Artificial Sequence
  Description of Artificial Sequence: Synthetic oligonucleotide
  Antisense strand to SEQ ID NO: 2041054
auuacagacgacugccacu

SEQ ID NO: 2041056 - RNA, 19 nt, Artificial Sequence
  Description of Artificial Sequence: Synthetic oligonucleotide
  Sense strand starting at position 1725 of SEQ ID NO: 1881393
gcucacuggcaugagagua

SEQ ID NO: 2041057 - RNA, 19 nt, Artificial Sequence
  Description of Artificial Sequence: Synthetic oligonucleotide
  Antisense strand to SEQ ID NO: 2041056
uacucucaugccagugagc

SEQ ID NO: 2041058 - RNA, 19 nt, Artificial Sequence
  Description of Artificial Sequence: Synthetic oligonucleotide
  Sense strand starting at position 1899 of SEQ ID NO: 1881393
agcugaacauucucagaaa

SEQ ID NO: 2041059 - RNA, 19 nt, Artificial Sequence
  Description of Artificial Sequence: Synthetic oligonucleotide
  Antisense strand to SEQ ID NO: 2041058
uuucugagaauguucagcu

SEQ ID NO: 2041060 - RNA, 19 nt, Artificial Sequence
  Description of Artificial Sequence: Synthetic oligonucleotide
  Sense strand starting at position 2096 of SEQ ID NO: 1881393
ugucuaguaaucuggacag

SEQ ID NO: 2041061 - RNA, 19 nt, Artificial Sequence
  Description of Artificial Sequence: Synthetic oligonucleotide
  Antisense strand to SEQ ID NO: 2041060
cuguccagauuacuagaca

SEQ ID NO: 2041062 - RNA, 19 nt, Artificial Sequence
  Description of Artificial Sequence: Synthetic oligonucleotide
  Sense strand starting at position 2167 of SEQ ID NO: 1881393
uugggacauuuagaacauu

SEQ ID NO: 2041063 - RNA, 19 nt, Artificial Sequence
  Description of Artificial Sequence: Synthetic oligonucleotide
  Antisense strand to SEQ ID NO: 2041062
aauguucuaaaugucccaa

SEQ ID NO: 2041064 - RNA, 19 nt, Artificial Sequence
  Description of Artificial Sequence: Synthetic oligonucleotide
  Sense strand starting at position 2211 of SEQ ID NO: 1881393
gguaaugugaaaugaauua

SEQ ID NO: 2041065 - RNA, 19 nt, Artificial Sequence
  Description of Artificial Sequence: Synthetic oligonucleotide
  Antisense strand to SEQ ID NO: 2041064
uaauucauuucacauuacc

SEQ ID NO: 2041066 - RNA, 19 nt, Artificial Sequence
  Description of Artificial Sequence: Synthetic oligonucleotide
  Sense strand starting at position 2230 of SEQ ID NO: 1881393
ugugaacccuuccuuugaa

SEQ ID NO: 2041067 - RNA, 19 nt, Artificial Sequence
  Description of Artificial Sequence: Synthetic oligonucleotide
  Antisense strand to SEQ ID NO: 2041066
uucaaaggaaggguucaca

SEQ ID NO: 2041068 - RNA, 19 nt, Artificial Sequence
  Description of Artificial Sequence: Synthetic oligonucleotide
  Sense strand starting at position 2270 of SEQ ID NO: 1881393
ccggauuauuccuuaacca

SEQ ID NO: 2041069 - RNA, 19 nt, Artificial Sequence
  Description of Artificial Sequence: Synthetic oligonucleotide
  Antisense strand to SEQ ID NO: 2041068
ugguuaaggaauaauccgg

SEQ ID NO: 2041070 - RNA, 19 nt, Artificial Sequence
  Description of Artificial Sequence: Synthetic oligonucleotide
  Sense strand starting at position 2271 of SEQ ID NO: 1881393
cggauuauuccuuaaccag

SEQ ID NO: 2041071 - RNA, 19 nt, Artificial Sequence
  Description of Artificial Sequence: Synthetic oligonucleotide
  Antisense strand to SEQ ID NO: 2041070
cugguuaaggaauaauccg

SEQ ID NO: 2041072 - RNA, 19 nt, Artificial Sequence
  Description of Artificial Sequence: Synthetic oligonucleotide
  Sense strand starting at position 2326 of SEQ ID NO: 1881393
agccauuacugaguauaac

SEQ ID NO: 2041073 - RNA, 19 nt, Artificial Sequence
  Description of Artificial Sequence: Synthetic oligonucleotide
  Antisense strand to SEQ ID NO: 2041072
guuauacucaguaauggcu

SEQ ID NO: 2041074 - RNA, 19 nt, Artificial Sequence
  Description of Artificial Sequence: Synthetic oligonucleotide
  Sense strand starting at position 2327 of SEQ ID NO: 1881393
gccauuacugaguauaacu

SEQ ID NO: 2041075 - RNA, 19 nt, Artificial Sequence
  Description of Artificial Sequence: Synthetic oligonucleotide
  Antisense strand to SEQ ID NO: 2041074
aguuauacucaguaauggc

SEQ ID NO: 2041076 - RNA, 19 nt, Artificial Sequence
  Description of Artificial Sequence: Synthetic oligonucleotide
  Sense strand starting at position 2374 of SEQ ID NO: 1881393
aaaugucaugccuaggaug

SEQ ID NO: 2041077 - RNA, 19 nt, Artificial Sequence
  Description of Artificial Sequence: Synthetic oligonucleotide
  Antisense strand to SEQ ID NO: 2041076
cauccuaggcaugacauuu

SEQ ID NO: 2041078 - RNA, 19 nt, Artificial Sequence
  Description of Artificial Sequence: Synthetic oligonucleotide
  Sense strand starting at position 2376 of SEQ ID NO: 1881393
augucaugccuaggaugga

SEQ ID NO: 2041079 - RNA, 19 nt, Artificial Sequence
  Description of Artificial Sequence: Synthetic oligonucleotide
  Antisense strand to SEQ ID NO: 2041078
uccauccuaggcaugacau

SEQ ID NO: 2041080 - RNA, 19 nt, Artificial Sequence
  Description of Artificial Sequence: Synthetic oligonucleotide
  Sense strand starting at position 2531 of SEQ ID NO: 1881393
uugccuaaauccuuggaga

SEQ ID NO: 2041081 - RNA, 19 nt, Artificial Sequence
  Description of Artificial Sequence: Synthetic oligonucleotide
  Antisense strand to SEQ ID NO: 2041080
ucuccaaggauuuaggcaa

SEQ ID NO: 2041082 - RNA, 19 nt, Artificial Sequence
  Description of Artificial Sequence: Synthetic oligonucleotide
  Sense strand starting at position 2532 of SEQ ID NO: 1881393
ugccuaaauccuuggagau

SEQ ID NO: 2041083 - RNA, 19 nt, Artificial Sequence
  Description of Artificial Sequence: Synthetic oligonucleotide
  Antisense strand to SEQ ID NO: 2041082
aucuccaaggauuuaggca

SEQ ID NO: 2041084 - RNA, 19 nt, Artificial Sequence
  Description of Artificial Sequence: Synthetic oligonucleotide
  Sense strand starting at position 2533 of SEQ ID NO: 1881393
gccuaaauccuuggagauu

SEQ ID NO: 2041085 - RNA, 19 nt, Artificial Sequence
  Description of Artificial Sequence: Synthetic oligonucleotide
  Antisense strand to SEQ ID NO: 2041084
aaucuccaaggauuuaggc

SEQ ID NO: 2041086 - RNA, 19 nt, Artificial Sequence
  Description of Artificial Sequence: Synthetic oligonucleotide
  Sense strand starting at position 2598 of SEQ ID NO: 1881393
guugcuuaacaugaauaua

SEQ ID NO: 2041087 - RNA, 19 nt, Artificial Sequence
  Description of Artificial Sequence: Synthetic oligonucleotide
  Antisense strand to SEQ ID NO: 2041086
uauauucauguuaagcaac

SEQ ID NO: 2041088 - RNA, 19 nt, Artificial Sequence
  Description of Artificial Sequence: Synthetic oligonucleotide
  Sense strand starting at position 2940 of SEQ ID NO: 1881393
guuuccuuaggccauuaau

SEQ ID NO: 2041089 - RNA, 19 nt, Artificial Sequence
  Description of Artificial Sequence: Synthetic oligonucleotide
  Antisense strand to SEQ ID NO: 2041088
auuaauggccuaaggaaac

SEQ ID NO: 2041090 - RNA, 19 nt, Artificial Sequence
  Description of Artificial Sequence: Synthetic oligonucleotide
  Sense strand starting at position 3114 of SEQ ID NO: 1881393
ggcaaauguaccuaguuug

SEQ ID NO: 2041091 - RNA, 19 nt, Artificial Sequence
  Description of Artificial Sequence: Synthetic oligonucleotide
  Antisense strand to SEQ ID NO: 2041090
caaacuagguacauuugcc

SEQ ID NO: 2041092 - RNA, 19 nt, Artificial Sequence
  Description of Artificial Sequence: Synthetic oligonucleotide
  Sense strand starting at position 3119 of SEQ ID NO: 1881393
auguaccuaguuugaaaga

SEQ ID NO: 2041093 - RNA, 19 nt, Artificial Sequence
  Description of Artificial Sequence: Synthetic oligonucleotide
  Antisense strand to SEQ ID NO: 2041092
ucuuucaaacuagguacau

SEQ ID NO: 2041094 - RNA, 19 nt, Artificial Sequence
  Description of Artificial Sequence: Synthetic oligonucleotide
  Sense strand starting at position 3155 of SEQ ID NO: 1881393
augcuuacacuaggaaguu

SEQ ID NO: 2041095 - RNA, 19 nt, Artificial Sequence
  Description of Artificial Sequence: Synthetic oligonucleotide
  Antisense strand to SEQ ID NO: 2041094
aacuuccuaguguaagcau

SEQ ID NO: 2041096 - RNA, 19 nt, Artificial Sequence
  Description of Artificial Sequence: Synthetic oligonucleotide
  Sense strand starting at position 3175 of SEQ ID NO: 1881393
ccaauucggaguuaaagcu

SEQ ID NO: 2041097 - RNA, 19 nt, Artificial Sequence
  Description of Artificial Sequence: Synthetic oligonucleotide
  Antisense strand to SEQ ID NO: 2041096
agcuuuaacuccgaauugg

SEQ ID NO: 2041098 - RNA, 19 nt, Artificial Sequence
  Description of Artificial Sequence: Synthetic oligonucleotide
  Sense strand starting at position 3373 of SEQ ID NO: 1881393
ucaagagcuuggguuuaaa

SEQ ID NO: 2041099 - RNA, 19 nt, Artificial Sequence
  Description of Artificial Sequence: Synthetic oligonucleotide
  Antisense strand to SEQ ID NO: 2041098
uuuaaacccaagcucuuga

SEQ ID NO: 2041100 - RNA, 19 nt, Artificial Sequence
  Description of Artificial Sequence: Synthetic oligonucleotide
  Sense strand starting at position 3508 of SEQ ID NO: 1881393
auagauaaugccuagcaag

SEQ ID NO: 2041101 - RNA, 19 nt, Artificial Sequence
  Description of Artificial Sequence: Synthetic oligonucleotide
  Antisense strand to SEQ ID NO: 2041100
cuugcuaggcauuaucuau

SEQ ID NO: 2041102 - RNA, 19 nt, Artificial Sequence
  Description of Artificial Sequence: Synthetic oligonucleotide
  Sense strand starting at position 3826 of SEQ ID NO: 1881393
gaggcagucaggcagaauu

SEQ ID NO: 2041103 - RNA, 19 nt, Artificial Sequence
  Description of Artificial Sequence: Synthetic oligonucleotide
  Antisense strand to SEQ ID NO: 2041102
aauucugccugacugccuc

SEQ ID NO: 2041104 - RNA, 19 nt, Artificial Sequence
  Description of Artificial Sequence: Synthetic oligonucleotide
  Sense strand starting at position 225 of SEQ ID NO: 1881394
uagucuuacugaucaaagg

SEQ ID NO: 2041105 - RNA, 19 nt, Artificial Sequence
  Description of Artificial Sequence: Synthetic oligonucleotide
  Antisense strand to SEQ ID NO: 2041104
ccuuugaucaguaagacua

SEQ ID NO: 2041106 - RNA, 19 nt, Artificial Sequence
  Description of Artificial Sequence: Synthetic oligonucleotide
  Sense strand starting at position 600 of SEQ ID NO: 1881394
cguuauucgaauuaaagga

SEQ ID NO: 2041107 - RNA, 19 nt, Artificial Sequence
  Description of Artificial Sequence: Synthetic oligonucleotide
  Antisense strand to SEQ ID NO: 2041106
uccuuuaauucgaauaacg

SEQ ID NO: 2041108 - RNA, 19 nt, Artificial Sequence
  Description of Artificial Sequence: Synthetic oligonucleotide
  Sense strand starting at position 712 of SEQ ID NO: 1881394
uuguaucaucuguaagaua

SEQ ID NO: 2041109 - RNA, 19 nt, Artificial Sequence
  Description of Artificial Sequence: Synthetic oligonucleotide
  Antisense strand to SEQ ID NO: 2041108
uaucuuacagaugauacaa

SEQ ID NO: 2041110 - RNA, 19 nt, Artificial Sequence
  Description of Artificial Sequence: Synthetic oligonucleotide
  Sense strand starting at position 846 of SEQ ID NO: 1881394
uuuguuaucaagggauaug

SEQ ID NO: 2041111 - RNA, 19 nt, Artificial Sequence
  Description of Artificial Sequence: Synthetic oligonucleotide
  Antisense strand to SEQ ID NO: 2041110
cauaucccuugauaacaaa

SEQ ID NO: 2041112 - RNA, 19 nt, Artificial Sequence
  Description of Artificial Sequence: Synthetic oligonucleotide
  Sense strand starting at position 871 of SEQ ID NO: 1881394
gagcucagauggucacaua

SEQ ID NO: 2041113 - RNA, 19 nt, Artificial Sequence
  Description of Artificial Sequence: Synthetic oligonucleotide
  Antisense strand to SEQ ID NO: 2041112
uaugugaccaucugagcuc

SEQ ID NO: 2041114 - RNA, 19 nt, Artificial Sequence
  Description of Artificial Sequence: Synthetic oligonucleotide
  Sense strand starting at position 872 of SEQ ID NO: 1881394
agcucagauggucacauau

SEQ ID NO: 2041115 - RNA, 19 nt, Artificial Sequence
  Description of Artificial Sequence: Synthetic oligonucleotide
  Antisense strand to SEQ ID NO: 2041114
auaugugaccaucugagcu

SEQ ID NO: 2041116 - RNA, 19 nt, Artificial Sequence
  Description of Artificial Sequence: Synthetic oligonucleotide
  Sense strand starting at position 892 of SEQ ID NO: 1881394
aucugaccuuauccggaua

SEQ ID NO: 2041117 - RNA, 19 nt, Artificial Sequence
  Description of Artificial Sequence: Synthetic oligonucleotide
  Antisense strand to SEQ ID NO: 2041116
uauccggauaaggucagau

SEQ ID NO: 2041118 - RNA, 19 nt, Artificial Sequence
  Description of Artificial Sequence: Synthetic oligonucleotide
  Sense strand starting at position 895 of SEQ ID NO: 1881394
ugaccuuauccggauaagu

SEQ ID NO: 2041119 - RNA, 19 nt, Artificial Sequence
  Description of Artificial Sequence: Synthetic oligonucleotide
  Antisense strand to SEQ ID NO: 2041118
acuuauccggauaagguca

SEQ ID NO: 2041120 - RNA, 19 nt, Artificial Sequence
  Description of Artificial Sequence: Synthetic oligonucleotide
  Sense strand starting at position 897 of SEQ ID NO: 1881394
accuuauccggauaaguua

SEQ ID NO: 2041121 - RNA, 19 nt, Artificial Sequence
  Description of Artificial Sequence: Synthetic oligonucleotide
  Antisense strand to SEQ ID NO: 2041120
uaacuuauccggauaaggu

SEQ ID NO: 2041122 - RNA, 19 nt, Artificial Sequence
  Description of Artificial Sequence: Synthetic oligonucleotide
  Sense strand starting at position 905 of SEQ ID NO: 1881394
cggauaaguuaacuucuga

SEQ ID NO: 2041123 - RNA, 19 nt, Artificial Sequence
  Description of Artificial Sequence: Synthetic oligonucleotide
  Antisense strand to SEQ ID NO: 2041122
ucagaaguuaacuuauccg

SEQ ID NO: 2041124 - RNA, 19 nt, Artificial Sequence
  Description of Artificial Sequence: Synthetic oligonucleotide
  Sense strand starting at position 993 of SEQ ID NO: 1881394
gguugucaggacugaggaa

SEQ ID NO: 2041125 - RNA, 19 nt, Artificial Sequence
  Description of Artificial Sequence: Synthetic oligonucleotide
  Antisense strand to SEQ ID NO: 2041124
uuccucaguccugacaacc

SEQ ID NO: 2041126 - RNA, 19 nt, Artificial Sequence
  Description of Artificial Sequence: Synthetic oligonucleotide
  Sense strand starting at position 1271 of SEQ ID NO: 1881394
ggauaccaauguuuccuaa

SEQ ID NO: 2041127 - RNA, 19 nt, Artificial Sequence
  Description of Artificial Sequence: Synthetic oligonucleotide
  Antisense strand to SEQ ID NO: 2041126
uuaggaaacauugguaucc

SEQ ID NO: 2041128 - RNA, 19 nt, Artificial Sequence
  Description of Artificial Sequence: Synthetic oligonucleotide
  Sense strand starting at position 1531 of SEQ ID NO: 1881394
ucaacagacuggucccuaa

SEQ ID NO: 2041129 - RNA, 19 nt, Artificial Sequence
  Description of Artificial Sequence: Synthetic oligonucleotide
  Antisense strand to SEQ ID NO: 2041128
uuagggaccagucuguuga

SEQ ID NO: 2041130 - RNA, 19 nt, Artificial Sequence
  Description of Artificial Sequence: Synthetic oligonucleotide
  Sense strand starting at position 1546 of SEQ ID NO: 1881394
cuaagagaagucggcagaa

SEQ ID NO: 2041131 - RNA, 19 nt, Artificial Sequence
  Description of Artificial Sequence: Synthetic oligonucleotide
  Antisense strand to SEQ ID NO: 2041130
uucugccgacuucucuuag

SEQ ID NO: 2041132 - RNA, 19 nt, Artificial Sequence
  Description of Artificial Sequence: Synthetic oligonucleotide
  Sense strand starting at position 1643 of SEQ ID NO: 1881394
guaauacucacgcauggaa

SEQ ID NO: 2041133 - RNA, 19 nt, Artificial Sequence
  Description of Artificial Sequence: Synthetic oligonucleotide
  Antisense strand to SEQ ID NO: 2041132
uuccaugcgugaguauuac

SEQ ID NO: 2041134 - RNA, 19 nt, Artificial Sequence
  Description of Artificial Sequence: Synthetic oligonucleotide
  Sense strand starting at position 1645 of SEQ ID NO: 1881394
aauacucacgcauggaaga

SEQ ID NO: 2041135 - RNA, 19 nt, Artificial Sequence
  Description of Artificial Sequence: Synthetic oligonucleotide
  Antisense strand to SEQ ID NO: 2041134
ucuuccaugcgugaguauu

SEQ ID NO: 2041136 - RNA, 19 nt, Artificial Sequence
  Description of Artificial Sequence: Synthetic oligonucleotide
  Sense strand starting at position 1879 of SEQ ID NO: 1881394
gagccagagccugauacuu

SEQ ID NO: 2041137 - RNA, 19 nt, Artificial Sequence
  Description of Artificial Sequence: Synthetic oligonucleotide
  Antisense strand to SEQ ID NO: 2041136
aaguaucaggcucuggcuc

SEQ ID NO: 2041138 - RNA, 19 nt, Artificial Sequence
  Description of Artificial Sequence: Synthetic oligonucleotide
  Sense strand starting at position 2057 of SEQ ID NO: 1881394
gcgccuucuccucuuaacu

SEQ ID NO: 2041139 - RNA, 19 nt, Artificial Sequence
  Description of Artificial Sequence: Synthetic oligonucleotide
  Antisense strand to SEQ ID NO: 2041138
aguuaagaggagaaggcgc

SEQ ID NO: 2041140 - RNA, 19 nt, Artificial Sequence
  Description of Artificial Sequence: Synthetic oligonucleotide
  Sense strand starting at position 2199 of SEQ ID NO: 1881394
guaguaaccauguacaagu

SEQ ID NO: 2041141 - RNA, 19 nt, Artificial Sequence
  Description of Artificial Sequence: Synthetic oligonucleotide
  Antisense strand to SEQ ID NO: 2041140
acuuguacaugguuacuac

SEQ ID NO: 2041142 - RNA, 19 nt, Artificial Sequence
  Description of Artificial Sequence: Synthetic oligonucleotide
  Sense strand starting at position 2230 of SEQ ID NO: 1881394
uuuacagaugaguguagau

SEQ ID NO: 2041143 - RNA, 19 nt, Artificial Sequence
  Description of Artificial Sequence: Synthetic oligonucleotide
  Antisense strand to SEQ ID NO: 2041142
aucuacacucaucuguaaa

SEQ ID NO: 2041144 - RNA, 19 nt, Artificial Sequence
  Description of Artificial Sequence: Synthetic oligonucleotide
  Sense strand starting at position 2242 of SEQ ID NO: 1881394
uguagauuaggagguguca

SEQ ID NO: 2041145 - RNA, 19 nt, Artificial Sequence
  Description of Artificial Sequence: Synthetic oligonucleotide
  Antisense strand to SEQ ID NO: 2041144
ugacaccuccuaaucuaca

SEQ ID NO: 2041146 - RNA, 19 nt, Artificial Sequence
  Description of Artificial Sequence: Synthetic oligonucleotide
  Sense strand starting at position 2491 of SEQ ID NO: 1881394
uaacgaauucugugggaug

SEQ ID NO: 2041147 - RNA, 19 nt, Artificial Sequence
  Description of Artificial Sequence: Synthetic oligonucleotide
  Antisense strand to SEQ ID NO: 2041146
caucccacagaauucguua

SEQ ID NO: 2041148 - RNA, 19 nt, Artificial Sequence
  Description of Artificial Sequence: Synthetic oligonucleotide
  Sense strand starting at position 2599 of SEQ ID NO: 1881394
ggcaguccuccuggagaag

SEQ ID NO: 2041149 - RNA, 19 nt, Artificial Sequence
  Description of Artificial Sequence: Synthetic oligonucleotide
  Antisense strand to SEQ ID NO: 2041148
cuucuccaggaggacugcc

SEQ ID NO: 2041150 - RNA, 19 nt, Artificial Sequence
  Description of Artificial Sequence: Synthetic oligonucleotide
  Sense strand starting at position 2600 of SEQ ID NO: 1881394
gcaguccuccuggagaagu

SEQ ID NO: 2041151 - RNA, 19 nt, Artificial Sequence
  Description of Artificial Sequence: Synthetic oligonucleotide
  Antisense strand to SEQ ID NO: 2041150
acuucuccaggaggacugc

SEQ ID NO: 2041152 - RNA, 19 nt, Artificial Sequence
  Description of Artificial Sequence: Synthetic oligonucleotide
  Sense strand starting at position 2630 of SEQ ID NO: 1881394
agguaaagaucugugagca

SEQ ID NO: 2041153 - RNA, 19 nt, Artificial Sequence
  Description of Artificial Sequence: Synthetic oligonucleotide
  Antisense strand to SEQ ID NO: 2041152
ugcucacagaucuuuaccu

SEQ ID NO: 2041154 - RNA, 19 nt, Artificial Sequence
  Description of Artificial Sequence: Synthetic oligonucleotide
  Sense strand starting at position 2631 of SEQ ID NO: 1881394
gguaaagaucugugagcaa

SEQ ID NO: 2041155 - RNA, 19 nt, Artificial Sequence
  Description of Artificial Sequence: Synthetic oligonucleotide
  Antisense strand to SEQ ID NO: 2041154
uugcucacagaucuuuacc

SEQ ID NO: 2041156 - RNA, 19 nt, Artificial Sequence
  Description of Artificial Sequence: Synthetic oligonucleotide
  Sense strand starting at position 2668 of SEQ ID NO: 1881394
aauugacaauaguuuggua

SEQ ID NO: 2041157 - RNA, 19 nt, Artificial Sequence
  Description of Artificial Sequence: Synthetic oligonucleotide
  Antisense strand to SEQ ID NO: 2041156
uaccaaacuauugucaauu

SEQ ID NO: 2041158 - RNA, 19 nt, Artificial Sequence
  Description of Artificial Sequence: Synthetic oligonucleotide
  Sense strand starting at position 2670 of SEQ ID NO: 1881394
uugacaauaguuugguauu

SEQ ID NO: 2041159 - RNA, 19 nt, Artificial Sequence
  Description of Artificial Sequence: Synthetic oligonucleotide
  Antisense strand to SEQ ID NO: 2041158
aauaccaaacuauugucaa

SEQ ID NO: 2041160 - RNA, 19 nt, Artificial Sequence
  Description of Artificial Sequence: Synthetic oligonucleotide
  Sense strand starting at position 2764 of SEQ ID NO: 1881394
guuguuuguauugauugaa

SEQ ID NO: 2041161 - RNA, 19 nt, Artificial Sequence
  Description of Artificial Sequence: Synthetic oligonucleotide
  Antisense strand to SEQ ID NO: 2041160
uucaaucaauacaaacaac

SEQ ID NO: 2041162 - RNA, 19 nt, Artificial Sequence
  Description of Artificial Sequence: Synthetic oligonucleotide
  Sense strand starting at position 2767 of SEQ ID NO: 1881394
guuuguauugauugaauga

SEQ ID NO: 2041163 - RNA, 19 nt, Artificial Sequence
  Description of Artificial Sequence: Synthetic oligonucleotide
  Antisense strand to SEQ ID NO: 2041162
ucauucaaucaauacaaac

SEQ ID NO: 2041164 - RNA, 19 nt, Artificial Sequence
  Description of Artificial Sequence: Synthetic oligonucleotide
  Sense strand starting at position 2908 of SEQ ID NO: 1881394
aagagaaguuaaguagcuu

SEQ ID NO: 2041165 - RNA, 19 nt, Artificial Sequence
  Description of Artificial Sequence: Synthetic oligonucleotide
  Antisense strand to SEQ ID NO: 2041164
aagcuacuuaacuucucuu

SEQ ID NO: 2041166 - RNA, 19 nt, Artificial Sequence
  Description of Artificial Sequence: Synthetic oligonucleotide
  Sense strand starting at position 3297 of SEQ ID NO: 1881394
gagccagaaugacugauau

SEQ ID NO: 2041167 - RNA, 19 nt, Artificial Sequence
  Description of Artificial Sequence: Synthetic oligonucleotide
  Antisense strand to SEQ ID NO: 2041166
auaucagucauucuggcuc

SEQ ID NO: 2041168 - RNA, 19 nt, Artificial Sequence
  Description of Artificial Sequence: Synthetic oligonucleotide
  Sense strand starting at position 3313 of SEQ ID NO: 1881394
uaucgaaaccaguaaaguu

SEQ ID NO: 2041169 - RNA, 19 nt, Artificial Sequence
  Description of Artificial Sequence: Synthetic oligonucleotide
  Antisense strand to SEQ ID NO: 2041168
aacuuuacugguuucgaua

SEQ ID NO: 2041170 - RNA, 19 nt, Artificial Sequence
  Description of Artificial Sequence: Synthetic oligonucleotide
  Sense strand starting at position 3372 of SEQ ID NO: 1881394
agagcugucacuuaggaau

SEQ ID NO: 2041171 - RNA, 19 nt, Artificial Sequence
  Description of Artificial Sequence: Synthetic oligonucleotide
  Antisense strand to SEQ ID NO: 2041170
auuccuaagugacagcucu

SEQ ID NO: 2041172 - RNA, 19 nt, Artificial Sequence
  Description of Artificial Sequence: Synthetic oligonucleotide
  Sense strand starting at position 3484 of SEQ ID NO: 1881394
ccaguacucguacaaccau

SEQ ID NO: 2041173 - RNA, 19 nt, Artificial Sequence
  Description of Artificial Sequence: Synthetic oligonucleotide
  Antisense strand to SEQ ID NO: 2041172
augguuguacgaguacugg

SEQ ID NO: 2041174 - RNA, 19 nt, Artificial Sequence
  Description of Artificial Sequence: Synthetic oligonucleotide
  Sense strand starting at position 3532 of SEQ ID NO: 1881394
ucaugugucccauaaugau

SEQ ID NO: 2041175 - RNA, 19 nt, Artificial Sequence
  Description of Artificial Sequence: Synthetic oligonucleotide
  Antisense strand to SEQ ID NO: 2041174
aucauuaugggacacauga

SEQ ID NO: 2041176 - RNA, 19 nt, Artificial Sequence
  Description of Artificial Sequence: Synthetic oligonucleotide
  Sense strand starting at position 3577 of SEQ ID NO: 1881394
uggugagcccaugagagua

SEQ ID NO: 2041177 - RNA, 19 nt, Artificial Sequence
  Description of Artificial Sequence: Synthetic oligonucleotide
  Antisense strand to SEQ ID NO: 2041176
uacucucaugggcucacca

SEQ ID NO: 2041178 - RNA, 19 nt, Artificial Sequence
  Description of Artificial Sequence: Synthetic oligonucleotide
  Sense strand starting at position 3633 of SEQ ID NO: 1881394
gcugucuuuauguuguagu

SEQ ID NO: 2041179 - RNA, 19 nt, Artificial Sequence
  Description of Artificial Sequence: Synthetic oligonucleotide
  Antisense strand to SEQ ID NO: 2041178
acuacaacauaaagacagc

SEQ ID NO: 2041180 - RNA, 19 nt, Artificial Sequence
  Description of Artificial Sequence: Synthetic oligonucleotide
  Sense strand starting at position 3928 of SEQ ID NO: 1881394
uguucuugacccugaagau

SEQ ID NO: 2041181 - RNA, 19 nt, Artificial Sequence
  Description of Artificial Sequence: Synthetic oligonucleotide
  Antisense strand to SEQ ID NO: 2041180
aucuucagggucaagaaca

SEQ ID NO: 2041182 - RNA, 19 nt, Artificial Sequence
  Description of Artificial Sequence: Synthetic oligonucleotide
  Sense strand starting at position 3929 of SEQ ID NO: 1881394
guucuugacccugaagauc

SEQ ID NO: 2041183 - RNA, 19 nt, Artificial Sequence
  Description of Artificial Sequence: Synthetic oligonucleotide
  Antisense strand to SEQ ID NO: 2041182
gaucuucagggucaagaac

SEQ ID NO: 2041184 - RNA, 19 nt, Artificial Sequence
  Description of Artificial Sequence: Synthetic oligonucleotide
  Sense strand starting at position 54 of SEQ ID NO: 1881395
caacgagaaucuuccugua

SEQ ID NO: 2041185 - RNA, 19 nt, Artificial Sequence
  Description of Artificial Sequence: Synthetic oligonucleotide
  Antisense strand to SEQ ID NO: 2041184
uacaggaagauucucguug

SEQ ID NO: 2041186 - RNA, 19 nt, Artificial Sequence
  Description of Artificial Sequence: Synthetic oligonucleotide
  Sense strand starting at position 56 of SEQ ID NO: 1881395
acgagaaucuuccuguaug

SEQ ID NO: 2041187 - RNA, 19 nt, Artificial Sequence
  Description of Artificial Sequence: Synthetic oligonucleotide
  Antisense strand to SEQ ID NO: 2041186
cauacaggaagauucucgu

SEQ ID NO: 2041188 - RNA, 19 nt, Artificial Sequence
  Description of Artificial Sequence: Synthetic oligonucleotide
  Sense strand starting at position 59 of SEQ ID NO: 1881395
agaaucuuccuguaugcaa

SEQ ID NO: 2041189 - RNA, 19 nt, Artificial Sequence
  Description of Artificial Sequence: Synthetic oligonucleotide
  Antisense strand to SEQ ID NO: 2041188
uugcauacaggaagauucu

SEQ ID NO: 2041190 - RNA, 19 nt, Artificial Sequence
  Description of Artificial Sequence: Synthetic oligonucleotide
  Sense strand starting at position 191 of SEQ ID NO: 1881395
gggagcaacuugcucugau

SEQ ID NO: 2041191 - RNA, 19 nt, Artificial Sequence
  Description of Artificial Sequence: Synthetic oligonucleotide
  Antisense strand to SEQ ID NO: 2041190
aucagagcaaguugcuccc

SEQ ID NO: 2041192 - RNA, 19 nt, Artificial Sequence
  Description of Artificial Sequence: Synthetic oligonucleotide
  Sense strand starting at position 192 of SEQ ID NO: 1881395
ggagcaacuugcucugaug

SEQ ID NO: 2041193 - RNA, 19 nt, Artificial Sequence
  Description of Artificial Sequence: Synthetic oligonucleotide
  Antisense strand to SEQ ID NO: 2041192
caucagagcaaguugcucc

SEQ ID NO: 2041194 - RNA, 19 nt, Artificial Sequence
  Description of Artificial Sequence: Synthetic oligonucleotide
  Sense strand starting at position 266 of SEQ ID NO: 1881395
cuauguaaucauuggcuca

SEQ ID NO: 2041195 - RNA, 19 nt, Artificial Sequence
  Description of Artificial Sequence: Synthetic oligonucleotide
  Antisense strand to SEQ ID NO: 2041194
ugagccaaugauuacauag

SEQ ID NO: 2041196 - RNA, 19 nt, Artificial Sequence
  Description of Artificial Sequence: Synthetic oligonucleotide
  Sense strand starting at position 268 of SEQ ID NO: 1881395
auguaaucauuggcucacu

SEQ ID NO: 2041197 - RNA, 19 nt, Artificial Sequence
  Description of Artificial Sequence: Synthetic oligonucleotide
  Antisense strand to SEQ ID NO: 2041196
agugagccaaugauuacau

SEQ ID NO: 2041198 - RNA, 19 nt, Artificial Sequence
  Description of Artificial Sequence: Synthetic oligonucleotide
  Sense strand starting at position 279 of SEQ ID NO: 1881395
ggcucacucaucuggagac

SEQ ID NO: 2041199 - RNA, 19 nt, Artificial Sequence
  Description of Artificial Sequence: Synthetic oligonucleotide
  Antisense strand to SEQ ID NO: 2041198
gucuccagaugagugagcc

SEQ ID NO: 2041200 - RNA, 19 nt, Artificial Sequence
  Description of Artificial Sequence: Synthetic oligonucleotide
  Sense strand starting at position 289 of SEQ ID NO: 1881395
ucuggagaccuguaguauc

SEQ ID NO: 2041201 - RNA, 19 nt, Artificial Sequence
  Description of Artificial Sequence: Synthetic oligonucleotide
  Antisense strand to SEQ ID NO: 2041200
gauacuacaggucuccaga

SEQ ID NO: 2041202 - RNA, 19 nt, Artificial Sequence
  Description of Artificial Sequence: Synthetic oligonucleotide
  Sense strand starting at position 363 of SEQ ID NO: 1881395
ugaacuucuuagguagacu

SEQ ID NO: 2041203 - RNA, 19 nt, Artificial Sequence
  Description of Artificial Sequence: Synthetic oligonucleotide
  Antisense strand to SEQ ID NO: 2041202
agucuaccuaagaaguuca

SEQ ID NO: 2041204 - RNA, 19 nt, Artificial Sequence
  Description of Artificial Sequence: Synthetic oligonucleotide
  Sense strand starting at position 397 of SEQ ID NO: 1881395
cuagaaagccuauggugaa

SEQ ID NO: 2041205 - RNA, 19 nt, Artificial Sequence
  Description of Artificial Sequence: Synthetic oligonucleotide
  Antisense strand to SEQ ID NO: 2041204
uucaccauaggcuuucuag

SEQ ID NO: 2041206 - RNA, 19 nt, Artificial Sequence
  Description of Artificial Sequence: Synthetic oligonucleotide
  Sense strand starting at position 410 of SEQ ID NO: 1881395
ggugaagacuaagugaacu

SEQ ID NO: 2041207 - RNA, 19 nt, Artificial Sequence
  Description of Artificial Sequence: Synthetic oligonucleotide
  Antisense strand to SEQ ID NO: 2041206
aguucacuuagucuucacc

SEQ ID NO: 2041208 - RNA, 19 nt, Artificial Sequence
  Description of Artificial Sequence: Synthetic oligonucleotide
  Sense strand starting at position 599 of SEQ ID NO: 1881395
auuagugauuauccagucu

SEQ ID NO: 2041209 - RNA, 19 nt, Artificial Sequence
  Description of Artificial Sequence: Synthetic oligonucleotide
  Antisense strand to SEQ ID NO: 2041208
agacuggauaaucacuaau

SEQ ID NO: 2041210 - RNA, 19 nt, Artificial Sequence
  Description of Artificial Sequence: Synthetic oligonucleotide
  Sense strand starting at position 610 of SEQ ID NO: 1881395
uccagucucuacuuaaguu

SEQ ID NO: 2041211 - RNA, 19 nt, Artificial Sequence
  Description of Artificial Sequence: Synthetic oligonucleotide
  Antisense strand to SEQ ID NO: 2041210
aacuuaaguagagacugga

SEQ ID NO: 2041212 - RNA, 19 nt, Artificial Sequence
  Description of Artificial Sequence: Synthetic oligonucleotide
  Sense strand starting at position 997 of SEQ ID NO: 1881395
uugaaagccugucuagauc

SEQ ID NO: 2041213 - RNA, 19 nt, Artificial Sequence
  Description of Artificial Sequence: Synthetic oligonucleotide
  Antisense strand to SEQ ID NO: 2041212
gaucuagacaggcuuucaa

SEQ ID NO: 2041214 - RNA, 19 nt, Artificial Sequence
  Description of Artificial Sequence: Synthetic oligonucleotide
  Sense strand starting at position 1040 of SEQ ID NO: 1881395
ccucccucaguaugaugaa

SEQ ID NO: 2041215 - RNA, 19 nt, Artificial Sequence
  Description of Artificial Sequence: Synthetic oligonucleotide
  Antisense strand to SEQ ID NO: 2041214
uucaucauacugagggagg

SEQ ID NO: 2041216 - RNA, 19 nt, Artificial Sequence
  Description of Artificial Sequence: Synthetic oligonucleotide
  Sense strand starting at position 1055 of SEQ ID NO: 1881395
ugaagagauuuaugagcau

SEQ ID NO: 2041217 - RNA, 19 nt, Artificial Sequence
  Description of Artificial Sequence: Synthetic oligonucleotide
  Antisense strand to SEQ ID NO: 2041216
augcucauaaaucucuuca

SEQ ID NO: 2041218 - RNA, 19 nt, Artificial Sequence
  Description of Artificial Sequence: Synthetic oligonucleotide
  Sense strand starting at position 1067 of SEQ ID NO: 1881395
ugagcaucauuugaagaca

SEQ ID NO: 2041219 - RNA, 19 nt, Artificial Sequence
  Description of Artificial Sequence: Synthetic oligonucleotide
  Antisense strand to SEQ ID NO: 2041218
ugucuucaaaugaugcuca

SEQ ID NO: 2041220 - RNA, 19 nt, Artificial Sequence
  Description of Artificial Sequence: Synthetic oligonucleotide
  Sense strand starting at position 1175 of SEQ ID NO: 1881395
aggucugauucagugugau

SEQ ID NO: 2041221 - RNA, 19 nt, Artificial Sequence
  Description of Artificial Sequence: Synthetic oligonucleotide
  Antisense strand to SEQ ID NO: 2041220
aucacacugaaucagaccu

SEQ ID NO: 2041222 - RNA, 19 nt, Artificial Sequence
  Description of Artificial Sequence: Synthetic oligonucleotide
  Sense strand starting at position 1394 of SEQ ID NO: 1881395
accucuuucuguuuggauu

SEQ ID NO: 2041223 - RNA, 19 nt, Artificial Sequence
  Description of Artificial Sequence: Synthetic oligonucleotide
  Antisense strand to SEQ ID NO: 2041222
aauccaaacagaaagaggu

SEQ ID NO: 2041224 - RNA, 19 nt, Artificial Sequence
  Description of Artificial Sequence: Synthetic oligonucleotide
  Sense strand starting at position 1395 of SEQ ID NO: 1881395
ccucuuucuguuuggauuu

SEQ ID NO: 2041225 - RNA, 19 nt, Artificial Sequence
  Description of Artificial Sequence: Synthetic oligonucleotide
  Antisense strand to SEQ ID NO: 2041224
aaauccaaacagaaagagg

SEQ ID NO: 2041226 - RNA, 19 nt, Artificial Sequence
  Description of Artificial Sequence: Synthetic oligonucleotide
  Sense strand starting at position 1437 of SEQ ID NO: 1881395
cuguauuaaucacuaagga

SEQ ID NO: 2041227 - RNA, 19 nt, Artificial Sequence
  Description of Artificial Sequence: Synthetic oligonucleotide
  Antisense strand to SEQ ID NO: 2041226
uccuuagugauuaauacag

SEQ ID NO: 2041228 - RNA, 19 nt, Artificial Sequence
  Description of Artificial Sequence: Synthetic oligonucleotide
  Sense strand starting at position 1463 of SEQ ID NO: 1881395
agaggagacuuagaaauau

SEQ ID NO: 2041229 - RNA, 19 nt, Artificial Sequence
  Description of Artificial Sequence: Synthetic oligonucleotide
  Antisense strand to SEQ ID NO: 2041228
auauuucuaagucuccucu

SEQ ID NO: 2041230 - RNA, 19 nt, Artificial Sequence
  Description of Artificial Sequence: Synthetic oligonucleotide
  Sense strand starting at position 1569 of SEQ ID NO: 1881395
gagguauugcucuacucuc

SEQ ID NO: 2041231 - RNA, 19 nt, Artificial Sequence
  Description of Artificial Sequence: Synthetic oligonucleotide
  Antisense strand to SEQ ID NO: 2041230
gagaguagagcaauaccuc

SEQ ID NO: 2041232 - RNA, 19 nt, Artificial Sequence
  Description of Artificial Sequence: Synthetic oligonucleotide
  Sense strand starting at position 1623 of SEQ ID NO: 1881395
gagacucugccuugaauga

SEQ ID NO: 2041233 - RNA, 19 nt, Artificial Sequence
  Description of Artificial Sequence: Synthetic oligonucleotide
  Antisense strand to SEQ ID NO: 2041232
ucauucaaggcagagucuc

SEQ ID NO: 2041234 - RNA, 19 nt, Artificial Sequence
  Description of Artificial Sequence: Synthetic oligonucleotide
  Sense strand starting at position 1645 of SEQ ID NO: 1881395
caagauauggugcaauguu

SEQ ID NO: 2041235 - RNA, 19 nt, Artificial Sequence
  Description of Artificial Sequence: Synthetic oligonucleotide
  Antisense strand to SEQ ID NO: 2041234
aacauugcaccauaucuug

SEQ ID NO: 2041236 - RNA, 19 nt, Artificial Sequence
  Description of Artificial Sequence: Synthetic oligonucleotide
  Sense strand starting at position 1663 of SEQ ID NO: 1881395
ugaggaagaucuccaaguu

SEQ ID NO: 2041237 - RNA, 19 nt, Artificial Sequence
  Description of Artificial Sequence: Synthetic oligonucleotide
  Antisense strand to SEQ ID NO: 2041236
aacuuggagaucuuccuca

SEQ ID NO: 2041238 - RNA, 19 nt, Artificial Sequence
  Description of Artificial Sequence: Synthetic oligonucleotide
  Sense strand starting at position 2259 of SEQ ID NO: 1881395
agggcacuuccgggaagaa

SEQ ID NO: 2041239 - RNA, 19 nt, Artificial Sequence
  Description of Artificial Sequence: Synthetic oligonucleotide
  Antisense strand to SEQ ID NO: 2041238
uucuucccggaagugcccu

SEQ ID NO: 2041240 - RNA, 19 nt, Artificial Sequence
  Description of Artificial Sequence: Synthetic oligonucleotide
  Sense strand starting at position 2564 of SEQ ID NO: 1881395
gacugaauagcugggacua

SEQ ID NO: 2041241 - RNA, 19 nt, Artificial Sequence
  Description of Artificial Sequence: Synthetic oligonucleotide
  Antisense strand to SEQ ID NO: 2041240
uagucccagcuauucaguc

SEQ ID NO: 2041242 - RNA, 19 nt, Artificial Sequence
  Description of Artificial Sequence: Synthetic oligonucleotide
  Sense strand starting at position 2814 of SEQ ID NO: 1881395
agccuaacgguguauuaua

SEQ ID NO: 2041243 - RNA, 19 nt, Artificial Sequence
  Description of Artificial Sequence: Synthetic oligonucleotide
  Antisense strand to SEQ ID NO: 2041242
uauaauacaccguuaggcu

SEQ ID NO: 2041244 - RNA, 19 nt, Artificial Sequence
  Description of Artificial Sequence: Synthetic oligonucleotide
  Sense strand starting at position 2963 of SEQ ID NO: 1881395
ucccuuugccuccaagaga

SEQ ID NO: 2041245 - RNA, 19 nt, Artificial Sequence
  Description of Artificial Sequence: Synthetic oligonucleotide
  Antisense strand to SEQ ID NO: 2041244
ucucuuggaggcaaaggga

SEQ ID NO: 2041246 - RNA, 19 nt, Artificial Sequence
  Description of Artificial Sequence: Synthetic oligonucleotide
  Sense strand starting at position 3316 of SEQ ID NO: 1881395
aguugucuccauuagguuu

SEQ ID NO: 2041247 - RNA, 19 nt, Artificial Sequence
  Description of Artificial Sequence: Synthetic oligonucleotide
  Antisense strand to SEQ ID NO: 2041246
aaaccuaauggagacaacu

SEQ ID NO: 2041248 - RNA, 19 nt, Artificial Sequence
  Description of Artificial Sequence: Synthetic oligonucleotide
  Sense strand starting at position 3328 of SEQ ID NO: 1881395
uagguuugauuuggaacau

SEQ ID NO: 2041249 - RNA, 19 nt, Artificial Sequence
  Description of Artificial Sequence: Synthetic oligonucleotide
  Antisense strand to SEQ ID NO: 2041248
auguuccaaaucaaaccua

SEQ ID NO: 2041250 - RNA, 19 nt, Artificial Sequence
  Description of Artificial Sequence: Synthetic oligonucleotide
  Sense strand starting at position 3329 of SEQ ID NO: 1881395
agguuugauuuggaacaug

SEQ ID NO: 2041251 - RNA, 19 nt, Artificial Sequence
  Description of Artificial Sequence: Synthetic oligonucleotide
  Antisense strand to SEQ ID NO: 2041250
cauguuccaaaucaaaccu

SEQ ID NO: 2041252 - RNA, 19 nt, Artificial Sequence
  Description of Artificial Sequence: Synthetic oligonucleotide
  Sense strand starting at position 3340 of SEQ ID NO: 1881395
ggaacaugcuuuccagcua

SEQ ID NO: 2041253 - RNA, 19 nt, Artificial Sequence
  Description of Artificial Sequence: Synthetic oligonucleotide
  Antisense strand to SEQ ID NO: 2041252
uagcuggaaagcauguucc

SEQ ID NO: 2041254 - RNA, 19 nt, Artificial Sequence
  Description of Artificial Sequence: Synthetic oligonucleotide
  Sense strand starting at position 3355 of SEQ ID NO: 1881395
gcuacaggguucuuaagau

SEQ ID NO: 2041255 - RNA, 19 nt, Artificial Sequence
  Description of Artificial Sequence: Synthetic oligonucleotide
  Antisense strand to SEQ ID NO: 2041254
aucuuaagaacccuguagc

SEQ ID NO: 2041256 - RNA, 19 nt, Artificial Sequence
  Description of Artificial Sequence: Synthetic oligonucleotide
  Sense strand starting at position 3362 of SEQ ID NO: 1881395
gguucuuaagaucauacuu

SEQ ID NO: 2041257 - RNA, 19 nt, Artificial Sequence
  Description of Artificial Sequence: Synthetic oligonucleotide
  Antisense strand to SEQ ID NO: 2041256
aaguaugaucuuaagaacc

SEQ ID NO: 2041258 - RNA, 19 nt, Artificial Sequence
  Description of Artificial Sequence: Synthetic oligonucleotide
  Sense strand starting at position 3818 of SEQ ID NO: 1881395
agccuaaagcccugauacu

SEQ ID NO: 2041259 - RNA, 19 nt, Artificial Sequence
  Description of Artificial Sequence: Synthetic oligonucleotide
  Antisense strand to SEQ ID NO: 2041258
aguaucagggcuuuaggcu

SEQ ID NO: 2041260 - RNA, 19 nt, Artificial Sequence
  Description of Artificial Sequence: Synthetic oligonucleotide
  Sense strand starting at position 3953 of SEQ ID NO: 1881395
aaacacuguccucgggaaa

SEQ ID NO: 2041261 - RNA, 19 nt, Artificial Sequence
  Description of Artificial Sequence: Synthetic oligonucleotide
  Antisense strand to SEQ ID NO: 2041260
uuucccgaggacaguguuu

SEQ ID NO: 2041262 - RNA, 19 nt, Artificial Sequence
  Description of Artificial Sequence: Synthetic oligonucleotide
  Sense strand starting at position 3956 of SEQ ID NO: 1881395
cacuguccucgggaaauug

SEQ ID NO: 2041263 - RNA, 19 nt, Artificial Sequence
  Description of Artificial Sequence: Synthetic oligonucleotide
  Antisense strand to SEQ ID NO: 2041262
caauuucccgaggacagug

SEQ ID NO: 2041264 - RNA, 19 nt, Artificial Sequence
  Description of Artificial Sequence: Synthetic oligonucleotide
  Sense strand starting at position 25 of SEQ ID NO: 1881396
gggcucucugaaggaauaa

SEQ ID NO: 2041265 - RNA, 19 nt, Artificial Sequence
  Description of Artificial Sequence: Synthetic oligonucleotide
  Antisense strand to SEQ ID NO: 2041264
uuauuccuucagagagccc

SEQ ID NO: 2041266 - RNA, 19 nt, Artificial Sequence
  Description of Artificial Sequence: Synthetic oligonucleotide
  Sense strand starting at position 95 of SEQ ID NO: 1881396
agcuuugaagcucaauaaa

SEQ ID NO: 2041267 - RNA, 19 nt, Artificial Sequence
  Description of Artificial Sequence: Synthetic oligonucleotide
  Antisense strand to SEQ ID NO: 2041266
uuuauugagcuucaaagcu

SEQ ID NO: 2041268 - RNA, 19 nt, Artificial Sequence
  Description of Artificial Sequence: Synthetic oligonucleotide
  Sense strand starting at position 235 of SEQ ID NO: 1881396
auaaaugauggcugaauua

SEQ ID NO: 2041269 - RNA, 19 nt, Artificial Sequence
  Description of Artificial Sequence: Synthetic oligonucleotide
  Antisense strand to SEQ ID NO: 2041268
uaauucagccaucauuuau

SEQ ID NO: 2041270 - RNA, 19 nt, Artificial Sequence
  Description of Artificial Sequence: Synthetic oligonucleotide
  Sense strand starting at position 271 of SEQ ID NO: 1881396
cugugagugauaggaaaca

SEQ ID NO: 2041271 - RNA, 19 nt, Artificial Sequence
  Description of Artificial Sequence: Synthetic oligonucleotide
  Antisense strand to SEQ ID NO: 2041270
uguuuccuaucacucacag

SEQ ID NO: 2041272 - RNA, 19 nt, Artificial Sequence
  Description of Artificial Sequence: Synthetic oligonucleotide
  Sense strand starting at position 316 of SEQ ID NO: 1881396
ucacuuuagcccuaggaag

SEQ ID NO: 2041273 - RNA, 19 nt, Artificial Sequence
  Description of Artificial Sequence: Synthetic oligonucleotide
  Antisense strand to SEQ ID NO: 2041272
cuuccuagggcuaaaguga

SEQ ID NO: 2041274 - RNA, 19 nt, Artificial Sequence
  Description of Artificial Sequence: Synthetic oligonucleotide
  Sense strand starting at position 415 of SEQ ID NO: 1881396
cagguaaugugaccuugga

SEQ ID NO: 2041275 - RNA, 19 nt, Artificial Sequence
  Description of Artificial Sequence: Synthetic oligonucleotide
  Antisense strand to SEQ ID NO: 2041274
uccaaggucacauuaccug

SEQ ID NO: 2041276 - RNA, 19 nt, Artificial Sequence
  Description of Artificial Sequence: Synthetic oligonucleotide
  Sense strand starting at position 419 of SEQ ID NO: 1881396
uaaugugaccuuggacuga

SEQ ID NO: 2041277 - RNA, 19 nt, Artificial Sequence
  Description of Artificial Sequence: Synthetic oligonucleotide
  Antisense strand to SEQ ID NO: 2041276
ucaguccaaggucacauua

SEQ ID NO: 2041278 - RNA, 19 nt, Artificial Sequence
  Description of Artificial Sequence: Synthetic oligonucleotide
  Sense strand starting at position 601 of SEQ ID NO: 1881396
cuucucauaucaguaagua

SEQ ID NO: 2041279 - RNA, 19 nt, Artificial Sequence
  Description of Artificial Sequence: Synthetic oligonucleotide
  Antisense strand to SEQ ID NO: 2041278
uacuuacugauaugagaag

SEQ ID NO: 2041280 - RNA, 19 nt, Artificial Sequence
  Description of Artificial Sequence: Synthetic oligonucleotide
  Sense strand starting at position 602 of SEQ ID NO: 1881396
uucucauaucaguaaguac

SEQ ID NO: 2041281 - RNA, 19 nt, Artificial Sequence
  Description of Artificial Sequence: Synthetic oligonucleotide
  Antisense strand to SEQ ID NO: 2041280
guacuuacugauaugagaa

SEQ ID NO: 2041282 - RNA, 19 nt, Artificial Sequence
  Description of Artificial Sequence: Synthetic oligonucleotide
  Sense strand starting at position 864 of SEQ ID NO: 1881396
acugaucuguuuccaugaa

SEQ ID NO: 2041283 - RNA, 19 nt, Artificial Sequence
  Description of Artificial Sequence: Synthetic oligonucleotide
  Antisense strand to SEQ ID NO: 2041282
uucauggaaacagaucagu

SEQ ID NO: 2041284 - RNA, 19 nt, Artificial Sequence
  Description of Artificial Sequence: Synthetic oligonucleotide
  Sense strand starting at position 1074 of SEQ ID NO: 1881396
ccaccaguuuccucaagga

SEQ ID NO: 2041285 - RNA, 19 nt, Artificial Sequence
  Description of Artificial Sequence: Synthetic oligonucleotide
  Antisense strand to SEQ ID NO: 2041284
uccuugaggaaacuggugg

SEQ ID NO: 2041286 - RNA, 19 nt, Artificial Sequence
  Description of Artificial Sequence: Synthetic oligonucleotide
  Sense strand starting at position 1078 of SEQ ID NO: 1881396
caguuuccucaaggacaga

SEQ ID NO: 2041287 - RNA, 19 nt, Artificial Sequence
  Description of Artificial Sequence: Synthetic oligonucleotide
  Antisense strand to SEQ ID NO: 2041286
ucuguccuugaggaaacug

SEQ ID NO: 2041288 - RNA, 19 nt, Artificial Sequence
  Description of Artificial Sequence: Synthetic oligonucleotide
  Sense strand starting at position 1172 of SEQ ID NO: 1881396
ucaaaugaauguucgggaa

SEQ ID NO: 2041289 - RNA, 19 nt, Artificial Sequence
  Description of Artificial Sequence: Synthetic oligonucleotide
  Antisense strand to SEQ ID NO: 2041288
uucccgaacauucauuuga

SEQ ID NO: 2041290 - RNA, 19 nt, Artificial Sequence
  Description of Artificial Sequence: Synthetic oligonucleotide
  Sense strand starting at position 1213 of SEQ ID NO: 1881396
gaugccaucccugggcaau

SEQ ID NO: 2041291 - RNA, 19 nt, Artificial Sequence
  Description of Artificial Sequence: Synthetic oligonucleotide
  Antisense strand to SEQ ID NO: 2041290
auugcccagggauggcauc

SEQ ID NO: 2041292 - RNA, 19 nt, Artificial Sequence
  Description of Artificial Sequence: Synthetic oligonucleotide
  Sense strand starting at position 1297 of SEQ ID NO: 1881396
agcacugaacucugaacuu

SEQ ID NO: 2041293 - RNA, 19 nt, Artificial Sequence
  Description of Artificial Sequence: Synthetic oligonucleotide
  Antisense strand to SEQ ID NO: 2041292
aaguucagaguucagugcu

SEQ ID NO: 2041294 - RNA, 19 nt, Artificial Sequence
  Description of Artificial Sequence: Synthetic oligonucleotide
  Sense strand starting at position 1340 of SEQ ID NO: 1881396
gagcuuucugaagguagga

SEQ ID NO: 2041295 - RNA, 19 nt, Artificial Sequence
  Description of Artificial Sequence: Synthetic oligonucleotide
  Antisense strand to SEQ ID NO: 2041294
uccuaccuucagaaagcuc

SEQ ID NO: 2041296 - RNA, 19 nt, Artificial Sequence
  Description of Artificial Sequence: Synthetic oligonucleotide
  Sense strand starting at position 1342 of SEQ ID NO: 1881396
gcuuucugaagguaggaga

SEQ ID NO: 2041297 - RNA, 19 nt, Artificial Sequence
  Description of Artificial Sequence: Synthetic oligonucleotide
  Antisense strand to SEQ ID NO: 2041296
ucuccuaccuucagaaagc

SEQ ID NO: 2041298 - RNA, 19 nt, Artificial Sequence
  Description of Artificial Sequence: Synthetic oligonucleotide
  Sense strand starting at position 1358 of SEQ ID NO: 1881396
agaugcaucgugguguguu

SEQ ID NO: 2041299 - RNA, 19 nt, Artificial Sequence
  Description of Artificial Sequence: Synthetic oligonucleotide
  Antisense strand to SEQ ID NO: 2041298
aacacaccacgaugcaucu

SEQ ID NO: 2041300 - RNA, 19 nt, Artificial Sequence
  Description of Artificial Sequence: Synthetic oligonucleotide
  Sense strand starting at position 1424 of SEQ ID NO: 1881396
gcauauaagugaccugaac

SEQ ID NO: 2041301 - RNA, 19 nt, Artificial Sequence
  Description of Artificial Sequence: Synthetic oligonucleotide
  Antisense strand to SEQ ID NO: 2041300
guucaggucacuuauaugc

SEQ ID NO: 2041302 - RNA, 19 nt, Artificial Sequence
  Description of Artificial Sequence: Synthetic oligonucleotide
  Sense strand starting at position 1698 of SEQ ID NO: 1881396
ggcacauucuuacuagacu

SEQ ID NO: 2041303 - RNA, 19 nt, Artificial Sequence
  Description of Artificial Sequence: Synthetic oligonucleotide
  Antisense strand to SEQ ID NO: 2041302
agucuaguaagaaugugcc

SEQ ID NO: 2041304 - RNA, 19 nt, Artificial Sequence
  Description of Artificial Sequence: Synthetic oligonucleotide
  Sense strand starting at position 1774 of SEQ ID NO: 1881396
guccaaauuggcuacaaau

SEQ ID NO: 2041305 - RNA, 19 nt, Artificial Sequence
  Description of Artificial Sequence: Synthetic oligonucleotide
  Antisense strand to SEQ ID NO: 2041304
auuuguagccaauuuggac

SEQ ID NO: 2041306 - RNA, 19 nt, Artificial Sequence
  Description of Artificial Sequence: Synthetic oligonucleotide
  Sense strand starting at position 1802 of SEQ ID NO: 1881396
ucauaaagcccucagguuu

SEQ ID NO: 2041307 - RNA, 19 nt, Artificial Sequence
  Description of Artificial Sequence: Synthetic oligonucleotide
  Antisense strand to SEQ ID NO: 2041306
aaaccugagggcuuuauga

SEQ ID NO: 2041308 - RNA, 19 nt, Artificial Sequence
  Description of Artificial Sequence: Synthetic oligonucleotide
  Sense strand starting at position 2068 of SEQ ID NO: 1881396
cgugauuaagcucaaucuu

SEQ ID NO: 2041309 - RNA, 19 nt, Artificial Sequence
  Description of Artificial Sequence: Synthetic oligonucleotide
  Antisense strand to SEQ ID NO: 2041308
aagauugagcuuaaucacg

SEQ ID NO: 2041310 - RNA, 19 nt, Artificial Sequence
  Description of Artificial Sequence: Synthetic oligonucleotide
  Sense strand starting at position 2159 of SEQ ID NO: 1881396
accagucacuuuguuaaua

SEQ ID NO: 2041311 - RNA, 19 nt, Artificial Sequence
  Description of Artificial Sequence: Synthetic oligonucleotide
  Antisense strand to SEQ ID NO: 2041310
uauuaacaaagugacuggu

SEQ ID NO: 2041312 - RNA, 19 nt, Artificial Sequence
  Description of Artificial Sequence: Synthetic oligonucleotide
  Sense strand starting at position 2160 of SEQ ID NO: 1881396
ccagucacuuuguuaauau

SEQ ID NO: 2041313 - RNA, 19 nt, Artificial Sequence
  Description of Artificial Sequence: Synthetic oligonucleotide
  Antisense strand to SEQ ID NO: 2041312
auauuaacaaagugacugg

SEQ ID NO: 2041314 - RNA, 19 nt, Artificial Sequence
  Description of Artificial Sequence: Synthetic oligonucleotide
  Sense strand starting at position 2292 of SEQ ID NO: 1881396
gaaguuacagaauguuaga

SEQ ID NO: 2041315 - RNA, 19 nt, Artificial Sequence
  Description of Artificial Sequence: Synthetic oligonucleotide
  Antisense strand to SEQ ID NO: 2041314
ucuaacauucuguaacuuc

SEQ ID NO: 2041316 - RNA, 19 nt, Artificial Sequence
  Description of Artificial Sequence: Synthetic oligonucleotide
  Sense strand starting at position 2311 of SEQ ID NO: 1881396
agcucugagccagaaaucu

SEQ ID NO: 2041317 - RNA, 19 nt, Artificial Sequence
  Description of Artificial Sequence: Synthetic oligonucleotide
  Antisense strand to SEQ ID NO: 2041316
agauuucuggcucagagcu

SEQ ID NO: 2041318 - RNA, 19 nt, Artificial Sequence
  Description of Artificial Sequence: Synthetic oligonucleotide
  Sense strand starting at position 2319 of SEQ ID NO: 1881396
gccagaaaucuagggcaca

SEQ ID NO: 2041319 - RNA, 19 nt, Artificial Sequence
  Description of Artificial Sequence: Synthetic oligonucleotide
  Antisense strand to SEQ ID NO: 2041318
ugugcccuagauuucuggc

SEQ ID NO: 2041320 - RNA, 19 nt, Artificial Sequence
  Description of Artificial Sequence: Synthetic oligonucleotide
  Sense strand starting at position 2355 of SEQ ID NO: 1881396
acauuauaucauggugcau

SEQ ID NO: 2041321 - RNA, 19 nt, Artificial Sequence
  Description of Artificial Sequence: Synthetic oligonucleotide
  Antisense strand to SEQ ID NO: 2041320
augcaccaugauauaaugu

SEQ ID NO: 2041322 - RNA, 19 nt, Artificial Sequence
  Description of Artificial Sequence: Synthetic oligonucleotide
  Sense strand starting at position 2359 of SEQ ID NO: 1881396
uauaucauggugcaugauu

SEQ ID NO: 2041323 - RNA, 19 nt, Artificial Sequence
  Description of Artificial Sequence: Synthetic oligonucleotide
  Antisense strand to SEQ ID NO: 2041322
aaucaugcaccaugauaua

SEQ ID NO: 2041324 - RNA, 19 nt, Artificial Sequence
  Description of Artificial Sequence: Synthetic oligonucleotide
  Sense strand starting at position 2406 of SEQ ID NO: 1881396
uggcaacuccgauacaagu

SEQ ID NO: 2041325 - RNA, 19 nt, Artificial Sequence
  Description of Artificial Sequence: Synthetic oligonucleotide
  Antisense strand to SEQ ID NO: 2041324
acuuguaucggaguugcca

SEQ ID NO: 2041326 - RNA, 19 nt, Artificial Sequence
  Description of Artificial Sequence: Synthetic oligonucleotide
  Sense strand starting at position 2444 of SEQ ID NO: 1881396
aguguugcauaagugagaa

SEQ ID NO: 2041327 - RNA, 19 nt, Artificial Sequence
  Description of Artificial Sequence: Synthetic oligonucleotide
  Antisense strand to SEQ ID NO: 2041326
uucucacuuaugcaacacu

SEQ ID NO: 2041328 - RNA, 19 nt, Artificial Sequence
  Description of Artificial Sequence: Synthetic oligonucleotide
  Sense strand starting at position 2539 of SEQ ID NO: 1881396
gagaaagaugcaugugcaa

SEQ ID NO: 2041329 - RNA, 19 nt, Artificial Sequence
  Description of Artificial Sequence: Synthetic oligonucleotide
  Antisense strand to SEQ ID NO: 2041328
uugcacaugcaucuuucuc

SEQ ID NO: 2041330 - RNA, 19 nt, Artificial Sequence
  Description of Artificial Sequence: Synthetic oligonucleotide
  Sense strand starting at position 2798 of SEQ ID NO: 1881396
agagaauucuggcuuaugu

SEQ ID NO: 2041331 - RNA, 19 nt, Artificial Sequence
  Description of Artificial Sequence: Synthetic oligonucleotide
  Antisense strand to SEQ ID NO: 2041330
acauaagccagaauucucu

SEQ ID NO: 2041332 - RNA, 19 nt, Artificial Sequence
  Description of Artificial Sequence: Synthetic oligonucleotide
  Sense strand starting at position 2800 of SEQ ID NO: 1881396
agaauucuggcuuaugucu

SEQ ID NO: 2041333 - RNA, 19 nt, Artificial Sequence
  Description of Artificial Sequence: Synthetic oligonucleotide
  Antisense strand to SEQ ID NO: 2041332
agacauaagccagaauucu

SEQ ID NO: 2041334 - RNA, 19 nt, Artificial Sequence
  Description of Artificial Sequence: Synthetic oligonucleotide
  Sense strand starting at position 3165 of SEQ ID NO: 1881396
uuggaaaugguguauccau

SEQ ID NO: 2041335 - RNA, 19 nt, Artificial Sequence
  Description of Artificial Sequence: Synthetic oligonucleotide
  Antisense strand to SEQ ID NO: 2041334
auggauacaccauuuccaa

SEQ ID NO: 2041336 - RNA, 19 nt, Artificial Sequence
  Description of Artificial Sequence: Synthetic oligonucleotide
  Sense strand starting at position 3236 of SEQ ID NO: 1881396
uugcuaaugcuggacucau

SEQ ID NO: 2041337 - RNA, 19 nt, Artificial Sequence
  Description of Artificial Sequence: Synthetic oligonucleotide
  Antisense strand to SEQ ID NO: 2041336
augaguccagcauuagcaa

SEQ ID NO: 2041338 - RNA, 19 nt, Artificial Sequence
  Description of Artificial Sequence: Synthetic oligonucleotide
  Sense strand starting at position 3309 of SEQ ID NO: 1881396
cacagaaguguccaggcua

SEQ ID NO: 2041339 - RNA, 19 nt, Artificial Sequence
  Description of Artificial Sequence: Synthetic oligonucleotide
  Antisense strand to SEQ ID NO: 2041338
uagccuggacacuucugug

SEQ ID NO: 2041340 - RNA, 19 nt, Artificial Sequence
  Description of Artificial Sequence: Synthetic oligonucleotide
  Sense strand starting at position 3325 of SEQ ID NO: 1881396
cuaugacugcuaggaugaa

SEQ ID NO: 2041341 - RNA, 19 nt, Artificial Sequence
  Description of Artificial Sequence: Synthetic oligonucleotide
  Antisense strand to SEQ ID NO: 2041340
uucauccuagcagucauag

SEQ ID NO: 2041342 - RNA, 19 nt, Artificial Sequence
  Description of Artificial Sequence: Synthetic oligonucleotide
  Sense strand starting at position 3616 of SEQ ID NO: 1881396
ucaggagauguugguacua

SEQ ID NO: 2041343 - RNA, 19 nt, Artificial Sequence
  Description of Artificial Sequence: Synthetic oligonucleotide
  Antisense strand to SEQ ID NO: 2041342
uaguaccaacaucuccuga

SEQ ID NO: 2041344 - RNA, 19 nt, Artificial Sequence
  Description of Artificial Sequence: Synthetic oligonucleotide
  Sense strand starting at position 134 of SEQ ID NO: 1881397
gcaauuccucaaggaacca

SEQ ID NO: 2041345 - RNA, 19 nt, Artificial Sequence
  Description of Artificial Sequence: Synthetic oligonucleotide
  Antisense strand to SEQ ID NO: 2041344
ugguuccuugaggaauugc

SEQ ID NO: 2041346 - RNA, 19 nt, Artificial Sequence
  Description of Artificial Sequence: Synthetic oligonucleotide
  Sense strand starting at position 241 of SEQ ID NO: 1881397
uguuuauuccagcaccauu

SEQ ID NO: 2041347 - RNA, 19 nt, Artificial Sequence
  Description of Artificial Sequence: Synthetic oligonucleotide
  Antisense strand to SEQ ID NO: 2041346
aauggugcuggaauaaaca

SEQ ID NO: 2041348 - RNA, 19 nt, Artificial Sequence
  Description of Artificial Sequence: Synthetic oligonucleotide
  Sense strand starting at position 718 of SEQ ID NO: 1881397
aaagaaaucuguuugccag

SEQ ID NO: 2041349 - RNA, 19 nt, Artificial Sequence
  Description of Artificial Sequence: Synthetic oligonucleotide
  Antisense strand to SEQ ID NO: 2041348
cuggcaaacagauuucuuu

SEQ ID NO: 2041350 - RNA, 19 nt, Artificial Sequence
  Description of Artificial Sequence: Synthetic oligonucleotide
  Sense strand starting at position 719 of SEQ ID NO: 1881397
aagaaaucuguuugccaga

SEQ ID NO: 2041351 - RNA, 19 nt, Artificial Sequence
  Description of Artificial Sequence: Synthetic oligonucleotide
  Antisense strand to SEQ ID NO: 2041350
ucuggcaaacagauuucuu

SEQ ID NO: 2041352 - RNA, 19 nt, Artificial Sequence
  Description of Artificial Sequence: Synthetic oligonucleotide
  Sense strand starting at position 720 of SEQ ID NO: 1881397
agaaaucuguuugccagaa

SEQ ID NO: 2041353 - RNA, 19 nt, Artificial Sequence
  Description of Artificial Sequence: Synthetic oligonucleotide
  Antisense strand to SEQ ID NO: 2041352
uucuggcaaacagauuucu

SEQ ID NO: 2041354 - RNA, 19 nt, Artificial Sequence
  Description of Artificial Sequence: Synthetic oligonucleotide
  Sense strand starting at position 748 of SEQ ID NO: 1881397
agcaauagaccucauguga

SEQ ID NO: 2041355 - RNA, 19 nt, Artificial Sequence
  Description of Artificial Sequence: Synthetic oligonucleotide
  Antisense strand to SEQ ID NO: 2041354
ucacaugaggucuauugcu

SEQ ID NO: 2041356 - RNA, 19 nt, Artificial Sequence
  Description of Artificial Sequence: Synthetic oligonucleotide
  Sense strand starting at position 755 of SEQ ID NO: 1881397
gaccucaugugaguuauga

SEQ ID NO: 2041357 - RNA, 19 nt, Artificial Sequence
  Description of Artificial Sequence: Synthetic oligonucleotide
  Antisense strand to SEQ ID NO: 2041356
ucauaacucacaugagguc

SEQ ID NO: 2041358 - RNA, 19 nt, Artificial Sequence
  Description of Artificial Sequence: Synthetic oligonucleotide
  Sense strand starting at position 794 of SEQ ID NO: 1881397
ugugcuauuggauaaagac

SEQ ID NO: 2041359 - RNA, 19 nt, Artificial Sequence
  Description of Artificial Sequence: Synthetic oligonucleotide
  Antisense strand to SEQ ID NO: 2041358
gucuuuauccaauagcaca

SEQ ID NO: 2041360 - RNA, 19 nt, Artificial Sequence
  Description of Artificial Sequence: Synthetic oligonucleotide
  Sense strand starting at position 1442 of SEQ ID NO: 1881397
guugcaauggcugauauua

SEQ ID NO: 2041361 - RNA, 19 nt, Artificial Sequence
  Description of Artificial Sequence: Synthetic oligonucleotide
  Antisense strand to SEQ ID NO: 2041360
uaauaucagccauugcaac

SEQ ID NO: 2041362 - RNA, 19 nt, Artificial Sequence
  Description of Artificial Sequence: Synthetic oligonucleotide
  Sense strand starting at position 1595 of SEQ ID NO: 1881397
cucaguuguuaugugauuu

SEQ ID NO: 2041363 - RNA, 19 nt, Artificial Sequence
  Description of Artificial Sequence: Synthetic oligonucleotide
  Antisense strand to SEQ ID NO: 2041362
aaaucacauaacaacugag

SEQ ID NO: 2041364 - RNA, 19 nt, Artificial Sequence
  Description of Artificial Sequence: Synthetic oligonucleotide
  Sense strand starting at position 1596 of SEQ ID NO: 1881397
ucaguuguuaugugauuua

SEQ ID NO: 2041365 - RNA, 19 nt, Artificial Sequence
  Description of Artificial Sequence: Synthetic oligonucleotide
  Antisense strand to SEQ ID NO: 2041364
uaaaucacauaacaacuga

SEQ ID NO: 2041366 - RNA, 19 nt, Artificial Sequence
  Description of Artificial Sequence: Synthetic oligonucleotide
  Sense strand starting at position 1599 of SEQ ID NO: 1881397
guuguuaugugauuuagca

SEQ ID NO: 2041367 - RNA, 19 nt, Artificial Sequence
  Description of Artificial Sequence: Synthetic oligonucleotide
  Antisense strand to SEQ ID NO: 2041366
ugcuaaaucacauaacaac

SEQ ID NO: 2041368 - RNA, 19 nt, Artificial Sequence
  Description of Artificial Sequence: Synthetic oligonucleotide
  Sense strand starting at position 1601 of SEQ ID NO: 1881397
uguuaugugauuuagcagu

SEQ ID NO: 2041369 - RNA, 19 nt, Artificial Sequence
  Description of Artificial Sequence: Synthetic oligonucleotide
  Antisense strand to SEQ ID NO: 2041368
acugcuaaaucacauaaca

SEQ ID NO: 2041370 - RNA, 19 nt, Artificial Sequence
  Description of Artificial Sequence: Synthetic oligonucleotide
  Sense strand starting at position 1603 of SEQ ID NO: 1881397
uuaugugauuuagcaguua

SEQ ID NO: 2041371 - RNA, 19 nt, Artificial Sequence
  Description of Artificial Sequence: Synthetic oligonucleotide
  Antisense strand to SEQ ID NO: 2041370
uaacugcuaaaucacauaa

SEQ ID NO: 2041372 - RNA, 19 nt, Artificial Sequence
  Description of Artificial Sequence: Synthetic oligonucleotide
  Sense strand starting at position 1618 of SEQ ID NO: 1881397
guuagaguguacccacaga

SEQ ID NO: 2041373 - RNA, 19 nt, Artificial Sequence
  Description of Artificial Sequence: Synthetic oligonucleotide
  Antisense strand to SEQ ID NO: 2041372
ucuguggguacacucuaac

SEQ ID NO: 2041374 - RNA, 19 nt, Artificial Sequence
  Description of Artificial Sequence: Synthetic oligonucleotide
  Sense strand starting at position 1703 of SEQ ID NO: 1881397
uugcuaagcgccucgaaga

SEQ ID NO: 2041375 - RNA, 19 nt, Artificial Sequence
  Description of Artificial Sequence: Synthetic oligonucleotide
  Antisense strand to SEQ ID NO: 2041374
ucuucgaggcgcuuagcaa

SEQ ID NO: 2041376 - RNA, 19 nt, Artificial Sequence
  Description of Artificial Sequence: Synthetic oligonucleotide
  Sense strand starting at position 1799 of SEQ ID NO: 1881397
gcaggagcacugugaagau

SEQ ID NO: 2041377 - RNA, 19 nt, Artificial Sequence
  Description of Artificial Sequence: Synthetic oligonucleotide
  Antisense strand to SEQ ID NO: 2041376
aucuucacagugcuccugc

SEQ ID NO: 2041378 - RNA, 19 nt, Artificial Sequence
  Description of Artificial Sequence: Synthetic oligonucleotide
  Sense strand starting at position 2078 of SEQ ID NO: 1881397
caaaguagucguuggaaag

SEQ ID NO: 2041379 - RNA, 19 nt, Artificial Sequence
  Description of Artificial Sequence: Synthetic oligonucleotide
  Antisense strand to SEQ ID NO: 2041378
cuuuccaacgacuacuuug

SEQ ID NO: 2041380 - RNA, 19 nt, Artificial Sequence
  Description of Artificial Sequence: Synthetic oligonucleotide
  Sense strand starting at position 2200 of SEQ ID NO: 1881397
uugauaauguccucagcca

SEQ ID NO: 2041381 - RNA, 19 nt, Artificial Sequence
  Description of Artificial Sequence: Synthetic oligonucleotide
  Antisense strand to SEQ ID NO: 2041380
uggcugaggacauuaucaa

SEQ ID NO: 2041382 - RNA, 19 nt, Artificial Sequence
  Description of Artificial Sequence: Synthetic oligonucleotide
  Sense strand starting at position 2201 of SEQ ID NO: 1881397
ugauaauguccucagccaa

SEQ ID NO: 2041383 - RNA, 19 nt, Artificial Sequence
  Description of Artificial Sequence: Synthetic oligonucleotide
  Antisense strand to SEQ ID NO: 2041382
uuggcugaggacauuauca

SEQ ID NO: 2041384 - RNA, 19 nt, Artificial Sequence
  Description of Artificial Sequence: Synthetic oligonucleotide
  Sense strand starting at position 2445 of SEQ ID NO: 1881397
auggucuugcuacauaauu

SEQ ID NO: 2041385 - RNA, 19 nt, Artificial Sequence
  Description of Artificial Sequence: Synthetic oligonucleotide
  Antisense strand to SEQ ID NO: 2041384
aauuauguagcaagaccau

SEQ ID NO: 2041386 - RNA, 19 nt, Artificial Sequence
  Description of Artificial Sequence: Synthetic oligonucleotide
  Sense strand starting at position 2462 of SEQ ID NO: 1881397
uuccaucuugaaugucaga

SEQ ID NO: 2041387 - RNA, 19 nt, Artificial Sequence
  Description of Artificial Sequence: Synthetic oligonucleotide
  Antisense strand to SEQ ID NO: 2041386
ucugacauucaagauggaa

SEQ ID NO: 2041388 - RNA, 19 nt, Artificial Sequence
  Description of Artificial Sequence: Synthetic oligonucleotide
  Sense strand starting at position 2594 of SEQ ID NO: 1881397
guaggaaguaguugacaca

SEQ ID NO: 2041389 - RNA, 19 nt, Artificial Sequence
  Description of Artificial Sequence: Synthetic oligonucleotide
  Antisense strand to SEQ ID NO: 2041388
ugugucaacuacuuccuac

SEQ ID NO: 2041390 - RNA, 19 nt, Artificial Sequence
  Description of Artificial Sequence: Synthetic oligonucleotide
  Sense strand starting at position 2720 of SEQ ID NO: 1881397
ggaguuaauuacccucaga

SEQ ID NO: 2041391 - RNA, 19 nt, Artificial Sequence
  Description of Artificial Sequence: Synthetic oligonucleotide
  Antisense strand to SEQ ID NO: 2041390
ucugaggguaauuaacucc

SEQ ID NO: 2041392 - RNA, 19 nt, Artificial Sequence
  Description of Artificial Sequence: Synthetic oligonucleotide
  Sense strand starting at position 2794 of SEQ ID NO: 1881397
guauguugucucuauaucu

SEQ ID NO: 2041393 - RNA, 19 nt, Artificial Sequence
  Description of Artificial Sequence: Synthetic oligonucleotide
  Antisense strand to SEQ ID NO: 2041392
agauauagagacaacauac

SEQ ID NO: 2041394 - RNA, 19 nt, Artificial Sequence
  Description of Artificial Sequence: Synthetic oligonucleotide
  Sense strand starting at position 3386 of SEQ ID NO: 1881397
acaguuacauuccugaguu

SEQ ID NO: 2041395 - RNA, 19 nt, Artificial Sequence
  Description of Artificial Sequence: Synthetic oligonucleotide
  Antisense strand to SEQ ID NO: 2041394
aacucaggaauguaacugu

SEQ ID NO: 2041396 - RNA, 19 nt, Artificial Sequence
  Description of Artificial Sequence: Synthetic oligonucleotide
  Sense strand starting at position 3443 of SEQ ID NO: 1881397
gccuucuaucuguaaauga

SEQ ID NO: 2041397 - RNA, 19 nt, Artificial Sequence
  Description of Artificial Sequence: Synthetic oligonucleotide
  Antisense strand to SEQ ID NO: 2041396
ucauuuacagauagaaggc

SEQ ID NO: 2041398 - RNA, 19 nt, Artificial Sequence
  Description of Artificial Sequence: Synthetic oligonucleotide
  Sense strand starting at position 3450 of SEQ ID NO: 1881397
aucuguaaaugagucuaua

SEQ ID NO: 2041399 - RNA, 19 nt, Artificial Sequence
  Description of Artificial Sequence: Synthetic oligonucleotide
  Antisense strand to SEQ ID NO: 2041398
uauagacucauuuacagau

SEQ ID NO: 2041400 - RNA, 19 nt, Artificial Sequence
  Description of Artificial Sequence: Synthetic oligonucleotide
  Sense strand starting at position 3631 of SEQ ID NO: 1881397
uaaguccuagacugaauga

SEQ ID NO: 2041401 - RNA, 19 nt, Artificial Sequence
  Description of Artificial Sequence: Synthetic oligonucleotide
  Antisense strand to SEQ ID NO: 2041400
ucauucagucuaggacuua

SEQ ID NO: 2041402 - RNA, 19 nt, Artificial Sequence
  Description of Artificial Sequence: Synthetic oligonucleotide
  Sense strand starting at position 3672 of SEQ ID NO: 1881397
ugaguaggauaaccguaau

SEQ ID NO: 2041403 - RNA, 19 nt, Artificial Sequence
  Description of Artificial Sequence: Synthetic oligonucleotide
  Antisense strand to SEQ ID NO: 2041402
auuacgguuauccuacuca

SEQ ID NO: 2041404 - RNA, 19 nt, Artificial Sequence
  Description of Artificial Sequence: Synthetic oligonucleotide
  Sense strand starting at position 3675 of SEQ ID NO: 1881397
guaggauaaccguaaugca

SEQ ID NO: 2041405 - RNA, 19 nt, Artificial Sequence
  Description of Artificial Sequence: Synthetic oligonucleotide
  Antisense strand to SEQ ID NO: 2041404
ugcauuacgguuauccuac

SEQ ID NO: 2041406 - RNA, 19 nt, Artificial Sequence
  Description of Artificial Sequence: Synthetic oligonucleotide
  Sense strand starting at position 3805 of SEQ ID NO: 1881397
aaacauuacggcuaugaug

SEQ ID NO: 2041407 - RNA, 19 nt, Artificial Sequence
  Description of Artificial Sequence: Synthetic oligonucleotide
  Antisense strand to SEQ ID NO: 2041406
caucauagccguaauguuu

SEQ ID NO: 2041408 - RNA, 19 nt, Artificial Sequence
  Description of Artificial Sequence: Synthetic oligonucleotide
  Sense strand starting at position 3807 of SEQ ID NO: 1881397
acauuacggcuaugaugua

SEQ ID NO: 2041409 - RNA, 19 nt, Artificial Sequence
  Description of Artificial Sequence: Synthetic oligonucleotide
  Antisense strand to SEQ ID NO: 2041408
uacaucauagccguaaugu

SEQ ID NO: 2041410 - RNA, 19 nt, Artificial Sequence
  Description of Artificial Sequence: Synthetic oligonucleotide
  Sense strand starting at position 3813 of SEQ ID NO: 1881397
cggcuaugauguacgugaa

SEQ ID NO: 2041411 - RNA, 19 nt, Artificial Sequence
  Description of Artificial Sequence: Synthetic oligonucleotide
  Antisense strand to SEQ ID NO: 2041410
uucacguacaucauagccg

SEQ ID NO: 2041412 - RNA, 19 nt, Artificial Sequence
  Description of Artificial Sequence: Synthetic oligonucleotide
  Sense strand starting at position 3816 of SEQ ID NO: 1881397
cuaugauguacgugaaagg

SEQ ID NO: 2041413 - RNA, 19 nt, Artificial Sequence
  Description of Artificial Sequence: Synthetic oligonucleotide
  Antisense strand to SEQ ID NO: 2041412
ccuuucacguacaucauag

SEQ ID NO: 2041414 - RNA, 19 nt, Artificial Sequence
  Description of Artificial Sequence: Synthetic oligonucleotide
  Sense strand starting at position 3823 of SEQ ID NO: 1881397
guacgugaaaggcaugaaa

SEQ ID NO: 2041415 - RNA, 19 nt, Artificial Sequence
  Description of Artificial Sequence: Synthetic oligonucleotide
  Antisense strand to SEQ ID NO: 2041414
uuucaugccuuucacguac

SEQ ID NO: 2041416 - RNA, 19 nt, Artificial Sequence
  Description of Artificial Sequence: Synthetic oligonucleotide
  Sense strand starting at position 3860 of SEQ ID NO: 1881397
gcaggaagucaacaucucu

SEQ ID NO: 2041417 - RNA, 19 nt, Artificial Sequence
  Description of Artificial Sequence: Synthetic oligonucleotide
  Antisense strand to SEQ ID NO: 2041416
agagauguugacuuccugc

SEQ ID NO: 2041418 - RNA, 19 nt, Artificial Sequence
  Description of Artificial Sequence: Synthetic oligonucleotide
  Sense strand starting at position 3879 of SEQ ID NO: 1881397
aucuuauaagcacguaaga

SEQ ID NO: 2041419 - RNA, 19 nt, Artificial Sequence
  Description of Artificial Sequence: Synthetic oligonucleotide
  Antisense strand to SEQ ID NO: 2041418
ucuuacgugcuuauaagau

SEQ ID NO: 2041420 - RNA, 19 nt, Artificial Sequence
  Description of Artificial Sequence: Synthetic oligonucleotide
  Sense strand starting at position 3896 of SEQ ID NO: 1881397
gaaagucuagaguguggaa

SEQ ID NO: 2041421 - RNA, 19 nt, Artificial Sequence
  Description of Artificial Sequence: Synthetic oligonucleotide
  Antisense strand to SEQ ID NO: 2041420
uuccacacucuagacuuuc

SEQ ID NO: 2041422 - RNA, 19 nt, Artificial Sequence
  Description of Artificial Sequence: Synthetic oligonucleotide
  Sense strand starting at position 3898 of SEQ ID NO: 1881397
aagucuagaguguggaaau

SEQ ID NO: 2041423 - RNA, 19 nt, Artificial Sequence
  Description of Artificial Sequence: Synthetic oligonucleotide
  Antisense strand to SEQ ID NO: 2041422
auuuccacacucuagacuu

SEQ ID NO: 2041424 - RNA, 19 nt, Artificial Sequence
  Description of Artificial Sequence: Synthetic oligonucleotide
  Sense strand starting at position 213 of SEQ ID NO: 1881398
uuuaauauaucagugcaga

SEQ ID NO: 2041425 - RNA, 19 nt, Artificial Sequence
  Description of Artificial Sequence: Synthetic oligonucleotide
  Antisense strand to SEQ ID NO: 2041424
ucugcacugauauauuaaa

SEQ ID NO: 2041426 - RNA, 19 nt, Artificial Sequence
  Description of Artificial Sequence: Synthetic oligonucleotide
  Sense strand starting at position 214 of SEQ ID NO: 1881398
uuaauauaucagugcagau

SEQ ID NO: 2041427 - RNA, 19 nt, Artificial Sequence
  Description of Artificial Sequence: Synthetic oligonucleotide
  Antisense strand to SEQ ID NO: 2041426
aucugcacugauauauuaa

SEQ ID NO: 2041428 - RNA, 19 nt, Artificial Sequence
  Description of Artificial Sequence: Synthetic oligonucleotide
  Sense strand starting at position 452 of SEQ ID NO: 1881398
agaagcaguccuuaaauug

SEQ ID NO: 2041429 - RNA, 19 nt, Artificial Sequence
  Description of Artificial Sequence: Synthetic oligonucleotide
  Antisense strand to SEQ ID NO: 2041428
caauuuaaggacugcuucu

SEQ ID NO: 2041430 - RNA, 19 nt, Artificial Sequence
  Description of Artificial Sequence: Synthetic oligonucleotide
  Sense strand starting at position 641 of SEQ ID NO: 1881398
cugguauucugaucucaaa

SEQ ID NO: 2041431 - RNA, 19 nt, Artificial Sequence
  Description of Artificial Sequence: Synthetic oligonucleotide
  Antisense strand to SEQ ID NO: 2041430
uuugagaucagaauaccag

SEQ ID NO: 2041432 - RNA, 19 nt, Artificial Sequence
  Description of Artificial Sequence: Synthetic oligonucleotide
  Sense strand starting at position 674 of SEQ ID NO: 1881398
gauucuauaucagugaugu

SEQ ID NO: 2041433 - RNA, 19 nt, Artificial Sequence
  Description of Artificial Sequence: Synthetic oligonucleotide
  Antisense strand to SEQ ID NO: 2041432
acaucacugauauagaauc

SEQ ID NO: 2041434 - RNA, 19 nt, Artificial Sequence
  Description of Artificial Sequence: Synthetic oligonucleotide
  Sense strand starting at position 675 of SEQ ID NO: 1881398
auucuauaucagugauguc

SEQ ID NO: 2041435 - RNA, 19 nt, Artificial Sequence
  Description of Artificial Sequence: Synthetic oligonucleotide
  Antisense strand to SEQ ID NO: 2041434
gacaucacugauauagaau

SEQ ID NO: 2041436 - RNA, 19 nt, Artificial Sequence
  Description of Artificial Sequence: Synthetic oligonucleotide
  Sense strand starting at position 685 of SEQ ID NO: 1881398
agugaugucuuagucaaua

SEQ ID NO: 2041437 - RNA, 19 nt, Artificial Sequence
  Description of Artificial Sequence: Synthetic oligonucleotide
  Antisense strand to SEQ ID NO: 2041436
uauugacuaagacaucacu

SEQ ID NO: 2041438 - RNA, 19 nt, Artificial Sequence
  Description of Artificial Sequence: Synthetic oligonucleotide
  Sense strand starting at position 690 of SEQ ID NO: 1881398
ugucuuagucaauacaaug

SEQ ID NO: 2041439 - RNA, 19 nt, Artificial Sequence
  Description of Artificial Sequence: Synthetic oligonucleotide
  Antisense strand to SEQ ID NO: 2041438
cauuguauugacuaagaca

SEQ ID NO: 2041440 - RNA, 19 nt, Artificial Sequence
  Description of Artificial Sequence: Synthetic oligonucleotide
  Sense strand starting at position 722 of SEQ ID NO: 1881398
gguaauucacgugaaggua

SEQ ID NO: 2041441 - RNA, 19 nt, Artificial Sequence
  Description of Artificial Sequence: Synthetic oligonucleotide
  Antisense strand to SEQ ID NO: 2041440
uaccuucacgugaauuacc

SEQ ID NO: 2041442 - RNA, 19 nt, Artificial Sequence
  Description of Artificial Sequence: Synthetic oligonucleotide
  Sense strand starting at position 856 of SEQ ID NO: 1881398
uccggucugauugaggaaa

SEQ ID NO: 2041443 - RNA, 19 nt, Artificial Sequence
  Description of Artificial Sequence: Synthetic oligonucleotide
  Antisense strand to SEQ ID NO: 2041442
uuuccucaaucagaccgga

SEQ ID NO: 2041444 - RNA, 19 nt, Artificial Sequence
  Description of Artificial Sequence: Synthetic oligonucleotide
  Sense strand starting at position 971 of SEQ ID NO: 1881398
gccauaaauaaaggugagu

SEQ ID NO: 2041445 - RNA, 19 nt, Artificial Sequence
  Description of Artificial Sequence: Synthetic oligonucleotide
  Antisense strand to SEQ ID NO: 2041444
acucaccuuuauuuauggc

SEQ ID NO: 2041446 - RNA, 19 nt, Artificial Sequence
  Description of Artificial Sequence: Synthetic oligonucleotide
  Sense strand starting at position 1320 of SEQ ID NO: 1881398
cucuuacaccgguauaaga

SEQ ID NO: 2041447 - RNA, 19 nt, Artificial Sequence
  Description of Artificial Sequence: Synthetic oligonucleotide
  Antisense strand to SEQ ID NO: 2041446
ucuuauaccgguguaagag

SEQ ID NO: 2041448 - RNA, 19 nt, Artificial Sequence
  Description of Artificial Sequence: Synthetic oligonucleotide
  Sense strand starting at position 1327 of SEQ ID NO: 1881398
accgguauaagaugaaacu

SEQ ID NO: 2041449 - RNA, 19 nt, Artificial Sequence
  Description of Artificial Sequence: Synthetic oligonucleotide
  Antisense strand to SEQ ID NO: 2041448
aguuucaucuuauaccggu

SEQ ID NO: 2041450 - RNA, 19 nt, Artificial Sequence
  Description of Artificial Sequence: Synthetic oligonucleotide
  Sense strand starting at position 1659 of SEQ ID NO: 1881398
uacuucuucgcuggagaaa

SEQ ID NO: 2041451 - RNA, 19 nt, Artificial Sequence
  Description of Artificial Sequence: Synthetic oligonucleotide
  Antisense strand to SEQ ID NO: 2041450
uuucuccagcgaagaagua

SEQ ID NO: 2041452 - RNA, 19 nt, Artificial Sequence
  Description of Artificial Sequence: Synthetic oligonucleotide
  Sense strand starting at position 1660 of SEQ ID NO: 1881398
acuucuucgcuggagaaau

SEQ ID NO: 2041453 - RNA, 19 nt, Artificial Sequence
  Description of Artificial Sequence: Synthetic oligonucleotide
  Antisense strand to SEQ ID NO: 2041452
auuucuccagcgaagaagu

SEQ ID NO: 2041454 - RNA, 19 nt, Artificial Sequence
  Description of Artificial Sequence: Synthetic oligonucleotide
  Sense strand starting at position 1989 of SEQ ID NO: 1881398
ggcuguuauaaugagacac

SEQ ID NO: 2041455 - RNA, 19 nt, Artificial Sequence
  Description of Artificial Sequence: Synthetic oligonucleotide
  Antisense strand to SEQ ID NO: 2041454
gugucucauuauaacagcc

SEQ ID NO: 2041456 - RNA, 19 nt, Artificial Sequence
  Description of Artificial Sequence: Synthetic oligonucleotide
  Sense strand starting at position 2247 of SEQ ID NO: 1881398
ccugaaccuugacuuguua

SEQ ID NO: 2041457 - RNA, 19 nt, Artificial Sequence
  Description of Artificial Sequence: Synthetic oligonucleotide
  Antisense strand to SEQ ID NO: 2041456
uaacaagucaagguucagg

SEQ ID NO: 2041458 - RNA, 19 nt, Artificial Sequence
  Description of Artificial Sequence: Synthetic oligonucleotide
  Sense strand starting at position 2358 of SEQ ID NO: 1881398
aaaugcucucgcgcugaga

SEQ ID NO: 2041459 - RNA, 19 nt, Artificial Sequence
  Description of Artificial Sequence: Synthetic oligonucleotide
  Antisense strand to SEQ ID NO: 2041458
ucucagcgcgagagcauuu

SEQ ID NO: 2041460 - RNA, 19 nt, Artificial Sequence
  Description of Artificial Sequence: Synthetic oligonucleotide
  Sense strand starting at position 2359 of SEQ ID NO: 1881398
aaugcucucgcgcugagaa

SEQ ID NO: 2041461 - RNA, 19 nt, Artificial Sequence
  Description of Artificial Sequence: Synthetic oligonucleotide
  Antisense strand to SEQ ID NO: 2041460
uucucagcgcgagagcauu

SEQ ID NO: 2041462 - RNA, 19 nt, Artificial Sequence
  Description of Artificial Sequence: Synthetic oligonucleotide
  Sense strand starting at position 2470 of SEQ ID NO: 1881398
ggacuugugugcaaggaag

SEQ ID NO: 2041463 - RNA, 19 nt, Artificial Sequence
  Description of Artificial Sequence: Synthetic oligonucleotide
  Antisense strand to SEQ ID NO: 2041462
cuuccuugcacacaagucc

SEQ ID NO: 2041464 - RNA, 19 nt, Artificial Sequence
  Description of Artificial Sequence: Synthetic oligonucleotide
  Sense strand starting at position 2653 of SEQ ID NO: 1881398
cugggaagguuugccagaa

SEQ ID NO: 2041465 - RNA, 19 nt, Artificial Sequence
  Description of Artificial Sequence: Synthetic oligonucleotide
  Antisense strand to SEQ ID NO: 2041464
uucuggcaaaccuucccag

SEQ ID NO: 2041466 - RNA, 19 nt, Artificial Sequence
  Description of Artificial Sequence: Synthetic oligonucleotide
  Sense strand starting at position 2941 of SEQ ID NO: 1881398
ggaagauguguacgugaga

SEQ ID NO: 2041467 - RNA, 19 nt, Artificial Sequence
  Description of Artificial Sequence: Synthetic oligonucleotide
  Antisense strand to SEQ ID NO: 2041466
ucucacguacacaucuucc

SEQ ID NO: 2041468 - RNA, 19 nt, Artificial Sequence
  Description of Artificial Sequence: Synthetic oligonucleotide
  Sense strand starting at position 2947 of SEQ ID NO: 1881398
uguguacgugagagcgauu

SEQ ID NO: 2041469 - RNA, 19 nt, Artificial Sequence
  Description of Artificial Sequence: Synthetic oligonucleotide
  Antisense strand to SEQ ID NO: 2041468
aaucgcucucacguacaca

SEQ ID NO: 2041470 - RNA, 19 nt, Artificial Sequence
  Description of Artificial Sequence: Synthetic oligonucleotide
  Sense strand starting at position 2950 of SEQ ID NO: 1881398
guacgugagagcgauuuca

SEQ ID NO: 2041471 - RNA, 19 nt, Artificial Sequence
  Description of Artificial Sequence: Synthetic oligonucleotide
  Antisense strand to SEQ ID NO: 2041470
ugaaaucgcucucacguac

SEQ ID NO: 2041472 - RNA, 19 nt, Artificial Sequence
  Description of Artificial Sequence: Synthetic oligonucleotide
  Sense strand starting at position 3002 of SEQ ID NO: 1881398
uuuacagugguauacauga

SEQ ID NO: 2041473 - RNA, 19 nt, Artificial Sequence
  Description of Artificial Sequence: Synthetic oligonucleotide
  Antisense strand to SEQ ID NO: 2041472
ucauguauaccacuguaaa

SEQ ID NO: 2041474 - RNA, 19 nt, Artificial Sequence
  Description of Artificial Sequence: Synthetic oligonucleotide
  Sense strand starting at position 3015 of SEQ ID NO: 1881398
acaugauucuccuucugua

SEQ ID NO: 2041475 - RNA, 19 nt, Artificial Sequence
  Description of Artificial Sequence: Synthetic oligonucleotide
  Antisense strand to SEQ ID NO: 2041474
uacagaaggagaaucaugu

SEQ ID NO: 2041476 - RNA, 19 nt, Artificial Sequence
  Description of Artificial Sequence: Synthetic oligonucleotide
  Sense strand starting at position 3023 of SEQ ID NO: 1881398
cuccuucuguaaucaagag

SEQ ID NO: 2041477 - RNA, 19 nt, Artificial Sequence
  Description of Artificial Sequence: Synthetic oligonucleotide
  Antisense strand to SEQ ID NO: 2041476
cucuugauuacagaaggag

SEQ ID NO: 2041478 - RNA, 19 nt, Artificial Sequence
  Description of Artificial Sequence: Synthetic oligonucleotide
  Sense strand starting at position 3177 of SEQ ID NO: 1881398
cuguuaacagcagaaugua

SEQ ID NO: 2041479 - RNA, 19 nt, Artificial Sequence
  Description of Artificial Sequence: Synthetic oligonucleotide
  Antisense strand to SEQ ID NO: 2041478
uacauucugcuguuaacag

SEQ ID NO: 2041480 - RNA, 19 nt, Artificial Sequence
  Description of Artificial Sequence: Synthetic oligonucleotide
  Sense strand starting at position 3180 of SEQ ID NO: 1881398
uuaacagcagaauguaauu

SEQ ID NO: 2041481 - RNA, 19 nt, Artificial Sequence
  Description of Artificial Sequence: Synthetic oligonucleotide
  Antisense strand to SEQ ID NO: 2041480
aauuacauucugcuguuaa

SEQ ID NO: 2041482 - RNA, 19 nt, Artificial Sequence
  Description of Artificial Sequence: Synthetic oligonucleotide
  Sense strand starting at position 3210 of SEQ ID NO: 1881398
acugaugguuucuuaauca

SEQ ID NO: 2041483 - RNA, 19 nt, Artificial Sequence
  Description of Artificial Sequence: Synthetic oligonucleotide
  Antisense strand to SEQ ID NO: 2041482
ugauuaagaaaccaucagu

SEQ ID NO: 2041484 - RNA, 19 nt, Artificial Sequence
  Description of Artificial Sequence: Synthetic oligonucleotide
  Sense strand starting at position 3222 of SEQ ID NO: 1881398
uuaaucaugcaguaugaag

SEQ ID NO: 2041485 - RNA, 19 nt, Artificial Sequence
  Description of Artificial Sequence: Synthetic oligonucleotide
  Antisense strand to SEQ ID NO: 2041484
cuucauacugcaugauuaa

SEQ ID NO: 2041486 - RNA, 19 nt, Artificial Sequence
  Description of Artificial Sequence: Synthetic oligonucleotide
  Sense strand starting at position 3224 of SEQ ID NO: 1881398
aaucaugcaguaugaagau

SEQ ID NO: 2041487 - RNA, 19 nt, Artificial Sequence
  Description of Artificial Sequence: Synthetic oligonucleotide
  Antisense strand to SEQ ID NO: 2041486
aucuucauacugcaugauu

SEQ ID NO: 2041488 - RNA, 19 nt, Artificial Sequence
  Description of Artificial Sequence: Synthetic oligonucleotide
  Sense strand starting at position 3295 of SEQ ID NO: 1881398
ucaucaugacugcagacau

SEQ ID NO: 2041489 - RNA, 19 nt, Artificial Sequence
  Description of Artificial Sequence: Synthetic oligonucleotide
  Antisense strand to SEQ ID NO: 2041488
augucugcagucaugauga

SEQ ID NO: 2041490 - RNA, 19 nt, Artificial Sequence
  Description of Artificial Sequence: Synthetic oligonucleotide
  Sense strand starting at position 3306 of SEQ ID NO: 1881398
gcagacauuagaggacuuu

SEQ ID NO: 2041491 - RNA, 19 nt, Artificial Sequence
  Description of Artificial Sequence: Synthetic oligonucleotide
  Antisense strand to SEQ ID NO: 2041490
aaaguccucuaaugucugc

SEQ ID NO: 2041492 - RNA, 19 nt, Artificial Sequence
  Description of Artificial Sequence: Synthetic oligonucleotide
  Sense strand starting at position 3324 of SEQ ID NO: 1881398
ugaaacaaccuuuggugua

SEQ ID NO: 2041493 - RNA, 19 nt, Artificial Sequence
  Description of Artificial Sequence: Synthetic oligonucleotide
  Antisense strand to SEQ ID NO: 2041492
uacaccaaagguuguuuca

SEQ ID NO: 2041494 - RNA, 19 nt, Artificial Sequence
  Description of Artificial Sequence: Synthetic oligonucleotide
  Sense strand starting at position 3361 of SEQ ID NO: 1881398
acugauauuguauguauuc

SEQ ID NO: 2041495 - RNA, 19 nt, Artificial Sequence
  Description of Artificial Sequence: Synthetic oligonucleotide
  Antisense strand to SEQ ID NO: 2041494
gaauacauacaauaucagu

SEQ ID NO: 2041496 - RNA, 19 nt, Artificial Sequence
  Description of Artificial Sequence: Synthetic oligonucleotide
  Sense strand starting at position 3526 of SEQ ID NO: 1881398
aaucaucugguucgacaua

SEQ ID NO: 2041497 - RNA, 19 nt, Artificial Sequence
  Description of Artificial Sequence: Synthetic oligonucleotide
  Antisense strand to SEQ ID NO: 2041496
uaugucgaaccagaugauu

SEQ ID NO: 2041498 - RNA, 19 nt, Artificial Sequence
  Description of Artificial Sequence: Synthetic oligonucleotide
  Sense strand starting at position 3531 of SEQ ID NO: 1881398
ucugguucgacauaguaag

SEQ ID NO: 2041499 - RNA, 19 nt, Artificial Sequence
  Description of Artificial Sequence: Synthetic oligonucleotide
  Antisense strand to SEQ ID NO: 2041498
cuuacuaugucgaaccaga

SEQ ID NO: 2041500 - RNA, 19 nt, Artificial Sequence
  Description of Artificial Sequence: Synthetic oligonucleotide
  Sense strand starting at position 3677 of SEQ ID NO: 1881398
uugucucaggguugaaaga

SEQ ID NO: 2041501 - RNA, 19 nt, Artificial Sequence
  Description of Artificial Sequence: Synthetic oligonucleotide
  Antisense strand to SEQ ID NO: 2041500
ucuuucaacccugagacaa

SEQ ID NO: 2041502 - RNA, 19 nt, Artificial Sequence
  Description of Artificial Sequence: Synthetic oligonucleotide
  Sense strand starting at position 3966 of SEQ ID NO: 1881398
uccuaagagccugagaagu

SEQ ID NO: 2041503 - RNA, 19 nt, Artificial Sequence
  Description of Artificial Sequence: Synthetic oligonucleotide
  Antisense strand to SEQ ID NO: 2041502
acuucucaggcucuuagga

SEQ ID NO: 2041504 - RNA, 19 nt, Artificial Sequence
  Description of Artificial Sequence: Synthetic oligonucleotide
  Sense strand starting at position 7 of SEQ ID NO: 1881399
cauggugcucagugcuuua

SEQ ID NO: 2041505 - RNA, 19 nt, Artificial Sequence
  Description of Artificial Sequence: Synthetic oligonucleotide
  Antisense strand to SEQ ID NO: 2041504
uaaagcacugagcaccaug

SEQ ID NO: 2041506 - RNA, 19 nt, Artificial Sequence
  Description of Artificial Sequence: Synthetic oligonucleotide
  Sense strand starting at position 19 of SEQ ID NO: 1881399
ugcuuuacacguggugaca

SEQ ID NO: 2041507 - RNA, 19 nt, Artificial Sequence
  Description of Artificial Sequence: Synthetic oligonucleotide
  Antisense strand to SEQ ID NO: 2041506
ugucaccacguguaaagca

SEQ ID NO: 2041508 - RNA, 19 nt, Artificial Sequence
  Description of Artificial Sequence: Synthetic oligonucleotide
  Sense strand starting at position 53 of SEQ ID NO: 1881399
ucgccuucuaagggagaga

SEQ ID NO: 2041509 - RNA, 19 nt, Artificial Sequence
  Description of Artificial Sequence: Synthetic oligonucleotide
  Antisense strand to SEQ ID NO: 2041508
ucucucccuuagaaggcga

SEQ ID NO: 2041510 - RNA, 19 nt, Artificial Sequence
  Description of Artificial Sequence: Synthetic oligonucleotide
  Sense strand starting at position 137 of SEQ ID NO: 1881399
ucuacuuaguucucuuaga

SEQ ID NO: 2041511 - RNA, 19 nt, Artificial Sequence
  Description of Artificial Sequence: Synthetic oligonucleotide
  Antisense strand to SEQ ID NO: 2041510
ucuaagagaacuaaguaga

SEQ ID NO: 2041512 - RNA, 19 nt, Artificial Sequence
  Description of Artificial Sequence: Synthetic oligonucleotide
  Sense strand starting at position 138 of SEQ ID NO: 1881399
cuacuuaguucucuuagac

SEQ ID NO: 2041513 - RNA, 19 nt, Artificial Sequence
  Description of Artificial Sequence: Synthetic oligonucleotide
  Antisense strand to SEQ ID NO: 2041512
gucuaagagaacuaaguag

SEQ ID NO: 2041514 - RNA, 19 nt, Artificial Sequence
  Description of Artificial Sequence: Synthetic oligonucleotide
  Sense strand starting at position 142 of SEQ ID NO: 1881399
uuaguucucuuagacugau

SEQ ID NO: 2041515 - RNA, 19 nt, Artificial Sequence
  Description of Artificial Sequence: Synthetic oligonucleotide
  Antisense strand to SEQ ID NO: 2041514
aucagucuaagagaacuaa

SEQ ID NO: 2041516 - RNA, 19 nt, Artificial Sequence
  Description of Artificial Sequence: Synthetic oligonucleotide
  Sense strand starting at position 258 of SEQ ID NO: 1881399
gggugauucucagaggagg

SEQ ID NO: 2041517 - RNA, 19 nt, Artificial Sequence
  Description of Artificial Sequence: Synthetic oligonucleotide
  Antisense strand to SEQ ID NO: 2041516
ccuccucugagaaucaccc

SEQ ID NO: 2041518 - RNA, 19 nt, Artificial Sequence
  Description of Artificial Sequence: Synthetic oligonucleotide
  Sense strand starting at position 273 of SEQ ID NO: 1881399
gaggaauuccugcggugca

SEQ ID NO: 2041519 - RNA, 19 nt, Artificial Sequence
  Description of Artificial Sequence: Synthetic oligonucleotide
  Antisense strand to SEQ ID NO: 2041518
ugcaccgcaggaauuccuc

SEQ ID NO: 2041520 - RNA, 19 nt, Artificial Sequence
  Description of Artificial Sequence: Synthetic oligonucleotide
  Sense strand starting at position 359 of SEQ ID NO: 1881399
ggaggagucucccagacuc

SEQ ID NO: 2041521 - RNA, 19 nt, Artificial Sequence
  Description of Artificial Sequence: Synthetic oligonucleotide
  Antisense strand to SEQ ID NO: 2041520
gagucugggagacuccucc

SEQ ID NO: 2041522 - RNA, 19 nt, Artificial Sequence
  Description of Artificial Sequence: Synthetic oligonucleotide
  Sense strand starting at position 534 of SEQ ID NO: 1881399
ucaucugugcaacaggauu

SEQ ID NO: 2041523 - RNA, 19 nt, Artificial Sequence
  Description of Artificial Sequence: Synthetic oligonucleotide
  Antisense strand to SEQ ID NO: 2041522
aauccuguugcacagauga

SEQ ID NO: 2041524 - RNA, 19 nt, Artificial Sequence
  Description of Artificial Sequence: Synthetic oligonucleotide
  Sense strand starting at position 623 of SEQ ID NO: 1881399
acggguuguugagcuuaca

SEQ ID NO: 2041525 - RNA, 19 nt, Artificial Sequence
  Description of Artificial Sequence: Synthetic oligonucleotide
  Antisense strand to SEQ ID NO: 2041524
uguaagcucaacaacccgu

SEQ ID NO: 2041526 - RNA, 19 nt, Artificial Sequence
  Description of Artificial Sequence: Synthetic oligonucleotide
  Sense strand starting at position 626 of SEQ ID NO: 1881399
gguuguugagcuuacaaac

SEQ ID NO: 2041527 - RNA, 19 nt, Artificial Sequence
  Description of Artificial Sequence: Synthetic oligonucleotide
  Antisense strand to SEQ ID NO: 2041526
guuuguaagcucaacaacc

SEQ ID NO: 2041528 - RNA, 19 nt, Artificial Sequence
  Description of Artificial Sequence: Synthetic oligonucleotide
  Sense strand starting at position 772 of SEQ ID NO: 1881399
gcguguggucccuguccua

SEQ ID NO: 2041529 - RNA, 19 nt, Artificial Sequence
  Description of Artificial Sequence: Synthetic oligonucleotide
  Antisense strand to SEQ ID NO: 2041528
uaggacagggaccacacgc

SEQ ID NO: 2041530 - RNA, 19 nt, Artificial Sequence
  Description of Artificial Sequence: Synthetic oligonucleotide
  Sense strand starting at position 1065 of SEQ ID NO: 1881399
gguuguuaugacgggaaca

SEQ ID NO: 2041531 - RNA, 19 nt, Artificial Sequence
  Description of Artificial Sequence: Synthetic oligonucleotide
  Antisense strand to SEQ ID NO: 2041530
uguucccgucauaacaacc

SEQ ID NO: 2041532 - RNA, 19 nt, Artificial Sequence
  Description of Artificial Sequence: Synthetic oligonucleotide
  Sense strand starting at position 1066 of SEQ ID NO: 1881399
guuguuaugacgggaacaa

SEQ ID NO: 2041533 - RNA, 19 nt, Artificial Sequence
  Description of Artificial Sequence: Synthetic oligonucleotide
  Antisense strand to SEQ ID NO: 2041532
uuguucccgucauaacaac

SEQ ID NO: 2041534 - RNA, 19 nt, Artificial Sequence
  Description of Artificial Sequence: Synthetic oligonucleotide
  Sense strand starting at position 1987 of SEQ ID NO: 1881399
gucccagagucccuguuau

SEQ ID NO: 2041535 - RNA, 19 nt, Artificial Sequence
  Description of Artificial Sequence: Synthetic oligonucleotide
  Antisense strand to SEQ ID NO: 2041534
auaacagggacucugggac

SEQ ID NO: 2041536 - RNA, 19 nt, Artificial Sequence
  Description of Artificial Sequence: Synthetic oligonucleotide
  Sense strand starting at position 2187 of SEQ ID NO: 1881399
cugcguuucucacucggaa

SEQ ID NO: 2041537 - RNA, 19 nt, Artificial Sequence
  Description of Artificial Sequence: Synthetic oligonucleotide
  Antisense strand to SEQ ID NO: 2041536
uuccgagugagaaacgcag

SEQ ID NO: 2041538 - RNA, 19 nt, Artificial Sequence
  Description of Artificial Sequence: Synthetic oligonucleotide
  Sense strand starting at position 2189 of SEQ ID NO: 1881399
gcguuucucacucggaaag

SEQ ID NO: 2041539 - RNA, 19 nt, Artificial Sequence
  Description of Artificial Sequence: Synthetic oligonucleotide
  Antisense strand to SEQ ID NO: 2041538
cuuuccgagugagaaacgc

SEQ ID NO: 2041540 - RNA, 19 nt, Artificial Sequence
  Description of Artificial Sequence: Synthetic oligonucleotide
  Sense strand starting at position 2713 of SEQ ID NO: 1881399
ccugauugcgccugucuua

SEQ ID NO: 2041541 - RNA, 19 nt, Artificial Sequence
  Description of Artificial Sequence: Synthetic oligonucleotide
  Antisense strand to SEQ ID NO: 2041540
uaagacaggcgcaaucagg

SEQ ID NO: 2041542 - RNA, 19 nt, Artificial Sequence
  Description of Artificial Sequence: Synthetic oligonucleotide
  Sense strand starting at position 2714 of SEQ ID NO: 1881399
cugauugcgccugucuuau

SEQ ID NO: 2041543 - RNA, 19 nt, Artificial Sequence
  Description of Artificial Sequence: Synthetic oligonucleotide
  Antisense strand to SEQ ID NO: 2041542
auaagacaggcgcaaucag

SEQ ID NO: 2041544 - RNA, 19 nt, Artificial Sequence
  Description of Artificial Sequence: Synthetic oligonucleotide
  Sense strand starting at position 2864 of SEQ ID NO: 1881399
ucauguccucuagaggguu

SEQ ID NO: 2041545 - RNA, 19 nt, Artificial Sequence
  Description of Artificial Sequence: Synthetic oligonucleotide
  Antisense strand to SEQ ID NO: 2041544
aacccucuagaggacauga

SEQ ID NO: 2041546 - RNA, 19 nt, Artificial Sequence
  Description of Artificial Sequence: Synthetic oligonucleotide
  Sense strand starting at position 2903 of SEQ ID NO: 1881399
gcggcuguccagucucauu

SEQ ID NO: 2041547 - RNA, 19 nt, Artificial Sequence
  Description of Artificial Sequence: Synthetic oligonucleotide
  Antisense strand to SEQ ID NO: 2041546
aaugagacuggacagccgc

SEQ ID NO: 2041548 - RNA, 19 nt, Artificial Sequence
  Description of Artificial Sequence: Synthetic oligonucleotide
  Sense strand starting at position 2916 of SEQ ID NO: 1881399
cucauuuccuuccgagcau

SEQ ID NO: 2041549 - RNA, 19 nt, Artificial Sequence
  Description of Artificial Sequence: Synthetic oligonucleotide
  Antisense strand to SEQ ID NO: 2041548
augcucggaaggaaaugag

SEQ ID NO: 2041550 - RNA, 19 nt, Artificial Sequence
  Description of Artificial Sequence: Synthetic oligonucleotide
  Sense strand starting at position 2996 of SEQ ID NO: 1881399
auagaauuccagcgucaug

SEQ ID NO: 2041551 - RNA, 19 nt, Artificial Sequence
  Description of Artificial Sequence: Synthetic oligonucleotide
  Antisense strand to SEQ ID NO: 2041550
caugacgcuggaauucuau

SEQ ID NO: 2041552 - RNA, 19 nt, Artificial Sequence
  Description of Artificial Sequence: Synthetic oligonucleotide
  Sense strand starting at position 3076 of SEQ ID NO: 1881399
gagccucgugcagauugua

SEQ ID NO: 2041553 - RNA, 19 nt, Artificial Sequence
  Description of Artificial Sequence: Synthetic oligonucleotide
  Antisense strand to SEQ ID NO: 2041552
uacaaucugcacgaggcuc

SEQ ID NO: 2041554 - RNA, 19 nt, Artificial Sequence
  Description of Artificial Sequence: Synthetic oligonucleotide
  Sense strand starting at position 3154 of SEQ ID NO: 1881399
gaaugagauugggucccau

SEQ ID NO: 2041555 - RNA, 19 nt, Artificial Sequence
  Description of Artificial Sequence: Synthetic oligonucleotide
  Antisense strand to SEQ ID NO: 2041554
augggacccaaucucauuc

SEQ ID NO: 2041556 - RNA, 19 nt, Artificial Sequence
  Description of Artificial Sequence: Synthetic oligonucleotide
  Sense strand starting at position 3158 of SEQ ID NO: 1881399
gagauugggucccauucuu

SEQ ID NO: 2041557 - RNA, 19 nt, Artificial Sequence
  Description of Artificial Sequence: Synthetic oligonucleotide
  Antisense strand to SEQ ID NO: 2041556
aagaaugggacccaaucuc

SEQ ID NO: 2041558 - RNA, 19 nt, Artificial Sequence
  Description of Artificial Sequence: Synthetic oligonucleotide
  Sense strand starting at position 3227 of SEQ ID NO: 1881399
ugugauccucugggacuuu

SEQ ID NO: 2041559 - RNA, 19 nt, Artificial Sequence
  Description of Artificial Sequence: Synthetic oligonucleotide
  Antisense strand to SEQ ID NO: 2041558
aaagucccagaggaucaca

SEQ ID NO: 2041560 - RNA, 19 nt, Artificial Sequence
  Description of Artificial Sequence: Synthetic oligonucleotide
  Sense strand starting at position 3280 of SEQ ID NO: 1881399
aguuuaggcuucuauauuc

SEQ ID NO: 2041561 - RNA, 19 nt, Artificial Sequence
  Description of Artificial Sequence: Synthetic oligonucleotide
  Antisense strand to SEQ ID NO: 2041560
gaauauagaagccuaaacu

SEQ ID NO: 2041562 - RNA, 19 nt, Artificial Sequence
  Description of Artificial Sequence: Synthetic oligonucleotide
  Sense strand starting at position 3286 of SEQ ID NO: 1881399
ggcuucuauauucgccaga

SEQ ID NO: 2041563 - RNA, 19 nt, Artificial Sequence
  Description of Artificial Sequence: Synthetic oligonucleotide
  Antisense strand to SEQ ID NO: 2041562
ucuggcgaauauagaagcc

SEQ ID NO: 2041564 - RNA, 19 nt, Artificial Sequence
  Description of Artificial Sequence: Synthetic oligonucleotide
  Sense strand starting at position 3288 of SEQ ID NO: 1881399
cuucuauauucgccagaga

SEQ ID NO: 2041565 - RNA, 19 nt, Artificial Sequence
  Description of Artificial Sequence: Synthetic oligonucleotide
  Antisense strand to SEQ ID NO: 2041564
ucucuggcgaauauagaag

SEQ ID NO: 2041566 - RNA, 19 nt, Artificial Sequence
  Description of Artificial Sequence: Synthetic oligonucleotide
  Sense strand starting at position 3289 of SEQ ID NO: 1881399
uucuauauucgccagagag

SEQ ID NO: 2041567 - RNA, 19 nt, Artificial Sequence
  Description of Artificial Sequence: Synthetic oligonucleotide
  Antisense strand to SEQ ID NO: 2041566
cucucuggcgaauauagaa

SEQ ID NO: 2041568 - RNA, 19 nt, Artificial Sequence
  Description of Artificial Sequence: Synthetic oligonucleotide
  Sense strand starting at position 3324 of SEQ ID NO: 1881399
cugcguaaucacgaaugac

SEQ ID NO: 2041569 - RNA, 19 nt, Artificial Sequence
  Description of Artificial Sequence: Synthetic oligonucleotide
  Antisense strand to SEQ ID NO: 2041568
gucauucgugauuacgcag

SEQ ID NO: 2041570 - RNA, 19 nt, Artificial Sequence
  Description of Artificial Sequence: Synthetic oligonucleotide
  Sense strand starting at position 3368 of SEQ ID NO: 1881399
uccaguggcuccucaaguu

SEQ ID NO: 2041571 - RNA, 19 nt, Artificial Sequence
  Description of Artificial Sequence: Synthetic oligonucleotide
  Antisense strand to SEQ ID NO: 2041570
aacuugaggagccacugga

SEQ ID NO: 2041572 - RNA, 19 nt, Artificial Sequence
  Description of Artificial Sequence: Synthetic oligonucleotide
  Sense strand starting at position 3380 of SEQ ID NO: 1881399
ucaaguuccucccagaaag

SEQ ID NO: 2041573 - RNA, 19 nt, Artificial Sequence
  Description of Artificial Sequence: Synthetic oligonucleotide
  Antisense strand to SEQ ID NO: 2041572
cuuucugggaggaacuuga

SEQ ID NO: 2041574 - RNA, 19 nt, Artificial Sequence
  Description of Artificial Sequence: Synthetic oligonucleotide
  Sense strand starting at position 3472 of SEQ ID NO: 1881399
uaccaugugccaggaagua

SEQ ID NO: 2041575 - RNA, 19 nt, Artificial Sequence
  Description of Artificial Sequence: Synthetic oligonucleotide
  Antisense strand to SEQ ID NO: 2041574
uacuuccuggcacauggua

SEQ ID NO: 2041576 - RNA, 19 nt, Artificial Sequence
  Description of Artificial Sequence: Synthetic oligonucleotide
  Sense strand starting at position 3487 of SEQ ID NO: 1881399
aguagaagucaugggacau

SEQ ID NO: 2041577 - RNA, 19 nt, Artificial Sequence
  Description of Artificial Sequence: Synthetic oligonucleotide
  Antisense strand to SEQ ID NO: 2041576
augucccaugacuucuacu

SEQ ID NO: 2041578 - RNA, 19 nt, Artificial Sequence
  Description of Artificial Sequence: Synthetic oligonucleotide
  Sense strand starting at position 3488 of SEQ ID NO: 1881399
guagaagucaugggacaug

SEQ ID NO: 2041579 - RNA, 19 nt, Artificial Sequence
  Description of Artificial Sequence: Synthetic oligonucleotide
  Antisense strand to SEQ ID NO: 2041578
caugucccaugacuucuac

SEQ ID NO: 2041580 - RNA, 19 nt, Artificial Sequence
  Description of Artificial Sequence: Synthetic oligonucleotide
  Sense strand starting at position 3493 of SEQ ID NO: 1881399
agucaugggacauguguga

SEQ ID NO: 2041581 - RNA, 19 nt, Artificial Sequence
  Description of Artificial Sequence: Synthetic oligonucleotide
  Antisense strand to SEQ ID NO: 2041580
ucacacaugucccaugacu

SEQ ID NO: 2041582 - RNA, 19 nt, Artificial Sequence
  Description of Artificial Sequence: Synthetic oligonucleotide
  Sense strand starting at position 3531 of SEQ ID NO: 1881399
ucuguaagguucuuguauc

SEQ ID NO: 2041583 - RNA, 19 nt, Artificial Sequence
  Description of Artificial Sequence: Synthetic oligonucleotide
  Antisense strand to SEQ ID NO: 2041582
gauacaagaaccuuacaga

SEQ ID NO: 2041584 - RNA, 19 nt, Artificial Sequence
  Description of Artificial Sequence: Synthetic oligonucleotide
  Sense strand starting at position 80 of SEQ ID NO: 1881400
aaaguaugugagcaaucuu

SEQ ID NO: 2041585 - RNA, 19 nt, Artificial Sequence
  Description of Artificial Sequence: Synthetic oligonucleotide
  Antisense strand to SEQ ID NO: 2041584
aagauugcucacauacuuu

SEQ ID NO: 2041586 - RNA, 19 nt, Artificial Sequence
  Description of Artificial Sequence: Synthetic oligonucleotide
  Sense strand starting at position 94 of SEQ ID NO: 1881400
aucuuauaucacuguacag

SEQ ID NO: 2041587 - RNA, 19 nt, Artificial Sequence
  Description of Artificial Sequence: Synthetic oligonucleotide
  Antisense strand to SEQ ID NO: 2041586
cuguacagugauauaagau

SEQ ID NO: 2041588 - RNA, 19 nt, Artificial Sequence
  Description of Artificial Sequence: Synthetic oligonucleotide
  Sense strand starting at position 145 of SEQ ID NO: 1881400
agaacaacccugugugaga

SEQ ID NO: 2041589 - RNA, 19 nt, Artificial Sequence
  Description of Artificial Sequence: Synthetic oligonucleotide
  Antisense strand to SEQ ID NO: 2041588
ucucacacaggguuguucu

SEQ ID NO: 2041590 - RNA, 19 nt, Artificial Sequence
  Description of Artificial Sequence: Synthetic oligonucleotide
  Sense strand starting at position 146 of SEQ ID NO: 1881400
gaacaacccugugugagaa

SEQ ID NO: 2041591 - RNA, 19 nt, Artificial Sequence
  Description of Artificial Sequence: Synthetic oligonucleotide
  Antisense strand to SEQ ID NO: 2041590
uucucacacaggguuguuc

SEQ ID NO: 2041592 - RNA, 19 nt, Artificial Sequence
  Description of Artificial Sequence: Synthetic oligonucleotide
  Sense strand starting at position 173 of SEQ ID NO: 1881400
gagugcugacacuagucau

SEQ ID NO: 2041593 - RNA, 19 nt, Artificial Sequence
  Description of Artificial Sequence: Synthetic oligonucleotide
  Antisense strand to SEQ ID NO: 2041592
augacuagugucagcacuc

SEQ ID NO: 2041594 - RNA, 19 nt, Artificial Sequence
  Description of Artificial Sequence: Synthetic oligonucleotide
  Sense strand starting at position 196 of SEQ ID NO: 1881400
cuagacucauagcugaauu

SEQ ID NO: 2041595 - RNA, 19 nt, Artificial Sequence
  Description of Artificial Sequence: Synthetic oligonucleotide
  Antisense strand to SEQ ID NO: 2041594
aauucagcuaugagucuag

SEQ ID NO: 2041596 - RNA, 19 nt, Artificial Sequence
  Description of Artificial Sequence: Synthetic oligonucleotide
  Sense strand starting at position 305 of SEQ ID NO: 1881400
uucuuugagguacaauuau

SEQ ID NO: 2041597 - RNA, 19 nt, Artificial Sequence
  Description of Artificial Sequence: Synthetic oligonucleotide
  Antisense strand to SEQ ID NO: 2041596
auaauuguaccucaaagaa

SEQ ID NO: 2041598 - RNA, 19 nt, Artificial Sequence
  Description of Artificial Sequence: Synthetic oligonucleotide
  Sense strand starting at position 392 of SEQ ID NO: 1881400
cuaucuuuguuaucagaga

SEQ ID NO: 2041599 - RNA, 19 nt, Artificial Sequence
  Description of Artificial Sequence: Synthetic oligonucleotide
  Antisense strand to SEQ ID NO: 2041598
ucucugauaacaaagauag

SEQ ID NO: 2041600 - RNA, 19 nt, Artificial Sequence
  Description of Artificial Sequence: Synthetic oligonucleotide
  Sense strand starting at position 420 of SEQ ID NO: 1881400
gugaccaaccuagguauau

SEQ ID NO: 2041601 - RNA, 19 nt, Artificial Sequence
  Description of Artificial Sequence: Synthetic oligonucleotide
  Antisense strand to SEQ ID NO: 2041600
auauaccuagguuggucac

SEQ ID NO: 2041602 - RNA, 19 nt, Artificial Sequence
  Description of Artificial Sequence: Synthetic oligonucleotide
  Sense strand starting at position 421 of SEQ ID NO: 1881400
ugaccaaccuagguauaua

SEQ ID NO: 2041603 - RNA, 19 nt, Artificial Sequence
  Description of Artificial Sequence: Synthetic oligonucleotide
  Antisense strand to SEQ ID NO: 2041602
uauauaccuagguugguca

SEQ ID NO: 2041604 - RNA, 19 nt, Artificial Sequence
  Description of Artificial Sequence: Synthetic oligonucleotide
  Sense strand starting at position 480 of SEQ ID NO: 1881400
cauuucugguugucugcua

SEQ ID NO: 2041605 - RNA, 19 nt, Artificial Sequence
  Description of Artificial Sequence: Synthetic oligonucleotide
  Antisense strand to SEQ ID NO: 2041604
uagcagacaaccagaaaug

SEQ ID NO: 2041606 - RNA, 19 nt, Artificial Sequence
  Description of Artificial Sequence: Synthetic oligonucleotide
  Sense strand starting at position 525 of SEQ ID NO: 1881400
cuuguauauguugggaaga

SEQ ID NO: 2041607 - RNA, 19 nt, Artificial Sequence
  Description of Artificial Sequence: Synthetic oligonucleotide
  Antisense strand to SEQ ID NO: 2041606
ucuucccaacauauacaag

SEQ ID NO: 2041608 - RNA, 19 nt, Artificial Sequence
  Description of Artificial Sequence: Synthetic oligonucleotide
  Sense strand starting at position 573 of SEQ ID NO: 1881400
cuuugcuuccaagagguaa

SEQ ID NO: 2041609 - RNA, 19 nt, Artificial Sequence
  Description of Artificial Sequence: Synthetic oligonucleotide
  Antisense strand to SEQ ID NO: 2041608
uuaccucuuggaagcaaag

SEQ ID NO: 2041610 - RNA, 19 nt, Artificial Sequence
  Description of Artificial Sequence: Synthetic oligonucleotide
  Sense strand starting at position 733 of SEQ ID NO: 1881400
cagaguuaaguccaaagca

SEQ ID NO: 2041611 - RNA, 19 nt, Artificial Sequence
  Description of Artificial Sequence: Synthetic oligonucleotide
  Antisense strand to SEQ ID NO: 2041610
ugcuuuggacuuaacucug

SEQ ID NO: 2041612 - RNA, 19 nt, Artificial Sequence
  Description of Artificial Sequence: Synthetic oligonucleotide
  Sense strand starting at position 782 of SEQ ID NO: 1881400
ccaggugguaaguaggauu

SEQ ID NO: 2041613 - RNA, 19 nt, Artificial Sequence
  Description of Artificial Sequence: Synthetic oligonucleotide
  Antisense strand to SEQ ID NO: 2041612
aauccuacuuaccaccugg

SEQ ID NO: 2041614 - RNA, 19 nt, Artificial Sequence
  Description of Artificial Sequence: Synthetic oligonucleotide
  Sense strand starting at position 826 of SEQ ID NO: 1881400
aguuacuggacuuggagau

SEQ ID NO: 2041615 - RNA, 19 nt, Artificial Sequence
  Description of Artificial Sequence: Synthetic oligonucleotide
  Antisense strand to SEQ ID NO: 2041614
aucuccaaguccaguaacu

SEQ ID NO: 2041616 - RNA, 19 nt, Artificial Sequence
  Description of Artificial Sequence: Synthetic oligonucleotide
  Sense strand starting at position 827 of SEQ ID NO: 1881400
guuacuggacuuggagauu

SEQ ID NO: 2041617 - RNA, 19 nt, Artificial Sequence
  Description of Artificial Sequence: Synthetic oligonucleotide
  Antisense strand to SEQ ID NO: 2041616
aaucuccaaguccaguaac

SEQ ID NO: 2041618 - RNA, 19 nt, Artificial Sequence
  Description of Artificial Sequence: Synthetic oligonucleotide
  Sense strand starting at position 881 of SEQ ID NO: 1881400
aguuuaauacuguggauua

SEQ ID NO: 2041619 - RNA, 19 nt, Artificial Sequence
  Description of Artificial Sequence: Synthetic oligonucleotide
  Antisense strand to SEQ ID NO: 2041618
uaauccacaguauuaaacu

SEQ ID NO: 2041620 - RNA, 19 nt, Artificial Sequence
  Description of Artificial Sequence: Synthetic oligonucleotide
  Sense strand starting at position 970 of SEQ ID NO: 1881400
aggugucugagggaacgua

SEQ ID NO: 2041621 - RNA, 19 nt, Artificial Sequence
  Description of Artificial Sequence: Synthetic oligonucleotide
  Antisense strand to SEQ ID NO: 2041620
uacguucccucagacaccu

SEQ ID NO: 2041622 - RNA, 19 nt, Artificial Sequence
  Description of Artificial Sequence: Synthetic oligonucleotide
  Sense strand starting at position 978 of SEQ ID NO: 1881400
gagggaacguagguuuauc

SEQ ID NO: 2041623 - RNA, 19 nt, Artificial Sequence
  Description of Artificial Sequence: Synthetic oligonucleotide
  Antisense strand to SEQ ID NO: 2041622
gauaaaccuacguucccuc

SEQ ID NO: 2041624 - RNA, 19 nt, Artificial Sequence
  Description of Artificial Sequence: Synthetic oligonucleotide
  Sense strand starting at position 1000 of SEQ ID NO: 1881400
cuuuauuacuaaguggauu

SEQ ID NO: 2041625 - RNA, 19 nt, Artificial Sequence
  Description of Artificial Sequence: Synthetic oligonucleotide
  Antisense strand to SEQ ID NO: 2041624
aauccacuuaguaauaaag

SEQ ID NO: 2041626 - RNA, 19 nt, Artificial Sequence
  Description of Artificial Sequence: Synthetic oligonucleotide
  Sense strand starting at position 1343 of SEQ ID NO: 1881400
ggcacauuagauugacuca

SEQ ID NO: 2041627 - RNA, 19 nt, Artificial Sequence
  Description of Artificial Sequence: Synthetic oligonucleotide
  Antisense strand to SEQ ID NO: 2041626
ugagucaaucuaaugugcc

SEQ ID NO: 2041628 - RNA, 19 nt, Artificial Sequence
  Description of Artificial Sequence: Synthetic oligonucleotide
  Sense strand starting at position 1366 of SEQ ID NO: 1881400
uacugaaauggucauaguu

SEQ ID NO: 2041629 - RNA, 19 nt, Artificial Sequence
  Description of Artificial Sequence: Synthetic oligonucleotide
  Antisense strand to SEQ ID NO: 2041628
aacuaugaccauuucagua

SEQ ID NO: 2041630 - RNA, 19 nt, Artificial Sequence
  Description of Artificial Sequence: Synthetic oligonucleotide
  Sense strand starting at position 1376 of SEQ ID NO: 1881400
gucauaguuauugagguua

SEQ ID NO: 2041631 - RNA, 19 nt, Artificial Sequence
  Description of Artificial Sequence: Synthetic oligonucleotide
  Antisense strand to SEQ ID NO: 2041630
uaaccucaauaacuaugac

SEQ ID NO: 2041632 - RNA, 19 nt, Artificial Sequence
  Description of Artificial Sequence: Synthetic oligonucleotide
  Sense strand starting at position 1515 of SEQ ID NO: 1881400
ggaggaggaugcucaucau

SEQ ID NO: 2041633 - RNA, 19 nt, Artificial Sequence
  Description of Artificial Sequence: Synthetic oligonucleotide
  Antisense strand to SEQ ID NO: 2041632
augaugagcauccuccucc

SEQ ID NO: 2041634 - RNA, 19 nt, Artificial Sequence
  Description of Artificial Sequence: Synthetic oligonucleotide
  Sense strand starting at position 1526 of SEQ ID NO: 1881400
cucaucauuggcuaaagau

SEQ ID NO: 2041635 - RNA, 19 nt, Artificial Sequence
  Description of Artificial Sequence: Synthetic oligonucleotide
  Antisense strand to SEQ ID NO: 2041634
aucuuuagccaaugaugag

SEQ ID NO: 2041636 - RNA, 19 nt, Artificial Sequence
  Description of Artificial Sequence: Synthetic oligonucleotide
  Sense strand starting at position 1541 of SEQ ID NO: 1881400
agauccaugccuggaaauu

SEQ ID NO: 2041637 - RNA, 19 nt, Artificial Sequence
  Description of Artificial Sequence: Synthetic oligonucleotide
  Antisense strand to SEQ ID NO: 2041636
aauuuccaggcauggaucu

SEQ ID NO: 2041638 - RNA, 19 nt, Artificial Sequence
  Description of Artificial Sequence: Synthetic oligonucleotide
  Sense strand starting at position 1630 of SEQ ID NO: 1881400
agaaguuuaccucagcuau

SEQ ID NO: 2041639 - RNA, 19 nt, Artificial Sequence
  Description of Artificial Sequence: Synthetic oligonucleotide
  Antisense strand to SEQ ID NO: 2041638
auagcugagguaaacuucu

SEQ ID NO: 2041640 - RNA, 19 nt, Artificial Sequence
  Description of Artificial Sequence: Synthetic oligonucleotide
  Sense strand starting at position 1812 of SEQ ID NO: 1881400
cuggguguucgggaucaag

SEQ ID NO: 2041641 - RNA, 19 nt, Artificial Sequence
  Description of Artificial Sequence: Synthetic oligonucleotide
  Antisense strand to SEQ ID NO: 2041640
cuugaucccgaacacccag

SEQ ID NO: 2041642 - RNA, 19 nt, Artificial Sequence
  Description of Artificial Sequence: Synthetic oligonucleotide
  Sense strand starting at position 2272 of SEQ ID NO: 1881400
aucacucuugugcaguaaa

SEQ ID NO: 2041643 - RNA, 19 nt, Artificial Sequence
  Description of Artificial Sequence: Synthetic oligonucleotide
  Antisense strand to SEQ ID NO: 2041642
uuuacugcacaagagugau

SEQ ID NO: 2041644 - RNA, 19 nt, Artificial Sequence
  Description of Artificial Sequence: Synthetic oligonucleotide
  Sense strand starting at position 2461 of SEQ ID NO: 1881400
cuggaugugcuccagggaa

SEQ ID NO: 2041645 - RNA, 19 nt, Artificial Sequence
  Description of Artificial Sequence: Synthetic oligonucleotide
  Antisense strand to SEQ ID NO: 2041644
uucccuggagcacauccag

SEQ ID NO: 2041646 - RNA, 19 nt, Artificial Sequence
  Description of Artificial Sequence: Synthetic oligonucleotide
  Sense strand starting at position 2463 of SEQ ID NO: 1881400
ggaugugcuccagggaaca

SEQ ID NO: 2041647 - RNA, 19 nt, Artificial Sequence
  Description of Artificial Sequence: Synthetic oligonucleotide
  Antisense strand to SEQ ID NO: 2041646
uguucccuggagcacaucc

SEQ ID NO: 2041648 - RNA, 19 nt, Artificial Sequence
  Description of Artificial Sequence: Synthetic oligonucleotide
  Sense strand starting at position 2479 of SEQ ID NO: 1881400
acagaauguacuuggcaga

SEQ ID NO: 2041649 - RNA, 19 nt, Artificial Sequence
  Description of Artificial Sequence: Synthetic oligonucleotide
  Antisense strand to SEQ ID NO: 2041648
ucugccaaguacauucugu

SEQ ID NO: 2041650 - RNA, 19 nt, Artificial Sequence
  Description of Artificial Sequence: Synthetic oligonucleotide
  Sense strand starting at position 2658 of SEQ ID NO: 1881400
gguugacugcuuugauuuc

SEQ ID NO: 2041651 - RNA, 19 nt, Artificial Sequence
  Description of Artificial Sequence: Synthetic oligonucleotide
  Antisense strand to SEQ ID NO: 2041650
gaaaucaaagcagucaacc

SEQ ID NO: 2041652 - RNA, 19 nt, Artificial Sequence
  Description of Artificial Sequence: Synthetic oligonucleotide
  Sense strand starting at position 2664 of SEQ ID NO: 1881400
cugcuuugauuucuaggca

SEQ ID NO: 2041653 - RNA, 19 nt, Artificial Sequence
  Description of Artificial Sequence: Synthetic oligonucleotide
  Antisense strand to SEQ ID NO: 2041652
ugccuagaaaucaaagcag

SEQ ID NO: 2041654 - RNA, 19 nt, Artificial Sequence
  Description of Artificial Sequence: Synthetic oligonucleotide
  Sense strand starting at position 2798 of SEQ ID NO: 1881400
caugcuugcgccucagcaa

SEQ ID NO: 2041655 - RNA, 19 nt, Artificial Sequence
  Description of Artificial Sequence: Synthetic oligonucleotide
  Antisense strand to SEQ ID NO: 2041654
uugcugaggcgcaagcaug

SEQ ID NO: 2041656 - RNA, 19 nt, Artificial Sequence
  Description of Artificial Sequence: Synthetic oligonucleotide
  Sense strand starting at position 3147 of SEQ ID NO: 1881400
gugagucacucauuucucu

SEQ ID NO: 2041657 - RNA, 19 nt, Artificial Sequence
  Description of Artificial Sequence: Synthetic oligonucleotide
  Antisense strand to SEQ ID NO: 2041656
agagaaaugagugacucac

SEQ ID NO: 2041658 - RNA, 19 nt, Artificial Sequence
  Description of Artificial Sequence: Synthetic oligonucleotide
  Sense strand starting at position 3245 of SEQ ID NO: 1881400
gagaaagucuuucccugac

SEQ ID NO: 2041659 - RNA, 19 nt, Artificial Sequence
  Description of Artificial Sequence: Synthetic oligonucleotide
  Antisense strand to SEQ ID NO: 2041658
gucagggaaagacuuucuc

SEQ ID NO: 2041660 - RNA, 19 nt, Artificial Sequence
  Description of Artificial Sequence: Synthetic oligonucleotide
  Sense strand starting at position 3553 of SEQ ID NO: 1881400
uuccuuguuggagggaaga

SEQ ID NO: 2041661 - RNA, 19 nt, Artificial Sequence
  Description of Artificial Sequence: Synthetic oligonucleotide
  Antisense strand to SEQ ID NO: 2041660
ucuucccuccaacaaggaa

SEQ ID NO: 2041662 - RNA, 19 nt, Artificial Sequence
  Description of Artificial Sequence: Synthetic oligonucleotide
  Sense strand starting at position 3695 of SEQ ID NO: 1881400
ccuggugcucucuaggaaa

SEQ ID NO: 2041663 - RNA, 19 nt, Artificial Sequence
  Description of Artificial Sequence: Synthetic oligonucleotide
  Antisense strand to SEQ ID NO: 2041662
uuuccuagagagcaccagg

SEQ ID NO: 2041664 - RNA, 19 nt, Artificial Sequence
  Description of Artificial Sequence: Synthetic oligonucleotide
  Sense strand starting at position 26 of SEQ ID NO: 1881401
cucuucugaguugaucaaa

SEQ ID NO: 2041665 - RNA, 19 nt, Artificial Sequence
  Description of Artificial Sequence: Synthetic oligonucleotide
  Antisense strand to SEQ ID NO: 2041664
uuugaucaacucagaagag

SEQ ID NO: 2041666 - RNA, 19 nt, Artificial Sequence
  Description of Artificial Sequence: Synthetic oligonucleotide
  Sense strand starting at position 29 of SEQ ID NO: 1881401
uucugaguugaucaaacuu

SEQ ID NO: 2041667 - RNA, 19 nt, Artificial Sequence
  Description of Artificial Sequence: Synthetic oligonucleotide
  Antisense strand to SEQ ID NO: 2041666
aaguuugaucaacucagaa

SEQ ID NO: 2041668 - RNA, 19 nt, Artificial Sequence
  Description of Artificial Sequence: Synthetic oligonucleotide
  Sense strand starting at position 66 of SEQ ID NO: 1881401
gagagaugugaaggucauu

SEQ ID NO: 2041669 - RNA, 19 nt, Artificial Sequence
  Description of Artificial Sequence: Synthetic oligonucleotide
  Antisense strand to SEQ ID NO: 2041668
aaugaccuucacaucucuc

SEQ ID NO: 2041670 - RNA, 19 nt, Artificial Sequence
  Description of Artificial Sequence: Synthetic oligonucleotide
  Sense strand starting at position 95 of SEQ ID NO: 1881401
uaggcugugucaucaauuu

SEQ ID NO: 2041671 - RNA, 19 nt, Artificial Sequence
  Description of Artificial Sequence: Synthetic oligonucleotide
  Antisense strand to SEQ ID NO: 2041670
aaauugaugacacagccua

SEQ ID NO: 2041672 - RNA, 19 nt, Artificial Sequence
  Description of Artificial Sequence: Synthetic oligonucleotide
  Sense strand starting at position 308 of SEQ ID NO: 1881401
cuggacaagugaguauaua

SEQ ID NO: 2041673 - RNA, 19 nt, Artificial Sequence
  Description of Artificial Sequence: Synthetic oligonucleotide
  Antisense strand to SEQ ID NO: 2041672
uauauacucacuuguccag

SEQ ID NO: 2041674 - RNA, 19 nt, Artificial Sequence
  Description of Artificial Sequence: Synthetic oligonucleotide
  Sense strand starting at position 316 of SEQ ID NO: 1881401
gugaguauauaucuuauac

SEQ ID NO: 2041675 - RNA, 19 nt, Artificial Sequence
  Description of Artificial Sequence: Synthetic oligonucleotide
  Antisense strand to SEQ ID NO: 2041674
guauaagauauauacucac

SEQ ID NO: 2041676 - RNA, 19 nt, Artificial Sequence
  Description of Artificial Sequence: Synthetic oligonucleotide
  Sense strand starting at position 565 of SEQ ID NO: 1881401
gguuuauugaacugacagu

SEQ ID NO: 2041677 - RNA, 19 nt, Artificial Sequence
  Description of Artificial Sequence: Synthetic oligonucleotide
  Antisense strand to SEQ ID NO: 2041676
acugucaguucaauaaacc

SEQ ID NO: 2041678 - RNA, 19 nt, Artificial Sequence
  Description of Artificial Sequence: Synthetic oligonucleotide
  Sense strand starting at position 622 of SEQ ID NO: 1881401
gggaaagucucuucuuaua

SEQ ID NO: 2041679 - RNA, 19 nt, Artificial Sequence
  Description of Artificial Sequence: Synthetic oligonucleotide
  Antisense strand to SEQ ID NO: 2041678
uauaagaagagacuuuccc

SEQ ID NO: 2041680 - RNA, 19 nt, Artificial Sequence
  Description of Artificial Sequence: Synthetic oligonucleotide
  Sense strand starting at position 687 of SEQ ID NO: 1881401
uguuaaacucaucaagucu

SEQ ID NO: 2041681 - RNA, 19 nt, Artificial Sequence
  Description of Artificial Sequence: Synthetic oligonucleotide
  Antisense strand to SEQ ID NO: 2041680
agacuugaugaguuuaaca

SEQ ID NO: 2041682 - RNA, 19 nt, Artificial Sequence
  Description of Artificial Sequence: Synthetic oligonucleotide
  Sense strand starting at position 872 of SEQ ID NO: 1881401
uuaguaugaggacgugaca

SEQ ID NO: 2041683 - RNA, 19 nt, Artificial Sequence
  Description of Artificial Sequence: Synthetic oligonucleotide
  Antisense strand to SEQ ID NO: 2041682
ugucacguccucauacuaa

SEQ ID NO: 2041684 - RNA, 19 nt, Artificial Sequence
  Description of Artificial Sequence: Synthetic oligonucleotide
  Sense strand starting at position 875 of SEQ ID NO: 1881401
guaugaggacgugacaaau

SEQ ID NO: 2041685 - RNA, 19 nt, Artificial Sequence
  Description of Artificial Sequence: Synthetic oligonucleotide
  Antisense strand to SEQ ID NO: 2041684
auuugucacguccucauac

SEQ ID NO: 2041686 - RNA, 19 nt, Artificial Sequence
  Description of Artificial Sequence: Synthetic oligonucleotide
  Sense strand starting at position 959 of SEQ ID NO: 1881401
gugucacguaaucagagaa

SEQ ID NO: 2041687 - RNA, 19 nt, Artificial Sequence
  Description of Artificial Sequence: Synthetic oligonucleotide
  Antisense strand to SEQ ID NO: 2041686
uucucugauuacgugacac

SEQ ID NO: 2041688 - RNA, 19 nt, Artificial Sequence
  Description of Artificial Sequence: Synthetic oligonucleotide
  Sense strand starting at position 1007 of SEQ ID NO: 1881401
uuuaauauugggcaggagu

SEQ ID NO: 2041689 - RNA, 19 nt, Artificial Sequence
  Description of Artificial Sequence: Synthetic oligonucleotide
  Antisense strand to SEQ ID NO: 2041688
acuccugcccaauauuaaa

SEQ ID NO: 2041690 - RNA, 19 nt, Artificial Sequence
  Description of Artificial Sequence: Synthetic oligonucleotide
  Sense strand starting at position 1009 of SEQ ID NO: 1881401
uaauauugggcaggaguua

SEQ ID NO: 2041691 - RNA, 19 nt, Artificial Sequence
  Description of Artificial Sequence: Synthetic oligonucleotide
  Antisense strand to SEQ ID NO: 2041690
uaacuccugcccaauauua

SEQ ID NO: 2041692 - RNA, 19 nt, Artificial Sequence
  Description of Artificial Sequence: Synthetic oligonucleotide
  Sense strand starting at position 1018 of SEQ ID NO: 1881401
gcaggaguuagccaaagaa

SEQ ID NO: 2041693 - RNA, 19 nt, Artificial Sequence
  Description of Artificial Sequence: Synthetic oligonucleotide
  Antisense strand to SEQ ID NO: 2041692
uucuuuggcuaacuccugc

SEQ ID NO: 2041694 - RNA, 19 nt, Artificial Sequence
  Description of Artificial Sequence: Synthetic oligonucleotide
  Sense strand starting at position 1080 of SEQ ID NO: 1881401
gaguaaugccucugggaau

SEQ ID NO: 2041695 - RNA, 19 nt, Artificial Sequence
  Description of Artificial Sequence: Synthetic oligonucleotide
  Antisense strand to SEQ ID NO: 2041694
auucccagaggcauuacuc

SEQ ID NO: 2041696 - RNA, 19 nt, Artificial Sequence
  Description of Artificial Sequence: Synthetic oligonucleotide
  Sense strand starting at position 1099 of SEQ ID NO: 1881401
ugaaauuauucuguaaagc

SEQ ID NO: 2041697 - RNA, 19 nt, Artificial Sequence
  Description of Artificial Sequence: Synthetic oligonucleotide
  Antisense strand to SEQ ID NO: 2041696
gcuuuacagaauaauuuca

SEQ ID NO: 2041698 - RNA, 19 nt, Artificial Sequence
  Description of Artificial Sequence: Synthetic oligonucleotide
  Sense strand starting at position 1169 of SEQ ID NO: 1881401
gggaucauuccuggaaguu

SEQ ID NO: 2041699 - RNA, 19 nt, Artificial Sequence
  Description of Artificial Sequence: Synthetic oligonucleotide
  Antisense strand to SEQ ID NO: 2041698
aacuuccaggaaugauccc

SEQ ID NO: 2041700 - RNA, 19 nt, Artificial Sequence
  Description of Artificial Sequence: Synthetic oligonucleotide
  Sense strand starting at position 1274 of SEQ ID NO: 1881401
ugcugaauuagguaaguuc

SEQ ID NO: 2041701 - RNA, 19 nt, Artificial Sequence
  Description of Artificial Sequence: Synthetic oligonucleotide
  Antisense strand to SEQ ID NO: 2041700
gaacuuaccuaauucagca

SEQ ID NO: 2041702 - RNA, 19 nt, Artificial Sequence
  Description of Artificial Sequence: Synthetic oligonucleotide
  Sense strand starting at position 1309 of SEQ ID NO: 1881401
ggcaucugccuuuacuaaa

SEQ ID NO: 2041703 - RNA, 19 nt, Artificial Sequence
  Description of Artificial Sequence: Synthetic oligonucleotide
  Antisense strand to SEQ ID NO: 2041702
uuuaguaaaggcagaugcc

SEQ ID NO: 2041704 - RNA, 19 nt, Artificial Sequence
  Description of Artificial Sequence: Synthetic oligonucleotide
  Sense strand starting at position 1397 of SEQ ID NO: 1881401
cgugaauuccuugcgggca

SEQ ID NO: 2041705 - RNA, 19 nt, Artificial Sequence
  Description of Artificial Sequence: Synthetic oligonucleotide
  Antisense strand to SEQ ID NO: 2041704
ugcccgcaaggaauucacg

SEQ ID NO: 2041706 - RNA, 19 nt, Artificial Sequence
  Description of Artificial Sequence: Synthetic oligonucleotide
  Sense strand starting at position 1462 of SEQ ID NO: 1881401
cauaguagggucugaaauc

SEQ ID NO: 2041707 - RNA, 19 nt, Artificial Sequence
  Description of Artificial Sequence: Synthetic oligonucleotide
  Antisense strand to SEQ ID NO: 2041706
gauuucagacccuacuaug

SEQ ID NO: 2041708 - RNA, 19 nt, Artificial Sequence
  Description of Artificial Sequence: Synthetic oligonucleotide
  Sense strand starting at position 1748 of SEQ ID NO: 1881401
augggugauagucaacagu

SEQ ID NO: 2041709 - RNA, 19 nt, Artificial Sequence
  Description of Artificial Sequence: Synthetic oligonucleotide
  Antisense strand to SEQ ID NO: 2041708
acuguugacuaucacccau

SEQ ID NO: 2041710 - RNA, 19 nt, Artificial Sequence
  Description of Artificial Sequence: Synthetic oligonucleotide
  Sense strand starting at position 2305 of SEQ ID NO: 1881401
agugauauaacuuggaggu

SEQ ID NO: 2041711 - RNA, 19 nt, Artificial Sequence
  Description of Artificial Sequence: Synthetic oligonucleotide
  Antisense strand to SEQ ID NO: 2041710
accuccaaguuauaucacu

SEQ ID NO: 2041712 - RNA, 19 nt, Artificial Sequence
  Description of Artificial Sequence: Synthetic oligonucleotide
  Sense strand starting at position 2306 of SEQ ID NO: 1881401
gugauauaacuuggagguu

SEQ ID NO: 2041713 - RNA, 19 nt, Artificial Sequence
  Description of Artificial Sequence: Synthetic oligonucleotide
  Antisense strand to SEQ ID NO: 2041712
aaccuccaaguuauaucac

SEQ ID NO: 2041714 - RNA, 19 nt, Artificial Sequence
  Description of Artificial Sequence: Synthetic oligonucleotide
  Sense strand starting at position 2309 of SEQ ID NO: 1881401
auauaacuuggagguuuau

SEQ ID NO: 2041715 - RNA, 19 nt, Artificial Sequence
  Description of Artificial Sequence: Synthetic oligonucleotide
  Antisense strand to SEQ ID NO: 2041714
auaaaccuccaaguuauau

SEQ ID NO: 2041716 - RNA, 19 nt, Artificial Sequence
  Description of Artificial Sequence: Synthetic oligonucleotide
  Sense strand starting at position 2408 of SEQ ID NO: 1881401
cucauugauguauaucuau

SEQ ID NO: 2041717 - RNA, 19 nt, Artificial Sequence
  Description of Artificial Sequence: Synthetic oligonucleotide
  Antisense strand to SEQ ID NO: 2041716
auagauauacaucaaugag

SEQ ID NO: 2041718 - RNA, 19 nt, Artificial Sequence
  Description of Artificial Sequence: Synthetic oligonucleotide
  Sense strand starting at position 2680 of SEQ ID NO: 1881401
uuacauugccagugagaua

SEQ ID NO: 2041719 - RNA, 19 nt, Artificial Sequence
  Description of Artificial Sequence: Synthetic oligonucleotide
  Antisense strand to SEQ ID NO: 2041718
uaucucacuggcaauguaa

SEQ ID NO: 2041720 - RNA, 19 nt, Artificial Sequence
  Description of Artificial Sequence: Synthetic oligonucleotide
  Sense strand starting at position 2685 of SEQ ID NO: 1881401
uugccagugagauaguaaa

SEQ ID NO: 2041721 - RNA, 19 nt, Artificial Sequence
  Description of Artificial Sequence: Synthetic oligonucleotide
  Antisense strand to SEQ ID NO: 2041720
uuuacuaucucacuggcaa

SEQ ID NO: 2041722 - RNA, 19 nt, Artificial Sequence
  Description of Artificial Sequence: Synthetic oligonucleotide
  Sense strand starting at position 2735 of SEQ ID NO: 1881401
ucacuagaauuugaagaac

SEQ ID NO: 2041723 - RNA, 19 nt, Artificial Sequence
  Description of Artificial Sequence: Synthetic oligonucleotide
  Antisense strand to SEQ ID NO: 2041722
guucuucaaauucuaguga

SEQ ID NO: 2041724 - RNA, 19 nt, Artificial Sequence
  Description of Artificial Sequence: Synthetic oligonucleotide
  Sense strand starting at position 2744 of SEQ ID NO: 1881401
uuugaagaacgauaugugu

SEQ ID NO: 2041725 - RNA, 19 nt, Artificial Sequence
  Description of Artificial Sequence: Synthetic oligonucleotide
  Antisense strand to SEQ ID NO: 2041724
acacauaucguucuucaaa

SEQ ID NO: 2041726 - RNA, 19 nt, Artificial Sequence
  Description of Artificial Sequence: Synthetic oligonucleotide
  Sense strand starting at position 2775 of SEQ ID NO: 1881401
guuagaaagccauauuauu

SEQ ID NO: 2041727 - RNA, 19 nt, Artificial Sequence
  Description of Artificial Sequence: Synthetic oligonucleotide
  Antisense strand to SEQ ID NO: 2041726
aauaauauggcuuucuaac

SEQ ID NO: 2041728 - RNA, 19 nt, Artificial Sequence
  Description of Artificial Sequence: Synthetic oligonucleotide
  Sense strand starting at position 2877 of SEQ ID NO: 1881401
guaagagcuauuuguguau

SEQ ID NO: 2041729 - RNA, 19 nt, Artificial Sequence
  Description of Artificial Sequence: Synthetic oligonucleotide
  Antisense strand to SEQ ID NO: 2041728
auacacaaauagcucuuac

SEQ ID NO: 2041730 - RNA, 19 nt, Artificial Sequence
  Description of Artificial Sequence: Synthetic oligonucleotide
  Sense strand starting at position 3525 of SEQ ID NO: 1881401
agaagaagguaugcaauca

SEQ ID NO: 2041731 - RNA, 19 nt, Artificial Sequence
  Description of Artificial Sequence: Synthetic oligonucleotide
  Antisense strand to SEQ ID NO: 2041730
ugauugcauaccuucuucu

SEQ ID NO: 2041732 - RNA, 19 nt, Artificial Sequence
  Description of Artificial Sequence: Synthetic oligonucleotide
  Sense strand starting at position 3668 of SEQ ID NO: 1881401
uuccauuugugucucuuaa

SEQ ID NO: 2041733 - RNA, 19 nt, Artificial Sequence
  Description of Artificial Sequence: Synthetic oligonucleotide
  Antisense strand to SEQ ID NO: 2041732
uuaagagacacaaauggaa

SEQ ID NO: 2041734 - RNA, 19 nt, Artificial Sequence
  Description of Artificial Sequence: Synthetic oligonucleotide
  Sense strand starting at position 3728 of SEQ ID NO: 1881401
ucaauaucugguugaguua

SEQ ID NO: 2041735 - RNA, 19 nt, Artificial Sequence
  Description of Artificial Sequence: Synthetic oligonucleotide
  Antisense strand to SEQ ID NO: 2041734
uaacucaaccagauauuga

SEQ ID NO: 2041736 - RNA, 19 nt, Artificial Sequence
  Description of Artificial Sequence: Synthetic oligonucleotide
  Sense strand starting at position 3729 of SEQ ID NO: 1881401
caauaucugguugaguuau

SEQ ID NO: 2041737 - RNA, 19 nt, Artificial Sequence
  Description of Artificial Sequence: Synthetic oligonucleotide
  Antisense strand to SEQ ID NO: 2041736
auaacucaaccagauauug

SEQ ID NO: 2041738 - RNA, 19 nt, Artificial Sequence
  Description of Artificial Sequence: Synthetic oligonucleotide
  Sense strand starting at position 3798 of SEQ ID NO: 1881401
cuugucuaauguuugaaag

SEQ ID NO: 2041739 - RNA, 19 nt, Artificial Sequence
  Description of Artificial Sequence: Synthetic oligonucleotide
  Antisense strand to SEQ ID NO: 2041738
cuuucaaacauuagacaag

SEQ ID NO: 2041740 - RNA, 19 nt, Artificial Sequence
  Description of Artificial Sequence: Synthetic oligonucleotide
  Sense strand starting at position 3911 of SEQ ID NO: 1881401
guggauuuaguuugcuaau

SEQ ID NO: 2041741 - RNA, 19 nt, Artificial Sequence
  Description of Artificial Sequence: Synthetic oligonucleotide
  Antisense strand to SEQ ID NO: 2041740
auuagcaaacuaaauccac

SEQ ID NO: 2041742 - RNA, 19 nt, Artificial Sequence
  Description of Artificial Sequence: Synthetic oligonucleotide
  Sense strand starting at position 3965 of SEQ ID NO: 1881401
ggguauuagucuguuauuu

SEQ ID NO: 2041743 - RNA, 19 nt, Artificial Sequence
  Description of Artificial Sequence: Synthetic oligonucleotide
  Antisense strand to SEQ ID NO: 2041742
aaauaacagacuaauaccc

SEQ ID NO: 2041744 - RNA, 19 nt, Artificial Sequence
  Description of Artificial Sequence: Synthetic oligonucleotide
  Sense strand starting at position 98 of SEQ ID NO: 1881402
gagcacaucucccgagaau

SEQ ID NO: 2041745 - RNA, 19 nt, Artificial Sequence
  Description of Artificial Sequence: Synthetic oligonucleotide
  Antisense strand to SEQ ID NO: 2041744
auucucgggagaugugcuc

SEQ ID NO: 2041746 - RNA, 19 nt, Artificial Sequence
  Description of Artificial Sequence: Synthetic oligonucleotide
  Sense strand starting at position 99 of SEQ ID NO: 1881402
agcacaucucccgagaauc

SEQ ID NO: 2041747 - RNA, 19 nt, Artificial Sequence
  Description of Artificial Sequence: Synthetic oligonucleotide
  Antisense strand to SEQ ID NO: 2041746
gauucucgggagaugugcu

SEQ ID NO: 2041748 - RNA, 19 nt, Artificial Sequence
  Description of Artificial Sequence: Synthetic oligonucleotide
  Sense strand starting at position 185 of SEQ ID NO: 1881402
auauacaaugcuuguguau

SEQ ID NO: 2041749 - RNA, 19 nt, Artificial Sequence
  Description of Artificial Sequence: Synthetic oligonucleotide
  Antisense strand to SEQ ID NO: 2041748
auacacaagcauuguauau

SEQ ID NO: 2041750 - RNA, 19 nt, Artificial Sequence
  Description of Artificial Sequence: Synthetic oligonucleotide
  Sense strand starting at position 187 of SEQ ID NO: 1881402
auacaaugcuuguguauac

SEQ ID NO: 2041751 - RNA, 19 nt, Artificial Sequence
  Description of Artificial Sequence: Synthetic oligonucleotide
  Antisense strand to SEQ ID NO: 2041750
guauacacaagcauuguau

SEQ ID NO: 2041752 - RNA, 19 nt, Artificial Sequence
  Description of Artificial Sequence: Synthetic oligonucleotide
  Sense strand starting at position 270 of SEQ ID NO: 1881402
ucaggaaugcccuacucuu

SEQ ID NO: 2041753 - RNA, 19 nt, Artificial Sequence
  Description of Artificial Sequence: Synthetic oligonucleotide
  Antisense strand to SEQ ID NO: 2041752
aagaguagggcauuccuga

SEQ ID NO: 2041754 - RNA, 19 nt, Artificial Sequence
  Description of Artificial Sequence: Synthetic oligonucleotide
  Sense strand starting at position 278 of SEQ ID NO: 1881402
gcccuacucuuucuaugga

SEQ ID NO: 2041755 - RNA, 19 nt, Artificial Sequence
  Description of Artificial Sequence: Synthetic oligonucleotide
  Antisense strand to SEQ ID NO: 2041754
uccauagaaagaguagggc

SEQ ID NO: 2041756 - RNA, 19 nt, Artificial Sequence
  Description of Artificial Sequence: Synthetic oligonucleotide
  Sense strand starting at position 281 of SEQ ID NO: 1881402
cuacucuuucuauggagua

SEQ ID NO: 2041757 - RNA, 19 nt, Artificial Sequence
  Description of Artificial Sequence: Synthetic oligonucleotide
  Antisense strand to SEQ ID NO: 2041756
uacuccauagaaagaguag

SEQ ID NO: 2041758 - RNA, 19 nt, Artificial Sequence
  Description of Artificial Sequence: Synthetic oligonucleotide
  Sense strand starting at position 351 of SEQ ID NO: 1881402
uguagagacucaccguaaa

SEQ ID NO: 2041759 - RNA, 19 nt, Artificial Sequence
  Description of Artificial Sequence: Synthetic oligonucleotide
  Antisense strand to SEQ ID NO: 2041758
uuuacggugagucucuaca

SEQ ID NO: 2041760 - RNA, 19 nt, Artificial Sequence
  Description of Artificial Sequence: Synthetic oligonucleotide
  Sense strand starting at position 354 of SEQ ID NO: 1881402
agagacucaccguaaauuc

SEQ ID NO: 2041761 - RNA, 19 nt, Artificial Sequence
  Description of Artificial Sequence: Synthetic oligonucleotide
  Antisense strand to SEQ ID NO: 2041760
gaauuuacggugagucucu

SEQ ID NO: 2041762 - RNA, 19 nt, Artificial Sequence
  Description of Artificial Sequence: Synthetic oligonucleotide
  Sense strand starting at position 364 of SEQ ID NO: 1881402
cguaaauucuuucuugcuu

SEQ ID NO: 2041763 - RNA, 19 nt, Artificial Sequence
  Description of Artificial Sequence: Synthetic oligonucleotide
  Antisense strand to SEQ ID NO: 2041762
aagcaagaaagaauuuacg

SEQ ID NO: 2041764 - RNA, 19 nt, Artificial Sequence
  Description of Artificial Sequence: Synthetic oligonucleotide
  Sense strand starting at position 720 of SEQ ID NO: 1881402
aggugugagccacaccauu

SEQ ID NO: 2041765 - RNA, 19 nt, Artificial Sequence
  Description of Artificial Sequence: Synthetic oligonucleotide
  Antisense strand to SEQ ID NO: 2041764
aaugguguggcucacaccu

SEQ ID NO: 2041766 - RNA, 19 nt, Artificial Sequence
  Description of Artificial Sequence: Synthetic oligonucleotide
  Sense strand starting at position 1199 of SEQ ID NO: 1881402
acuuucucucuuggugaca

SEQ ID NO: 2041767 - RNA, 19 nt, Artificial Sequence
  Description of Artificial Sequence: Synthetic oligonucleotide
  Antisense strand to SEQ ID NO: 2041766
ugucaccaagagagaaagu

SEQ ID NO: 2041768 - RNA, 19 nt, Artificial Sequence
  Description of Artificial Sequence: Synthetic oligonucleotide
  Sense strand starting at position 1240 of SEQ ID NO: 1881402
ccaucuaccuaggagauau

SEQ ID NO: 2041769 - RNA, 19 nt, Artificial Sequence
  Description of Artificial Sequence: Synthetic oligonucleotide
  Antisense strand to SEQ ID NO: 2041768
auaucuccuagguagaugg

SEQ ID NO: 2041770 - RNA, 19 nt, Artificial Sequence
  Description of Artificial Sequence: Synthetic oligonucleotide
  Sense strand starting at position 1553 of SEQ ID NO: 1881402
ugcucuuacguguaccaua

SEQ ID NO: 2041771 - RNA, 19 nt, Artificial Sequence
  Description of Artificial Sequence: Synthetic oligonucleotide
  Antisense strand to SEQ ID NO: 2041770
uaugguacacguaagagca

SEQ ID NO: 2041772 - RNA, 19 nt, Artificial Sequence
  Description of Artificial Sequence: Synthetic oligonucleotide
  Sense strand starting at position 1619 of SEQ ID NO: 1881402
ucuuaaauaucugcuguga

SEQ ID NO: 2041773 - RNA, 19 nt, Artificial Sequence
  Description of Artificial Sequence: Synthetic oligonucleotide
  Antisense strand to SEQ ID NO: 2041772
ucacagcagauauuuaaga

SEQ ID NO: 2041774 - RNA, 19 nt, Artificial Sequence
  Description of Artificial Sequence: Synthetic oligonucleotide
  Sense strand starting at position 1623 of SEQ ID NO: 1881402
aaauaucugcugugaggua

SEQ ID NO: 2041775 - RNA, 19 nt, Artificial Sequence
  Description of Artificial Sequence: Synthetic oligonucleotide
  Antisense strand to SEQ ID NO: 2041774
uaccucacagcagauauuu

SEQ ID NO: 2041776 - RNA, 19 nt, Artificial Sequence
  Description of Artificial Sequence: Synthetic oligonucleotide
  Sense strand starting at position 1673 of SEQ ID NO: 1881402
agggcucagagauguaaag

SEQ ID NO: 2041777 - RNA, 19 nt, Artificial Sequence
  Description of Artificial Sequence: Synthetic oligonucleotide
  Antisense strand to SEQ ID NO: 2041776
cuuuacaucucugagcccu

SEQ ID NO: 2041778 - RNA, 19 nt, Artificial Sequence
  Description of Artificial Sequence: Synthetic oligonucleotide
  Sense strand starting at position 2004 of SEQ ID NO: 1881402
gucugaguucaugguugga

SEQ ID NO: 2041779 - RNA, 19 nt, Artificial Sequence
  Description of Artificial Sequence: Synthetic oligonucleotide
  Antisense strand to SEQ ID NO: 2041778
uccaaccaugaacucagac

SEQ ID NO: 2041780 - RNA, 19 nt, Artificial Sequence
  Description of Artificial Sequence: Synthetic oligonucleotide
  Sense strand starting at position 2006 of SEQ ID NO: 1881402
cugaguucaugguuggaau

SEQ ID NO: 2041781 - RNA, 19 nt, Artificial Sequence
  Description of Artificial Sequence: Synthetic oligonucleotide
  Antisense strand to SEQ ID NO: 2041780
auuccaaccaugaacucag

SEQ ID NO: 2041782 - RNA, 19 nt, Artificial Sequence
  Description of Artificial Sequence: Synthetic oligonucleotide
  Sense strand starting at position 2007 of SEQ ID NO: 1881402
ugaguucaugguuggaaug

SEQ ID NO: 2041783 - RNA, 19 nt, Artificial Sequence
  Description of Artificial Sequence: Synthetic oligonucleotide
  Antisense strand to SEQ ID NO: 2041782
cauuccaaccaugaacuca

SEQ ID NO: 2041784 - RNA, 19 nt, Artificial Sequence
  Description of Artificial Sequence: Synthetic oligonucleotide
  Sense strand starting at position 2026 of SEQ ID NO: 1881402
uucucauagucugaauggu

SEQ ID NO: 2041785 - RNA, 19 nt, Artificial Sequence
  Description of Artificial Sequence: Synthetic oligonucleotide
  Antisense strand to SEQ ID NO: 2041784
accauucagacuaugagaa

SEQ ID NO: 2041786 - RNA, 19 nt, Artificial Sequence
  Description of Artificial Sequence: Synthetic oligonucleotide
  Sense strand starting at position 2218 of SEQ ID NO: 1881402
gucccaguuugagacuuaa

SEQ ID NO: 2041787 - RNA, 19 nt, Artificial Sequence
  Description of Artificial Sequence: Synthetic oligonucleotide
  Antisense strand to SEQ ID NO: 2041786
uuaagucucaaacugggac

SEQ ID NO: 2041788 - RNA, 19 nt, Artificial Sequence
  Description of Artificial Sequence: Synthetic oligonucleotide
  Sense strand starting at position 2243 of SEQ ID NO: 1881402
gggaguuauugaggcuucu

SEQ ID NO: 2041789 - RNA, 19 nt, Artificial Sequence
  Description of Artificial Sequence: Synthetic oligonucleotide
  Antisense strand to SEQ ID NO: 2041788
agaagccucaauaacuccc

SEQ ID NO: 2041790 - RNA, 19 nt, Artificial Sequence
  Description of Artificial Sequence: Synthetic oligonucleotide
  Sense strand starting at position 2249 of SEQ ID NO: 1881402
uauugaggcuucucugguu

SEQ ID NO: 2041791 - RNA, 19 nt, Artificial Sequence
  Description of Artificial Sequence: Synthetic oligonucleotide
  Antisense strand to SEQ ID NO: 2041790
aaccagagaagccucaaua

SEQ ID NO: 2041792 - RNA, 19 nt, Artificial Sequence
  Description of Artificial Sequence: Synthetic oligonucleotide
  Sense strand starting at position 2254 of SEQ ID NO: 1881402
aggcuucucugguugacuu

SEQ ID NO: 2041793 - RNA, 19 nt, Artificial Sequence
  Description of Artificial Sequence: Synthetic oligonucleotide
  Antisense strand to SEQ ID NO: 2041792
aagucaaccagagaagccu

SEQ ID NO: 2041794 - RNA, 19 nt, Artificial Sequence
  Description of Artificial Sequence: Synthetic oligonucleotide
  Sense strand starting at position 2255 of SEQ ID NO: 1881402
ggcuucucugguugacuuu

SEQ ID NO: 2041795 - RNA, 19 nt, Artificial Sequence
  Description of Artificial Sequence: Synthetic oligonucleotide
  Antisense strand to SEQ ID NO: 2041794
aaagucaaccagagaagcc

SEQ ID NO: 2041796 - RNA, 19 nt, Artificial Sequence
  Description of Artificial Sequence: Synthetic oligonucleotide
  Sense strand starting at position 2262 of SEQ ID NO: 1881402
cugguugacuuuccuggaa

SEQ ID NO: 2041797 - RNA, 19 nt, Artificial Sequence
  Description of Artificial Sequence: Synthetic oligonucleotide
  Antisense strand to SEQ ID NO: 2041796
uuccaggaaagucaaccag

SEQ ID NO: 2041798 - RNA, 19 nt, Artificial Sequence
  Description of Artificial Sequence: Synthetic oligonucleotide
  Sense strand starting at position 2334 of SEQ ID NO: 1881402
gcaauuuacucuccgucuu

SEQ ID NO: 2041799 - RNA, 19 nt, Artificial Sequence
  Description of Artificial Sequence: Synthetic oligonucleotide
  Antisense strand to SEQ ID NO: 2041798
aagacggagaguaaauugc

SEQ ID NO: 2041800 - RNA, 19 nt, Artificial Sequence
  Description of Artificial Sequence: Synthetic oligonucleotide
  Sense strand starting at position 407 of SEQ ID NO: 1881403
auaguuugccuaggagaga

SEQ ID NO: 2041801 - RNA, 19 nt, Artificial Sequence
  Description of Artificial Sequence: Synthetic oligonucleotide
  Antisense strand to SEQ ID NO: 2041800
ucucuccuaggcaaacuau

SEQ ID NO: 2041802 - RNA, 19 nt, Artificial Sequence
  Description of Artificial Sequence: Synthetic oligonucleotide
  Sense strand starting at position 471 of SEQ ID NO: 1881403
aggugcuagaguugagaau

SEQ ID NO: 2041803 - RNA, 19 nt, Artificial Sequence
  Description of Artificial Sequence: Synthetic oligonucleotide
  Antisense strand to SEQ ID NO: 2041802
auucucaacucuagcaccu

SEQ ID NO: 2041804 - RNA, 19 nt, Artificial Sequence
  Description of Artificial Sequence: Synthetic oligonucleotide
  Sense strand starting at position 526 of SEQ ID NO: 1881403
uggaauuagaccugugggu

SEQ ID NO: 2041805 - RNA, 19 nt, Artificial Sequence
  Description of Artificial Sequence: Synthetic oligonucleotide
  Antisense strand to SEQ ID NO: 2041804
acccacaggucuaauucca

SEQ ID NO: 2041806 - RNA, 19 nt, Artificial Sequence
  Description of Artificial Sequence: Synthetic oligonucleotide
  Sense strand starting at position 528 of SEQ ID NO: 1881403
gaauuagaccuguggguga

SEQ ID NO: 2041807 - RNA, 19 nt, Artificial Sequence
  Description of Artificial Sequence: Synthetic oligonucleotide
  Antisense strand to SEQ ID NO: 2041806
ucacccacaggucuaauuc

SEQ ID NO: 2041808 - RNA, 19 nt, Artificial Sequence
  Description of Artificial Sequence: Synthetic oligonucleotide
  Sense strand starting at position 532 of SEQ ID NO: 1881403
uagaccugugggugaagaa

SEQ ID NO: 2041809 - RNA, 19 nt, Artificial Sequence
  Description of Artificial Sequence: Synthetic oligonucleotide
  Antisense strand to SEQ ID NO: 2041808
uucuucacccacaggucua

SEQ ID NO: 2041810 - RNA, 19 nt, Artificial Sequence
  Description of Artificial Sequence: Synthetic oligonucleotide
  Sense strand starting at position 571 of SEQ ID NO: 1881403
gcgugaggaacugagagau

SEQ ID NO: 2041811 - RNA, 19 nt, Artificial Sequence
  Description of Artificial Sequence: Synthetic oligonucleotide
  Antisense strand to SEQ ID NO: 2041810
aucucucaguuccucacgc

SEQ ID NO: 2041812 - RNA, 19 nt, Artificial Sequence
  Description of Artificial Sequence: Synthetic oligonucleotide
  Sense strand starting at position 618 of SEQ ID NO: 1881403
cagguuugggcaggaagau

SEQ ID NO: 2041813 - RNA, 19 nt, Artificial Sequence
  Description of Artificial Sequence: Synthetic oligonucleotide
  Antisense strand to SEQ ID NO: 2041812
aucuuccugcccaaaccug

SEQ ID NO: 2041814 - RNA, 19 nt, Artificial Sequence
  Description of Artificial Sequence: Synthetic oligonucleotide
  Sense strand starting at position 635 of SEQ ID NO: 1881403
aucaaagucugguuuggga

SEQ ID NO: 2041815 - RNA, 19 nt, Artificial Sequence
  Description of Artificial Sequence: Synthetic oligonucleotide
  Antisense strand to SEQ ID NO: 2041814
ucccaaaccagacuuugau

SEQ ID NO: 2041816 - RNA, 19 nt, Artificial Sequence
  Description of Artificial Sequence: Synthetic oligonucleotide
  Sense strand starting at position 637 of SEQ ID NO: 1881403
caaagucugguuugggaca

SEQ ID NO: 2041817 - RNA, 19 nt, Artificial Sequence
  Description of Artificial Sequence: Synthetic oligonucleotide
  Antisense strand to SEQ ID NO: 2041816
ugucccaaaccagacuuug

SEQ ID NO: 2041818 - RNA, 19 nt, Artificial Sequence
  Description of Artificial Sequence: Synthetic oligonucleotide
  Sense strand starting at position 703 of SEQ ID NO: 1881403
gggcuagaucuacgggaug

SEQ ID NO: 2041819 - RNA, 19 nt, Artificial Sequence
  Description of Artificial Sequence: Synthetic oligonucleotide
  Antisense strand to SEQ ID NO: 2041818
caucccguagaucuagccc

SEQ ID NO: 2041820 - RNA, 19 nt, Artificial Sequence
  Description of Artificial Sequence: Synthetic oligonucleotide
  Sense strand starting at position 705 of SEQ ID NO: 1881403
gcuagaucuacgggaugug

SEQ ID NO: 2041821 - RNA, 19 nt, Artificial Sequence
  Description of Artificial Sequence: Synthetic oligonucleotide
  Antisense strand to SEQ ID NO: 2041820
cacaucccguagaucuagc

SEQ ID NO: 2041822 - RNA, 19 nt, Artificial Sequence
  Description of Artificial Sequence: Synthetic oligonucleotide
  Sense strand starting at position 829 of SEQ ID NO: 1881403
gccacuaauggcugaggaa

SEQ ID NO: 2041823 - RNA, 19 nt, Artificial Sequence
  Description of Artificial Sequence: Synthetic oligonucleotide
  Antisense strand to SEQ ID NO: 2041822
uuccucagccauuaguggc

SEQ ID NO: 2041824 - RNA, 19 nt, Artificial Sequence
  Description of Artificial Sequence: Synthetic oligonucleotide
  Sense strand starting at position 1020 of SEQ ID NO: 1881403
caggcaccuugauuagagu

SEQ ID NO: 2041825 - RNA, 19 nt, Artificial Sequence
  Description of Artificial Sequence: Synthetic oligonucleotide
  Antisense strand to SEQ ID NO: 2041824
acucuaaucaaggugccug

SEQ ID NO: 2041826 - RNA, 19 nt, Artificial Sequence
  Description of Artificial Sequence: Synthetic oligonucleotide
  Sense strand starting at position 1026 of SEQ ID NO: 1881403
ccuugauuagagugggaca

SEQ ID NO: 2041827 - RNA, 19 nt, Artificial Sequence
  Description of Artificial Sequence: Synthetic oligonucleotide
  Antisense strand to SEQ ID NO: 2041826
ugucccacucuaaucaagg

SEQ ID NO: 2041828 - RNA, 19 nt, Artificial Sequence
  Description of Artificial Sequence: Synthetic oligonucleotide
  Sense strand starting at position 1027 of SEQ ID NO: 1881403
cuugauuagagugggacau

SEQ ID NO: 2041829 - RNA, 19 nt, Artificial Sequence
  Description of Artificial Sequence: Synthetic oligonucleotide
  Antisense strand to SEQ ID NO: 2041828
augucccacucuaaucaag

SEQ ID NO: 2041830 - RNA, 19 nt, Artificial Sequence
  Description of Artificial Sequence: Synthetic oligonucleotide
  Sense strand starting at position 1117 of SEQ ID NO: 1881403
ggguguggugguugaggau

SEQ ID NO: 2041831 - RNA, 19 nt, Artificial Sequence
  Description of Artificial Sequence: Synthetic oligonucleotide
  Antisense strand to SEQ ID NO: 2041830
auccucaaccaccacaccc

SEQ ID NO: 2041832 - RNA, 19 nt, Artificial Sequence
  Description of Artificial Sequence: Synthetic oligonucleotide
  Sense strand starting at position 1118 of SEQ ID NO: 1881403
gguguggugguugaggauu

SEQ ID NO: 2041833 - RNA, 19 nt, Artificial Sequence
  Description of Artificial Sequence: Synthetic oligonucleotide
  Antisense strand to SEQ ID NO: 2041832
aauccucaaccaccacacc

SEQ ID NO: 2041834 - RNA, 19 nt, Artificial Sequence
  Description of Artificial Sequence: Synthetic oligonucleotide
  Sense strand starting at position 2255 of SEQ ID NO: 1881403
uaguguugcgguuccuuau

SEQ ID NO: 2041835 - RNA, 19 nt, Artificial Sequence
  Description of Artificial Sequence: Synthetic oligonucleotide
  Antisense strand to SEQ ID NO: 2041834
auaaggaaccgcaacacua

SEQ ID NO: 2041836 - RNA, 19 nt, Artificial Sequence
  Description of Artificial Sequence: Synthetic oligonucleotide
  Sense strand starting at position 2295 of SEQ ID NO: 1881403
ggcccuaggguuugaguga

SEQ ID NO: 2041837 - RNA, 19 nt, Artificial Sequence
  Description of Artificial Sequence: Synthetic oligonucleotide
  Antisense strand to SEQ ID NO: 2041836
ucacucaaacccuagggcc

SEQ ID NO: 2041838 - RNA, 19 nt, Artificial Sequence
  Description of Artificial Sequence: Synthetic oligonucleotide
  Sense strand starting at position 2300 of SEQ ID NO: 1881403
uaggguuugagugauucca

SEQ ID NO: 2041839 - RNA, 19 nt, Artificial Sequence
  Description of Artificial Sequence: Synthetic oligonucleotide
  Antisense strand to SEQ ID NO: 2041838
uggaaucacucaaacccua

SEQ ID NO: 2041840 - RNA, 19 nt, Artificial Sequence
  Description of Artificial Sequence: Synthetic oligonucleotide
  Sense strand starting at position 2302 of SEQ ID NO: 1881403
ggguuugagugauuccaca

SEQ ID NO: 2041841 - RNA, 19 nt, Artificial Sequence
  Description of Artificial Sequence: Synthetic oligonucleotide
  Antisense strand to SEQ ID NO: 2041840
uguggaaucacucaaaccc

SEQ ID NO: 2041842 - RNA, 19 nt, Artificial Sequence
  Description of Artificial Sequence: Synthetic oligonucleotide
  Sense strand starting at position 2318 of SEQ ID NO: 1881403
acaguauuuauaggcgcua

SEQ ID NO: 2041843 - RNA, 19 nt, Artificial Sequence
  Description of Artificial Sequence: Synthetic oligonucleotide
  Antisense strand to SEQ ID NO: 2041842
uagcgccuauaaauacugu

SEQ ID NO: 2041844 - RNA, 19 nt, Artificial Sequence
  Description of Artificial Sequence: Synthetic oligonucleotide
  Sense strand starting at position 2319 of SEQ ID NO: 1881403
caguauuuauaggcgcuaa

SEQ ID NO: 2041845 - RNA, 19 nt, Artificial Sequence
  Description of Artificial Sequence: Synthetic oligonucleotide
  Antisense strand to SEQ ID NO: 2041844
uuagcgccuauaaauacug

SEQ ID NO: 2041846 - RNA, 19 nt, Artificial Sequence
  Description of Artificial Sequence: Synthetic oligonucleotide
  Sense strand starting at position 2352 of SEQ ID NO: 1881403
ccucauggagcuuacuaaa

SEQ ID NO: 2041847 - RNA, 19 nt, Artificial Sequence
  Description of Artificial Sequence: Synthetic oligonucleotide
  Antisense strand to SEQ ID NO: 2041846
uuuaguaagcuccaugagg

SEQ ID NO: 2041848 - RNA, 19 nt, Artificial Sequence
  Description of Artificial Sequence: Synthetic oligonucleotide
  Sense strand starting at position 2490 of SEQ ID NO: 1881403
gcgcauuuaagcugaaggu

SEQ ID NO: 2041849 - RNA, 19 nt, Artificial Sequence
  Description of Artificial Sequence: Synthetic oligonucleotide
  Antisense strand to SEQ ID NO: 2041848
accuucagcuuaaaugcgc

SEQ ID NO: 2041850 - RNA, 19 nt, Artificial Sequence
  Description of Artificial Sequence: Synthetic oligonucleotide
  Sense strand starting at position 2496 of SEQ ID NO: 1881403
uuaagcugaagguguaaau

SEQ ID NO: 2041851 - RNA, 19 nt, Artificial Sequence
  Description of Artificial Sequence: Synthetic oligonucleotide
  Antisense strand to SEQ ID NO: 2041850
auuuacaccuucagcuuaa

SEQ ID NO: 2041852 - RNA, 19 nt, Artificial Sequence
  Description of Artificial Sequence: Synthetic oligonucleotide
  Sense strand starting at position 2599 of SEQ ID NO: 1881403
agaaccucugugcgaacua

SEQ ID NO: 2041853 - RNA, 19 nt, Artificial Sequence
  Description of Artificial Sequence: Synthetic oligonucleotide
  Antisense strand to SEQ ID NO: 2041852
uaguucgcacagagguucu

SEQ ID NO: 2041854 - RNA, 19 nt, Artificial Sequence
  Description of Artificial Sequence: Synthetic oligonucleotide
  Sense strand starting at position 2687 of SEQ ID NO: 1881403
ggguaagguccuuagcgag

SEQ ID NO: 2041855 - RNA, 19 nt, Artificial Sequence
  Description of Artificial Sequence: Synthetic oligonucleotide
  Antisense strand to SEQ ID NO: 2041854
cucgcuaaggaccuuaccc

SEQ ID NO: 2041856 - RNA, 19 nt, Artificial Sequence
  Description of Artificial Sequence: Synthetic oligonucleotide
  Sense strand starting at position 2778 of SEQ ID NO: 1881403
uugagucaacugcgaaaga

SEQ ID NO: 2041857 - RNA, 19 nt, Artificial Sequence
  Description of Artificial Sequence: Synthetic oligonucleotide
  Antisense strand to SEQ ID NO: 2041856
ucuuucgcaguugacucaa

SEQ ID NO: 2041858 - RNA, 19 nt, Artificial Sequence
  Description of Artificial Sequence: Synthetic oligonucleotide
  Sense strand starting at position 2787 of SEQ ID NO: 1881403
cugcgaaagaaauguaaua

SEQ ID NO: 2041859 - RNA, 19 nt, Artificial Sequence
  Description of Artificial Sequence: Synthetic oligonucleotide
  Antisense strand to SEQ ID NO: 2041858
uauuacauuucuuucgcag

SEQ ID NO: 2041860 - RNA, 19 nt, Artificial Sequence
  Description of Artificial Sequence: Synthetic oligonucleotide
  Sense strand starting at position 2789 of SEQ ID NO: 1881403
gcgaaagaaauguaauagu

SEQ ID NO: 2041861 - RNA, 19 nt, Artificial Sequence
  Description of Artificial Sequence: Synthetic oligonucleotide
  Antisense strand to SEQ ID NO: 2041860
acuauuacauuucuuucgc

SEQ ID NO: 2041862 - RNA, 19 nt, Artificial Sequence
  Description of Artificial Sequence: Synthetic oligonucleotide
  Sense strand starting at position 2832 of SEQ ID NO: 1881403
aggcuaagacuguaagcaa

SEQ ID NO: 2041863 - RNA, 19 nt, Artificial Sequence
  Description of Artificial Sequence: Synthetic oligonucleotide
  Antisense strand to SEQ ID NO: 2041862
uugcuuacagucuuagccu

SEQ ID NO: 2041864 - RNA, 19 nt, Artificial Sequence
  Description of Artificial Sequence: Synthetic oligonucleotide
  Sense strand starting at position 3114 of SEQ ID NO: 1881403
uugucagucacuggguaga

SEQ ID NO: 2041865 - RNA, 19 nt, Artificial Sequence
  Description of Artificial Sequence: Synthetic oligonucleotide
  Antisense strand to SEQ ID NO: 2041864
ucuacccagugacugacaa

SEQ ID NO: 2041866 - RNA, 19 nt, Artificial Sequence
  Description of Artificial Sequence: Synthetic oligonucleotide
  Sense strand starting at position 3135 of SEQ ID NO: 1881403
ugcucuuaagagugaaggu

SEQ ID NO: 2041867 - RNA, 19 nt, Artificial Sequence
  Description of Artificial Sequence: Synthetic oligonucleotide
  Antisense strand to SEQ ID NO: 2041866
accuucacucuuaagagca

SEQ ID NO: 2041868 - RNA, 19 nt, Artificial Sequence
  Description of Artificial Sequence: Synthetic oligonucleotide
  Sense strand starting at position 3235 of SEQ ID NO: 1881403
aaaggugauuuagggaauu

SEQ ID NO: 2041869 - RNA, 19 nt, Artificial Sequence
  Description of Artificial Sequence: Synthetic oligonucleotide
  Antisense strand to SEQ ID NO: 2041868
aauucccuaaaucaccuuu

SEQ ID NO: 2041870 - RNA, 19 nt, Artificial Sequence
  Description of Artificial Sequence: Synthetic oligonucleotide
  Sense strand starting at position 3267 of SEQ ID NO: 1881403
agagauacaugacaaauga

SEQ ID NO: 2041871 - RNA, 19 nt, Artificial Sequence
  Description of Artificial Sequence: Synthetic oligonucleotide
  Antisense strand to SEQ ID NO: 2041870
ucauuugucauguaucucu

SEQ ID NO: 2041872 - RNA, 19 nt, Artificial Sequence
  Description of Artificial Sequence: Synthetic oligonucleotide
  Sense strand starting at position 3323 of SEQ ID NO: 1881403
gaggguuguugagugacca

SEQ ID NO: 2041873 - RNA, 19 nt, Artificial Sequence
  Description of Artificial Sequence: Synthetic oligonucleotide
  Antisense strand to SEQ ID NO: 2041872
uggucacucaacaacccuc

SEQ ID NO: 2041874 - RNA, 19 nt, Artificial Sequence
  Description of Artificial Sequence: Synthetic oligonucleotide
  Sense strand starting at position 3351 of SEQ ID NO: 1881403
uccuauuagucacccaguu

SEQ ID NO: 2041875 - RNA, 19 nt, Artificial Sequence
  Description of Artificial Sequence: Synthetic oligonucleotide
  Antisense strand to SEQ ID NO: 2041874
aacugggugacuaauagga

SEQ ID NO: 2041876 - RNA, 19 nt, Artificial Sequence
  Description of Artificial Sequence: Synthetic oligonucleotide
  Sense strand starting at position 3460 of SEQ ID NO: 1881403
guaggucacagagguaaug

SEQ ID NO: 2041877 - RNA, 19 nt, Artificial Sequence
  Description of Artificial Sequence: Synthetic oligonucleotide
  Antisense strand to SEQ ID NO: 2041876
cauuaccucugugaccuac

SEQ ID NO: 2041878 - RNA, 19 nt, Artificial Sequence
  Description of Artificial Sequence: Synthetic oligonucleotide
  Sense strand starting at position 3873 of SEQ ID NO: 1881403
uuugaaagcucagcucaaa

SEQ ID NO: 2041879 - RNA, 19 nt, Artificial Sequence
  Description of Artificial Sequence: Synthetic oligonucleotide
  Antisense strand to SEQ ID NO: 2041878
uuugagcugagcuuucaaa

SEQ ID NO: 2041880 - RNA, 19 nt, Artificial Sequence
  Description of Artificial Sequence: Synthetic oligonucleotide
  Sense strand starting at position 24 of SEQ ID NO: 1881404
ugagaugcuuuauugaaac

SEQ ID NO: 2041881 - RNA, 19 nt, Artificial Sequence
  Description of Artificial Sequence: Synthetic oligonucleotide
  Antisense strand to SEQ ID NO: 2041880
guuucaauaaagcaucuca

SEQ ID NO: 2041882 - RNA, 19 nt, Artificial Sequence
  Description of Artificial Sequence: Synthetic oligonucleotide
  Sense strand starting at position 105 of SEQ ID NO: 1881404
gacuguacucauugaacug

SEQ ID NO: 2041883 - RNA, 19 nt, Artificial Sequence
  Description of Artificial Sequence: Synthetic oligonucleotide
  Antisense strand to SEQ ID NO: 2041882
caguucaaugaguacaguc

SEQ ID NO: 2041884 - RNA, 19 nt, Artificial Sequence
  Description of Artificial Sequence: Synthetic oligonucleotide
  Sense strand starting at position 117 of SEQ ID NO: 1881404
ugaacugugcuugaucauu

SEQ ID NO: 2041885 - RNA, 19 nt, Artificial Sequence
  Description of Artificial Sequence: Synthetic oligonucleotide
  Antisense strand to SEQ ID NO: 2041884
aaugaucaagcacaguuca

SEQ ID NO: 2041886 - RNA, 19 nt, Artificial Sequence
  Description of Artificial Sequence: Synthetic oligonucleotide
  Sense strand starting at position 123 of SEQ ID NO: 1881404
gugcuugaucauuaguaau

SEQ ID NO: 2041887 - RNA, 19 nt, Artificial Sequence
  Description of Artificial Sequence: Synthetic oligonucleotide
  Antisense strand to SEQ ID NO: 2041886
auuacuaaugaucaagcac

SEQ ID NO: 2041888 - RNA, 19 nt, Artificial Sequence
  Description of Artificial Sequence: Synthetic oligonucleotide
  Sense strand starting at position 142 of SEQ ID NO: 1881404
ggcagcuaucuuuaaugag

SEQ ID NO: 2041889 - RNA, 19 nt, Artificial Sequence
  Description of Artificial Sequence: Synthetic oligonucleotide
  Antisense strand to SEQ ID NO: 2041888
cucauuaaagauagcugcc

SEQ ID NO: 2041890 - RNA, 19 nt, Artificial Sequence
  Description of Artificial Sequence: Synthetic oligonucleotide
  Sense strand starting at position 189 of SEQ ID NO: 1881404
ggucuaauagucugaggau

SEQ ID NO: 2041891 - RNA, 19 nt, Artificial Sequence
  Description of Artificial Sequence: Synthetic oligonucleotide
  Antisense strand to SEQ ID NO: 2041890
auccucagacuauuagacc

SEQ ID NO: 2041892 - RNA, 19 nt, Artificial Sequence
  Description of Artificial Sequence: Synthetic oligonucleotide
  Sense strand starting at position 196 of SEQ ID NO: 1881404
uagucugaggauugaauua

SEQ ID NO: 2041893 - RNA, 19 nt, Artificial Sequence
  Description of Artificial Sequence: Synthetic oligonucleotide
  Antisense strand to SEQ ID NO: 2041892
uaauucaauccucagacua

SEQ ID NO: 2041894 - RNA, 19 nt, Artificial Sequence
  Description of Artificial Sequence: Synthetic oligonucleotide
  Sense strand starting at position 226 of SEQ ID NO: 1881404
ggaaauauuucuuauaugg

SEQ ID NO: 2041895 - RNA, 19 nt, Artificial Sequence
  Description of Artificial Sequence: Synthetic oligonucleotide
  Antisense strand to SEQ ID NO: 2041894
ccauauaagaaauauuucc

SEQ ID NO: 2041896 - RNA, 19 nt, Artificial Sequence
  Description of Artificial Sequence: Synthetic oligonucleotide
  Sense strand starting at position 259 of SEQ ID NO: 1881404
augagaaagcugcaaguau

SEQ ID NO: 2041897 - RNA, 19 nt, Artificial Sequence
  Description of Artificial Sequence: Synthetic oligonucleotide
  Antisense strand to SEQ ID NO: 2041896
auacuugcagcuuucucau

SEQ ID NO: 2041898 - RNA, 19 nt, Artificial Sequence
  Description of Artificial Sequence: Synthetic oligonucleotide
  Sense strand starting at position 430 of SEQ ID NO: 1881404
ugcugacaucuuuaguuaa

SEQ ID NO: 2041899 - RNA, 19 nt, Artificial Sequence
  Description of Artificial Sequence: Synthetic oligonucleotide
  Antisense strand to SEQ ID NO: 2041898
uuaacuaaagaugucagca

SEQ ID NO: 2041900 - RNA, 19 nt, Artificial Sequence
  Description of Artificial Sequence: Synthetic oligonucleotide
  Sense strand starting at position 432 of SEQ ID NO: 1881404
cugacaucuuuaguuaaga

SEQ ID NO: 2041901 - RNA, 19 nt, Artificial Sequence
  Description of Artificial Sequence: Synthetic oligonucleotide
  Antisense strand to SEQ ID NO: 2041900
ucuuaacuaaagaugucag

SEQ ID NO: 2041902 - RNA, 19 nt, Artificial Sequence
  Description of Artificial Sequence: Synthetic oligonucleotide
  Sense strand starting at position 433 of SEQ ID NO: 1881404
ugacaucuuuaguuaagac

SEQ ID NO: 2041903 - RNA, 19 nt, Artificial Sequence
  Description of Artificial Sequence: Synthetic oligonucleotide
  Antisense strand to SEQ ID NO: 2041902
gucuuaacuaaagauguca

SEQ ID NO: 2041904 - RNA, 19 nt, Artificial Sequence
  Description of Artificial Sequence: Synthetic oligonucleotide
  Sense strand starting at position 530 of SEQ ID NO: 1881404
gcauuaaagcugcagagaa

SEQ ID NO: 2041905 - RNA, 19 nt, Artificial Sequence
  Description of Artificial Sequence: Synthetic oligonucleotide
  Antisense strand to SEQ ID NO: 2041904
uucucugcagcuuuaaugc

SEQ ID NO: 2041906 - RNA, 19 nt, Artificial Sequence
  Description of Artificial Sequence: Synthetic oligonucleotide
  Sense strand starting at position 624 of SEQ ID NO: 1881404
acuuacacugaugguaauu

SEQ ID NO: 2041907 - RNA, 19 nt, Artificial Sequence
  Description of Artificial Sequence: Synthetic oligonucleotide
  Antisense strand to SEQ ID NO: 2041906
aauuaccaucaguguaagu

SEQ ID NO: 2041908 - RNA, 19 nt, Artificial Sequence
  Description of Artificial Sequence: Synthetic oligonucleotide
  Sense strand starting at position 645 of SEQ ID NO: 1881404
uagauauuggccuagucag

SEQ ID NO: 2041909 - RNA, 19 nt, Artificial Sequence
  Description of Artificial Sequence: Synthetic oligonucleotide
  Antisense strand to SEQ ID NO: 2041908
cugacuaggccaauaucua

SEQ ID NO: 2041910 - RNA, 19 nt, Artificial Sequence
  Description of Artificial Sequence: Synthetic oligonucleotide
  Sense strand starting at position 771 of SEQ ID NO: 1881404
aaagcuauguaauuggauu

SEQ ID NO: 2041911 - RNA, 19 nt, Artificial Sequence
  Description of Artificial Sequence: Synthetic oligonucleotide
  Antisense strand to SEQ ID NO: 2041910
aauccaauuacauagcuuu

SEQ ID NO: 2041912 - RNA, 19 nt, Artificial Sequence
  Description of Artificial Sequence: Synthetic oligonucleotide
  Sense strand starting at position 862 of SEQ ID NO: 1881404
uuguuaauggaguaacuau

SEQ ID NO: 2041913 - RNA, 19 nt, Artificial Sequence
  Description of Artificial Sequence: Synthetic oligonucleotide
  Antisense strand to SEQ ID NO: 2041912
auaguuacuccauuaacaa

SEQ ID NO: 2041914 - RNA, 19 nt, Artificial Sequence
  Description of Artificial Sequence: Synthetic oligonucleotide
  Sense strand starting at position 869 of SEQ ID NO: 1881404
uggaguaacuaucuacaca

SEQ ID NO: 2041915 - RNA, 19 nt, Artificial Sequence
  Description of Artificial Sequence: Synthetic oligonucleotide
  Antisense strand to SEQ ID NO: 2041914
uguguagauaguuacucca

SEQ ID NO: 2041916 - RNA, 19 nt, Artificial Sequence
  Description of Artificial Sequence: Synthetic oligonucleotide
  Sense strand starting at position 1239 of SEQ ID NO: 1881404
auaggaaauuauucuaguc

SEQ ID NO: 2041917 - RNA, 19 nt, Artificial Sequence
  Description of Artificial Sequence: Synthetic oligonucleotide
  Antisense strand to SEQ ID NO: 2041916
gacuagaauaauuuccuau

SEQ ID NO: 2041918 - RNA, 19 nt, Artificial Sequence
  Description of Artificial Sequence: Synthetic oligonucleotide
  Sense strand starting at position 1336 of SEQ ID NO: 1881404
cugauauauuugggauaag

SEQ ID NO: 2041919 - RNA, 19 nt, Artificial Sequence
  Description of Artificial Sequence: Synthetic oligonucleotide
  Antisense strand to SEQ ID NO: 2041918
cuuaucccaaauauaucag

SEQ ID NO: 2041920 - RNA, 19 nt, Artificial Sequence
  Description of Artificial Sequence: Synthetic oligonucleotide
  Sense strand starting at position 2024 of SEQ ID NO: 1881404
gcgucauaggaacaucauu

SEQ ID NO: 2041921 - RNA, 19 nt, Artificial Sequence
  Description of Artificial Sequence: Synthetic oligonucleotide
  Antisense strand to SEQ ID NO: 2041920
aaugauguuccuaugacgc

SEQ ID NO: 2041922 - RNA, 19 nt, Artificial Sequence
  Description of Artificial Sequence: Synthetic oligonucleotide
  Sense strand starting at position 2190 of SEQ ID NO: 1881404
agaggcagaucuuucuaaa

SEQ ID NO: 2041923 - RNA, 19 nt, Artificial Sequence
  Description of Artificial Sequence: Synthetic oligonucleotide
  Antisense strand to SEQ ID NO: 2041922
uuuagaaagaucugccucu

SEQ ID NO: 2041924 - RNA, 19 nt, Artificial Sequence
  Description of Artificial Sequence: Synthetic oligonucleotide
  Sense strand starting at position 2316 of SEQ ID NO: 1881404
acggauacauuugauauaa

SEQ ID NO: 2041925 - RNA, 19 nt, Artificial Sequence
  Description of Artificial Sequence: Synthetic oligonucleotide
  Antisense strand to SEQ ID NO: 2041924
uuauaucaaauguauccgu

SEQ ID NO: 2041926 - RNA, 19 nt, Artificial Sequence
  Description of Artificial Sequence: Synthetic oligonucleotide
  Sense strand starting at position 2591 of SEQ ID NO: 1881404
aacucugagcugugggaaa

SEQ ID NO: 2041927 - RNA, 19 nt, Artificial Sequence
  Description of Artificial Sequence: Synthetic oligonucleotide
  Antisense strand to SEQ ID NO: 2041926
uuucccacagcucagaguu

SEQ ID NO: 2041928 - RNA, 19 nt, Artificial Sequence
  Description of Artificial Sequence: Synthetic oligonucleotide
  Sense strand starting at position 2904 of SEQ ID NO: 1881404
ucagaaugcccuugaagua

SEQ ID NO: 2041929 - RNA, 19 nt, Artificial Sequence
  Description of Artificial Sequence: Synthetic oligonucleotide
  Antisense strand to SEQ ID NO: 2041928
uacuucaagggcauucuga

SEQ ID NO: 2041930 - RNA, 19 nt, Artificial Sequence
  Description of Artificial Sequence: Synthetic oligonucleotide
  Sense strand starting at position 2911 of SEQ ID NO: 1881404
gcccuugaaguagauucua

SEQ ID NO: 2041931 - RNA, 19 nt, Artificial Sequence
  Description of Artificial Sequence: Synthetic oligonucleotide
  Antisense strand to SEQ ID NO: 2041930
uagaaucuacuucaagggc

SEQ ID NO: 2041932 - RNA, 19 nt, Artificial Sequence
  Description of Artificial Sequence: Synthetic oligonucleotide
  Sense strand starting at position 2972 of SEQ ID NO: 1881404
guaggcuuccuugaauaaa

SEQ ID NO: 2041933 - RNA, 19 nt, Artificial Sequence
  Description of Artificial Sequence: Synthetic oligonucleotide
  Antisense strand to SEQ ID NO: 2041932
uuuauucaaggaagccuac

SEQ ID NO: 2041934 - RNA, 19 nt, Artificial Sequence
  Description of Artificial Sequence: Synthetic oligonucleotide
  Sense strand starting at position 3143 of SEQ ID NO: 1881404
acugaaacuguccauagua

SEQ ID NO: 2041935 - RNA, 19 nt, Artificial Sequence
  Description of Artificial Sequence: Synthetic oligonucleotide
  Antisense strand to SEQ ID NO: 2041934
uacuauggacaguuucagu

SEQ ID NO: 2041936 - RNA, 19 nt, Artificial Sequence
  Description of Artificial Sequence: Synthetic oligonucleotide
  Sense strand starting at position 3145 of SEQ ID NO: 1881404
ugaaacuguccauaguauc

SEQ ID NO: 2041937 - RNA, 19 nt, Artificial Sequence
  Description of Artificial Sequence: Synthetic oligonucleotide
  Antisense strand to SEQ ID NO: 2041936
gauacuauggacaguuuca

SEQ ID NO: 2041938 - RNA, 19 nt, Artificial Sequence
  Description of Artificial Sequence: Synthetic oligonucleotide
  Sense strand starting at position 3217 of SEQ ID NO: 1881404
gcugccuuugaucauuaga

SEQ ID NO: 2041939 - RNA, 19 nt, Artificial Sequence
  Description of Artificial Sequence: Synthetic oligonucleotide
  Antisense strand to SEQ ID NO: 2041938
ucuaaugaucaaaggcagc

SEQ ID NO: 2041940 - RNA, 19 nt, Artificial Sequence
  Description of Artificial Sequence: Synthetic oligonucleotide
  Sense strand starting at position 3219 of SEQ ID NO: 1881404
ugccuuugaucauuagaaa

SEQ ID NO: 2041941 - RNA, 19 nt, Artificial Sequence
  Description of Artificial Sequence: Synthetic oligonucleotide
  Antisense strand to SEQ ID NO: 2041940
uuucuaaugaucaaaggca

SEQ ID NO: 2041942 - RNA, 19 nt, Artificial Sequence
  Description of Artificial Sequence: Synthetic oligonucleotide
  Sense strand starting at position 3220 of SEQ ID NO: 1881404
gccuuugaucauuagaaau

SEQ ID NO: 2041943 - RNA, 19 nt, Artificial Sequence
  Description of Artificial Sequence: Synthetic oligonucleotide
  Antisense strand to SEQ ID NO: 2041942
auuucuaaugaucaaaggc

SEQ ID NO: 2041944 - RNA, 19 nt, Artificial Sequence
  Description of Artificial Sequence: Synthetic oligonucleotide
  Sense strand starting at position 3420 of SEQ ID NO: 1881404
gcuauuagaccaugagacu

SEQ ID NO: 2041945 - RNA, 19 nt, Artificial Sequence
  Description of Artificial Sequence: Synthetic oligonucleotide
  Antisense strand to SEQ ID NO: 2041944
agucucauggucuaauagc

SEQ ID NO: 2041946 - RNA, 19 nt, Artificial Sequence
  Description of Artificial Sequence: Synthetic oligonucleotide
  Sense strand starting at position 3596 of SEQ ID NO: 1881404
uccuuaucaguguagugaa

SEQ ID NO: 2041947 - RNA, 19 nt, Artificial Sequence
  Description of Artificial Sequence: Synthetic oligonucleotide
  Antisense strand to SEQ ID NO: 2041946
uucacuacacugauaagga

SEQ ID NO: 2041948 - RNA, 19 nt, Artificial Sequence
  Description of Artificial Sequence: Synthetic oligonucleotide
  Sense strand starting at position 3750 of SEQ ID NO: 1881404
gguaguugcaaggauugaa

SEQ ID NO: 2041949 - RNA, 19 nt, Artificial Sequence
  Description of Artificial Sequence: Synthetic oligonucleotide
  Antisense strand to SEQ ID NO: 2041948
uucaauccuugcaacuacc

SEQ ID NO: 2041950 - RNA, 19 nt, Artificial Sequence
  Description of Artificial Sequence: Synthetic oligonucleotide
  Sense strand starting at position 3753 of SEQ ID NO: 1881404
aguugcaaggauugaaaga

SEQ ID NO: 2041951 - RNA, 19 nt, Artificial Sequence
  Description of Artificial Sequence: Synthetic oligonucleotide
  Antisense strand to SEQ ID NO: 2041950
ucuuucaauccuugcaacu

SEQ ID NO: 2041952 - RNA, 19 nt, Artificial Sequence
  Description of Artificial Sequence: Synthetic oligonucleotide
  Sense strand starting at position 3764 of SEQ ID NO: 1881404
uugaaagaaucaucugcaa

SEQ ID NO: 2041953 - RNA, 19 nt, Artificial Sequence
  Description of Artificial Sequence: Synthetic oligonucleotide
  Antisense strand to SEQ ID NO: 2041952
uugcagaugauucuuucaa

SEQ ID NO: 2041954 - RNA, 19 nt, Artificial Sequence
  Description of Artificial Sequence: Synthetic oligonucleotide
  Sense strand starting at position 3867 of SEQ ID NO: 1881404
aggagaaucuuugcuccua

SEQ ID NO: 2041955 - RNA, 19 nt, Artificial Sequence
  Description of Artificial Sequence: Synthetic oligonucleotide
  Antisense strand to SEQ ID NO: 2041954
uaggagcaaagauucuccu

SEQ ID NO: 2041956 - RNA, 19 nt, Artificial Sequence
  Description of Artificial Sequence: Synthetic oligonucleotide
  Sense strand starting at position 3868 of SEQ ID NO: 1881404
ggagaaucuuugcuccuaa

SEQ ID NO: 2041957 - RNA, 19 nt, Artificial Sequence
  Description of Artificial Sequence: Synthetic oligonucleotide
  Antisense strand to SEQ ID NO: 2041956
uuaggagcaaagauucucc

SEQ ID NO: 2041958 - RNA, 19 nt, Artificial Sequence
  Description of Artificial Sequence: Synthetic oligonucleotide
  Sense strand starting at position 3913 of SEQ ID NO: 1881404
gcauauaaauggccaagaa

SEQ ID NO: 2041959 - RNA, 19 nt, Artificial Sequence
  Description of Artificial Sequence: Synthetic oligonucleotide
  Antisense strand to SEQ ID NO: 2041958
uucuuggccauuuauaugc

SEQ ID NO: 2041960 - RNA, 19 nt, Artificial Sequence
  Description of Artificial Sequence: Synthetic oligonucleotide
  Sense strand starting at position 76 of SEQ ID NO: 1881405
uagcauuuauagguagcua

SEQ ID NO: 2041961 - RNA, 19 nt, Artificial Sequence
  Description of Artificial Sequence: Synthetic oligonucleotide
  Antisense strand to SEQ ID NO: 2041960
uagcuaccuauaaaugcua

SEQ ID NO: 2041962 - RNA, 19 nt, Artificial Sequence
  Description of Artificial Sequence: Synthetic oligonucleotide
  Sense strand starting at position 411 of SEQ ID NO: 1881405
ucgcgugaccugagcagaa

SEQ ID NO: 2041963 - RNA, 19 nt, Artificial Sequence
  Description of Artificial Sequence: Synthetic oligonucleotide
  Antisense strand to SEQ ID NO: 2041962
uucugcucaggucacgcga

SEQ ID NO: 2041964 - RNA, 19 nt, Artificial Sequence
  Description of Artificial Sequence: Synthetic oligonucleotide
  Sense strand starting at position 429 of SEQ ID NO: 1881405
aaauuccuaguuugggauu

SEQ ID NO: 2041965 - RNA, 19 nt, Artificial Sequence
  Description of Artificial Sequence: Synthetic oligonucleotide
  Antisense strand to SEQ ID NO: 2041964
aaucccaaacuaggaauuu

SEQ ID NO: 2041966 - RNA, 19 nt, Artificial Sequence
  Description of Artificial Sequence: Synthetic oligonucleotide
  Sense strand starting at position 484 of SEQ ID NO: 1881405
gcagguaaauugcuagaag

SEQ ID NO: 2041967 - RNA, 19 nt, Artificial Sequence
  Description of Artificial Sequence: Synthetic oligonucleotide
  Antisense strand to SEQ ID NO: 2041966
cuucuagcaauuuaccugc

SEQ ID NO: 2041968 - RNA, 19 nt, Artificial Sequence
  Description of Artificial Sequence: Synthetic oligonucleotide
  Sense strand starting at position 501 of SEQ ID NO: 1881405
aggagaagcaagugucagu

SEQ ID NO: 2041969 - RNA, 19 nt, Artificial Sequence
  Description of Artificial Sequence: Synthetic oligonucleotide
  Antisense strand to SEQ ID NO: 2041968
acugacacuugcuucuccu

SEQ ID NO: 2041970 - RNA, 19 nt, Artificial Sequence
  Description of Artificial Sequence: Synthetic oligonucleotide
  Sense strand starting at position 506 of SEQ ID NO: 1881405
aagcaagugucaguccaaa

SEQ ID NO: 2041971 - RNA, 19 nt, Artificial Sequence
  Description of Artificial Sequence: Synthetic oligonucleotide
  Antisense strand to SEQ ID NO: 2041970
uuuggacugacacuugcuu

SEQ ID NO: 2041972 - RNA, 19 nt, Artificial Sequence
  Description of Artificial Sequence: Synthetic oligonucleotide
  Sense strand starting at position 528 of SEQ ID NO: 1881405
aacccuuguugugugauuu

SEQ ID NO: 2041973 - RNA, 19 nt, Artificial Sequence
  Description of Artificial Sequence: Synthetic oligonucleotide
  Antisense strand to SEQ ID NO: 2041972
aaaucacacaacaaggguu

SEQ ID NO: 2041974 - RNA, 19 nt, Artificial Sequence
  Description of Artificial Sequence: Synthetic oligonucleotide
  Sense strand starting at position 679 of SEQ ID NO: 1881405
gaaagaacuuucucucgug

SEQ ID NO: 2041975 - RNA, 19 nt, Artificial Sequence
  Description of Artificial Sequence: Synthetic oligonucleotide
  Antisense strand to SEQ ID NO: 2041974
cacgagagaaaguucuuuc

SEQ ID NO: 2041976 - RNA, 19 nt, Artificial Sequence
  Description of Artificial Sequence: Synthetic oligonucleotide
  Sense strand starting at position 680 of SEQ ID NO: 1881405
aaagaacuuucucucguga

SEQ ID NO: 2041977 - RNA, 19 nt, Artificial Sequence
  Description of Artificial Sequence: Synthetic oligonucleotide
  Antisense strand to SEQ ID NO: 2041976
ucacgagagaaaguucuuu

SEQ ID NO: 2041978 - RNA, 19 nt, Artificial Sequence
  Description of Artificial Sequence: Synthetic oligonucleotide
  Sense strand starting at position 1563 of SEQ ID NO: 1881405
ggcggaagggcucauuguu

SEQ ID NO: 2041979 - RNA, 19 nt, Artificial Sequence
  Description of Artificial Sequence: Synthetic oligonucleotide
  Antisense strand to SEQ ID NO: 2041978
aacaaugagcccuuccgcc

SEQ ID NO: 2041980 - RNA, 19 nt, Artificial Sequence
  Description of Artificial Sequence: Synthetic oligonucleotide
  Sense strand starting at position 2262 of SEQ ID NO: 1881405
gcacccgaguuccuuauuu

SEQ ID NO: 2041981 - RNA, 19 nt, Artificial Sequence
  Description of Artificial Sequence: Synthetic oligonucleotide
  Antisense strand to SEQ ID NO: 2041980
aaauaaggaacucgggugc

SEQ ID NO: 2041982 - RNA, 19 nt, Artificial Sequence
  Description of Artificial Sequence: Synthetic oligonucleotide
  Sense strand starting at position 2616 of SEQ ID NO: 1881405
ugguuuauguguucuuaaa

SEQ ID NO: 2041983 - RNA, 19 nt, Artificial Sequence
  Description of Artificial Sequence: Synthetic oligonucleotide
  Antisense strand to SEQ ID NO: 2041982
uuuaagaacacauaaacca

SEQ ID NO: 2041984 - RNA, 19 nt, Artificial Sequence
  Description of Artificial Sequence: Synthetic oligonucleotide
  Sense strand starting at position 2729 of SEQ ID NO: 1881405
ucgcauuucuugcugaagu

SEQ ID NO: 2041985 - RNA, 19 nt, Artificial Sequence
  Description of Artificial Sequence: Synthetic oligonucleotide
  Antisense strand to SEQ ID NO: 2041984
acuucagcaagaaaugcga

SEQ ID NO: 2041986 - RNA, 19 nt, Artificial Sequence
  Description of Artificial Sequence: Synthetic oligonucleotide
  Sense strand starting at position 2731 of SEQ ID NO: 1881405
gcauuucuugcugaaguuu

SEQ ID NO: 2041987 - RNA, 19 nt, Artificial Sequence
  Description of Artificial Sequence: Synthetic oligonucleotide
  Antisense strand to SEQ ID NO: 2041986
aaacuucagcaagaaaugc

SEQ ID NO: 2041988 - RNA, 19 nt, Artificial Sequence
  Description of Artificial Sequence: Synthetic oligonucleotide
  Sense strand starting at position 2737 of SEQ ID NO: 1881405
cuugcugaaguuuguaaga

SEQ ID NO: 2041989 - RNA, 19 nt, Artificial Sequence
  Description of Artificial Sequence: Synthetic oligonucleotide
  Antisense strand to SEQ ID NO: 2041988
ucuuacaaacuucagcaag

SEQ ID NO: 2041990 - RNA, 19 nt, Artificial Sequence
  Description of Artificial Sequence: Synthetic oligonucleotide
  Sense strand starting at position 2747 of SEQ ID NO: 1881405
uuuguaagauuccucguua

SEQ ID NO: 2041991 - RNA, 19 nt, Artificial Sequence
  Description of Artificial Sequence: Synthetic oligonucleotide
  Antisense strand to SEQ ID NO: 2041990
uaacgaggaaucuuacaaa

SEQ ID NO: 2041992 - RNA, 19 nt, Artificial Sequence
  Description of Artificial Sequence: Synthetic oligonucleotide
  Sense strand starting at position 2810 of SEQ ID NO: 1881405
acuaaugguuaaucuguga

SEQ ID NO: 2041993 - RNA, 19 nt, Artificial Sequence
  Description of Artificial Sequence: Synthetic oligonucleotide
  Antisense strand to SEQ ID NO: 2041992
ucacagauuaaccauuagu

SEQ ID NO: 2041994 - RNA, 19 nt, Artificial Sequence
  Description of Artificial Sequence: Synthetic oligonucleotide
  Sense strand starting at position 2814 of SEQ ID NO: 1881405
augguuaaucugugaccuu

SEQ ID NO: 2041995 - RNA, 19 nt, Artificial Sequence
  Description of Artificial Sequence: Synthetic oligonucleotide
  Antisense strand to SEQ ID NO: 2041994
aaggucacagauuaaccau

SEQ ID NO: 2041996 - RNA, 19 nt, Artificial Sequence
  Description of Artificial Sequence: Synthetic oligonucleotide
  Sense strand starting at position 2921 of SEQ ID NO: 1881405
ucaccuguugcauggauga

SEQ ID NO: 2041997 - RNA, 19 nt, Artificial Sequence
  Description of Artificial Sequence: Synthetic oligonucleotide
  Antisense strand to SEQ ID NO: 2041996
ucauccaugcaacagguga

SEQ ID NO: 2041998 - RNA, 19 nt, Artificial Sequence
  Description of Artificial Sequence: Synthetic oligonucleotide
  Sense strand starting at position 2988 of SEQ ID NO: 1881405
cucauauuagcagguacaa

SEQ ID NO: 2041999 - RNA, 19 nt, Artificial Sequence
  Description of Artificial Sequence: Synthetic oligonucleotide
  Antisense strand to SEQ ID NO: 2041998
uuguaccugcuaauaugag

SEQ ID NO: 2042000 - RNA, 19 nt, Artificial Sequence
  Description of Artificial Sequence: Synthetic oligonucleotide
  Sense strand starting at position 3063 of SEQ ID NO: 1881405
aguugaggcaaaugaauga

SEQ ID NO: 2042001 - RNA, 19 nt, Artificial Sequence
  Description of Artificial Sequence: Synthetic oligonucleotide
  Antisense strand to SEQ ID NO: 2042000
ucauucauuugccucaacu

SEQ ID NO: 2042002 - RNA, 19 nt, Artificial Sequence
  Description of Artificial Sequence: Synthetic oligonucleotide
  Sense strand starting at position 3078 of SEQ ID NO: 1881405
augaaucaguaagugacua

SEQ ID NO: 2042003 - RNA, 19 nt, Artificial Sequence
  Description of Artificial Sequence: Synthetic oligonucleotide
  Antisense strand to SEQ ID NO: 2042002
uagucacuuacugauucau

SEQ ID NO: 2042004 - RNA, 19 nt, Artificial Sequence
  Description of Artificial Sequence: Synthetic oligonucleotide
  Sense strand starting at position 3082 of SEQ ID NO: 1881405
aucaguaagugacuauaaa

SEQ ID NO: 2042005 - RNA, 19 nt, Artificial Sequence
  Description of Artificial Sequence: Synthetic oligonucleotide
  Antisense strand to SEQ ID NO: 2042004
uuuauagucacuuacugau

SEQ ID NO: 2042006 - RNA, 19 nt, Artificial Sequence
  Description of Artificial Sequence: Synthetic oligonucleotide
  Sense strand starting at position 3101 of SEQ ID NO: 1881405
augguuauucuagguuauu

SEQ ID NO: 2042007 - RNA, 19 nt, Artificial Sequence
  Description of Artificial Sequence: Synthetic oligonucleotide
  Antisense strand to SEQ ID NO: 2042006
aauaaccuagaauaaccau

SEQ ID NO: 2042008 - RNA, 19 nt, Artificial Sequence
  Description of Artificial Sequence: Synthetic oligonucleotide
  Sense strand starting at position 3208 of SEQ ID NO: 1881405
auguuacuuugccuuauuu

SEQ ID NO: 2042009 - RNA, 19 nt, Artificial Sequence
  Description of Artificial Sequence: Synthetic oligonucleotide
  Antisense strand to SEQ ID NO: 2042008
aaauaaggcaaaguaacau

SEQ ID NO: 2042010 - RNA, 19 nt, Artificial Sequence
  Description of Artificial Sequence: Synthetic oligonucleotide
  Sense strand starting at position 3427 of SEQ ID NO: 1881405
aguggauuccuaggagcuc

SEQ ID NO: 2042011 - RNA, 19 nt, Artificial Sequence
  Description of Artificial Sequence: Synthetic oligonucleotide
  Antisense strand to SEQ ID NO: 2042010
gagcuccuaggaauccacu

SEQ ID NO: 2042012 - RNA, 19 nt, Artificial Sequence
  Description of Artificial Sequence: Synthetic oligonucleotide
  Sense strand starting at position 3479 of SEQ ID NO: 1881405
gaguuaggcaguuguuaaa

SEQ ID NO: 2042013 - RNA, 19 nt, Artificial Sequence
  Description of Artificial Sequence: Synthetic oligonucleotide
  Antisense strand to SEQ ID NO: 2042012
uuuaacaacugccuaacuc

SEQ ID NO: 2042014 - RNA, 19 nt, Artificial Sequence
  Description of Artificial Sequence: Synthetic oligonucleotide
  Sense strand starting at position 3593 of SEQ ID NO: 1881405
agaucucuccacugaguag

SEQ ID NO: 2042015 - RNA, 19 nt, Artificial Sequence
  Description of Artificial Sequence: Synthetic oligonucleotide
  Antisense strand to SEQ ID NO: 2042014
cuacucaguggagagaucu

SEQ ID NO: 2042016 - RNA, 19 nt, Artificial Sequence
  Description of Artificial Sequence: Synthetic oligonucleotide
  Sense strand starting at position 3616 of SEQ ID NO: 1881405
ccuggaagucaggguuuga

SEQ ID NO: 2042017 - RNA, 19 nt, Artificial Sequence
  Description of Artificial Sequence: Synthetic oligonucleotide
  Antisense strand to SEQ ID NO: 2042016
ucaaacccugacuuccagg

SEQ ID NO: 2042018 - RNA, 19 nt, Artificial Sequence
  Description of Artificial Sequence: Synthetic oligonucleotide
  Sense strand starting at position 3620 of SEQ ID NO: 1881405
gaagucaggguuugagagu

SEQ ID NO: 2042019 - RNA, 19 nt, Artificial Sequence
  Description of Artificial Sequence: Synthetic oligonucleotide
  Antisense strand to SEQ ID NO: 2042018
acucucaaacccugacuuc

SEQ ID NO: 2042020 - RNA, 19 nt, Artificial Sequence
  Description of Artificial Sequence: Synthetic oligonucleotide
  Sense strand starting at position 3631 of SEQ ID NO: 1881405
uugagaguuuguucuguca

SEQ ID NO: 2042021 - RNA, 19 nt, Artificial Sequence
  Description of Artificial Sequence: Synthetic oligonucleotide
  Antisense strand to SEQ ID NO: 2042020
ugacagaacaaacucucaa

SEQ ID NO: 2042022 - RNA, 19 nt, Artificial Sequence
  Description of Artificial Sequence: Synthetic oligonucleotide
  Sense strand starting at position 3644 of SEQ ID NO: 1881405
cugucauucucccugacuu

SEQ ID NO: 2042023 - RNA, 19 nt, Artificial Sequence
  Description of Artificial Sequence: Synthetic oligonucleotide
  Antisense strand to SEQ ID NO: 2042022
aagucagggagaaugacag

SEQ ID NO: 2042024 - RNA, 19 nt, Artificial Sequence
  Description of Artificial Sequence: Synthetic oligonucleotide
  Sense strand starting at position 3645 of SEQ ID NO: 1881405
ugucauucucccugacuug

SEQ ID NO: 2042025 - RNA, 19 nt, Artificial Sequence
  Description of Artificial Sequence: Synthetic oligonucleotide
  Antisense strand to SEQ ID NO: 2042024
caagucagggagaaugaca

SEQ ID NO: 2042026 - RNA, 19 nt, Artificial Sequence
  Description of Artificial Sequence: Synthetic oligonucleotide
  Sense strand starting at position 3646 of SEQ ID NO: 1881405
gucauucucccugacuugu

SEQ ID NO: 2042027 - RNA, 19 nt, Artificial Sequence
  Description of Artificial Sequence: Synthetic oligonucleotide
  Antisense strand to SEQ ID NO: 2042026
acaagucagggagaaugac

SEQ ID NO: 2042028 - RNA, 19 nt, Artificial Sequence
  Description of Artificial Sequence: Synthetic oligonucleotide
  Sense strand starting at position 3753 of SEQ ID NO: 1881405
caaggugccucugcaagau

SEQ ID NO: 2042029 - RNA, 19 nt, Artificial Sequence
  Description of Artificial Sequence: Synthetic oligonucleotide
  Antisense strand to SEQ ID NO: 2042028
aucuugcagaggcaccuug

SEQ ID NO: 2042030 - RNA, 19 nt, Artificial Sequence
  Description of Artificial Sequence: Synthetic oligonucleotide
  Sense strand starting at position 3762 of SEQ ID NO: 1881405
ucugcaagauuguucucau

SEQ ID NO: 2042031 - RNA, 19 nt, Artificial Sequence
  Description of Artificial Sequence: Synthetic oligonucleotide
  Antisense strand to SEQ ID NO: 2042030
augagaacaaucuugcaga

SEQ ID NO: 2042032 - RNA, 19 nt, Artificial Sequence
  Description of Artificial Sequence: Synthetic oligonucleotide
  Sense strand starting at position 3763 of SEQ ID NO: 1881405
cugcaagauuguucucauu

SEQ ID NO: 2042033 - RNA, 19 nt, Artificial Sequence
  Description of Artificial Sequence: Synthetic oligonucleotide
  Antisense strand to SEQ ID NO: 2042032
aaugagaacaaucuugcag

SEQ ID NO: 2042034 - RNA, 19 nt, Artificial Sequence
  Description of Artificial Sequence: Synthetic oligonucleotide
  Sense strand starting at position 3782 of SEQ ID NO: 1881405
uuuauagguuugguuugau

SEQ ID NO: 2042035 - RNA, 19 nt, Artificial Sequence
  Description of Artificial Sequence: Synthetic oligonucleotide
  Antisense strand to SEQ ID NO: 2042034
aucaaaccaaaccuauaaa

SEQ ID NO: 2042036 - RNA, 19 nt, Artificial Sequence
  Description of Artificial Sequence: Synthetic oligonucleotide
  Sense strand starting at position 3785 of SEQ ID NO: 1881405
auagguuugguuugauugu

SEQ ID NO: 2042037 - RNA, 19 nt, Artificial Sequence
  Description of Artificial Sequence: Synthetic oligonucleotide
  Antisense strand to SEQ ID NO: 2042036
acaaucaaaccaaaccuau

SEQ ID NO: 2042038 - RNA, 19 nt, Artificial Sequence
  Description of Artificial Sequence: Synthetic oligonucleotide
  Sense strand starting at position 3966 of SEQ ID NO: 1881405
ugcucaagccaggauacuu

SEQ ID NO: 2042039 - RNA, 19 nt, Artificial Sequence
  Description of Artificial Sequence: Synthetic oligonucleotide
  Antisense strand to SEQ ID NO: 2042038
aaguauccuggcuugagca

SEQ ID NO: 2042040 - RNA, 19 nt, Artificial Sequence
  Description of Artificial Sequence: Synthetic oligonucleotide
  Sense strand starting at position 151 of SEQ ID NO: 1881406
aguaguugcccugacuaua

SEQ ID NO: 2042041 - RNA, 19 nt, Artificial Sequence
  Description of Artificial Sequence: Synthetic oligonucleotide
  Antisense strand to SEQ ID NO: 2042040
uauagucagggcaacuacu

SEQ ID NO: 2042042 - RNA, 19 nt, Artificial Sequence
  Description of Artificial Sequence: Synthetic oligonucleotide
  Sense strand starting at position 163 of SEQ ID NO: 1881406
gacuauaggcuucgauuac

SEQ ID NO: 2042043 - RNA, 19 nt, Artificial Sequence
  Description of Artificial Sequence: Synthetic oligonucleotide
  Antisense strand to SEQ ID NO: 2042042
guaaucgaagccuauaguc

SEQ ID NO: 2042044 - RNA, 19 nt, Artificial Sequence
  Description of Artificial Sequence: Synthetic oligonucleotide
  Sense strand starting at position 167 of SEQ ID NO: 1881406
auaggcuucgauuacagua

SEQ ID NO: 2042045 - RNA, 19 nt, Artificial Sequence
  Description of Artificial Sequence: Synthetic oligonucleotide
  Antisense strand to SEQ ID NO: 2042044
uacuguaaucgaagccuau

SEQ ID NO: 2042046 - RNA, 19 nt, Artificial Sequence
  Description of Artificial Sequence: Synthetic oligonucleotide
  Sense strand starting at position 172 of SEQ ID NO: 1881406
cuucgauuacaguaguuac

SEQ ID NO: 2042047 - RNA, 19 nt, Artificial Sequence
  Description of Artificial Sequence: Synthetic oligonucleotide
  Antisense strand to SEQ ID NO: 2042046
guaacuacuguaaucgaag

SEQ ID NO: 2042048 - RNA, 19 nt, Artificial Sequence
  Description of Artificial Sequence: Synthetic oligonucleotide
  Sense strand starting at position 175 of SEQ ID NO: 1881406
cgauuacaguaguuacaag

SEQ ID NO: 2042049 - RNA, 19 nt, Artificial Sequence
  Description of Artificial Sequence: Synthetic oligonucleotide
  Antisense strand to SEQ ID NO: 2042048
cuuguaacuacuguaaucg

SEQ ID NO: 2042050 - RNA, 19 nt, Artificial Sequence
  Description of Artificial Sequence: Synthetic oligonucleotide
  Sense strand starting at position 890 of SEQ ID NO: 1881406
acaagcgauugauuagcua

SEQ ID NO: 2042051 - RNA, 19 nt, Artificial Sequence
  Description of Artificial Sequence: Synthetic oligonucleotide
  Antisense strand to SEQ ID NO: 2042050
uagcuaaucaaucgcuugu

SEQ ID NO: 2042052 - RNA, 19 nt, Artificial Sequence
  Description of Artificial Sequence: Synthetic oligonucleotide
  Sense strand starting at position 925 of SEQ ID NO: 1881406
ucacacauuccagguacau

SEQ ID NO: 2042053 - RNA, 19 nt, Artificial Sequence
  Description of Artificial Sequence: Synthetic oligonucleotide
  Antisense strand to SEQ ID NO: 2042052
auguaccuggaauguguga

SEQ ID NO: 2042054 - RNA, 19 nt, Artificial Sequence
  Description of Artificial Sequence: Synthetic oligonucleotide
  Sense strand starting at position 960 of SEQ ID NO: 1881406
gcagcuagucagggacaaa

SEQ ID NO: 2042055 - RNA, 19 nt, Artificial Sequence
  Description of Artificial Sequence: Synthetic oligonucleotide
  Antisense strand to SEQ ID NO: 2042054
uuugucccugacuagcugc

SEQ ID NO: 2042056 - RNA, 19 nt, Artificial Sequence
  Description of Artificial Sequence: Synthetic oligonucleotide
  Sense strand starting at position 1012 of SEQ ID NO: 1881406
gggaguaugguugaagucu

SEQ ID NO: 2042057 - RNA, 19 nt, Artificial Sequence
  Description of Artificial Sequence: Synthetic oligonucleotide
  Antisense strand to SEQ ID NO: 2042056
agacuucaaccauacuccc

SEQ ID NO: 2042058 - RNA, 19 nt, Artificial Sequence
  Description of Artificial Sequence: Synthetic oligonucleotide
  Sense strand starting at position 1065 of SEQ ID NO: 1881406
aguucugguuguucuauuu

SEQ ID NO: 2042059 - RNA, 19 nt, Artificial Sequence
  Description of Artificial Sequence: Synthetic oligonucleotide
  Antisense strand to SEQ ID NO: 2042058
aaauagaacaaccagaacu

SEQ ID NO: 2042060 - RNA, 19 nt, Artificial Sequence
  Description of Artificial Sequence: Synthetic oligonucleotide
  Sense strand starting at position 1530 of SEQ ID NO: 1881406
aagcgugugggugaaagaa

SEQ ID NO: 2042061 - RNA, 19 nt, Artificial Sequence
  Description of Artificial Sequence: Synthetic oligonucleotide
  Antisense strand to SEQ ID NO: 2042060
uucuuucacccacacgcuu

SEQ ID NO: 2042062 - RNA, 19 nt, Artificial Sequence
  Description of Artificial Sequence: Synthetic oligonucleotide
  Sense strand starting at position 2168 of SEQ ID NO: 1881406
ucaugagaguuugcauaaa

SEQ ID NO: 2042063 - RNA, 19 nt, Artificial Sequence
  Description of Artificial Sequence: Synthetic oligonucleotide
  Antisense strand to SEQ ID NO: 2042062
uuuaugcaaacucucauga

SEQ ID NO: 2042064 - RNA, 19 nt, Artificial Sequence
  Description of Artificial Sequence: Synthetic oligonucleotide
  Sense strand starting at position 2368 of SEQ ID NO: 1881406
caucuaguacgugacaguu

SEQ ID NO: 2042065 - RNA, 19 nt, Artificial Sequence
  Description of Artificial Sequence: Synthetic oligonucleotide
  Antisense strand to SEQ ID NO: 2042064
aacugucacguacuagaug

SEQ ID NO: 2042066 - RNA, 19 nt, Artificial Sequence
  Description of Artificial Sequence: Synthetic oligonucleotide
  Sense strand starting at position 2378 of SEQ ID NO: 1881406
gugacaguuccauagcagu

SEQ ID NO: 2042067 - RNA, 19 nt, Artificial Sequence
  Description of Artificial Sequence: Synthetic oligonucleotide
  Antisense strand to SEQ ID NO: 2042066
acugcuauggaacugucac

SEQ ID NO: 2042068 - RNA, 19 nt, Artificial Sequence
  Description of Artificial Sequence: Synthetic oligonucleotide
  Sense strand starting at position 2392 of SEQ ID NO: 1881406
gcaguuugcacauaggaau

SEQ ID NO: 2042069 - RNA, 19 nt, Artificial Sequence
  Description of Artificial Sequence: Synthetic oligonucleotide
  Antisense strand to SEQ ID NO: 2042068
auuccuaugugcaaacugc

SEQ ID NO: 2042070 - RNA, 19 nt, Artificial Sequence
  Description of Artificial Sequence: Synthetic oligonucleotide
  Sense strand starting at position 2416 of SEQ ID NO: 1881406
gcacuuagaucauuacagu

SEQ ID NO: 2042071 - RNA, 19 nt, Artificial Sequence
  Description of Artificial Sequence: Synthetic oligonucleotide
  Antisense strand to SEQ ID NO: 2042070
acuguaaugaucuaagugc

SEQ ID NO: 2042072 - RNA, 19 nt, Artificial Sequence
  Description of Artificial Sequence: Synthetic oligonucleotide
  Sense strand starting at position 2458 of SEQ ID NO: 1881406
cucugcuuccuggaggagu

SEQ ID NO: 2042073 - RNA, 19 nt, Artificial Sequence
  Description of Artificial Sequence: Synthetic oligonucleotide
  Antisense strand to SEQ ID NO: 2042072
acuccuccaggaagcagag

SEQ ID NO: 2042074 - RNA, 19 nt, Artificial Sequence
  Description of Artificial Sequence: Synthetic oligonucleotide
  Sense strand starting at position 2499 of SEQ ID NO: 1881406
accucaaaugcuuagguaa

SEQ ID NO: 2042075 - RNA, 19 nt, Artificial Sequence
  Description of Artificial Sequence: Synthetic oligonucleotide
  Antisense strand to SEQ ID NO: 2042074
uuaccuaagcauuugaggu

SEQ ID NO: 2042076 - RNA, 19 nt, Artificial Sequence
  Description of Artificial Sequence: Synthetic oligonucleotide
  Sense strand starting at position 2510 of SEQ ID NO: 1881406
uuagguaauagguguagaa

SEQ ID NO: 2042077 - RNA, 19 nt, Artificial Sequence
  Description of Artificial Sequence: Synthetic oligonucleotide
  Antisense strand to SEQ ID NO: 2042076
uucuacaccuauuaccuaa

SEQ ID NO: 2042078 - RNA, 19 nt, Artificial Sequence
  Description of Artificial Sequence: Synthetic oligonucleotide
  Sense strand starting at position 2550 of SEQ ID NO: 1881406
agaguuagaagacgguuaa

SEQ ID NO: 2042079 - RNA, 19 nt, Artificial Sequence
  Description of Artificial Sequence: Synthetic oligonucleotide
  Antisense strand to SEQ ID NO: 2042078
uuaaccgucuucuaacucu

SEQ ID NO: 2042080 - RNA, 19 nt, Artificial Sequence
  Description of Artificial Sequence: Synthetic oligonucleotide
  Sense strand starting at position 2551 of SEQ ID NO: 1881406
gaguuagaagacgguuaau

SEQ ID NO: 2042081 - RNA, 19 nt, Artificial Sequence
  Description of Artificial Sequence: Synthetic oligonucleotide
  Antisense strand to SEQ ID NO: 2042080
auuaaccgucuucuaacuc

SEQ ID NO: 2042082 - RNA, 19 nt, Artificial Sequence
  Description of Artificial Sequence: Synthetic oligonucleotide
  Sense strand starting at position 2561 of SEQ ID NO: 1881406
acgguuaauugauugguau

SEQ ID NO: 2042083 - RNA, 19 nt, Artificial Sequence
  Description of Artificial Sequence: Synthetic oligonucleotide
  Antisense strand to SEQ ID NO: 2042082
auaccaaucaauuaaccgu

SEQ ID NO: 2042084 - RNA, 19 nt, Artificial Sequence
  Description of Artificial Sequence: Synthetic oligonucleotide
  Sense strand starting at position 2563 of SEQ ID NO: 1881406
gguuaauugauugguauca

SEQ ID NO: 2042085 - RNA, 19 nt, Artificial Sequence
  Description of Artificial Sequence: Synthetic oligonucleotide
  Antisense strand to SEQ ID NO: 2042084
ugauaccaaucaauuaacc

SEQ ID NO: 2042086 - RNA, 19 nt, Artificial Sequence
  Description of Artificial Sequence: Synthetic oligonucleotide
  Sense strand starting at position 2576 of SEQ ID NO: 1881406
guaucaggguuauccagga

SEQ ID NO: 2042087 - RNA, 19 nt, Artificial Sequence
  Description of Artificial Sequence: Synthetic oligonucleotide
  Antisense strand to SEQ ID NO: 2042086
uccuggauaacccugauac

SEQ ID NO: 2042088 - RNA, 19 nt, Artificial Sequence
  Description of Artificial Sequence: Synthetic oligonucleotide
  Sense strand starting at position 2580 of SEQ ID NO: 1881406
caggguuauccaggaggau

SEQ ID NO: 2042089 - RNA, 19 nt, Artificial Sequence
  Description of Artificial Sequence: Synthetic oligonucleotide
  Antisense strand to SEQ ID NO: 2042088
auccuccuggauaacccug

SEQ ID NO: 2042090 - RNA, 19 nt, Artificial Sequence
  Description of Artificial Sequence: Synthetic oligonucleotide
  Sense strand starting at position 2696 of SEQ ID NO: 1881406
uucuccauuguguauauaa

SEQ ID NO: 2042091 - RNA, 19 nt, Artificial Sequence
  Description of Artificial Sequence: Synthetic oligonucleotide
  Antisense strand to SEQ ID NO: 2042090
uuauauacacaauggagaa

SEQ ID NO: 2042092 - RNA, 19 nt, Artificial Sequence
  Description of Artificial Sequence: Synthetic oligonucleotide
  Sense strand starting at position 2723 of SEQ ID NO: 1881406
uuuauucuagcuuaaggaa

SEQ ID NO: 2042093 - RNA, 19 nt, Artificial Sequence
  Description of Artificial Sequence: Synthetic oligonucleotide
  Antisense strand to SEQ ID NO: 2042092
uuccuuaagcuagaauaaa

SEQ ID NO: 2042094 - RNA, 19 nt, Artificial Sequence
  Description of Artificial Sequence: Synthetic oligonucleotide
  Sense strand starting at position 2808 of SEQ ID NO: 1881406
gacauuauguuagugaaac

SEQ ID NO: 2042095 - RNA, 19 nt, Artificial Sequence
  Description of Artificial Sequence: Synthetic oligonucleotide
  Antisense strand to SEQ ID NO: 2042094
guuucacuaacauaauguc

SEQ ID NO: 2042096 - RNA, 19 nt, Artificial Sequence
  Description of Artificial Sequence: Synthetic oligonucleotide
  Sense strand starting at position 3101 of SEQ ID NO: 1881406
uauuuaaggugaggaauau

SEQ ID NO: 2042097 - RNA, 19 nt, Artificial Sequence
  Description of Artificial Sequence: Synthetic oligonucleotide
  Antisense strand to SEQ ID NO: 2042096
auauuccucaccuuaaaua

SEQ ID NO: 2042098 - RNA, 19 nt, Artificial Sequence
  Description of Artificial Sequence: Synthetic oligonucleotide
  Sense strand starting at position 3110 of SEQ ID NO: 1881406
ugaggaauauaugaauuac

SEQ ID NO: 2042099 - RNA, 19 nt, Artificial Sequence
  Description of Artificial Sequence: Synthetic oligonucleotide
  Antisense strand to SEQ ID NO: 2042098
guaauucauauauuccuca

SEQ ID NO: 2042100 - RNA, 19 nt, Artificial Sequence
  Description of Artificial Sequence: Synthetic oligonucleotide
  Sense strand starting at position 3120 of SEQ ID NO: 1881406
augaauuacucugauuuga

SEQ ID NO: 2042101 - RNA, 19 nt, Artificial Sequence
  Description of Artificial Sequence: Synthetic oligonucleotide
  Antisense strand to SEQ ID NO: 2042100
ucaaaucagaguaauucau

SEQ ID NO: 2042102 - RNA, 19 nt, Artificial Sequence
  Description of Artificial Sequence: Synthetic oligonucleotide
  Sense strand starting at position 3144 of SEQ ID NO: 1881406
guacauuguguguauugaa

SEQ ID NO: 2042103 - RNA, 19 nt, Artificial Sequence
  Description of Artificial Sequence: Synthetic oligonucleotide
  Antisense strand to SEQ ID NO: 2042102
uucaauacacacaauguac

SEQ ID NO: 2042104 - RNA, 19 nt, Artificial Sequence
  Description of Artificial Sequence: Synthetic oligonucleotide
  Sense strand starting at position 3158 of SEQ ID NO: 1881406
uugaaauagcacuauguac

SEQ ID NO: 2042105 - RNA, 19 nt, Artificial Sequence
  Description of Artificial Sequence: Synthetic oligonucleotide
  Antisense strand to SEQ ID NO: 2042104
guacauagugcuauuucaa

SEQ ID NO: 2042106 - RNA, 19 nt, Artificial Sequence
  Description of Artificial Sequence: Synthetic oligonucleotide
  Sense strand starting at position 3169 of SEQ ID NO: 1881406
cuauguacccaauaaaugu

SEQ ID NO: 2042107 - RNA, 19 nt, Artificial Sequence
  Description of Artificial Sequence: Synthetic oligonucleotide
  Antisense strand to SEQ ID NO: 2042106
acauuuauuggguacauag

SEQ ID NO: 2042108 - RNA, 19 nt, Artificial Sequence
  Description of Artificial Sequence: Synthetic oligonucleotide
  Sense strand starting at position 3176 of SEQ ID NO: 1881406
cccaauaaauguguacgau

SEQ ID NO: 2042109 - RNA, 19 nt, Artificial Sequence
  Description of Artificial Sequence: Synthetic oligonucleotide
  Antisense strand to SEQ ID NO: 2042108
aucguacacauuuauuggg

SEQ ID NO: 2042110 - RNA, 19 nt, Artificial Sequence
  Description of Artificial Sequence: Synthetic oligonucleotide
  Sense strand starting at position 3177 of SEQ ID NO: 1881406
ccaauaaauguguacgaua

SEQ ID NO: 2042111 - RNA, 19 nt, Artificial Sequence
  Description of Artificial Sequence: Synthetic oligonucleotide
  Antisense strand to SEQ ID NO: 2042110
uaucguacacauuuauugg

SEQ ID NO: 2042112 - RNA, 19 nt, Artificial Sequence
  Description of Artificial Sequence: Synthetic oligonucleotide
  Sense strand starting at position 3179 of SEQ ID NO: 1881406
aauaaauguguacgauauc

SEQ ID NO: 2042113 - RNA, 19 nt, Artificial Sequence
  Description of Artificial Sequence: Synthetic oligonucleotide
  Antisense strand to SEQ ID NO: 2042112
gauaucguacacauuuauu

SEQ ID NO: 2042114 - RNA, 19 nt, Artificial Sequence
  Description of Artificial Sequence: Synthetic oligonucleotide
  Sense strand starting at position 3182 of SEQ ID NO: 1881406
aaauguguacgauaucaug

SEQ ID NO: 2042115 - RNA, 19 nt, Artificial Sequence
  Description of Artificial Sequence: Synthetic oligonucleotide
  Antisense strand to SEQ ID NO: 2042114
caugauaucguacacauuu

SEQ ID NO: 2042116 - RNA, 19 nt, Artificial Sequence
  Description of Artificial Sequence: Synthetic oligonucleotide
  Sense strand starting at position 3190 of SEQ ID NO: 1881406
acgauaucaugugucaacu

SEQ ID NO: 2042117 - RNA, 19 nt, Artificial Sequence
  Description of Artificial Sequence: Synthetic oligonucleotide
  Antisense strand to SEQ ID NO: 2042116
aguugacacaugauaucgu

SEQ ID NO: 2042118 - RNA, 19 nt, Artificial Sequence
  Description of Artificial Sequence: Synthetic oligonucleotide
  Sense strand starting at position 3351 of SEQ ID NO: 1881406
ugagcuauaugagucucaa

SEQ ID NO: 2042119 - RNA, 19 nt, Artificial Sequence
  Description of Artificial Sequence: Synthetic oligonucleotide
  Antisense strand to SEQ ID NO: 2042118
uugagacucauauagcuca

SEQ ID NO: 2042120 - RNA, 19 nt, Artificial Sequence
  Description of Artificial Sequence: Synthetic oligonucleotide
  Sense strand starting at position 88 of SEQ ID NO: 1881407
uccauucgugcauacuuua

SEQ ID NO: 2042121 - RNA, 19 nt, Artificial Sequence
  Description of Artificial Sequence: Synthetic oligonucleotide
  Antisense strand to SEQ ID NO: 2042120
uaaaguaugcacgaaugga

SEQ ID NO: 2042122 - RNA, 19 nt, Artificial Sequence
  Description of Artificial Sequence: Synthetic oligonucleotide
  Sense strand starting at position 91 of SEQ ID NO: 1881407
auucgugcauacuuuauua

SEQ ID NO: 2042123 - RNA, 19 nt, Artificial Sequence
  Description of Artificial Sequence: Synthetic oligonucleotide
  Antisense strand to SEQ ID NO: 2042122
uaauaaaguaugcacgaau

SEQ ID NO: 2042124 - RNA, 19 nt, Artificial Sequence
  Description of Artificial Sequence: Synthetic oligonucleotide
  Sense strand starting at position 93 of SEQ ID NO: 1881407
ucgugcauacuuuauuaau

SEQ ID NO: 2042125 - RNA, 19 nt, Artificial Sequence
  Description of Artificial Sequence: Synthetic oligonucleotide
  Antisense strand to SEQ ID NO: 2042124
auuaauaaaguaugcacga

SEQ ID NO: 2042126 - RNA, 19 nt, Artificial Sequence
  Description of Artificial Sequence: Synthetic oligonucleotide
  Sense strand starting at position 102 of SEQ ID NO: 1881407
cuuuauuaauaugcgguua

SEQ ID NO: 2042127 - RNA, 19 nt, Artificial Sequence
  Description of Artificial Sequence: Synthetic oligonucleotide
  Antisense strand to SEQ ID NO: 2042126
uaaccgcauauuaauaaag

SEQ ID NO: 2042128 - RNA, 19 nt, Artificial Sequence
  Description of Artificial Sequence: Synthetic oligonucleotide
  Sense strand starting at position 107 of SEQ ID NO: 1881407
uuaauaugcgguuauaaug

SEQ ID NO: 2042129 - RNA, 19 nt, Artificial Sequence
  Description of Artificial Sequence: Synthetic oligonucleotide
  Antisense strand to SEQ ID NO: 2042128
cauuauaaccgcauauuaa

SEQ ID NO: 2042130 - RNA, 19 nt, Artificial Sequence
  Description of Artificial Sequence: Synthetic oligonucleotide
  Sense strand starting at position 131 of SEQ ID NO: 1881407
uauacuauauuggauagga

SEQ ID NO: 2042131 - RNA, 19 nt, Artificial Sequence
  Description of Artificial Sequence: Synthetic oligonucleotide
  Antisense strand to SEQ ID NO: 2042130
uccuauccaauauaguaua

SEQ ID NO: 2042132 - RNA, 19 nt, Artificial Sequence
  Description of Artificial Sequence: Synthetic oligonucleotide
  Sense strand starting at position 189 of SEQ ID NO: 1881407
gugccaaaugcguauuuau

SEQ ID NO: 2042133 - RNA, 19 nt, Artificial Sequence
  Description of Artificial Sequence: Synthetic oligonucleotide
  Antisense strand to SEQ ID NO: 2042132
auaaauacgcauuuggcac

SEQ ID NO: 2042134 - RNA, 19 nt, Artificial Sequence
  Description of Artificial Sequence: Synthetic oligonucleotide
  Sense strand starting at position 266 of SEQ ID NO: 1881407
auaugcauagacuguauaa

SEQ ID NO: 2042135 - RNA, 19 nt, Artificial Sequence
  Description of Artificial Sequence: Synthetic oligonucleotide
  Antisense strand to SEQ ID NO: 2042134
uuauacagucuaugcauau

SEQ ID NO: 2042136 - RNA, 19 nt, Artificial Sequence
  Description of Artificial Sequence: Synthetic oligonucleotide
  Sense strand starting at position 390 of SEQ ID NO: 1881407
auguguucuuaacuauagu

SEQ ID NO: 2042137 - RNA, 19 nt, Artificial Sequence
  Description of Artificial Sequence: Synthetic oligonucleotide
  Antisense strand to SEQ ID NO: 2042136
acuauaguuaagaacacau

SEQ ID NO: 2042138 - RNA, 19 nt, Artificial Sequence
  Description of Artificial Sequence: Synthetic oligonucleotide
  Sense strand starting at position 418 of SEQ ID NO: 1881407
guggaaagauaggauuuau

SEQ ID NO: 2042139 - RNA, 19 nt, Artificial Sequence
  Description of Artificial Sequence: Synthetic oligonucleotide
  Antisense strand to SEQ ID NO: 2042138
auaaauccuaucuuuccac

SEQ ID NO: 2042140 - RNA, 19 nt, Artificial Sequence
  Description of Artificial Sequence: Synthetic oligonucleotide
  Sense strand starting at position 452 of SEQ ID NO: 1881407
guguauuugugccuguuaa

SEQ ID NO: 2042141 - RNA, 19 nt, Artificial Sequence
  Description of Artificial Sequence: Synthetic oligonucleotide
  Antisense strand to SEQ ID NO: 2042140
uuaacaggcacaaauacac

SEQ ID NO: 2042142 - RNA, 19 nt, Artificial Sequence
  Description of Artificial Sequence: Synthetic oligonucleotide
  Sense strand starting at position 453 of SEQ ID NO: 1881407
uguauuugugccuguuaac

SEQ ID NO: 2042143 - RNA, 19 nt, Artificial Sequence
  Description of Artificial Sequence: Synthetic oligonucleotide
  Antisense strand to SEQ ID NO: 2042142
guuaacaggcacaaauaca

SEQ ID NO: 2042144 - RNA, 19 nt, Artificial Sequence
  Description of Artificial Sequence: Synthetic oligonucleotide
  Sense strand starting at position 456 of SEQ ID NO: 1881407
auuugugccuguuaaccua

SEQ ID NO: 2042145 - RNA, 19 nt, Artificial Sequence
  Description of Artificial Sequence: Synthetic oligonucleotide
  Antisense strand to SEQ ID NO: 2042144
uagguuaacaggcacaaau

SEQ ID NO: 2042146 - RNA, 19 nt, Artificial Sequence
  Description of Artificial Sequence: Synthetic oligonucleotide
  Sense strand starting at position 512 of SEQ ID NO: 1881407
agcuucuaguaucuauuau

SEQ ID NO: 2042147 - RNA, 19 nt, Artificial Sequence
  Description of Artificial Sequence: Synthetic oligonucleotide
  Antisense strand to SEQ ID NO: 2042146
auaauagauacuagaagcu

SEQ ID NO: 2042148 - RNA, 19 nt, Artificial Sequence
  Description of Artificial Sequence: Synthetic oligonucleotide
  Sense strand starting at position 725 of SEQ ID NO: 1881407
uucucuauuuguugauuga

SEQ ID NO: 2042149 - RNA, 19 nt, Artificial Sequence
  Description of Artificial Sequence: Synthetic oligonucleotide
  Antisense strand to SEQ ID NO: 2042148
ucaaucaacaaauagagaa

SEQ ID NO: 2042150 - RNA, 19 nt, Artificial Sequence
  Description of Artificial Sequence: Synthetic oligonucleotide
  Sense strand starting at position 777 of SEQ ID NO: 1881407
cgagaauagagcugugaua

SEQ ID NO: 2042151 - RNA, 19 nt, Artificial Sequence
  Description of Artificial Sequence: Synthetic oligonucleotide
  Antisense strand to SEQ ID NO: 2042150
uaucacagcucuauucucg

SEQ ID NO: 2042152 - RNA, 19 nt, Artificial Sequence
  Description of Artificial Sequence: Synthetic oligonucleotide
  Sense strand starting at position 779 of SEQ ID NO: 1881407
agaauagagcugugauaaa

SEQ ID NO: 2042153 - RNA, 19 nt, Artificial Sequence
  Description of Artificial Sequence: Synthetic oligonucleotide
  Antisense strand to SEQ ID NO: 2042152
uuuaucacagcucuauucu

SEQ ID NO: 2042154 - RNA, 19 nt, Artificial Sequence
  Description of Artificial Sequence: Synthetic oligonucleotide
  Sense strand starting at position 808 of SEQ ID NO: 1881407
ccgguaucccuuugauaua

SEQ ID NO: 2042155 - RNA, 19 nt, Artificial Sequence
  Description of Artificial Sequence: Synthetic oligonucleotide
  Antisense strand to SEQ ID NO: 2042154
uauaucaaagggauaccgg

SEQ ID NO: 2042156 - RNA, 19 nt, Artificial Sequence
  Description of Artificial Sequence: Synthetic oligonucleotide
  Sense strand starting at position 833 of SEQ ID NO: 1881407
gguuucuauuccuuuggau

SEQ ID NO: 2042157 - RNA, 19 nt, Artificial Sequence
  Description of Artificial Sequence: Synthetic oligonucleotide
  Antisense strand to SEQ ID NO: 2042156
auccaaaggaauagaaacc

SEQ ID NO: 2042158 - RNA, 19 nt, Artificial Sequence
  Description of Artificial Sequence: Synthetic oligonucleotide
  Sense strand starting at position 835 of SEQ ID NO: 1881407
uuucuauuccuuuggauag

SEQ ID NO: 2042159 - RNA, 19 nt, Artificial Sequence
  Description of Artificial Sequence: Synthetic oligonucleotide
  Antisense strand to SEQ ID NO: 2042158
cuauccaaaggaauagaaa

SEQ ID NO: 2042160 - RNA, 19 nt, Artificial Sequence
  Description of Artificial Sequence: Synthetic oligonucleotide
  Sense strand starting at position 847 of SEQ ID NO: 1881407
uggauagacccucaguagu

SEQ ID NO: 2042161 - RNA, 19 nt, Artificial Sequence
  Description of Artificial Sequence: Synthetic oligonucleotide
  Antisense strand to SEQ ID NO: 2042160
acuacugagggucuaucca

SEQ ID NO: 2042162 - RNA, 19 nt, Artificial Sequence
  Description of Artificial Sequence: Synthetic oligonucleotide
  Sense strand starting at position 2085 of SEQ ID NO: 1881407
aggauaagaugauauguaa

SEQ ID NO: 2042163 - RNA, 19 nt, Artificial Sequence
  Description of Artificial Sequence: Synthetic oligonucleotide
  Antisense strand to SEQ ID NO: 2042162
uuacauaucaucuuauccu

SEQ ID NO: 2042164 - RNA, 19 nt, Artificial Sequence
  Description of Artificial Sequence: Synthetic oligonucleotide
  Sense strand starting at position 2518 of SEQ ID NO: 1881407
ccauucugcucacuguuua

SEQ ID NO: 2042165 - RNA, 19 nt, Artificial Sequence
  Description of Artificial Sequence: Synthetic oligonucleotide
  Antisense strand to SEQ ID NO: 2042164
uaaacagugagcagaaugg

SEQ ID NO: 2042166 - RNA, 19 nt, Artificial Sequence
  Description of Artificial Sequence: Synthetic oligonucleotide
  Sense strand starting at position 2558 of SEQ ID NO: 1881407
auuguuuaguuguuugagu

SEQ ID NO: 2042167 - RNA, 19 nt, Artificial Sequence
  Description of Artificial Sequence: Synthetic oligonucleotide
  Antisense strand to SEQ ID NO: 2042166
acucaaacaacuaaacaau

SEQ ID NO: 2042168 - RNA, 19 nt, Artificial Sequence
  Description of Artificial Sequence: Synthetic oligonucleotide
  Sense strand starting at position 2608 of SEQ ID NO: 1881407
augaaugauuugcaaacau

SEQ ID NO: 2042169 - RNA, 19 nt, Artificial Sequence
  Description of Artificial Sequence: Synthetic oligonucleotide
  Antisense strand to SEQ ID NO: 2042168
auguuugcaaaucauucau

SEQ ID NO: 2042170 - RNA, 19 nt, Artificial Sequence
  Description of Artificial Sequence: Synthetic oligonucleotide
  Sense strand starting at position 2694 of SEQ ID NO: 1881407
aguuuaauauagucugguu

SEQ ID NO: 2042171 - RNA, 19 nt, Artificial Sequence
  Description of Artificial Sequence: Synthetic oligonucleotide
  Antisense strand to SEQ ID NO: 2042170
aaccagacuauauuaaacu

SEQ ID NO: 2042172 - RNA, 19 nt, Artificial Sequence
  Description of Artificial Sequence: Synthetic oligonucleotide
  Sense strand starting at position 2764 of SEQ ID NO: 1881407
cuuggccuagacuaauauu

SEQ ID NO: 2042173 - RNA, 19 nt, Artificial Sequence
  Description of Artificial Sequence: Synthetic oligonucleotide
  Antisense strand to SEQ ID NO: 2042172
aauauuagucuaggccaag

SEQ ID NO: 2042174 - RNA, 19 nt, Artificial Sequence
  Description of Artificial Sequence: Synthetic oligonucleotide
  Sense strand starting at position 2772 of SEQ ID NO: 1881407
agacuaauauucugaauug

SEQ ID NO: 2042175 - RNA, 19 nt, Artificial Sequence
  Description of Artificial Sequence: Synthetic oligonucleotide
  Antisense strand to SEQ ID NO: 2042174
caauucagaauauuagucu

SEQ ID NO: 2042176 - RNA, 19 nt, Artificial Sequence
  Description of Artificial Sequence: Synthetic oligonucleotide
  Sense strand starting at position 2952 of SEQ ID NO: 1881407
ucguccuuucuccagugua

SEQ ID NO: 2042177 - RNA, 19 nt, Artificial Sequence
  Description of Artificial Sequence: Synthetic oligonucleotide
  Antisense strand to SEQ ID NO: 2042176
uacacuggagaaaggacga

SEQ ID NO: 2042178 - RNA, 19 nt, Artificial Sequence
  Description of Artificial Sequence: Synthetic oligonucleotide
  Sense strand starting at position 2992 of SEQ ID NO: 1881407
aaaucaguugacugugaua

SEQ ID NO: 2042179 - RNA, 19 nt, Artificial Sequence
  Description of Artificial Sequence: Synthetic oligonucleotide
  Antisense strand to SEQ ID NO: 2042178
uaucacagucaacugauuu

SEQ ID NO: 2042180 - RNA, 19 nt, Artificial Sequence
  Description of Artificial Sequence: Synthetic oligonucleotide
  Sense strand starting at position 2994 of SEQ ID NO: 1881407
aucaguugacugugauaua

SEQ ID NO: 2042181 - RNA, 19 nt, Artificial Sequence
  Description of Artificial Sequence: Synthetic oligonucleotide
  Antisense strand to SEQ ID NO: 2042180
uauaucacagucaacugau

SEQ ID NO: 2042182 - RNA, 19 nt, Artificial Sequence
  Description of Artificial Sequence: Synthetic oligonucleotide
  Sense strand starting at position 2995 of SEQ ID NO: 1881407
ucaguugacugugauauau

SEQ ID NO: 2042183 - RNA, 19 nt, Artificial Sequence
  Description of Artificial Sequence: Synthetic oligonucleotide
  Antisense strand to SEQ ID NO: 2042182
auauaucacagucaacuga

SEQ ID NO: 2042184 - RNA, 19 nt, Artificial Sequence
  Description of Artificial Sequence: Synthetic oligonucleotide
  Sense strand starting at position 3260 of SEQ ID NO: 1881407
ugaauuaaaucuguagacu

SEQ ID NO: 2042185 - RNA, 19 nt, Artificial Sequence
  Description of Artificial Sequence: Synthetic oligonucleotide
  Antisense strand to SEQ ID NO: 2042184
agucuacagauuuaauuca

SEQ ID NO: 2042186 - RNA, 19 nt, Artificial Sequence
  Description of Artificial Sequence: Synthetic oligonucleotide
  Sense strand starting at position 3271 of SEQ ID NO: 1881407
uguagacugcuuugggaau

SEQ ID NO: 2042187 - RNA, 19 nt, Artificial Sequence
  Description of Artificial Sequence: Synthetic oligonucleotide
  Antisense strand to SEQ ID NO: 2042186
auucccaaagcagucuaca

SEQ ID NO: 2042188 - RNA, 19 nt, Artificial Sequence
  Description of Artificial Sequence: Synthetic oligonucleotide
  Sense strand starting at position 3380 of SEQ ID NO: 1881407
uguuacaguuuagcugaua

SEQ ID NO: 2042189 - RNA, 19 nt, Artificial Sequence
  Description of Artificial Sequence: Synthetic oligonucleotide
  Antisense strand to SEQ ID NO: 2042188
uaucagcuaaacuguaaca

SEQ ID NO: 2042190 - RNA, 19 nt, Artificial Sequence
  Description of Artificial Sequence: Synthetic oligonucleotide
  Sense strand starting at position 3383 of SEQ ID NO: 1881407
uacaguuuagcugauagag

SEQ ID NO: 2042191 - RNA, 19 nt, Artificial Sequence
  Description of Artificial Sequence: Synthetic oligonucleotide
  Antisense strand to SEQ ID NO: 2042190
cucuaucagcuaaacugua

SEQ ID NO: 2042192 - RNA, 19 nt, Artificial Sequence
  Description of Artificial Sequence: Synthetic oligonucleotide
  Sense strand starting at position 3385 of SEQ ID NO: 1881407
caguuuagcugauagagau

SEQ ID NO: 2042193 - RNA, 19 nt, Artificial Sequence
  Description of Artificial Sequence: Synthetic oligonucleotide
  Antisense strand to SEQ ID NO: 2042192
aucucuaucagcuaaacug

SEQ ID NO: 2042194 - RNA, 19 nt, Artificial Sequence
  Description of Artificial Sequence: Synthetic oligonucleotide
  Sense strand starting at position 3918 of SEQ ID NO: 1881407
uuuguuuguuaccucuaca

SEQ ID NO: 2042195 - RNA, 19 nt, Artificial Sequence
  Description of Artificial Sequence: Synthetic oligonucleotide
  Antisense strand to SEQ ID NO: 2042194
uguagagguaacaaacaaa

SEQ ID NO: 2042196 - RNA, 19 nt, Artificial Sequence
  Description of Artificial Sequence: Synthetic oligonucleotide
  Sense strand starting at position 3921 of SEQ ID NO: 1881407
guuuguuaccucuacaagu

SEQ ID NO: 2042197 - RNA, 19 nt, Artificial Sequence
  Description of Artificial Sequence: Synthetic oligonucleotide
  Antisense strand to SEQ ID NO: 2042196
acuuguagagguaacaaac

SEQ ID NO: 2042198 - RNA, 19 nt, Artificial Sequence
  Description of Artificial Sequence: Synthetic oligonucleotide
  Sense strand starting at position 3923 of SEQ ID NO: 1881407
uuguuaccucuacaaguuu

SEQ ID NO: 2042199 - RNA, 19 nt, Artificial Sequence
  Description of Artificial Sequence: Synthetic oligonucleotide
  Antisense strand to SEQ ID NO: 2042198
aaacuuguagagguaacaa

SEQ ID NO: 2042200 - RNA, 19 nt, Artificial Sequence
  Description of Artificial Sequence: Synthetic oligonucleotide
  Sense strand starting at position 488 of SEQ ID NO: 1881408
gucugaucccaggacaagu

SEQ ID NO: 2042201 - RNA, 19 nt, Artificial Sequence
  Description of Artificial Sequence: Synthetic oligonucleotide
  Antisense strand to SEQ ID NO: 2042200
acuuguccugggaucagac

SEQ ID NO: 2042202 - RNA, 19 nt, Artificial Sequence
  Description of Artificial Sequence: Synthetic oligonucleotide
  Sense strand starting at position 573 of SEQ ID NO: 1881408
ccuuuaguucccgaaauac

SEQ ID NO: 2042203 - RNA, 19 nt, Artificial Sequence
  Description of Artificial Sequence: Synthetic oligonucleotide
  Antisense strand to SEQ ID NO: 2042202
guauuucgggaacuaaagg

SEQ ID NO: 2042204 - RNA, 19 nt, Artificial Sequence
  Description of Artificial Sequence: Synthetic oligonucleotide
  Sense strand starting at position 596 of SEQ ID NO: 1881408
ggccacugcuaaucuauaa

SEQ ID NO: 2042205 - RNA, 19 nt, Artificial Sequence
  Description of Artificial Sequence: Synthetic oligonucleotide
  Antisense strand to SEQ ID NO: 2042204
uuauagauuagcaguggcc

SEQ ID NO: 2042206 - RNA, 19 nt, Artificial Sequence
  Description of Artificial Sequence: Synthetic oligonucleotide
  Sense strand starting at position 634 of SEQ ID NO: 1881408
gaaagagaauguccgucua

SEQ ID NO: 2042207 - RNA, 19 nt, Artificial Sequence
  Description of Artificial Sequence: Synthetic oligonucleotide
  Antisense strand to SEQ ID NO: 2042206
uagacggacauucucuuuc

SEQ ID NO: 2042208 - RNA, 19 nt, Artificial Sequence
  Description of Artificial Sequence: Synthetic oligonucleotide
  Sense strand starting at position 914 of SEQ ID NO: 1881408
ugaggauuaugggugagcu

SEQ ID NO: 2042209 - RNA, 19 nt, Artificial Sequence
  Description of Artificial Sequence: Synthetic oligonucleotide
  Antisense strand to SEQ ID NO: 2042208
agcucacccauaauccuca

SEQ ID NO: 2042210 - RNA, 19 nt, Artificial Sequence
  Description of Artificial Sequence: Synthetic oligonucleotide
  Sense strand starting at position 915 of SEQ ID NO: 1881408
gaggauuaugggugagcug

SEQ ID NO: 2042211 - RNA, 19 nt, Artificial Sequence
  Description of Artificial Sequence: Synthetic oligonucleotide
  Antisense strand to SEQ ID NO: 2042210
cagcucacccauaauccuc

SEQ ID NO: 2042212 - RNA, 19 nt, Artificial Sequence
  Description of Artificial Sequence: Synthetic oligonucleotide
  Sense strand starting at position 1002 of SEQ ID NO: 1881408
ggccuuggugaguggacaa

SEQ ID NO: 2042213 - RNA, 19 nt, Artificial Sequence
  Description of Artificial Sequence: Synthetic oligonucleotide
  Antisense strand to SEQ ID NO: 2042212
uuguccacucaccaaggcc

SEQ ID NO: 2042214 - RNA, 19 nt, Artificial Sequence
  Description of Artificial Sequence: Synthetic oligonucleotide
  Sense strand starting at position 1095 of SEQ ID NO: 1881408
uaaagugcucaggagcaga

SEQ ID NO: 2042215 - RNA, 19 nt, Artificial Sequence
  Description of Artificial Sequence: Synthetic oligonucleotide
  Antisense strand to SEQ ID NO: 2042214
ucugcuccugagcacuuua

SEQ ID NO: 2042216 - RNA, 19 nt, Artificial Sequence
  Description of Artificial Sequence: Synthetic oligonucleotide
  Sense strand starting at position 1157 of SEQ ID NO: 1881408
ugaggacaaucccucucau

SEQ ID NO: 2042217 - RNA, 19 nt, Artificial Sequence
  Description of Artificial Sequence: Synthetic oligonucleotide
  Antisense strand to SEQ ID NO: 2042216
augagagggauuguccuca

SEQ ID NO: 2042218 - RNA, 19 nt, Artificial Sequence
  Description of Artificial Sequence: Synthetic oligonucleotide
  Sense strand starting at position 1252 of SEQ ID NO: 1881408
accuccaucuugguaagau

SEQ ID NO: 2042219 - RNA, 19 nt, Artificial Sequence
  Description of Artificial Sequence: Synthetic oligonucleotide
  Antisense strand to SEQ ID NO: 2042218
aucuuaccaagauggaggu

SEQ ID NO: 2042220 - RNA, 19 nt, Artificial Sequence
  Description of Artificial Sequence: Synthetic oligonucleotide
  Sense strand starting at position 1338 of SEQ ID NO: 1881408
ggaaauuaguaucuagguc

SEQ ID NO: 2042221 - RNA, 19 nt, Artificial Sequence
  Description of Artificial Sequence: Synthetic oligonucleotide
  Antisense strand to SEQ ID NO: 2042220
gaccuagauacuaauuucc

SEQ ID NO: 2042222 - RNA, 19 nt, Artificial Sequence
  Description of Artificial Sequence: Synthetic oligonucleotide
  Sense strand starting at position 1342 of SEQ ID NO: 1881408
auuaguaucuaggucagaa

SEQ ID NO: 2042223 - RNA, 19 nt, Artificial Sequence
  Description of Artificial Sequence: Synthetic oligonucleotide
  Antisense strand to SEQ ID NO: 2042222
uucugaccuagauacuaau

SEQ ID NO: 2042224 - RNA, 19 nt, Artificial Sequence
  Description of Artificial Sequence: Synthetic oligonucleotide
  Sense strand starting at position 1344 of SEQ ID NO: 1881408
uaguaucuaggucagaacu

SEQ ID NO: 2042225 - RNA, 19 nt, Artificial Sequence
  Description of Artificial Sequence: Synthetic oligonucleotide
  Antisense strand to SEQ ID NO: 2042224
aguucugaccuagauacua

SEQ ID NO: 2042226 - RNA, 19 nt, Artificial Sequence
  Description of Artificial Sequence: Synthetic oligonucleotide
  Sense strand starting at position 1443 of SEQ ID NO: 1881408
ggagcacaguccuuaggga

SEQ ID NO: 2042227 - RNA, 19 nt, Artificial Sequence
  Description of Artificial Sequence: Synthetic oligonucleotide
  Antisense strand to SEQ ID NO: 2042226
ucccuaaggacugugcucc

SEQ ID NO: 2042228 - RNA, 19 nt, Artificial Sequence
  Description of Artificial Sequence: Synthetic oligonucleotide
  Sense strand starting at position 1444 of SEQ ID NO: 1881408
gagcacaguccuuagggau

SEQ ID NO: 2042229 - RNA, 19 nt, Artificial Sequence
  Description of Artificial Sequence: Synthetic oligonucleotide
  Antisense strand to SEQ ID NO: 2042228
aucccuaaggacugugcuc

SEQ ID NO: 2042230 - RNA, 19 nt, Artificial Sequence
  Description of Artificial Sequence: Synthetic oligonucleotide
  Sense strand starting at position 1469 of SEQ ID NO: 1881408
gagguagaguucccggaug

SEQ ID NO: 2042231 - RNA, 19 nt, Artificial Sequence
  Description of Artificial Sequence: Synthetic oligonucleotide
  Antisense strand to SEQ ID NO: 2042230
cauccgggaacucuaccuc

SEQ ID NO: 2042232 - RNA, 19 nt, Artificial Sequence
  Description of Artificial Sequence: Synthetic oligonucleotide
  Sense strand starting at position 1471 of SEQ ID NO: 1881408
gguagaguucccggaugac

SEQ ID NO: 2042233 - RNA, 19 nt, Artificial Sequence
  Description of Artificial Sequence: Synthetic oligonucleotide
  Antisense strand to SEQ ID NO: 2042232
gucauccgggaacucuacc

SEQ ID NO: 2042234 - RNA, 19 nt, Artificial Sequence
  Description of Artificial Sequence: Synthetic oligonucleotide
  Sense strand starting at position 2142 of SEQ ID NO: 1881408
auguucgggacucaguauu

SEQ ID NO: 2042235 - RNA, 19 nt, Artificial Sequence
  Description of Artificial Sequence: Synthetic oligonucleotide
  Antisense strand to SEQ ID NO: 2042234
aauacugagucccgaacau

SEQ ID NO: 2042236 - RNA, 19 nt, Artificial Sequence
  Description of Artificial Sequence: Synthetic oligonucleotide
  Sense strand starting at position 2152 of SEQ ID NO: 1881408
cucaguauuccucaguaau

SEQ ID NO: 2042237 - RNA, 19 nt, Artificial Sequence
  Description of Artificial Sequence: Synthetic oligonucleotide
  Antisense strand to SEQ ID NO: 2042236
auuacugaggaauacugag

SEQ ID NO: 2042238 - RNA, 19 nt, Artificial Sequence
  Description of Artificial Sequence: Synthetic oligonucleotide
  Sense strand starting at position 2155 of SEQ ID NO: 1881408
aguauuccucaguaauaau

SEQ ID NO: 2042239 - RNA, 19 nt, Artificial Sequence
  Description of Artificial Sequence: Synthetic oligonucleotide
  Antisense strand to SEQ ID NO: 2042238
auuauuacugaggaauacu

SEQ ID NO: 2042240 - RNA, 19 nt, Artificial Sequence
  Description of Artificial Sequence: Synthetic oligonucleotide
  Sense strand starting at position 2173 of SEQ ID NO: 1881408
ugaugacaccugcaguuua

SEQ ID NO: 2042241 - RNA, 19 nt, Artificial Sequence
  Description of Artificial Sequence: Synthetic oligonucleotide
  Antisense strand to SEQ ID NO: 2042240
uaaacugcaggugucauca

SEQ ID NO: 2042242 - RNA, 19 nt, Artificial Sequence
  Description of Artificial Sequence: Synthetic oligonucleotide
  Sense strand starting at position 2346 of SEQ ID NO: 1881408
gcacaauguccauggacca

SEQ ID NO: 2042243 - RNA, 19 nt, Artificial Sequence
  Description of Artificial Sequence: Synthetic oligonucleotide
  Antisense strand to SEQ ID NO: 2042242
ugguccauggacauugugc

SEQ ID NO: 2042244 - RNA, 19 nt, Artificial Sequence
  Description of Artificial Sequence: Synthetic oligonucleotide
  Sense strand starting at position 2530 of SEQ ID NO: 1881408
ggaguaggagauugaguau

SEQ ID NO: 2042245 - RNA, 19 nt, Artificial Sequence
  Description of Artificial Sequence: Synthetic oligonucleotide
  Antisense strand to SEQ ID NO: 2042244
auacucaaucuccuacucc

SEQ ID NO: 2042246 - RNA, 19 nt, Artificial Sequence
  Description of Artificial Sequence: Synthetic oligonucleotide
  Sense strand starting at position 2539 of SEQ ID NO: 1881408
gauugaguaucagugcuau

SEQ ID NO: 2042247 - RNA, 19 nt, Artificial Sequence
  Description of Artificial Sequence: Synthetic oligonucleotide
  Antisense strand to SEQ ID NO: 2042246
auagcacugauacucaauc

SEQ ID NO: 2042248 - RNA, 19 nt, Artificial Sequence
  Description of Artificial Sequence: Synthetic oligonucleotide
  Sense strand starting at position 2617 of SEQ ID NO: 1881408
ccuggcuucucuuuggaga

SEQ ID NO: 2042249 - RNA, 19 nt, Artificial Sequence
  Description of Artificial Sequence: Synthetic oligonucleotide
  Antisense strand to SEQ ID NO: 2042248
ucuccaaagagaagccagg

SEQ ID NO: 2042250 - RNA, 19 nt, Artificial Sequence
  Description of Artificial Sequence: Synthetic oligonucleotide
  Sense strand starting at position 2636 of SEQ ID NO: 1881408
gucugugcugugguucuaa

SEQ ID NO: 2042251 - RNA, 19 nt, Artificial Sequence
  Description of Artificial Sequence: Synthetic oligonucleotide
  Antisense strand to SEQ ID NO: 2042250
uuagaaccacagcacagac

SEQ ID NO: 2042252 - RNA, 19 nt, Artificial Sequence
  Description of Artificial Sequence: Synthetic oligonucleotide
  Sense strand starting at position 2648 of SEQ ID NO: 1881408
guucuaagauuccuggcua

SEQ ID NO: 2042253 - RNA, 19 nt, Artificial Sequence
  Description of Artificial Sequence: Synthetic oligonucleotide
  Antisense strand to SEQ ID NO: 2042252
uagccaggaaucuuagaac

SEQ ID NO: 2042254 - RNA, 19 nt, Artificial Sequence
  Description of Artificial Sequence: Synthetic oligonucleotide
  Sense strand starting at position 2688 of SEQ ID NO: 1881408
uuaggauucuauucuggaa

SEQ ID NO: 2042255 - RNA, 19 nt, Artificial Sequence
  Description of Artificial Sequence: Synthetic oligonucleotide
  Antisense strand to SEQ ID NO: 2042254
uuccagaauagaauccuaa

SEQ ID NO: 2042256 - RNA, 19 nt, Artificial Sequence
  Description of Artificial Sequence: Synthetic oligonucleotide
  Sense strand starting at position 2700 of SEQ ID NO: 1881408
ucuggaauccugugauucu

SEQ ID NO: 2042257 - RNA, 19 nt, Artificial Sequence
  Description of Artificial Sequence: Synthetic oligonucleotide
  Antisense strand to SEQ ID NO: 2042256
agaaucacaggauuccaga

SEQ ID NO: 2042258 - RNA, 19 nt, Artificial Sequence
  Description of Artificial Sequence: Synthetic oligonucleotide
  Sense strand starting at position 2707 of SEQ ID NO: 1881408
uccugugauucucccugau

SEQ ID NO: 2042259 - RNA, 19 nt, Artificial Sequence
  Description of Artificial Sequence: Synthetic oligonucleotide
  Antisense strand to SEQ ID NO: 2042258
aucagggagaaucacagga

SEQ ID NO: 2042260 - RNA, 19 nt, Artificial Sequence
  Description of Artificial Sequence: Synthetic oligonucleotide
  Sense strand starting at position 2710 of SEQ ID NO: 1881408
ugugauucucccugaugag

SEQ ID NO: 2042261 - RNA, 19 nt, Artificial Sequence
  Description of Artificial Sequence: Synthetic oligonucleotide
  Antisense strand to SEQ ID NO: 2042260
cucaucagggagaaucaca

SEQ ID NO: 2042262 - RNA, 19 nt, Artificial Sequence
  Description of Artificial Sequence: Synthetic oligonucleotide
  Sense strand starting at position 2735 of SEQ ID NO: 1881408
acucacauuccugguguga

SEQ ID NO: 2042263 - RNA, 19 nt, Artificial Sequence
  Description of Artificial Sequence: Synthetic oligonucleotide
  Antisense strand to SEQ ID NO: 2042262
ucacaccaggaaugugagu

SEQ ID NO: 2042264 - RNA, 19 nt, Artificial Sequence
  Description of Artificial Sequence: Synthetic oligonucleotide
  Sense strand starting at position 2788 of SEQ ID NO: 1881408
uucccuuccugucugagaa

SEQ ID NO: 2042265 - RNA, 19 nt, Artificial Sequence
  Description of Artificial Sequence: Synthetic oligonucleotide
  Antisense strand to SEQ ID NO: 2042264
uucucagacaggaagggaa

SEQ ID NO: 2042266 - RNA, 19 nt, Artificial Sequence
  Description of Artificial Sequence: Synthetic oligonucleotide
  Sense strand starting at position 2789 of SEQ ID NO: 1881408
ucccuuccugucugagaag

SEQ ID NO: 2042267 - RNA, 19 nt, Artificial Sequence
  Description of Artificial Sequence: Synthetic oligonucleotide
  Antisense strand to SEQ ID NO: 2042266
cuucucagacaggaaggga

SEQ ID NO: 2042268 - RNA, 19 nt, Artificial Sequence
  Description of Artificial Sequence: Synthetic oligonucleotide
  Sense strand starting at position 3002 of SEQ ID NO: 1881408
aacaguugucagcaggcaa

SEQ ID NO: 2042269 - RNA, 19 nt, Artificial Sequence
  Description of Artificial Sequence: Synthetic oligonucleotide
  Antisense strand to SEQ ID NO: 2042268
uugccugcugacaacuguu

SEQ ID NO: 2042270 - RNA, 19 nt, Artificial Sequence
  Description of Artificial Sequence: Synthetic oligonucleotide
  Sense strand starting at position 3274 of SEQ ID NO: 1881408
gcuagacuuccuuggacug

SEQ ID NO: 2042271 - RNA, 19 nt, Artificial Sequence
  Description of Artificial Sequence: Synthetic oligonucleotide
  Antisense strand to SEQ ID NO: 2042270
caguccaaggaagucuagc

SEQ ID NO: 2042272 - RNA, 19 nt, Artificial Sequence
  Description of Artificial Sequence: Synthetic oligonucleotide
  Sense strand starting at position 3275 of SEQ ID NO: 1881408
cuagacuuccuuggacuga

SEQ ID NO: 2042273 - RNA, 19 nt, Artificial Sequence
  Description of Artificial Sequence: Synthetic oligonucleotide
  Antisense strand to SEQ ID NO: 2042272
ucaguccaaggaagucuag

SEQ ID NO: 2042274 - RNA, 19 nt, Artificial Sequence
  Description of Artificial Sequence: Synthetic oligonucleotide
  Sense strand starting at position 3660 of SEQ ID NO: 1881408
ggugaucagguaugaacuu

SEQ ID NO: 2042275 - RNA, 19 nt, Artificial Sequence
  Description of Artificial Sequence: Synthetic oligonucleotide
  Antisense strand to SEQ ID NO: 2042274
aaguucauaccugaucacc

SEQ ID NO: 2042276 - RNA, 19 nt, Artificial Sequence
  Description of Artificial Sequence: Synthetic oligonucleotide
  Sense strand starting at position 3842 of SEQ ID NO: 1881408
uuugacuaugucgagcaua

SEQ ID NO: 2042277 - RNA, 19 nt, Artificial Sequence
  Description of Artificial Sequence: Synthetic oligonucleotide
  Antisense strand to SEQ ID NO: 2042276
uaugcucgacauagucaaa

SEQ ID NO: 2042278 - RNA, 19 nt, Artificial Sequence
  Description of Artificial Sequence: Synthetic oligonucleotide
  Sense strand starting at position 3917 of SEQ ID NO: 1881408
ucucuuguugccuaagaga

SEQ ID NO: 2042279 - RNA, 19 nt, Artificial Sequence
  Description of Artificial Sequence: Synthetic oligonucleotide
  Antisense strand to SEQ ID NO: 2042278
ucucuuaggcaacaagaga

SEQ ID NO: 2042280 - RNA, 19 nt, Artificial Sequence
  Description of Artificial Sequence: Synthetic oligonucleotide
  Sense strand starting at position 883 of SEQ ID NO: 1881409
aggcacaauacgugaacuu

SEQ ID NO: 2042281 - RNA, 19 nt, Artificial Sequence
  Description of Artificial Sequence: Synthetic oligonucleotide
  Antisense strand to SEQ ID NO: 2042280
aaguucacguauugugccu

SEQ ID NO: 2042282 - RNA, 19 nt, Artificial Sequence
  Description of Artificial Sequence: Synthetic oligonucleotide
  Sense strand starting at position 958 of SEQ ID NO: 1881409
gugcgaagugcuuuacauu

SEQ ID NO: 2042283 - RNA, 19 nt, Artificial Sequence
  Description of Artificial Sequence: Synthetic oligonucleotide
  Antisense strand to SEQ ID NO: 2042282
aauguaaagcacuucgcac

SEQ ID NO: 2042284 - RNA, 19 nt, Artificial Sequence
  Description of Artificial Sequence: Synthetic oligonucleotide
  Sense strand starting at position 959 of SEQ ID NO: 1881409
ugcgaagugcuuuacauug

SEQ ID NO: 2042285 - RNA, 19 nt, Artificial Sequence
  Description of Artificial Sequence: Synthetic oligonucleotide
  Antisense strand to SEQ ID NO: 2042284
caauguaaagcacuucgca

SEQ ID NO: 2042286 - RNA, 19 nt, Artificial Sequence
  Description of Artificial Sequence: Synthetic oligonucleotide
  Sense strand starting at position 971 of SEQ ID NO: 1881409
uacauugucucguuugauu

SEQ ID NO: 2042287 - RNA, 19 nt, Artificial Sequence
  Description of Artificial Sequence: Synthetic oligonucleotide
  Antisense strand to SEQ ID NO: 2042286
aaucaaacgagacaaugua

SEQ ID NO: 2042288 - RNA, 19 nt, Artificial Sequence
  Description of Artificial Sequence: Synthetic oligonucleotide
  Sense strand starting at position 973 of SEQ ID NO: 1881409
cauugucucguuugauuua

SEQ ID NO: 2042289 - RNA, 19 nt, Artificial Sequence
  Description of Artificial Sequence: Synthetic oligonucleotide
  Antisense strand to SEQ ID NO: 2042288
uaaaucaaacgagacaaug

SEQ ID NO: 2042290 - RNA, 19 nt, Artificial Sequence
  Description of Artificial Sequence: Synthetic oligonucleotide
  Sense strand starting at position 976 of SEQ ID NO: 1881409
ugucucguuugauuuacuu

SEQ ID NO: 2042291 - RNA, 19 nt, Artificial Sequence
  Description of Artificial Sequence: Synthetic oligonucleotide
  Antisense strand to SEQ ID NO: 2042290
aaguaaaucaaacgagaca

SEQ ID NO: 2042292 - RNA, 19 nt, Artificial Sequence
  Description of Artificial Sequence: Synthetic oligonucleotide
  Sense strand starting at position 1424 of SEQ ID NO: 1881409
ucucuaguggccugaguca

SEQ ID NO: 2042293 - RNA, 19 nt, Artificial Sequence
  Description of Artificial Sequence: Synthetic oligonucleotide
  Antisense strand to SEQ ID NO: 2042292
ugacucaggccacuagaga

SEQ ID NO: 2042294 - RNA, 19 nt, Artificial Sequence
  Description of Artificial Sequence: Synthetic oligonucleotide
  Sense strand starting at position 1450 of SEQ ID NO: 1881409
agaggaaauuaaggauuga

SEQ ID NO: 2042295 - RNA, 19 nt, Artificial Sequence
  Description of Artificial Sequence: Synthetic oligonucleotide
  Antisense strand to SEQ ID NO: 2042294
ucaauccuuaauuuccucu

SEQ ID NO: 2042296 - RNA, 19 nt, Artificial Sequence
  Description of Artificial Sequence: Synthetic oligonucleotide
  Sense strand starting at position 1466 of SEQ ID NO: 1881409
ugaugaaugguuugaaagu

SEQ ID NO: 2042297 - RNA, 19 nt, Artificial Sequence
  Description of Artificial Sequence: Synthetic oligonucleotide
  Antisense strand to SEQ ID NO: 2042296
acuuucaaaccauucauca

SEQ ID NO: 2042298 - RNA, 19 nt, Artificial Sequence
  Description of Artificial Sequence: Synthetic oligonucleotide
  Sense strand starting at position 1467 of SEQ ID NO: 1881409
gaugaaugguuugaaaguu

SEQ ID NO: 2042299 - RNA, 19 nt, Artificial Sequence
  Description of Artificial Sequence: Synthetic oligonucleotide
  Antisense strand to SEQ ID NO: 2042298
aacuuucaaaccauucauc

SEQ ID NO: 2042300 - RNA, 19 nt, Artificial Sequence
  Description of Artificial Sequence: Synthetic oligonucleotide
  Sense strand starting at position 1473 of SEQ ID NO: 1881409
ugguuugaaaguuguuugu

SEQ ID NO: 2042301 - RNA, 19 nt, Artificial Sequence
  Description of Artificial Sequence: Synthetic oligonucleotide
  Antisense strand to SEQ ID NO: 2042300
acaaacaacuuucaaacca

SEQ ID NO: 2042302 - RNA, 19 nt, Artificial Sequence
  Description of Artificial Sequence: Synthetic oligonucleotide
  Sense strand starting at position 1479 of SEQ ID NO: 1881409
gaaaguuguuuguuuacaa

SEQ ID NO: 2042303 - RNA, 19 nt, Artificial Sequence
  Description of Artificial Sequence: Synthetic oligonucleotide
  Antisense strand to SEQ ID NO: 2042302
uuguaaacaaacaacuuuc

SEQ ID NO: 2042304 - RNA, 19 nt, Artificial Sequence
  Description of Artificial Sequence: Synthetic oligonucleotide
  Sense strand starting at position 1990 of SEQ ID NO: 1881409
ccucuuacccaguaaagua

SEQ ID NO: 2042305 - RNA, 19 nt, Artificial Sequence
  Description of Artificial Sequence: Synthetic oligonucleotide
  Antisense strand to SEQ ID NO: 2042304
uacuuuacuggguaagagg

SEQ ID NO: 2042306 - RNA, 19 nt, Artificial Sequence
  Description of Artificial Sequence: Synthetic oligonucleotide
  Sense strand starting at position 2153 of SEQ ID NO: 1881409
gugggaguuugcuccaaac

SEQ ID NO: 2042307 - RNA, 19 nt, Artificial Sequence
  Description of Artificial Sequence: Synthetic oligonucleotide
  Antisense strand to SEQ ID NO: 2042306
guuuggagcaaacucccac

SEQ ID NO: 2042308 - RNA, 19 nt, Artificial Sequence
  Description of Artificial Sequence: Synthetic oligonucleotide
  Sense strand starting at position 2155 of SEQ ID NO: 1881409
gggaguuugcuccaaacuu

SEQ ID NO: 2042309 - RNA, 19 nt, Artificial Sequence
  Description of Artificial Sequence: Synthetic oligonucleotide
  Antisense strand to SEQ ID NO: 2042308
aaguuuggagcaaacuccc

SEQ ID NO: 2042310 - RNA, 19 nt, Artificial Sequence
  Description of Artificial Sequence: Synthetic oligonucleotide
  Sense strand starting at position 2571 of SEQ ID NO: 1881409
ccuggaaucgugcgaccuu

SEQ ID NO: 2042311 - RNA, 19 nt, Artificial Sequence
  Description of Artificial Sequence: Synthetic oligonucleotide
  Antisense strand to SEQ ID NO: 2042310
aaggucgcacgauuccagg

SEQ ID NO: 2042312 - RNA, 19 nt, Artificial Sequence
  Description of Artificial Sequence: Synthetic oligonucleotide
  Sense strand starting at position 2683 of SEQ ID NO: 1881409
ucaagaaaguugcauaauu

SEQ ID NO: 2042313 - RNA, 19 nt, Artificial Sequence
  Description of Artificial Sequence: Synthetic oligonucleotide
  Antisense strand to SEQ ID NO: 2042312
aauuaugcaacuuucuuga

SEQ ID NO: 2042314 - RNA, 19 nt, Artificial Sequence
  Description of Artificial Sequence: Synthetic oligonucleotide
  Sense strand starting at position 2693 of SEQ ID NO: 1881409
ugcauaauucucgaggcca

SEQ ID NO: 2042315 - RNA, 19 nt, Artificial Sequence
  Description of Artificial Sequence: Synthetic oligonucleotide
  Antisense strand to SEQ ID NO: 2042314
uggccucgagaauuaugca

SEQ ID NO: 2042316 - RNA, 19 nt, Artificial Sequence
  Description of Artificial Sequence: Synthetic oligonucleotide
  Sense strand starting at position 2734 of SEQ ID NO: 1881409
gcuggucuuaccgcugagu

SEQ ID NO: 2042317 - RNA, 19 nt, Artificial Sequence
  Description of Artificial Sequence: Synthetic oligonucleotide
  Antisense strand to SEQ ID NO: 2042316
acucagcgguaagaccagc

SEQ ID NO: 2042318 - RNA, 19 nt, Artificial Sequence
  Description of Artificial Sequence: Synthetic oligonucleotide
  Sense strand starting at position 2736 of SEQ ID NO: 1881409
uggucuuaccgcugagugu

SEQ ID NO: 2042319 - RNA, 19 nt, Artificial Sequence
  Description of Artificial Sequence: Synthetic oligonucleotide
  Antisense strand to SEQ ID NO: 2042318
acacucagcgguaagacca

SEQ ID NO: 2042320 - RNA, 19 nt, Artificial Sequence
  Description of Artificial Sequence: Synthetic oligonucleotide
  Sense strand starting at position 2770 of SEQ ID NO: 1881409
gggcaauuaucugucuccu

SEQ ID NO: 2042321 - RNA, 19 nt, Artificial Sequence
  Description of Artificial Sequence: Synthetic oligonucleotide
  Antisense strand to SEQ ID NO: 2042320
aggagacagauaauugccc

SEQ ID NO: 2042322 - RNA, 19 nt, Artificial Sequence
  Description of Artificial Sequence: Synthetic oligonucleotide
  Sense strand starting at position 3048 of SEQ ID NO: 1881409
gccggagucuuucuuuaag

SEQ ID NO: 2042323 - RNA, 19 nt, Artificial Sequence
  Description of Artificial Sequence: Synthetic oligonucleotide
  Antisense strand to SEQ ID NO: 2042322
cuuaaagaaagacuccggc

SEQ ID NO: 2042324 - RNA, 19 nt, Artificial Sequence
  Description of Artificial Sequence: Synthetic oligonucleotide
  Sense strand starting at position 3050 of SEQ ID NO: 1881409
cggagucuuucuuuaagga

SEQ ID NO: 2042325 - RNA, 19 nt, Artificial Sequence
  Description of Artificial Sequence: Synthetic oligonucleotide
  Antisense strand to SEQ ID NO: 2042324
uccuuaaagaaagacuccg

SEQ ID NO: 2042326 - RNA, 19 nt, Artificial Sequence
  Description of Artificial Sequence: Synthetic oligonucleotide
  Sense strand starting at position 3320 of SEQ ID NO: 1881409
agagguacuuccucaagua

SEQ ID NO: 2042327 - RNA, 19 nt, Artificial Sequence
  Description of Artificial Sequence: Synthetic oligonucleotide
  Antisense strand to SEQ ID NO: 2042326
uacuugaggaaguaccucu

SEQ ID NO: 2042328 - RNA, 19 nt, Artificial Sequence
  Description of Artificial Sequence: Synthetic oligonucleotide
  Sense strand starting at position 3321 of SEQ ID NO: 1881409
gagguacuuccucaaguaa

SEQ ID NO: 2042329 - RNA, 19 nt, Artificial Sequence
  Description of Artificial Sequence: Synthetic oligonucleotide
  Antisense strand to SEQ ID NO: 2042328
uuacuugaggaaguaccuc

SEQ ID NO: 2042330 - RNA, 19 nt, Artificial Sequence
  Description of Artificial Sequence: Synthetic oligonucleotide
  Sense strand starting at position 3452 of SEQ ID NO: 1881409
agagauggugcguguccuu

SEQ ID NO: 2042331 - RNA, 19 nt, Artificial Sequence
  Description of Artificial Sequence: Synthetic oligonucleotide
  Antisense strand to SEQ ID NO: 2042330
aaggacacgcaccaucucu

SEQ ID NO: 2042332 - RNA, 19 nt, Artificial Sequence
  Description of Artificial Sequence: Synthetic oligonucleotide
  Sense strand starting at position 3461 of SEQ ID NO: 1881409
gcguguccuuccacgguua

SEQ ID NO: 2042333 - RNA, 19 nt, Artificial Sequence
  Description of Artificial Sequence: Synthetic oligonucleotide
  Antisense strand to SEQ ID NO: 2042332
uaaccguggaaggacacgc

SEQ ID NO: 2042334 - RNA, 19 nt, Artificial Sequence
  Description of Artificial Sequence: Synthetic oligonucleotide
  Sense strand starting at position 3463 of SEQ ID NO: 1881409
guguccuuccacgguuauu

SEQ ID NO: 2042335 - RNA, 19 nt, Artificial Sequence
  Description of Artificial Sequence: Synthetic oligonucleotide
  Antisense strand to SEQ ID NO: 2042334
aauaaccguggaaggacac

SEQ ID NO: 2042336 - RNA, 19 nt, Artificial Sequence
  Description of Artificial Sequence: Synthetic oligonucleotide
  Sense strand starting at position 3512 of SEQ ID NO: 1881409
ugagucucugaguguugga

SEQ ID NO: 2042337 - RNA, 19 nt, Artificial Sequence
  Description of Artificial Sequence: Synthetic oligonucleotide
  Antisense strand to SEQ ID NO: 2042336
uccaacacucagagacuca

SEQ ID NO: 2042338 - RNA, 19 nt, Artificial Sequence
  Description of Artificial Sequence: Synthetic oligonucleotide
  Sense strand starting at position 3521 of SEQ ID NO: 1881409
gaguguuggaauuguaagg

SEQ ID NO: 2042339 - RNA, 19 nt, Artificial Sequence
  Description of Artificial Sequence: Synthetic oligonucleotide
  Antisense strand to SEQ ID NO: 2042338
ccuuacaauuccaacacuc

SEQ ID NO: 2042340 - RNA, 19 nt, Artificial Sequence
  Description of Artificial Sequence: Synthetic oligonucleotide
  Sense strand starting at position 3526 of SEQ ID NO: 1881409
uuggaauuguaagggauca

SEQ ID NO: 2042341 - RNA, 19 nt, Artificial Sequence
  Description of Artificial Sequence: Synthetic oligonucleotide
  Antisense strand to SEQ ID NO: 2042340
ugaucccuuacaauuccaa

SEQ ID NO: 2042342 - RNA, 19 nt, Artificial Sequence
  Description of Artificial Sequence: Synthetic oligonucleotide
  Sense strand starting at position 3594 of SEQ ID NO: 1881409
aggugacuuugccuugaau

SEQ ID NO: 2042343 - RNA, 19 nt, Artificial Sequence
  Description of Artificial Sequence: Synthetic oligonucleotide
  Antisense strand to SEQ ID NO: 2042342
auucaaggcaaagucaccu

SEQ ID NO: 2042344 - RNA, 19 nt, Artificial Sequence
  Description of Artificial Sequence: Synthetic oligonucleotide
  Sense strand starting at position 3606 of SEQ ID NO: 1881409
cuugaaucugcaggacuga

SEQ ID NO: 2042345 - RNA, 19 nt, Artificial Sequence
  Description of Artificial Sequence: Synthetic oligonucleotide
  Antisense strand to SEQ ID NO: 2042344
ucaguccugcagauucaag

SEQ ID NO: 2042346 - RNA, 19 nt, Artificial Sequence
  Description of Artificial Sequence: Synthetic oligonucleotide
  Sense strand starting at position 3661 of SEQ ID NO: 1881409
uggccacucuaagucagau

SEQ ID NO: 2042347 - RNA, 19 nt, Artificial Sequence
  Description of Artificial Sequence: Synthetic oligonucleotide
  Antisense strand to SEQ ID NO: 2042346
aucugacuuagaguggcca

SEQ ID NO: 2042348 - RNA, 19 nt, Artificial Sequence
  Description of Artificial Sequence: Synthetic oligonucleotide
  Sense strand starting at position 3692 of SEQ ID NO: 1881409
ggcccuuugggaugugaca

SEQ ID NO: 2042349 - RNA, 19 nt, Artificial Sequence
  Description of Artificial Sequence: Synthetic oligonucleotide
  Antisense strand to SEQ ID NO: 2042348
ugucacaucccaaagggcc

SEQ ID NO: 2042350 - RNA, 19 nt, Artificial Sequence
  Description of Artificial Sequence: Synthetic oligonucleotide
  Sense strand starting at position 3782 of SEQ ID NO: 1881409
guuucuaucuucuugggaa

SEQ ID NO: 2042351 - RNA, 19 nt, Artificial Sequence
  Description of Artificial Sequence: Synthetic oligonucleotide
  Antisense strand to SEQ ID NO: 2042350
uucccaagaagauagaaac

SEQ ID NO: 2042352 - RNA, 19 nt, Artificial Sequence
  Description of Artificial Sequence: Synthetic oligonucleotide
  Sense strand starting at position 3843 of SEQ ID NO: 1881409
cucccagcugggugacaua

SEQ ID NO: 2042353 - RNA, 19 nt, Artificial Sequence
  Description of Artificial Sequence: Synthetic oligonucleotide
  Antisense strand to SEQ ID NO: 2042352
uaugucacccagcugggag

SEQ ID NO: 2042354 - RNA, 19 nt, Artificial Sequence
  Description of Artificial Sequence: Synthetic oligonucleotide
  Sense strand starting at position 3906 of SEQ ID NO: 1881409
guaguugugggcuggacaa

SEQ ID NO: 2042355 - RNA, 19 nt, Artificial Sequence
  Description of Artificial Sequence: Synthetic oligonucleotide
  Antisense strand to SEQ ID NO: 2042354
uuguccagcccacaacuac

SEQ ID NO: 2042356 - RNA, 19 nt, Artificial Sequence
  Description of Artificial Sequence: Synthetic oligonucleotide
  Sense strand starting at position 3908 of SEQ ID NO: 1881409
aguugugggcuggacaaau

SEQ ID NO: 2042357 - RNA, 19 nt, Artificial Sequence
  Description of Artificial Sequence: Synthetic oligonucleotide
  Antisense strand to SEQ ID NO: 2042356
auuuguccagcccacaacu

SEQ ID NO: 2042358 - RNA, 19 nt, Artificial Sequence
  Description of Artificial Sequence: Synthetic oligonucleotide
  Sense strand starting at position 3923 of SEQ ID NO: 1881409
aaaucaaucguguggaaau

SEQ ID NO: 2042359 - RNA, 19 nt, Artificial Sequence
  Description of Artificial Sequence: Synthetic oligonucleotide
  Antisense strand to SEQ ID NO: 2042358
auuuccacacgauugauuu

SEQ ID NO: 2042360 - RNA, 19 nt, Artificial Sequence
  Description of Artificial Sequence: Synthetic oligonucleotide
  Sense strand starting at position 48 of SEQ ID NO: 1881410
agccuuugccgguuaccua

SEQ ID NO: 2042361 - RNA, 19 nt, Artificial Sequence
  Description of Artificial Sequence: Synthetic oligonucleotide
  Antisense strand to SEQ ID NO: 2042360
uagguaaccggcaaaggcu

SEQ ID NO: 2042362 - RNA, 19 nt, Artificial Sequence
  Description of Artificial Sequence: Synthetic oligonucleotide
  Sense strand starting at position 58 of SEQ ID NO: 1881410
gguuaccuagucuaaucua

SEQ ID NO: 2042363 - RNA, 19 nt, Artificial Sequence
  Description of Artificial Sequence: Synthetic oligonucleotide
  Antisense strand to SEQ ID NO: 2042362
uagauuagacuagguaacc

SEQ ID NO: 2042364 - RNA, 19 nt, Artificial Sequence
  Description of Artificial Sequence: Synthetic oligonucleotide
  Sense strand starting at position 501 of SEQ ID NO: 1881410
augaauauauuucgggaaa

SEQ ID NO: 2042365 - RNA, 19 nt, Artificial Sequence
  Description of Artificial Sequence: Synthetic oligonucleotide
  Antisense strand to SEQ ID NO: 2042364
uuucccgaaauauauucau

SEQ ID NO: 2042366 - RNA, 19 nt, Artificial Sequence
  Description of Artificial Sequence: Synthetic oligonucleotide
  Sense strand starting at position 579 of SEQ ID NO: 1881410
uagguauuauuagugaucu

SEQ ID NO: 2042367 - RNA, 19 nt, Artificial Sequence
  Description of Artificial Sequence: Synthetic oligonucleotide
  Antisense strand to SEQ ID NO: 2042366
agaucacuaauaauaccua

SEQ ID NO: 2042368 - RNA, 19 nt, Artificial Sequence
  Description of Artificial Sequence: Synthetic oligonucleotide
  Sense strand starting at position 581 of SEQ ID NO: 1881410
gguauuauuagugaucuag

SEQ ID NO: 2042369 - RNA, 19 nt, Artificial Sequence
  Description of Artificial Sequence: Synthetic oligonucleotide
  Antisense strand to SEQ ID NO: 2042368
cuagaucacuaauaauacc

SEQ ID NO: 2042370 - RNA, 19 nt, Artificial Sequence
  Description of Artificial Sequence: Synthetic oligonucleotide
  Sense strand starting at position 583 of SEQ ID NO: 1881410
uauuauuagugaucuagag

SEQ ID NO: 2042371 - RNA, 19 nt, Artificial Sequence
  Description of Artificial Sequence: Synthetic oligonucleotide
  Antisense strand to SEQ ID NO: 2042370
cucuagaucacuaauaaua

SEQ ID NO: 2042372 - RNA, 19 nt, Artificial Sequence
  Description of Artificial Sequence: Synthetic oligonucleotide
  Sense strand starting at position 659 of SEQ ID NO: 1881410
gauauaagguacuugagca

SEQ ID NO: 2042373 - RNA, 19 nt, Artificial Sequence
  Description of Artificial Sequence: Synthetic oligonucleotide
  Antisense strand to SEQ ID NO: 2042372
ugcucaaguaccuuauauc

SEQ ID NO: 2042374 - RNA, 19 nt, Artificial Sequence
  Description of Artificial Sequence: Synthetic oligonucleotide
  Sense strand starting at position 725 of SEQ ID NO: 1881410
uugcucaaggaaugucuaa

SEQ ID NO: 2042375 - RNA, 19 nt, Artificial Sequence
  Description of Artificial Sequence: Synthetic oligonucleotide
  Antisense strand to SEQ ID NO: 2042374
uuagacauuccuugagcaa

SEQ ID NO: 2042376 - RNA, 19 nt, Artificial Sequence
  Description of Artificial Sequence: Synthetic oligonucleotide
  Sense strand starting at position 732 of SEQ ID NO: 1881410
aggaaugucuaacuugagu

SEQ ID NO: 2042377 - RNA, 19 nt, Artificial Sequence
  Description of Artificial Sequence: Synthetic oligonucleotide
  Antisense strand to SEQ ID NO: 2042376
acucaaguuagacauuccu

SEQ ID NO: 2042378 - RNA, 19 nt, Artificial Sequence
  Description of Artificial Sequence: Synthetic oligonucleotide
  Sense strand starting at position 793 of SEQ ID NO: 1881410
ggguucacucuaggcagaa

SEQ ID NO: 2042379 - RNA, 19 nt, Artificial Sequence
  Description of Artificial Sequence: Synthetic oligonucleotide
  Antisense strand to SEQ ID NO: 2042378
uucugccuagagugaaccc

SEQ ID NO: 2042380 - RNA, 19 nt, Artificial Sequence
  Description of Artificial Sequence: Synthetic oligonucleotide
  Sense strand starting at position 794 of SEQ ID NO: 1881410
gguucacucuaggcagaag

SEQ ID NO: 2042381 - RNA, 19 nt, Artificial Sequence
  Description of Artificial Sequence: Synthetic oligonucleotide
  Antisense strand to SEQ ID NO: 2042380
cuucugccuagagugaacc

SEQ ID NO: 2042382 - RNA, 19 nt, Artificial Sequence
  Description of Artificial Sequence: Synthetic oligonucleotide
  Sense strand starting at position 835 of SEQ ID NO: 1881410
aggaauaacuuggcauauu

SEQ ID NO: 2042383 - RNA, 19 nt, Artificial Sequence
  Description of Artificial Sequence: Synthetic oligonucleotide
  Antisense strand to SEQ ID NO: 2042382
aauaugccaaguuauuccu

SEQ ID NO: 2042384 - RNA, 19 nt, Artificial Sequence
  Description of Artificial Sequence: Synthetic oligonucleotide
  Sense strand starting at position 883 of SEQ ID NO: 1881410
gguaucuggcaaggaaaca

SEQ ID NO: 2042385 - RNA, 19 nt, Artificial Sequence
  Description of Artificial Sequence: Synthetic oligonucleotide
  Antisense strand to SEQ ID NO: 2042384
uguuuccuugccagauacc

SEQ ID NO: 2042386 - RNA, 19 nt, Artificial Sequence
  Description of Artificial Sequence: Synthetic oligonucleotide
  Sense strand starting at position 947 of SEQ ID NO: 1881410
uaucuuguaggccaggaua

SEQ ID NO: 2042387 - RNA, 19 nt, Artificial Sequence
  Description of Artificial Sequence: Synthetic oligonucleotide
  Antisense strand to SEQ ID NO: 2042386
uauccuggccuacaagaua

SEQ ID NO: 2042388 - RNA, 19 nt, Artificial Sequence
  Description of Artificial Sequence: Synthetic oligonucleotide
  Sense strand starting at position 949 of SEQ ID NO: 1881410
ucuuguaggccaggauaaa

SEQ ID NO: 2042389 - RNA, 19 nt, Artificial Sequence
  Description of Artificial Sequence: Synthetic oligonucleotide
  Antisense strand to SEQ ID NO: 2042388
uuuauccuggccuacaaga

SEQ ID NO: 2042390 - RNA, 19 nt, Artificial Sequence
  Description of Artificial Sequence: Synthetic oligonucleotide
  Sense strand starting at position 1247 of SEQ ID NO: 1881410
ugggcuuugcuuuauaaca

SEQ ID NO: 2042391 - RNA, 19 nt, Artificial Sequence
  Description of Artificial Sequence: Synthetic oligonucleotide
  Antisense strand to SEQ ID NO: 2042390
uguuauaaagcaaagccca

SEQ ID NO: 2042392 - RNA, 19 nt, Artificial Sequence
  Description of Artificial Sequence: Synthetic oligonucleotide
  Sense strand starting at position 1325 of SEQ ID NO: 1881410
ugcauugcccaugacaaau

SEQ ID NO: 2042393 - RNA, 19 nt, Artificial Sequence
  Description of Artificial Sequence: Synthetic oligonucleotide
  Antisense strand to SEQ ID NO: 2042392
auuugucaugggcaaugca

SEQ ID NO: 2042394 - RNA, 19 nt, Artificial Sequence
  Description of Artificial Sequence: Synthetic oligonucleotide
  Sense strand starting at position 1381 of SEQ ID NO: 1881410
gugggaucccacuguggaa

SEQ ID NO: 2042395 - RNA, 19 nt, Artificial Sequence
  Description of Artificial Sequence: Synthetic oligonucleotide
  Antisense strand to SEQ ID NO: 2042394
uuccacagugggaucccac

SEQ ID NO: 2042396 - RNA, 19 nt, Artificial Sequence
  Description of Artificial Sequence: Synthetic oligonucleotide
  Sense strand starting at position 1393 of SEQ ID NO: 1881410
uguggaacucugggugaga

SEQ ID NO: 2042397 - RNA, 19 nt, Artificial Sequence
  Description of Artificial Sequence: Synthetic oligonucleotide
  Antisense strand to SEQ ID NO: 2042396
ucucacccagaguuccaca

SEQ ID NO: 2042398 - RNA, 19 nt, Artificial Sequence
  Description of Artificial Sequence: Synthetic oligonucleotide
  Sense strand starting at position 1395 of SEQ ID NO: 1881410
uggaacucugggugagacu

SEQ ID NO: 2042399 - RNA, 19 nt, Artificial Sequence
  Description of Artificial Sequence: Synthetic oligonucleotide
  Antisense strand to SEQ ID NO: 2042398
agucucacccagaguucca

SEQ ID NO: 2042400 - RNA, 19 nt, Artificial Sequence
  Description of Artificial Sequence: Synthetic oligonucleotide
  Sense strand starting at position 1404 of SEQ ID NO: 1881410
gggugagacucagcugaag

SEQ ID NO: 2042401 - RNA, 19 nt, Artificial Sequence
  Description of Artificial Sequence: Synthetic oligonucleotide
  Antisense strand to SEQ ID NO: 2042400
cuucagcugagucucaccc

SEQ ID NO: 2042402 - RNA, 19 nt, Artificial Sequence
  Description of Artificial Sequence: Synthetic oligonucleotide
  Sense strand starting at position 1407 of SEQ ID NO: 1881410
ugagacucagcugaaguua

SEQ ID NO: 2042403 - RNA, 19 nt, Artificial Sequence
  Description of Artificial Sequence: Synthetic oligonucleotide
  Antisense strand to SEQ ID NO: 2042402
uaacuucagcugagucuca

SEQ ID NO: 2042404 - RNA, 19 nt, Artificial Sequence
  Description of Artificial Sequence: Synthetic oligonucleotide
  Sense strand starting at position 1474 of SEQ ID NO: 1881410
ucugucuuccugggacaca

SEQ ID NO: 2042405 - RNA, 19 nt, Artificial Sequence
  Description of Artificial Sequence: Synthetic oligonucleotide
  Antisense strand to SEQ ID NO: 2042404
ugugucccaggaagacaga

SEQ ID NO: 2042406 - RNA, 19 nt, Artificial Sequence
  Description of Artificial Sequence: Synthetic oligonucleotide
  Sense strand starting at position 1525 of SEQ ID NO: 1881410
aucuguauccucuggacaa

SEQ ID NO: 2042407 - RNA, 19 nt, Artificial Sequence
  Description of Artificial Sequence: Synthetic oligonucleotide
  Antisense strand to SEQ ID NO: 2042406
uuguccagaggauacagau

SEQ ID NO: 2042408 - RNA, 19 nt, Artificial Sequence
  Description of Artificial Sequence: Synthetic oligonucleotide
  Sense strand starting at position 2441 of SEQ ID NO: 1881410
uguagauuauuauccuuag

SEQ ID NO: 2042409 - RNA, 19 nt, Artificial Sequence
  Description of Artificial Sequence: Synthetic oligonucleotide
  Antisense strand to SEQ ID NO: 2042408
cuaaggauaauaaucuaca

SEQ ID NO: 2042410 - RNA, 19 nt, Artificial Sequence
  Description of Artificial Sequence: Synthetic oligonucleotide
  Sense strand starting at position 2513 of SEQ ID NO: 1881410
aguuguuaucauuagugag

SEQ ID NO: 2042411 - RNA, 19 nt, Artificial Sequence
  Description of Artificial Sequence: Synthetic oligonucleotide
  Antisense strand to SEQ ID NO: 2042410
cucacuaaugauaacaacu

SEQ ID NO: 2042412 - RNA, 19 nt, Artificial Sequence
  Description of Artificial Sequence: Synthetic oligonucleotide
  Sense strand starting at position 2560 of SEQ ID NO: 1881410
uagagugaacaucagcuuu

SEQ ID NO: 2042413 - RNA, 19 nt, Artificial Sequence
  Description of Artificial Sequence: Synthetic oligonucleotide
  Antisense strand to SEQ ID NO: 2042412
aaagcugauguucacucua

SEQ ID NO: 2042414 - RNA, 19 nt, Artificial Sequence
  Description of Artificial Sequence: Synthetic oligonucleotide
  Sense strand starting at position 2608 of SEQ ID NO: 1881410
ggacacugacaucgacaua

SEQ ID NO: 2042415 - RNA, 19 nt, Artificial Sequence
  Description of Artificial Sequence: Synthetic oligonucleotide
  Antisense strand to SEQ ID NO: 2042414
uaugucgaugucagugucc

SEQ ID NO: 2042416 - RNA, 19 nt, Artificial Sequence
  Description of Artificial Sequence: Synthetic oligonucleotide
  Sense strand starting at position 2626 of SEQ ID NO: 1881410
auaagagauccuugccauu

SEQ ID NO: 2042417 - RNA, 19 nt, Artificial Sequence
  Description of Artificial Sequence: Synthetic oligonucleotide
  Antisense strand to SEQ ID NO: 2042416
aauggcaaggaucucuuau

SEQ ID NO: 2042418 - RNA, 19 nt, Artificial Sequence
  Description of Artificial Sequence: Synthetic oligonucleotide
  Sense strand starting at position 2695 of SEQ ID NO: 1881410
guaagacuuccaggaacug

SEQ ID NO: 2042419 - RNA, 19 nt, Artificial Sequence
  Description of Artificial Sequence: Synthetic oligonucleotide
  Antisense strand to SEQ ID NO: 2042418
caguuccuggaagucuuac

SEQ ID NO: 2042420 - RNA, 19 nt, Artificial Sequence
  Description of Artificial Sequence: Synthetic oligonucleotide
  Sense strand starting at position 2717 of SEQ ID NO: 1881410
ugugcugugaaggaaacaa

SEQ ID NO: 2042421 - RNA, 19 nt, Artificial Sequence
  Description of Artificial Sequence: Synthetic oligonucleotide
  Antisense strand to SEQ ID NO: 2042420
uuguuuccuucacagcaca

SEQ ID NO: 2042422 - RNA, 19 nt, Artificial Sequence
  Description of Artificial Sequence: Synthetic oligonucleotide
  Sense strand starting at position 2796 of SEQ ID NO: 1881410
cucaaauaucuuuggagau

SEQ ID NO: 2042423 - RNA, 19 nt, Artificial Sequence
  Description of Artificial Sequence: Synthetic oligonucleotide
  Antisense strand to SEQ ID NO: 2042422
aucuccaaagauauuugag

SEQ ID NO: 2042424 - RNA, 19 nt, Artificial Sequence
  Description of Artificial Sequence: Synthetic oligonucleotide
  Sense strand starting at position 3072 of SEQ ID NO: 1881410
uugagugaaugaguuagau

SEQ ID NO: 2042425 - RNA, 19 nt, Artificial Sequence
  Description of Artificial Sequence: Synthetic oligonucleotide
  Antisense strand to SEQ ID NO: 2042424
aucuaacucauucacucaa

SEQ ID NO: 2042426 - RNA, 19 nt, Artificial Sequence
  Description of Artificial Sequence: Synthetic oligonucleotide
  Sense strand starting at position 3096 of SEQ ID NO: 1881410
gaggaagccucuuugagaa

SEQ ID NO: 2042427 - RNA, 19 nt, Artificial Sequence
  Description of Artificial Sequence: Synthetic oligonucleotide
  Antisense strand to SEQ ID NO: 2042426
uucucaaagaggcuuccuc

SEQ ID NO: 2042428 - RNA, 19 nt, Artificial Sequence
  Description of Artificial Sequence: Synthetic oligonucleotide
  Sense strand starting at position 3246 of SEQ ID NO: 1881410
gaaugagcuccuugagggu

SEQ ID NO: 2042429 - RNA, 19 nt, Artificial Sequence
  Description of Artificial Sequence: Synthetic oligonucleotide
  Antisense strand to SEQ ID NO: 2042428
acccucaaggagcucauuc

SEQ ID NO: 2042430 - RNA, 19 nt, Artificial Sequence
  Description of Artificial Sequence: Synthetic oligonucleotide
  Sense strand starting at position 3270 of SEQ ID NO: 1881410
uugugacuucucuaucauu

SEQ ID NO: 2042431 - RNA, 19 nt, Artificial Sequence
  Description of Artificial Sequence: Synthetic oligonucleotide
  Antisense strand to SEQ ID NO: 2042430
aaugauagagaagucacaa

SEQ ID NO: 2042432 - RNA, 19 nt, Artificial Sequence
  Description of Artificial Sequence: Synthetic oligonucleotide
  Sense strand starting at position 3294 of SEQ ID NO: 1881410
cuaacaguugguuaucuga

SEQ ID NO: 2042433 - RNA, 19 nt, Artificial Sequence
  Description of Artificial Sequence: Synthetic oligonucleotide
  Antisense strand to SEQ ID NO: 2042432
ucagauaaccaacuguuag

SEQ ID NO: 2042434 - RNA, 19 nt, Artificial Sequence
  Description of Artificial Sequence: Synthetic oligonucleotide
  Sense strand starting at position 3452 of SEQ ID NO: 1881410
ugaagaagcucuccuugaa

SEQ ID NO: 2042435 - RNA, 19 nt, Artificial Sequence
  Description of Artificial Sequence: Synthetic oligonucleotide
  Antisense strand to SEQ ID NO: 2042434
uucaaggagagcuucuuca

SEQ ID NO: 2042436 - RNA, 19 nt, Artificial Sequence
  Description of Artificial Sequence: Synthetic oligonucleotide
  Sense strand starting at position 3455 of SEQ ID NO: 1881410
agaagcucuccuugaauaa

SEQ ID NO: 2042437 - RNA, 19 nt, Artificial Sequence
  Description of Artificial Sequence: Synthetic oligonucleotide
  Antisense strand to SEQ ID NO: 2042436
uuauucaaggagagcuucu

SEQ ID NO: 2042438 - RNA, 19 nt, Artificial Sequence
  Description of Artificial Sequence: Synthetic oligonucleotide
  Sense strand starting at position 3560 of SEQ ID NO: 1881410
ccagcaguucuguaauaau

SEQ ID NO: 2042439 - RNA, 19 nt, Artificial Sequence
  Description of Artificial Sequence: Synthetic oligonucleotide
  Antisense strand to SEQ ID NO: 2042438
auuauuacagaacugcugg

SEQ ID NO: 2042440 - RNA, 19 nt, Artificial Sequence
  Description of Artificial Sequence: Synthetic oligonucleotide
  Sense strand starting at position 49 of SEQ ID NO: 1881411
cgaggaaauguaugcgugu

SEQ ID NO: 2042441 - RNA, 19 nt, Artificial Sequence
  Description of Artificial Sequence: Synthetic oligonucleotide
  Antisense strand to SEQ ID NO: 2042440
acacgcauacauuuccucg

SEQ ID NO: 2042442 - RNA, 19 nt, Artificial Sequence
  Description of Artificial Sequence: Synthetic oligonucleotide
  Sense strand starting at position 51 of SEQ ID NO: 1881411
aggaaauguaugcgugugu

SEQ ID NO: 2042443 - RNA, 19 nt, Artificial Sequence
  Description of Artificial Sequence: Synthetic oligonucleotide
  Antisense strand to SEQ ID NO: 2042442
acacacgcauacauuuccu

SEQ ID NO: 2042444 - RNA, 19 nt, Artificial Sequence
  Description of Artificial Sequence: Synthetic oligonucleotide
  Sense strand starting at position 83 of SEQ ID NO: 1881411
guguguuugucagcaugug

SEQ ID NO: 2042445 - RNA, 19 nt, Artificial Sequence
  Description of Artificial Sequence: Synthetic oligonucleotide
  Antisense strand to SEQ ID NO: 2042444
cacaugcugacaaacacac

SEQ ID NO: 2042446 - RNA, 19 nt, Artificial Sequence
  Description of Artificial Sequence: Synthetic oligonucleotide
  Sense strand starting at position 92 of SEQ ID NO: 1881411
ucagcaugugcgucuguua

SEQ ID NO: 2042447 - RNA, 19 nt, Artificial Sequence
  Description of Artificial Sequence: Synthetic oligonucleotide
  Antisense strand to SEQ ID NO: 2042446
uaacagacgcacaugcuga

SEQ ID NO: 2042448 - RNA, 19 nt, Artificial Sequence
  Description of Artificial Sequence: Synthetic oligonucleotide
  Sense strand starting at position 122 of SEQ ID NO: 1881411
gcguaugugcauguguauu

SEQ ID NO: 2042449 - RNA, 19 nt, Artificial Sequence
  Description of Artificial Sequence: Synthetic oligonucleotide
  Antisense strand to SEQ ID NO: 2042448
aauacacaugcacauacgc

SEQ ID NO: 2042450 - RNA, 19 nt, Artificial Sequence
  Description of Artificial Sequence: Synthetic oligonucleotide
  Sense strand starting at position 124 of SEQ ID NO: 1881411
guaugugcauguguauuau

SEQ ID NO: 2042451 - RNA, 19 nt, Artificial Sequence
  Description of Artificial Sequence: Synthetic oligonucleotide
  Antisense strand to SEQ ID NO: 2042450
auaauacacaugcacauac

SEQ ID NO: 2042452 - RNA, 19 nt, Artificial Sequence
  Description of Artificial Sequence: Synthetic oligonucleotide
  Sense strand starting at position 135 of SEQ ID NO: 1881411
uguauuauguaagugcaca

SEQ ID NO: 2042453 - RNA, 19 nt, Artificial Sequence
  Description of Artificial Sequence: Synthetic oligonucleotide
  Antisense strand to SEQ ID NO: 2042452
ugugcacuuacauaauaca

SEQ ID NO: 2042454 - RNA, 19 nt, Artificial Sequence
  Description of Artificial Sequence: Synthetic oligonucleotide
  Sense strand starting at position 136 of SEQ ID NO: 1881411
guauuauguaagugcacau

SEQ ID NO: 2042455 - RNA, 19 nt, Artificial Sequence
  Description of Artificial Sequence: Synthetic oligonucleotide
  Antisense strand to SEQ ID NO: 2042454
augugcacuuacauaauac

SEQ ID NO: 2042456 - RNA, 19 nt, Artificial Sequence
  Description of Artificial Sequence: Synthetic oligonucleotide
  Sense strand starting at position 209 of SEQ ID NO: 1881411
cauggugucugcgucacau

SEQ ID NO: 2042457 - RNA, 19 nt, Artificial Sequence
  Description of Artificial Sequence: Synthetic oligonucleotide
  Antisense strand to SEQ ID NO: 2042456
augugacgcagacaccaug

SEQ ID NO: 2042458 - RNA, 19 nt, Artificial Sequence
  Description of Artificial Sequence: Synthetic oligonucleotide
  Sense strand starting at position 374 of SEQ ID NO: 1881411
cuuagcagguacucuauaa

SEQ ID NO: 2042459 - RNA, 19 nt, Artificial Sequence
  Description of Artificial Sequence: Synthetic oligonucleotide
  Antisense strand to SEQ ID NO: 2042458
uuauagaguaccugcuaag

SEQ ID NO: 2042460 - RNA, 19 nt, Artificial Sequence
  Description of Artificial Sequence: Synthetic oligonucleotide
  Sense strand starting at position 482 of SEQ ID NO: 1881411
cuggguggguguccauaaa

SEQ ID NO: 2042461 - RNA, 19 nt, Artificial Sequence
  Description of Artificial Sequence: Synthetic oligonucleotide
  Antisense strand to SEQ ID NO: 2042460
uuuauggacacccacccag

SEQ ID NO: 2042462 - RNA, 19 nt, Artificial Sequence
  Description of Artificial Sequence: Synthetic oligonucleotide
  Sense strand starting at position 492 of SEQ ID NO: 1881411
guccauaaacgcgugcuaa

SEQ ID NO: 2042463 - RNA, 19 nt, Artificial Sequence
  Description of Artificial Sequence: Synthetic oligonucleotide
  Antisense strand to SEQ ID NO: 2042462
uuagcacgcguuuauggac

SEQ ID NO: 2042464 - RNA, 19 nt, Artificial Sequence
  Description of Artificial Sequence: Synthetic oligonucleotide
  Sense strand starting at position 493 of SEQ ID NO: 1881411
uccauaaacgcgugcuaag

SEQ ID NO: 2042465 - RNA, 19 nt, Artificial Sequence
  Description of Artificial Sequence: Synthetic oligonucleotide
  Antisense strand to SEQ ID NO: 2042464
cuuagcacgcguuuaugga

SEQ ID NO: 2042466 - RNA, 19 nt, Artificial Sequence
  Description of Artificial Sequence: Synthetic oligonucleotide
  Sense strand starting at position 686 of SEQ ID NO: 1881411
gaaagagagguuugcuaac

SEQ ID NO: 2042467 - RNA, 19 nt, Artificial Sequence
  Description of Artificial Sequence: Synthetic oligonucleotide
  Antisense strand to SEQ ID NO: 2042466
guuagcaaaccucucuuuc

SEQ ID NO: 2042468 - RNA, 19 nt, Artificial Sequence
  Description of Artificial Sequence: Synthetic oligonucleotide
  Sense strand starting at position 718 of SEQ ID NO: 1881411
gccagaugugguuaacgug

SEQ ID NO: 2042469 - RNA, 19 nt, Artificial Sequence
  Description of Artificial Sequence: Synthetic oligonucleotide
  Antisense strand to SEQ ID NO: 2042468
cacguuaaccacaucuggc

SEQ ID NO: 2042470 - RNA, 19 nt, Artificial Sequence
  Description of Artificial Sequence: Synthetic oligonucleotide
  Sense strand starting at position 992 of SEQ ID NO: 1881411
ugaagaauugcccaccagu

SEQ ID NO: 2042471 - RNA, 19 nt, Artificial Sequence
  Description of Artificial Sequence: Synthetic oligonucleotide
  Antisense strand to SEQ ID NO: 2042470
acuggugggcaauucuuca

SEQ ID NO: 2042472 - RNA, 19 nt, Artificial Sequence
  Description of Artificial Sequence: Synthetic oligonucleotide
  Sense strand starting at position 1005 of SEQ ID NO: 1881411
accagugugaccugaacga

SEQ ID NO: 2042473 - RNA, 19 nt, Artificial Sequence
  Description of Artificial Sequence: Synthetic oligonucleotide
  Antisense strand to SEQ ID NO: 2042472
ucguucaggucacacuggu

SEQ ID NO: 2042474 - RNA, 19 nt, Artificial Sequence
  Description of Artificial Sequence: Synthetic oligonucleotide
  Sense strand starting at position 1392 of SEQ ID NO: 1881411
acggcagucucaugagaug

SEQ ID NO: 2042475 - RNA, 19 nt, Artificial Sequence
  Description of Artificial Sequence: Synthetic oligonucleotide
  Antisense strand to SEQ ID NO: 2042474
caucucaugagacugccgu

SEQ ID NO: 2042476 - RNA, 19 nt, Artificial Sequence
  Description of Artificial Sequence: Synthetic oligonucleotide
  Sense strand starting at position 1397 of SEQ ID NO: 1881411
agucucaugagauguaaug

SEQ ID NO: 2042477 - RNA, 19 nt, Artificial Sequence
  Description of Artificial Sequence: Synthetic oligonucleotide
  Antisense strand to SEQ ID NO: 2042476
cauuacaucucaugagacu

SEQ ID NO: 2042478 - RNA, 19 nt, Artificial Sequence
  Description of Artificial Sequence: Synthetic oligonucleotide
  Sense strand starting at position 1406 of SEQ ID NO: 1881411
agauguaaugcuuaguucu

SEQ ID NO: 2042479 - RNA, 19 nt, Artificial Sequence
  Description of Artificial Sequence: Synthetic oligonucleotide
  Antisense strand to SEQ ID NO: 2042478
agaacuaagcauuacaucu

SEQ ID NO: 2042480 - RNA, 19 nt, Artificial Sequence
  Description of Artificial Sequence: Synthetic oligonucleotide
  Sense strand starting at position 1514 of SEQ ID NO: 1881411
accaguagcguugguauca

SEQ ID NO: 2042481 - RNA, 19 nt, Artificial Sequence
  Description of Artificial Sequence: Synthetic oligonucleotide
  Antisense strand to SEQ ID NO: 2042480
ugauaccaacgcuacuggu

SEQ ID NO: 2042482 - RNA, 19 nt, Artificial Sequence
  Description of Artificial Sequence: Synthetic oligonucleotide
  Sense strand starting at position 1540 of SEQ ID NO: 1881411
gcuugucagcgaugcggaa

SEQ ID NO: 2042483 - RNA, 19 nt, Artificial Sequence
  Description of Artificial Sequence: Synthetic oligonucleotide
  Antisense strand to SEQ ID NO: 2042482
uuccgcaucgcugacaagc

SEQ ID NO: 2042484 - RNA, 19 nt, Artificial Sequence
  Description of Artificial Sequence: Synthetic oligonucleotide
  Sense strand starting at position 1635 of SEQ ID NO: 1881411
ucuaguaacucuuauguga

SEQ ID NO: 2042485 - RNA, 19 nt, Artificial Sequence
  Description of Artificial Sequence: Synthetic oligonucleotide
  Antisense strand to SEQ ID NO: 2042484
ucacauaagaguuacuaga

SEQ ID NO: 2042486 - RNA, 19 nt, Artificial Sequence
  Description of Artificial Sequence: Synthetic oligonucleotide
  Sense strand starting at position 1637 of SEQ ID NO: 1881411
uaguaacucuuaugugaga

SEQ ID NO: 2042487 - RNA, 19 nt, Artificial Sequence
  Description of Artificial Sequence: Synthetic oligonucleotide
  Antisense strand to SEQ ID NO: 2042486
ucucacauaagaguuacua

SEQ ID NO: 2042488 - RNA, 19 nt, Artificial Sequence
  Description of Artificial Sequence: Synthetic oligonucleotide
  Sense strand starting at position 1639 of SEQ ID NO: 1881411
guaacucuuaugugagaga

SEQ ID NO: 2042489 - RNA, 19 nt, Artificial Sequence
  Description of Artificial Sequence: Synthetic oligonucleotide
  Antisense strand to SEQ ID NO: 2042488
ucucucacauaagaguuac

SEQ ID NO: 2042490 - RNA, 19 nt, Artificial Sequence
  Description of Artificial Sequence: Synthetic oligonucleotide
  Sense strand starting at position 1640 of SEQ ID NO: 1881411
uaacucuuaugugagagaa

SEQ ID NO: 2042491 - RNA, 19 nt, Artificial Sequence
  Description of Artificial Sequence: Synthetic oligonucleotide
  Antisense strand to SEQ ID NO: 2042490
uucucucacauaagaguua

SEQ ID NO: 2042492 - RNA, 19 nt, Artificial Sequence
  Description of Artificial Sequence: Synthetic oligonucleotide
  Sense strand starting at position 1756 of SEQ ID NO: 1881411
agaggcagcauuugcuaau

SEQ ID NO: 2042493 - RNA, 19 nt, Artificial Sequence
  Description of Artificial Sequence: Synthetic oligonucleotide
  Antisense strand to SEQ ID NO: 2042492
auuagcaaaugcugccucu

SEQ ID NO: 2042494 - RNA, 19 nt, Artificial Sequence
  Description of Artificial Sequence: Synthetic oligonucleotide
  Sense strand starting at position 1895 of SEQ ID NO: 1881411
aagcgugauuacccacaca

SEQ ID NO: 2042495 - RNA, 19 nt, Artificial Sequence
  Description of Artificial Sequence: Synthetic oligonucleotide
  Antisense strand to SEQ ID NO: 2042494
uguguggguaaucacgcuu

SEQ ID NO: 2042496 - RNA, 19 nt, Artificial Sequence
  Description of Artificial Sequence: Synthetic oligonucleotide
  Sense strand starting at position 2008 of SEQ ID NO: 1881411
uugugaaugugggaucgaa

SEQ ID NO: 2042497 - RNA, 19 nt, Artificial Sequence
  Description of Artificial Sequence: Synthetic oligonucleotide
  Antisense strand to SEQ ID NO: 2042496
uucgaucccacauucacaa

SEQ ID NO: 2042498 - RNA, 19 nt, Artificial Sequence
  Description of Artificial Sequence: Synthetic oligonucleotide
  Sense strand starting at position 2020 of SEQ ID NO: 1881411
gaucgaagcgcuuagaucu

SEQ ID NO: 2042499 - RNA, 19 nt, Artificial Sequence
  Description of Artificial Sequence: Synthetic oligonucleotide
  Antisense strand to SEQ ID NO: 2042498
agaucuaagcgcuucgauc

SEQ ID NO: 2042500 - RNA, 19 nt, Artificial Sequence
  Description of Artificial Sequence: Synthetic oligonucleotide
  Sense strand starting at position 2057 of SEQ ID NO: 1881411
gcggguguccagcuuugua

SEQ ID NO: 2042501 - RNA, 19 nt, Artificial Sequence
  Description of Artificial Sequence: Synthetic oligonucleotide
  Antisense strand to SEQ ID NO: 2042500
uacaaagcuggacacccgc

SEQ ID NO: 2042502 - RNA, 19 nt, Artificial Sequence
  Description of Artificial Sequence: Synthetic oligonucleotide
  Sense strand starting at position 2114 of SEQ ID NO: 1881411
ucagcuuugugucuggaca

SEQ ID NO: 2042503 - RNA, 19 nt, Artificial Sequence
  Description of Artificial Sequence: Synthetic oligonucleotide
  Antisense strand to SEQ ID NO: 2042502
uguccagacacaaagcuga

SEQ ID NO: 2042504 - RNA, 19 nt, Artificial Sequence
  Description of Artificial Sequence: Synthetic oligonucleotide
  Sense strand starting at position 2295 of SEQ ID NO: 1881411
ggauguggguuucagcaga

SEQ ID NO: 2042505 - RNA, 19 nt, Artificial Sequence
  Description of Artificial Sequence: Synthetic oligonucleotide
  Antisense strand to SEQ ID NO: 2042504
ucugcugaaacccacaucc

SEQ ID NO: 2042506 - RNA, 19 nt, Artificial Sequence
  Description of Artificial Sequence: Synthetic oligonucleotide
  Sense strand starting at position 2467 of SEQ ID NO: 1881411
aggccagugcugugaauuu

SEQ ID NO: 2042507 - RNA, 19 nt, Artificial Sequence
  Description of Artificial Sequence: Synthetic oligonucleotide
  Antisense strand to SEQ ID NO: 2042506
aaauucacagcacuggccu

SEQ ID NO: 2042508 - RNA, 19 nt, Artificial Sequence
  Description of Artificial Sequence: Synthetic oligonucleotide
  Sense strand starting at position 2657 of SEQ ID NO: 1881411
aggauaggcuccuaauuag

SEQ ID NO: 2042509 - RNA, 19 nt, Artificial Sequence
  Description of Artificial Sequence: Synthetic oligonucleotide
  Antisense strand to SEQ ID NO: 2042508
cuaauuaggagccuauccu

SEQ ID NO: 2042510 - RNA, 19 nt, Artificial Sequence
  Description of Artificial Sequence: Synthetic oligonucleotide
  Sense strand starting at position 2664 of SEQ ID NO: 1881411
gcuccuaauuaguuuggau

SEQ ID NO: 2042511 - RNA, 19 nt, Artificial Sequence
  Description of Artificial Sequence: Synthetic oligonucleotide
  Antisense strand to SEQ ID NO: 2042510
auccaaacuaauuaggagc

SEQ ID NO: 2042512 - RNA, 19 nt, Artificial Sequence
  Description of Artificial Sequence: Synthetic oligonucleotide
  Sense strand starting at position 2765 of SEQ ID NO: 1881411
gccagauaauuccagaaga

SEQ ID NO: 2042513 - RNA, 19 nt, Artificial Sequence
  Description of Artificial Sequence: Synthetic oligonucleotide
  Antisense strand to SEQ ID NO: 2042512
ucuucuggaauuaucuggc

SEQ ID NO: 2042514 - RNA, 19 nt, Artificial Sequence
  Description of Artificial Sequence: Synthetic oligonucleotide
  Sense strand starting at position 2819 of SEQ ID NO: 1881411
uucggaggagucuaauuac

SEQ ID NO: 2042515 - RNA, 19 nt, Artificial Sequence
  Description of Artificial Sequence: Synthetic oligonucleotide
  Antisense strand to SEQ ID NO: 2042514
guaauuagacuccuccgaa

SEQ ID NO: 2042516 - RNA, 19 nt, Artificial Sequence
  Description of Artificial Sequence: Synthetic oligonucleotide
  Sense strand starting at position 2822 of SEQ ID NO: 1881411
ggaggagucuaauuacuuu

SEQ ID NO: 2042517 - RNA, 19 nt, Artificial Sequence
  Description of Artificial Sequence: Synthetic oligonucleotide
  Antisense strand to SEQ ID NO: 2042516
aaaguaauuagacuccucc

SEQ ID NO: 2042518 - RNA, 19 nt, Artificial Sequence
  Description of Artificial Sequence: Synthetic oligonucleotide
  Sense strand starting at position 2844 of SEQ ID NO: 1881411
cagguaauggcuugaagua

SEQ ID NO: 2042519 - RNA, 19 nt, Artificial Sequence
  Description of Artificial Sequence: Synthetic oligonucleotide
  Antisense strand to SEQ ID NO: 2042518
uacuucaagccauuaccug

SEQ ID NO: 2042520 - RNA, 19 nt, Artificial Sequence
  Description of Artificial Sequence: Synthetic oligonucleotide
  Sense strand starting at position 51 of SEQ ID NO: 1881412
gugucuuaucuauacagac

SEQ ID NO: 2042521 - RNA, 19 nt, Artificial Sequence
  Description of Artificial Sequence: Synthetic oligonucleotide
  Antisense strand to SEQ ID NO: 2042520
gucuguauagauaagacac

SEQ ID NO: 2042522 - RNA, 19 nt, Artificial Sequence
  Description of Artificial Sequence: Synthetic oligonucleotide
  Sense strand starting at position 153 of SEQ ID NO: 1881412
cgcaauagugaagaacauu

SEQ ID NO: 2042523 - RNA, 19 nt, Artificial Sequence
  Description of Artificial Sequence: Synthetic oligonucleotide
  Antisense strand to SEQ ID NO: 2042522
aauguucuucacuauugcg

SEQ ID NO: 2042524 - RNA, 19 nt, Artificial Sequence
  Description of Artificial Sequence: Synthetic oligonucleotide
  Sense strand starting at position 477 of SEQ ID NO: 1881412
uggagauguuuaucucauu

SEQ ID NO: 2042525 - RNA, 19 nt, Artificial Sequence
  Description of Artificial Sequence: Synthetic oligonucleotide
  Antisense strand to SEQ ID NO: 2042524
aaugagauaaacaucucca

SEQ ID NO: 2042526 - RNA, 19 nt, Artificial Sequence
  Description of Artificial Sequence: Synthetic oligonucleotide
  Sense strand starting at position 596 of SEQ ID NO: 1881412
auagcauauggagguuauu

SEQ ID NO: 2042527 - RNA, 19 nt, Artificial Sequence
  Description of Artificial Sequence: Synthetic oligonucleotide
  Antisense strand to SEQ ID NO: 2042526
aauaaccuccauaugcuau

SEQ ID NO: 2042528 - RNA, 19 nt, Artificial Sequence
  Description of Artificial Sequence: Synthetic oligonucleotide
  Sense strand starting at position 599 of SEQ ID NO: 1881412
gcauauggagguuauuauu

SEQ ID NO: 2042529 - RNA, 19 nt, Artificial Sequence
  Description of Artificial Sequence: Synthetic oligonucleotide
  Antisense strand to SEQ ID NO: 2042528
aauaauaaccuccauaugc

SEQ ID NO: 2042530 - RNA, 19 nt, Artificial Sequence
  Description of Artificial Sequence: Synthetic oligonucleotide
  Sense strand starting at position 822 of SEQ ID NO: 1881412
aguagaaagcaucauguaa

SEQ ID NO: 2042531 - RNA, 19 nt, Artificial Sequence
  Description of Artificial Sequence: Synthetic oligonucleotide
  Antisense strand to SEQ ID NO: 2042530
uuacaugaugcuuucuacu

SEQ ID NO: 2042532 - RNA, 19 nt, Artificial Sequence
  Description of Artificial Sequence: Synthetic oligonucleotide
  Sense strand starting at position 975 of SEQ ID NO: 1881412
cacagcauuucgucuguaa

SEQ ID NO: 2042533 - RNA, 19 nt, Artificial Sequence
  Description of Artificial Sequence: Synthetic oligonucleotide
  Antisense strand to SEQ ID NO: 2042532
uuacagacgaaaugcugug

SEQ ID NO: 2042534 - RNA, 19 nt, Artificial Sequence
  Description of Artificial Sequence: Synthetic oligonucleotide
  Sense strand starting at position 977 of SEQ ID NO: 1881412
cagcauuucgucuguaaau

SEQ ID NO: 2042535 - RNA, 19 nt, Artificial Sequence
  Description of Artificial Sequence: Synthetic oligonucleotide
  Antisense strand to SEQ ID NO: 2042534
auuuacagacgaaaugcug

SEQ ID NO: 2042536 - RNA, 19 nt, Artificial Sequence
  Description of Artificial Sequence: Synthetic oligonucleotide
  Sense strand starting at position 978 of SEQ ID NO: 1881412
agcauuucgucuguaaaug

SEQ ID NO: 2042537 - RNA, 19 nt, Artificial Sequence
  Description of Artificial Sequence: Synthetic oligonucleotide
  Antisense strand to SEQ ID NO: 2042536
cauuuacagacgaaaugcu

SEQ ID NO: 2042538 - RNA, 19 nt, Artificial Sequence
  Description of Artificial Sequence: Synthetic oligonucleotide
  Sense strand starting at position 979 of SEQ ID NO: 1881412
gcauuucgucuguaaaugu

SEQ ID NO: 2042539 - RNA, 19 nt, Artificial Sequence
  Description of Artificial Sequence: Synthetic oligonucleotide
  Antisense strand to SEQ ID NO: 2042538
acauuuacagacgaaaugc

SEQ ID NO: 2042540 - RNA, 19 nt, Artificial Sequence
  Description of Artificial Sequence: Synthetic oligonucleotide
  Sense strand starting at position 1055 of SEQ ID NO: 1881412
aggagaguuauaugagcuc

SEQ ID NO: 2042541 - RNA, 19 nt, Artificial Sequence
  Description of Artificial Sequence: Synthetic oligonucleotide
  Antisense strand to SEQ ID NO: 2042540
gagcucauauaacucuccu

SEQ ID NO: 2042542 - RNA, 19 nt, Artificial Sequence
  Description of Artificial Sequence: Synthetic oligonucleotide
  Sense strand starting at position 1058 of SEQ ID NO: 1881412
agaguuauaugagcucaua

SEQ ID NO: 2042543 - RNA, 19 nt, Artificial Sequence
  Description of Artificial Sequence: Synthetic oligonucleotide
  Antisense strand to SEQ ID NO: 2042542
uaugagcucauauaacucu

SEQ ID NO: 2042544 - RNA, 19 nt, Artificial Sequence
  Description of Artificial Sequence: Synthetic oligonucleotide
  Sense strand starting at position 1061 of SEQ ID NO: 1881412
guuauaugagcucauagug

SEQ ID NO: 2042545 - RNA, 19 nt, Artificial Sequence
  Description of Artificial Sequence: Synthetic oligonucleotide
  Antisense strand to SEQ ID NO: 2042544
cacuaugagcucauauaac

SEQ ID NO: 2042546 - RNA, 19 nt, Artificial Sequence
  Description of Artificial Sequence: Synthetic oligonucleotide
  Sense strand starting at position 1105 of SEQ ID NO: 1881412
cugaaaucaguugguacaa

SEQ ID NO: 2042547 - RNA, 19 nt, Artificial Sequence
  Description of Artificial Sequence: Synthetic oligonucleotide
  Antisense strand to SEQ ID NO: 2042546
uuguaccaacugauuucag

SEQ ID NO: 2042548 - RNA, 19 nt, Artificial Sequence
  Description of Artificial Sequence: Synthetic oligonucleotide
  Sense strand starting at position 1230 of SEQ ID NO: 1881412
ggcuuuauggcugauauaa

SEQ ID NO: 2042549 - RNA, 19 nt, Artificial Sequence
  Description of Artificial Sequence: Synthetic oligonucleotide
  Antisense strand to SEQ ID NO: 2042548
uuauaucagccauaaagcc

SEQ ID NO: 2042550 - RNA, 19 nt, Artificial Sequence
  Description of Artificial Sequence: Synthetic oligonucleotide
  Sense strand starting at position 1307 of SEQ ID NO: 1881412
cccucauuacgagaugcau

SEQ ID NO: 2042551 - RNA, 19 nt, Artificial Sequence
  Description of Artificial Sequence: Synthetic oligonucleotide
  Antisense strand to SEQ ID NO: 2042550
augcaucucguaaugaggg

SEQ ID NO: 2042552 - RNA, 19 nt, Artificial Sequence
  Description of Artificial Sequence: Synthetic oligonucleotide
  Sense strand starting at position 1313 of SEQ ID NO: 1881412
uuacgagaugcauaaaugu

SEQ ID NO: 2042553 - RNA, 19 nt, Artificial Sequence
  Description of Artificial Sequence: Synthetic oligonucleotide
  Antisense strand to SEQ ID NO: 2042552
acauuuaugcaucucguaa

SEQ ID NO: 2042554 - RNA, 19 nt, Artificial Sequence
  Description of Artificial Sequence: Synthetic oligonucleotide
  Sense strand starting at position 1460 of SEQ ID NO: 1881412
aguuaaaucugaguaaagg

SEQ ID NO: 2042555 - RNA, 19 nt, Artificial Sequence
  Description of Artificial Sequence: Synthetic oligonucleotide
  Antisense strand to SEQ ID NO: 2042554
ccuuuacucagauuuaacu

SEQ ID NO: 2042556 - RNA, 19 nt, Artificial Sequence
  Description of Artificial Sequence: Synthetic oligonucleotide
  Sense strand starting at position 1630 of SEQ ID NO: 1881412
cccugugguagagaucaga

SEQ ID NO: 2042557 - RNA, 19 nt, Artificial Sequence
  Description of Artificial Sequence: Synthetic oligonucleotide
  Antisense strand to SEQ ID NO: 2042556
ucugaucucuaccacaggg

SEQ ID NO: 2042558 - RNA, 19 nt, Artificial Sequence
  Description of Artificial Sequence: Synthetic oligonucleotide
  Sense strand starting at position 1633 of SEQ ID NO: 1881412
ugugguagagaucagaagu

SEQ ID NO: 2042559 - RNA, 19 nt, Artificial Sequence
  Description of Artificial Sequence: Synthetic oligonucleotide
  Antisense strand to SEQ ID NO: 2042558
acuucugaucucuaccaca

SEQ ID NO: 2042560 - RNA, 19 nt, Artificial Sequence
  Description of Artificial Sequence: Synthetic oligonucleotide
  Sense strand starting at position 1646 of SEQ ID NO: 1881412
agaagucuacucugagguu

SEQ ID NO: 2042561 - RNA, 19 nt, Artificial Sequence
  Description of Artificial Sequence: Synthetic oligonucleotide
  Antisense strand to SEQ ID NO: 2042560
aaccucagaguagacuucu

SEQ ID NO: 2042562 - RNA, 19 nt, Artificial Sequence
  Description of Artificial Sequence: Synthetic oligonucleotide
  Sense strand starting at position 1731 of SEQ ID NO: 1881412
cgggauuguguugcuguca

SEQ ID NO: 2042563 - RNA, 19 nt, Artificial Sequence
  Description of Artificial Sequence: Synthetic oligonucleotide
  Antisense strand to SEQ ID NO: 2042562
ugacagcaacacaaucccg

SEQ ID NO: 2042564 - RNA, 19 nt, Artificial Sequence
  Description of Artificial Sequence: Synthetic oligonucleotide
  Sense strand starting at position 2082 of SEQ ID NO: 1881412
ucuguuuaugccgugcaga

SEQ ID NO: 2042565 - RNA, 19 nt, Artificial Sequence
  Description of Artificial Sequence: Synthetic oligonucleotide
  Antisense strand to SEQ ID NO: 2042564
ucugcacggcauaaacaga

SEQ ID NO: 2042566 - RNA, 19 nt, Artificial Sequence
  Description of Artificial Sequence: Synthetic oligonucleotide
  Sense strand starting at position 2207 of SEQ ID NO: 1881412
ucccauuacuggucuuaga

SEQ ID NO: 2042567 - RNA, 19 nt, Artificial Sequence
  Description of Artificial Sequence: Synthetic oligonucleotide
  Antisense strand to SEQ ID NO: 2042566
ucuaagaccaguaauggga

SEQ ID NO: 2042568 - RNA, 19 nt, Artificial Sequence
  Description of Artificial Sequence: Synthetic oligonucleotide
  Sense strand starting at position 2268 of SEQ ID NO: 1881412
augggaaaguuuguuauuc

SEQ ID NO: 2042569 - RNA, 19 nt, Artificial Sequence
  Description of Artificial Sequence: Synthetic oligonucleotide
  Antisense strand to SEQ ID NO: 2042568
gaauaacaaacuuucccau

SEQ ID NO: 2042570 - RNA, 19 nt, Artificial Sequence
  Description of Artificial Sequence: Synthetic oligonucleotide
  Sense strand starting at position 2294 of SEQ ID NO: 1881412
guuuguuugagacauaguu

SEQ ID NO: 2042571 - RNA, 19 nt, Artificial Sequence
  Description of Artificial Sequence: Synthetic oligonucleotide
  Antisense strand to SEQ ID NO: 2042570
aacuaugucucaaacaaac

SEQ ID NO: 2042572 - RNA, 19 nt, Artificial Sequence
  Description of Artificial Sequence: Synthetic oligonucleotide
  Sense strand starting at position 2757 of SEQ ID NO: 1881412
aguacugcuguuuagagau

SEQ ID NO: 2042573 - RNA, 19 nt, Artificial Sequence
  Description of Artificial Sequence: Synthetic oligonucleotide
  Antisense strand to SEQ ID NO: 2042572
aucucuaaacagcaguacu

SEQ ID NO: 2042574 - RNA, 19 nt, Artificial Sequence
  Description of Artificial Sequence: Synthetic oligonucleotide
  Sense strand starting at position 2949 of SEQ ID NO: 1881412
gugggugucugcacuaagu

SEQ ID NO: 2042575 - RNA, 19 nt, Artificial Sequence
  Description of Artificial Sequence: Synthetic oligonucleotide
  Antisense strand to SEQ ID NO: 2042574
acuuagugcagacacccac

SEQ ID NO: 2042576 - RNA, 19 nt, Artificial Sequence
  Description of Artificial Sequence: Synthetic oligonucleotide
  Sense strand starting at position 3071 of SEQ ID NO: 1881412
cugauuaguaaugggauua

SEQ ID NO: 2042577 - RNA, 19 nt, Artificial Sequence
  Description of Artificial Sequence: Synthetic oligonucleotide
  Antisense strand to SEQ ID NO: 2042576
uaaucccauuacuaaucag

SEQ ID NO: 2042578 - RNA, 19 nt, Artificial Sequence
  Description of Artificial Sequence: Synthetic oligonucleotide
  Sense strand starting at position 3072 of SEQ ID NO: 1881412
ugauuaguaaugggauuac

SEQ ID NO: 2042579 - RNA, 19 nt, Artificial Sequence
  Description of Artificial Sequence: Synthetic oligonucleotide
  Antisense strand to SEQ ID NO: 2042578
guaaucccauuacuaauca

SEQ ID NO: 2042580 - RNA, 19 nt, Artificial Sequence
  Description of Artificial Sequence: Synthetic oligonucleotide
  Sense strand starting at position 3277 of SEQ ID NO: 1881412
aagagugcucuugggauag

SEQ ID NO: 2042581 - RNA, 19 nt, Artificial Sequence
  Description of Artificial Sequence: Synthetic oligonucleotide
  Antisense strand to SEQ ID NO: 2042580
cuaucccaagagcacucuu

SEQ ID NO: 2042582 - RNA, 19 nt, Artificial Sequence
  Description of Artificial Sequence: Synthetic oligonucleotide
  Sense strand starting at position 3300 of SEQ ID NO: 1881412
aacucugugcccgaauaga

SEQ ID NO: 2042583 - RNA, 19 nt, Artificial Sequence
  Description of Artificial Sequence: Synthetic oligonucleotide
  Antisense strand to SEQ ID NO: 2042582
ucuauucgggcacagaguu

SEQ ID NO: 2042584 - RNA, 19 nt, Artificial Sequence
  Description of Artificial Sequence: Synthetic oligonucleotide
  Sense strand starting at position 3508 of SEQ ID NO: 1881412
acaucaucgcauugaaaga

SEQ ID NO: 2042585 - RNA, 19 nt, Artificial Sequence
  Description of Artificial Sequence: Synthetic oligonucleotide
  Antisense strand to SEQ ID NO: 2042584
ucuuucaaugcgaugaugu

SEQ ID NO: 2042586 - RNA, 19 nt, Artificial Sequence
  Description of Artificial Sequence: Synthetic oligonucleotide
  Sense strand starting at position 3532 of SEQ ID NO: 1881412
auuuguaauccaggcagca

SEQ ID NO: 2042587 - RNA, 19 nt, Artificial Sequence
  Description of Artificial Sequence: Synthetic oligonucleotide
  Antisense strand to SEQ ID NO: 2042586
ugcugccuggauuacaaau

SEQ ID NO: 2042588 - RNA, 19 nt, Artificial Sequence
  Description of Artificial Sequence: Synthetic oligonucleotide
  Sense strand starting at position 3534 of SEQ ID NO: 1881412
uuguaauccaggcagcaga

SEQ ID NO: 2042589 - RNA, 19 nt, Artificial Sequence
  Description of Artificial Sequence: Synthetic oligonucleotide
  Antisense strand to SEQ ID NO: 2042588
ucugcugccuggauuacaa

SEQ ID NO: 2042590 - RNA, 19 nt, Artificial Sequence
  Description of Artificial Sequence: Synthetic oligonucleotide
  Sense strand starting at position 3547 of SEQ ID NO: 1881412
agcagaaaggcuuaucugu

SEQ ID NO: 2042591 - RNA, 19 nt, Artificial Sequence
  Description of Artificial Sequence: Synthetic oligonucleotide
  Antisense strand to SEQ ID NO: 2042590
acagauaagccuuucugcu

SEQ ID NO: 2042592 - RNA, 19 nt, Artificial Sequence
  Description of Artificial Sequence: Synthetic oligonucleotide
  Sense strand starting at position 3549 of SEQ ID NO: 1881412
cagaaaggcuuaucuguaa

SEQ ID NO: 2042593 - RNA, 19 nt, Artificial Sequence
  Description of Artificial Sequence: Synthetic oligonucleotide
  Antisense strand to SEQ ID NO: 2042592
uuacagauaagccuuucug

SEQ ID NO: 2042594 - RNA, 19 nt, Artificial Sequence
  Description of Artificial Sequence: Synthetic oligonucleotide
  Sense strand starting at position 3628 of SEQ ID NO: 1881412
gagggaccuucuguaacaa

SEQ ID NO: 2042595 - RNA, 19 nt, Artificial Sequence
  Description of Artificial Sequence: Synthetic oligonucleotide
  Antisense strand to SEQ ID NO: 2042594
uuguuacagaaggucccuc

SEQ ID NO: 2042596 - RNA, 19 nt, Artificial Sequence
  Description of Artificial Sequence: Synthetic oligonucleotide
  Sense strand starting at position 3773 of SEQ ID NO: 1881412
gugaaacggaucugaaguu

SEQ ID NO: 2042597 - RNA, 19 nt, Artificial Sequence
  Description of Artificial Sequence: Synthetic oligonucleotide
  Antisense strand to SEQ ID NO: 2042596
aacuucagauccguuucac

SEQ ID NO: 2042598 - RNA, 19 nt, Artificial Sequence
  Description of Artificial Sequence: Synthetic oligonucleotide
  Sense strand starting at position 3865 of SEQ ID NO: 1881412
gguugaauugaacaucugu

SEQ ID NO: 2042599 - RNA, 19 nt, Artificial Sequence
  Description of Artificial Sequence: Synthetic oligonucleotide
  Antisense strand to SEQ ID NO: 2042598
acagauguucaauucaacc

SEQ ID NO: 2042600 - RNA, 19 nt, Artificial Sequence
  Description of Artificial Sequence: Synthetic oligonucleotide
  Sense strand starting at position 2254 of SEQ ID NO: 1881413
cgggucucccguuucuuua

SEQ ID NO: 2042601 - RNA, 19 nt, Artificial Sequence
  Description of Artificial Sequence: Synthetic oligonucleotide
  Antisense strand to SEQ ID NO: 2042600
uaaagaaacgggagacccg

SEQ ID NO: 2042602 - RNA, 19 nt, Artificial Sequence
  Description of Artificial Sequence: Synthetic oligonucleotide
  Sense strand starting at position 2303 of SEQ ID NO: 1881413
ugagcugcucuggacacau

SEQ ID NO: 2042603 - RNA, 19 nt, Artificial Sequence
  Description of Artificial Sequence: Synthetic oligonucleotide
  Antisense strand to SEQ ID NO: 2042602
auguguccagagcagcuca

SEQ ID NO: 2042604 - RNA, 19 nt, Artificial Sequence
  Description of Artificial Sequence: Synthetic oligonucleotide
  Sense strand starting at position 2314 of SEQ ID NO: 1881413
ggacacauucgcuaguguu

SEQ ID NO: 2042605 - RNA, 19 nt, Artificial Sequence
  Description of Artificial Sequence: Synthetic oligonucleotide
  Antisense strand to SEQ ID NO: 2042604
aacacuagcgaaugugucc

SEQ ID NO: 2042606 - RNA, 19 nt, Artificial Sequence
  Description of Artificial Sequence: Synthetic oligonucleotide
  Sense strand starting at position 2386 of SEQ ID NO: 1881413
agugauaaggagugauuga

SEQ ID NO: 2042607 - RNA, 19 nt, Artificial Sequence
  Description of Artificial Sequence: Synthetic oligonucleotide
  Antisense strand to SEQ ID NO: 2042606
ucaaucacuccuuaucacu

SEQ ID NO: 2042608 - RNA, 19 nt, Artificial Sequence
  Description of Artificial Sequence: Synthetic oligonucleotide
  Sense strand starting at position 2613 of SEQ ID NO: 1881413
ccagcuugauauucguaac

SEQ ID NO: 2042609 - RNA, 19 nt, Artificial Sequence
  Description of Artificial Sequence: Synthetic oligonucleotide
  Antisense strand to SEQ ID NO: 2042608
guuacgaauaucaagcugg

SEQ ID NO: 2042610 - RNA, 19 nt, Artificial Sequence
  Description of Artificial Sequence: Synthetic oligonucleotide
  Sense strand starting at position 2619 of SEQ ID NO: 1881413
ugauauucguaacucugaa

SEQ ID NO: 2042611 - RNA, 19 nt, Artificial Sequence
  Description of Artificial Sequence: Synthetic oligonucleotide
  Antisense strand to SEQ ID NO: 2042610
uucagaguuacgaauauca

SEQ ID NO: 2042612 - RNA, 19 nt, Artificial Sequence
  Description of Artificial Sequence: Synthetic oligonucleotide
  Sense strand starting at position 2673 of SEQ ID NO: 1881413
cgcguuugggaacugugua

SEQ ID NO: 2042613 - RNA, 19 nt, Artificial Sequence
  Description of Artificial Sequence: Synthetic oligonucleotide
  Antisense strand to SEQ ID NO: 2042612
uacacaguucccaaacgcg

SEQ ID NO: 2042614 - RNA, 19 nt, Artificial Sequence
  Description of Artificial Sequence: Synthetic oligonucleotide
  Sense strand starting at position 2678 of SEQ ID NO: 1881413
uugggaacuguguagcauu

SEQ ID NO: 2042615 - RNA, 19 nt, Artificial Sequence
  Description of Artificial Sequence: Synthetic oligonucleotide
  Antisense strand to SEQ ID NO: 2042614
aaugcuacacaguucccaa

SEQ ID NO: 2042616 - RNA, 19 nt, Artificial Sequence
  Description of Artificial Sequence: Synthetic oligonucleotide
  Sense strand starting at position 2693 of SEQ ID NO: 1881413
cauuguauauacgcagaaa

SEQ ID NO: 2042617 - RNA, 19 nt, Artificial Sequence
  Description of Artificial Sequence: Synthetic oligonucleotide
  Antisense strand to SEQ ID NO: 2042616
uuucugcguauauacaaug

SEQ ID NO: 2042618 - RNA, 19 nt, Artificial Sequence
  Description of Artificial Sequence: Synthetic oligonucleotide
  Sense strand starting at position 2714 of SEQ ID NO: 1881413
guacgauuacugugacuuu

SEQ ID NO: 2042619 - RNA, 19 nt, Artificial Sequence
  Description of Artificial Sequence: Synthetic oligonucleotide
  Antisense strand to SEQ ID NO: 2042618
aaagucacaguaaucguac

SEQ ID NO: 2042620 - RNA, 19 nt, Artificial Sequence
  Description of Artificial Sequence: Synthetic oligonucleotide
  Sense strand starting at position 2761 of SEQ ID NO: 1881413
uuacuugacuccuugggaa

SEQ ID NO: 2042621 - RNA, 19 nt, Artificial Sequence
  Description of Artificial Sequence: Synthetic oligonucleotide
  Antisense strand to SEQ ID NO: 2042620
uucccaaggagucaaguaa

SEQ ID NO: 2042622 - RNA, 19 nt, Artificial Sequence
  Description of Artificial Sequence: Synthetic oligonucleotide
  Sense strand starting at position 2779 of SEQ ID NO: 1881413
accaguuguaagggaggau

SEQ ID NO: 2042623 - RNA, 19 nt, Artificial Sequence
  Description of Artificial Sequence: Synthetic oligonucleotide
  Antisense strand to SEQ ID NO: 2042622
auccucccuuacaacuggu

SEQ ID NO: 2042624 - RNA, 19 nt, Artificial Sequence
  Description of Artificial Sequence: Synthetic oligonucleotide
  Sense strand starting at position 2792 of SEQ ID NO: 1881413
gaggauagcaaguguccuu

SEQ ID NO: 2042625 - RNA, 19 nt, Artificial Sequence
  Description of Artificial Sequence: Synthetic oligonucleotide
  Antisense strand to SEQ ID NO: 2042624
aaggacacuugcuauccuc

SEQ ID NO: 2042626 - RNA, 19 nt, Artificial Sequence
  Description of Artificial Sequence: Synthetic oligonucleotide
  Sense strand starting at position 2801 of SEQ ID NO: 1881413
aaguguccuuggcuucuua

SEQ ID NO: 2042627 - RNA, 19 nt, Artificial Sequence
  Description of Artificial Sequence: Synthetic oligonucleotide
  Antisense strand to SEQ ID NO: 2042626
uaagaagccaaggacacuu

SEQ ID NO: 2042628 - RNA, 19 nt, Artificial Sequence
  Description of Artificial Sequence: Synthetic oligonucleotide
  Sense strand starting at position 2856 of SEQ ID NO: 1881413
cugucagaauuaguuaaua

SEQ ID NO: 2042629 - RNA, 19 nt, Artificial Sequence
  Description of Artificial Sequence: Synthetic oligonucleotide
  Antisense strand to SEQ ID NO: 2042628
uauuaacuaauucugacag

SEQ ID NO: 2042630 - RNA, 19 nt, Artificial Sequence
  Description of Artificial Sequence: Synthetic oligonucleotide
  Sense strand starting at position 2921 of SEQ ID NO: 1881413
ucuccaauauggcuacaga

SEQ ID NO: 2042631 - RNA, 19 nt, Artificial Sequence
  Description of Artificial Sequence: Synthetic oligonucleotide
  Antisense strand to SEQ ID NO: 2042630
ucuguagccauauuggaga

SEQ ID NO: 2042632 - RNA, 19 nt, Artificial Sequence
  Description of Artificial Sequence: Synthetic oligonucleotide
  Sense strand starting at position 2964 of SEQ ID NO: 1881413
uuacuucgucugugaauaa

SEQ ID NO: 2042633 - RNA, 19 nt, Artificial Sequence
  Description of Artificial Sequence: Synthetic oligonucleotide
  Antisense strand to SEQ ID NO: 2042632
uuauucacagacgaaguaa

SEQ ID NO: 2042634 - RNA, 19 nt, Artificial Sequence
  Description of Artificial Sequence: Synthetic oligonucleotide
  Sense strand starting at position 2968 of SEQ ID NO: 1881413
uucgucugugaauaacgaa

SEQ ID NO: 2042635 - RNA, 19 nt, Artificial Sequence
  Description of Artificial Sequence: Synthetic oligonucleotide
  Antisense strand to SEQ ID NO: 2042634
uucguuauucacagacgaa

SEQ ID NO: 2042636 - RNA, 19 nt, Artificial Sequence
  Description of Artificial Sequence: Synthetic oligonucleotide
  Sense strand starting at position 3028 of SEQ ID NO: 1881413
ucaucaaguuuauucguuu

SEQ ID NO: 2042637 - RNA, 19 nt, Artificial Sequence
  Description of Artificial Sequence: Synthetic oligonucleotide
  Antisense strand to SEQ ID NO: 2042636
aaacgaauaaacuugauga

SEQ ID NO: 2042638 - RNA, 19 nt, Artificial Sequence
  Description of Artificial Sequence: Synthetic oligonucleotide
  Sense strand starting at position 3032 of SEQ ID NO: 1881413
caaguuuauucguuuacga

SEQ ID NO: 2042639 - RNA, 19 nt, Artificial Sequence
  Description of Artificial Sequence: Synthetic oligonucleotide
  Antisense strand to SEQ ID NO: 2042638
ucguaaacgaauaaacuug

SEQ ID NO: 2042640 - RNA, 19 nt, Artificial Sequence
  Description of Artificial Sequence: Synthetic oligonucleotide
  Sense strand starting at position 3034 of SEQ ID NO: 1881413
aguuuauucguuuacgaac

SEQ ID NO: 2042641 - RNA, 19 nt, Artificial Sequence
  Description of Artificial Sequence: Synthetic oligonucleotide
  Antisense strand to SEQ ID NO: 2042640
guucguaaacgaauaaacu

SEQ ID NO: 2042642 - RNA, 19 nt, Artificial Sequence
  Description of Artificial Sequence: Synthetic oligonucleotide
  Sense strand starting at position 3041 of SEQ ID NO: 1881413
ucguuuacgaacuauugga

SEQ ID NO: 2042643 - RNA, 19 nt, Artificial Sequence
  Description of Artificial Sequence: Synthetic oligonucleotide
  Antisense strand to SEQ ID NO: 2042642
uccaauaguucguaaacga

SEQ ID NO: 2042644 - RNA, 19 nt, Artificial Sequence
  Description of Artificial Sequence: Synthetic oligonucleotide
  Sense strand starting at position 3102 of SEQ ID NO: 1881413
ugaauuaaauuccuguaag

SEQ ID NO: 2042645 - RNA, 19 nt, Artificial Sequence
  Description of Artificial Sequence: Synthetic oligonucleotide
  Antisense strand to SEQ ID NO: 2042644
cuuacaggaauuuaauuca

SEQ ID NO: 2042646 - RNA, 19 nt, Artificial Sequence
  Description of Artificial Sequence: Synthetic oligonucleotide
  Sense strand starting at position 3179 of SEQ ID NO: 1881413
ggauggguuuggguagaca

SEQ ID NO: 2042647 - RNA, 19 nt, Artificial Sequence
  Description of Artificial Sequence: Synthetic oligonucleotide
  Antisense strand to SEQ ID NO: 2042646
ugucuacccaaacccaucc

SEQ ID NO: 2042648 - RNA, 19 nt, Artificial Sequence
  Description of Artificial Sequence: Synthetic oligonucleotide
  Sense strand starting at position 3182 of SEQ ID NO: 1881413
uggguuuggguagacauua

SEQ ID NO: 2042649 - RNA, 19 nt, Artificial Sequence
  Description of Artificial Sequence: Synthetic oligonucleotide
  Antisense strand to SEQ ID NO: 2042648
uaaugucuacccaaaccca

SEQ ID NO: 2042650 - RNA, 19 nt, Artificial Sequence
  Description of Artificial Sequence: Synthetic oligonucleotide
  Sense strand starting at position 3192 of SEQ ID NO: 1881413
uagacauuaguuuguugaa

SEQ ID NO: 2042651 - RNA, 19 nt, Artificial Sequence
  Description of Artificial Sequence: Synthetic oligonucleotide
  Antisense strand to SEQ ID NO: 2042650
uucaacaaacuaaugucua

SEQ ID NO: 2042652 - RNA, 19 nt, Artificial Sequence
  Description of Artificial Sequence: Synthetic oligonucleotide
  Sense strand starting at position 3193 of SEQ ID NO: 1881413
agacauuaguuuguugaac

SEQ ID NO: 2042653 - RNA, 19 nt, Artificial Sequence
  Description of Artificial Sequence: Synthetic oligonucleotide
  Antisense strand to SEQ ID NO: 2042652
guucaacaaacuaaugucu

SEQ ID NO: 2042654 - RNA, 19 nt, Artificial Sequence
  Description of Artificial Sequence: Synthetic oligonucleotide
  Sense strand starting at position 3194 of SEQ ID NO: 1881413
gacauuaguuuguugaaca

SEQ ID NO: 2042655 - RNA, 19 nt, Artificial Sequence
  Description of Artificial Sequence: Synthetic oligonucleotide
  Antisense strand to SEQ ID NO: 2042654
uguucaacaaacuaauguc

SEQ ID NO: 2042656 - RNA, 19 nt, Artificial Sequence
  Description of Artificial Sequence: Synthetic oligonucleotide
  Sense strand starting at position 3199 of SEQ ID NO: 1881413
uaguuuguugaacaaaugu

SEQ ID NO: 2042657 - RNA, 19 nt, Artificial Sequence
  Description of Artificial Sequence: Synthetic oligonucleotide
  Antisense strand to SEQ ID NO: 2042656
acauuuguucaacaaacua

SEQ ID NO: 2042658 - RNA, 19 nt, Artificial Sequence
  Description of Artificial Sequence: Synthetic oligonucleotide
  Sense strand starting at position 3206 of SEQ ID NO: 1881413
uugaacaaaugucucagau

SEQ ID NO: 2042659 - RNA, 19 nt, Artificial Sequence
  Description of Artificial Sequence: Synthetic oligonucleotide
  Antisense strand to SEQ ID NO: 2042658
aucugagacauuuguucaa

SEQ ID NO: 2042660 - RNA, 19 nt, Artificial Sequence
  Description of Artificial Sequence: Synthetic oligonucleotide
  Sense strand starting at position 3266 of SEQ ID NO: 1881413
agguaacauugaucaagcu

SEQ ID NO: 2042661 - RNA, 19 nt, Artificial Sequence
  Description of Artificial Sequence: Synthetic oligonucleotide
  Antisense strand to SEQ ID NO: 2042660
agcuugaucaauguuaccu

SEQ ID NO: 2042662 - RNA, 19 nt, Artificial Sequence
  Description of Artificial Sequence: Synthetic oligonucleotide
  Sense strand starting at position 3267 of SEQ ID NO: 1881413
gguaacauugaucaagcuu

SEQ ID NO: 2042663 - RNA, 19 nt, Artificial Sequence
  Description of Artificial Sequence: Synthetic oligonucleotide
  Antisense strand to SEQ ID NO: 2042662
aagcuugaucaauguuacc

SEQ ID NO: 2042664 - RNA, 19 nt, Artificial Sequence
  Description of Artificial Sequence: Synthetic oligonucleotide
  Sense strand starting at position 3273 of SEQ ID NO: 1881413
auugaucaagcuuguauau

SEQ ID NO: 2042665 - RNA, 19 nt, Artificial Sequence
  Description of Artificial Sequence: Synthetic oligonucleotide
  Antisense strand to SEQ ID NO: 2042664
auauacaagcuugaucaau

SEQ ID NO: 2042666 - RNA, 19 nt, Artificial Sequence
  Description of Artificial Sequence: Synthetic oligonucleotide
  Sense strand starting at position 3283 of SEQ ID NO: 1881413
cuuguauaugcaggaugua

SEQ ID NO: 2042667 - RNA, 19 nt, Artificial Sequence
  Description of Artificial Sequence: Synthetic oligonucleotide
  Antisense strand to SEQ ID NO: 2042666
uacauccugcauauacaag

SEQ ID NO: 2042668 - RNA, 19 nt, Artificial Sequence
  Description of Artificial Sequence: Synthetic oligonucleotide
  Sense strand starting at position 3295 of SEQ ID NO: 1881413
ggauguagucguuagcccu

SEQ ID NO: 2042669 - RNA, 19 nt, Artificial Sequence
  Description of Artificial Sequence: Synthetic oligonucleotide
  Antisense strand to SEQ ID NO: 2042668
agggcuaacgacuacaucc

SEQ ID NO: 2042670 - RNA, 19 nt, Artificial Sequence
  Description of Artificial Sequence: Synthetic oligonucleotide
  Sense strand starting at position 3303 of SEQ ID NO: 1881413
ucguuagcccuugacauuu

SEQ ID NO: 2042671 - RNA, 19 nt, Artificial Sequence
  Description of Artificial Sequence: Synthetic oligonucleotide
  Antisense strand to SEQ ID NO: 2042670
aaaugucaagggcuaacga

SEQ ID NO: 2042672 - RNA, 19 nt, Artificial Sequence
  Description of Artificial Sequence: Synthetic oligonucleotide
  Sense strand starting at position 3490 of SEQ ID NO: 1881413
aaagcacuaggauguuaaa

SEQ ID NO: 2042673 - RNA, 19 nt, Artificial Sequence
  Description of Artificial Sequence: Synthetic oligonucleotide
  Antisense strand to SEQ ID NO: 2042672
uuuaacauccuagugcuuu

SEQ ID NO: 2042674 - RNA, 19 nt, Artificial Sequence
  Description of Artificial Sequence: Synthetic oligonucleotide
  Sense strand starting at position 3554 of SEQ ID NO: 1881413
uucuuaacccaguguuaug

SEQ ID NO: 2042675 - RNA, 19 nt, Artificial Sequence
  Description of Artificial Sequence: Synthetic oligonucleotide
  Antisense strand to SEQ ID NO: 2042674
cauaacacuggguuaagaa

SEQ ID NO: 2042676 - RNA, 19 nt, Artificial Sequence
  Description of Artificial Sequence: Synthetic oligonucleotide
  Sense strand starting at position 3620 of SEQ ID NO: 1881413
gagugauucuaauccaguu

SEQ ID NO: 2042677 - RNA, 19 nt, Artificial Sequence
  Description of Artificial Sequence: Synthetic oligonucleotide
  Antisense strand to SEQ ID NO: 2042676
aacuggauuagaaucacuc

SEQ ID NO: 2042678 - RNA, 19 nt, Artificial Sequence
  Description of Artificial Sequence: Synthetic oligonucleotide
  Sense strand starting at position 3622 of SEQ ID NO: 1881413
gugauucuaauccaguugu

SEQ ID NO: 2042679 - RNA, 19 nt, Artificial Sequence
  Description of Artificial Sequence: Synthetic oligonucleotide
  Antisense strand to SEQ ID NO: 2042678
acaacuggauuagaaucac

SEQ ID NO: 2042680 - RNA, 19 nt, Artificial Sequence
  Description of Artificial Sequence: Synthetic oligonucleotide
  Sense strand starting at position 14 of SEQ ID NO: 1881414
uguacaaggcauuguauaa

SEQ ID NO: 2042681 - RNA, 19 nt, Artificial Sequence
  Description of Artificial Sequence: Synthetic oligonucleotide
  Antisense strand to SEQ ID NO: 2042680
uuauacaaugccuuguaca

SEQ ID NO: 2042682 - RNA, 19 nt, Artificial Sequence
  Description of Artificial Sequence: Synthetic oligonucleotide
  Sense strand starting at position 39 of SEQ ID NO: 1881414
guggcaauccucuacuuac

SEQ ID NO: 2042683 - RNA, 19 nt, Artificial Sequence
  Description of Artificial Sequence: Synthetic oligonucleotide
  Antisense strand to SEQ ID NO: 2042682
guaaguagaggauugccac

SEQ ID NO: 2042684 - RNA, 19 nt, Artificial Sequence
  Description of Artificial Sequence: Synthetic oligonucleotide
  Sense strand starting at position 199 of SEQ ID NO: 1881414
gacggaaacuccucagcau

SEQ ID NO: 2042685 - RNA, 19 nt, Artificial Sequence
  Description of Artificial Sequence: Synthetic oligonucleotide
  Antisense strand to SEQ ID NO: 2042684
augcugaggaguuuccguc

SEQ ID NO: 2042686 - RNA, 19 nt, Artificial Sequence
  Description of Artificial Sequence: Synthetic oligonucleotide
  Sense strand starting at position 200 of SEQ ID NO: 1881414
acggaaacuccucagcauu

SEQ ID NO: 2042687 - RNA, 19 nt, Artificial Sequence
  Description of Artificial Sequence: Synthetic oligonucleotide
  Antisense strand to SEQ ID NO: 2042686
aaugcugaggaguuuccgu

SEQ ID NO: 2042688 - RNA, 19 nt, Artificial Sequence
  Description of Artificial Sequence: Synthetic oligonucleotide
  Sense strand starting at position 674 of SEQ ID NO: 1881414
ccauguguccacuaauagc

SEQ ID NO: 2042689 - RNA, 19 nt, Artificial Sequence
  Description of Artificial Sequence: Synthetic oligonucleotide
  Antisense strand to SEQ ID NO: 2042688
gcuauuaguggacacaugg

SEQ ID NO: 2042690 - RNA, 19 nt, Artificial Sequence
  Description of Artificial Sequence: Synthetic oligonucleotide
  Sense strand starting at position 790 of SEQ ID NO: 1881414
augucucuaccaggacaaa

SEQ ID NO: 2042691 - RNA, 19 nt, Artificial Sequence
  Description of Artificial Sequence: Synthetic oligonucleotide
  Antisense strand to SEQ ID NO: 2042690
uuuguccugguagagacau

SEQ ID NO: 2042692 - RNA, 19 nt, Artificial Sequence
  Description of Artificial Sequence: Synthetic oligonucleotide
  Sense strand starting at position 847 of SEQ ID NO: 1881414
cccagauauucuuucgaga

SEQ ID NO: 2042693 - RNA, 19 nt, Artificial Sequence
  Description of Artificial Sequence: Synthetic oligonucleotide
  Antisense strand to SEQ ID NO: 2042692
ucucgaaagaauaucuggg

SEQ ID NO: 2042694 - RNA, 19 nt, Artificial Sequence
  Description of Artificial Sequence: Synthetic oligonucleotide
  Sense strand starting at position 852 of SEQ ID NO: 1881414
auauucuuucgagaaguug

SEQ ID NO: 2042695 - RNA, 19 nt, Artificial Sequence
  Description of Artificial Sequence: Synthetic oligonucleotide
  Antisense strand to SEQ ID NO: 2042694
caacuucucgaaagaauau

SEQ ID NO: 2042696 - RNA, 19 nt, Artificial Sequence
  Description of Artificial Sequence: Synthetic oligonucleotide
  Sense strand starting at position 875 of SEQ ID NO: 1881414
acacauuaucuagggcagu

SEQ ID NO: 2042697 - RNA, 19 nt, Artificial Sequence
  Description of Artificial Sequence: Synthetic oligonucleotide
  Antisense strand to SEQ ID NO: 2042696
acugcccuagauaaugugu

SEQ ID NO: 2042698 - RNA, 19 nt, Artificial Sequence
  Description of Artificial Sequence: Synthetic oligonucleotide
  Sense strand starting at position 1174 of SEQ ID NO: 1881414
aacacugcaugguugagau

SEQ ID NO: 2042699 - RNA, 19 nt, Artificial Sequence
  Description of Artificial Sequence: Synthetic oligonucleotide
  Antisense strand to SEQ ID NO: 2042698
aucucaaccaugcaguguu

SEQ ID NO: 2042700 - RNA, 19 nt, Artificial Sequence
  Description of Artificial Sequence: Synthetic oligonucleotide
  Sense strand starting at position 1430 of SEQ ID NO: 1881414
ccagaugaaugcuuuguaa

SEQ ID NO: 2042701 - RNA, 19 nt, Artificial Sequence
  Description of Artificial Sequence: Synthetic oligonucleotide
  Antisense strand to SEQ ID NO: 2042700
uuacaaagcauucaucugg

SEQ ID NO: 2042702 - RNA, 19 nt, Artificial Sequence
  Description of Artificial Sequence: Synthetic oligonucleotide
  Sense strand starting at position 1432 of SEQ ID NO: 1881414
agaugaaugcuuuguaauu

SEQ ID NO: 2042703 - RNA, 19 nt, Artificial Sequence
  Description of Artificial Sequence: Synthetic oligonucleotide
  Antisense strand to SEQ ID NO: 2042702
aauuacaaagcauucaucu

SEQ ID NO: 2042704 - RNA, 19 nt, Artificial Sequence
  Description of Artificial Sequence: Synthetic oligonucleotide
  Sense strand starting at position 1433 of SEQ ID NO: 1881414
gaugaaugcuuuguaauua

SEQ ID NO: 2042705 - RNA, 19 nt, Artificial Sequence
  Description of Artificial Sequence: Synthetic oligonucleotide
  Antisense strand to SEQ ID NO: 2042704
uaauuacaaagcauucauc

SEQ ID NO: 2042706 - RNA, 19 nt, Artificial Sequence
  Description of Artificial Sequence: Synthetic oligonucleotide
  Sense strand starting at position 1476 of SEQ ID NO: 1881414
agaaauguuuacuugauuc

SEQ ID NO: 2042707 - RNA, 19 nt, Artificial Sequence
  Description of Artificial Sequence: Synthetic oligonucleotide
  Antisense strand to SEQ ID NO: 2042706
gaaucaaguaaacauuucu

SEQ ID NO: 2042708 - RNA, 19 nt, Artificial Sequence
  Description of Artificial Sequence: Synthetic oligonucleotide
  Sense strand starting at position 1547 of SEQ ID NO: 1881414
ugucauuaucuguaaguaa

SEQ ID NO: 2042709 - RNA, 19 nt, Artificial Sequence
  Description of Artificial Sequence: Synthetic oligonucleotide
  Antisense strand to SEQ ID NO: 2042708
uuacuuacagauaaugaca

SEQ ID NO: 2042710 - RNA, 19 nt, Artificial Sequence
  Description of Artificial Sequence: Synthetic oligonucleotide
  Sense strand starting at position 1554 of SEQ ID NO: 1881414
aucuguaaguaaucaagaa

SEQ ID NO: 2042711 - RNA, 19 nt, Artificial Sequence
  Description of Artificial Sequence: Synthetic oligonucleotide
  Antisense strand to SEQ ID NO: 2042710
uucuugauuacuuacagau

SEQ ID NO: 2042712 - RNA, 19 nt, Artificial Sequence
  Description of Artificial Sequence: Synthetic oligonucleotide
  Sense strand starting at position 1788 of SEQ ID NO: 1881414
acaauuccugcagagaagu

SEQ ID NO: 2042713 - RNA, 19 nt, Artificial Sequence
  Description of Artificial Sequence: Synthetic oligonucleotide
  Antisense strand to SEQ ID NO: 2042712
acuucucugcaggaauugu

SEQ ID NO: 2042714 - RNA, 19 nt, Artificial Sequence
  Description of Artificial Sequence: Synthetic oligonucleotide
  Sense strand starting at position 1819 of SEQ ID NO: 1881414
agugcauaaagagguaaau

SEQ ID NO: 2042715 - RNA, 19 nt, Artificial Sequence
  Description of Artificial Sequence: Synthetic oligonucleotide
  Antisense strand to SEQ ID NO: 2042714
auuuaccucuuuaugcacu

SEQ ID NO: 2042716 - RNA, 19 nt, Artificial Sequence
  Description of Artificial Sequence: Synthetic oligonucleotide
  Sense strand starting at position 1924 of SEQ ID NO: 1881414
cacagagucccuuagcagu

SEQ ID NO: 2042717 - RNA, 19 nt, Artificial Sequence
  Description of Artificial Sequence: Synthetic oligonucleotide
  Antisense strand to SEQ ID NO: 2042716
acugcuaagggacucugug

SEQ ID NO: 2042718 - RNA, 19 nt, Artificial Sequence
  Description of Artificial Sequence: Synthetic oligonucleotide
  Sense strand starting at position 1932 of SEQ ID NO: 1881414
cccuuagcaguguaucaua

SEQ ID NO: 2042719 - RNA, 19 nt, Artificial Sequence
  Description of Artificial Sequence: Synthetic oligonucleotide
  Antisense strand to SEQ ID NO: 2042718
uaugauacacugcuaaggg

SEQ ID NO: 2042720 - RNA, 19 nt, Artificial Sequence
  Description of Artificial Sequence: Synthetic oligonucleotide
  Sense strand starting at position 2128 of SEQ ID NO: 1881414
ucaguuuggauagaauguu

SEQ ID NO: 2042721 - RNA, 19 nt, Artificial Sequence
  Description of Artificial Sequence: Synthetic oligonucleotide
  Antisense strand to SEQ ID NO: 2042720
aacauucuauccaaacuga

SEQ ID NO: 2042722 - RNA, 19 nt, Artificial Sequence
  Description of Artificial Sequence: Synthetic oligonucleotide
  Sense strand starting at position 2136 of SEQ ID NO: 1881414
gauagaauguuguuaagga

SEQ ID NO: 2042723 - RNA, 19 nt, Artificial Sequence
  Description of Artificial Sequence: Synthetic oligonucleotide
  Antisense strand to SEQ ID NO: 2042722
uccuuaacaacauucuauc

SEQ ID NO: 2042724 - RNA, 19 nt, Artificial Sequence
  Description of Artificial Sequence: Synthetic oligonucleotide
  Sense strand starting at position 2203 of SEQ ID NO: 1881414
gaaaguaaacuuugaaugu

SEQ ID NO: 2042725 - RNA, 19 nt, Artificial Sequence
  Description of Artificial Sequence: Synthetic oligonucleotide
  Antisense strand to SEQ ID NO: 2042724
acauucaaaguuuacuuuc

SEQ ID NO: 2042726 - RNA, 19 nt, Artificial Sequence
  Description of Artificial Sequence: Synthetic oligonucleotide
  Sense strand starting at position 2214 of SEQ ID NO: 1881414
uugaauguucguuaacuuu

SEQ ID NO: 2042727 - RNA, 19 nt, Artificial Sequence
  Description of Artificial Sequence: Synthetic oligonucleotide
  Antisense strand to SEQ ID NO: 2042726
aaaguuaacgaacauucaa

SEQ ID NO: 2042728 - RNA, 19 nt, Artificial Sequence
  Description of Artificial Sequence: Synthetic oligonucleotide
  Sense strand starting at position 2223 of SEQ ID NO: 1881414
cguuaacuuugaguuacaa

SEQ ID NO: 2042729 - RNA, 19 nt, Artificial Sequence
  Description of Artificial Sequence: Synthetic oligonucleotide
  Antisense strand to SEQ ID NO: 2042728
uuguaacucaaaguuaacg

SEQ ID NO: 2042730 - RNA, 19 nt, Artificial Sequence
  Description of Artificial Sequence: Synthetic oligonucleotide
  Sense strand starting at position 2342 of SEQ ID NO: 1881414
cagcgaaguagguauugau

SEQ ID NO: 2042731 - RNA, 19 nt, Artificial Sequence
  Description of Artificial Sequence: Synthetic oligonucleotide
  Antisense strand to SEQ ID NO: 2042730
aucaauaccuacuucgcug

SEQ ID NO: 2042732 - RNA, 19 nt, Artificial Sequence
  Description of Artificial Sequence: Synthetic oligonucleotide
  Sense strand starting at position 2360 of SEQ ID NO: 1881414
uacagaagacuauguaagu

SEQ ID NO: 2042733 - RNA, 19 nt, Artificial Sequence
  Description of Artificial Sequence: Synthetic oligonucleotide
  Antisense strand to SEQ ID NO: 2042732
acuuacauagucuucugua

SEQ ID NO: 2042734 - RNA, 19 nt, Artificial Sequence
  Description of Artificial Sequence: Synthetic oligonucleotide
  Sense strand starting at position 2492 of SEQ ID NO: 1881414
ccuaguucuagccaggagu

SEQ ID NO: 2042735 - RNA, 19 nt, Artificial Sequence
  Description of Artificial Sequence: Synthetic oligonucleotide
  Antisense strand to SEQ ID NO: 2042734
acuccuggcuagaacuagg

SEQ ID NO: 2042736 - RNA, 19 nt, Artificial Sequence
  Description of Artificial Sequence: Synthetic oligonucleotide
  Sense strand starting at position 2580 of SEQ ID NO: 1881414
cgagacuagcccgagauua

SEQ ID NO: 2042737 - RNA, 19 nt, Artificial Sequence
  Description of Artificial Sequence: Synthetic oligonucleotide
  Antisense strand to SEQ ID NO: 2042736
uaaucucgggcuagucucg

SEQ ID NO: 2042738 - RNA, 19 nt, Artificial Sequence
  Description of Artificial Sequence: Synthetic oligonucleotide
  Sense strand starting at position 2669 of SEQ ID NO: 1881414
agcaaacggacauguuuaa

SEQ ID NO: 2042739 - RNA, 19 nt, Artificial Sequence
  Description of Artificial Sequence: Synthetic oligonucleotide
  Antisense strand to SEQ ID NO: 2042738
uuaaacauguccguuugcu

SEQ ID NO: 2042740 - RNA, 19 nt, Artificial Sequence
  Description of Artificial Sequence: Synthetic oligonucleotide
  Sense strand starting at position 2713 of SEQ ID NO: 1881414
cgauuacagcaacacauua

SEQ ID NO: 2042741 - RNA, 19 nt, Artificial Sequence
  Description of Artificial Sequence: Synthetic oligonucleotide
  Antisense strand to SEQ ID NO: 2042740
uaauguguugcuguaaucg

SEQ ID NO: 2042742 - RNA, 19 nt, Artificial Sequence
  Description of Artificial Sequence: Synthetic oligonucleotide
  Sense strand starting at position 2726 of SEQ ID NO: 1881414
acauuauagucaguaaguc

SEQ ID NO: 2042743 - RNA, 19 nt, Artificial Sequence
  Description of Artificial Sequence: Synthetic oligonucleotide
  Antisense strand to SEQ ID NO: 2042742
gacuuacugacuauaaugu

SEQ ID NO: 2042744 - RNA, 19 nt, Artificial Sequence
  Description of Artificial Sequence: Synthetic oligonucleotide
  Sense strand starting at position 2816 of SEQ ID NO: 1881414
guauauucugaugggaaug

SEQ ID NO: 2042745 - RNA, 19 nt, Artificial Sequence
  Description of Artificial Sequence: Synthetic oligonucleotide
  Antisense strand to SEQ ID NO: 2042744
cauucccaucagaauauac

SEQ ID NO: 2042746 - RNA, 19 nt, Artificial Sequence
  Description of Artificial Sequence: Synthetic oligonucleotide
  Sense strand starting at position 2821 of SEQ ID NO: 1881414
uucugaugggaauguggau

SEQ ID NO: 2042747 - RNA, 19 nt, Artificial Sequence
  Description of Artificial Sequence: Synthetic oligonucleotide
  Antisense strand to SEQ ID NO: 2042746
auccacauucccaucagaa

SEQ ID NO: 2042748 - RNA, 19 nt, Artificial Sequence
  Description of Artificial Sequence: Synthetic oligonucleotide
  Sense strand starting at position 3231 of SEQ ID NO: 1881414
gagugauuauaucuggaua

SEQ ID NO: 2042749 - RNA, 19 nt, Artificial Sequence
  Description of Artificial Sequence: Synthetic oligonucleotide
  Antisense strand to SEQ ID NO: 2042748
uauccagauauaaucacuc

SEQ ID NO: 2042750 - RNA, 19 nt, Artificial Sequence
  Description of Artificial Sequence: Synthetic oligonucleotide
  Sense strand starting at position 3455 of SEQ ID NO: 1881414
cugugccuacagugagaaa

SEQ ID NO: 2042751 - RNA, 19 nt, Artificial Sequence
  Description of Artificial Sequence: Synthetic oligonucleotide
  Antisense strand to SEQ ID NO: 2042750
uuucucacuguaggcacag

SEQ ID NO: 2042752 - RNA, 19 nt, Artificial Sequence
  Description of Artificial Sequence: Synthetic oligonucleotide
  Sense strand starting at position 3586 of SEQ ID NO: 1881414
uuuacuuauuaugcagagu

SEQ ID NO: 2042753 - RNA, 19 nt, Artificial Sequence
  Description of Artificial Sequence: Synthetic oligonucleotide
  Antisense strand to SEQ ID NO: 2042752
acucugcauaauaaguaaa

SEQ ID NO: 2042754 - RNA, 19 nt, Artificial Sequence
  Description of Artificial Sequence: Synthetic oligonucleotide
  Sense strand starting at position 3589 of SEQ ID NO: 1881414
acuuauuaugcagagugaa

SEQ ID NO: 2042755 - RNA, 19 nt, Artificial Sequence
  Description of Artificial Sequence: Synthetic oligonucleotide
  Antisense strand to SEQ ID NO: 2042754
uucacucugcauaauaagu

SEQ ID NO: 2042756 - RNA, 19 nt, Artificial Sequence
  Description of Artificial Sequence: Synthetic oligonucleotide
  Sense strand starting at position 3592 of SEQ ID NO: 1881414
uauuaugcagagugaaaug

SEQ ID NO: 2042757 - RNA, 19 nt, Artificial Sequence
  Description of Artificial Sequence: Synthetic oligonucleotide
  Antisense strand to SEQ ID NO: 2042756
cauuucacucugcauaaua

SEQ ID NO: 2042758 - RNA, 19 nt, Artificial Sequence
  Description of Artificial Sequence: Synthetic oligonucleotide
  Sense strand starting at position 3841 of SEQ ID NO: 1881414
caaagcauuugugacagau

SEQ ID NO: 2042759 - RNA, 19 nt, Artificial Sequence
  Description of Artificial Sequence: Synthetic oligonucleotide
  Antisense strand to SEQ ID NO: 2042758
aucugucacaaaugcuuug

SEQ ID NO: 2042760 - RNA, 19 nt, Artificial Sequence
  Description of Artificial Sequence: Synthetic oligonucleotide
  Sense strand starting at position 72 of SEQ ID NO: 1881415
uuaucuugugauuacuauc

SEQ ID NO: 2042761 - RNA, 19 nt, Artificial Sequence
  Description of Artificial Sequence: Synthetic oligonucleotide
  Antisense strand to SEQ ID NO: 2042760
gauaguaaucacaagauaa

SEQ ID NO: 2042762 - RNA, 19 nt, Artificial Sequence
  Description of Artificial Sequence: Synthetic oligonucleotide
  Sense strand starting at position 81 of SEQ ID NO: 1881415
gauuacuaucaugguaugu

SEQ ID NO: 2042763 - RNA, 19 nt, Artificial Sequence
  Description of Artificial Sequence: Synthetic oligonucleotide
  Antisense strand to SEQ ID NO: 2042762
acauaccaugauaguaauc

SEQ ID NO: 2042764 - RNA, 19 nt, Artificial Sequence
  Description of Artificial Sequence: Synthetic oligonucleotide
  Sense strand starting at position 125 of SEQ ID NO: 1881415
ugaaauuuggucugcugcu

SEQ ID NO: 2042765 - RNA, 19 nt, Artificial Sequence
  Description of Artificial Sequence: Synthetic oligonucleotide
  Antisense strand to SEQ ID NO: 2042764
agcagcagaccaaauuuca

SEQ ID NO: 2042766 - RNA, 19 nt, Artificial Sequence
  Description of Artificial Sequence: Synthetic oligonucleotide
  Sense strand starting at position 160 of SEQ ID NO: 1881415
agcccuuccuggguuauuu

SEQ ID NO: 2042767 - RNA, 19 nt, Artificial Sequence
  Description of Artificial Sequence: Synthetic oligonucleotide
  Antisense strand to SEQ ID NO: 2042766
aaauaacccaggaagggcu

SEQ ID NO: 2042768 - RNA, 19 nt, Artificial Sequence
  Description of Artificial Sequence: Synthetic oligonucleotide
  Sense strand starting at position 282 of SEQ ID NO: 1881415
uggaaucuguagccuaaua

SEQ ID NO: 2042769 - RNA, 19 nt, Artificial Sequence
  Description of Artificial Sequence: Synthetic oligonucleotide
  Antisense strand to SEQ ID NO: 2042768
uauuaggcuacagauucca

SEQ ID NO: 2042770 - RNA, 19 nt, Artificial Sequence
  Description of Artificial Sequence: Synthetic oligonucleotide
  Sense strand starting at position 406 of SEQ ID NO: 1881415
auaccaugugagggugauu

SEQ ID NO: 2042771 - RNA, 19 nt, Artificial Sequence
  Description of Artificial Sequence: Synthetic oligonucleotide
  Antisense strand to SEQ ID NO: 2042770
aaucacccucacaugguau

SEQ ID NO: 2042772 - RNA, 19 nt, Artificial Sequence
  Description of Artificial Sequence: Synthetic oligonucleotide
  Sense strand starting at position 417 of SEQ ID NO: 1881415
gggugauugagugaagcaa

SEQ ID NO: 2042773 - RNA, 19 nt, Artificial Sequence
  Description of Artificial Sequence: Synthetic oligonucleotide
  Antisense strand to SEQ ID NO: 2042772
uugcuucacucaaucaccc

SEQ ID NO: 2042774 - RNA, 19 nt, Artificial Sequence
  Description of Artificial Sequence: Synthetic oligonucleotide
  Sense strand starting at position 421 of SEQ ID NO: 1881415
gauugagugaagcaaggua

SEQ ID NO: 2042775 - RNA, 19 nt, Artificial Sequence
  Description of Artificial Sequence: Synthetic oligonucleotide
  Antisense strand to SEQ ID NO: 2042774
uaccuugcuucacucaauc

SEQ ID NO: 2042776 - RNA, 19 nt, Artificial Sequence
  Description of Artificial Sequence: Synthetic oligonucleotide
  Sense strand starting at position 436 of SEQ ID NO: 1881415
gguagaaacgcucauugaa

SEQ ID NO: 2042777 - RNA, 19 nt, Artificial Sequence
  Description of Artificial Sequence: Synthetic oligonucleotide
  Antisense strand to SEQ ID NO: 2042776
uucaaugagcguuucuacc

SEQ ID NO: 2042778 - RNA, 19 nt, Artificial Sequence
  Description of Artificial Sequence: Synthetic oligonucleotide
  Sense strand starting at position 459 of SEQ ID NO: 1881415
gaguuuccugaacaagucu

SEQ ID NO: 2042779 - RNA, 19 nt, Artificial Sequence
  Description of Artificial Sequence: Synthetic oligonucleotide
  Antisense strand to SEQ ID NO: 2042778
agacuuguucaggaaacuc

SEQ ID NO: 2042780 - RNA, 19 nt, Artificial Sequence
  Description of Artificial Sequence: Synthetic oligonucleotide
  Sense strand starting at position 711 of SEQ ID NO: 1881415
ucuagagccaucugagaga

SEQ ID NO: 2042781 - RNA, 19 nt, Artificial Sequence
  Description of Artificial Sequence: Synthetic oligonucleotide
  Antisense strand to SEQ ID NO: 2042780
ucucucagauggcucuaga

SEQ ID NO: 2042782 - RNA, 19 nt, Artificial Sequence
  Description of Artificial Sequence: Synthetic oligonucleotide
  Sense strand starting at position 718 of SEQ ID NO: 1881415
ccaucugagagaugagcua

SEQ ID NO: 2042783 - RNA, 19 nt, Artificial Sequence
  Description of Artificial Sequence: Synthetic oligonucleotide
  Antisense strand to SEQ ID NO: 2042782
uagcucaucucucagaugg

SEQ ID NO: 2042784 - RNA, 19 nt, Artificial Sequence
  Description of Artificial Sequence: Synthetic oligonucleotide
  Sense strand starting at position 898 of SEQ ID NO: 1881415
cugggagcuguuuaauacu

SEQ ID NO: 2042785 - RNA, 19 nt, Artificial Sequence
  Description of Artificial Sequence: Synthetic oligonucleotide
  Antisense strand to SEQ ID NO: 2042784
aguauuaaacagcucccag

SEQ ID NO: 2042786 - RNA, 19 nt, Artificial Sequence
  Description of Artificial Sequence: Synthetic oligonucleotide
  Sense strand starting at position 942 of SEQ ID NO: 1881415
ccuauuacccaaggagauc

SEQ ID NO: 2042787 - RNA, 19 nt, Artificial Sequence
  Description of Artificial Sequence: Synthetic oligonucleotide
  Antisense strand to SEQ ID NO: 2042786
gaucuccuuggguaauagg

SEQ ID NO: 2042788 - RNA, 19 nt, Artificial Sequence
  Description of Artificial Sequence: Synthetic oligonucleotide
  Sense strand starting at position 1173 of SEQ ID NO: 1881415
ccuagaaagugcucaaaca

SEQ ID NO: 2042789 - RNA, 19 nt, Artificial Sequence
  Description of Artificial Sequence: Synthetic oligonucleotide
  Antisense strand to SEQ ID NO: 2042788
uguuugagcacuuucuagg

SEQ ID NO: 2042790 - RNA, 19 nt, Artificial Sequence
  Description of Artificial Sequence: Synthetic oligonucleotide
  Sense strand starting at position 1185 of SEQ ID NO: 1881415
ucaaacagguugucagaga

SEQ ID NO: 2042791 - RNA, 19 nt, Artificial Sequence
  Description of Artificial Sequence: Synthetic oligonucleotide
  Antisense strand to SEQ ID NO: 2042790
ucucugacaaccuguuuga

SEQ ID NO: 2042792 - RNA, 19 nt, Artificial Sequence
  Description of Artificial Sequence: Synthetic oligonucleotide
  Sense strand starting at position 1192 of SEQ ID NO: 1881415
gguugucagagaugacaag

SEQ ID NO: 2042793 - RNA, 19 nt, Artificial Sequence
  Description of Artificial Sequence: Synthetic oligonucleotide
  Antisense strand to SEQ ID NO: 2042792
cuugucaucucugacaacc

SEQ ID NO: 2042794 - RNA, 19 nt, Artificial Sequence
  Description of Artificial Sequence: Synthetic oligonucleotide
  Sense strand starting at position 1279 of SEQ ID NO: 1881415
auccaucauccggaaagca

SEQ ID NO: 2042795 - RNA, 19 nt, Artificial Sequence
  Description of Artificial Sequence: Synthetic oligonucleotide
  Antisense strand to SEQ ID NO: 2042794
ugcuuuccggaugauggau

SEQ ID NO: 2042796 - RNA, 19 nt, Artificial Sequence
  Description of Artificial Sequence: Synthetic oligonucleotide
  Sense strand starting at position 1302 of SEQ ID NO: 1881415
caugacuguuugguagaua

SEQ ID NO: 2042797 - RNA, 19 nt, Artificial Sequence
  Description of Artificial Sequence: Synthetic oligonucleotide
  Antisense strand to SEQ ID NO: 2042796
uaucuaccaaacagucaug

SEQ ID NO: 2042798 - RNA, 19 nt, Artificial Sequence
  Description of Artificial Sequence: Synthetic oligonucleotide
  Sense strand starting at position 1305 of SEQ ID NO: 1881415
gacuguuugguagauaucu

SEQ ID NO: 2042799 - RNA, 19 nt, Artificial Sequence
  Description of Artificial Sequence: Synthetic oligonucleotide
  Antisense strand to SEQ ID NO: 2042798
agauaucuaccaaacaguc

SEQ ID NO: 2042800 - RNA, 19 nt, Artificial Sequence
  Description of Artificial Sequence: Synthetic oligonucleotide
  Sense strand starting at position 1315 of SEQ ID NO: 1881415
uagauaucuuagucugggu

SEQ ID NO: 2042801 - RNA, 19 nt, Artificial Sequence
  Description of Artificial Sequence: Synthetic oligonucleotide
  Antisense strand to SEQ ID NO: 2042800
acccagacuaagauaucua

SEQ ID NO: 2042802 - RNA, 19 nt, Artificial Sequence
  Description of Artificial Sequence: Synthetic oligonucleotide
  Sense strand starting at position 1320 of SEQ ID NO: 1881415
aucuuagucuggguugaau

SEQ ID NO: 2042803 - RNA, 19 nt, Artificial Sequence
  Description of Artificial Sequence: Synthetic oligonucleotide
  Antisense strand to SEQ ID NO: 2042802
auucaacccagacuaagau

SEQ ID NO: 2042804 - RNA, 19 nt, Artificial Sequence
  Description of Artificial Sequence: Synthetic oligonucleotide
  Sense strand starting at position 1419 of SEQ ID NO: 1881415
cuaugaauauggucacugu

SEQ ID NO: 2042805 - RNA, 19 nt, Artificial Sequence
  Description of Artificial Sequence: Synthetic oligonucleotide
  Antisense strand to SEQ ID NO: 2042804
acagugaccauauucauag

SEQ ID NO: 2042806 - RNA, 19 nt, Artificial Sequence
  Description of Artificial Sequence: Synthetic oligonucleotide
  Sense strand starting at position 1427 of SEQ ID NO: 1881415
auggucacuguguaugaau

SEQ ID NO: 2042807 - RNA, 19 nt, Artificial Sequence
  Description of Artificial Sequence: Synthetic oligonucleotide
  Antisense strand to SEQ ID NO: 2042806
auucauacacagugaccau

SEQ ID NO: 2042808 - RNA, 19 nt, Artificial Sequence
  Description of Artificial Sequence: Synthetic oligonucleotide
  Sense strand starting at position 1429 of SEQ ID NO: 1881415
ggucacuguguaugaauaa

SEQ ID NO: 2042809 - RNA, 19 nt, Artificial Sequence
  Description of Artificial Sequence: Synthetic oligonucleotide
  Antisense strand to SEQ ID NO: 2042808
uuauucauacacagugacc

SEQ ID NO: 2042810 - RNA, 19 nt, Artificial Sequence
  Description of Artificial Sequence: Synthetic oligonucleotide
  Sense strand starting at position 1563 of SEQ ID NO: 1881415
uuuaguguuccauaagaac

SEQ ID NO: 2042811 - RNA, 19 nt, Artificial Sequence
  Description of Artificial Sequence: Synthetic oligonucleotide
  Antisense strand to SEQ ID NO: 2042810
guucuuauggaacacuaaa

SEQ ID NO: 2042812 - RNA, 19 nt, Artificial Sequence
  Description of Artificial Sequence: Synthetic oligonucleotide
  Sense strand starting at position 1632 of SEQ ID NO: 1881415
gcaaacaaaucaucugguu

SEQ ID NO: 2042813 - RNA, 19 nt, Artificial Sequence
  Description of Artificial Sequence: Synthetic oligonucleotide
  Antisense strand to SEQ ID NO: 2042812
aaccagaugauuuguuugc

SEQ ID NO: 2042814 - RNA, 19 nt, Artificial Sequence
  Description of Artificial Sequence: Synthetic oligonucleotide
  Sense strand starting at position 1646 of SEQ ID NO: 1881415
ugguuauuaggccacucua

SEQ ID NO: 2042815 - RNA, 19 nt, Artificial Sequence
  Description of Artificial Sequence: Synthetic oligonucleotide
  Antisense strand to SEQ ID NO: 2042814
uagaguggccuaauaacca

SEQ ID NO: 2042816 - RNA, 19 nt, Artificial Sequence
  Description of Artificial Sequence: Synthetic oligonucleotide
  Sense strand starting at position 1854 of SEQ ID NO: 1881415
accugaaaccuagguguua

SEQ ID NO: 2042817 - RNA, 19 nt, Artificial Sequence
  Description of Artificial Sequence: Synthetic oligonucleotide
  Antisense strand to SEQ ID NO: 2042816
uaacaccuagguuucaggu

SEQ ID NO: 2042818 - RNA, 19 nt, Artificial Sequence
  Description of Artificial Sequence: Synthetic oligonucleotide
  Sense strand starting at position 2302 of SEQ ID NO: 1881415
acgcgcaucgugucacaga

SEQ ID NO: 2042819 - RNA, 19 nt, Artificial Sequence
  Description of Artificial Sequence: Synthetic oligonucleotide
  Antisense strand to SEQ ID NO: 2042818
ucugugacacgaugcgcgu

SEQ ID NO: 2042820 - RNA, 19 nt, Artificial Sequence
  Description of Artificial Sequence: Synthetic oligonucleotide
  Sense strand starting at position 2459 of SEQ ID NO: 1881415
ggaucuacucggcacucua

SEQ ID NO: 2042821 - RNA, 19 nt, Artificial Sequence
  Description of Artificial Sequence: Synthetic oligonucleotide
  Antisense strand to SEQ ID NO: 2042820
uagagugccgaguagaucc

SEQ ID NO: 2042822 - RNA, 19 nt, Artificial Sequence
  Description of Artificial Sequence: Synthetic oligonucleotide
  Sense strand starting at position 2986 of SEQ ID NO: 1881415
gagggugguccgcagacaa

SEQ ID NO: 2042823 - RNA, 19 nt, Artificial Sequence
  Description of Artificial Sequence: Synthetic oligonucleotide
  Antisense strand to SEQ ID NO: 2042822
uugucugcggaccacccuc

SEQ ID NO: 2042824 - RNA, 19 nt, Artificial Sequence
  Description of Artificial Sequence: Synthetic oligonucleotide
  Sense strand starting at position 3022 of SEQ ID NO: 1881415
gcuuccucuccggagagaa

SEQ ID NO: 2042825 - RNA, 19 nt, Artificial Sequence
  Description of Artificial Sequence: Synthetic oligonucleotide
  Antisense strand to SEQ ID NO: 2042824
uucucuccggagaggaagc

SEQ ID NO: 2042826 - RNA, 19 nt, Artificial Sequence
  Description of Artificial Sequence: Synthetic oligonucleotide
  Sense strand starting at position 3054 of SEQ ID NO: 1881415
gauggacagcacuguuauc

SEQ ID NO: 2042827 - RNA, 19 nt, Artificial Sequence
  Description of Artificial Sequence: Synthetic oligonucleotide
  Antisense strand to SEQ ID NO: 2042826
gauaacagugcuguccauc

SEQ ID NO: 2042828 - RNA, 19 nt, Artificial Sequence
  Description of Artificial Sequence: Synthetic oligonucleotide
  Sense strand starting at position 3159 of SEQ ID NO: 1881415
cuacuuacgccagacagaa

SEQ ID NO: 2042829 - RNA, 19 nt, Artificial Sequence
  Description of Artificial Sequence: Synthetic oligonucleotide
  Antisense strand to SEQ ID NO: 2042828
uucugucuggcguaaguag

SEQ ID NO: 2042830 - RNA, 19 nt, Artificial Sequence
  Description of Artificial Sequence: Synthetic oligonucleotide
  Sense strand starting at position 3194 of SEQ ID NO: 1881415
ugaggaugccucugaccuu

SEQ ID NO: 2042831 - RNA, 19 nt, Artificial Sequence
  Description of Artificial Sequence: Synthetic oligonucleotide
  Antisense strand to SEQ ID NO: 2042830
aaggucagaggcauccuca

SEQ ID NO: 2042832 - RNA, 19 nt, Artificial Sequence
  Description of Artificial Sequence: Synthetic oligonucleotide
  Sense strand starting at position 3769 of SEQ ID NO: 1881415
uagggauguccagacugca

SEQ ID NO: 2042833 - RNA, 19 nt, Artificial Sequence
  Description of Artificial Sequence: Synthetic oligonucleotide
  Antisense strand to SEQ ID NO: 2042832
ugcagucuggacaucccua

SEQ ID NO: 2042834 - RNA, 19 nt, Artificial Sequence
  Description of Artificial Sequence: Synthetic oligonucleotide
  Sense strand starting at position 3795 of SEQ ID NO: 1881415
agacucaggucauuauaua

SEQ ID NO: 2042835 - RNA, 19 nt, Artificial Sequence
  Description of Artificial Sequence: Synthetic oligonucleotide
  Antisense strand to SEQ ID NO: 2042834
uauauaaugaccugagucu

SEQ ID NO: 2042836 - RNA, 19 nt, Artificial Sequence
  Description of Artificial Sequence: Synthetic oligonucleotide
  Sense strand starting at position 3845 of SEQ ID NO: 1881415
agcauacuguagucaggaa

SEQ ID NO: 2042837 - RNA, 19 nt, Artificial Sequence
  Description of Artificial Sequence: Synthetic oligonucleotide
  Antisense strand to SEQ ID NO: 2042836
uuccugacuacaguaugcu

SEQ ID NO: 2042838 - RNA, 19 nt, Artificial Sequence
  Description of Artificial Sequence: Synthetic oligonucleotide
  Sense strand starting at position 3860 of SEQ ID NO: 1881415
ggaagagcuugagcucuua

SEQ ID NO: 2042839 - RNA, 19 nt, Artificial Sequence
  Description of Artificial Sequence: Synthetic oligonucleotide
  Antisense strand to SEQ ID NO: 2042838
uaagagcucaagcucuucc

SEQ ID NO: 2042840 - RNA, 19 nt, Artificial Sequence
  Description of Artificial Sequence: Synthetic oligonucleotide
  Sense strand starting at position 181 of SEQ ID NO: 1881416
auuguauagcuagacaagu

SEQ ID NO: 2042841 - RNA, 19 nt, Artificial Sequence
  Description of Artificial Sequence: Synthetic oligonucleotide
  Antisense strand to SEQ ID NO: 2042840
acuugucuagcuauacaau

SEQ ID NO: 2042842 - RNA, 19 nt, Artificial Sequence
  Description of Artificial Sequence: Synthetic oligonucleotide
  Sense strand starting at position 228 of SEQ ID NO: 1881416
gcaccaauuccugggagga

SEQ ID NO: 2042843 - RNA, 19 nt, Artificial Sequence
  Description of Artificial Sequence: Synthetic oligonucleotide
  Antisense strand to SEQ ID NO: 2042842
uccucccaggaauuggugc

SEQ ID NO: 2042844 - RNA, 19 nt, Artificial Sequence
  Description of Artificial Sequence: Synthetic oligonucleotide
  Sense strand starting at position 311 of SEQ ID NO: 1881416
aaauuaagggagugccauu

SEQ ID NO: 2042845 - RNA, 19 nt, Artificial Sequence
  Description of Artificial Sequence: Synthetic oligonucleotide
  Antisense strand to SEQ ID NO: 2042844
aauggcacucccuuaauuu

SEQ ID NO: 2042846 - RNA, 19 nt, Artificial Sequence
  Description of Artificial Sequence: Synthetic oligonucleotide
  Sense strand starting at position 507 of SEQ ID NO: 1881416
agcuuugcugcugcugaaa

SEQ ID NO: 2042847 - RNA, 19 nt, Artificial Sequence
  Description of Artificial Sequence: Synthetic oligonucleotide
  Antisense strand to SEQ ID NO: 2042846
uuucagcagcagcaaagcu

SEQ ID NO: 2042848 - RNA, 19 nt, Artificial Sequence
  Description of Artificial Sequence: Synthetic oligonucleotide
  Sense strand starting at position 581 of SEQ ID NO: 1881416
uccugugaagaugaguuua

SEQ ID NO: 2042849 - RNA, 19 nt, Artificial Sequence
  Description of Artificial Sequence: Synthetic oligonucleotide
  Antisense strand to SEQ ID NO: 2042848
uaaacucaucuucacagga

SEQ ID NO: 2042850 - RNA, 19 nt, Artificial Sequence
  Description of Artificial Sequence: Synthetic oligonucleotide
  Sense strand starting at position 720 of SEQ ID NO: 1881416
auaucuacuuguuugaaug

SEQ ID NO: 2042851 - RNA, 19 nt, Artificial Sequence
  Description of Artificial Sequence: Synthetic oligonucleotide
  Antisense strand to SEQ ID NO: 2042850
cauucaaacaaguagauau

SEQ ID NO: 2042852 - RNA, 19 nt, Artificial Sequence
  Description of Artificial Sequence: Synthetic oligonucleotide
  Sense strand starting at position 762 of SEQ ID NO: 1881416
caggauuguuuagugaaua

SEQ ID NO: 2042853 - RNA, 19 nt, Artificial Sequence
  Description of Artificial Sequence: Synthetic oligonucleotide
  Antisense strand to SEQ ID NO: 2042852
uauucacuaaacaauccug

SEQ ID NO: 2042854 - RNA, 19 nt, Artificial Sequence
  Description of Artificial Sequence: Synthetic oligonucleotide
  Sense strand starting at position 820 of SEQ ID NO: 1881416
uccuuuacucuggaguuua

SEQ ID NO: 2042855 - RNA, 19 nt, Artificial Sequence
  Description of Artificial Sequence: Synthetic oligonucleotide
  Antisense strand to SEQ ID NO: 2042854
uaaacuccagaguaaagga

SEQ ID NO: 2042856 - RNA, 19 nt, Artificial Sequence
  Description of Artificial Sequence: Synthetic oligonucleotide
  Sense strand starting at position 840 of SEQ ID NO: 1881416
gcaaauguauacguuauuu

SEQ ID NO: 2042857 - RNA, 19 nt, Artificial Sequence
  Description of Artificial Sequence: Synthetic oligonucleotide
  Antisense strand to SEQ ID NO: 2042856
aaauaacguauacauuugc

SEQ ID NO: 2042858 - RNA, 19 nt, Artificial Sequence
  Description of Artificial Sequence: Synthetic oligonucleotide
  Sense strand starting at position 1010 of SEQ ID NO: 1881416
gaggcaaagucauugauga

SEQ ID NO: 2042859 - RNA, 19 nt, Artificial Sequence
  Description of Artificial Sequence: Synthetic oligonucleotide
  Antisense strand to SEQ ID NO: 2042858
ucaucaaugacuuugccuc

SEQ ID NO: 2042860 - RNA, 19 nt, Artificial Sequence
  Description of Artificial Sequence: Synthetic oligonucleotide
  Sense strand starting at position 1053 of SEQ ID NO: 1881416
uaaguuauuuguccaggca

SEQ ID NO: 2042861 - RNA, 19 nt, Artificial Sequence
  Description of Artificial Sequence: Synthetic oligonucleotide
  Antisense strand to SEQ ID NO: 2042860
ugccuggacaaauaacuua

SEQ ID NO: 2042862 - RNA, 19 nt, Artificial Sequence
  Description of Artificial Sequence: Synthetic oligonucleotide
  Sense strand starting at position 1156 of SEQ ID NO: 1881416
ugacauaaaucuuugguuu

SEQ ID NO: 2042863 - RNA, 19 nt, Artificial Sequence
  Description of Artificial Sequence: Synthetic oligonucleotide
  Antisense strand to SEQ ID NO: 2042862
aaaccaaagauuuauguca

SEQ ID NO: 2042864 - RNA, 19 nt, Artificial Sequence
  Description of Artificial Sequence: Synthetic oligonucleotide
  Sense strand starting at position 1163 of SEQ ID NO: 1881416
aaucuuugguuuccaagga

SEQ ID NO: 2042865 - RNA, 19 nt, Artificial Sequence
  Description of Artificial Sequence: Synthetic oligonucleotide
  Antisense strand to SEQ ID NO: 2042864
uccuuggaaaccaaagauu

SEQ ID NO: 2042866 - RNA, 19 nt, Artificial Sequence
  Description of Artificial Sequence: Synthetic oligonucleotide
  Sense strand starting at position 1557 of SEQ ID NO: 1881416
uuuauaaugucacugggau

SEQ ID NO: 2042867 - RNA, 19 nt, Artificial Sequence
  Description of Artificial Sequence: Synthetic oligonucleotide
  Antisense strand to SEQ ID NO: 2042866
aucccagugacauuauaaa

SEQ ID NO: 2042868 - RNA, 19 nt, Artificial Sequence
  Description of Artificial Sequence: Synthetic oligonucleotide
  Sense strand starting at position 1558 of SEQ ID NO: 1881416
uuauaaugucacugggaug

SEQ ID NO: 2042869 - RNA, 19 nt, Artificial Sequence
  Description of Artificial Sequence: Synthetic oligonucleotide
  Antisense strand to SEQ ID NO: 2042868
caucccagugacauuauaa

SEQ ID NO: 2042870 - RNA, 19 nt, Artificial Sequence
  Description of Artificial Sequence: Synthetic oligonucleotide
  Sense strand starting at position 1774 of SEQ ID NO: 1881416
guuauaguaccauaaacuc

SEQ ID NO: 2042871 - RNA, 19 nt, Artificial Sequence
  Description of Artificial Sequence: Synthetic oligonucleotide
  Antisense strand to SEQ ID NO: 2042870
gaguuuaugguacuauaac

SEQ ID NO: 2042872 - RNA, 19 nt, Artificial Sequence
  Description of Artificial Sequence: Synthetic oligonucleotide
  Sense strand starting at position 1803 of SEQ ID NO: 1881416
uggagauacaguugaccau

SEQ ID NO: 2042873 - RNA, 19 nt, Artificial Sequence
  Description of Artificial Sequence: Synthetic oligonucleotide
  Antisense strand to SEQ ID NO: 2042872
auggucaacuguaucucca

SEQ ID NO: 2042874 - RNA, 19 nt, Artificial Sequence
  Description of Artificial Sequence: Synthetic oligonucleotide
  Sense strand starting at position 1869 of SEQ ID NO: 1881416
acaugauaguuucucauga

SEQ ID NO: 2042875 - RNA, 19 nt, Artificial Sequence
  Description of Artificial Sequence: Synthetic oligonucleotide
  Antisense strand to SEQ ID NO: 2042874
ucaugagaaacuaucaugu

SEQ ID NO: 2042876 - RNA, 19 nt, Artificial Sequence
  Description of Artificial Sequence: Synthetic oligonucleotide
  Sense strand starting at position 1874 of SEQ ID NO: 1881416
auaguuucucaugauauuc

SEQ ID NO: 2042877 - RNA, 19 nt, Artificial Sequence
  Description of Artificial Sequence: Synthetic oligonucleotide
  Antisense strand to SEQ ID NO: 2042876
gaauaucaugagaaacuau

SEQ ID NO: 2042878 - RNA, 19 nt, Artificial Sequence
  Description of Artificial Sequence: Synthetic oligonucleotide
  Sense strand starting at position 2005 of SEQ ID NO: 1881416
aggacuugaugguucucaa

SEQ ID NO: 2042879 - RNA, 19 nt, Artificial Sequence
  Description of Artificial Sequence: Synthetic oligonucleotide
  Antisense strand to SEQ ID NO: 2042878
uugagaaccaucaaguccu

SEQ ID NO: 2042880 - RNA, 19 nt, Artificial Sequence
  Description of Artificial Sequence: Synthetic oligonucleotide
  Sense strand starting at position 2058 of SEQ ID NO: 1881416
agucuauuaguugauuaga

SEQ ID NO: 2042881 - RNA, 19 nt, Artificial Sequence
  Description of Artificial Sequence: Synthetic oligonucleotide
  Antisense strand to SEQ ID NO: 2042880
ucuaaucaacuaauagacu

SEQ ID NO: 2042882 - RNA, 19 nt, Artificial Sequence
  Description of Artificial Sequence: Synthetic oligonucleotide
  Sense strand starting at position 2060 of SEQ ID NO: 1881416
ucuauuaguugauuagacu

SEQ ID NO: 2042883 - RNA, 19 nt, Artificial Sequence
  Description of Artificial Sequence: Synthetic oligonucleotide
  Antisense strand to SEQ ID NO: 2042882
agucuaaucaacuaauaga

SEQ ID NO: 2042884 - RNA, 19 nt, Artificial Sequence
  Description of Artificial Sequence: Synthetic oligonucleotide
  Sense strand starting at position 2068 of SEQ ID NO: 1881416
uugauuagacuaugaagug

SEQ ID NO: 2042885 - RNA, 19 nt, Artificial Sequence
  Description of Artificial Sequence: Synthetic oligonucleotide
  Antisense strand to SEQ ID NO: 2042884
cacuucauagucuaaucaa

SEQ ID NO: 2042886 - RNA, 19 nt, Artificial Sequence
  Description of Artificial Sequence: Synthetic oligonucleotide
  Sense strand starting at position 2083 of SEQ ID NO: 1881416
agugaaauguauccauuau

SEQ ID NO: 2042887 - RNA, 19 nt, Artificial Sequence
  Description of Artificial Sequence: Synthetic oligonucleotide
  Antisense strand to SEQ ID NO: 2042886
auaauggauacauuucacu

SEQ ID NO: 2042888 - RNA, 19 nt, Artificial Sequence
  Description of Artificial Sequence: Synthetic oligonucleotide
  Sense strand starting at position 2108 of SEQ ID NO: 1881416
augagcagccuugaaauca

SEQ ID NO: 2042889 - RNA, 19 nt, Artificial Sequence
  Description of Artificial Sequence: Synthetic oligonucleotide
  Antisense strand to SEQ ID NO: 2042888
ugauuucaaggcugcucau

SEQ ID NO: 2042890 - RNA, 19 nt, Artificial Sequence
  Description of Artificial Sequence: Synthetic oligonucleotide
  Sense strand starting at position 2125 of SEQ ID NO: 1881416
cauacagaguucuuuggga

SEQ ID NO: 2042891 - RNA, 19 nt, Artificial Sequence
  Description of Artificial Sequence: Synthetic oligonucleotide
  Antisense strand to SEQ ID NO: 2042890
ucccaaagaacucuguaug

SEQ ID NO: 2042892 - RNA, 19 nt, Artificial Sequence
  Description of Artificial Sequence: Synthetic oligonucleotide
  Sense strand starting at position 2127 of SEQ ID NO: 1881416
uacagaguucuuugggacu

SEQ ID NO: 2042893 - RNA, 19 nt, Artificial Sequence
  Description of Artificial Sequence: Synthetic oligonucleotide
  Antisense strand to SEQ ID NO: 2042892
agucccaaagaacucugua

SEQ ID NO: 2042894 - RNA, 19 nt, Artificial Sequence
  Description of Artificial Sequence: Synthetic oligonucleotide
  Sense strand starting at position 2175 of SEQ ID NO: 1881416
gcuaauucuguggacacua

SEQ ID NO: 2042895 - RNA, 19 nt, Artificial Sequence
  Description of Artificial Sequence: Synthetic oligonucleotide
  Antisense strand to SEQ ID NO: 2042894
uaguguccacagaauuagc

SEQ ID NO: 2042896 - RNA, 19 nt, Artificial Sequence
  Description of Artificial Sequence: Synthetic oligonucleotide
  Sense strand starting at position 2469 of SEQ ID NO: 1881416
cgucuuauuucugcauuaa

SEQ ID NO: 2042897 - RNA, 19 nt, Artificial Sequence
  Description of Artificial Sequence: Synthetic oligonucleotide
  Antisense strand to SEQ ID NO: 2042896
uuaaugcagaaauaagacg

SEQ ID NO: 2042898 - RNA, 19 nt, Artificial Sequence
  Description of Artificial Sequence: Synthetic oligonucleotide
  Sense strand starting at position 2878 of SEQ ID NO: 1881416
caggauauaugaucuguua

SEQ ID NO: 2042899 - RNA, 19 nt, Artificial Sequence
  Description of Artificial Sequence: Synthetic oligonucleotide
  Antisense strand to SEQ ID NO: 2042898
uaacagaucauauauccug

SEQ ID NO: 2042900 - RNA, 19 nt, Artificial Sequence
  Description of Artificial Sequence: Synthetic oligonucleotide
  Sense strand starting at position 2885 of SEQ ID NO: 1881416
uaugaucuguuaguaggaa

SEQ ID NO: 2042901 - RNA, 19 nt, Artificial Sequence
  Description of Artificial Sequence: Synthetic oligonucleotide
  Antisense strand to SEQ ID NO: 2042900
uuccuacuaacagaucaua

SEQ ID NO: 2042902 - RNA, 19 nt, Artificial Sequence
  Description of Artificial Sequence: Synthetic oligonucleotide
  Sense strand starting at position 2934 of SEQ ID NO: 1881416
agauauugggaaggcuuua

SEQ ID NO: 2042903 - RNA, 19 nt, Artificial Sequence
  Description of Artificial Sequence: Synthetic oligonucleotide
  Antisense strand to SEQ ID NO: 2042902
uaaagccuucccaauaucu

SEQ ID NO: 2042904 - RNA, 19 nt, Artificial Sequence
  Description of Artificial Sequence: Synthetic oligonucleotide
  Sense strand starting at position 3024 of SEQ ID NO: 1881416
aguaaacucuaggcagaga

SEQ ID NO: 2042905 - RNA, 19 nt, Artificial Sequence
  Description of Artificial Sequence: Synthetic oligonucleotide
  Antisense strand to SEQ ID NO: 2042904
ucucugccuagaguuuacu

SEQ ID NO: 2042906 - RNA, 19 nt, Artificial Sequence
  Description of Artificial Sequence: Synthetic oligonucleotide
  Sense strand starting at position 3144 of SEQ ID NO: 1881416
guccuauguguuguuuagu

SEQ ID NO: 2042907 - RNA, 19 nt, Artificial Sequence
  Description of Artificial Sequence: Synthetic oligonucleotide
  Antisense strand to SEQ ID NO: 2042906
acuaaacaacacauaggac

SEQ ID NO: 2042908 - RNA, 19 nt, Artificial Sequence
  Description of Artificial Sequence: Synthetic oligonucleotide
  Sense strand starting at position 3201 of SEQ ID NO: 1881416
auaguugugguauagagag

SEQ ID NO: 2042909 - RNA, 19 nt, Artificial Sequence
  Description of Artificial Sequence: Synthetic oligonucleotide
  Antisense strand to SEQ ID NO: 2042908
cucucuauaccacaacuau

SEQ ID NO: 2042910 - RNA, 19 nt, Artificial Sequence
  Description of Artificial Sequence: Synthetic oligonucleotide
  Sense strand starting at position 3232 of SEQ ID NO: 1881416
auaagaugaucauuagcuu

SEQ ID NO: 2042911 - RNA, 19 nt, Artificial Sequence
  Description of Artificial Sequence: Synthetic oligonucleotide
  Antisense strand to SEQ ID NO: 2042910
aagcuaaugaucaucuuau

SEQ ID NO: 2042912 - RNA, 19 nt, Artificial Sequence
  Description of Artificial Sequence: Synthetic oligonucleotide
  Sense strand starting at position 3642 of SEQ ID NO: 1881416
agaguuauagcuuagagua

SEQ ID NO: 2042913 - RNA, 19 nt, Artificial Sequence
  Description of Artificial Sequence: Synthetic oligonucleotide
  Antisense strand to SEQ ID NO: 2042912
uacucuaagcuauaacucu

SEQ ID NO: 2042914 - RNA, 19 nt, Artificial Sequence
  Description of Artificial Sequence: Synthetic oligonucleotide
  Sense strand starting at position 3650 of SEQ ID NO: 1881416
agcuuagaguaucuaagaa

SEQ ID NO: 2042915 - RNA, 19 nt, Artificial Sequence
  Description of Artificial Sequence: Synthetic oligonucleotide
  Antisense strand to SEQ ID NO: 2042914
uucuuagauacucuaagcu

SEQ ID NO: 2042916 - RNA, 19 nt, Artificial Sequence
  Description of Artificial Sequence: Synthetic oligonucleotide
  Sense strand starting at position 3715 of SEQ ID NO: 1881416
gugaacaucuauccaugga

SEQ ID NO: 2042917 - RNA, 19 nt, Artificial Sequence
  Description of Artificial Sequence: Synthetic oligonucleotide
  Antisense strand to SEQ ID NO: 2042916
uccauggauagauguucac

SEQ ID NO: 2042918 - RNA, 19 nt, Artificial Sequence
  Description of Artificial Sequence: Synthetic oligonucleotide
  Sense strand starting at position 3742 of SEQ ID NO: 1881416
gaucauagauugcccugau

SEQ ID NO: 2042919 - RNA, 19 nt, Artificial Sequence
  Description of Artificial Sequence: Synthetic oligonucleotide
  Antisense strand to SEQ ID NO: 2042918
aucagggcaaucuaugauc

SEQ ID NO: 2042920 - RNA, 19 nt, Artificial Sequence
  Description of Artificial Sequence: Synthetic oligonucleotide
  Sense strand starting at position 12 of SEQ ID NO: 1881417
uuaauaaagcuucggagaa

SEQ ID NO: 2042921 - RNA, 19 nt, Artificial Sequence
  Description of Artificial Sequence: Synthetic oligonucleotide
  Antisense strand to SEQ ID NO: 2042920
uucuccgaagcuuuauuaa

SEQ ID NO: 2042922 - RNA, 19 nt, Artificial Sequence
  Description of Artificial Sequence: Synthetic oligonucleotide
  Sense strand starting at position 138 of SEQ ID NO: 1881417
agacaagugaccugaagua

SEQ ID NO: 2042923 - RNA, 19 nt, Artificial Sequence
  Description of Artificial Sequence: Synthetic oligonucleotide
  Antisense strand to SEQ ID NO: 2042922
uacuucaggucacuugucu

SEQ ID NO: 2042924 - RNA, 19 nt, Artificial Sequence
  Description of Artificial Sequence: Synthetic oligonucleotide
  Sense strand starting at position 243 of SEQ ID NO: 1881417
gagguugaauugguggauu

SEQ ID NO: 2042925 - RNA, 19 nt, Artificial Sequence
  Description of Artificial Sequence: Synthetic oligonucleotide
  Antisense strand to SEQ ID NO: 2042924
aauccaccaauucaaccuc

SEQ ID NO: 2042926 - RNA, 19 nt, Artificial Sequence
  Description of Artificial Sequence: Synthetic oligonucleotide
  Sense strand starting at position 245 of SEQ ID NO: 1881417
gguugaauugguggauuac

SEQ ID NO: 2042927 - RNA, 19 nt, Artificial Sequence
  Description of Artificial Sequence: Synthetic oligonucleotide
  Antisense strand to SEQ ID NO: 2042926
guaauccaccaauucaacc

SEQ ID NO: 2042928 - RNA, 19 nt, Artificial Sequence
  Description of Artificial Sequence: Synthetic oligonucleotide
  Sense strand starting at position 254 of SEQ ID NO: 1881417
gguggauuacgaugagacu

SEQ ID NO: 2042929 - RNA, 19 nt, Artificial Sequence
  Description of Artificial Sequence: Synthetic oligonucleotide
  Antisense strand to SEQ ID NO: 2042928
agucucaucguaauccacc

SEQ ID NO: 2042930 - RNA, 19 nt, Artificial Sequence
  Description of Artificial Sequence: Synthetic oligonucleotide
  Sense strand starting at position 272 of SEQ ID NO: 1881417
uagaguggucuggacucuu

SEQ ID NO: 2042931 - RNA, 19 nt, Artificial Sequence
  Description of Artificial Sequence: Synthetic oligonucleotide
  Antisense strand to SEQ ID NO: 2042930
aagaguccagaccacucua

SEQ ID NO: 2042932 - RNA, 19 nt, Artificial Sequence
  Description of Artificial Sequence: Synthetic oligonucleotide
  Sense strand starting at position 288 of SEQ ID NO: 1881417
cuugguuucuuacuagaaa

SEQ ID NO: 2042933 - RNA, 19 nt, Artificial Sequence
  Description of Artificial Sequence: Synthetic oligonucleotide
  Antisense strand to SEQ ID NO: 2042932
uuucuaguaagaaaccaag

SEQ ID NO: 2042934 - RNA, 19 nt, Artificial Sequence
  Description of Artificial Sequence: Synthetic oligonucleotide
  Sense strand starting at position 462 of SEQ ID NO: 1881417
aggugaagaaucgguugau

SEQ ID NO: 2042935 - RNA, 19 nt, Artificial Sequence
  Description of Artificial Sequence: Synthetic oligonucleotide
  Antisense strand to SEQ ID NO: 2042934
aucaaccgauucuucaccu

SEQ ID NO: 2042936 - RNA, 19 nt, Artificial Sequence
  Description of Artificial Sequence: Synthetic oligonucleotide
  Sense strand starting at position 465 of SEQ ID NO: 1881417
ugaagaaucgguugaucua

SEQ ID NO: 2042937 - RNA, 19 nt, Artificial Sequence
  Description of Artificial Sequence: Synthetic oligonucleotide
  Antisense strand to SEQ ID NO: 2042936
uagaucaaccgauucuuca

SEQ ID NO: 2042938 - RNA, 19 nt, Artificial Sequence
  Description of Artificial Sequence: Synthetic oligonucleotide
  Sense strand starting at position 468 of SEQ ID NO: 1881417
agaaucgguugaucuauaa

SEQ ID NO: 2042939 - RNA, 19 nt, Artificial Sequence
  Description of Artificial Sequence: Synthetic oligonucleotide
  Antisense strand to SEQ ID NO: 2042938
uuauagaucaaccgauucu

SEQ ID NO: 2042940 - RNA, 19 nt, Artificial Sequence
  Description of Artificial Sequence: Synthetic oligonucleotide
  Sense strand starting at position 574 of SEQ ID NO: 1881417
guuuaugcagagggacaua

SEQ ID NO: 2042941 - RNA, 19 nt, Artificial Sequence
  Description of Artificial Sequence: Synthetic oligonucleotide
  Antisense strand to SEQ ID NO: 2042940
uaugucccucugcauaaac

SEQ ID NO: 2042942 - RNA, 19 nt, Artificial Sequence
  Description of Artificial Sequence: Synthetic oligonucleotide
  Sense strand starting at position 685 of SEQ ID NO: 1881417
ggguuugaauaagucaaau

SEQ ID NO: 2042943 - RNA, 19 nt, Artificial Sequence
  Description of Artificial Sequence: Synthetic oligonucleotide
  Antisense strand to SEQ ID NO: 2042942
auuugacuuauucaaaccc

SEQ ID NO: 2042944 - RNA, 19 nt, Artificial Sequence
  Description of Artificial Sequence: Synthetic oligonucleotide
  Sense strand starting at position 819 of SEQ ID NO: 1881417
gaaggugggugucuagaua

SEQ ID NO: 2042945 - RNA, 19 nt, Artificial Sequence
  Description of Artificial Sequence: Synthetic oligonucleotide
  Antisense strand to SEQ ID NO: 2042944
uaucuagacacccaccuuc

SEQ ID NO: 2042946 - RNA, 19 nt, Artificial Sequence
  Description of Artificial Sequence: Synthetic oligonucleotide
  Sense strand starting at position 854 of SEQ ID NO: 1881417
ggagauaugacucgucaag

SEQ ID NO: 2042947 - RNA, 19 nt, Artificial Sequence
  Description of Artificial Sequence: Synthetic oligonucleotide
  Antisense strand to SEQ ID NO: 2042946
cuugacgagucauaucucc

SEQ ID NO: 2042948 - RNA, 19 nt, Artificial Sequence
  Description of Artificial Sequence: Synthetic oligonucleotide
  Sense strand starting at position 1218 of SEQ ID NO: 1881417
auaucauccugauugugau

SEQ ID NO: 2042949 - RNA, 19 nt, Artificial Sequence
  Description of Artificial Sequence: Synthetic oligonucleotide
  Antisense strand to SEQ ID NO: 2042948
aucacaaucaggaugauau

SEQ ID NO: 2042950 - RNA, 19 nt, Artificial Sequence
  Description of Artificial Sequence: Synthetic oligonucleotide
  Sense strand starting at position 1463 of SEQ ID NO: 1881417
uuuauuaacugagcaauga

SEQ ID NO: 2042951 - RNA, 19 nt, Artificial Sequence
  Description of Artificial Sequence: Synthetic oligonucleotide
  Antisense strand to SEQ ID NO: 2042950
ucauugcucaguuaauaaa

SEQ ID NO: 2042952 - RNA, 19 nt, Artificial Sequence
  Description of Artificial Sequence: Synthetic oligonucleotide
  Sense strand starting at position 1478 of SEQ ID NO: 1881417
augauuucuucuuugcagu

SEQ ID NO: 2042953 - RNA, 19 nt, Artificial Sequence
  Description of Artificial Sequence: Synthetic oligonucleotide
  Antisense strand to SEQ ID NO: 2042952
acugcaaagaagaaaucau

SEQ ID NO: 2042954 - RNA, 19 nt, Artificial Sequence
  Description of Artificial Sequence: Synthetic oligonucleotide
  Sense strand starting at position 1479 of SEQ ID NO: 1881417
ugauuucuucuuugcaguu

SEQ ID NO: 2042955 - RNA, 19 nt, Artificial Sequence
  Description of Artificial Sequence: Synthetic oligonucleotide
  Antisense strand to SEQ ID NO: 2042954
aacugcaaagaagaaauca

SEQ ID NO: 2042956 - RNA, 19 nt, Artificial Sequence
  Description of Artificial Sequence: Synthetic oligonucleotide
  Sense strand starting at position 1717 of SEQ ID NO: 1881417
cauguacugccagaacuga

SEQ ID NO: 2042957 - RNA, 19 nt, Artificial Sequence
  Description of Artificial Sequence: Synthetic oligonucleotide
  Antisense strand to SEQ ID NO: 2042956
ucaguucuggcaguacaug

SEQ ID NO: 2042958 - RNA, 19 nt, Artificial Sequence
  Description of Artificial Sequence: Synthetic oligonucleotide
  Sense strand starting at position 2193 of SEQ ID NO: 1881417
cuguacuuccagggagaca

SEQ ID NO: 2042959 - RNA, 19 nt, Artificial Sequence
  Description of Artificial Sequence: Synthetic oligonucleotide
  Antisense strand to SEQ ID NO: 2042958
ugucucccuggaaguacag

SEQ ID NO: 2042960 - RNA, 19 nt, Artificial Sequence
  Description of Artificial Sequence: Synthetic oligonucleotide
  Sense strand starting at position 2662 of SEQ ID NO: 1881417
uuuguuaguuauuugccaa

SEQ ID NO: 2042961 - RNA, 19 nt, Artificial Sequence
  Description of Artificial Sequence: Synthetic oligonucleotide
  Antisense strand to SEQ ID NO: 2042960
uuggcaaauaacuaacaaa

SEQ ID NO: 2042962 - RNA, 19 nt, Artificial Sequence
  Description of Artificial Sequence: Synthetic oligonucleotide
  Sense strand starting at position 2665 of SEQ ID NO: 1881417
guuaguuauuugccaauga

SEQ ID NO: 2042963 - RNA, 19 nt, Artificial Sequence
  Description of Artificial Sequence: Synthetic oligonucleotide
  Antisense strand to SEQ ID NO: 2042962
ucauuggcaaauaacuaac

SEQ ID NO: 2042964 - RNA, 19 nt, Artificial Sequence
  Description of Artificial Sequence: Synthetic oligonucleotide
  Sense strand starting at position 2669 of SEQ ID NO: 1881417
guuauuugccaaugaguuu

SEQ ID NO: 2042965 - RNA, 19 nt, Artificial Sequence
  Description of Artificial Sequence: Synthetic oligonucleotide
  Antisense strand to SEQ ID NO: 2042964
aaacucauuggcaaauaac

SEQ ID NO: 2042966 - RNA, 19 nt, Artificial Sequence
  Description of Artificial Sequence: Synthetic oligonucleotide
  Sense strand starting at position 2770 of SEQ ID NO: 1881417
guuuaaauccuugaagcag

SEQ ID NO: 2042967 - RNA, 19 nt, Artificial Sequence
  Description of Artificial Sequence: Synthetic oligonucleotide
  Antisense strand to SEQ ID NO: 2042966
cugcuucaaggauuuaaac

SEQ ID NO: 2042968 - RNA, 19 nt, Artificial Sequence
  Description of Artificial Sequence: Synthetic oligonucleotide
  Sense strand starting at position 2801 of SEQ ID NO: 1881417
uugccagcauguuuauuua

SEQ ID NO: 2042969 - RNA, 19 nt, Artificial Sequence
  Description of Artificial Sequence: Synthetic oligonucleotide
  Antisense strand to SEQ ID NO: 2042968
uaaauaaacaugcuggcaa

SEQ ID NO: 2042970 - RNA, 19 nt, Artificial Sequence
  Description of Artificial Sequence: Synthetic oligonucleotide
  Sense strand starting at position 2857 of SEQ ID NO: 1881417
guggguaagaauggaguaa

SEQ ID NO: 2042971 - RNA, 19 nt, Artificial Sequence
  Description of Artificial Sequence: Synthetic oligonucleotide
  Antisense strand to SEQ ID NO: 2042970
uuacuccauucuuacccac

SEQ ID NO: 2042972 - RNA, 19 nt, Artificial Sequence
  Description of Artificial Sequence: Synthetic oligonucleotide
  Sense strand starting at position 2985 of SEQ ID NO: 1881417
auaggaauaucacuuuggu

SEQ ID NO: 2042973 - RNA, 19 nt, Artificial Sequence
  Description of Artificial Sequence: Synthetic oligonucleotide
  Antisense strand to SEQ ID NO: 2042972
accaaagugauauuccuau

SEQ ID NO: 2042974 - RNA, 19 nt, Artificial Sequence
  Description of Artificial Sequence: Synthetic oligonucleotide
  Sense strand starting at position 2994 of SEQ ID NO: 1881417
ucacuuugguuaguaagaa

SEQ ID NO: 2042975 - RNA, 19 nt, Artificial Sequence
  Description of Artificial Sequence: Synthetic oligonucleotide
  Antisense strand to SEQ ID NO: 2042974
uucuuacuaaccaaaguga

SEQ ID NO: 2042976 - RNA, 19 nt, Artificial Sequence
  Description of Artificial Sequence: Synthetic oligonucleotide
  Sense strand starting at position 3156 of SEQ ID NO: 1881417
gcacaacaacuguaaguau

SEQ ID NO: 2042977 - RNA, 19 nt, Artificial Sequence
  Description of Artificial Sequence: Synthetic oligonucleotide
  Antisense strand to SEQ ID NO: 2042976
auacuuacaguuguugugc

SEQ ID NO: 2042978 - RNA, 19 nt, Artificial Sequence
  Description of Artificial Sequence: Synthetic oligonucleotide
  Sense strand starting at position 3294 of SEQ ID NO: 1881417
acuagcagacauuguugaa

SEQ ID NO: 2042979 - RNA, 19 nt, Artificial Sequence
  Description of Artificial Sequence: Synthetic oligonucleotide
  Antisense strand to SEQ ID NO: 2042978
uucaacaaugucugcuagu

SEQ ID NO: 2042980 - RNA, 19 nt, Artificial Sequence
  Description of Artificial Sequence: Synthetic oligonucleotide
  Sense strand starting at position 3298 of SEQ ID NO: 1881417
gcagacauuguugaagagu

SEQ ID NO: 2042981 - RNA, 19 nt, Artificial Sequence
  Description of Artificial Sequence: Synthetic oligonucleotide
  Antisense strand to SEQ ID NO: 2042980
acucuucaacaaugucugc

SEQ ID NO: 2042982 - RNA, 19 nt, Artificial Sequence
  Description of Artificial Sequence: Synthetic oligonucleotide
  Sense strand starting at position 3467 of SEQ ID NO: 1881417
ucggcauauacagagcaau

SEQ ID NO: 2042983 - RNA, 19 nt, Artificial Sequence
  Description of Artificial Sequence: Synthetic oligonucleotide
  Antisense strand to SEQ ID NO: 2042982
auugcucuguauaugccga

SEQ ID NO: 2042984 - RNA, 19 nt, Artificial Sequence
  Description of Artificial Sequence: Synthetic oligonucleotide
  Sense strand starting at position 3470 of SEQ ID NO: 1881417
gcauauacagagcaauguu

SEQ ID NO: 2042985 - RNA, 19 nt, Artificial Sequence
  Description of Artificial Sequence: Synthetic oligonucleotide
  Antisense strand to SEQ ID NO: 2042984
aacauugcucuguauaugc

SEQ ID NO: 2042986 - RNA, 19 nt, Artificial Sequence
  Description of Artificial Sequence: Synthetic oligonucleotide
  Sense strand starting at position 3473 of SEQ ID NO: 1881417
uauacagagcaauguuaga

SEQ ID NO: 2042987 - RNA, 19 nt, Artificial Sequence
  Description of Artificial Sequence: Synthetic oligonucleotide
  Antisense strand to SEQ ID NO: 2042986
ucuaacauugcucuguaua

SEQ ID NO: 2042988 - RNA, 19 nt, Artificial Sequence
  Description of Artificial Sequence: Synthetic oligonucleotide
  Sense strand starting at position 3496 of SEQ ID NO: 1881417
ggaugcugaucuguagaga

SEQ ID NO: 2042989 - RNA, 19 nt, Artificial Sequence
  Description of Artificial Sequence: Synthetic oligonucleotide
  Antisense strand to SEQ ID NO: 2042988
ucucuacagaucagcaucc

SEQ ID NO: 2042990 - RNA, 19 nt, Artificial Sequence
  Description of Artificial Sequence: Synthetic oligonucleotide
  Sense strand starting at position 3497 of SEQ ID NO: 1881417
gaugcugaucuguagagau

SEQ ID NO: 2042991 - RNA, 19 nt, Artificial Sequence
  Description of Artificial Sequence: Synthetic oligonucleotide
  Antisense strand to SEQ ID NO: 2042990
aucucuacagaucagcauc

SEQ ID NO: 2042992 - RNA, 19 nt, Artificial Sequence
  Description of Artificial Sequence: Synthetic oligonucleotide
  Sense strand starting at position 3499 of SEQ ID NO: 1881417
ugcugaucuguagagaucu

SEQ ID NO: 2042993 - RNA, 19 nt, Artificial Sequence
  Description of Artificial Sequence: Synthetic oligonucleotide
  Antisense strand to SEQ ID NO: 2042992
agaucucuacagaucagca

SEQ ID NO: 2042994 - RNA, 19 nt, Artificial Sequence
  Description of Artificial Sequence: Synthetic oligonucleotide
  Sense strand starting at position 3507 of SEQ ID NO: 1881417
uguagagaucuuugauaau

SEQ ID NO: 2042995 - RNA, 19 nt, Artificial Sequence
  Description of Artificial Sequence: Synthetic oligonucleotide
  Antisense strand to SEQ ID NO: 2042994
auuaucaaagaucucuaca

SEQ ID NO: 2042996 - RNA, 19 nt, Artificial Sequence
  Description of Artificial Sequence: Synthetic oligonucleotide
  Sense strand starting at position 3845 of SEQ ID NO: 1881417
ggcuuugaccaagaguagu

SEQ ID NO: 2042997 - RNA, 19 nt, Artificial Sequence
  Description of Artificial Sequence: Synthetic oligonucleotide
  Antisense strand to SEQ ID NO: 2042996
acuacucuuggucaaagcc

SEQ ID NO: 2042998 - RNA, 19 nt, Artificial Sequence
  Description of Artificial Sequence: Synthetic oligonucleotide
  Sense strand starting at position 3947 of SEQ ID NO: 1881417
guuaauaugguacacgaua

SEQ ID NO: 2042999 - RNA, 19 nt, Artificial Sequence
  Description of Artificial Sequence: Synthetic oligonucleotide
  Antisense strand to SEQ ID NO: 2042998
uaucguguaccauauuaac

SEQ ID NO: 2043000 - RNA, 19 nt, Artificial Sequence
  Description of Artificial Sequence: Synthetic oligonucleotide
  Sense strand starting at position 33 of SEQ ID NO: 1881418
cgaagcaugcgggaaaucu

SEQ ID NO: 2043001 - RNA, 19 nt, Artificial Sequence
  Description of Artificial Sequence: Synthetic oligonucleotide
  Antisense strand to SEQ ID NO: 2043000
agauuucccgcaugcuucg

SEQ ID NO: 2043002 - RNA, 19 nt, Artificial Sequence
  Description of Artificial Sequence: Synthetic oligonucleotide
  Sense strand starting at position 41 of SEQ ID NO: 1881418
gcgggaaaucuguggcuuu

SEQ ID NO: 2043003 - RNA, 19 nt, Artificial Sequence
  Description of Artificial Sequence: Synthetic oligonucleotide
  Antisense strand to SEQ ID NO: 2043002
aaagccacagauuucccgc

SEQ ID NO: 2043004 - RNA, 19 nt, Artificial Sequence
  Description of Artificial Sequence: Synthetic oligonucleotide
  Sense strand starting at position 44 of SEQ ID NO: 1881418
ggaaaucuguggcuuuacu

SEQ ID NO: 2043005 - RNA, 19 nt, Artificial Sequence
  Description of Artificial Sequence: Synthetic oligonucleotide
  Antisense strand to SEQ ID NO: 2043004
aguaaagccacagauuucc

SEQ ID NO: 2043006 - RNA, 19 nt, Artificial Sequence
  Description of Artificial Sequence: Synthetic oligonucleotide
  Sense strand starting at position 190 of SEQ ID NO: 1881418
ugcugauugugacuacaga

SEQ ID NO: 2043007 - RNA, 19 nt, Artificial Sequence
  Description of Artificial Sequence: Synthetic oligonucleotide
  Antisense strand to SEQ ID NO: 2043006
ucuguagucacaaucagca

SEQ ID NO: 2043008 - RNA, 19 nt, Artificial Sequence
  Description of Artificial Sequence: Synthetic oligonucleotide
  Sense strand starting at position 191 of SEQ ID NO: 1881418
gcugauugugacuacagaa

SEQ ID NO: 2043009 - RNA, 19 nt, Artificial Sequence
  Description of Artificial Sequence: Synthetic oligonucleotide
  Antisense strand to SEQ ID NO: 2043008
uucuguagucacaaucagc

SEQ ID NO: 2043010 - RNA, 19 nt, Artificial Sequence
  Description of Artificial Sequence: Synthetic oligonucleotide
  Sense strand starting at position 246 of SEQ ID NO: 1881418
gacauuauauuagcguauu

SEQ ID NO: 2043011 - RNA, 19 nt, Artificial Sequence
  Description of Artificial Sequence: Synthetic oligonucleotide
  Antisense strand to SEQ ID NO: 2043010
aauacgcuaauauaauguc

SEQ ID NO: 2043012 - RNA, 19 nt, Artificial Sequence
  Description of Artificial Sequence: Synthetic oligonucleotide
  Sense strand starting at position 710 of SEQ ID NO: 1881418
cguguauggcuugucgcua

SEQ ID NO: 2043013 - RNA, 19 nt, Artificial Sequence
  Description of Artificial Sequence: Synthetic oligonucleotide
  Antisense strand to SEQ ID NO: 2043012
uagcgacaagccauacacg

SEQ ID NO: 2043014 - RNA, 19 nt, Artificial Sequence
  Description of Artificial Sequence: Synthetic oligonucleotide
  Sense strand starting at position 836 of SEQ ID NO: 1881418
gacauuagugcuugugggu

SEQ ID NO: 2043015 - RNA, 19 nt, Artificial Sequence
  Description of Artificial Sequence: Synthetic oligonucleotide
  Antisense strand to SEQ ID NO: 2043014
acccacaagcacuaauguc

SEQ ID NO: 2043016 - RNA, 19 nt, Artificial Sequence
  Description of Artificial Sequence: Synthetic oligonucleotide
  Sense strand starting at position 1075 of SEQ ID NO: 1881418
acuccaucuuagucgaguu

SEQ ID NO: 2043017 - RNA, 19 nt, Artificial Sequence
  Description of Artificial Sequence: Synthetic oligonucleotide
  Antisense strand to SEQ ID NO: 2043016
aacucgacuaagauggagu

SEQ ID NO: 2043018 - RNA, 19 nt, Artificial Sequence
  Description of Artificial Sequence: Synthetic oligonucleotide
  Sense strand starting at position 1119 of SEQ ID NO: 1881418
ucggguuguuuccuccaaa

SEQ ID NO: 2043019 - RNA, 19 nt, Artificial Sequence
  Description of Artificial Sequence: Synthetic oligonucleotide
  Antisense strand to SEQ ID NO: 2043018
uuuggaggaaacaacccga

SEQ ID NO: 2043020 - RNA, 19 nt, Artificial Sequence
  Description of Artificial Sequence: Synthetic oligonucleotide
  Sense strand starting at position 1120 of SEQ ID NO: 1881418
cggguuguuuccuccaaau

SEQ ID NO: 2043021 - RNA, 19 nt, Artificial Sequence
  Description of Artificial Sequence: Synthetic oligonucleotide
  Antisense strand to SEQ ID NO: 2043020
auuuggaggaaacaacccg

SEQ ID NO: 2043022 - RNA, 19 nt, Artificial Sequence
  Description of Artificial Sequence: Synthetic oligonucleotide
  Sense strand starting at position 1159 of SEQ ID NO: 1881418
agcaccucugcucggaaau

SEQ ID NO: 2043023 - RNA, 19 nt, Artificial Sequence
  Description of Artificial Sequence: Synthetic oligonucleotide
  Antisense strand to SEQ ID NO: 2043022
auuuccgagcagaggugcu

SEQ ID NO: 2043024 - RNA, 19 nt, Artificial Sequence
  Description of Artificial Sequence: Synthetic oligonucleotide
  Sense strand starting at position 1160 of SEQ ID NO: 1881418
gcaccucugcucggaaaua

SEQ ID NO: 2043025 - RNA, 19 nt, Artificial Sequence
  Description of Artificial Sequence: Synthetic oligonucleotide
  Antisense strand to SEQ ID NO: 2043024
uauuuccgagcagaggugc

SEQ ID NO: 2043026 - RNA, 19 nt, Artificial Sequence
  Description of Artificial Sequence: Synthetic oligonucleotide
  Sense strand starting at position 1188 of SEQ ID NO: 1881418
aggagcucacaauauaguu

SEQ ID NO: 2043027 - RNA, 19 nt, Artificial Sequence
  Description of Artificial Sequence: Synthetic oligonucleotide
  Antisense strand to SEQ ID NO: 2043026
aacuauauugugagcuccu

SEQ ID NO: 2043028 - RNA, 19 nt, Artificial Sequence
  Description of Artificial Sequence: Synthetic oligonucleotide
  Sense strand starting at position 1216 of SEQ ID NO: 1881418
gcucacaucugcucgauuu

SEQ ID NO: 2043029 - RNA, 19 nt, Artificial Sequence
  Description of Artificial Sequence: Synthetic oligonucleotide
  Antisense strand to SEQ ID NO: 2043028
aaaucgagcagaugugagc

SEQ ID NO: 2043030 - RNA, 19 nt, Artificial Sequence
  Description of Artificial Sequence: Synthetic oligonucleotide
  Sense strand starting at position 1217 of SEQ ID NO: 1881418
cucacaucugcucgauuua

SEQ ID NO: 2043031 - RNA, 19 nt, Artificial Sequence
  Description of Artificial Sequence: Synthetic oligonucleotide
  Antisense strand to SEQ ID NO: 2043030
uaaaucgagcagaugugag

SEQ ID NO: 2043032 - RNA, 19 nt, Artificial Sequence
  Description of Artificial Sequence: Synthetic oligonucleotide
  Sense strand starting at position 1345 of SEQ ID NO: 1881418
acgccaaagcgaugaaaua

SEQ ID NO: 2043033 - RNA, 19 nt, Artificial Sequence
  Description of Artificial Sequence: Synthetic oligonucleotide
  Antisense strand to SEQ ID NO: 2043032
uauuucaucgcuuuggcgu

SEQ ID NO: 2043034 - RNA, 19 nt, Artificial Sequence
  Description of Artificial Sequence: Synthetic oligonucleotide
  Sense strand starting at position 1346 of SEQ ID NO: 1881418
cgccaaagcgaugaaauaa

SEQ ID NO: 2043035 - RNA, 19 nt, Artificial Sequence
  Description of Artificial Sequence: Synthetic oligonucleotide
  Antisense strand to SEQ ID NO: 2043034
uuauuucaucgcuuuggcg

SEQ ID NO: 2043036 - RNA, 19 nt, Artificial Sequence
  Description of Artificial Sequence: Synthetic oligonucleotide
  Sense strand starting at position 1426 of SEQ ID NO: 1881418
agguauucugagcaaugau

SEQ ID NO: 2043037 - RNA, 19 nt, Artificial Sequence
  Description of Artificial Sequence: Synthetic oligonucleotide
  Antisense strand to SEQ ID NO: 2043036
aucauugcucagaauaccu

SEQ ID NO: 2043038 - RNA, 19 nt, Artificial Sequence
  Description of Artificial Sequence: Synthetic oligonucleotide
  Sense strand starting at position 1508 of SEQ ID NO: 1881418
gcaaacauuuagcagcauu

SEQ ID NO: 2043039 - RNA, 19 nt, Artificial Sequence
  Description of Artificial Sequence: Synthetic oligonucleotide
  Antisense strand to SEQ ID NO: 2043038
aaugcugcuaaauguuugc

SEQ ID NO: 2043040 - RNA, 19 nt, Artificial Sequence
  Description of Artificial Sequence: Synthetic oligonucleotide
  Sense strand starting at position 1562 of SEQ ID NO: 1881418
agauacgcucgccaguaau

SEQ ID NO: 2043041 - RNA, 19 nt, Artificial Sequence
  Description of Artificial Sequence: Synthetic oligonucleotide
  Antisense strand to SEQ ID NO: 2043040
auuacuggcgagcguaucu

SEQ ID NO: 2043042 - RNA, 19 nt, Artificial Sequence
  Description of Artificial Sequence: Synthetic oligonucleotide
  Sense strand starting at position 1565 of SEQ ID NO: 1881418
uacgcucgccaguaauaau

SEQ ID NO: 2043043 - RNA, 19 nt, Artificial Sequence
  Description of Artificial Sequence: Synthetic oligonucleotide
  Antisense strand to SEQ ID NO: 2043042
auuauuacuggcgagcgua

SEQ ID NO: 2043044 - RNA, 19 nt, Artificial Sequence
  Description of Artificial Sequence: Synthetic oligonucleotide
  Sense strand starting at position 1941 of SEQ ID NO: 1881418
gcacguuagagugacaaua

SEQ ID NO: 2043045 - RNA, 19 nt, Artificial Sequence
  Description of Artificial Sequence: Synthetic oligonucleotide
  Antisense strand to SEQ ID NO: 2043044
uauugucacucuaacgugc

SEQ ID NO: 2043046 - RNA, 19 nt, Artificial Sequence
  Description of Artificial Sequence: Synthetic oligonucleotide
  Sense strand starting at position 2190 of SEQ ID NO: 1881418
ggagaacuguugccuuugu

SEQ ID NO: 2043047 - RNA, 19 nt, Artificial Sequence
  Description of Artificial Sequence: Synthetic oligonucleotide
  Antisense strand to SEQ ID NO: 2043046
acaaaggcaacaguucucc

SEQ ID NO: 2043048 - RNA, 19 nt, Artificial Sequence
  Description of Artificial Sequence: Synthetic oligonucleotide
  Sense strand starting at position 2191 of SEQ ID NO: 1881418
gagaacuguugccuuugua

SEQ ID NO: 2043049 - RNA, 19 nt, Artificial Sequence
  Description of Artificial Sequence: Synthetic oligonucleotide
  Antisense strand to SEQ ID NO: 2043048
uacaaaggcaacaguucuc

SEQ ID NO: 2043050 - RNA, 19 nt, Artificial Sequence
  Description of Artificial Sequence: Synthetic oligonucleotide
  Sense strand starting at position 2442 of SEQ ID NO: 1881418
ugccauuucgcgggacacu

SEQ ID NO: 2043051 - RNA, 19 nt, Artificial Sequence
  Description of Artificial Sequence: Synthetic oligonucleotide
  Antisense strand to SEQ ID NO: 2043050
agugucccgcgaaauggca

SEQ ID NO: 2043052 - RNA, 19 nt, Artificial Sequence
  Description of Artificial Sequence: Synthetic oligonucleotide
  Sense strand starting at position 2492 of SEQ ID NO: 1881418
ugcggaauaaaucaguguu

SEQ ID NO: 2043053 - RNA, 19 nt, Artificial Sequence
  Description of Artificial Sequence: Synthetic oligonucleotide
  Antisense strand to SEQ ID NO: 2043052
aacacugauuuauuccgca

SEQ ID NO: 2043054 - RNA, 19 nt, Artificial Sequence
  Description of Artificial Sequence: Synthetic oligonucleotide
  Sense strand starting at position 2733 of SEQ ID NO: 1881418
cgcuuauccgaucucguga

SEQ ID NO: 2043055 - RNA, 19 nt, Artificial Sequence
  Description of Artificial Sequence: Synthetic oligonucleotide
  Antisense strand to SEQ ID NO: 2043054
ucacgagaucggauaagcg

SEQ ID NO: 2043056 - RNA, 19 nt, Artificial Sequence
  Description of Artificial Sequence: Synthetic oligonucleotide
  Sense strand starting at position 2923 of SEQ ID NO: 1881418
uggucucugcgcuugacau

SEQ ID NO: 2043057 - RNA, 19 nt, Artificial Sequence
  Description of Artificial Sequence: Synthetic oligonucleotide
  Antisense strand to SEQ ID NO: 2043056
augucaagcgcagagacca

SEQ ID NO: 2043058 - RNA, 19 nt, Artificial Sequence
  Description of Artificial Sequence: Synthetic oligonucleotide
  Sense strand starting at position 3457 of SEQ ID NO: 1881418
caaagugaauccuuucggu

SEQ ID NO: 2043059 - RNA, 19 nt, Artificial Sequence
  Description of Artificial Sequence: Synthetic oligonucleotide
  Antisense strand to SEQ ID NO: 2043058
accgaaaggauucacuuug

SEQ ID NO: 2043060 - RNA, 19 nt, Artificial Sequence
  Description of Artificial Sequence: Synthetic oligonucleotide
  Sense strand starting at position 3505 of SEQ ID NO: 1881418
ggauucaggucagggagaa

SEQ ID NO: 2043061 - RNA, 19 nt, Artificial Sequence
  Description of Artificial Sequence: Synthetic oligonucleotide
  Antisense strand to SEQ ID NO: 2043060
uucucccugaccugaaucc

SEQ ID NO: 2043062 - RNA, 19 nt, Artificial Sequence
  Description of Artificial Sequence: Synthetic oligonucleotide
  Sense strand starting at position 3557 of SEQ ID NO: 1881418
gcuucugcuacucgaggaa

SEQ ID NO: 2043063 - RNA, 19 nt, Artificial Sequence
  Description of Artificial Sequence: Synthetic oligonucleotide
  Antisense strand to SEQ ID NO: 2043062
uuccucgaguagcagaagc

SEQ ID NO: 2043064 - RNA, 19 nt, Artificial Sequence
  Description of Artificial Sequence: Synthetic oligonucleotide
  Sense strand starting at position 3560 of SEQ ID NO: 1881418
ucugcuacucgaggaaaug

SEQ ID NO: 2043065 - RNA, 19 nt, Artificial Sequence
  Description of Artificial Sequence: Synthetic oligonucleotide
  Antisense strand to SEQ ID NO: 2043064
cauuuccucgaguagcaga

SEQ ID NO: 2043066 - RNA, 19 nt, Artificial Sequence
  Description of Artificial Sequence: Synthetic oligonucleotide
  Sense strand starting at position 3561 of SEQ ID NO: 1881418
cugcuacucgaggaaauga

SEQ ID NO: 2043067 - RNA, 19 nt, Artificial Sequence
  Description of Artificial Sequence: Synthetic oligonucleotide
  Antisense strand to SEQ ID NO: 2043066
ucauuuccucgaguagcag

SEQ ID NO: 2043068 - RNA, 19 nt, Artificial Sequence
  Description of Artificial Sequence: Synthetic oligonucleotide
  Sense strand starting at position 3576 of SEQ ID NO: 1881418
augaaacgccauuaauauu

SEQ ID NO: 2043069 - RNA, 19 nt, Artificial Sequence
  Description of Artificial Sequence: Synthetic oligonucleotide
  Antisense strand to SEQ ID NO: 2043068
aauauuaauggcguuucau

SEQ ID NO: 2043070 - RNA, 19 nt, Artificial Sequence
  Description of Artificial Sequence: Synthetic oligonucleotide
  Sense strand starting at position 3612 of SEQ ID NO: 1881418
uccuguugaaucgagaacu

SEQ ID NO: 2043071 - RNA, 19 nt, Artificial Sequence
  Description of Artificial Sequence: Synthetic oligonucleotide
  Antisense strand to SEQ ID NO: 2043070
aguucucgauucaacagga

SEQ ID NO: 2043072 - RNA, 19 nt, Artificial Sequence
  Description of Artificial Sequence: Synthetic oligonucleotide
  Sense strand starting at position 3640 of SEQ ID NO: 1881418
aauaauuuguagugagguc

SEQ ID NO: 2043073 - RNA, 19 nt, Artificial Sequence
  Description of Artificial Sequence: Synthetic oligonucleotide
  Antisense strand to SEQ ID NO: 2043072
gaccucacuacaaauuauu

SEQ ID NO: 2043074 - RNA, 19 nt, Artificial Sequence
  Description of Artificial Sequence: Synthetic oligonucleotide
  Sense strand starting at position 3653 of SEQ ID NO: 1881418
gaggucuauugccauuuga

SEQ ID NO: 2043075 - RNA, 19 nt, Artificial Sequence
  Description of Artificial Sequence: Synthetic oligonucleotide
  Antisense strand to SEQ ID NO: 2043074
ucaaauggcaauagaccuc

SEQ ID NO: 2043076 - RNA, 19 nt, Artificial Sequence
  Description of Artificial Sequence: Synthetic oligonucleotide
  Sense strand starting at position 3660 of SEQ ID NO: 1881418
auugccauuugagaaauau

SEQ ID NO: 2043077 - RNA, 19 nt, Artificial Sequence
  Description of Artificial Sequence: Synthetic oligonucleotide
  Antisense strand to SEQ ID NO: 2043076
auauuucucaaauggcaau

SEQ ID NO: 2043078 - RNA, 19 nt, Artificial Sequence
  Description of Artificial Sequence: Synthetic oligonucleotide
  Sense strand starting at position 3788 of SEQ ID NO: 1881418
guuguuggucguguuuguu

SEQ ID NO: 2043079 - RNA, 19 nt, Artificial Sequence
  Description of Artificial Sequence: Synthetic oligonucleotide
  Antisense strand to SEQ ID NO: 2043078
aacaaacacgaccaacaac

SEQ ID NO: 2043080 - RNA, 19 nt, Artificial Sequence
  Description of Artificial Sequence: Synthetic oligonucleotide
  Sense strand starting at position 511 of SEQ ID NO: 1881419
agagauagucucuggcuug

SEQ ID NO: 2043081 - RNA, 19 nt, Artificial Sequence
  Description of Artificial Sequence: Synthetic oligonucleotide
  Antisense strand to SEQ ID NO: 2043080
caagccagagacuaucucu

SEQ ID NO: 2043082 - RNA, 19 nt, Artificial Sequence
  Description of Artificial Sequence: Synthetic oligonucleotide
  Sense strand starting at position 514 of SEQ ID NO: 1881419
gauagucucuggcuugaac

SEQ ID NO: 2043083 - RNA, 19 nt, Artificial Sequence
  Description of Artificial Sequence: Synthetic oligonucleotide
  Antisense strand to SEQ ID NO: 2043082
guucaagccagagacuauc

SEQ ID NO: 2043084 - RNA, 19 nt, Artificial Sequence
  Description of Artificial Sequence: Synthetic oligonucleotide
  Sense strand starting at position 521 of SEQ ID NO: 1881419
ucuggcuugaacugaaagu

SEQ ID NO: 2043085 - RNA, 19 nt, Artificial Sequence
  Description of Artificial Sequence: Synthetic oligonucleotide
  Antisense strand to SEQ ID NO: 2043084
acuuucaguucaagccaga

SEQ ID NO: 2043086 - RNA, 19 nt, Artificial Sequence
  Description of Artificial Sequence: Synthetic oligonucleotide
  Sense strand starting at position 611 of SEQ ID NO: 1881419
ugagaaaguucauuggcag

SEQ ID NO: 2043087 - RNA, 19 nt, Artificial Sequence
  Description of Artificial Sequence: Synthetic oligonucleotide
  Antisense strand to SEQ ID NO: 2043086
cugccaaugaacuuucuca

SEQ ID NO: 2043088 - RNA, 19 nt, Artificial Sequence
  Description of Artificial Sequence: Synthetic oligonucleotide
  Sense strand starting at position 618 of SEQ ID NO: 1881419
guucauuggcaguaguaag

SEQ ID NO: 2043089 - RNA, 19 nt, Artificial Sequence
  Description of Artificial Sequence: Synthetic oligonucleotide
  Antisense strand to SEQ ID NO: 2043088
cuuacuacugccaaugaac

SEQ ID NO: 2043090 - RNA, 19 nt, Artificial Sequence
  Description of Artificial Sequence: Synthetic oligonucleotide
  Sense strand starting at position 701 of SEQ ID NO: 1881419
ugcagcaacuuaucucaga

SEQ ID NO: 2043091 - RNA, 19 nt, Artificial Sequence
  Description of Artificial Sequence: Synthetic oligonucleotide
  Antisense strand to SEQ ID NO: 2043090
ucugagauaaguugcugca

SEQ ID NO: 2043092 - RNA, 19 nt, Artificial Sequence
  Description of Artificial Sequence: Synthetic oligonucleotide
  Sense strand starting at position 702 of SEQ ID NO: 1881419
gcagcaacuuaucucagaa

SEQ ID NO: 2043093 - RNA, 19 nt, Artificial Sequence
  Description of Artificial Sequence: Synthetic oligonucleotide
  Antisense strand to SEQ ID NO: 2043092
uucugagauaaguugcugc

SEQ ID NO: 2043094 - RNA, 19 nt, Artificial Sequence
  Description of Artificial Sequence: Synthetic oligonucleotide
  Sense strand starting at position 824 of SEQ ID NO: 1881419
ccagcuaauuucucgacuu

SEQ ID NO: 2043095 - RNA, 19 nt, Artificial Sequence
  Description of Artificial Sequence: Synthetic oligonucleotide
  Antisense strand to SEQ ID NO: 2043094
aagucgagaaauuagcugg

SEQ ID NO: 2043096 - RNA, 19 nt, Artificial Sequence
  Description of Artificial Sequence: Synthetic oligonucleotide
  Sense strand starting at position 1033 of SEQ ID NO: 1881419
gcaaguacucaguaguuga

SEQ ID NO: 2043097 - RNA, 19 nt, Artificial Sequence
  Description of Artificial Sequence: Synthetic oligonucleotide
  Antisense strand to SEQ ID NO: 2043096
ucaacuacugaguacuugc

SEQ ID NO: 2043098 - RNA, 19 nt, Artificial Sequence
  Description of Artificial Sequence: Synthetic oligonucleotide
  Sense strand starting at position 1037 of SEQ ID NO: 1881419
guacucaguaguugaauga

SEQ ID NO: 2043099 - RNA, 19 nt, Artificial Sequence
  Description of Artificial Sequence: Synthetic oligonucleotide
  Antisense strand to SEQ ID NO: 2043098
ucauucaacuacugaguac

SEQ ID NO: 2043100 - RNA, 19 nt, Artificial Sequence
  Description of Artificial Sequence: Synthetic oligonucleotide
  Sense strand starting at position 1041 of SEQ ID NO: 1881419
ucaguaguugaaugaauga

SEQ ID NO: 2043101 - RNA, 19 nt, Artificial Sequence
  Description of Artificial Sequence: Synthetic oligonucleotide
  Antisense strand to SEQ ID NO: 2043100
ucauucauucaacuacuga

SEQ ID NO: 2043102 - RNA, 19 nt, Artificial Sequence
  Description of Artificial Sequence: Synthetic oligonucleotide
  Sense strand starting at position 1060 of SEQ ID NO: 1881419
augaaucaaggcugaaguu

SEQ ID NO: 2043103 - RNA, 19 nt, Artificial Sequence
  Description of Artificial Sequence: Synthetic oligonucleotide
  Antisense strand to SEQ ID NO: 2043102
aacuucagccuugauucau

SEQ ID NO: 2043104 - RNA, 19 nt, Artificial Sequence
  Description of Artificial Sequence: Synthetic oligonucleotide
  Sense strand starting at position 1061 of SEQ ID NO: 1881419
ugaaucaaggcugaaguuu

SEQ ID NO: 2043105 - RNA, 19 nt, Artificial Sequence
  Description of Artificial Sequence: Synthetic oligonucleotide
  Antisense strand to SEQ ID NO: 2043104
aaacuucagccuugauuca

SEQ ID NO: 2043106 - RNA, 19 nt, Artificial Sequence
  Description of Artificial Sequence: Synthetic oligonucleotide
  Sense strand starting at position 1459 of SEQ ID NO: 1881419
augaaccuugcucauugaa

SEQ ID NO: 2043107 - RNA, 19 nt, Artificial Sequence
  Description of Artificial Sequence: Synthetic oligonucleotide
  Antisense strand to SEQ ID NO: 2043106
uucaaugagcaagguucau

SEQ ID NO: 2043108 - RNA, 19 nt, Artificial Sequence
  Description of Artificial Sequence: Synthetic oligonucleotide
  Sense strand starting at position 1521 of SEQ ID NO: 1881419
gugcuaaauacaugggauc

SEQ ID NO: 2043109 - RNA, 19 nt, Artificial Sequence
  Description of Artificial Sequence: Synthetic oligonucleotide
  Antisense strand to SEQ ID NO: 2043108
gaucccauguauuuagcac

SEQ ID NO: 2043110 - RNA, 19 nt, Artificial Sequence
  Description of Artificial Sequence: Synthetic oligonucleotide
  Sense strand starting at position 1656 of SEQ ID NO: 1881419
gccaguuuccuuuauauac

SEQ ID NO: 2043111 - RNA, 19 nt, Artificial Sequence
  Description of Artificial Sequence: Synthetic oligonucleotide
  Antisense strand to SEQ ID NO: 2043110
guauauaaaggaaacuggc

SEQ ID NO: 2043112 - RNA, 19 nt, Artificial Sequence
  Description of Artificial Sequence: Synthetic oligonucleotide
  Sense strand starting at position 1794 of SEQ ID NO: 1881419
uccaauaugucaucaugug

SEQ ID NO: 2043113 - RNA, 19 nt, Artificial Sequence
  Description of Artificial Sequence: Synthetic oligonucleotide
  Antisense strand to SEQ ID NO: 2043112
cacaugaugacauauugga

SEQ ID NO: 2043114 - RNA, 19 nt, Artificial Sequence
  Description of Artificial Sequence: Synthetic oligonucleotide
  Sense strand starting at position 1847 of SEQ ID NO: 1881419
gagggugauuuauaaguca

SEQ ID NO: 2043115 - RNA, 19 nt, Artificial Sequence
  Description of Artificial Sequence: Synthetic oligonucleotide
  Antisense strand to SEQ ID NO: 2043114
ugacuuauaaaucacccuc

SEQ ID NO: 2043116 - RNA, 19 nt, Artificial Sequence
  Description of Artificial Sequence: Synthetic oligonucleotide
  Sense strand starting at position 1880 of SEQ ID NO: 1881419
gugagaauugcauaaguuc

SEQ ID NO: 2043117 - RNA, 19 nt, Artificial Sequence
  Description of Artificial Sequence: Synthetic oligonucleotide
  Antisense strand to SEQ ID NO: 2043116
gaacuuaugcaauucucac

SEQ ID NO: 2043118 - RNA, 19 nt, Artificial Sequence
  Description of Artificial Sequence: Synthetic oligonucleotide
  Sense strand starting at position 2053 of SEQ ID NO: 1881419
acccuuccggucugaaaca

SEQ ID NO: 2043119 - RNA, 19 nt, Artificial Sequence
  Description of Artificial Sequence: Synthetic oligonucleotide
  Antisense strand to SEQ ID NO: 2043118
uguuucagaccggaagggu

SEQ ID NO: 2043120 - RNA, 19 nt, Artificial Sequence
  Description of Artificial Sequence: Synthetic oligonucleotide
  Sense strand starting at position 2073 of SEQ ID NO: 1881419
cggccaguucuuguucgau

SEQ ID NO: 2043121 - RNA, 19 nt, Artificial Sequence
  Description of Artificial Sequence: Synthetic oligonucleotide
  Antisense strand to SEQ ID NO: 2043120
aucgaacaagaacuggccg

SEQ ID NO: 2043122 - RNA, 19 nt, Artificial Sequence
  Description of Artificial Sequence: Synthetic oligonucleotide
  Sense strand starting at position 2081 of SEQ ID NO: 1881419
ucuuguucgauguaaggaa

SEQ ID NO: 2043123 - RNA, 19 nt, Artificial Sequence
  Description of Artificial Sequence: Synthetic oligonucleotide
  Antisense strand to SEQ ID NO: 2043122
uuccuuacaucgaacaaga

SEQ ID NO: 2043124 - RNA, 19 nt, Artificial Sequence
  Description of Artificial Sequence: Synthetic oligonucleotide
  Sense strand starting at position 2085 of SEQ ID NO: 1881419
guucgauguaaggaacacu

SEQ ID NO: 2043125 - RNA, 19 nt, Artificial Sequence
  Description of Artificial Sequence: Synthetic oligonucleotide
  Antisense strand to SEQ ID NO: 2043124
aguguuccuuacaucgaac

SEQ ID NO: 2043126 - RNA, 19 nt, Artificial Sequence
  Description of Artificial Sequence: Synthetic oligonucleotide
  Sense strand starting at position 2168 of SEQ ID NO: 1881419
agauguggcuuccuagaga

SEQ ID NO: 2043127 - RNA, 19 nt, Artificial Sequence
  Description of Artificial Sequence: Synthetic oligonucleotide
  Antisense strand to SEQ ID NO: 2043126
ucucuaggaagccacaucu

SEQ ID NO: 2043128 - RNA, 19 nt, Artificial Sequence
  Description of Artificial Sequence: Synthetic oligonucleotide
  Sense strand starting at position 2179 of SEQ ID NO: 1881419
ccuagagauccgggaugag

SEQ ID NO: 2043129 - RNA, 19 nt, Artificial Sequence
  Description of Artificial Sequence: Synthetic oligonucleotide
  Antisense strand to SEQ ID NO: 2043128
cucaucccggaucucuagg

SEQ ID NO: 2043130 - RNA, 19 nt, Artificial Sequence
  Description of Artificial Sequence: Synthetic oligonucleotide
  Sense strand starting at position 2600 of SEQ ID NO: 1881419
cucugcuggcgcuuugaga

SEQ ID NO: 2043131 - RNA, 19 nt, Artificial Sequence
  Description of Artificial Sequence: Synthetic oligonucleotide
  Antisense strand to SEQ ID NO: 2043130
ucucaaagcgccagcagag

SEQ ID NO: 2043132 - RNA, 19 nt, Artificial Sequence
  Description of Artificial Sequence: Synthetic oligonucleotide
  Sense strand starting at position 2701 of SEQ ID NO: 1881419
uucugagguuucccuauua

SEQ ID NO: 2043133 - RNA, 19 nt, Artificial Sequence
  Description of Artificial Sequence: Synthetic oligonucleotide
  Antisense strand to SEQ ID NO: 2043132
uaauagggaaaccucagaa

SEQ ID NO: 2043134 - RNA, 19 nt, Artificial Sequence
  Description of Artificial Sequence: Synthetic oligonucleotide
  Sense strand starting at position 2903 of SEQ ID NO: 1881419
guacuaagaccguaaacuc

SEQ ID NO: 2043135 - RNA, 19 nt, Artificial Sequence
  Description of Artificial Sequence: Synthetic oligonucleotide
  Antisense strand to SEQ ID NO: 2043134
gaguuuacggucuuaguac

SEQ ID NO: 2043136 - RNA, 19 nt, Artificial Sequence
  Description of Artificial Sequence: Synthetic oligonucleotide
  Sense strand starting at position 2922 of SEQ ID NO: 1881419
agaauaaaugcuggccuuu

SEQ ID NO: 2043137 - RNA, 19 nt, Artificial Sequence
  Description of Artificial Sequence: Synthetic oligonucleotide
  Antisense strand to SEQ ID NO: 2043136
aaaggccagcauuuauucu

SEQ ID NO: 2043138 - RNA, 19 nt, Artificial Sequence
  Description of Artificial Sequence: Synthetic oligonucleotide
  Sense strand starting at position 3036 of SEQ ID NO: 1881419
ugcagcuuaccagauuaaa

SEQ ID NO: 2043139 - RNA, 19 nt, Artificial Sequence
  Description of Artificial Sequence: Synthetic oligonucleotide
  Antisense strand to SEQ ID NO: 2043138
uuuaaucugguaagcugca

SEQ ID NO: 2043140 - RNA, 19 nt, Artificial Sequence
  Description of Artificial Sequence: Synthetic oligonucleotide
  Sense strand starting at position 3063 of SEQ ID NO: 1881419
guggacugguguuuggaaa

SEQ ID NO: 2043141 - RNA, 19 nt, Artificial Sequence
  Description of Artificial Sequence: Synthetic oligonucleotide
  Antisense strand to SEQ ID NO: 2043140
uuuccaaacaccaguccac

SEQ ID NO: 2043142 - RNA, 19 nt, Artificial Sequence
  Description of Artificial Sequence: Synthetic oligonucleotide
  Sense strand starting at position 3121 of SEQ ID NO: 1881419
aguuucuucguagauggaa

SEQ ID NO: 2043143 - RNA, 19 nt, Artificial Sequence
  Description of Artificial Sequence: Synthetic oligonucleotide
  Antisense strand to SEQ ID NO: 2043142
uuccaucuacgaagaaacu

SEQ ID NO: 2043144 - RNA, 19 nt, Artificial Sequence
  Description of Artificial Sequence: Synthetic oligonucleotide
  Sense strand starting at position 3123 of SEQ ID NO: 1881419
uuucuucguagauggaauu

SEQ ID NO: 2043145 - RNA, 19 nt, Artificial Sequence
  Description of Artificial Sequence: Synthetic oligonucleotide
  Antisense strand to SEQ ID NO: 2043144
aauuccaucuacgaagaaa

SEQ ID NO: 2043146 - RNA, 19 nt, Artificial Sequence
  Description of Artificial Sequence: Synthetic oligonucleotide
  Sense strand starting at position 3415 of SEQ ID NO: 1881419
cccuacuucguuuagaacu

SEQ ID NO: 2043147 - RNA, 19 nt, Artificial Sequence
  Description of Artificial Sequence: Synthetic oligonucleotide
  Antisense strand to SEQ ID NO: 2043146
aguucuaaacgaaguaggg

SEQ ID NO: 2043148 - RNA, 19 nt, Artificial Sequence
  Description of Artificial Sequence: Synthetic oligonucleotide
  Sense strand starting at position 3425 of SEQ ID NO: 1881419
uuuagaacuuaagucaugu

SEQ ID NO: 2043149 - RNA, 19 nt, Artificial Sequence
  Description of Artificial Sequence: Synthetic oligonucleotide
  Antisense strand to SEQ ID NO: 2043148
acaugacuuaaguucuaaa

SEQ ID NO: 2043150 - RNA, 19 nt, Artificial Sequence
  Description of Artificial Sequence: Synthetic oligonucleotide
  Sense strand starting at position 3435 of SEQ ID NO: 1881419
aagucauguguuuagacua

SEQ ID NO: 2043151 - RNA, 19 nt, Artificial Sequence
  Description of Artificial Sequence: Synthetic oligonucleotide
  Antisense strand to SEQ ID NO: 2043150
uagucuaaacacaugacuu

SEQ ID NO: 2043152 - RNA, 19 nt, Artificial Sequence
  Description of Artificial Sequence: Synthetic oligonucleotide
  Sense strand starting at position 3440 of SEQ ID NO: 1881419
auguguuuagacuauuaga

SEQ ID NO: 2043153 - RNA, 19 nt, Artificial Sequence
  Description of Artificial Sequence: Synthetic oligonucleotide
  Antisense strand to SEQ ID NO: 2043152
ucuaauagucuaaacacau

SEQ ID NO: 2043154 - RNA, 19 nt, Artificial Sequence
  Description of Artificial Sequence: Synthetic oligonucleotide
  Sense strand starting at position 3645 of SEQ ID NO: 1881419
uggcauauauagucacaaa

SEQ ID NO: 2043155 - RNA, 19 nt, Artificial Sequence
  Description of Artificial Sequence: Synthetic oligonucleotide
  Antisense strand to SEQ ID NO: 2043154
uuugugacuauauaugcca

SEQ ID NO: 2043156 - RNA, 19 nt, Artificial Sequence
  Description of Artificial Sequence: Synthetic oligonucleotide
  Sense strand starting at position 3919 of SEQ ID NO: 1881419
cuguuucugaugggaguau

SEQ ID NO: 2043157 - RNA, 19 nt, Artificial Sequence
  Description of Artificial Sequence: Synthetic oligonucleotide
  Antisense strand to SEQ ID NO: 2043156
auacucccaucagaaacag

SEQ ID NO: 2043158 - RNA, 19 nt, Artificial Sequence
  Description of Artificial Sequence: Synthetic oligonucleotide
  Sense strand starting at position 3963 of SEQ ID NO: 1881419
ugaggucaaauuggcaaua

SEQ ID NO: 2043159 - RNA, 19 nt, Artificial Sequence
  Description of Artificial Sequence: Synthetic oligonucleotide
  Antisense strand to SEQ ID NO: 2043158
uauugccaauuugaccuca

SEQ ID NO: 2043160 - RNA, 19 nt, Artificial Sequence
  Description of Artificial Sequence: Synthetic oligonucleotide
  Sense strand starting at position 98 of SEQ ID NO: 1881420
cgaagaccagauuagcauu

SEQ ID NO: 2043161 - RNA, 19 nt, Artificial Sequence
  Description of Artificial Sequence: Synthetic oligonucleotide
  Antisense strand to SEQ ID NO: 2043160
aaugcuaaucuggucuucg

SEQ ID NO: 2043162 - RNA, 19 nt, Artificial Sequence
  Description of Artificial Sequence: Synthetic oligonucleotide
  Sense strand starting at position 399 of SEQ ID NO: 1881420
ucuaguaaugucgauaaac

SEQ ID NO: 2043163 - RNA, 19 nt, Artificial Sequence
  Description of Artificial Sequence: Synthetic oligonucleotide
  Antisense strand to SEQ ID NO: 2043162
guuuaucgacauuacuaga

SEQ ID NO: 2043164 - RNA, 19 nt, Artificial Sequence
  Description of Artificial Sequence: Synthetic oligonucleotide
  Sense strand starting at position 401 of SEQ ID NO: 1881420
uaguaaugucgauaaacuc

SEQ ID NO: 2043165 - RNA, 19 nt, Artificial Sequence
  Description of Artificial Sequence: Synthetic oligonucleotide
  Antisense strand to SEQ ID NO: 2043164
gaguuuaucgacauuacua

SEQ ID NO: 2043166 - RNA, 19 nt, Artificial Sequence
  Description of Artificial Sequence: Synthetic oligonucleotide
  Sense strand starting at position 1159 of SEQ ID NO: 1881420
ccaccaguugcauaagaaa

SEQ ID NO: 2043167 - RNA, 19 nt, Artificial Sequence
  Description of Artificial Sequence: Synthetic oligonucleotide
  Antisense strand to SEQ ID NO: 2043166
uuucuuaugcaacuggugg

SEQ ID NO: 2043168 - RNA, 19 nt, Artificial Sequence
  Description of Artificial Sequence: Synthetic oligonucleotide
  Sense strand starting at position 1187 of SEQ ID NO: 1881420
uuaauuacugucggaugga

SEQ ID NO: 2043169 - RNA, 19 nt, Artificial Sequence
  Description of Artificial Sequence: Synthetic oligonucleotide
  Antisense strand to SEQ ID NO: 2043168
uccauccgacaguaauuaa

SEQ ID NO: 2043170 - RNA, 19 nt, Artificial Sequence
  Description of Artificial Sequence: Synthetic oligonucleotide
  Sense strand starting at position 1337 of SEQ ID NO: 1881420
cucgcuaguccgucuggaa

SEQ ID NO: 2043171 - RNA, 19 nt, Artificial Sequence
  Description of Artificial Sequence: Synthetic oligonucleotide
  Antisense strand to SEQ ID NO: 2043170
uuccagacggacuagcgag

SEQ ID NO: 2043172 - RNA, 19 nt, Artificial Sequence
  Description of Artificial Sequence: Synthetic oligonucleotide
  Sense strand starting at position 1416 of SEQ ID NO: 1881420
cucccauaugcucagaagu

SEQ ID NO: 2043173 - RNA, 19 nt, Artificial Sequence
  Description of Artificial Sequence: Synthetic oligonucleotide
  Antisense strand to SEQ ID NO: 2043172
acuucugagcauaugggag

SEQ ID NO: 2043174 - RNA, 19 nt, Artificial Sequence
  Description of Artificial Sequence: Synthetic oligonucleotide
  Sense strand starting at position 1427 of SEQ ID NO: 1881420
ucagaaguugcaggaugaa

SEQ ID NO: 2043175 - RNA, 19 nt, Artificial Sequence
  Description of Artificial Sequence: Synthetic oligonucleotide
  Antisense strand to SEQ ID NO: 2043174
uucauccugcaacuucuga

SEQ ID NO: 2043176 - RNA, 19 nt, Artificial Sequence
  Description of Artificial Sequence: Synthetic oligonucleotide
  Sense strand starting at position 2074 of SEQ ID NO: 1881420
auugaacuuccugaggcua

SEQ ID NO: 2043177 - RNA, 19 nt, Artificial Sequence
  Description of Artificial Sequence: Synthetic oligonucleotide
  Antisense strand to SEQ ID NO: 2043176
uagccucaggaaguucaau

SEQ ID NO: 2043178 - RNA, 19 nt, Artificial Sequence
  Description of Artificial Sequence: Synthetic oligonucleotide
  Sense strand starting at position 2316 of SEQ ID NO: 1881420
uugagaagcagagguuuga

SEQ ID NO: 2043179 - RNA, 19 nt, Artificial Sequence
  Description of Artificial Sequence: Synthetic oligonucleotide
  Antisense strand to SEQ ID NO: 2043178
ucaaaccucugcuucucaa

SEQ ID NO: 2043180 - RNA, 19 nt, Artificial Sequence
  Description of Artificial Sequence: Synthetic oligonucleotide
  Sense strand starting at position 2320 of SEQ ID NO: 1881420
gaagcagagguuugaggau

SEQ ID NO: 2043181 - RNA, 19 nt, Artificial Sequence
  Description of Artificial Sequence: Synthetic oligonucleotide
  Antisense strand to SEQ ID NO: 2043180
auccucaaaccucugcuuc

SEQ ID NO: 2043182 - RNA, 19 nt, Artificial Sequence
  Description of Artificial Sequence: Synthetic oligonucleotide
  Sense strand starting at position 2350 of SEQ ID NO: 1881420
agcgguucgagguugcaau

SEQ ID NO: 2043183 - RNA, 19 nt, Artificial Sequence
  Description of Artificial Sequence: Synthetic oligonucleotide
  Antisense strand to SEQ ID NO: 2043182
auugcaaccucgaaccgcu

SEQ ID NO: 2043184 - RNA, 19 nt, Artificial Sequence
  Description of Artificial Sequence: Synthetic oligonucleotide
  Sense strand starting at position 2415 of SEQ ID NO: 1881420
accucaucaucucugggaa

SEQ ID NO: 2043185 - RNA, 19 nt, Artificial Sequence
  Description of Artificial Sequence: Synthetic oligonucleotide
  Antisense strand to SEQ ID NO: 2043184
uucccagagaugaugaggu

SEQ ID NO: 2043186 - RNA, 19 nt, Artificial Sequence
  Description of Artificial Sequence: Synthetic oligonucleotide
  Sense strand starting at position 2416 of SEQ ID NO: 1881420
ccucaucaucucugggaaa

SEQ ID NO: 2043187 - RNA, 19 nt, Artificial Sequence
  Description of Artificial Sequence: Synthetic oligonucleotide
  Antisense strand to SEQ ID NO: 2043186
uuucccagagaugaugagg

SEQ ID NO: 2043188 - RNA, 19 nt, Artificial Sequence
  Description of Artificial Sequence: Synthetic oligonucleotide
  Sense strand starting at position 2538 of SEQ ID NO: 1881420
agugacuacucucuccaca

SEQ ID NO: 2043189 - RNA, 19 nt, Artificial Sequence
  Description of Artificial Sequence: Synthetic oligonucleotide
  Antisense strand to SEQ ID NO: 2043188
uguggagagaguagucacu

SEQ ID NO: 2043190 - RNA, 19 nt, Artificial Sequence
  Description of Artificial Sequence: Synthetic oligonucleotide
  Sense strand starting at position 2576 of SEQ ID NO: 1881420
aguaacugauucucugaaa

SEQ ID NO: 2043191 - RNA, 19 nt, Artificial Sequence
  Description of Artificial Sequence: Synthetic oligonucleotide
  Antisense strand to SEQ ID NO: 2043190
uuucagagaaucaguuacu

SEQ ID NO: 2043192 - RNA, 19 nt, Artificial Sequence
  Description of Artificial Sequence: Synthetic oligonucleotide
  Sense strand starting at position 2577 of SEQ ID NO: 1881420
guaacugauucucugaaac

SEQ ID NO: 2043193 - RNA, 19 nt, Artificial Sequence
  Description of Artificial Sequence: Synthetic oligonucleotide
  Antisense strand to SEQ ID NO: 2043192
guuucagagaaucaguuac

SEQ ID NO: 2043194 - RNA, 19 nt, Artificial Sequence
  Description of Artificial Sequence: Synthetic oligonucleotide
  Sense strand starting at position 2626 of SEQ ID NO: 1881420
ggaaguaaauaagugcaau

SEQ ID NO: 2043195 - RNA, 19 nt, Artificial Sequence
  Description of Artificial Sequence: Synthetic oligonucleotide
  Antisense strand to SEQ ID NO: 2043194
auugcacuuauuuacuucc

SEQ ID NO: 2043196 - RNA, 19 nt, Artificial Sequence
  Description of Artificial Sequence: Synthetic oligonucleotide
  Sense strand starting at position 2640 of SEQ ID NO: 1881420
gcaauuagacuugagcaug

SEQ ID NO: 2043197 - RNA, 19 nt, Artificial Sequence
  Description of Artificial Sequence: Synthetic oligonucleotide
  Antisense strand to SEQ ID NO: 2043196
caugcucaagucuaauugc

SEQ ID NO: 2043198 - RNA, 19 nt, Artificial Sequence
  Description of Artificial Sequence: Synthetic oligonucleotide
  Sense strand starting at position 2645 of SEQ ID NO: 1881420
uagacuugagcaugaccua

SEQ ID NO: 2043199 - RNA, 19 nt, Artificial Sequence
  Description of Artificial Sequence: Synthetic oligonucleotide
  Antisense strand to SEQ ID NO: 2043198
uaggucaugcucaagucua

SEQ ID NO: 2043200 - RNA, 19 nt, Artificial Sequence
  Description of Artificial Sequence: Synthetic oligonucleotide
  Sense strand starting at position 2661 of SEQ ID NO: 1881420
cuagaaacuuguucuuaug

SEQ ID NO: 2043201 - RNA, 19 nt, Artificial Sequence
  Description of Artificial Sequence: Synthetic oligonucleotide
  Antisense strand to SEQ ID NO: 2043200
cauaagaacaaguuucuag

SEQ ID NO: 2043202 - RNA, 19 nt, Artificial Sequence
  Description of Artificial Sequence: Synthetic oligonucleotide
  Sense strand starting at position 2663 of SEQ ID NO: 1881420
agaaacuuguucuuaugau

SEQ ID NO: 2043203 - RNA, 19 nt, Artificial Sequence
  Description of Artificial Sequence: Synthetic oligonucleotide
  Antisense strand to SEQ ID NO: 2043202
aucauaagaacaaguuucu

SEQ ID NO: 2043204 - RNA, 19 nt, Artificial Sequence
  Description of Artificial Sequence: Synthetic oligonucleotide
  Sense strand starting at position 2669 of SEQ ID NO: 1881420
uuguucuuaugauucugaa

SEQ ID NO: 2043205 - RNA, 19 nt, Artificial Sequence
  Description of Artificial Sequence: Synthetic oligonucleotide
  Antisense strand to SEQ ID NO: 2043204
uucagaaucauaagaacaa

SEQ ID NO: 2043206 - RNA, 19 nt, Artificial Sequence
  Description of Artificial Sequence: Synthetic oligonucleotide
  Sense strand starting at position 2801 of SEQ ID NO: 1881420
ugaugaaaucuuuauuagc

SEQ ID NO: 2043207 - RNA, 19 nt, Artificial Sequence
  Description of Artificial Sequence: Synthetic oligonucleotide
  Antisense strand to SEQ ID NO: 2043206
gcuaauaaagauuucauca

SEQ ID NO: 2043208 - RNA, 19 nt, Artificial Sequence
  Description of Artificial Sequence: Synthetic oligonucleotide
  Sense strand starting at position 2810 of SEQ ID NO: 1881420
cuuuauuagcuauggaaua

SEQ ID NO: 2043209 - RNA, 19 nt, Artificial Sequence
  Description of Artificial Sequence: Synthetic oligonucleotide
  Antisense strand to SEQ ID NO: 2043208
uauuccauagcuaauaaag

SEQ ID NO: 2043210 - RNA, 19 nt, Artificial Sequence
  Description of Artificial Sequence: Synthetic oligonucleotide
  Sense strand starting at position 2853 of SEQ ID NO: 1881420
ccacaaauugcuggauaua

SEQ ID NO: 2043211 - RNA, 19 nt, Artificial Sequence
  Description of Artificial Sequence: Synthetic oligonucleotide
  Antisense strand to SEQ ID NO: 2043210
uauauccagcaauuugugg

SEQ ID NO: 2043212 - RNA, 19 nt, Artificial Sequence
  Description of Artificial Sequence: Synthetic oligonucleotide
  Sense strand starting at position 2935 of SEQ ID NO: 1881420
aaguauuaguaggcacuaa

SEQ ID NO: 2043213 - RNA, 19 nt, Artificial Sequence
  Description of Artificial Sequence: Synthetic oligonucleotide
  Antisense strand to SEQ ID NO: 2043212
uuagugccuacuaauacuu

SEQ ID NO: 2043214 - RNA, 19 nt, Artificial Sequence
  Description of Artificial Sequence: Synthetic oligonucleotide
  Sense strand starting at position 2978 of SEQ ID NO: 1881420
gaaacuagauuagugguca

SEQ ID NO: 2043215 - RNA, 19 nt, Artificial Sequence
  Description of Artificial Sequence: Synthetic oligonucleotide
  Antisense strand to SEQ ID NO: 2043214
ugaccacuaaucuaguuuc

SEQ ID NO: 2043216 - RNA, 19 nt, Artificial Sequence
  Description of Artificial Sequence: Synthetic oligonucleotide
  Sense strand starting at position 2982 of SEQ ID NO: 1881420
cuagauuaguggucaccaa

SEQ ID NO: 2043217 - RNA, 19 nt, Artificial Sequence
  Description of Artificial Sequence: Synthetic oligonucleotide
  Antisense strand to SEQ ID NO: 2043216
uuggugaccacuaaucuag

SEQ ID NO: 2043218 - RNA, 19 nt, Artificial Sequence
  Description of Artificial Sequence: Synthetic oligonucleotide
  Sense strand starting at position 2983 of SEQ ID NO: 1881420
uagauuaguggucaccaau

SEQ ID NO: 2043219 - RNA, 19 nt, Artificial Sequence
  Description of Artificial Sequence: Synthetic oligonucleotide
  Antisense strand to SEQ ID NO: 2043218
auuggugaccacuaaucua

SEQ ID NO: 2043220 - RNA, 19 nt, Artificial Sequence
  Description of Artificial Sequence: Synthetic oligonucleotide
  Sense strand starting at position 2986 of SEQ ID NO: 1881420
auuaguggucaccaauaau

SEQ ID NO: 2043221 - RNA, 19 nt, Artificial Sequence
  Description of Artificial Sequence: Synthetic oligonucleotide
  Antisense strand to SEQ ID NO: 2043220
auuauuggugaccacuaau

SEQ ID NO: 2043222 - RNA, 19 nt, Artificial Sequence
  Description of Artificial Sequence: Synthetic oligonucleotide
  Sense strand starting at position 3165 of SEQ ID NO: 1881420
uuuguuccuggucagauga

SEQ ID NO: 2043223 - RNA, 19 nt, Artificial Sequence
  Description of Artificial Sequence: Synthetic oligonucleotide
  Antisense strand to SEQ ID NO: 2043222
ucaucugaccaggaacaaa

SEQ ID NO: 2043224 - RNA, 19 nt, Artificial Sequence
  Description of Artificial Sequence: Synthetic oligonucleotide
  Sense strand starting at position 3219 of SEQ ID NO: 1881420
gucuauuccuguguaauuu

SEQ ID NO: 2043225 - RNA, 19 nt, Artificial Sequence
  Description of Artificial Sequence: Synthetic oligonucleotide
  Antisense strand to SEQ ID NO: 2043224
aaauuacacaggaauagac

SEQ ID NO: 2043226 - RNA, 19 nt, Artificial Sequence
  Description of Artificial Sequence: Synthetic oligonucleotide
  Sense strand starting at position 3318 of SEQ ID NO: 1881420
cuguauuaacuagaguaau

SEQ ID NO: 2043227 - RNA, 19 nt, Artificial Sequence
  Description of Artificial Sequence: Synthetic oligonucleotide
  Antisense strand to SEQ ID NO: 2043226
auuacucuaguuaauacag

SEQ ID NO: 2043228 - RNA, 19 nt, Artificial Sequence
  Description of Artificial Sequence: Synthetic oligonucleotide
  Sense strand starting at position 3324 of SEQ ID NO: 1881420
uaacuagaguaauugugau

SEQ ID NO: 2043229 - RNA, 19 nt, Artificial Sequence
  Description of Artificial Sequence: Synthetic oligonucleotide
  Antisense strand to SEQ ID NO: 2043228
aucacaauuacucuaguua

SEQ ID NO: 2043230 - RNA, 19 nt, Artificial Sequence
  Description of Artificial Sequence: Synthetic oligonucleotide
  Sense strand starting at position 3418 of SEQ ID NO: 1881420
caguuugaggcucacagua

SEQ ID NO: 2043231 - RNA, 19 nt, Artificial Sequence
  Description of Artificial Sequence: Synthetic oligonucleotide
  Antisense strand to SEQ ID NO: 2043230
uacugugagccucaaacug

SEQ ID NO: 2043232 - RNA, 19 nt, Artificial Sequence
  Description of Artificial Sequence: Synthetic oligonucleotide
  Sense strand starting at position 3423 of SEQ ID NO: 1881420
ugaggcucacaguaguauu

SEQ ID NO: 2043233 - RNA, 19 nt, Artificial Sequence
  Description of Artificial Sequence: Synthetic oligonucleotide
  Antisense strand to SEQ ID NO: 2043232
aauacuacugugagccuca

SEQ ID NO: 2043234 - RNA, 19 nt, Artificial Sequence
  Description of Artificial Sequence: Synthetic oligonucleotide
  Sense strand starting at position 3534 of SEQ ID NO: 1881420
uauggugauugguuuaaga

SEQ ID NO: 2043235 - RNA, 19 nt, Artificial Sequence
  Description of Artificial Sequence: Synthetic oligonucleotide
  Antisense strand to SEQ ID NO: 2043234
ucuuaaaccaaucaccaua

SEQ ID NO: 2043236 - RNA, 19 nt, Artificial Sequence
  Description of Artificial Sequence: Synthetic oligonucleotide
  Sense strand starting at position 3536 of SEQ ID NO: 1881420
uggugauugguuuaagagu

SEQ ID NO: 2043237 - RNA, 19 nt, Artificial Sequence
  Description of Artificial Sequence: Synthetic oligonucleotide
  Antisense strand to SEQ ID NO: 2043236
acucuuaaaccaaucacca

SEQ ID NO: 2043238 - RNA, 19 nt, Artificial Sequence
  Description of Artificial Sequence: Synthetic oligonucleotide
  Sense strand starting at position 3941 of SEQ ID NO: 1881420
caagauaugccaugaaagu

SEQ ID NO: 2043239 - RNA, 19 nt, Artificial Sequence
  Description of Artificial Sequence: Synthetic oligonucleotide
  Antisense strand to SEQ ID NO: 2043238
acuuucauggcauaucuug

SEQ ID NO: 2043240 - RNA, 19 nt, Artificial Sequence
  Description of Artificial Sequence: Synthetic oligonucleotide
  Sense strand starting at position 128 of SEQ ID NO: 1881421
cuacaaucccaguagaugu

SEQ ID NO: 2043241 - RNA, 19 nt, Artificial Sequence
  Description of Artificial Sequence: Synthetic oligonucleotide
  Antisense strand to SEQ ID NO: 2043240
acaucuacugggauuguag

SEQ ID NO: 2043242 - RNA, 19 nt, Artificial Sequence
  Description of Artificial Sequence: Synthetic oligonucleotide
  Sense strand starting at position 166 of SEQ ID NO: 1881421
augaaaucucagggcuuua

SEQ ID NO: 2043243 - RNA, 19 nt, Artificial Sequence
  Description of Artificial Sequence: Synthetic oligonucleotide
  Antisense strand to SEQ ID NO: 2043242
uaaagcccugagauuucau

SEQ ID NO: 2043244 - RNA, 19 nt, Artificial Sequence
  Description of Artificial Sequence: Synthetic oligonucleotide
  Sense strand starting at position 298 of SEQ ID NO: 1881421
uguagauggaucuguuaag

SEQ ID NO: 2043245 - RNA, 19 nt, Artificial Sequence
  Description of Artificial Sequence: Synthetic oligonucleotide
  Antisense strand to SEQ ID NO: 2043244
cuuaacagauccaucuaca

SEQ ID NO: 2043246 - RNA, 19 nt, Artificial Sequence
  Description of Artificial Sequence: Synthetic oligonucleotide
  Sense strand starting at position 299 of SEQ ID NO: 1881421
guagauggaucuguuaaga

SEQ ID NO: 2043247 - RNA, 19 nt, Artificial Sequence
  Description of Artificial Sequence: Synthetic oligonucleotide
  Antisense strand to SEQ ID NO: 2043246
ucuuaacagauccaucuac

SEQ ID NO: 2043248 - RNA, 19 nt, Artificial Sequence
  Description of Artificial Sequence: Synthetic oligonucleotide
  Sense strand starting at position 334 of SEQ ID NO: 1881421
gugaacauccaugguuuau

SEQ ID NO: 2043249 - RNA, 19 nt, Artificial Sequence
  Description of Artificial Sequence: Synthetic oligonucleotide
  Antisense strand to SEQ ID NO: 2043248
auaaaccauggauguucac

SEQ ID NO: 2043250 - RNA, 19 nt, Artificial Sequence
  Description of Artificial Sequence: Synthetic oligonucleotide
  Sense strand starting at position 485 of SEQ ID NO: 1881421
ggcgauagaaucuaguucu

SEQ ID NO: 2043251 - RNA, 19 nt, Artificial Sequence
  Description of Artificial Sequence: Synthetic oligonucleotide
  Antisense strand to SEQ ID NO: 2043250
agaacuagauucuaucgcc

SEQ ID NO: 2043252 - RNA, 19 nt, Artificial Sequence
  Description of Artificial Sequence: Synthetic oligonucleotide
  Sense strand starting at position 496 of SEQ ID NO: 1881421
cuaguucuacccugggauu

SEQ ID NO: 2043253 - RNA, 19 nt, Artificial Sequence
  Description of Artificial Sequence: Synthetic oligonucleotide
  Antisense strand to SEQ ID NO: 2043252
aaucccaggguagaacuag

SEQ ID NO: 2043254 - RNA, 19 nt, Artificial Sequence
  Description of Artificial Sequence: Synthetic oligonucleotide
  Sense strand starting at position 497 of SEQ ID NO: 1881421
uaguucuacccugggauua

SEQ ID NO: 2043255 - RNA, 19 nt, Artificial Sequence
  Description of Artificial Sequence: Synthetic oligonucleotide
  Antisense strand to SEQ ID NO: 2043254
uaaucccaggguagaacua

SEQ ID NO: 2043256 - RNA, 19 nt, Artificial Sequence
  Description of Artificial Sequence: Synthetic oligonucleotide
  Sense strand starting at position 498 of SEQ ID NO: 1881421
aguucuacccugggauuau

SEQ ID NO: 2043257 - RNA, 19 nt, Artificial Sequence
  Description of Artificial Sequence: Synthetic oligonucleotide
  Antisense strand to SEQ ID NO: 2043256
auaaucccaggguagaacu

SEQ ID NO: 2043258 - RNA, 19 nt, Artificial Sequence
  Description of Artificial Sequence: Synthetic oligonucleotide
  Sense strand starting at position 635 of SEQ ID NO: 1881421
ucauuaaucccguaacaug

SEQ ID NO: 2043259 - RNA, 19 nt, Artificial Sequence
  Description of Artificial Sequence: Synthetic oligonucleotide
  Antisense strand to SEQ ID NO: 2043258
cauguuacgggauuaauga

SEQ ID NO: 2043260 - RNA, 19 nt, Artificial Sequence
  Description of Artificial Sequence: Synthetic oligonucleotide
  Sense strand starting at position 776 of SEQ ID NO: 1881421
aaauuccugugacuggaaa

SEQ ID NO: 2043261 - RNA, 19 nt, Artificial Sequence
  Description of Artificial Sequence: Synthetic oligonucleotide
  Antisense strand to SEQ ID NO: 2043260
uuuccagucacaggaauuu

SEQ ID NO: 2043262 - RNA, 19 nt, Artificial Sequence
  Description of Artificial Sequence: Synthetic oligonucleotide
  Sense strand starting at position 938 of SEQ ID NO: 1881421
ugauauucuuagguagaaa

SEQ ID NO: 2043263 - RNA, 19 nt, Artificial Sequence
  Description of Artificial Sequence: Synthetic oligonucleotide
  Antisense strand to SEQ ID NO: 2043262
uuucuaccuaagaauauca

SEQ ID NO: 2043264 - RNA, 19 nt, Artificial Sequence
  Description of Artificial Sequence: Synthetic oligonucleotide
  Sense strand starting at position 971 of SEQ ID NO: 1881421
cuacaaggcuuaguuacau

SEQ ID NO: 2043265 - RNA, 19 nt, Artificial Sequence
  Description of Artificial Sequence: Synthetic oligonucleotide
  Antisense strand to SEQ ID NO: 2043264
auguaacuaagccuuguag

SEQ ID NO: 2043266 - RNA, 19 nt, Artificial Sequence
  Description of Artificial Sequence: Synthetic oligonucleotide
  Sense strand starting at position 1030 of SEQ ID NO: 1881421
ggauaaagauuagucugca

SEQ ID NO: 2043267 - RNA, 19 nt, Artificial Sequence
  Description of Artificial Sequence: Synthetic oligonucleotide
  Antisense strand to SEQ ID NO: 2043266
ugcagacuaaucuuuaucc

SEQ ID NO: 2043268 - RNA, 19 nt, Artificial Sequence
  Description of Artificial Sequence: Synthetic oligonucleotide
  Sense strand starting at position 1031 of SEQ ID NO: 1881421
gauaaagauuagucugcau

SEQ ID NO: 2043269 - RNA, 19 nt, Artificial Sequence
  Description of Artificial Sequence: Synthetic oligonucleotide
  Antisense strand to SEQ ID NO: 2043268
augcagacuaaucuuuauc

SEQ ID NO: 2043270 - RNA, 19 nt, Artificial Sequence
  Description of Artificial Sequence: Synthetic oligonucleotide
  Sense strand starting at position 1207 of SEQ ID NO: 1881421
acauuagugguacauuagu

SEQ ID NO: 2043271 - RNA, 19 nt, Artificial Sequence
  Description of Artificial Sequence: Synthetic oligonucleotide
  Antisense strand to SEQ ID NO: 2043270
acuaauguaccacuaaugu

SEQ ID NO: 2043272 - RNA, 19 nt, Artificial Sequence
  Description of Artificial Sequence: Synthetic oligonucleotide
  Sense strand starting at position 1215 of SEQ ID NO: 1881421
gguacauuaguacauugau

SEQ ID NO: 2043273 - RNA, 19 nt, Artificial Sequence
  Description of Artificial Sequence: Synthetic oligonucleotide
  Antisense strand to SEQ ID NO: 2043272
aucaauguacuaauguacc

SEQ ID NO: 2043274 - RNA, 19 nt, Artificial Sequence
  Description of Artificial Sequence: Synthetic oligonucleotide
  Sense strand starting at position 1301 of SEQ ID NO: 1881421
gagaaccuaugggcuaaau

SEQ ID NO: 2043275 - RNA, 19 nt, Artificial Sequence
  Description of Artificial Sequence: Synthetic oligonucleotide
  Antisense strand to SEQ ID NO: 2043274
auuuagcccauagguucuc

SEQ ID NO: 2043276 - RNA, 19 nt, Artificial Sequence
  Description of Artificial Sequence: Synthetic oligonucleotide
  Sense strand starting at position 1385 of SEQ ID NO: 1881421
ccuucuaagccaugaggga

SEQ ID NO: 2043277 - RNA, 19 nt, Artificial Sequence
  Description of Artificial Sequence: Synthetic oligonucleotide
  Antisense strand to SEQ ID NO: 2043276
ucccucauggcuuagaagg

SEQ ID NO: 2043278 - RNA, 19 nt, Artificial Sequence
  Description of Artificial Sequence: Synthetic oligonucleotide
  Sense strand starting at position 1481 of SEQ ID NO: 1881421
agacaaagccugcagugau

SEQ ID NO: 2043279 - RNA, 19 nt, Artificial Sequence
  Description of Artificial Sequence: Synthetic oligonucleotide
  Antisense strand to SEQ ID NO: 2043278
aucacugcaggcuuugucu

SEQ ID NO: 2043280 - RNA, 19 nt, Artificial Sequence
  Description of Artificial Sequence: Synthetic oligonucleotide
  Sense strand starting at position 2316 of SEQ ID NO: 1881421
ugccuucugcuugaggaau

SEQ ID NO: 2043281 - RNA, 19 nt, Artificial Sequence
  Description of Artificial Sequence: Synthetic oligonucleotide
  Antisense strand to SEQ ID NO: 2043280
auuccucaagcagaaggca

SEQ ID NO: 2043282 - RNA, 19 nt, Artificial Sequence
  Description of Artificial Sequence: Synthetic oligonucleotide
  Sense strand starting at position 2394 of SEQ ID NO: 1881421
ggcuuauuacaugauuauu

SEQ ID NO: 2043283 - RNA, 19 nt, Artificial Sequence
  Description of Artificial Sequence: Synthetic oligonucleotide
  Antisense strand to SEQ ID NO: 2043282
aauaaucauguaauaagcc

SEQ ID NO: 2043284 - RNA, 19 nt, Artificial Sequence
  Description of Artificial Sequence: Synthetic oligonucleotide
  Sense strand starting at position 2418 of SEQ ID NO: 1881421
agauuauguuuagccauaa

SEQ ID NO: 2043285 - RNA, 19 nt, Artificial Sequence
  Description of Artificial Sequence: Synthetic oligonucleotide
  Antisense strand to SEQ ID NO: 2043284
uuauggcuaaacauaaucu

SEQ ID NO: 2043286 - RNA, 19 nt, Artificial Sequence
  Description of Artificial Sequence: Synthetic oligonucleotide
  Sense strand starting at position 2664 of SEQ ID NO: 1881421
caauuagaucacuguagag

SEQ ID NO: 2043287 - RNA, 19 nt, Artificial Sequence
  Description of Artificial Sequence: Synthetic oligonucleotide
  Antisense strand to SEQ ID NO: 2043286
cucuacagugaucuaauug

SEQ ID NO: 2043288 - RNA, 19 nt, Artificial Sequence
  Description of Artificial Sequence: Synthetic oligonucleotide
  Sense strand starting at position 2790 of SEQ ID NO: 1881421
ggaggaauaucacauuugu

SEQ ID NO: 2043289 - RNA, 19 nt, Artificial Sequence
  Description of Artificial Sequence: Synthetic oligonucleotide
  Antisense strand to SEQ ID NO: 2043288
acaaaugugauauuccucc

SEQ ID NO: 2043290 - RNA, 19 nt, Artificial Sequence
  Description of Artificial Sequence: Synthetic oligonucleotide
  Sense strand starting at position 2796 of SEQ ID NO: 1881421
auaucacauuuguaaagga

SEQ ID NO: 2043291 - RNA, 19 nt, Artificial Sequence
  Description of Artificial Sequence: Synthetic oligonucleotide
  Antisense strand to SEQ ID NO: 2043290
uccuuuacaaaugugauau

SEQ ID NO: 2043292 - RNA, 19 nt, Artificial Sequence
  Description of Artificial Sequence: Synthetic oligonucleotide
  Sense strand starting at position 2853 of SEQ ID NO: 1881421
ccucuaggacucuggauaa

SEQ ID NO: 2043293 - RNA, 19 nt, Artificial Sequence
  Description of Artificial Sequence: Synthetic oligonucleotide
  Antisense strand to SEQ ID NO: 2043292
uuauccagaguccuagagg

SEQ ID NO: 2043294 - RNA, 19 nt, Artificial Sequence
  Description of Artificial Sequence: Synthetic oligonucleotide
  Sense strand starting at position 3058 of SEQ ID NO: 1881421
ucuugaguacugggacuau

SEQ ID NO: 2043295 - RNA, 19 nt, Artificial Sequence
  Description of Artificial Sequence: Synthetic oligonucleotide
  Antisense strand to SEQ ID NO: 2043294
auagucccaguacucaaga

SEQ ID NO: 2043296 - RNA, 19 nt, Artificial Sequence
  Description of Artificial Sequence: Synthetic oligonucleotide
  Sense strand starting at position 3086 of SEQ ID NO: 1881421
ccacuagacguggauaauu

SEQ ID NO: 2043297 - RNA, 19 nt, Artificial Sequence
  Description of Artificial Sequence: Synthetic oligonucleotide
  Antisense strand to SEQ ID NO: 2043296
aauuauccacgucuagugg

SEQ ID NO: 2043298 - RNA, 19 nt, Artificial Sequence
  Description of Artificial Sequence: Synthetic oligonucleotide
  Sense strand starting at position 3155 of SEQ ID NO: 1881421
ucauauaccugagcucaag

SEQ ID NO: 2043299 - RNA, 19 nt, Artificial Sequence
  Description of Artificial Sequence: Synthetic oligonucleotide
  Antisense strand to SEQ ID NO: 2043298
cuugagcucagguauauga

SEQ ID NO: 2043300 - RNA, 19 nt, Artificial Sequence
  Description of Artificial Sequence: Synthetic oligonucleotide
  Sense strand starting at position 3305 of SEQ ID NO: 1881421
augaauuaucugugucaca

SEQ ID NO: 2043301 - RNA, 19 nt, Artificial Sequence
  Description of Artificial Sequence: Synthetic oligonucleotide
  Antisense strand to SEQ ID NO: 2043300
ugugacacagauaauucau

SEQ ID NO: 2043302 - RNA, 19 nt, Artificial Sequence
  Description of Artificial Sequence: Synthetic oligonucleotide
  Sense strand starting at position 3344 of SEQ ID NO: 1881421
ccaguauggaauuggcaua

SEQ ID NO: 2043303 - RNA, 19 nt, Artificial Sequence
  Description of Artificial Sequence: Synthetic oligonucleotide
  Antisense strand to SEQ ID NO: 2043302
uaugccaauuccauacugg

SEQ ID NO: 2043304 - RNA, 19 nt, Artificial Sequence
  Description of Artificial Sequence: Synthetic oligonucleotide
  Sense strand starting at position 3439 of SEQ ID NO: 1881421
uuauaacauguggguuaau

SEQ ID NO: 2043305 - RNA, 19 nt, Artificial Sequence
  Description of Artificial Sequence: Synthetic oligonucleotide
  Antisense strand to SEQ ID NO: 2043304
auuaacccacauguuauaa

SEQ ID NO: 2043306 - RNA, 19 nt, Artificial Sequence
  Description of Artificial Sequence: Synthetic oligonucleotide
  Sense strand starting at position 3440 of SEQ ID NO: 1881421
uauaacauguggguuaauu

SEQ ID NO: 2043307 - RNA, 19 nt, Artificial Sequence
  Description of Artificial Sequence: Synthetic oligonucleotide
  Antisense strand to SEQ ID NO: 2043306
aauuaacccacauguuaua

SEQ ID NO: 2043308 - RNA, 19 nt, Artificial Sequence
  Description of Artificial Sequence: Synthetic oligonucleotide
  Sense strand starting at position 3450 of SEQ ID NO: 1881421
ggguuaauuaaauggucag

SEQ ID NO: 2043309 - RNA, 19 nt, Artificial Sequence
  Description of Artificial Sequence: Synthetic oligonucleotide
  Antisense strand to SEQ ID NO: 2043308
cugaccauuuaauuaaccc

SEQ ID NO: 2043310 - RNA, 19 nt, Artificial Sequence
  Description of Artificial Sequence: Synthetic oligonucleotide
  Sense strand starting at position 3460 of SEQ ID NO: 1881421
aauggucaggcugaaucua

SEQ ID NO: 2043311 - RNA, 19 nt, Artificial Sequence
  Description of Artificial Sequence: Synthetic oligonucleotide
  Antisense strand to SEQ ID NO: 2043310
uagauucagccugaccauu

SEQ ID NO: 2043312 - RNA, 19 nt, Artificial Sequence
  Description of Artificial Sequence: Synthetic oligonucleotide
  Sense strand starting at position 3472 of SEQ ID NO: 1881421
gaaucuaugcagcagggua

SEQ ID NO: 2043313 - RNA, 19 nt, Artificial Sequence
  Description of Artificial Sequence: Synthetic oligonucleotide
  Antisense strand to SEQ ID NO: 2043312
uacccugcugcauagauuc

SEQ ID NO: 2043314 - RNA, 19 nt, Artificial Sequence
  Description of Artificial Sequence: Synthetic oligonucleotide
  Sense strand starting at position 3601 of SEQ ID NO: 1881421
cugaauccagaaugaucuu

SEQ ID NO: 2043315 - RNA, 19 nt, Artificial Sequence
  Description of Artificial Sequence: Synthetic oligonucleotide
  Antisense strand to SEQ ID NO: 2043314
aagaucauucuggauucag

SEQ ID NO: 2043316 - RNA, 19 nt, Artificial Sequence
  Description of Artificial Sequence: Synthetic oligonucleotide
  Sense strand starting at position 3716 of SEQ ID NO: 1881421
ggaagaacauuggagacaa

SEQ ID NO: 2043317 - RNA, 19 nt, Artificial Sequence
  Description of Artificial Sequence: Synthetic oligonucleotide
  Antisense strand to SEQ ID NO: 2043316
uugucuccaauguucuucc

SEQ ID NO: 2043318 - RNA, 19 nt, Artificial Sequence
  Description of Artificial Sequence: Synthetic oligonucleotide
  Sense strand starting at position 3839 of SEQ ID NO: 1881421
guaagaacuuuaguuucca

SEQ ID NO: 2043319 - RNA, 19 nt, Artificial Sequence
  Description of Artificial Sequence: Synthetic oligonucleotide
  Antisense strand to SEQ ID NO: 2043318
uggaaacuaaaguucuuac

SEQ ID NO: 2043320 - RNA, 19 nt, Artificial Sequence
  Description of Artificial Sequence: Synthetic oligonucleotide
  Sense strand starting at position 111 of SEQ ID NO: 1881422
cguuuaauccacugucauu

SEQ ID NO: 2043321 - RNA, 19 nt, Artificial Sequence
  Description of Artificial Sequence: Synthetic oligonucleotide
  Antisense strand to SEQ ID NO: 2043320
aaugacaguggauuaaacg

SEQ ID NO: 2043322 - RNA, 19 nt, Artificial Sequence
  Description of Artificial Sequence: Synthetic oligonucleotide
  Sense strand starting at position 145 of SEQ ID NO: 1881422
ggaaucuaauccuaaguga

SEQ ID NO: 2043323 - RNA, 19 nt, Artificial Sequence
  Description of Artificial Sequence: Synthetic oligonucleotide
  Antisense strand to SEQ ID NO: 2043322
ucacuuaggauuagauucc

SEQ ID NO: 2043324 - RNA, 19 nt, Artificial Sequence
  Description of Artificial Sequence: Synthetic oligonucleotide
  Sense strand starting at position 244 of SEQ ID NO: 1881422
gcugaaguucucgaacaga

SEQ ID NO: 2043325 - RNA, 19 nt, Artificial Sequence
  Description of Artificial Sequence: Synthetic oligonucleotide
  Antisense strand to SEQ ID NO: 2043324
ucuguucgagaacuucagc

SEQ ID NO: 2043326 - RNA, 19 nt, Artificial Sequence
  Description of Artificial Sequence: Synthetic oligonucleotide
  Sense strand starting at position 247 of SEQ ID NO: 1881422
gaaguucucgaacagaagu

SEQ ID NO: 2043327 - RNA, 19 nt, Artificial Sequence
  Description of Artificial Sequence: Synthetic oligonucleotide
  Antisense strand to SEQ ID NO: 2043326
acuucuguucgagaacuuc

SEQ ID NO: 2043328 - RNA, 19 nt, Artificial Sequence
  Description of Artificial Sequence: Synthetic oligonucleotide
  Sense strand starting at position 260 of SEQ ID NO: 1881422
agaaguggaugguccaaua

SEQ ID NO: 2043329 - RNA, 19 nt, Artificial Sequence
  Description of Artificial Sequence: Synthetic oligonucleotide
  Antisense strand to SEQ ID NO: 2043328
uauuggaccauccacuucu

SEQ ID NO: 2043330 - RNA, 19 nt, Artificial Sequence
  Description of Artificial Sequence: Synthetic oligonucleotide
  Sense strand starting at position 318 of SEQ ID NO: 1881422
gauggagcuuucucauuac

SEQ ID NO: 2043331 - RNA, 19 nt, Artificial Sequence
  Description of Artificial Sequence: Synthetic oligonucleotide
  Antisense strand to SEQ ID NO: 2043330
guaaugagaaagcuccauc

SEQ ID NO: 2043332 - RNA, 19 nt, Artificial Sequence
  Description of Artificial Sequence: Synthetic oligonucleotide
  Sense strand starting at position 321 of SEQ ID NO: 1881422
ggagcuuucucauuacaag

SEQ ID NO: 2043333 - RNA, 19 nt, Artificial Sequence
  Description of Artificial Sequence: Synthetic oligonucleotide
  Antisense strand to SEQ ID NO: 2043332
cuuguaaugagaaagcucc

SEQ ID NO: 2043334 - RNA, 19 nt, Artificial Sequence
  Description of Artificial Sequence: Synthetic oligonucleotide
  Sense strand starting at position 374 of SEQ ID NO: 1881422
uuccaugaucuaggacacu

SEQ ID NO: 2043335 - RNA, 19 nt, Artificial Sequence
  Description of Artificial Sequence: Synthetic oligonucleotide
  Antisense strand to SEQ ID NO: 2043334
aguguccuagaucauggaa

SEQ ID NO: 2043336 - RNA, 19 nt, Artificial Sequence
  Description of Artificial Sequence: Synthetic oligonucleotide
  Sense strand starting at position 483 of SEQ ID NO: 1881422
gauauagacucucacagag

SEQ ID NO: 2043337 - RNA, 19 nt, Artificial Sequence
  Description of Artificial Sequence: Synthetic oligonucleotide
  Antisense strand to SEQ ID NO: 2043336
cucugugagagucuauauc

SEQ ID NO: 2043338 - RNA, 19 nt, Artificial Sequence
  Description of Artificial Sequence: Synthetic oligonucleotide
  Sense strand starting at position 635 of SEQ ID NO: 1881422
cugaguggucugcagggua

SEQ ID NO: 2043339 - RNA, 19 nt, Artificial Sequence
  Description of Artificial Sequence: Synthetic oligonucleotide
  Antisense strand to SEQ ID NO: 2043338
uacccugcagaccacucag

SEQ ID NO: 2043340 - RNA, 19 nt, Artificial Sequence
  Description of Artificial Sequence: Synthetic oligonucleotide
  Sense strand starting at position 651 of SEQ ID NO: 1881422
guaaacuccucccuuggaa

SEQ ID NO: 2043341 - RNA, 19 nt, Artificial Sequence
  Description of Artificial Sequence: Synthetic oligonucleotide
  Antisense strand to SEQ ID NO: 2043340
uuccaagggaggaguuuac

SEQ ID NO: 2043342 - RNA, 19 nt, Artificial Sequence
  Description of Artificial Sequence: Synthetic oligonucleotide
  Sense strand starting at position 824 of SEQ ID NO: 1881422
acaagagcccucuguaaug

SEQ ID NO: 2043343 - RNA, 19 nt, Artificial Sequence
  Description of Artificial Sequence: Synthetic oligonucleotide
  Antisense strand to SEQ ID NO: 2043342
cauuacagagggcucuugu

SEQ ID NO: 2043344 - RNA, 19 nt, Artificial Sequence
  Description of Artificial Sequence: Synthetic oligonucleotide
  Sense strand starting at position 874 of SEQ ID NO: 1881422
aguucucaugaaugcagau

SEQ ID NO: 2043345 - RNA, 19 nt, Artificial Sequence
  Description of Artificial Sequence: Synthetic oligonucleotide
  Antisense strand to SEQ ID NO: 2043344
aucugcauucaugagaacu

SEQ ID NO: 2043346 - RNA, 19 nt, Artificial Sequence
  Description of Artificial Sequence: Synthetic oligonucleotide
  Sense strand starting at position 995 of SEQ ID NO: 1881422
uacuuuauugaaggaugua

SEQ ID NO: 2043347 - RNA, 19 nt, Artificial Sequence
  Description of Artificial Sequence: Synthetic oligonucleotide
  Antisense strand to SEQ ID NO: 2043346
uacauccuucaauaaagua

SEQ ID NO: 2043348 - RNA, 19 nt, Artificial Sequence
  Description of Artificial Sequence: Synthetic oligonucleotide
  Sense strand starting at position 1069 of SEQ ID NO: 1881422
aucuguucugaguauggaa

SEQ ID NO: 2043349 - RNA, 19 nt, Artificial Sequence
  Description of Artificial Sequence: Synthetic oligonucleotide
  Antisense strand to SEQ ID NO: 2043348
uuccauacucagaacagau

SEQ ID NO: 2043350 - RNA, 19 nt, Artificial Sequence
  Description of Artificial Sequence: Synthetic oligonucleotide
  Sense strand starting at position 1211 of SEQ ID NO: 1881422
caaugagacugaucugucu

SEQ ID NO: 2043351 - RNA, 19 nt, Artificial Sequence
  Description of Artificial Sequence: Synthetic oligonucleotide
  Antisense strand to SEQ ID NO: 2043350
agacagaucagucucauug

SEQ ID NO: 2043352 - RNA, 19 nt, Artificial Sequence
  Description of Artificial Sequence: Synthetic oligonucleotide
  Sense strand starting at position 1280 of SEQ ID NO: 1881422
gcagauauucuuggcacac

SEQ ID NO: 2043353 - RNA, 19 nt, Artificial Sequence
  Description of Artificial Sequence: Synthetic oligonucleotide
  Antisense strand to SEQ ID NO: 2043352
gugugccaagaauaucugc

SEQ ID NO: 2043354 - RNA, 19 nt, Artificial Sequence
  Description of Artificial Sequence: Synthetic oligonucleotide
  Sense strand starting at position 1325 of SEQ ID NO: 1881422
ugauucaugggauguugca

SEQ ID NO: 2043355 - RNA, 19 nt, Artificial Sequence
  Description of Artificial Sequence: Synthetic oligonucleotide
  Antisense strand to SEQ ID NO: 2043354
ugcaacaucccaugaauca

SEQ ID NO: 2043356 - RNA, 19 nt, Artificial Sequence
  Description of Artificial Sequence: Synthetic oligonucleotide
  Sense strand starting at position 1367 of SEQ ID NO: 1881422
uauagaucugcuuggugac

SEQ ID NO: 2043357 - RNA, 19 nt, Artificial Sequence
  Description of Artificial Sequence: Synthetic oligonucleotide
  Antisense strand to SEQ ID NO: 2043356
gucaccaagcagaucuaua

SEQ ID NO: 2043358 - RNA, 19 nt, Artificial Sequence
  Description of Artificial Sequence: Synthetic oligonucleotide
  Sense strand starting at position 1368 of SEQ ID NO: 1881422
auagaucugcuuggugaca

SEQ ID NO: 2043359 - RNA, 19 nt, Artificial Sequence
  Description of Artificial Sequence: Synthetic oligonucleotide
  Antisense strand to SEQ ID NO: 2043358
ugucaccaagcagaucuau

SEQ ID NO: 2043360 - RNA, 19 nt, Artificial Sequence
  Description of Artificial Sequence: Synthetic oligonucleotide
  Sense strand starting at position 1434 of SEQ ID NO: 1881422
aguggauucguggcuguuu

SEQ ID NO: 2043361 - RNA, 19 nt, Artificial Sequence
  Description of Artificial Sequence: Synthetic oligonucleotide
  Antisense strand to SEQ ID NO: 2043360
aaacagccacgaauccacu

SEQ ID NO: 2043362 - RNA, 19 nt, Artificial Sequence
  Description of Artificial Sequence: Synthetic oligonucleotide
  Sense strand starting at position 1500 of SEQ ID NO: 1881422
uguauugaaugcuucuagu

SEQ ID NO: 2043363 - RNA, 19 nt, Artificial Sequence
  Description of Artificial Sequence: Synthetic oligonucleotide
  Antisense strand to SEQ ID NO: 2043362
acuagaagcauucaauaca

SEQ ID NO: 2043364 - RNA, 19 nt, Artificial Sequence
  Description of Artificial Sequence: Synthetic oligonucleotide
  Sense strand starting at position 1550 of SEQ ID NO: 1881422
gagagaaaguaggauauaa

SEQ ID NO: 2043365 - RNA, 19 nt, Artificial Sequence
  Description of Artificial Sequence: Synthetic oligonucleotide
  Antisense strand to SEQ ID NO: 2043364
uuauauccuacuuucucuc

SEQ ID NO: 2043366 - RNA, 19 nt, Artificial Sequence
  Description of Artificial Sequence: Synthetic oligonucleotide
  Sense strand starting at position 1637 of SEQ ID NO: 1881422
ggguaagacgcuuaauguc

SEQ ID NO: 2043367 - RNA, 19 nt, Artificial Sequence
  Description of Artificial Sequence: Synthetic oligonucleotide
  Antisense strand to SEQ ID NO: 2043366
gacauuaagcgucuuaccc

SEQ ID NO: 2043368 - RNA, 19 nt, Artificial Sequence
  Description of Artificial Sequence: Synthetic oligonucleotide
  Sense strand starting at position 1661 of SEQ ID NO: 1881422
gggugaugcugaccgaaga

SEQ ID NO: 2043369 - RNA, 19 nt, Artificial Sequence
  Description of Artificial Sequence: Synthetic oligonucleotide
  Antisense strand to SEQ ID NO: 2043368
ucuucggucagcaucaccc

SEQ ID NO: 2043370 - RNA, 19 nt, Artificial Sequence
  Description of Artificial Sequence: Synthetic oligonucleotide
  Sense strand starting at position 2024 of SEQ ID NO: 1881422
ucucuaugguucccacgaa

SEQ ID NO: 2043371 - RNA, 19 nt, Artificial Sequence
  Description of Artificial Sequence: Synthetic oligonucleotide
  Antisense strand to SEQ ID NO: 2043370
uucgugggaaccauagaga

SEQ ID NO: 2043372 - RNA, 19 nt, Artificial Sequence
  Description of Artificial Sequence: Synthetic oligonucleotide
  Sense strand starting at position 2028 of SEQ ID NO: 1881422
uaugguucccacgaaacga

SEQ ID NO: 2043373 - RNA, 19 nt, Artificial Sequence
  Description of Artificial Sequence: Synthetic oligonucleotide
  Antisense strand to SEQ ID NO: 2043372
ucguuucgugggaaccaua

SEQ ID NO: 2043374 - RNA, 19 nt, Artificial Sequence
  Description of Artificial Sequence: Synthetic oligonucleotide
  Sense strand starting at position 2271 of SEQ ID NO: 1881422
uuucucuuaugucuuagua

SEQ ID NO: 2043375 - RNA, 19 nt, Artificial Sequence
  Description of Artificial Sequence: Synthetic oligonucleotide
  Antisense strand to SEQ ID NO: 2043374
uacuaagacauaagagaaa

SEQ ID NO: 2043376 - RNA, 19 nt, Artificial Sequence
  Description of Artificial Sequence: Synthetic oligonucleotide
  Sense strand starting at position 2407 of SEQ ID NO: 1881422
ccugucucccacugaauga

SEQ ID NO: 2043377 - RNA, 19 nt, Artificial Sequence
  Description of Artificial Sequence: Synthetic oligonucleotide
  Antisense strand to SEQ ID NO: 2043376
ucauucagugggagacagg

SEQ ID NO: 2043378 - RNA, 19 nt, Artificial Sequence
  Description of Artificial Sequence: Synthetic oligonucleotide
  Sense strand starting at position 2417 of SEQ ID NO: 1881422
acugaaugacugugaccua

SEQ ID NO: 2043379 - RNA, 19 nt, Artificial Sequence
  Description of Artificial Sequence: Synthetic oligonucleotide
  Antisense strand to SEQ ID NO: 2043378
uaggucacagucauucagu

SEQ ID NO: 2043380 - RNA, 19 nt, Artificial Sequence
  Description of Artificial Sequence: Synthetic oligonucleotide
  Sense strand starting at position 2485 of SEQ ID NO: 1881422
uauggacuugcucaaguua

SEQ ID NO: 2043381 - RNA, 19 nt, Artificial Sequence
  Description of Artificial Sequence: Synthetic oligonucleotide
  Antisense strand to SEQ ID NO: 2043380
uaacuugagcaaguccaua

SEQ ID NO: 2043382 - RNA, 19 nt, Artificial Sequence
  Description of Artificial Sequence: Synthetic oligonucleotide
  Sense strand starting at position 2506 of SEQ ID NO: 1881422
cuuaaaucguugccucaau

SEQ ID NO: 2043383 - RNA, 19 nt, Artificial Sequence
  Description of Artificial Sequence: Synthetic oligonucleotide
  Antisense strand to SEQ ID NO: 2043382
auugaggcaacgauuuaag

SEQ ID NO: 2043384 - RNA, 19 nt, Artificial Sequence
  Description of Artificial Sequence: Synthetic oligonucleotide
  Sense strand starting at position 2507 of SEQ ID NO: 1881422
uuaaaucguugccucaauu

SEQ ID NO: 2043385 - RNA, 19 nt, Artificial Sequence
  Description of Artificial Sequence: Synthetic oligonucleotide
  Antisense strand to SEQ ID NO: 2043384
aauugaggcaacgauuuaa

SEQ ID NO: 2043386 - RNA, 19 nt, Artificial Sequence
  Description of Artificial Sequence: Synthetic oligonucleotide
  Sense strand starting at position 2517 of SEQ ID NO: 1881422
gccucaauuuaucaguuga

SEQ ID NO: 2043387 - RNA, 19 nt, Artificial Sequence
  Description of Artificial Sequence: Synthetic oligonucleotide
  Antisense strand to SEQ ID NO: 2043386
ucaacugauaaauugaggc

SEQ ID NO: 2043388 - RNA, 19 nt, Artificial Sequence
  Description of Artificial Sequence: Synthetic oligonucleotide
  Sense strand starting at position 2527 of SEQ ID NO: 1881422
aucaguugagaaugguaaa

SEQ ID NO: 2043389 - RNA, 19 nt, Artificial Sequence
  Description of Artificial Sequence: Synthetic oligonucleotide
  Antisense strand to SEQ ID NO: 2043388
uuuaccauucucaacugau

SEQ ID NO: 2043390 - RNA, 19 nt, Artificial Sequence
  Description of Artificial Sequence: Synthetic oligonucleotide
  Sense strand starting at position 2568 of SEQ ID NO: 1881422
ugaauuaacugagucaauu

SEQ ID NO: 2043391 - RNA, 19 nt, Artificial Sequence
  Description of Artificial Sequence: Synthetic oligonucleotide
  Antisense strand to SEQ ID NO: 2043390
aauugacucaguuaauuca

SEQ ID NO: 2043392 - RNA, 19 nt, Artificial Sequence
  Description of Artificial Sequence: Synthetic oligonucleotide
  Sense strand starting at position 3022 of SEQ ID NO: 1881422
ugaacuagaccucgugauc

SEQ ID NO: 2043393 - RNA, 19 nt, Artificial Sequence
  Description of Artificial Sequence: Synthetic oligonucleotide
  Antisense strand to SEQ ID NO: 2043392
gaucacgaggucuaguuca

SEQ ID NO: 2043394 - RNA, 19 nt, Artificial Sequence
  Description of Artificial Sequence: Synthetic oligonucleotide
  Sense strand starting at position 3370 of SEQ ID NO: 1881422
acaaucguuucucucugaa

SEQ ID NO: 2043395 - RNA, 19 nt, Artificial Sequence
  Description of Artificial Sequence: Synthetic oligonucleotide
  Antisense strand to SEQ ID NO: 2043394
uucagagagaaacgauugu

SEQ ID NO: 2043396 - RNA, 19 nt, Artificial Sequence
  Description of Artificial Sequence: Synthetic oligonucleotide
  Sense strand starting at position 3972 of SEQ ID NO: 1881422
uccggauggagcuaaugua

SEQ ID NO: 2043397 - RNA, 19 nt, Artificial Sequence
  Description of Artificial Sequence: Synthetic oligonucleotide
  Antisense strand to SEQ ID NO: 2043396
uacauuagcuccauccgga

SEQ ID NO: 2043398 - RNA, 19 nt, Artificial Sequence
  Description of Artificial Sequence: Synthetic oligonucleotide
  Sense strand starting at position 3979 of SEQ ID NO: 1881422
ggagcuaauguacauccua

SEQ ID NO: 2043399 - RNA, 19 nt, Artificial Sequence
  Description of Artificial Sequence: Synthetic oligonucleotide
  Antisense strand to SEQ ID NO: 2043398
uaggauguacauuagcucc

SEQ ID NO: 2043400 - RNA, 19 nt, Artificial Sequence
  Description of Artificial Sequence: Synthetic oligonucleotide
  Sense strand starting at position 26 of SEQ ID NO: 1881423
acccuaucccugugaaagc

SEQ ID NO: 2043401 - RNA, 19 nt, Artificial Sequence
  Description of Artificial Sequence: Synthetic oligonucleotide
  Antisense strand to SEQ ID NO: 2043400
gcuuucacagggauagggu

SEQ ID NO: 2043402 - RNA, 19 nt, Artificial Sequence
  Description of Artificial Sequence: Synthetic oligonucleotide
  Sense strand starting at position 66 of SEQ ID NO: 1881423
ugaagagcucacuguguug

SEQ ID NO: 2043403 - RNA, 19 nt, Artificial Sequence
  Description of Artificial Sequence: Synthetic oligonucleotide
  Antisense strand to SEQ ID NO: 2043402
caacacagugagcucuuca

SEQ ID NO: 2043404 - RNA, 19 nt, Artificial Sequence
  Description of Artificial Sequence: Synthetic oligonucleotide
  Sense strand starting at position 454 of SEQ ID NO: 1881423
ggacuuuauccacaaggcu

SEQ ID NO: 2043405 - RNA, 19 nt, Artificial Sequence
  Description of Artificial Sequence: Synthetic oligonucleotide
  Antisense strand to SEQ ID NO: 2043404
agccuuguggauaaagucc

SEQ ID NO: 2043406 - RNA, 19 nt, Artificial Sequence
  Description of Artificial Sequence: Synthetic oligonucleotide
  Sense strand starting at position 616 of SEQ ID NO: 1881423
cuauccucccagcguguua

SEQ ID NO: 2043407 - RNA, 19 nt, Artificial Sequence
  Description of Artificial Sequence: Synthetic oligonucleotide
  Antisense strand to SEQ ID NO: 2043406
uaacacgcugggaggauag

SEQ ID NO: 2043408 - RNA, 19 nt, Artificial Sequence
  Description of Artificial Sequence: Synthetic oligonucleotide
  Sense strand starting at position 638 of SEQ ID NO: 1881423
uccugaaucuggccacauu

SEQ ID NO: 2043409 - RNA, 19 nt, Artificial Sequence
  Description of Artificial Sequence: Synthetic oligonucleotide
  Antisense strand to SEQ ID NO: 2043408
aauguggccagauucagga

SEQ ID NO: 2043410 - RNA, 19 nt, Artificial Sequence
  Description of Artificial Sequence: Synthetic oligonucleotide
  Sense strand starting at position 739 of SEQ ID NO: 1881423
cgugccacucugugaagau

SEQ ID NO: 2043411 - RNA, 19 nt, Artificial Sequence
  Description of Artificial Sequence: Synthetic oligonucleotide
  Antisense strand to SEQ ID NO: 2043410
aucuucacagaguggcacg

SEQ ID NO: 2043412 - RNA, 19 nt, Artificial Sequence
  Description of Artificial Sequence: Synthetic oligonucleotide
  Sense strand starting at position 740 of SEQ ID NO: 1881423
gugccacucugugaagaug

SEQ ID NO: 2043413 - RNA, 19 nt, Artificial Sequence
  Description of Artificial Sequence: Synthetic oligonucleotide
  Antisense strand to SEQ ID NO: 2043412
caucuucacagaguggcac

SEQ ID NO: 2043414 - RNA, 19 nt, Artificial Sequence
  Description of Artificial Sequence: Synthetic oligonucleotide
  Sense strand starting at position 782 of SEQ ID NO: 1881423
gcagguuaaggauaucugu

SEQ ID NO: 2043415 - RNA, 19 nt, Artificial Sequence
  Description of Artificial Sequence: Synthetic oligonucleotide
  Antisense strand to SEQ ID NO: 2043414
acagauauccuuaaccugc

SEQ ID NO: 2043416 - RNA, 19 nt, Artificial Sequence
  Description of Artificial Sequence: Synthetic oligonucleotide
  Sense strand starting at position 881 of SEQ ID NO: 1881423
ucucaaaucgaaugacaug

SEQ ID NO: 2043417 - RNA, 19 nt, Artificial Sequence
  Description of Artificial Sequence: Synthetic oligonucleotide
  Antisense strand to SEQ ID NO: 2043416
caugucauucgauuugaga

SEQ ID NO: 2043418 - RNA, 19 nt, Artificial Sequence
  Description of Artificial Sequence: Synthetic oligonucleotide
  Sense strand starting at position 1030 of SEQ ID NO: 1881423
gcgcgguuaccgggaaagu

SEQ ID NO: 2043419 - RNA, 19 nt, Artificial Sequence
  Description of Artificial Sequence: Synthetic oligonucleotide
  Antisense strand to SEQ ID NO: 2043418
acuuucccgguaaccgcgc

SEQ ID NO: 2043420 - RNA, 19 nt, Artificial Sequence
  Description of Artificial Sequence: Synthetic oligonucleotide
  Sense strand starting at position 1039 of SEQ ID NO: 1881423
ccgggaaagucacacuugu

SEQ ID NO: 2043421 - RNA, 19 nt, Artificial Sequence
  Description of Artificial Sequence: Synthetic oligonucleotide
  Antisense strand to SEQ ID NO: 2043420
acaagugugacuuucccgg

SEQ ID NO: 2043422 - RNA, 19 nt, Artificial Sequence
  Description of Artificial Sequence: Synthetic oligonucleotide
  Sense strand starting at position 1184 of SEQ ID NO: 1881423
gguuauagaccguagugaa

SEQ ID NO: 2043423 - RNA, 19 nt, Artificial Sequence
  Description of Artificial Sequence: Synthetic oligonucleotide
  Antisense strand to SEQ ID NO: 2043422
uucacuacggucuauaacc

SEQ ID NO: 2043424 - RNA, 19 nt, Artificial Sequence
  Description of Artificial Sequence: Synthetic oligonucleotide
  Sense strand starting at position 2052 of SEQ ID NO: 1881423
cguagaguccggcucggaa

SEQ ID NO: 2043425 - RNA, 19 nt, Artificial Sequence
  Description of Artificial Sequence: Synthetic oligonucleotide
  Antisense strand to SEQ ID NO: 2043424
uuccgagccggacucuacg

SEQ ID NO: 2043426 - RNA, 19 nt, Artificial Sequence
  Description of Artificial Sequence: Synthetic oligonucleotide
  Sense strand starting at position 2384 of SEQ ID NO: 1881423
gagcgauuccuucucguuc

SEQ ID NO: 2043427 - RNA, 19 nt, Artificial Sequence
  Description of Artificial Sequence: Synthetic oligonucleotide
  Antisense strand to SEQ ID NO: 2043426
gaacgagaaggaaucgcuc

SEQ ID NO: 2043428 - RNA, 19 nt, Artificial Sequence
  Description of Artificial Sequence: Synthetic oligonucleotide
  Sense strand starting at position 2430 of SEQ ID NO: 1881423
uugacuucgaaucguauua

SEQ ID NO: 2043429 - RNA, 19 nt, Artificial Sequence
  Description of Artificial Sequence: Synthetic oligonucleotide
  Antisense strand to SEQ ID NO: 2043428
uaauacgauucgaagucaa

SEQ ID NO: 2043430 - RNA, 19 nt, Artificial Sequence
  Description of Artificial Sequence: Synthetic oligonucleotide
  Sense strand starting at position 2432 of SEQ ID NO: 1881423
gacuucgaaucguauuaau

SEQ ID NO: 2043431 - RNA, 19 nt, Artificial Sequence
  Description of Artificial Sequence: Synthetic oligonucleotide
  Antisense strand to SEQ ID NO: 2043430
auuaauacgauucgaaguc

SEQ ID NO: 2043432 - RNA, 19 nt, Artificial Sequence
  Description of Artificial Sequence: Synthetic oligonucleotide
  Sense strand starting at position 2508 of SEQ ID NO: 1881423
accuguccgagcugauuaa

SEQ ID NO: 2043433 - RNA, 19 nt, Artificial Sequence
  Description of Artificial Sequence: Synthetic oligonucleotide
  Antisense strand to SEQ ID NO: 2043432
uuaaucagcucggacaggu

SEQ ID NO: 2043434 - RNA, 19 nt, Artificial Sequence
  Description of Artificial Sequence: Synthetic oligonucleotide
  Sense strand starting at position 2597 of SEQ ID NO: 1881423
aggauucgaaccuguccaa

SEQ ID NO: 2043435 - RNA, 19 nt, Artificial Sequence
  Description of Artificial Sequence: Synthetic oligonucleotide
  Antisense strand to SEQ ID NO: 2043434
uuggacagguucgaauccu

SEQ ID NO: 2043436 - RNA, 19 nt, Artificial Sequence
  Description of Artificial Sequence: Synthetic oligonucleotide
  Sense strand starting at position 2909 of SEQ ID NO: 1881423
cgcacuuuauuccugggua

SEQ ID NO: 2043437 - RNA, 19 nt, Artificial Sequence
  Description of Artificial Sequence: Synthetic oligonucleotide
  Antisense strand to SEQ ID NO: 2043436
uacccaggaauaaagugcg

SEQ ID NO: 2043438 - RNA, 19 nt, Artificial Sequence
  Description of Artificial Sequence: Synthetic oligonucleotide
  Sense strand starting at position 2912 of SEQ ID NO: 1881423
acuuuauuccuggguaccu

SEQ ID NO: 2043439 - RNA, 19 nt, Artificial Sequence
  Description of Artificial Sequence: Synthetic oligonucleotide
  Antisense strand to SEQ ID NO: 2043438
agguacccaggaauaaagu

SEQ ID NO: 2043440 - RNA, 19 nt, Artificial Sequence
  Description of Artificial Sequence: Synthetic oligonucleotide
  Sense strand starting at position 3184 of SEQ ID NO: 1881423
guuccagccucagagacuu

SEQ ID NO: 2043441 - RNA, 19 nt, Artificial Sequence
  Description of Artificial Sequence: Synthetic oligonucleotide
  Antisense strand to SEQ ID NO: 2043440
aagucucugaggcuggaac

SEQ ID NO: 2043442 - RNA, 19 nt, Artificial Sequence
  Description of Artificial Sequence: Synthetic oligonucleotide
  Sense strand starting at position 3213 of SEQ ID NO: 1881423
aucucugauuccucuggga

SEQ ID NO: 2043443 - RNA, 19 nt, Artificial Sequence
  Description of Artificial Sequence: Synthetic oligonucleotide
  Antisense strand to SEQ ID NO: 2043442
ucccagaggaaucagagau

SEQ ID NO: 2043444 - RNA, 19 nt, Artificial Sequence
  Description of Artificial Sequence: Synthetic oligonucleotide
  Sense strand starting at position 3216 of SEQ ID NO: 1881423
ucugauuccucugggagga

SEQ ID NO: 2043445 - RNA, 19 nt, Artificial Sequence
  Description of Artificial Sequence: Synthetic oligonucleotide
  Antisense strand to SEQ ID NO: 2043444
uccucccagaggaaucaga

SEQ ID NO: 2043446 - RNA, 19 nt, Artificial Sequence
  Description of Artificial Sequence: Synthetic oligonucleotide
  Sense strand starting at position 3286 of SEQ ID NO: 1881423
accucugucugaucuguuu

SEQ ID NO: 2043447 - RNA, 19 nt, Artificial Sequence
  Description of Artificial Sequence: Synthetic oligonucleotide
  Antisense strand to SEQ ID NO: 2043446
aaacagaucagacagaggu

SEQ ID NO: 2043448 - RNA, 19 nt, Artificial Sequence
  Description of Artificial Sequence: Synthetic oligonucleotide
  Sense strand starting at position 3293 of SEQ ID NO: 1881423
ucugaucuguuugcucuua

SEQ ID NO: 2043449 - RNA, 19 nt, Artificial Sequence
  Description of Artificial Sequence: Synthetic oligonucleotide
  Antisense strand to SEQ ID NO: 2043448
uaagagcaaacagaucaga

SEQ ID NO: 2043450 - RNA, 19 nt, Artificial Sequence
  Description of Artificial Sequence: Synthetic oligonucleotide
  Sense strand starting at position 3295 of SEQ ID NO: 1881423
ugaucuguuugcucuuaga

SEQ ID NO: 2043451 - RNA, 19 nt, Artificial Sequence
  Description of Artificial Sequence: Synthetic oligonucleotide
  Antisense strand to SEQ ID NO: 2043450
ucuaagagcaaacagauca

SEQ ID NO: 2043452 - RNA, 19 nt, Artificial Sequence
  Description of Artificial Sequence: Synthetic oligonucleotide
  Sense strand starting at position 3438 of SEQ ID NO: 1881423
cuuggugcauauuuguuaa

SEQ ID NO: 2043453 - RNA, 19 nt, Artificial Sequence
  Description of Artificial Sequence: Synthetic oligonucleotide
  Antisense strand to SEQ ID NO: 2043452
uuaacaaauaugcaccaag

SEQ ID NO: 2043454 - RNA, 19 nt, Artificial Sequence
  Description of Artificial Sequence: Synthetic oligonucleotide
  Sense strand starting at position 3440 of SEQ ID NO: 1881423
uggugcauauuuguuaaau

SEQ ID NO: 2043455 - RNA, 19 nt, Artificial Sequence
  Description of Artificial Sequence: Synthetic oligonucleotide
  Antisense strand to SEQ ID NO: 2043454
auuuaacaaauaugcacca

SEQ ID NO: 2043456 - RNA, 19 nt, Artificial Sequence
  Description of Artificial Sequence: Synthetic oligonucleotide
  Sense strand starting at position 3442 of SEQ ID NO: 1881423
gugcauauuuguuaaauac

SEQ ID NO: 2043457 - RNA, 19 nt, Artificial Sequence
  Description of Artificial Sequence: Synthetic oligonucleotide
  Antisense strand to SEQ ID NO: 2043456
guauuuaacaaauaugcac

SEQ ID NO: 2043458 - RNA, 19 nt, Artificial Sequence
  Description of Artificial Sequence: Synthetic oligonucleotide
  Sense strand starting at position 3541 of SEQ ID NO: 1881423
auaucaguuuaugccgaaa

SEQ ID NO: 2043459 - RNA, 19 nt, Artificial Sequence
  Description of Artificial Sequence: Synthetic oligonucleotide
  Antisense strand to SEQ ID NO: 2043458
uuucggcauaaacugauau

SEQ ID NO: 2043460 - RNA, 19 nt, Artificial Sequence
  Description of Artificial Sequence: Synthetic oligonucleotide
  Sense strand starting at position 3560 of SEQ ID NO: 1881423
acauauuguuccuagacca

SEQ ID NO: 2043461 - RNA, 19 nt, Artificial Sequence
  Description of Artificial Sequence: Synthetic oligonucleotide
  Antisense strand to SEQ ID NO: 2043460
uggucuaggaacaauaugu

SEQ ID NO: 2043462 - RNA, 19 nt, Artificial Sequence
  Description of Artificial Sequence: Synthetic oligonucleotide
  Sense strand starting at position 3651 of SEQ ID NO: 1881423
ccaauuuggacguguaucu

SEQ ID NO: 2043463 - RNA, 19 nt, Artificial Sequence
  Description of Artificial Sequence: Synthetic oligonucleotide
  Antisense strand to SEQ ID NO: 2043462
agauacacguccaaauugg

SEQ ID NO: 2043464 - RNA, 19 nt, Artificial Sequence
  Description of Artificial Sequence: Synthetic oligonucleotide
  Sense strand starting at position 3658 of SEQ ID NO: 1881423
ggacguguaucucucauca

SEQ ID NO: 2043465 - RNA, 19 nt, Artificial Sequence
  Description of Artificial Sequence: Synthetic oligonucleotide
  Antisense strand to SEQ ID NO: 2043464
ugaugagagauacacgucc

SEQ ID NO: 2043466 - RNA, 19 nt, Artificial Sequence
  Description of Artificial Sequence: Synthetic oligonucleotide
  Sense strand starting at position 3662 of SEQ ID NO: 1881423
guguaucucucaucagagg

SEQ ID NO: 2043467 - RNA, 19 nt, Artificial Sequence
  Description of Artificial Sequence: Synthetic oligonucleotide
  Antisense strand to SEQ ID NO: 2043466
ccucugaugagagauacac

SEQ ID NO: 2043468 - RNA, 19 nt, Artificial Sequence
  Description of Artificial Sequence: Synthetic oligonucleotide
  Sense strand starting at position 3746 of SEQ ID NO: 1881423
gguguaaaucuaugugacc

SEQ ID NO: 2043469 - RNA, 19 nt, Artificial Sequence
  Description of Artificial Sequence: Synthetic oligonucleotide
  Antisense strand to SEQ ID NO: 2043468
ggucacauagauuuacacc

SEQ ID NO: 2043470 - RNA, 19 nt, Artificial Sequence
  Description of Artificial Sequence: Synthetic oligonucleotide
  Sense strand starting at position 3755 of SEQ ID NO: 1881423
cuaugugacccuggauuag

SEQ ID NO: 2043471 - RNA, 19 nt, Artificial Sequence
  Description of Artificial Sequence: Synthetic oligonucleotide
  Antisense strand to SEQ ID NO: 2043470
cuaauccagggucacauag

SEQ ID NO: 2043472 - RNA, 19 nt, Artificial Sequence
  Description of Artificial Sequence: Synthetic oligonucleotide
  Sense strand starting at position 3901 of SEQ ID NO: 1881423
gggagaagggugugcaaau

SEQ ID NO: 2043473 - RNA, 19 nt, Artificial Sequence
  Description of Artificial Sequence: Synthetic oligonucleotide
  Antisense strand to SEQ ID NO: 2043472
auuugcacacccuucuccc

SEQ ID NO: 2043474 - RNA, 19 nt, Artificial Sequence
  Description of Artificial Sequence: Synthetic oligonucleotide
  Sense strand starting at position 3908 of SEQ ID NO: 1881423
gggugugcaaaucgaauau

SEQ ID NO: 2043475 - RNA, 19 nt, Artificial Sequence
  Description of Artificial Sequence: Synthetic oligonucleotide
  Antisense strand to SEQ ID NO: 2043474
auauucgauuugcacaccc

SEQ ID NO: 2043476 - RNA, 19 nt, Artificial Sequence
  Description of Artificial Sequence: Synthetic oligonucleotide
  Sense strand starting at position 3912 of SEQ ID NO: 1881423
gugcaaaucgaauaucuga

SEQ ID NO: 2043477 - RNA, 19 nt, Artificial Sequence
  Description of Artificial Sequence: Synthetic oligonucleotide
  Antisense strand to SEQ ID NO: 2043476
ucagauauucgauuugcac

SEQ ID NO: 2043478 - RNA, 19 nt, Artificial Sequence
  Description of Artificial Sequence: Synthetic oligonucleotide
  Sense strand starting at position 3919 of SEQ ID NO: 1881423
ucgaauaucugauaaggau

SEQ ID NO: 2043479 - RNA, 19 nt, Artificial Sequence
  Description of Artificial Sequence: Synthetic oligonucleotide
  Antisense strand to SEQ ID NO: 2043478
auccuuaucagauauucga

SEQ ID NO: 2043480 - RNA, 19 nt, Artificial Sequence
  Description of Artificial Sequence: Synthetic oligonucleotide
  Sense strand starting at position 339 of SEQ ID NO: 1881424
ggaauuaugcauuaaaguu

SEQ ID NO: 2043481 - RNA, 19 nt, Artificial Sequence
  Description of Artificial Sequence: Synthetic oligonucleotide
  Antisense strand to SEQ ID NO: 2043480
aacuuuaaugcauaauucc

SEQ ID NO: 2043482 - RNA, 19 nt, Artificial Sequence
  Description of Artificial Sequence: Synthetic oligonucleotide
  Sense strand starting at position 571 of SEQ ID NO: 1881424
augugacugacugggauua

SEQ ID NO: 2043483 - RNA, 19 nt, Artificial Sequence
  Description of Artificial Sequence: Synthetic oligonucleotide
  Antisense strand to SEQ ID NO: 2043482
uaaucccagucagucacau

SEQ ID NO: 2043484 - RNA, 19 nt, Artificial Sequence
  Description of Artificial Sequence: Synthetic oligonucleotide
  Sense strand starting at position 572 of SEQ ID NO: 1881424
ugugacugacugggauuau

SEQ ID NO: 2043485 - RNA, 19 nt, Artificial Sequence
  Description of Artificial Sequence: Synthetic oligonucleotide
  Antisense strand to SEQ ID NO: 2043484
auaaucccagucagucaca

SEQ ID NO: 2043486 - RNA, 19 nt, Artificial Sequence
  Description of Artificial Sequence: Synthetic oligonucleotide
  Sense strand starting at position 632 of SEQ ID NO: 1881424
uucuauagcucugcggaaa

SEQ ID NO: 2043487 - RNA, 19 nt, Artificial Sequence
  Description of Artificial Sequence: Synthetic oligonucleotide
  Antisense strand to SEQ ID NO: 2043486
uuuccgcagagcuauagaa

SEQ ID NO: 2043488 - RNA, 19 nt, Artificial Sequence
  Description of Artificial Sequence: Synthetic oligonucleotide
  Sense strand starting at position 785 of SEQ ID NO: 1881424
ucuggaaguccucaugcuu

SEQ ID NO: 2043489 - RNA, 19 nt, Artificial Sequence
  Description of Artificial Sequence: Synthetic oligonucleotide
  Antisense strand to SEQ ID NO: 2043488
aagcaugaggacuuccaga

SEQ ID NO: 2043490 - RNA, 19 nt, Artificial Sequence
  Description of Artificial Sequence: Synthetic oligonucleotide
  Sense strand starting at position 815 of SEQ ID NO: 1881424
ugcuauaauaugcgaggaa

SEQ ID NO: 2043491 - RNA, 19 nt, Artificial Sequence
  Description of Artificial Sequence: Synthetic oligonucleotide
  Antisense strand to SEQ ID NO: 2043490
uuccucgcauauuauagca

SEQ ID NO: 2043492 - RNA, 19 nt, Artificial Sequence
  Description of Artificial Sequence: Synthetic oligonucleotide
  Sense strand starting at position 818 of SEQ ID NO: 1881424
uauaauaugcgaggaacuu

SEQ ID NO: 2043493 - RNA, 19 nt, Artificial Sequence
  Description of Artificial Sequence: Synthetic oligonucleotide
  Antisense strand to SEQ ID NO: 2043492
aaguuccucgcauauuaua

SEQ ID NO: 2043494 - RNA, 19 nt, Artificial Sequence
  Description of Artificial Sequence: Synthetic oligonucleotide
  Sense strand starting at position 992 of SEQ ID NO: 1881424
uguuaaaggccucacugua

SEQ ID NO: 2043495 - RNA, 19 nt, Artificial Sequence
  Description of Artificial Sequence: Synthetic oligonucleotide
  Antisense strand to SEQ ID NO: 2043494
uacagugaggccuuuaaca

SEQ ID NO: 2043496 - RNA, 19 nt, Artificial Sequence
  Description of Artificial Sequence: Synthetic oligonucleotide
  Sense strand starting at position 1054 of SEQ ID NO: 1881424
uuuaucaagucuccuguua

SEQ ID NO: 2043497 - RNA, 19 nt, Artificial Sequence
  Description of Artificial Sequence: Synthetic oligonucleotide
  Antisense strand to SEQ ID NO: 2043496
uaacaggagacuugauaaa

SEQ ID NO: 2043498 - RNA, 19 nt, Artificial Sequence
  Description of Artificial Sequence: Synthetic oligonucleotide
  Sense strand starting at position 1102 of SEQ ID NO: 1881424
auaguacuacucggcuaga

SEQ ID NO: 2043499 - RNA, 19 nt, Artificial Sequence
  Description of Artificial Sequence: Synthetic oligonucleotide
  Antisense strand to SEQ ID NO: 2043498
ucuagccgaguaguacuau

SEQ ID NO: 2043500 - RNA, 19 nt, Artificial Sequence
  Description of Artificial Sequence: Synthetic oligonucleotide
  Sense strand starting at position 1105 of SEQ ID NO: 1881424
guacuacucggcuagagaa

SEQ ID NO: 2043501 - RNA, 19 nt, Artificial Sequence
  Description of Artificial Sequence: Synthetic oligonucleotide
  Antisense strand to SEQ ID NO: 2043500
uucucuagccgaguaguac

SEQ ID NO: 2043502 - RNA, 19 nt, Artificial Sequence
  Description of Artificial Sequence: Synthetic oligonucleotide
  Sense strand starting at position 1786 of SEQ ID NO: 1881424
aagggugucgcgaagucuu

SEQ ID NO: 2043503 - RNA, 19 nt, Artificial Sequence
  Description of Artificial Sequence: Synthetic oligonucleotide
  Antisense strand to SEQ ID NO: 2043502
aagacuucgcgacacccuu

SEQ ID NO: 2043504 - RNA, 19 nt, Artificial Sequence
  Description of Artificial Sequence: Synthetic oligonucleotide
  Sense strand starting at position 1791 of SEQ ID NO: 1881424
ugucgcgaagucuuagcua

SEQ ID NO: 2043505 - RNA, 19 nt, Artificial Sequence
  Description of Artificial Sequence: Synthetic oligonucleotide
  Antisense strand to SEQ ID NO: 2043504
uagcuaagacuucgcgaca

SEQ ID NO: 2043506 - RNA, 19 nt, Artificial Sequence
  Description of Artificial Sequence: Synthetic oligonucleotide
  Sense strand starting at position 1796 of SEQ ID NO: 1881424
cgaagucuuagcuacgaau

SEQ ID NO: 2043507 - RNA, 19 nt, Artificial Sequence
  Description of Artificial Sequence: Synthetic oligonucleotide
  Antisense strand to SEQ ID NO: 2043506
auucguagcuaagacuucg

SEQ ID NO: 2043508 - RNA, 19 nt, Artificial Sequence
  Description of Artificial Sequence: Synthetic oligonucleotide
  Sense strand starting at position 1798 of SEQ ID NO: 1881424
aagucuuagcuacgaauca

SEQ ID NO: 2043509 - RNA, 19 nt, Artificial Sequence
  Description of Artificial Sequence: Synthetic oligonucleotide
  Antisense strand to SEQ ID NO: 2043508
ugauucguagcuaagacuu

SEQ ID NO: 2043510 - RNA, 19 nt, Artificial Sequence
  Description of Artificial Sequence: Synthetic oligonucleotide
  Sense strand starting at position 2009 of SEQ ID NO: 1881424
aagcgcucugauuggauau

SEQ ID NO: 2043511 - RNA, 19 nt, Artificial Sequence
  Description of Artificial Sequence: Synthetic oligonucleotide
  Antisense strand to SEQ ID NO: 2043510
auauccaaucagagcgcuu

SEQ ID NO: 2043512 - RNA, 19 nt, Artificial Sequence
  Description of Artificial Sequence: Synthetic oligonucleotide
  Sense strand starting at position 2043 of SEQ ID NO: 1881424
gcccucaggcuuugaauga

SEQ ID NO: 2043513 - RNA, 19 nt, Artificial Sequence
  Description of Artificial Sequence: Synthetic oligonucleotide
  Antisense strand to SEQ ID NO: 2043512
ucauucaaagccugagggc

SEQ ID NO: 2043514 - RNA, 19 nt, Artificial Sequence
  Description of Artificial Sequence: Synthetic oligonucleotide
  Sense strand starting at position 2047 of SEQ ID NO: 1881424
ucaggcuuugaaugacaga

SEQ ID NO: 2043515 - RNA, 19 nt, Artificial Sequence
  Description of Artificial Sequence: Synthetic oligonucleotide
  Antisense strand to SEQ ID NO: 2043514
ucugucauucaaagccuga

SEQ ID NO: 2043516 - RNA, 19 nt, Artificial Sequence
  Description of Artificial Sequence: Synthetic oligonucleotide
  Sense strand starting at position 2095 of SEQ ID NO: 1881424
gcaagagugacagacuagu

SEQ ID NO: 2043517 - RNA, 19 nt, Artificial Sequence
  Description of Artificial Sequence: Synthetic oligonucleotide
  Antisense strand to SEQ ID NO: 2043516
acuagucugucacucuugc

SEQ ID NO: 2043518 - RNA, 19 nt, Artificial Sequence
  Description of Artificial Sequence: Synthetic oligonucleotide
  Sense strand starting at position 2912 of SEQ ID NO: 1881424
agcuucuuguuaguugaga

SEQ ID NO: 2043519 - RNA, 19 nt, Artificial Sequence
  Description of Artificial Sequence: Synthetic oligonucleotide
  Antisense strand to SEQ ID NO: 2043518
ucucaacuaacaagaagcu

SEQ ID NO: 2043520 - RNA, 19 nt, Artificial Sequence
  Description of Artificial Sequence: Synthetic oligonucleotide
  Sense strand starting at position 2914 of SEQ ID NO: 1881424
cuucuuguuaguugagaug

SEQ ID NO: 2043521 - RNA, 19 nt, Artificial Sequence
  Description of Artificial Sequence: Synthetic oligonucleotide
  Antisense strand to SEQ ID NO: 2043520
caucucaacuaacaagaag

SEQ ID NO: 2043522 - RNA, 19 nt, Artificial Sequence
  Description of Artificial Sequence: Synthetic oligonucleotide
  Sense strand starting at position 3159 of SEQ ID NO: 1881424
cagggaaguguuugcuaug

SEQ ID NO: 2043523 - RNA, 19 nt, Artificial Sequence
  Description of Artificial Sequence: Synthetic oligonucleotide
  Antisense strand to SEQ ID NO: 2043522
cauagcaaacacuucccug

SEQ ID NO: 2043524 - RNA, 19 nt, Artificial Sequence
  Description of Artificial Sequence: Synthetic oligonucleotide
  Sense strand starting at position 3202 of SEQ ID NO: 1881424
gucauaaucugaguauuga

SEQ ID NO: 2043525 - RNA, 19 nt, Artificial Sequence
  Description of Artificial Sequence: Synthetic oligonucleotide
  Antisense strand to SEQ ID NO: 2043524
ucaauacucagauuaugac

SEQ ID NO: 2043526 - RNA, 19 nt, Artificial Sequence
  Description of Artificial Sequence: Synthetic oligonucleotide
  Sense strand starting at position 3228 of SEQ ID NO: 1881424
cucuaauacucauuguguu

SEQ ID NO: 2043527 - RNA, 19 nt, Artificial Sequence
  Description of Artificial Sequence: Synthetic oligonucleotide
  Antisense strand to SEQ ID NO: 2043526
aacacaaugaguauuagag

SEQ ID NO: 2043528 - RNA, 19 nt, Artificial Sequence
  Description of Artificial Sequence: Synthetic oligonucleotide
  Sense strand starting at position 3229 of SEQ ID NO: 1881424
ucuaauacucauuguguuc

SEQ ID NO: 2043529 - RNA, 19 nt, Artificial Sequence
  Description of Artificial Sequence: Synthetic oligonucleotide
  Antisense strand to SEQ ID NO: 2043528
gaacacaaugaguauuaga

SEQ ID NO: 2043530 - RNA, 19 nt, Artificial Sequence
  Description of Artificial Sequence: Synthetic oligonucleotide
  Sense strand starting at position 3282 of SEQ ID NO: 1881424
guccuaaucuacuuucugu

SEQ ID NO: 2043531 - RNA, 19 nt, Artificial Sequence
  Description of Artificial Sequence: Synthetic oligonucleotide
  Antisense strand to SEQ ID NO: 2043530
acagaaaguagauuaggac

SEQ ID NO: 2043532 - RNA, 19 nt, Artificial Sequence
  Description of Artificial Sequence: Synthetic oligonucleotide
  Sense strand starting at position 3288 of SEQ ID NO: 1881424
aucuacuuucuguggaacu

SEQ ID NO: 2043533 - RNA, 19 nt, Artificial Sequence
  Description of Artificial Sequence: Synthetic oligonucleotide
  Antisense strand to SEQ ID NO: 2043532
aguuccacagaaaguagau

SEQ ID NO: 2043534 - RNA, 19 nt, Artificial Sequence
  Description of Artificial Sequence: Synthetic oligonucleotide
  Sense strand starting at position 3290 of SEQ ID NO: 1881424
cuacuuucuguggaacuau

SEQ ID NO: 2043535 - RNA, 19 nt, Artificial Sequence
  Description of Artificial Sequence: Synthetic oligonucleotide
  Antisense strand to SEQ ID NO: 2043534
auaguuccacagaaaguag

SEQ ID NO: 2043536 - RNA, 19 nt, Artificial Sequence
  Description of Artificial Sequence: Synthetic oligonucleotide
  Sense strand starting at position 3313 of SEQ ID NO: 1881424
ccuaaugcucuauggucau

SEQ ID NO: 2043537 - RNA, 19 nt, Artificial Sequence
  Description of Artificial Sequence: Synthetic oligonucleotide
  Antisense strand to SEQ ID NO: 2043536
augaccauagagcauuagg

SEQ ID NO: 2043538 - RNA, 19 nt, Artificial Sequence
  Description of Artificial Sequence: Synthetic oligonucleotide
  Sense strand starting at position 3319 of SEQ ID NO: 1881424
gcucuauggucauuacuca

SEQ ID NO: 2043539 - RNA, 19 nt, Artificial Sequence
  Description of Artificial Sequence: Synthetic oligonucleotide
  Antisense strand to SEQ ID NO: 2043538
ugaguaaugaccauagagc

SEQ ID NO: 2043540 - RNA, 19 nt, Artificial Sequence
  Description of Artificial Sequence: Synthetic oligonucleotide
  Sense strand starting at position 3320 of SEQ ID NO: 1881424
cucuauggucauuacucau

SEQ ID NO: 2043541 - RNA, 19 nt, Artificial Sequence
  Description of Artificial Sequence: Synthetic oligonucleotide
  Antisense strand to SEQ ID NO: 2043540
augaguaaugaccauagag

SEQ ID NO: 2043542 - RNA, 19 nt, Artificial Sequence
  Description of Artificial Sequence: Synthetic oligonucleotide
  Sense strand starting at position 3449 of SEQ ID NO: 1881424
ccuguuagcuaugcaugaa

SEQ ID NO: 2043543 - RNA, 19 nt, Artificial Sequence
  Description of Artificial Sequence: Synthetic oligonucleotide
  Antisense strand to SEQ ID NO: 2043542
uucaugcauagcuaacagg

SEQ ID NO: 2043544 - RNA, 19 nt, Artificial Sequence
  Description of Artificial Sequence: Synthetic oligonucleotide
  Sense strand starting at position 3492 of SEQ ID NO: 1881424
guccuacuuggucauagua

SEQ ID NO: 2043545 - RNA, 19 nt, Artificial Sequence
  Description of Artificial Sequence: Synthetic oligonucleotide
  Antisense strand to SEQ ID NO: 2043544
uacuaugaccaaguaggac

SEQ ID NO: 2043546 - RNA, 19 nt, Artificial Sequence
  Description of Artificial Sequence: Synthetic oligonucleotide
  Sense strand starting at position 3723 of SEQ ID NO: 1881424
ccagaauccaugugggugu

SEQ ID NO: 2043547 - RNA, 19 nt, Artificial Sequence
  Description of Artificial Sequence: Synthetic oligonucleotide
  Antisense strand to SEQ ID NO: 2043546
acacccacauggauucugg

SEQ ID NO: 2043548 - RNA, 19 nt, Artificial Sequence
  Description of Artificial Sequence: Synthetic oligonucleotide
  Sense strand starting at position 3726 of SEQ ID NO: 1881424
gaauccauguggguguauu

SEQ ID NO: 2043549 - RNA, 19 nt, Artificial Sequence
  Description of Artificial Sequence: Synthetic oligonucleotide
  Antisense strand to SEQ ID NO: 2043548
aauacacccacauggauuc

SEQ ID NO: 2043550 - RNA, 19 nt, Artificial Sequence
  Description of Artificial Sequence: Synthetic oligonucleotide
  Sense strand starting at position 3727 of SEQ ID NO: 1881424
aauccauguggguguauuu

SEQ ID NO: 2043551 - RNA, 19 nt, Artificial Sequence
  Description of Artificial Sequence: Synthetic oligonucleotide
  Antisense strand to SEQ ID NO: 2043550
aaauacacccacauggauu

SEQ ID NO: 2043552 - RNA, 19 nt, Artificial Sequence
  Description of Artificial Sequence: Synthetic oligonucleotide
  Sense strand starting at position 3737 of SEQ ID NO: 1881424
gguguauuugacugagcac

SEQ ID NO: 2043553 - RNA, 19 nt, Artificial Sequence
  Description of Artificial Sequence: Synthetic oligonucleotide
  Antisense strand to SEQ ID NO: 2043552
gugcucagucaaauacacc

SEQ ID NO: 2043554 - RNA, 19 nt, Artificial Sequence
  Description of Artificial Sequence: Synthetic oligonucleotide
  Sense strand starting at position 3943 of SEQ ID NO: 1881424
ugaccaagccaguauggau

SEQ ID NO: 2043555 - RNA, 19 nt, Artificial Sequence
  Description of Artificial Sequence: Synthetic oligonucleotide
  Antisense strand to SEQ ID NO: 2043554
auccauacuggcuugguca

SEQ ID NO: 2043556 - RNA, 19 nt, Artificial Sequence
  Description of Artificial Sequence: Synthetic oligonucleotide
  Sense strand starting at position 3950 of SEQ ID NO: 1881424
gccaguauggauuaugcaa

SEQ ID NO: 2043557 - RNA, 19 nt, Artificial Sequence
  Description of Artificial Sequence: Synthetic oligonucleotide
  Antisense strand to SEQ ID NO: 2043556
uugcauaauccauacuggc

SEQ ID NO: 2043558 - RNA, 19 nt, Artificial Sequence
  Description of Artificial Sequence: Synthetic oligonucleotide
  Sense strand starting at position 3957 of SEQ ID NO: 1881424
uggauuaugcaauaaguuu

SEQ ID NO: 2043559 - RNA, 19 nt, Artificial Sequence
  Description of Artificial Sequence: Synthetic oligonucleotide
  Antisense strand to SEQ ID NO: 2043558
aaacuuauugcauaaucca

SEQ ID NO: 2043560 - RNA, 19 nt, Artificial Sequence
  Description of Artificial Sequence: Synthetic oligonucleotide
  Sense strand starting at position 175 of SEQ ID NO: 1881425
caccuucucugugcugaga

SEQ ID NO: 2043561 - RNA, 19 nt, Artificial Sequence
  Description of Artificial Sequence: Synthetic oligonucleotide
  Antisense strand to SEQ ID NO: 2043560
ucucagcacagagaaggug

SEQ ID NO: 2043562 - RNA, 19 nt, Artificial Sequence
  Description of Artificial Sequence: Synthetic oligonucleotide
  Sense strand starting at position 487 of SEQ ID NO: 1881425
gggcacagcuccuucuuua

SEQ ID NO: 2043563 - RNA, 19 nt, Artificial Sequence
  Description of Artificial Sequence: Synthetic oligonucleotide
  Antisense strand to SEQ ID NO: 2043562
uaaagaaggagcugugccc

SEQ ID NO: 2043564 - RNA, 19 nt, Artificial Sequence
  Description of Artificial Sequence: Synthetic oligonucleotide
  Sense strand starting at position 893 of SEQ ID NO: 1881425
cgcagagcucaucaggaau

SEQ ID NO: 2043565 - RNA, 19 nt, Artificial Sequence
  Description of Artificial Sequence: Synthetic oligonucleotide
  Antisense strand to SEQ ID NO: 2043564
auuccugaugagcucugcg

SEQ ID NO: 2043566 - RNA, 19 nt, Artificial Sequence
  Description of Artificial Sequence: Synthetic oligonucleotide
  Sense strand starting at position 1546 of SEQ ID NO: 1881425
ggugguccuccauguuaaa

SEQ ID NO: 2043567 - RNA, 19 nt, Artificial Sequence
  Description of Artificial Sequence: Synthetic oligonucleotide
  Antisense strand to SEQ ID NO: 2043566
uuuaacauggaggaccacc

SEQ ID NO: 2043568 - RNA, 19 nt, Artificial Sequence
  Description of Artificial Sequence: Synthetic oligonucleotide
  Sense strand starting at position 1688 of SEQ ID NO: 1881425
ggacacugcccgugaaaug

SEQ ID NO: 2043569 - RNA, 19 nt, Artificial Sequence
  Description of Artificial Sequence: Synthetic oligonucleotide
  Antisense strand to SEQ ID NO: 2043568
cauuucacgggcagugucc

SEQ ID NO: 2043570 - RNA, 19 nt, Artificial Sequence
  Description of Artificial Sequence: Synthetic oligonucleotide
  Sense strand starting at position 1789 of SEQ ID NO: 1881425
ccaagaaucagccgggaca

SEQ ID NO: 2043571 - RNA, 19 nt, Artificial Sequence
  Description of Artificial Sequence: Synthetic oligonucleotide
  Antisense strand to SEQ ID NO: 2043570
ugucccggcugauucuugg

SEQ ID NO: 2043572 - RNA, 19 nt, Artificial Sequence
  Description of Artificial Sequence: Synthetic oligonucleotide
  Sense strand starting at position 2145 of SEQ ID NO: 1881425
ugggaauucugggaaauau

SEQ ID NO: 2043573 - RNA, 19 nt, Artificial Sequence
  Description of Artificial Sequence: Synthetic oligonucleotide
  Antisense strand to SEQ ID NO: 2043572
auauuucccagaauuccca

SEQ ID NO: 2043574 - RNA, 19 nt, Artificial Sequence
  Description of Artificial Sequence: Synthetic oligonucleotide
  Sense strand starting at position 2284 of SEQ ID NO: 1881425
gcguguucugaugcuuauc

SEQ ID NO: 2043575 - RNA, 19 nt, Artificial Sequence
  Description of Artificial Sequence: Synthetic oligonucleotide
  Antisense strand to SEQ ID NO: 2043574
gauaagcaucagaacacgc

SEQ ID NO: 2043576 - RNA, 19 nt, Artificial Sequence
  Description of Artificial Sequence: Synthetic oligonucleotide
  Sense strand starting at position 2285 of SEQ ID NO: 1881425
cguguucugaugcuuaucu

SEQ ID NO: 2043577 - RNA, 19 nt, Artificial Sequence
  Description of Artificial Sequence: Synthetic oligonucleotide
  Antisense strand to SEQ ID NO: 2043576
agauaagcaucagaacacg

SEQ ID NO: 2043578 - RNA, 19 nt, Artificial Sequence
  Description of Artificial Sequence: Synthetic oligonucleotide
  Sense strand starting at position 2387 of SEQ ID NO: 1881425
cccaucgcucuggaugaau

SEQ ID NO: 2043579 - RNA, 19 nt, Artificial Sequence
  Description of Artificial Sequence: Synthetic oligonucleotide
  Antisense strand to SEQ ID NO: 2043578
auucauccagagcgauggg

SEQ ID NO: 2043580 - RNA, 19 nt, Artificial Sequence
  Description of Artificial Sequence: Synthetic oligonucleotide
  Sense strand starting at position 2409 of SEQ ID NO: 1881425
ucaggagaauccuuuccuu

SEQ ID NO: 2043581 - RNA, 19 nt, Artificial Sequence
  Description of Artificial Sequence: Synthetic oligonucleotide
  Antisense strand to SEQ ID NO: 2043580
aaggaaaggauucuccuga

SEQ ID NO: 2043582 - RNA, 19 nt, Artificial Sequence
  Description of Artificial Sequence: Synthetic oligonucleotide
  Sense strand starting at position 2412 of SEQ ID NO: 1881425
ggagaauccuuuccuugca

SEQ ID NO: 2043583 - RNA, 19 nt, Artificial Sequence
  Description of Artificial Sequence: Synthetic oligonucleotide
  Antisense strand to SEQ ID NO: 2043582
ugcaaggaaaggauucucc

SEQ ID NO: 2043584 - RNA, 19 nt, Artificial Sequence
  Description of Artificial Sequence: Synthetic oligonucleotide
  Sense strand starting at position 2639 of SEQ ID NO: 1881425
aggugcuuuccaugaguca

SEQ ID NO: 2043585 - RNA, 19 nt, Artificial Sequence
  Description of Artificial Sequence: Synthetic oligonucleotide
  Antisense strand to SEQ ID NO: 2043584
ugacucauggaaagcaccu

SEQ ID NO: 2043586 - RNA, 19 nt, Artificial Sequence
  Description of Artificial Sequence: Synthetic oligonucleotide
  Sense strand starting at position 2640 of SEQ ID NO: 1881425
ggugcuuuccaugagucag

SEQ ID NO: 2043587 - RNA, 19 nt, Artificial Sequence
  Description of Artificial Sequence: Synthetic oligonucleotide
  Antisense strand to SEQ ID NO: 2043586
cugacucauggaaagcacc

SEQ ID NO: 2043588 - RNA, 19 nt, Artificial Sequence
  Description of Artificial Sequence: Synthetic oligonucleotide
  Sense strand starting at position 2856 of SEQ ID NO: 1881425
guaguagagacagguuucu

SEQ ID NO: 2043589 - RNA, 19 nt, Artificial Sequence
  Description of Artificial Sequence: Synthetic oligonucleotide
  Antisense strand to SEQ ID NO: 2043588
agaaaccugucucuacuac

SEQ ID NO: 2043590 - RNA, 19 nt, Artificial Sequence
  Description of Artificial Sequence: Synthetic oligonucleotide
  Sense strand starting at position 3032 of SEQ ID NO: 1881425
ccacgacacccguaagacu

SEQ ID NO: 2043591 - RNA, 19 nt, Artificial Sequence
  Description of Artificial Sequence: Synthetic oligonucleotide
  Antisense strand to SEQ ID NO: 2043590
agucuuacgggugucgugg

SEQ ID NO: 2043592 - RNA, 19 nt, Artificial Sequence
  Description of Artificial Sequence: Synthetic oligonucleotide
  Sense strand starting at position 3040 of SEQ ID NO: 1881425
cccguaagacuuuaaucga

SEQ ID NO: 2043593 - RNA, 19 nt, Artificial Sequence
  Description of Artificial Sequence: Synthetic oligonucleotide
  Antisense strand to SEQ ID NO: 2043592
ucgauuaaagucuuacggg

SEQ ID NO: 2043594 - RNA, 19 nt, Artificial Sequence
  Description of Artificial Sequence: Synthetic oligonucleotide
  Sense strand starting at position 3043 of SEQ ID NO: 1881425
guaagacuuuaaucgagca

SEQ ID NO: 2043595 - RNA, 19 nt, Artificial Sequence
  Description of Artificial Sequence: Synthetic oligonucleotide
  Antisense strand to SEQ ID NO: 2043594
ugcucgauuaaagucuuac

SEQ ID NO: 2043596 - RNA, 19 nt, Artificial Sequence
  Description of Artificial Sequence: Synthetic oligonucleotide
  Sense strand starting at position 3048 of SEQ ID NO: 1881425
acuuuaaucgagcagaaau

SEQ ID NO: 2043597 - RNA, 19 nt, Artificial Sequence
  Description of Artificial Sequence: Synthetic oligonucleotide
  Antisense strand to SEQ ID NO: 2043596
auuucugcucgauuaaagu

SEQ ID NO: 2043598 - RNA, 19 nt, Artificial Sequence
  Description of Artificial Sequence: Synthetic oligonucleotide
  Sense strand starting at position 3065 of SEQ ID NO: 1881425
auccuuucucuguggguua

SEQ ID NO: 2043599 - RNA, 19 nt, Artificial Sequence
  Description of Artificial Sequence: Synthetic oligonucleotide
  Antisense strand to SEQ ID NO: 2043598
uaacccacagagaaaggau

SEQ ID NO: 2043600 - RNA, 19 nt, Artificial Sequence
  Description of Artificial Sequence: Synthetic oligonucleotide
  Sense strand starting at position 3218 of SEQ ID NO: 1881425
ggaggaaaccgucaggcau

SEQ ID NO: 2043601 - RNA, 19 nt, Artificial Sequence
  Description of Artificial Sequence: Synthetic oligonucleotide
  Antisense strand to SEQ ID NO: 2043600
augccugacgguuuccucc

SEQ ID NO: 2043602 - RNA, 19 nt, Artificial Sequence
  Description of Artificial Sequence: Synthetic oligonucleotide
  Sense strand starting at position 3361 of SEQ ID NO: 1881425
guuccaagaucuuucuuga

SEQ ID NO: 2043603 - RNA, 19 nt, Artificial Sequence
  Description of Artificial Sequence: Synthetic oligonucleotide
  Antisense strand to SEQ ID NO: 2043602
ucaagaaagaucuuggaac

SEQ ID NO: 2043604 - RNA, 19 nt, Artificial Sequence
  Description of Artificial Sequence: Synthetic oligonucleotide
  Sense strand starting at position 3438 of SEQ ID NO: 1881425
gaaacuggguucucgcauu

SEQ ID NO: 2043605 - RNA, 19 nt, Artificial Sequence
  Description of Artificial Sequence: Synthetic oligonucleotide
  Antisense strand to SEQ ID NO: 2043604
aaugcgagaacccaguuuc

SEQ ID NO: 2043606 - RNA, 19 nt, Artificial Sequence
  Description of Artificial Sequence: Synthetic oligonucleotide
  Sense strand starting at position 3448 of SEQ ID NO: 1881425
ucucgcauuccauagguau

SEQ ID NO: 2043607 - RNA, 19 nt, Artificial Sequence
  Description of Artificial Sequence: Synthetic oligonucleotide
  Antisense strand to SEQ ID NO: 2043606
auaccuauggaaugcgaga

SEQ ID NO: 2043608 - RNA, 19 nt, Artificial Sequence
  Description of Artificial Sequence: Synthetic oligonucleotide
  Sense strand starting at position 3451 of SEQ ID NO: 1881425
cgcauuccauagguauaau

SEQ ID NO: 2043609 - RNA, 19 nt, Artificial Sequence
  Description of Artificial Sequence: Synthetic oligonucleotide
  Antisense strand to SEQ ID NO: 2043608
auuauaccuauggaaugcg

SEQ ID NO: 2043610 - RNA, 19 nt, Artificial Sequence
  Description of Artificial Sequence: Synthetic oligonucleotide
  Sense strand starting at position 3474 of SEQ ID NO: 1881425
gcucuuaauuuccagagac

SEQ ID NO: 2043611 - RNA, 19 nt, Artificial Sequence
  Description of Artificial Sequence: Synthetic oligonucleotide
  Antisense strand to SEQ ID NO: 2043610
gucucuggaaauuaagagc

SEQ ID NO: 2043612 - RNA, 19 nt, Artificial Sequence
  Description of Artificial Sequence: Synthetic oligonucleotide
  Sense strand starting at position 3503 of SEQ ID NO: 1881425
uguguauugggaugggaaa

SEQ ID NO: 2043613 - RNA, 19 nt, Artificial Sequence
  Description of Artificial Sequence: Synthetic oligonucleotide
  Antisense strand to SEQ ID NO: 2043612
uuucccaucccaauacaca

SEQ ID NO: 2043614 - RNA, 19 nt, Artificial Sequence
  Description of Artificial Sequence: Synthetic oligonucleotide
  Sense strand starting at position 3524 of SEQ ID NO: 1881425
agagcucagccauaaucau

SEQ ID NO: 2043615 - RNA, 19 nt, Artificial Sequence
  Description of Artificial Sequence: Synthetic oligonucleotide
  Antisense strand to SEQ ID NO: 2043614
augauuauggcugagcucu

SEQ ID NO: 2043616 - RNA, 19 nt, Artificial Sequence
  Description of Artificial Sequence: Synthetic oligonucleotide
  Sense strand starting at position 3531 of SEQ ID NO: 1881425
agccauaaucaucaugguu

SEQ ID NO: 2043617 - RNA, 19 nt, Artificial Sequence
  Description of Artificial Sequence: Synthetic oligonucleotide
  Antisense strand to SEQ ID NO: 2043616
aaccaugaugauuauggcu

SEQ ID NO: 2043618 - RNA, 19 nt, Artificial Sequence
  Description of Artificial Sequence: Synthetic oligonucleotide
  Sense strand starting at position 3631 of SEQ ID NO: 1881425
ccuugaucugcacaaagca

SEQ ID NO: 2043619 - RNA, 19 nt, Artificial Sequence
  Description of Artificial Sequence: Synthetic oligonucleotide
  Antisense strand to SEQ ID NO: 2043618
ugcuuugugcagaucaagg

SEQ ID NO: 2043620 - RNA, 19 nt, Artificial Sequence
  Description of Artificial Sequence: Synthetic oligonucleotide
  Sense strand starting at position 3669 of SEQ ID NO: 1881425
ccuaucuggcucugggaau

SEQ ID NO: 2043621 - RNA, 19 nt, Artificial Sequence
  Description of Artificial Sequence: Synthetic oligonucleotide
  Antisense strand to SEQ ID NO: 2043620
auucccagagccagauagg

SEQ ID NO: 2043622 - RNA, 19 nt, Artificial Sequence
  Description of Artificial Sequence: Synthetic oligonucleotide
  Sense strand starting at position 3696 of SEQ ID NO: 1881425
cugcuugagucaccgagaa

SEQ ID NO: 2043623 - RNA, 19 nt, Artificial Sequence
  Description of Artificial Sequence: Synthetic oligonucleotide
  Antisense strand to SEQ ID NO: 2043622
uucucggugacucaagcag

SEQ ID NO: 2043624 - RNA, 19 nt, Artificial Sequence
  Description of Artificial Sequence: Synthetic oligonucleotide
  Sense strand starting at position 3698 of SEQ ID NO: 1881425
gcuugagucaccgagaaac

SEQ ID NO: 2043625 - RNA, 19 nt, Artificial Sequence
  Description of Artificial Sequence: Synthetic oligonucleotide
  Antisense strand to SEQ ID NO: 2043624
guuucucggugacucaagc

SEQ ID NO: 2043626 - RNA, 19 nt, Artificial Sequence
  Description of Artificial Sequence: Synthetic oligonucleotide
  Sense strand starting at position 3700 of SEQ ID NO: 1881425
uugagucaccgagaaacuu

SEQ ID NO: 2043627 - RNA, 19 nt, Artificial Sequence
  Description of Artificial Sequence: Synthetic oligonucleotide
  Antisense strand to SEQ ID NO: 2043626
aaguuucucggugacucaa

SEQ ID NO: 2043628 - RNA, 19 nt, Artificial Sequence
  Description of Artificial Sequence: Synthetic oligonucleotide
  Sense strand starting at position 3870 of SEQ ID NO: 1881425
agugaugugcaccaaggaa

SEQ ID NO: 2043629 - RNA, 19 nt, Artificial Sequence
  Description of Artificial Sequence: Synthetic oligonucleotide
  Antisense strand to SEQ ID NO: 2043628
uuccuuggugcacaucacu

SEQ ID NO: 2043630 - RNA, 19 nt, Artificial Sequence
  Description of Artificial Sequence: Synthetic oligonucleotide
  Sense strand starting at position 3883 of SEQ ID NO: 1881425
aaggaagacuccucacagu

SEQ ID NO: 2043631 - RNA, 19 nt, Artificial Sequence
  Description of Artificial Sequence: Synthetic oligonucleotide
  Antisense strand to SEQ ID NO: 2043630
acugugaggagucuuccuu

SEQ ID NO: 2043632 - RNA, 19 nt, Artificial Sequence
  Description of Artificial Sequence: Synthetic oligonucleotide
  Sense strand starting at position 3924 of SEQ ID NO: 1881425
gucucugaccucgagcaaa

SEQ ID NO: 2043633 - RNA, 19 nt, Artificial Sequence
  Description of Artificial Sequence: Synthetic oligonucleotide
  Antisense strand to SEQ ID NO: 2043632
uuugcucgaggucagagac

SEQ ID NO: 2043634 - RNA, 19 nt, Artificial Sequence
  Description of Artificial Sequence: Synthetic oligonucleotide
  Sense strand starting at position 3935 of SEQ ID NO: 1881425
cgagcaaauuccuugggca

SEQ ID NO: 2043635 - RNA, 19 nt, Artificial Sequence
  Description of Artificial Sequence: Synthetic oligonucleotide
  Antisense strand to SEQ ID NO: 2043634
ugcccaaggaauuugcucg

SEQ ID NO: 2043636 - RNA, 19 nt, Artificial Sequence
  Description of Artificial Sequence: Synthetic oligonucleotide
  Sense strand starting at position 3936 of SEQ ID NO: 1881425
gagcaaauuccuugggcaa

SEQ ID NO: 2043637 - RNA, 19 nt, Artificial Sequence
  Description of Artificial Sequence: Synthetic oligonucleotide
  Antisense strand to SEQ ID NO: 2043636
uugcccaaggaauuugcuc

SEQ ID NO: 2043638 - RNA, 19 nt, Artificial Sequence
  Description of Artificial Sequence: Synthetic oligonucleotide
  Sense strand starting at position 3958 of SEQ ID NO: 1881425
gaccauguggcucaccaau

SEQ ID NO: 2043639 - RNA, 19 nt, Artificial Sequence
  Description of Artificial Sequence: Synthetic oligonucleotide
  Antisense strand to SEQ ID NO: 2043638
auuggugagccacaugguc

SEQ ID NO: 2043640 - RNA, 19 nt, Artificial Sequence
  Description of Artificial Sequence: Synthetic oligonucleotide
  Sense strand starting at position 95 of SEQ ID NO: 1881426
uuuaacuaguuaucagaag

SEQ ID NO: 2043641 - RNA, 19 nt, Artificial Sequence
  Description of Artificial Sequence: Synthetic oligonucleotide
  Antisense strand to SEQ ID NO: 2043640
cuucugauaacuaguuaaa

SEQ ID NO: 2043642 - RNA, 19 nt, Artificial Sequence
  Description of Artificial Sequence: Synthetic oligonucleotide
  Sense strand starting at position 581 of SEQ ID NO: 1881426
agggucuuugauggacaau

SEQ ID NO: 2043643 - RNA, 19 nt, Artificial Sequence
  Description of Artificial Sequence: Synthetic oligonucleotide
  Antisense strand to SEQ ID NO: 2043642
auuguccaucaaagacccu

SEQ ID NO: 2043644 - RNA, 19 nt, Artificial Sequence
  Description of Artificial Sequence: Synthetic oligonucleotide
  Sense strand starting at position 662 of SEQ ID NO: 1881426
caccuacaggcuugaaagu

SEQ ID NO: 2043645 - RNA, 19 nt, Artificial Sequence
  Description of Artificial Sequence: Synthetic oligonucleotide
  Antisense strand to SEQ ID NO: 2043644
acuuucaagccuguaggug

SEQ ID NO: 2043646 - RNA, 19 nt, Artificial Sequence
  Description of Artificial Sequence: Synthetic oligonucleotide
  Sense strand starting at position 677 of SEQ ID NO: 1881426
aaguguauuuacgcaaguu

SEQ ID NO: 2043647 - RNA, 19 nt, Artificial Sequence
  Description of Artificial Sequence: Synthetic oligonucleotide
  Antisense strand to SEQ ID NO: 2043646
aacuugcguaaauacacuu

SEQ ID NO: 2043648 - RNA, 19 nt, Artificial Sequence
  Description of Artificial Sequence: Synthetic oligonucleotide
  Sense strand starting at position 678 of SEQ ID NO: 1881426
aguguauuuacgcaaguuc

SEQ ID NO: 2043649 - RNA, 19 nt, Artificial Sequence
  Description of Artificial Sequence: Synthetic oligonucleotide
  Antisense strand to SEQ ID NO: 2043648
gaacuugcguaaauacacu

SEQ ID NO: 2043650 - RNA, 19 nt, Artificial Sequence
  Description of Artificial Sequence: Synthetic oligonucleotide
  Sense strand starting at position 764 of SEQ ID NO: 1881426
ucucauuauggcugggaau

SEQ ID NO: 2043651 - RNA, 19 nt, Artificial Sequence
  Description of Artificial Sequence: Synthetic oligonucleotide
  Antisense strand to SEQ ID NO: 2043650
auucccagccauaaugaga

SEQ ID NO: 2043652 - RNA, 19 nt, Artificial Sequence
  Description of Artificial Sequence: Synthetic oligonucleotide
  Sense strand starting at position 765 of SEQ ID NO: 1881426
cucauuauggcugggaaua

SEQ ID NO: 2043653 - RNA, 19 nt, Artificial Sequence
  Description of Artificial Sequence: Synthetic oligonucleotide
  Antisense strand to SEQ ID NO: 2043652
uauucccagccauaaugag

SEQ ID NO: 2043654 - RNA, 19 nt, Artificial Sequence
  Description of Artificial Sequence: Synthetic oligonucleotide
  Sense strand starting at position 766 of SEQ ID NO: 1881426
ucauuauggcugggaauau

SEQ ID NO: 2043655 - RNA, 19 nt, Artificial Sequence
  Description of Artificial Sequence: Synthetic oligonucleotide
  Antisense strand to SEQ ID NO: 2043654
auauucccagccauaauga

SEQ ID NO: 2043656 - RNA, 19 nt, Artificial Sequence
  Description of Artificial Sequence: Synthetic oligonucleotide
  Sense strand starting at position 775 of SEQ ID NO: 1881426
cugggaauaucuuucucac

SEQ ID NO: 2043657 - RNA, 19 nt, Artificial Sequence
  Description of Artificial Sequence: Synthetic oligonucleotide
  Antisense strand to SEQ ID NO: 2043656
gugagaaagauauucccag

SEQ ID NO: 2043658 - RNA, 19 nt, Artificial Sequence
  Description of Artificial Sequence: Synthetic oligonucleotide
  Sense strand starting at position 777 of SEQ ID NO: 1881426
gggaauaucuuucucacag

SEQ ID NO: 2043659 - RNA, 19 nt, Artificial Sequence
  Description of Artificial Sequence: Synthetic oligonucleotide
  Antisense strand to SEQ ID NO: 2043658
cugugagaaagauauuccc

SEQ ID NO: 2043660 - RNA, 19 nt, Artificial Sequence
  Description of Artificial Sequence: Synthetic oligonucleotide
  Sense strand starting at position 778 of SEQ ID NO: 1881426
ggaauaucuuucucacagc

SEQ ID NO: 2043661 - RNA, 19 nt, Artificial Sequence
  Description of Artificial Sequence: Synthetic oligonucleotide
  Antisense strand to SEQ ID NO: 2043660
gcugugagaaagauauucc

SEQ ID NO: 2043662 - RNA, 19 nt, Artificial Sequence
  Description of Artificial Sequence: Synthetic oligonucleotide
  Sense strand starting at position 847 of SEQ ID NO: 1881426
ccaauucugcccuagaaag

SEQ ID NO: 2043663 - RNA, 19 nt, Artificial Sequence
  Description of Artificial Sequence: Synthetic oligonucleotide
  Antisense strand to SEQ ID NO: 2043662
cuuucuagggcagaauugg

SEQ ID NO: 2043664 - RNA, 19 nt, Artificial Sequence
  Description of Artificial Sequence: Synthetic oligonucleotide
  Sense strand starting at position 863 of SEQ ID NO: 1881426
aaguuaauacguuagcaac

SEQ ID NO: 2043665 - RNA, 19 nt, Artificial Sequence
  Description of Artificial Sequence: Synthetic oligonucleotide
  Antisense strand to SEQ ID NO: 2043664
guugcuaacguauuaacuu

SEQ ID NO: 2043666 - RNA, 19 nt, Artificial Sequence
  Description of Artificial Sequence: Synthetic oligonucleotide
  Sense strand starting at position 910 of SEQ ID NO: 1881426
ugacucuucuggucauuaa

SEQ ID NO: 2043667 - RNA, 19 nt, Artificial Sequence
  Description of Artificial Sequence: Synthetic oligonucleotide
  Antisense strand to SEQ ID NO: 2043666
uuaaugaccagaagaguca

SEQ ID NO: 2043668 - RNA, 19 nt, Artificial Sequence
  Description of Artificial Sequence: Synthetic oligonucleotide
  Sense strand starting at position 911 of SEQ ID NO: 1881426
gacucuucuggucauuaag

SEQ ID NO: 2043669 - RNA, 19 nt, Artificial Sequence
  Description of Artificial Sequence: Synthetic oligonucleotide
  Antisense strand to SEQ ID NO: 2043668
cuuaaugaccagaagaguc

SEQ ID NO: 2043670 - RNA, 19 nt, Artificial Sequence
  Description of Artificial Sequence: Synthetic oligonucleotide
  Sense strand starting at position 914 of SEQ ID NO: 1881426
ucuucuggucauuaagcaa

SEQ ID NO: 2043671 - RNA, 19 nt, Artificial Sequence
  Description of Artificial Sequence: Synthetic oligonucleotide
  Antisense strand to SEQ ID NO: 2043670
uugcuuaaugaccagaaga

SEQ ID NO: 2043672 - RNA, 19 nt, Artificial Sequence
  Description of Artificial Sequence: Synthetic oligonucleotide
  Sense strand starting at position 969 of SEQ ID NO: 1881426
aagauaaugguacguaaag

SEQ ID NO: 2043673 - RNA, 19 nt, Artificial Sequence
  Description of Artificial Sequence: Synthetic oligonucleotide
  Antisense strand to SEQ ID NO: 2043672
cuuuacguaccauuaucuu

SEQ ID NO: 2043674 - RNA, 19 nt, Artificial Sequence
  Description of Artificial Sequence: Synthetic oligonucleotide
  Sense strand starting at position 978 of SEQ ID NO: 1881426
guacguaaaggcuauuaac

SEQ ID NO: 2043675 - RNA, 19 nt, Artificial Sequence
  Description of Artificial Sequence: Synthetic oligonucleotide
  Antisense strand to SEQ ID NO: 2043674
guuaauagccuuuacguac

SEQ ID NO: 2043676 - RNA, 19 nt, Artificial Sequence
  Description of Artificial Sequence: Synthetic oligonucleotide
  Sense strand starting at position 1150 of SEQ ID NO: 1881426
cccugauuccagcaguuag

SEQ ID NO: 2043677 - RNA, 19 nt, Artificial Sequence
  Description of Artificial Sequence: Synthetic oligonucleotide
  Antisense strand to SEQ ID NO: 2043676
cuaacugcuggaaucaggg

SEQ ID NO: 2043678 - RNA, 19 nt, Artificial Sequence
  Description of Artificial Sequence: Synthetic oligonucleotide
  Sense strand starting at position 1261 of SEQ ID NO: 1881426
cuaaguggcagguaaagua

SEQ ID NO: 2043679 - RNA, 19 nt, Artificial Sequence
  Description of Artificial Sequence: Synthetic oligonucleotide
  Antisense strand to SEQ ID NO: 2043678
uacuuuaccugccacuuag

SEQ ID NO: 2043680 - RNA, 19 nt, Artificial Sequence
  Description of Artificial Sequence: Synthetic oligonucleotide
  Sense strand starting at position 1434 of SEQ ID NO: 1881426
cugcuacuugauuaaagca

SEQ ID NO: 2043681 - RNA, 19 nt, Artificial Sequence
  Description of Artificial Sequence: Synthetic oligonucleotide
  Antisense strand to SEQ ID NO: 2043680
ugcuuuaaucaaguagcag

SEQ ID NO: 2043682 - RNA, 19 nt, Artificial Sequence
  Description of Artificial Sequence: Synthetic oligonucleotide
  Sense strand starting at position 1450 of SEQ ID NO: 1881426
gcacaaaggccauaacuau

SEQ ID NO: 2043683 - RNA, 19 nt, Artificial Sequence
  Description of Artificial Sequence: Synthetic oligonucleotide
  Antisense strand to SEQ ID NO: 2043682
auaguuauggccuuugugc

SEQ ID NO: 2043684 - RNA, 19 nt, Artificial Sequence
  Description of Artificial Sequence: Synthetic oligonucleotide
  Sense strand starting at position 2228 of SEQ ID NO: 1881426
ugcuguguacuauggauuu

SEQ ID NO: 2043685 - RNA, 19 nt, Artificial Sequence
  Description of Artificial Sequence: Synthetic oligonucleotide
  Antisense strand to SEQ ID NO: 2043684
aaauccauaguacacagca

SEQ ID NO: 2043686 - RNA, 19 nt, Artificial Sequence
  Description of Artificial Sequence: Synthetic oligonucleotide
  Sense strand starting at position 2291 of SEQ ID NO: 1881426
uugucaaacucaguauauu

SEQ ID NO: 2043687 - RNA, 19 nt, Artificial Sequence
  Description of Artificial Sequence: Synthetic oligonucleotide
  Antisense strand to SEQ ID NO: 2043686
aauauacugaguuugacaa

SEQ ID NO: 2043688 - RNA, 19 nt, Artificial Sequence
  Description of Artificial Sequence: Synthetic oligonucleotide
  Sense strand starting at position 2292 of SEQ ID NO: 1881426
ugucaaacucaguauauuc

SEQ ID NO: 2043689 - RNA, 19 nt, Artificial Sequence
  Description of Artificial Sequence: Synthetic oligonucleotide
  Antisense strand to SEQ ID NO: 2043688
gaauauacugaguuugaca

SEQ ID NO: 2043690 - RNA, 19 nt, Artificial Sequence
  Description of Artificial Sequence: Synthetic oligonucleotide
  Sense strand starting at position 2329 of SEQ ID NO: 1881426
ggaggucugcaauaguuau

SEQ ID NO: 2043691 - RNA, 19 nt, Artificial Sequence
  Description of Artificial Sequence: Synthetic oligonucleotide
  Antisense strand to SEQ ID NO: 2043690
auaacuauugcagaccucc

SEQ ID NO: 2043692 - RNA, 19 nt, Artificial Sequence
  Description of Artificial Sequence: Synthetic oligonucleotide
  Sense strand starting at position 2341 of SEQ ID NO: 1881426
uaguuaugaguguagguga

SEQ ID NO: 2043693 - RNA, 19 nt, Artificial Sequence
  Description of Artificial Sequence: Synthetic oligonucleotide
  Antisense strand to SEQ ID NO: 2043692
ucaccuacacucauaacua

SEQ ID NO: 2043694 - RNA, 19 nt, Artificial Sequence
  Description of Artificial Sequence: Synthetic oligonucleotide
  Sense strand starting at position 2354 of SEQ ID NO: 1881426
aggugaagcguguuugcuu

SEQ ID NO: 2043695 - RNA, 19 nt, Artificial Sequence
  Description of Artificial Sequence: Synthetic oligonucleotide
  Antisense strand to SEQ ID NO: 2043694
aagcaaacacgcuucaccu

SEQ ID NO: 2043696 - RNA, 19 nt, Artificial Sequence
  Description of Artificial Sequence: Synthetic oligonucleotide
  Sense strand starting at position 2368 of SEQ ID NO: 1881426
ugcuuaggaccggauugau

SEQ ID NO: 2043697 - RNA, 19 nt, Artificial Sequence
  Description of Artificial Sequence: Synthetic oligonucleotide
  Antisense strand to SEQ ID NO: 2043696
aucaauccgguccuaagca

SEQ ID NO: 2043698 - RNA, 19 nt, Artificial Sequence
  Description of Artificial Sequence: Synthetic oligonucleotide
  Sense strand starting at position 2458 of SEQ ID NO: 1881426
auaaaucccugagcuggaa

SEQ ID NO: 2043699 - RNA, 19 nt, Artificial Sequence
  Description of Artificial Sequence: Synthetic oligonucleotide
  Antisense strand to SEQ ID NO: 2043698
uuccagcucagggauuuau

SEQ ID NO: 2043700 - RNA, 19 nt, Artificial Sequence
  Description of Artificial Sequence: Synthetic oligonucleotide
  Sense strand starting at position 3125 of SEQ ID NO: 1881426
cuagguaggaguugugaga

SEQ ID NO: 2043701 - RNA, 19 nt, Artificial Sequence
  Description of Artificial Sequence: Synthetic oligonucleotide
  Antisense strand to SEQ ID NO: 2043700
ucucacaacuccuaccuag

SEQ ID NO: 2043702 - RNA, 19 nt, Artificial Sequence
  Description of Artificial Sequence: Synthetic oligonucleotide
  Sense strand starting at position 3163 of SEQ ID NO: 1881426
ucuuauugauugcuaggaa

SEQ ID NO: 2043703 - RNA, 19 nt, Artificial Sequence
  Description of Artificial Sequence: Synthetic oligonucleotide
  Antisense strand to SEQ ID NO: 2043702
uuccuagcaaucaauaaga

SEQ ID NO: 2043704 - RNA, 19 nt, Artificial Sequence
  Description of Artificial Sequence: Synthetic oligonucleotide
  Sense strand starting at position 3313 of SEQ ID NO: 1881426
ucaucugugcuggaguaau

SEQ ID NO: 2043705 - RNA, 19 nt, Artificial Sequence
  Description of Artificial Sequence: Synthetic oligonucleotide
  Antisense strand to SEQ ID NO: 2043704
auuacuccagcacagauga

SEQ ID NO: 2043706 - RNA, 19 nt, Artificial Sequence
  Description of Artificial Sequence: Synthetic oligonucleotide
  Sense strand starting at position 3458 of SEQ ID NO: 1881426
ggaauuaggacaugccuuu

SEQ ID NO: 2043707 - RNA, 19 nt, Artificial Sequence
  Description of Artificial Sequence: Synthetic oligonucleotide
  Antisense strand to SEQ ID NO: 2043706
aaaggcauguccuaauucc

SEQ ID NO: 2043708 - RNA, 19 nt, Artificial Sequence
  Description of Artificial Sequence: Synthetic oligonucleotide
  Sense strand starting at position 3464 of SEQ ID NO: 1881426
aggacaugccuuuagcaaa

SEQ ID NO: 2043709 - RNA, 19 nt, Artificial Sequence
  Description of Artificial Sequence: Synthetic oligonucleotide
  Antisense strand to SEQ ID NO: 2043708
uuugcuaaaggcauguccu

SEQ ID NO: 2043710 - RNA, 19 nt, Artificial Sequence
  Description of Artificial Sequence: Synthetic oligonucleotide
  Sense strand starting at position 3566 of SEQ ID NO: 1881426
guuucuucugguggaaaga

SEQ ID NO: 2043711 - RNA, 19 nt, Artificial Sequence
  Description of Artificial Sequence: Synthetic oligonucleotide
  Antisense strand to SEQ ID NO: 2043710
ucuuuccaccagaagaaac

SEQ ID NO: 2043712 - RNA, 19 nt, Artificial Sequence
  Description of Artificial Sequence: Synthetic oligonucleotide
  Sense strand starting at position 3577 of SEQ ID NO: 1881426
uggaaagagccugaucugu

SEQ ID NO: 2043713 - RNA, 19 nt, Artificial Sequence
  Description of Artificial Sequence: Synthetic oligonucleotide
  Antisense strand to SEQ ID NO: 2043712
acagaucaggcucuuucca

SEQ ID NO: 2043714 - RNA, 19 nt, Artificial Sequence
  Description of Artificial Sequence: Synthetic oligonucleotide
  Sense strand starting at position 3579 of SEQ ID NO: 1881426
gaaagagccugaucuguua

SEQ ID NO: 2043715 - RNA, 19 nt, Artificial Sequence
  Description of Artificial Sequence: Synthetic oligonucleotide
  Antisense strand to SEQ ID NO: 2043714
uaacagaucaggcucuuuc

SEQ ID NO: 2043716 - RNA, 19 nt, Artificial Sequence
  Description of Artificial Sequence: Synthetic oligonucleotide
  Sense strand starting at position 3662 of SEQ ID NO: 1881426
gcuaaauuacacuauagug

SEQ ID NO: 2043717 - RNA, 19 nt, Artificial Sequence
  Description of Artificial Sequence: Synthetic oligonucleotide
  Antisense strand to SEQ ID NO: 2043716
cacuauaguguaauuuagc

SEQ ID NO: 2043718 - RNA, 19 nt, Artificial Sequence
  Description of Artificial Sequence: Synthetic oligonucleotide
  Sense strand starting at position 3721 of SEQ ID NO: 1881426
uggauauuuguauguaugu

SEQ ID NO: 2043719 - RNA, 19 nt, Artificial Sequence
  Description of Artificial Sequence: Synthetic oligonucleotide
  Antisense strand to SEQ ID NO: 2043718
acauacauacaaauaucca

SEQ ID NO: 2043720 - RNA, 19 nt, Artificial Sequence
  Description of Artificial Sequence: Synthetic oligonucleotide
  Sense strand starting at position 235 of SEQ ID NO: 1881427
agcagugagcuauaguagu

SEQ ID NO: 2043721 - RNA, 19 nt, Artificial Sequence
  Description of Artificial Sequence: Synthetic oligonucleotide
  Antisense strand to SEQ ID NO: 2043720
acuacuauagcucacugcu

SEQ ID NO: 2043722 - RNA, 19 nt, Artificial Sequence
  Description of Artificial Sequence: Synthetic oligonucleotide
  Sense strand starting at position 390 of SEQ ID NO: 1881427
ucuauaauucugugccuga

SEQ ID NO: 2043723 - RNA, 19 nt, Artificial Sequence
  Description of Artificial Sequence: Synthetic oligonucleotide
  Antisense strand to SEQ ID NO: 2043722
ucaggcacagaauuauaga

SEQ ID NO: 2043724 - RNA, 19 nt, Artificial Sequence
  Description of Artificial Sequence: Synthetic oligonucleotide
  Sense strand starting at position 391 of SEQ ID NO: 1881427
cuauaauucugugccugaa

SEQ ID NO: 2043725 - RNA, 19 nt, Artificial Sequence
  Description of Artificial Sequence: Synthetic oligonucleotide
  Antisense strand to SEQ ID NO: 2043724
uucaggcacagaauuauag

SEQ ID NO: 2043726 - RNA, 19 nt, Artificial Sequence
  Description of Artificial Sequence: Synthetic oligonucleotide
  Sense strand starting at position 788 of SEQ ID NO: 1881427
ucgagaccagccuggaaua

SEQ ID NO: 2043727 - RNA, 19 nt, Artificial Sequence
  Description of Artificial Sequence: Synthetic oligonucleotide
  Antisense strand to SEQ ID NO: 2043726
uauuccaggcuggucucga

SEQ ID NO: 2043728 - RNA, 19 nt, Artificial Sequence
  Description of Artificial Sequence: Synthetic oligonucleotide
  Sense strand starting at position 1169 of SEQ ID NO: 1881427
ucaauacuggaucgugaac

SEQ ID NO: 2043729 - RNA, 19 nt, Artificial Sequence
  Description of Artificial Sequence: Synthetic oligonucleotide
  Antisense strand to SEQ ID NO: 2043728
guucacgauccaguauuga

SEQ ID NO: 2043730 - RNA, 19 nt, Artificial Sequence
  Description of Artificial Sequence: Synthetic oligonucleotide
  Sense strand starting at position 1178 of SEQ ID NO: 1881427
gaucgugaacaauauguaa

SEQ ID NO: 2043731 - RNA, 19 nt, Artificial Sequence
  Description of Artificial Sequence: Synthetic oligonucleotide
  Antisense strand to SEQ ID NO: 2043730
uuacauauuguucacgauc

SEQ ID NO: 2043732 - RNA, 19 nt, Artificial Sequence
  Description of Artificial Sequence: Synthetic oligonucleotide
  Sense strand starting at position 1221 of SEQ ID NO: 1881427
gcuacugaacauuguuaua

SEQ ID NO: 2043733 - RNA, 19 nt, Artificial Sequence
  Description of Artificial Sequence: Synthetic oligonucleotide
  Antisense strand to SEQ ID NO: 2043732
uauaacaauguucaguagc

SEQ ID NO: 2043734 - RNA, 19 nt, Artificial Sequence
  Description of Artificial Sequence: Synthetic oligonucleotide
  Sense strand starting at position 1300 of SEQ ID NO: 1881427
auccgaaguuguucuuuaa

SEQ ID NO: 2043735 - RNA, 19 nt, Artificial Sequence
  Description of Artificial Sequence: Synthetic oligonucleotide
  Antisense strand to SEQ ID NO: 2043734
uuaaagaacaacuucggau

SEQ ID NO: 2043736 - RNA, 19 nt, Artificial Sequence
  Description of Artificial Sequence: Synthetic oligonucleotide
  Sense strand starting at position 1311 of SEQ ID NO: 1881427
uucuuuaaucggcacacaa

SEQ ID NO: 2043737 - RNA, 19 nt, Artificial Sequence
  Description of Artificial Sequence: Synthetic oligonucleotide
  Antisense strand to SEQ ID NO: 2043736
uugugugccgauuaaagaa

SEQ ID NO: 2043738 - RNA, 19 nt, Artificial Sequence
  Description of Artificial Sequence: Synthetic oligonucleotide
  Sense strand starting at position 1391 of SEQ ID NO: 1881427
ggcuuaaacgcucaauaag

SEQ ID NO: 2043739 - RNA, 19 nt, Artificial Sequence
  Description of Artificial Sequence: Synthetic oligonucleotide
  Antisense strand to SEQ ID NO: 2043738
cuuauugagcguuuaagcc

SEQ ID NO: 2043740 - RNA, 19 nt, Artificial Sequence
  Description of Artificial Sequence: Synthetic oligonucleotide
  Sense strand starting at position 1394 of SEQ ID NO: 1881427
uuaaacgcucaauaaguaa

SEQ ID NO: 2043741 - RNA, 19 nt, Artificial Sequence
  Description of Artificial Sequence: Synthetic oligonucleotide
  Antisense strand to SEQ ID NO: 2043740
uuacuuauugagcguuuaa

SEQ ID NO: 2043742 - RNA, 19 nt, Artificial Sequence
  Description of Artificial Sequence: Synthetic oligonucleotide
  Sense strand starting at position 1443 of SEQ ID NO: 1881427
ucaguuaugaacuaguugu

SEQ ID NO: 2043743 - RNA, 19 nt, Artificial Sequence
  Description of Artificial Sequence: Synthetic oligonucleotide
  Antisense strand to SEQ ID NO: 2043742
acaacuaguucauaacuga

SEQ ID NO: 2043744 - RNA, 19 nt, Artificial Sequence
  Description of Artificial Sequence: Synthetic oligonucleotide
  Sense strand starting at position 1468 of SEQ ID NO: 1881427
ccugcaaguuaggugagau

SEQ ID NO: 2043745 - RNA, 19 nt, Artificial Sequence
  Description of Artificial Sequence: Synthetic oligonucleotide
  Antisense strand to SEQ ID NO: 2043744
aucucaccuaacuugcagg

SEQ ID NO: 2043746 - RNA, 19 nt, Artificial Sequence
  Description of Artificial Sequence: Synthetic oligonucleotide
  Sense strand starting at position 1469 of SEQ ID NO: 1881427
cugcaaguuaggugagauc

SEQ ID NO: 2043747 - RNA, 19 nt, Artificial Sequence
  Description of Artificial Sequence: Synthetic oligonucleotide
  Antisense strand to SEQ ID NO: 2043746
gaucucaccuaacuugcag

SEQ ID NO: 2043748 - RNA, 19 nt, Artificial Sequence
  Description of Artificial Sequence: Synthetic oligonucleotide
  Sense strand starting at position 1484 of SEQ ID NO: 1881427
gaucuagggcgagacuauu

SEQ ID NO: 2043749 - RNA, 19 nt, Artificial Sequence
  Description of Artificial Sequence: Synthetic oligonucleotide
  Antisense strand to SEQ ID NO: 2043748
aauagucucgcccuagauc

SEQ ID NO: 2043750 - RNA, 19 nt, Artificial Sequence
  Description of Artificial Sequence: Synthetic oligonucleotide
  Sense strand starting at position 1565 of SEQ ID NO: 1881427
ccaucuuuagggcagaauu

SEQ ID NO: 2043751 - RNA, 19 nt, Artificial Sequence
  Description of Artificial Sequence: Synthetic oligonucleotide
  Antisense strand to SEQ ID NO: 2043750
aauucugcccuaaagaugg

SEQ ID NO: 2043752 - RNA, 19 nt, Artificial Sequence
  Description of Artificial Sequence: Synthetic oligonucleotide
  Sense strand starting at position 2205 of SEQ ID NO: 1881427
gugaauagcccggagaggu

SEQ ID NO: 2043753 - RNA, 19 nt, Artificial Sequence
  Description of Artificial Sequence: Synthetic oligonucleotide
  Antisense strand to SEQ ID NO: 2043752
accucuccgggcuauucac

SEQ ID NO: 2043754 - RNA, 19 nt, Artificial Sequence
  Description of Artificial Sequence: Synthetic oligonucleotide
  Sense strand starting at position 2261 of SEQ ID NO: 1881427
guagggacguucuccgaga

SEQ ID NO: 2043755 - RNA, 19 nt, Artificial Sequence
  Description of Artificial Sequence: Synthetic oligonucleotide
  Antisense strand to SEQ ID NO: 2043754
ucucggagaacgucccuac

SEQ ID NO: 2043756 - RNA, 19 nt, Artificial Sequence
  Description of Artificial Sequence: Synthetic oligonucleotide
  Sense strand starting at position 2265 of SEQ ID NO: 1881427
ggacguucuccgagagccu

SEQ ID NO: 2043757 - RNA, 19 nt, Artificial Sequence
  Description of Artificial Sequence: Synthetic oligonucleotide
  Antisense strand to SEQ ID NO: 2043756
aggcucucggagaacgucc

SEQ ID NO: 2043758 - RNA, 19 nt, Artificial Sequence
  Description of Artificial Sequence: Synthetic oligonucleotide
  Sense strand starting at position 2610 of SEQ ID NO: 1881427
ugcauauuugguuguggga

SEQ ID NO: 2043759 - RNA, 19 nt, Artificial Sequence
  Description of Artificial Sequence: Synthetic oligonucleotide
  Antisense strand to SEQ ID NO: 2043758
ucccacaaccaaauaugca

SEQ ID NO: 2043760 - RNA, 19 nt, Artificial Sequence
  Description of Artificial Sequence: Synthetic oligonucleotide
  Sense strand starting at position 2705 of SEQ ID NO: 1881427
acucccaggcuuuauagaa

SEQ ID NO: 2043761 - RNA, 19 nt, Artificial Sequence
  Description of Artificial Sequence: Synthetic oligonucleotide
  Antisense strand to SEQ ID NO: 2043760
uucuauaaagccugggagu

SEQ ID NO: 2043762 - RNA, 19 nt, Artificial Sequence
  Description of Artificial Sequence: Synthetic oligonucleotide
  Sense strand starting at position 2720 of SEQ ID NO: 1881427
agaaaugaugcccacaugu

SEQ ID NO: 2043763 - RNA, 19 nt, Artificial Sequence
  Description of Artificial Sequence: Synthetic oligonucleotide
  Antisense strand to SEQ ID NO: 2043762
acaugugggcaucauuucu

SEQ ID NO: 2043764 - RNA, 19 nt, Artificial Sequence
  Description of Artificial Sequence: Synthetic oligonucleotide
  Sense strand starting at position 2793 of SEQ ID NO: 1881427
guaguuucccaguagaaau

SEQ ID NO: 2043765 - RNA, 19 nt, Artificial Sequence
  Description of Artificial Sequence: Synthetic oligonucleotide
  Antisense strand to SEQ ID NO: 2043764
auuucuacugggaaacuac

SEQ ID NO: 2043766 - RNA, 19 nt, Artificial Sequence
  Description of Artificial Sequence: Synthetic oligonucleotide
  Sense strand starting at position 2893 of SEQ ID NO: 1881427
cauugagaucaagguugau

SEQ ID NO: 2043767 - RNA, 19 nt, Artificial Sequence
  Description of Artificial Sequence: Synthetic oligonucleotide
  Antisense strand to SEQ ID NO: 2043766
aucaaccuugaucucaaug

SEQ ID NO: 2043768 - RNA, 19 nt, Artificial Sequence
  Description of Artificial Sequence: Synthetic oligonucleotide
  Sense strand starting at position 2902 of SEQ ID NO: 1881427
caagguugaugucuuuacu

SEQ ID NO: 2043769 - RNA, 19 nt, Artificial Sequence
  Description of Artificial Sequence: Synthetic oligonucleotide
  Antisense strand to SEQ ID NO: 2043768
aguaaagacaucaaccuug

SEQ ID NO: 2043770 - RNA, 19 nt, Artificial Sequence
  Description of Artificial Sequence: Synthetic oligonucleotide
  Sense strand starting at position 2908 of SEQ ID NO: 1881427
ugaugucuuuacucagaau

SEQ ID NO: 2043771 - RNA, 19 nt, Artificial Sequence
  Description of Artificial Sequence: Synthetic oligonucleotide
  Antisense strand to SEQ ID NO: 2043770
auucugaguaaagacauca

SEQ ID NO: 2043772 - RNA, 19 nt, Artificial Sequence
  Description of Artificial Sequence: Synthetic oligonucleotide
  Sense strand starting at position 2943 of SEQ ID NO: 1881427
cagggcuucguacauugua

SEQ ID NO: 2043773 - RNA, 19 nt, Artificial Sequence
  Description of Artificial Sequence: Synthetic oligonucleotide
  Antisense strand to SEQ ID NO: 2043772
uacaauguacgaagcccug

SEQ ID NO: 2043774 - RNA, 19 nt, Artificial Sequence
  Description of Artificial Sequence: Synthetic oligonucleotide
  Sense strand starting at position 2951 of SEQ ID NO: 1881427
cguacauuguaggcauuua

SEQ ID NO: 2043775 - RNA, 19 nt, Artificial Sequence
  Description of Artificial Sequence: Synthetic oligonucleotide
  Antisense strand to SEQ ID NO: 2043774
uaaaugccuacaauguacg

SEQ ID NO: 2043776 - RNA, 19 nt, Artificial Sequence
  Description of Artificial Sequence: Synthetic oligonucleotide
  Sense strand starting at position 2962 of SEQ ID NO: 1881427
ggcauuuaauacguauugu

SEQ ID NO: 2043777 - RNA, 19 nt, Artificial Sequence
  Description of Artificial Sequence: Synthetic oligonucleotide
  Antisense strand to SEQ ID NO: 2043776
acaauacguauuaaaugcc

SEQ ID NO: 2043778 - RNA, 19 nt, Artificial Sequence
  Description of Artificial Sequence: Synthetic oligonucleotide
  Sense strand starting at position 2973 of SEQ ID NO: 1881427
cguauugugaaugaaugac

SEQ ID NO: 2043779 - RNA, 19 nt, Artificial Sequence
  Description of Artificial Sequence: Synthetic oligonucleotide
  Antisense strand to SEQ ID NO: 2043778
gucauucauucacaauacg

SEQ ID NO: 2043780 - RNA, 19 nt, Artificial Sequence
  Description of Artificial Sequence: Synthetic oligonucleotide
  Sense strand starting at position 3208 of SEQ ID NO: 1881427
acacuaauacuuuguuagu

SEQ ID NO: 2043781 - RNA, 19 nt, Artificial Sequence
  Description of Artificial Sequence: Synthetic oligonucleotide
  Antisense strand to SEQ ID NO: 2043780
acuaacaaaguauuagugu

SEQ ID NO: 2043782 - RNA, 19 nt, Artificial Sequence
  Description of Artificial Sequence: Synthetic oligonucleotide
  Sense strand starting at position 3210 of SEQ ID NO: 1881427
acuaauacuuuguuagugu

SEQ ID NO: 2043783 - RNA, 19 nt, Artificial Sequence
  Description of Artificial Sequence: Synthetic oligonucleotide
  Antisense strand to SEQ ID NO: 2043782
acacuaacaaaguauuagu

SEQ ID NO: 2043784 - RNA, 19 nt, Artificial Sequence
  Description of Artificial Sequence: Synthetic oligonucleotide
  Sense strand starting at position 3486 of SEQ ID NO: 1881427
cuacaauaagcauggguua

SEQ ID NO: 2043785 - RNA, 19 nt, Artificial Sequence
  Description of Artificial Sequence: Synthetic oligonucleotide
  Antisense strand to SEQ ID NO: 2043784
uaacccaugcuuauuguag

SEQ ID NO: 2043786 - RNA, 19 nt, Artificial Sequence
  Description of Artificial Sequence: Synthetic oligonucleotide
  Sense strand starting at position 3488 of SEQ ID NO: 1881427
acaauaagcauggguuaga

SEQ ID NO: 2043787 - RNA, 19 nt, Artificial Sequence
  Description of Artificial Sequence: Synthetic oligonucleotide
  Antisense strand to SEQ ID NO: 2043786
ucuaacccaugcuuauugu

SEQ ID NO: 2043788 - RNA, 19 nt, Artificial Sequence
  Description of Artificial Sequence: Synthetic oligonucleotide
  Sense strand starting at position 3538 of SEQ ID NO: 1881427
aacagcagucuuugaaaug

SEQ ID NO: 2043789 - RNA, 19 nt, Artificial Sequence
  Description of Artificial Sequence: Synthetic oligonucleotide
  Antisense strand to SEQ ID NO: 2043788
cauuucaaagacugcuguu

SEQ ID NO: 2043790 - RNA, 19 nt, Artificial Sequence
  Description of Artificial Sequence: Synthetic oligonucleotide
  Sense strand starting at position 3559 of SEQ ID NO: 1881427
uuuacacagcguuacaauu

SEQ ID NO: 2043791 - RNA, 19 nt, Artificial Sequence
  Description of Artificial Sequence: Synthetic oligonucleotide
  Antisense strand to SEQ ID NO: 2043790
aauuguaacgcuguguaaa

SEQ ID NO: 2043792 - RNA, 19 nt, Artificial Sequence
  Description of Artificial Sequence: Synthetic oligonucleotide
  Sense strand starting at position 3590 of SEQ ID NO: 1881427
gacuguaaaugcuucuaag

SEQ ID NO: 2043793 - RNA, 19 nt, Artificial Sequence
  Description of Artificial Sequence: Synthetic oligonucleotide
  Antisense strand to SEQ ID NO: 2043792
cuuagaagcauuuacaguc

SEQ ID NO: 2043794 - RNA, 19 nt, Artificial Sequence
  Description of Artificial Sequence: Synthetic oligonucleotide
  Sense strand starting at position 3628 of SEQ ID NO: 1881427
uccucucagcuguaagaau

SEQ ID NO: 2043795 - RNA, 19 nt, Artificial Sequence
  Description of Artificial Sequence: Synthetic oligonucleotide
  Antisense strand to SEQ ID NO: 2043794
auucuuacagcugagagga

SEQ ID NO: 2043796 - RNA, 19 nt, Artificial Sequence
  Description of Artificial Sequence: Synthetic oligonucleotide
  Sense strand starting at position 3699 of SEQ ID NO: 1881427
ucugaaauauccgcaaauc

SEQ ID NO: 2043797 - RNA, 19 nt, Artificial Sequence
  Description of Artificial Sequence: Synthetic oligonucleotide
  Antisense strand to SEQ ID NO: 2043796
gauuugcggauauuucaga

SEQ ID NO: 2043798 - RNA, 19 nt, Artificial Sequence
  Description of Artificial Sequence: Synthetic oligonucleotide
  Sense strand starting at position 3732 of SEQ ID NO: 1881427
ggagccuguuaacuauaau

SEQ ID NO: 2043799 - RNA, 19 nt, Artificial Sequence
  Description of Artificial Sequence: Synthetic oligonucleotide
  Antisense strand to SEQ ID NO: 2043798
auuauaguuaacaggcucc

SEQ ID NO: 2043800 - RNA, 19 nt, Artificial Sequence
  Description of Artificial Sequence: Synthetic oligonucleotide
  Sense strand starting at position 47 of SEQ ID NO: 1881428
ugccaagagccauauuacu

SEQ ID NO: 2043801 - RNA, 19 nt, Artificial Sequence
  Description of Artificial Sequence: Synthetic oligonucleotide
  Antisense strand to SEQ ID NO: 2043800
aguaauauggcucuuggca

SEQ ID NO: 2043802 - RNA, 19 nt, Artificial Sequence
  Description of Artificial Sequence: Synthetic oligonucleotide
  Sense strand starting at position 237 of SEQ ID NO: 1881428
cccacugugagugaguuau

SEQ ID NO: 2043803 - RNA, 19 nt, Artificial Sequence
  Description of Artificial Sequence: Synthetic oligonucleotide
  Antisense strand to SEQ ID NO: 2043802
auaacucacucacaguggg

SEQ ID NO: 2043804 - RNA, 19 nt, Artificial Sequence
  Description of Artificial Sequence: Synthetic oligonucleotide
  Sense strand starting at position 241 of SEQ ID NO: 1881428
cugugagugaguuauuaca

SEQ ID NO: 2043805 - RNA, 19 nt, Artificial Sequence
  Description of Artificial Sequence: Synthetic oligonucleotide
  Antisense strand to SEQ ID NO: 2043804
uguaauaacucacucacag

SEQ ID NO: 2043806 - RNA, 19 nt, Artificial Sequence
  Description of Artificial Sequence: Synthetic oligonucleotide
  Sense strand starting at position 285 of SEQ ID NO: 1881428
aauccugaaugaguuuaga

SEQ ID NO: 2043807 - RNA, 19 nt, Artificial Sequence
  Description of Artificial Sequence: Synthetic oligonucleotide
  Antisense strand to SEQ ID NO: 2043806
ucuaaacucauucaggauu

SEQ ID NO: 2043808 - RNA, 19 nt, Artificial Sequence
  Description of Artificial Sequence: Synthetic oligonucleotide
  Sense strand starting at position 317 of SEQ ID NO: 1881428
gcaucuguugaugaugauu

SEQ ID NO: 2043809 - RNA, 19 nt, Artificial Sequence
  Description of Artificial Sequence: Synthetic oligonucleotide
  Antisense strand to SEQ ID NO: 2043808
aaucaucaucaacagaugc

SEQ ID NO: 2043810 - RNA, 19 nt, Artificial Sequence
  Description of Artificial Sequence: Synthetic oligonucleotide
  Sense strand starting at position 370 of SEQ ID NO: 1881428
agaguuugcugacuagaaa

SEQ ID NO: 2043811 - RNA, 19 nt, Artificial Sequence
  Description of Artificial Sequence: Synthetic oligonucleotide
  Antisense strand to SEQ ID NO: 2043810
uuucuagucagcaaacucu

SEQ ID NO: 2043812 - RNA, 19 nt, Artificial Sequence
  Description of Artificial Sequence: Synthetic oligonucleotide
  Sense strand starting at position 371 of SEQ ID NO: 1881428
gaguuugcugacuagaaac

SEQ ID NO: 2043813 - RNA, 19 nt, Artificial Sequence
  Description of Artificial Sequence: Synthetic oligonucleotide
  Antisense strand to SEQ ID NO: 2043812
guuucuagucagcaaacuc

SEQ ID NO: 2043814 - RNA, 19 nt, Artificial Sequence
  Description of Artificial Sequence: Synthetic oligonucleotide
  Sense strand starting at position 439 of SEQ ID NO: 1881428
ggguaagucagaugaugug

SEQ ID NO: 2043815 - RNA, 19 nt, Artificial Sequence
  Description of Artificial Sequence: Synthetic oligonucleotide
  Antisense strand to SEQ ID NO: 2043814
cacaucaucugacuuaccc

SEQ ID NO: 2043816 - RNA, 19 nt, Artificial Sequence
  Description of Artificial Sequence: Synthetic oligonucleotide
  Sense strand starting at position 476 of SEQ ID NO: 1881428
acaggugaauagucucaaa

SEQ ID NO: 2043817 - RNA, 19 nt, Artificial Sequence
  Description of Artificial Sequence: Synthetic oligonucleotide
  Antisense strand to SEQ ID NO: 2043816
uuugagacuauucaccugu

SEQ ID NO: 2043818 - RNA, 19 nt, Artificial Sequence
  Description of Artificial Sequence: Synthetic oligonucleotide
  Sense strand starting at position 560 of SEQ ID NO: 1881428
acucuagaacaguguaauu

SEQ ID NO: 2043819 - RNA, 19 nt, Artificial Sequence
  Description of Artificial Sequence: Synthetic oligonucleotide
  Antisense strand to SEQ ID NO: 2043818
aauuacacuguucuagagu

SEQ ID NO: 2043820 - RNA, 19 nt, Artificial Sequence
  Description of Artificial Sequence: Synthetic oligonucleotide
  Sense strand starting at position 734 of SEQ ID NO: 1881428
cuuccaauuccuuggaaug

SEQ ID NO: 2043821 - RNA, 19 nt, Artificial Sequence
  Description of Artificial Sequence: Synthetic oligonucleotide
  Antisense strand to SEQ ID NO: 2043820
cauuccaaggaauuggaag

SEQ ID NO: 2043822 - RNA, 19 nt, Artificial Sequence
  Description of Artificial Sequence: Synthetic oligonucleotide
  Sense strand starting at position 735 of SEQ ID NO: 1881428
uuccaauuccuuggaaugu

SEQ ID NO: 2043823 - RNA, 19 nt, Artificial Sequence
  Description of Artificial Sequence: Synthetic oligonucleotide
  Antisense strand to SEQ ID NO: 2043822
acauuccaaggaauuggaa

SEQ ID NO: 2043824 - RNA, 19 nt, Artificial Sequence
  Description of Artificial Sequence: Synthetic oligonucleotide
  Sense strand starting at position 1005 of SEQ ID NO: 1881428
aguacagggacuugcuaua

SEQ ID NO: 2043825 - RNA, 19 nt, Artificial Sequence
  Description of Artificial Sequence: Synthetic oligonucleotide
  Antisense strand to SEQ ID NO: 2043824
uauagcaagucccuguacu

SEQ ID NO: 2043826 - RNA, 19 nt, Artificial Sequence
  Description of Artificial Sequence: Synthetic oligonucleotide
  Sense strand starting at position 1449 of SEQ ID NO: 1881428
ugcagaagucaccagaugu

SEQ ID NO: 2043827 - RNA, 19 nt, Artificial Sequence
  Description of Artificial Sequence: Synthetic oligonucleotide
  Antisense strand to SEQ ID NO: 2043826
acaucuggugacuucugca

SEQ ID NO: 2043828 - RNA, 19 nt, Artificial Sequence
  Description of Artificial Sequence: Synthetic oligonucleotide
  Sense strand starting at position 1544 of SEQ ID NO: 1881428
uugguucuugagcagauga

SEQ ID NO: 2043829 - RNA, 19 nt, Artificial Sequence
  Description of Artificial Sequence: Synthetic oligonucleotide
  Antisense strand to SEQ ID NO: 2043828
ucaucugcucaagaaccaa

SEQ ID NO: 2043830 - RNA, 19 nt, Artificial Sequence
  Description of Artificial Sequence: Synthetic oligonucleotide
  Sense strand starting at position 1546 of SEQ ID NO: 1881428
gguucuugagcagaugauc

SEQ ID NO: 2043831 - RNA, 19 nt, Artificial Sequence
  Description of Artificial Sequence: Synthetic oligonucleotide
  Antisense strand to SEQ ID NO: 2043830
gaucaucugcucaagaacc

SEQ ID NO: 2043832 - RNA, 19 nt, Artificial Sequence
  Description of Artificial Sequence: Synthetic oligonucleotide
  Sense strand starting at position 1551 of SEQ ID NO: 1881428
uugagcagaugaucucaau

SEQ ID NO: 2043833 - RNA, 19 nt, Artificial Sequence
  Description of Artificial Sequence: Synthetic oligonucleotide
  Antisense strand to SEQ ID NO: 2043832
auugagaucaucugcucaa

SEQ ID NO: 2043834 - RNA, 19 nt, Artificial Sequence
  Description of Artificial Sequence: Synthetic oligonucleotide
  Sense strand starting at position 1662 of SEQ ID NO: 1881428
cuaucuagguggccagaua

SEQ ID NO: 2043835 - RNA, 19 nt, Artificial Sequence
  Description of Artificial Sequence: Synthetic oligonucleotide
  Antisense strand to SEQ ID NO: 2043834
uaucuggccaccuagauag

SEQ ID NO: 2043836 - RNA, 19 nt, Artificial Sequence
  Description of Artificial Sequence: Synthetic oligonucleotide
  Sense strand starting at position 1663 of SEQ ID NO: 1881428
uaucuagguggccagauaa

SEQ ID NO: 2043837 - RNA, 19 nt, Artificial Sequence
  Description of Artificial Sequence: Synthetic oligonucleotide
  Antisense strand to SEQ ID NO: 2043836
uuaucuggccaccuagaua

SEQ ID NO: 2043838 - RNA, 19 nt, Artificial Sequence
  Description of Artificial Sequence: Synthetic oligonucleotide
  Sense strand starting at position 1673 of SEQ ID NO: 1881428
gccagauaaggcugacuua

SEQ ID NO: 2043839 - RNA, 19 nt, Artificial Sequence
  Description of Artificial Sequence: Synthetic oligonucleotide
  Antisense strand to SEQ ID NO: 2043838
uaagucagccuuaucuggc

SEQ ID NO: 2043840 - RNA, 19 nt, Artificial Sequence
  Description of Artificial Sequence: Synthetic oligonucleotide
  Sense strand starting at position 1676 of SEQ ID NO: 1881428
agauaaggcugacuuaagu

SEQ ID NO: 2043841 - RNA, 19 nt, Artificial Sequence
  Description of Artificial Sequence: Synthetic oligonucleotide
  Antisense strand to SEQ ID NO: 2043840
acuuaagucagccuuaucu

SEQ ID NO: 2043842 - RNA, 19 nt, Artificial Sequence
  Description of Artificial Sequence: Synthetic oligonucleotide
  Sense strand starting at position 1686 of SEQ ID NO: 1881428
gacuuaagugcugauacaa

SEQ ID NO: 2043843 - RNA, 19 nt, Artificial Sequence
  Description of Artificial Sequence: Synthetic oligonucleotide
  Antisense strand to SEQ ID NO: 2043842
uuguaucagcacuuaaguc

SEQ ID NO: 2043844 - RNA, 19 nt, Artificial Sequence
  Description of Artificial Sequence: Synthetic oligonucleotide
  Sense strand starting at position 1751 of SEQ ID NO: 1881428
cugugcauugcugugguua

SEQ ID NO: 2043845 - RNA, 19 nt, Artificial Sequence
  Description of Artificial Sequence: Synthetic oligonucleotide
  Antisense strand to SEQ ID NO: 2043844
uaaccacagcaaugcacag

SEQ ID NO: 2043846 - RNA, 19 nt, Artificial Sequence
  Description of Artificial Sequence: Synthetic oligonucleotide
  Sense strand starting at position 1774 of SEQ ID NO: 1881428
aaauguugacaguggugau

SEQ ID NO: 2043847 - RNA, 19 nt, Artificial Sequence
  Description of Artificial Sequence: Synthetic oligonucleotide
  Antisense strand to SEQ ID NO: 2043846
aucaccacugucaacauuu

SEQ ID NO: 2043848 - RNA, 19 nt, Artificial Sequence
  Description of Artificial Sequence: Synthetic oligonucleotide
  Sense strand starting at position 1865 of SEQ ID NO: 1881428
ggcuuugacugacccaaau

SEQ ID NO: 2043849 - RNA, 19 nt, Artificial Sequence
  Description of Artificial Sequence: Synthetic oligonucleotide
  Antisense strand to SEQ ID NO: 2043848
auuugggucagucaaagcc

SEQ ID NO: 2043850 - RNA, 19 nt, Artificial Sequence
  Description of Artificial Sequence: Synthetic oligonucleotide
  Sense strand starting at position 1877 of SEQ ID NO: 1881428
cccaaaugcacuugggagu

SEQ ID NO: 2043851 - RNA, 19 nt, Artificial Sequence
  Description of Artificial Sequence: Synthetic oligonucleotide
  Antisense strand to SEQ ID NO: 2043850
acucccaagugcauuuggg

SEQ ID NO: 2043852 - RNA, 19 nt, Artificial Sequence
  Description of Artificial Sequence: Synthetic oligonucleotide
  Sense strand starting at position 1993 of SEQ ID NO: 1881428
cccagaugcugagcugaaa

SEQ ID NO: 2043853 - RNA, 19 nt, Artificial Sequence
  Description of Artificial Sequence: Synthetic oligonucleotide
  Antisense strand to SEQ ID NO: 2043852
uuucagcucagcaucuggg

SEQ ID NO: 2043854 - RNA, 19 nt, Artificial Sequence
  Description of Artificial Sequence: Synthetic oligonucleotide
  Sense strand starting at position 2105 of SEQ ID NO: 1881428
ggcaucuuaggucauuaua

SEQ ID NO: 2043855 - RNA, 19 nt, Artificial Sequence
  Description of Artificial Sequence: Synthetic oligonucleotide
  Antisense strand to SEQ ID NO: 2043854
uauaaugaccuaagaugcc

SEQ ID NO: 2043856 - RNA, 19 nt, Artificial Sequence
  Description of Artificial Sequence: Synthetic oligonucleotide
  Sense strand starting at position 2278 of SEQ ID NO: 1881428
caacuuacaguguagugaa

SEQ ID NO: 2043857 - RNA, 19 nt, Artificial Sequence
  Description of Artificial Sequence: Synthetic oligonucleotide
  Antisense strand to SEQ ID NO: 2043856
uucacuacacuguaaguug

SEQ ID NO: 2043858 - RNA, 19 nt, Artificial Sequence
  Description of Artificial Sequence: Synthetic oligonucleotide
  Sense strand starting at position 2285 of SEQ ID NO: 1881428
caguguagugaaggauaca

SEQ ID NO: 2043859 - RNA, 19 nt, Artificial Sequence
  Description of Artificial Sequence: Synthetic oligonucleotide
  Antisense strand to SEQ ID NO: 2043858
uguauccuucacuacacug

SEQ ID NO: 2043860 - RNA, 19 nt, Artificial Sequence
  Description of Artificial Sequence: Synthetic oligonucleotide
  Sense strand starting at position 2315 of SEQ ID NO: 1881428
aaaguaucauguguuaaag

SEQ ID NO: 2043861 - RNA, 19 nt, Artificial Sequence
  Description of Artificial Sequence: Synthetic oligonucleotide
  Antisense strand to SEQ ID NO: 2043860
cuuuaacacaugauacuuu

SEQ ID NO: 2043862 - RNA, 19 nt, Artificial Sequence
  Description of Artificial Sequence: Synthetic oligonucleotide
  Sense strand starting at position 2446 of SEQ ID NO: 1881428
guguuauguaaaggaucag

SEQ ID NO: 2043863 - RNA, 19 nt, Artificial Sequence
  Description of Artificial Sequence: Synthetic oligonucleotide
  Antisense strand to SEQ ID NO: 2043862
cugauccuuuacauaacac

SEQ ID NO: 2043864 - RNA, 19 nt, Artificial Sequence
  Description of Artificial Sequence: Synthetic oligonucleotide
  Sense strand starting at position 2496 of SEQ ID NO: 1881428
ugaugaucucgguaaugug

SEQ ID NO: 2043865 - RNA, 19 nt, Artificial Sequence
  Description of Artificial Sequence: Synthetic oligonucleotide
  Antisense strand to SEQ ID NO: 2043864
cacauuaccgagaucauca

SEQ ID NO: 2043866 - RNA, 19 nt, Artificial Sequence
  Description of Artificial Sequence: Synthetic oligonucleotide
  Sense strand starting at position 2546 of SEQ ID NO: 1881428
ggaugauaauguuuguccu

SEQ ID NO: 2043867 - RNA, 19 nt, Artificial Sequence
  Description of Artificial Sequence: Synthetic oligonucleotide
  Antisense strand to SEQ ID NO: 2043866
aggacaaacauuaucaucc

SEQ ID NO: 2043868 - RNA, 19 nt, Artificial Sequence
  Description of Artificial Sequence: Synthetic oligonucleotide
  Sense strand starting at position 2573 of SEQ ID NO: 1881428
augggaugguaugugagaa

SEQ ID NO: 2043869 - RNA, 19 nt, Artificial Sequence
  Description of Artificial Sequence: Synthetic oligonucleotide
  Antisense strand to SEQ ID NO: 2043868
uucucacauaccaucccau

SEQ ID NO: 2043870 - RNA, 19 nt, Artificial Sequence
  Description of Artificial Sequence: Synthetic oligonucleotide
  Sense strand starting at position 2574 of SEQ ID NO: 1881428
ugggaugguaugugagaaa

SEQ ID NO: 2043871 - RNA, 19 nt, Artificial Sequence
  Description of Artificial Sequence: Synthetic oligonucleotide
  Antisense strand to SEQ ID NO: 2043870
uuucucacauaccauccca

SEQ ID NO: 2043872 - RNA, 19 nt, Artificial Sequence
  Description of Artificial Sequence: Synthetic oligonucleotide
  Sense strand starting at position 2718 of SEQ ID NO: 1881428
gcaccuacuugauugaaga

SEQ ID NO: 2043873 - RNA, 19 nt, Artificial Sequence
  Description of Artificial Sequence: Synthetic oligonucleotide
  Antisense strand to SEQ ID NO: 2043872
ucuucaaucaaguaggugc

SEQ ID NO: 2043874 - RNA, 19 nt, Artificial Sequence
  Description of Artificial Sequence: Synthetic oligonucleotide
  Sense strand starting at position 2731 of SEQ ID NO: 1881428
ugaagauccuguguuagau

SEQ ID NO: 2043875 - RNA, 19 nt, Artificial Sequence
  Description of Artificial Sequence: Synthetic oligonucleotide
  Antisense strand to SEQ ID NO: 2043874
aucuaacacaggaucuuca

SEQ ID NO: 2043876 - RNA, 19 nt, Artificial Sequence
  Description of Artificial Sequence: Synthetic oligonucleotide
  Sense strand starting at position 3730 of SEQ ID NO: 1881428
aauaguuggcaucaauugu

SEQ ID NO: 2043877 - RNA, 19 nt, Artificial Sequence
  Description of Artificial Sequence: Synthetic oligonucleotide
  Antisense strand to SEQ ID NO: 2043876
acaauugaugccaacuauu

SEQ ID NO: 2043878 - RNA, 19 nt, Artificial Sequence
  Description of Artificial Sequence: Synthetic oligonucleotide
  Sense strand starting at position 3788 of SEQ ID NO: 1881428
ggaguaacacacugauucu

SEQ ID NO: 2043879 - RNA, 19 nt, Artificial Sequence
  Description of Artificial Sequence: Synthetic oligonucleotide
  Antisense strand to SEQ ID NO: 2043878
agaaucaguguguuacucc

SEQ ID NO: 2043880 - RNA, 19 nt, Artificial Sequence
  Description of Artificial Sequence: Synthetic oligonucleotide
  Sense strand starting at position 25 of SEQ ID NO: 1881429
cuaugugaccacugggaga

SEQ ID NO: 2043881 - RNA, 19 nt, Artificial Sequence
  Description of Artificial Sequence: Synthetic oligonucleotide
  Antisense strand to SEQ ID NO: 2043880
ucucccaguggucacauag

SEQ ID NO: 2043882 - RNA, 19 nt, Artificial Sequence
  Description of Artificial Sequence: Synthetic oligonucleotide
  Sense strand starting at position 109 of SEQ ID NO: 1881429
aguugcuaagagcaugaaa

SEQ ID NO: 2043883 - RNA, 19 nt, Artificial Sequence
  Description of Artificial Sequence: Synthetic oligonucleotide
  Antisense strand to SEQ ID NO: 2043882
uuucaugcucuuagcaacu

SEQ ID NO: 2043884 - RNA, 19 nt, Artificial Sequence
  Description of Artificial Sequence: Synthetic oligonucleotide
  Sense strand starting at position 111 of SEQ ID NO: 1881429
uugcuaagagcaugaaaug

SEQ ID NO: 2043885 - RNA, 19 nt, Artificial Sequence
  Description of Artificial Sequence: Synthetic oligonucleotide
  Antisense strand to SEQ ID NO: 2043884
cauuucaugcucuuagcaa

SEQ ID NO: 2043886 - RNA, 19 nt, Artificial Sequence
  Description of Artificial Sequence: Synthetic oligonucleotide
  Sense strand starting at position 159 of SEQ ID NO: 1881429
uguucaguugguguuugua

SEQ ID NO: 2043887 - RNA, 19 nt, Artificial Sequence
  Description of Artificial Sequence: Synthetic oligonucleotide
  Antisense strand to SEQ ID NO: 2043886
uacaaacaccaacugaaca

SEQ ID NO: 2043888 - RNA, 19 nt, Artificial Sequence
  Description of Artificial Sequence: Synthetic oligonucleotide
  Sense strand starting at position 381 of SEQ ID NO: 1881429
ugcuuuauuugugucucua

SEQ ID NO: 2043889 - RNA, 19 nt, Artificial Sequence
  Description of Artificial Sequence: Synthetic oligonucleotide
  Antisense strand to SEQ ID NO: 2043888
uagagacacaaauaaagca

SEQ ID NO: 2043890 - RNA, 19 nt, Artificial Sequence
  Description of Artificial Sequence: Synthetic oligonucleotide
  Sense strand starting at position 383 of SEQ ID NO: 1881429
cuuuauuugugucucuaau

SEQ ID NO: 2043891 - RNA, 19 nt, Artificial Sequence
  Description of Artificial Sequence: Synthetic oligonucleotide
  Antisense strand to SEQ ID NO: 2043890
auuagagacacaaauaaag

SEQ ID NO: 2043892 - RNA, 19 nt, Artificial Sequence
  Description of Artificial Sequence: Synthetic oligonucleotide
  Sense strand starting at position 410 of SEQ ID NO: 1881429
ccacuuaauauguggugga

SEQ ID NO: 2043893 - RNA, 19 nt, Artificial Sequence
  Description of Artificial Sequence: Synthetic oligonucleotide
  Antisense strand to SEQ ID NO: 2043892
uccaccacauauuaagugg

SEQ ID NO: 2043894 - RNA, 19 nt, Artificial Sequence
  Description of Artificial Sequence: Synthetic oligonucleotide
  Sense strand starting at position 488 of SEQ ID NO: 1881429
gagugcaaccagcagauau

SEQ ID NO: 2043895 - RNA, 19 nt, Artificial Sequence
  Description of Artificial Sequence: Synthetic oligonucleotide
  Antisense strand to SEQ ID NO: 2043894
auaucugcugguugcacuc

SEQ ID NO: 2043896 - RNA, 19 nt, Artificial Sequence
  Description of Artificial Sequence: Synthetic oligonucleotide
  Sense strand starting at position 503 of SEQ ID NO: 1881429
auaugcccucuuuaggaau

SEQ ID NO: 2043897 - RNA, 19 nt, Artificial Sequence
  Description of Artificial Sequence: Synthetic oligonucleotide
  Antisense strand to SEQ ID NO: 2043896
auuccuaaagagggcauau

SEQ ID NO: 2043898 - RNA, 19 nt, Artificial Sequence
  Description of Artificial Sequence: Synthetic oligonucleotide
  Sense strand starting at position 579 of SEQ ID NO: 1881429
aaacguaaagugugauaca

SEQ ID NO: 2043899 - RNA, 19 nt, Artificial Sequence
  Description of Artificial Sequence: Synthetic oligonucleotide
  Antisense strand to SEQ ID NO: 2043898
uguaucacacuuuacguuu

SEQ ID NO: 2043900 - RNA, 19 nt, Artificial Sequence
  Description of Artificial Sequence: Synthetic oligonucleotide
  Sense strand starting at position 760 of SEQ ID NO: 1881429
acagaauguugccuaauaa

SEQ ID NO: 2043901 - RNA, 19 nt, Artificial Sequence
  Description of Artificial Sequence: Synthetic oligonucleotide
  Antisense strand to SEQ ID NO: 2043900
uuauuaggcaacauucugu

SEQ ID NO: 2043902 - RNA, 19 nt, Artificial Sequence
  Description of Artificial Sequence: Synthetic oligonucleotide
  Sense strand starting at position 1020 of SEQ ID NO: 1881429
ccaggaaacucuuucuagu

SEQ ID NO: 2043903 - RNA, 19 nt, Artificial Sequence
  Description of Artificial Sequence: Synthetic oligonucleotide
  Antisense strand to SEQ ID NO: 2043902
acuagaaagaguuuccugg

SEQ ID NO: 2043904 - RNA, 19 nt, Artificial Sequence
  Description of Artificial Sequence: Synthetic oligonucleotide
  Sense strand starting at position 1022 of SEQ ID NO: 1881429
aggaaacucuuucuagucu

SEQ ID NO: 2043905 - RNA, 19 nt, Artificial Sequence
  Description of Artificial Sequence: Synthetic oligonucleotide
  Antisense strand to SEQ ID NO: 2043904
agacuagaaagaguuuccu

SEQ ID NO: 2043906 - RNA, 19 nt, Artificial Sequence
  Description of Artificial Sequence: Synthetic oligonucleotide
  Sense strand starting at position 1122 of SEQ ID NO: 1881429
uuacauaguggguaaguga

SEQ ID NO: 2043907 - RNA, 19 nt, Artificial Sequence
  Description of Artificial Sequence: Synthetic oligonucleotide
  Antisense strand to SEQ ID NO: 2043906
ucacuuacccacuauguaa

SEQ ID NO: 2043908 - RNA, 19 nt, Artificial Sequence
  Description of Artificial Sequence: Synthetic oligonucleotide
  Sense strand starting at position 1175 of SEQ ID NO: 1881429
ggaucaauauaguuguaau

SEQ ID NO: 2043909 - RNA, 19 nt, Artificial Sequence
  Description of Artificial Sequence: Synthetic oligonucleotide
  Antisense strand to SEQ ID NO: 2043908
auuacaacuauauugaucc

SEQ ID NO: 2043910 - RNA, 19 nt, Artificial Sequence
  Description of Artificial Sequence: Synthetic oligonucleotide
  Sense strand starting at position 1222 of SEQ ID NO: 1881429
auaaauagucauugagcag

SEQ ID NO: 2043911 - RNA, 19 nt, Artificial Sequence
  Description of Artificial Sequence: Synthetic oligonucleotide
  Antisense strand to SEQ ID NO: 2043910
cugcucaaugacuauuuau

SEQ ID NO: 2043912 - RNA, 19 nt, Artificial Sequence
  Description of Artificial Sequence: Synthetic oligonucleotide
  Sense strand starting at position 1225 of SEQ ID NO: 1881429
aauagucauugagcagaau

SEQ ID NO: 2043913 - RNA, 19 nt, Artificial Sequence
  Description of Artificial Sequence: Synthetic oligonucleotide
  Antisense strand to SEQ ID NO: 2043912
auucugcucaaugacuauu

SEQ ID NO: 2043914 - RNA, 19 nt, Artificial Sequence
  Description of Artificial Sequence: Synthetic oligonucleotide
  Sense strand starting at position 1234 of SEQ ID NO: 1881429
ugagcagaauaacuguaua

SEQ ID NO: 2043915 - RNA, 19 nt, Artificial Sequence
  Description of Artificial Sequence: Synthetic oligonucleotide
  Antisense strand to SEQ ID NO: 2043914
uauacaguuauucugcuca

SEQ ID NO: 2043916 - RNA, 19 nt, Artificial Sequence
  Description of Artificial Sequence: Synthetic oligonucleotide
  Sense strand starting at position 1237 of SEQ ID NO: 1881429
gcagaauaacuguauacca

SEQ ID NO: 2043917 - RNA, 19 nt, Artificial Sequence
  Description of Artificial Sequence: Synthetic oligonucleotide
  Antisense strand to SEQ ID NO: 2043916
ugguauacaguuauucugc

SEQ ID NO: 2043918 - RNA, 19 nt, Artificial Sequence
  Description of Artificial Sequence: Synthetic oligonucleotide
  Sense strand starting at position 1348 of SEQ ID NO: 1881429
uagaguaauagaugguaug

SEQ ID NO: 2043919 - RNA, 19 nt, Artificial Sequence
  Description of Artificial Sequence: Synthetic oligonucleotide
  Antisense strand to SEQ ID NO: 2043918
cauaccaucuauuacucua

SEQ ID NO: 2043920 - RNA, 19 nt, Artificial Sequence
  Description of Artificial Sequence: Synthetic oligonucleotide
  Sense strand starting at position 1408 of SEQ ID NO: 1881429
gccacuuugggauacugau

SEQ ID NO: 2043921 - RNA, 19 nt, Artificial Sequence
  Description of Artificial Sequence: Synthetic oligonucleotide
  Antisense strand to SEQ ID NO: 2043920
aucaguaucccaaaguggc

SEQ ID NO: 2043922 - RNA, 19 nt, Artificial Sequence
  Description of Artificial Sequence: Synthetic oligonucleotide
  Sense strand starting at position 1906 of SEQ ID NO: 1881429
cacagaauuuaagagggua

SEQ ID NO: 2043923 - RNA, 19 nt, Artificial Sequence
  Description of Artificial Sequence: Synthetic oligonucleotide
  Antisense strand to SEQ ID NO: 2043922
uacccucuuaaauucugug

SEQ ID NO: 2043924 - RNA, 19 nt, Artificial Sequence
  Description of Artificial Sequence: Synthetic oligonucleotide
  Sense strand starting at position 2783 of SEQ ID NO: 1881429
ugugaagugcuauaaugac

SEQ ID NO: 2043925 - RNA, 19 nt, Artificial Sequence
  Description of Artificial Sequence: Synthetic oligonucleotide
  Antisense strand to SEQ ID NO: 2043924
gucauuauagcacuucaca

SEQ ID NO: 2043926 - RNA, 19 nt, Artificial Sequence
  Description of Artificial Sequence: Synthetic oligonucleotide
  Sense strand starting at position 2789 of SEQ ID NO: 1881429
gugcuauaaugacucacaa

SEQ ID NO: 2043927 - RNA, 19 nt, Artificial Sequence
  Description of Artificial Sequence: Synthetic oligonucleotide
  Antisense strand to SEQ ID NO: 2043926
uugugagucauuauagcac

SEQ ID NO: 2043928 - RNA, 19 nt, Artificial Sequence
  Description of Artificial Sequence: Synthetic oligonucleotide
  Sense strand starting at position 2812 of SEQ ID NO: 1881429
uagaguaguagcuagauga

SEQ ID NO: 2043929 - RNA, 19 nt, Artificial Sequence
  Description of Artificial Sequence: Synthetic oligonucleotide
  Antisense strand to SEQ ID NO: 2043928
ucaucuagcuacuacucua

SEQ ID NO: 2043930 - RNA, 19 nt, Artificial Sequence
  Description of Artificial Sequence: Synthetic oligonucleotide
  Sense strand starting at position 2822 of SEQ ID NO: 1881429
gcuagaugacaugaccuuu

SEQ ID NO: 2043931 - RNA, 19 nt, Artificial Sequence
  Description of Artificial Sequence: Synthetic oligonucleotide
  Antisense strand to SEQ ID NO: 2043930
aaaggucaugucaucuagc

SEQ ID NO: 2043932 - RNA, 19 nt, Artificial Sequence
  Description of Artificial Sequence: Synthetic oligonucleotide
  Sense strand starting at position 2828 of SEQ ID NO: 1881429
ugacaugaccuuuaaguuu

SEQ ID NO: 2043933 - RNA, 19 nt, Artificial Sequence
  Description of Artificial Sequence: Synthetic oligonucleotide
  Antisense strand to SEQ ID NO: 2043932
aaacuuaaaggucauguca

SEQ ID NO: 2043934 - RNA, 19 nt, Artificial Sequence
  Description of Artificial Sequence: Synthetic oligonucleotide
  Sense strand starting at position 3000 of SEQ ID NO: 1881429
cucuguguuccugcugcau

SEQ ID NO: 2043935 - RNA, 19 nt, Artificial Sequence
  Description of Artificial Sequence: Synthetic oligonucleotide
  Antisense strand to SEQ ID NO: 2043934
augcagcaggaacacagag

SEQ ID NO: 2043936 - RNA, 19 nt, Artificial Sequence
  Description of Artificial Sequence: Synthetic oligonucleotide
  Sense strand starting at position 3004 of SEQ ID NO: 1881429
guguuccugcugcauuuaa

SEQ ID NO: 2043937 - RNA, 19 nt, Artificial Sequence
  Description of Artificial Sequence: Synthetic oligonucleotide
  Antisense strand to SEQ ID NO: 2043936
uuaaaugcagcaggaacac

SEQ ID NO: 2043938 - RNA, 19 nt, Artificial Sequence
  Description of Artificial Sequence: Synthetic oligonucleotide
  Sense strand starting at position 3144 of SEQ ID NO: 1881429
cucucauugcuguagaaua

SEQ ID NO: 2043939 - RNA, 19 nt, Artificial Sequence
  Description of Artificial Sequence: Synthetic oligonucleotide
  Antisense strand to SEQ ID NO: 2043938
uauucuacagcaaugagag

SEQ ID NO: 2043940 - RNA, 19 nt, Artificial Sequence
  Description of Artificial Sequence: Synthetic oligonucleotide
  Sense strand starting at position 3160 of SEQ ID NO: 1881429
auaggacucucaguuauuc

SEQ ID NO: 2043941 - RNA, 19 nt, Artificial Sequence
  Description of Artificial Sequence: Synthetic oligonucleotide
  Antisense strand to SEQ ID NO: 2043940
gaauaacugagaguccuau

SEQ ID NO: 2043942 - RNA, 19 nt, Artificial Sequence
  Description of Artificial Sequence: Synthetic oligonucleotide
  Sense strand starting at position 3165 of SEQ ID NO: 1881429
acucucaguuauucugaua

SEQ ID NO: 2043943 - RNA, 19 nt, Artificial Sequence
  Description of Artificial Sequence: Synthetic oligonucleotide
  Antisense strand to SEQ ID NO: 2043942
uaucagaauaacugagagu

SEQ ID NO: 2043944 - RNA, 19 nt, Artificial Sequence
  Description of Artificial Sequence: Synthetic oligonucleotide
  Sense strand starting at position 3252 of SEQ ID NO: 1881429
ugucaagauacgcaaugaa

SEQ ID NO: 2043945 - RNA, 19 nt, Artificial Sequence
  Description of Artificial Sequence: Synthetic oligonucleotide
  Antisense strand to SEQ ID NO: 2043944
uucauugcguaucuugaca

SEQ ID NO: 2043946 - RNA, 19 nt, Artificial Sequence
  Description of Artificial Sequence: Synthetic oligonucleotide
  Sense strand starting at position 3280 of SEQ ID NO: 1881429
ggagaucauuaagcuauua

SEQ ID NO: 2043947 - RNA, 19 nt, Artificial Sequence
  Description of Artificial Sequence: Synthetic oligonucleotide
  Antisense strand to SEQ ID NO: 2043946
uaauagcuuaaugaucucc

SEQ ID NO: 2043948 - RNA, 19 nt, Artificial Sequence
  Description of Artificial Sequence: Synthetic oligonucleotide
  Sense strand starting at position 3365 of SEQ ID NO: 1881429
uuuauuaaacagugacagu

SEQ ID NO: 2043949 - RNA, 19 nt, Artificial Sequence
  Description of Artificial Sequence: Synthetic oligonucleotide
  Antisense strand to SEQ ID NO: 2043948
acugucacuguuuaauaaa

SEQ ID NO: 2043950 - RNA, 19 nt, Artificial Sequence
  Description of Artificial Sequence: Synthetic oligonucleotide
  Sense strand starting at position 3390 of SEQ ID NO: 1881429
gggacaugccacuauaagu

SEQ ID NO: 2043951 - RNA, 19 nt, Artificial Sequence
  Description of Artificial Sequence: Synthetic oligonucleotide
  Antisense strand to SEQ ID NO: 2043950
acuuauaguggcauguccc

SEQ ID NO: 2043952 - RNA, 19 nt, Artificial Sequence
  Description of Artificial Sequence: Synthetic oligonucleotide
  Sense strand starting at position 3460 of SEQ ID NO: 1881429
uaugguagcagagaaaugu

SEQ ID NO: 2043953 - RNA, 19 nt, Artificial Sequence
  Description of Artificial Sequence: Synthetic oligonucleotide
  Antisense strand to SEQ ID NO: 2043952
acauuucucugcuaccaua

SEQ ID NO: 2043954 - RNA, 19 nt, Artificial Sequence
  Description of Artificial Sequence: Synthetic oligonucleotide
  Sense strand starting at position 3556 of SEQ ID NO: 1881429
ugagucaacuaguuaaauu

SEQ ID NO: 2043955 - RNA, 19 nt, Artificial Sequence
  Description of Artificial Sequence: Synthetic oligonucleotide
  Antisense strand to SEQ ID NO: 2043954
aauuuaacuaguugacuca

SEQ ID NO: 2043956 - RNA, 19 nt, Artificial Sequence
  Description of Artificial Sequence: Synthetic oligonucleotide
  Sense strand starting at position 3949 of SEQ ID NO: 1881429
augugauauuuccuucugu

SEQ ID NO: 2043957 - RNA, 19 nt, Artificial Sequence
  Description of Artificial Sequence: Synthetic oligonucleotide
  Antisense strand to SEQ ID NO: 2043956
acagaaggaaauaucacau

SEQ ID NO: 2043958 - RNA, 19 nt, Artificial Sequence
  Description of Artificial Sequence: Synthetic oligonucleotide
  Sense strand starting at position 3950 of SEQ ID NO: 1881429
ugugauauuuccuucuguc

SEQ ID NO: 2043959 - RNA, 19 nt, Artificial Sequence
  Description of Artificial Sequence: Synthetic oligonucleotide
  Antisense strand to SEQ ID NO: 2043958
gacagaaggaaauaucaca

SEQ ID NO: 2043960 - RNA, 19 nt, Artificial Sequence
  Description of Artificial Sequence: Synthetic oligonucleotide
  Sense strand starting at position 91 of SEQ ID NO: 1881430
gccggaguaucacacaaca

SEQ ID NO: 2043961 - RNA, 19 nt, Artificial Sequence
  Description of Artificial Sequence: Synthetic oligonucleotide
  Antisense strand to SEQ ID NO: 2043960
uguugugugauacuccggc

SEQ ID NO: 2043962 - RNA, 19 nt, Artificial Sequence
  Description of Artificial Sequence: Synthetic oligonucleotide
  Sense strand starting at position 156 of SEQ ID NO: 1881430
ggucacucacuuuaauaug

SEQ ID NO: 2043963 - RNA, 19 nt, Artificial Sequence
  Description of Artificial Sequence: Synthetic oligonucleotide
  Antisense strand to SEQ ID NO: 2043962
cauauuaaagugagugacc

SEQ ID NO: 2043964 - RNA, 19 nt, Artificial Sequence
  Description of Artificial Sequence: Synthetic oligonucleotide
  Sense strand starting at position 175 of SEQ ID NO: 1881430
cugucaucuugggccggaa

SEQ ID NO: 2043965 - RNA, 19 nt, Artificial Sequence
  Description of Artificial Sequence: Synthetic oligonucleotide
  Antisense strand to SEQ ID NO: 2043964
uuccggcccaagaugacag

SEQ ID NO: 2043966 - RNA, 19 nt, Artificial Sequence
  Description of Artificial Sequence: Synthetic oligonucleotide
  Sense strand starting at position 187 of SEQ ID NO: 1881430
gccggaagguuagaagaaa

SEQ ID NO: 2043967 - RNA, 19 nt, Artificial Sequence
  Description of Artificial Sequence: Synthetic oligonucleotide
  Antisense strand to SEQ ID NO: 2043966
uuucuucuaaccuuccggc

SEQ ID NO: 2043968 - RNA, 19 nt, Artificial Sequence
  Description of Artificial Sequence: Synthetic oligonucleotide
  Sense strand starting at position 876 of SEQ ID NO: 1881430
cuuagcucugcuuaaaugu

SEQ ID NO: 2043969 - RNA, 19 nt, Artificial Sequence
  Description of Artificial Sequence: Synthetic oligonucleotide
  Antisense strand to SEQ ID NO: 2043968
acauuuaagcagagcuaag

SEQ ID NO: 2043970 - RNA, 19 nt, Artificial Sequence
  Description of Artificial Sequence: Synthetic oligonucleotide
  Sense strand starting at position 957 of SEQ ID NO: 1881430
acucguaccuucugccaau

SEQ ID NO: 2043971 - RNA, 19 nt, Artificial Sequence
  Description of Artificial Sequence: Synthetic oligonucleotide
  Antisense strand to SEQ ID NO: 2043970
auuggcagaagguacgagu

SEQ ID NO: 2043972 - RNA, 19 nt, Artificial Sequence
  Description of Artificial Sequence: Synthetic oligonucleotide
  Sense strand starting at position 968 of SEQ ID NO: 1881430
cugccaauucucuggcaau

SEQ ID NO: 2043973 - RNA, 19 nt, Artificial Sequence
  Description of Artificial Sequence: Synthetic oligonucleotide
  Antisense strand to SEQ ID NO: 2043972
auugccagagaauuggcag

SEQ ID NO: 2043974 - RNA, 19 nt, Artificial Sequence
  Description of Artificial Sequence: Synthetic oligonucleotide
  Sense strand starting at position 969 of SEQ ID NO: 1881430
ugccaauucucuggcaauc

SEQ ID NO: 2043975 - RNA, 19 nt, Artificial Sequence
  Description of Artificial Sequence: Synthetic oligonucleotide
  Antisense strand to SEQ ID NO: 2043974
gauugccagagaauuggca

SEQ ID NO: 2043976 - RNA, 19 nt, Artificial Sequence
  Description of Artificial Sequence: Synthetic oligonucleotide
  Sense strand starting at position 1037 of SEQ ID NO: 1881430
ccucuucugcccgagguuu

SEQ ID NO: 2043977 - RNA, 19 nt, Artificial Sequence
  Description of Artificial Sequence: Synthetic oligonucleotide
  Antisense strand to SEQ ID NO: 2043976
aaaccucgggcagaagagg

SEQ ID NO: 2043978 - RNA, 19 nt, Artificial Sequence
  Description of Artificial Sequence: Synthetic oligonucleotide
  Sense strand starting at position 1057 of SEQ ID NO: 1881430
agguaaucuguuuggcgga

SEQ ID NO: 2043979 - RNA, 19 nt, Artificial Sequence
  Description of Artificial Sequence: Synthetic oligonucleotide
  Antisense strand to SEQ ID NO: 2043978
uccgccaaacagauuaccu

SEQ ID NO: 2043980 - RNA, 19 nt, Artificial Sequence
  Description of Artificial Sequence: Synthetic oligonucleotide
  Sense strand starting at position 1058 of SEQ ID NO: 1881430
gguaaucuguuuggcggaa

SEQ ID NO: 2043981 - RNA, 19 nt, Artificial Sequence
  Description of Artificial Sequence: Synthetic oligonucleotide
  Antisense strand to SEQ ID NO: 2043980
uuccgccaaacagauuacc

SEQ ID NO: 2043982 - RNA, 19 nt, Artificial Sequence
  Description of Artificial Sequence: Synthetic oligonucleotide
  Sense strand starting at position 1059 of SEQ ID NO: 1881430
guaaucuguuuggcggaau

SEQ ID NO: 2043983 - RNA, 19 nt, Artificial Sequence
  Description of Artificial Sequence: Synthetic oligonucleotide
  Antisense strand to SEQ ID NO: 2043982
auuccgccaaacagauuac

SEQ ID NO: 2043984 - RNA, 19 nt, Artificial Sequence
  Description of Artificial Sequence: Synthetic oligonucleotide
  Sense strand starting at position 1062 of SEQ ID NO: 1881430
aucuguuuggcggaaugca

SEQ ID NO: 2043985 - RNA, 19 nt, Artificial Sequence
  Description of Artificial Sequence: Synthetic oligonucleotide
  Antisense strand to SEQ ID NO: 2043984
ugcauuccgccaaacagau

SEQ ID NO: 2043986 - RNA, 19 nt, Artificial Sequence
  Description of Artificial Sequence: Synthetic oligonucleotide
  Sense strand starting at position 1070 of SEQ ID NO: 1881430
ggcggaaugcaggagaaua

SEQ ID NO: 2043987 - RNA, 19 nt, Artificial Sequence
  Description of Artificial Sequence: Synthetic oligonucleotide
  Antisense strand to SEQ ID NO: 2043986
uauucuccugcauuccgcc

SEQ ID NO: 2043988 - RNA, 19 nt, Artificial Sequence
  Description of Artificial Sequence: Synthetic oligonucleotide
  Sense strand starting at position 1174 of SEQ ID NO: 1881430
guucccgcucuuuauguua

SEQ ID NO: 2043989 - RNA, 19 nt, Artificial Sequence
  Description of Artificial Sequence: Synthetic oligonucleotide
  Antisense strand to SEQ ID NO: 2043988
uaacauaaagagcgggaac

SEQ ID NO: 2043990 - RNA, 19 nt, Artificial Sequence
  Description of Artificial Sequence: Synthetic oligonucleotide
  Sense strand starting at position 1176 of SEQ ID NO: 1881430
ucccgcucuuuauguuaau

SEQ ID NO: 2043991 - RNA, 19 nt, Artificial Sequence
  Description of Artificial Sequence: Synthetic oligonucleotide
  Antisense strand to SEQ ID NO: 2043990
auuaacauaaagagcggga

SEQ ID NO: 2043992 - RNA, 19 nt, Artificial Sequence
  Description of Artificial Sequence: Synthetic oligonucleotide
  Sense strand starting at position 1182 of SEQ ID NO: 1881430
ucuuuauguuaaugcgagu

SEQ ID NO: 2043993 - RNA, 19 nt, Artificial Sequence
  Description of Artificial Sequence: Synthetic oligonucleotide
  Antisense strand to SEQ ID NO: 2043992
acucgcauuaacauaaaga

SEQ ID NO: 2043994 - RNA, 19 nt, Artificial Sequence
  Description of Artificial Sequence: Synthetic oligonucleotide
  Sense strand starting at position 1185 of SEQ ID NO: 1881430
uuauguuaaugcgagucaa

SEQ ID NO: 2043995 - RNA, 19 nt, Artificial Sequence
  Description of Artificial Sequence: Synthetic oligonucleotide
  Antisense strand to SEQ ID NO: 2043994
uugacucgcauuaacauaa

SEQ ID NO: 2043996 - RNA, 19 nt, Artificial Sequence
  Description of Artificial Sequence: Synthetic oligonucleotide
  Sense strand starting at position 1494 of SEQ ID NO: 1881430
gcuggaguucuccaaauag

SEQ ID NO: 2043997 - RNA, 19 nt, Artificial Sequence
  Description of Artificial Sequence: Synthetic oligonucleotide
  Antisense strand to SEQ ID NO: 2043996
cuauuuggagaacuccagc

SEQ ID NO: 2043998 - RNA, 19 nt, Artificial Sequence
  Description of Artificial Sequence: Synthetic oligonucleotide
  Sense strand starting at position 1631 of SEQ ID NO: 1881430
gcgaaagagguuggucaga

SEQ ID NO: 2043999 - RNA, 19 nt, Artificial Sequence
  Description of Artificial Sequence: Synthetic oligonucleotide
  Antisense strand to SEQ ID NO: 2043998
ucugaccaaccucuuucgc

SEQ ID NO: 2044000 - RNA, 19 nt, Artificial Sequence
  Description of Artificial Sequence: Synthetic oligonucleotide
  Sense strand starting at position 1864 of SEQ ID NO: 1881430
ccuggaucaccuugaugag

SEQ ID NO: 2044001 - RNA, 19 nt, Artificial Sequence
  Description of Artificial Sequence: Synthetic oligonucleotide
  Antisense strand to SEQ ID NO: 2044000
cucaucaaggugauccagg

SEQ ID NO: 2044002 - RNA, 19 nt, Artificial Sequence
  Description of Artificial Sequence: Synthetic oligonucleotide
  Sense strand starting at position 2462 of SEQ ID NO: 1881430
gcagguccuucuccuacaa

SEQ ID NO: 2044003 - RNA, 19 nt, Artificial Sequence
  Description of Artificial Sequence: Synthetic oligonucleotide
  Antisense strand to SEQ ID NO: 2044002
uuguaggagaaggaccugc

SEQ ID NO: 2044004 - RNA, 19 nt, Artificial Sequence
  Description of Artificial Sequence: Synthetic oligonucleotide
  Sense strand starting at position 2632 of SEQ ID NO: 1881430
ucacuucugucccgaagag

SEQ ID NO: 2044005 - RNA, 19 nt, Artificial Sequence
  Description of Artificial Sequence: Synthetic oligonucleotide
  Antisense strand to SEQ ID NO: 2044004
cucuucgggacagaaguga

SEQ ID NO: 2044006 - RNA, 19 nt, Artificial Sequence
  Description of Artificial Sequence: Synthetic oligonucleotide
  Sense strand starting at position 2654 of SEQ ID NO: 1881430
cugggaucuucuugggaag

SEQ ID NO: 2044007 - RNA, 19 nt, Artificial Sequence
  Description of Artificial Sequence: Synthetic oligonucleotide
  Antisense strand to SEQ ID NO: 2044006
cuucccaagaagaucccag

SEQ ID NO: 2044008 - RNA, 19 nt, Artificial Sequence
  Description of Artificial Sequence: Synthetic oligonucleotide
  Sense strand starting at position 2656 of SEQ ID NO: 1881430
gggaucuucuugggaagac

SEQ ID NO: 2044009 - RNA, 19 nt, Artificial Sequence
  Description of Artificial Sequence: Synthetic oligonucleotide
  Antisense strand to SEQ ID NO: 2044008
gucuucccaagaagauccc

SEQ ID NO: 2044010 - RNA, 19 nt, Artificial Sequence
  Description of Artificial Sequence: Synthetic oligonucleotide
  Sense strand starting at position 3248 of SEQ ID NO: 1881430
gggccucucuggcugagaa

SEQ ID NO: 2044011 - RNA, 19 nt, Artificial Sequence
  Description of Artificial Sequence: Synthetic oligonucleotide
  Antisense strand to SEQ ID NO: 2044010
uucucagccagagaggccc

SEQ ID NO: 2044012 - RNA, 19 nt, Artificial Sequence
  Description of Artificial Sequence: Synthetic oligonucleotide
  Sense strand starting at position 3249 of SEQ ID NO: 1881430
ggccucucuggcugagaaa

SEQ ID NO: 2044013 - RNA, 19 nt, Artificial Sequence
  Description of Artificial Sequence: Synthetic oligonucleotide
  Antisense strand to SEQ ID NO: 2044012
uuucucagccagagaggcc

SEQ ID NO: 2044014 - RNA, 19 nt, Artificial Sequence
  Description of Artificial Sequence: Synthetic oligonucleotide
  Sense strand starting at position 3252 of SEQ ID NO: 1881430
cucucuggcugagaaacua

SEQ ID NO: 2044015 - RNA, 19 nt, Artificial Sequence
  Description of Artificial Sequence: Synthetic oligonucleotide
  Antisense strand to SEQ ID NO: 2044014
uaguuucucagccagagag

SEQ ID NO: 2044016 - RNA, 19 nt, Artificial Sequence
  Description of Artificial Sequence: Synthetic oligonucleotide
  Sense strand starting at position 3288 of SEQ ID NO: 1881430
guuuccugagcuggguaua

SEQ ID NO: 2044017 - RNA, 19 nt, Artificial Sequence
  Description of Artificial Sequence: Synthetic oligonucleotide
  Antisense strand to SEQ ID NO: 2044016
uauacccagcucaggaaac

SEQ ID NO: 2044018 - RNA, 19 nt, Artificial Sequence
  Description of Artificial Sequence: Synthetic oligonucleotide
  Sense strand starting at position 3509 of SEQ ID NO: 1881430
gcgcucuggugagaaucua

SEQ ID NO: 2044019 - RNA, 19 nt, Artificial Sequence
  Description of Artificial Sequence: Synthetic oligonucleotide
  Antisense strand to SEQ ID NO: 2044018
uagauucucaccagagcgc

SEQ ID NO: 2044020 - RNA, 19 nt, Artificial Sequence
  Description of Artificial Sequence: Synthetic oligonucleotide
  Sense strand starting at position 3681 of SEQ ID NO: 1881430
cuggcagucccugaagacu

SEQ ID NO: 2044021 - RNA, 19 nt, Artificial Sequence
  Description of Artificial Sequence: Synthetic oligonucleotide
  Antisense strand to SEQ ID NO: 2044020
agucuucagggacugccag

SEQ ID NO: 2044022 - RNA, 19 nt, Artificial Sequence
  Description of Artificial Sequence: Synthetic oligonucleotide
  Sense strand starting at position 3690 of SEQ ID NO: 1881430
ccugaagacuccugccuga

SEQ ID NO: 2044023 - RNA, 19 nt, Artificial Sequence
  Description of Artificial Sequence: Synthetic oligonucleotide
  Antisense strand to SEQ ID NO: 2044022
ucaggcaggagucuucagg

SEQ ID NO: 2044024 - RNA, 19 nt, Artificial Sequence
  Description of Artificial Sequence: Synthetic oligonucleotide
  Sense strand starting at position 3767 of SEQ ID NO: 1881430
ucuacugcucgcugaggaa

SEQ ID NO: 2044025 - RNA, 19 nt, Artificial Sequence
  Description of Artificial Sequence: Synthetic oligonucleotide
  Antisense strand to SEQ ID NO: 2044024
uuccucagcgagcaguaga

SEQ ID NO: 2044026 - RNA, 19 nt, Artificial Sequence
  Description of Artificial Sequence: Synthetic oligonucleotide
  Sense strand starting at position 51 of SEQ ID NO: 1881431
ucugcaaguugauugaagu

SEQ ID NO: 2044027 - RNA, 19 nt, Artificial Sequence
  Description of Artificial Sequence: Synthetic oligonucleotide
  Antisense strand to SEQ ID NO: 2044026
acuucaaucaacuugcaga

SEQ ID NO: 2044028 - RNA, 19 nt, Artificial Sequence
  Description of Artificial Sequence: Synthetic oligonucleotide
  Sense strand starting at position 57 of SEQ ID NO: 1881431
aguugauugaaguggaauc

SEQ ID NO: 2044029 - RNA, 19 nt, Artificial Sequence
  Description of Artificial Sequence: Synthetic oligonucleotide
  Antisense strand to SEQ ID NO: 2044028
gauuccacuucaaucaacu

SEQ ID NO: 2044030 - RNA, 19 nt, Artificial Sequence
  Description of Artificial Sequence: Synthetic oligonucleotide
  Sense strand starting at position 78 of SEQ ID NO: 1881431
ugucuucucuauccagaga

SEQ ID NO: 2044031 - RNA, 19 nt, Artificial Sequence
  Description of Artificial Sequence: Synthetic oligonucleotide
  Antisense strand to SEQ ID NO: 2044030
ucucuggauagagaagaca

SEQ ID NO: 2044032 - RNA, 19 nt, Artificial Sequence
  Description of Artificial Sequence: Synthetic oligonucleotide
  Sense strand starting at position 89 of SEQ ID NO: 1881431
uccagagaugccuguauuc

SEQ ID NO: 2044033 - RNA, 19 nt, Artificial Sequence
  Description of Artificial Sequence: Synthetic oligonucleotide
  Antisense strand to SEQ ID NO: 2044032
gaauacaggcaucucugga

SEQ ID NO: 2044034 - RNA, 19 nt, Artificial Sequence
  Description of Artificial Sequence: Synthetic oligonucleotide
  Sense strand starting at position 99 of SEQ ID NO: 1881431
ccuguauucccugaaucag

SEQ ID NO: 2044035 - RNA, 19 nt, Artificial Sequence
  Description of Artificial Sequence: Synthetic oligonucleotide
  Antisense strand to SEQ ID NO: 2044034
cugauucagggaauacagg

SEQ ID NO: 2044036 - RNA, 19 nt, Artificial Sequence
  Description of Artificial Sequence: Synthetic oligonucleotide
  Sense strand starting at position 177 of SEQ ID NO: 1881431
gaaagauaauccuuagugc

SEQ ID NO: 2044037 - RNA, 19 nt, Artificial Sequence
  Description of Artificial Sequence: Synthetic oligonucleotide
  Antisense strand to SEQ ID NO: 2044036
gcacuaaggauuaucuuuc

SEQ ID NO: 2044038 - RNA, 19 nt, Artificial Sequence
  Description of Artificial Sequence: Synthetic oligonucleotide
  Sense strand starting at position 180 of SEQ ID NO: 1881431
agauaauccuuagugcaac

SEQ ID NO: 2044039 - RNA, 19 nt, Artificial Sequence
  Description of Artificial Sequence: Synthetic oligonucleotide
  Antisense strand to SEQ ID NO: 2044038
guugcacuaaggauuaucu

SEQ ID NO: 2044040 - RNA, 19 nt, Artificial Sequence
  Description of Artificial Sequence: Synthetic oligonucleotide
  Sense strand starting at position 274 of SEQ ID NO: 1881431
uuaugagugcuccaauucu

SEQ ID NO: 2044041 - RNA, 19 nt, Artificial Sequence
  Description of Artificial Sequence: Synthetic oligonucleotide
  Antisense strand to SEQ ID NO: 2044040
agaauuggagcacucauaa

SEQ ID NO: 2044042 - RNA, 19 nt, Artificial Sequence
  Description of Artificial Sequence: Synthetic oligonucleotide
  Sense strand starting at position 396 of SEQ ID NO: 1881431
augagauauugacaaugau

SEQ ID NO: 2044043 - RNA, 19 nt, Artificial Sequence
  Description of Artificial Sequence: Synthetic oligonucleotide
  Antisense strand to SEQ ID NO: 2044042
aucauugucaauaucucau

SEQ ID NO: 2044044 - RNA, 19 nt, Artificial Sequence
  Description of Artificial Sequence: Synthetic oligonucleotide
  Sense strand starting at position 479 of SEQ ID NO: 1881431
aucauaagcucuguaauga

SEQ ID NO: 2044045 - RNA, 19 nt, Artificial Sequence
  Description of Artificial Sequence: Synthetic oligonucleotide
  Antisense strand to SEQ ID NO: 2044044
ucauuacagagcuuaugau

SEQ ID NO: 2044046 - RNA, 19 nt, Artificial Sequence
  Description of Artificial Sequence: Synthetic oligonucleotide
  Sense strand starting at position 480 of SEQ ID NO: 1881431
ucauaagcucuguaaugaa

SEQ ID NO: 2044047 - RNA, 19 nt, Artificial Sequence
  Description of Artificial Sequence: Synthetic oligonucleotide
  Antisense strand to SEQ ID NO: 2044046
uucauuacagagcuuauga

SEQ ID NO: 2044048 - RNA, 19 nt, Artificial Sequence
  Description of Artificial Sequence: Synthetic oligonucleotide
  Sense strand starting at position 624 of SEQ ID NO: 1881431
uuuaaugguguagaaguua

SEQ ID NO: 2044049 - RNA, 19 nt, Artificial Sequence
  Description of Artificial Sequence: Synthetic oligonucleotide
  Antisense strand to SEQ ID NO: 2044048
uaacuucuacaccauuaaa

SEQ ID NO: 2044050 - RNA, 19 nt, Artificial Sequence
  Description of Artificial Sequence: Synthetic oligonucleotide
  Sense strand starting at position 629 of SEQ ID NO: 1881431
ugguguagaaguuauaauu

SEQ ID NO: 2044051 - RNA, 19 nt, Artificial Sequence
  Description of Artificial Sequence: Synthetic oligonucleotide
  Antisense strand to SEQ ID NO: 2044050
aauuauaacuucuacacca

SEQ ID NO: 2044052 - RNA, 19 nt, Artificial Sequence
  Description of Artificial Sequence: Synthetic oligonucleotide
  Sense strand starting at position 639 of SEQ ID NO: 1881431
guuauaauuuccgugucuu

SEQ ID NO: 2044053 - RNA, 19 nt, Artificial Sequence
  Description of Artificial Sequence: Synthetic oligonucleotide
  Antisense strand to SEQ ID NO: 2044052
aagacacggaaauuauaac

SEQ ID NO: 2044054 - RNA, 19 nt, Artificial Sequence
  Description of Artificial Sequence: Synthetic oligonucleotide
  Sense strand starting at position 640 of SEQ ID NO: 1881431
uuauaauuuccgugucuuc

SEQ ID NO: 2044055 - RNA, 19 nt, Artificial Sequence
  Description of Artificial Sequence: Synthetic oligonucleotide
  Antisense strand to SEQ ID NO: 2044054
gaagacacggaaauuauaa

SEQ ID NO: 2044056 - RNA, 19 nt, Artificial Sequence
  Description of Artificial Sequence: Synthetic oligonucleotide
  Sense strand starting at position 750 of SEQ ID NO: 1881431
agucauaugcuuuauuguu

SEQ ID NO: 2044057 - RNA, 19 nt, Artificial Sequence
  Description of Artificial Sequence: Synthetic oligonucleotide
  Antisense strand to SEQ ID NO: 2044056
aacaauaaagcauaugacu

SEQ ID NO: 2044058 - RNA, 19 nt, Artificial Sequence
  Description of Artificial Sequence: Synthetic oligonucleotide
  Sense strand starting at position 899 of SEQ ID NO: 1881431
cuggaacagugguugaaua

SEQ ID NO: 2044059 - RNA, 19 nt, Artificial Sequence
  Description of Artificial Sequence: Synthetic oligonucleotide
  Antisense strand to SEQ ID NO: 2044058
uauucaaccacuguuccag

SEQ ID NO: 2044060 - RNA, 19 nt, Artificial Sequence
  Description of Artificial Sequence: Synthetic oligonucleotide
  Sense strand starting at position 900 of SEQ ID NO: 1881431
uggaacagugguugaauaa

SEQ ID NO: 2044061 - RNA, 19 nt, Artificial Sequence
  Description of Artificial Sequence: Synthetic oligonucleotide
  Antisense strand to SEQ ID NO: 2044060
uuauucaaccacuguucca

SEQ ID NO: 2044062 - RNA, 19 nt, Artificial Sequence
  Description of Artificial Sequence: Synthetic oligonucleotide
  Sense strand starting at position 989 of SEQ ID NO: 1881431
ccaguuuggcauuagaaau

SEQ ID NO: 2044063 - RNA, 19 nt, Artificial Sequence
  Description of Artificial Sequence: Synthetic oligonucleotide
  Antisense strand to SEQ ID NO: 2044062
auuucuaaugccaaacugg

SEQ ID NO: 2044064 - RNA, 19 nt, Artificial Sequence
  Description of Artificial Sequence: Synthetic oligonucleotide
  Sense strand starting at position 1371 of SEQ ID NO: 1881431
accagagacuguuugucaa

SEQ ID NO: 2044065 - RNA, 19 nt, Artificial Sequence
  Description of Artificial Sequence: Synthetic oligonucleotide
  Antisense strand to SEQ ID NO: 2044064
uugacaaacagucucuggu

SEQ ID NO: 2044066 - RNA, 19 nt, Artificial Sequence
  Description of Artificial Sequence: Synthetic oligonucleotide
  Sense strand starting at position 1373 of SEQ ID NO: 1881431
cagagacuguuugucaaua

SEQ ID NO: 2044067 - RNA, 19 nt, Artificial Sequence
  Description of Artificial Sequence: Synthetic oligonucleotide
  Antisense strand to SEQ ID NO: 2044066
uauugacaaacagucucug

SEQ ID NO: 2044068 - RNA, 19 nt, Artificial Sequence
  Description of Artificial Sequence: Synthetic oligonucleotide
  Sense strand starting at position 1374 of SEQ ID NO: 1881431
agagacuguuugucaauau

SEQ ID NO: 2044069 - RNA, 19 nt, Artificial Sequence
  Description of Artificial Sequence: Synthetic oligonucleotide
  Antisense strand to SEQ ID NO: 2044068
auauugacaaacagucucu

SEQ ID NO: 2044070 - RNA, 19 nt, Artificial Sequence
  Description of Artificial Sequence: Synthetic oligonucleotide
  Sense strand starting at position 1425 of SEQ ID NO: 1881431
auaaguaaugcuggagagu

SEQ ID NO: 2044071 - RNA, 19 nt, Artificial Sequence
  Description of Artificial Sequence: Synthetic oligonucleotide
  Antisense strand to SEQ ID NO: 2044070
acucuccagcauuacuuau

SEQ ID NO: 2044072 - RNA, 19 nt, Artificial Sequence
  Description of Artificial Sequence: Synthetic oligonucleotide
  Sense strand starting at position 1488 of SEQ ID NO: 1881431
cgagauaucucccugggaa

SEQ ID NO: 2044073 - RNA, 19 nt, Artificial Sequence
  Description of Artificial Sequence: Synthetic oligonucleotide
  Antisense strand to SEQ ID NO: 2044072
uucccagggagauaucucg

SEQ ID NO: 2044074 - RNA, 19 nt, Artificial Sequence
  Description of Artificial Sequence: Synthetic oligonucleotide
  Sense strand starting at position 1566 of SEQ ID NO: 1881431
ugugaacuagcuuacuuua

SEQ ID NO: 2044075 - RNA, 19 nt, Artificial Sequence
  Description of Artificial Sequence: Synthetic oligonucleotide
  Antisense strand to SEQ ID NO: 2044074
uaaaguaagcuaguucaca

SEQ ID NO: 2044076 - RNA, 19 nt, Artificial Sequence
  Description of Artificial Sequence: Synthetic oligonucleotide
  Sense strand starting at position 1641 of SEQ ID NO: 1881431
aguauaagacguuacauac

SEQ ID NO: 2044077 - RNA, 19 nt, Artificial Sequence
  Description of Artificial Sequence: Synthetic oligonucleotide
  Antisense strand to SEQ ID NO: 2044076
guauguaacgucuuauacu

SEQ ID NO: 2044078 - RNA, 19 nt, Artificial Sequence
  Description of Artificial Sequence: Synthetic oligonucleotide
  Sense strand starting at position 1684 of SEQ ID NO: 1881431
uguaaacugucaucaaaua

SEQ ID NO: 2044079 - RNA, 19 nt, Artificial Sequence
  Description of Artificial Sequence: Synthetic oligonucleotide
  Antisense strand to SEQ ID NO: 2044078
uauuugaugacaguuuaca

SEQ ID NO: 2044080 - RNA, 19 nt, Artificial Sequence
  Description of Artificial Sequence: Synthetic oligonucleotide
  Sense strand starting at position 1819 of SEQ ID NO: 1881431
gacgcucaacuguauauau

SEQ ID NO: 2044081 - RNA, 19 nt, Artificial Sequence
  Description of Artificial Sequence: Synthetic oligonucleotide
  Antisense strand to SEQ ID NO: 2044080
auauauacaguugagcguc

SEQ ID NO: 2044082 - RNA, 19 nt, Artificial Sequence
  Description of Artificial Sequence: Synthetic oligonucleotide
  Sense strand starting at position 1952 of SEQ ID NO: 1881431
aguugaaauccacgacauu

SEQ ID NO: 2044083 - RNA, 19 nt, Artificial Sequence
  Description of Artificial Sequence: Synthetic oligonucleotide
  Antisense strand to SEQ ID NO: 2044082
aaugucguggauuucaacu

SEQ ID NO: 2044084 - RNA, 19 nt, Artificial Sequence
  Description of Artificial Sequence: Synthetic oligonucleotide
  Sense strand starting at position 1953 of SEQ ID NO: 1881431
guugaaauccacgacauua

SEQ ID NO: 2044085 - RNA, 19 nt, Artificial Sequence
  Description of Artificial Sequence: Synthetic oligonucleotide
  Antisense strand to SEQ ID NO: 2044084
uaaugucguggauuucaac

SEQ ID NO: 2044086 - RNA, 19 nt, Artificial Sequence
  Description of Artificial Sequence: Synthetic oligonucleotide
  Sense strand starting at position 1996 of SEQ ID NO: 1881431
gcucucaagguacaauaau

SEQ ID NO: 2044087 - RNA, 19 nt, Artificial Sequence
  Description of Artificial Sequence: Synthetic oligonucleotide
  Antisense strand to SEQ ID NO: 2044086
auuauuguaccuugagagc

SEQ ID NO: 2044088 - RNA, 19 nt, Artificial Sequence
  Description of Artificial Sequence: Synthetic oligonucleotide
  Sense strand starting at position 3539 of SEQ ID NO: 1881431
ggaaguuguccgcuguggu

SEQ ID NO: 2044089 - RNA, 19 nt, Artificial Sequence
  Description of Artificial Sequence: Synthetic oligonucleotide
  Antisense strand to SEQ ID NO: 2044088
accacagcggacaacuucc

SEQ ID NO: 2044090 - RNA, 19 nt, Artificial Sequence
  Description of Artificial Sequence: Synthetic oligonucleotide
  Sense strand starting at position 3560 of SEQ ID NO: 1881431
gggucuuacuucuuuagag

SEQ ID NO: 2044091 - RNA, 19 nt, Artificial Sequence
  Description of Artificial Sequence: Synthetic oligonucleotide
  Antisense strand to SEQ ID NO: 2044090
cucuaaagaaguaagaccc

SEQ ID NO: 2044092 - RNA, 19 nt, Artificial Sequence
  Description of Artificial Sequence: Synthetic oligonucleotide
  Sense strand starting at position 3562 of SEQ ID NO: 1881431
gucuuacuucuuuagagcu

SEQ ID NO: 2044093 - RNA, 19 nt, Artificial Sequence
  Description of Artificial Sequence: Synthetic oligonucleotide
  Antisense strand to SEQ ID NO: 2044092
agcucuaaagaaguaagac

SEQ ID NO: 2044094 - RNA, 19 nt, Artificial Sequence
  Description of Artificial Sequence: Synthetic oligonucleotide
  Sense strand starting at position 3605 of SEQ ID NO: 1881431
guuuguucugaauggaaac

SEQ ID NO: 2044095 - RNA, 19 nt, Artificial Sequence
  Description of Artificial Sequence: Synthetic oligonucleotide
  Antisense strand to SEQ ID NO: 2044094
guuuccauucagaacaaac

SEQ ID NO: 2044096 - RNA, 19 nt, Artificial Sequence
  Description of Artificial Sequence: Synthetic oligonucleotide
  Sense strand starting at position 3624 of SEQ ID NO: 1881431
gcugcaguucccuugaguu

SEQ ID NO: 2044097 - RNA, 19 nt, Artificial Sequence
  Description of Artificial Sequence: Synthetic oligonucleotide
  Antisense strand to SEQ ID NO: 2044096
aacucaagggaacugcagc

SEQ ID NO: 2044098 - RNA, 19 nt, Artificial Sequence
  Description of Artificial Sequence: Synthetic oligonucleotide
  Sense strand starting at position 3632 of SEQ ID NO: 1881431
ucccuugaguuauuagaaa

SEQ ID NO: 2044099 - RNA, 19 nt, Artificial Sequence
  Description of Artificial Sequence: Synthetic oligonucleotide
  Antisense strand to SEQ ID NO: 2044098
uuucuaauaacucaaggga

SEQ ID NO: 2044100 - RNA, 19 nt, Artificial Sequence
  Description of Artificial Sequence: Synthetic oligonucleotide
  Sense strand starting at position 3803 of SEQ ID NO: 1881431
agcagagccaccugagaaa

SEQ ID NO: 2044101 - RNA, 19 nt, Artificial Sequence
  Description of Artificial Sequence: Synthetic oligonucleotide
  Antisense strand to SEQ ID NO: 2044100
uuucucagguggcucugcu

SEQ ID NO: 2044102 - RNA, 19 nt, Artificial Sequence
  Description of Artificial Sequence: Synthetic oligonucleotide
  Sense strand starting at position 3826 of SEQ ID NO: 1881431
ucuugaguucugcaaagaa

SEQ ID NO: 2044103 - RNA, 19 nt, Artificial Sequence
  Description of Artificial Sequence: Synthetic oligonucleotide
  Antisense strand to SEQ ID NO: 2044102
uucuuugcagaacucaaga

SEQ ID NO: 2044104 - RNA, 19 nt, Artificial Sequence
  Description of Artificial Sequence: Synthetic oligonucleotide
  Sense strand starting at position 3978 of SEQ ID NO: 1881431
uuaggauuccagugacaac

SEQ ID NO: 2044105 - RNA, 19 nt, Artificial Sequence
  Description of Artificial Sequence: Synthetic oligonucleotide
  Antisense strand to SEQ ID NO: 2044104
guugucacuggaauccuaa

SEQ ID NO: 2044106 - RNA, 19 nt, Artificial Sequence
  Description of Artificial Sequence: Synthetic oligonucleotide
  Sense strand starting at position 202 of SEQ ID NO: 1881432
ccgugcaucagugagaaga

SEQ ID NO: 2044107 - RNA, 19 nt, Artificial Sequence
  Description of Artificial Sequence: Synthetic oligonucleotide
  Antisense strand to SEQ ID NO: 2044106
ucuucucacugaugcacgg

SEQ ID NO: 2044108 - RNA, 19 nt, Artificial Sequence
  Description of Artificial Sequence: Synthetic oligonucleotide
  Sense strand starting at position 370 of SEQ ID NO: 1881432
ggaaaucaaaucugguguu

SEQ ID NO: 2044109 - RNA, 19 nt, Artificial Sequence
  Description of Artificial Sequence: Synthetic oligonucleotide
  Antisense strand to SEQ ID NO: 2044108
aacaccagauuugauuucc

SEQ ID NO: 2044110 - RNA, 19 nt, Artificial Sequence
  Description of Artificial Sequence: Synthetic oligonucleotide
  Sense strand starting at position 750 of SEQ ID NO: 1881432
uagcuauguguuuacaaag

SEQ ID NO: 2044111 - RNA, 19 nt, Artificial Sequence
  Description of Artificial Sequence: Synthetic oligonucleotide
  Antisense strand to SEQ ID NO: 2044110
cuuuguaaacacauagcua

SEQ ID NO: 2044112 - RNA, 19 nt, Artificial Sequence
  Description of Artificial Sequence: Synthetic oligonucleotide
  Sense strand starting at position 966 of SEQ ID NO: 1881432
cugaguguuccacaaccag

SEQ ID NO: 2044113 - RNA, 19 nt, Artificial Sequence
  Description of Artificial Sequence: Synthetic oligonucleotide
  Antisense strand to SEQ ID NO: 2044112
cugguuguggaacacucag

SEQ ID NO: 2044114 - RNA, 19 nt, Artificial Sequence
  Description of Artificial Sequence: Synthetic oligonucleotide
  Sense strand starting at position 1012 of SEQ ID NO: 1881432
uauugugagcucugaggga

SEQ ID NO: 2044115 - RNA, 19 nt, Artificial Sequence
  Description of Artificial Sequence: Synthetic oligonucleotide
  Antisense strand to SEQ ID NO: 2044114
ucccucagagcucacaaua

SEQ ID NO: 2044116 - RNA, 19 nt, Artificial Sequence
  Description of Artificial Sequence: Synthetic oligonucleotide
  Sense strand starting at position 1137 of SEQ ID NO: 1881432
guccaucuuccguaaacag

SEQ ID NO: 2044117 - RNA, 19 nt, Artificial Sequence
  Description of Artificial Sequence: Synthetic oligonucleotide
  Antisense strand to SEQ ID NO: 2044116
cuguuuacggaagauggac

SEQ ID NO: 2044118 - RNA, 19 nt, Artificial Sequence
  Description of Artificial Sequence: Synthetic oligonucleotide
  Sense strand starting at position 1422 of SEQ ID NO: 1881432
agaugugauuaauuaaagc

SEQ ID NO: 2044119 - RNA, 19 nt, Artificial Sequence
  Description of Artificial Sequence: Synthetic oligonucleotide
  Antisense strand to SEQ ID NO: 2044118
gcuuuaauuaaucacaucu

SEQ ID NO: 2044120 - RNA, 19 nt, Artificial Sequence
  Description of Artificial Sequence: Synthetic oligonucleotide
  Sense strand starting at position 1601 of SEQ ID NO: 1881432
cucauuugguccuugcaaa

SEQ ID NO: 2044121 - RNA, 19 nt, Artificial Sequence
  Description of Artificial Sequence: Synthetic oligonucleotide
  Antisense strand to SEQ ID NO: 2044120
uuugcaaggaccaaaugag

SEQ ID NO: 2044122 - RNA, 19 nt, Artificial Sequence
  Description of Artificial Sequence: Synthetic oligonucleotide
  Sense strand starting at position 1602 of SEQ ID NO: 1881432
ucauuugguccuugcaaac

SEQ ID NO: 2044123 - RNA, 19 nt, Artificial Sequence
  Description of Artificial Sequence: Synthetic oligonucleotide
  Antisense strand to SEQ ID NO: 2044122
guuugcaaggaccaaauga

SEQ ID NO: 2044124 - RNA, 19 nt, Artificial Sequence
  Description of Artificial Sequence: Synthetic oligonucleotide
  Sense strand starting at position 1667 of SEQ ID NO: 1881432
aucugauacucagagauuu

SEQ ID NO: 2044125 - RNA, 19 nt, Artificial Sequence
  Description of Artificial Sequence: Synthetic oligonucleotide
  Antisense strand to SEQ ID NO: 2044124
aaaucucugaguaucagau

SEQ ID NO: 2044126 - RNA, 19 nt, Artificial Sequence
  Description of Artificial Sequence: Synthetic oligonucleotide
  Sense strand starting at position 1705 of SEQ ID NO: 1881432
agagcuauugcugagacga

SEQ ID NO: 2044127 - RNA, 19 nt, Artificial Sequence
  Description of Artificial Sequence: Synthetic oligonucleotide
  Antisense strand to SEQ ID NO: 2044126
ucgucucagcaauagcucu

SEQ ID NO: 2044128 - RNA, 19 nt, Artificial Sequence
  Description of Artificial Sequence: Synthetic oligonucleotide
  Sense strand starting at position 1816 of SEQ ID NO: 1881432
acguauaaucauggagcca

SEQ ID NO: 2044129 - RNA, 19 nt, Artificial Sequence
  Description of Artificial Sequence: Synthetic oligonucleotide
  Antisense strand to SEQ ID NO: 2044128
uggcuccaugauuauacgu

SEQ ID NO: 2044130 - RNA, 19 nt, Artificial Sequence
  Description of Artificial Sequence: Synthetic oligonucleotide
  Sense strand starting at position 1995 of SEQ ID NO: 1881432
accugauguugcuuuaaag

SEQ ID NO: 2044131 - RNA, 19 nt, Artificial Sequence
  Description of Artificial Sequence: Synthetic oligonucleotide
  Antisense strand to SEQ ID NO: 2044130
cuuuaaagcaacaucaggu

SEQ ID NO: 2044132 - RNA, 19 nt, Artificial Sequence
  Description of Artificial Sequence: Synthetic oligonucleotide
  Sense strand starting at position 2088 of SEQ ID NO: 1881432
gcggugugaggguaagaaa

SEQ ID NO: 2044133 - RNA, 19 nt, Artificial Sequence
  Description of Artificial Sequence: Synthetic oligonucleotide
  Antisense strand to SEQ ID NO: 2044132
uuucuuacccucacaccgc

SEQ ID NO: 2044134 - RNA, 19 nt, Artificial Sequence
  Description of Artificial Sequence: Synthetic oligonucleotide
  Sense strand starting at position 2138 of SEQ ID NO: 1881432
accagaagcuucuuggaau

SEQ ID NO: 2044135 - RNA, 19 nt, Artificial Sequence
  Description of Artificial Sequence: Synthetic oligonucleotide
  Antisense strand to SEQ ID NO: 2044134
auuccaagaagcuucuggu

SEQ ID NO: 2044136 - RNA, 19 nt, Artificial Sequence
  Description of Artificial Sequence: Synthetic oligonucleotide
  Sense strand starting at position 2273 of SEQ ID NO: 1881432
agucuuccucugcaagaga

SEQ ID NO: 2044137 - RNA, 19 nt, Artificial Sequence
  Description of Artificial Sequence: Synthetic oligonucleotide
  Antisense strand to SEQ ID NO: 2044136
ucucuugcagaggaagacu

SEQ ID NO: 2044138 - RNA, 19 nt, Artificial Sequence
  Description of Artificial Sequence: Synthetic oligonucleotide
  Sense strand starting at position 2276 of SEQ ID NO: 1881432
cuuccucugcaagagaaau

SEQ ID NO: 2044139 - RNA, 19 nt, Artificial Sequence
  Description of Artificial Sequence: Synthetic oligonucleotide
  Antisense strand to SEQ ID NO: 2044138
auuucucuugcagaggaag

SEQ ID NO: 2044140 - RNA, 19 nt, Artificial Sequence
  Description of Artificial Sequence: Synthetic oligonucleotide
  Sense strand starting at position 2293 of SEQ ID NO: 1881432
auaagcuguccagaaauau

SEQ ID NO: 2044141 - RNA, 19 nt, Artificial Sequence
  Description of Artificial Sequence: Synthetic oligonucleotide
  Antisense strand to SEQ ID NO: 2044140
auauuucuggacagcuuau

SEQ ID NO: 2044142 - RNA, 19 nt, Artificial Sequence
  Description of Artificial Sequence: Synthetic oligonucleotide
  Sense strand starting at position 2504 of SEQ ID NO: 1881432
agugaucuucccuaguggu

SEQ ID NO: 2044143 - RNA, 19 nt, Artificial Sequence
  Description of Artificial Sequence: Synthetic oligonucleotide
  Antisense strand to SEQ ID NO: 2044142
accacuagggaagaucacu

SEQ ID NO: 2044144 - RNA, 19 nt, Artificial Sequence
  Description of Artificial Sequence: Synthetic oligonucleotide
  Sense strand starting at position 2522 of SEQ ID NO: 1881432
ucaugauggucacugucua

SEQ ID NO: 2044145 - RNA, 19 nt, Artificial Sequence
  Description of Artificial Sequence: Synthetic oligonucleotide
  Antisense strand to SEQ ID NO: 2044144
uagacagugaccaucauga

SEQ ID NO: 2044146 - RNA, 19 nt, Artificial Sequence
  Description of Artificial Sequence: Synthetic oligonucleotide
  Sense strand starting at position 2523 of SEQ ID NO: 1881432
caugauggucacugucuaa

SEQ ID NO: 2044147 - RNA, 19 nt, Artificial Sequence
  Description of Artificial Sequence: Synthetic oligonucleotide
  Antisense strand to SEQ ID NO: 2044146
uuagacagugaccaucaug

SEQ ID NO: 2044148 - RNA, 19 nt, Artificial Sequence
  Description of Artificial Sequence: Synthetic oligonucleotide
  Sense strand starting at position 2526 of SEQ ID NO: 1881432
gauggucacugucuaaaca

SEQ ID NO: 2044149 - RNA, 19 nt, Artificial Sequence
  Description of Artificial Sequence: Synthetic oligonucleotide
  Antisense strand to SEQ ID NO: 2044148
uguuuagacagugaccauc

SEQ ID NO: 2044150 - RNA, 19 nt, Artificial Sequence
  Description of Artificial Sequence: Synthetic oligonucleotide
  Sense strand starting at position 2527 of SEQ ID NO: 1881432
auggucacugucuaaacaa

SEQ ID NO: 2044151 - RNA, 19 nt, Artificial Sequence
  Description of Artificial Sequence: Synthetic oligonucleotide
  Antisense strand to SEQ ID NO: 2044150
uuguuuagacagugaccau

SEQ ID NO: 2044152 - RNA, 19 nt, Artificial Sequence
  Description of Artificial Sequence: Synthetic oligonucleotide
  Sense strand starting at position 2640 of SEQ ID NO: 1881432
uccaguugguuuccugaga

SEQ ID NO: 2044153 - RNA, 19 nt, Artificial Sequence
  Description of Artificial Sequence: Synthetic oligonucleotide
  Antisense strand to SEQ ID NO: 2044152
ucucaggaaaccaacugga

SEQ ID NO: 2044154 - RNA, 19 nt, Artificial Sequence
  Description of Artificial Sequence: Synthetic oligonucleotide
  Sense strand starting at position 2670 of SEQ ID NO: 1881432
ucagcugcuggauauauga

SEQ ID NO: 2044155 - RNA, 19 nt, Artificial Sequence
  Description of Artificial Sequence: Synthetic oligonucleotide
  Antisense strand to SEQ ID NO: 2044154
ucauauauccagcagcuga

SEQ ID NO: 2044156 - RNA, 19 nt, Artificial Sequence
  Description of Artificial Sequence: Synthetic oligonucleotide
  Sense strand starting at position 2672 of SEQ ID NO: 1881432
agcugcuggauauaugaga

SEQ ID NO: 2044157 - RNA, 19 nt, Artificial Sequence
  Description of Artificial Sequence: Synthetic oligonucleotide
  Antisense strand to SEQ ID NO: 2044156
ucucauauauccagcagcu

SEQ ID NO: 2044158 - RNA, 19 nt, Artificial Sequence
  Description of Artificial Sequence: Synthetic oligonucleotide
  Sense strand starting at position 2692 of SEQ ID NO: 1881432
gggauugucacaggugauu

SEQ ID NO: 2044159 - RNA, 19 nt, Artificial Sequence
  Description of Artificial Sequence: Synthetic oligonucleotide
  Antisense strand to SEQ ID NO: 2044158
aaucaccugugacaauccc

SEQ ID NO: 2044160 - RNA, 19 nt, Artificial Sequence
  Description of Artificial Sequence: Synthetic oligonucleotide
  Sense strand starting at position 2697 of SEQ ID NO: 1881432
ugucacaggugauuaagaa

SEQ ID NO: 2044161 - RNA, 19 nt, Artificial Sequence
  Description of Artificial Sequence: Synthetic oligonucleotide
  Antisense strand to SEQ ID NO: 2044160
uucuuaaucaccugugaca

SEQ ID NO: 2044162 - RNA, 19 nt, Artificial Sequence
  Description of Artificial Sequence: Synthetic oligonucleotide
  Sense strand starting at position 2779 of SEQ ID NO: 1881432
uggugagucccugagacuu

SEQ ID NO: 2044163 - RNA, 19 nt, Artificial Sequence
  Description of Artificial Sequence: Synthetic oligonucleotide
  Antisense strand to SEQ ID NO: 2044162
aagucucagggacucacca

SEQ ID NO: 2044164 - RNA, 19 nt, Artificial Sequence
  Description of Artificial Sequence: Synthetic oligonucleotide
  Sense strand starting at position 2785 of SEQ ID NO: 1881432
gucccugagacuugcugaa

SEQ ID NO: 2044165 - RNA, 19 nt, Artificial Sequence
  Description of Artificial Sequence: Synthetic oligonucleotide
  Antisense strand to SEQ ID NO: 2044164
uucagcaagucucagggac

SEQ ID NO: 2044166 - RNA, 19 nt, Artificial Sequence
  Description of Artificial Sequence: Synthetic oligonucleotide
  Sense strand starting at position 2850 of SEQ ID NO: 1881432
agaggaauuugugaauuaa

SEQ ID NO: 2044167 - RNA, 19 nt, Artificial Sequence
  Description of Artificial Sequence: Synthetic oligonucleotide
  Antisense strand to SEQ ID NO: 2044166
uuaauucacaaauuccucu

SEQ ID NO: 2044168 - RNA, 19 nt, Artificial Sequence
  Description of Artificial Sequence: Synthetic oligonucleotide
  Sense strand starting at position 3317 of SEQ ID NO: 1881432
ggagauaauugacauacag

SEQ ID NO: 2044169 - RNA, 19 nt, Artificial Sequence
  Description of Artificial Sequence: Synthetic oligonucleotide
  Antisense strand to SEQ ID NO: 2044168
cuguaugucaauuaucucc

SEQ ID NO: 2044170 - RNA, 19 nt, Artificial Sequence
  Description of Artificial Sequence: Synthetic oligonucleotide
  Sense strand starting at position 3362 of SEQ ID NO: 1881432
aagggaguguuugugauug

SEQ ID NO: 2044171 - RNA, 19 nt, Artificial Sequence
  Description of Artificial Sequence: Synthetic oligonucleotide
  Antisense strand to SEQ ID NO: 2044170
caaucacaaacacucccuu

SEQ ID NO: 2044172 - RNA, 19 nt, Artificial Sequence
  Description of Artificial Sequence: Synthetic oligonucleotide
  Sense strand starting at position 3632 of SEQ ID NO: 1881432
auggaaaguuccucaggcu

SEQ ID NO: 2044173 - RNA, 19 nt, Artificial Sequence
  Description of Artificial Sequence: Synthetic oligonucleotide
  Antisense strand to SEQ ID NO: 2044172
agccugaggaacuuuccau

SEQ ID NO: 2044174 - RNA, 19 nt, Artificial Sequence
  Description of Artificial Sequence: Synthetic oligonucleotide
  Sense strand starting at position 3633 of SEQ ID NO: 1881432
uggaaaguuccucaggcuu

SEQ ID NO: 2044175 - RNA, 19 nt, Artificial Sequence
  Description of Artificial Sequence: Synthetic oligonucleotide
  Antisense strand to SEQ ID NO: 2044174
aagccugaggaacuuucca

SEQ ID NO: 2044176 - RNA, 19 nt, Artificial Sequence
  Description of Artificial Sequence: Synthetic oligonucleotide
  Sense strand starting at position 3640 of SEQ ID NO: 1881432
uuccucaggcuugauguua

SEQ ID NO: 2044177 - RNA, 19 nt, Artificial Sequence
  Description of Artificial Sequence: Synthetic oligonucleotide
  Antisense strand to SEQ ID NO: 2044176
uaacaucaagccugaggaa

SEQ ID NO: 2044178 - RNA, 19 nt, Artificial Sequence
  Description of Artificial Sequence: Synthetic oligonucleotide
  Sense strand starting at position 3735 of SEQ ID NO: 1881432
aggacaaauugaguuccuu

SEQ ID NO: 2044179 - RNA, 19 nt, Artificial Sequence
  Description of Artificial Sequence: Synthetic oligonucleotide
  Antisense strand to SEQ ID NO: 2044178
aaggaacucaauuuguccu

SEQ ID NO: 2044180 - RNA, 19 nt, Artificial Sequence
  Description of Artificial Sequence: Synthetic oligonucleotide
  Sense strand starting at position 3801 of SEQ ID NO: 1881432
gugucagacacuggucaag

SEQ ID NO: 2044181 - RNA, 19 nt, Artificial Sequence
  Description of Artificial Sequence: Synthetic oligonucleotide
  Antisense strand to SEQ ID NO: 2044180
cuugaccagugucugacac

SEQ ID NO: 2044182 - RNA, 19 nt, Artificial Sequence
  Description of Artificial Sequence: Synthetic oligonucleotide
  Sense strand starting at position 3853 of SEQ ID NO: 1881432
uggaacuuauaguuuagga

SEQ ID NO: 2044183 - RNA, 19 nt, Artificial Sequence
  Description of Artificial Sequence: Synthetic oligonucleotide
  Antisense strand to SEQ ID NO: 2044182
uccuaaacuauaaguucca

SEQ ID NO: 2044184 - RNA, 19 nt, Artificial Sequence
  Description of Artificial Sequence: Synthetic oligonucleotide
  Sense strand starting at position 3960 of SEQ ID NO: 1881432
acaaacacagucuguaauu

SEQ ID NO: 2044185 - RNA, 19 nt, Artificial Sequence
  Description of Artificial Sequence: Synthetic oligonucleotide
  Antisense strand to SEQ ID NO: 2044184
aauuacagacuguguuugu

SEQ ID NO: 2044186 - RNA, 19 nt, Artificial Sequence
  Description of Artificial Sequence: Synthetic oligonucleotide
  Sense strand starting at position 133 of SEQ ID NO: 1881433
gacacuaagcgccagauau

SEQ ID NO: 2044187 - RNA, 19 nt, Artificial Sequence
  Description of Artificial Sequence: Synthetic oligonucleotide
  Antisense strand to SEQ ID NO: 2044186
auaucuggcgcuuaguguc

SEQ ID NO: 2044188 - RNA, 19 nt, Artificial Sequence
  Description of Artificial Sequence: Synthetic oligonucleotide
  Sense strand starting at position 143 of SEQ ID NO: 1881433
gccagauauaucugagaga

SEQ ID NO: 2044189 - RNA, 19 nt, Artificial Sequence
  Description of Artificial Sequence: Synthetic oligonucleotide
  Antisense strand to SEQ ID NO: 2044188
ucucucagauauaucuggc

SEQ ID NO: 2044190 - RNA, 19 nt, Artificial Sequence
  Description of Artificial Sequence: Synthetic oligonucleotide
  Sense strand starting at position 146 of SEQ ID NO: 1881433
agauauaucugagagauuu

SEQ ID NO: 2044191 - RNA, 19 nt, Artificial Sequence
  Description of Artificial Sequence: Synthetic oligonucleotide
  Antisense strand to SEQ ID NO: 2044190
aaaucucucagauauaucu

SEQ ID NO: 2044192 - RNA, 19 nt, Artificial Sequence
  Description of Artificial Sequence: Synthetic oligonucleotide
  Sense strand starting at position 200 of SEQ ID NO: 1881433
ugggcauugaccugugaac

SEQ ID NO: 2044193 - RNA, 19 nt, Artificial Sequence
  Description of Artificial Sequence: Synthetic oligonucleotide
  Antisense strand to SEQ ID NO: 2044192
guucacaggucaaugccca

SEQ ID NO: 2044194 - RNA, 19 nt, Artificial Sequence
  Description of Artificial Sequence: Synthetic oligonucleotide
  Sense strand starting at position 202 of SEQ ID NO: 1881433
ggcauugaccugugaacac

SEQ ID NO: 2044195 - RNA, 19 nt, Artificial Sequence
  Description of Artificial Sequence: Synthetic oligonucleotide
  Antisense strand to SEQ ID NO: 2044194
guguucacaggucaaugcc

SEQ ID NO: 2044196 - RNA, 19 nt, Artificial Sequence
  Description of Artificial Sequence: Synthetic oligonucleotide
  Sense strand starting at position 377 of SEQ ID NO: 1881433
aguguuccucaauaacaca

SEQ ID NO: 2044197 - RNA, 19 nt, Artificial Sequence
  Description of Artificial Sequence: Synthetic oligonucleotide
  Antisense strand to SEQ ID NO: 2044196
uguguuauugaggaacacu

SEQ ID NO: 2044198 - RNA, 19 nt, Artificial Sequence
  Description of Artificial Sequence: Synthetic oligonucleotide
  Sense strand starting at position 454 of SEQ ID NO: 1881433
gguuaagcacucuagucau

SEQ ID NO: 2044199 - RNA, 19 nt, Artificial Sequence
  Description of Artificial Sequence: Synthetic oligonucleotide
  Antisense strand to SEQ ID NO: 2044198
augacuagagugcuuaacc

SEQ ID NO: 2044200 - RNA, 19 nt, Artificial Sequence
  Description of Artificial Sequence: Synthetic oligonucleotide
  Sense strand starting at position 524 of SEQ ID NO: 1881433
guuuccaaucugcaggaaa

SEQ ID NO: 2044201 - RNA, 19 nt, Artificial Sequence
  Description of Artificial Sequence: Synthetic oligonucleotide
  Antisense strand to SEQ ID NO: 2044200
uuuccugcagauuggaaac

SEQ ID NO: 2044202 - RNA, 19 nt, Artificial Sequence
  Description of Artificial Sequence: Synthetic oligonucleotide
  Sense strand starting at position 554 of SEQ ID NO: 1881433
agaacucucccagguuaca

SEQ ID NO: 2044203 - RNA, 19 nt, Artificial Sequence
  Description of Artificial Sequence: Synthetic oligonucleotide
  Antisense strand to SEQ ID NO: 2044202
uguaaccugggagaguucu

SEQ ID NO: 2044204 - RNA, 19 nt, Artificial Sequence
  Description of Artificial Sequence: Synthetic oligonucleotide
  Sense strand starting at position 886 of SEQ ID NO: 1881433
cucuaagucccauggaaag

SEQ ID NO: 2044205 - RNA, 19 nt, Artificial Sequence
  Description of Artificial Sequence: Synthetic oligonucleotide
  Antisense strand to SEQ ID NO: 2044204
cuuuccaugggacuuagag

SEQ ID NO: 2044206 - RNA, 19 nt, Artificial Sequence
  Description of Artificial Sequence: Synthetic oligonucleotide
  Sense strand starting at position 989 of SEQ ID NO: 1881433
acuauucuccgaugggaaa

SEQ ID NO: 2044207 - RNA, 19 nt, Artificial Sequence
  Description of Artificial Sequence: Synthetic oligonucleotide
  Antisense strand to SEQ ID NO: 2044206
uuucccaucggagaauagu

SEQ ID NO: 2044208 - RNA, 19 nt, Artificial Sequence
  Description of Artificial Sequence: Synthetic oligonucleotide
  Sense strand starting at position 990 of SEQ ID NO: 1881433
cuauucuccgaugggaaag

SEQ ID NO: 2044209 - RNA, 19 nt, Artificial Sequence
  Description of Artificial Sequence: Synthetic oligonucleotide
  Antisense strand to SEQ ID NO: 2044208
cuuucccaucggagaauag

SEQ ID NO: 2044210 - RNA, 19 nt, Artificial Sequence
  Description of Artificial Sequence: Synthetic oligonucleotide
  Sense strand starting at position 1058 of SEQ ID NO: 1881433
guuacugcggaugauugaa

SEQ ID NO: 2044211 - RNA, 19 nt, Artificial Sequence
  Description of Artificial Sequence: Synthetic oligonucleotide
  Antisense strand to SEQ ID NO: 2044210
uucaaucauccgcaguaac

SEQ ID NO: 2044212 - RNA, 19 nt, Artificial Sequence
  Description of Artificial Sequence: Synthetic oligonucleotide
  Sense strand starting at position 1638 of SEQ ID NO: 1881433
gccuccuaacgccagaaau

SEQ ID NO: 2044213 - RNA, 19 nt, Artificial Sequence
  Description of Artificial Sequence: Synthetic oligonucleotide
  Antisense strand to SEQ ID NO: 2044212
auuucuggcguuaggaggc

SEQ ID NO: 2044214 - RNA, 19 nt, Artificial Sequence
  Description of Artificial Sequence: Synthetic oligonucleotide
  Sense strand starting at position 2428 of SEQ ID NO: 1881433
auuaauaucuaggcuaaag

SEQ ID NO: 2044215 - RNA, 19 nt, Artificial Sequence
  Description of Artificial Sequence: Synthetic oligonucleotide
  Antisense strand to SEQ ID NO: 2044214
cuuuagccuagauauuaau

SEQ ID NO: 2044216 - RNA, 19 nt, Artificial Sequence
  Description of Artificial Sequence: Synthetic oligonucleotide
  Sense strand starting at position 2590 of SEQ ID NO: 1881433
aaucguauuugcccaguuu

SEQ ID NO: 2044217 - RNA, 19 nt, Artificial Sequence
  Description of Artificial Sequence: Synthetic oligonucleotide
  Antisense strand to SEQ ID NO: 2044216
aaacugggcaaauacgauu

SEQ ID NO: 2044218 - RNA, 19 nt, Artificial Sequence
  Description of Artificial Sequence: Synthetic oligonucleotide
  Sense strand starting at position 2665 of SEQ ID NO: 1881433
gaaauugaagucugaucug

SEQ ID NO: 2044219 - RNA, 19 nt, Artificial Sequence
  Description of Artificial Sequence: Synthetic oligonucleotide
  Antisense strand to SEQ ID NO: 2044218
cagaucagacuucaauuuc

SEQ ID NO: 2044220 - RNA, 19 nt, Artificial Sequence
  Description of Artificial Sequence: Synthetic oligonucleotide
  Sense strand starting at position 2668 of SEQ ID NO: 1881433
auugaagucugaucuguca

SEQ ID NO: 2044221 - RNA, 19 nt, Artificial Sequence
  Description of Artificial Sequence: Synthetic oligonucleotide
  Antisense strand to SEQ ID NO: 2044220
ugacagaucagacuucaau

SEQ ID NO: 2044222 - RNA, 19 nt, Artificial Sequence
  Description of Artificial Sequence: Synthetic oligonucleotide
  Sense strand starting at position 2671 of SEQ ID NO: 1881433
gaagucugaucugucacau

SEQ ID NO: 2044223 - RNA, 19 nt, Artificial Sequence
  Description of Artificial Sequence: Synthetic oligonucleotide
  Antisense strand to SEQ ID NO: 2044222
augugacagaucagacuuc

SEQ ID NO: 2044224 - RNA, 19 nt, Artificial Sequence
  Description of Artificial Sequence: Synthetic oligonucleotide
  Sense strand starting at position 2683 of SEQ ID NO: 1881433
gucacaucaugguuaacau

SEQ ID NO: 2044225 - RNA, 19 nt, Artificial Sequence
  Description of Artificial Sequence: Synthetic oligonucleotide
  Antisense strand to SEQ ID NO: 2044224
auguuaaccaugaugugac

SEQ ID NO: 2044226 - RNA, 19 nt, Artificial Sequence
  Description of Artificial Sequence: Synthetic oligonucleotide
  Sense strand starting at position 2702 of SEQ ID NO: 1881433
ucauauguugaccaaguca

SEQ ID NO: 2044227 - RNA, 19 nt, Artificial Sequence
  Description of Artificial Sequence: Synthetic oligonucleotide
  Antisense strand to SEQ ID NO: 2044226
ugacuuggucaacauauga

SEQ ID NO: 2044228 - RNA, 19 nt, Artificial Sequence
  Description of Artificial Sequence: Synthetic oligonucleotide
  Sense strand starting at position 3092 of SEQ ID NO: 1881433
auggguauucugugaacca

SEQ ID NO: 2044229 - RNA, 19 nt, Artificial Sequence
  Description of Artificial Sequence: Synthetic oligonucleotide
  Antisense strand to SEQ ID NO: 2044228
ugguucacagaauacccau

SEQ ID NO: 2044230 - RNA, 19 nt, Artificial Sequence
  Description of Artificial Sequence: Synthetic oligonucleotide
  Sense strand starting at position 3103 of SEQ ID NO: 1881433
gugaaccaucgugacagau

SEQ ID NO: 2044231 - RNA, 19 nt, Artificial Sequence
  Description of Artificial Sequence: Synthetic oligonucleotide
  Antisense strand to SEQ ID NO: 2044230
aucugucacgaugguucac

SEQ ID NO: 2044232 - RNA, 19 nt, Artificial Sequence
  Description of Artificial Sequence: Synthetic oligonucleotide
  Sense strand starting at position 3109 of SEQ ID NO: 1881433
caucgugacagaugaaguu

SEQ ID NO: 2044233 - RNA, 19 nt, Artificial Sequence
  Description of Artificial Sequence: Synthetic oligonucleotide
  Antisense strand to SEQ ID NO: 2044232
aacuucaucugucacgaug

SEQ ID NO: 2044234 - RNA, 19 nt, Artificial Sequence
  Description of Artificial Sequence: Synthetic oligonucleotide
  Sense strand starting at position 3119 of SEQ ID NO: 1881433
gaugaaguuggauggucuu

SEQ ID NO: 2044235 - RNA, 19 nt, Artificial Sequence
  Description of Artificial Sequence: Synthetic oligonucleotide
  Antisense strand to SEQ ID NO: 2044234
aagaccauccaacuucauc

SEQ ID NO: 2044236 - RNA, 19 nt, Artificial Sequence
  Description of Artificial Sequence: Synthetic oligonucleotide
  Sense strand starting at position 3158 of SEQ ID NO: 1881433
uuuguuguugucguuaauu

SEQ ID NO: 2044237 - RNA, 19 nt, Artificial Sequence
  Description of Artificial Sequence: Synthetic oligonucleotide
  Antisense strand to SEQ ID NO: 2044236
aauuaacgacaacaacaaa

SEQ ID NO: 2044238 - RNA, 19 nt, Artificial Sequence
  Description of Artificial Sequence: Synthetic oligonucleotide
  Sense strand starting at position 3260 of SEQ ID NO: 1881433
gugauagaaucauuaaguc

SEQ ID NO: 2044239 - RNA, 19 nt, Artificial Sequence
  Description of Artificial Sequence: Synthetic oligonucleotide
  Antisense strand to SEQ ID NO: 2044238
gacuuaaugauucuaucac

SEQ ID NO: 2044240 - RNA, 19 nt, Artificial Sequence
  Description of Artificial Sequence: Synthetic oligonucleotide
  Sense strand starting at position 3331 of SEQ ID NO: 1881433
uuguuaaauuuggcuucca

SEQ ID NO: 2044241 - RNA, 19 nt, Artificial Sequence
  Description of Artificial Sequence: Synthetic oligonucleotide
  Antisense strand to SEQ ID NO: 2044240
uggaagccaaauuuaacaa

SEQ ID NO: 2044242 - RNA, 19 nt, Artificial Sequence
  Description of Artificial Sequence: Synthetic oligonucleotide
  Sense strand starting at position 3332 of SEQ ID NO: 1881433
uguuaaauuuggcuuccau

SEQ ID NO: 2044243 - RNA, 19 nt, Artificial Sequence
  Description of Artificial Sequence: Synthetic oligonucleotide
  Antisense strand to SEQ ID NO: 2044242
auggaagccaaauuuaaca

SEQ ID NO: 2044244 - RNA, 19 nt, Artificial Sequence
  Description of Artificial Sequence: Synthetic oligonucleotide
  Sense strand starting at position 3406 of SEQ ID NO: 1881433
gcacuuaauguauggauaa

SEQ ID NO: 2044245 - RNA, 19 nt, Artificial Sequence
  Description of Artificial Sequence: Synthetic oligonucleotide
  Antisense strand to SEQ ID NO: 2044244
uuauccauacauuaagugc

SEQ ID NO: 2044246 - RNA, 19 nt, Artificial Sequence
  Description of Artificial Sequence: Synthetic oligonucleotide
  Sense strand starting at position 3416 of SEQ ID NO: 1881433
uauggauaagaugguguuu

SEQ ID NO: 2044247 - RNA, 19 nt, Artificial Sequence
  Description of Artificial Sequence: Synthetic oligonucleotide
  Antisense strand to SEQ ID NO: 2044246
aaacaccaucuuauccaua

SEQ ID NO: 2044248 - RNA, 19 nt, Artificial Sequence
  Description of Artificial Sequence: Synthetic oligonucleotide
  Sense strand starting at position 3421 of SEQ ID NO: 1881433
auaagaugguguuuggaac

SEQ ID NO: 2044249 - RNA, 19 nt, Artificial Sequence
  Description of Artificial Sequence: Synthetic oligonucleotide
  Antisense strand to SEQ ID NO: 2044248
guuccaaacaccaucuuau

SEQ ID NO: 2044250 - RNA, 19 nt, Artificial Sequence
  Description of Artificial Sequence: Synthetic oligonucleotide
  Sense strand starting at position 3609 of SEQ ID NO: 1881433
gugacuuugauauggugau

SEQ ID NO: 2044251 - RNA, 19 nt, Artificial Sequence
  Description of Artificial Sequence: Synthetic oligonucleotide
  Antisense strand to SEQ ID NO: 2044250
aucaccauaucaaagucac

SEQ ID NO: 2044252 - RNA, 19 nt, Artificial Sequence
  Description of Artificial Sequence: Synthetic oligonucleotide
  Sense strand starting at position 3613 of SEQ ID NO: 1881433
cuuugauauggugaugcua

SEQ ID NO: 2044253 - RNA, 19 nt, Artificial Sequence
  Description of Artificial Sequence: Synthetic oligonucleotide
  Antisense strand to SEQ ID NO: 2044252
uagcaucaccauaucaaag

SEQ ID NO: 2044254 - RNA, 19 nt, Artificial Sequence
  Description of Artificial Sequence: Synthetic oligonucleotide
  Sense strand starting at position 3697 of SEQ ID NO: 1881433
ugagauaucagauguguuu

SEQ ID NO: 2044255 - RNA, 19 nt, Artificial Sequence
  Description of Artificial Sequence: Synthetic oligonucleotide
  Antisense strand to SEQ ID NO: 2044254
aaacacaucugauaucuca

SEQ ID NO: 2044256 - RNA, 19 nt, Artificial Sequence
  Description of Artificial Sequence: Synthetic oligonucleotide
  Sense strand starting at position 3746 of SEQ ID NO: 1881433
uuuccaauccuuuggagaa

SEQ ID NO: 2044257 - RNA, 19 nt, Artificial Sequence
  Description of Artificial Sequence: Synthetic oligonucleotide
  Antisense strand to SEQ ID NO: 2044256
uucuccaaaggauuggaaa

SEQ ID NO: 2044258 - RNA, 19 nt, Artificial Sequence
  Description of Artificial Sequence: Synthetic oligonucleotide
  Sense strand starting at position 3819 of SEQ ID NO: 1881433
guagaaauaguuugucaua

SEQ ID NO: 2044259 - RNA, 19 nt, Artificial Sequence
  Description of Artificial Sequence: Synthetic oligonucleotide
  Antisense strand to SEQ ID NO: 2044258
uaugacaaacuauuucuac

SEQ ID NO: 2044260 - RNA, 19 nt, Artificial Sequence
  Description of Artificial Sequence: Synthetic oligonucleotide
  Sense strand starting at position 3821 of SEQ ID NO: 1881433
agaaauaguuugucauaug

SEQ ID NO: 2044261 - RNA, 19 nt, Artificial Sequence
  Description of Artificial Sequence: Synthetic oligonucleotide
  Antisense strand to SEQ ID NO: 2044260
cauaugacaaacuauuucu

SEQ ID NO: 2044262 - RNA, 19 nt, Artificial Sequence
  Description of Artificial Sequence: Synthetic oligonucleotide
  Sense strand starting at position 3945 of SEQ ID NO: 1881433
ugaguucuagaauaucuuu

SEQ ID NO: 2044263 - RNA, 19 nt, Artificial Sequence
  Description of Artificial Sequence: Synthetic oligonucleotide
  Antisense strand to SEQ ID NO: 2044262
aaagauauucuagaacuca

SEQ ID NO: 2044264 - RNA, 19 nt, Artificial Sequence
  Description of Artificial Sequence: Synthetic oligonucleotide
  Sense strand starting at position 3948 of SEQ ID NO: 1881433
guucuagaauaucuuuaug

SEQ ID NO: 2044265 - RNA, 19 nt, Artificial Sequence
  Description of Artificial Sequence: Synthetic oligonucleotide
  Antisense strand to SEQ ID NO: 2044264
cauaaagauauucuagaac

SEQ ID NO: 2044266 - RNA, 19 nt, Artificial Sequence
  Description of Artificial Sequence: Synthetic oligonucleotide
  Sense strand starting at position 8 of SEQ ID NO: 1881434
gaagcauugcacuggauau

SEQ ID NO: 2044267 - RNA, 19 nt, Artificial Sequence
  Description of Artificial Sequence: Synthetic oligonucleotide
  Antisense strand to SEQ ID NO: 2044266
auauccagugcaaugcuuc

SEQ ID NO: 2044268 - RNA, 19 nt, Artificial Sequence
  Description of Artificial Sequence: Synthetic oligonucleotide
  Sense strand starting at position 70 of SEQ ID NO: 1881434
acguguacuaagugugaug

SEQ ID NO: 2044269 - RNA, 19 nt, Artificial Sequence
  Description of Artificial Sequence: Synthetic oligonucleotide
  Antisense strand to SEQ ID NO: 2044268
caucacacuuaguacacgu

SEQ ID NO: 2044270 - RNA, 19 nt, Artificial Sequence
  Description of Artificial Sequence: Synthetic oligonucleotide
  Sense strand starting at position 72 of SEQ ID NO: 1881434
guguacuaagugugaugua

SEQ ID NO: 2044271 - RNA, 19 nt, Artificial Sequence
  Description of Artificial Sequence: Synthetic oligonucleotide
  Antisense strand to SEQ ID NO: 2044270
uacaucacacuuaguacac

SEQ ID NO: 2044272 - RNA, 19 nt, Artificial Sequence
  Description of Artificial Sequence: Synthetic oligonucleotide
  Sense strand starting at position 155 of SEQ ID NO: 1881434
cccagacuugagugucauc

SEQ ID NO: 2044273 - RNA, 19 nt, Artificial Sequence
  Description of Artificial Sequence: Synthetic oligonucleotide
  Antisense strand to SEQ ID NO: 2044272
gaugacacucaagucuggg

SEQ ID NO: 2044274 - RNA, 19 nt, Artificial Sequence
  Description of Artificial Sequence: Synthetic oligonucleotide
  Sense strand starting at position 158 of SEQ ID NO: 1881434
agacuugagugucaucaaa

SEQ ID NO: 2044275 - RNA, 19 nt, Artificial Sequence
  Description of Artificial Sequence: Synthetic oligonucleotide
  Antisense strand to SEQ ID NO: 2044274
uuugaugacacucaagucu

SEQ ID NO: 2044276 - RNA, 19 nt, Artificial Sequence
  Description of Artificial Sequence: Synthetic oligonucleotide
  Sense strand starting at position 218 of SEQ ID NO: 1881434
ccaggagugucugauucag

SEQ ID NO: 2044277 - RNA, 19 nt, Artificial Sequence
  Description of Artificial Sequence: Synthetic oligonucleotide
  Antisense strand to SEQ ID NO: 2044276
cugaaucagacacuccugg

SEQ ID NO: 2044278 - RNA, 19 nt, Artificial Sequence
  Description of Artificial Sequence: Synthetic oligonucleotide
  Sense strand starting at position 220 of SEQ ID NO: 1881434
aggagugucugauucaguc

SEQ ID NO: 2044279 - RNA, 19 nt, Artificial Sequence
  Description of Artificial Sequence: Synthetic oligonucleotide
  Antisense strand to SEQ ID NO: 2044278
gacugaaucagacacuccu

SEQ ID NO: 2044280 - RNA, 19 nt, Artificial Sequence
  Description of Artificial Sequence: Synthetic oligonucleotide
  Sense strand starting at position 245 of SEQ ID NO: 1881434
gggugaggucugggauucu

SEQ ID NO: 2044281 - RNA, 19 nt, Artificial Sequence
  Description of Artificial Sequence: Synthetic oligonucleotide
  Antisense strand to SEQ ID NO: 2044280
agaaucccagaccucaccc

SEQ ID NO: 2044282 - RNA, 19 nt, Artificial Sequence
  Description of Artificial Sequence: Synthetic oligonucleotide
  Sense strand starting at position 318 of SEQ ID NO: 1881434
agguaagacaaguauuggu

SEQ ID NO: 2044283 - RNA, 19 nt, Artificial Sequence
  Description of Artificial Sequence: Synthetic oligonucleotide
  Antisense strand to SEQ ID NO: 2044282
accaauacuugucuuaccu

SEQ ID NO: 2044284 - RNA, 19 nt, Artificial Sequence
  Description of Artificial Sequence: Synthetic oligonucleotide
  Sense strand starting at position 353 of SEQ ID NO: 1881434
agaugaugauuccgggauu

SEQ ID NO: 2044285 - RNA, 19 nt, Artificial Sequence
  Description of Artificial Sequence: Synthetic oligonucleotide
  Antisense strand to SEQ ID NO: 2044284
aaucccggaaucaucaucu

SEQ ID NO: 2044286 - RNA, 19 nt, Artificial Sequence
  Description of Artificial Sequence: Synthetic oligonucleotide
  Sense strand starting at position 398 of SEQ ID NO: 1881434
gucacauagccagguaaca

SEQ ID NO: 2044287 - RNA, 19 nt, Artificial Sequence
  Description of Artificial Sequence: Synthetic oligonucleotide
  Antisense strand to SEQ ID NO: 2044286
uguuaccuggcuaugugac

SEQ ID NO: 2044288 - RNA, 19 nt, Artificial Sequence
  Description of Artificial Sequence: Synthetic oligonucleotide
  Sense strand starting at position 516 of SEQ ID NO: 1881434
ugccuuacgcuggagucaa

SEQ ID NO: 2044289 - RNA, 19 nt, Artificial Sequence
  Description of Artificial Sequence: Synthetic oligonucleotide
  Antisense strand to SEQ ID NO: 2044288
uugacuccagcguaaggca

SEQ ID NO: 2044290 - RNA, 19 nt, Artificial Sequence
  Description of Artificial Sequence: Synthetic oligonucleotide
  Sense strand starting at position 551 of SEQ ID NO: 1881434
gacagaaaccucugugaca

SEQ ID NO: 2044291 - RNA, 19 nt, Artificial Sequence
  Description of Artificial Sequence: Synthetic oligonucleotide
  Antisense strand to SEQ ID NO: 2044290
ugucacagagguuucuguc

SEQ ID NO: 2044292 - RNA, 19 nt, Artificial Sequence
  Description of Artificial Sequence: Synthetic oligonucleotide
  Sense strand starting at position 1013 of SEQ ID NO: 1881434
gacauugaaggcugacauu

SEQ ID NO: 2044293 - RNA, 19 nt, Artificial Sequence
  Description of Artificial Sequence: Synthetic oligonucleotide
  Antisense strand to SEQ ID NO: 2044292
aaugucagccuucaauguc

SEQ ID NO: 2044294 - RNA, 19 nt, Artificial Sequence
  Description of Artificial Sequence: Synthetic oligonucleotide
  Sense strand starting at position 1022 of SEQ ID NO: 1881434
ggcugacauucucuucuaa

SEQ ID NO: 2044295 - RNA, 19 nt, Artificial Sequence
  Description of Artificial Sequence: Synthetic oligonucleotide
  Antisense strand to SEQ ID NO: 2044294
uuagaagagaaugucagcc

SEQ ID NO: 2044296 - RNA, 19 nt, Artificial Sequence
  Description of Artificial Sequence: Synthetic oligonucleotide
  Sense strand starting at position 1298 of SEQ ID NO: 1881434
gccauucgccaacgaauca

SEQ ID NO: 2044297 - RNA, 19 nt, Artificial Sequence
  Description of Artificial Sequence: Synthetic oligonucleotide
  Antisense strand to SEQ ID NO: 2044296
ugauucguuggcgaauggc

SEQ ID NO: 2044298 - RNA, 19 nt, Artificial Sequence
  Description of Artificial Sequence: Synthetic oligonucleotide
  Sense strand starting at position 1357 of SEQ ID NO: 1881434
gcucgcuuucuuugguaaa

SEQ ID NO: 2044299 - RNA, 19 nt, Artificial Sequence
  Description of Artificial Sequence: Synthetic oligonucleotide
  Antisense strand to SEQ ID NO: 2044298
uuuaccaaagaaagcgagc

SEQ ID NO: 2044300 - RNA, 19 nt, Artificial Sequence
  Description of Artificial Sequence: Synthetic oligonucleotide
  Sense strand starting at position 1359 of SEQ ID NO: 1881434
ucgcuuucuuugguaaaca

SEQ ID NO: 2044301 - RNA, 19 nt, Artificial Sequence
  Description of Artificial Sequence: Synthetic oligonucleotide
  Antisense strand to SEQ ID NO: 2044300
uguuuaccaaagaaagcga

SEQ ID NO: 2044302 - RNA, 19 nt, Artificial Sequence
  Description of Artificial Sequence: Synthetic oligonucleotide
  Sense strand starting at position 1430 of SEQ ID NO: 1881434
ccggauuuaugcuccaguu

SEQ ID NO: 2044303 - RNA, 19 nt, Artificial Sequence
  Description of Artificial Sequence: Synthetic oligonucleotide
  Antisense strand to SEQ ID NO: 2044302
aacuggagcauaaauccgg

SEQ ID NO: 2044304 - RNA, 19 nt, Artificial Sequence
  Description of Artificial Sequence: Synthetic oligonucleotide
  Sense strand starting at position 1456 of SEQ ID NO: 1881434
ugugguuugcaguaagaaa

SEQ ID NO: 2044305 - RNA, 19 nt, Artificial Sequence
  Description of Artificial Sequence: Synthetic oligonucleotide
  Antisense strand to SEQ ID NO: 2044304
uuucuuacugcaaaccaca

SEQ ID NO: 2044306 - RNA, 19 nt, Artificial Sequence
  Description of Artificial Sequence: Synthetic oligonucleotide
  Sense strand starting at position 1503 of SEQ ID NO: 1881434
gauucccagucagagaaua

SEQ ID NO: 2044307 - RNA, 19 nt, Artificial Sequence
  Description of Artificial Sequence: Synthetic oligonucleotide
  Antisense strand to SEQ ID NO: 2044306
uauucucugacugggaauc

SEQ ID NO: 2044308 - RNA, 19 nt, Artificial Sequence
  Description of Artificial Sequence: Synthetic oligonucleotide
  Sense strand starting at position 1553 of SEQ ID NO: 1881434
ggcaauacguauuugcuga

SEQ ID NO: 2044309 - RNA, 19 nt, Artificial Sequence
  Description of Artificial Sequence: Synthetic oligonucleotide
  Antisense strand to SEQ ID NO: 2044308
ucagcaaauacguauugcc

SEQ ID NO: 2044310 - RNA, 19 nt, Artificial Sequence
  Description of Artificial Sequence: Synthetic oligonucleotide
  Sense strand starting at position 1554 of SEQ ID NO: 1881434
gcaauacguauuugcugaa

SEQ ID NO: 2044311 - RNA, 19 nt, Artificial Sequence
  Description of Artificial Sequence: Synthetic oligonucleotide
  Antisense strand to SEQ ID NO: 2044310
uucagcaaauacguauugc

SEQ ID NO: 2044312 - RNA, 19 nt, Artificial Sequence
  Description of Artificial Sequence: Synthetic oligonucleotide
  Sense strand starting at position 1557 of SEQ ID NO: 1881434
auacguauuugcugaauau

SEQ ID NO: 2044313 - RNA, 19 nt, Artificial Sequence
  Description of Artificial Sequence: Synthetic oligonucleotide
  Antisense strand to SEQ ID NO: 2044312
auauucagcaaauacguau

SEQ ID NO: 2044314 - RNA, 19 nt, Artificial Sequence
  Description of Artificial Sequence: Synthetic oligonucleotide
  Sense strand starting at position 2257 of SEQ ID NO: 1881434
gagcuagugucccugaguc

SEQ ID NO: 2044315 - RNA, 19 nt, Artificial Sequence
  Description of Artificial Sequence: Synthetic oligonucleotide
  Antisense strand to SEQ ID NO: 2044314
gacucagggacacuagcuc

SEQ ID NO: 2044316 - RNA, 19 nt, Artificial Sequence
  Description of Artificial Sequence: Synthetic oligonucleotide
  Sense strand starting at position 2259 of SEQ ID NO: 1881434
gcuagugucccugagucgu

SEQ ID NO: 2044317 - RNA, 19 nt, Artificial Sequence
  Description of Artificial Sequence: Synthetic oligonucleotide
  Antisense strand to SEQ ID NO: 2044316
acgacucagggacacuagc

SEQ ID NO: 2044318 - RNA, 19 nt, Artificial Sequence
  Description of Artificial Sequence: Synthetic oligonucleotide
  Sense strand starting at position 2383 of SEQ ID NO: 1881434
uuaucagcugucugagcuu

SEQ ID NO: 2044319 - RNA, 19 nt, Artificial Sequence
  Description of Artificial Sequence: Synthetic oligonucleotide
  Antisense strand to SEQ ID NO: 2044318
aagcucagacagcugauaa

SEQ ID NO: 2044320 - RNA, 19 nt, Artificial Sequence
  Description of Artificial Sequence: Synthetic oligonucleotide
  Sense strand starting at position 2394 of SEQ ID NO: 1881434
cugagcuuagcauguuacu

SEQ ID NO: 2044321 - RNA, 19 nt, Artificial Sequence
  Description of Artificial Sequence: Synthetic oligonucleotide
  Antisense strand to SEQ ID NO: 2044320
aguaacaugcuaagcucag

SEQ ID NO: 2044322 - RNA, 19 nt, Artificial Sequence
  Description of Artificial Sequence: Synthetic oligonucleotide
  Sense strand starting at position 2488 of SEQ ID NO: 1881434
auguguaaugcagaagaau

SEQ ID NO: 2044323 - RNA, 19 nt, Artificial Sequence
  Description of Artificial Sequence: Synthetic oligonucleotide
  Antisense strand to SEQ ID NO: 2044322
auucuucugcauuacacau

SEQ ID NO: 2044324 - RNA, 19 nt, Artificial Sequence
  Description of Artificial Sequence: Synthetic oligonucleotide
  Sense strand starting at position 2491 of SEQ ID NO: 1881434
uguaaugcagaagaaugua

SEQ ID NO: 2044325 - RNA, 19 nt, Artificial Sequence
  Description of Artificial Sequence: Synthetic oligonucleotide
  Antisense strand to SEQ ID NO: 2044324
uacauucuucugcauuaca

SEQ ID NO: 2044326 - RNA, 19 nt, Artificial Sequence
  Description of Artificial Sequence: Synthetic oligonucleotide
  Sense strand starting at position 2520 of SEQ ID NO: 1881434
uaccuuacaccgcguauaa

SEQ ID NO: 2044327 - RNA, 19 nt, Artificial Sequence
  Description of Artificial Sequence: Synthetic oligonucleotide
  Antisense strand to SEQ ID NO: 2044326
uuauacgcgguguaaggua

SEQ ID NO: 2044328 - RNA, 19 nt, Artificial Sequence
  Description of Artificial Sequence: Synthetic oligonucleotide
  Sense strand starting at position 2685 of SEQ ID NO: 1881434
ucuggaaauagugguggau

SEQ ID NO: 2044329 - RNA, 19 nt, Artificial Sequence
  Description of Artificial Sequence: Synthetic oligonucleotide
  Antisense strand to SEQ ID NO: 2044328
auccaccacuauuuccaga

SEQ ID NO: 2044330 - RNA, 19 nt, Artificial Sequence
  Description of Artificial Sequence: Synthetic oligonucleotide
  Sense strand starting at position 2720 of SEQ ID NO: 1881434
gguacuuaaugccacaaua

SEQ ID NO: 2044331 - RNA, 19 nt, Artificial Sequence
  Description of Artificial Sequence: Synthetic oligonucleotide
  Antisense strand to SEQ ID NO: 2044330
uauuguggcauuaaguacc

SEQ ID NO: 2044332 - RNA, 19 nt, Artificial Sequence
  Description of Artificial Sequence: Synthetic oligonucleotide
  Sense strand starting at position 2730 of SEQ ID NO: 1881434
gccacaauacuguaaaguu

SEQ ID NO: 2044333 - RNA, 19 nt, Artificial Sequence
  Description of Artificial Sequence: Synthetic oligonucleotide
  Antisense strand to SEQ ID NO: 2044332
aacuuuacaguauuguggc

SEQ ID NO: 2044334 - RNA, 19 nt, Artificial Sequence
  Description of Artificial Sequence: Synthetic oligonucleotide
  Sense strand starting at position 2820 of SEQ ID NO: 1881434
gaaagaauauaacguguaa

SEQ ID NO: 2044335 - RNA, 19 nt, Artificial Sequence
  Description of Artificial Sequence: Synthetic oligonucleotide
  Antisense strand to SEQ ID NO: 2044334
uuacacguuauauucuuuc

SEQ ID NO: 2044336 - RNA, 19 nt, Artificial Sequence
  Description of Artificial Sequence: Synthetic oligonucleotide
  Sense strand starting at position 2824 of SEQ ID NO: 1881434
gaauauaacguguaaugua

SEQ ID NO: 2044337 - RNA, 19 nt, Artificial Sequence
  Description of Artificial Sequence: Synthetic oligonucleotide
  Antisense strand to SEQ ID NO: 2044336
uacauuacacguuauauuc

SEQ ID NO: 2044338 - RNA, 19 nt, Artificial Sequence
  Description of Artificial Sequence: Synthetic oligonucleotide
  Sense strand starting at position 3047 of SEQ ID NO: 1881434
uaugauauuugguagguau

SEQ ID NO: 2044339 - RNA, 19 nt, Artificial Sequence
  Description of Artificial Sequence: Synthetic oligonucleotide
  Antisense strand to SEQ ID NO: 2044338
auaccuaccaaauaucaua

SEQ ID NO: 2044340 - RNA, 19 nt, Artificial Sequence
  Description of Artificial Sequence: Synthetic oligonucleotide
  Sense strand starting at position 3638 of SEQ ID NO: 1881434
uccugaagguaugcuauga

SEQ ID NO: 2044341 - RNA, 19 nt, Artificial Sequence
  Description of Artificial Sequence: Synthetic oligonucleotide
  Antisense strand to SEQ ID NO: 2044340
ucauagcauaccuucagga

SEQ ID NO: 2044342 - RNA, 19 nt, Artificial Sequence
  Description of Artificial Sequence: Synthetic oligonucleotide
  Sense strand starting at position 3642 of SEQ ID NO: 1881434
gaagguaugcuaugaggag

SEQ ID NO: 2044343 - RNA, 19 nt, Artificial Sequence
  Description of Artificial Sequence: Synthetic oligonucleotide
  Antisense strand to SEQ ID NO: 2044342
cuccucauagcauaccuuc

SEQ ID NO: 2044344 - RNA, 19 nt, Artificial Sequence
  Description of Artificial Sequence: Synthetic oligonucleotide
  Sense strand starting at position 3795 of SEQ ID NO: 1881434
gggauaaagucccaauacu

SEQ ID NO: 2044345 - RNA, 19 nt, Artificial Sequence
  Description of Artificial Sequence: Synthetic oligonucleotide
  Antisense strand to SEQ ID NO: 2044344
aguauugggacuuuauccc

SEQ ID NO: 2044346 - RNA, 19 nt, Artificial Sequence
  Description of Artificial Sequence: Synthetic oligonucleotide
  Sense strand starting at position 24 of SEQ ID NO: 1881435
guuaaacuccuagaagcaa

SEQ ID NO: 2044347 - RNA, 19 nt, Artificial Sequence
  Description of Artificial Sequence: Synthetic oligonucleotide
  Antisense strand to SEQ ID NO: 2044346
uugcuucuaggaguuuaac

SEQ ID NO: 2044348 - RNA, 19 nt, Artificial Sequence
  Description of Artificial Sequence: Synthetic oligonucleotide
  Sense strand starting at position 87 of SEQ ID NO: 1881435
auugcuaaaucugagauuu

SEQ ID NO: 2044349 - RNA, 19 nt, Artificial Sequence
  Description of Artificial Sequence: Synthetic oligonucleotide
  Antisense strand to SEQ ID NO: 2044348
aaaucucagauuuagcaau

SEQ ID NO: 2044350 - RNA, 19 nt, Artificial Sequence
  Description of Artificial Sequence: Synthetic oligonucleotide
  Sense strand starting at position 401 of SEQ ID NO: 1881435
ucagauuauuuccaagguc

SEQ ID NO: 2044351 - RNA, 19 nt, Artificial Sequence
  Description of Artificial Sequence: Synthetic oligonucleotide
  Antisense strand to SEQ ID NO: 2044350
gaccuuggaaauaaucuga

SEQ ID NO: 2044352 - RNA, 19 nt, Artificial Sequence
  Description of Artificial Sequence: Synthetic oligonucleotide
  Sense strand starting at position 409 of SEQ ID NO: 1881435
uuuccaaggucuuuaaagu

SEQ ID NO: 2044353 - RNA, 19 nt, Artificial Sequence
  Description of Artificial Sequence: Synthetic oligonucleotide
  Antisense strand to SEQ ID NO: 2044352
acuuuaaagaccuuggaaa

SEQ ID NO: 2044354 - RNA, 19 nt, Artificial Sequence
  Description of Artificial Sequence: Synthetic oligonucleotide
  Sense strand starting at position 410 of SEQ ID NO: 1881435
uuccaaggucuuuaaaguu

SEQ ID NO: 2044355 - RNA, 19 nt, Artificial Sequence
  Description of Artificial Sequence: Synthetic oligonucleotide
  Antisense strand to SEQ ID NO: 2044354
aacuuuaaagaccuuggaa

SEQ ID NO: 2044356 - RNA, 19 nt, Artificial Sequence
  Description of Artificial Sequence: Synthetic oligonucleotide
  Sense strand starting at position 444 of SEQ ID NO: 1881435
aacacugaucggcaugauu

SEQ ID NO: 2044357 - RNA, 19 nt, Artificial Sequence
  Description of Artificial Sequence: Synthetic oligonucleotide
  Antisense strand to SEQ ID NO: 2044356
aaucaugccgaucaguguu

SEQ ID NO: 2044358 - RNA, 19 nt, Artificial Sequence
  Description of Artificial Sequence: Synthetic oligonucleotide
  Sense strand starting at position 633 of SEQ ID NO: 1881435
cuauuauaguauguucuca

SEQ ID NO: 2044359 - RNA, 19 nt, Artificial Sequence
  Description of Artificial Sequence: Synthetic oligonucleotide
  Antisense strand to SEQ ID NO: 2044358
ugagaacauacuauaauag

SEQ ID NO: 2044360 - RNA, 19 nt, Artificial Sequence
  Description of Artificial Sequence: Synthetic oligonucleotide
  Sense strand starting at position 635 of SEQ ID NO: 1881435
auuauaguauguucucacu

SEQ ID NO: 2044361 - RNA, 19 nt, Artificial Sequence
  Description of Artificial Sequence: Synthetic oligonucleotide
  Antisense strand to SEQ ID NO: 2044360
agugagaacauacuauaau

SEQ ID NO: 2044362 - RNA, 19 nt, Artificial Sequence
  Description of Artificial Sequence: Synthetic oligonucleotide
  Sense strand starting at position 641 of SEQ ID NO: 1881435
guauguucucacugaagga

SEQ ID NO: 2044363 - RNA, 19 nt, Artificial Sequence
  Description of Artificial Sequence: Synthetic oligonucleotide
  Antisense strand to SEQ ID NO: 2044362
uccuucagugagaacauac

SEQ ID NO: 2044364 - RNA, 19 nt, Artificial Sequence
  Description of Artificial Sequence: Synthetic oligonucleotide
  Sense strand starting at position 656 of SEQ ID NO: 1881435
aggaaagauccuggccacu

SEQ ID NO: 2044365 - RNA, 19 nt, Artificial Sequence
  Description of Artificial Sequence: Synthetic oligonucleotide
  Antisense strand to SEQ ID NO: 2044364
aguggccaggaucuuuccu

SEQ ID NO: 2044366 - RNA, 19 nt, Artificial Sequence
  Description of Artificial Sequence: Synthetic oligonucleotide
  Sense strand starting at position 658 of SEQ ID NO: 1881435
gaaagauccuggccacugu

SEQ ID NO: 2044367 - RNA, 19 nt, Artificial Sequence
  Description of Artificial Sequence: Synthetic oligonucleotide
  Antisense strand to SEQ ID NO: 2044366
acaguggccaggaucuuuc

SEQ ID NO: 2044368 - RNA, 19 nt, Artificial Sequence
  Description of Artificial Sequence: Synthetic oligonucleotide
  Sense strand starting at position 669 of SEQ ID NO: 1881435
gccacuguccuagagaaga

SEQ ID NO: 2044369 - RNA, 19 nt, Artificial Sequence
  Description of Artificial Sequence: Synthetic oligonucleotide
  Antisense strand to SEQ ID NO: 2044368
ucuucucuaggacaguggc

SEQ ID NO: 2044370 - RNA, 19 nt, Artificial Sequence
  Description of Artificial Sequence: Synthetic oligonucleotide
  Sense strand starting at position 697 of SEQ ID NO: 1881435
auaaguggguaucuugaga

SEQ ID NO: 2044371 - RNA, 19 nt, Artificial Sequence
  Description of Artificial Sequence: Synthetic oligonucleotide
  Antisense strand to SEQ ID NO: 2044370
ucucaagauacccacuuau

SEQ ID NO: 2044372 - RNA, 19 nt, Artificial Sequence
  Description of Artificial Sequence: Synthetic oligonucleotide
  Sense strand starting at position 738 of SEQ ID NO: 1881435
auuacaauguggcuuuaca

SEQ ID NO: 2044373 - RNA, 19 nt, Artificial Sequence
  Description of Artificial Sequence: Synthetic oligonucleotide
  Antisense strand to SEQ ID NO: 2044372
uguaaagccacauuguaau

SEQ ID NO: 2044374 - RNA, 19 nt, Artificial Sequence
  Description of Artificial Sequence: Synthetic oligonucleotide
  Sense strand starting at position 941 of SEQ ID NO: 1881435
cuagaauagauacgguaga

SEQ ID NO: 2044375 - RNA, 19 nt, Artificial Sequence
  Description of Artificial Sequence: Synthetic oligonucleotide
  Antisense strand to SEQ ID NO: 2044374
ucuaccguaucuauucuag

SEQ ID NO: 2044376 - RNA, 19 nt, Artificial Sequence
  Description of Artificial Sequence: Synthetic oligonucleotide
  Sense strand starting at position 1028 of SEQ ID NO: 1881435
gcagguuauuuccucucuu

SEQ ID NO: 2044377 - RNA, 19 nt, Artificial Sequence
  Description of Artificial Sequence: Synthetic oligonucleotide
  Antisense strand to SEQ ID NO: 2044376
aagagaggaaauaaccugc

SEQ ID NO: 2044378 - RNA, 19 nt, Artificial Sequence
  Description of Artificial Sequence: Synthetic oligonucleotide
  Sense strand starting at position 1114 of SEQ ID NO: 1881435
acugcuaguaaguacgaaa

SEQ ID NO: 2044379 - RNA, 19 nt, Artificial Sequence
  Description of Artificial Sequence: Synthetic oligonucleotide
  Antisense strand to SEQ ID NO: 2044378
uuucguacuuacuagcagu

SEQ ID NO: 2044380 - RNA, 19 nt, Artificial Sequence
  Description of Artificial Sequence: Synthetic oligonucleotide
  Sense strand starting at position 1152 of SEQ ID NO: 1881435
caauguguccuagggaauu

SEQ ID NO: 2044381 - RNA, 19 nt, Artificial Sequence
  Description of Artificial Sequence: Synthetic oligonucleotide
  Antisense strand to SEQ ID NO: 2044380
aauucccuaggacacauug

SEQ ID NO: 2044382 - RNA, 19 nt, Artificial Sequence
  Description of Artificial Sequence: Synthetic oligonucleotide
  Sense strand starting at position 1286 of SEQ ID NO: 1881435
cuuagacuugcugaaguaa

SEQ ID NO: 2044383 - RNA, 19 nt, Artificial Sequence
  Description of Artificial Sequence: Synthetic oligonucleotide
  Antisense strand to SEQ ID NO: 2044382
uuacuucagcaagucuaag

SEQ ID NO: 2044384 - RNA, 19 nt, Artificial Sequence
  Description of Artificial Sequence: Synthetic oligonucleotide
  Sense strand starting at position 1354 of SEQ ID NO: 1881435
accacaucauguguuaaga

SEQ ID NO: 2044385 - RNA, 19 nt, Artificial Sequence
  Description of Artificial Sequence: Synthetic oligonucleotide
  Antisense strand to SEQ ID NO: 2044384
ucuuaacacaugauguggu

SEQ ID NO: 2044386 - RNA, 19 nt, Artificial Sequence
  Description of Artificial Sequence: Synthetic oligonucleotide
  Sense strand starting at position 1363 of SEQ ID NO: 1881435
uguguuaagagguacucca

SEQ ID NO: 2044387 - RNA, 19 nt, Artificial Sequence
  Description of Artificial Sequence: Synthetic oligonucleotide
  Antisense strand to SEQ ID NO: 2044386
uggaguaccucuuaacaca

SEQ ID NO: 2044388 - RNA, 19 nt, Artificial Sequence
  Description of Artificial Sequence: Synthetic oligonucleotide
  Sense strand starting at position 1615 of SEQ ID NO: 1881435
gcuucaaguguggaaauga

SEQ ID NO: 2044389 - RNA, 19 nt, Artificial Sequence
  Description of Artificial Sequence: Synthetic oligonucleotide
  Antisense strand to SEQ ID NO: 2044388
ucauuuccacacuugaagc

SEQ ID NO: 2044390 - RNA, 19 nt, Artificial Sequence
  Description of Artificial Sequence: Synthetic oligonucleotide
  Sense strand starting at position 1860 of SEQ ID NO: 1881435
uaggauauggugugguaga

SEQ ID NO: 2044391 - RNA, 19 nt, Artificial Sequence
  Description of Artificial Sequence: Synthetic oligonucleotide
  Antisense strand to SEQ ID NO: 2044390
ucuaccacaccauauccua

SEQ ID NO: 2044392 - RNA, 19 nt, Artificial Sequence
  Description of Artificial Sequence: Synthetic oligonucleotide
  Sense strand starting at position 1865 of SEQ ID NO: 1881435
uauggugugguagauguaa

SEQ ID NO: 2044393 - RNA, 19 nt, Artificial Sequence
  Description of Artificial Sequence: Synthetic oligonucleotide
  Antisense strand to SEQ ID NO: 2044392
uuacaucuaccacaccaua

SEQ ID NO: 2044394 - RNA, 19 nt, Artificial Sequence
  Description of Artificial Sequence: Synthetic oligonucleotide
  Sense strand starting at position 2045 of SEQ ID NO: 1881435
auaugaggcucauuaugaa

SEQ ID NO: 2044395 - RNA, 19 nt, Artificial Sequence
  Description of Artificial Sequence: Synthetic oligonucleotide
  Antisense strand to SEQ ID NO: 2044394
uucauaaugagccucauau

SEQ ID NO: 2044396 - RNA, 19 nt, Artificial Sequence
  Description of Artificial Sequence: Synthetic oligonucleotide
  Sense strand starting at position 2108 of SEQ ID NO: 1881435
ucacucuuuggucacacau

SEQ ID NO: 2044397 - RNA, 19 nt, Artificial Sequence
  Description of Artificial Sequence: Synthetic oligonucleotide
  Antisense strand to SEQ ID NO: 2044396
augugugaccaaagaguga

SEQ ID NO: 2044398 - RNA, 19 nt, Artificial Sequence
  Description of Artificial Sequence: Synthetic oligonucleotide
  Sense strand starting at position 2189 of SEQ ID NO: 1881435
uuaaauucugguggaaagu

SEQ ID NO: 2044399 - RNA, 19 nt, Artificial Sequence
  Description of Artificial Sequence: Synthetic oligonucleotide
  Antisense strand to SEQ ID NO: 2044398
acuuuccaccagaauuuaa

SEQ ID NO: 2044400 - RNA, 19 nt, Artificial Sequence
  Description of Artificial Sequence: Synthetic oligonucleotide
  Sense strand starting at position 2198 of SEQ ID NO: 1881435
gguggaaaguaaguaguuu

SEQ ID NO: 2044401 - RNA, 19 nt, Artificial Sequence
  Description of Artificial Sequence: Synthetic oligonucleotide
  Antisense strand to SEQ ID NO: 2044400
aaacuacuuacuuuccacc

SEQ ID NO: 2044402 - RNA, 19 nt, Artificial Sequence
  Description of Artificial Sequence: Synthetic oligonucleotide
  Sense strand starting at position 2264 of SEQ ID NO: 1881435
auaacagcacuuugugaua

SEQ ID NO: 2044403 - RNA, 19 nt, Artificial Sequence
  Description of Artificial Sequence: Synthetic oligonucleotide
  Antisense strand to SEQ ID NO: 2044402
uaucacaaagugcuguuau

SEQ ID NO: 2044404 - RNA, 19 nt, Artificial Sequence
  Description of Artificial Sequence: Synthetic oligonucleotide
  Sense strand starting at position 2277 of SEQ ID NO: 1881435
gugauauaaugcucauaac

SEQ ID NO: 2044405 - RNA, 19 nt, Artificial Sequence
  Description of Artificial Sequence: Synthetic oligonucleotide
  Antisense strand to SEQ ID NO: 2044404
guuaugagcauuauaucac

SEQ ID NO: 2044406 - RNA, 19 nt, Artificial Sequence
  Description of Artificial Sequence: Synthetic oligonucleotide
  Sense strand starting at position 2323 of SEQ ID NO: 1881435
ccaauauaugcugagugau

SEQ ID NO: 2044407 - RNA, 19 nt, Artificial Sequence
  Description of Artificial Sequence: Synthetic oligonucleotide
  Antisense strand to SEQ ID NO: 2044406
aucacucagcauauauugg

SEQ ID NO: 2044408 - RNA, 19 nt, Artificial Sequence
  Description of Artificial Sequence: Synthetic oligonucleotide
  Sense strand starting at position 2325 of SEQ ID NO: 1881435
aauauaugcugagugauuc

SEQ ID NO: 2044409 - RNA, 19 nt, Artificial Sequence
  Description of Artificial Sequence: Synthetic oligonucleotide
  Antisense strand to SEQ ID NO: 2044408
gaaucacucagcauauauu

SEQ ID NO: 2044410 - RNA, 19 nt, Artificial Sequence
  Description of Artificial Sequence: Synthetic oligonucleotide
  Sense strand starting at position 2429 of SEQ ID NO: 1881435
auagguaaaguaugugaga

SEQ ID NO: 2044411 - RNA, 19 nt, Artificial Sequence
  Description of Artificial Sequence: Synthetic oligonucleotide
  Antisense strand to SEQ ID NO: 2044410
ucucacauacuuuaccuau

SEQ ID NO: 2044412 - RNA, 19 nt, Artificial Sequence
  Description of Artificial Sequence: Synthetic oligonucleotide
  Sense strand starting at position 2431 of SEQ ID NO: 1881435
agguaaaguaugugagaca

SEQ ID NO: 2044413 - RNA, 19 nt, Artificial Sequence
  Description of Artificial Sequence: Synthetic oligonucleotide
  Antisense strand to SEQ ID NO: 2044412
ugucucacauacuuuaccu

SEQ ID NO: 2044414 - RNA, 19 nt, Artificial Sequence
  Description of Artificial Sequence: Synthetic oligonucleotide
  Sense strand starting at position 2434 of SEQ ID NO: 1881435
uaaaguaugugagacauuu

SEQ ID NO: 2044415 - RNA, 19 nt, Artificial Sequence
  Description of Artificial Sequence: Synthetic oligonucleotide
  Antisense strand to SEQ ID NO: 2044414
aaaugucucacauacuuua

SEQ ID NO: 2044416 - RNA, 19 nt, Artificial Sequence
  Description of Artificial Sequence: Synthetic oligonucleotide
  Sense strand starting at position 2543 of SEQ ID NO: 1881435
ucuuaagggcuuugaauua

SEQ ID NO: 2044417 - RNA, 19 nt, Artificial Sequence
  Description of Artificial Sequence: Synthetic oligonucleotide
  Antisense strand to SEQ ID NO: 2044416
uaauucaaagcccuuaaga

SEQ ID NO: 2044418 - RNA, 19 nt, Artificial Sequence
  Description of Artificial Sequence: Synthetic oligonucleotide
  Sense strand starting at position 2548 of SEQ ID NO: 1881435
agggcuuugaauuauguga

SEQ ID NO: 2044419 - RNA, 19 nt, Artificial Sequence
  Description of Artificial Sequence: Synthetic oligonucleotide
  Antisense strand to SEQ ID NO: 2044418
ucacauaauucaaagcccu

SEQ ID NO: 2044420 - RNA, 19 nt, Artificial Sequence
  Description of Artificial Sequence: Synthetic oligonucleotide
  Sense strand starting at position 2552 of SEQ ID NO: 1881435
cuuugaauuaugugaggau

SEQ ID NO: 2044421 - RNA, 19 nt, Artificial Sequence
  Description of Artificial Sequence: Synthetic oligonucleotide
  Antisense strand to SEQ ID NO: 2044420
auccucacauaauucaaag

SEQ ID NO: 2044422 - RNA, 19 nt, Artificial Sequence
  Description of Artificial Sequence: Synthetic oligonucleotide
  Sense strand starting at position 2594 of SEQ ID NO: 1881435
uuagaagcacaauguuaau

SEQ ID NO: 2044423 - RNA, 19 nt, Artificial Sequence
  Description of Artificial Sequence: Synthetic oligonucleotide
  Antisense strand to SEQ ID NO: 2044422
auuaacauugugcuucuaa

SEQ ID NO: 2044424 - RNA, 19 nt, Artificial Sequence
  Description of Artificial Sequence: Synthetic oligonucleotide
  Sense strand starting at position 2862 of SEQ ID NO: 1881435
uugaaugaguaucuuggga

SEQ ID NO: 2044425 - RNA, 19 nt, Artificial Sequence
  Description of Artificial Sequence: Synthetic oligonucleotide
  Antisense strand to SEQ ID NO: 2044424
ucccaagauacucauucaa

SEQ ID NO: 2044426 - RNA, 19 nt, Artificial Sequence
  Description of Artificial Sequence: Synthetic oligonucleotide
  Sense strand starting at position 84 of SEQ ID NO: 1881436
gcuauuaauaacgaguagu

SEQ ID NO: 2044427 - RNA, 19 nt, Artificial Sequence
  Description of Artificial Sequence: Synthetic oligonucleotide
  Antisense strand to SEQ ID NO: 2044426
acuacucguuauuaauagc

SEQ ID NO: 2044428 - RNA, 19 nt, Artificial Sequence
  Description of Artificial Sequence: Synthetic oligonucleotide
  Sense strand starting at position 87 of SEQ ID NO: 1881436
auuaauaacgaguagucuu

SEQ ID NO: 2044429 - RNA, 19 nt, Artificial Sequence
  Description of Artificial Sequence: Synthetic oligonucleotide
  Antisense strand to SEQ ID NO: 2044428
aagacuacucguuauuaau

SEQ ID NO: 2044430 - RNA, 19 nt, Artificial Sequence
  Description of Artificial Sequence: Synthetic oligonucleotide
  Sense strand starting at position 122 of SEQ ID NO: 1881436
acaucuuccucguuuauuu

SEQ ID NO: 2044431 - RNA, 19 nt, Artificial Sequence
  Description of Artificial Sequence: Synthetic oligonucleotide
  Antisense strand to SEQ ID NO: 2044430
aaauaaacgaggaagaugu

SEQ ID NO: 2044432 - RNA, 19 nt, Artificial Sequence
  Description of Artificial Sequence: Synthetic oligonucleotide
  Sense strand starting at position 132 of SEQ ID NO: 1881436
cguuuauuucuccaucucu

SEQ ID NO: 2044433 - RNA, 19 nt, Artificial Sequence
  Description of Artificial Sequence: Synthetic oligonucleotide
  Antisense strand to SEQ ID NO: 2044432
agagauggagaaauaaacg

SEQ ID NO: 2044434 - RNA, 19 nt, Artificial Sequence
  Description of Artificial Sequence: Synthetic oligonucleotide
  Sense strand starting at position 408 of SEQ ID NO: 1881436
cuugauaccgguuaguauu

SEQ ID NO: 2044435 - RNA, 19 nt, Artificial Sequence
  Description of Artificial Sequence: Synthetic oligonucleotide
  Antisense strand to SEQ ID NO: 2044434
aauacuaaccgguaucaag

SEQ ID NO: 2044436 - RNA, 19 nt, Artificial Sequence
  Description of Artificial Sequence: Synthetic oligonucleotide
  Sense strand starting at position 419 of SEQ ID NO: 1881436
uuaguauuauacuuccagu

SEQ ID NO: 2044437 - RNA, 19 nt, Artificial Sequence
  Description of Artificial Sequence: Synthetic oligonucleotide
  Antisense strand to SEQ ID NO: 2044436
acuggaaguauaauacuaa

SEQ ID NO: 2044438 - RNA, 19 nt, Artificial Sequence
  Description of Artificial Sequence: Synthetic oligonucleotide
  Sense strand starting at position 1139 of SEQ ID NO: 1881436
ggugccaauuccuucuuua

SEQ ID NO: 2044439 - RNA, 19 nt, Artificial Sequence
  Description of Artificial Sequence: Synthetic oligonucleotide
  Antisense strand to SEQ ID NO: 2044438
uaaagaaggaauuggcacc

SEQ ID NO: 2044440 - RNA, 19 nt, Artificial Sequence
  Description of Artificial Sequence: Synthetic oligonucleotide
  Sense strand starting at position 1308 of SEQ ID NO: 1881436
ucuauuauggacugagcau

SEQ ID NO: 2044441 - RNA, 19 nt, Artificial Sequence
  Description of Artificial Sequence: Synthetic oligonucleotide
  Antisense strand to SEQ ID NO: 2044440
augcucaguccauaauaga

SEQ ID NO: 2044442 - RNA, 19 nt, Artificial Sequence
  Description of Artificial Sequence: Synthetic oligonucleotide
  Sense strand starting at position 1527 of SEQ ID NO: 1881436
agccuuaaagauugccaca

SEQ ID NO: 2044443 - RNA, 19 nt, Artificial Sequence
  Description of Artificial Sequence: Synthetic oligonucleotide
  Antisense strand to SEQ ID NO: 2044442
uguggcaaucuuuaaggcu

SEQ ID NO: 2044444 - RNA, 19 nt, Artificial Sequence
  Description of Artificial Sequence: Synthetic oligonucleotide
  Sense strand starting at position 1700 of SEQ ID NO: 1881436
cuuccauuggucugaacuu

SEQ ID NO: 2044445 - RNA, 19 nt, Artificial Sequence
  Description of Artificial Sequence: Synthetic oligonucleotide
  Antisense strand to SEQ ID NO: 2044444
aaguucagaccaauggaag

SEQ ID NO: 2044446 - RNA, 19 nt, Artificial Sequence
  Description of Artificial Sequence: Synthetic oligonucleotide
  Sense strand starting at position 1716 of SEQ ID NO: 1881436
cuuguaugguaguuagaug

SEQ ID NO: 2044447 - RNA, 19 nt, Artificial Sequence
  Description of Artificial Sequence: Synthetic oligonucleotide
  Antisense strand to SEQ ID NO: 2044446
caucuaacuaccauacaag

SEQ ID NO: 2044448 - RNA, 19 nt, Artificial Sequence
  Description of Artificial Sequence: Synthetic oligonucleotide
  Sense strand starting at position 1724 of SEQ ID NO: 1881436
guaguuagaugccuguaau

SEQ ID NO: 2044449 - RNA, 19 nt, Artificial Sequence
  Description of Artificial Sequence: Synthetic oligonucleotide
  Antisense strand to SEQ ID NO: 2044448
auuacaggcaucuaacuac

SEQ ID NO: 2044450 - RNA, 19 nt, Artificial Sequence
  Description of Artificial Sequence: Synthetic oligonucleotide
  Sense strand starting at position 1725 of SEQ ID NO: 1881436
uaguuagaugccuguaaua

SEQ ID NO: 2044451 - RNA, 19 nt, Artificial Sequence
  Description of Artificial Sequence: Synthetic oligonucleotide
  Antisense strand to SEQ ID NO: 2044450
uauuacaggcaucuaacua

SEQ ID NO: 2044452 - RNA, 19 nt, Artificial Sequence
  Description of Artificial Sequence: Synthetic oligonucleotide
  Sense strand starting at position 1727 of SEQ ID NO: 1881436
guuagaugccuguaauaca

SEQ ID NO: 2044453 - RNA, 19 nt, Artificial Sequence
  Description of Artificial Sequence: Synthetic oligonucleotide
  Antisense strand to SEQ ID NO: 2044452
uguauuacaggcaucuaac

SEQ ID NO: 2044454 - RNA, 19 nt, Artificial Sequence
  Description of Artificial Sequence: Synthetic oligonucleotide
  Sense strand starting at position 1777 of SEQ ID NO: 1881436
cuggaauaguuagcagaac

SEQ ID NO: 2044455 - RNA, 19 nt, Artificial Sequence
  Description of Artificial Sequence: Synthetic oligonucleotide
  Antisense strand to SEQ ID NO: 2044454
guucugcuaacuauuccag

SEQ ID NO: 2044456 - RNA, 19 nt, Artificial Sequence
  Description of Artificial Sequence: Synthetic oligonucleotide
  Sense strand starting at position 2100 of SEQ ID NO: 1881436
cagccugaguuauugacau

SEQ ID NO: 2044457 - RNA, 19 nt, Artificial Sequence
  Description of Artificial Sequence: Synthetic oligonucleotide
  Antisense strand to SEQ ID NO: 2044456
augucaauaacucaggcug

SEQ ID NO: 2044458 - RNA, 19 nt, Artificial Sequence
  Description of Artificial Sequence: Synthetic oligonucleotide
  Sense strand starting at position 2458 of SEQ ID NO: 1881436
agcuaagucuuuccugaag

SEQ ID NO: 2044459 - RNA, 19 nt, Artificial Sequence
  Description of Artificial Sequence: Synthetic oligonucleotide
  Antisense strand to SEQ ID NO: 2044458
cuucaggaaagacuuagcu

SEQ ID NO: 2044460 - RNA, 19 nt, Artificial Sequence
  Description of Artificial Sequence: Synthetic oligonucleotide
  Sense strand starting at position 2482 of SEQ ID NO: 1881436
ggagcccguguguuugauu

SEQ ID NO: 2044461 - RNA, 19 nt, Artificial Sequence
  Description of Artificial Sequence: Synthetic oligonucleotide
  Antisense strand to SEQ ID NO: 2044460
aaucaaacacacgggcucc

SEQ ID NO: 2044462 - RNA, 19 nt, Artificial Sequence
  Description of Artificial Sequence: Synthetic oligonucleotide
  Sense strand starting at position 2483 of SEQ ID NO: 1881436
gagcccguguguuugauuu

SEQ ID NO: 2044463 - RNA, 19 nt, Artificial Sequence
  Description of Artificial Sequence: Synthetic oligonucleotide
  Antisense strand to SEQ ID NO: 2044462
aaaucaaacacacgggcuc

SEQ ID NO: 2044464 - RNA, 19 nt, Artificial Sequence
  Description of Artificial Sequence: Synthetic oligonucleotide
  Sense strand starting at position 2521 of SEQ ID NO: 1881436
gggaaagaaugagaaucua

SEQ ID NO: 2044465 - RNA, 19 nt, Artificial Sequence
  Description of Artificial Sequence: Synthetic oligonucleotide
  Antisense strand to SEQ ID NO: 2044464
uagauucucauucuuuccc

SEQ ID NO: 2044466 - RNA, 19 nt, Artificial Sequence
  Description of Artificial Sequence: Synthetic oligonucleotide
  Sense strand starting at position 2557 of SEQ ID NO: 1881436
ggugaauugguccagcaug

SEQ ID NO: 2044467 - RNA, 19 nt, Artificial Sequence
  Description of Artificial Sequence: Synthetic oligonucleotide
  Antisense strand to SEQ ID NO: 2044466
caugcuggaccaauucacc

SEQ ID NO: 2044468 - RNA, 19 nt, Artificial Sequence
  Description of Artificial Sequence: Synthetic oligonucleotide
  Sense strand starting at position 2620 of SEQ ID NO: 1881436
ccgcuagacuuuccucauu

SEQ ID NO: 2044469 - RNA, 19 nt, Artificial Sequence
  Description of Artificial Sequence: Synthetic oligonucleotide
  Antisense strand to SEQ ID NO: 2044468
aaugaggaaagucuagcgg

SEQ ID NO: 2044470 - RNA, 19 nt, Artificial Sequence
  Description of Artificial Sequence: Synthetic oligonucleotide
  Sense strand starting at position 2695 of SEQ ID NO: 1881436
gggauucuggcaugguaga

SEQ ID NO: 2044471 - RNA, 19 nt, Artificial Sequence
  Description of Artificial Sequence: Synthetic oligonucleotide
  Antisense strand to SEQ ID NO: 2044470
ucuaccaugccagaauccc

SEQ ID NO: 2044472 - RNA, 19 nt, Artificial Sequence
  Description of Artificial Sequence: Synthetic oligonucleotide
  Sense strand starting at position 2715 of SEQ ID NO: 1881436
accagaauucuguauagca

SEQ ID NO: 2044473 - RNA, 19 nt, Artificial Sequence
  Description of Artificial Sequence: Synthetic oligonucleotide
  Antisense strand to SEQ ID NO: 2044472
ugcuauacagaauucuggu

SEQ ID NO: 2044474 - RNA, 19 nt, Artificial Sequence
  Description of Artificial Sequence: Synthetic oligonucleotide
  Sense strand starting at position 2767 of SEQ ID NO: 1881436
uggguauugggauaagcau

SEQ ID NO: 2044475 - RNA, 19 nt, Artificial Sequence
  Description of Artificial Sequence: Synthetic oligonucleotide
  Antisense strand to SEQ ID NO: 2044474
augcuuaucccaauaccca

SEQ ID NO: 2044476 - RNA, 19 nt, Artificial Sequence
  Description of Artificial Sequence: Synthetic oligonucleotide
  Sense strand starting at position 3005 of SEQ ID NO: 1881436
aguugucaacgauaucaac

SEQ ID NO: 2044477 - RNA, 19 nt, Artificial Sequence
  Description of Artificial Sequence: Synthetic oligonucleotide
  Antisense strand to SEQ ID NO: 2044476
guugauaucguugacaacu

SEQ ID NO: 2044478 - RNA, 19 nt, Artificial Sequence
  Description of Artificial Sequence: Synthetic oligonucleotide
  Sense strand starting at position 3044 of SEQ ID NO: 1881436
agacacagguagucugauu

SEQ ID NO: 2044479 - RNA, 19 nt, Artificial Sequence
  Description of Artificial Sequence: Synthetic oligonucleotide
  Antisense strand to SEQ ID NO: 2044478
aaucagacuaccugugucu

SEQ ID NO: 2044480 - RNA, 19 nt, Artificial Sequence
  Description of Artificial Sequence: Synthetic oligonucleotide
  Sense strand starting at position 3049 of SEQ ID NO: 1881436
cagguagucugauuaucca

SEQ ID NO: 2044481 - RNA, 19 nt, Artificial Sequence
  Description of Artificial Sequence: Synthetic oligonucleotide
  Antisense strand to SEQ ID NO: 2044480
uggauaaucagacuaccug

SEQ ID NO: 2044482 - RNA, 19 nt, Artificial Sequence
  Description of Artificial Sequence: Synthetic oligonucleotide
  Sense strand starting at position 3052 of SEQ ID NO: 1881436
guagucugauuauccaguu

SEQ ID NO: 2044483 - RNA, 19 nt, Artificial Sequence
  Description of Artificial Sequence: Synthetic oligonucleotide
  Antisense strand to SEQ ID NO: 2044482
aacuggauaaucagacuac

SEQ ID NO: 2044484 - RNA, 19 nt, Artificial Sequence
  Description of Artificial Sequence: Synthetic oligonucleotide
  Sense strand starting at position 3082 of SEQ ID NO: 1881436
ggccuagauuuagauacuu

SEQ ID NO: 2044485 - RNA, 19 nt, Artificial Sequence
  Description of Artificial Sequence: Synthetic oligonucleotide
  Antisense strand to SEQ ID NO: 2044484
aaguaucuaaaucuaggcc

SEQ ID NO: 2044486 - RNA, 19 nt, Artificial Sequence
  Description of Artificial Sequence: Synthetic oligonucleotide
  Sense strand starting at position 3152 of SEQ ID NO: 1881436
ugcuucugcccguucugaa

SEQ ID NO: 2044487 - RNA, 19 nt, Artificial Sequence
  Description of Artificial Sequence: Synthetic oligonucleotide
  Antisense strand to SEQ ID NO: 2044486
uucagaacgggcagaagca

SEQ ID NO: 2044488 - RNA, 19 nt, Artificial Sequence
  Description of Artificial Sequence: Synthetic oligonucleotide
  Sense strand starting at position 3153 of SEQ ID NO: 1881436
gcuucugcccguucugaau

SEQ ID NO: 2044489 - RNA, 19 nt, Artificial Sequence
  Description of Artificial Sequence: Synthetic oligonucleotide
  Antisense strand to SEQ ID NO: 2044488
auucagaacgggcagaagc

SEQ ID NO: 2044490 - RNA, 19 nt, Artificial Sequence
  Description of Artificial Sequence: Synthetic oligonucleotide
  Sense strand starting at position 3225 of SEQ ID NO: 1881436
cacugacuuccugguggga

SEQ ID NO: 2044491 - RNA, 19 nt, Artificial Sequence
  Description of Artificial Sequence: Synthetic oligonucleotide
  Antisense strand to SEQ ID NO: 2044490
ucccaccaggaagucagug

SEQ ID NO: 2044492 - RNA, 19 nt, Artificial Sequence
  Description of Artificial Sequence: Synthetic oligonucleotide
  Sense strand starting at position 3430 of SEQ ID NO: 1881436
acuuaucuuccugaaggca

SEQ ID NO: 2044493 - RNA, 19 nt, Artificial Sequence
  Description of Artificial Sequence: Synthetic oligonucleotide
  Antisense strand to SEQ ID NO: 2044492
ugccuucaggaagauaagu

SEQ ID NO: 2044494 - RNA, 19 nt, Artificial Sequence
  Description of Artificial Sequence: Synthetic oligonucleotide
  Sense strand starting at position 3632 of SEQ ID NO: 1881436
agguaaguuuauccucaua

SEQ ID NO: 2044495 - RNA, 19 nt, Artificial Sequence
  Description of Artificial Sequence: Synthetic oligonucleotide
  Antisense strand to SEQ ID NO: 2044494
uaugaggauaaacuuaccu

SEQ ID NO: 2044496 - RNA, 19 nt, Artificial Sequence
  Description of Artificial Sequence: Synthetic oligonucleotide
  Sense strand starting at position 3634 of SEQ ID NO: 1881436
guaaguuuauccucauauu

SEQ ID NO: 2044497 - RNA, 19 nt, Artificial Sequence
  Description of Artificial Sequence: Synthetic oligonucleotide
  Antisense strand to SEQ ID NO: 2044496
aauaugaggauaaacuuac

SEQ ID NO: 2044498 - RNA, 19 nt, Artificial Sequence
  Description of Artificial Sequence: Synthetic oligonucleotide
  Sense strand starting at position 3758 of SEQ ID NO: 1881436
ucacgucauuuaucucacu

SEQ ID NO: 2044499 - RNA, 19 nt, Artificial Sequence
  Description of Artificial Sequence: Synthetic oligonucleotide
  Antisense strand to SEQ ID NO: 2044498
agugagauaaaugacguga

SEQ ID NO: 2044500 - RNA, 19 nt, Artificial Sequence
  Description of Artificial Sequence: Synthetic oligonucleotide
  Sense strand starting at position 3775 of SEQ ID NO: 1881436
cuuggaaaguugcucuuga

SEQ ID NO: 2044501 - RNA, 19 nt, Artificial Sequence
  Description of Artificial Sequence: Synthetic oligonucleotide
  Antisense strand to SEQ ID NO: 2044500
ucaagagcaacuuuccaag

SEQ ID NO: 2044502 - RNA, 19 nt, Artificial Sequence
  Description of Artificial Sequence: Synthetic oligonucleotide
  Sense strand starting at position 3776 of SEQ ID NO: 1881436
uuggaaaguugcucuugau

SEQ ID NO: 2044503 - RNA, 19 nt, Artificial Sequence
  Description of Artificial Sequence: Synthetic oligonucleotide
  Antisense strand to SEQ ID NO: 2044502
aucaagagcaacuuuccaa

SEQ ID NO: 2044504 - RNA, 19 nt, Artificial Sequence
  Description of Artificial Sequence: Synthetic oligonucleotide
  Sense strand starting at position 3780 of SEQ ID NO: 1881436
aaaguugcucuugaucagu

SEQ ID NO: 2044505 - RNA, 19 nt, Artificial Sequence
  Description of Artificial Sequence: Synthetic oligonucleotide
  Antisense strand to SEQ ID NO: 2044504
acugaucaagagcaacuuu

SEQ ID NO: 2044506 - RNA, 19 nt, Artificial Sequence
  Description of Artificial Sequence: Synthetic oligonucleotide
  Sense strand starting at position 70 of SEQ ID NO: 1881437
uugaaugagacauguugau

SEQ ID NO: 2044507 - RNA, 19 nt, Artificial Sequence
  Description of Artificial Sequence: Synthetic oligonucleotide
  Antisense strand to SEQ ID NO: 2044506
aucaacaugucucauucaa

SEQ ID NO: 2044508 - RNA, 19 nt, Artificial Sequence
  Description of Artificial Sequence: Synthetic oligonucleotide
  Sense strand starting at position 172 of SEQ ID NO: 1881437
ugcucugcucuggaggaaa

SEQ ID NO: 2044509 - RNA, 19 nt, Artificial Sequence
  Description of Artificial Sequence: Synthetic oligonucleotide
  Antisense strand to SEQ ID NO: 2044508
uuuccuccagagcagagca

SEQ ID NO: 2044510 - RNA, 19 nt, Artificial Sequence
  Description of Artificial Sequence: Synthetic oligonucleotide
  Sense strand starting at position 354 of SEQ ID NO: 1881437
uggccauacgccugauuua

SEQ ID NO: 2044511 - RNA, 19 nt, Artificial Sequence
  Description of Artificial Sequence: Synthetic oligonucleotide
  Antisense strand to SEQ ID NO: 2044510
uaaaucaggcguauggcca

SEQ ID NO: 2044512 - RNA, 19 nt, Artificial Sequence
  Description of Artificial Sequence: Synthetic oligonucleotide
  Sense strand starting at position 411 of SEQ ID NO: 1881437
guacuuggacucuagucaa

SEQ ID NO: 2044513 - RNA, 19 nt, Artificial Sequence
  Description of Artificial Sequence: Synthetic oligonucleotide
  Antisense strand to SEQ ID NO: 2044512
uugacuagaguccaaguac

SEQ ID NO: 2044514 - RNA, 19 nt, Artificial Sequence
  Description of Artificial Sequence: Synthetic oligonucleotide
  Sense strand starting at position 414 of SEQ ID NO: 1881437
cuuggacucuagucaagaa

SEQ ID NO: 2044515 - RNA, 19 nt, Artificial Sequence
  Description of Artificial Sequence: Synthetic oligonucleotide
  Antisense strand to SEQ ID NO: 2044514
uucuugacuagaguccaag

SEQ ID NO: 2044516 - RNA, 19 nt, Artificial Sequence
  Description of Artificial Sequence: Synthetic oligonucleotide
  Sense strand starting at position 477 of SEQ ID NO: 1881437
ggguaucaagauugcugga

SEQ ID NO: 2044517 - RNA, 19 nt, Artificial Sequence
  Description of Artificial Sequence: Synthetic oligonucleotide
  Antisense strand to SEQ ID NO: 2044516
uccagcaaucuugauaccc

SEQ ID NO: 2044518 - RNA, 19 nt, Artificial Sequence
  Description of Artificial Sequence: Synthetic oligonucleotide
  Sense strand starting at position 479 of SEQ ID NO: 1881437
guaucaagauugcuggacu

SEQ ID NO: 2044519 - RNA, 19 nt, Artificial Sequence
  Description of Artificial Sequence: Synthetic oligonucleotide
  Antisense strand to SEQ ID NO: 2044518
aguccagcaaucuugauac

SEQ ID NO: 2044520 - RNA, 19 nt, Artificial Sequence
  Description of Artificial Sequence: Synthetic oligonucleotide
  Sense strand starting at position 482 of SEQ ID NO: 1881437
ucaagauugcuggacuugu

SEQ ID NO: 2044521 - RNA, 19 nt, Artificial Sequence
  Description of Artificial Sequence: Synthetic oligonucleotide
  Antisense strand to SEQ ID NO: 2044520
acaaguccagcaaucuuga

SEQ ID NO: 2044522 - RNA, 19 nt, Artificial Sequence
  Description of Artificial Sequence: Synthetic oligonucleotide
  Sense strand starting at position 490 of SEQ ID NO: 1881437
gcuggacuuguauaacauc

SEQ ID NO: 2044523 - RNA, 19 nt, Artificial Sequence
  Description of Artificial Sequence: Synthetic oligonucleotide
  Antisense strand to SEQ ID NO: 2044522
gauguuauacaaguccagc

SEQ ID NO: 2044524 - RNA, 19 nt, Artificial Sequence
  Description of Artificial Sequence: Synthetic oligonucleotide
  Sense strand starting at position 601 of SEQ ID NO: 1881437
uaagcuguggcuuaccaau

SEQ ID NO: 2044525 - RNA, 19 nt, Artificial Sequence
  Description of Artificial Sequence: Synthetic oligonucleotide
  Antisense strand to SEQ ID NO: 2044524
auugguaagccacagcuua

SEQ ID NO: 2044526 - RNA, 19 nt, Artificial Sequence
  Description of Artificial Sequence: Synthetic oligonucleotide
  Sense strand starting at position 1008 of SEQ ID NO: 1881437
agaugcuaucucugcaaga

SEQ ID NO: 2044527 - RNA, 19 nt, Artificial Sequence
  Description of Artificial Sequence: Synthetic oligonucleotide
  Antisense strand to SEQ ID NO: 2044526
ucuugcagagauagcaucu

SEQ ID NO: 2044528 - RNA, 19 nt, Artificial Sequence
  Description of Artificial Sequence: Synthetic oligonucleotide
  Sense strand starting at position 1010 of SEQ ID NO: 1881437
augcuaucucugcaagaaa

SEQ ID NO: 2044529 - RNA, 19 nt, Artificial Sequence
  Description of Artificial Sequence: Synthetic oligonucleotide
  Antisense strand to SEQ ID NO: 2044528
uuucuugcagagauagcau

SEQ ID NO: 2044530 - RNA, 19 nt, Artificial Sequence
  Description of Artificial Sequence: Synthetic oligonucleotide
  Sense strand starting at position 1038 of SEQ ID NO: 1881437
cacaauuggguuugacuua

SEQ ID NO: 2044531 - RNA, 19 nt, Artificial Sequence
  Description of Artificial Sequence: Synthetic oligonucleotide
  Antisense strand to SEQ ID NO: 2044530
uaagucaaacccaauugug

SEQ ID NO: 2044532 - RNA, 19 nt, Artificial Sequence
  Description of Artificial Sequence: Synthetic oligonucleotide
  Sense strand starting at position 1099 of SEQ ID NO: 1881437
agaccuuccuauguguuua

SEQ ID NO: 2044533 - RNA, 19 nt, Artificial Sequence
  Description of Artificial Sequence: Synthetic oligonucleotide
  Antisense strand to SEQ ID NO: 2044532
uaaacacauaggaaggucu

SEQ ID NO: 2044534 - RNA, 19 nt, Artificial Sequence
  Description of Artificial Sequence: Synthetic oligonucleotide
  Sense strand starting at position 1103 of SEQ ID NO: 1881437
cuuccuauguguuuaacac

SEQ ID NO: 2044535 - RNA, 19 nt, Artificial Sequence
  Description of Artificial Sequence: Synthetic oligonucleotide
  Antisense strand to SEQ ID NO: 2044534
guguuaaacacauaggaag

SEQ ID NO: 2044536 - RNA, 19 nt, Artificial Sequence
  Description of Artificial Sequence: Synthetic oligonucleotide
  Sense strand starting at position 1206 of SEQ ID NO: 1881437
gagcauagauccuuggcca

SEQ ID NO: 2044537 - RNA, 19 nt, Artificial Sequence
  Description of Artificial Sequence: Synthetic oligonucleotide
  Antisense strand to SEQ ID NO: 2044536
uggccaaggaucuaugcuc

SEQ ID NO: 2044538 - RNA, 19 nt, Artificial Sequence
  Description of Artificial Sequence: Synthetic oligonucleotide
  Sense strand starting at position 1207 of SEQ ID NO: 1881437
agcauagauccuuggccaa

SEQ ID NO: 2044539 - RNA, 19 nt, Artificial Sequence
  Description of Artificial Sequence: Synthetic oligonucleotide
  Antisense strand to SEQ ID NO: 2044538
uuggccaaggaucuaugcu

SEQ ID NO: 2044540 - RNA, 19 nt, Artificial Sequence
  Description of Artificial Sequence: Synthetic oligonucleotide
  Sense strand starting at position 1282 of SEQ ID NO: 1881437
gcggcuagucaugcacaca

SEQ ID NO: 2044541 - RNA, 19 nt, Artificial Sequence
  Description of Artificial Sequence: Synthetic oligonucleotide
  Antisense strand to SEQ ID NO: 2044540
ugugugcaugacuagccgc

SEQ ID NO: 2044542 - RNA, 19 nt, Artificial Sequence
  Description of Artificial Sequence: Synthetic oligonucleotide
  Sense strand starting at position 1306 of SEQ ID NO: 1881437
acgcuuguacaagauguua

SEQ ID NO: 2044543 - RNA, 19 nt, Artificial Sequence
  Description of Artificial Sequence: Synthetic oligonucleotide
  Antisense strand to SEQ ID NO: 2044542
uaacaucuuguacaagcgu

SEQ ID NO: 2044544 - RNA, 19 nt, Artificial Sequence
  Description of Artificial Sequence: Synthetic oligonucleotide
  Sense strand starting at position 1386 of SEQ ID NO: 1881437
caccauagucuugagguga

SEQ ID NO: 2044545 - RNA, 19 nt, Artificial Sequence
  Description of Artificial Sequence: Synthetic oligonucleotide
  Antisense strand to SEQ ID NO: 2044544
ucaccucaagacuauggug

SEQ ID NO: 2044546 - RNA, 19 nt, Artificial Sequence
  Description of Artificial Sequence: Synthetic oligonucleotide
  Sense strand starting at position 1390 of SEQ ID NO: 1881437
auagucuugaggugaucca

SEQ ID NO: 2044547 - RNA, 19 nt, Artificial Sequence
  Description of Artificial Sequence: Synthetic oligonucleotide
  Antisense strand to SEQ ID NO: 2044546
uggaucaccucaagacuau

SEQ ID NO: 2044548 - RNA, 19 nt, Artificial Sequence
  Description of Artificial Sequence: Synthetic oligonucleotide
  Sense strand starting at position 1397 of SEQ ID NO: 1881437
ugaggugauccaggguauc

SEQ ID NO: 2044549 - RNA, 19 nt, Artificial Sequence
  Description of Artificial Sequence: Synthetic oligonucleotide
  Antisense strand to SEQ ID NO: 2044548
gauacccuggaucaccuca

SEQ ID NO: 2044550 - RNA, 19 nt, Artificial Sequence
  Description of Artificial Sequence: Synthetic oligonucleotide
  Sense strand starting at position 1723 of SEQ ID NO: 1881437
aaaggucgauuccuccaaa

SEQ ID NO: 2044551 - RNA, 19 nt, Artificial Sequence
  Description of Artificial Sequence: Synthetic oligonucleotide
  Antisense strand to SEQ ID NO: 2044550
uuuggaggaaucgaccuuu

SEQ ID NO: 2044552 - RNA, 19 nt, Artificial Sequence
  Description of Artificial Sequence: Synthetic oligonucleotide
  Sense strand starting at position 1726 of SEQ ID NO: 1881437
ggucgauuccuccaaaguu

SEQ ID NO: 2044553 - RNA, 19 nt, Artificial Sequence
  Description of Artificial Sequence: Synthetic oligonucleotide
  Antisense strand to SEQ ID NO: 2044552
aacuuuggaggaaucgacc

SEQ ID NO: 2044554 - RNA, 19 nt, Artificial Sequence
  Description of Artificial Sequence: Synthetic oligonucleotide
  Sense strand starting at position 2080 of SEQ ID NO: 1881437
cugugaguuugccuuauuu

SEQ ID NO: 2044555 - RNA, 19 nt, Artificial Sequence
  Description of Artificial Sequence: Synthetic oligonucleotide
  Antisense strand to SEQ ID NO: 2044554
aaauaaggcaaacucacag

SEQ ID NO: 2044556 - RNA, 19 nt, Artificial Sequence
  Description of Artificial Sequence: Synthetic oligonucleotide
  Sense strand starting at position 2082 of SEQ ID NO: 1881437
gugaguuugccuuauuucu

SEQ ID NO: 2044557 - RNA, 19 nt, Artificial Sequence
  Description of Artificial Sequence: Synthetic oligonucleotide
  Antisense strand to SEQ ID NO: 2044556
agaaauaaggcaaacucac

SEQ ID NO: 2044558 - RNA, 19 nt, Artificial Sequence
  Description of Artificial Sequence: Synthetic oligonucleotide
  Sense strand starting at position 2302 of SEQ ID NO: 1881437
gcgugcgcgauccuuaaau

SEQ ID NO: 2044559 - RNA, 19 nt, Artificial Sequence
  Description of Artificial Sequence: Synthetic oligonucleotide
  Antisense strand to SEQ ID NO: 2044558
auuuaaggaucgcgcacgc

SEQ ID NO: 2044560 - RNA, 19 nt, Artificial Sequence
  Description of Artificial Sequence: Synthetic oligonucleotide
  Sense strand starting at position 2577 of SEQ ID NO: 1881437
cuguuauuagcauaaugua

SEQ ID NO: 2044561 - RNA, 19 nt, Artificial Sequence
  Description of Artificial Sequence: Synthetic oligonucleotide
  Antisense strand to SEQ ID NO: 2044560
uacauuaugcuaauaacag

SEQ ID NO: 2044562 - RNA, 19 nt, Artificial Sequence
  Description of Artificial Sequence: Synthetic oligonucleotide
  Sense strand starting at position 2585 of SEQ ID NO: 1881437
agcauaauguaugcaaaua

SEQ ID NO: 2044563 - RNA, 19 nt, Artificial Sequence
  Description of Artificial Sequence: Synthetic oligonucleotide
  Antisense strand to SEQ ID NO: 2044562
uauuugcauacauuaugcu

SEQ ID NO: 2044564 - RNA, 19 nt, Artificial Sequence
  Description of Artificial Sequence: Synthetic oligonucleotide
  Sense strand starting at position 2828 of SEQ ID NO: 1881437
acgcucuaucucuacugau

SEQ ID NO: 2044565 - RNA, 19 nt, Artificial Sequence
  Description of Artificial Sequence: Synthetic oligonucleotide
  Antisense strand to SEQ ID NO: 2044564
aucaguagagauagagcgu

SEQ ID NO: 2044566 - RNA, 19 nt, Artificial Sequence
  Description of Artificial Sequence: Synthetic oligonucleotide
  Sense strand starting at position 3151 of SEQ ID NO: 1881437
aguguugagguauacacau

SEQ ID NO: 2044567 - RNA, 19 nt, Artificial Sequence
  Description of Artificial Sequence: Synthetic oligonucleotide
  Antisense strand to SEQ ID NO: 2044566
auguguauaccucaacacu

SEQ ID NO: 2044568 - RNA, 19 nt, Artificial Sequence
  Description of Artificial Sequence: Synthetic oligonucleotide
  Sense strand starting at position 3234 of SEQ ID NO: 1881437
cuguucucucuggaucaaa

SEQ ID NO: 2044569 - RNA, 19 nt, Artificial Sequence
  Description of Artificial Sequence: Synthetic oligonucleotide
  Antisense strand to SEQ ID NO: 2044568
uuugauccagagagaacag

SEQ ID NO: 2044570 - RNA, 19 nt, Artificial Sequence
  Description of Artificial Sequence: Synthetic oligonucleotide
  Sense strand starting at position 3274 of SEQ ID NO: 1881437
uuuggaaaguugguaacaa

SEQ ID NO: 2044571 - RNA, 19 nt, Artificial Sequence
  Description of Artificial Sequence: Synthetic oligonucleotide
  Antisense strand to SEQ ID NO: 2044570
uuguuaccaacuuuccaaa

SEQ ID NO: 2044572 - RNA, 19 nt, Artificial Sequence
  Description of Artificial Sequence: Synthetic oligonucleotide
  Sense strand starting at position 3282 of SEQ ID NO: 1881437
guugguaacaaguagcauu

SEQ ID NO: 2044573 - RNA, 19 nt, Artificial Sequence
  Description of Artificial Sequence: Synthetic oligonucleotide
  Antisense strand to SEQ ID NO: 2044572
aaugcuacuuguuaccaac

SEQ ID NO: 2044574 - RNA, 19 nt, Artificial Sequence
  Description of Artificial Sequence: Synthetic oligonucleotide
  Sense strand starting at position 3292 of SEQ ID NO: 1881437
aguagcauuugacaucuaa

SEQ ID NO: 2044575 - RNA, 19 nt, Artificial Sequence
  Description of Artificial Sequence: Synthetic oligonucleotide
  Antisense strand to SEQ ID NO: 2044574
uuagaugucaaaugcuacu

SEQ ID NO: 2044576 - RNA, 19 nt, Artificial Sequence
  Description of Artificial Sequence: Synthetic oligonucleotide
  Sense strand starting at position 3481 of SEQ ID NO: 1881437
acauguguaaacggauauu

SEQ ID NO: 2044577 - RNA, 19 nt, Artificial Sequence
  Description of Artificial Sequence: Synthetic oligonucleotide
  Antisense strand to SEQ ID NO: 2044576
aauauccguuuacacaugu

SEQ ID NO: 2044578 - RNA, 19 nt, Artificial Sequence
  Description of Artificial Sequence: Synthetic oligonucleotide
  Sense strand starting at position 3484 of SEQ ID NO: 1881437
uguguaaacggauauugcu

SEQ ID NO: 2044579 - RNA, 19 nt, Artificial Sequence
  Description of Artificial Sequence: Synthetic oligonucleotide
  Antisense strand to SEQ ID NO: 2044578
agcaauauccguuuacaca

SEQ ID NO: 2044580 - RNA, 19 nt, Artificial Sequence
  Description of Artificial Sequence: Synthetic oligonucleotide
  Sense strand starting at position 3494 of SEQ ID NO: 1881437
gauauugcuaggugugaag

SEQ ID NO: 2044581 - RNA, 19 nt, Artificial Sequence
  Description of Artificial Sequence: Synthetic oligonucleotide
  Antisense strand to SEQ ID NO: 2044580
cuucacaccuagcaauauc

SEQ ID NO: 2044582 - RNA, 19 nt, Artificial Sequence
  Description of Artificial Sequence: Synthetic oligonucleotide
  Sense strand starting at position 3501 of SEQ ID NO: 1881437
cuaggugugaagcaaggua

SEQ ID NO: 2044583 - RNA, 19 nt, Artificial Sequence
  Description of Artificial Sequence: Synthetic oligonucleotide
  Antisense strand to SEQ ID NO: 2044582
uaccuugcuucacaccuag

SEQ ID NO: 2044584 - RNA, 19 nt, Artificial Sequence
  Description of Artificial Sequence: Synthetic oligonucleotide
  Sense strand starting at position 3548 of SEQ ID NO: 1881437
agacuaacauuggaggaaa

SEQ ID NO: 2044585 - RNA, 19 nt, Artificial Sequence
  Description of Artificial Sequence: Synthetic oligonucleotide
  Antisense strand to SEQ ID NO: 2044584
uuuccuccaauguuagucu

SEQ ID NO: 2044586 - RNA, 19 nt, Artificial Sequence
  Description of Artificial Sequence: Synthetic oligonucleotide
  Sense strand starting at position 8 of SEQ ID NO: 1881438
gggcaagaucaccagcuua

SEQ ID NO: 2044587 - RNA, 19 nt, Artificial Sequence
  Description of Artificial Sequence: Synthetic oligonucleotide
  Antisense strand to SEQ ID NO: 2044586
uaagcuggugaucuugccc

SEQ ID NO: 2044588 - RNA, 19 nt, Artificial Sequence
  Description of Artificial Sequence: Synthetic oligonucleotide
  Sense strand starting at position 23 of SEQ ID NO: 1881438
cuuacaagaugucagaaag

SEQ ID NO: 2044589 - RNA, 19 nt, Artificial Sequence
  Description of Artificial Sequence: Synthetic oligonucleotide
  Antisense strand to SEQ ID NO: 2044588
cuuucugacaucuuguaag

SEQ ID NO: 2044590 - RNA, 19 nt, Artificial Sequence
  Description of Artificial Sequence: Synthetic oligonucleotide
  Sense strand starting at position 104 of SEQ ID NO: 1881438
uuuggaauuugguguauuu

SEQ ID NO: 2044591 - RNA, 19 nt, Artificial Sequence
  Description of Artificial Sequence: Synthetic oligonucleotide
  Antisense strand to SEQ ID NO: 2044590
aaauacaccaaauuccaaa

SEQ ID NO: 2044592 - RNA, 19 nt, Artificial Sequence
  Description of Artificial Sequence: Synthetic oligonucleotide
  Sense strand starting at position 113 of SEQ ID NO: 1881438
ugguguauuuaauaugaag

SEQ ID NO: 2044593 - RNA, 19 nt, Artificial Sequence
  Description of Artificial Sequence: Synthetic oligonucleotide
  Antisense strand to SEQ ID NO: 2044592
cuucauauuaaauacacca

SEQ ID NO: 2044594 - RNA, 19 nt, Artificial Sequence
  Description of Artificial Sequence: Synthetic oligonucleotide
  Sense strand starting at position 299 of SEQ ID NO: 1881438
uuuacuaacugcgguguua

SEQ ID NO: 2044595 - RNA, 19 nt, Artificial Sequence
  Description of Artificial Sequence: Synthetic oligonucleotide
  Antisense strand to SEQ ID NO: 2044594
uaacaccgcaguuaguaaa

SEQ ID NO: 2044596 - RNA, 19 nt, Artificial Sequence
  Description of Artificial Sequence: Synthetic oligonucleotide
  Sense strand starting at position 301 of SEQ ID NO: 1881438
uacuaacugcgguguuagu

SEQ ID NO: 2044597 - RNA, 19 nt, Artificial Sequence
  Description of Artificial Sequence: Synthetic oligonucleotide
  Antisense strand to SEQ ID NO: 2044596
acuaacaccgcaguuagua

SEQ ID NO: 2044598 - RNA, 19 nt, Artificial Sequence
  Description of Artificial Sequence: Synthetic oligonucleotide
  Sense strand starting at position 308 of SEQ ID NO: 1881438
ugcgguguuaguggauaau

SEQ ID NO: 2044599 - RNA, 19 nt, Artificial Sequence
  Description of Artificial Sequence: Synthetic oligonucleotide
  Antisense strand to SEQ ID NO: 2044598
auuauccacuaacaccgca

SEQ ID NO: 2044600 - RNA, 19 nt, Artificial Sequence
  Description of Artificial Sequence: Synthetic oligonucleotide
  Sense strand starting at position 311 of SEQ ID NO: 1881438
gguguuaguggauaauuga

SEQ ID NO: 2044601 - RNA, 19 nt, Artificial Sequence
  Description of Artificial Sequence: Synthetic oligonucleotide
  Antisense strand to SEQ ID NO: 2044600
ucaauuauccacuaacacc

SEQ ID NO: 2044602 - RNA, 19 nt, Artificial Sequence
  Description of Artificial Sequence: Synthetic oligonucleotide
  Sense strand starting at position 364 of SEQ ID NO: 1881438
aagauuuguuguuggaucu

SEQ ID NO: 2044603 - RNA, 19 nt, Artificial Sequence
  Description of Artificial Sequence: Synthetic oligonucleotide
  Antisense strand to SEQ ID NO: 2044602
agauccaacaacaaaucuu

SEQ ID NO: 2044604 - RNA, 19 nt, Artificial Sequence
  Description of Artificial Sequence: Synthetic oligonucleotide
  Sense strand starting at position 370 of SEQ ID NO: 1881438
uguuguuggaucugcaaau

SEQ ID NO: 2044605 - RNA, 19 nt, Artificial Sequence
  Description of Artificial Sequence: Synthetic oligonucleotide
  Antisense strand to SEQ ID NO: 2044604
auuugcagauccaacaaca

SEQ ID NO: 2044606 - RNA, 19 nt, Artificial Sequence
  Description of Artificial Sequence: Synthetic oligonucleotide
  Sense strand starting at position 371 of SEQ ID NO: 1881438
guuguuggaucugcaaaug

SEQ ID NO: 2044607 - RNA, 19 nt, Artificial Sequence
  Description of Artificial Sequence: Synthetic oligonucleotide
  Antisense strand to SEQ ID NO: 2044606
cauuugcagauccaacaac

SEQ ID NO: 2044608 - RNA, 19 nt, Artificial Sequence
  Description of Artificial Sequence: Synthetic oligonucleotide
  Sense strand starting at position 426 of SEQ ID NO: 1881438
auccguuguuaagacuuua

SEQ ID NO: 2044609 - RNA, 19 nt, Artificial Sequence
  Description of Artificial Sequence: Synthetic oligonucleotide
  Antisense strand to SEQ ID NO: 2044608
uaaagucuuaacaacggau

SEQ ID NO: 2044610 - RNA, 19 nt, Artificial Sequence
  Description of Artificial Sequence: Synthetic oligonucleotide
  Sense strand starting at position 446 of SEQ ID NO: 1881438
auuccuuaguugcagaagu

SEQ ID NO: 2044611 - RNA, 19 nt, Artificial Sequence
  Description of Artificial Sequence: Synthetic oligonucleotide
  Antisense strand to SEQ ID NO: 2044610
acuucugcaacuaaggaau

SEQ ID NO: 2044612 - RNA, 19 nt, Artificial Sequence
  Description of Artificial Sequence: Synthetic oligonucleotide
  Sense strand starting at position 548 of SEQ ID NO: 1881438
aaauucugagcucagguua

SEQ ID NO: 2044613 - RNA, 19 nt, Artificial Sequence
  Description of Artificial Sequence: Synthetic oligonucleotide
  Antisense strand to SEQ ID NO: 2044612
uaaccugagcucagaauuu

SEQ ID NO: 2044614 - RNA, 19 nt, Artificial Sequence
  Description of Artificial Sequence: Synthetic oligonucleotide
  Sense strand starting at position 802 of SEQ ID NO: 1881438
gggcaauguugcucucuuu

SEQ ID NO: 2044615 - RNA, 19 nt, Artificial Sequence
  Description of Artificial Sequence: Synthetic oligonucleotide
  Antisense strand to SEQ ID NO: 2044614
aaagagagcaacauugccc

SEQ ID NO: 2044616 - RNA, 19 nt, Artificial Sequence
  Description of Artificial Sequence: Synthetic oligonucleotide
  Sense strand starting at position 824 of SEQ ID NO: 1881438
ccauguuuauuucgauuua

SEQ ID NO: 2044617 - RNA, 19 nt, Artificial Sequence
  Description of Artificial Sequence: Synthetic oligonucleotide
  Antisense strand to SEQ ID NO: 2044616
uaaaucgaaauaaacaugg

SEQ ID NO: 2044618 - RNA, 19 nt, Artificial Sequence
  Description of Artificial Sequence: Synthetic oligonucleotide
  Sense strand starting at position 912 of SEQ ID NO: 1881438
ugccuacaucaguaagagu

SEQ ID NO: 2044619 - RNA, 19 nt, Artificial Sequence
  Description of Artificial Sequence: Synthetic oligonucleotide
  Antisense strand to SEQ ID NO: 2044618
acucuuacugauguaggca

SEQ ID NO: 2044620 - RNA, 19 nt, Artificial Sequence
  Description of Artificial Sequence: Synthetic oligonucleotide
  Sense strand starting at position 920 of SEQ ID NO: 1881438
ucaguaagaguaugcuaau

SEQ ID NO: 2044621 - RNA, 19 nt, Artificial Sequence
  Description of Artificial Sequence: Synthetic oligonucleotide
  Antisense strand to SEQ ID NO: 2044620
auuagcauacucuuacuga

SEQ ID NO: 2044622 - RNA, 19 nt, Artificial Sequence
  Description of Artificial Sequence: Synthetic oligonucleotide
  Sense strand starting at position 921 of SEQ ID NO: 1881438
caguaagaguaugcuaauu

SEQ ID NO: 2044623 - RNA, 19 nt, Artificial Sequence
  Description of Artificial Sequence: Synthetic oligonucleotide
  Antisense strand to SEQ ID NO: 2044622
aauuagcauacucuuacug

SEQ ID NO: 2044624 - RNA, 19 nt, Artificial Sequence
  Description of Artificial Sequence: Synthetic oligonucleotide
  Sense strand starting at position 923 of SEQ ID NO: 1881438
guaagaguaugcuaauuua

SEQ ID NO: 2044625 - RNA, 19 nt, Artificial Sequence
  Description of Artificial Sequence: Synthetic oligonucleotide
  Antisense strand to SEQ ID NO: 2044624
uaaauuagcauacucuuac

SEQ ID NO: 2044626 - RNA, 19 nt, Artificial Sequence
  Description of Artificial Sequence: Synthetic oligonucleotide
  Sense strand starting at position 1023 of SEQ ID NO: 1881438
uugagucuauauucuagga

SEQ ID NO: 2044627 - RNA, 19 nt, Artificial Sequence
  Description of Artificial Sequence: Synthetic oligonucleotide
  Antisense strand to SEQ ID NO: 2044626
uccuagaauauagacucaa

SEQ ID NO: 2044628 - RNA, 19 nt, Artificial Sequence
  Description of Artificial Sequence: Synthetic oligonucleotide
  Sense strand starting at position 1025 of SEQ ID NO: 1881438
gagucuauauucuaggauu

SEQ ID NO: 2044629 - RNA, 19 nt, Artificial Sequence
  Description of Artificial Sequence: Synthetic oligonucleotide
  Antisense strand to SEQ ID NO: 2044628
aauccuagaauauagacuc

SEQ ID NO: 2044630 - RNA, 19 nt, Artificial Sequence
  Description of Artificial Sequence: Synthetic oligonucleotide
  Sense strand starting at position 1116 of SEQ ID NO: 1881438
cucaucauguaguauggau

SEQ ID NO: 2044631 - RNA, 19 nt, Artificial Sequence
  Description of Artificial Sequence: Synthetic oligonucleotide
  Antisense strand to SEQ ID NO: 2044630
auccauacuacaugaugag

SEQ ID NO: 2044632 - RNA, 19 nt, Artificial Sequence
  Description of Artificial Sequence: Synthetic oligonucleotide
  Sense strand starting at position 1131 of SEQ ID NO: 1881438
ggaucacucuguuauucuu

SEQ ID NO: 2044633 - RNA, 19 nt, Artificial Sequence
  Description of Artificial Sequence: Synthetic oligonucleotide
  Antisense strand to SEQ ID NO: 2044632
aagaauaacagagugaucc

SEQ ID NO: 2044634 - RNA, 19 nt, Artificial Sequence
  Description of Artificial Sequence: Synthetic oligonucleotide
  Sense strand starting at position 1138 of SEQ ID NO: 1881438
ucuguuauucuuuaucuag

SEQ ID NO: 2044635 - RNA, 19 nt, Artificial Sequence
  Description of Artificial Sequence: Synthetic oligonucleotide
  Antisense strand to SEQ ID NO: 2044634
cuagauaaagaauaacaga

SEQ ID NO: 2044636 - RNA, 19 nt, Artificial Sequence
  Description of Artificial Sequence: Synthetic oligonucleotide
  Sense strand starting at position 1203 of SEQ ID NO: 1881438
aggauuaguuccuccucua

SEQ ID NO: 2044637 - RNA, 19 nt, Artificial Sequence
  Description of Artificial Sequence: Synthetic oligonucleotide
  Antisense strand to SEQ ID NO: 2044636
uagaggaggaacuaauccu

SEQ ID NO: 2044638 - RNA, 19 nt, Artificial Sequence
  Description of Artificial Sequence: Synthetic oligonucleotide
  Sense strand starting at position 1217 of SEQ ID NO: 1881438
cucuaaugcuucuaaagag

SEQ ID NO: 2044639 - RNA, 19 nt, Artificial Sequence
  Description of Artificial Sequence: Synthetic oligonucleotide
  Antisense strand to SEQ ID NO: 2044638
cucuuuagaagcauuagag

SEQ ID NO: 2044640 - RNA, 19 nt, Artificial Sequence
  Description of Artificial Sequence: Synthetic oligonucleotide
  Sense strand starting at position 1227 of SEQ ID NO: 1881438
ucuaaagagcucuaccaug

SEQ ID NO: 2044641 - RNA, 19 nt, Artificial Sequence
  Description of Artificial Sequence: Synthetic oligonucleotide
  Antisense strand to SEQ ID NO: 2044640
caugguagagcucuuuaga

SEQ ID NO: 2044642 - RNA, 19 nt, Artificial Sequence
  Description of Artificial Sequence: Synthetic oligonucleotide
  Sense strand starting at position 1232 of SEQ ID NO: 1881438
agagcucuaccauggaaag

SEQ ID NO: 2044643 - RNA, 19 nt, Artificial Sequence
  Description of Artificial Sequence: Synthetic oligonucleotide
  Antisense strand to SEQ ID NO: 2044642
cuuuccaugguagagcucu

SEQ ID NO: 2044644 - RNA, 19 nt, Artificial Sequence
  Description of Artificial Sequence: Synthetic oligonucleotide
  Sense strand starting at position 1280 of SEQ ID NO: 1881438
caagucugcugcugaguca

SEQ ID NO: 2044645 - RNA, 19 nt, Artificial Sequence
  Description of Artificial Sequence: Synthetic oligonucleotide
  Antisense strand to SEQ ID NO: 2044644
ugacucagcagcagacuug

SEQ ID NO: 2044646 - RNA, 19 nt, Artificial Sequence
  Description of Artificial Sequence: Synthetic oligonucleotide
  Sense strand starting at position 1346 of SEQ ID NO: 1881438
ucauaaagcuuaggaauaa

SEQ ID NO: 2044647 - RNA, 19 nt, Artificial Sequence
  Description of Artificial Sequence: Synthetic oligonucleotide
  Antisense strand to SEQ ID NO: 2044646
uuauuccuaagcuuuauga

SEQ ID NO: 2044648 - RNA, 19 nt, Artificial Sequence
  Description of Artificial Sequence: Synthetic oligonucleotide
  Sense strand starting at position 1514 of SEQ ID NO: 1881438
ccacgcauccgagugugua

SEQ ID NO: 2044649 - RNA, 19 nt, Artificial Sequence
  Description of Artificial Sequence: Synthetic oligonucleotide
  Antisense strand to SEQ ID NO: 2044648
uacacacucggaugcgugg

SEQ ID NO: 2044650 - RNA, 19 nt, Artificial Sequence
  Description of Artificial Sequence: Synthetic oligonucleotide
  Sense strand starting at position 1515 of SEQ ID NO: 1881438
cacgcauccgaguguguaa

SEQ ID NO: 2044651 - RNA, 19 nt, Artificial Sequence
  Description of Artificial Sequence: Synthetic oligonucleotide
  Antisense strand to SEQ ID NO: 2044650
uuacacacucggaugcgug

SEQ ID NO: 2044652 - RNA, 19 nt, Artificial Sequence
  Description of Artificial Sequence: Synthetic oligonucleotide
  Sense strand starting at position 1517 of SEQ ID NO: 1881438
cgcauccgaguguguaaau

SEQ ID NO: 2044653 - RNA, 19 nt, Artificial Sequence
  Description of Artificial Sequence: Synthetic oligonucleotide
  Antisense strand to SEQ ID NO: 2044652
auuuacacacucggaugcg

SEQ ID NO: 2044654 - RNA, 19 nt, Artificial Sequence
  Description of Artificial Sequence: Synthetic oligonucleotide
  Sense strand starting at position 1518 of SEQ ID NO: 1881438
gcauccgaguguguaaaua

SEQ ID NO: 2044655 - RNA, 19 nt, Artificial Sequence
  Description of Artificial Sequence: Synthetic oligonucleotide
  Antisense strand to SEQ ID NO: 2044654
uauuuacacacucggaugc

SEQ ID NO: 2044656 - RNA, 19 nt, Artificial Sequence
  Description of Artificial Sequence: Synthetic oligonucleotide
  Sense strand starting at position 1547 of SEQ ID NO: 1881438
gcguguuuguuccagggac

SEQ ID NO: 2044657 - RNA, 19 nt, Artificial Sequence
  Description of Artificial Sequence: Synthetic oligonucleotide
  Antisense strand to SEQ ID NO: 2044656
gucccuggaacaaacacgc

SEQ ID NO: 2044658 - RNA, 19 nt, Artificial Sequence
  Description of Artificial Sequence: Synthetic oligonucleotide
  Sense strand starting at position 1549 of SEQ ID NO: 1881438
guguuuguuccagggacuu

SEQ ID NO: 2044659 - RNA, 19 nt, Artificial Sequence
  Description of Artificial Sequence: Synthetic oligonucleotide
  Antisense strand to SEQ ID NO: 2044658
aagucccuggaacaaacac

SEQ ID NO: 2044660 - RNA, 19 nt, Artificial Sequence
  Description of Artificial Sequence: Synthetic oligonucleotide
  Sense strand starting at position 1561 of SEQ ID NO: 1881438
gggacuuuguuccuucuua

SEQ ID NO: 2044661 - RNA, 19 nt, Artificial Sequence
  Description of Artificial Sequence: Synthetic oligonucleotide
  Antisense strand to SEQ ID NO: 2044660
uaagaaggaacaaaguccc

SEQ ID NO: 2044662 - RNA, 19 nt, Artificial Sequence
  Description of Artificial Sequence: Synthetic oligonucleotide
  Sense strand starting at position 1562 of SEQ ID NO: 1881438
ggacuuuguuccuucuuac

SEQ ID NO: 2044663 - RNA, 19 nt, Artificial Sequence
  Description of Artificial Sequence: Synthetic oligonucleotide
  Antisense strand to SEQ ID NO: 2044662
guaagaaggaacaaagucc

SEQ ID NO: 2044664 - RNA, 19 nt, Artificial Sequence
  Description of Artificial Sequence: Synthetic oligonucleotide
  Sense strand starting at position 2621 of SEQ ID NO: 1881438
ccugauaaaugagggauuu

SEQ ID NO: 2044665 - RNA, 19 nt, Artificial Sequence
  Description of Artificial Sequence: Synthetic oligonucleotide
  Antisense strand to SEQ ID NO: 2044664
aaaucccucauuuaucagg

SEQ ID NO: 2044666 - RNA, 19 nt, Artificial Sequence
  Description of Artificial Sequence: Synthetic oligonucleotide
  Sense strand starting at position 68 of SEQ ID NO: 1881439
ugaagucacuuuguagaaa

SEQ ID NO: 2044667 - RNA, 19 nt, Artificial Sequence
  Description of Artificial Sequence: Synthetic oligonucleotide
  Antisense strand to SEQ ID NO: 2044666
uuucuacaaagugacuuca

SEQ ID NO: 2044668 - RNA, 19 nt, Artificial Sequence
  Description of Artificial Sequence: Synthetic oligonucleotide
  Sense strand starting at position 96 of SEQ ID NO: 1881439
ccugaacacucuguuuaag

SEQ ID NO: 2044669 - RNA, 19 nt, Artificial Sequence
  Description of Artificial Sequence: Synthetic oligonucleotide
  Antisense strand to SEQ ID NO: 2044668
cuuaaacagaguguucagg

SEQ ID NO: 2044670 - RNA, 19 nt, Artificial Sequence
  Description of Artificial Sequence: Synthetic oligonucleotide
  Sense strand starting at position 99 of SEQ ID NO: 1881439
gaacacucuguuuaaggua

SEQ ID NO: 2044671 - RNA, 19 nt, Artificial Sequence
  Description of Artificial Sequence: Synthetic oligonucleotide
  Antisense strand to SEQ ID NO: 2044670
uaccuuaaacagaguguuc

SEQ ID NO: 2044672 - RNA, 19 nt, Artificial Sequence
  Description of Artificial Sequence: Synthetic oligonucleotide
  Sense strand starting at position 106 of SEQ ID NO: 1881439
cuguuuaagguagagucaa

SEQ ID NO: 2044673 - RNA, 19 nt, Artificial Sequence
  Description of Artificial Sequence: Synthetic oligonucleotide
  Antisense strand to SEQ ID NO: 2044672
uugacucuaccuuaaacag

SEQ ID NO: 2044674 - RNA, 19 nt, Artificial Sequence
  Description of Artificial Sequence: Synthetic oligonucleotide
  Sense strand starting at position 853 of SEQ ID NO: 1881439
augugaguugacuacacga

SEQ ID NO: 2044675 - RNA, 19 nt, Artificial Sequence
  Description of Artificial Sequence: Synthetic oligonucleotide
  Antisense strand to SEQ ID NO: 2044674
ucguguagucaacucacau

SEQ ID NO: 2044676 - RNA, 19 nt, Artificial Sequence
  Description of Artificial Sequence: Synthetic oligonucleotide
  Sense strand starting at position 855 of SEQ ID NO: 1881439
gugaguugacuacacgauc

SEQ ID NO: 2044677 - RNA, 19 nt, Artificial Sequence
  Description of Artificial Sequence: Synthetic oligonucleotide
  Antisense strand to SEQ ID NO: 2044676
gaucguguagucaacucac

SEQ ID NO: 2044678 - RNA, 19 nt, Artificial Sequence
  Description of Artificial Sequence: Synthetic oligonucleotide
  Sense strand starting at position 863 of SEQ ID NO: 1881439
acuacacgaucucuaagau

SEQ ID NO: 2044679 - RNA, 19 nt, Artificial Sequence
  Description of Artificial Sequence: Synthetic oligonucleotide
  Antisense strand to SEQ ID NO: 2044678
aucuuagagaucguguagu

SEQ ID NO: 2044680 - RNA, 19 nt, Artificial Sequence
  Description of Artificial Sequence: Synthetic oligonucleotide
  Sense strand starting at position 891 of SEQ ID NO: 1881439
cuagacugaugucucauau

SEQ ID NO: 2044681 - RNA, 19 nt, Artificial Sequence
  Description of Artificial Sequence: Synthetic oligonucleotide
  Antisense strand to SEQ ID NO: 2044680
auaugagacaucagucuag

SEQ ID NO: 2044682 - RNA, 19 nt, Artificial Sequence
  Description of Artificial Sequence: Synthetic oligonucleotide
  Sense strand starting at position 1028 of SEQ ID NO: 1881439
cucuuuauaguguacauau

SEQ ID NO: 2044683 - RNA, 19 nt, Artificial Sequence
  Description of Artificial Sequence: Synthetic oligonucleotide
  Antisense strand to SEQ ID NO: 2044682
auauguacacuauaaagag

SEQ ID NO: 2044684 - RNA, 19 nt, Artificial Sequence
  Description of Artificial Sequence: Synthetic oligonucleotide
  Sense strand starting at position 1373 of SEQ ID NO: 1881439
aaggcauauuucguuaucu

SEQ ID NO: 2044685 - RNA, 19 nt, Artificial Sequence
  Description of Artificial Sequence: Synthetic oligonucleotide
  Antisense strand to SEQ ID NO: 2044684
agauaacgaaauaugccuu

SEQ ID NO: 2044686 - RNA, 19 nt, Artificial Sequence
  Description of Artificial Sequence: Synthetic oligonucleotide
  Sense strand starting at position 1374 of SEQ ID NO: 1881439
aggcauauuucguuaucuu

SEQ ID NO: 2044687 - RNA, 19 nt, Artificial Sequence
  Description of Artificial Sequence: Synthetic oligonucleotide
  Antisense strand to SEQ ID NO: 2044686
aagauaacgaaauaugccu

SEQ ID NO: 2044688 - RNA, 19 nt, Artificial Sequence
  Description of Artificial Sequence: Synthetic oligonucleotide
  Sense strand starting at position 1375 of SEQ ID NO: 1881439
ggcauauuucguuaucuuu

SEQ ID NO: 2044689 - RNA, 19 nt, Artificial Sequence
  Description of Artificial Sequence: Synthetic oligonucleotide
  Antisense strand to SEQ ID NO: 2044688
aaagauaacgaaauaugcc

SEQ ID NO: 2044690 - RNA, 19 nt, Artificial Sequence
  Description of Artificial Sequence: Synthetic oligonucleotide
  Sense strand starting at position 1489 of SEQ ID NO: 1881439
ggaaacuguuaguucuuaa

SEQ ID NO: 2044691 - RNA, 19 nt, Artificial Sequence
  Description of Artificial Sequence: Synthetic oligonucleotide
  Antisense strand to SEQ ID NO: 2044690
uuaagaacuaacaguuucc

SEQ ID NO: 2044692 - RNA, 19 nt, Artificial Sequence
  Description of Artificial Sequence: Synthetic oligonucleotide
  Sense strand starting at position 1692 of SEQ ID NO: 1881439
acugauuaucuuggucaug

SEQ ID NO: 2044693 - RNA, 19 nt, Artificial Sequence
  Description of Artificial Sequence: Synthetic oligonucleotide
  Antisense strand to SEQ ID NO: 2044692
caugaccaagauaaucagu

SEQ ID NO: 2044694 - RNA, 19 nt, Artificial Sequence
  Description of Artificial Sequence: Synthetic oligonucleotide
  Sense strand starting at position 1693 of SEQ ID NO: 1881439
cugauuaucuuggucauga

SEQ ID NO: 2044695 - RNA, 19 nt, Artificial Sequence
  Description of Artificial Sequence: Synthetic oligonucleotide
  Antisense strand to SEQ ID NO: 2044694
ucaugaccaagauaaucag

SEQ ID NO: 2044696 - RNA, 19 nt, Artificial Sequence
  Description of Artificial Sequence: Synthetic oligonucleotide
  Sense strand starting at position 1694 of SEQ ID NO: 1881439
ugauuaucuuggucaugac

SEQ ID NO: 2044697 - RNA, 19 nt, Artificial Sequence
  Description of Artificial Sequence: Synthetic oligonucleotide
  Antisense strand to SEQ ID NO: 2044696
gucaugaccaagauaauca

SEQ ID NO: 2044698 - RNA, 19 nt, Artificial Sequence
  Description of Artificial Sequence: Synthetic oligonucleotide
  Sense strand starting at position 1695 of SEQ ID NO: 1881439
gauuaucuuggucaugacu

SEQ ID NO: 2044699 - RNA, 19 nt, Artificial Sequence
  Description of Artificial Sequence: Synthetic oligonucleotide
  Antisense strand to SEQ ID NO: 2044698
agucaugaccaagauaauc

SEQ ID NO: 2044700 - RNA, 19 nt, Artificial Sequence
  Description of Artificial Sequence: Synthetic oligonucleotide
  Sense strand starting at position 1734 of SEQ ID NO: 1881439
cuauaagacugugucauaa

SEQ ID NO: 2044701 - RNA, 19 nt, Artificial Sequence
  Description of Artificial Sequence: Synthetic oligonucleotide
  Antisense strand to SEQ ID NO: 2044700
uuaugacacagucuuauag

SEQ ID NO: 2044702 - RNA, 19 nt, Artificial Sequence
  Description of Artificial Sequence: Synthetic oligonucleotide
  Sense strand starting at position 1830 of SEQ ID NO: 1881439
caauuuaugguguguugau

SEQ ID NO: 2044703 - RNA, 19 nt, Artificial Sequence
  Description of Artificial Sequence: Synthetic oligonucleotide
  Antisense strand to SEQ ID NO: 2044702
aucaacacaccauaaauug

SEQ ID NO: 2044704 - RNA, 19 nt, Artificial Sequence
  Description of Artificial Sequence: Synthetic oligonucleotide
  Sense strand starting at position 2101 of SEQ ID NO: 1881439
ucagaaugguuagaaauuu

SEQ ID NO: 2044705 - RNA, 19 nt, Artificial Sequence
  Description of Artificial Sequence: Synthetic oligonucleotide
  Antisense strand to SEQ ID NO: 2044704
aaauuucuaaccauucuga

SEQ ID NO: 2044706 - RNA, 19 nt, Artificial Sequence
  Description of Artificial Sequence: Synthetic oligonucleotide
  Sense strand starting at position 2422 of SEQ ID NO: 1881439
gcaagaauuuccgucucuc

SEQ ID NO: 2044707 - RNA, 19 nt, Artificial Sequence
  Description of Artificial Sequence: Synthetic oligonucleotide
  Antisense strand to SEQ ID NO: 2044706
gagagacggaaauucuugc

SEQ ID NO: 2044708 - RNA, 19 nt, Artificial Sequence
  Description of Artificial Sequence: Synthetic oligonucleotide
  Sense strand starting at position 2449 of SEQ ID NO: 1881439
auuggaaaugccugauaaa

SEQ ID NO: 2044709 - RNA, 19 nt, Artificial Sequence
  Description of Artificial Sequence: Synthetic oligonucleotide
  Antisense strand to SEQ ID NO: 2044708
uuuaucaggcauuuccaau

SEQ ID NO: 2044710 - RNA, 19 nt, Artificial Sequence
  Description of Artificial Sequence: Synthetic oligonucleotide
  Sense strand starting at position 2494 of SEQ ID NO: 1881439
auuggacaaagcugugaaa

SEQ ID NO: 2044711 - RNA, 19 nt, Artificial Sequence
  Description of Artificial Sequence: Synthetic oligonucleotide
  Antisense strand to SEQ ID NO: 2044710
uuucacagcuuuguccaau

SEQ ID NO: 2044712 - RNA, 19 nt, Artificial Sequence
  Description of Artificial Sequence: Synthetic oligonucleotide
  Sense strand starting at position 2731 of SEQ ID NO: 1881439
gaguuuaugguuuaacuga

SEQ ID NO: 2044713 - RNA, 19 nt, Artificial Sequence
  Description of Artificial Sequence: Synthetic oligonucleotide
  Antisense strand to SEQ ID NO: 2044712
ucaguuaaaccauaaacuc

SEQ ID NO: 2044714 - RNA, 19 nt, Artificial Sequence
  Description of Artificial Sequence: Synthetic oligonucleotide
  Sense strand starting at position 2877 of SEQ ID NO: 1881439
auagcauagcuaggaaauc

SEQ ID NO: 2044715 - RNA, 19 nt, Artificial Sequence
  Description of Artificial Sequence: Synthetic oligonucleotide
  Antisense strand to SEQ ID NO: 2044714
gauuuccuagcuaugcuau

SEQ ID NO: 2044716 - RNA, 19 nt, Artificial Sequence
  Description of Artificial Sequence: Synthetic oligonucleotide
  Sense strand starting at position 2888 of SEQ ID NO: 1881439
aggaaauccucccugagca

SEQ ID NO: 2044717 - RNA, 19 nt, Artificial Sequence
  Description of Artificial Sequence: Synthetic oligonucleotide
  Antisense strand to SEQ ID NO: 2044716
ugcucagggaggauuuccu

SEQ ID NO: 2044718 - RNA, 19 nt, Artificial Sequence
  Description of Artificial Sequence: Synthetic oligonucleotide
  Sense strand starting at position 2889 of SEQ ID NO: 1881439
ggaaauccucccugagcaa

SEQ ID NO: 2044719 - RNA, 19 nt, Artificial Sequence
  Description of Artificial Sequence: Synthetic oligonucleotide
  Antisense strand to SEQ ID NO: 2044718
uugcucagggaggauuucc

SEQ ID NO: 2044720 - RNA, 19 nt, Artificial Sequence
  Description of Artificial Sequence: Synthetic oligonucleotide
  Sense strand starting at position 3042 of SEQ ID NO: 1881439
gaguaaaucugguuaaccu

SEQ ID NO: 2044721 - RNA, 19 nt, Artificial Sequence
  Description of Artificial Sequence: Synthetic oligonucleotide
  Antisense strand to SEQ ID NO: 2044720
agguuaaccagauuuacuc

SEQ ID NO: 2044722 - RNA, 19 nt, Artificial Sequence
  Description of Artificial Sequence: Synthetic oligonucleotide
  Sense strand starting at position 3049 of SEQ ID NO: 1881439
ucugguuaaccugagguca

SEQ ID NO: 2044723 - RNA, 19 nt, Artificial Sequence
  Description of Artificial Sequence: Synthetic oligonucleotide
  Antisense strand to SEQ ID NO: 2044722
ugaccucagguuaaccaga

SEQ ID NO: 2044724 - RNA, 19 nt, Artificial Sequence
  Description of Artificial Sequence: Synthetic oligonucleotide
  Sense strand starting at position 3263 of SEQ ID NO: 1881439
gcaggauggugauucccaa

SEQ ID NO: 2044725 - RNA, 19 nt, Artificial Sequence
  Description of Artificial Sequence: Synthetic oligonucleotide
  Antisense strand to SEQ ID NO: 2044724
uugggaaucaccauccugc

SEQ ID NO: 2044726 - RNA, 19 nt, Artificial Sequence
  Description of Artificial Sequence: Synthetic oligonucleotide
  Sense strand starting at position 3359 of SEQ ID NO: 1881439
agagaaaggaagcguuuaa

SEQ ID NO: 2044727 - RNA, 19 nt, Artificial Sequence
  Description of Artificial Sequence: Synthetic oligonucleotide
  Antisense strand to SEQ ID NO: 2044726
uuaaacgcuuccuuucucu

SEQ ID NO: 2044728 - RNA, 19 nt, Artificial Sequence
  Description of Artificial Sequence: Synthetic oligonucleotide
  Sense strand starting at position 3369 of SEQ ID NO: 1881439
agcguuuaaauagaauaag

SEQ ID NO: 2044729 - RNA, 19 nt, Artificial Sequence
  Description of Artificial Sequence: Synthetic oligonucleotide
  Antisense strand to SEQ ID NO: 2044728
cuuauucuauuuaaacgcu

SEQ ID NO: 2044730 - RNA, 19 nt, Artificial Sequence
  Description of Artificial Sequence: Synthetic oligonucleotide
  Sense strand starting at position 3517 of SEQ ID NO: 1881439
uaaagaggguuaucuuuaa

SEQ ID NO: 2044731 - RNA, 19 nt, Artificial Sequence
  Description of Artificial Sequence: Synthetic oligonucleotide
  Antisense strand to SEQ ID NO: 2044730
uuaaagauaacccucuuua

SEQ ID NO: 2044732 - RNA, 19 nt, Artificial Sequence
  Description of Artificial Sequence: Synthetic oligonucleotide
  Sense strand starting at position 3619 of SEQ ID NO: 1881439
guauaaugccuggagcaca

SEQ ID NO: 2044733 - RNA, 19 nt, Artificial Sequence
  Description of Artificial Sequence: Synthetic oligonucleotide
  Antisense strand to SEQ ID NO: 2044732
ugugcuccaggcauuauac

SEQ ID NO: 2044734 - RNA, 19 nt, Artificial Sequence
  Description of Artificial Sequence: Synthetic oligonucleotide
  Sense strand starting at position 3693 of SEQ ID NO: 1881439
uauacauggcaugguuaga

SEQ ID NO: 2044735 - RNA, 19 nt, Artificial Sequence
  Description of Artificial Sequence: Synthetic oligonucleotide
  Antisense strand to SEQ ID NO: 2044734
ucuaaccaugccauguaua

SEQ ID NO: 2044736 - RNA, 19 nt, Artificial Sequence
  Description of Artificial Sequence: Synthetic oligonucleotide
  Sense strand starting at position 3721 of SEQ ID NO: 1881439
aagguauugcuugaguaau

SEQ ID NO: 2044737 - RNA, 19 nt, Artificial Sequence
  Description of Artificial Sequence: Synthetic oligonucleotide
  Antisense strand to SEQ ID NO: 2044736
auuacucaagcaauaccuu

SEQ ID NO: 2044738 - RNA, 19 nt, Artificial Sequence
  Description of Artificial Sequence: Synthetic oligonucleotide
  Sense strand starting at position 3786 of SEQ ID NO: 1881439
cuaguaaagcuuuaaagca

SEQ ID NO: 2044739 - RNA, 19 nt, Artificial Sequence
  Description of Artificial Sequence: Synthetic oligonucleotide
  Antisense strand to SEQ ID NO: 2044738
ugcuuuaaagcuuuacuag

SEQ ID NO: 2044740 - RNA, 19 nt, Artificial Sequence
  Description of Artificial Sequence: Synthetic oligonucleotide
  Sense strand starting at position 3914 of SEQ ID NO: 1881439
ucugucagccaauaaagaa

SEQ ID NO: 2044741 - RNA, 19 nt, Artificial Sequence
  Description of Artificial Sequence: Synthetic oligonucleotide
  Antisense strand to SEQ ID NO: 2044740
uucuuuauuggcugacaga

SEQ ID NO: 2044742 - RNA, 19 nt, Artificial Sequence
  Description of Artificial Sequence: Synthetic oligonucleotide
  Sense strand starting at position 3940 of SEQ ID NO: 1881439
gcguguaacaaagaaagaa

SEQ ID NO: 2044743 - RNA, 19 nt, Artificial Sequence
  Description of Artificial Sequence: Synthetic oligonucleotide
  Antisense strand to SEQ ID NO: 2044742
uucuuucuuuguuacacgc

SEQ ID NO: 2044744 - RNA, 19 nt, Artificial Sequence
  Description of Artificial Sequence: Synthetic oligonucleotide
  Sense strand starting at position 3961 of SEQ ID NO: 1881439
caugacuugcagugaagaa

SEQ ID NO: 2044745 - RNA, 19 nt, Artificial Sequence
  Description of Artificial Sequence: Synthetic oligonucleotide
  Antisense strand to SEQ ID NO: 2044744
uucuucacugcaagucaug

SEQ ID NO: 2044746 - RNA, 19 nt, Artificial Sequence
  Description of Artificial Sequence: Synthetic oligonucleotide
  Sense strand starting at position 480 of SEQ ID NO: 1881440
cugaucuccuggguuuaua

SEQ ID NO: 2044747 - RNA, 19 nt, Artificial Sequence
  Description of Artificial Sequence: Synthetic oligonucleotide
  Antisense strand to SEQ ID NO: 2044746
uauaaacccaggagaucag

SEQ ID NO: 2044748 - RNA, 19 nt, Artificial Sequence
  Description of Artificial Sequence: Synthetic oligonucleotide
  Sense strand starting at position 678 of SEQ ID NO: 1881440
uuuauaauugguggcaaau

SEQ ID NO: 2044749 - RNA, 19 nt, Artificial Sequence
  Description of Artificial Sequence: Synthetic oligonucleotide
  Antisense strand to SEQ ID NO: 2044748
auuugccaccaauuauaaa

SEQ ID NO: 2044750 - RNA, 19 nt, Artificial Sequence
  Description of Artificial Sequence: Synthetic oligonucleotide
  Sense strand starting at position 879 of SEQ ID NO: 1881440
auguguguuggaaguuagu

SEQ ID NO: 2044751 - RNA, 19 nt, Artificial Sequence
  Description of Artificial Sequence: Synthetic oligonucleotide
  Antisense strand to SEQ ID NO: 2044750
acuaacuuccaacacacau

SEQ ID NO: 2044752 - RNA, 19 nt, Artificial Sequence
  Description of Artificial Sequence: Synthetic oligonucleotide
  Sense strand starting at position 900 of SEQ ID NO: 1881440
ugucuuuggagucagaaau

SEQ ID NO: 2044753 - RNA, 19 nt, Artificial Sequence
  Description of Artificial Sequence: Synthetic oligonucleotide
  Antisense strand to SEQ ID NO: 2044752
auuucugacuccaaagaca

SEQ ID NO: 2044754 - RNA, 19 nt, Artificial Sequence
  Description of Artificial Sequence: Synthetic oligonucleotide
  Sense strand starting at position 953 of SEQ ID NO: 1881440
ccacgacccugauuaaauu

SEQ ID NO: 2044755 - RNA, 19 nt, Artificial Sequence
  Description of Artificial Sequence: Synthetic oligonucleotide
  Antisense strand to SEQ ID NO: 2044754
aauuuaaucagggucgugg

SEQ ID NO: 2044756 - RNA, 19 nt, Artificial Sequence
  Description of Artificial Sequence: Synthetic oligonucleotide
  Sense strand starting at position 979 of SEQ ID NO: 1881440
cuguuugagcauuacuuau

SEQ ID NO: 2044757 - RNA, 19 nt, Artificial Sequence
  Description of Artificial Sequence: Synthetic oligonucleotide
  Antisense strand to SEQ ID NO: 2044756
auaaguaaugcucaaacag

SEQ ID NO: 2044758 - RNA, 19 nt, Artificial Sequence
  Description of Artificial Sequence: Synthetic oligonucleotide
  Sense strand starting at position 992 of SEQ ID NO: 1881440
acuuaucaugugggauuau

SEQ ID NO: 2044759 - RNA, 19 nt, Artificial Sequence
  Description of Artificial Sequence: Synthetic oligonucleotide
  Antisense strand to SEQ ID NO: 2044758
auaaucccacaugauaagu

SEQ ID NO: 2044760 - RNA, 19 nt, Artificial Sequence
  Description of Artificial Sequence: Synthetic oligonucleotide
  Sense strand starting at position 1001 of SEQ ID NO: 1881440
gugggauuauaucuguuaa

SEQ ID NO: 2044761 - RNA, 19 nt, Artificial Sequence
  Description of Artificial Sequence: Synthetic oligonucleotide
  Antisense strand to SEQ ID NO: 2044760
uuaacagauauaaucccac

SEQ ID NO: 2044762 - RNA, 19 nt, Artificial Sequence
  Description of Artificial Sequence: Synthetic oligonucleotide
  Sense strand starting at position 1003 of SEQ ID NO: 1881440
gggauuauaucuguuaaac

SEQ ID NO: 2044763 - RNA, 19 nt, Artificial Sequence
  Description of Artificial Sequence: Synthetic oligonucleotide
  Antisense strand to SEQ ID NO: 2044762
guuuaacagauauaauccc

SEQ ID NO: 2044764 - RNA, 19 nt, Artificial Sequence
  Description of Artificial Sequence: Synthetic oligonucleotide
  Sense strand starting at position 1026 of SEQ ID NO: 1881440
aagagaaguuugccuagua

SEQ ID NO: 2044765 - RNA, 19 nt, Artificial Sequence
  Description of Artificial Sequence: Synthetic oligonucleotide
  Antisense strand to SEQ ID NO: 2044764
uacuaggcaaacuucucuu

SEQ ID NO: 2044766 - RNA, 19 nt, Artificial Sequence
  Description of Artificial Sequence: Synthetic oligonucleotide
  Sense strand starting at position 1027 of SEQ ID NO: 1881440
agagaaguuugccuaguaa

SEQ ID NO: 2044767 - RNA, 19 nt, Artificial Sequence
  Description of Artificial Sequence: Synthetic oligonucleotide
  Antisense strand to SEQ ID NO: 2044766
uuacuaggcaaacuucucu

SEQ ID NO: 2044768 - RNA, 19 nt, Artificial Sequence
  Description of Artificial Sequence: Synthetic oligonucleotide
  Sense strand starting at position 1194 of SEQ ID NO: 1881440
ggucuuuagaauuguugga

SEQ ID NO: 2044769 - RNA, 19 nt, Artificial Sequence
  Description of Artificial Sequence: Synthetic oligonucleotide
  Antisense strand to SEQ ID NO: 2044768
uccaacaauucuaaagacc

SEQ ID NO: 2044770 - RNA, 19 nt, Artificial Sequence
  Description of Artificial Sequence: Synthetic oligonucleotide
  Sense strand starting at position 1198 of SEQ ID NO: 1881440
uuuagaauuguuggaugaa

SEQ ID NO: 2044771 - RNA, 19 nt, Artificial Sequence
  Description of Artificial Sequence: Synthetic oligonucleotide
  Antisense strand to SEQ ID NO: 2044770
uucauccaacaauucuaaa

SEQ ID NO: 2044772 - RNA, 19 nt, Artificial Sequence
  Description of Artificial Sequence: Synthetic oligonucleotide
  Sense strand starting at position 1207 of SEQ ID NO: 1881440
guuggaugaauccaugguu

SEQ ID NO: 2044773 - RNA, 19 nt, Artificial Sequence
  Description of Artificial Sequence: Synthetic oligonucleotide
  Antisense strand to SEQ ID NO: 2044772
aaccauggauucauccaac

SEQ ID NO: 2044774 - RNA, 19 nt, Artificial Sequence
  Description of Artificial Sequence: Synthetic oligonucleotide
  Sense strand starting at position 1210 of SEQ ID NO: 1881440
ggaugaauccaugguuacg

SEQ ID NO: 2044775 - RNA, 19 nt, Artificial Sequence
  Description of Artificial Sequence: Synthetic oligonucleotide
  Antisense strand to SEQ ID NO: 2044774
cguaaccauggauucaucc

SEQ ID NO: 2044776 - RNA, 19 nt, Artificial Sequence
  Description of Artificial Sequence: Synthetic oligonucleotide
  Sense strand starting at position 1213 of SEQ ID NO: 1881440
ugaauccaugguuacguua

SEQ ID NO: 2044777 - RNA, 19 nt, Artificial Sequence
  Description of Artificial Sequence: Synthetic oligonucleotide
  Antisense strand to SEQ ID NO: 2044776
uaacguaaccauggauuca

SEQ ID NO: 2044778 - RNA, 19 nt, Artificial Sequence
  Description of Artificial Sequence: Synthetic oligonucleotide
  Sense strand starting at position 1245 of SEQ ID NO: 1881440
augagaauguugcuggaag

SEQ ID NO: 2044779 - RNA, 19 nt, Artificial Sequence
  Description of Artificial Sequence: Synthetic oligonucleotide
  Antisense strand to SEQ ID NO: 2044778
cuuccagcaacauucucau

SEQ ID NO: 2044780 - RNA, 19 nt, Artificial Sequence
  Description of Artificial Sequence: Synthetic oligonucleotide
  Sense strand starting at position 1507 of SEQ ID NO: 1881440
acaaucuugcaggguuaau

SEQ ID NO: 2044781 - RNA, 19 nt, Artificial Sequence
  Description of Artificial Sequence: Synthetic oligonucleotide
  Antisense strand to SEQ ID NO: 2044780
auuaacccugcaagauugu

SEQ ID NO: 2044782 - RNA, 19 nt, Artificial Sequence
  Description of Artificial Sequence: Synthetic oligonucleotide
  Sense strand starting at position 1563 of SEQ ID NO: 1881440
uggagagguuaaguaguaa

SEQ ID NO: 2044783 - RNA, 19 nt, Artificial Sequence
  Description of Artificial Sequence: Synthetic oligonucleotide
  Antisense strand to SEQ ID NO: 2044782
uuacuacuuaaccucucca

SEQ ID NO: 2044784 - RNA, 19 nt, Artificial Sequence
  Description of Artificial Sequence: Synthetic oligonucleotide
  Sense strand starting at position 1600 of SEQ ID NO: 1881440
gaauacaaguugccugaca

SEQ ID NO: 2044785 - RNA, 19 nt, Artificial Sequence
  Description of Artificial Sequence: Synthetic oligonucleotide
  Antisense strand to SEQ ID NO: 2044784
ugucaggcaacuuguauuc

SEQ ID NO: 2044786 - RNA, 19 nt, Artificial Sequence
  Description of Artificial Sequence: Synthetic oligonucleotide
  Sense strand starting at position 1863 of SEQ ID NO: 1881440
auucgcucuccugagaauc

SEQ ID NO: 2044787 - RNA, 19 nt, Artificial Sequence
  Description of Artificial Sequence: Synthetic oligonucleotide
  Antisense strand to SEQ ID NO: 2044786
gauucucaggagagcgaau

SEQ ID NO: 2044788 - RNA, 19 nt, Artificial Sequence
  Description of Artificial Sequence: Synthetic oligonucleotide
  Sense strand starting at position 2631 of SEQ ID NO: 1881440
cgauaaauuucuuaauggg

SEQ ID NO: 2044789 - RNA, 19 nt, Artificial Sequence
  Description of Artificial Sequence: Synthetic oligonucleotide
  Antisense strand to SEQ ID NO: 2044788
cccauuaagaaauuuaucg

SEQ ID NO: 2044790 - RNA, 19 nt, Artificial Sequence
  Description of Artificial Sequence: Synthetic oligonucleotide
  Sense strand starting at position 2662 of SEQ ID NO: 1881440
gugugaauauuugagagaa

SEQ ID NO: 2044791 - RNA, 19 nt, Artificial Sequence
  Description of Artificial Sequence: Synthetic oligonucleotide
  Antisense strand to SEQ ID NO: 2044790
uucucucaaauauucacac

SEQ ID NO: 2044792 - RNA, 19 nt, Artificial Sequence
  Description of Artificial Sequence: Synthetic oligonucleotide
  Sense strand starting at position 2664 of SEQ ID NO: 1881440
gugaauauuugagagaaga

SEQ ID NO: 2044793 - RNA, 19 nt, Artificial Sequence
  Description of Artificial Sequence: Synthetic oligonucleotide
  Antisense strand to SEQ ID NO: 2044792
ucuucucucaaauauucac

SEQ ID NO: 2044794 - RNA, 19 nt, Artificial Sequence
  Description of Artificial Sequence: Synthetic oligonucleotide
  Sense strand starting at position 2869 of SEQ ID NO: 1881440
auuaccucuguggaaacuu

SEQ ID NO: 2044795 - RNA, 19 nt, Artificial Sequence
  Description of Artificial Sequence: Synthetic oligonucleotide
  Antisense strand to SEQ ID NO: 2044794
aaguuuccacagagguaau

SEQ ID NO: 2044796 - RNA, 19 nt, Artificial Sequence
  Description of Artificial Sequence: Synthetic oligonucleotide
  Sense strand starting at position 2879 of SEQ ID NO: 1881440
uggaaacuucugcagauuc

SEQ ID NO: 2044797 - RNA, 19 nt, Artificial Sequence
  Description of Artificial Sequence: Synthetic oligonucleotide
  Antisense strand to SEQ ID NO: 2044796
gaaucugcagaaguuucca

SEQ ID NO: 2044798 - RNA, 19 nt, Artificial Sequence
  Description of Artificial Sequence: Synthetic oligonucleotide
  Sense strand starting at position 2948 of SEQ ID NO: 1881440
ggagucaugcuagaauauu

SEQ ID NO: 2044799 - RNA, 19 nt, Artificial Sequence
  Description of Artificial Sequence: Synthetic oligonucleotide
  Antisense strand to SEQ ID NO: 2044798
aauauucuagcaugacucc

SEQ ID NO: 2044800 - RNA, 19 nt, Artificial Sequence
  Description of Artificial Sequence: Synthetic oligonucleotide
  Sense strand starting at position 3255 of SEQ ID NO: 1881440
aaauguuaucuuuaagcga

SEQ ID NO: 2044801 - RNA, 19 nt, Artificial Sequence
  Description of Artificial Sequence: Synthetic oligonucleotide
  Antisense strand to SEQ ID NO: 2044800
ucgcuuaaagauaacauuu

SEQ ID NO: 2044802 - RNA, 19 nt, Artificial Sequence
  Description of Artificial Sequence: Synthetic oligonucleotide
  Sense strand starting at position 3470 of SEQ ID NO: 1881440
gugucagugauauacacaa

SEQ ID NO: 2044803 - RNA, 19 nt, Artificial Sequence
  Description of Artificial Sequence: Synthetic oligonucleotide
  Antisense strand to SEQ ID NO: 2044802
uuguguauaucacugacac

SEQ ID NO: 2044804 - RNA, 19 nt, Artificial Sequence
  Description of Artificial Sequence: Synthetic oligonucleotide
  Sense strand starting at position 3546 of SEQ ID NO: 1881440
uuuaaagugcaccagaaua

SEQ ID NO: 2044805 - RNA, 19 nt, Artificial Sequence
  Description of Artificial Sequence: Synthetic oligonucleotide
  Antisense strand to SEQ ID NO: 2044804
uauucuggugcacuuuaaa

SEQ ID NO: 2044806 - RNA, 19 nt, Artificial Sequence
  Description of Artificial Sequence: Synthetic oligonucleotide
  Sense strand starting at position 3602 of SEQ ID NO: 1881440
gaaccaccgcucuaagaga

SEQ ID NO: 2044807 - RNA, 19 nt, Artificial Sequence
  Description of Artificial Sequence: Synthetic oligonucleotide
  Antisense strand to SEQ ID NO: 2044806
ucucuuagagcggugguuc

SEQ ID NO: 2044808 - RNA, 19 nt, Artificial Sequence
  Description of Artificial Sequence: Synthetic oligonucleotide
  Sense strand starting at position 3609 of SEQ ID NO: 1881440
cgcucuaagagauauugag

SEQ ID NO: 2044809 - RNA, 19 nt, Artificial Sequence
  Description of Artificial Sequence: Synthetic oligonucleotide
  Antisense strand to SEQ ID NO: 2044808
cucaauaucucuuagagcg

SEQ ID NO: 2044810 - RNA, 19 nt, Artificial Sequence
  Description of Artificial Sequence: Synthetic oligonucleotide
  Sense strand starting at position 3712 of SEQ ID NO: 1881440
gaaaucagauguuugauac

SEQ ID NO: 2044811 - RNA, 19 nt, Artificial Sequence
  Description of Artificial Sequence: Synthetic oligonucleotide
  Antisense strand to SEQ ID NO: 2044810
guaucaaacaucugauuuc

SEQ ID NO: 2044812 - RNA, 19 nt, Artificial Sequence
  Description of Artificial Sequence: Synthetic oligonucleotide
  Sense strand starting at position 3754 of SEQ ID NO: 1881440
ggaaaccaauguucggaua

SEQ ID NO: 2044813 - RNA, 19 nt, Artificial Sequence
  Description of Artificial Sequence: Synthetic oligonucleotide
  Antisense strand to SEQ ID NO: 2044812
uauccgaacauugguuucc

SEQ ID NO: 2044814 - RNA, 19 nt, Artificial Sequence
  Description of Artificial Sequence: Synthetic oligonucleotide
  Sense strand starting at position 3798 of SEQ ID NO: 1881440
cauugaguuuggguuacaa

SEQ ID NO: 2044815 - RNA, 19 nt, Artificial Sequence
  Description of Artificial Sequence: Synthetic oligonucleotide
  Antisense strand to SEQ ID NO: 2044814
uuguaacccaaacucaaug

SEQ ID NO: 2044816 - RNA, 19 nt, Artificial Sequence
  Description of Artificial Sequence: Synthetic oligonucleotide
  Sense strand starting at position 3800 of SEQ ID NO: 1881440
uugaguuuggguuacaauu

SEQ ID NO: 2044817 - RNA, 19 nt, Artificial Sequence
  Description of Artificial Sequence: Synthetic oligonucleotide
  Antisense strand to SEQ ID NO: 2044816
aauuguaacccaaacucaa

SEQ ID NO: 2044818 - RNA, 19 nt, Artificial Sequence
  Description of Artificial Sequence: Synthetic oligonucleotide
  Sense strand starting at position 3808 of SEQ ID NO: 1881440
ggguuacaauuugaugaac

SEQ ID NO: 2044819 - RNA, 19 nt, Artificial Sequence
  Description of Artificial Sequence: Synthetic oligonucleotide
  Antisense strand to SEQ ID NO: 2044818
guucaucaaauuguaaccc

SEQ ID NO: 2044820 - RNA, 19 nt, Artificial Sequence
  Description of Artificial Sequence: Synthetic oligonucleotide
  Sense strand starting at position 3890 of SEQ ID NO: 1881440
gcucuuaccucacuagaag

SEQ ID NO: 2044821 - RNA, 19 nt, Artificial Sequence
  Description of Artificial Sequence: Synthetic oligonucleotide
  Antisense strand to SEQ ID NO: 2044820
cuucuagugagguaagagc

SEQ ID NO: 2044822 - RNA, 19 nt, Artificial Sequence
  Description of Artificial Sequence: Synthetic oligonucleotide
  Sense strand starting at position 3913 of SEQ ID NO: 1881440
gcuagaagauugcuugaga

SEQ ID NO: 2044823 - RNA, 19 nt, Artificial Sequence
  Description of Artificial Sequence: Synthetic oligonucleotide
  Antisense strand to SEQ ID NO: 2044822
ucucaagcaaucuucuagc

SEQ ID NO: 2044824 - RNA, 19 nt, Artificial Sequence
  Description of Artificial Sequence: Synthetic oligonucleotide
  Sense strand starting at position 3914 of SEQ ID NO: 1881440
cuagaagauugcuugagaa

SEQ ID NO: 2044825 - RNA, 19 nt, Artificial Sequence
  Description of Artificial Sequence: Synthetic oligonucleotide
  Antisense strand to SEQ ID NO: 2044824
uucucaagcaaucuucuag

SEQ ID NO: 2044826 - RNA, 19 nt, Artificial Sequence
  Description of Artificial Sequence: Synthetic oligonucleotide
  Sense strand starting at position 105 of SEQ ID NO: 1881441
gucaguaguuauucuccca

SEQ ID NO: 2044827 - RNA, 19 nt, Artificial Sequence
  Description of Artificial Sequence: Synthetic oligonucleotide
  Antisense strand to SEQ ID NO: 2044826
ugggagaauaacuacugac

SEQ ID NO: 2044828 - RNA, 19 nt, Artificial Sequence
  Description of Artificial Sequence: Synthetic oligonucleotide
  Sense strand starting at position 108 of SEQ ID NO: 1881441
aguaguuauucucccauga

SEQ ID NO: 2044829 - RNA, 19 nt, Artificial Sequence
  Description of Artificial Sequence: Synthetic oligonucleotide
  Antisense strand to SEQ ID NO: 2044828
ucaugggagaauaacuacu

SEQ ID NO: 2044830 - RNA, 19 nt, Artificial Sequence
  Description of Artificial Sequence: Synthetic oligonucleotide
  Sense strand starting at position 112 of SEQ ID NO: 1881441
guuauucucccaugaacgu

SEQ ID NO: 2044831 - RNA, 19 nt, Artificial Sequence
  Description of Artificial Sequence: Synthetic oligonucleotide
  Antisense strand to SEQ ID NO: 2044830
acguucaugggagaauaac

SEQ ID NO: 2044832 - RNA, 19 nt, Artificial Sequence
  Description of Artificial Sequence: Synthetic oligonucleotide
  Sense strand starting at position 113 of SEQ ID NO: 1881441
uuauucucccaugaacguu

SEQ ID NO: 2044833 - RNA, 19 nt, Artificial Sequence
  Description of Artificial Sequence: Synthetic oligonucleotide
  Antisense strand to SEQ ID NO: 2044832
aacguucaugggagaauaa

SEQ ID NO: 2044834 - RNA, 19 nt, Artificial Sequence
  Description of Artificial Sequence: Synthetic oligonucleotide
  Sense strand starting at position 162 of SEQ ID NO: 1881441
aaaggaucuguuugcuuag

SEQ ID NO: 2044835 - RNA, 19 nt, Artificial Sequence
  Description of Artificial Sequence: Synthetic oligonucleotide
  Antisense strand to SEQ ID NO: 2044834
cuaagcaaacagauccuuu

SEQ ID NO: 2044836 - RNA, 19 nt, Artificial Sequence
  Description of Artificial Sequence: Synthetic oligonucleotide
  Sense strand starting at position 276 of SEQ ID NO: 1881441
gaaugaggcaguuggcaaa

SEQ ID NO: 2044837 - RNA, 19 nt, Artificial Sequence
  Description of Artificial Sequence: Synthetic oligonucleotide
  Antisense strand to SEQ ID NO: 2044836
uuugccaacugccucauuc

SEQ ID NO: 2044838 - RNA, 19 nt, Artificial Sequence
  Description of Artificial Sequence: Synthetic oligonucleotide
  Sense strand starting at position 353 of SEQ ID NO: 1881441
uuucuaccugcuugucuua

SEQ ID NO: 2044839 - RNA, 19 nt, Artificial Sequence
  Description of Artificial Sequence: Synthetic oligonucleotide
  Antisense strand to SEQ ID NO: 2044838
uaagacaagcagguagaaa

SEQ ID NO: 2044840 - RNA, 19 nt, Artificial Sequence
  Description of Artificial Sequence: Synthetic oligonucleotide
  Sense strand starting at position 355 of SEQ ID NO: 1881441
ucuaccugcuugucuuauu

SEQ ID NO: 2044841 - RNA, 19 nt, Artificial Sequence
  Description of Artificial Sequence: Synthetic oligonucleotide
  Antisense strand to SEQ ID NO: 2044840
aauaagacaagcagguaga

SEQ ID NO: 2044842 - RNA, 19 nt, Artificial Sequence
  Description of Artificial Sequence: Synthetic oligonucleotide
  Sense strand starting at position 611 of SEQ ID NO: 1881441
ucauguuugugacuguaac

SEQ ID NO: 2044843 - RNA, 19 nt, Artificial Sequence
  Description of Artificial Sequence: Synthetic oligonucleotide
  Antisense strand to SEQ ID NO: 2044842
guuacagucacaaacauga

SEQ ID NO: 2044844 - RNA, 19 nt, Artificial Sequence
  Description of Artificial Sequence: Synthetic oligonucleotide
  Sense strand starting at position 624 of SEQ ID NO: 1881441
uguaaccauuuguaugaau

SEQ ID NO: 2044845 - RNA, 19 nt, Artificial Sequence
  Description of Artificial Sequence: Synthetic oligonucleotide
  Antisense strand to SEQ ID NO: 2044844
auucauacaaaugguuaca

SEQ ID NO: 2044846 - RNA, 19 nt, Artificial Sequence
  Description of Artificial Sequence: Synthetic oligonucleotide
  Sense strand starting at position 696 of SEQ ID NO: 1881441
uggugacuuucucucauga

SEQ ID NO: 2044847 - RNA, 19 nt, Artificial Sequence
  Description of Artificial Sequence: Synthetic oligonucleotide
  Antisense strand to SEQ ID NO: 2044846
ucaugagagaaagucacca

SEQ ID NO: 2044848 - RNA, 19 nt, Artificial Sequence
  Description of Artificial Sequence: Synthetic oligonucleotide
  Sense strand starting at position 1078 of SEQ ID NO: 1881441
agaugucagggcugaggaa

SEQ ID NO: 2044849 - RNA, 19 nt, Artificial Sequence
  Description of Artificial Sequence: Synthetic oligonucleotide
  Antisense strand to SEQ ID NO: 2044848
uuccucagcccugacaucu

SEQ ID NO: 2044850 - RNA, 19 nt, Artificial Sequence
  Description of Artificial Sequence: Synthetic oligonucleotide
  Sense strand starting at position 1242 of SEQ ID NO: 1881441
aagcgugguccaugcaaau

SEQ ID NO: 2044851 - RNA, 19 nt, Artificial Sequence
  Description of Artificial Sequence: Synthetic oligonucleotide
  Antisense strand to SEQ ID NO: 2044850
auuugcauggaccacgcuu

SEQ ID NO: 2044852 - RNA, 19 nt, Artificial Sequence
  Description of Artificial Sequence: Synthetic oligonucleotide
  Sense strand starting at position 1271 of SEQ ID NO: 1881441
ccaacucauuuaugagaag

SEQ ID NO: 2044853 - RNA, 19 nt, Artificial Sequence
  Description of Artificial Sequence: Synthetic oligonucleotide
  Antisense strand to SEQ ID NO: 2044852
cuucucauaaaugaguugg

SEQ ID NO: 2044854 - RNA, 19 nt, Artificial Sequence
  Description of Artificial Sequence: Synthetic oligonucleotide
  Sense strand starting at position 2180 of SEQ ID NO: 1881441
guuuccauguuuccaaguu

SEQ ID NO: 2044855 - RNA, 19 nt, Artificial Sequence
  Description of Artificial Sequence: Synthetic oligonucleotide
  Antisense strand to SEQ ID NO: 2044854
aacuuggaaacauggaaac

SEQ ID NO: 2044856 - RNA, 19 nt, Artificial Sequence
  Description of Artificial Sequence: Synthetic oligonucleotide
  Sense strand starting at position 2302 of SEQ ID NO: 1881441
gggacagaaagcugucaga

SEQ ID NO: 2044857 - RNA, 19 nt, Artificial Sequence
  Description of Artificial Sequence: Synthetic oligonucleotide
  Antisense strand to SEQ ID NO: 2044856
ucugacagcuuucuguccc

SEQ ID NO: 2044858 - RNA, 19 nt, Artificial Sequence
  Description of Artificial Sequence: Synthetic oligonucleotide
  Sense strand starting at position 2442 of SEQ ID NO: 1881441
gguuuccuggccugugaaa

SEQ ID NO: 2044859 - RNA, 19 nt, Artificial Sequence
  Description of Artificial Sequence: Synthetic oligonucleotide
  Antisense strand to SEQ ID NO: 2044858
uuucacaggccaggaaacc

SEQ ID NO: 2044860 - RNA, 19 nt, Artificial Sequence
  Description of Artificial Sequence: Synthetic oligonucleotide
  Sense strand starting at position 2444 of SEQ ID NO: 1881441
uuuccuggccugugaaauc

SEQ ID NO: 2044861 - RNA, 19 nt, Artificial Sequence
  Description of Artificial Sequence: Synthetic oligonucleotide
  Antisense strand to SEQ ID NO: 2044860
gauuucacaggccaggaaa

SEQ ID NO: 2044862 - RNA, 19 nt, Artificial Sequence
  Description of Artificial Sequence: Synthetic oligonucleotide
  Sense strand starting at position 2453 of SEQ ID NO: 1881441
cugugaaaucggcagcacu

SEQ ID NO: 2044863 - RNA, 19 nt, Artificial Sequence
  Description of Artificial Sequence: Synthetic oligonucleotide
  Antisense strand to SEQ ID NO: 2044862
agugcugccgauuucacag

SEQ ID NO: 2044864 - RNA, 19 nt, Artificial Sequence
  Description of Artificial Sequence: Synthetic oligonucleotide
  Sense strand starting at position 2479 of SEQ ID NO: 1881441
ucccuagaggcugguauua

SEQ ID NO: 2044865 - RNA, 19 nt, Artificial Sequence
  Description of Artificial Sequence: Synthetic oligonucleotide
  Antisense strand to SEQ ID NO: 2044864
uaauaccagccucuaggga

SEQ ID NO: 2044866 - RNA, 19 nt, Artificial Sequence
  Description of Artificial Sequence: Synthetic oligonucleotide
  Sense strand starting at position 2490 of SEQ ID NO: 1881441
ugguauuaggcuggagguu

SEQ ID NO: 2044867 - RNA, 19 nt, Artificial Sequence
  Description of Artificial Sequence: Synthetic oligonucleotide
  Antisense strand to SEQ ID NO: 2044866
aaccuccagccuaauacca

SEQ ID NO: 2044868 - RNA, 19 nt, Artificial Sequence
  Description of Artificial Sequence: Synthetic oligonucleotide
  Sense strand starting at position 2563 of SEQ ID NO: 1881441
agagauaagucucugguau

SEQ ID NO: 2044869 - RNA, 19 nt, Artificial Sequence
  Description of Artificial Sequence: Synthetic oligonucleotide
  Antisense strand to SEQ ID NO: 2044868
auaccagagacuuaucucu

SEQ ID NO: 2044870 - RNA, 19 nt, Artificial Sequence
  Description of Artificial Sequence: Synthetic oligonucleotide
  Sense strand starting at position 2564 of SEQ ID NO: 1881441
gagauaagucucugguauu

SEQ ID NO: 2044871 - RNA, 19 nt, Artificial Sequence
  Description of Artificial Sequence: Synthetic oligonucleotide
  Antisense strand to SEQ ID NO: 2044870
aauaccagagacuuaucuc

SEQ ID NO: 2044872 - RNA, 19 nt, Artificial Sequence
  Description of Artificial Sequence: Synthetic oligonucleotide
  Sense strand starting at position 2565 of SEQ ID NO: 1881441
agauaagucucugguauuu

SEQ ID NO: 2044873 - RNA, 19 nt, Artificial Sequence
  Description of Artificial Sequence: Synthetic oligonucleotide
  Antisense strand to SEQ ID NO: 2044872
aaauaccagagacuuaucu

SEQ ID NO: 2044874 - RNA, 19 nt, Artificial Sequence
  Description of Artificial Sequence: Synthetic oligonucleotide
  Sense strand starting at position 2574 of SEQ ID NO: 1881441
ucugguauuugcugacaag

SEQ ID NO: 2044875 - RNA, 19 nt, Artificial Sequence
  Description of Artificial Sequence: Synthetic oligonucleotide
  Antisense strand to SEQ ID NO: 2044874
cuugucagcaaauaccaga

SEQ ID NO: 2044876 - RNA, 19 nt, Artificial Sequence
  Description of Artificial Sequence: Synthetic oligonucleotide
  Sense strand starting at position 2577 of SEQ ID NO: 1881441
gguauuugcugacaagcau

SEQ ID NO: 2044877 - RNA, 19 nt, Artificial Sequence
  Description of Artificial Sequence: Synthetic oligonucleotide
  Antisense strand to SEQ ID NO: 2044876
augcuugucagcaaauacc

SEQ ID NO: 2044878 - RNA, 19 nt, Artificial Sequence
  Description of Artificial Sequence: Synthetic oligonucleotide
  Sense strand starting at position 2586 of SEQ ID NO: 1881441
ugacaagcaucuguguaca

SEQ ID NO: 2044879 - RNA, 19 nt, Artificial Sequence
  Description of Artificial Sequence: Synthetic oligonucleotide
  Antisense strand to SEQ ID NO: 2044878
uguacacagaugcuuguca

SEQ ID NO: 2044880 - RNA, 19 nt, Artificial Sequence
  Description of Artificial Sequence: Synthetic oligonucleotide
  Sense strand starting at position 2589 of SEQ ID NO: 1881441
caagcaucuguguacaaga

SEQ ID NO: 2044881 - RNA, 19 nt, Artificial Sequence
  Description of Artificial Sequence: Synthetic oligonucleotide
  Antisense strand to SEQ ID NO: 2044880
ucuuguacacagaugcuug

SEQ ID NO: 2044882 - RNA, 19 nt, Artificial Sequence
  Description of Artificial Sequence: Synthetic oligonucleotide
  Sense strand starting at position 2951 of SEQ ID NO: 1881441
cgggcuguuaguguuguaa

SEQ ID NO: 2044883 - RNA, 19 nt, Artificial Sequence
  Description of Artificial Sequence: Synthetic oligonucleotide
  Antisense strand to SEQ ID NO: 2044882
uuacaacacuaacagcccg

SEQ ID NO: 2044884 - RNA, 19 nt, Artificial Sequence
  Description of Artificial Sequence: Synthetic oligonucleotide
  Sense strand starting at position 3000 of SEQ ID NO: 1881441
gugcuagagccguucauca

SEQ ID NO: 2044885 - RNA, 19 nt, Artificial Sequence
  Description of Artificial Sequence: Synthetic oligonucleotide
  Antisense strand to SEQ ID NO: 2044884
ugaugaacggcucuagcac

SEQ ID NO: 2044886 - RNA, 19 nt, Artificial Sequence
  Description of Artificial Sequence: Synthetic oligonucleotide
  Sense strand starting at position 3038 of SEQ ID NO: 1881441
agcugcuuacguugaacaa

SEQ ID NO: 2044887 - RNA, 19 nt, Artificial Sequence
  Description of Artificial Sequence: Synthetic oligonucleotide
  Antisense strand to SEQ ID NO: 2044886
uuguucaacguaagcagcu

SEQ ID NO: 2044888 - RNA, 19 nt, Artificial Sequence
  Description of Artificial Sequence: Synthetic oligonucleotide
  Sense strand starting at position 3039 of SEQ ID NO: 1881441
gcugcuuacguugaacaaa

SEQ ID NO: 2044889 - RNA, 19 nt, Artificial Sequence
  Description of Artificial Sequence: Synthetic oligonucleotide
  Antisense strand to SEQ ID NO: 2044888
uuuguucaacguaagcagc

SEQ ID NO: 2044890 - RNA, 19 nt, Artificial Sequence
  Description of Artificial Sequence: Synthetic oligonucleotide
  Sense strand starting at position 3062 of SEQ ID NO: 1881441
acaaguuuauccucaaguu

SEQ ID NO: 2044891 - RNA, 19 nt, Artificial Sequence
  Description of Artificial Sequence: Synthetic oligonucleotide
  Antisense strand to SEQ ID NO: 2044890
aacuugaggauaaacuugu

SEQ ID NO: 2044892 - RNA, 19 nt, Artificial Sequence
  Description of Artificial Sequence: Synthetic oligonucleotide
  Sense strand starting at position 3074 of SEQ ID NO: 1881441
ucaaguuuauaugcagcaa

SEQ ID NO: 2044893 - RNA, 19 nt, Artificial Sequence
  Description of Artificial Sequence: Synthetic oligonucleotide
  Antisense strand to SEQ ID NO: 2044892
uugcugcauauaaacuuga

SEQ ID NO: 2044894 - RNA, 19 nt, Artificial Sequence
  Description of Artificial Sequence: Synthetic oligonucleotide
  Sense strand starting at position 3078 of SEQ ID NO: 1881441
guuuauaugcagcaacaaa

SEQ ID NO: 2044895 - RNA, 19 nt, Artificial Sequence
  Description of Artificial Sequence: Synthetic oligonucleotide
  Antisense strand to SEQ ID NO: 2044894
uuuguugcugcauauaaac

SEQ ID NO: 2044896 - RNA, 19 nt, Artificial Sequence
  Description of Artificial Sequence: Synthetic oligonucleotide
  Sense strand starting at position 3268 of SEQ ID NO: 1881441
ugcgcauguguguuuguga

SEQ ID NO: 2044897 - RNA, 19 nt, Artificial Sequence
  Description of Artificial Sequence: Synthetic oligonucleotide
  Antisense strand to SEQ ID NO: 2044896
ucacaaacacacaugcgca

SEQ ID NO: 2044898 - RNA, 19 nt, Artificial Sequence
  Description of Artificial Sequence: Synthetic oligonucleotide
  Sense strand starting at position 3281 of SEQ ID NO: 1881441
uugugaacuggcgauguga

SEQ ID NO: 2044899 - RNA, 19 nt, Artificial Sequence
  Description of Artificial Sequence: Synthetic oligonucleotide
  Antisense strand to SEQ ID NO: 2044898
ucacaucgccaguucacaa

SEQ ID NO: 2044900 - RNA, 19 nt, Artificial Sequence
  Description of Artificial Sequence: Synthetic oligonucleotide
  Sense strand starting at position 3433 of SEQ ID NO: 1881441
gaguccguucaagaaaggu

SEQ ID NO: 2044901 - RNA, 19 nt, Artificial Sequence
  Description of Artificial Sequence: Synthetic oligonucleotide
  Antisense strand to SEQ ID NO: 2044900
accuuucuugaacggacuc

SEQ ID NO: 2044902 - RNA, 19 nt, Artificial Sequence
  Description of Artificial Sequence: Synthetic oligonucleotide
  Sense strand starting at position 3442 of SEQ ID NO: 1881441
caagaaaggucggcagaga

SEQ ID NO: 2044903 - RNA, 19 nt, Artificial Sequence
  Description of Artificial Sequence: Synthetic oligonucleotide
  Antisense strand to SEQ ID NO: 2044902
ucucugccgaccuuucuug

SEQ ID NO: 2044904 - RNA, 19 nt, Artificial Sequence
  Description of Artificial Sequence: Synthetic oligonucleotide
  Sense strand starting at position 3936 of SEQ ID NO: 1881441
cuggacuugcaggauugau

SEQ ID NO: 2044905 - RNA, 19 nt, Artificial Sequence
  Description of Artificial Sequence: Synthetic oligonucleotide
  Antisense strand to SEQ ID NO: 2044904
aucaauccugcaaguccag

SEQ ID NO: 2044906 - RNA, 19 nt, Artificial Sequence
  Description of Artificial Sequence: Synthetic oligonucleotide
  Sense strand starting at position 1320 of SEQ ID NO: 1881442
ugccgugguuucugaaauu

SEQ ID NO: 2044907 - RNA, 19 nt, Artificial Sequence
  Description of Artificial Sequence: Synthetic oligonucleotide
  Antisense strand to SEQ ID NO: 2044906
aauuucagaaaccacggca

SEQ ID NO: 2044908 - RNA, 19 nt, Artificial Sequence
  Description of Artificial Sequence: Synthetic oligonucleotide
  Sense strand starting at position 1339 of SEQ ID NO: 1881442
augcaacuaucucggcauu

SEQ ID NO: 2044909 - RNA, 19 nt, Artificial Sequence
  Description of Artificial Sequence: Synthetic oligonucleotide
  Antisense strand to SEQ ID NO: 2044908
aaugccgagauaguugcau

SEQ ID NO: 2044910 - RNA, 19 nt, Artificial Sequence
  Description of Artificial Sequence: Synthetic oligonucleotide
  Sense strand starting at position 1555 of SEQ ID NO: 1881442
gggcuuugauauuaaugcu

SEQ ID NO: 2044911 - RNA, 19 nt, Artificial Sequence
  Description of Artificial Sequence: Synthetic oligonucleotide
  Antisense strand to SEQ ID NO: 2044910
agcauuaauaucaaagccc

SEQ ID NO: 2044912 - RNA, 19 nt, Artificial Sequence
  Description of Artificial Sequence: Synthetic oligonucleotide
  Sense strand starting at position 1561 of SEQ ID NO: 1881442
ugauauuaaugcuuaaagg

SEQ ID NO: 2044913 - RNA, 19 nt, Artificial Sequence
  Description of Artificial Sequence: Synthetic oligonucleotide
  Antisense strand to SEQ ID NO: 2044912
ccuuuaagcauuaauauca

SEQ ID NO: 2044914 - RNA, 19 nt, Artificial Sequence
  Description of Artificial Sequence: Synthetic oligonucleotide
  Sense strand starting at position 1601 of SEQ ID NO: 1881442
ggacguugguuagcuacaa

SEQ ID NO: 2044915 - RNA, 19 nt, Artificial Sequence
  Description of Artificial Sequence: Synthetic oligonucleotide
  Antisense strand to SEQ ID NO: 2044914
uuguagcuaaccaacgucc

SEQ ID NO: 2044916 - RNA, 19 nt, Artificial Sequence
  Description of Artificial Sequence: Synthetic oligonucleotide
  Sense strand starting at position 1602 of SEQ ID NO: 1881442
gacguugguuagcuacaaa

SEQ ID NO: 2044917 - RNA, 19 nt, Artificial Sequence
  Description of Artificial Sequence: Synthetic oligonucleotide
  Antisense strand to SEQ ID NO: 2044916
uuuguagcuaaccaacguc

SEQ ID NO: 2044918 - RNA, 19 nt, Artificial Sequence
  Description of Artificial Sequence: Synthetic oligonucleotide
  Sense strand starting at position 1780 of SEQ ID NO: 1881442
cggcucucggacgguaaau

SEQ ID NO: 2044919 - RNA, 19 nt, Artificial Sequence
  Description of Artificial Sequence: Synthetic oligonucleotide
  Antisense strand to SEQ ID NO: 2044918
auuuaccguccgagagccg

SEQ ID NO: 2044920 - RNA, 19 nt, Artificial Sequence
  Description of Artificial Sequence: Synthetic oligonucleotide
  Sense strand starting at position 2104 of SEQ ID NO: 1881442
cgguuuagaacgugcggaa

SEQ ID NO: 2044921 - RNA, 19 nt, Artificial Sequence
  Description of Artificial Sequence: Synthetic oligonucleotide
  Antisense strand to SEQ ID NO: 2044920
uuccgcacguucuaaaccg

SEQ ID NO: 2044922 - RNA, 19 nt, Artificial Sequence
  Description of Artificial Sequence: Synthetic oligonucleotide
  Sense strand starting at position 2700 of SEQ ID NO: 1881442
cgggaagggucuugcgcau

SEQ ID NO: 2044923 - RNA, 19 nt, Artificial Sequence
  Description of Artificial Sequence: Synthetic oligonucleotide
  Antisense strand to SEQ ID NO: 2044922
augcgcaagacccuucccg

SEQ ID NO: 2044924 - RNA, 19 nt, Artificial Sequence
  Description of Artificial Sequence: Synthetic oligonucleotide
  Sense strand starting at position 3489 of SEQ ID NO: 1881442
ugcugucgucuccgugauu

SEQ ID NO: 2044925 - RNA, 19 nt, Artificial Sequence
  Description of Artificial Sequence: Synthetic oligonucleotide
  Antisense strand to SEQ ID NO: 2044924
aaucacggagacgacagca

SEQ ID NO: 2044926 - RNA, 19 nt, Artificial Sequence
  Description of Artificial Sequence: Synthetic oligonucleotide
  Sense strand starting at position 3500 of SEQ ID NO: 1881442
ccgugauugccgggacaga

SEQ ID NO: 2044927 - RNA, 19 nt, Artificial Sequence
  Description of Artificial Sequence: Synthetic oligonucleotide
  Antisense strand to SEQ ID NO: 2044926
ucugucccggcaaucacgg

SEQ ID NO: 2044928 - RNA, 19 nt, Artificial Sequence
  Description of Artificial Sequence: Synthetic oligonucleotide
  Sense strand starting at position 3501 of SEQ ID NO: 1881442
cgugauugccgggacagaa

SEQ ID NO: 2044929 - RNA, 19 nt, Artificial Sequence
  Description of Artificial Sequence: Synthetic oligonucleotide
  Antisense strand to SEQ ID NO: 2044928
uucugucccggcaaucacg

SEQ ID NO: 2044930 - RNA, 19 nt, Artificial Sequence
  Description of Artificial Sequence: Synthetic oligonucleotide
  Sense strand starting at position 3717 of SEQ ID NO: 1881442
acacgucccucgggaagaa

SEQ ID NO: 2044931 - RNA, 19 nt, Artificial Sequence
  Description of Artificial Sequence: Synthetic oligonucleotide
  Antisense strand to SEQ ID NO: 2044930
uucuucccgagggacgugu

SEQ ID NO: 2044932 - RNA, 19 nt, Artificial Sequence
  Description of Artificial Sequence: Synthetic oligonucleotide
  Sense strand starting at position 3854 of SEQ ID NO: 1881442
guaacuauuugccguugca

SEQ ID NO: 2044933 - RNA, 19 nt, Artificial Sequence
  Description of Artificial Sequence: Synthetic oligonucleotide
  Antisense strand to SEQ ID NO: 2044932
ugcaacggcaaauaguuac

SEQ ID NO: 2044934 - RNA, 19 nt, Artificial Sequence
  Description of Artificial Sequence: Synthetic oligonucleotide
  Sense strand starting at position 3904 of SEQ ID NO: 1881442
cccuuucuguguccuggaa

SEQ ID NO: 2044935 - RNA, 19 nt, Artificial Sequence
  Description of Artificial Sequence: Synthetic oligonucleotide
  Antisense strand to SEQ ID NO: 2044934
uuccaggacacagaaaggg

SEQ ID NO: 2044936 - RNA, 19 nt, Artificial Sequence
  Description of Artificial Sequence: Synthetic oligonucleotide
  Sense strand starting at position 3906 of SEQ ID NO: 1881442
cuuucuguguccuggaacu

SEQ ID NO: 2044937 - RNA, 19 nt, Artificial Sequence
  Description of Artificial Sequence: Synthetic oligonucleotide
  Antisense strand to SEQ ID NO: 2044936
aguuccaggacacagaaag

SEQ ID NO: 2044938 - RNA, 19 nt, Artificial Sequence
  Description of Artificial Sequence: Synthetic oligonucleotide
  Sense strand starting at position 3908 of SEQ ID NO: 1881442
uucuguguccuggaacuuu

SEQ ID NO: 2044939 - RNA, 19 nt, Artificial Sequence
  Description of Artificial Sequence: Synthetic oligonucleotide
  Antisense strand to SEQ ID NO: 2044938
aaaguuccaggacacagaa

SEQ ID NO: 2044940 - RNA, 19 nt, Artificial Sequence
  Description of Artificial Sequence: Synthetic oligonucleotide
  Sense strand starting at position 21 of SEQ ID NO: 1881443
uuugauuuaucuguauagc

SEQ ID NO: 2044941 - RNA, 19 nt, Artificial Sequence
  Description of Artificial Sequence: Synthetic oligonucleotide
  Antisense strand to SEQ ID NO: 2044940
gcuauacagauaaaucaaa

SEQ ID NO: 2044942 - RNA, 19 nt, Artificial Sequence
  Description of Artificial Sequence: Synthetic oligonucleotide
  Sense strand starting at position 867 of SEQ ID NO: 1881443
uugucacugcaaugagaaa

SEQ ID NO: 2044943 - RNA, 19 nt, Artificial Sequence
  Description of Artificial Sequence: Synthetic oligonucleotide
  Antisense strand to SEQ ID NO: 2044942
uuucucauugcagugacaa

SEQ ID NO: 2044944 - RNA, 19 nt, Artificial Sequence
  Description of Artificial Sequence: Synthetic oligonucleotide
  Sense strand starting at position 908 of SEQ ID NO: 1881443
cgggaaagcugauugcaca

SEQ ID NO: 2044945 - RNA, 19 nt, Artificial Sequence
  Description of Artificial Sequence: Synthetic oligonucleotide
  Antisense strand to SEQ ID NO: 2044944
ugugcaaucagcuuucccg

SEQ ID NO: 2044946 - RNA, 19 nt, Artificial Sequence
  Description of Artificial Sequence: Synthetic oligonucleotide
  Sense strand starting at position 909 of SEQ ID NO: 1881443
gggaaagcugauugcacaa

SEQ ID NO: 2044947 - RNA, 19 nt, Artificial Sequence
  Description of Artificial Sequence: Synthetic oligonucleotide
  Antisense strand to SEQ ID NO: 2044946
uugugcaaucagcuuuccc

SEQ ID NO: 2044948 - RNA, 19 nt, Artificial Sequence
  Description of Artificial Sequence: Synthetic oligonucleotide
  Sense strand starting at position 1086 of SEQ ID NO: 1881443
uggucuccacuguacuauu

SEQ ID NO: 2044949 - RNA, 19 nt, Artificial Sequence
  Description of Artificial Sequence: Synthetic oligonucleotide
  Antisense strand to SEQ ID NO: 2044948
aauaguacaguggagacca

SEQ ID NO: 2044950 - RNA, 19 nt, Artificial Sequence
  Description of Artificial Sequence: Synthetic oligonucleotide
  Sense strand starting at position 1217 of SEQ ID NO: 1881443
uugggaauauccucuggca

SEQ ID NO: 2044951 - RNA, 19 nt, Artificial Sequence
  Description of Artificial Sequence: Synthetic oligonucleotide
  Antisense strand to SEQ ID NO: 2044950
ugccagaggauauucccaa

SEQ ID NO: 2044952 - RNA, 19 nt, Artificial Sequence
  Description of Artificial Sequence: Synthetic oligonucleotide
  Sense strand starting at position 1233 of SEQ ID NO: 1881443
gcaccagagcaguaauuau

SEQ ID NO: 2044953 - RNA, 19 nt, Artificial Sequence
  Description of Artificial Sequence: Synthetic oligonucleotide
  Antisense strand to SEQ ID NO: 2044952
auaauuacugcucuggugc

SEQ ID NO: 2044954 - RNA, 19 nt, Artificial Sequence
  Description of Artificial Sequence: Synthetic oligonucleotide
  Sense strand starting at position 1590 of SEQ ID NO: 1881443
gcgggacuuacaugacuuc

SEQ ID NO: 2044955 - RNA, 19 nt, Artificial Sequence
  Description of Artificial Sequence: Synthetic oligonucleotide
  Antisense strand to SEQ ID NO: 2044954
gaagucauguaagucccgc

SEQ ID NO: 2044956 - RNA, 19 nt, Artificial Sequence
  Description of Artificial Sequence: Synthetic oligonucleotide
  Sense strand starting at position 2077 of SEQ ID NO: 1881443
cccggaguuccagaucgau

SEQ ID NO: 2044957 - RNA, 19 nt, Artificial Sequence
  Description of Artificial Sequence: Synthetic oligonucleotide
  Antisense strand to SEQ ID NO: 2044956
aucgaucuggaacuccggg

SEQ ID NO: 2044958 - RNA, 19 nt, Artificial Sequence
  Description of Artificial Sequence: Synthetic oligonucleotide
  Sense strand starting at position 2199 of SEQ ID NO: 1881443
gaguaacuccuguggacuc

SEQ ID NO: 2044959 - RNA, 19 nt, Artificial Sequence
  Description of Artificial Sequence: Synthetic oligonucleotide
  Antisense strand to SEQ ID NO: 2044958
gaguccacaggaguuacuc

SEQ ID NO: 2044960 - RNA, 19 nt, Artificial Sequence
  Description of Artificial Sequence: Synthetic oligonucleotide
  Sense strand starting at position 2412 of SEQ ID NO: 1881443
gagcguugugucucggauu

SEQ ID NO: 2044961 - RNA, 19 nt, Artificial Sequence
  Description of Artificial Sequence: Synthetic oligonucleotide
  Antisense strand to SEQ ID NO: 2044960
aauccgagacacaacgcuc

SEQ ID NO: 2044962 - RNA, 19 nt, Artificial Sequence
  Description of Artificial Sequence: Synthetic oligonucleotide
  Sense strand starting at position 2467 of SEQ ID NO: 1881443
ggagauaggcuggagcuau

SEQ ID NO: 2044963 - RNA, 19 nt, Artificial Sequence
  Description of Artificial Sequence: Synthetic oligonucleotide
  Antisense strand to SEQ ID NO: 2044962
auagcuccagccuaucucc

SEQ ID NO: 2044964 - RNA, 19 nt, Artificial Sequence
  Description of Artificial Sequence: Synthetic oligonucleotide
  Sense strand starting at position 2471 of SEQ ID NO: 1881443
auaggcuggagcuauauua

SEQ ID NO: 2044965 - RNA, 19 nt, Artificial Sequence
  Description of Artificial Sequence: Synthetic oligonucleotide
  Antisense strand to SEQ ID NO: 2044964
uaauauagcuccagccuau

SEQ ID NO: 2044966 - RNA, 19 nt, Artificial Sequence
  Description of Artificial Sequence: Synthetic oligonucleotide
  Sense strand starting at position 2565 of SEQ ID NO: 1881443
aguacaguccauuauguca

SEQ ID NO: 2044967 - RNA, 19 nt, Artificial Sequence
  Description of Artificial Sequence: Synthetic oligonucleotide
  Antisense strand to SEQ ID NO: 2044966
ugacauaauggacuguacu

SEQ ID NO: 2044968 - RNA, 19 nt, Artificial Sequence
  Description of Artificial Sequence: Synthetic oligonucleotide
  Sense strand starting at position 2607 of SEQ ID NO: 1881443
uuguuccuuguguugcaua

SEQ ID NO: 2044969 - RNA, 19 nt, Artificial Sequence
  Description of Artificial Sequence: Synthetic oligonucleotide
  Antisense strand to SEQ ID NO: 2044968
uaugcaacacaaggaacaa

SEQ ID NO: 2044970 - RNA, 19 nt, Artificial Sequence
  Description of Artificial Sequence: Synthetic oligonucleotide
  Sense strand starting at position 2609 of SEQ ID NO: 1881443
guuccuuguguugcauauu

SEQ ID NO: 2044971 - RNA, 19 nt, Artificial Sequence
  Description of Artificial Sequence: Synthetic oligonucleotide
  Antisense strand to SEQ ID NO: 2044970
aauaugcaacacaaggaac

SEQ ID NO: 2044972 - RNA, 19 nt, Artificial Sequence
  Description of Artificial Sequence: Synthetic oligonucleotide
  Sense strand starting at position 2643 of SEQ ID NO: 1881443
gaauaucuuguuuacguuu

SEQ ID NO: 2044973 - RNA, 19 nt, Artificial Sequence
  Description of Artificial Sequence: Synthetic oligonucleotide
  Antisense strand to SEQ ID NO: 2044972
aaacguaaacaagauauuc

SEQ ID NO: 2044974 - RNA, 19 nt, Artificial Sequence
  Description of Artificial Sequence: Synthetic oligonucleotide
  Sense strand starting at position 2670 of SEQ ID NO: 1881443
guggcaacagauuaucagu

SEQ ID NO: 2044975 - RNA, 19 nt, Artificial Sequence
  Description of Artificial Sequence: Synthetic oligonucleotide
  Antisense strand to SEQ ID NO: 2044974
acugauaaucuguugccac

SEQ ID NO: 2044976 - RNA, 19 nt, Artificial Sequence
  Description of Artificial Sequence: Synthetic oligonucleotide
  Sense strand starting at position 2676 of SEQ ID NO: 1881443
acagauuaucagugucaaa

SEQ ID NO: 2044977 - RNA, 19 nt, Artificial Sequence
  Description of Artificial Sequence: Synthetic oligonucleotide
  Antisense strand to SEQ ID NO: 2044976
uuugacacugauaaucugu

SEQ ID NO: 2044978 - RNA, 19 nt, Artificial Sequence
  Description of Artificial Sequence: Synthetic oligonucleotide
  Sense strand starting at position 2705 of SEQ ID NO: 1881443
aguguuagcgucaguggaa

SEQ ID NO: 2044979 - RNA, 19 nt, Artificial Sequence
  Description of Artificial Sequence: Synthetic oligonucleotide
  Antisense strand to SEQ ID NO: 2044978
uuccacugacgcuaacacu

SEQ ID NO: 2044980 - RNA, 19 nt, Artificial Sequence
  Description of Artificial Sequence: Synthetic oligonucleotide
  Sense strand starting at position 2902 of SEQ ID NO: 1881443
ggcucaugggcucaccauu

SEQ ID NO: 2044981 - RNA, 19 nt, Artificial Sequence
  Description of Artificial Sequence: Synthetic oligonucleotide
  Antisense strand to SEQ ID NO: 2044980
aauggugagcccaugagcc

SEQ ID NO: 2044982 - RNA, 19 nt, Artificial Sequence
  Description of Artificial Sequence: Synthetic oligonucleotide
  Sense strand starting at position 3007 of SEQ ID NO: 1881443
caugcauucggaugaaaua

SEQ ID NO: 2044983 - RNA, 19 nt, Artificial Sequence
  Description of Artificial Sequence: Synthetic oligonucleotide
  Antisense strand to SEQ ID NO: 2044982
uauuucauccgaaugcaug

SEQ ID NO: 2044984 - RNA, 19 nt, Artificial Sequence
  Description of Artificial Sequence: Synthetic oligonucleotide
  Sense strand starting at position 3142 of SEQ ID NO: 1881443
gucauuuaaccugguagcu

SEQ ID NO: 2044985 - RNA, 19 nt, Artificial Sequence
  Description of Artificial Sequence: Synthetic oligonucleotide
  Antisense strand to SEQ ID NO: 2044984
agcuaccagguuaaaugac

SEQ ID NO: 2044986 - RNA, 19 nt, Artificial Sequence
  Description of Artificial Sequence: Synthetic oligonucleotide
  Sense strand starting at position 3229 of SEQ ID NO: 1881443
aagugugauucuccaagug

SEQ ID NO: 2044987 - RNA, 19 nt, Artificial Sequence
  Description of Artificial Sequence: Synthetic oligonucleotide
  Antisense strand to SEQ ID NO: 2044986
cacuuggagaaucacacuu

SEQ ID NO: 2044988 - RNA, 19 nt, Artificial Sequence
  Description of Artificial Sequence: Synthetic oligonucleotide
  Sense strand starting at position 3234 of SEQ ID NO: 1881443
ugauucuccaagugggauu

SEQ ID NO: 2044989 - RNA, 19 nt, Artificial Sequence
  Description of Artificial Sequence: Synthetic oligonucleotide
  Antisense strand to SEQ ID NO: 2044988
aaucccacuuggagaauca

SEQ ID NO: 2044990 - RNA, 19 nt, Artificial Sequence
  Description of Artificial Sequence: Synthetic oligonucleotide
  Sense strand starting at position 3258 of SEQ ID NO: 1881443
cucucugagacauggagua

SEQ ID NO: 2044991 - RNA, 19 nt, Artificial Sequence
  Description of Artificial Sequence: Synthetic oligonucleotide
  Antisense strand to SEQ ID NO: 2044990
uacuccaugucucagagag

SEQ ID NO: 2044992 - RNA, 19 nt, Artificial Sequence
  Description of Artificial Sequence: Synthetic oligonucleotide
  Sense strand starting at position 3318 of SEQ ID NO: 1881443
ggcagaugucuccacaaca

SEQ ID NO: 2044993 - RNA, 19 nt, Artificial Sequence
  Description of Artificial Sequence: Synthetic oligonucleotide
  Antisense strand to SEQ ID NO: 2044992
uguuguggagacaucugcc

SEQ ID NO: 2044994 - RNA, 19 nt, Artificial Sequence
  Description of Artificial Sequence: Synthetic oligonucleotide
  Sense strand starting at position 3474 of SEQ ID NO: 1881443
gguuaugagaaaugaguca

SEQ ID NO: 2044995 - RNA, 19 nt, Artificial Sequence
  Description of Artificial Sequence: Synthetic oligonucleotide
  Antisense strand to SEQ ID NO: 2044994
ugacucauuucucauaacc

SEQ ID NO: 2044996 - RNA, 19 nt, Artificial Sequence
  Description of Artificial Sequence: Synthetic oligonucleotide
  Sense strand starting at position 3600 of SEQ ID NO: 1881443
ucauccugaugugaauuua

SEQ ID NO: 2044997 - RNA, 19 nt, Artificial Sequence
  Description of Artificial Sequence: Synthetic oligonucleotide
  Antisense strand to SEQ ID NO: 2044996
uaaauucacaucaggauga

SEQ ID NO: 2044998 - RNA, 19 nt, Artificial Sequence
  Description of Artificial Sequence: Synthetic oligonucleotide
  Sense strand starting at position 3765 of SEQ ID NO: 1881443
cauauacagcaguaugagu

SEQ ID NO: 2044999 - RNA, 19 nt, Artificial Sequence
  Description of Artificial Sequence: Synthetic oligonucleotide
  Antisense strand to SEQ ID NO: 2044998
acucauacugcuguauaug

SEQ ID NO: 2045000 - RNA, 19 nt, Artificial Sequence
  Description of Artificial Sequence: Synthetic oligonucleotide
  Sense strand starting at position 3879 of SEQ ID NO: 1881443
uggugcucucauuacagua

SEQ ID NO: 2045001 - RNA, 19 nt, Artificial Sequence
  Description of Artificial Sequence: Synthetic oligonucleotide
  Antisense strand to SEQ ID NO: 2045000
uacuguaaugagagcacca

SEQ ID NO: 2045002 - RNA, 19 nt, Artificial Sequence
  Description of Artificial Sequence: Synthetic oligonucleotide
  Sense strand starting at position 3887 of SEQ ID NO: 1881443
ucauuacaguaaucuuagu

SEQ ID NO: 2045003 - RNA, 19 nt, Artificial Sequence
  Description of Artificial Sequence: Synthetic oligonucleotide
  Antisense strand to SEQ ID NO: 2045002
acuaagauuacuguaauga

SEQ ID NO: 2045004 - RNA, 19 nt, Artificial Sequence
  Description of Artificial Sequence: Synthetic oligonucleotide
  Sense strand starting at position 3894 of SEQ ID NO: 1881443
aguaaucuuagucaagggu

SEQ ID NO: 2045005 - RNA, 19 nt, Artificial Sequence
  Description of Artificial Sequence: Synthetic oligonucleotide
  Antisense strand to SEQ ID NO: 2045004
acccuugacuaagauuacu

SEQ ID NO: 2045006 - RNA, 19 nt, Artificial Sequence
  Description of Artificial Sequence: Synthetic oligonucleotide
  Sense strand starting at position 3897 of SEQ ID NO: 1881443
aaucuuagucaaggguaga

SEQ ID NO: 2045007 - RNA, 19 nt, Artificial Sequence
  Description of Artificial Sequence: Synthetic oligonucleotide
  Antisense strand to SEQ ID NO: 2045006
ucuacccuugacuaagauu

SEQ ID NO: 2045008 - RNA, 19 nt, Artificial Sequence
  Description of Artificial Sequence: Synthetic oligonucleotide
  Sense strand starting at position 3898 of SEQ ID NO: 1881443
aucuuagucaaggguagaa

SEQ ID NO: 2045009 - RNA, 19 nt, Artificial Sequence
  Description of Artificial Sequence: Synthetic oligonucleotide
  Antisense strand to SEQ ID NO: 2045008
uucuacccuugacuaagau

SEQ ID NO: 2045010 - RNA, 19 nt, Artificial Sequence
  Description of Artificial Sequence: Synthetic oligonucleotide
  Sense strand starting at position 3908 of SEQ ID NO: 1881443
aggguagaaaggugugcua

SEQ ID NO: 2045011 - RNA, 19 nt, Artificial Sequence
  Description of Artificial Sequence: Synthetic oligonucleotide
  Antisense strand to SEQ ID NO: 2045010
uagcacaccuuucuacccu

SEQ ID NO: 2045012 - RNA, 19 nt, Artificial Sequence
  Description of Artificial Sequence: Synthetic oligonucleotide
  Sense strand starting at position 3910 of SEQ ID NO: 1881443
gguagaaaggugugcuaga

SEQ ID NO: 2045013 - RNA, 19 nt, Artificial Sequence
  Description of Artificial Sequence: Synthetic oligonucleotide
  Antisense strand to SEQ ID NO: 2045012
ucuagcacaccuuucuacc

SEQ ID NO: 2045014 - RNA, 19 nt, Artificial Sequence
  Description of Artificial Sequence: Synthetic oligonucleotide
  Sense strand starting at position 3911 of SEQ ID NO: 1881443
guagaaaggugugcuagaa

SEQ ID NO: 2045015 - RNA, 19 nt, Artificial Sequence
  Description of Artificial Sequence: Synthetic oligonucleotide
  Antisense strand to SEQ ID NO: 2045014
uucuagcacaccuuucuac

SEQ ID NO: 2045016 - RNA, 19 nt, Artificial Sequence
  Description of Artificial Sequence: Synthetic oligonucleotide
  Sense strand starting at position 3915 of SEQ ID NO: 1881443
aaaggugugcuagaauguu

SEQ ID NO: 2045017 - RNA, 19 nt, Artificial Sequence
  Description of Artificial Sequence: Synthetic oligonucleotide
  Antisense strand to SEQ ID NO: 2045016
aacauucuagcacaccuuu

SEQ ID NO: 2045018 - RNA, 19 nt, Artificial Sequence
  Description of Artificial Sequence: Synthetic oligonucleotide
  Sense strand starting at position 3961 of SEQ ID NO: 1881443
guauauguacuccagucuu

SEQ ID NO: 2045019 - RNA, 19 nt, Artificial Sequence
  Description of Artificial Sequence: Synthetic oligonucleotide
  Antisense strand to SEQ ID NO: 2045018
aagacuggaguacauauac

SEQ ID NO: 2045020 - RNA, 19 nt, Artificial Sequence
  Description of Artificial Sequence: Synthetic oligonucleotide
  Sense strand starting at position 13 of SEQ ID NO: 1881444
uugugaaccuucuuaggcu

SEQ ID NO: 2045021 - RNA, 19 nt, Artificial Sequence
  Description of Artificial Sequence: Synthetic oligonucleotide
  Antisense strand to SEQ ID NO: 2045020
agccuaagaagguucacaa

SEQ ID NO: 2045022 - RNA, 19 nt, Artificial Sequence
  Description of Artificial Sequence: Synthetic oligonucleotide
  Sense strand starting at position 28 of SEQ ID NO: 1881444
ggcucaaugcaaugaaaua

SEQ ID NO: 2045023 - RNA, 19 nt, Artificial Sequence
  Description of Artificial Sequence: Synthetic oligonucleotide
  Antisense strand to SEQ ID NO: 2045022
uauuucauugcauugagcc

SEQ ID NO: 2045024 - RNA, 19 nt, Artificial Sequence
  Description of Artificial Sequence: Synthetic oligonucleotide
  Sense strand starting at position 87 of SEQ ID NO: 1881444
uuuccuaguuugguugaaa

SEQ ID NO: 2045025 - RNA, 19 nt, Artificial Sequence
  Description of Artificial Sequence: Synthetic oligonucleotide
  Antisense strand to SEQ ID NO: 2045024
uuucaaccaaacuaggaaa

SEQ ID NO: 2045026 - RNA, 19 nt, Artificial Sequence
  Description of Artificial Sequence: Synthetic oligonucleotide
  Sense strand starting at position 88 of SEQ ID NO: 1881444
uuccuaguuugguugaaau

SEQ ID NO: 2045027 - RNA, 19 nt, Artificial Sequence
  Description of Artificial Sequence: Synthetic oligonucleotide
  Antisense strand to SEQ ID NO: 2045026
auuucaaccaaacuaggaa

SEQ ID NO: 2045028 - RNA, 19 nt, Artificial Sequence
  Description of Artificial Sequence: Synthetic oligonucleotide
  Sense strand starting at position 90 of SEQ ID NO: 1881444
ccuaguuugguugaaauaa

SEQ ID NO: 2045029 - RNA, 19 nt, Artificial Sequence
  Description of Artificial Sequence: Synthetic oligonucleotide
  Antisense strand to SEQ ID NO: 2045028
uuauuucaaccaaacuagg

SEQ ID NO: 2045030 - RNA, 19 nt, Artificial Sequence
  Description of Artificial Sequence: Synthetic oligonucleotide
  Sense strand starting at position 146 of SEQ ID NO: 1881444
acaagugacuuuccagaag

SEQ ID NO: 2045031 - RNA, 19 nt, Artificial Sequence
  Description of Artificial Sequence: Synthetic oligonucleotide
  Antisense strand to SEQ ID NO: 2045030
cuucuggaaagucacuugu

SEQ ID NO: 2045032 - RNA, 19 nt, Artificial Sequence
  Description of Artificial Sequence: Synthetic oligonucleotide
  Sense strand starting at position 204 of SEQ ID NO: 1881444
cagagauacucacagguga

SEQ ID NO: 2045033 - RNA, 19 nt, Artificial Sequence
  Description of Artificial Sequence: Synthetic oligonucleotide
  Antisense strand to SEQ ID NO: 2045032
ucaccugugaguaucucug

SEQ ID NO: 2045034 - RNA, 19 nt, Artificial Sequence
  Description of Artificial Sequence: Synthetic oligonucleotide
  Sense strand starting at position 218 of SEQ ID NO: 1881444
ggugaugaaacuugaguua

SEQ ID NO: 2045035 - RNA, 19 nt, Artificial Sequence
  Description of Artificial Sequence: Synthetic oligonucleotide
  Antisense strand to SEQ ID NO: 2045034
uaacucaaguuucaucacc

SEQ ID NO: 2045036 - RNA, 19 nt, Artificial Sequence
  Description of Artificial Sequence: Synthetic oligonucleotide
  Sense strand starting at position 221 of SEQ ID NO: 1881444
gaugaaacuugaguuauca

SEQ ID NO: 2045037 - RNA, 19 nt, Artificial Sequence
  Description of Artificial Sequence: Synthetic oligonucleotide
  Antisense strand to SEQ ID NO: 2045036
ugauaacucaaguuucauc

SEQ ID NO: 2045038 - RNA, 19 nt, Artificial Sequence
  Description of Artificial Sequence: Synthetic oligonucleotide
  Sense strand starting at position 269 of SEQ ID NO: 1881444
agaauagaaucuguaaggu

SEQ ID NO: 2045039 - RNA, 19 nt, Artificial Sequence
  Description of Artificial Sequence: Synthetic oligonucleotide
  Antisense strand to SEQ ID NO: 2045038
accuuacagauucuauucu

SEQ ID NO: 2045040 - RNA, 19 nt, Artificial Sequence
  Description of Artificial Sequence: Synthetic oligonucleotide
  Sense strand starting at position 1011 of SEQ ID NO: 1881444
auguauugcuuguucuaua

SEQ ID NO: 2045041 - RNA, 19 nt, Artificial Sequence
  Description of Artificial Sequence: Synthetic oligonucleotide
  Antisense strand to SEQ ID NO: 2045040
uauagaacaagcaauacau

SEQ ID NO: 2045042 - RNA, 19 nt, Artificial Sequence
  Description of Artificial Sequence: Synthetic oligonucleotide
  Sense strand starting at position 1016 of SEQ ID NO: 1881444
uugcuuguucuauaaacug

SEQ ID NO: 2045043 - RNA, 19 nt, Artificial Sequence
  Description of Artificial Sequence: Synthetic oligonucleotide
  Antisense strand to SEQ ID NO: 2045042
caguuuauagaacaagcaa

SEQ ID NO: 2045044 - RNA, 19 nt, Artificial Sequence
  Description of Artificial Sequence: Synthetic oligonucleotide
  Sense strand starting at position 1207 of SEQ ID NO: 1881444
aggaaagggugcuuuguga

SEQ ID NO: 2045045 - RNA, 19 nt, Artificial Sequence
  Description of Artificial Sequence: Synthetic oligonucleotide
  Antisense strand to SEQ ID NO: 2045044
ucacaaagcacccuuuccu

SEQ ID NO: 2045046 - RNA, 19 nt, Artificial Sequence
  Description of Artificial Sequence: Synthetic oligonucleotide
  Sense strand starting at position 1263 of SEQ ID NO: 1881444
uuccgcguugcucucaaua

SEQ ID NO: 2045047 - RNA, 19 nt, Artificial Sequence
  Description of Artificial Sequence: Synthetic oligonucleotide
  Antisense strand to SEQ ID NO: 2045046
uauugagagcaacgcggaa

SEQ ID NO: 2045048 - RNA, 19 nt, Artificial Sequence
  Description of Artificial Sequence: Synthetic oligonucleotide
  Sense strand starting at position 1273 of SEQ ID NO: 1881444
cucucaauaccucguggau

SEQ ID NO: 2045049 - RNA, 19 nt, Artificial Sequence
  Description of Artificial Sequence: Synthetic oligonucleotide
  Antisense strand to SEQ ID NO: 2045048
auccacgagguauugagag

SEQ ID NO: 2045050 - RNA, 19 nt, Artificial Sequence
  Description of Artificial Sequence: Synthetic oligonucleotide
  Sense strand starting at position 1286 of SEQ ID NO: 1881444
guggaucucugcuucucua

SEQ ID NO: 2045051 - RNA, 19 nt, Artificial Sequence
  Description of Artificial Sequence: Synthetic oligonucleotide
  Antisense strand to SEQ ID NO: 2045050
uagagaagcagagauccac

SEQ ID NO: 2045052 - RNA, 19 nt, Artificial Sequence
  Description of Artificial Sequence: Synthetic oligonucleotide
  Sense strand starting at position 1294 of SEQ ID NO: 1881444
cugcuucucuaagucugaa

SEQ ID NO: 2045053 - RNA, 19 nt, Artificial Sequence
  Description of Artificial Sequence: Synthetic oligonucleotide
  Antisense strand to SEQ ID NO: 2045052
uucagacuuagagaagcag

SEQ ID NO: 2045054 - RNA, 19 nt, Artificial Sequence
  Description of Artificial Sequence: Synthetic oligonucleotide
  Sense strand starting at position 1355 of SEQ ID NO: 1881444
auggauguuuccuuccagu

SEQ ID NO: 2045055 - RNA, 19 nt, Artificial Sequence
  Description of Artificial Sequence: Synthetic oligonucleotide
  Antisense strand to SEQ ID NO: 2045054
acuggaaggaaacauccau

SEQ ID NO: 2045056 - RNA, 19 nt, Artificial Sequence
  Description of Artificial Sequence: Synthetic oligonucleotide
  Sense strand starting at position 1488 of SEQ ID NO: 1881444
gaacauaccugcgcuaaga

SEQ ID NO: 2045057 - RNA, 19 nt, Artificial Sequence
  Description of Artificial Sequence: Synthetic oligonucleotide
  Antisense strand to SEQ ID NO: 2045056
ucuuagcgcagguauguuc

SEQ ID NO: 2045058 - RNA, 19 nt, Artificial Sequence
  Description of Artificial Sequence: Synthetic oligonucleotide
  Sense strand starting at position 2031 of SEQ ID NO: 1881444
agccaaucccgggaagacu

SEQ ID NO: 2045059 - RNA, 19 nt, Artificial Sequence
  Description of Artificial Sequence: Synthetic oligonucleotide
  Antisense strand to SEQ ID NO: 2045058
agucuucccgggauuggcu

SEQ ID NO: 2045060 - RNA, 19 nt, Artificial Sequence
  Description of Artificial Sequence: Synthetic oligonucleotide
  Sense strand starting at position 2039 of SEQ ID NO: 1881444
ccgggaagacucugggcaa

SEQ ID NO: 2045061 - RNA, 19 nt, Artificial Sequence
  Description of Artificial Sequence: Synthetic oligonucleotide
  Antisense strand to SEQ ID NO: 2045060
uugcccagagucuucccgg

SEQ ID NO: 2045062 - RNA, 19 nt, Artificial Sequence
  Description of Artificial Sequence: Synthetic oligonucleotide
  Sense strand starting at position 2263 of SEQ ID NO: 1881444
ggagcauccuucucugaau

SEQ ID NO: 2045063 - RNA, 19 nt, Artificial Sequence
  Description of Artificial Sequence: Synthetic oligonucleotide
  Antisense strand to SEQ ID NO: 2045062
auucagagaaggaugcucc

SEQ ID NO: 2045064 - RNA, 19 nt, Artificial Sequence
  Description of Artificial Sequence: Synthetic oligonucleotide
  Sense strand starting at position 2395 of SEQ ID NO: 1881444
ggccuaaggcccugggauu

SEQ ID NO: 2045065 - RNA, 19 nt, Artificial Sequence
  Description of Artificial Sequence: Synthetic oligonucleotide
  Antisense strand to SEQ ID NO: 2045064
aaucccagggccuuaggcc

SEQ ID NO: 2045066 - RNA, 19 nt, Artificial Sequence
  Description of Artificial Sequence: Synthetic oligonucleotide
  Sense strand starting at position 2408 of SEQ ID NO: 1881444
gggauucccuuucuuaaag

SEQ ID NO: 2045067 - RNA, 19 nt, Artificial Sequence
  Description of Artificial Sequence: Synthetic oligonucleotide
  Antisense strand to SEQ ID NO: 2045066
cuuuaagaaagggaauccc

SEQ ID NO: 2045068 - RNA, 19 nt, Artificial Sequence
  Description of Artificial Sequence: Synthetic oligonucleotide
  Sense strand starting at position 2662 of SEQ ID NO: 1881444
agguaacaggcucaaacuu

SEQ ID NO: 2045069 - RNA, 19 nt, Artificial Sequence
  Description of Artificial Sequence: Synthetic oligonucleotide
  Antisense strand to SEQ ID NO: 2045068
aaguuugagccuguuaccu

SEQ ID NO: 2045070 - RNA, 19 nt, Artificial Sequence
  Description of Artificial Sequence: Synthetic oligonucleotide
  Sense strand starting at position 2670 of SEQ ID NO: 1881444
ggcucaaacuuggcaaaca

SEQ ID NO: 2045071 - RNA, 19 nt, Artificial Sequence
  Description of Artificial Sequence: Synthetic oligonucleotide
  Antisense strand to SEQ ID NO: 2045070
uguuugccaaguuugagcc

SEQ ID NO: 2045072 - RNA, 19 nt, Artificial Sequence
  Description of Artificial Sequence: Synthetic oligonucleotide
  Sense strand starting at position 2853 of SEQ ID NO: 1881444
cagcuagccagugguagau

SEQ ID NO: 2045073 - RNA, 19 nt, Artificial Sequence
  Description of Artificial Sequence: Synthetic oligonucleotide
  Antisense strand to SEQ ID NO: 2045072
aucuaccacuggcuagcug

SEQ ID NO: 2045074 - RNA, 19 nt, Artificial Sequence
  Description of Artificial Sequence: Synthetic oligonucleotide
  Sense strand starting at position 2977 of SEQ ID NO: 1881444
agccuacacuugguuaaca

SEQ ID NO: 2045075 - RNA, 19 nt, Artificial Sequence
  Description of Artificial Sequence: Synthetic oligonucleotide
  Antisense strand to SEQ ID NO: 2045074
uguuaaccaaguguaggcu

SEQ ID NO: 2045076 - RNA, 19 nt, Artificial Sequence
  Description of Artificial Sequence: Synthetic oligonucleotide
  Sense strand starting at position 3019 of SEQ ID NO: 1881444
ggguguggcuuuguaaaca

SEQ ID NO: 2045077 - RNA, 19 nt, Artificial Sequence
  Description of Artificial Sequence: Synthetic oligonucleotide
  Antisense strand to SEQ ID NO: 2045076
uguuuacaaagccacaccc

SEQ ID NO: 2045078 - RNA, 19 nt, Artificial Sequence
  Description of Artificial Sequence: Synthetic oligonucleotide
  Sense strand starting at position 3080 of SEQ ID NO: 1881444
ggcuuuaccuguuuaagga

SEQ ID NO: 2045079 - RNA, 19 nt, Artificial Sequence
  Description of Artificial Sequence: Synthetic oligonucleotide
  Antisense strand to SEQ ID NO: 2045078
uccuuaaacagguaaagcc

SEQ ID NO: 2045080 - RNA, 19 nt, Artificial Sequence
  Description of Artificial Sequence: Synthetic oligonucleotide
  Sense strand starting at position 3369 of SEQ ID NO: 1881444
gaguuuauacuuugugcua

SEQ ID NO: 2045081 - RNA, 19 nt, Artificial Sequence
  Description of Artificial Sequence: Synthetic oligonucleotide
  Antisense strand to SEQ ID NO: 2045080
uagcacaaaguauaaacuc

SEQ ID NO: 2045082 - RNA, 19 nt, Artificial Sequence
  Description of Artificial Sequence: Synthetic oligonucleotide
  Sense strand starting at position 3372 of SEQ ID NO: 1881444
uuuauacuuugugcuaaga

SEQ ID NO: 2045083 - RNA, 19 nt, Artificial Sequence
  Description of Artificial Sequence: Synthetic oligonucleotide
  Antisense strand to SEQ ID NO: 2045082
ucuuagcacaaaguauaaa

SEQ ID NO: 2045084 - RNA, 19 nt, Artificial Sequence
  Description of Artificial Sequence: Synthetic oligonucleotide
  Sense strand starting at position 3394 of SEQ ID NO: 1881444
auggaaagcuguucaagug

SEQ ID NO: 2045085 - RNA, 19 nt, Artificial Sequence
  Description of Artificial Sequence: Synthetic oligonucleotide
  Antisense strand to SEQ ID NO: 2045084
cacuugaacagcuuuccau

SEQ ID NO: 2045086 - RNA, 19 nt, Artificial Sequence
  Description of Artificial Sequence: Synthetic oligonucleotide
  Sense strand starting at position 3395 of SEQ ID NO: 1881444
uggaaagcuguucaagugu

SEQ ID NO: 2045087 - RNA, 19 nt, Artificial Sequence
  Description of Artificial Sequence: Synthetic oligonucleotide
  Antisense strand to SEQ ID NO: 2045086
acacuugaacagcuuucca

SEQ ID NO: 2045088 - RNA, 19 nt, Artificial Sequence
  Description of Artificial Sequence: Synthetic oligonucleotide
  Sense strand starting at position 3478 of SEQ ID NO: 1881444
gugugguuucgggugugau

SEQ ID NO: 2045089 - RNA, 19 nt, Artificial Sequence
  Description of Artificial Sequence: Synthetic oligonucleotide
  Antisense strand to SEQ ID NO: 2045088
aucacacccgaaaccacac

SEQ ID NO: 2045090 - RNA, 19 nt, Artificial Sequence
  Description of Artificial Sequence: Synthetic oligonucleotide
  Sense strand starting at position 3481 of SEQ ID NO: 1881444
ugguuucgggugugauuaa

SEQ ID NO: 2045091 - RNA, 19 nt, Artificial Sequence
  Description of Artificial Sequence: Synthetic oligonucleotide
  Antisense strand to SEQ ID NO: 2045090
uuaaucacacccgaaacca

SEQ ID NO: 2045092 - RNA, 19 nt, Artificial Sequence
  Description of Artificial Sequence: Synthetic oligonucleotide
  Sense strand starting at position 3650 of SEQ ID NO: 1881444
acauaucucuaguuggaau

SEQ ID NO: 2045093 - RNA, 19 nt, Artificial Sequence
  Description of Artificial Sequence: Synthetic oligonucleotide
  Antisense strand to SEQ ID NO: 2045092
auuccaacuagagauaugu

SEQ ID NO: 2045094 - RNA, 19 nt, Artificial Sequence
  Description of Artificial Sequence: Synthetic oligonucleotide
  Sense strand starting at position 3769 of SEQ ID NO: 1881444
agaaguaaaucuccuuagu

SEQ ID NO: 2045095 - RNA, 19 nt, Artificial Sequence
  Description of Artificial Sequence: Synthetic oligonucleotide
  Antisense strand to SEQ ID NO: 2045094
acuaaggagauuuacuucu

SEQ ID NO: 2045096 - RNA, 19 nt, Artificial Sequence
  Description of Artificial Sequence: Synthetic oligonucleotide
  Sense strand starting at position 3791 of SEQ ID NO: 1881444
gagacuaaugcaggaauuc

SEQ ID NO: 2045097 - RNA, 19 nt, Artificial Sequence
  Description of Artificial Sequence: Synthetic oligonucleotide
  Antisense strand to SEQ ID NO: 2045096
gaauuccugcauuagucuc

SEQ ID NO: 2045098 - RNA, 19 nt, Artificial Sequence
  Description of Artificial Sequence: Synthetic oligonucleotide
  Sense strand starting at position 3834 of SEQ ID NO: 1881444
gguaguugugcagaauguc

SEQ ID NO: 2045099 - RNA, 19 nt, Artificial Sequence
  Description of Artificial Sequence: Synthetic oligonucleotide
  Antisense strand to SEQ ID NO: 2045098
gacauucugcacaacuacc

SEQ ID NO: 2045100 - RNA, 19 nt, Artificial Sequence
  Description of Artificial Sequence: Synthetic oligonucleotide
  Sense strand starting at position 2352 of SEQ ID NO: 1881445
ucuuaugcauucucaguga

SEQ ID NO: 2045101 - RNA, 19 nt, Artificial Sequence
  Description of Artificial Sequence: Synthetic oligonucleotide
  Antisense strand to SEQ ID NO: 2045100
ucacugagaaugcauaaga

SEQ ID NO: 2045102 - RNA, 19 nt, Artificial Sequence
  Description of Artificial Sequence: Synthetic oligonucleotide
  Sense strand starting at position 2355 of SEQ ID NO: 1881445
uaugcauucucagugagca

SEQ ID NO: 2045103 - RNA, 19 nt, Artificial Sequence
  Description of Artificial Sequence: Synthetic oligonucleotide
  Antisense strand to SEQ ID NO: 2045102
ugcucacugagaaugcaua

SEQ ID NO: 2045104 - RNA, 19 nt, Artificial Sequence
  Description of Artificial Sequence: Synthetic oligonucleotide
  Sense strand starting at position 2356 of SEQ ID NO: 1881445
augcauucucagugagcaa

SEQ ID NO: 2045105 - RNA, 19 nt, Artificial Sequence
  Description of Artificial Sequence: Synthetic oligonucleotide
  Antisense strand to SEQ ID NO: 2045104
uugcucacugagaaugcau

SEQ ID NO: 2045106 - RNA, 19 nt, Artificial Sequence
  Description of Artificial Sequence: Synthetic oligonucleotide
  Sense strand starting at position 2921 of SEQ ID NO: 1881445
gagaguuaauuauguugaa

SEQ ID NO: 2045107 - RNA, 19 nt, Artificial Sequence
  Description of Artificial Sequence: Synthetic oligonucleotide
  Antisense strand to SEQ ID NO: 2045106
uucaacauaauuaacucuc

SEQ ID NO: 2045108 - RNA, 19 nt, Artificial Sequence
  Description of Artificial Sequence: Synthetic oligonucleotide
  Sense strand starting at position 3185 of SEQ ID NO: 1881445
ggaccuuagcaaugggcaa

SEQ ID NO: 2045109 - RNA, 19 nt, Artificial Sequence
  Description of Artificial Sequence: Synthetic oligonucleotide
  Antisense strand to SEQ ID NO: 2045108
uugcccauugcuaaggucc

SEQ ID NO: 2045110 - RNA, 19 nt, Artificial Sequence
  Description of Artificial Sequence: Synthetic oligonucleotide
  Sense strand starting at position 3771 of SEQ ID NO: 1881445
ggcucugcgucagaugaga

SEQ ID NO: 2045111 - RNA, 19 nt, Artificial Sequence
  Description of Artificial Sequence: Synthetic oligonucleotide
  Antisense strand to SEQ ID NO: 2045110
ucucaucugacgcagagcc

SEQ ID NO: 2045112 - RNA, 19 nt, Artificial Sequence
  Description of Artificial Sequence: Synthetic oligonucleotide
  Sense strand starting at position 105 of SEQ ID NO: 1881446
acccuuuagcacggugauu

SEQ ID NO: 2045113 - RNA, 19 nt, Artificial Sequence
  Description of Artificial Sequence: Synthetic oligonucleotide
  Antisense strand to SEQ ID NO: 2045112
aaucaccgugcuaaagggu

SEQ ID NO: 2045114 - RNA, 19 nt, Artificial Sequence
  Description of Artificial Sequence: Synthetic oligonucleotide
  Sense strand starting at position 235 of SEQ ID NO: 1881446
ggaucagggucccauauuu

SEQ ID NO: 2045115 - RNA, 19 nt, Artificial Sequence
  Description of Artificial Sequence: Synthetic oligonucleotide
  Antisense strand to SEQ ID NO: 2045114
aaauaugggacccugaucc

SEQ ID NO: 2045116 - RNA, 19 nt, Artificial Sequence
  Description of Artificial Sequence: Synthetic oligonucleotide
  Sense strand starting at position 263 of SEQ ID NO: 1881446
cccagugugauccaagaug

SEQ ID NO: 2045117 - RNA, 19 nt, Artificial Sequence
  Description of Artificial Sequence: Synthetic oligonucleotide
  Antisense strand to SEQ ID NO: 2045116
caucuuggaucacacuggg

SEQ ID NO: 2045118 - RNA, 19 nt, Artificial Sequence
  Description of Artificial Sequence: Synthetic oligonucleotide
  Sense strand starting at position 463 of SEQ ID NO: 1881446
uccaacagagcuuauuagu

SEQ ID NO: 2045119 - RNA, 19 nt, Artificial Sequence
  Description of Artificial Sequence: Synthetic oligonucleotide
  Antisense strand to SEQ ID NO: 2045118
acuaauaagcucuguugga

SEQ ID NO: 2045120 - RNA, 19 nt, Artificial Sequence
  Description of Artificial Sequence: Synthetic oligonucleotide
  Sense strand starting at position 578 of SEQ ID NO: 1881446
ccuaaauuggccugaccau

SEQ ID NO: 2045121 - RNA, 19 nt, Artificial Sequence
  Description of Artificial Sequence: Synthetic oligonucleotide
  Antisense strand to SEQ ID NO: 2045120
auggucaggccaauuuagg

SEQ ID NO: 2045122 - RNA, 19 nt, Artificial Sequence
  Description of Artificial Sequence: Synthetic oligonucleotide
  Sense strand starting at position 636 of SEQ ID NO: 1881446
gaaggaaagucagugugua

SEQ ID NO: 2045123 - RNA, 19 nt, Artificial Sequence
  Description of Artificial Sequence: Synthetic oligonucleotide
  Antisense strand to SEQ ID NO: 2045122
uacacacugacuuuccuuc

SEQ ID NO: 2045124 - RNA, 19 nt, Artificial Sequence
  Description of Artificial Sequence: Synthetic oligonucleotide
  Sense strand starting at position 637 of SEQ ID NO: 1881446
aaggaaagucaguguguau

SEQ ID NO: 2045125 - RNA, 19 nt, Artificial Sequence
  Description of Artificial Sequence: Synthetic oligonucleotide
  Antisense strand to SEQ ID NO: 2045124
auacacacugacuuuccuu

SEQ ID NO: 2045126 - RNA, 19 nt, Artificial Sequence
  Description of Artificial Sequence: Synthetic oligonucleotide
  Sense strand starting at position 2254 of SEQ ID NO: 1881446
gccaaacuaccgcagaaau

SEQ ID NO: 2045127 - RNA, 19 nt, Artificial Sequence
  Description of Artificial Sequence: Synthetic oligonucleotide
  Antisense strand to SEQ ID NO: 2045126
auuucugcgguaguuuggc

SEQ ID NO: 2045128 - RNA, 19 nt, Artificial Sequence
  Description of Artificial Sequence: Synthetic oligonucleotide
  Sense strand starting at position 2374 of SEQ ID NO: 1881446
auugcagauucgcuaauau

SEQ ID NO: 2045129 - RNA, 19 nt, Artificial Sequence
  Description of Artificial Sequence: Synthetic oligonucleotide
  Antisense strand to SEQ ID NO: 2045128
auauuagcgaaucugcaau

SEQ ID NO: 2045130 - RNA, 19 nt, Artificial Sequence
  Description of Artificial Sequence: Synthetic oligonucleotide
  Sense strand starting at position 2409 of SEQ ID NO: 1881446
uugaaugaaugaugagaag

SEQ ID NO: 2045131 - RNA, 19 nt, Artificial Sequence
  Description of Artificial Sequence: Synthetic oligonucleotide
  Antisense strand to SEQ ID NO: 2045130
cuucucaucauucauucaa

SEQ ID NO: 2045132 - RNA, 19 nt, Artificial Sequence
  Description of Artificial Sequence: Synthetic oligonucleotide
  Sense strand starting at position 2424 of SEQ ID NO: 1881446
gaaguuauugggugguaga

SEQ ID NO: 2045133 - RNA, 19 nt, Artificial Sequence
  Description of Artificial Sequence: Synthetic oligonucleotide
  Antisense strand to SEQ ID NO: 2045132
ucuaccacccaauaacuuc

SEQ ID NO: 2045134 - RNA, 19 nt, Artificial Sequence
  Description of Artificial Sequence: Synthetic oligonucleotide
  Sense strand starting at position 2425 of SEQ ID NO: 1881446
aaguuauugggugguagag

SEQ ID NO: 2045135 - RNA, 19 nt, Artificial Sequence
  Description of Artificial Sequence: Synthetic oligonucleotide
  Antisense strand to SEQ ID NO: 2045134
cucuaccacccaauaacuu

SEQ ID NO: 2045136 - RNA, 19 nt, Artificial Sequence
  Description of Artificial Sequence: Synthetic oligonucleotide
  Sense strand starting at position 2445 of SEQ ID NO: 1881446
ggguuauguaaucaacgaa

SEQ ID NO: 2045137 - RNA, 19 nt, Artificial Sequence
  Description of Artificial Sequence: Synthetic oligonucleotide
  Antisense strand to SEQ ID NO: 2045136
uucguugauuacauaaccc

SEQ ID NO: 2045138 - RNA, 19 nt, Artificial Sequence
  Description of Artificial Sequence: Synthetic oligonucleotide
  Sense strand starting at position 2591 of SEQ ID NO: 1881446
accuaagaggccuaucauu

SEQ ID NO: 2045139 - RNA, 19 nt, Artificial Sequence
  Description of Artificial Sequence: Synthetic oligonucleotide
  Antisense strand to SEQ ID NO: 2045138
aaugauaggccucuuaggu

SEQ ID NO: 2045140 - RNA, 19 nt, Artificial Sequence
  Description of Artificial Sequence: Synthetic oligonucleotide
  Sense strand starting at position 2599 of SEQ ID NO: 1881446
ggccuaucauuugugagca

SEQ ID NO: 2045141 - RNA, 19 nt, Artificial Sequence
  Description of Artificial Sequence: Synthetic oligonucleotide
  Antisense strand to SEQ ID NO: 2045140
ugcucacaaaugauaggcc

SEQ ID NO: 2045142 - RNA, 19 nt, Artificial Sequence
  Description of Artificial Sequence: Synthetic oligonucleotide
  Sense strand starting at position 2687 of SEQ ID NO: 1881446
gagaaauacuaguuacuug

SEQ ID NO: 2045143 - RNA, 19 nt, Artificial Sequence
  Description of Artificial Sequence: Synthetic oligonucleotide
  Antisense strand to SEQ ID NO: 2045142
caaguaacuaguauuucuc

SEQ ID NO: 2045144 - RNA, 19 nt, Artificial Sequence
  Description of Artificial Sequence: Synthetic oligonucleotide
  Sense strand starting at position 2913 of SEQ ID NO: 1881446
ggucuagcaucugugaagu

SEQ ID NO: 2045145 - RNA, 19 nt, Artificial Sequence
  Description of Artificial Sequence: Synthetic oligonucleotide
  Antisense strand to SEQ ID NO: 2045144
acuucacagaugcuagacc

SEQ ID NO: 2045146 - RNA, 19 nt, Artificial Sequence
  Description of Artificial Sequence: Synthetic oligonucleotide
  Sense strand starting at position 3208 of SEQ ID NO: 1881446
gggcuucuccaacaguauu

SEQ ID NO: 2045147 - RNA, 19 nt, Artificial Sequence
  Description of Artificial Sequence: Synthetic oligonucleotide
  Antisense strand to SEQ ID NO: 2045146
aauacuguuggagaagccc

SEQ ID NO: 2045148 - RNA, 19 nt, Artificial Sequence
  Description of Artificial Sequence: Synthetic oligonucleotide
  Sense strand starting at position 3244 of SEQ ID NO: 1881446
aagguauauccagaguuuc

SEQ ID NO: 2045149 - RNA, 19 nt, Artificial Sequence
  Description of Artificial Sequence: Synthetic oligonucleotide
  Antisense strand to SEQ ID NO: 2045148
gaaacucuggauauaccuu

SEQ ID NO: 2045150 - RNA, 19 nt, Artificial Sequence
  Description of Artificial Sequence: Synthetic oligonucleotide
  Sense strand starting at position 3272 of SEQ ID NO: 1881446
gcuguaacaccaggaauca

SEQ ID NO: 2045151 - RNA, 19 nt, Artificial Sequence
  Description of Artificial Sequence: Synthetic oligonucleotide
  Antisense strand to SEQ ID NO: 2045150
ugauuccugguguuacagc

SEQ ID NO: 2045152 - RNA, 19 nt, Artificial Sequence
  Description of Artificial Sequence: Synthetic oligonucleotide
  Sense strand starting at position 3356 of SEQ ID NO: 1881446
gcagauugcuauucuguag

SEQ ID NO: 2045153 - RNA, 19 nt, Artificial Sequence
  Description of Artificial Sequence: Synthetic oligonucleotide
  Antisense strand to SEQ ID NO: 2045152
cuacagaauagcaaucugc

SEQ ID NO: 2045154 - RNA, 19 nt, Artificial Sequence
  Description of Artificial Sequence: Synthetic oligonucleotide
  Sense strand starting at position 3444 of SEQ ID NO: 1881446
guacaagacuuugagaaac

SEQ ID NO: 2045155 - RNA, 19 nt, Artificial Sequence
  Description of Artificial Sequence: Synthetic oligonucleotide
  Antisense strand to SEQ ID NO: 2045154
guuucucaaagucuuguac

SEQ ID NO: 2045156 - RNA, 19 nt, Artificial Sequence
  Description of Artificial Sequence: Synthetic oligonucleotide
  Sense strand starting at position 3446 of SEQ ID NO: 1881446
acaagacuuugagaaacaa

SEQ ID NO: 2045157 - RNA, 19 nt, Artificial Sequence
  Description of Artificial Sequence: Synthetic oligonucleotide
  Antisense strand to SEQ ID NO: 2045156
uuguuucucaaagucuugu

SEQ ID NO: 2045158 - RNA, 19 nt, Artificial Sequence
  Description of Artificial Sequence: Synthetic oligonucleotide
  Sense strand starting at position 3486 of SEQ ID NO: 1881446
ugagauaaguuuccaucua

SEQ ID NO: 2045159 - RNA, 19 nt, Artificial Sequence
  Description of Artificial Sequence: Synthetic oligonucleotide
  Antisense strand to SEQ ID NO: 2045158
uagauggaaacuuaucuca

SEQ ID NO: 2045160 - RNA, 19 nt, Artificial Sequence
  Description of Artificial Sequence: Synthetic oligonucleotide
  Sense strand starting at position 3529 of SEQ ID NO: 1881446
aucaacuugccuuaagaug

SEQ ID NO: 2045161 - RNA, 19 nt, Artificial Sequence
  Description of Artificial Sequence: Synthetic oligonucleotide
  Antisense strand to SEQ ID NO: 2045160
caucuuaaggcaaguugau

SEQ ID NO: 2045162 - RNA, 19 nt, Artificial Sequence
  Description of Artificial Sequence: Synthetic oligonucleotide
  Sense strand starting at position 3537 of SEQ ID NO: 1881446
gccuuaagauggccauguu

SEQ ID NO: 2045163 - RNA, 19 nt, Artificial Sequence
  Description of Artificial Sequence: Synthetic oligonucleotide
  Antisense strand to SEQ ID NO: 2045162
aacauggccaucuuaaggc

SEQ ID NO: 2045164 - RNA, 19 nt, Artificial Sequence
  Description of Artificial Sequence: Synthetic oligonucleotide
  Sense strand starting at position 3598 of SEQ ID NO: 1881446
uguaaacuauugcuguaga

SEQ ID NO: 2045165 - RNA, 19 nt, Artificial Sequence
  Description of Artificial Sequence: Synthetic oligonucleotide
  Antisense strand to SEQ ID NO: 2045164
ucuacagcaauaguuuaca

SEQ ID NO: 2045166 - RNA, 19 nt, Artificial Sequence
  Description of Artificial Sequence: Synthetic oligonucleotide
  Sense strand starting at position 3603 of SEQ ID NO: 1881446
acuauugcuguagaaacaa

SEQ ID NO: 2045167 - RNA, 19 nt, Artificial Sequence
  Description of Artificial Sequence: Synthetic oligonucleotide
  Antisense strand to SEQ ID NO: 2045166
uuguuucuacagcaauagu

SEQ ID NO: 2045168 - RNA, 19 nt, Artificial Sequence
  Description of Artificial Sequence: Synthetic oligonucleotide
  Sense strand starting at position 3693 of SEQ ID NO: 1881446
gggagcaguuuaccucaaa

SEQ ID NO: 2045169 - RNA, 19 nt, Artificial Sequence
  Description of Artificial Sequence: Synthetic oligonucleotide
  Antisense strand to SEQ ID NO: 2045168
uuugagguaaacugcuccc

SEQ ID NO: 2045170 - RNA, 19 nt, Artificial Sequence
  Description of Artificial Sequence: Synthetic oligonucleotide
  Sense strand starting at position 3694 of SEQ ID NO: 1881446
ggagcaguuuaccucaaag

SEQ ID NO: 2045171 - RNA, 19 nt, Artificial Sequence
  Description of Artificial Sequence: Synthetic oligonucleotide
  Antisense strand to SEQ ID NO: 2045170
cuuugagguaaacugcucc

SEQ ID NO: 2045172 - RNA, 19 nt, Artificial Sequence
  Description of Artificial Sequence: Synthetic oligonucleotide
  Sense strand starting at position 3704 of SEQ ID NO: 1881446
accucaaagccucauguga

SEQ ID NO: 2045173 - RNA, 19 nt, Artificial Sequence
  Description of Artificial Sequence: Synthetic oligonucleotide
  Antisense strand to SEQ ID NO: 2045172
ucacaugaggcuuugaggu

SEQ ID NO: 2045174 - RNA, 19 nt, Artificial Sequence
  Description of Artificial Sequence: Synthetic oligonucleotide
  Sense strand starting at position 3721 of SEQ ID NO: 1881446
gauugcugucaagauguug

SEQ ID NO: 2045175 - RNA, 19 nt, Artificial Sequence
  Description of Artificial Sequence: Synthetic oligonucleotide
  Antisense strand to SEQ ID NO: 2045174
caacaucuugacagcaauc

SEQ ID NO: 2045176 - RNA, 19 nt, Artificial Sequence
  Description of Artificial Sequence: Synthetic oligonucleotide
  Sense strand starting at position 3761 of SEQ ID NO: 1881446
aggcuugacugggucaaga

SEQ ID NO: 2045177 - RNA, 19 nt, Artificial Sequence
  Description of Artificial Sequence: Synthetic oligonucleotide
  Antisense strand to SEQ ID NO: 2045176
ucuugacccagucaagccu

SEQ ID NO: 2045178 - RNA, 19 nt, Artificial Sequence
  Description of Artificial Sequence: Synthetic oligonucleotide
  Sense strand starting at position 3763 of SEQ ID NO: 1881446
gcuugacugggucaagaag

SEQ ID NO: 2045179 - RNA, 19 nt, Artificial Sequence
  Description of Artificial Sequence: Synthetic oligonucleotide
  Antisense strand to SEQ ID NO: 2045178
cuucuugacccagucaagc

SEQ ID NO: 2045180 - RNA, 19 nt, Artificial Sequence
  Description of Artificial Sequence: Synthetic oligonucleotide
  Sense strand starting at position 3832 of SEQ ID NO: 1881446
ccuugucaugaguaccuuu

SEQ ID NO: 2045181 - RNA, 19 nt, Artificial Sequence
  Description of Artificial Sequence: Synthetic oligonucleotide
  Antisense strand to SEQ ID NO: 2045180
aaagguacucaugacaagg

SEQ ID NO: 2045182 - RNA, 19 nt, Artificial Sequence
  Description of Artificial Sequence: Synthetic oligonucleotide
  Sense strand starting at position 3842 of SEQ ID NO: 1881446
aguaccuuuccauagaguu

SEQ ID NO: 2045183 - RNA, 19 nt, Artificial Sequence
  Description of Artificial Sequence: Synthetic oligonucleotide
  Antisense strand to SEQ ID NO: 2045182
aacucuauggaaagguacu

SEQ ID NO: 2045184 - RNA, 19 nt, Artificial Sequence
  Description of Artificial Sequence: Synthetic oligonucleotide
  Sense strand starting at position 3850 of SEQ ID NO: 1881446
uccauagaguugcuuaagu

SEQ ID NO: 2045185 - RNA, 19 nt, Artificial Sequence
  Description of Artificial Sequence: Synthetic oligonucleotide
  Antisense strand to SEQ ID NO: 2045184
acuuaagcaacucuaugga

SEQ ID NO: 2045186 - RNA, 19 nt, Artificial Sequence
  Description of Artificial Sequence: Synthetic oligonucleotide
  Sense strand starting at position 3852 of SEQ ID NO: 1881446
cauagaguugcuuaagugu

SEQ ID NO: 2045187 - RNA, 19 nt, Artificial Sequence
  Description of Artificial Sequence: Synthetic oligonucleotide
  Antisense strand to SEQ ID NO: 2045186
acacuuaagcaacucuaug

SEQ ID NO: 2045188 - RNA, 19 nt, Artificial Sequence
  Description of Artificial Sequence: Synthetic oligonucleotide
  Sense strand starting at position 3861 of SEQ ID NO: 1881446
gcuuaagugucaccaugac

SEQ ID NO: 2045189 - RNA, 19 nt, Artificial Sequence
  Description of Artificial Sequence: Synthetic oligonucleotide
  Antisense strand to SEQ ID NO: 2045188
gucauggugacacuuaagc

SEQ ID NO: 2045190 - RNA, 19 nt, Artificial Sequence
  Description of Artificial Sequence: Synthetic oligonucleotide
  Sense strand starting at position 3981 of SEQ ID NO: 1881446
cauuaaugauggcugauga

SEQ ID NO: 2045191 - RNA, 19 nt, Artificial Sequence
  Description of Artificial Sequence: Synthetic oligonucleotide
  Antisense strand to SEQ ID NO: 2045190
ucaucagccaucauuaaug

SEQ ID NO: 2045192 - RNA, 19 nt, Artificial Sequence
  Description of Artificial Sequence: Synthetic oligonucleotide
  Sense strand starting at position 66 of SEQ ID NO: 1881447
ccaugcauugucuaugaug

SEQ ID NO: 2045193 - RNA, 19 nt, Artificial Sequence
  Description of Artificial Sequence: Synthetic oligonucleotide
  Antisense strand to SEQ ID NO: 2045192
caucauagacaaugcaugg

SEQ ID NO: 2045194 - RNA, 19 nt, Artificial Sequence
  Description of Artificial Sequence: Synthetic oligonucleotide
  Sense strand starting at position 80 of SEQ ID NO: 1881447
ugauguagauggagaggua

SEQ ID NO: 2045195 - RNA, 19 nt, Artificial Sequence
  Description of Artificial Sequence: Synthetic oligonucleotide
  Antisense strand to SEQ ID NO: 2045194
uaccucuccaucuacauca

SEQ ID NO: 2045196 - RNA, 19 nt, Artificial Sequence
  Description of Artificial Sequence: Synthetic oligonucleotide
  Sense strand starting at position 92 of SEQ ID NO: 1881447
agagguauagcauauuauc

SEQ ID NO: 2045197 - RNA, 19 nt, Artificial Sequence
  Description of Artificial Sequence: Synthetic oligonucleotide
  Antisense strand to SEQ ID NO: 2045196
gauaauaugcuauaccucu

SEQ ID NO: 2045198 - RNA, 19 nt, Artificial Sequence
  Description of Artificial Sequence: Synthetic oligonucleotide
  Sense strand starting at position 119 of SEQ ID NO: 1881447
ccucaaauccugugaggga

SEQ ID NO: 2045199 - RNA, 19 nt, Artificial Sequence
  Description of Artificial Sequence: Synthetic oligonucleotide
  Antisense strand to SEQ ID NO: 2045198
ucccucacaggauuugagg

SEQ ID NO: 2045200 - RNA, 19 nt, Artificial Sequence
  Description of Artificial Sequence: Synthetic oligonucleotide
  Sense strand starting at position 126 of SEQ ID NO: 1881447
uccugugagggaugugaau

SEQ ID NO: 2045201 - RNA, 19 nt, Artificial Sequence
  Description of Artificial Sequence: Synthetic oligonucleotide
  Antisense strand to SEQ ID NO: 2045200
auucacaucccucacagga

SEQ ID NO: 2045202 - RNA, 19 nt, Artificial Sequence
  Description of Artificial Sequence: Synthetic oligonucleotide
  Sense strand starting at position 128 of SEQ ID NO: 1881447
cugugagggaugugaauca

SEQ ID NO: 2045203 - RNA, 19 nt, Artificial Sequence
  Description of Artificial Sequence: Synthetic oligonucleotide
  Antisense strand to SEQ ID NO: 2045202
ugauucacaucccucacag

SEQ ID NO: 2045204 - RNA, 19 nt, Artificial Sequence
  Description of Artificial Sequence: Synthetic oligonucleotide
  Sense strand starting at position 185 of SEQ ID NO: 1881447
agagaugaguggagauuga

SEQ ID NO: 2045205 - RNA, 19 nt, Artificial Sequence
  Description of Artificial Sequence: Synthetic oligonucleotide
  Antisense strand to SEQ ID NO: 2045204
ucaaucuccacucaucucu

SEQ ID NO: 2045206 - RNA, 19 nt, Artificial Sequence
  Description of Artificial Sequence: Synthetic oligonucleotide
  Sense strand starting at position 192 of SEQ ID NO: 1881447
aguggagauugaucacuau

SEQ ID NO: 2045207 - RNA, 19 nt, Artificial Sequence
  Description of Artificial Sequence: Synthetic oligonucleotide
  Antisense strand to SEQ ID NO: 2045206
auagugaucaaucuccacu

SEQ ID NO: 2045208 - RNA, 19 nt, Artificial Sequence
  Description of Artificial Sequence: Synthetic oligonucleotide
  Sense strand starting at position 214 of SEQ ID NO: 1881447
uuaugucaaagagguaagu

SEQ ID NO: 2045209 - RNA, 19 nt, Artificial Sequence
  Description of Artificial Sequence: Synthetic oligonucleotide
  Antisense strand to SEQ ID NO: 2045208
acuuaccucuuugacauaa

SEQ ID NO: 2045210 - RNA, 19 nt, Artificial Sequence
  Description of Artificial Sequence: Synthetic oligonucleotide
  Sense strand starting at position 216 of SEQ ID NO: 1881447
augucaaagagguaaguuu

SEQ ID NO: 2045211 - RNA, 19 nt, Artificial Sequence
  Description of Artificial Sequence: Synthetic oligonucleotide
  Antisense strand to SEQ ID NO: 2045210
aaacuuaccucuuugacau

SEQ ID NO: 2045212 - RNA, 19 nt, Artificial Sequence
  Description of Artificial Sequence: Synthetic oligonucleotide
  Sense strand starting at position 244 of SEQ ID NO: 1881447
guuugaaguuaugugagag

SEQ ID NO: 2045213 - RNA, 19 nt, Artificial Sequence
  Description of Artificial Sequence: Synthetic oligonucleotide
  Antisense strand to SEQ ID NO: 2045212
cucucacauaacuucaaac

SEQ ID NO: 2045214 - RNA, 19 nt, Artificial Sequence
  Description of Artificial Sequence: Synthetic oligonucleotide
  Sense strand starting at position 245 of SEQ ID NO: 1881447
uuugaaguuaugugagaga

SEQ ID NO: 2045215 - RNA, 19 nt, Artificial Sequence
  Description of Artificial Sequence: Synthetic oligonucleotide
  Antisense strand to SEQ ID NO: 2045214
ucucucacauaacuucaaa

SEQ ID NO: 2045216 - RNA, 19 nt, Artificial Sequence
  Description of Artificial Sequence: Synthetic oligonucleotide
  Sense strand starting at position 401 of SEQ ID NO: 1881447
caaggugaauguucuggau

SEQ ID NO: 2045217 - RNA, 19 nt, Artificial Sequence
  Description of Artificial Sequence: Synthetic oligonucleotide
  Antisense strand to SEQ ID NO: 2045216
auccagaacauucaccuug

SEQ ID NO: 2045218 - RNA, 19 nt, Artificial Sequence
  Description of Artificial Sequence: Synthetic oligonucleotide
  Sense strand starting at position 405 of SEQ ID NO: 1881447
gugaauguucuggauacau

SEQ ID NO: 2045219 - RNA, 19 nt, Artificial Sequence
  Description of Artificial Sequence: Synthetic oligonucleotide
  Antisense strand to SEQ ID NO: 2045218
auguauccagaacauucac

SEQ ID NO: 2045220 - RNA, 19 nt, Artificial Sequence
  Description of Artificial Sequence: Synthetic oligonucleotide
  Sense strand starting at position 407 of SEQ ID NO: 1881447
gaauguucuggauacaugu

SEQ ID NO: 2045221 - RNA, 19 nt, Artificial Sequence
  Description of Artificial Sequence: Synthetic oligonucleotide
  Antisense strand to SEQ ID NO: 2045220
acauguauccagaacauuc

SEQ ID NO: 2045222 - RNA, 19 nt, Artificial Sequence
  Description of Artificial Sequence: Synthetic oligonucleotide
  Sense strand starting at position 591 of SEQ ID NO: 1881447
guagauuccacauggguaa

SEQ ID NO: 2045223 - RNA, 19 nt, Artificial Sequence
  Description of Artificial Sequence: Synthetic oligonucleotide
  Antisense strand to SEQ ID NO: 2045222
uuacccauguggaaucuac

SEQ ID NO: 2045224 - RNA, 19 nt, Artificial Sequence
  Description of Artificial Sequence: Synthetic oligonucleotide
  Sense strand starting at position 592 of SEQ ID NO: 1881447
uagauuccacauggguaaa

SEQ ID NO: 2045225 - RNA, 19 nt, Artificial Sequence
  Description of Artificial Sequence: Synthetic oligonucleotide
  Antisense strand to SEQ ID NO: 2045224
uuuacccauguggaaucua

SEQ ID NO: 2045226 - RNA, 19 nt, Artificial Sequence
  Description of Artificial Sequence: Synthetic oligonucleotide
  Sense strand starting at position 594 of SEQ ID NO: 1881447
gauuccacauggguaaaua

SEQ ID NO: 2045227 - RNA, 19 nt, Artificial Sequence
  Description of Artificial Sequence: Synthetic oligonucleotide
  Antisense strand to SEQ ID NO: 2045226
uauuuacccauguggaauc

SEQ ID NO: 2045228 - RNA, 19 nt, Artificial Sequence
  Description of Artificial Sequence: Synthetic oligonucleotide
  Sense strand starting at position 681 of SEQ ID NO: 1881447
caugucuuggaucaaguuu

SEQ ID NO: 2045229 - RNA, 19 nt, Artificial Sequence
  Description of Artificial Sequence: Synthetic oligonucleotide
  Antisense strand to SEQ ID NO: 2045228
aaacuugauccaagacaug

SEQ ID NO: 2045230 - RNA, 19 nt, Artificial Sequence
  Description of Artificial Sequence: Synthetic oligonucleotide
  Sense strand starting at position 809 of SEQ ID NO: 1881447
guacuuaaaucaguauaga

SEQ ID NO: 2045231 - RNA, 19 nt, Artificial Sequence
  Description of Artificial Sequence: Synthetic oligonucleotide
  Antisense strand to SEQ ID NO: 2045230
ucuauacugauuuaaguac

SEQ ID NO: 2045232 - RNA, 19 nt, Artificial Sequence
  Description of Artificial Sequence: Synthetic oligonucleotide
  Sense strand starting at position 879 of SEQ ID NO: 1881447
agguuaauuaaauguguga

SEQ ID NO: 2045233 - RNA, 19 nt, Artificial Sequence
  Description of Artificial Sequence: Synthetic oligonucleotide
  Antisense strand to SEQ ID NO: 2045232
ucacacauuuaauuaaccu

SEQ ID NO: 2045234 - RNA, 19 nt, Artificial Sequence
  Description of Artificial Sequence: Synthetic oligonucleotide
  Sense strand starting at position 1207 of SEQ ID NO: 1881447
gccuguuuaauuuguggaa

SEQ ID NO: 2045235 - RNA, 19 nt, Artificial Sequence
  Description of Artificial Sequence: Synthetic oligonucleotide
  Antisense strand to SEQ ID NO: 2045234
uuccacaaauuaaacaggc

SEQ ID NO: 2045236 - RNA, 19 nt, Artificial Sequence
  Description of Artificial Sequence: Synthetic oligonucleotide
  Sense strand starting at position 1220 of SEQ ID NO: 1881447
guggaagacaguugucaaa

SEQ ID NO: 2045237 - RNA, 19 nt, Artificial Sequence
  Description of Artificial Sequence: Synthetic oligonucleotide
  Antisense strand to SEQ ID NO: 2045236
uuugacaacugucuuccac

SEQ ID NO: 2045238 - RNA, 19 nt, Artificial Sequence
  Description of Artificial Sequence: Synthetic oligonucleotide
  Sense strand starting at position 1222 of SEQ ID NO: 1881447
ggaagacaguugucaaaug

SEQ ID NO: 2045239 - RNA, 19 nt, Artificial Sequence
  Description of Artificial Sequence: Synthetic oligonucleotide
  Antisense strand to SEQ ID NO: 2045238
cauuugacaacugucuucc

SEQ ID NO: 2045240 - RNA, 19 nt, Artificial Sequence
  Description of Artificial Sequence: Synthetic oligonucleotide
  Sense strand starting at position 1295 of SEQ ID NO: 1881447
agaugagugccuuauuaaa

SEQ ID NO: 2045241 - RNA, 19 nt, Artificial Sequence
  Description of Artificial Sequence: Synthetic oligonucleotide
  Antisense strand to SEQ ID NO: 2045240
uuuaauaaggcacucaucu

SEQ ID NO: 2045242 - RNA, 19 nt, Artificial Sequence
  Description of Artificial Sequence: Synthetic oligonucleotide
  Sense strand starting at position 1988 of SEQ ID NO: 1881447
agggcuguaaauugauaaa

SEQ ID NO: 2045243 - RNA, 19 nt, Artificial Sequence
  Description of Artificial Sequence: Synthetic oligonucleotide
  Antisense strand to SEQ ID NO: 2045242
uuuaucaauuuacagcccu

SEQ ID NO: 2045244 - RNA, 19 nt, Artificial Sequence
  Description of Artificial Sequence: Synthetic oligonucleotide
  Sense strand starting at position 2092 of SEQ ID NO: 1881447
augugagaguaacuauuga

SEQ ID NO: 2045245 - RNA, 19 nt, Artificial Sequence
  Description of Artificial Sequence: Synthetic oligonucleotide
  Antisense strand to SEQ ID NO: 2045244
ucaauaguuacucucacau

SEQ ID NO: 2045246 - RNA, 19 nt, Artificial Sequence
  Description of Artificial Sequence: Synthetic oligonucleotide
  Sense strand starting at position 2445 of SEQ ID NO: 1881447
acagcacuucuuugggaau

SEQ ID NO: 2045247 - RNA, 19 nt, Artificial Sequence
  Description of Artificial Sequence: Synthetic oligonucleotide
  Antisense strand to SEQ ID NO: 2045246
auucccaaagaagugcugu

SEQ ID NO: 2045248 - RNA, 19 nt, Artificial Sequence
  Description of Artificial Sequence: Synthetic oligonucleotide
  Sense strand starting at position 2541 of SEQ ID NO: 1881447
uaaggcauaguuuagauau

SEQ ID NO: 2045249 - RNA, 19 nt, Artificial Sequence
  Description of Artificial Sequence: Synthetic oligonucleotide
  Antisense strand to SEQ ID NO: 2045248
auaucuaaacuaugccuua

SEQ ID NO: 2045250 - RNA, 19 nt, Artificial Sequence
  Description of Artificial Sequence: Synthetic oligonucleotide
  Sense strand starting at position 2554 of SEQ ID NO: 1881447
agauauaguuccuuuauug

SEQ ID NO: 2045251 - RNA, 19 nt, Artificial Sequence
  Description of Artificial Sequence: Synthetic oligonucleotide
  Antisense strand to SEQ ID NO: 2045250
caauaaaggaacuauaucu

SEQ ID NO: 2045252 - RNA, 19 nt, Artificial Sequence
  Description of Artificial Sequence: Synthetic oligonucleotide
  Sense strand starting at position 2801 of SEQ ID NO: 1881447
uguuaaagauagucccaau

SEQ ID NO: 2045253 - RNA, 19 nt, Artificial Sequence
  Description of Artificial Sequence: Synthetic oligonucleotide
  Antisense strand to SEQ ID NO: 2045252
auugggacuaucuuuaaca

SEQ ID NO: 2045254 - RNA, 19 nt, Artificial Sequence
  Description of Artificial Sequence: Synthetic oligonucleotide
  Sense strand starting at position 3090 of SEQ ID NO: 1881447
acauaaguauuugacugaa

SEQ ID NO: 2045255 - RNA, 19 nt, Artificial Sequence
  Description of Artificial Sequence: Synthetic oligonucleotide
  Antisense strand to SEQ ID NO: 2045254
uucagucaaauacuuaugu

SEQ ID NO: 2045256 - RNA, 19 nt, Artificial Sequence
  Description of Artificial Sequence: Synthetic oligonucleotide
  Sense strand starting at position 3125 of SEQ ID NO: 1881447
uuugauauauucucuguag

SEQ ID NO: 2045257 - RNA, 19 nt, Artificial Sequence
  Description of Artificial Sequence: Synthetic oligonucleotide
  Antisense strand to SEQ ID NO: 2045256
cuacagagaauauaucaaa

SEQ ID NO: 2045258 - RNA, 19 nt, Artificial Sequence
  Description of Artificial Sequence: Synthetic oligonucleotide
  Sense strand starting at position 3151 of SEQ ID NO: 1881447
agugauauccuccguauuu

SEQ ID NO: 2045259 - RNA, 19 nt, Artificial Sequence
  Description of Artificial Sequence: Synthetic oligonucleotide
  Antisense strand to SEQ ID NO: 2045258
aaauacggaggauaucacu

SEQ ID NO: 2045260 - RNA, 19 nt, Artificial Sequence
  Description of Artificial Sequence: Synthetic oligonucleotide
  Sense strand starting at position 3230 of SEQ ID NO: 1881447
ucuaauaauggugagguuu

SEQ ID NO: 2045261 - RNA, 19 nt, Artificial Sequence
  Description of Artificial Sequence: Synthetic oligonucleotide
  Antisense strand to SEQ ID NO: 2045260
aaaccucaccauuauuaga

SEQ ID NO: 2045262 - RNA, 19 nt, Artificial Sequence
  Description of Artificial Sequence: Synthetic oligonucleotide
  Sense strand starting at position 3379 of SEQ ID NO: 1881447
aguaaagauucucucaguu

SEQ ID NO: 2045263 - RNA, 19 nt, Artificial Sequence
  Description of Artificial Sequence: Synthetic oligonucleotide
  Antisense strand to SEQ ID NO: 2045262
aacugagagaaucuuuacu

SEQ ID NO: 2045264 - RNA, 19 nt, Artificial Sequence
  Description of Artificial Sequence: Synthetic oligonucleotide
  Sense strand starting at position 3458 of SEQ ID NO: 1881447
aagggagagccuugguuua

SEQ ID NO: 2045265 - RNA, 19 nt, Artificial Sequence
  Description of Artificial Sequence: Synthetic oligonucleotide
  Antisense strand to SEQ ID NO: 2045264
uaaaccaaggcucucccuu

SEQ ID NO: 2045266 - RNA, 19 nt, Artificial Sequence
  Description of Artificial Sequence: Synthetic oligonucleotide
  Sense strand starting at position 3486 of SEQ ID NO: 1881447
cuguguuucccucuuguuu

SEQ ID NO: 2045267 - RNA, 19 nt, Artificial Sequence
  Description of Artificial Sequence: Synthetic oligonucleotide
  Antisense strand to SEQ ID NO: 2045266
aaacaagagggaaacacag

SEQ ID NO: 2045268 - RNA, 19 nt, Artificial Sequence
  Description of Artificial Sequence: Synthetic oligonucleotide
  Sense strand starting at position 3621 of SEQ ID NO: 1881447
auuaccuucuugucaggaa

SEQ ID NO: 2045269 - RNA, 19 nt, Artificial Sequence
  Description of Artificial Sequence: Synthetic oligonucleotide
  Antisense strand to SEQ ID NO: 2045268
uuccugacaagaagguaau

SEQ ID NO: 2045270 - RNA, 19 nt, Artificial Sequence
  Description of Artificial Sequence: Synthetic oligonucleotide
  Sense strand starting at position 3743 of SEQ ID NO: 1881447
acacuagaggcuugugaug

SEQ ID NO: 2045271 - RNA, 19 nt, Artificial Sequence
  Description of Artificial Sequence: Synthetic oligonucleotide
  Antisense strand to SEQ ID NO: 2045270
caucacaagccucuagugu

SEQ ID NO: 2045272 - RNA, 19 nt, Artificial Sequence
  Description of Artificial Sequence: Synthetic oligonucleotide
  Sense strand starting at position 2280 of SEQ ID NO: 1881448
gaaggagcauccgagagau

SEQ ID NO: 2045273 - RNA, 19 nt, Artificial Sequence
  Description of Artificial Sequence: Synthetic oligonucleotide
  Antisense strand to SEQ ID NO: 2045272
aucucucggaugcuccuuc

SEQ ID NO: 2045274 - RNA, 19 nt, Artificial Sequence
  Description of Artificial Sequence: Synthetic oligonucleotide
  Sense strand starting at position 3061 of SEQ ID NO: 1881448
ccugacugucccgggagaa

SEQ ID NO: 2045275 - RNA, 19 nt, Artificial Sequence
  Description of Artificial Sequence: Synthetic oligonucleotide
  Antisense strand to SEQ ID NO: 2045274
uucucccgggacagucagg

SEQ ID NO: 2045276 - RNA, 19 nt, Artificial Sequence
  Description of Artificial Sequence: Synthetic oligonucleotide
  Sense strand starting at position 3375 of SEQ ID NO: 1881448
ggcgcuuccuccuggaguu

SEQ ID NO: 2045277 - RNA, 19 nt, Artificial Sequence
  Description of Artificial Sequence: Synthetic oligonucleotide
  Antisense strand to SEQ ID NO: 2045276
aacuccaggaggaagcgcc

SEQ ID NO: 2045278 - RNA, 19 nt, Artificial Sequence
  Description of Artificial Sequence: Synthetic oligonucleotide
  Sense strand starting at position 3376 of SEQ ID NO: 1881448
gcgcuuccuccuggaguuu

SEQ ID NO: 2045279 - RNA, 19 nt, Artificial Sequence
  Description of Artificial Sequence: Synthetic oligonucleotide
  Antisense strand to SEQ ID NO: 2045278
aaacuccaggaggaagcgc

SEQ ID NO: 2045280 - RNA, 19 nt, Artificial Sequence
  Description of Artificial Sequence: Synthetic oligonucleotide
  Sense strand starting at position 3396 of SEQ ID NO: 1881448
gcugauguucuccaguagu

SEQ ID NO: 2045281 - RNA, 19 nt, Artificial Sequence
  Description of Artificial Sequence: Synthetic oligonucleotide
  Antisense strand to SEQ ID NO: 2045280
acuacuggagaacaucagc

SEQ ID NO: 2045282 - RNA, 19 nt, Artificial Sequence
  Description of Artificial Sequence: Synthetic oligonucleotide
  Sense strand starting at position 3399 of SEQ ID NO: 1881448
gauguucuccaguaguguu

SEQ ID NO: 2045283 - RNA, 19 nt, Artificial Sequence
  Description of Artificial Sequence: Synthetic oligonucleotide
  Antisense strand to SEQ ID NO: 2045282
aacacuacuggagaacauc

SEQ ID NO: 2045284 - RNA, 19 nt, Artificial Sequence
  Description of Artificial Sequence: Synthetic oligonucleotide
  Sense strand starting at position 3416 of SEQ ID NO: 1881448
uugggagucuaucaaugag

SEQ ID NO: 2045285 - RNA, 19 nt, Artificial Sequence
  Description of Artificial Sequence: Synthetic oligonucleotide
  Antisense strand to SEQ ID NO: 2045284
cucauugauagacucccaa

SEQ ID NO: 2045286 - RNA, 19 nt, Artificial Sequence
  Description of Artificial Sequence: Synthetic oligonucleotide
  Sense strand starting at position 3432 of SEQ ID NO: 1881448
gagggagucuagcuuuauu

SEQ ID NO: 2045287 - RNA, 19 nt, Artificial Sequence
  Description of Artificial Sequence: Synthetic oligonucleotide
  Antisense strand to SEQ ID NO: 2045286
aauaaagcuagacucccuc

SEQ ID NO: 2045288 - RNA, 19 nt, Artificial Sequence
  Description of Artificial Sequence: Synthetic oligonucleotide
  Sense strand starting at position 3497 of SEQ ID NO: 1881448
uagcucuuuguacgaguaa

SEQ ID NO: 2045289 - RNA, 19 nt, Artificial Sequence
  Description of Artificial Sequence: Synthetic oligonucleotide
  Antisense strand to SEQ ID NO: 2045288
uuacucguacaaagagcua

SEQ ID NO: 2045290 - RNA, 19 nt, Artificial Sequence
  Description of Artificial Sequence: Synthetic oligonucleotide
  Sense strand starting at position 3498 of SEQ ID NO: 1881448
agcucuuuguacgaguaau

SEQ ID NO: 2045291 - RNA, 19 nt, Artificial Sequence
  Description of Artificial Sequence: Synthetic oligonucleotide
  Antisense strand to SEQ ID NO: 2045290
auuacucguacaaagagcu

SEQ ID NO: 2045292 - RNA, 19 nt, Artificial Sequence
  Description of Artificial Sequence: Synthetic oligonucleotide
  Sense strand starting at position 3506 of SEQ ID NO: 1881448
guacgaguaaugcaaguau

SEQ ID NO: 2045293 - RNA, 19 nt, Artificial Sequence
  Description of Artificial Sequence: Synthetic oligonucleotide
  Antisense strand to SEQ ID NO: 2045292
auacuugcauuacucguac

SEQ ID NO: 2045294 - RNA, 19 nt, Artificial Sequence
  Description of Artificial Sequence: Synthetic oligonucleotide
  Sense strand starting at position 3525 of SEQ ID NO: 1881448
gcagguuucugucggagga

SEQ ID NO: 2045295 - RNA, 19 nt, Artificial Sequence
  Description of Artificial Sequence: Synthetic oligonucleotide
  Antisense strand to SEQ ID NO: 2045294
uccuccgacagaaaccugc

SEQ ID NO: 2045296 - RNA, 19 nt, Artificial Sequence
  Description of Artificial Sequence: Synthetic oligonucleotide
  Sense strand starting at position 3527 of SEQ ID NO: 1881448
agguuucugucggaggagu

SEQ ID NO: 2045297 - RNA, 19 nt, Artificial Sequence
  Description of Artificial Sequence: Synthetic oligonucleotide
  Antisense strand to SEQ ID NO: 2045296
acuccuccgacagaaaccu

SEQ ID NO: 2045298 - RNA, 19 nt, Artificial Sequence
  Description of Artificial Sequence: Synthetic oligonucleotide
  Sense strand starting at position 3528 of SEQ ID NO: 1881448
gguuucugucggaggaguc

SEQ ID NO: 2045299 - RNA, 19 nt, Artificial Sequence
  Description of Artificial Sequence: Synthetic oligonucleotide
  Antisense strand to SEQ ID NO: 2045298
gacuccuccgacagaaacc

SEQ ID NO: 2045300 - RNA, 19 nt, Artificial Sequence
  Description of Artificial Sequence: Synthetic oligonucleotide
  Sense strand starting at position 3557 of SEQ ID NO: 1881448
agugaauacucgcaccuuu

SEQ ID NO: 2045301 - RNA, 19 nt, Artificial Sequence
  Description of Artificial Sequence: Synthetic oligonucleotide
  Antisense strand to SEQ ID NO: 2045300
aaaggugcgaguauucacu

SEQ ID NO: 2045302 - RNA, 19 nt, Artificial Sequence
  Description of Artificial Sequence: Synthetic oligonucleotide
  Sense strand starting at position 3583 of SEQ ID NO: 1881448
gcaguuggcaaagggaaau

SEQ ID NO: 2045303 - RNA, 19 nt, Artificial Sequence
  Description of Artificial Sequence: Synthetic oligonucleotide
  Antisense strand to SEQ ID NO: 2045302
auuucccuuugccaacugc

SEQ ID NO: 2045304 - RNA, 19 nt, Artificial Sequence
  Description of Artificial Sequence: Synthetic oligonucleotide
  Sense strand starting at position 3613 of SEQ ID NO: 1881448
gagcauaugugcgcacaga

SEQ ID NO: 2045305 - RNA, 19 nt, Artificial Sequence
  Description of Artificial Sequence: Synthetic oligonucleotide
  Antisense strand to SEQ ID NO: 2045304
ucugugcgcacauaugcuc

SEQ ID NO: 2045306 - RNA, 19 nt, Artificial Sequence
  Description of Artificial Sequence: Synthetic oligonucleotide
  Sense strand starting at position 3667 of SEQ ID NO: 1881448
gggugugugcgguguacuu

SEQ ID NO: 2045307 - RNA, 19 nt, Artificial Sequence
  Description of Artificial Sequence: Synthetic oligonucleotide
  Antisense strand to SEQ ID NO: 2045306
aaguacaccgcacacaccc

SEQ ID NO: 2045308 - RNA, 19 nt, Artificial Sequence
  Description of Artificial Sequence: Synthetic oligonucleotide
  Sense strand starting at position 3705 of SEQ ID NO: 1881448
cauauagguucccgaauga

SEQ ID NO: 2045309 - RNA, 19 nt, Artificial Sequence
  Description of Artificial Sequence: Synthetic oligonucleotide
  Antisense strand to SEQ ID NO: 2045308
ucauucgggaaccuauaug

SEQ ID NO: 2045310 - RNA, 19 nt, Artificial Sequence
  Description of Artificial Sequence: Synthetic oligonucleotide
  Sense strand starting at position 3709 of SEQ ID NO: 1881448
uagguucccgaaugagaac

SEQ ID NO: 2045311 - RNA, 19 nt, Artificial Sequence
  Description of Artificial Sequence: Synthetic oligonucleotide
  Antisense strand to SEQ ID NO: 2045310
guucucauucgggaaccua

SEQ ID NO: 2045312 - RNA, 19 nt, Artificial Sequence
  Description of Artificial Sequence: Synthetic oligonucleotide
  Sense strand starting at position 3810 of SEQ ID NO: 1881448
uaccuauugguacaggagu

SEQ ID NO: 2045313 - RNA, 19 nt, Artificial Sequence
  Description of Artificial Sequence: Synthetic oligonucleotide
  Antisense strand to SEQ ID NO: 2045312
acuccuguaccaauaggua

SEQ ID NO: 2045314 - RNA, 19 nt, Artificial Sequence
  Description of Artificial Sequence: Synthetic oligonucleotide
  Sense strand starting at position 3812 of SEQ ID NO: 1881448
ccuauugguacaggaguua

SEQ ID NO: 2045315 - RNA, 19 nt, Artificial Sequence
  Description of Artificial Sequence: Synthetic oligonucleotide
  Antisense strand to SEQ ID NO: 2045314
uaacuccuguaccaauagg

SEQ ID NO: 2045316 - RNA, 19 nt, Artificial Sequence
  Description of Artificial Sequence: Synthetic oligonucleotide
  Sense strand starting at position 3836 of SEQ ID NO: 1881448
cucaguuacuggguccaau

SEQ ID NO: 2045317 - RNA, 19 nt, Artificial Sequence
  Description of Artificial Sequence: Synthetic oligonucleotide
  Antisense strand to SEQ ID NO: 2045316
auuggacccaguaacugag

SEQ ID NO: 2045318 - RNA, 19 nt, Artificial Sequence
  Description of Artificial Sequence: Synthetic oligonucleotide
  Sense strand starting at position 3847 of SEQ ID NO: 1881448
gguccaauuucaugugugu

SEQ ID NO: 2045319 - RNA, 19 nt, Artificial Sequence
  Description of Artificial Sequence: Synthetic oligonucleotide
  Antisense strand to SEQ ID NO: 2045318
acacacaugaaauuggacc

SEQ ID NO: 2045320 - RNA, 19 nt, Artificial Sequence
  Description of Artificial Sequence: Synthetic oligonucleotide
  Sense strand starting at position 3884 of SEQ ID NO: 1881448
gaugucaguuacucaggaa

SEQ ID NO: 2045321 - RNA, 19 nt, Artificial Sequence
  Description of Artificial Sequence: Synthetic oligonucleotide
  Antisense strand to SEQ ID NO: 2045320
uuccugaguaacugacauc

SEQ ID NO: 2045322 - RNA, 19 nt, Artificial Sequence
  Description of Artificial Sequence: Synthetic oligonucleotide
  Sense strand starting at position 3887 of SEQ ID NO: 1881448
gucaguuacucaggaacuu

SEQ ID NO: 2045323 - RNA, 19 nt, Artificial Sequence
  Description of Artificial Sequence: Synthetic oligonucleotide
  Antisense strand to SEQ ID NO: 2045322
aaguuccugaguaacugac

SEQ ID NO: 2045324 - RNA, 19 nt, Artificial Sequence
  Description of Artificial Sequence: Synthetic oligonucleotide
  Sense strand starting at position 3896 of SEQ ID NO: 1881448
ucaggaacuugaguuguua

SEQ ID NO: 2045325 - RNA, 19 nt, Artificial Sequence
  Description of Artificial Sequence: Synthetic oligonucleotide
  Antisense strand to SEQ ID NO: 2045324
uaacaacucaaguuccuga

SEQ ID NO: 2045326 - RNA, 19 nt, Artificial Sequence
  Description of Artificial Sequence: Synthetic oligonucleotide
  Sense strand starting at position 3900 of SEQ ID NO: 1881448
gaacuugaguuguuaggaa

SEQ ID NO: 2045327 - RNA, 19 nt, Artificial Sequence
  Description of Artificial Sequence: Synthetic oligonucleotide
  Antisense strand to SEQ ID NO: 2045326
uuccuaacaacucaaguuc

SEQ ID NO: 2045328 - RNA, 19 nt, Artificial Sequence
  Description of Artificial Sequence: Synthetic oligonucleotide
  Sense strand starting at position 3904 of SEQ ID NO: 1881448
uugaguuguuaggaaucac

SEQ ID NO: 2045329 - RNA, 19 nt, Artificial Sequence
  Description of Artificial Sequence: Synthetic oligonucleotide
  Antisense strand to SEQ ID NO: 2045328
gugauuccuaacaacucaa

SEQ ID NO: 2045330 - RNA, 19 nt, Artificial Sequence
  Description of Artificial Sequence: Synthetic oligonucleotide
  Sense strand starting at position 1 of SEQ ID NO: 1881449
gcucucugccgguuacagu

SEQ ID NO: 2045331 - RNA, 19 nt, Artificial Sequence
  Description of Artificial Sequence: Synthetic oligonucleotide
  Antisense strand to SEQ ID NO: 2045330
acuguaaccggcagagagc

SEQ ID NO: 2045332 - RNA, 19 nt, Artificial Sequence
  Description of Artificial Sequence: Synthetic oligonucleotide
  Sense strand starting at position 24 of SEQ ID NO: 1881449
ugggaacugaccugugaac

SEQ ID NO: 2045333 - RNA, 19 nt, Artificial Sequence
  Description of Artificial Sequence: Synthetic oligonucleotide
  Antisense strand to SEQ ID NO: 2045332
guucacaggucaguuccca

SEQ ID NO: 2045334 - RNA, 19 nt, Artificial Sequence
  Description of Artificial Sequence: Synthetic oligonucleotide
  Sense strand starting at position 26 of SEQ ID NO: 1881449
ggaacugaccugugaacug

SEQ ID NO: 2045335 - RNA, 19 nt, Artificial Sequence
  Description of Artificial Sequence: Synthetic oligonucleotide
  Antisense strand to SEQ ID NO: 2045334
caguucacaggucaguucc

SEQ ID NO: 2045336 - RNA, 19 nt, Artificial Sequence
  Description of Artificial Sequence: Synthetic oligonucleotide
  Sense strand starting at position 57 of SEQ ID NO: 1881449
uggguacugcucuacucau

SEQ ID NO: 2045337 - RNA, 19 nt, Artificial Sequence
  Description of Artificial Sequence: Synthetic oligonucleotide
  Antisense strand to SEQ ID NO: 2045336
augaguagagcaguaccca

SEQ ID NO: 2045338 - RNA, 19 nt, Artificial Sequence
  Description of Artificial Sequence: Synthetic oligonucleotide
  Sense strand starting at position 64 of SEQ ID NO: 1881449
ugcucuacucaucagaggu

SEQ ID NO: 2045339 - RNA, 19 nt, Artificial Sequence
  Description of Artificial Sequence: Synthetic oligonucleotide
  Antisense strand to SEQ ID NO: 2045338
accucugaugaguagagca

SEQ ID NO: 2045340 - RNA, 19 nt, Artificial Sequence
  Description of Artificial Sequence: Synthetic oligonucleotide
  Sense strand starting at position 89 of SEQ ID NO: 1881449
gugcuuugaacguuagcau

SEQ ID NO: 2045341 - RNA, 19 nt, Artificial Sequence
  Description of Artificial Sequence: Synthetic oligonucleotide
  Antisense strand to SEQ ID NO: 2045340
augcuaacguucaaagcac

SEQ ID NO: 2045342 - RNA, 19 nt, Artificial Sequence
  Description of Artificial Sequence: Synthetic oligonucleotide
  Sense strand starting at position 126 of SEQ ID NO: 1881449
cugauuaugccaggaggua

SEQ ID NO: 2045343 - RNA, 19 nt, Artificial Sequence
  Description of Artificial Sequence: Synthetic oligonucleotide
  Antisense strand to SEQ ID NO: 2045342
uaccuccuggcauaaucag

SEQ ID NO: 2045344 - RNA, 19 nt, Artificial Sequence
  Description of Artificial Sequence: Synthetic oligonucleotide
  Sense strand starting at position 158 of SEQ ID NO: 1881449
ggguucuuaaggcaugaga

SEQ ID NO: 2045345 - RNA, 19 nt, Artificial Sequence
  Description of Artificial Sequence: Synthetic oligonucleotide
  Antisense strand to SEQ ID NO: 2045344
ucucaugccuuaagaaccc

SEQ ID NO: 2045346 - RNA, 19 nt, Artificial Sequence
  Description of Artificial Sequence: Synthetic oligonucleotide
  Sense strand starting at position 230 of SEQ ID NO: 1881449
agaaaucauuucugaugac

SEQ ID NO: 2045347 - RNA, 19 nt, Artificial Sequence
  Description of Artificial Sequence: Synthetic oligonucleotide
  Antisense strand to SEQ ID NO: 2045346
gucaucagaaaugauuucu

SEQ ID NO: 2045348 - RNA, 19 nt, Artificial Sequence
  Description of Artificial Sequence: Synthetic oligonucleotide
  Sense strand starting at position 317 of SEQ ID NO: 1881449
ucauauuaucauuggcuga

SEQ ID NO: 2045349 - RNA, 19 nt, Artificial Sequence
  Description of Artificial Sequence: Synthetic oligonucleotide
  Antisense strand to SEQ ID NO: 2045348
ucagccaaugauaauauga

SEQ ID NO: 2045350 - RNA, 19 nt, Artificial Sequence
  Description of Artificial Sequence: Synthetic oligonucleotide
  Sense strand starting at position 319 of SEQ ID NO: 1881449
auauuaucauuggcugaaa

SEQ ID NO: 2045351 - RNA, 19 nt, Artificial Sequence
  Description of Artificial Sequence: Synthetic oligonucleotide
  Antisense strand to SEQ ID NO: 2045350
uuucagccaaugauaauau

SEQ ID NO: 2045352 - RNA, 19 nt, Artificial Sequence
  Description of Artificial Sequence: Synthetic oligonucleotide
  Sense strand starting at position 483 of SEQ ID NO: 1881449
accugaaggacauggucua

SEQ ID NO: 2045353 - RNA, 19 nt, Artificial Sequence
  Description of Artificial Sequence: Synthetic oligonucleotide
  Antisense strand to SEQ ID NO: 2045352
uagaccauguccuucaggu

SEQ ID NO: 2045354 - RNA, 19 nt, Artificial Sequence
  Description of Artificial Sequence: Synthetic oligonucleotide
  Sense strand starting at position 519 of SEQ ID NO: 1881449
cuguuuggaaucugagagu

SEQ ID NO: 2045355 - RNA, 19 nt, Artificial Sequence
  Description of Artificial Sequence: Synthetic oligonucleotide
  Antisense strand to SEQ ID NO: 2045354
acucucagauuccaaacag

SEQ ID NO: 2045356 - RNA, 19 nt, Artificial Sequence
  Description of Artificial Sequence: Synthetic oligonucleotide
  Sense strand starting at position 806 of SEQ ID NO: 1881449
uugcucucugguuaagaaa

SEQ ID NO: 2045357 - RNA, 19 nt, Artificial Sequence
  Description of Artificial Sequence: Synthetic oligonucleotide
  Antisense strand to SEQ ID NO: 2045356
uuucuuaaccagagagcaa

SEQ ID NO: 2045358 - RNA, 19 nt, Artificial Sequence
  Description of Artificial Sequence: Synthetic oligonucleotide
  Sense strand starting at position 813 of SEQ ID NO: 1881449
cugguuaagaaaugagcaa

SEQ ID NO: 2045359 - RNA, 19 nt, Artificial Sequence
  Description of Artificial Sequence: Synthetic oligonucleotide
  Antisense strand to SEQ ID NO: 2045358
uugcucauuucuuaaccag

SEQ ID NO: 2045360 - RNA, 19 nt, Artificial Sequence
  Description of Artificial Sequence: Synthetic oligonucleotide
  Sense strand starting at position 824 of SEQ ID NO: 1881449
augagcaacucuccuuaga

SEQ ID NO: 2045361 - RNA, 19 nt, Artificial Sequence
  Description of Artificial Sequence: Synthetic oligonucleotide
  Antisense strand to SEQ ID NO: 2045360
ucuaaggagaguugcucau

SEQ ID NO: 2045362 - RNA, 19 nt, Artificial Sequence
  Description of Artificial Sequence: Synthetic oligonucleotide
  Sense strand starting at position 840 of SEQ ID NO: 1881449
agagacaacgccugaguuu

SEQ ID NO: 2045363 - RNA, 19 nt, Artificial Sequence
  Description of Artificial Sequence: Synthetic oligonucleotide
  Antisense strand to SEQ ID NO: 2045362
aaacucaggcguugucucu

SEQ ID NO: 2045364 - RNA, 19 nt, Artificial Sequence
  Description of Artificial Sequence: Synthetic oligonucleotide
  Sense strand starting at position 841 of SEQ ID NO: 1881449
gagacaacgccugaguuua

SEQ ID NO: 2045365 - RNA, 19 nt, Artificial Sequence
  Description of Artificial Sequence: Synthetic oligonucleotide
  Antisense strand to SEQ ID NO: 2045364
uaaacucaggcguugucuc

SEQ ID NO: 2045366 - RNA, 19 nt, Artificial Sequence
  Description of Artificial Sequence: Synthetic oligonucleotide
  Sense strand starting at position 892 of SEQ ID NO: 1881449
aagccauuaggaugaugua

SEQ ID NO: 2045367 - RNA, 19 nt, Artificial Sequence
  Description of Artificial Sequence: Synthetic oligonucleotide
  Antisense strand to SEQ ID NO: 2045366
uacaucauccuaauggcuu

SEQ ID NO: 2045368 - RNA, 19 nt, Artificial Sequence
  Description of Artificial Sequence: Synthetic oligonucleotide
  Sense strand starting at position 908 of SEQ ID NO: 1881449
guaaacagagggugauuau

SEQ ID NO: 2045369 - RNA, 19 nt, Artificial Sequence
  Description of Artificial Sequence: Synthetic oligonucleotide
  Antisense strand to SEQ ID NO: 2045368
auaaucacccucuguuuac

SEQ ID NO: 2045370 - RNA, 19 nt, Artificial Sequence
  Description of Artificial Sequence: Synthetic oligonucleotide
  Sense strand starting at position 959 of SEQ ID NO: 1881449
agcaacaaguguccuuuaa

SEQ ID NO: 2045371 - RNA, 19 nt, Artificial Sequence
  Description of Artificial Sequence: Synthetic oligonucleotide
  Antisense strand to SEQ ID NO: 2045370
uuaaaggacacuuguugcu

SEQ ID NO: 2045372 - RNA, 19 nt, Artificial Sequence
  Description of Artificial Sequence: Synthetic oligonucleotide
  Sense strand starting at position 1250 of SEQ ID NO: 1881449
ugggcuuccucuuccuaaa

SEQ ID NO: 2045373 - RNA, 19 nt, Artificial Sequence
  Description of Artificial Sequence: Synthetic oligonucleotide
  Antisense strand to SEQ ID NO: 2045372
uuuaggaagaggaagccca

SEQ ID NO: 2045374 - RNA, 19 nt, Artificial Sequence
  Description of Artificial Sequence: Synthetic oligonucleotide
  Sense strand starting at position 2077 of SEQ ID NO: 1881449
gaggguagaguuugacaga

SEQ ID NO: 2045375 - RNA, 19 nt, Artificial Sequence
  Description of Artificial Sequence: Synthetic oligonucleotide
  Antisense strand to SEQ ID NO: 2045374
ucugucaaacucuacccuc

SEQ ID NO: 2045376 - RNA, 19 nt, Artificial Sequence
  Description of Artificial Sequence: Synthetic oligonucleotide
  Sense strand starting at position 2149 of SEQ ID NO: 1881449
gcagauuugaucugugacg

SEQ ID NO: 2045377 - RNA, 19 nt, Artificial Sequence
  Description of Artificial Sequence: Synthetic oligonucleotide
  Antisense strand to SEQ ID NO: 2045376
cgucacagaucaaaucugc

SEQ ID NO: 2045378 - RNA, 19 nt, Artificial Sequence
  Description of Artificial Sequence: Synthetic oligonucleotide
  Sense strand starting at position 2155 of SEQ ID NO: 1881449
uugaucugugacggaacaa

SEQ ID NO: 2045379 - RNA, 19 nt, Artificial Sequence
  Description of Artificial Sequence: Synthetic oligonucleotide
  Antisense strand to SEQ ID NO: 2045378
uuguuccgucacagaucaa

SEQ ID NO: 2045380 - RNA, 19 nt, Artificial Sequence
  Description of Artificial Sequence: Synthetic oligonucleotide
  Sense strand starting at position 2480 of SEQ ID NO: 1881449
ucuuuaucacggcagauac

SEQ ID NO: 2045381 - RNA, 19 nt, Artificial Sequence
  Description of Artificial Sequence: Synthetic oligonucleotide
  Antisense strand to SEQ ID NO: 2045380
guaucugccgugauaaaga

SEQ ID NO: 2045382 - RNA, 19 nt, Artificial Sequence
  Description of Artificial Sequence: Synthetic oligonucleotide
  Sense strand starting at position 2630 of SEQ ID NO: 1881449
augguagaagugugagguu

SEQ ID NO: 2045383 - RNA, 19 nt, Artificial Sequence
  Description of Artificial Sequence: Synthetic oligonucleotide
  Antisense strand to SEQ ID NO: 2045382
aaccucacacuucuaccau

SEQ ID NO: 2045384 - RNA, 19 nt, Artificial Sequence
  Description of Artificial Sequence: Synthetic oligonucleotide
  Sense strand starting at position 2648 of SEQ ID NO: 1881449
uggagcacuggucauguua

SEQ ID NO: 2045385 - RNA, 19 nt, Artificial Sequence
  Description of Artificial Sequence: Synthetic oligonucleotide
  Antisense strand to SEQ ID NO: 2045384
uaacaugaccagugcucca

SEQ ID NO: 2045386 - RNA, 19 nt, Artificial Sequence
  Description of Artificial Sequence: Synthetic oligonucleotide
  Sense strand starting at position 3023 of SEQ ID NO: 1881449
cgugucauuucugcuugau

SEQ ID NO: 2045387 - RNA, 19 nt, Artificial Sequence
  Description of Artificial Sequence: Synthetic oligonucleotide
  Antisense strand to SEQ ID NO: 2045386
aucaagcagaaaugacacg

SEQ ID NO: 2045388 - RNA, 19 nt, Artificial Sequence
  Description of Artificial Sequence: Synthetic oligonucleotide
  Sense strand starting at position 3025 of SEQ ID NO: 1881449
ugucauuucugcuugauuc

SEQ ID NO: 2045389 - RNA, 19 nt, Artificial Sequence
  Description of Artificial Sequence: Synthetic oligonucleotide
  Antisense strand to SEQ ID NO: 2045388
gaaucaagcagaaaugaca

SEQ ID NO: 2045390 - RNA, 19 nt, Artificial Sequence
  Description of Artificial Sequence: Synthetic oligonucleotide
  Sense strand starting at position 3026 of SEQ ID NO: 1881449
gucauuucugcuugauucu

SEQ ID NO: 2045391 - RNA, 19 nt, Artificial Sequence
  Description of Artificial Sequence: Synthetic oligonucleotide
  Antisense strand to SEQ ID NO: 2045390
agaaucaagcagaaaugac

SEQ ID NO: 2045392 - RNA, 19 nt, Artificial Sequence
  Description of Artificial Sequence: Synthetic oligonucleotide
  Sense strand starting at position 3038 of SEQ ID NO: 1881449
ugauucuauuagucaagca

SEQ ID NO: 2045393 - RNA, 19 nt, Artificial Sequence
  Description of Artificial Sequence: Synthetic oligonucleotide
  Antisense strand to SEQ ID NO: 2045392
ugcuugacuaauagaauca

SEQ ID NO: 2045394 - RNA, 19 nt, Artificial Sequence
  Description of Artificial Sequence: Synthetic oligonucleotide
  Sense strand starting at position 3103 of SEQ ID NO: 1881449
uagugugaggagugucaaa

SEQ ID NO: 2045395 - RNA, 19 nt, Artificial Sequence
  Description of Artificial Sequence: Synthetic oligonucleotide
  Antisense strand to SEQ ID NO: 2045394
uuugacacuccucacacua

SEQ ID NO: 2045396 - RNA, 19 nt, Artificial Sequence
  Description of Artificial Sequence: Synthetic oligonucleotide
  Sense strand starting at position 3182 of SEQ ID NO: 1881449
aggccuuaauagucaucua

SEQ ID NO: 2045397 - RNA, 19 nt, Artificial Sequence
  Description of Artificial Sequence: Synthetic oligonucleotide
  Antisense strand to SEQ ID NO: 2045396
uagaugacuauuaaggccu

SEQ ID NO: 2045398 - RNA, 19 nt, Artificial Sequence
  Description of Artificial Sequence: Synthetic oligonucleotide
  Sense strand starting at position 3185 of SEQ ID NO: 1881449
ccuuaauagucaucuagua

SEQ ID NO: 2045399 - RNA, 19 nt, Artificial Sequence
  Description of Artificial Sequence: Synthetic oligonucleotide
  Antisense strand to SEQ ID NO: 2045398
uacuagaugacuauuaagg

SEQ ID NO: 2045400 - RNA, 19 nt, Artificial Sequence
  Description of Artificial Sequence: Synthetic oligonucleotide
  Sense strand starting at position 3293 of SEQ ID NO: 1881449
agugccauuguuuauauua

SEQ ID NO: 2045401 - RNA, 19 nt, Artificial Sequence
  Description of Artificial Sequence: Synthetic oligonucleotide
  Antisense strand to SEQ ID NO: 2045400
uaauauaaacaauggcacu

SEQ ID NO: 2045402 - RNA, 19 nt, Artificial Sequence
  Description of Artificial Sequence: Synthetic oligonucleotide
  Sense strand starting at position 3606 of SEQ ID NO: 1881449
cuauuaggauagccauuau

SEQ ID NO: 2045403 - RNA, 19 nt, Artificial Sequence
  Description of Artificial Sequence: Synthetic oligonucleotide
  Antisense strand to SEQ ID NO: 2045402
auaauggcuauccuaauag

SEQ ID NO: 2045404 - RNA, 19 nt, Artificial Sequence
  Description of Artificial Sequence: Synthetic oligonucleotide
  Sense strand starting at position 3610 of SEQ ID NO: 1881449
uaggauagccauuauagua

SEQ ID NO: 2045405 - RNA, 19 nt, Artificial Sequence
  Description of Artificial Sequence: Synthetic oligonucleotide
  Antisense strand to SEQ ID NO: 2045404
uacuauaauggcuauccua

SEQ ID NO: 2045406 - RNA, 19 nt, Artificial Sequence
  Description of Artificial Sequence: Synthetic oligonucleotide
  Sense strand starting at position 3655 of SEQ ID NO: 1881449
aaguguuggcaagaauguu

SEQ ID NO: 2045407 - RNA, 19 nt, Artificial Sequence
  Description of Artificial Sequence: Synthetic oligonucleotide
  Antisense strand to SEQ ID NO: 2045406
aacauucuugccaacacuu

SEQ ID NO: 2045408 - RNA, 19 nt, Artificial Sequence
  Description of Artificial Sequence: Synthetic oligonucleotide
  Sense strand starting at position 3959 of SEQ ID NO: 1881449
gguauauacauguauguau

SEQ ID NO: 2045409 - RNA, 19 nt, Artificial Sequence
  Description of Artificial Sequence: Synthetic oligonucleotide
  Antisense strand to SEQ ID NO: 2045408
auacauacauguauauacc

SEQ ID NO: 2045410 - RNA, 19 nt, Artificial Sequence
  Description of Artificial Sequence: Synthetic oligonucleotide
  Sense strand starting at position 154 of SEQ ID NO: 1881450
cucgauuucuucugaaccu

SEQ ID NO: 2045411 - RNA, 19 nt, Artificial Sequence
  Description of Artificial Sequence: Synthetic oligonucleotide
  Antisense strand to SEQ ID NO: 2045410
agguucagaagaaaucgag

SEQ ID NO: 2045412 - RNA, 19 nt, Artificial Sequence
  Description of Artificial Sequence: Synthetic oligonucleotide
  Sense strand starting at position 155 of SEQ ID NO: 1881450
ucgauuucuucugaaccua

SEQ ID NO: 2045413 - RNA, 19 nt, Artificial Sequence
  Description of Artificial Sequence: Synthetic oligonucleotide
  Antisense strand to SEQ ID NO: 2045412
uagguucagaagaaaucga

SEQ ID NO: 2045414 - RNA, 19 nt, Artificial Sequence
  Description of Artificial Sequence: Synthetic oligonucleotide
  Sense strand starting at position 163 of SEQ ID NO: 1881450
uucugaaccuaugcuaaga

SEQ ID NO: 2045415 - RNA, 19 nt, Artificial Sequence
  Description of Artificial Sequence: Synthetic oligonucleotide
  Antisense strand to SEQ ID NO: 2045414
ucuuagcauagguucagaa

SEQ ID NO: 2045416 - RNA, 19 nt, Artificial Sequence
  Description of Artificial Sequence: Synthetic oligonucleotide
  Sense strand starting at position 176 of SEQ ID NO: 1881450
cuaagaugucaagguacug

SEQ ID NO: 2045417 - RNA, 19 nt, Artificial Sequence
  Description of Artificial Sequence: Synthetic oligonucleotide
  Antisense strand to SEQ ID NO: 2045416
caguaccuugacaucuuag

SEQ ID NO: 2045418 - RNA, 19 nt, Artificial Sequence
  Description of Artificial Sequence: Synthetic oligonucleotide
  Sense strand starting at position 334 of SEQ ID NO: 1881450
ggccaagaauuccagacua

SEQ ID NO: 2045419 - RNA, 19 nt, Artificial Sequence
  Description of Artificial Sequence: Synthetic oligonucleotide
  Antisense strand to SEQ ID NO: 2045418
uagucuggaauucuuggcc

SEQ ID NO: 2045420 - RNA, 19 nt, Artificial Sequence
  Description of Artificial Sequence: Synthetic oligonucleotide
  Sense strand starting at position 629 of SEQ ID NO: 1881450
cucaguuucuuggaagaug

SEQ ID NO: 2045421 - RNA, 19 nt, Artificial Sequence
  Description of Artificial Sequence: Synthetic oligonucleotide
  Antisense strand to SEQ ID NO: 2045420
caucuuccaagaaacugag

SEQ ID NO: 2045422 - RNA, 19 nt, Artificial Sequence
  Description of Artificial Sequence: Synthetic oligonucleotide
  Sense strand starting at position 672 of SEQ ID NO: 1881450
uuuguauaucucgacuauu

SEQ ID NO: 2045423 - RNA, 19 nt, Artificial Sequence
  Description of Artificial Sequence: Synthetic oligonucleotide
  Antisense strand to SEQ ID NO: 2045422
aauagucgagauauacaaa

SEQ ID NO: 2045424 - RNA, 19 nt, Artificial Sequence
  Description of Artificial Sequence: Synthetic oligonucleotide
  Sense strand starting at position 675 of SEQ ID NO: 1881450
guauaucucgacuauuauu

SEQ ID NO: 2045425 - RNA, 19 nt, Artificial Sequence
  Description of Artificial Sequence: Synthetic oligonucleotide
  Antisense strand to SEQ ID NO: 2045424
aauaauagucgagauauac

SEQ ID NO: 2045426 - RNA, 19 nt, Artificial Sequence
  Description of Artificial Sequence: Synthetic oligonucleotide
  Sense strand starting at position 684 of SEQ ID NO: 1881450
gacuauuauugugcaugca

SEQ ID NO: 2045427 - RNA, 19 nt, Artificial Sequence
  Description of Artificial Sequence: Synthetic oligonucleotide
  Antisense strand to SEQ ID NO: 2045426
ugcaugcacaauaauaguc

SEQ ID NO: 2045428 - RNA, 19 nt, Artificial Sequence
  Description of Artificial Sequence: Synthetic oligonucleotide
  Sense strand starting at position 685 of SEQ ID NO: 1881450
acuauuauugugcaugcaa

SEQ ID NO: 2045429 - RNA, 19 nt, Artificial Sequence
  Description of Artificial Sequence: Synthetic oligonucleotide
  Antisense strand to SEQ ID NO: 2045428
uugcaugcacaauaauagu

SEQ ID NO: 2045430 - RNA, 19 nt, Artificial Sequence
  Description of Artificial Sequence: Synthetic oligonucleotide
  Sense strand starting at position 717 of SEQ ID NO: 1881450
guacuuguaucugcaauga

SEQ ID NO: 2045431 - RNA, 19 nt, Artificial Sequence
  Description of Artificial Sequence: Synthetic oligonucleotide
  Antisense strand to SEQ ID NO: 2045430
ucauugcagauacaaguac

SEQ ID NO: 2045432 - RNA, 19 nt, Artificial Sequence
  Description of Artificial Sequence: Synthetic oligonucleotide
  Sense strand starting at position 721 of SEQ ID NO: 1881450
uuguaucugcaaugaauuc

SEQ ID NO: 2045433 - RNA, 19 nt, Artificial Sequence
  Description of Artificial Sequence: Synthetic oligonucleotide
  Antisense strand to SEQ ID NO: 2045432
gaauucauugcagauacaa

SEQ ID NO: 2045434 - RNA, 19 nt, Artificial Sequence
  Description of Artificial Sequence: Synthetic oligonucleotide
  Sense strand starting at position 841 of SEQ ID NO: 1881450
gaaggaauccgcuaaguug

SEQ ID NO: 2045435 - RNA, 19 nt, Artificial Sequence
  Description of Artificial Sequence: Synthetic oligonucleotide
  Antisense strand to SEQ ID NO: 2045434
caacuuagcggauuccuuc

SEQ ID NO: 2045436 - RNA, 19 nt, Artificial Sequence
  Description of Artificial Sequence: Synthetic oligonucleotide
  Sense strand starting at position 904 of SEQ ID NO: 1881450
aaggaaugcucuggauaag

SEQ ID NO: 2045437 - RNA, 19 nt, Artificial Sequence
  Description of Artificial Sequence: Synthetic oligonucleotide
  Antisense strand to SEQ ID NO: 2045436
cuuauccagagcauuccuu

SEQ ID NO: 2045438 - RNA, 19 nt, Artificial Sequence
  Description of Artificial Sequence: Synthetic oligonucleotide
  Sense strand starting at position 967 of SEQ ID NO: 1881450
agacguguccuauagcuca

SEQ ID NO: 2045439 - RNA, 19 nt, Artificial Sequence
  Description of Artificial Sequence: Synthetic oligonucleotide
  Antisense strand to SEQ ID NO: 2045438
ugagcuauaggacacgucu

SEQ ID NO: 2045440 - RNA, 19 nt, Artificial Sequence
  Description of Artificial Sequence: Synthetic oligonucleotide
  Sense strand starting at position 1083 of SEQ ID NO: 1881450
ccuugauugcccgacacca

SEQ ID NO: 2045441 - RNA, 19 nt, Artificial Sequence
  Description of Artificial Sequence: Synthetic oligonucleotide
  Antisense strand to SEQ ID NO: 2045440
uggugucgggcaaucaagg

SEQ ID NO: 2045442 - RNA, 19 nt, Artificial Sequence
  Description of Artificial Sequence: Synthetic oligonucleotide
  Sense strand starting at position 1378 of SEQ ID NO: 1881450
agcuagugucgcgaggaaa

SEQ ID NO: 2045443 - RNA, 19 nt, Artificial Sequence
  Description of Artificial Sequence: Synthetic oligonucleotide
  Antisense strand to SEQ ID NO: 2045442
uuuccucgcgacacuagcu

SEQ ID NO: 2045444 - RNA, 19 nt, Artificial Sequence
  Description of Artificial Sequence: Synthetic oligonucleotide
  Sense strand starting at position 3159 of SEQ ID NO: 1881450
gaacgaguacagcaauaua

SEQ ID NO: 2045445 - RNA, 19 nt, Artificial Sequence
  Description of Artificial Sequence: Synthetic oligonucleotide
  Antisense strand to SEQ ID NO: 2045444
uauauugcuguacucguuc

SEQ ID NO: 2045446 - RNA, 19 nt, Artificial Sequence
  Description of Artificial Sequence: Synthetic oligonucleotide
  Sense strand starting at position 3201 of SEQ ID NO: 1881450
gaucaacgcgagcaagaau

SEQ ID NO: 2045447 - RNA, 19 nt, Artificial Sequence
  Description of Artificial Sequence: Synthetic oligonucleotide
  Antisense strand to SEQ ID NO: 2045446
auucuugcucgcguugauc

SEQ ID NO: 2045448 - RNA, 19 nt, Artificial Sequence
  Description of Artificial Sequence: Synthetic oligonucleotide
  Sense strand starting at position 3210 of SEQ ID NO: 1881450
gagcaagaaucagcaggau

SEQ ID NO: 2045449 - RNA, 19 nt, Artificial Sequence
  Description of Artificial Sequence: Synthetic oligonucleotide
  Antisense strand to SEQ ID NO: 2045448
auccugcugauucuugcuc

SEQ ID NO: 2045450 - RNA, 19 nt, Artificial Sequence
  Description of Artificial Sequence: Synthetic oligonucleotide
  Sense strand starting at position 3553 of SEQ ID NO: 1881450
cauugugucucuguuacca

SEQ ID NO: 2045451 - RNA, 19 nt, Artificial Sequence
  Description of Artificial Sequence: Synthetic oligonucleotide
  Antisense strand to SEQ ID NO: 2045450
ugguaacagagacacaaug

SEQ ID NO: 2045452 - RNA, 19 nt, Artificial Sequence
  Description of Artificial Sequence: Synthetic oligonucleotide
  Sense strand starting at position 3626 of SEQ ID NO: 1881450
ggcgacugguacccagauu

SEQ ID NO: 2045453 - RNA, 19 nt, Artificial Sequence
  Description of Artificial Sequence: Synthetic oligonucleotide
  Antisense strand to SEQ ID NO: 2045452
aaucuggguaccagucgcc

SEQ ID NO: 2045454 - RNA, 19 nt, Artificial Sequence
  Description of Artificial Sequence: Synthetic oligonucleotide
  Sense strand starting at position 3651 of SEQ ID NO: 1881450
acguguuaugauugaugag

SEQ ID NO: 2045455 - RNA, 19 nt, Artificial Sequence
  Description of Artificial Sequence: Synthetic oligonucleotide
  Antisense strand to SEQ ID NO: 2045454
cucaucaaucauaacacgu

SEQ ID NO: 2045456 - RNA, 19 nt, Artificial Sequence
  Description of Artificial Sequence: Synthetic oligonucleotide
  Sense strand starting at position 3652 of SEQ ID NO: 1881450
cguguuaugauugaugagu

SEQ ID NO: 2045457 - RNA, 19 nt, Artificial Sequence
  Description of Artificial Sequence: Synthetic oligonucleotide
  Antisense strand to SEQ ID NO: 2045456
acucaucaaucauaacacg

SEQ ID NO: 2045458 - RNA, 19 nt, Artificial Sequence
  Description of Artificial Sequence: Synthetic oligonucleotide
  Sense strand starting at position 3661 of SEQ ID NO: 1881450
auugaugaguucucugggu

SEQ ID NO: 2045459 - RNA, 19 nt, Artificial Sequence
  Description of Artificial Sequence: Synthetic oligonucleotide
  Antisense strand to SEQ ID NO: 2045458
acccagagaacucaucaau

SEQ ID NO: 2045460 - RNA, 19 nt, Artificial Sequence
  Description of Artificial Sequence: Synthetic oligonucleotide
  Sense strand starting at position 3665 of SEQ ID NO: 1881450
augaguucucuggguggaa

SEQ ID NO: 2045461 - RNA, 19 nt, Artificial Sequence
  Description of Artificial Sequence: Synthetic oligonucleotide
  Antisense strand to SEQ ID NO: 2045460
uuccacccagagaacucau

SEQ ID NO: 2045462 - RNA, 19 nt, Artificial Sequence
  Description of Artificial Sequence: Synthetic oligonucleotide
  Sense strand starting at position 3666 of SEQ ID NO: 1881450
ugaguucucuggguggaac

SEQ ID NO: 2045463 - RNA, 19 nt, Artificial Sequence
  Description of Artificial Sequence: Synthetic oligonucleotide
  Antisense strand to SEQ ID NO: 2045462
guuccacccagagaacuca

SEQ ID NO: 2045464 - RNA, 19 nt, Artificial Sequence
  Description of Artificial Sequence: Synthetic oligonucleotide
  Sense strand starting at position 3687 of SEQ ID NO: 1881450
uggcuugacagcugagaac

SEQ ID NO: 2045465 - RNA, 19 nt, Artificial Sequence
  Description of Artificial Sequence: Synthetic oligonucleotide
  Antisense strand to SEQ ID NO: 2045464
guucucagcugucaagcca

SEQ ID NO: 2045466 - RNA, 19 nt, Artificial Sequence
  Description of Artificial Sequence: Synthetic oligonucleotide
  Sense strand starting at position 3712 of SEQ ID NO: 1881450
ggaccuaaguaagauaaga

SEQ ID NO: 2045467 - RNA, 19 nt, Artificial Sequence
  Description of Artificial Sequence: Synthetic oligonucleotide
  Antisense strand to SEQ ID NO: 2045466
ucuuaucuuacuuaggucc

SEQ ID NO: 2045468 - RNA, 19 nt, Artificial Sequence
  Description of Artificial Sequence: Synthetic oligonucleotide
  Sense strand starting at position 3736 of SEQ ID NO: 1881450
gggauucaucuaggaaguu

SEQ ID NO: 2045469 - RNA, 19 nt, Artificial Sequence
  Description of Artificial Sequence: Synthetic oligonucleotide
  Antisense strand to SEQ ID NO: 2045468
aacuuccuagaugaauccc

SEQ ID NO: 2045470 - RNA, 19 nt, Artificial Sequence
  Description of Artificial Sequence: Synthetic oligonucleotide
  Sense strand starting at position 3737 of SEQ ID NO: 1881450
ggauucaucuaggaaguug

SEQ ID NO: 2045471 - RNA, 19 nt, Artificial Sequence
  Description of Artificial Sequence: Synthetic oligonucleotide
  Antisense strand to SEQ ID NO: 2045470
caacuuccuagaugaaucc

SEQ ID NO: 2045472 - RNA, 19 nt, Artificial Sequence
  Description of Artificial Sequence: Synthetic oligonucleotide
  Sense strand starting at position 3780 of SEQ ID NO: 1881450
gcagaaccuuuacuguauu

SEQ ID NO: 2045473 - RNA, 19 nt, Artificial Sequence
  Description of Artificial Sequence: Synthetic oligonucleotide
  Antisense strand to SEQ ID NO: 2045472
aauacaguaaagguucugc

SEQ ID NO: 2045474 - RNA, 19 nt, Artificial Sequence
  Description of Artificial Sequence: Synthetic oligonucleotide
  Sense strand starting at position 3813 of SEQ ID NO: 1881450
ugagcuuugcuuuauguag

SEQ ID NO: 2045475 - RNA, 19 nt, Artificial Sequence
  Description of Artificial Sequence: Synthetic oligonucleotide
  Antisense strand to SEQ ID NO: 2045474
cuacauaaagcaaagcuca

SEQ ID NO: 2045476 - RNA, 19 nt, Artificial Sequence
  Description of Artificial Sequence: Synthetic oligonucleotide
  Sense strand starting at position 3840 of SEQ ID NO: 1881450
gugagcuguccgcugguuu

SEQ ID NO: 2045477 - RNA, 19 nt, Artificial Sequence
  Description of Artificial Sequence: Synthetic oligonucleotide
  Antisense strand to SEQ ID NO: 2045476
aaaccagcggacagcucac

SEQ ID NO: 2045478 - RNA, 19 nt, Artificial Sequence
  Description of Artificial Sequence: Synthetic oligonucleotide
  Sense strand starting at position 3857 of SEQ ID NO: 1881450
uugaguaacuucguuggga

SEQ ID NO: 2045479 - RNA, 19 nt, Artificial Sequence
  Description of Artificial Sequence: Synthetic oligonucleotide
  Antisense strand to SEQ ID NO: 2045478
ucccaacgaaguuacucaa

SEQ ID NO: 2045480 - RNA, 19 nt, Artificial Sequence
  Description of Artificial Sequence: Synthetic oligonucleotide
  Sense strand starting at position 3858 of SEQ ID NO: 1881450
ugaguaacuucguugggau

SEQ ID NO: 2045481 - RNA, 19 nt, Artificial Sequence
  Description of Artificial Sequence: Synthetic oligonucleotide
  Antisense strand to SEQ ID NO: 2045480
aucccaacgaaguuacuca

SEQ ID NO: 2045482 - RNA, 19 nt, Artificial Sequence
  Description of Artificial Sequence: Synthetic oligonucleotide
  Sense strand starting at position 3859 of SEQ ID NO: 1881450
gaguaacuucguugggaua

SEQ ID NO: 2045483 - RNA, 19 nt, Artificial Sequence
  Description of Artificial Sequence: Synthetic oligonucleotide
  Antisense strand to SEQ ID NO: 2045482
uaucccaacgaaguuacuc

SEQ ID NO: 2045484 - RNA, 19 nt, Artificial Sequence
  Description of Artificial Sequence: Synthetic oligonucleotide
  Sense strand starting at position 3860 of SEQ ID NO: 1881450
aguaacuucguugggauau

SEQ ID NO: 2045485 - RNA, 19 nt, Artificial Sequence
  Description of Artificial Sequence: Synthetic oligonucleotide
  Antisense strand to SEQ ID NO: 2045484
auaucccaacgaaguuacu

SEQ ID NO: 2045486 - RNA, 19 nt, Artificial Sequence
  Description of Artificial Sequence: Synthetic oligonucleotide
  Sense strand starting at position 3963 of SEQ ID NO: 1881450
acgauuuaauuccagaacu

SEQ ID NO: 2045487 - RNA, 19 nt, Artificial Sequence
  Description of Artificial Sequence: Synthetic oligonucleotide
  Antisense strand to SEQ ID NO: 2045486
aguucuggaauuaaaucgu

SEQ ID NO: 2045488 - RNA, 19 nt, Artificial Sequence
  Description of Artificial Sequence: Synthetic oligonucleotide
  Sense strand starting at position 3982 of SEQ ID NO: 1881450
gaaggaucauuugaguuau

SEQ ID NO: 2045489 - RNA, 19 nt, Artificial Sequence
  Description of Artificial Sequence: Synthetic oligonucleotide
  Antisense strand to SEQ ID NO: 2045488
auaacucaaaugauccuuc

SEQ ID NO: 2045490 - RNA, 19 nt, Artificial Sequence
  Description of Artificial Sequence: Synthetic oligonucleotide
  Sense strand starting at position 357 of SEQ ID NO: 1881451
agacaaauaguuggcuaaa

SEQ ID NO: 2045491 - RNA, 19 nt, Artificial Sequence
  Description of Artificial Sequence: Synthetic oligonucleotide
  Antisense strand to SEQ ID NO: 2045490
uuuagccaacuauuugucu

SEQ ID NO: 2045492 - RNA, 19 nt, Artificial Sequence
  Description of Artificial Sequence: Synthetic oligonucleotide
  Sense strand starting at position 489 of SEQ ID NO: 1881451
gaagaacacugagauauga

SEQ ID NO: 2045493 - RNA, 19 nt, Artificial Sequence
  Description of Artificial Sequence: Synthetic oligonucleotide
  Antisense strand to SEQ ID NO: 2045492
ucauaucucaguguucuuc

SEQ ID NO: 2045494 - RNA, 19 nt, Artificial Sequence
  Description of Artificial Sequence: Synthetic oligonucleotide
  Sense strand starting at position 716 of SEQ ID NO: 1881451
uccagaagccacugugaua

SEQ ID NO: 2045495 - RNA, 19 nt, Artificial Sequence
  Description of Artificial Sequence: Synthetic oligonucleotide
  Antisense strand to SEQ ID NO: 2045494
uaucacaguggcuucugga

SEQ ID NO: 2045496 - RNA, 19 nt, Artificial Sequence
  Description of Artificial Sequence: Synthetic oligonucleotide
  Sense strand starting at position 727 of SEQ ID NO: 1881451
cugugauaauaauuaagug

SEQ ID NO: 2045497 - RNA, 19 nt, Artificial Sequence
  Description of Artificial Sequence: Synthetic oligonucleotide
  Antisense strand to SEQ ID NO: 2045496
cacuuaauuauuaucacag

SEQ ID NO: 2045498 - RNA, 19 nt, Artificial Sequence
  Description of Artificial Sequence: Synthetic oligonucleotide
  Sense strand starting at position 784 of SEQ ID NO: 1881451
ggguacaagugguuaggaa

SEQ ID NO: 2045499 - RNA, 19 nt, Artificial Sequence
  Description of Artificial Sequence: Synthetic oligonucleotide
  Antisense strand to SEQ ID NO: 2045498
uuccuaaccacuuguaccc

SEQ ID NO: 2045500 - RNA, 19 nt, Artificial Sequence
  Description of Artificial Sequence: Synthetic oligonucleotide
  Sense strand starting at position 799 of SEQ ID NO: 1881451
ggaaauacagcauaugcua

SEQ ID NO: 2045501 - RNA, 19 nt, Artificial Sequence
  Description of Artificial Sequence: Synthetic oligonucleotide
  Antisense strand to SEQ ID NO: 2045500
uagcauaugcuguauuucc

SEQ ID NO: 2045502 - RNA, 19 nt, Artificial Sequence
  Description of Artificial Sequence: Synthetic oligonucleotide
  Sense strand starting at position 910 of SEQ ID NO: 1881451
ggcaucaaagcuuauaauc

SEQ ID NO: 2045503 - RNA, 19 nt, Artificial Sequence
  Description of Artificial Sequence: Synthetic oligonucleotide
  Antisense strand to SEQ ID NO: 2045502
gauuauaagcuuugaugcc

SEQ ID NO: 2045504 - RNA, 19 nt, Artificial Sequence
  Description of Artificial Sequence: Synthetic oligonucleotide
  Sense strand starting at position 949 of SEQ ID NO: 1881451
gcucaucaagaaugccaaa

SEQ ID NO: 2045505 - RNA, 19 nt, Artificial Sequence
  Description of Artificial Sequence: Synthetic oligonucleotide
  Antisense strand to SEQ ID NO: 2045504
uuuggcauucuugaugagc

SEQ ID NO: 2045506 - RNA, 19 nt, Artificial Sequence
  Description of Artificial Sequence: Synthetic oligonucleotide
  Sense strand starting at position 971 of SEQ ID NO: 1881451
gggacaaacugucucugua

SEQ ID NO: 2045507 - RNA, 19 nt, Artificial Sequence
  Description of Artificial Sequence: Synthetic oligonucleotide
  Antisense strand to SEQ ID NO: 2045506
uacagagacaguuuguccc

SEQ ID NO: 2045508 - RNA, 19 nt, Artificial Sequence
  Description of Artificial Sequence: Synthetic oligonucleotide
  Sense strand starting at position 1124 of SEQ ID NO: 1881451
gcacauuuaucugucacuu

SEQ ID NO: 2045509 - RNA, 19 nt, Artificial Sequence
  Description of Artificial Sequence: Synthetic oligonucleotide
  Antisense strand to SEQ ID NO: 2045508
aagugacagauaaaugugc

SEQ ID NO: 2045510 - RNA, 19 nt, Artificial Sequence
  Description of Artificial Sequence: Synthetic oligonucleotide
  Sense strand starting at position 1166 of SEQ ID NO: 1881451
agagcugauuaucuaauaa

SEQ ID NO: 2045511 - RNA, 19 nt, Artificial Sequence
  Description of Artificial Sequence: Synthetic oligonucleotide
  Antisense strand to SEQ ID NO: 2045510
uuauuagauaaucagcucu

SEQ ID NO: 2045512 - RNA, 19 nt, Artificial Sequence
  Description of Artificial Sequence: Synthetic oligonucleotide
  Sense strand starting at position 1366 of SEQ ID NO: 1881451
agugcugucauugcuguau

SEQ ID NO: 2045513 - RNA, 19 nt, Artificial Sequence
  Description of Artificial Sequence: Synthetic oligonucleotide
  Antisense strand to SEQ ID NO: 2045512
auacagcaaugacagcacu

SEQ ID NO: 2045514 - RNA, 19 nt, Artificial Sequence
  Description of Artificial Sequence: Synthetic oligonucleotide
  Sense strand starting at position 1408 of SEQ ID NO: 1881451
cagagagccuccuucuaug

SEQ ID NO: 2045515 - RNA, 19 nt, Artificial Sequence
  Description of Artificial Sequence: Synthetic oligonucleotide
  Antisense strand to SEQ ID NO: 2045514
cauagaaggaggcucucug

SEQ ID NO: 2045516 - RNA, 19 nt, Artificial Sequence
  Description of Artificial Sequence: Synthetic oligonucleotide
  Sense strand starting at position 1438 of SEQ ID NO: 1881451
gauggaaaguauucuuauu

SEQ ID NO: 2045517 - RNA, 19 nt, Artificial Sequence
  Description of Artificial Sequence: Synthetic oligonucleotide
  Antisense strand to SEQ ID NO: 2045516
aauaagaauacuuuccauc

SEQ ID NO: 2045518 - RNA, 19 nt, Artificial Sequence
  Description of Artificial Sequence: Synthetic oligonucleotide
  Sense strand starting at position 1440 of SEQ ID NO: 1881451
uggaaaguauucuuauucu

SEQ ID NO: 2045519 - RNA, 19 nt, Artificial Sequence
  Description of Artificial Sequence: Synthetic oligonucleotide
  Antisense strand to SEQ ID NO: 2045518
agaauaagaauacuuucca

SEQ ID NO: 2045520 - RNA, 19 nt, Artificial Sequence
  Description of Artificial Sequence: Synthetic oligonucleotide
  Sense strand starting at position 1493 of SEQ ID NO: 1881451
aguugaaauccauaacgug

SEQ ID NO: 2045521 - RNA, 19 nt, Artificial Sequence
  Description of Artificial Sequence: Synthetic oligonucleotide
  Antisense strand to SEQ ID NO: 2045520
cacguuauggauuucaacu

SEQ ID NO: 2045522 - RNA, 19 nt, Artificial Sequence
  Description of Artificial Sequence: Synthetic oligonucleotide
  Sense strand starting at position 1682 of SEQ ID NO: 1881451
aaacauucuggaggucuca

SEQ ID NO: 2045523 - RNA, 19 nt, Artificial Sequence
  Description of Artificial Sequence: Synthetic oligonucleotide
  Antisense strand to SEQ ID NO: 2045522
ugagaccuccagaauguuu

SEQ ID NO: 2045524 - RNA, 19 nt, Artificial Sequence
  Description of Artificial Sequence: Synthetic oligonucleotide
  Sense strand starting at position 1886 of SEQ ID NO: 1881451
auuaccuaccguugaauaa

SEQ ID NO: 2045525 - RNA, 19 nt, Artificial Sequence
  Description of Artificial Sequence: Synthetic oligonucleotide
  Antisense strand to SEQ ID NO: 2045524
uuauucaacgguagguaau

SEQ ID NO: 2045526 - RNA, 19 nt, Artificial Sequence
  Description of Artificial Sequence: Synthetic oligonucleotide
  Sense strand starting at position 1887 of SEQ ID NO: 1881451
uuaccuaccguugaauaaa

SEQ ID NO: 2045527 - RNA, 19 nt, Artificial Sequence
  Description of Artificial Sequence: Synthetic oligonucleotide
  Antisense strand to SEQ ID NO: 2045526
uuuauucaacgguagguaa

SEQ ID NO: 2045528 - RNA, 19 nt, Artificial Sequence
  Description of Artificial Sequence: Synthetic oligonucleotide
  Sense strand starting at position 2111 of SEQ ID NO: 1881451
cacgcacuugguuaggaua

SEQ ID NO: 2045529 - RNA, 19 nt, Artificial Sequence
  Description of Artificial Sequence: Synthetic oligonucleotide
  Antisense strand to SEQ ID NO: 2045528
uauccuaaccaagugcgug

SEQ ID NO: 2045530 - RNA, 19 nt, Artificial Sequence
  Description of Artificial Sequence: Synthetic oligonucleotide
  Sense strand starting at position 2119 of SEQ ID NO: 1881451
ugguuaggauaccuguauu

SEQ ID NO: 2045531 - RNA, 19 nt, Artificial Sequence
  Description of Artificial Sequence: Synthetic oligonucleotide
  Antisense strand to SEQ ID NO: 2045530
aauacagguauccuaacca

SEQ ID NO: 2045532 - RNA, 19 nt, Artificial Sequence
  Description of Artificial Sequence: Synthetic oligonucleotide
  Sense strand starting at position 2122 of SEQ ID NO: 1881451
uuaggauaccuguauuauc

SEQ ID NO: 2045533 - RNA, 19 nt, Artificial Sequence
  Description of Artificial Sequence: Synthetic oligonucleotide
  Antisense strand to SEQ ID NO: 2045532
gauaauacagguauccuaa

SEQ ID NO: 2045534 - RNA, 19 nt, Artificial Sequence
  Description of Artificial Sequence: Synthetic oligonucleotide
  Sense strand starting at position 2141 of SEQ ID NO: 1881451
uagcaaugugaucaaguuu

SEQ ID NO: 2045535 - RNA, 19 nt, Artificial Sequence
  Description of Artificial Sequence: Synthetic oligonucleotide
  Antisense strand to SEQ ID NO: 2045534
aaacuugaucacauugcua

SEQ ID NO: 2045536 - RNA, 19 nt, Artificial Sequence
  Description of Artificial Sequence: Synthetic oligonucleotide
  Sense strand starting at position 2254 of SEQ ID NO: 1881451
cucccauuggugugaagag

SEQ ID NO: 2045537 - RNA, 19 nt, Artificial Sequence
  Description of Artificial Sequence: Synthetic oligonucleotide
  Antisense strand to SEQ ID NO: 2045536
cucuucacaccaaugggag

SEQ ID NO: 2045538 - RNA, 19 nt, Artificial Sequence
  Description of Artificial Sequence: Synthetic oligonucleotide
  Sense strand starting at position 2282 of SEQ ID NO: 1881451
agcucaaacuaugcuagaa

SEQ ID NO: 2045539 - RNA, 19 nt, Artificial Sequence
  Description of Artificial Sequence: Synthetic oligonucleotide
  Antisense strand to SEQ ID NO: 2045538
uucuagcauaguuugagcu

SEQ ID NO: 2045540 - RNA, 19 nt, Artificial Sequence
  Description of Artificial Sequence: Synthetic oligonucleotide
  Sense strand starting at position 2373 of SEQ ID NO: 1881451
cugaaacuauaguugguua

SEQ ID NO: 2045541 - RNA, 19 nt, Artificial Sequence
  Description of Artificial Sequence: Synthetic oligonucleotide
  Antisense strand to SEQ ID NO: 2045540
uaaccaacuauaguuucag

SEQ ID NO: 2045542 - RNA, 19 nt, Artificial Sequence
  Description of Artificial Sequence: Synthetic oligonucleotide
  Sense strand starting at position 2375 of SEQ ID NO: 1881451
gaaacuauaguugguuaua

SEQ ID NO: 2045543 - RNA, 19 nt, Artificial Sequence
  Description of Artificial Sequence: Synthetic oligonucleotide
  Antisense strand to SEQ ID NO: 2045542
uauaaccaacuauaguuuc

SEQ ID NO: 2045544 - RNA, 19 nt, Artificial Sequence
  Description of Artificial Sequence: Synthetic oligonucleotide
  Sense strand starting at position 2378 of SEQ ID NO: 1881451
acuauaguugguuauacca

SEQ ID NO: 2045545 - RNA, 19 nt, Artificial Sequence
  Description of Artificial Sequence: Synthetic oligonucleotide
  Antisense strand to SEQ ID NO: 2045544
ugguauaaccaacuauagu

SEQ ID NO: 2045546 - RNA, 19 nt, Artificial Sequence
  Description of Artificial Sequence: Synthetic oligonucleotide
  Sense strand starting at position 2440 of SEQ ID NO: 1881451
uuguuaauuuaguugcaga

SEQ ID NO: 2045547 - RNA, 19 nt, Artificial Sequence
  Description of Artificial Sequence: Synthetic oligonucleotide
  Antisense strand to SEQ ID NO: 2045546
ucugcaacuaaauuaacaa

SEQ ID NO: 2045548 - RNA, 19 nt, Artificial Sequence
  Description of Artificial Sequence: Synthetic oligonucleotide
  Sense strand starting at position 2528 of SEQ ID NO: 1881451
ugacaagugcuguaaauaa

SEQ ID NO: 2045549 - RNA, 19 nt, Artificial Sequence
  Description of Artificial Sequence: Synthetic oligonucleotide
  Antisense strand to SEQ ID NO: 2045548
uuauuuacagcacuuguca

SEQ ID NO: 2045550 - RNA, 19 nt, Artificial Sequence
  Description of Artificial Sequence: Synthetic oligonucleotide
  Sense strand starting at position 2623 of SEQ ID NO: 1881451
ugccauauuccaggaacaa

SEQ ID NO: 2045551 - RNA, 19 nt, Artificial Sequence
  Description of Artificial Sequence: Synthetic oligonucleotide
  Antisense strand to SEQ ID NO: 2045550
uuguuccuggaauauggca

SEQ ID NO: 2045552 - RNA, 19 nt, Artificial Sequence
  Description of Artificial Sequence: Synthetic oligonucleotide
  Sense strand starting at position 2758 of SEQ ID NO: 1881451
acauuuaguuuggauacau

SEQ ID NO: 2045553 - RNA, 19 nt, Artificial Sequence
  Description of Artificial Sequence: Synthetic oligonucleotide
  Antisense strand to SEQ ID NO: 2045552
auguauccaaacuaaaugu

SEQ ID NO: 2045554 - RNA, 19 nt, Artificial Sequence
  Description of Artificial Sequence: Synthetic oligonucleotide
  Sense strand starting at position 2948 of SEQ ID NO: 1881451
auauaucuuccugaggcau

SEQ ID NO: 2045555 - RNA, 19 nt, Artificial Sequence
  Description of Artificial Sequence: Synthetic oligonucleotide
  Antisense strand to SEQ ID NO: 2045554
augccucaggaagauauau

SEQ ID NO: 2045556 - RNA, 19 nt, Artificial Sequence
  Description of Artificial Sequence: Synthetic oligonucleotide
  Sense strand starting at position 3150 of SEQ ID NO: 1881451
agaacaagcuuguugaacu

SEQ ID NO: 2045557 - RNA, 19 nt, Artificial Sequence
  Description of Artificial Sequence: Synthetic oligonucleotide
  Antisense strand to SEQ ID NO: 2045556
aguucaacaagcuuguucu

SEQ ID NO: 2045558 - RNA, 19 nt, Artificial Sequence
  Description of Artificial Sequence: Synthetic oligonucleotide
  Sense strand starting at position 3168 of SEQ ID NO: 1881451
ucauuauaacuugggcaau

SEQ ID NO: 2045559 - RNA, 19 nt, Artificial Sequence
  Description of Artificial Sequence: Synthetic oligonucleotide
  Antisense strand to SEQ ID NO: 2045558
auugcccaaguuauaauga

SEQ ID NO: 2045560 - RNA, 19 nt, Artificial Sequence
  Description of Artificial Sequence: Synthetic oligonucleotide
  Sense strand starting at position 3170 of SEQ ID NO: 1881451
auuauaacuugggcaauca

SEQ ID NO: 2045561 - RNA, 19 nt, Artificial Sequence
  Description of Artificial Sequence: Synthetic oligonucleotide
  Antisense strand to SEQ ID NO: 2045560
ugauugcccaaguuauaau

SEQ ID NO: 2045562 - RNA, 19 nt, Artificial Sequence
  Description of Artificial Sequence: Synthetic oligonucleotide
  Sense strand starting at position 3375 of SEQ ID NO: 1881451
ugcaccauugcugagaauu

SEQ ID NO: 2045563 - RNA, 19 nt, Artificial Sequence
  Description of Artificial Sequence: Synthetic oligonucleotide
  Antisense strand to SEQ ID NO: 2045562
aauucucagcaauggugca

SEQ ID NO: 2045564 - RNA, 19 nt, Artificial Sequence
  Description of Artificial Sequence: Synthetic oligonucleotide
  Sense strand starting at position 3444 of SEQ ID NO: 1881451
guaguuucuggagggagau

SEQ ID NO: 2045565 - RNA, 19 nt, Artificial Sequence
  Description of Artificial Sequence: Synthetic oligonucleotide
  Antisense strand to SEQ ID NO: 2045564
aucucccuccagaaacuac

SEQ ID NO: 2045566 - RNA, 19 nt, Artificial Sequence
  Description of Artificial Sequence: Synthetic oligonucleotide
  Sense strand starting at position 3763 of SEQ ID NO: 1881451
guuuauuucuaagacugag

SEQ ID NO: 2045567 - RNA, 19 nt, Artificial Sequence
  Description of Artificial Sequence: Synthetic oligonucleotide
  Antisense strand to SEQ ID NO: 2045566
cucagucuuagaaauaaac

SEQ ID NO: 2045568 - RNA, 19 nt, Artificial Sequence
  Description of Artificial Sequence: Synthetic oligonucleotide
  Sense strand starting at position 3790 of SEQ ID NO: 1881451
guacaaagauuaucuuugu

SEQ ID NO: 2045569 - RNA, 19 nt, Artificial Sequence
  Description of Artificial Sequence: Synthetic oligonucleotide
  Antisense strand to SEQ ID NO: 2045568
acaaagauaaucuuuguac

SEQ ID NO: 2045570 - RNA, 19 nt, Artificial Sequence
  Description of Artificial Sequence: Synthetic oligonucleotide
  Sense strand starting at position 33 of SEQ ID NO: 1881452
uuugaaugguccucaaaua

SEQ ID NO: 2045571 - RNA, 19 nt, Artificial Sequence
  Description of Artificial Sequence: Synthetic oligonucleotide
  Antisense strand to SEQ ID NO: 2045570
uauuugaggaccauucaaa

SEQ ID NO: 2045572 - RNA, 19 nt, Artificial Sequence
  Description of Artificial Sequence: Synthetic oligonucleotide
  Sense strand starting at position 315 of SEQ ID NO: 1881452
agcuaaagauagugaggaa

SEQ ID NO: 2045573 - RNA, 19 nt, Artificial Sequence
  Description of Artificial Sequence: Synthetic oligonucleotide
  Antisense strand to SEQ ID NO: 2045572
uuccucacuaucuuuagcu

SEQ ID NO: 2045574 - RNA, 19 nt, Artificial Sequence
  Description of Artificial Sequence: Synthetic oligonucleotide
  Sense strand starting at position 318 of SEQ ID NO: 1881452
uaaagauagugaggaauuu

SEQ ID NO: 2045575 - RNA, 19 nt, Artificial Sequence
  Description of Artificial Sequence: Synthetic oligonucleotide
  Antisense strand to SEQ ID NO: 2045574
aaauuccucacuaucuuua

SEQ ID NO: 2045576 - RNA, 19 nt, Artificial Sequence
  Description of Artificial Sequence: Synthetic oligonucleotide
  Sense strand starting at position 327 of SEQ ID NO: 1881452
ugaggaauuuauuguggag

SEQ ID NO: 2045577 - RNA, 19 nt, Artificial Sequence
  Description of Artificial Sequence: Synthetic oligonucleotide
  Antisense strand to SEQ ID NO: 2045576
cuccacaauaaauuccuca

SEQ ID NO: 2045578 - RNA, 19 nt, Artificial Sequence
  Description of Artificial Sequence: Synthetic oligonucleotide
  Sense strand starting at position 329 of SEQ ID NO: 1881452
aggaauuuauuguggagac

SEQ ID NO: 2045579 - RNA, 19 nt, Artificial Sequence
  Description of Artificial Sequence: Synthetic oligonucleotide
  Antisense strand to SEQ ID NO: 2045578
gucuccacaauaaauuccu

SEQ ID NO: 2045580 - RNA, 19 nt, Artificial Sequence
  Description of Artificial Sequence: Synthetic oligonucleotide
  Sense strand starting at position 330 of SEQ ID NO: 1881452
ggaauuuauuguggagaca

SEQ ID NO: 2045581 - RNA, 19 nt, Artificial Sequence
  Description of Artificial Sequence: Synthetic oligonucleotide
  Antisense strand to SEQ ID NO: 2045580
ugucuccacaauaaauucc

SEQ ID NO: 2045582 - RNA, 19 nt, Artificial Sequence
  Description of Artificial Sequence: Synthetic oligonucleotide
  Sense strand starting at position 377 of SEQ ID NO: 1881452
ugagcugacucaccuuuau

SEQ ID NO: 2045583 - RNA, 19 nt, Artificial Sequence
  Description of Artificial Sequence: Synthetic oligonucleotide
  Antisense strand to SEQ ID NO: 2045582
auaaaggugagucagcuca

SEQ ID NO: 2045584 - RNA, 19 nt, Artificial Sequence
  Description of Artificial Sequence: Synthetic oligonucleotide
  Sense strand starting at position 387 of SEQ ID NO: 1881452
caccuuuauuaggugugaa

SEQ ID NO: 2045585 - RNA, 19 nt, Artificial Sequence
  Description of Artificial Sequence: Synthetic oligonucleotide
  Antisense strand to SEQ ID NO: 2045584
uucacaccuaauaaaggug

SEQ ID NO: 2045586 - RNA, 19 nt, Artificial Sequence
  Description of Artificial Sequence: Synthetic oligonucleotide
  Sense strand starting at position 417 of SEQ ID NO: 1881452
gcuuuacagugguuacuau

SEQ ID NO: 2045587 - RNA, 19 nt, Artificial Sequence
  Description of Artificial Sequence: Synthetic oligonucleotide
  Antisense strand to SEQ ID NO: 2045586
auaguaaccacuguaaagc

SEQ ID NO: 2045588 - RNA, 19 nt, Artificial Sequence
  Description of Artificial Sequence: Synthetic oligonucleotide
  Sense strand starting at position 418 of SEQ ID NO: 1881452
cuuuacagugguuacuaua

SEQ ID NO: 2045589 - RNA, 19 nt, Artificial Sequence
  Description of Artificial Sequence: Synthetic oligonucleotide
  Antisense strand to SEQ ID NO: 2045588
uauaguaaccacuguaaag

SEQ ID NO: 2045590 - RNA, 19 nt, Artificial Sequence
  Description of Artificial Sequence: Synthetic oligonucleotide
  Sense strand starting at position 510 of SEQ ID NO: 1881452
uuuaaaugccuguguacua

SEQ ID NO: 2045591 - RNA, 19 nt, Artificial Sequence
  Description of Artificial Sequence: Synthetic oligonucleotide
  Antisense strand to SEQ ID NO: 2045590
uaguacacaggcauuuaaa

SEQ ID NO: 2045592 - RNA, 19 nt, Artificial Sequence
  Description of Artificial Sequence: Synthetic oligonucleotide
  Sense strand starting at position 511 of SEQ ID NO: 1881452
uuaaaugccuguguacuaa

SEQ ID NO: 2045593 - RNA, 19 nt, Artificial Sequence
  Description of Artificial Sequence: Synthetic oligonucleotide
  Antisense strand to SEQ ID NO: 2045592
uuaguacacaggcauuuaa

SEQ ID NO: 2045594 - RNA, 19 nt, Artificial Sequence
  Description of Artificial Sequence: Synthetic oligonucleotide
  Sense strand starting at position 543 of SEQ ID NO: 1881452
auguaucucuuugaaagaa

SEQ ID NO: 2045595 - RNA, 19 nt, Artificial Sequence
  Description of Artificial Sequence: Synthetic oligonucleotide
  Antisense strand to SEQ ID NO: 2045594
uucuuucaaagagauacau

SEQ ID NO: 2045596 - RNA, 19 nt, Artificial Sequence
  Description of Artificial Sequence: Synthetic oligonucleotide
  Sense strand starting at position 572 of SEQ ID NO: 1881452
gagggaauauacuaaagca

SEQ ID NO: 2045597 - RNA, 19 nt, Artificial Sequence
  Description of Artificial Sequence: Synthetic oligonucleotide
  Antisense strand to SEQ ID NO: 2045596
ugcuuuaguauauucccuc

SEQ ID NO: 2045598 - RNA, 19 nt, Artificial Sequence
  Description of Artificial Sequence: Synthetic oligonucleotide
  Sense strand starting at position 598 of SEQ ID NO: 1881452
acauaauagaggugaagca

SEQ ID NO: 2045599 - RNA, 19 nt, Artificial Sequence
  Description of Artificial Sequence: Synthetic oligonucleotide
  Antisense strand to SEQ ID NO: 2045598
ugcuucaccucuauuaugu

SEQ ID NO: 2045600 - RNA, 19 nt, Artificial Sequence
  Description of Artificial Sequence: Synthetic oligonucleotide
  Sense strand starting at position 654 of SEQ ID NO: 1881452
guuuguaaaucucccaaug

SEQ ID NO: 2045601 - RNA, 19 nt, Artificial Sequence
  Description of Artificial Sequence: Synthetic oligonucleotide
  Antisense strand to SEQ ID NO: 2045600
cauugggagauuuacaaac

SEQ ID NO: 2045602 - RNA, 19 nt, Artificial Sequence
  Description of Artificial Sequence: Synthetic oligonucleotide
  Sense strand starting at position 751 of SEQ ID NO: 1881452
guaugucguguaucugcau

SEQ ID NO: 2045603 - RNA, 19 nt, Artificial Sequence
  Description of Artificial Sequence: Synthetic oligonucleotide
  Antisense strand to SEQ ID NO: 2045602
augcagauacacgacauac

SEQ ID NO: 2045604 - RNA, 19 nt, Artificial Sequence
  Description of Artificial Sequence: Synthetic oligonucleotide
  Sense strand starting at position 762 of SEQ ID NO: 1881452
aucugcauaucguccaauu

SEQ ID NO: 2045605 - RNA, 19 nt, Artificial Sequence
  Description of Artificial Sequence: Synthetic oligonucleotide
  Antisense strand to SEQ ID NO: 2045604
aauuggacgauaugcagau

SEQ ID NO: 2045606 - RNA, 19 nt, Artificial Sequence
  Description of Artificial Sequence: Synthetic oligonucleotide
  Sense strand starting at position 816 of SEQ ID NO: 1881452
ugaauuaaaucgccaccua

SEQ ID NO: 2045607 - RNA, 19 nt, Artificial Sequence
  Description of Artificial Sequence: Synthetic oligonucleotide
  Antisense strand to SEQ ID NO: 2045606
uagguggcgauuuaauuca

SEQ ID NO: 2045608 - RNA, 19 nt, Artificial Sequence
  Description of Artificial Sequence: Synthetic oligonucleotide
  Sense strand starting at position 836 of SEQ ID NO: 1881452
gaaaguaccuggcacacua

SEQ ID NO: 2045609 - RNA, 19 nt, Artificial Sequence
  Description of Artificial Sequence: Synthetic oligonucleotide
  Antisense strand to SEQ ID NO: 2045608
uagugugccagguacuuuc

SEQ ID NO: 2045610 - RNA, 19 nt, Artificial Sequence
  Description of Artificial Sequence: Synthetic oligonucleotide
  Sense strand starting at position 902 of SEQ ID NO: 1881452
gcuaccgccucuuuauuua

SEQ ID NO: 2045611 - RNA, 19 nt, Artificial Sequence
  Description of Artificial Sequence: Synthetic oligonucleotide
  Antisense strand to SEQ ID NO: 2045610
uaaauaaagaggcgguagc

SEQ ID NO: 2045612 - RNA, 19 nt, Artificial Sequence
  Description of Artificial Sequence: Synthetic oligonucleotide
  Sense strand starting at position 970 of SEQ ID NO: 1881452
ccaucaaaguaugggaaga

SEQ ID NO: 2045613 - RNA, 19 nt, Artificial Sequence
  Description of Artificial Sequence: Synthetic oligonucleotide
  Antisense strand to SEQ ID NO: 2045612
ucuucccauacuuugaugg

SEQ ID NO: 2045614 - RNA, 19 nt, Artificial Sequence
  Description of Artificial Sequence: Synthetic oligonucleotide
  Sense strand starting at position 1013 of SEQ ID NO: 1881452
cgguauggguguuuaagaa

SEQ ID NO: 2045615 - RNA, 19 nt, Artificial Sequence
  Description of Artificial Sequence: Synthetic oligonucleotide
  Antisense strand to SEQ ID NO: 2045614
uucuuaaacacccauaccg

SEQ ID NO: 2045616 - RNA, 19 nt, Artificial Sequence
  Description of Artificial Sequence: Synthetic oligonucleotide
  Sense strand starting at position 1017 of SEQ ID NO: 1881452
auggguguuuaagaaacua

SEQ ID NO: 2045617 - RNA, 19 nt, Artificial Sequence
  Description of Artificial Sequence: Synthetic oligonucleotide
  Antisense strand to SEQ ID NO: 2045616
uaguuucuuaaacacccau

SEQ ID NO: 2045618 - RNA, 19 nt, Artificial Sequence
  Description of Artificial Sequence: Synthetic oligonucleotide
  Sense strand starting at position 1067 of SEQ ID NO: 1881452
gcgaugugacgacaagguu

SEQ ID NO: 2045619 - RNA, 19 nt, Artificial Sequence
  Description of Artificial Sequence: Synthetic oligonucleotide
  Antisense strand to SEQ ID NO: 2045618
aaccuugucgucacaucgc

SEQ ID NO: 2045620 - RNA, 19 nt, Artificial Sequence
  Description of Artificial Sequence: Synthetic oligonucleotide
  Sense strand starting at position 1220 of SEQ ID NO: 1881452
aggauuccuugcccuaauu

SEQ ID NO: 2045621 - RNA, 19 nt, Artificial Sequence
  Description of Artificial Sequence: Synthetic oligonucleotide
  Antisense strand to SEQ ID NO: 2045620
aauuagggcaaggaauccu

SEQ ID NO: 2045622 - RNA, 19 nt, Artificial Sequence
  Description of Artificial Sequence: Synthetic oligonucleotide
  Sense strand starting at position 1232 of SEQ ID NO: 1881452
ccuaauuaucccgggagga

SEQ ID NO: 2045623 - RNA, 19 nt, Artificial Sequence
  Description of Artificial Sequence: Synthetic oligonucleotide
  Antisense strand to SEQ ID NO: 2045622
uccucccgggauaauuagg

SEQ ID NO: 2045624 - RNA, 19 nt, Artificial Sequence
  Description of Artificial Sequence: Synthetic oligonucleotide
  Sense strand starting at position 1233 of SEQ ID NO: 1881452
cuaauuaucccgggaggaa

SEQ ID NO: 2045625 - RNA, 19 nt, Artificial Sequence
  Description of Artificial Sequence: Synthetic oligonucleotide
  Antisense strand to SEQ ID NO: 2045624
uuccucccgggauaauuag

SEQ ID NO: 2045626 - RNA, 19 nt, Artificial Sequence
  Description of Artificial Sequence: Synthetic oligonucleotide
  Sense strand starting at position 2058 of SEQ ID NO: 1881452
gccggauccgugguuccua

SEQ ID NO: 2045627 - RNA, 19 nt, Artificial Sequence
  Description of Artificial Sequence: Synthetic oligonucleotide
  Antisense strand to SEQ ID NO: 2045626
uaggaaccacggauccggc

SEQ ID NO: 2045628 - RNA, 19 nt, Artificial Sequence
  Description of Artificial Sequence: Synthetic oligonucleotide
  Sense strand starting at position 2063 of SEQ ID NO: 1881452
auccgugguuccuacauuu

SEQ ID NO: 2045629 - RNA, 19 nt, Artificial Sequence
  Description of Artificial Sequence: Synthetic oligonucleotide
  Antisense strand to SEQ ID NO: 2045628
aaauguaggaaccacggau

SEQ ID NO: 2045630 - RNA, 19 nt, Artificial Sequence
  Description of Artificial Sequence: Synthetic oligonucleotide
  Sense strand starting at position 2504 of SEQ ID NO: 1881452
aucgcagucucaucucaaa

SEQ ID NO: 2045631 - RNA, 19 nt, Artificial Sequence
  Description of Artificial Sequence: Synthetic oligonucleotide
  Antisense strand to SEQ ID NO: 2045630
uuugagaugagacugcgau

SEQ ID NO: 2045632 - RNA, 19 nt, Artificial Sequence
  Description of Artificial Sequence: Synthetic oligonucleotide
  Sense strand starting at position 2759 of SEQ ID NO: 1881452
agugacauuucgggcuuga

SEQ ID NO: 2045633 - RNA, 19 nt, Artificial Sequence
  Description of Artificial Sequence: Synthetic oligonucleotide
  Antisense strand to SEQ ID NO: 2045632
ucaagcccgaaaugucacu

SEQ ID NO: 2045634 - RNA, 19 nt, Artificial Sequence
  Description of Artificial Sequence: Synthetic oligonucleotide
  Sense strand starting at position 2791 of SEQ ID NO: 1881452
guuggaagcucagugacaa

SEQ ID NO: 2045635 - RNA, 19 nt, Artificial Sequence
  Description of Artificial Sequence: Synthetic oligonucleotide
  Antisense strand to SEQ ID NO: 2045634
uugucacugagcuuccaac

SEQ ID NO: 2045636 - RNA, 19 nt, Artificial Sequence
  Description of Artificial Sequence: Synthetic oligonucleotide
  Sense strand starting at position 2807 of SEQ ID NO: 1881452
caaggaucucuggagcagu

SEQ ID NO: 2045637 - RNA, 19 nt, Artificial Sequence
  Description of Artificial Sequence: Synthetic oligonucleotide
  Antisense strand to SEQ ID NO: 2045636
acugcuccagagauccuug

SEQ ID NO: 2045638 - RNA, 19 nt, Artificial Sequence
  Description of Artificial Sequence: Synthetic oligonucleotide
  Sense strand starting at position 2909 of SEQ ID NO: 1881452
ccugcugggagcuguuauu

SEQ ID NO: 2045639 - RNA, 19 nt, Artificial Sequence
  Description of Artificial Sequence: Synthetic oligonucleotide
  Antisense strand to SEQ ID NO: 2045638
aauaacagcucccagcagg

SEQ ID NO: 2045640 - RNA, 19 nt, Artificial Sequence
  Description of Artificial Sequence: Synthetic oligonucleotide
  Sense strand starting at position 3158 of SEQ ID NO: 1881452
gcaugucuuaaagacggaa

SEQ ID NO: 2045641 - RNA, 19 nt, Artificial Sequence
  Description of Artificial Sequence: Synthetic oligonucleotide
  Antisense strand to SEQ ID NO: 2045640
uuccgucuuuaagacaugc

SEQ ID NO: 2045642 - RNA, 19 nt, Artificial Sequence
  Description of Artificial Sequence: Synthetic oligonucleotide
  Sense strand starting at position 3471 of SEQ ID NO: 1881452
cgggaacaguaucucagau

SEQ ID NO: 2045643 - RNA, 19 nt, Artificial Sequence
  Description of Artificial Sequence: Synthetic oligonucleotide
  Antisense strand to SEQ ID NO: 2045642
aucugagauacuguucccg

SEQ ID NO: 2045644 - RNA, 19 nt, Artificial Sequence
  Description of Artificial Sequence: Synthetic oligonucleotide
  Sense strand starting at position 3532 of SEQ ID NO: 1881452
ccacuuuggcuagaauggu

SEQ ID NO: 2045645 - RNA, 19 nt, Artificial Sequence
  Description of Artificial Sequence: Synthetic oligonucleotide
  Antisense strand to SEQ ID NO: 2045644
accauucuagccaaagugg

SEQ ID NO: 2045646 - RNA, 19 nt, Artificial Sequence
  Description of Artificial Sequence: Synthetic oligonucleotide
  Sense strand starting at position 3842 of SEQ ID NO: 1881452
uaauuaaaggcuuaugugu

SEQ ID NO: 2045647 - RNA, 19 nt, Artificial Sequence
  Description of Artificial Sequence: Synthetic oligonucleotide
  Antisense strand to SEQ ID NO: 2045646
acacauaagccuuuaauua

SEQ ID NO: 2045648 - RNA, 19 nt, Artificial Sequence
  Description of Artificial Sequence: Synthetic oligonucleotide
  Sense strand starting at position 3961 of SEQ ID NO: 1881452
uugagagucguagaccuuu

SEQ ID NO: 2045649 - RNA, 19 nt, Artificial Sequence
  Description of Artificial Sequence: Synthetic oligonucleotide
  Antisense strand to SEQ ID NO: 2045648
aaaggucuacgacucucaa

SEQ ID NO: 2045650 - RNA, 19 nt, Artificial Sequence
  Description of Artificial Sequence: Synthetic oligonucleotide
  Sense strand starting at position 10 of SEQ ID NO: 1881453
gcauaauaaggucauccau

SEQ ID NO: 2045651 - RNA, 19 nt, Artificial Sequence
  Description of Artificial Sequence: Synthetic oligonucleotide
  Antisense strand to SEQ ID NO: 2045650
auggaugaccuuauuaugc

SEQ ID NO: 2045652 - RNA, 19 nt, Artificial Sequence
  Description of Artificial Sequence: Synthetic oligonucleotide
  Sense strand starting at position 39 of SEQ ID NO: 1881453
ggaugaauggcuggauuau

SEQ ID NO: 2045653 - RNA, 19 nt, Artificial Sequence
  Description of Artificial Sequence: Synthetic oligonucleotide
  Antisense strand to SEQ ID NO: 2045652
auaauccagccauucaucc

SEQ ID NO: 2045654 - RNA, 19 nt, Artificial Sequence
  Description of Artificial Sequence: Synthetic oligonucleotide
  Sense strand starting at position 194 of SEQ ID NO: 1881453
guucuaguaguagaaauau

SEQ ID NO: 2045655 - RNA, 19 nt, Artificial Sequence
  Description of Artificial Sequence: Synthetic oligonucleotide
  Antisense strand to SEQ ID NO: 2045654
auauuucuacuacuagaac

SEQ ID NO: 2045656 - RNA, 19 nt, Artificial Sequence
  Description of Artificial Sequence: Synthetic oligonucleotide
  Sense strand starting at position 222 of SEQ ID NO: 1881453
auauguaacuguuuagaag

SEQ ID NO: 2045657 - RNA, 19 nt, Artificial Sequence
  Description of Artificial Sequence: Synthetic oligonucleotide
  Antisense strand to SEQ ID NO: 2045656
cuucuaaacaguuacauau

SEQ ID NO: 2045658 - RNA, 19 nt, Artificial Sequence
  Description of Artificial Sequence: Synthetic oligonucleotide
  Sense strand starting at position 321 of SEQ ID NO: 1881453
gcaucaucagcugaaauga

SEQ ID NO: 2045659 - RNA, 19 nt, Artificial Sequence
  Description of Artificial Sequence: Synthetic oligonucleotide
  Antisense strand to SEQ ID NO: 2045658
ucauuucagcugaugaugc

SEQ ID NO: 2045660 - RNA, 19 nt, Artificial Sequence
  Description of Artificial Sequence: Synthetic oligonucleotide
  Sense strand starting at position 383 of SEQ ID NO: 1881453
guuaguuuauaccuacaag

SEQ ID NO: 2045661 - RNA, 19 nt, Artificial Sequence
  Description of Artificial Sequence: Synthetic oligonucleotide
  Antisense strand to SEQ ID NO: 2045660
cuuguagguauaaacuaac

SEQ ID NO: 2045662 - RNA, 19 nt, Artificial Sequence
  Description of Artificial Sequence: Synthetic oligonucleotide
  Sense strand starting at position 386 of SEQ ID NO: 1881453
aguuuauaccuacaaguua

SEQ ID NO: 2045663 - RNA, 19 nt, Artificial Sequence
  Description of Artificial Sequence: Synthetic oligonucleotide
  Antisense strand to SEQ ID NO: 2045662
uaacuuguagguauaaacu

SEQ ID NO: 2045664 - RNA, 19 nt, Artificial Sequence
  Description of Artificial Sequence: Synthetic oligonucleotide
  Sense strand starting at position 555 of SEQ ID NO: 1881453
auuuguucugcucauguca

SEQ ID NO: 2045665 - RNA, 19 nt, Artificial Sequence
  Description of Artificial Sequence: Synthetic oligonucleotide
  Antisense strand to SEQ ID NO: 2045664
ugacaugagcagaacaaau

SEQ ID NO: 2045666 - RNA, 19 nt, Artificial Sequence
  Description of Artificial Sequence: Synthetic oligonucleotide
  Sense strand starting at position 570 of SEQ ID NO: 1881453
gucagaaaccauuaggcau

SEQ ID NO: 2045667 - RNA, 19 nt, Artificial Sequence
  Description of Artificial Sequence: Synthetic oligonucleotide
  Antisense strand to SEQ ID NO: 2045666
augccuaaugguuucugac

SEQ ID NO: 2045668 - RNA, 19 nt, Artificial Sequence
  Description of Artificial Sequence: Synthetic oligonucleotide
  Sense strand starting at position 618 of SEQ ID NO: 1881453
aacgcagugagugauuaga

SEQ ID NO: 2045669 - RNA, 19 nt, Artificial Sequence
  Description of Artificial Sequence: Synthetic oligonucleotide
  Antisense strand to SEQ ID NO: 2045668
ucuaaucacucacugcguu

SEQ ID NO: 2045670 - RNA, 19 nt, Artificial Sequence
  Description of Artificial Sequence: Synthetic oligonucleotide
  Sense strand starting at position 642 of SEQ ID NO: 1881453
uaggguagugauugauuaa

SEQ ID NO: 2045671 - RNA, 19 nt, Artificial Sequence
  Description of Artificial Sequence: Synthetic oligonucleotide
  Antisense strand to SEQ ID NO: 2045670
uuaaucaaucacuacccua

SEQ ID NO: 2045672 - RNA, 19 nt, Artificial Sequence
  Description of Artificial Sequence: Synthetic oligonucleotide
  Sense strand starting at position 709 of SEQ ID NO: 1881453
uggaacuagucuuccaaac

SEQ ID NO: 2045673 - RNA, 19 nt, Artificial Sequence
  Description of Artificial Sequence: Synthetic oligonucleotide
  Antisense strand to SEQ ID NO: 2045672
guuuggaagacuaguucca

SEQ ID NO: 2045674 - RNA, 19 nt, Artificial Sequence
  Description of Artificial Sequence: Synthetic oligonucleotide
  Sense strand starting at position 756 of SEQ ID NO: 1881453
ggagcuucagucugagaaa

SEQ ID NO: 2045675 - RNA, 19 nt, Artificial Sequence
  Description of Artificial Sequence: Synthetic oligonucleotide
  Antisense strand to SEQ ID NO: 2045674
uuucucagacugaagcucc

SEQ ID NO: 2045676 - RNA, 19 nt, Artificial Sequence
  Description of Artificial Sequence: Synthetic oligonucleotide
  Sense strand starting at position 768 of SEQ ID NO: 1881453
ugagaaacuguccagcauu

SEQ ID NO: 2045677 - RNA, 19 nt, Artificial Sequence
  Description of Artificial Sequence: Synthetic oligonucleotide
  Antisense strand to SEQ ID NO: 2045676
aaugcuggacaguuucuca

SEQ ID NO: 2045678 - RNA, 19 nt, Artificial Sequence
  Description of Artificial Sequence: Synthetic oligonucleotide
  Sense strand starting at position 887 of SEQ ID NO: 1881453
gacgguugacuuuacagua

SEQ ID NO: 2045679 - RNA, 19 nt, Artificial Sequence
  Description of Artificial Sequence: Synthetic oligonucleotide
  Antisense strand to SEQ ID NO: 2045678
uacuguaaagucaaccguc

SEQ ID NO: 2045680 - RNA, 19 nt, Artificial Sequence
  Description of Artificial Sequence: Synthetic oligonucleotide
  Sense strand starting at position 992 of SEQ ID NO: 1881453
gcuccugugaaguagaaug

SEQ ID NO: 2045681 - RNA, 19 nt, Artificial Sequence
  Description of Artificial Sequence: Synthetic oligonucleotide
  Antisense strand to SEQ ID NO: 2045680
cauucuacuucacaggagc

SEQ ID NO: 2045682 - RNA, 19 nt, Artificial Sequence
  Description of Artificial Sequence: Synthetic oligonucleotide
  Sense strand starting at position 994 of SEQ ID NO: 1881453
uccugugaaguagaauguu

SEQ ID NO: 2045683 - RNA, 19 nt, Artificial Sequence
  Description of Artificial Sequence: Synthetic oligonucleotide
  Antisense strand to SEQ ID NO: 2045682
aacauucuacuucacagga

SEQ ID NO: 2045684 - RNA, 19 nt, Artificial Sequence
  Description of Artificial Sequence: Synthetic oligonucleotide
  Sense strand starting at position 1035 of SEQ ID NO: 1881453
caauuaauuugacagaggu

SEQ ID NO: 2045685 - RNA, 19 nt, Artificial Sequence
  Description of Artificial Sequence: Synthetic oligonucleotide
  Antisense strand to SEQ ID NO: 2045684
accucugucaaauuaauug

SEQ ID NO: 2045686 - RNA, 19 nt, Artificial Sequence
  Description of Artificial Sequence: Synthetic oligonucleotide
  Sense strand starting at position 1247 of SEQ ID NO: 1881453
uucuauuggcuagauaaac

SEQ ID NO: 2045687 - RNA, 19 nt, Artificial Sequence
  Description of Artificial Sequence: Synthetic oligonucleotide
  Antisense strand to SEQ ID NO: 2045686
guuuaucuagccaauagaa

SEQ ID NO: 2045688 - RNA, 19 nt, Artificial Sequence
  Description of Artificial Sequence: Synthetic oligonucleotide
  Sense strand starting at position 2351 of SEQ ID NO: 1881453
gcguccuaacgagaaauaa

SEQ ID NO: 2045689 - RNA, 19 nt, Artificial Sequence
  Description of Artificial Sequence: Synthetic oligonucleotide
  Antisense strand to SEQ ID NO: 2045688
uuauuucucguuaggacgc

SEQ ID NO: 2045690 - RNA, 19 nt, Artificial Sequence
  Description of Artificial Sequence: Synthetic oligonucleotide
  Sense strand starting at position 2390 of SEQ ID NO: 1881453
uccauuggcagugaugaua

SEQ ID NO: 2045691 - RNA, 19 nt, Artificial Sequence
  Description of Artificial Sequence: Synthetic oligonucleotide
  Antisense strand to SEQ ID NO: 2045690
uaucaucacugccaaugga

SEQ ID NO: 2045692 - RNA, 19 nt, Artificial Sequence
  Description of Artificial Sequence: Synthetic oligonucleotide
  Sense strand starting at position 2393 of SEQ ID NO: 1881453
auuggcagugaugauauau

SEQ ID NO: 2045693 - RNA, 19 nt, Artificial Sequence
  Description of Artificial Sequence: Synthetic oligonucleotide
  Antisense strand to SEQ ID NO: 2045692
auauaucaucacugccaau

SEQ ID NO: 2045694 - RNA, 19 nt, Artificial Sequence
  Description of Artificial Sequence: Synthetic oligonucleotide
  Sense strand starting at position 2401 of SEQ ID NO: 1881453
ugaugauauaugcaguguu

SEQ ID NO: 2045695 - RNA, 19 nt, Artificial Sequence
  Description of Artificial Sequence: Synthetic oligonucleotide
  Antisense strand to SEQ ID NO: 2045694
aacacugcauauaucauca

SEQ ID NO: 2045696 - RNA, 19 nt, Artificial Sequence
  Description of Artificial Sequence: Synthetic oligonucleotide
  Sense strand starting at position 2524 of SEQ ID NO: 1881453
gagagaugaccacgagugu

SEQ ID NO: 2045697 - RNA, 19 nt, Artificial Sequence
  Description of Artificial Sequence: Synthetic oligonucleotide
  Antisense strand to SEQ ID NO: 2045696
acacucguggucaucucuc

SEQ ID NO: 2045698 - RNA, 19 nt, Artificial Sequence
  Description of Artificial Sequence: Synthetic oligonucleotide
  Sense strand starting at position 2525 of SEQ ID NO: 1881453
agagaugaccacgaguguu

SEQ ID NO: 2045699 - RNA, 19 nt, Artificial Sequence
  Description of Artificial Sequence: Synthetic oligonucleotide
  Antisense strand to SEQ ID NO: 2045698
aacacucguggucaucucu

SEQ ID NO: 2045700 - RNA, 19 nt, Artificial Sequence
  Description of Artificial Sequence: Synthetic oligonucleotide
  Sense strand starting at position 2617 of SEQ ID NO: 1881453
cgggacucauucuuagauu

SEQ ID NO: 2045701 - RNA, 19 nt, Artificial Sequence
  Description of Artificial Sequence: Synthetic oligonucleotide
  Antisense strand to SEQ ID NO: 2045700
aaucuaagaaugagucccg

SEQ ID NO: 2045702 - RNA, 19 nt, Artificial Sequence
  Description of Artificial Sequence: Synthetic oligonucleotide
  Sense strand starting at position 2618 of SEQ ID NO: 1881453
gggacucauucuuagauuu

SEQ ID NO: 2045703 - RNA, 19 nt, Artificial Sequence
  Description of Artificial Sequence: Synthetic oligonucleotide
  Antisense strand to SEQ ID NO: 2045702
aaaucuaagaaugaguccc

SEQ ID NO: 2045704 - RNA, 19 nt, Artificial Sequence
  Description of Artificial Sequence: Synthetic oligonucleotide
  Sense strand starting at position 2648 of SEQ ID NO: 1881453
ucaagauggucuucucaca

SEQ ID NO: 2045705 - RNA, 19 nt, Artificial Sequence
  Description of Artificial Sequence: Synthetic oligonucleotide
  Antisense strand to SEQ ID NO: 2045704
ugugagaagaccaucuuga

SEQ ID NO: 2045706 - RNA, 19 nt, Artificial Sequence
  Description of Artificial Sequence: Synthetic oligonucleotide
  Sense strand starting at position 3050 of SEQ ID NO: 1881453
cucugcucuguagauaaga

SEQ ID NO: 2045707 - RNA, 19 nt, Artificial Sequence
  Description of Artificial Sequence: Synthetic oligonucleotide
  Antisense strand to SEQ ID NO: 2045706
ucuuaucuacagagcagag

SEQ ID NO: 2045708 - RNA, 19 nt, Artificial Sequence
  Description of Artificial Sequence: Synthetic oligonucleotide
  Sense strand starting at position 3081 of SEQ ID NO: 1881453
aggaaaggugaagguuuau

SEQ ID NO: 2045709 - RNA, 19 nt, Artificial Sequence
  Description of Artificial Sequence: Synthetic oligonucleotide
  Antisense strand to SEQ ID NO: 2045708
auaaaccuucaccuuuccu

SEQ ID NO: 2045710 - RNA, 19 nt, Artificial Sequence
  Description of Artificial Sequence: Synthetic oligonucleotide
  Sense strand starting at position 3119 of SEQ ID NO: 1881453
uagucauuggguuaaggau

SEQ ID NO: 2045711 - RNA, 19 nt, Artificial Sequence
  Description of Artificial Sequence: Synthetic oligonucleotide
  Antisense strand to SEQ ID NO: 2045710
auccuuaacccaaugacua

SEQ ID NO: 2045712 - RNA, 19 nt, Artificial Sequence
  Description of Artificial Sequence: Synthetic oligonucleotide
  Sense strand starting at position 3127 of SEQ ID NO: 1881453
ggguuaaggauaggucauu

SEQ ID NO: 2045713 - RNA, 19 nt, Artificial Sequence
  Description of Artificial Sequence: Synthetic oligonucleotide
  Antisense strand to SEQ ID NO: 2045712
aaugaccuauccuuaaccc

SEQ ID NO: 2045714 - RNA, 19 nt, Artificial Sequence
  Description of Artificial Sequence: Synthetic oligonucleotide
  Sense strand starting at position 3182 of SEQ ID NO: 1881453
gccuaauuugcauguauca

SEQ ID NO: 2045715 - RNA, 19 nt, Artificial Sequence
  Description of Artificial Sequence: Synthetic oligonucleotide
  Antisense strand to SEQ ID NO: 2045714
ugauacaugcaaauuaggc

SEQ ID NO: 2045716 - RNA, 19 nt, Artificial Sequence
  Description of Artificial Sequence: Synthetic oligonucleotide
  Sense strand starting at position 3278 of SEQ ID NO: 1881453
guagaauuggauugccuaa

SEQ ID NO: 2045717 - RNA, 19 nt, Artificial Sequence
  Description of Artificial Sequence: Synthetic oligonucleotide
  Antisense strand to SEQ ID NO: 2045716
uuaggcaauccaauucuac

SEQ ID NO: 2045718 - RNA, 19 nt, Artificial Sequence
  Description of Artificial Sequence: Synthetic oligonucleotide
  Sense strand starting at position 3322 of SEQ ID NO: 1881453
gaggaacaguguguuaauu

SEQ ID NO: 2045719 - RNA, 19 nt, Artificial Sequence
  Description of Artificial Sequence: Synthetic oligonucleotide
  Antisense strand to SEQ ID NO: 2045718
aauuaacacacuguuccuc

SEQ ID NO: 2045720 - RNA, 19 nt, Artificial Sequence
  Description of Artificial Sequence: Synthetic oligonucleotide
  Sense strand starting at position 3740 of SEQ ID NO: 1881453
aguucugugccugaaagau

SEQ ID NO: 2045721 - RNA, 19 nt, Artificial Sequence
  Description of Artificial Sequence: Synthetic oligonucleotide
  Antisense strand to SEQ ID NO: 2045720
aucuuucaggcacagaacu

SEQ ID NO: 2045722 - RNA, 19 nt, Artificial Sequence
  Description of Artificial Sequence: Synthetic oligonucleotide
  Sense strand starting at position 3854 of SEQ ID NO: 1881453
uucccagugccuuaagaaa

SEQ ID NO: 2045723 - RNA, 19 nt, Artificial Sequence
  Description of Artificial Sequence: Synthetic oligonucleotide
  Antisense strand to SEQ ID NO: 2045722
uuucuuaaggcacugggaa

SEQ ID NO: 2045724 - RNA, 19 nt, Artificial Sequence
  Description of Artificial Sequence: Synthetic oligonucleotide
  Sense strand starting at position 3898 of SEQ ID NO: 1881453
agaucugguucuuccauaa

SEQ ID NO: 2045725 - RNA, 19 nt, Artificial Sequence
  Description of Artificial Sequence: Synthetic oligonucleotide
  Antisense strand to SEQ ID NO: 2045724
uuauggaagaaccagaucu

SEQ ID NO: 2045726 - RNA, 19 nt, Artificial Sequence
  Description of Artificial Sequence: Synthetic oligonucleotide
  Sense strand starting at position 3943 of SEQ ID NO: 1881453
aggcccaauuucuuuguau

SEQ ID NO: 2045727 - RNA, 19 nt, Artificial Sequence
  Description of Artificial Sequence: Synthetic oligonucleotide
  Antisense strand to SEQ ID NO: 2045726
auacaaagaaauugggccu

SEQ ID NO: 2045728 - RNA, 19 nt, Artificial Sequence
  Description of Artificial Sequence: Synthetic oligonucleotide
  Sense strand starting at position 3945 of SEQ ID NO: 1881453
gcccaauuucuuuguauug

SEQ ID NO: 2045729 - RNA, 19 nt, Artificial Sequence
  Description of Artificial Sequence: Synthetic oligonucleotide
  Antisense strand to SEQ ID NO: 2045728
caauacaaagaaauugggc

SEQ ID NO: 2045730 - RNA, 19 nt, Artificial Sequence
  Description of Artificial Sequence: Synthetic oligonucleotide
  Sense strand starting at position 17 of SEQ ID NO: 1881454
ucaaguuaaccugaugagu

SEQ ID NO: 2045731 - RNA, 19 nt, Artificial Sequence
  Description of Artificial Sequence: Synthetic oligonucleotide
  Antisense strand to SEQ ID NO: 2045730
acucaucagguuaacuuga

SEQ ID NO: 2045732 - RNA, 19 nt, Artificial Sequence
  Description of Artificial Sequence: Synthetic oligonucleotide
  Sense strand starting at position 372 of SEQ ID NO: 1881454
acacauuaacgcugaauua

SEQ ID NO: 2045733 - RNA, 19 nt, Artificial Sequence
  Description of Artificial Sequence: Synthetic oligonucleotide
  Antisense strand to SEQ ID NO: 2045732
uaauucagcguuaaugugu

SEQ ID NO: 2045734 - RNA, 19 nt, Artificial Sequence
  Description of Artificial Sequence: Synthetic oligonucleotide
  Sense strand starting at position 491 of SEQ ID NO: 1881454
cuacucucugcccaugaga

SEQ ID NO: 2045735 - RNA, 19 nt, Artificial Sequence
  Description of Artificial Sequence: Synthetic oligonucleotide
  Antisense strand to SEQ ID NO: 2045734
ucucaugggcagagaguag

SEQ ID NO: 2045736 - RNA, 19 nt, Artificial Sequence
  Description of Artificial Sequence: Synthetic oligonucleotide
  Sense strand starting at position 718 of SEQ ID NO: 1881454
uuacuccgaucacuuaaga

SEQ ID NO: 2045737 - RNA, 19 nt, Artificial Sequence
  Description of Artificial Sequence: Synthetic oligonucleotide
  Antisense strand to SEQ ID NO: 2045736
ucuuaagugaucggaguaa

SEQ ID NO: 2045738 - RNA, 19 nt, Artificial Sequence
  Description of Artificial Sequence: Synthetic oligonucleotide
  Sense strand starting at position 857 of SEQ ID NO: 1881454
uccugugcccgagauaaag

SEQ ID NO: 2045739 - RNA, 19 nt, Artificial Sequence
  Description of Artificial Sequence: Synthetic oligonucleotide
  Antisense strand to SEQ ID NO: 2045738
cuuuaucucgggcacagga

SEQ ID NO: 2045740 - RNA, 19 nt, Artificial Sequence
  Description of Artificial Sequence: Synthetic oligonucleotide
  Sense strand starting at position 868 of SEQ ID NO: 1881454
agauaaagcuggguuucca

SEQ ID NO: 2045741 - RNA, 19 nt, Artificial Sequence
  Description of Artificial Sequence: Synthetic oligonucleotide
  Antisense strand to SEQ ID NO: 2045740
uggaaacccagcuuuaucu

SEQ ID NO: 2045742 - RNA, 19 nt, Artificial Sequence
  Description of Artificial Sequence: Synthetic oligonucleotide
  Sense strand starting at position 912 of SEQ ID NO: 1881454
ccaaguaauuauuuguugu

SEQ ID NO: 2045743 - RNA, 19 nt, Artificial Sequence
  Description of Artificial Sequence: Synthetic oligonucleotide
  Antisense strand to SEQ ID NO: 2045742
acaacaaauaauuacuugg

SEQ ID NO: 2045744 - RNA, 19 nt, Artificial Sequence
  Description of Artificial Sequence: Synthetic oligonucleotide
  Sense strand starting at position 933 of SEQ ID NO: 1881454
gaggcuauucuauacauug

SEQ ID NO: 2045745 - RNA, 19 nt, Artificial Sequence
  Description of Artificial Sequence: Synthetic oligonucleotide
  Antisense strand to SEQ ID NO: 2045744
caauguauagaauagccuc

SEQ ID NO: 2045746 - RNA, 19 nt, Artificial Sequence
  Description of Artificial Sequence: Synthetic oligonucleotide
  Sense strand starting at position 1059 of SEQ ID NO: 1881454
aaaucaucucguugagaua

SEQ ID NO: 2045747 - RNA, 19 nt, Artificial Sequence
  Description of Artificial Sequence: Synthetic oligonucleotide
  Antisense strand to SEQ ID NO: 2045746
uaucucaacgagaugauuu

SEQ ID NO: 2045748 - RNA, 19 nt, Artificial Sequence
  Description of Artificial Sequence: Synthetic oligonucleotide
  Sense strand starting at position 1060 of SEQ ID NO: 1881454
aaucaucucguugagauau

SEQ ID NO: 2045749 - RNA, 19 nt, Artificial Sequence
  Description of Artificial Sequence: Synthetic oligonucleotide
  Antisense strand to SEQ ID NO: 2045748
auaucucaacgagaugauu

SEQ ID NO: 2045750 - RNA, 19 nt, Artificial Sequence
  Description of Artificial Sequence: Synthetic oligonucleotide
  Sense strand starting at position 1158 of SEQ ID NO: 1881454
guaguauguccgucucugu

SEQ ID NO: 2045751 - RNA, 19 nt, Artificial Sequence
  Description of Artificial Sequence: Synthetic oligonucleotide
  Antisense strand to SEQ ID NO: 2045750
acagagacggacauacuac

SEQ ID NO: 2045752 - RNA, 19 nt, Artificial Sequence
  Description of Artificial Sequence: Synthetic oligonucleotide
  Sense strand starting at position 1159 of SEQ ID NO: 1881454
uaguauguccgucucugua

SEQ ID NO: 2045753 - RNA, 19 nt, Artificial Sequence
  Description of Artificial Sequence: Synthetic oligonucleotide
  Antisense strand to SEQ ID NO: 2045752
uacagagacggacauacua

SEQ ID NO: 2045754 - RNA, 19 nt, Artificial Sequence
  Description of Artificial Sequence: Synthetic oligonucleotide
  Sense strand starting at position 1645 of SEQ ID NO: 1881454
ugaggaauuaugugcucaa

SEQ ID NO: 2045755 - RNA, 19 nt, Artificial Sequence
  Description of Artificial Sequence: Synthetic oligonucleotide
  Antisense strand to SEQ ID NO: 2045754
uugagcacauaauuccuca

SEQ ID NO: 2045756 - RNA, 19 nt, Artificial Sequence
  Description of Artificial Sequence: Synthetic oligonucleotide
  Sense strand starting at position 1646 of SEQ ID NO: 1881454
gaggaauuaugugcucaau

SEQ ID NO: 2045757 - RNA, 19 nt, Artificial Sequence
  Description of Artificial Sequence: Synthetic oligonucleotide
  Antisense strand to SEQ ID NO: 2045756
auugagcacauaauuccuc

SEQ ID NO: 2045758 - RNA, 19 nt, Artificial Sequence
  Description of Artificial Sequence: Synthetic oligonucleotide
  Sense strand starting at position 1648 of SEQ ID NO: 1881454
ggaauuaugugcucaauau

SEQ ID NO: 2045759 - RNA, 19 nt, Artificial Sequence
  Description of Artificial Sequence: Synthetic oligonucleotide
  Antisense strand to SEQ ID NO: 2045758
auauugagcacauaauucc

SEQ ID NO: 2045760 - RNA, 19 nt, Artificial Sequence
  Description of Artificial Sequence: Synthetic oligonucleotide
  Sense strand starting at position 1677 of SEQ ID NO: 1881454
cgcauaugcacagaaauag

SEQ ID NO: 2045761 - RNA, 19 nt, Artificial Sequence
  Description of Artificial Sequence: Synthetic oligonucleotide
  Antisense strand to SEQ ID NO: 2045760
cuauuucugugcauaugcg

SEQ ID NO: 2045762 - RNA, 19 nt, Artificial Sequence
  Description of Artificial Sequence: Synthetic oligonucleotide
  Sense strand starting at position 1730 of SEQ ID NO: 1881454
aagcaucgacagggaaauu

SEQ ID NO: 2045763 - RNA, 19 nt, Artificial Sequence
  Description of Artificial Sequence: Synthetic oligonucleotide
  Antisense strand to SEQ ID NO: 2045762
aauuucccugucgaugcuu

SEQ ID NO: 2045764 - RNA, 19 nt, Artificial Sequence
  Description of Artificial Sequence: Synthetic oligonucleotide
  Sense strand starting at position 1774 of SEQ ID NO: 1881454
auguaaauguuaccuuaug

SEQ ID NO: 2045765 - RNA, 19 nt, Artificial Sequence
  Description of Artificial Sequence: Synthetic oligonucleotide
  Antisense strand to SEQ ID NO: 2045764
cauaagguaacauuuacau

SEQ ID NO: 2045766 - RNA, 19 nt, Artificial Sequence
  Description of Artificial Sequence: Synthetic oligonucleotide
  Sense strand starting at position 1922 of SEQ ID NO: 1881454
ccauguugagaagguaaca

SEQ ID NO: 2045767 - RNA, 19 nt, Artificial Sequence
  Description of Artificial Sequence: Synthetic oligonucleotide
  Antisense strand to SEQ ID NO: 2045766
uguuaccuucucaacaugg

SEQ ID NO: 2045768 - RNA, 19 nt, Artificial Sequence
  Description of Artificial Sequence: Synthetic oligonucleotide
  Sense strand starting at position 2232 of SEQ ID NO: 1881454
gggcucauggcgaguuaug

SEQ ID NO: 2045769 - RNA, 19 nt, Artificial Sequence
  Description of Artificial Sequence: Synthetic oligonucleotide
  Antisense strand to SEQ ID NO: 2045768
cauaacucgccaugagccc

SEQ ID NO: 2045770 - RNA, 19 nt, Artificial Sequence
  Description of Artificial Sequence: Synthetic oligonucleotide
  Sense strand starting at position 2241 of SEQ ID NO: 1881454
gcgaguuauggaagcuguu

SEQ ID NO: 2045771 - RNA, 19 nt, Artificial Sequence
  Description of Artificial Sequence: Synthetic oligonucleotide
  Antisense strand to SEQ ID NO: 2045770
aacagcuuccauaacucgc

SEQ ID NO: 2045772 - RNA, 19 nt, Artificial Sequence
  Description of Artificial Sequence: Synthetic oligonucleotide
  Sense strand starting at position 2284 of SEQ ID NO: 1881454
gacagagaucgagguguug

SEQ ID NO: 2045773 - RNA, 19 nt, Artificial Sequence
  Description of Artificial Sequence: Synthetic oligonucleotide
  Antisense strand to SEQ ID NO: 2045772
caacaccucgaucucuguc

SEQ ID NO: 2045774 - RNA, 19 nt, Artificial Sequence
  Description of Artificial Sequence: Synthetic oligonucleotide
  Sense strand starting at position 2293 of SEQ ID NO: 1881454
cgagguguuggcagugaaa

SEQ ID NO: 2045775 - RNA, 19 nt, Artificial Sequence
  Description of Artificial Sequence: Synthetic oligonucleotide
  Antisense strand to SEQ ID NO: 2045774
uuucacugccaacaccucg

SEQ ID NO: 2045776 - RNA, 19 nt, Artificial Sequence
  Description of Artificial Sequence: Synthetic oligonucleotide
  Sense strand starting at position 2362 of SEQ ID NO: 1881454
agggauccaugguuuguua

SEQ ID NO: 2045777 - RNA, 19 nt, Artificial Sequence
  Description of Artificial Sequence: Synthetic oligonucleotide
  Antisense strand to SEQ ID NO: 2045776
uaacaaaccauggaucccu

SEQ ID NO: 2045778 - RNA, 19 nt, Artificial Sequence
  Description of Artificial Sequence: Synthetic oligonucleotide
  Sense strand starting at position 2371 of SEQ ID NO: 1881454
ugguuuguuagacauugaa

SEQ ID NO: 2045779 - RNA, 19 nt, Artificial Sequence
  Description of Artificial Sequence: Synthetic oligonucleotide
  Antisense strand to SEQ ID NO: 2045778
uucaaugucuaacaaacca

SEQ ID NO: 2045780 - RNA, 19 nt, Artificial Sequence
  Description of Artificial Sequence: Synthetic oligonucleotide
  Sense strand starting at position 2594 of SEQ ID NO: 1881454
cccgcauaacaaugaaaug

SEQ ID NO: 2045781 - RNA, 19 nt, Artificial Sequence
  Description of Artificial Sequence: Synthetic oligonucleotide
  Antisense strand to SEQ ID NO: 2045780
cauuucauuguuaugcggg

SEQ ID NO: 2045782 - RNA, 19 nt, Artificial Sequence
  Description of Artificial Sequence: Synthetic oligonucleotide
  Sense strand starting at position 2608 of SEQ ID NO: 1881454
aaaugaugucccuggacca

SEQ ID NO: 2045783 - RNA, 19 nt, Artificial Sequence
  Description of Artificial Sequence: Synthetic oligonucleotide
  Antisense strand to SEQ ID NO: 2045782
ugguccagggacaucauuu

SEQ ID NO: 2045784 - RNA, 19 nt, Artificial Sequence
  Description of Artificial Sequence: Synthetic oligonucleotide
  Sense strand starting at position 3160 of SEQ ID NO: 1881454
gcgacauauaacuggacua

SEQ ID NO: 2045785 - RNA, 19 nt, Artificial Sequence
  Description of Artificial Sequence: Synthetic oligonucleotide
  Antisense strand to SEQ ID NO: 2045784
uaguccaguuauaugucgc

SEQ ID NO: 2045786 - RNA, 19 nt, Artificial Sequence
  Description of Artificial Sequence: Synthetic oligonucleotide
  Sense strand starting at position 3353 of SEQ ID NO: 1881454
gcaggaguucuuugaaaga

SEQ ID NO: 2045787 - RNA, 19 nt, Artificial Sequence
  Description of Artificial Sequence: Synthetic oligonucleotide
  Antisense strand to SEQ ID NO: 2045786
ucuuucaaagaacuccugc

SEQ ID NO: 2045788 - RNA, 19 nt, Artificial Sequence
  Description of Artificial Sequence: Synthetic oligonucleotide
  Sense strand starting at position 3463 of SEQ ID NO: 1881454
aggauagucucagucagau

SEQ ID NO: 2045789 - RNA, 19 nt, Artificial Sequence
  Description of Artificial Sequence: Synthetic oligonucleotide
  Antisense strand to SEQ ID NO: 2045788
aucugacugagacuauccu

SEQ ID NO: 2045790 - RNA, 19 nt, Artificial Sequence
  Description of Artificial Sequence: Synthetic oligonucleotide
  Sense strand starting at position 3477 of SEQ ID NO: 1881454
cagauaagaugaguguguu

SEQ ID NO: 2045791 - RNA, 19 nt, Artificial Sequence
  Description of Artificial Sequence: Synthetic oligonucleotide
  Antisense strand to SEQ ID NO: 2045790
aacacacucaucuuaucug

SEQ ID NO: 2045792 - RNA, 19 nt, Artificial Sequence
  Description of Artificial Sequence: Synthetic oligonucleotide
  Sense strand starting at position 3478 of SEQ ID NO: 1881454
agauaagaugaguguguuc

SEQ ID NO: 2045793 - RNA, 19 nt, Artificial Sequence
  Description of Artificial Sequence: Synthetic oligonucleotide
  Antisense strand to SEQ ID NO: 2045792
gaacacacucaucuuaucu

SEQ ID NO: 2045794 - RNA, 19 nt, Artificial Sequence
  Description of Artificial Sequence: Synthetic oligonucleotide
  Sense strand starting at position 3483 of SEQ ID NO: 1881454
agaugaguguguucugaag

SEQ ID NO: 2045795 - RNA, 19 nt, Artificial Sequence
  Description of Artificial Sequence: Synthetic oligonucleotide
  Antisense strand to SEQ ID NO: 2045794
cuucagaacacacucaucu

SEQ ID NO: 2045796 - RNA, 19 nt, Artificial Sequence
  Description of Artificial Sequence: Synthetic oligonucleotide
  Sense strand starting at position 3489 of SEQ ID NO: 1881454
guguguucugaagaucuau

SEQ ID NO: 2045797 - RNA, 19 nt, Artificial Sequence
  Description of Artificial Sequence: Synthetic oligonucleotide
  Antisense strand to SEQ ID NO: 2045796
auagaucuucagaacacac

SEQ ID NO: 2045798 - RNA, 19 nt, Artificial Sequence
  Description of Artificial Sequence: Synthetic oligonucleotide
  Sense strand starting at position 3495 of SEQ ID NO: 1881454
ucugaagaucuauguauga

SEQ ID NO: 2045799 - RNA, 19 nt, Artificial Sequence
  Description of Artificial Sequence: Synthetic oligonucleotide
  Antisense strand to SEQ ID NO: 2045798
ucauacauagaucuucaga

SEQ ID NO: 2045800 - RNA, 19 nt, Artificial Sequence
  Description of Artificial Sequence: Synthetic oligonucleotide
  Sense strand starting at position 3594 of SEQ ID NO: 1881454
uaacuauguaggugaugga

SEQ ID NO: 2045801 - RNA, 19 nt, Artificial Sequence
  Description of Artificial Sequence: Synthetic oligonucleotide
  Antisense strand to SEQ ID NO: 2045800
uccaucaccuacauaguua

SEQ ID NO: 2045802 - RNA, 19 nt, Artificial Sequence
  Description of Artificial Sequence: Synthetic oligonucleotide
  Sense strand starting at position 3668 of SEQ ID NO: 1881454
ucccauugugcgcuguaaa

SEQ ID NO: 2045803 - RNA, 19 nt, Artificial Sequence
  Description of Artificial Sequence: Synthetic oligonucleotide
  Antisense strand to SEQ ID NO: 2045802
uuuacagcgcacaauggga

SEQ ID NO: 2045804 - RNA, 19 nt, Artificial Sequence
  Description of Artificial Sequence: Synthetic oligonucleotide
  Sense strand starting at position 3807 of SEQ ID NO: 1881454
agaagaaugugaguuccau

SEQ ID NO: 2045805 - RNA, 19 nt, Artificial Sequence
  Description of Artificial Sequence: Synthetic oligonucleotide
  Antisense strand to SEQ ID NO: 2045804
auggaacucacauucuucu

SEQ ID NO: 2045806 - RNA, 19 nt, Artificial Sequence
  Description of Artificial Sequence: Synthetic oligonucleotide
  Sense strand starting at position 3877 of SEQ ID NO: 1881454
uuagauggucccuagugau

SEQ ID NO: 2045807 - RNA, 19 nt, Artificial Sequence
  Description of Artificial Sequence: Synthetic oligonucleotide
  Antisense strand to SEQ ID NO: 2045806
aucacuagggaccaucuaa

SEQ ID NO: 2045808 - RNA, 19 nt, Artificial Sequence
  Description of Artificial Sequence: Synthetic oligonucleotide
  Sense strand starting at position 3889 of SEQ ID NO: 1881454
uagugaugaggugaguaua

SEQ ID NO: 2045809 - RNA, 19 nt, Artificial Sequence
  Description of Artificial Sequence: Synthetic oligonucleotide
  Antisense strand to SEQ ID NO: 2045808
uauacucaccucaucacua

SEQ ID NO: 2045810 - RNA, 19 nt, Artificial Sequence
  Description of Artificial Sequence: Synthetic oligonucleotide
  Sense strand starting at position 100 of SEQ ID NO: 1881455
uuguauaaagcuugacaag

SEQ ID NO: 2045811 - RNA, 19 nt, Artificial Sequence
  Description of Artificial Sequence: Synthetic oligonucleotide
  Antisense strand to SEQ ID NO: 2045810
cuugucaagcuuuauacaa

SEQ ID NO: 2045812 - RNA, 19 nt, Artificial Sequence
  Description of Artificial Sequence: Synthetic oligonucleotide
  Sense strand starting at position 101 of SEQ ID NO: 1881455
uguauaaagcuugacaagu

SEQ ID NO: 2045813 - RNA, 19 nt, Artificial Sequence
  Description of Artificial Sequence: Synthetic oligonucleotide
  Antisense strand to SEQ ID NO: 2045812
acuugucaagcuuuauaca

SEQ ID NO: 2045814 - RNA, 19 nt, Artificial Sequence
  Description of Artificial Sequence: Synthetic oligonucleotide
  Sense strand starting at position 514 of SEQ ID NO: 1881455
agauuucuauuccauguau

SEQ ID NO: 2045815 - RNA, 19 nt, Artificial Sequence
  Description of Artificial Sequence: Synthetic oligonucleotide
  Antisense strand to SEQ ID NO: 2045814
auacauggaauagaaaucu

SEQ ID NO: 2045816 - RNA, 19 nt, Artificial Sequence
  Description of Artificial Sequence: Synthetic oligonucleotide
  Sense strand starting at position 593 of SEQ ID NO: 1881455
ugguuucugucccucagau

SEQ ID NO: 2045817 - RNA, 19 nt, Artificial Sequence
  Description of Artificial Sequence: Synthetic oligonucleotide
  Antisense strand to SEQ ID NO: 2045816
aucugagggacagaaacca

SEQ ID NO: 2045818 - RNA, 19 nt, Artificial Sequence
  Description of Artificial Sequence: Synthetic oligonucleotide
  Sense strand starting at position 595 of SEQ ID NO: 1881455
guuucugucccucagauau

SEQ ID NO: 2045819 - RNA, 19 nt, Artificial Sequence
  Description of Artificial Sequence: Synthetic oligonucleotide
  Antisense strand to SEQ ID NO: 2045818
auaucugagggacagaaac

SEQ ID NO: 2045820 - RNA, 19 nt, Artificial Sequence
  Description of Artificial Sequence: Synthetic oligonucleotide
  Sense strand starting at position 606 of SEQ ID NO: 1881455
ucagauauuuacugaauug

SEQ ID NO: 2045821 - RNA, 19 nt, Artificial Sequence
  Description of Artificial Sequence: Synthetic oligonucleotide
  Antisense strand to SEQ ID NO: 2045820
caauucaguaaauaucuga

SEQ ID NO: 2045822 - RNA, 19 nt, Artificial Sequence
  Description of Artificial Sequence: Synthetic oligonucleotide
  Sense strand starting at position 624 of SEQ ID NO: 1881455
gaaauacauuguguuugau

SEQ ID NO: 2045823 - RNA, 19 nt, Artificial Sequence
  Description of Artificial Sequence: Synthetic oligonucleotide
  Antisense strand to SEQ ID NO: 2045822
aucaaacacaauguauuuc

SEQ ID NO: 2045824 - RNA, 19 nt, Artificial Sequence
  Description of Artificial Sequence: Synthetic oligonucleotide
  Sense strand starting at position 653 of SEQ ID NO: 1881455
gagaaaccauguuugaugu

SEQ ID NO: 2045825 - RNA, 19 nt, Artificial Sequence
  Description of Artificial Sequence: Synthetic oligonucleotide
  Antisense strand to SEQ ID NO: 2045824
acaucaaacaugguuucuc

SEQ ID NO: 2045826 - RNA, 19 nt, Artificial Sequence
  Description of Artificial Sequence: Synthetic oligonucleotide
  Sense strand starting at position 654 of SEQ ID NO: 1881455
agaaaccauguuugaugua

SEQ ID NO: 2045827 - RNA, 19 nt, Artificial Sequence
  Description of Artificial Sequence: Synthetic oligonucleotide
  Antisense strand to SEQ ID NO: 2045826
uacaucaaacaugguuucu

SEQ ID NO: 2045828 - RNA, 19 nt, Artificial Sequence
  Description of Artificial Sequence: Synthetic oligonucleotide
  Sense strand starting at position 666 of SEQ ID NO: 1881455
ugauguaagccuggucaaa

SEQ ID NO: 2045829 - RNA, 19 nt, Artificial Sequence
  Description of Artificial Sequence: Synthetic oligonucleotide
  Antisense strand to SEQ ID NO: 2045828
uuugaccaggcuuacauca

SEQ ID NO: 2045830 - RNA, 19 nt, Artificial Sequence
  Description of Artificial Sequence: Synthetic oligonucleotide
  Sense strand starting at position 668 of SEQ ID NO: 1881455
auguaagccuggucaaaua

SEQ ID NO: 2045831 - RNA, 19 nt, Artificial Sequence
  Description of Artificial Sequence: Synthetic oligonucleotide
  Antisense strand to SEQ ID NO: 2045830
uauuugaccaggcuuacau

SEQ ID NO: 2045832 - RNA, 19 nt, Artificial Sequence
  Description of Artificial Sequence: Synthetic oligonucleotide
  Sense strand starting at position 711 of SEQ ID NO: 1881455
gucugaaucgcucagauuc

SEQ ID NO: 2045833 - RNA, 19 nt, Artificial Sequence
  Description of Artificial Sequence: Synthetic oligonucleotide
  Antisense strand to SEQ ID NO: 2045832
gaaucugagcgauucagac

SEQ ID NO: 2045834 - RNA, 19 nt, Artificial Sequence
  Description of Artificial Sequence: Synthetic oligonucleotide
  Sense strand starting at position 828 of SEQ ID NO: 1881455
guaagaaguuuaucagauu

SEQ ID NO: 2045835 - RNA, 19 nt, Artificial Sequence
  Description of Artificial Sequence: Synthetic oligonucleotide
  Antisense strand to SEQ ID NO: 2045834
aaucugauaaacuucuuac

SEQ ID NO: 2045836 - RNA, 19 nt, Artificial Sequence
  Description of Artificial Sequence: Synthetic oligonucleotide
  Sense strand starting at position 953 of SEQ ID NO: 1881455
gaggauagagccugucuca

SEQ ID NO: 2045837 - RNA, 19 nt, Artificial Sequence
  Description of Artificial Sequence: Synthetic oligonucleotide
  Antisense strand to SEQ ID NO: 2045836
ugagacaggcucuauccuc

SEQ ID NO: 2045838 - RNA, 19 nt, Artificial Sequence
  Description of Artificial Sequence: Synthetic oligonucleotide
  Sense strand starting at position 956 of SEQ ID NO: 1881455
gauagagccugucucauuc

SEQ ID NO: 2045839 - RNA, 19 nt, Artificial Sequence
  Description of Artificial Sequence: Synthetic oligonucleotide
  Antisense strand to SEQ ID NO: 2045838
gaaugagacaggcucuauc

SEQ ID NO: 2045840 - RNA, 19 nt, Artificial Sequence
  Description of Artificial Sequence: Synthetic oligonucleotide
  Sense strand starting at position 1074 of SEQ ID NO: 1881455
augggaucaguagggcaua

SEQ ID NO: 2045841 - RNA, 19 nt, Artificial Sequence
  Description of Artificial Sequence: Synthetic oligonucleotide
  Antisense strand to SEQ ID NO: 2045840
uaugcccuacugaucccau

SEQ ID NO: 2045842 - RNA, 19 nt, Artificial Sequence
  Description of Artificial Sequence: Synthetic oligonucleotide
  Sense strand starting at position 1116 of SEQ ID NO: 1881455
agagaugucuuccuacuua

SEQ ID NO: 2045843 - RNA, 19 nt, Artificial Sequence
  Description of Artificial Sequence: Synthetic oligonucleotide
  Antisense strand to SEQ ID NO: 2045842
uaaguaggaagacaucucu

SEQ ID NO: 2045844 - RNA, 19 nt, Artificial Sequence
  Description of Artificial Sequence: Synthetic oligonucleotide
  Sense strand starting at position 1163 of SEQ ID NO: 1881455
gucugaggugccuggaaau

SEQ ID NO: 2045845 - RNA, 19 nt, Artificial Sequence
  Description of Artificial Sequence: Synthetic oligonucleotide
  Antisense strand to SEQ ID NO: 2045844
auuuccaggcaccucagac

SEQ ID NO: 2045846 - RNA, 19 nt, Artificial Sequence
  Description of Artificial Sequence: Synthetic oligonucleotide
  Sense strand starting at position 1175 of SEQ ID NO: 1881455
uggaaauacucaccggaug

SEQ ID NO: 2045847 - RNA, 19 nt, Artificial Sequence
  Description of Artificial Sequence: Synthetic oligonucleotide
  Antisense strand to SEQ ID NO: 2045846
cauccggugaguauuucca

SEQ ID NO: 2045848 - RNA, 19 nt, Artificial Sequence
  Description of Artificial Sequence: Synthetic oligonucleotide
  Sense strand starting at position 2091 of SEQ ID NO: 1881455
gcgagucuccuggaaacuu

SEQ ID NO: 2045849 - RNA, 19 nt, Artificial Sequence
  Description of Artificial Sequence: Synthetic oligonucleotide
  Antisense strand to SEQ ID NO: 2045848
aaguuuccaggagacucgc

SEQ ID NO: 2045850 - RNA, 19 nt, Artificial Sequence
  Description of Artificial Sequence: Synthetic oligonucleotide
  Sense strand starting at position 2102 of SEQ ID NO: 1881455
ggaaacuuggcuuguccca

SEQ ID NO: 2045851 - RNA, 19 nt, Artificial Sequence
  Description of Artificial Sequence: Synthetic oligonucleotide
  Antisense strand to SEQ ID NO: 2045850
ugggacaagccaaguuucc

SEQ ID NO: 2045852 - RNA, 19 nt, Artificial Sequence
  Description of Artificial Sequence: Synthetic oligonucleotide
  Sense strand starting at position 2273 of SEQ ID NO: 1881455
guuugaucuccugauucug

SEQ ID NO: 2045853 - RNA, 19 nt, Artificial Sequence
  Description of Artificial Sequence: Synthetic oligonucleotide
  Antisense strand to SEQ ID NO: 2045852
cagaaucaggagaucaaac

SEQ ID NO: 2045854 - RNA, 19 nt, Artificial Sequence
  Description of Artificial Sequence: Synthetic oligonucleotide
  Sense strand starting at position 2320 of SEQ ID NO: 1881455
gugggagugugauagauuu

SEQ ID NO: 2045855 - RNA, 19 nt, Artificial Sequence
  Description of Artificial Sequence: Synthetic oligonucleotide
  Antisense strand to SEQ ID NO: 2045854
aaaucuaucacacucccac

SEQ ID NO: 2045856 - RNA, 19 nt, Artificial Sequence
  Description of Artificial Sequence: Synthetic oligonucleotide
  Sense strand starting at position 2391 of SEQ ID NO: 1881455
uuuggagcuguggguuaaa

SEQ ID NO: 2045857 - RNA, 19 nt, Artificial Sequence
  Description of Artificial Sequence: Synthetic oligonucleotide
  Antisense strand to SEQ ID NO: 2045856
uuuaacccacagcuccaaa

SEQ ID NO: 2045858 - RNA, 19 nt, Artificial Sequence
  Description of Artificial Sequence: Synthetic oligonucleotide
  Sense strand starting at position 2421 of SEQ ID NO: 1881455
uuagcuuuggccuaggaau

SEQ ID NO: 2045859 - RNA, 19 nt, Artificial Sequence
  Description of Artificial Sequence: Synthetic oligonucleotide
  Antisense strand to SEQ ID NO: 2045858
auuccuaggccaaagcuaa

SEQ ID NO: 2045860 - RNA, 19 nt, Artificial Sequence
  Description of Artificial Sequence: Synthetic oligonucleotide
  Sense strand starting at position 2447 of SEQ ID NO: 1881455
uugugaauuuguccuaagu

SEQ ID NO: 2045861 - RNA, 19 nt, Artificial Sequence
  Description of Artificial Sequence: Synthetic oligonucleotide
  Antisense strand to SEQ ID NO: 2045860
acuuaggacaaauucacaa

SEQ ID NO: 2045862 - RNA, 19 nt, Artificial Sequence
  Description of Artificial Sequence: Synthetic oligonucleotide
  Sense strand starting at position 2468 of SEQ ID NO: 1881455
gcagucaaaugggcaaaua

SEQ ID NO: 2045863 - RNA, 19 nt, Artificial Sequence
  Description of Artificial Sequence: Synthetic oligonucleotide
  Antisense strand to SEQ ID NO: 2045862
uauuugcccauuugacugc

SEQ ID NO: 2045864 - RNA, 19 nt, Artificial Sequence
  Description of Artificial Sequence: Synthetic oligonucleotide
  Sense strand starting at position 2479 of SEQ ID NO: 1881455
ggcaaauauguauguacaa

SEQ ID NO: 2045865 - RNA, 19 nt, Artificial Sequence
  Description of Artificial Sequence: Synthetic oligonucleotide
  Antisense strand to SEQ ID NO: 2045864
uuguacauacauauuugcc

SEQ ID NO: 2045866 - RNA, 19 nt, Artificial Sequence
  Description of Artificial Sequence: Synthetic oligonucleotide
  Sense strand starting at position 2480 of SEQ ID NO: 1881455
gcaaauauguauguacaag

SEQ ID NO: 2045867 - RNA, 19 nt, Artificial Sequence
  Description of Artificial Sequence: Synthetic oligonucleotide
  Antisense strand to SEQ ID NO: 2045866
cuuguacauacauauuugc

SEQ ID NO: 2045868 - RNA, 19 nt, Artificial Sequence
  Description of Artificial Sequence: Synthetic oligonucleotide
  Sense strand starting at position 2553 of SEQ ID NO: 1881455
cccaguaagauuggugaag

SEQ ID NO: 2045869 - RNA, 19 nt, Artificial Sequence
  Description of Artificial Sequence: Synthetic oligonucleotide
  Antisense strand to SEQ ID NO: 2045868
cuucaccaaucuuacuggg

SEQ ID NO: 2045870 - RNA, 19 nt, Artificial Sequence
  Description of Artificial Sequence: Synthetic oligonucleotide
  Sense strand starting at position 2554 of SEQ ID NO: 1881455
ccaguaagauuggugaagu

SEQ ID NO: 2045871 - RNA, 19 nt, Artificial Sequence
  Description of Artificial Sequence: Synthetic oligonucleotide
  Antisense strand to SEQ ID NO: 2045870
acuucaccaaucuuacugg

SEQ ID NO: 2045872 - RNA, 19 nt, Artificial Sequence
  Description of Artificial Sequence: Synthetic oligonucleotide
  Sense strand starting at position 2565 of SEQ ID NO: 1881455
ggugaaguaagcuacagua

SEQ ID NO: 2045873 - RNA, 19 nt, Artificial Sequence
  Description of Artificial Sequence: Synthetic oligonucleotide
  Antisense strand to SEQ ID NO: 2045872
uacuguagcuuacuucacc

SEQ ID NO: 2045874 - RNA, 19 nt, Artificial Sequence
  Description of Artificial Sequence: Synthetic oligonucleotide
  Sense strand starting at position 2589 of SEQ ID NO: 1881455
agacaucgaauauguugua

SEQ ID NO: 2045875 - RNA, 19 nt, Artificial Sequence
  Description of Artificial Sequence: Synthetic oligonucleotide
  Antisense strand to SEQ ID NO: 2045874
uacaacauauucgaugucu

SEQ ID NO: 2045876 - RNA, 19 nt, Artificial Sequence
  Description of Artificial Sequence: Synthetic oligonucleotide
  Sense strand starting at position 2616 of SEQ ID NO: 1881455
aaaugaggauucguugaca

SEQ ID NO: 2045877 - RNA, 19 nt, Artificial Sequence
  Description of Artificial Sequence: Synthetic oligonucleotide
  Antisense strand to SEQ ID NO: 2045876
ugucaacgaauccucauuu

SEQ ID NO: 2045878 - RNA, 19 nt, Artificial Sequence
  Description of Artificial Sequence: Synthetic oligonucleotide
  Sense strand starting at position 2780 of SEQ ID NO: 1881455
aauagugauucuuucugag

SEQ ID NO: 2045879 - RNA, 19 nt, Artificial Sequence
  Description of Artificial Sequence: Synthetic oligonucleotide
  Antisense strand to SEQ ID NO: 2045878
cucagaaagaaucacuauu

SEQ ID NO: 2045880 - RNA, 19 nt, Artificial Sequence
  Description of Artificial Sequence: Synthetic oligonucleotide
  Sense strand starting at position 2796 of SEQ ID NO: 1881455
gagcgauguguuuaaggca

SEQ ID NO: 2045881 - RNA, 19 nt, Artificial Sequence
  Description of Artificial Sequence: Synthetic oligonucleotide
  Antisense strand to SEQ ID NO: 2045880
ugccuuaaacacaucgcuc

SEQ ID NO: 2045882 - RNA, 19 nt, Artificial Sequence
  Description of Artificial Sequence: Synthetic oligonucleotide
  Sense strand starting at position 3903 of SEQ ID NO: 1881455
ccagaaaguuaucuuaaug

SEQ ID NO: 2045883 - RNA, 19 nt, Artificial Sequence
  Description of Artificial Sequence: Synthetic oligonucleotide
  Antisense strand to SEQ ID NO: 2045882
cauuaagauaacuuucugg

SEQ ID NO: 2045884 - RNA, 19 nt, Artificial Sequence
  Description of Artificial Sequence: Synthetic oligonucleotide
  Sense strand starting at position 3910 of SEQ ID NO: 1881455
guuaucuuaaugugagagu

SEQ ID NO: 2045885 - RNA, 19 nt, Artificial Sequence
  Description of Artificial Sequence: Synthetic oligonucleotide
  Antisense strand to SEQ ID NO: 2045884
acucucacauuaagauaac

SEQ ID NO: 2045886 - RNA, 19 nt, Artificial Sequence
  Description of Artificial Sequence: Synthetic oligonucleotide
  Sense strand starting at position 3930 of SEQ ID NO: 1881455
gguggaaacugcuuuaaau

SEQ ID NO: 2045887 - RNA, 19 nt, Artificial Sequence
  Description of Artificial Sequence: Synthetic oligonucleotide
  Antisense strand to SEQ ID NO: 2045886
auuuaaagcaguuuccacc

SEQ ID NO: 2045888 - RNA, 19 nt, Artificial Sequence
  Description of Artificial Sequence: Synthetic oligonucleotide
  Sense strand starting at position 3965 of SEQ ID NO: 1881455
uuugaauugagcgagacuu

SEQ ID NO: 2045889 - RNA, 19 nt, Artificial Sequence
  Description of Artificial Sequence: Synthetic oligonucleotide
  Antisense strand to SEQ ID NO: 2045888
aagucucgcucaauucaaa

SEQ ID NO: 2045890 - RNA, 19 nt, Artificial Sequence
  Description of Artificial Sequence: Synthetic oligonucleotide
  Sense strand starting at position 65 of SEQ ID NO: 1881456
cuagaagauuuggaaugua

SEQ ID NO: 2045891 - RNA, 19 nt, Artificial Sequence
  Description of Artificial Sequence: Synthetic oligonucleotide
  Antisense strand to SEQ ID NO: 2045890
uacauuccaaaucuucuag

SEQ ID NO: 2045892 - RNA, 19 nt, Artificial Sequence
  Description of Artificial Sequence: Synthetic oligonucleotide
  Sense strand starting at position 374 of SEQ ID NO: 1881456
ugccaaacacuagguaauu

SEQ ID NO: 2045893 - RNA, 19 nt, Artificial Sequence
  Description of Artificial Sequence: Synthetic oligonucleotide
  Antisense strand to SEQ ID NO: 2045892
aauuaccuaguguuuggca

SEQ ID NO: 2045894 - RNA, 19 nt, Artificial Sequence
  Description of Artificial Sequence: Synthetic oligonucleotide
  Sense strand starting at position 383 of SEQ ID NO: 1881456
cuagguaauuuacaacaga

SEQ ID NO: 2045895 - RNA, 19 nt, Artificial Sequence
  Description of Artificial Sequence: Synthetic oligonucleotide
  Antisense strand to SEQ ID NO: 2045894
ucuguuguaaauuaccuag

SEQ ID NO: 2045896 - RNA, 19 nt, Artificial Sequence
  Description of Artificial Sequence: Synthetic oligonucleotide
  Sense strand starting at position 467 of SEQ ID NO: 1881456
gggccuacuuucucacaga

SEQ ID NO: 2045897 - RNA, 19 nt, Artificial Sequence
  Description of Artificial Sequence: Synthetic oligonucleotide
  Antisense strand to SEQ ID NO: 2045896
ucugugagaaaguaggccc

SEQ ID NO: 2045898 - RNA, 19 nt, Artificial Sequence
  Description of Artificial Sequence: Synthetic oligonucleotide
  Sense strand starting at position 575 of SEQ ID NO: 1881456
ggguucugcccuuaugaua

SEQ ID NO: 2045899 - RNA, 19 nt, Artificial Sequence
  Description of Artificial Sequence: Synthetic oligonucleotide
  Antisense strand to SEQ ID NO: 2045898
uaucauaagggcagaaccc

SEQ ID NO: 2045900 - RNA, 19 nt, Artificial Sequence
  Description of Artificial Sequence: Synthetic oligonucleotide
  Sense strand starting at position 702 of SEQ ID NO: 1881456
uggcaucuugggcaggaua

SEQ ID NO: 2045901 - RNA, 19 nt, Artificial Sequence
  Description of Artificial Sequence: Synthetic oligonucleotide
  Antisense strand to SEQ ID NO: 2045900
uauccugcccaagaugcca

SEQ ID NO: 2045902 - RNA, 19 nt, Artificial Sequence
  Description of Artificial Sequence: Synthetic oligonucleotide
  Sense strand starting at position 704 of SEQ ID NO: 1881456
gcaucuugggcaggauaaa

SEQ ID NO: 2045903 - RNA, 19 nt, Artificial Sequence
  Description of Artificial Sequence: Synthetic oligonucleotide
  Antisense strand to SEQ ID NO: 2045902
uuuauccugcccaagaugc

SEQ ID NO: 2045904 - RNA, 19 nt, Artificial Sequence
  Description of Artificial Sequence: Synthetic oligonucleotide
  Sense strand starting at position 725 of SEQ ID NO: 1881456
ggaauuguucuaugcaaug

SEQ ID NO: 2045905 - RNA, 19 nt, Artificial Sequence
  Description of Artificial Sequence: Synthetic oligonucleotide
  Antisense strand to SEQ ID NO: 2045904
cauugcauagaacaauucc

SEQ ID NO: 2045906 - RNA, 19 nt, Artificial Sequence
  Description of Artificial Sequence: Synthetic oligonucleotide
  Sense strand starting at position 834 of SEQ ID NO: 1881456
ugcacugaucacuacugaa

SEQ ID NO: 2045907 - RNA, 19 nt, Artificial Sequence
  Description of Artificial Sequence: Synthetic oligonucleotide
  Antisense strand to SEQ ID NO: 2045906
uucaguagugaucagugca

SEQ ID NO: 2045908 - RNA, 19 nt, Artificial Sequence
  Description of Artificial Sequence: Synthetic oligonucleotide
  Sense strand starting at position 893 of SEQ ID NO: 1881456
ugcagauacguggaacuca

SEQ ID NO: 2045909 - RNA, 19 nt, Artificial Sequence
  Description of Artificial Sequence: Synthetic oligonucleotide
  Antisense strand to SEQ ID NO: 2045908
ugaguuccacguaucugca

SEQ ID NO: 2045910 - RNA, 19 nt, Artificial Sequence
  Description of Artificial Sequence: Synthetic oligonucleotide
  Sense strand starting at position 947 of SEQ ID NO: 1881456
gaugucuuugcagauaugu

SEQ ID NO: 2045911 - RNA, 19 nt, Artificial Sequence
  Description of Artificial Sequence: Synthetic oligonucleotide
  Antisense strand to SEQ ID NO: 2045910
acauaucugcaaagacauc

SEQ ID NO: 2045912 - RNA, 19 nt, Artificial Sequence
  Description of Artificial Sequence: Synthetic oligonucleotide
  Sense strand starting at position 956 of SEQ ID NO: 1881456
gcagauauguggucaaaga

SEQ ID NO: 2045913 - RNA, 19 nt, Artificial Sequence
  Description of Artificial Sequence: Synthetic oligonucleotide
  Antisense strand to SEQ ID NO: 2045912
ucuuugaccacauaucugc

SEQ ID NO: 2045914 - RNA, 19 nt, Artificial Sequence
  Description of Artificial Sequence: Synthetic oligonucleotide
  Sense strand starting at position 1066 of SEQ ID NO: 1881456
acagauuaauggucaaguc

SEQ ID NO: 2045915 - RNA, 19 nt, Artificial Sequence
  Description of Artificial Sequence: Synthetic oligonucleotide
  Antisense strand to SEQ ID NO: 2045914
gacuugaccauuaaucugu

SEQ ID NO: 2045916 - RNA, 19 nt, Artificial Sequence
  Description of Artificial Sequence: Synthetic oligonucleotide
  Sense strand starting at position 1099 of SEQ ID NO: 1881456
uugugauaaugagcaacua

SEQ ID NO: 2045917 - RNA, 19 nt, Artificial Sequence
  Description of Artificial Sequence: Synthetic oligonucleotide
  Antisense strand to SEQ ID NO: 2045916
uaguugcucauuaucacaa

SEQ ID NO: 2045918 - RNA, 19 nt, Artificial Sequence
  Description of Artificial Sequence: Synthetic oligonucleotide
  Sense strand starting at position 1100 of SEQ ID NO: 1881456
ugugauaaugagcaacuau

SEQ ID NO: 2045919 - RNA, 19 nt, Artificial Sequence
  Description of Artificial Sequence: Synthetic oligonucleotide
  Antisense strand to SEQ ID NO: 2045918
auaguugcucauuaucaca

SEQ ID NO: 2045920 - RNA, 19 nt, Artificial Sequence
  Description of Artificial Sequence: Synthetic oligonucleotide
  Sense strand starting at position 1158 of SEQ ID NO: 1881456
ugguaauucuaaguacuga

SEQ ID NO: 2045921 - RNA, 19 nt, Artificial Sequence
  Description of Artificial Sequence: Synthetic oligonucleotide
  Antisense strand to SEQ ID NO: 2045920
ucaguacuuagaauuacca

SEQ ID NO: 2045922 - RNA, 19 nt, Artificial Sequence
  Description of Artificial Sequence: Synthetic oligonucleotide
  Sense strand starting at position 1345 of SEQ ID NO: 1881456
ccaggaggacccugguaau

SEQ ID NO: 2045923 - RNA, 19 nt, Artificial Sequence
  Description of Artificial Sequence: Synthetic oligonucleotide
  Antisense strand to SEQ ID NO: 2045922
auuaccaggguccuccugg

SEQ ID NO: 2045924 - RNA, 19 nt, Artificial Sequence
  Description of Artificial Sequence: Synthetic oligonucleotide
  Sense strand starting at position 1374 of SEQ ID NO: 1881456
cuaguuagugcauagcaaa

SEQ ID NO: 2045925 - RNA, 19 nt, Artificial Sequence
  Description of Artificial Sequence: Synthetic oligonucleotide
  Antisense strand to SEQ ID NO: 2045924
uuugcuaugcacuaacuag

SEQ ID NO: 2045926 - RNA, 19 nt, Artificial Sequence
  Description of Artificial Sequence: Synthetic oligonucleotide
  Sense strand starting at position 1407 of SEQ ID NO: 1881456
cucauaugggucugguaca

SEQ ID NO: 2045927 - RNA, 19 nt, Artificial Sequence
  Description of Artificial Sequence: Synthetic oligonucleotide
  Antisense strand to SEQ ID NO: 2045926
uguaccagacccauaugag

SEQ ID NO: 2045928 - RNA, 19 nt, Artificial Sequence
  Description of Artificial Sequence: Synthetic oligonucleotide
  Sense strand starting at position 1441 of SEQ ID NO: 1881456
acagguuaguuauuauuag

SEQ ID NO: 2045929 - RNA, 19 nt, Artificial Sequence
  Description of Artificial Sequence: Synthetic oligonucleotide
  Antisense strand to SEQ ID NO: 2045928
cuaauaauaacuaaccugu

SEQ ID NO: 2045930 - RNA, 19 nt, Artificial Sequence
  Description of Artificial Sequence: Synthetic oligonucleotide
  Sense strand starting at position 1448 of SEQ ID NO: 1881456
aguuauuauuaggucgaaa

SEQ ID NO: 2045931 - RNA, 19 nt, Artificial Sequence
  Description of Artificial Sequence: Synthetic oligonucleotide
  Antisense strand to SEQ ID NO: 2045930
uuucgaccuaauaauaacu

SEQ ID NO: 2045932 - RNA, 19 nt, Artificial Sequence
  Description of Artificial Sequence: Synthetic oligonucleotide
  Sense strand starting at position 1450 of SEQ ID NO: 1881456
uuauuauuaggucgaaacc

SEQ ID NO: 2045933 - RNA, 19 nt, Artificial Sequence
  Description of Artificial Sequence: Synthetic oligonucleotide
  Antisense strand to SEQ ID NO: 2045932
gguuucgaccuaauaauaa

SEQ ID NO: 2045934 - RNA, 19 nt, Artificial Sequence
  Description of Artificial Sequence: Synthetic oligonucleotide
  Sense strand starting at position 1451 of SEQ ID NO: 1881456
uauuauuaggucgaaaccu

SEQ ID NO: 2045935 - RNA, 19 nt, Artificial Sequence
  Description of Artificial Sequence: Synthetic oligonucleotide
  Antisense strand to SEQ ID NO: 2045934
agguuucgaccuaauaaua

SEQ ID NO: 2045936 - RNA, 19 nt, Artificial Sequence
  Description of Artificial Sequence: Synthetic oligonucleotide
  Sense strand starting at position 1460 of SEQ ID NO: 1881456
gucgaaaccuuaguauuaa

SEQ ID NO: 2045937 - RNA, 19 nt, Artificial Sequence
  Description of Artificial Sequence: Synthetic oligonucleotide
  Antisense strand to SEQ ID NO: 2045936
uuaauacuaagguuucgac

SEQ ID NO: 2045938 - RNA, 19 nt, Artificial Sequence
  Description of Artificial Sequence: Synthetic oligonucleotide
  Sense strand starting at position 1484 of SEQ ID NO: 1881456
acuucuguggguuaaucuu

SEQ ID NO: 2045939 - RNA, 19 nt, Artificial Sequence
  Description of Artificial Sequence: Synthetic oligonucleotide
  Antisense strand to SEQ ID NO: 2045938
aagauuaacccacagaagu

SEQ ID NO: 2045940 - RNA, 19 nt, Artificial Sequence
  Description of Artificial Sequence: Synthetic oligonucleotide
  Sense strand starting at position 2064 of SEQ ID NO: 1881456
cuucuaaagcauugguaau

SEQ ID NO: 2045941 - RNA, 19 nt, Artificial Sequence
  Description of Artificial Sequence: Synthetic oligonucleotide
  Antisense strand to SEQ ID NO: 2045940
auuaccaaugcuuuagaag

SEQ ID NO: 2045942 - RNA, 19 nt, Artificial Sequence
  Description of Artificial Sequence: Synthetic oligonucleotide
  Sense strand starting at position 2066 of SEQ ID NO: 1881456
ucuaaagcauugguaauga

SEQ ID NO: 2045943 - RNA, 19 nt, Artificial Sequence
  Description of Artificial Sequence: Synthetic oligonucleotide
  Antisense strand to SEQ ID NO: 2045942
ucauuaccaaugcuuuaga

SEQ ID NO: 2045944 - RNA, 19 nt, Artificial Sequence
  Description of Artificial Sequence: Synthetic oligonucleotide
  Sense strand starting at position 2194 of SEQ ID NO: 1881456
gcacucucucaguaaugga

SEQ ID NO: 2045945 - RNA, 19 nt, Artificial Sequence
  Description of Artificial Sequence: Synthetic oligonucleotide
  Antisense strand to SEQ ID NO: 2045944
uccauuacugagagagugc

SEQ ID NO: 2045946 - RNA, 19 nt, Artificial Sequence
  Description of Artificial Sequence: Synthetic oligonucleotide
  Sense strand starting at position 2312 of SEQ ID NO: 1881456
uuggcaauuucugugcaaa

SEQ ID NO: 2045947 - RNA, 19 nt, Artificial Sequence
  Description of Artificial Sequence: Synthetic oligonucleotide
  Antisense strand to SEQ ID NO: 2045946
uuugcacagaaauugccaa

SEQ ID NO: 2045948 - RNA, 19 nt, Artificial Sequence
  Description of Artificial Sequence: Synthetic oligonucleotide
  Sense strand starting at position 2370 of SEQ ID NO: 1881456
agcacuuauguagauuauu

SEQ ID NO: 2045949 - RNA, 19 nt, Artificial Sequence
  Description of Artificial Sequence: Synthetic oligonucleotide
  Antisense strand to SEQ ID NO: 2045948
aauaaucuacauaagugcu

SEQ ID NO: 2045950 - RNA, 19 nt, Artificial Sequence
  Description of Artificial Sequence: Synthetic oligonucleotide
  Sense strand starting at position 2393 of SEQ ID NO: 1881456
guuuguugaauggagcuua

SEQ ID NO: 2045951 - RNA, 19 nt, Artificial Sequence
  Description of Artificial Sequence: Synthetic oligonucleotide
  Antisense strand to SEQ ID NO: 2045950
uaagcuccauucaacaaac

SEQ ID NO: 2045952 - RNA, 19 nt, Artificial Sequence
  Description of Artificial Sequence: Synthetic oligonucleotide
  Sense strand starting at position 2555 of SEQ ID NO: 1881456
gcuuaaauggccuaacaau

SEQ ID NO: 2045953 - RNA, 19 nt, Artificial Sequence
  Description of Artificial Sequence: Synthetic oligonucleotide
  Antisense strand to SEQ ID NO: 2045952
auuguuaggccauuuaagc

SEQ ID NO: 2045954 - RNA, 19 nt, Artificial Sequence
  Description of Artificial Sequence: Synthetic oligonucleotide
  Sense strand starting at position 2942 of SEQ ID NO: 1881456
gccuauuuccucugauguu

SEQ ID NO: 2045955 - RNA, 19 nt, Artificial Sequence
  Description of Artificial Sequence: Synthetic oligonucleotide
  Antisense strand to SEQ ID NO: 2045954
aacaucagaggaaauaggc

SEQ ID NO: 2045956 - RNA, 19 nt, Artificial Sequence
  Description of Artificial Sequence: Synthetic oligonucleotide
  Sense strand starting at position 2976 of SEQ ID NO: 1881456
uuggcucuugccuaaauau

SEQ ID NO: 2045957 - RNA, 19 nt, Artificial Sequence
  Description of Artificial Sequence: Synthetic oligonucleotide
  Antisense strand to SEQ ID NO: 2045956
auauuuaggcaagagccaa

SEQ ID NO: 2045958 - RNA, 19 nt, Artificial Sequence
  Description of Artificial Sequence: Synthetic oligonucleotide
  Sense strand starting at position 3139 of SEQ ID NO: 1881456
cuacuuucuuaugcaggaa

SEQ ID NO: 2045959 - RNA, 19 nt, Artificial Sequence
  Description of Artificial Sequence: Synthetic oligonucleotide
  Antisense strand to SEQ ID NO: 2045958
uuccugcauaagaaaguag

SEQ ID NO: 2045960 - RNA, 19 nt, Artificial Sequence
  Description of Artificial Sequence: Synthetic oligonucleotide
  Sense strand starting at position 3142 of SEQ ID NO: 1881456
cuuucuuaugcaggaauca

SEQ ID NO: 2045961 - RNA, 19 nt, Artificial Sequence
  Description of Artificial Sequence: Synthetic oligonucleotide
  Antisense strand to SEQ ID NO: 2045960
ugauuccugcauaagaaag

SEQ ID NO: 2045962 - RNA, 19 nt, Artificial Sequence
  Description of Artificial Sequence: Synthetic oligonucleotide
  Sense strand starting at position 3143 of SEQ ID NO: 1881456
uuucuuaugcaggaaucaa

SEQ ID NO: 2045963 - RNA, 19 nt, Artificial Sequence
  Description of Artificial Sequence: Synthetic oligonucleotide
  Antisense strand to SEQ ID NO: 2045962
uugauuccugcauaagaaa

SEQ ID NO: 2045964 - RNA, 19 nt, Artificial Sequence
  Description of Artificial Sequence: Synthetic oligonucleotide
  Sense strand starting at position 3171 of SEQ ID NO: 1881456
ucuauuagauuaucugagu

SEQ ID NO: 2045965 - RNA, 19 nt, Artificial Sequence
  Description of Artificial Sequence: Synthetic oligonucleotide
  Antisense strand to SEQ ID NO: 2045964
acucagauaaucuaauaga

SEQ ID NO: 2045966 - RNA, 19 nt, Artificial Sequence
  Description of Artificial Sequence: Synthetic oligonucleotide
  Sense strand starting at position 3172 of SEQ ID NO: 1881456
cuauuagauuaucugagua

SEQ ID NO: 2045967 - RNA, 19 nt, Artificial Sequence
  Description of Artificial Sequence: Synthetic oligonucleotide
  Antisense strand to SEQ ID NO: 2045966
uacucagauaaucuaauag

SEQ ID NO: 2045968 - RNA, 19 nt, Artificial Sequence
  Description of Artificial Sequence: Synthetic oligonucleotide
  Sense strand starting at position 3176 of SEQ ID NO: 1881456
uagauuaucugaguauacg

SEQ ID NO: 2045969 - RNA, 19 nt, Artificial Sequence
  Description of Artificial Sequence: Synthetic oligonucleotide
  Antisense strand to SEQ ID NO: 2045968
cguauacucagauaaucua

SEQ ID NO: 2045970 - RNA, 19 nt, Artificial Sequence
  Description of Artificial Sequence: Synthetic oligonucleotide
  Sense strand starting at position 41 of SEQ ID NO: 1881457
uggauuauguuagagacca

SEQ ID NO: 2045971 - RNA, 19 nt, Artificial Sequence
  Description of Artificial Sequence: Synthetic oligonucleotide
  Antisense strand to SEQ ID NO: 2045970
uggucucuaacauaaucca

SEQ ID NO: 2045972 - RNA, 19 nt, Artificial Sequence
  Description of Artificial Sequence: Synthetic oligonucleotide
  Sense strand starting at position 146 of SEQ ID NO: 1881457
ucuggaggcugagacauaa

SEQ ID NO: 2045973 - RNA, 19 nt, Artificial Sequence
  Description of Artificial Sequence: Synthetic oligonucleotide
  Antisense strand to SEQ ID NO: 2045972
uuaugucucagccuccaga

SEQ ID NO: 2045974 - RNA, 19 nt, Artificial Sequence
  Description of Artificial Sequence: Synthetic oligonucleotide
  Sense strand starting at position 313 of SEQ ID NO: 1881457
ccucaaauucugugugguu

SEQ ID NO: 2045975 - RNA, 19 nt, Artificial Sequence
  Description of Artificial Sequence: Synthetic oligonucleotide
  Antisense strand to SEQ ID NO: 2045974
aaccacacagaauuugagg

SEQ ID NO: 2045976 - RNA, 19 nt, Artificial Sequence
  Description of Artificial Sequence: Synthetic oligonucleotide
  Sense strand starting at position 314 of SEQ ID NO: 1881457
cucaaauucugugugguua

SEQ ID NO: 2045977 - RNA, 19 nt, Artificial Sequence
  Description of Artificial Sequence: Synthetic oligonucleotide
  Antisense strand to SEQ ID NO: 2045976
uaaccacacagaauuugag

SEQ ID NO: 2045978 - RNA, 19 nt, Artificial Sequence
  Description of Artificial Sequence: Synthetic oligonucleotide
  Sense strand starting at position 315 of SEQ ID NO: 1881457
ucaaauucugugugguuac

SEQ ID NO: 2045979 - RNA, 19 nt, Artificial Sequence
  Description of Artificial Sequence: Synthetic oligonucleotide
  Antisense strand to SEQ ID NO: 2045978
guaaccacacagaauuuga

SEQ ID NO: 2045980 - RNA, 19 nt, Artificial Sequence
  Description of Artificial Sequence: Synthetic oligonucleotide
  Sense strand starting at position 325 of SEQ ID NO: 1881457
ugugguuacugagcauaag

SEQ ID NO: 2045981 - RNA, 19 nt, Artificial Sequence
  Description of Artificial Sequence: Synthetic oligonucleotide
  Antisense strand to SEQ ID NO: 2045980
cuuaugcucaguaaccaca

SEQ ID NO: 2045982 - RNA, 19 nt, Artificial Sequence
  Description of Artificial Sequence: Synthetic oligonucleotide
  Sense strand starting at position 328 of SEQ ID NO: 1881457
gguuacugagcauaaggua

SEQ ID NO: 2045983 - RNA, 19 nt, Artificial Sequence
  Description of Artificial Sequence: Synthetic oligonucleotide
  Antisense strand to SEQ ID NO: 2045982
uaccuuaugcucaguaacc

SEQ ID NO: 2045984 - RNA, 19 nt, Artificial Sequence
  Description of Artificial Sequence: Synthetic oligonucleotide
  Sense strand starting at position 337 of SEQ ID NO: 1881457
gcauaagguaucugcugaa

SEQ ID NO: 2045985 - RNA, 19 nt, Artificial Sequence
  Description of Artificial Sequence: Synthetic oligonucleotide
  Antisense strand to SEQ ID NO: 2045984
uucagcagauaccuuaugc

SEQ ID NO: 2045986 - RNA, 19 nt, Artificial Sequence
  Description of Artificial Sequence: Synthetic oligonucleotide
  Sense strand starting at position 406 of SEQ ID NO: 1881457
cugucuuggccucaugaac

SEQ ID NO: 2045987 - RNA, 19 nt, Artificial Sequence
  Description of Artificial Sequence: Synthetic oligonucleotide
  Antisense strand to SEQ ID NO: 2045986
guucaugaggccaagacag

SEQ ID NO: 2045988 - RNA, 19 nt, Artificial Sequence
  Description of Artificial Sequence: Synthetic oligonucleotide
  Sense strand starting at position 498 of SEQ ID NO: 1881457
cuuucuccuuggguugaua

SEQ ID NO: 2045989 - RNA, 19 nt, Artificial Sequence
  Description of Artificial Sequence: Synthetic oligonucleotide
  Antisense strand to SEQ ID NO: 2045988
uaucaacccaaggagaaag

SEQ ID NO: 2045990 - RNA, 19 nt, Artificial Sequence
  Description of Artificial Sequence: Synthetic oligonucleotide
  Sense strand starting at position 500 of SEQ ID NO: 1881457
uucuccuuggguugauaaa

SEQ ID NO: 2045991 - RNA, 19 nt, Artificial Sequence
  Description of Artificial Sequence: Synthetic oligonucleotide
  Antisense strand to SEQ ID NO: 2045990
uuuaucaacccaaggagaa

SEQ ID NO: 2045992 - RNA, 19 nt, Artificial Sequence
  Description of Artificial Sequence: Synthetic oligonucleotide
  Sense strand starting at position 509 of SEQ ID NO: 1881457
gguugauaaaggcaagagu

SEQ ID NO: 2045993 - RNA, 19 nt, Artificial Sequence
  Description of Artificial Sequence: Synthetic oligonucleotide
  Antisense strand to SEQ ID NO: 2045992
acucuugccuuuaucaacc

SEQ ID NO: 2045994 - RNA, 19 nt, Artificial Sequence
  Description of Artificial Sequence: Synthetic oligonucleotide
  Sense strand starting at position 518 of SEQ ID NO: 1881457
aggcaagagugcuuguaaa

SEQ ID NO: 2045995 - RNA, 19 nt, Artificial Sequence
  Description of Artificial Sequence: Synthetic oligonucleotide
  Antisense strand to SEQ ID NO: 2045994
uuuacaagcacucuugccu

SEQ ID NO: 2045996 - RNA, 19 nt, Artificial Sequence
  Description of Artificial Sequence: Synthetic oligonucleotide
  Sense strand starting at position 573 of SEQ ID NO: 1881457
aaaggaagguauuauuauc

SEQ ID NO: 2045997 - RNA, 19 nt, Artificial Sequence
  Description of Artificial Sequence: Synthetic oligonucleotide
  Antisense strand to SEQ ID NO: 2045996
gauaauaauaccuuccuuu

SEQ ID NO: 2045998 - RNA, 19 nt, Artificial Sequence
  Description of Artificial Sequence: Synthetic oligonucleotide
  Sense strand starting at position 614 of SEQ ID NO: 1881457
agaaacauuucuuguguaa

SEQ ID NO: 2045999 - RNA, 19 nt, Artificial Sequence
  Description of Artificial Sequence: Synthetic oligonucleotide
  Antisense strand to SEQ ID NO: 2045998
uuacacaagaaauguuucu

SEQ ID NO: 2046000 - RNA, 19 nt, Artificial Sequence
  Description of Artificial Sequence: Synthetic oligonucleotide
  Sense strand starting at position 752 of SEQ ID NO: 1881457
agcugagcacuguaaggaa

SEQ ID NO: 2046001 - RNA, 19 nt, Artificial Sequence
  Description of Artificial Sequence: Synthetic oligonucleotide
  Antisense strand to SEQ ID NO: 2046000
uuccuuacagugcucagcu

SEQ ID NO: 2046002 - RNA, 19 nt, Artificial Sequence
  Description of Artificial Sequence: Synthetic oligonucleotide
  Sense strand starting at position 844 of SEQ ID NO: 1881457
ggcaguauguaccuaucca

SEQ ID NO: 2046003 - RNA, 19 nt, Artificial Sequence
  Description of Artificial Sequence: Synthetic oligonucleotide
  Antisense strand to SEQ ID NO: 2046002
uggauagguacauacugcc

SEQ ID NO: 2046004 - RNA, 19 nt, Artificial Sequence
  Description of Artificial Sequence: Synthetic oligonucleotide
  Sense strand starting at position 1011 of SEQ ID NO: 1881457
ugccgaaauuucucuguga

SEQ ID NO: 2046005 - RNA, 19 nt, Artificial Sequence
  Description of Artificial Sequence: Synthetic oligonucleotide
  Antisense strand to SEQ ID NO: 2046004
ucacagagaaauuucggca

SEQ ID NO: 2046006 - RNA, 19 nt, Artificial Sequence
  Description of Artificial Sequence: Synthetic oligonucleotide
  Sense strand starting at position 1012 of SEQ ID NO: 1881457
gccgaaauuucucugugag

SEQ ID NO: 2046007 - RNA, 19 nt, Artificial Sequence
  Description of Artificial Sequence: Synthetic oligonucleotide
  Antisense strand to SEQ ID NO: 2046006
cucacagagaaauuucggc

SEQ ID NO: 2046008 - RNA, 19 nt, Artificial Sequence
  Description of Artificial Sequence: Synthetic oligonucleotide
  Sense strand starting at position 1018 of SEQ ID NO: 1881457
auuucucugugagacaaca

SEQ ID NO: 2046009 - RNA, 19 nt, Artificial Sequence
  Description of Artificial Sequence: Synthetic oligonucleotide
  Antisense strand to SEQ ID NO: 2046008
uguugucucacagagaaau

SEQ ID NO: 2046010 - RNA, 19 nt, Artificial Sequence
  Description of Artificial Sequence: Synthetic oligonucleotide
  Sense strand starting at position 1044 of SEQ ID NO: 1881457
guuagaaagucaccacaau

SEQ ID NO: 2046011 - RNA, 19 nt, Artificial Sequence
  Description of Artificial Sequence: Synthetic oligonucleotide
  Antisense strand to SEQ ID NO: 2046010
auuguggugacuuucuaac

SEQ ID NO: 2046012 - RNA, 19 nt, Artificial Sequence
  Description of Artificial Sequence: Synthetic oligonucleotide
  Sense strand starting at position 1199 of SEQ ID NO: 1881457
gugcacucugcguaagauc

SEQ ID NO: 2046013 - RNA, 19 nt, Artificial Sequence
  Description of Artificial Sequence: Synthetic oligonucleotide
  Antisense strand to SEQ ID NO: 2046012
gaucuuacgcagagugcac

SEQ ID NO: 2046014 - RNA, 19 nt, Artificial Sequence
  Description of Artificial Sequence: Synthetic oligonucleotide
  Sense strand starting at position 1248 of SEQ ID NO: 1881457
guggcuaauguccacaauu

SEQ ID NO: 2046015 - RNA, 19 nt, Artificial Sequence
  Description of Artificial Sequence: Synthetic oligonucleotide
  Antisense strand to SEQ ID NO: 2046014
aauuguggacauuagccac

SEQ ID NO: 2046016 - RNA, 19 nt, Artificial Sequence
  Description of Artificial Sequence: Synthetic oligonucleotide
  Sense strand starting at position 1250 of SEQ ID NO: 1881457
ggcuaauguccacaauuag

SEQ ID NO: 2046017 - RNA, 19 nt, Artificial Sequence
  Description of Artificial Sequence: Synthetic oligonucleotide
  Antisense strand to SEQ ID NO: 2046016
cuaauuguggacauuagcc

SEQ ID NO: 2046018 - RNA, 19 nt, Artificial Sequence
  Description of Artificial Sequence: Synthetic oligonucleotide
  Sense strand starting at position 1461 of SEQ ID NO: 1881457
acgggcuaaucguuugagu

SEQ ID NO: 2046019 - RNA, 19 nt, Artificial Sequence
  Description of Artificial Sequence: Synthetic oligonucleotide
  Antisense strand to SEQ ID NO: 2046018
acucaaacgauuagcccgu

SEQ ID NO: 2046020 - RNA, 19 nt, Artificial Sequence
  Description of Artificial Sequence: Synthetic oligonucleotide
  Sense strand starting at position 1787 of SEQ ID NO: 1881457
cacugaggcugcucuuaga

SEQ ID NO: 2046021 - RNA, 19 nt, Artificial Sequence
  Description of Artificial Sequence: Synthetic oligonucleotide
  Antisense strand to SEQ ID NO: 2046020
ucuaagagcagccucagug

SEQ ID NO: 2046022 - RNA, 19 nt, Artificial Sequence
  Description of Artificial Sequence: Synthetic oligonucleotide
  Sense strand starting at position 1830 of SEQ ID NO: 1881457
ucuuguucugaggaugcuu

SEQ ID NO: 2046023 - RNA, 19 nt, Artificial Sequence
  Description of Artificial Sequence: Synthetic oligonucleotide
  Antisense strand to SEQ ID NO: 2046022
aagcauccucagaacaaga

SEQ ID NO: 2046024 - RNA, 19 nt, Artificial Sequence
  Description of Artificial Sequence: Synthetic oligonucleotide
  Sense strand starting at position 1985 of SEQ ID NO: 1881457
gucugcaugucauugugga

SEQ ID NO: 2046025 - RNA, 19 nt, Artificial Sequence
  Description of Artificial Sequence: Synthetic oligonucleotide
  Antisense strand to SEQ ID NO: 2046024
uccacaaugacaugcagac

SEQ ID NO: 2046026 - RNA, 19 nt, Artificial Sequence
  Description of Artificial Sequence: Synthetic oligonucleotide
  Sense strand starting at position 2061 of SEQ ID NO: 1881457
cgagcaugcggugucugaa

SEQ ID NO: 2046027 - RNA, 19 nt, Artificial Sequence
  Description of Artificial Sequence: Synthetic oligonucleotide
  Antisense strand to SEQ ID NO: 2046026
uucagacaccgcaugcucg

SEQ ID NO: 2046028 - RNA, 19 nt, Artificial Sequence
  Description of Artificial Sequence: Synthetic oligonucleotide
  Sense strand starting at position 2289 of SEQ ID NO: 1881457
agaaacuaucuuggccaga

SEQ ID NO: 2046029 - RNA, 19 nt, Artificial Sequence
  Description of Artificial Sequence: Synthetic oligonucleotide
  Antisense strand to SEQ ID NO: 2046028
ucuggccaagauaguuucu

SEQ ID NO: 2046030 - RNA, 19 nt, Artificial Sequence
  Description of Artificial Sequence: Synthetic oligonucleotide
  Sense strand starting at position 2496 of SEQ ID NO: 1881457
uauagucagccgugaucau

SEQ ID NO: 2046031 - RNA, 19 nt, Artificial Sequence
  Description of Artificial Sequence: Synthetic oligonucleotide
  Antisense strand to SEQ ID NO: 2046030
augaucacggcugacuaua

SEQ ID NO: 2046032 - RNA, 19 nt, Artificial Sequence
  Description of Artificial Sequence: Synthetic oligonucleotide
  Sense strand starting at position 2543 of SEQ ID NO: 1881457
gagacauugucacacagac

SEQ ID NO: 2046033 - RNA, 19 nt, Artificial Sequence
  Description of Artificial Sequence: Synthetic oligonucleotide
  Antisense strand to SEQ ID NO: 2046032
gucugugugacaaugucuc

SEQ ID NO: 2046034 - RNA, 19 nt, Artificial Sequence
  Description of Artificial Sequence: Synthetic oligonucleotide
  Sense strand starting at position 2583 of SEQ ID NO: 1881457
aaacaauucggcugggcau

SEQ ID NO: 2046035 - RNA, 19 nt, Artificial Sequence
  Description of Artificial Sequence: Synthetic oligonucleotide
  Antisense strand to SEQ ID NO: 2046034
augcccagccgaauuguuu

SEQ ID NO: 2046036 - RNA, 19 nt, Artificial Sequence
  Description of Artificial Sequence: Synthetic oligonucleotide
  Sense strand starting at position 2878 of SEQ ID NO: 1881457
cucucugagccuugcauca

SEQ ID NO: 2046037 - RNA, 19 nt, Artificial Sequence
  Description of Artificial Sequence: Synthetic oligonucleotide
  Antisense strand to SEQ ID NO: 2046036
ugaugcaaggcucagagag

SEQ ID NO: 2046038 - RNA, 19 nt, Artificial Sequence
  Description of Artificial Sequence: Synthetic oligonucleotide
  Sense strand starting at position 3092 of SEQ ID NO: 1881457
ugaaauccgucucuucuaa

SEQ ID NO: 2046039 - RNA, 19 nt, Artificial Sequence
  Description of Artificial Sequence: Synthetic oligonucleotide
  Antisense strand to SEQ ID NO: 2046038
uuagaagagacggauuuca

SEQ ID NO: 2046040 - RNA, 19 nt, Artificial Sequence
  Description of Artificial Sequence: Synthetic oligonucleotide
  Sense strand starting at position 3277 of SEQ ID NO: 1881457
uccuaugucccacgccaaa

SEQ ID NO: 2046041 - RNA, 19 nt, Artificial Sequence
  Description of Artificial Sequence: Synthetic oligonucleotide
  Antisense strand to SEQ ID NO: 2046040
uuuggcgugggacauagga

SEQ ID NO: 2046042 - RNA, 19 nt, Artificial Sequence
  Description of Artificial Sequence: Synthetic oligonucleotide
  Sense strand starting at position 3405 of SEQ ID NO: 1881457
ggacucugcuccuugggaa

SEQ ID NO: 2046043 - RNA, 19 nt, Artificial Sequence
  Description of Artificial Sequence: Synthetic oligonucleotide
  Antisense strand to SEQ ID NO: 2046042
uucccaaggagcagagucc

SEQ ID NO: 2046044 - RNA, 19 nt, Artificial Sequence
  Description of Artificial Sequence: Synthetic oligonucleotide
  Sense strand starting at position 3565 of SEQ ID NO: 1881457
gaaauacagucacaagaga

SEQ ID NO: 2046045 - RNA, 19 nt, Artificial Sequence
  Description of Artificial Sequence: Synthetic oligonucleotide
  Antisense strand to SEQ ID NO: 2046044
ucucuugugacuguauuuc

SEQ ID NO: 2046046 - RNA, 19 nt, Artificial Sequence
  Description of Artificial Sequence: Synthetic oligonucleotide
  Sense strand starting at position 3605 of SEQ ID NO: 1881457
cuaagucuugaguauugca

SEQ ID NO: 2046047 - RNA, 19 nt, Artificial Sequence
  Description of Artificial Sequence: Synthetic oligonucleotide
  Antisense strand to SEQ ID NO: 2046046
ugcaauacucaagacuuag

SEQ ID NO: 2046048 - RNA, 19 nt, Artificial Sequence
  Description of Artificial Sequence: Synthetic oligonucleotide
  Sense strand starting at position 3769 of SEQ ID NO: 1881457
uuggcaaggucuguucaga

SEQ ID NO: 2046049 - RNA, 19 nt, Artificial Sequence
  Description of Artificial Sequence: Synthetic oligonucleotide
  Antisense strand to SEQ ID NO: 2046048
ucugaacagaccuugccaa

SEQ ID NO: 2046050 - RNA, 19 nt, Artificial Sequence
  Description of Artificial Sequence: Synthetic oligonucleotide
  Sense strand starting at position 803 of SEQ ID NO: 1881458
agagguagcuaucauuaua

SEQ ID NO: 2046051 - RNA, 19 nt, Artificial Sequence
  Description of Artificial Sequence: Synthetic oligonucleotide
  Antisense strand to SEQ ID NO: 2046050
uauaaugauagcuaccucu

SEQ ID NO: 2046052 - RNA, 19 nt, Artificial Sequence
  Description of Artificial Sequence: Synthetic oligonucleotide
  Sense strand starting at position 1101 of SEQ ID NO: 1881458
uaggaagguuucuauuuag

SEQ ID NO: 2046053 - RNA, 19 nt, Artificial Sequence
  Description of Artificial Sequence: Synthetic oligonucleotide
  Antisense strand to SEQ ID NO: 2046052
cuaaauagaaaccuuccua

SEQ ID NO: 2046054 - RNA, 19 nt, Artificial Sequence
  Description of Artificial Sequence: Synthetic oligonucleotide
  Sense strand starting at position 1107 of SEQ ID NO: 1881458
gguuucuauuuaggguuaa

SEQ ID NO: 2046055 - RNA, 19 nt, Artificial Sequence
  Description of Artificial Sequence: Synthetic oligonucleotide
  Antisense strand to SEQ ID NO: 2046054
uuaacccuaaauagaaacc

SEQ ID NO: 2046056 - RNA, 19 nt, Artificial Sequence
  Description of Artificial Sequence: Synthetic oligonucleotide
  Sense strand starting at position 1108 of SEQ ID NO: 1881458
guuucuauuuaggguuaaa

SEQ ID NO: 2046057 - RNA, 19 nt, Artificial Sequence
  Description of Artificial Sequence: Synthetic oligonucleotide
  Antisense strand to SEQ ID NO: 2046056
uuuaacccuaaauagaaac

SEQ ID NO: 2046058 - RNA, 19 nt, Artificial Sequence
  Description of Artificial Sequence: Synthetic oligonucleotide
  Sense strand starting at position 2129 of SEQ ID NO: 1881458
guggugguggcguuucuaa

SEQ ID NO: 2046059 - RNA, 19 nt, Artificial Sequence
  Description of Artificial Sequence: Synthetic oligonucleotide
  Antisense strand to SEQ ID NO: 2046058
uuagaaacgccaccaccac

SEQ ID NO: 2046060 - RNA, 19 nt, Artificial Sequence
  Description of Artificial Sequence: Synthetic oligonucleotide
  Sense strand starting at position 2489 of SEQ ID NO: 1881458
cguugauaugucguagcac

SEQ ID NO: 2046061 - RNA, 19 nt, Artificial Sequence
  Description of Artificial Sequence: Synthetic oligonucleotide
  Antisense strand to SEQ ID NO: 2046060
gugcuacgacauaucaacg

SEQ ID NO: 2046062 - RNA, 19 nt, Artificial Sequence
  Description of Artificial Sequence: Synthetic oligonucleotide
  Sense strand starting at position 2491 of SEQ ID NO: 1881458
uugauaugucguagcacgu

SEQ ID NO: 2046063 - RNA, 19 nt, Artificial Sequence
  Description of Artificial Sequence: Synthetic oligonucleotide
  Antisense strand to SEQ ID NO: 2046062
acgugcuacgacauaucaa

SEQ ID NO: 2046064 - RNA, 19 nt, Artificial Sequence
  Description of Artificial Sequence: Synthetic oligonucleotide
  Sense strand starting at position 3123 of SEQ ID NO: 1881458
gcccgauaggagggagauu

SEQ ID NO: 2046065 - RNA, 19 nt, Artificial Sequence
  Description of Artificial Sequence: Synthetic oligonucleotide
  Antisense strand to SEQ ID NO: 2046064
aaucucccuccuaucgggc

SEQ ID NO: 2046066 - RNA, 19 nt, Artificial Sequence
  Description of Artificial Sequence: Synthetic oligonucleotide
  Sense strand starting at position 3401 of SEQ ID NO: 1881458
uuugaucuugcagggauag

SEQ ID NO: 2046067 - RNA, 19 nt, Artificial Sequence
  Description of Artificial Sequence: Synthetic oligonucleotide
  Antisense strand to SEQ ID NO: 2046066
cuaucccugcaagaucaaa

SEQ ID NO: 2046068 - RNA, 19 nt, Artificial Sequence
  Description of Artificial Sequence: Synthetic oligonucleotide
  Sense strand starting at position 3665 of SEQ ID NO: 1881458
gagcgaauuuguuaaguau

SEQ ID NO: 2046069 - RNA, 19 nt, Artificial Sequence
  Description of Artificial Sequence: Synthetic oligonucleotide
  Antisense strand to SEQ ID NO: 2046068
auacuuaacaaauucgcuc

SEQ ID NO: 2046070 - RNA, 19 nt, Artificial Sequence
  Description of Artificial Sequence: Synthetic oligonucleotide
  Sense strand starting at position 1998 of SEQ ID NO: 1881459
uucugugguucugugauga

SEQ ID NO: 2046071 - RNA, 19 nt, Artificial Sequence
  Description of Artificial Sequence: Synthetic oligonucleotide
  Antisense strand to SEQ ID NO: 2046070
ucaucacagaaccacagaa

SEQ ID NO: 2046072 - RNA, 19 nt, Artificial Sequence
  Description of Artificial Sequence: Synthetic oligonucleotide
  Sense strand starting at position 2018 of SEQ ID NO: 1881459
ugaugaccucuuugugaag

SEQ ID NO: 2046073 - RNA, 19 nt, Artificial Sequence
  Description of Artificial Sequence: Synthetic oligonucleotide
  Antisense strand to SEQ ID NO: 2046072
cuucacaaagaggucauca

SEQ ID NO: 2046074 - RNA, 19 nt, Artificial Sequence
  Description of Artificial Sequence: Synthetic oligonucleotide
  Sense strand starting at position 2019 of SEQ ID NO: 1881459
gaugaccucuuugugaagu

SEQ ID NO: 2046075 - RNA, 19 nt, Artificial Sequence
  Description of Artificial Sequence: Synthetic oligonucleotide
  Antisense strand to SEQ ID NO: 2046074
acuucacaaagaggucauc

SEQ ID NO: 2046076 - RNA, 19 nt, Artificial Sequence
  Description of Artificial Sequence: Synthetic oligonucleotide
  Sense strand starting at position 2085 of SEQ ID NO: 1881459
ccaucugcugguuguaauu

SEQ ID NO: 2046077 - RNA, 19 nt, Artificial Sequence
  Description of Artificial Sequence: Synthetic oligonucleotide
  Antisense strand to SEQ ID NO: 2046076
aauuacaaccagcagaugg

SEQ ID NO: 2046078 - RNA, 19 nt, Artificial Sequence
  Description of Artificial Sequence: Synthetic oligonucleotide
  Sense strand starting at position 2152 of SEQ ID NO: 1881459
auggaaggauguuggaaau

SEQ ID NO: 2046079 - RNA, 19 nt, Artificial Sequence
  Description of Artificial Sequence: Synthetic oligonucleotide
  Antisense strand to SEQ ID NO: 2046078
auuuccaacauccuuccau

SEQ ID NO: 2046080 - RNA, 19 nt, Artificial Sequence
  Description of Artificial Sequence: Synthetic oligonucleotide
  Sense strand starting at position 2231 of SEQ ID NO: 1881459
guggcauuacagugaucaa

SEQ ID NO: 2046081 - RNA, 19 nt, Artificial Sequence
  Description of Artificial Sequence: Synthetic oligonucleotide
  Antisense strand to SEQ ID NO: 2046080
uugaucacuguaaugccac

SEQ ID NO: 2046082 - RNA, 19 nt, Artificial Sequence
  Description of Artificial Sequence: Synthetic oligonucleotide
  Sense strand starting at position 2234 of SEQ ID NO: 1881459
gcauuacagugaucaaagg

SEQ ID NO: 2046083 - RNA, 19 nt, Artificial Sequence
  Description of Artificial Sequence: Synthetic oligonucleotide
  Antisense strand to SEQ ID NO: 2046082
ccuuugaucacuguaaugc

SEQ ID NO: 2046084 - RNA, 19 nt, Artificial Sequence
  Description of Artificial Sequence: Synthetic oligonucleotide
  Sense strand starting at position 2356 of SEQ ID NO: 1881459
gugccugcaggagaugaau

SEQ ID NO: 2046085 - RNA, 19 nt, Artificial Sequence
  Description of Artificial Sequence: Synthetic oligonucleotide
  Antisense strand to SEQ ID NO: 2046084
auucaucuccugcaggcac

SEQ ID NO: 2046086 - RNA, 19 nt, Artificial Sequence
  Description of Artificial Sequence: Synthetic oligonucleotide
  Sense strand starting at position 2506 of SEQ ID NO: 1881459
ucucucuacucucugaguu

SEQ ID NO: 2046087 - RNA, 19 nt, Artificial Sequence
  Description of Artificial Sequence: Synthetic oligonucleotide
  Antisense strand to SEQ ID NO: 2046086
aacucagagaguagagaga

SEQ ID NO: 2046088 - RNA, 19 nt, Artificial Sequence
  Description of Artificial Sequence: Synthetic oligonucleotide
  Sense strand starting at position 2507 of SEQ ID NO: 1881459
cucucuacucucugaguuu

SEQ ID NO: 2046089 - RNA, 19 nt, Artificial Sequence
  Description of Artificial Sequence: Synthetic oligonucleotide
  Antisense strand to SEQ ID NO: 2046088
aaacucagagaguagagag

SEQ ID NO: 2046090 - RNA, 19 nt, Artificial Sequence
  Description of Artificial Sequence: Synthetic oligonucleotide
  Sense strand starting at position 2575 of SEQ ID NO: 1881459
gcacauuuauuacacggau

SEQ ID NO: 2046091 - RNA, 19 nt, Artificial Sequence
  Description of Artificial Sequence: Synthetic oligonucleotide
  Antisense strand to SEQ ID NO: 2046090
auccguguaauaaaugugc

SEQ ID NO: 2046092 - RNA, 19 nt, Artificial Sequence
  Description of Artificial Sequence: Synthetic oligonucleotide
  Sense strand starting at position 2772 of SEQ ID NO: 1881459
ccagucucuucuccuauga

SEQ ID NO: 2046093 - RNA, 19 nt, Artificial Sequence
  Description of Artificial Sequence: Synthetic oligonucleotide
  Antisense strand to SEQ ID NO: 2046092
ucauaggagaagagacugg

SEQ ID NO: 2046094 - RNA, 19 nt, Artificial Sequence
  Description of Artificial Sequence: Synthetic oligonucleotide
  Sense strand starting at position 2794 of SEQ ID NO: 1881459
agugaaucuugucucugga

SEQ ID NO: 2046095 - RNA, 19 nt, Artificial Sequence
  Description of Artificial Sequence: Synthetic oligonucleotide
  Antisense strand to SEQ ID NO: 2046094
uccagagacaagauucacu

SEQ ID NO: 2046096 - RNA, 19 nt, Artificial Sequence
  Description of Artificial Sequence: Synthetic oligonucleotide
  Sense strand starting at position 2797 of SEQ ID NO: 1881459
gaaucuugucucuggagga

SEQ ID NO: 2046097 - RNA, 19 nt, Artificial Sequence
  Description of Artificial Sequence: Synthetic oligonucleotide
  Antisense strand to SEQ ID NO: 2046096
uccuccagagacaagauuc

SEQ ID NO: 2046098 - RNA, 19 nt, Artificial Sequence
  Description of Artificial Sequence: Synthetic oligonucleotide
  Sense strand starting at position 2801 of SEQ ID NO: 1881459
cuugucucuggaggagaaa

SEQ ID NO: 2046099 - RNA, 19 nt, Artificial Sequence
  Description of Artificial Sequence: Synthetic oligonucleotide
  Antisense strand to SEQ ID NO: 2046098
uuucuccuccagagacaag

SEQ ID NO: 2046100 - RNA, 19 nt, Artificial Sequence
  Description of Artificial Sequence: Synthetic oligonucleotide
  Sense strand starting at position 2812 of SEQ ID NO: 1881459
aggagaaacugaguuccuu

SEQ ID NO: 2046101 - RNA, 19 nt, Artificial Sequence
  Description of Artificial Sequence: Synthetic oligonucleotide
  Antisense strand to SEQ ID NO: 2046100
aaggaacucaguuucuccu

SEQ ID NO: 2046102 - RNA, 19 nt, Artificial Sequence
  Description of Artificial Sequence: Synthetic oligonucleotide
  Sense strand starting at position 2836 of SEQ ID NO: 1881459
aucuaucuuuaaggagaca

SEQ ID NO: 2046103 - RNA, 19 nt, Artificial Sequence
  Description of Artificial Sequence: Synthetic oligonucleotide
  Antisense strand to SEQ ID NO: 2046102
ugucuccuuaaagauagau

SEQ ID NO: 2046104 - RNA, 19 nt, Artificial Sequence
  Description of Artificial Sequence: Synthetic oligonucleotide
  Sense strand starting at position 3036 of SEQ ID NO: 1881459
cagcaauggucggcuguga

SEQ ID NO: 2046105 - RNA, 19 nt, Artificial Sequence
  Description of Artificial Sequence: Synthetic oligonucleotide
  Antisense strand to SEQ ID NO: 2046104
ucacagccgaccauugcug

SEQ ID NO: 2046106 - RNA, 19 nt, Artificial Sequence
  Description of Artificial Sequence: Synthetic oligonucleotide
  Sense strand starting at position 3181 of SEQ ID NO: 1881459
cuuggauaacuuugccagu

SEQ ID NO: 2046107 - RNA, 19 nt, Artificial Sequence
  Description of Artificial Sequence: Synthetic oligonucleotide
  Antisense strand to SEQ ID NO: 2046106
acuggcaaaguuauccaag

SEQ ID NO: 2046108 - RNA, 19 nt, Artificial Sequence
  Description of Artificial Sequence: Synthetic oligonucleotide
  Sense strand starting at position 3183 of SEQ ID NO: 1881459
uggauaacuuugccaguca

SEQ ID NO: 2046109 - RNA, 19 nt, Artificial Sequence
  Description of Artificial Sequence: Synthetic oligonucleotide
  Antisense strand to SEQ ID NO: 2046108
ugacuggcaaaguuaucca

SEQ ID NO: 2046110 - RNA, 19 nt, Artificial Sequence
  Description of Artificial Sequence: Synthetic oligonucleotide
  Sense strand starting at position 3279 of SEQ ID NO: 1881459
ccuuaaggguccuugaaca

SEQ ID NO: 2046111 - RNA, 19 nt, Artificial Sequence
  Description of Artificial Sequence: Synthetic oligonucleotide
  Antisense strand to SEQ ID NO: 2046110
uguucaaggacccuuaagg

SEQ ID NO: 2046112 - RNA, 19 nt, Artificial Sequence
  Description of Artificial Sequence: Synthetic oligonucleotide
  Sense strand starting at position 3286 of SEQ ID NO: 1881459
gguccuugaacauguagga

SEQ ID NO: 2046113 - RNA, 19 nt, Artificial Sequence
  Description of Artificial Sequence: Synthetic oligonucleotide
  Antisense strand to SEQ ID NO: 2046112
uccuacauguucaaggacc

SEQ ID NO: 2046114 - RNA, 19 nt, Artificial Sequence
  Description of Artificial Sequence: Synthetic oligonucleotide
  Sense strand starting at position 3325 of SEQ ID NO: 1881459
ugugcagguguccaucuaa

SEQ ID NO: 2046115 - RNA, 19 nt, Artificial Sequence
  Description of Artificial Sequence: Synthetic oligonucleotide
  Antisense strand to SEQ ID NO: 2046114
uuagauggacaccugcaca

SEQ ID NO: 2046116 - RNA, 19 nt, Artificial Sequence
  Description of Artificial Sequence: Synthetic oligonucleotide
  Sense strand starting at position 3353 of SEQ ID NO: 1881459
cuuaguugggagcaaucuu

SEQ ID NO: 2046117 - RNA, 19 nt, Artificial Sequence
  Description of Artificial Sequence: Synthetic oligonucleotide
  Antisense strand to SEQ ID NO: 2046116
aagauugcucccaacuaag

SEQ ID NO: 2046118 - RNA, 19 nt, Artificial Sequence
  Description of Artificial Sequence: Synthetic oligonucleotide
  Sense strand starting at position 3360 of SEQ ID NO: 1881459
gggagcaaucuuggaauuc

SEQ ID NO: 2046119 - RNA, 19 nt, Artificial Sequence
  Description of Artificial Sequence: Synthetic oligonucleotide
  Antisense strand to SEQ ID NO: 2046118
gaauuccaagauugcuccc

SEQ ID NO: 2046120 - RNA, 19 nt, Artificial Sequence
  Description of Artificial Sequence: Synthetic oligonucleotide
  Sense strand starting at position 3675 of SEQ ID NO: 1881459
gggcuuauuugccugguga

SEQ ID NO: 2046121 - RNA, 19 nt, Artificial Sequence
  Description of Artificial Sequence: Synthetic oligonucleotide
  Antisense strand to SEQ ID NO: 2046120
ucaccaggcaaauaagccc

SEQ ID NO: 2046122 - RNA, 19 nt, Artificial Sequence
  Description of Artificial Sequence: Synthetic oligonucleotide
  Sense strand starting at position 3676 of SEQ ID NO: 1881459
ggcuuauuugccuggugag

SEQ ID NO: 2046123 - RNA, 19 nt, Artificial Sequence
  Description of Artificial Sequence: Synthetic oligonucleotide
  Antisense strand to SEQ ID NO: 2046122
cucaccaggcaaauaagcc

SEQ ID NO: 2046124 - RNA, 19 nt, Artificial Sequence
  Description of Artificial Sequence: Synthetic oligonucleotide
  Sense strand starting at position 3677 of SEQ ID NO: 1881459
gcuuauuugccuggugagu

SEQ ID NO: 2046125 - RNA, 19 nt, Artificial Sequence
  Description of Artificial Sequence: Synthetic oligonucleotide
  Antisense strand to SEQ ID NO: 2046124
acucaccaggcaaauaagc

SEQ ID NO: 2046126 - RNA, 19 nt, Artificial Sequence
  Description of Artificial Sequence: Synthetic oligonucleotide
  Sense strand starting at position 3729 of SEQ ID NO: 1881459
aucaauaggcauuguguua

SEQ ID NO: 2046127 - RNA, 19 nt, Artificial Sequence
  Description of Artificial Sequence: Synthetic oligonucleotide
  Antisense strand to SEQ ID NO: 2046126
uaacacaaugccuauugau

SEQ ID NO: 2046128 - RNA, 19 nt, Artificial Sequence
  Description of Artificial Sequence: Synthetic oligonucleotide
  Sense strand starting at position 3736 of SEQ ID NO: 1881459
ggcauuguguuacuuggca

SEQ ID NO: 2046129 - RNA, 19 nt, Artificial Sequence
  Description of Artificial Sequence: Synthetic oligonucleotide
  Antisense strand to SEQ ID NO: 2046128
ugccaaguaacacaaugcc

SEQ ID NO: 2046130 - RNA, 19 nt, Artificial Sequence
  Description of Artificial Sequence: Synthetic oligonucleotide
  Sense strand starting at position 3740 of SEQ ID NO: 1881459
uuguguuacuuggcacaag

SEQ ID NO: 2046131 - RNA, 19 nt, Artificial Sequence
  Description of Artificial Sequence: Synthetic oligonucleotide
  Antisense strand to SEQ ID NO: 2046130
cuugugccaaguaacacaa

SEQ ID NO: 2046132 - RNA, 19 nt, Artificial Sequence
  Description of Artificial Sequence: Synthetic oligonucleotide
  Sense strand starting at position 3743 of SEQ ID NO: 1881459
uguuacuuggcacaaguaa

SEQ ID NO: 2046133 - RNA, 19 nt, Artificial Sequence
  Description of Artificial Sequence: Synthetic oligonucleotide
  Antisense strand to SEQ ID NO: 2046132
uuacuugugccaaguaaca

SEQ ID NO: 2046134 - RNA, 19 nt, Artificial Sequence
  Description of Artificial Sequence: Synthetic oligonucleotide
  Sense strand starting at position 3770 of SEQ ID NO: 1881459
cgggaaguguucuccaaag

SEQ ID NO: 2046135 - RNA, 19 nt, Artificial Sequence
  Description of Artificial Sequence: Synthetic oligonucleotide
  Antisense strand to SEQ ID NO: 2046134
cuuuggagaacacuucccg

SEQ ID NO: 2046136 - RNA, 19 nt, Artificial Sequence
  Description of Artificial Sequence: Synthetic oligonucleotide
  Sense strand starting at position 3791 of SEQ ID NO: 1881459
guaucuucccaagggaaag

SEQ ID NO: 2046137 - RNA, 19 nt, Artificial Sequence
  Description of Artificial Sequence: Synthetic oligonucleotide
  Antisense strand to SEQ ID NO: 2046136
cuuucccuugggaagauac

SEQ ID NO: 2046138 - RNA, 19 nt, Artificial Sequence
  Description of Artificial Sequence: Synthetic oligonucleotide
  Sense strand starting at position 3815 of SEQ ID NO: 1881459
ggaggguuugauggaguga

SEQ ID NO: 2046139 - RNA, 19 nt, Artificial Sequence
  Description of Artificial Sequence: Synthetic oligonucleotide
  Antisense strand to SEQ ID NO: 2046138
ucacuccaucaaacccucc

SEQ ID NO: 2046140 - RNA, 19 nt, Artificial Sequence
  Description of Artificial Sequence: Synthetic oligonucleotide
  Sense strand starting at position 3817 of SEQ ID NO: 1881459
aggguuugauggagugaua

SEQ ID NO: 2046141 - RNA, 19 nt, Artificial Sequence
  Description of Artificial Sequence: Synthetic oligonucleotide
  Antisense strand to SEQ ID NO: 2046140
uaucacuccaucaaacccu

SEQ ID NO: 2046142 - RNA, 19 nt, Artificial Sequence
  Description of Artificial Sequence: Synthetic oligonucleotide
  Sense strand starting at position 3849 of SEQ ID NO: 1881459
ugcaucauggcauguguau

SEQ ID NO: 2046143 - RNA, 19 nt, Artificial Sequence
  Description of Artificial Sequence: Synthetic oligonucleotide
  Antisense strand to SEQ ID NO: 2046142
auacacaugccaugaugca

SEQ ID NO: 2046144 - RNA, 19 nt, Artificial Sequence
  Description of Artificial Sequence: Synthetic oligonucleotide
  Sense strand starting at position 3915 of SEQ ID NO: 1881459
ugggucacagguuaugaua

SEQ ID NO: 2046145 - RNA, 19 nt, Artificial Sequence
  Description of Artificial Sequence: Synthetic oligonucleotide
  Antisense strand to SEQ ID NO: 2046144
uaucauaaccugugaccca

SEQ ID NO: 2046146 - RNA, 19 nt, Artificial Sequence
  Description of Artificial Sequence: Synthetic oligonucleotide
  Sense strand starting at position 3962 of SEQ ID NO: 1881459
gggcuuuagcauggcauga

SEQ ID NO: 2046147 - RNA, 19 nt, Artificial Sequence
  Description of Artificial Sequence: Synthetic oligonucleotide
  Antisense strand to SEQ ID NO: 2046146
ucaugccaugcuaaagccc

SEQ ID NO: 2046148 - RNA, 19 nt, Artificial Sequence
  Description of Artificial Sequence: Synthetic oligonucleotide
  Sense strand starting at position 3966 of SEQ ID NO: 1881459
uuuagcauggcaugaagaa

SEQ ID NO: 2046149 - RNA, 19 nt, Artificial Sequence
  Description of Artificial Sequence: Synthetic oligonucleotide
  Antisense strand to SEQ ID NO: 2046148
uucuucaugccaugcuaaa

SEQ ID NO: 2046150 - RNA, 19 nt, Artificial Sequence
  Description of Artificial Sequence: Synthetic oligonucleotide
  Sense strand starting at position 57 of SEQ ID NO: 1881460
aggucacaaucaucuggaa

SEQ ID NO: 2046151 - RNA, 19 nt, Artificial Sequence
  Description of Artificial Sequence: Synthetic oligonucleotide
  Antisense strand to SEQ ID NO: 2046150
uuccagaugauugugaccu

SEQ ID NO: 2046152 - RNA, 19 nt, Artificial Sequence
  Description of Artificial Sequence: Synthetic oligonucleotide
  Sense strand starting at position 255 of SEQ ID NO: 1881460
aaagaauggugucugaaug

SEQ ID NO: 2046153 - RNA, 19 nt, Artificial Sequence
  Description of Artificial Sequence: Synthetic oligonucleotide
  Antisense strand to SEQ ID NO: 2046152
cauucagacaccauucuuu

SEQ ID NO: 2046154 - RNA, 19 nt, Artificial Sequence
  Description of Artificial Sequence: Synthetic oligonucleotide
  Sense strand starting at position 256 of SEQ ID NO: 1881460
aagaauggugucugaauga

SEQ ID NO: 2046155 - RNA, 19 nt, Artificial Sequence
  Description of Artificial Sequence: Synthetic oligonucleotide
  Antisense strand to SEQ ID NO: 2046154
ucauucagacaccauucuu

SEQ ID NO: 2046156 - RNA, 19 nt, Artificial Sequence
  Description of Artificial Sequence: Synthetic oligonucleotide
  Sense strand starting at position 261 of SEQ ID NO: 1881460
uggugucugaaugaacgau

SEQ ID NO: 2046157 - RNA, 19 nt, Artificial Sequence
  Description of Artificial Sequence: Synthetic oligonucleotide
  Antisense strand to SEQ ID NO: 2046156
aucguucauucagacacca

SEQ ID NO: 2046158 - RNA, 19 nt, Artificial Sequence
  Description of Artificial Sequence: Synthetic oligonucleotide
  Sense strand starting at position 265 of SEQ ID NO: 1881460
gucugaaugaacgauauuc

SEQ ID NO: 2046159 - RNA, 19 nt, Artificial Sequence
  Description of Artificial Sequence: Synthetic oligonucleotide
  Antisense strand to SEQ ID NO: 2046158
gaauaucguucauucagac

SEQ ID NO: 2046160 - RNA, 19 nt, Artificial Sequence
  Description of Artificial Sequence: Synthetic oligonucleotide
  Sense strand starting at position 348 of SEQ ID NO: 1881460
ugcuuaauggcuuaaccau

SEQ ID NO: 2046161 - RNA, 19 nt, Artificial Sequence
  Description of Artificial Sequence: Synthetic oligonucleotide
  Antisense strand to SEQ ID NO: 2046160
augguuaagccauuaagca

SEQ ID NO: 2046162 - RNA, 19 nt, Artificial Sequence
  Description of Artificial Sequence: Synthetic oligonucleotide
  Sense strand starting at position 372 of SEQ ID NO: 1881460
augcuucuccuagaugagu

SEQ ID NO: 2046163 - RNA, 19 nt, Artificial Sequence
  Description of Artificial Sequence: Synthetic oligonucleotide
  Antisense strand to SEQ ID NO: 2046162
acucaucuaggagaagcau

SEQ ID NO: 2046164 - RNA, 19 nt, Artificial Sequence
  Description of Artificial Sequence: Synthetic oligonucleotide
  Sense strand starting at position 443 of SEQ ID NO: 1881460
auaccugaugucuggguga

SEQ ID NO: 2046165 - RNA, 19 nt, Artificial Sequence
  Description of Artificial Sequence: Synthetic oligonucleotide
  Antisense strand to SEQ ID NO: 2046164
ucacccagacaucagguau

SEQ ID NO: 2046166 - RNA, 19 nt, Artificial Sequence
  Description of Artificial Sequence: Synthetic oligonucleotide
  Sense strand starting at position 445 of SEQ ID NO: 1881460
accugaugucugggugaaa

SEQ ID NO: 2046167 - RNA, 19 nt, Artificial Sequence
  Description of Artificial Sequence: Synthetic oligonucleotide
  Antisense strand to SEQ ID NO: 2046166
uuucacccagacaucaggu

SEQ ID NO: 2046168 - RNA, 19 nt, Artificial Sequence
  Description of Artificial Sequence: Synthetic oligonucleotide
  Sense strand starting at position 446 of SEQ ID NO: 1881460
ccugaugucugggugaaau

SEQ ID NO: 2046169 - RNA, 19 nt, Artificial Sequence
  Description of Artificial Sequence: Synthetic oligonucleotide
  Antisense strand to SEQ ID NO: 2046168
auuucacccagacaucagg

SEQ ID NO: 2046170 - RNA, 19 nt, Artificial Sequence
  Description of Artificial Sequence: Synthetic oligonucleotide
  Sense strand starting at position 506 of SEQ ID NO: 1881460
uuaguuuaaggcuaauaag

SEQ ID NO: 2046171 - RNA, 19 nt, Artificial Sequence
  Description of Artificial Sequence: Synthetic oligonucleotide
  Antisense strand to SEQ ID NO: 2046170
cuuauuagccuuaaacuaa

SEQ ID NO: 2046172 - RNA, 19 nt, Artificial Sequence
  Description of Artificial Sequence: Synthetic oligonucleotide
  Sense strand starting at position 578 of SEQ ID NO: 1881460
ugaacuggguguuucuaaa

SEQ ID NO: 2046173 - RNA, 19 nt, Artificial Sequence
  Description of Artificial Sequence: Synthetic oligonucleotide
  Antisense strand to SEQ ID NO: 2046172
uuuagaaacacccaguuca

SEQ ID NO: 2046174 - RNA, 19 nt, Artificial Sequence
  Description of Artificial Sequence: Synthetic oligonucleotide
  Sense strand starting at position 614 of SEQ ID NO: 1881460
gggagaagauggagugcua

SEQ ID NO: 2046175 - RNA, 19 nt, Artificial Sequence
  Description of Artificial Sequence: Synthetic oligonucleotide
  Antisense strand to SEQ ID NO: 2046174
uagcacuccaucuucuccc

SEQ ID NO: 2046176 - RNA, 19 nt, Artificial Sequence
  Description of Artificial Sequence: Synthetic oligonucleotide
  Sense strand starting at position 717 of SEQ ID NO: 1881460
cuggcugagcuaugaaaca

SEQ ID NO: 2046177 - RNA, 19 nt, Artificial Sequence
  Description of Artificial Sequence: Synthetic oligonucleotide
  Antisense strand to SEQ ID NO: 2046176
uguuucauagcucagccag

SEQ ID NO: 2046178 - RNA, 19 nt, Artificial Sequence
  Description of Artificial Sequence: Synthetic oligonucleotide
  Sense strand starting at position 751 of SEQ ID NO: 1881460
gacaaugguucugcauaau

SEQ ID NO: 2046179 - RNA, 19 nt, Artificial Sequence
  Description of Artificial Sequence: Synthetic oligonucleotide
  Antisense strand to SEQ ID NO: 2046178
auuaugcagaaccauuguc

SEQ ID NO: 2046180 - RNA, 19 nt, Artificial Sequence
  Description of Artificial Sequence: Synthetic oligonucleotide
  Sense strand starting at position 763 of SEQ ID NO: 1881460
gcauaaugcuaugcaauuu

SEQ ID NO: 2046181 - RNA, 19 nt, Artificial Sequence
  Description of Artificial Sequence: Synthetic oligonucleotide
  Antisense strand to SEQ ID NO: 2046180
aaauugcauagcauuaugc

SEQ ID NO: 2046182 - RNA, 19 nt, Artificial Sequence
  Description of Artificial Sequence: Synthetic oligonucleotide
  Sense strand starting at position 808 of SEQ ID NO: 1881460
augcuuaaacaguagucau

SEQ ID NO: 2046183 - RNA, 19 nt, Artificial Sequence
  Description of Artificial Sequence: Synthetic oligonucleotide
  Antisense strand to SEQ ID NO: 2046182
augacuacuguuuaagcau

SEQ ID NO: 2046184 - RNA, 19 nt, Artificial Sequence
  Description of Artificial Sequence: Synthetic oligonucleotide
  Sense strand starting at position 844 of SEQ ID NO: 1881460
uuggaucauuuccacaaga

SEQ ID NO: 2046185 - RNA, 19 nt, Artificial Sequence
  Description of Artificial Sequence: Synthetic oligonucleotide
  Antisense strand to SEQ ID NO: 2046184
ucuuguggaaaugauccaa

SEQ ID NO: 2046186 - RNA, 19 nt, Artificial Sequence
  Description of Artificial Sequence: Synthetic oligonucleotide
  Sense strand starting at position 883 of SEQ ID NO: 1881460
gcagauauccaugacuuuc

SEQ ID NO: 2046187 - RNA, 19 nt, Artificial Sequence
  Description of Artificial Sequence: Synthetic oligonucleotide
  Antisense strand to SEQ ID NO: 2046186
gaaagucauggauaucugc

SEQ ID NO: 2046188 - RNA, 19 nt, Artificial Sequence
  Description of Artificial Sequence: Synthetic oligonucleotide
  Sense strand starting at position 913 of SEQ ID NO: 1881460
cugacaaauacguggaaug

SEQ ID NO: 2046189 - RNA, 19 nt, Artificial Sequence
  Description of Artificial Sequence: Synthetic oligonucleotide
  Antisense strand to SEQ ID NO: 2046188
cauuccacguauuugucag

SEQ ID NO: 2046190 - RNA, 19 nt, Artificial Sequence
  Description of Artificial Sequence: Synthetic oligonucleotide
  Sense strand starting at position 914 of SEQ ID NO: 1881460
ugacaaauacguggaaugu

SEQ ID NO: 2046191 - RNA, 19 nt, Artificial Sequence
  Description of Artificial Sequence: Synthetic oligonucleotide
  Antisense strand to SEQ ID NO: 2046190
acauuccacguauuuguca

SEQ ID NO: 2046192 - RNA, 19 nt, Artificial Sequence
  Description of Artificial Sequence: Synthetic oligonucleotide
  Sense strand starting at position 915 of SEQ ID NO: 1881460
gacaaauacguggaauguu

SEQ ID NO: 2046193 - RNA, 19 nt, Artificial Sequence
  Description of Artificial Sequence: Synthetic oligonucleotide
  Antisense strand to SEQ ID NO: 2046192
aacauuccacguauuuguc

SEQ ID NO: 2046194 - RNA, 19 nt, Artificial Sequence
  Description of Artificial Sequence: Synthetic oligonucleotide
  Sense strand starting at position 918 of SEQ ID NO: 1881460
aaauacguggaauguuaau

SEQ ID NO: 2046195 - RNA, 19 nt, Artificial Sequence
  Description of Artificial Sequence: Synthetic oligonucleotide
  Antisense strand to SEQ ID NO: 2046194
auuaacauuccacguauuu

SEQ ID NO: 2046196 - RNA, 19 nt, Artificial Sequence
  Description of Artificial Sequence: Synthetic oligonucleotide
  Sense strand starting at position 1063 of SEQ ID NO: 1881460
uuuauucgagcucauauaa

SEQ ID NO: 2046197 - RNA, 19 nt, Artificial Sequence
  Description of Artificial Sequence: Synthetic oligonucleotide
  Antisense strand to SEQ ID NO: 2046196
uuauaugagcucgaauaaa

SEQ ID NO: 2046198 - RNA, 19 nt, Artificial Sequence
  Description of Artificial Sequence: Synthetic oligonucleotide
  Sense strand starting at position 1117 of SEQ ID NO: 1881460
aucuacauccaguaagugu

SEQ ID NO: 2046199 - RNA, 19 nt, Artificial Sequence
  Description of Artificial Sequence: Synthetic oligonucleotide
  Antisense strand to SEQ ID NO: 2046198
acacuuacuggauguagau

SEQ ID NO: 2046200 - RNA, 19 nt, Artificial Sequence
  Description of Artificial Sequence: Synthetic oligonucleotide
  Sense strand starting at position 2592 of SEQ ID NO: 1881460
gagaguucucgugaaauuc

SEQ ID NO: 2046201 - RNA, 19 nt, Artificial Sequence
  Description of Artificial Sequence: Synthetic oligonucleotide
  Antisense strand to SEQ ID NO: 2046200
gaauuucacgagaacucuc

SEQ ID NO: 2046202 - RNA, 19 nt, Artificial Sequence
  Description of Artificial Sequence: Synthetic oligonucleotide
  Sense strand starting at position 2601 of SEQ ID NO: 1881460
cgugaaauucgggagacuc

SEQ ID NO: 2046203 - RNA, 19 nt, Artificial Sequence
  Description of Artificial Sequence: Synthetic oligonucleotide
  Antisense strand to SEQ ID NO: 2046202
gagucucccgaauuucacg

SEQ ID NO: 2046204 - RNA, 19 nt, Artificial Sequence
  Description of Artificial Sequence: Synthetic oligonucleotide
  Sense strand starting at position 2921 of SEQ ID NO: 1881460
uggaguacugcuggacaga

SEQ ID NO: 2046205 - RNA, 19 nt, Artificial Sequence
  Description of Artificial Sequence: Synthetic oligonucleotide
  Antisense strand to SEQ ID NO: 2046204
ucuguccagcaguacucca

SEQ ID NO: 2046206 - RNA, 19 nt, Artificial Sequence
  Description of Artificial Sequence: Synthetic oligonucleotide
  Sense strand starting at position 2922 of SEQ ID NO: 1881460
ggaguacugcuggacagau

SEQ ID NO: 2046207 - RNA, 19 nt, Artificial Sequence
  Description of Artificial Sequence: Synthetic oligonucleotide
  Antisense strand to SEQ ID NO: 2046206
aucuguccagcaguacucc

SEQ ID NO: 2046208 - RNA, 19 nt, Artificial Sequence
  Description of Artificial Sequence: Synthetic oligonucleotide
  Sense strand starting at position 3134 of SEQ ID NO: 1881460
agaacuuugcaguggaaug

SEQ ID NO: 2046209 - RNA, 19 nt, Artificial Sequence
  Description of Artificial Sequence: Synthetic oligonucleotide
  Antisense strand to SEQ ID NO: 2046208
cauuccacugcaaaguucu

SEQ ID NO: 2046210 - RNA, 19 nt, Artificial Sequence
  Description of Artificial Sequence: Synthetic oligonucleotide
  Sense strand starting at position 3189 of SEQ ID NO: 1881460
uauuauagacagugugaac

SEQ ID NO: 2046211 - RNA, 19 nt, Artificial Sequence
  Description of Artificial Sequence: Synthetic oligonucleotide
  Antisense strand to SEQ ID NO: 2046210
guucacacugucuauaaua

SEQ ID NO: 2046212 - RNA, 19 nt, Artificial Sequence
  Description of Artificial Sequence: Synthetic oligonucleotide
  Sense strand starting at position 3202 of SEQ ID NO: 1881460
gugaacagugguuaaacca

SEQ ID NO: 2046213 - RNA, 19 nt, Artificial Sequence
  Description of Artificial Sequence: Synthetic oligonucleotide
  Antisense strand to SEQ ID NO: 2046212
ugguuuaaccacuguucac

SEQ ID NO: 2046214 - RNA, 19 nt, Artificial Sequence
  Description of Artificial Sequence: Synthetic oligonucleotide
  Sense strand starting at position 3231 of SEQ ID NO: 1881460
aaguuaagauuccugguuu

SEQ ID NO: 2046215 - RNA, 19 nt, Artificial Sequence
  Description of Artificial Sequence: Synthetic oligonucleotide
  Antisense strand to SEQ ID NO: 2046214
aaaccaggaaucuuaacuu

SEQ ID NO: 2046216 - RNA, 19 nt, Artificial Sequence
  Description of Artificial Sequence: Synthetic oligonucleotide
  Sense strand starting at position 3273 of SEQ ID NO: 1881460
guuaacaagcuauaugacu

SEQ ID NO: 2046217 - RNA, 19 nt, Artificial Sequence
  Description of Artificial Sequence: Synthetic oligonucleotide
  Antisense strand to SEQ ID NO: 2046216
agucauauagcuuguuaac

SEQ ID NO: 2046218 - RNA, 19 nt, Artificial Sequence
  Description of Artificial Sequence: Synthetic oligonucleotide
  Sense strand starting at position 3430 of SEQ ID NO: 1881460
gagguagugcugcaggaaa

SEQ ID NO: 2046219 - RNA, 19 nt, Artificial Sequence
  Description of Artificial Sequence: Synthetic oligonucleotide
  Antisense strand to SEQ ID NO: 2046218
uuuccugcagcacuaccuc

SEQ ID NO: 2046220 - RNA, 19 nt, Artificial Sequence
  Description of Artificial Sequence: Synthetic oligonucleotide
  Sense strand starting at position 3560 of SEQ ID NO: 1881460
gggauacagagauggcuua

SEQ ID NO: 2046221 - RNA, 19 nt, Artificial Sequence
  Description of Artificial Sequence: Synthetic oligonucleotide
  Antisense strand to SEQ ID NO: 2046220
uaagccaucucuguauccc

SEQ ID NO: 2046222 - RNA, 19 nt, Artificial Sequence
  Description of Artificial Sequence: Synthetic oligonucleotide
  Sense strand starting at position 3793 of SEQ ID NO: 1881460
gcuaucuuggaaugcagaa

SEQ ID NO: 2046223 - RNA, 19 nt, Artificial Sequence
  Description of Artificial Sequence: Synthetic oligonucleotide
  Antisense strand to SEQ ID NO: 2046222
uucugcauuccaagauagc

SEQ ID NO: 2046224 - RNA, 19 nt, Artificial Sequence
  Description of Artificial Sequence: Synthetic oligonucleotide
  Sense strand starting at position 3886 of SEQ ID NO: 1881460
uuagaaugaugucugucau

SEQ ID NO: 2046225 - RNA, 19 nt, Artificial Sequence
  Description of Artificial Sequence: Synthetic oligonucleotide
  Antisense strand to SEQ ID NO: 2046224
augacagacaucauucuaa

SEQ ID NO: 2046226 - RNA, 19 nt, Artificial Sequence
  Description of Artificial Sequence: Synthetic oligonucleotide
  Sense strand starting at position 3887 of SEQ ID NO: 1881460
uagaaugaugucugucaua

SEQ ID NO: 2046227 - RNA, 19 nt, Artificial Sequence
  Description of Artificial Sequence: Synthetic oligonucleotide
  Antisense strand to SEQ ID NO: 2046226
uaugacagacaucauucua

SEQ ID NO: 2046228 - RNA, 19 nt, Artificial Sequence
  Description of Artificial Sequence: Synthetic oligonucleotide
  Sense strand starting at position 3898 of SEQ ID NO: 1881460
cugucauaaagugaguauu

SEQ ID NO: 2046229 - RNA, 19 nt, Artificial Sequence
  Description of Artificial Sequence: Synthetic oligonucleotide
  Antisense strand to SEQ ID NO: 2046228
aauacucacuuuaugacag

SEQ ID NO: 2046230 - RNA, 19 nt, Artificial Sequence
  Description of Artificial Sequence: Synthetic oligonucleotide
  Sense strand starting at position 35 of SEQ ID NO: 1881461
agauguuuauccuauaccu

SEQ ID NO: 2046231 - RNA, 19 nt, Artificial Sequence
  Description of Artificial Sequence: Synthetic oligonucleotide
  Antisense strand to SEQ ID NO: 2046230
agguauaggauaaacaucu

SEQ ID NO: 2046232 - RNA, 19 nt, Artificial Sequence
  Description of Artificial Sequence: Synthetic oligonucleotide
  Sense strand starting at position 96 of SEQ ID NO: 1881461
ucuaauauguaggagagaa

SEQ ID NO: 2046233 - RNA, 19 nt, Artificial Sequence
  Description of Artificial Sequence: Synthetic oligonucleotide
  Antisense strand to SEQ ID NO: 2046232
uucucuccuacauauuaga

SEQ ID NO: 2046234 - RNA, 19 nt, Artificial Sequence
  Description of Artificial Sequence: Synthetic oligonucleotide
  Sense strand starting at position 108 of SEQ ID NO: 1881461
gagagaaugucuuggccuu

SEQ ID NO: 2046235 - RNA, 19 nt, Artificial Sequence
  Description of Artificial Sequence: Synthetic oligonucleotide
  Antisense strand to SEQ ID NO: 2046234
aaggccaagacauucucuc

SEQ ID NO: 2046236 - RNA, 19 nt, Artificial Sequence
  Description of Artificial Sequence: Synthetic oligonucleotide
  Sense strand starting at position 114 of SEQ ID NO: 1881461
augucuuggccuuggaaau

SEQ ID NO: 2046237 - RNA, 19 nt, Artificial Sequence
  Description of Artificial Sequence: Synthetic oligonucleotide
  Antisense strand to SEQ ID NO: 2046236
auuuccaaggccaagacau

SEQ ID NO: 2046238 - RNA, 19 nt, Artificial Sequence
  Description of Artificial Sequence: Synthetic oligonucleotide
  Sense strand starting at position 115 of SEQ ID NO: 1881461
ugucuuggccuuggaaaug

SEQ ID NO: 2046239 - RNA, 19 nt, Artificial Sequence
  Description of Artificial Sequence: Synthetic oligonucleotide
  Antisense strand to SEQ ID NO: 2046238
cauuuccaaggccaagaca

SEQ ID NO: 2046240 - RNA, 19 nt, Artificial Sequence
  Description of Artificial Sequence: Synthetic oligonucleotide
  Sense strand starting at position 150 of SEQ ID NO: 1881461
guuuccuggucuuucugaa

SEQ ID NO: 2046241 - RNA, 19 nt, Artificial Sequence
  Description of Artificial Sequence: Synthetic oligonucleotide
  Antisense strand to SEQ ID NO: 2046240
uucagaaagaccaggaaac

SEQ ID NO: 2046242 - RNA, 19 nt, Artificial Sequence
  Description of Artificial Sequence: Synthetic oligonucleotide
  Sense strand starting at position 510 of SEQ ID NO: 1881461
gcagaaucucagugccagu

SEQ ID NO: 2046243 - RNA, 19 nt, Artificial Sequence
  Description of Artificial Sequence: Synthetic oligonucleotide
  Antisense strand to SEQ ID NO: 2046242
acuggcacugagauucugc

SEQ ID NO: 2046244 - RNA, 19 nt, Artificial Sequence
  Description of Artificial Sequence: Synthetic oligonucleotide
  Sense strand starting at position 536 of SEQ ID NO: 1881461
ucccuaucuuggugggaca

SEQ ID NO: 2046245 - RNA, 19 nt, Artificial Sequence
  Description of Artificial Sequence: Synthetic oligonucleotide
  Antisense strand to SEQ ID NO: 2046244
ugucccaccaagauaggga

SEQ ID NO: 2046246 - RNA, 19 nt, Artificial Sequence
  Description of Artificial Sequence: Synthetic oligonucleotide
  Sense strand starting at position 615 of SEQ ID NO: 1881461
ccgugcaguccacaucaaa

SEQ ID NO: 2046247 - RNA, 19 nt, Artificial Sequence
  Description of Artificial Sequence: Synthetic oligonucleotide
  Antisense strand to SEQ ID NO: 2046246
uuugauguggacugcacgg

SEQ ID NO: 2046248 - RNA, 19 nt, Artificial Sequence
  Description of Artificial Sequence: Synthetic oligonucleotide
  Sense strand starting at position 829 of SEQ ID NO: 1881461
cgugguccaauugaggaaa

SEQ ID NO: 2046249 - RNA, 19 nt, Artificial Sequence
  Description of Artificial Sequence: Synthetic oligonucleotide
  Antisense strand to SEQ ID NO: 2046248
uuuccucaauuggaccacg

SEQ ID NO: 2046250 - RNA, 19 nt, Artificial Sequence
  Description of Artificial Sequence: Synthetic oligonucleotide
  Sense strand starting at position 831 of SEQ ID NO: 1881461
ugguccaauugaggaaaua

SEQ ID NO: 2046251 - RNA, 19 nt, Artificial Sequence
  Description of Artificial Sequence: Synthetic oligonucleotide
  Antisense strand to SEQ ID NO: 2046250
uauuuccucaauuggacca

SEQ ID NO: 2046252 - RNA, 19 nt, Artificial Sequence
  Description of Artificial Sequence: Synthetic oligonucleotide
  Sense strand starting at position 893 of SEQ ID NO: 1881461
caugaagggugagaaauuu

SEQ ID NO: 2046253 - RNA, 19 nt, Artificial Sequence
  Description of Artificial Sequence: Synthetic oligonucleotide
  Antisense strand to SEQ ID NO: 2046252
aaauuucucacccuucaug

SEQ ID NO: 2046254 - RNA, 19 nt, Artificial Sequence
  Description of Artificial Sequence: Synthetic oligonucleotide
  Sense strand starting at position 1530 of SEQ ID NO: 1881461
agcucuucuccgcaaggua

SEQ ID NO: 2046255 - RNA, 19 nt, Artificial Sequence
  Description of Artificial Sequence: Synthetic oligonucleotide
  Antisense strand to SEQ ID NO: 2046254
uaccuugcggagaagagcu

SEQ ID NO: 2046256 - RNA, 19 nt, Artificial Sequence
  Description of Artificial Sequence: Synthetic oligonucleotide
  Sense strand starting at position 1542 of SEQ ID NO: 1881461
caagguaaguuguuuauuc

SEQ ID NO: 2046257 - RNA, 19 nt, Artificial Sequence
  Description of Artificial Sequence: Synthetic oligonucleotide
  Antisense strand to SEQ ID NO: 2046256
gaauaaacaacuuaccuug

SEQ ID NO: 2046258 - RNA, 19 nt, Artificial Sequence
  Description of Artificial Sequence: Synthetic oligonucleotide
  Sense strand starting at position 1544 of SEQ ID NO: 1881461
agguaaguuguuuauucgu

SEQ ID NO: 2046259 - RNA, 19 nt, Artificial Sequence
  Description of Artificial Sequence: Synthetic oligonucleotide
  Antisense strand to SEQ ID NO: 2046258
acgaauaaacaacuuaccu

SEQ ID NO: 2046260 - RNA, 19 nt, Artificial Sequence
  Description of Artificial Sequence: Synthetic oligonucleotide
  Sense strand starting at position 1552 of SEQ ID NO: 1881461
uguuuauucgucgccguuu

SEQ ID NO: 2046261 - RNA, 19 nt, Artificial Sequence
  Description of Artificial Sequence: Synthetic oligonucleotide
  Antisense strand to SEQ ID NO: 2046260
aaacggcgacgaauaaaca

SEQ ID NO: 2046262 - RNA, 19 nt, Artificial Sequence
  Description of Artificial Sequence: Synthetic oligonucleotide
  Sense strand starting at position 1571 of SEQ ID NO: 1881461
uggcgauccucccuggaca

SEQ ID NO: 2046263 - RNA, 19 nt, Artificial Sequence
  Description of Artificial Sequence: Synthetic oligonucleotide
  Antisense strand to SEQ ID NO: 2046262
uguccagggaggaucgcca

SEQ ID NO: 2046264 - RNA, 19 nt, Artificial Sequence
  Description of Artificial Sequence: Synthetic oligonucleotide
  Sense strand starting at position 2385 of SEQ ID NO: 1881461
cggcgcucuguguggagaa

SEQ ID NO: 2046265 - RNA, 19 nt, Artificial Sequence
  Description of Artificial Sequence: Synthetic oligonucleotide
  Antisense strand to SEQ ID NO: 2046264
uucuccacacagagcgccg

SEQ ID NO: 2046266 - RNA, 19 nt, Artificial Sequence
  Description of Artificial Sequence: Synthetic oligonucleotide
  Sense strand starting at position 2553 of SEQ ID NO: 1881461
ugugaucggucuuaauccu

SEQ ID NO: 2046267 - RNA, 19 nt, Artificial Sequence
  Description of Artificial Sequence: Synthetic oligonucleotide
  Antisense strand to SEQ ID NO: 2046266
aggauuaagaccgaucaca

SEQ ID NO: 2046268 - RNA, 19 nt, Artificial Sequence
  Description of Artificial Sequence: Synthetic oligonucleotide
  Sense strand starting at position 2561 of SEQ ID NO: 1881461
gucuuaauccuggccgugu

SEQ ID NO: 2046269 - RNA, 19 nt, Artificial Sequence
  Description of Artificial Sequence: Synthetic oligonucleotide
  Antisense strand to SEQ ID NO: 2046268
acacggccaggauuaagac

SEQ ID NO: 2046270 - RNA, 19 nt, Artificial Sequence
  Description of Artificial Sequence: Synthetic oligonucleotide
  Sense strand starting at position 2689 of SEQ ID NO: 1881461
cgggaggcgugcucagaaa

SEQ ID NO: 2046271 - RNA, 19 nt, Artificial Sequence
  Description of Artificial Sequence: Synthetic oligonucleotide
  Antisense strand to SEQ ID NO: 2046270
uuucugagcacgccucccg

SEQ ID NO: 2046272 - RNA, 19 nt, Artificial Sequence
  Description of Artificial Sequence: Synthetic oligonucleotide
  Sense strand starting at position 2996 of SEQ ID NO: 1881461
ggcaauugaucccaaguug

SEQ ID NO: 2046273 - RNA, 19 nt, Artificial Sequence
  Description of Artificial Sequence: Synthetic oligonucleotide
  Antisense strand to SEQ ID NO: 2046272
caacuugggaucaauugcc

SEQ ID NO: 2046274 - RNA, 19 nt, Artificial Sequence
  Description of Artificial Sequence: Synthetic oligonucleotide
  Sense strand starting at position 3007 of SEQ ID NO: 1881461
ccaaguugucgacgaccga

SEQ ID NO: 2046275 - RNA, 19 nt, Artificial Sequence
  Description of Artificial Sequence: Synthetic oligonucleotide
  Antisense strand to SEQ ID NO: 2046274
ucggucgucgacaacuugg

SEQ ID NO: 2046276 - RNA, 19 nt, Artificial Sequence
  Description of Artificial Sequence: Synthetic oligonucleotide
  Sense strand starting at position 3158 of SEQ ID NO: 1881461
gcggaccuucuaggauauu

SEQ ID NO: 2046277 - RNA, 19 nt, Artificial Sequence
  Description of Artificial Sequence: Synthetic oligonucleotide
  Antisense strand to SEQ ID NO: 2046276
aauauccuagaagguccgc

SEQ ID NO: 2046278 - RNA, 19 nt, Artificial Sequence
  Description of Artificial Sequence: Synthetic oligonucleotide
  Sense strand starting at position 3164 of SEQ ID NO: 1881461
cuucuaggauauugugcaa

SEQ ID NO: 2046279 - RNA, 19 nt, Artificial Sequence
  Description of Artificial Sequence: Synthetic oligonucleotide
  Antisense strand to SEQ ID NO: 2046278
uugcacaauauccuagaag

SEQ ID NO: 2046280 - RNA, 19 nt, Artificial Sequence
  Description of Artificial Sequence: Synthetic oligonucleotide
  Sense strand starting at position 3360 of SEQ ID NO: 1881461
ggguguagcugcugugaca

SEQ ID NO: 2046281 - RNA, 19 nt, Artificial Sequence
  Description of Artificial Sequence: Synthetic oligonucleotide
  Antisense strand to SEQ ID NO: 2046280
ugucacagcagcuacaccc

SEQ ID NO: 2046282 - RNA, 19 nt, Artificial Sequence
  Description of Artificial Sequence: Synthetic oligonucleotide
  Sense strand starting at position 3941 of SEQ ID NO: 1881461
gcuguuggauuccuauuau

SEQ ID NO: 2046283 - RNA, 19 nt, Artificial Sequence
  Description of Artificial Sequence: Synthetic oligonucleotide
  Antisense strand to SEQ ID NO: 2046282
auaauaggaauccaacagc

SEQ ID NO: 2046284 - RNA, 19 nt, Artificial Sequence
  Description of Artificial Sequence: Synthetic oligonucleotide
  Sense strand starting at position 3973 of SEQ ID NO: 1881461
ccgccuacgggaugauaaa

SEQ ID NO: 2046285 - RNA, 19 nt, Artificial Sequence
  Description of Artificial Sequence: Synthetic oligonucleotide
  Antisense strand to SEQ ID NO: 2046284
uuuaucaucccguaggcgg

SEQ ID NO: 2046286 - RNA, 19 nt, Artificial Sequence
  Description of Artificial Sequence: Synthetic oligonucleotide
  Sense strand starting at position 61 of SEQ ID NO: 1881462
gcucaugcuuuggugucaa

SEQ ID NO: 2046287 - RNA, 19 nt, Artificial Sequence
  Description of Artificial Sequence: Synthetic oligonucleotide
  Antisense strand to SEQ ID NO: 2046286
uugacaccaaagcaugagc

SEQ ID NO: 2046288 - RNA, 19 nt, Artificial Sequence
  Description of Artificial Sequence: Synthetic oligonucleotide
  Sense strand starting at position 99 of SEQ ID NO: 1881462
ccaugagguccuggagaca

SEQ ID NO: 2046289 - RNA, 19 nt, Artificial Sequence
  Description of Artificial Sequence: Synthetic oligonucleotide
  Antisense strand to SEQ ID NO: 2046288
ugucuccaggaccucaugg

SEQ ID NO: 2046290 - RNA, 19 nt, Artificial Sequence
  Description of Artificial Sequence: Synthetic oligonucleotide
  Sense strand starting at position 131 of SEQ ID NO: 1881462
cuucuaagagcuugaucau

SEQ ID NO: 2046291 - RNA, 19 nt, Artificial Sequence
  Description of Artificial Sequence: Synthetic oligonucleotide
  Antisense strand to SEQ ID NO: 2046290
augaucaagcucuuagaag

SEQ ID NO: 2046292 - RNA, 19 nt, Artificial Sequence
  Description of Artificial Sequence: Synthetic oligonucleotide
  Sense strand starting at position 132 of SEQ ID NO: 1881462
uucuaagagcuugaucauu

SEQ ID NO: 2046293 - RNA, 19 nt, Artificial Sequence
  Description of Artificial Sequence: Synthetic oligonucleotide
  Antisense strand to SEQ ID NO: 2046292
aaugaucaagcucuuagaa

SEQ ID NO: 2046294 - RNA, 19 nt, Artificial Sequence
  Description of Artificial Sequence: Synthetic oligonucleotide
  Sense strand starting at position 134 of SEQ ID NO: 1881462
cuaagagcuugaucauucu

SEQ ID NO: 2046295 - RNA, 19 nt, Artificial Sequence
  Description of Artificial Sequence: Synthetic oligonucleotide
  Antisense strand to SEQ ID NO: 2046294
agaaugaucaagcucuuag

SEQ ID NO: 2046296 - RNA, 19 nt, Artificial Sequence
  Description of Artificial Sequence: Synthetic oligonucleotide
  Sense strand starting at position 137 of SEQ ID NO: 1881462
agagcuugaucauucuagu

SEQ ID NO: 2046297 - RNA, 19 nt, Artificial Sequence
  Description of Artificial Sequence: Synthetic oligonucleotide
  Antisense strand to SEQ ID NO: 2046296
acuagaaugaucaagcucu

SEQ ID NO: 2046298 - RNA, 19 nt, Artificial Sequence
  Description of Artificial Sequence: Synthetic oligonucleotide
  Sense strand starting at position 140 of SEQ ID NO: 1881462
gcuugaucauucuagugcu

SEQ ID NO: 2046299 - RNA, 19 nt, Artificial Sequence
  Description of Artificial Sequence: Synthetic oligonucleotide
  Antisense strand to SEQ ID NO: 2046298
agcacuagaaugaucaagc

SEQ ID NO: 2046300 - RNA, 19 nt, Artificial Sequence
  Description of Artificial Sequence: Synthetic oligonucleotide
  Sense strand starting at position 150 of SEQ ID NO: 1881462
ucuagugcuugccuuuagu

SEQ ID NO: 2046301 - RNA, 19 nt, Artificial Sequence
  Description of Artificial Sequence: Synthetic oligonucleotide
  Antisense strand to SEQ ID NO: 2046300
acuaaaggcaagcacuaga

SEQ ID NO: 2046302 - RNA, 19 nt, Artificial Sequence
  Description of Artificial Sequence: Synthetic oligonucleotide
  Sense strand starting at position 339 of SEQ ID NO: 1881462
gggcgguggucagcucuaa

SEQ ID NO: 2046303 - RNA, 19 nt, Artificial Sequence
  Description of Artificial Sequence: Synthetic oligonucleotide
  Antisense strand to SEQ ID NO: 2046302
uuagagcugaccaccgccc

SEQ ID NO: 2046304 - RNA, 19 nt, Artificial Sequence
  Description of Artificial Sequence: Synthetic oligonucleotide
  Sense strand starting at position 343 of SEQ ID NO: 1881462
gguggucagcucuaagaau

SEQ ID NO: 2046305 - RNA, 19 nt, Artificial Sequence
  Description of Artificial Sequence: Synthetic oligonucleotide
  Antisense strand to SEQ ID NO: 2046304
auucuuagagcugaccacc

SEQ ID NO: 2046306 - RNA, 19 nt, Artificial Sequence
  Description of Artificial Sequence: Synthetic oligonucleotide
  Sense strand starting at position 509 of SEQ ID NO: 1881462
uggugagucagauggagaa

SEQ ID NO: 2046307 - RNA, 19 nt, Artificial Sequence
  Description of Artificial Sequence: Synthetic oligonucleotide
  Antisense strand to SEQ ID NO: 2046306
uucuccaucugacucacca

SEQ ID NO: 2046308 - RNA, 19 nt, Artificial Sequence
  Description of Artificial Sequence: Synthetic oligonucleotide
  Sense strand starting at position 1486 of SEQ ID NO: 1881462
cgaagagcucuugguggau

SEQ ID NO: 2046309 - RNA, 19 nt, Artificial Sequence
  Description of Artificial Sequence: Synthetic oligonucleotide
  Antisense strand to SEQ ID NO: 2046308
auccaccaagagcucuucg

SEQ ID NO: 2046310 - RNA, 19 nt, Artificial Sequence
  Description of Artificial Sequence: Synthetic oligonucleotide
  Sense strand starting at position 1490 of SEQ ID NO: 1881462
gagcucuugguggauggaa

SEQ ID NO: 2046311 - RNA, 19 nt, Artificial Sequence
  Description of Artificial Sequence: Synthetic oligonucleotide
  Antisense strand to SEQ ID NO: 2046310
uuccauccaccaagagcuc

SEQ ID NO: 2046312 - RNA, 19 nt, Artificial Sequence
  Description of Artificial Sequence: Synthetic oligonucleotide
  Sense strand starting at position 1507 of SEQ ID NO: 1881462
aaggacagcuuccaguauu

SEQ ID NO: 2046313 - RNA, 19 nt, Artificial Sequence
  Description of Artificial Sequence: Synthetic oligonucleotide
  Antisense strand to SEQ ID NO: 2046312
aauacuggaagcuguccuu

SEQ ID NO: 2046314 - RNA, 19 nt, Artificial Sequence
  Description of Artificial Sequence: Synthetic oligonucleotide
  Sense strand starting at position 1594 of SEQ ID NO: 1881462
gacaguugcugugguugau

SEQ ID NO: 2046315 - RNA, 19 nt, Artificial Sequence
  Description of Artificial Sequence: Synthetic oligonucleotide
  Antisense strand to SEQ ID NO: 2046314
aucaaccacagcaacuguc

SEQ ID NO: 2046316 - RNA, 19 nt, Artificial Sequence
  Description of Artificial Sequence: Synthetic oligonucleotide
  Sense strand starting at position 1805 of SEQ ID NO: 1881462
cugugaguucccggaggca

SEQ ID NO: 2046317 - RNA, 19 nt, Artificial Sequence
  Description of Artificial Sequence: Synthetic oligonucleotide
  Antisense strand to SEQ ID NO: 2046316
ugccuccgggaacucacag

SEQ ID NO: 2046318 - RNA, 19 nt, Artificial Sequence
  Description of Artificial Sequence: Synthetic oligonucleotide
  Sense strand starting at position 2161 of SEQ ID NO: 1881462
ggacaucucgcuggacuca

SEQ ID NO: 2046319 - RNA, 19 nt, Artificial Sequence
  Description of Artificial Sequence: Synthetic oligonucleotide
  Antisense strand to SEQ ID NO: 2046318
ugaguccagcgagaugucc

SEQ ID NO: 2046320 - RNA, 19 nt, Artificial Sequence
  Description of Artificial Sequence: Synthetic oligonucleotide
  Sense strand starting at position 2207 of SEQ ID NO: 1881462
gaugcucuuugugcugaga

SEQ ID NO: 2046321 - RNA, 19 nt, Artificial Sequence
  Description of Artificial Sequence: Synthetic oligonucleotide
  Antisense strand to SEQ ID NO: 2046320
ucucagcacaaagagcauc

SEQ ID NO: 2046322 - RNA, 19 nt, Artificial Sequence
  Description of Artificial Sequence: Synthetic oligonucleotide
  Sense strand starting at position 2209 of SEQ ID NO: 1881462
ugcucuuugugcugagaac

SEQ ID NO: 2046323 - RNA, 19 nt, Artificial Sequence
  Description of Artificial Sequence: Synthetic oligonucleotide
  Antisense strand to SEQ ID NO: 2046322
guucucagcacaaagagca

SEQ ID NO: 2046324 - RNA, 19 nt, Artificial Sequence
  Description of Artificial Sequence: Synthetic oligonucleotide
  Sense strand starting at position 2210 of SEQ ID NO: 1881462
gcucuuugugcugagaacu

SEQ ID NO: 2046325 - RNA, 19 nt, Artificial Sequence
  Description of Artificial Sequence: Synthetic oligonucleotide
  Antisense strand to SEQ ID NO: 2046324
aguucucagcacaaagagc

SEQ ID NO: 2046326 - RNA, 19 nt, Artificial Sequence
  Description of Artificial Sequence: Synthetic oligonucleotide
  Sense strand starting at position 2220 of SEQ ID NO: 1881462
cugagaacucgcuggucag

SEQ ID NO: 2046327 - RNA, 19 nt, Artificial Sequence
  Description of Artificial Sequence: Synthetic oligonucleotide
  Antisense strand to SEQ ID NO: 2046326
cugaccagcgaguucucag

SEQ ID NO: 2046328 - RNA, 19 nt, Artificial Sequence
  Description of Artificial Sequence: Synthetic oligonucleotide
  Sense strand starting at position 2302 of SEQ ID NO: 1881462
uggugaucgugucuuguuu

SEQ ID NO: 2046329 - RNA, 19 nt, Artificial Sequence
  Description of Artificial Sequence: Synthetic oligonucleotide
  Antisense strand to SEQ ID NO: 2046328
aaacaagacacgaucacca

SEQ ID NO: 2046330 - RNA, 19 nt, Artificial Sequence
  Description of Artificial Sequence: Synthetic oligonucleotide
  Sense strand starting at position 2331 of SEQ ID NO: 1881462
ggauucgugucucugguga

SEQ ID NO: 2046331 - RNA, 19 nt, Artificial Sequence
  Description of Artificial Sequence: Synthetic oligonucleotide
  Antisense strand to SEQ ID NO: 2046330
ucaccagagacacgaaucc

SEQ ID NO: 2046332 - RNA, 19 nt, Artificial Sequence
  Description of Artificial Sequence: Synthetic oligonucleotide
  Sense strand starting at position 2333 of SEQ ID NO: 1881462
auucgugucucuggugaca

SEQ ID NO: 2046333 - RNA, 19 nt, Artificial Sequence
  Description of Artificial Sequence: Synthetic oligonucleotide
  Antisense strand to SEQ ID NO: 2046332
ugucaccagagacacgaau

SEQ ID NO: 2046334 - RNA, 19 nt, Artificial Sequence
  Description of Artificial Sequence: Synthetic oligonucleotide
  Sense strand starting at position 2336 of SEQ ID NO: 1881462
cgugucucuggugacauuu

SEQ ID NO: 2046335 - RNA, 19 nt, Artificial Sequence
  Description of Artificial Sequence: Synthetic oligonucleotide
  Antisense strand to SEQ ID NO: 2046334
aaaugucaccagagacacg

SEQ ID NO: 2046336 - RNA, 19 nt, Artificial Sequence
  Description of Artificial Sequence: Synthetic oligonucleotide
  Sense strand starting at position 2422 of SEQ ID NO: 1881462
ccaaacucagcuugaggaa

SEQ ID NO: 2046337 - RNA, 19 nt, Artificial Sequence
  Description of Artificial Sequence: Synthetic oligonucleotide
  Antisense strand to SEQ ID NO: 2046336
uuccucaagcugaguuugg

SEQ ID NO: 2046338 - RNA, 19 nt, Artificial Sequence
  Description of Artificial Sequence: Synthetic oligonucleotide
  Sense strand starting at position 2437 of SEQ ID NO: 1881462
ggaaguccucgggagcaaa

SEQ ID NO: 2046339 - RNA, 19 nt, Artificial Sequence
  Description of Artificial Sequence: Synthetic oligonucleotide
  Antisense strand to SEQ ID NO: 2046338
uuugcucccgaggacuucc

SEQ ID NO: 2046340 - RNA, 19 nt, Artificial Sequence
  Description of Artificial Sequence: Synthetic oligonucleotide
  Sense strand starting at position 2595 of SEQ ID NO: 1881462
gcaguugaguccuaaacac

SEQ ID NO: 2046341 - RNA, 19 nt, Artificial Sequence
  Description of Artificial Sequence: Synthetic oligonucleotide
  Antisense strand to SEQ ID NO: 2046340
guguuuaggacucaacugc

SEQ ID NO: 2046342 - RNA, 19 nt, Artificial Sequence
  Description of Artificial Sequence: Synthetic oligonucleotide
  Sense strand starting at position 2642 of SEQ ID NO: 1881462
gcaucuggcucaguccuua

SEQ ID NO: 2046343 - RNA, 19 nt, Artificial Sequence
  Description of Artificial Sequence: Synthetic oligonucleotide
  Antisense strand to SEQ ID NO: 2046342
uaaggacugagccagaugc

SEQ ID NO: 2046344 - RNA, 19 nt, Artificial Sequence
  Description of Artificial Sequence: Synthetic oligonucleotide
  Sense strand starting at position 2646 of SEQ ID NO: 1881462
cuggcucaguccuuacaga

SEQ ID NO: 2046345 - RNA, 19 nt, Artificial Sequence
  Description of Artificial Sequence: Synthetic oligonucleotide
  Antisense strand to SEQ ID NO: 2046344
ucuguaaggacugagccag

SEQ ID NO: 2046346 - RNA, 19 nt, Artificial Sequence
  Description of Artificial Sequence: Synthetic oligonucleotide
  Sense strand starting at position 2809 of SEQ ID NO: 1881462
agaggcagaguuuguagau

SEQ ID NO: 2046347 - RNA, 19 nt, Artificial Sequence
  Description of Artificial Sequence: Synthetic oligonucleotide
  Antisense strand to SEQ ID NO: 2046346
aucuacaaacucugccucu

SEQ ID NO: 2046348 - RNA, 19 nt, Artificial Sequence
  Description of Artificial Sequence: Synthetic oligonucleotide
  Sense strand starting at position 3145 of SEQ ID NO: 1881462
ggaugaagcucacaucucu

SEQ ID NO: 2046349 - RNA, 19 nt, Artificial Sequence
  Description of Artificial Sequence: Synthetic oligonucleotide
  Antisense strand to SEQ ID NO: 2046348
agagaugugagcuucaucc

SEQ ID NO: 2046350 - RNA, 19 nt, Artificial Sequence
  Description of Artificial Sequence: Synthetic oligonucleotide
  Sense strand starting at position 3151 of SEQ ID NO: 1881462
agcucacaucucuaggaua

SEQ ID NO: 2046351 - RNA, 19 nt, Artificial Sequence
  Description of Artificial Sequence: Synthetic oligonucleotide
  Antisense strand to SEQ ID NO: 2046350
uauccuagagaugugagcu

SEQ ID NO: 2046352 - RNA, 19 nt, Artificial Sequence
  Description of Artificial Sequence: Synthetic oligonucleotide
  Sense strand starting at position 3277 of SEQ ID NO: 1881462
uuugaagauucugcugacu

SEQ ID NO: 2046353 - RNA, 19 nt, Artificial Sequence
  Description of Artificial Sequence: Synthetic oligonucleotide
  Antisense strand to SEQ ID NO: 2046352
agucagcagaaucuucaaa

SEQ ID NO: 2046354 - RNA, 19 nt, Artificial Sequence
  Description of Artificial Sequence: Synthetic oligonucleotide
  Sense strand starting at position 3279 of SEQ ID NO: 1881462
ugaagauucugcugacuua

SEQ ID NO: 2046355 - RNA, 19 nt, Artificial Sequence
  Description of Artificial Sequence: Synthetic oligonucleotide
  Antisense strand to SEQ ID NO: 2046354
uaagucagcagaaucuuca

SEQ ID NO: 2046356 - RNA, 19 nt, Artificial Sequence
  Description of Artificial Sequence: Synthetic oligonucleotide
  Sense strand starting at position 3288 of SEQ ID NO: 1881462
ugcugacuuaccuggaaug

SEQ ID NO: 2046357 - RNA, 19 nt, Artificial Sequence
  Description of Artificial Sequence: Synthetic oligonucleotide
  Antisense strand to SEQ ID NO: 2046356
cauuccagguaagucagca

SEQ ID NO: 2046358 - RNA, 19 nt, Artificial Sequence
  Description of Artificial Sequence: Synthetic oligonucleotide
  Sense strand starting at position 3289 of SEQ ID NO: 1881462
gcugacuuaccuggaaugu

SEQ ID NO: 2046359 - RNA, 19 nt, Artificial Sequence
  Description of Artificial Sequence: Synthetic oligonucleotide
  Antisense strand to SEQ ID NO: 2046358
acauuccagguaagucagc

SEQ ID NO: 2046360 - RNA, 19 nt, Artificial Sequence
  Description of Artificial Sequence: Synthetic oligonucleotide
  Sense strand starting at position 3356 of SEQ ID NO: 1881462
auagcuaucguuugacuca

SEQ ID NO: 2046361 - RNA, 19 nt, Artificial Sequence
  Description of Artificial Sequence: Synthetic oligonucleotide
  Antisense strand to SEQ ID NO: 2046360
ugagucaaacgauagcuau

SEQ ID NO: 2046362 - RNA, 19 nt, Artificial Sequence
  Description of Artificial Sequence: Synthetic oligonucleotide
  Sense strand starting at position 3475 of SEQ ID NO: 1881462
gugggaggucuuugcuucu

SEQ ID NO: 2046363 - RNA, 19 nt, Artificial Sequence
  Description of Artificial Sequence: Synthetic oligonucleotide
  Antisense strand to SEQ ID NO: 2046362
agaagcaaagaccucccac

SEQ ID NO: 2046364 - RNA, 19 nt, Artificial Sequence
  Description of Artificial Sequence: Synthetic oligonucleotide
  Sense strand starting at position 3958 of SEQ ID NO: 1881462
acucuugauucccgacaca

SEQ ID NO: 2046365 - RNA, 19 nt, Artificial Sequence
  Description of Artificial Sequence: Synthetic oligonucleotide
  Antisense strand to SEQ ID NO: 2046364
ugugucgggaaucaagagu

SEQ ID NO: 2046366 - RNA, 19 nt, Artificial Sequence
  Description of Artificial Sequence: Synthetic oligonucleotide
  Sense strand starting at position 131 of SEQ ID NO: 1881463
cugacugguuuagucugaa

SEQ ID NO: 2046367 - RNA, 19 nt, Artificial Sequence
  Description of Artificial Sequence: Synthetic oligonucleotide
  Antisense strand to SEQ ID NO: 2046366
uucagacuaaaccagucag

SEQ ID NO: 2046368 - RNA, 19 nt, Artificial Sequence
  Description of Artificial Sequence: Synthetic oligonucleotide
  Sense strand starting at position 134 of SEQ ID NO: 1881463
acugguuuagucugaaauu

SEQ ID NO: 2046369 - RNA, 19 nt, Artificial Sequence
  Description of Artificial Sequence: Synthetic oligonucleotide
  Antisense strand to SEQ ID NO: 2046368
aauuucagacuaaaccagu

SEQ ID NO: 2046370 - RNA, 19 nt, Artificial Sequence
  Description of Artificial Sequence: Synthetic oligonucleotide
  Sense strand starting at position 135 of SEQ ID NO: 1881463
cugguuuagucugaaauuu

SEQ ID NO: 2046371 - RNA, 19 nt, Artificial Sequence
  Description of Artificial Sequence: Synthetic oligonucleotide
  Antisense strand to SEQ ID NO: 2046370
aaauuucagacuaaaccag

SEQ ID NO: 2046372 - RNA, 19 nt, Artificial Sequence
  Description of Artificial Sequence: Synthetic oligonucleotide
  Sense strand starting at position 153 of SEQ ID NO: 1881463
ucaguauuccaggguagua

SEQ ID NO: 2046373 - RNA, 19 nt, Artificial Sequence
  Description of Artificial Sequence: Synthetic oligonucleotide
  Antisense strand to SEQ ID NO: 2046372
uacuacccuggaauacuga

SEQ ID NO: 2046374 - RNA, 19 nt, Artificial Sequence
  Description of Artificial Sequence: Synthetic oligonucleotide
  Sense strand starting at position 246 of SEQ ID NO: 1881463
uuuguucuuuacccacaga

SEQ ID NO: 2046375 - RNA, 19 nt, Artificial Sequence
  Description of Artificial Sequence: Synthetic oligonucleotide
  Antisense strand to SEQ ID NO: 2046374
ucuguggguaaagaacaaa

SEQ ID NO: 2046376 - RNA, 19 nt, Artificial Sequence
  Description of Artificial Sequence: Synthetic oligonucleotide
  Sense strand starting at position 249 of SEQ ID NO: 1881463
guucuuuacccacagauug

SEQ ID NO: 2046377 - RNA, 19 nt, Artificial Sequence
  Description of Artificial Sequence: Synthetic oligonucleotide
  Antisense strand to SEQ ID NO: 2046376
caaucuguggguaaagaac

SEQ ID NO: 2046378 - RNA, 19 nt, Artificial Sequence
  Description of Artificial Sequence: Synthetic oligonucleotide
  Sense strand starting at position 280 of SEQ ID NO: 1881463
agauaaagcgucuaagccu

SEQ ID NO: 2046379 - RNA, 19 nt, Artificial Sequence
  Description of Artificial Sequence: Synthetic oligonucleotide
  Antisense strand to SEQ ID NO: 2046378
aggcuuagacgcuuuaucu

SEQ ID NO: 2046380 - RNA, 19 nt, Artificial Sequence
  Description of Artificial Sequence: Synthetic oligonucleotide
  Sense strand starting at position 312 of SEQ ID NO: 1881463
ucuuuaagcuggcuccaua

SEQ ID NO: 2046381 - RNA, 19 nt, Artificial Sequence
  Description of Artificial Sequence: Synthetic oligonucleotide
  Antisense strand to SEQ ID NO: 2046380
uauggagccagcuuaaaga

SEQ ID NO: 2046382 - RNA, 19 nt, Artificial Sequence
  Description of Artificial Sequence: Synthetic oligonucleotide
  Sense strand starting at position 547 of SEQ ID NO: 1881463
guuagcagagacugauaca

SEQ ID NO: 2046383 - RNA, 19 nt, Artificial Sequence
  Description of Artificial Sequence: Synthetic oligonucleotide
  Antisense strand to SEQ ID NO: 2046382
uguaucagucucugcuaac

SEQ ID NO: 2046384 - RNA, 19 nt, Artificial Sequence
  Description of Artificial Sequence: Synthetic oligonucleotide
  Sense strand starting at position 618 of SEQ ID NO: 1881463
guuaaauuugccugacgcu

SEQ ID NO: 2046385 - RNA, 19 nt, Artificial Sequence
  Description of Artificial Sequence: Synthetic oligonucleotide
  Antisense strand to SEQ ID NO: 2046384
agcgucaggcaaauuuaac

SEQ ID NO: 2046386 - RNA, 19 nt, Artificial Sequence
  Description of Artificial Sequence: Synthetic oligonucleotide
  Sense strand starting at position 638 of SEQ ID NO: 1881463
agguuugaguuucuauuga

SEQ ID NO: 2046387 - RNA, 19 nt, Artificial Sequence
  Description of Artificial Sequence: Synthetic oligonucleotide
  Antisense strand to SEQ ID NO: 2046386
ucaauagaaacucaaaccu

SEQ ID NO: 2046388 - RNA, 19 nt, Artificial Sequence
  Description of Artificial Sequence: Synthetic oligonucleotide
  Sense strand starting at position 751 of SEQ ID NO: 1881463
guagacaaauuguuuacuu

SEQ ID NO: 2046389 - RNA, 19 nt, Artificial Sequence
  Description of Artificial Sequence: Synthetic oligonucleotide
  Antisense strand to SEQ ID NO: 2046388
aaguaaacaauuugucuac

SEQ ID NO: 2046390 - RNA, 19 nt, Artificial Sequence
  Description of Artificial Sequence: Synthetic oligonucleotide
  Sense strand starting at position 801 of SEQ ID NO: 1881463
gccucaacccuuuagagag

SEQ ID NO: 2046391 - RNA, 19 nt, Artificial Sequence
  Description of Artificial Sequence: Synthetic oligonucleotide
  Antisense strand to SEQ ID NO: 2046390
cucucuaaaggguugaggc

SEQ ID NO: 2046392 - RNA, 19 nt, Artificial Sequence
  Description of Artificial Sequence: Synthetic oligonucleotide
  Sense strand starting at position 834 of SEQ ID NO: 1881463
ccaugagacuugcuuaaag

SEQ ID NO: 2046393 - RNA, 19 nt, Artificial Sequence
  Description of Artificial Sequence: Synthetic oligonucleotide
  Antisense strand to SEQ ID NO: 2046392
cuuuaagcaagucucaugg

SEQ ID NO: 2046394 - RNA, 19 nt, Artificial Sequence
  Description of Artificial Sequence: Synthetic oligonucleotide
  Sense strand starting at position 882 of SEQ ID NO: 1881463
guguuaaagugauuaaaca

SEQ ID NO: 2046395 - RNA, 19 nt, Artificial Sequence
  Description of Artificial Sequence: Synthetic oligonucleotide
  Antisense strand to SEQ ID NO: 2046394
uguuuaaucacuuuaacac

SEQ ID NO: 2046396 - RNA, 19 nt, Artificial Sequence
  Description of Artificial Sequence: Synthetic oligonucleotide
  Sense strand starting at position 890 of SEQ ID NO: 1881463
gugauuaaacaauguagac

SEQ ID NO: 2046397 - RNA, 19 nt, Artificial Sequence
  Description of Artificial Sequence: Synthetic oligonucleotide
  Antisense strand to SEQ ID NO: 2046396
gucuacauuguuuaaucac

SEQ ID NO: 2046398 - RNA, 19 nt, Artificial Sequence
  Description of Artificial Sequence: Synthetic oligonucleotide
  Sense strand starting at position 902 of SEQ ID NO: 1881463
uguagacgugaaugaaaua

SEQ ID NO: 2046399 - RNA, 19 nt, Artificial Sequence
  Description of Artificial Sequence: Synthetic oligonucleotide
  Antisense strand to SEQ ID NO: 2046398
uauuucauucacgucuaca

SEQ ID NO: 2046400 - RNA, 19 nt, Artificial Sequence
  Description of Artificial Sequence: Synthetic oligonucleotide
  Sense strand starting at position 951 of SEQ ID NO: 1881463
cuccauagagcugaucagu

SEQ ID NO: 2046401 - RNA, 19 nt, Artificial Sequence
  Description of Artificial Sequence: Synthetic oligonucleotide
  Antisense strand to SEQ ID NO: 2046400
acugaucagcucuauggag

SEQ ID NO: 2046402 - RNA, 19 nt, Artificial Sequence
  Description of Artificial Sequence: Synthetic oligonucleotide
  Sense strand starting at position 954 of SEQ ID NO: 1881463
cauagagcugaucaguauu

SEQ ID NO: 2046403 - RNA, 19 nt, Artificial Sequence
  Description of Artificial Sequence: Synthetic oligonucleotide
  Antisense strand to SEQ ID NO: 2046402
aauacugaucagcucuaug

SEQ ID NO: 2046404 - RNA, 19 nt, Artificial Sequence
  Description of Artificial Sequence: Synthetic oligonucleotide
  Sense strand starting at position 1190 of SEQ ID NO: 1881463
guggcuucgagugaacgaa

SEQ ID NO: 2046405 - RNA, 19 nt, Artificial Sequence
  Description of Artificial Sequence: Synthetic oligonucleotide
  Antisense strand to SEQ ID NO: 2046404
uucguucacucgaagccac

SEQ ID NO: 2046406 - RNA, 19 nt, Artificial Sequence
  Description of Artificial Sequence: Synthetic oligonucleotide
  Sense strand starting at position 1202 of SEQ ID NO: 1881463
gaacgaacguaauuaguaa

SEQ ID NO: 2046407 - RNA, 19 nt, Artificial Sequence
  Description of Artificial Sequence: Synthetic oligonucleotide
  Antisense strand to SEQ ID NO: 2046406
uuacuaauuacguucguuc

SEQ ID NO: 2046408 - RNA, 19 nt, Artificial Sequence
  Description of Artificial Sequence: Synthetic oligonucleotide
  Sense strand starting at position 1209 of SEQ ID NO: 1881463
cguaauuaguaauuaagca

SEQ ID NO: 2046409 - RNA, 19 nt, Artificial Sequence
  Description of Artificial Sequence: Synthetic oligonucleotide
  Antisense strand to SEQ ID NO: 2046408
ugcuuaauuacuaauuacg

SEQ ID NO: 2046410 - RNA, 19 nt, Artificial Sequence
  Description of Artificial Sequence: Synthetic oligonucleotide
  Sense strand starting at position 1264 of SEQ ID NO: 1881463
gcacuuuaguguuuaggaa

SEQ ID NO: 2046411 - RNA, 19 nt, Artificial Sequence
  Description of Artificial Sequence: Synthetic oligonucleotide
  Antisense strand to SEQ ID NO: 2046410
uuccuaaacacuaaagugc

SEQ ID NO: 2046412 - RNA, 19 nt, Artificial Sequence
  Description of Artificial Sequence: Synthetic oligonucleotide
  Sense strand starting at position 1265 of SEQ ID NO: 1881463
cacuuuaguguuuaggaag

SEQ ID NO: 2046413 - RNA, 19 nt, Artificial Sequence
  Description of Artificial Sequence: Synthetic oligonucleotide
  Antisense strand to SEQ ID NO: 2046412
cuuccuaaacacuaaagug

SEQ ID NO: 2046414 - RNA, 19 nt, Artificial Sequence
  Description of Artificial Sequence: Synthetic oligonucleotide
  Sense strand starting at position 1709 of SEQ ID NO: 1881463
cccaaagccucccuggauu

SEQ ID NO: 2046415 - RNA, 19 nt, Artificial Sequence
  Description of Artificial Sequence: Synthetic oligonucleotide
  Antisense strand to SEQ ID NO: 2046414
aauccagggaggcuuuggg

SEQ ID NO: 2046416 - RNA, 19 nt, Artificial Sequence
  Description of Artificial Sequence: Synthetic oligonucleotide
  Sense strand starting at position 2656 of SEQ ID NO: 1881463
ccugucacccuguggagaa

SEQ ID NO: 2046417 - RNA, 19 nt, Artificial Sequence
  Description of Artificial Sequence: Synthetic oligonucleotide
  Antisense strand to SEQ ID NO: 2046416
uucuccacagggugacagg

SEQ ID NO: 2046418 - RNA, 19 nt, Artificial Sequence
  Description of Artificial Sequence: Synthetic oligonucleotide
  Sense strand starting at position 3044 of SEQ ID NO: 1881463
acuuuagcccuuuaaagga

SEQ ID NO: 2046419 - RNA, 19 nt, Artificial Sequence
  Description of Artificial Sequence: Synthetic oligonucleotide
  Antisense strand to SEQ ID NO: 2046418
uccuuuaaagggcuaaagu

SEQ ID NO: 2046420 - RNA, 19 nt, Artificial Sequence
  Description of Artificial Sequence: Synthetic oligonucleotide
  Sense strand starting at position 3051 of SEQ ID NO: 1881463
cccuuuaaaggauguuaca

SEQ ID NO: 2046421 - RNA, 19 nt, Artificial Sequence
  Description of Artificial Sequence: Synthetic oligonucleotide
  Antisense strand to SEQ ID NO: 2046420
uguaacauccuuuaaaggg

SEQ ID NO: 2046422 - RNA, 19 nt, Artificial Sequence
  Description of Artificial Sequence: Synthetic oligonucleotide
  Sense strand starting at position 3108 of SEQ ID NO: 1881463
uucuuuggagggugucaaa

SEQ ID NO: 2046423 - RNA, 19 nt, Artificial Sequence
  Description of Artificial Sequence: Synthetic oligonucleotide
  Antisense strand to SEQ ID NO: 2046422
uuugacacccuccaaagaa

SEQ ID NO: 2046424 - RNA, 19 nt, Artificial Sequence
  Description of Artificial Sequence: Synthetic oligonucleotide
  Sense strand starting at position 3119 of SEQ ID NO: 1881463
gugucaaacgccuuguuua

SEQ ID NO: 2046425 - RNA, 19 nt, Artificial Sequence
  Description of Artificial Sequence: Synthetic oligonucleotide
  Antisense strand to SEQ ID NO: 2046424
uaaacaaggcguuugacac

SEQ ID NO: 2046426 - RNA, 19 nt, Artificial Sequence
  Description of Artificial Sequence: Synthetic oligonucleotide
  Sense strand starting at position 3126 of SEQ ID NO: 1881463
acgccuuguuuauuaaaga

SEQ ID NO: 2046427 - RNA, 19 nt, Artificial Sequence
  Description of Artificial Sequence: Synthetic oligonucleotide
  Antisense strand to SEQ ID NO: 2046426
ucuuuaauaaacaaggcgu

SEQ ID NO: 2046428 - RNA, 19 nt, Artificial Sequence
  Description of Artificial Sequence: Synthetic oligonucleotide
  Sense strand starting at position 3205 of SEQ ID NO: 1881463
aaaucacguuaaguuagaa

SEQ ID NO: 2046429 - RNA, 19 nt, Artificial Sequence
  Description of Artificial Sequence: Synthetic oligonucleotide
  Antisense strand to SEQ ID NO: 2046428
uucuaacuuaacgugauuu

SEQ ID NO: 2046430 - RNA, 19 nt, Artificial Sequence
  Description of Artificial Sequence: Synthetic oligonucleotide
  Sense strand starting at position 3298 of SEQ ID NO: 1881463
cagggauuacguugaggua

SEQ ID NO: 2046431 - RNA, 19 nt, Artificial Sequence
  Description of Artificial Sequence: Synthetic oligonucleotide
  Antisense strand to SEQ ID NO: 2046430
uaccucaacguaaucccug

SEQ ID NO: 2046432 - RNA, 19 nt, Artificial Sequence
  Description of Artificial Sequence: Synthetic oligonucleotide
  Sense strand starting at position 3307 of SEQ ID NO: 1881463
cguugagguacccagaaau

SEQ ID NO: 2046433 - RNA, 19 nt, Artificial Sequence
  Description of Artificial Sequence: Synthetic oligonucleotide
  Antisense strand to SEQ ID NO: 2046432
auuucuggguaccucaacg

SEQ ID NO: 2046434 - RNA, 19 nt, Artificial Sequence
  Description of Artificial Sequence: Synthetic oligonucleotide
  Sense strand starting at position 3375 of SEQ ID NO: 1881463
cccaguuuccucugggauu

SEQ ID NO: 2046435 - RNA, 19 nt, Artificial Sequence
  Description of Artificial Sequence: Synthetic oligonucleotide
  Antisense strand to SEQ ID NO: 2046434
aaucccagaggaaacuggg

SEQ ID NO: 2046436 - RNA, 19 nt, Artificial Sequence
  Description of Artificial Sequence: Synthetic oligonucleotide
  Sense strand starting at position 3377 of SEQ ID NO: 1881463
caguuuccucugggauuau

SEQ ID NO: 2046437 - RNA, 19 nt, Artificial Sequence
  Description of Artificial Sequence: Synthetic oligonucleotide
  Antisense strand to SEQ ID NO: 2046436
auaaucccagaggaaacug

SEQ ID NO: 2046438 - RNA, 19 nt, Artificial Sequence
  Description of Artificial Sequence: Synthetic oligonucleotide
  Sense strand starting at position 3388 of SEQ ID NO: 1881463
gggauuauuuguuaguaau

SEQ ID NO: 2046439 - RNA, 19 nt, Artificial Sequence
  Description of Artificial Sequence: Synthetic oligonucleotide
  Antisense strand to SEQ ID NO: 2046438
auuacuaacaaauaauccc

SEQ ID NO: 2046440 - RNA, 19 nt, Artificial Sequence
  Description of Artificial Sequence: Synthetic oligonucleotide
  Sense strand starting at position 3522 of SEQ ID NO: 1881463
auggaagaguguuuaccaa

SEQ ID NO: 2046441 - RNA, 19 nt, Artificial Sequence
  Description of Artificial Sequence: Synthetic oligonucleotide
  Antisense strand to SEQ ID NO: 2046440
uugguaaacacucuuccau

SEQ ID NO: 2046442 - RNA, 19 nt, Artificial Sequence
  Description of Artificial Sequence: Synthetic oligonucleotide
  Sense strand starting at position 3698 of SEQ ID NO: 1881463
guccuaaggcuuuauggua

SEQ ID NO: 2046443 - RNA, 19 nt, Artificial Sequence
  Description of Artificial Sequence: Synthetic oligonucleotide
  Antisense strand to SEQ ID NO: 2046442
uaccauaaagccuuaggac

SEQ ID NO: 2046444 - RNA, 19 nt, Artificial Sequence
  Description of Artificial Sequence: Synthetic oligonucleotide
  Sense strand starting at position 3859 of SEQ ID NO: 1881463
gugagcugacuggacuauu

SEQ ID NO: 2046445 - RNA, 19 nt, Artificial Sequence
  Description of Artificial Sequence: Synthetic oligonucleotide
  Antisense strand to SEQ ID NO: 2046444
aauaguccagucagcucac

SEQ ID NO: 2046446 - RNA, 19 nt, Artificial Sequence
  Description of Artificial Sequence: Synthetic oligonucleotide
  Sense strand starting at position 127 of SEQ ID NO: 1881464
augaauguggugcaaucaa

SEQ ID NO: 2046447 - RNA, 19 nt, Artificial Sequence
  Description of Artificial Sequence: Synthetic oligonucleotide
  Antisense strand to SEQ ID NO: 2046446
uugauugcaccacauucau

SEQ ID NO: 2046448 - RNA, 19 nt, Artificial Sequence
  Description of Artificial Sequence: Synthetic oligonucleotide
  Sense strand starting at position 185 of SEQ ID NO: 1881464
cuggauuaccucugagacg

SEQ ID NO: 2046449 - RNA, 19 nt, Artificial Sequence
  Description of Artificial Sequence: Synthetic oligonucleotide
  Antisense strand to SEQ ID NO: 2046448
cgucucagagguaauccag

SEQ ID NO: 2046450 - RNA, 19 nt, Artificial Sequence
  Description of Artificial Sequence: Synthetic oligonucleotide
  Sense strand starting at position 273 of SEQ ID NO: 1881464
uaaauuaguguguacaaug

SEQ ID NO: 2046451 - RNA, 19 nt, Artificial Sequence
  Description of Artificial Sequence: Synthetic oligonucleotide
  Antisense strand to SEQ ID NO: 2046450
cauuguacacacuaauuua

SEQ ID NO: 2046452 - RNA, 19 nt, Artificial Sequence
  Description of Artificial Sequence: Synthetic oligonucleotide
  Sense strand starting at position 309 of SEQ ID NO: 1881464
gccguccugagggaauauu

SEQ ID NO: 2046453 - RNA, 19 nt, Artificial Sequence
  Description of Artificial Sequence: Synthetic oligonucleotide
  Antisense strand to SEQ ID NO: 2046452
aauauucccucaggacggc

SEQ ID NO: 2046454 - RNA, 19 nt, Artificial Sequence
  Description of Artificial Sequence: Synthetic oligonucleotide
  Sense strand starting at position 329 of SEQ ID NO: 1881464
guggacuucuaagccaaau

SEQ ID NO: 2046455 - RNA, 19 nt, Artificial Sequence
  Description of Artificial Sequence: Synthetic oligonucleotide
  Antisense strand to SEQ ID NO: 2046454
auuuggcuuagaaguccac

SEQ ID NO: 2046456 - RNA, 19 nt, Artificial Sequence
  Description of Artificial Sequence: Synthetic oligonucleotide
  Sense strand starting at position 368 of SEQ ID NO: 1881464
ccucaaguuugguccagaa

SEQ ID NO: 2046457 - RNA, 19 nt, Artificial Sequence
  Description of Artificial Sequence: Synthetic oligonucleotide
  Antisense strand to SEQ ID NO: 2046456
uucuggaccaaacuugagg

SEQ ID NO: 2046458 - RNA, 19 nt, Artificial Sequence
  Description of Artificial Sequence: Synthetic oligonucleotide
  Sense strand starting at position 508 of SEQ ID NO: 1881464
ucagacuuucuagaauugu

SEQ ID NO: 2046459 - RNA, 19 nt, Artificial Sequence
  Description of Artificial Sequence: Synthetic oligonucleotide
  Antisense strand to SEQ ID NO: 2046458
acaauucuagaaagucuga

SEQ ID NO: 2046460 - RNA, 19 nt, Artificial Sequence
  Description of Artificial Sequence: Synthetic oligonucleotide
  Sense strand starting at position 558 of SEQ ID NO: 1881464
cacugugagugacuggaau

SEQ ID NO: 2046461 - RNA, 19 nt, Artificial Sequence
  Description of Artificial Sequence: Synthetic oligonucleotide
  Antisense strand to SEQ ID NO: 2046460
auuccagucacucacagug

SEQ ID NO: 2046462 - RNA, 19 nt, Artificial Sequence
  Description of Artificial Sequence: Synthetic oligonucleotide
  Sense strand starting at position 560 of SEQ ID NO: 1881464
cugugagugacuggaauca

SEQ ID NO: 2046463 - RNA, 19 nt, Artificial Sequence
  Description of Artificial Sequence: Synthetic oligonucleotide
  Antisense strand to SEQ ID NO: 2046462
ugauuccagucacucacag

SEQ ID NO: 2046464 - RNA, 19 nt, Artificial Sequence
  Description of Artificial Sequence: Synthetic oligonucleotide
  Sense strand starting at position 587 of SEQ ID NO: 1881464
ugcugauuggguuggaaua

SEQ ID NO: 2046465 - RNA, 19 nt, Artificial Sequence
  Description of Artificial Sequence: Synthetic oligonucleotide
  Antisense strand to SEQ ID NO: 2046464
uauuccaacccaaucagca

SEQ ID NO: 2046466 - RNA, 19 nt, Artificial Sequence
  Description of Artificial Sequence: Synthetic oligonucleotide
  Sense strand starting at position 588 of SEQ ID NO: 1881464
gcugauuggguuggaauau

SEQ ID NO: 2046467 - RNA, 19 nt, Artificial Sequence
  Description of Artificial Sequence: Synthetic oligonucleotide
  Antisense strand to SEQ ID NO: 2046466
auauuccaacccaaucagc

SEQ ID NO: 2046468 - RNA, 19 nt, Artificial Sequence
  Description of Artificial Sequence: Synthetic oligonucleotide
  Sense strand starting at position 594 of SEQ ID NO: 1881464
uggguuggaauaugcuaua

SEQ ID NO: 2046469 - RNA, 19 nt, Artificial Sequence
  Description of Artificial Sequence: Synthetic oligonucleotide
  Antisense strand to SEQ ID NO: 2046468
uauagcauauuccaaccca

SEQ ID NO: 2046470 - RNA, 19 nt, Artificial Sequence
  Description of Artificial Sequence: Synthetic oligonucleotide
  Sense strand starting at position 647 of SEQ ID NO: 1881464
gugguugugaccuaaaucu

SEQ ID NO: 2046471 - RNA, 19 nt, Artificial Sequence
  Description of Artificial Sequence: Synthetic oligonucleotide
  Antisense strand to SEQ ID NO: 2046470
agauuuaggucacaaccac

SEQ ID NO: 2046472 - RNA, 19 nt, Artificial Sequence
  Description of Artificial Sequence: Synthetic oligonucleotide
  Sense strand starting at position 658 of SEQ ID NO: 1881464
cuaaaucuagucugaaugu

SEQ ID NO: 2046473 - RNA, 19 nt, Artificial Sequence
  Description of Artificial Sequence: Synthetic oligonucleotide
  Antisense strand to SEQ ID NO: 2046472
acauucagacuagauuuag

SEQ ID NO: 2046474 - RNA, 19 nt, Artificial Sequence
  Description of Artificial Sequence: Synthetic oligonucleotide
  Sense strand starting at position 671 of SEQ ID NO: 1881464
gaauguaggcacugaguua

SEQ ID NO: 2046475 - RNA, 19 nt, Artificial Sequence
  Description of Artificial Sequence: Synthetic oligonucleotide
  Antisense strand to SEQ ID NO: 2046474
uaacucagugccuacauuc

SEQ ID NO: 2046476 - RNA, 19 nt, Artificial Sequence
  Description of Artificial Sequence: Synthetic oligonucleotide
  Sense strand starting at position 2210 of SEQ ID NO: 1881464
guuaauuucuggccauagu

SEQ ID NO: 2046477 - RNA, 19 nt, Artificial Sequence
  Description of Artificial Sequence: Synthetic oligonucleotide
  Antisense strand to SEQ ID NO: 2046476
acuauggccagaaauuaac

SEQ ID NO: 2046478 - RNA, 19 nt, Artificial Sequence
  Description of Artificial Sequence: Synthetic oligonucleotide
  Sense strand starting at position 2300 of SEQ ID NO: 1881464
ugacuacagucuguaauau

SEQ ID NO: 2046479 - RNA, 19 nt, Artificial Sequence
  Description of Artificial Sequence: Synthetic oligonucleotide
  Antisense strand to SEQ ID NO: 2046478
auauuacagacuguaguca

SEQ ID NO: 2046480 - RNA, 19 nt, Artificial Sequence
  Description of Artificial Sequence: Synthetic oligonucleotide
  Sense strand starting at position 2662 of SEQ ID NO: 1881464
guagucuuagcauauuaaa

SEQ ID NO: 2046481 - RNA, 19 nt, Artificial Sequence
  Description of Artificial Sequence: Synthetic oligonucleotide
  Antisense strand to SEQ ID NO: 2046480
uuuaauaugcuaagacuac

SEQ ID NO: 2046482 - RNA, 19 nt, Artificial Sequence
  Description of Artificial Sequence: Synthetic oligonucleotide
  Sense strand starting at position 2762 of SEQ ID NO: 1881464
augaaacagcagugcuuaa

SEQ ID NO: 2046483 - RNA, 19 nt, Artificial Sequence
  Description of Artificial Sequence: Synthetic oligonucleotide
  Antisense strand to SEQ ID NO: 2046482
uuaagcacugcuguuucau

SEQ ID NO: 2046484 - RNA, 19 nt, Artificial Sequence
  Description of Artificial Sequence: Synthetic oligonucleotide
  Sense strand starting at position 2782 of SEQ ID NO: 1881464
auuacugaguuguuacuau

SEQ ID NO: 2046485 - RNA, 19 nt, Artificial Sequence
  Description of Artificial Sequence: Synthetic oligonucleotide
  Antisense strand to SEQ ID NO: 2046484
auaguaacaacucaguaau

SEQ ID NO: 2046486 - RNA, 19 nt, Artificial Sequence
  Description of Artificial Sequence: Synthetic oligonucleotide
  Sense strand starting at position 2820 of SEQ ID NO: 1881464
ugacuuugucuguauuauc

SEQ ID NO: 2046487 - RNA, 19 nt, Artificial Sequence
  Description of Artificial Sequence: Synthetic oligonucleotide
  Antisense strand to SEQ ID NO: 2046486
gauaauacagacaaaguca

SEQ ID NO: 2046488 - RNA, 19 nt, Artificial Sequence
  Description of Artificial Sequence: Synthetic oligonucleotide
  Sense strand starting at position 2852 of SEQ ID NO: 1881464
cugucuauuccaugaagaa

SEQ ID NO: 2046489 - RNA, 19 nt, Artificial Sequence
  Description of Artificial Sequence: Synthetic oligonucleotide
  Antisense strand to SEQ ID NO: 2046488
uucuucauggaauagacag

SEQ ID NO: 2046490 - RNA, 19 nt, Artificial Sequence
  Description of Artificial Sequence: Synthetic oligonucleotide
  Sense strand starting at position 2917 of SEQ ID NO: 1881464
gguuaacaaccuuguccaa

SEQ ID NO: 2046491 - RNA, 19 nt, Artificial Sequence
  Description of Artificial Sequence: Synthetic oligonucleotide
  Antisense strand to SEQ ID NO: 2046490
uuggacaagguuguuaacc

SEQ ID NO: 2046492 - RNA, 19 nt, Artificial Sequence
  Description of Artificial Sequence: Synthetic oligonucleotide
  Sense strand starting at position 3056 of SEQ ID NO: 1881464
ugguguuauguguuugugu

SEQ ID NO: 2046493 - RNA, 19 nt, Artificial Sequence
  Description of Artificial Sequence: Synthetic oligonucleotide
  Antisense strand to SEQ ID NO: 2046492
acacaaacacauaacacca

SEQ ID NO: 2046494 - RNA, 19 nt, Artificial Sequence
  Description of Artificial Sequence: Synthetic oligonucleotide
  Sense strand starting at position 3190 of SEQ ID NO: 1881464
cauuuauauuuguagggua

SEQ ID NO: 2046495 - RNA, 19 nt, Artificial Sequence
  Description of Artificial Sequence: Synthetic oligonucleotide
  Antisense strand to SEQ ID NO: 2046494
uacccuacaaauauaaaug

SEQ ID NO: 2046496 - RNA, 19 nt, Artificial Sequence
  Description of Artificial Sequence: Synthetic oligonucleotide
  Sense strand starting at position 3219 of SEQ ID NO: 1881464
cucacuugagccuauguaa

SEQ ID NO: 2046497 - RNA, 19 nt, Artificial Sequence
  Description of Artificial Sequence: Synthetic oligonucleotide
  Antisense strand to SEQ ID NO: 2046496
uuacauaggcucaagugag

SEQ ID NO: 2046498 - RNA, 19 nt, Artificial Sequence
  Description of Artificial Sequence: Synthetic oligonucleotide
  Sense strand starting at position 3248 of SEQ ID NO: 1881464
ugaaucauggucuggcaaa

SEQ ID NO: 2046499 - RNA, 19 nt, Artificial Sequence
  Description of Artificial Sequence: Synthetic oligonucleotide
  Antisense strand to SEQ ID NO: 2046498
uuugccagaccaugauuca

SEQ ID NO: 2046500 - RNA, 19 nt, Artificial Sequence
  Description of Artificial Sequence: Synthetic oligonucleotide
  Sense strand starting at position 3260 of SEQ ID NO: 1881464
uggcaaauuuggcugucau

SEQ ID NO: 2046501 - RNA, 19 nt, Artificial Sequence
  Description of Artificial Sequence: Synthetic oligonucleotide
  Antisense strand to SEQ ID NO: 2046500
augacagccaaauuugcca

SEQ ID NO: 2046502 - RNA, 19 nt, Artificial Sequence
  Description of Artificial Sequence: Synthetic oligonucleotide
  Sense strand starting at position 3261 of SEQ ID NO: 1881464
ggcaaauuuggcugucauu

SEQ ID NO: 2046503 - RNA, 19 nt, Artificial Sequence
  Description of Artificial Sequence: Synthetic oligonucleotide
  Antisense strand to SEQ ID NO: 2046502
aaugacagccaaauuugcc

SEQ ID NO: 2046504 - RNA, 19 nt, Artificial Sequence
  Description of Artificial Sequence: Synthetic oligonucleotide
  Sense strand starting at position 3374 of SEQ ID NO: 1881464
ugauacuagugacugcuaa

SEQ ID NO: 2046505 - RNA, 19 nt, Artificial Sequence
  Description of Artificial Sequence: Synthetic oligonucleotide
  Antisense strand to SEQ ID NO: 2046504
uuagcagucacuaguauca

SEQ ID NO: 2046506 - RNA, 19 nt, Artificial Sequence
  Description of Artificial Sequence: Synthetic oligonucleotide
  Sense strand starting at position 3427 of SEQ ID NO: 1881464
ucagaugaaguuugaauac

SEQ ID NO: 2046507 - RNA, 19 nt, Artificial Sequence
  Description of Artificial Sequence: Synthetic oligonucleotide
  Antisense strand to SEQ ID NO: 2046506
guauucaaacuucaucuga

SEQ ID NO: 2046508 - RNA, 19 nt, Artificial Sequence
  Description of Artificial Sequence: Synthetic oligonucleotide
  Sense strand starting at position 3517 of SEQ ID NO: 1881464
gucucugagagccagaguu

SEQ ID NO: 2046509 - RNA, 19 nt, Artificial Sequence
  Description of Artificial Sequence: Synthetic oligonucleotide
  Antisense strand to SEQ ID NO: 2046508
aacucuggcucucagagac

SEQ ID NO: 2046510 - RNA, 19 nt, Artificial Sequence
  Description of Artificial Sequence: Synthetic oligonucleotide
  Sense strand starting at position 3519 of SEQ ID NO: 1881464
cucugagagccagaguuua

SEQ ID NO: 2046511 - RNA, 19 nt, Artificial Sequence
  Description of Artificial Sequence: Synthetic oligonucleotide
  Antisense strand to SEQ ID NO: 2046510
uaaacucuggcucucagag

SEQ ID NO: 2046512 - RNA, 19 nt, Artificial Sequence
  Description of Artificial Sequence: Synthetic oligonucleotide
  Sense strand starting at position 3524 of SEQ ID NO: 1881464
agagccagaguuuauuaau

SEQ ID NO: 2046513 - RNA, 19 nt, Artificial Sequence
  Description of Artificial Sequence: Synthetic oligonucleotide
  Antisense strand to SEQ ID NO: 2046512
auuaauaaacucuggcucu

SEQ ID NO: 2046514 - RNA, 19 nt, Artificial Sequence
  Description of Artificial Sequence: Synthetic oligonucleotide
  Sense strand starting at position 3624 of SEQ ID NO: 1881464
gcuugaugguaucugacaa

SEQ ID NO: 2046515 - RNA, 19 nt, Artificial Sequence
  Description of Artificial Sequence: Synthetic oligonucleotide
  Antisense strand to SEQ ID NO: 2046514
uugucagauaccaucaagc

SEQ ID NO: 2046516 - RNA, 19 nt, Artificial Sequence
  Description of Artificial Sequence: Synthetic oligonucleotide
  Sense strand starting at position 3628 of SEQ ID NO: 1881464
gaugguaucugacaaauuu

SEQ ID NO: 2046517 - RNA, 19 nt, Artificial Sequence
  Description of Artificial Sequence: Synthetic oligonucleotide
  Antisense strand to SEQ ID NO: 2046516
aaauuugucagauaccauc

SEQ ID NO: 2046518 - RNA, 19 nt, Artificial Sequence
  Description of Artificial Sequence: Synthetic oligonucleotide
  Sense strand starting at position 3711 of SEQ ID NO: 1881464
ugcaaugagaaguagcaau

SEQ ID NO: 2046519 - RNA, 19 nt, Artificial Sequence
  Description of Artificial Sequence: Synthetic oligonucleotide
  Antisense strand to SEQ ID NO: 2046518
auugcuacuucucauugca

SEQ ID NO: 2046520 - RNA, 19 nt, Artificial Sequence
  Description of Artificial Sequence: Synthetic oligonucleotide
  Sense strand starting at position 3801 of SEQ ID NO: 1881464
uuaugucuaccauacggua

SEQ ID NO: 2046521 - RNA, 19 nt, Artificial Sequence
  Description of Artificial Sequence: Synthetic oligonucleotide
  Antisense strand to SEQ ID NO: 2046520
uaccguaugguagacauaa

SEQ ID NO: 2046522 - RNA, 19 nt, Artificial Sequence
  Description of Artificial Sequence: Synthetic oligonucleotide
  Sense strand starting at position 3831 of SEQ ID NO: 1881464
uugauaauuccauggauau

SEQ ID NO: 2046523 - RNA, 19 nt, Artificial Sequence
  Description of Artificial Sequence: Synthetic oligonucleotide
  Antisense strand to SEQ ID NO: 2046522
auauccauggaauuaucaa

SEQ ID NO: 2046524 - RNA, 19 nt, Artificial Sequence
  Description of Artificial Sequence: Synthetic oligonucleotide
  Sense strand starting at position 3832 of SEQ ID NO: 1881464
ugauaauuccauggauauu

SEQ ID NO: 2046525 - RNA, 19 nt, Artificial Sequence
  Description of Artificial Sequence: Synthetic oligonucleotide
  Antisense strand to SEQ ID NO: 2046524
aauauccauggaauuauca

SEQ ID NO: 2046526 - RNA, 19 nt, Artificial Sequence
  Description of Artificial Sequence: Synthetic oligonucleotide
  Sense strand starting at position 224 of SEQ ID NO: 1881465
agaugucuucuacauggca

SEQ ID NO: 2046527 - RNA, 19 nt, Artificial Sequence
  Description of Artificial Sequence: Synthetic oligonucleotide
  Antisense strand to SEQ ID NO: 2046526
ugccauguagaagacaucu

SEQ ID NO: 2046528 - RNA, 19 nt, Artificial Sequence
  Description of Artificial Sequence: Synthetic oligonucleotide
  Sense strand starting at position 246 of SEQ ID NO: 1881465
aucacaacuguguaguaaa

SEQ ID NO: 2046529 - RNA, 19 nt, Artificial Sequence
  Description of Artificial Sequence: Synthetic oligonucleotide
  Antisense strand to SEQ ID NO: 2046528
uuuacuacacaguugugau

SEQ ID NO: 2046530 - RNA, 19 nt, Artificial Sequence
  Description of Artificial Sequence: Synthetic oligonucleotide
  Sense strand starting at position 329 of SEQ ID NO: 1881465
uggguuguaccaggaucaa

SEQ ID NO: 2046531 - RNA, 19 nt, Artificial Sequence
  Description of Artificial Sequence: Synthetic oligonucleotide
  Antisense strand to SEQ ID NO: 2046530
uugauccugguacaaccca

SEQ ID NO: 2046532 - RNA, 19 nt, Artificial Sequence
  Description of Artificial Sequence: Synthetic oligonucleotide
  Sense strand starting at position 412 of SEQ ID NO: 1881465
uuaaguuuagacggaauga

SEQ ID NO: 2046533 - RNA, 19 nt, Artificial Sequence
  Description of Artificial Sequence: Synthetic oligonucleotide
  Antisense strand to SEQ ID NO: 2046532
ucauuccgucuaaacuuaa

SEQ ID NO: 2046534 - RNA, 19 nt, Artificial Sequence
  Description of Artificial Sequence: Synthetic oligonucleotide
  Sense strand starting at position 547 of SEQ ID NO: 1881465
uugauugauugacuuguuu

SEQ ID NO: 2046535 - RNA, 19 nt, Artificial Sequence
  Description of Artificial Sequence: Synthetic oligonucleotide
  Antisense strand to SEQ ID NO: 2046534
aaacaagucaaucaaucaa

SEQ ID NO: 2046536 - RNA, 19 nt, Artificial Sequence
  Description of Artificial Sequence: Synthetic oligonucleotide
  Sense strand starting at position 889 of SEQ ID NO: 1881465
gucauauuggauugcauau

SEQ ID NO: 2046537 - RNA, 19 nt, Artificial Sequence
  Description of Artificial Sequence: Synthetic oligonucleotide
  Antisense strand to SEQ ID NO: 2046536
auaugcaauccaauaugac

SEQ ID NO: 2046538 - RNA, 19 nt, Artificial Sequence
  Description of Artificial Sequence: Synthetic oligonucleotide
  Sense strand starting at position 910 of SEQ ID NO: 1881465
gcccuacuccaguaugauc

SEQ ID NO: 2046539 - RNA, 19 nt, Artificial Sequence
  Description of Artificial Sequence: Synthetic oligonucleotide
  Antisense strand to SEQ ID NO: 2046538
gaucauacuggaguagggc

SEQ ID NO: 2046540 - RNA, 19 nt, Artificial Sequence
  Description of Artificial Sequence: Synthetic oligonucleotide
  Sense strand starting at position 971 of SEQ ID NO: 1881465
ggcuucuagaaccguaaga

SEQ ID NO: 2046541 - RNA, 19 nt, Artificial Sequence
  Description of Artificial Sequence: Synthetic oligonucleotide
  Antisense strand to SEQ ID NO: 2046540
ucuuacgguucuagaagcc

SEQ ID NO: 2046542 - RNA, 19 nt, Artificial Sequence
  Description of Artificial Sequence: Synthetic oligonucleotide
  Sense strand starting at position 1310 of SEQ ID NO: 1881465
cugggugcucuuuaccauu

SEQ ID NO: 2046543 - RNA, 19 nt, Artificial Sequence
  Description of Artificial Sequence: Synthetic oligonucleotide
  Antisense strand to SEQ ID NO: 2046542
aaugguaaagagcacccag

SEQ ID NO: 2046544 - RNA, 19 nt, Artificial Sequence
  Description of Artificial Sequence: Synthetic oligonucleotide
  Sense strand starting at position 1385 of SEQ ID NO: 1881465
uuggcuuggcgcucacuaa

SEQ ID NO: 2046545 - RNA, 19 nt, Artificial Sequence
  Description of Artificial Sequence: Synthetic oligonucleotide
  Antisense strand to SEQ ID NO: 2046544
uuagugagcgccaagccaa

SEQ ID NO: 2046546 - RNA, 19 nt, Artificial Sequence
  Description of Artificial Sequence: Synthetic oligonucleotide
  Sense strand starting at position 1389 of SEQ ID NO: 1881465
cuuggcgcucacuaagaau

SEQ ID NO: 2046547 - RNA, 19 nt, Artificial Sequence
  Description of Artificial Sequence: Synthetic oligonucleotide
  Antisense strand to SEQ ID NO: 2046546
auucuuagugagcgccaag

SEQ ID NO: 2046548 - RNA, 19 nt, Artificial Sequence
  Description of Artificial Sequence: Synthetic oligonucleotide
  Sense strand starting at position 1486 of SEQ ID NO: 1881465
augauucuccuuuguagag

SEQ ID NO: 2046549 - RNA, 19 nt, Artificial Sequence
  Description of Artificial Sequence: Synthetic oligonucleotide
  Antisense strand to SEQ ID NO: 2046548
cucuacaaaggagaaucau

SEQ ID NO: 2046550 - RNA, 19 nt, Artificial Sequence
  Description of Artificial Sequence: Synthetic oligonucleotide
  Sense strand starting at position 1574 of SEQ ID NO: 1881465
cugaguuuggacugacuga

SEQ ID NO: 2046551 - RNA, 19 nt, Artificial Sequence
  Description of Artificial Sequence: Synthetic oligonucleotide
  Antisense strand to SEQ ID NO: 2046550
ucagucaguccaaacucag

SEQ ID NO: 2046552 - RNA, 19 nt, Artificial Sequence
  Description of Artificial Sequence: Synthetic oligonucleotide
  Sense strand starting at position 1636 of SEQ ID NO: 1881465
cuuccuugugccuaaagag

SEQ ID NO: 2046553 - RNA, 19 nt, Artificial Sequence
  Description of Artificial Sequence: Synthetic oligonucleotide
  Antisense strand to SEQ ID NO: 2046552
cucuuuaggcacaaggaag

SEQ ID NO: 2046554 - RNA, 19 nt, Artificial Sequence
  Description of Artificial Sequence: Synthetic oligonucleotide
  Sense strand starting at position 1762 of SEQ ID NO: 1881465
ccaccaucuuccucaggua

SEQ ID NO: 2046555 - RNA, 19 nt, Artificial Sequence
  Description of Artificial Sequence: Synthetic oligonucleotide
  Antisense strand to SEQ ID NO: 2046554
uaccugaggaagauggugg

SEQ ID NO: 2046556 - RNA, 19 nt, Artificial Sequence
  Description of Artificial Sequence: Synthetic oligonucleotide
  Sense strand starting at position 1992 of SEQ ID NO: 1881465
gcucucacccuagaaugaa

SEQ ID NO: 2046557 - RNA, 19 nt, Artificial Sequence
  Description of Artificial Sequence: Synthetic oligonucleotide
  Antisense strand to SEQ ID NO: 2046556
uucauucuagggugagagc

SEQ ID NO: 2046558 - RNA, 19 nt, Artificial Sequence
  Description of Artificial Sequence: Synthetic oligonucleotide
  Sense strand starting at position 2070 of SEQ ID NO: 1881465
ugccacagccuugauaaga

SEQ ID NO: 2046559 - RNA, 19 nt, Artificial Sequence
  Description of Artificial Sequence: Synthetic oligonucleotide
  Antisense strand to SEQ ID NO: 2046558
ucuuaucaaggcuguggca

SEQ ID NO: 2046560 - RNA, 19 nt, Artificial Sequence
  Description of Artificial Sequence: Synthetic oligonucleotide
  Sense strand starting at position 2091 of SEQ ID NO: 1881465
ccaagauacuuuguacaag

SEQ ID NO: 2046561 - RNA, 19 nt, Artificial Sequence
  Description of Artificial Sequence: Synthetic oligonucleotide
  Antisense strand to SEQ ID NO: 2046560
cuuguacaaaguaucuugg

SEQ ID NO: 2046562 - RNA, 19 nt, Artificial Sequence
  Description of Artificial Sequence: Synthetic oligonucleotide
  Sense strand starting at position 2171 of SEQ ID NO: 1881465
ggugcuaagucccugauuu

SEQ ID NO: 2046563 - RNA, 19 nt, Artificial Sequence
  Description of Artificial Sequence: Synthetic oligonucleotide
  Antisense strand to SEQ ID NO: 2046562
aaaucagggacuuagcacc

SEQ ID NO: 2046564 - RNA, 19 nt, Artificial Sequence
  Description of Artificial Sequence: Synthetic oligonucleotide
  Sense strand starting at position 2172 of SEQ ID NO: 1881465
gugcuaagucccugauuug

SEQ ID NO: 2046565 - RNA, 19 nt, Artificial Sequence
  Description of Artificial Sequence: Synthetic oligonucleotide
  Antisense strand to SEQ ID NO: 2046564
caaaucagggacuuagcac

SEQ ID NO: 2046566 - RNA, 19 nt, Artificial Sequence
  Description of Artificial Sequence: Synthetic oligonucleotide
  Sense strand starting at position 2306 of SEQ ID NO: 1881465
ccguacucuguagagguaa

SEQ ID NO: 2046567 - RNA, 19 nt, Artificial Sequence
  Description of Artificial Sequence: Synthetic oligonucleotide
  Antisense strand to SEQ ID NO: 2046566
uuaccucuacagaguacgg

SEQ ID NO: 2046568 - RNA, 19 nt, Artificial Sequence
  Description of Artificial Sequence: Synthetic oligonucleotide
  Sense strand starting at position 2354 of SEQ ID NO: 1881465
aucccauauuguguaaaua

SEQ ID NO: 2046569 - RNA, 19 nt, Artificial Sequence
  Description of Artificial Sequence: Synthetic oligonucleotide
  Antisense strand to SEQ ID NO: 2046568
uauuuacacaauaugggau

SEQ ID NO: 2046570 - RNA, 19 nt, Artificial Sequence
  Description of Artificial Sequence: Synthetic oligonucleotide
  Sense strand starting at position 2355 of SEQ ID NO: 1881465
ucccauauuguguaaauaa

SEQ ID NO: 2046571 - RNA, 19 nt, Artificial Sequence
  Description of Artificial Sequence: Synthetic oligonucleotide
  Antisense strand to SEQ ID NO: 2046570
uuauuuacacaauauggga

SEQ ID NO: 2046572 - RNA, 19 nt, Artificial Sequence
  Description of Artificial Sequence: Synthetic oligonucleotide
  Sense strand starting at position 2412 of SEQ ID NO: 1881465
uauugacuucuggguauag

SEQ ID NO: 2046573 - RNA, 19 nt, Artificial Sequence
  Description of Artificial Sequence: Synthetic oligonucleotide
  Antisense strand to SEQ ID NO: 2046572
cuauacccagaagucaaua

SEQ ID NO: 2046574 - RNA, 19 nt, Artificial Sequence
  Description of Artificial Sequence: Synthetic oligonucleotide
  Sense strand starting at position 2491 of SEQ ID NO: 1881465
ccaucuggccaacaugaua

SEQ ID NO: 2046575 - RNA, 19 nt, Artificial Sequence
  Description of Artificial Sequence: Synthetic oligonucleotide
  Antisense strand to SEQ ID NO: 2046574
uaucauguuggccagaugg

SEQ ID NO: 2046576 - RNA, 19 nt, Artificial Sequence
  Description of Artificial Sequence: Synthetic oligonucleotide
  Sense strand starting at position 2708 of SEQ ID NO: 1881465
agaauacaucucugaguug

SEQ ID NO: 2046577 - RNA, 19 nt, Artificial Sequence
  Description of Artificial Sequence: Synthetic oligonucleotide
  Antisense strand to SEQ ID NO: 2046576
caacucagagauguauucu

SEQ ID NO: 2046578 - RNA, 19 nt, Artificial Sequence
  Description of Artificial Sequence: Synthetic oligonucleotide
  Sense strand starting at position 2945 of SEQ ID NO: 1881465
uggaauugucuuuagucua

SEQ ID NO: 2046579 - RNA, 19 nt, Artificial Sequence
  Description of Artificial Sequence: Synthetic oligonucleotide
  Antisense strand to SEQ ID NO: 2046578
uagacuaaagacaauucca

SEQ ID NO: 2046580 - RNA, 19 nt, Artificial Sequence
  Description of Artificial Sequence: Synthetic oligonucleotide
  Sense strand starting at position 2950 of SEQ ID NO: 1881465
uugucuuuagucuaacauu

SEQ ID NO: 2046581 - RNA, 19 nt, Artificial Sequence
  Description of Artificial Sequence: Synthetic oligonucleotide
  Antisense strand to SEQ ID NO: 2046580
aauguuagacuaaagacaa

SEQ ID NO: 2046582 - RNA, 19 nt, Artificial Sequence
  Description of Artificial Sequence: Synthetic oligonucleotide
  Sense strand starting at position 3225 of SEQ ID NO: 1881465
ggguauggguuuccacaga

SEQ ID NO: 2046583 - RNA, 19 nt, Artificial Sequence
  Description of Artificial Sequence: Synthetic oligonucleotide
  Antisense strand to SEQ ID NO: 2046582
ucuguggaaacccauaccc

SEQ ID NO: 2046584 - RNA, 19 nt, Artificial Sequence
  Description of Artificial Sequence: Synthetic oligonucleotide
  Sense strand starting at position 3230 of SEQ ID NO: 1881465
uggguuuccacagaaaugu

SEQ ID NO: 2046585 - RNA, 19 nt, Artificial Sequence
  Description of Artificial Sequence: Synthetic oligonucleotide
  Antisense strand to SEQ ID NO: 2046584
acauuucuguggaaaccca

SEQ ID NO: 2046586 - RNA, 19 nt, Artificial Sequence
  Description of Artificial Sequence: Synthetic oligonucleotide
  Sense strand starting at position 3308 of SEQ ID NO: 1881465
gaagcuucuguguaaaucu

SEQ ID NO: 2046587 - RNA, 19 nt, Artificial Sequence
  Description of Artificial Sequence: Synthetic oligonucleotide
  Antisense strand to SEQ ID NO: 2046586
agauuuacacagaagcuuc

SEQ ID NO: 2046588 - RNA, 19 nt, Artificial Sequence
  Description of Artificial Sequence: Synthetic oligonucleotide
  Sense strand starting at position 3663 of SEQ ID NO: 1881465
guauguauaaccgaaguga

SEQ ID NO: 2046589 - RNA, 19 nt, Artificial Sequence
  Description of Artificial Sequence: Synthetic oligonucleotide
  Antisense strand to SEQ ID NO: 2046588
ucacuucgguuauacauac

SEQ ID NO: 2046590 - RNA, 19 nt, Artificial Sequence
  Description of Artificial Sequence: Synthetic oligonucleotide
  Sense strand starting at position 3720 of SEQ ID NO: 1881465
aucauucuacauuguguaa

SEQ ID NO: 2046591 - RNA, 19 nt, Artificial Sequence
  Description of Artificial Sequence: Synthetic oligonucleotide
  Antisense strand to SEQ ID NO: 2046590
uuacacaauguagaaugau

SEQ ID NO: 2046592 - RNA, 19 nt, Artificial Sequence
  Description of Artificial Sequence: Synthetic oligonucleotide
  Sense strand starting at position 3723 of SEQ ID NO: 1881465
auucuacauuguguaauga

SEQ ID NO: 2046593 - RNA, 19 nt, Artificial Sequence
  Description of Artificial Sequence: Synthetic oligonucleotide
  Antisense strand to SEQ ID NO: 2046592
ucauuacacaauguagaau

SEQ ID NO: 2046594 - RNA, 19 nt, Artificial Sequence
  Description of Artificial Sequence: Synthetic oligonucleotide
  Sense strand starting at position 3763 of SEQ ID NO: 1881465
aagguauaaguagguugaa

SEQ ID NO: 2046595 - RNA, 19 nt, Artificial Sequence
  Description of Artificial Sequence: Synthetic oligonucleotide
  Antisense strand to SEQ ID NO: 2046594
uucaaccuacuuauaccuu

SEQ ID NO: 2046596 - RNA, 19 nt, Artificial Sequence
  Description of Artificial Sequence: Synthetic oligonucleotide
  Sense strand starting at position 3764 of SEQ ID NO: 1881465
agguauaaguagguugaaa

SEQ ID NO: 2046597 - RNA, 19 nt, Artificial Sequence
  Description of Artificial Sequence: Synthetic oligonucleotide
  Antisense strand to SEQ ID NO: 2046596
uuucaaccuacuuauaccu

SEQ ID NO: 2046598 - RNA, 19 nt, Artificial Sequence
  Description of Artificial Sequence: Synthetic oligonucleotide
  Sense strand starting at position 3862 of SEQ ID NO: 1881465
aagguacauguuuggugaa

SEQ ID NO: 2046599 - RNA, 19 nt, Artificial Sequence
  Description of Artificial Sequence: Synthetic oligonucleotide
  Antisense strand to SEQ ID NO: 2046598
uucaccaaacauguaccuu

SEQ ID NO: 2046600 - RNA, 19 nt, Artificial Sequence
  Description of Artificial Sequence: Synthetic oligonucleotide
  Sense strand starting at position 3864 of SEQ ID NO: 1881465
gguacauguuuggugaaau

SEQ ID NO: 2046601 - RNA, 19 nt, Artificial Sequence
  Description of Artificial Sequence: Synthetic oligonucleotide
  Antisense strand to SEQ ID NO: 2046600
auuucaccaaacauguacc

SEQ ID NO: 2046602 - RNA, 19 nt, Artificial Sequence
  Description of Artificial Sequence: Synthetic oligonucleotide
  Sense strand starting at position 3886 of SEQ ID NO: 1881465
cuaacaaaugcauggcaaa

SEQ ID NO: 2046603 - RNA, 19 nt, Artificial Sequence
  Description of Artificial Sequence: Synthetic oligonucleotide
  Antisense strand to SEQ ID NO: 2046602
uuugccaugcauuuguuag

SEQ ID NO: 2046604 - RNA, 19 nt, Artificial Sequence
  Description of Artificial Sequence: Synthetic oligonucleotide
  Sense strand starting at position 3942 of SEQ ID NO: 1881465
gcaauuguaaauugagaga

SEQ ID NO: 2046605 - RNA, 19 nt, Artificial Sequence
  Description of Artificial Sequence: Synthetic oligonucleotide
  Antisense strand to SEQ ID NO: 2046604
ucucucaauuuacaauugc

SEQ ID NO: 2046606 - RNA, 19 nt, Artificial Sequence
  Description of Artificial Sequence: Synthetic oligonucleotide
  Sense strand starting at position 161 of SEQ ID NO: 1881466
auaaauuucgguugcuuaa

SEQ ID NO: 2046607 - RNA, 19 nt, Artificial Sequence
  Description of Artificial Sequence: Synthetic oligonucleotide
  Antisense strand to SEQ ID NO: 2046606
uuaagcaaccgaaauuuau

SEQ ID NO: 2046608 - RNA, 19 nt, Artificial Sequence
  Description of Artificial Sequence: Synthetic oligonucleotide
  Sense strand starting at position 283 of SEQ ID NO: 1881466
auaugaugaauuggagucu

SEQ ID NO: 2046609 - RNA, 19 nt, Artificial Sequence
  Description of Artificial Sequence: Synthetic oligonucleotide
  Antisense strand to SEQ ID NO: 2046608
agacuccaauucaucauau

SEQ ID NO: 2046610 - RNA, 19 nt, Artificial Sequence
  Description of Artificial Sequence: Synthetic oligonucleotide
  Sense strand starting at position 432 of SEQ ID NO: 1881466
aaaggaugugcuuauguuu

SEQ ID NO: 2046611 - RNA, 19 nt, Artificial Sequence
  Description of Artificial Sequence: Synthetic oligonucleotide
  Antisense strand to SEQ ID NO: 2046610
aaacauaagcacauccuuu

SEQ ID NO: 2046612 - RNA, 19 nt, Artificial Sequence
  Description of Artificial Sequence: Synthetic oligonucleotide
  Sense strand starting at position 548 of SEQ ID NO: 1881466
ugucuuacugcugcuguaa

SEQ ID NO: 2046613 - RNA, 19 nt, Artificial Sequence
  Description of Artificial Sequence: Synthetic oligonucleotide
  Antisense strand to SEQ ID NO: 2046612
uuacagcagcaguaagaca

SEQ ID NO: 2046614 - RNA, 19 nt, Artificial Sequence
  Description of Artificial Sequence: Synthetic oligonucleotide
  Sense strand starting at position 580 of SEQ ID NO: 1881466
acuugaugacuacggacaa

SEQ ID NO: 2046615 - RNA, 19 nt, Artificial Sequence
  Description of Artificial Sequence: Synthetic oligonucleotide
  Antisense strand to SEQ ID NO: 2046614
uuguccguagucaucaagu

SEQ ID NO: 2046616 - RNA, 19 nt, Artificial Sequence
  Description of Artificial Sequence: Synthetic oligonucleotide
  Sense strand starting at position 618 of SEQ ID NO: 1881466
aguuguagagcccagaagu

SEQ ID NO: 2046617 - RNA, 19 nt, Artificial Sequence
  Description of Artificial Sequence: Synthetic oligonucleotide
  Antisense strand to SEQ ID NO: 2046616
acuucugggcucuacaacu

SEQ ID NO: 2046618 - RNA, 19 nt, Artificial Sequence
  Description of Artificial Sequence: Synthetic oligonucleotide
  Sense strand starting at position 635 of SEQ ID NO: 1881466
gucugaaaucaggauguug

SEQ ID NO: 2046619 - RNA, 19 nt, Artificial Sequence
  Description of Artificial Sequence: Synthetic oligonucleotide
  Antisense strand to SEQ ID NO: 2046618
caacauccugauuucagac

SEQ ID NO: 2046620 - RNA, 19 nt, Artificial Sequence
  Description of Artificial Sequence: Synthetic oligonucleotide
  Sense strand starting at position 859 of SEQ ID NO: 1881466
cuucuaaauccaggguaau

SEQ ID NO: 2046621 - RNA, 19 nt, Artificial Sequence
  Description of Artificial Sequence: Synthetic oligonucleotide
  Antisense strand to SEQ ID NO: 2046620
auuacccuggauuuagaag

SEQ ID NO: 2046622 - RNA, 19 nt, Artificial Sequence
  Description of Artificial Sequence: Synthetic oligonucleotide
  Sense strand starting at position 860 of SEQ ID NO: 1881466
uucuaaauccaggguaauu

SEQ ID NO: 2046623 - RNA, 19 nt, Artificial Sequence
  Description of Artificial Sequence: Synthetic oligonucleotide
  Antisense strand to SEQ ID NO: 2046622
aauuacccuggauuuagaa

SEQ ID NO: 2046624 - RNA, 19 nt, Artificial Sequence
  Description of Artificial Sequence: Synthetic oligonucleotide
  Sense strand starting at position 882 of SEQ ID NO: 1881466
ucucgagaucuuuaucuua

SEQ ID NO: 2046625 - RNA, 19 nt, Artificial Sequence
  Description of Artificial Sequence: Synthetic oligonucleotide
  Antisense strand to SEQ ID NO: 2046624
uaagauaaagaucucgaga

SEQ ID NO: 2046626 - RNA, 19 nt, Artificial Sequence
  Description of Artificial Sequence: Synthetic oligonucleotide
  Sense strand starting at position 884 of SEQ ID NO: 1881466
ucgagaucuuuaucuuaau

SEQ ID NO: 2046627 - RNA, 19 nt, Artificial Sequence
  Description of Artificial Sequence: Synthetic oligonucleotide
  Antisense strand to SEQ ID NO: 2046626
auuaagauaaagaucucga

SEQ ID NO: 2046628 - RNA, 19 nt, Artificial Sequence
  Description of Artificial Sequence: Synthetic oligonucleotide
  Sense strand starting at position 885 of SEQ ID NO: 1881466
cgagaucuuuaucuuaauu

SEQ ID NO: 2046629 - RNA, 19 nt, Artificial Sequence
  Description of Artificial Sequence: Synthetic oligonucleotide
  Antisense strand to SEQ ID NO: 2046628
aauuaagauaaagaucucg

SEQ ID NO: 2046630 - RNA, 19 nt, Artificial Sequence
  Description of Artificial Sequence: Synthetic oligonucleotide
  Sense strand starting at position 1125 of SEQ ID NO: 1881466
acacaaaugucuguaagaa

SEQ ID NO: 2046631 - RNA, 19 nt, Artificial Sequence
  Description of Artificial Sequence: Synthetic oligonucleotide
  Antisense strand to SEQ ID NO: 2046630
uucuuacagacauuugugu

SEQ ID NO: 2046632 - RNA, 19 nt, Artificial Sequence
  Description of Artificial Sequence: Synthetic oligonucleotide
  Sense strand starting at position 1167 of SEQ ID NO: 1881466
ccgaaaucagagcauguga

SEQ ID NO: 2046633 - RNA, 19 nt, Artificial Sequence
  Description of Artificial Sequence: Synthetic oligonucleotide
  Antisense strand to SEQ ID NO: 2046632
ucacaugcucugauuucgg

SEQ ID NO: 2046634 - RNA, 19 nt, Artificial Sequence
  Description of Artificial Sequence: Synthetic oligonucleotide
  Sense strand starting at position 1231 of SEQ ID NO: 1881466
gucagaaaccaugguaaac

SEQ ID NO: 2046635 - RNA, 19 nt, Artificial Sequence
  Description of Artificial Sequence: Synthetic oligonucleotide
  Antisense strand to SEQ ID NO: 2046634
guuuaccaugguuucugac

SEQ ID NO: 2046636 - RNA, 19 nt, Artificial Sequence
  Description of Artificial Sequence: Synthetic oligonucleotide
  Sense strand starting at position 1356 of SEQ ID NO: 1881466
auagucagauuauucuaag

SEQ ID NO: 2046637 - RNA, 19 nt, Artificial Sequence
  Description of Artificial Sequence: Synthetic oligonucleotide
  Antisense strand to SEQ ID NO: 2046636
cuuagaauaaucugacuau

SEQ ID NO: 2046638 - RNA, 19 nt, Artificial Sequence
  Description of Artificial Sequence: Synthetic oligonucleotide
  Sense strand starting at position 1459 of SEQ ID NO: 1881466
uggguuauugaggaaagcu

SEQ ID NO: 2046639 - RNA, 19 nt, Artificial Sequence
  Description of Artificial Sequence: Synthetic oligonucleotide
  Antisense strand to SEQ ID NO: 2046638
agcuuuccucaauaaccca

SEQ ID NO: 2046640 - RNA, 19 nt, Artificial Sequence
  Description of Artificial Sequence: Synthetic oligonucleotide
  Sense strand starting at position 1530 of SEQ ID NO: 1881466
ggaauagugcaguaccuca

SEQ ID NO: 2046641 - RNA, 19 nt, Artificial Sequence
  Description of Artificial Sequence: Synthetic oligonucleotide
  Antisense strand to SEQ ID NO: 2046640
ugagguacugcacuauucc

SEQ ID NO: 2046642 - RNA, 19 nt, Artificial Sequence
  Description of Artificial Sequence: Synthetic oligonucleotide
  Sense strand starting at position 1657 of SEQ ID NO: 1881466
ggaggcauuagucgaggga

SEQ ID NO: 2046643 - RNA, 19 nt, Artificial Sequence
  Description of Artificial Sequence: Synthetic oligonucleotide
  Antisense strand to SEQ ID NO: 2046642
ucccucgacuaaugccucc

SEQ ID NO: 2046644 - RNA, 19 nt, Artificial Sequence
  Description of Artificial Sequence: Synthetic oligonucleotide
  Sense strand starting at position 2161 of SEQ ID NO: 1881466
ugggacuuguucuucugga

SEQ ID NO: 2046645 - RNA, 19 nt, Artificial Sequence
  Description of Artificial Sequence: Synthetic oligonucleotide
  Antisense strand to SEQ ID NO: 2046644
uccagaagaacaaguccca

SEQ ID NO: 2046646 - RNA, 19 nt, Artificial Sequence
  Description of Artificial Sequence: Synthetic oligonucleotide
  Sense strand starting at position 2162 of SEQ ID NO: 1881466
gggacuuguucuucuggac

SEQ ID NO: 2046647 - RNA, 19 nt, Artificial Sequence
  Description of Artificial Sequence: Synthetic oligonucleotide
  Antisense strand to SEQ ID NO: 2046646
guccagaagaacaaguccc

SEQ ID NO: 2046648 - RNA, 19 nt, Artificial Sequence
  Description of Artificial Sequence: Synthetic oligonucleotide
  Sense strand starting at position 2378 of SEQ ID NO: 1881466
acgcuaucuagugaaagac

SEQ ID NO: 2046649 - RNA, 19 nt, Artificial Sequence
  Description of Artificial Sequence: Synthetic oligonucleotide
  Antisense strand to SEQ ID NO: 2046648
gucuuucacuagauagcgu

SEQ ID NO: 2046650 - RNA, 19 nt, Artificial Sequence
  Description of Artificial Sequence: Synthetic oligonucleotide
  Sense strand starting at position 2469 of SEQ ID NO: 1881466
auauguaaacuagaaacgu

SEQ ID NO: 2046651 - RNA, 19 nt, Artificial Sequence
  Description of Artificial Sequence: Synthetic oligonucleotide
  Antisense strand to SEQ ID NO: 2046650
acguuucuaguuuacauau

SEQ ID NO: 2046652 - RNA, 19 nt, Artificial Sequence
  Description of Artificial Sequence: Synthetic oligonucleotide
  Sense strand starting at position 2473 of SEQ ID NO: 1881466
guaaacuagaaacguagau

SEQ ID NO: 2046653 - RNA, 19 nt, Artificial Sequence
  Description of Artificial Sequence: Synthetic oligonucleotide
  Antisense strand to SEQ ID NO: 2046652
aucuacguuucuaguuuac

SEQ ID NO: 2046654 - RNA, 19 nt, Artificial Sequence
  Description of Artificial Sequence: Synthetic oligonucleotide
  Sense strand starting at position 2642 of SEQ ID NO: 1881466
uucugaucacucuaaguug

SEQ ID NO: 2046655 - RNA, 19 nt, Artificial Sequence
  Description of Artificial Sequence: Synthetic oligonucleotide
  Antisense strand to SEQ ID NO: 2046654
caacuuagagugaucagaa

SEQ ID NO: 2046656 - RNA, 19 nt, Artificial Sequence
  Description of Artificial Sequence: Synthetic oligonucleotide
  Sense strand starting at position 2693 of SEQ ID NO: 1881466
gagcuccauuuggaaggau

SEQ ID NO: 2046657 - RNA, 19 nt, Artificial Sequence
  Description of Artificial Sequence: Synthetic oligonucleotide
  Antisense strand to SEQ ID NO: 2046656
auccuuccaaauggagcuc

SEQ ID NO: 2046658 - RNA, 19 nt, Artificial Sequence
  Description of Artificial Sequence: Synthetic oligonucleotide
  Sense strand starting at position 2838 of SEQ ID NO: 1881466
ccauuuaaauacgaggaau

SEQ ID NO: 2046659 - RNA, 19 nt, Artificial Sequence
  Description of Artificial Sequence: Synthetic oligonucleotide
  Antisense strand to SEQ ID NO: 2046658
auuccucguauuuaaaugg

SEQ ID NO: 2046660 - RNA, 19 nt, Artificial Sequence
  Description of Artificial Sequence: Synthetic oligonucleotide
  Sense strand starting at position 2846 of SEQ ID NO: 1881466
auacgaggaaucugaaguu

SEQ ID NO: 2046661 - RNA, 19 nt, Artificial Sequence
  Description of Artificial Sequence: Synthetic oligonucleotide
  Antisense strand to SEQ ID NO: 2046660
aacuucagauuccucguau

SEQ ID NO: 2046662 - RNA, 19 nt, Artificial Sequence
  Description of Artificial Sequence: Synthetic oligonucleotide
  Sense strand starting at position 2889 of SEQ ID NO: 1881466
aggucauagaucuagcagu

SEQ ID NO: 2046663 - RNA, 19 nt, Artificial Sequence
  Description of Artificial Sequence: Synthetic oligonucleotide
  Antisense strand to SEQ ID NO: 2046662
acugcuagaucuaugaccu

SEQ ID NO: 2046664 - RNA, 19 nt, Artificial Sequence
  Description of Artificial Sequence: Synthetic oligonucleotide
  Sense strand starting at position 2924 of SEQ ID NO: 1881466
guaagucagaugugacuga

SEQ ID NO: 2046665 - RNA, 19 nt, Artificial Sequence
  Description of Artificial Sequence: Synthetic oligonucleotide
  Antisense strand to SEQ ID NO: 2046664
ucagucacaucugacuuac

SEQ ID NO: 2046666 - RNA, 19 nt, Artificial Sequence
  Description of Artificial Sequence: Synthetic oligonucleotide
  Sense strand starting at position 2928 of SEQ ID NO: 1881466
gucagaugugacugaacaa

SEQ ID NO: 2046667 - RNA, 19 nt, Artificial Sequence
  Description of Artificial Sequence: Synthetic oligonucleotide
  Antisense strand to SEQ ID NO: 2046666
uuguucagucacaucugac

SEQ ID NO: 2046668 - RNA, 19 nt, Artificial Sequence
  Description of Artificial Sequence: Synthetic oligonucleotide
  Sense strand starting at position 2995 of SEQ ID NO: 1881466
accucuguagcuuacuaua

SEQ ID NO: 2046669 - RNA, 19 nt, Artificial Sequence
  Description of Artificial Sequence: Synthetic oligonucleotide
  Antisense strand to SEQ ID NO: 2046668
uauaguaagcuacagaggu

SEQ ID NO: 2046670 - RNA, 19 nt, Artificial Sequence
  Description of Artificial Sequence: Synthetic oligonucleotide
  Sense strand starting at position 3104 of SEQ ID NO: 1881466
uucccaaaguuacugagaa

SEQ ID NO: 2046671 - RNA, 19 nt, Artificial Sequence
  Description of Artificial Sequence: Synthetic oligonucleotide
  Antisense strand to SEQ ID NO: 2046670
uucucaguaacuuugggaa

SEQ ID NO: 2046672 - RNA, 19 nt, Artificial Sequence
  Description of Artificial Sequence: Synthetic oligonucleotide
  Sense strand starting at position 3249 of SEQ ID NO: 1881466
cagaguaacuaguccuuga

SEQ ID NO: 2046673 - RNA, 19 nt, Artificial Sequence
  Description of Artificial Sequence: Synthetic oligonucleotide
  Antisense strand to SEQ ID NO: 2046672
ucaaggacuaguuacucug

SEQ ID NO: 2046674 - RNA, 19 nt, Artificial Sequence
  Description of Artificial Sequence: Synthetic oligonucleotide
  Sense strand starting at position 3253 of SEQ ID NO: 1881466
guaacuaguccuugaggga

SEQ ID NO: 2046675 - RNA, 19 nt, Artificial Sequence
  Description of Artificial Sequence: Synthetic oligonucleotide
  Antisense strand to SEQ ID NO: 2046674
ucccucaaggacuaguuac

SEQ ID NO: 2046676 - RNA, 19 nt, Artificial Sequence
  Description of Artificial Sequence: Synthetic oligonucleotide
  Sense strand starting at position 3420 of SEQ ID NO: 1881466
guuucuucugaugcgugua

SEQ ID NO: 2046677 - RNA, 19 nt, Artificial Sequence
  Description of Artificial Sequence: Synthetic oligonucleotide
  Antisense strand to SEQ ID NO: 2046676
uacacgcaucagaagaaac

SEQ ID NO: 2046678 - RNA, 19 nt, Artificial Sequence
  Description of Artificial Sequence: Synthetic oligonucleotide
  Sense strand starting at position 3432 of SEQ ID NO: 1881466
gcguguagucagucaugac

SEQ ID NO: 2046679 - RNA, 19 nt, Artificial Sequence
  Description of Artificial Sequence: Synthetic oligonucleotide
  Antisense strand to SEQ ID NO: 2046678
gucaugacugacuacacgc

SEQ ID NO: 2046680 - RNA, 19 nt, Artificial Sequence
  Description of Artificial Sequence: Synthetic oligonucleotide
  Sense strand starting at position 3444 of SEQ ID NO: 1881466
ucaugacucugggcucuaa

SEQ ID NO: 2046681 - RNA, 19 nt, Artificial Sequence
  Description of Artificial Sequence: Synthetic oligonucleotide
  Antisense strand to SEQ ID NO: 2046680
uuagagcccagagucauga

SEQ ID NO: 2046682 - RNA, 19 nt, Artificial Sequence
  Description of Artificial Sequence: Synthetic oligonucleotide
  Sense strand starting at position 3691 of SEQ ID NO: 1881466
accucuguugcccagaaga

SEQ ID NO: 2046683 - RNA, 19 nt, Artificial Sequence
  Description of Artificial Sequence: Synthetic oligonucleotide
  Antisense strand to SEQ ID NO: 2046682
ucuucugggcaacagaggu

SEQ ID NO: 2046684 - RNA, 19 nt, Artificial Sequence
  Description of Artificial Sequence: Synthetic oligonucleotide
  Sense strand starting at position 3776 of SEQ ID NO: 1881466
ucuauugauccguaacuuc

SEQ ID NO: 2046685 - RNA, 19 nt, Artificial Sequence
  Description of Artificial Sequence: Synthetic oligonucleotide
  Antisense strand to SEQ ID NO: 2046684
gaaguuacggaucaauaga

SEQ ID NO: 2046686 - RNA, 19 nt, Artificial Sequence
  Description of Artificial Sequence: Synthetic oligonucleotide
  Sense strand starting at position 181 of SEQ ID NO: 1881467
gcggacaaauccucagguu

SEQ ID NO: 2046687 - RNA, 19 nt, Artificial Sequence
  Description of Artificial Sequence: Synthetic oligonucleotide
  Antisense strand to SEQ ID NO: 2046686
aaccugaggauuuguccgc

SEQ ID NO: 2046688 - RNA, 19 nt, Artificial Sequence
  Description of Artificial Sequence: Synthetic oligonucleotide
  Sense strand starting at position 333 of SEQ ID NO: 1881467
gcuggucauuccuccauca

SEQ ID NO: 2046689 - RNA, 19 nt, Artificial Sequence
  Description of Artificial Sequence: Synthetic oligonucleotide
  Antisense strand to SEQ ID NO: 2046688
ugauggaggaaugaccagc

SEQ ID NO: 2046690 - RNA, 19 nt, Artificial Sequence
  Description of Artificial Sequence: Synthetic oligonucleotide
  Sense strand starting at position 449 of SEQ ID NO: 1881467
uauggcauuuauucgugaa

SEQ ID NO: 2046691 - RNA, 19 nt, Artificial Sequence
  Description of Artificial Sequence: Synthetic oligonucleotide
  Antisense strand to SEQ ID NO: 2046690
uucacgaauaaaugccaua

SEQ ID NO: 2046692 - RNA, 19 nt, Artificial Sequence
  Description of Artificial Sequence: Synthetic oligonucleotide
  Sense strand starting at position 450 of SEQ ID NO: 1881467
auggcauuuauucgugaau

SEQ ID NO: 2046693 - RNA, 19 nt, Artificial Sequence
  Description of Artificial Sequence: Synthetic oligonucleotide
  Antisense strand to SEQ ID NO: 2046692
auucacgaauaaaugccau

SEQ ID NO: 2046694 - RNA, 19 nt, Artificial Sequence
  Description of Artificial Sequence: Synthetic oligonucleotide
  Sense strand starting at position 451 of SEQ ID NO: 1881467
uggcauuuauucgugaauu

SEQ ID NO: 2046695 - RNA, 19 nt, Artificial Sequence
  Description of Artificial Sequence: Synthetic oligonucleotide
  Antisense strand to SEQ ID NO: 2046694
aauucacgaauaaaugcca

SEQ ID NO: 2046696 - RNA, 19 nt, Artificial Sequence
  Description of Artificial Sequence: Synthetic oligonucleotide
  Sense strand starting at position 452 of SEQ ID NO: 1881467
ggcauuuauucgugaauug

SEQ ID NO: 2046697 - RNA, 19 nt, Artificial Sequence
  Description of Artificial Sequence: Synthetic oligonucleotide
  Antisense strand to SEQ ID NO: 2046696
caauucacgaauaaaugcc

SEQ ID NO: 2046698 - RNA, 19 nt, Artificial Sequence
  Description of Artificial Sequence: Synthetic oligonucleotide
  Sense strand starting at position 457 of SEQ ID NO: 1881467
uuauucgugaauugaguga

SEQ ID NO: 2046699 - RNA, 19 nt, Artificial Sequence
  Description of Artificial Sequence: Synthetic oligonucleotide
  Antisense strand to SEQ ID NO: 2046698
ucacucaauucacgaauaa

SEQ ID NO: 2046700 - RNA, 19 nt, Artificial Sequence
  Description of Artificial Sequence: Synthetic oligonucleotide
  Sense strand starting at position 462 of SEQ ID NO: 1881467
cgugaauugagugagucca

SEQ ID NO: 2046701 - RNA, 19 nt, Artificial Sequence
  Description of Artificial Sequence: Synthetic oligonucleotide
  Antisense strand to SEQ ID NO: 2046700
uggacucacucaauucacg

SEQ ID NO: 2046702 - RNA, 19 nt, Artificial Sequence
  Description of Artificial Sequence: Synthetic oligonucleotide
  Sense strand starting at position 464 of SEQ ID NO: 1881467
ugaauugagugaguccaca

SEQ ID NO: 2046703 - RNA, 19 nt, Artificial Sequence
  Description of Artificial Sequence: Synthetic oligonucleotide
  Antisense strand to SEQ ID NO: 2046702
uguggacucacucaauuca

SEQ ID NO: 2046704 - RNA, 19 nt, Artificial Sequence
  Description of Artificial Sequence: Synthetic oligonucleotide
  Sense strand starting at position 664 of SEQ ID NO: 1881467
ccuuccaaagcguaauaua

SEQ ID NO: 2046705 - RNA, 19 nt, Artificial Sequence
  Description of Artificial Sequence: Synthetic oligonucleotide
  Antisense strand to SEQ ID NO: 2046704
uauauuacgcuuuggaagg

SEQ ID NO: 2046706 - RNA, 19 nt, Artificial Sequence
  Description of Artificial Sequence: Synthetic oligonucleotide
  Sense strand starting at position 816 of SEQ ID NO: 1881467
gcacauuugucccaccagu

SEQ ID NO: 2046707 - RNA, 19 nt, Artificial Sequence
  Description of Artificial Sequence: Synthetic oligonucleotide
  Antisense strand to SEQ ID NO: 2046706
acuggugggacaaaugugc

SEQ ID NO: 2046708 - RNA, 19 nt, Artificial Sequence
  Description of Artificial Sequence: Synthetic oligonucleotide
  Sense strand starting at position 1257 of SEQ ID NO: 1881467
gguagacuguguucuuaga

SEQ ID NO: 2046709 - RNA, 19 nt, Artificial Sequence
  Description of Artificial Sequence: Synthetic oligonucleotide
  Antisense strand to SEQ ID NO: 2046708
ucuaagaacacagucuacc

SEQ ID NO: 2046710 - RNA, 19 nt, Artificial Sequence
  Description of Artificial Sequence: Synthetic oligonucleotide
  Sense strand starting at position 1259 of SEQ ID NO: 1881467
uagacuguguucuuagauc

SEQ ID NO: 2046711 - RNA, 19 nt, Artificial Sequence
  Description of Artificial Sequence: Synthetic oligonucleotide
  Antisense strand to SEQ ID NO: 2046710
gaucuaagaacacagucua

SEQ ID NO: 2046712 - RNA, 19 nt, Artificial Sequence
  Description of Artificial Sequence: Synthetic oligonucleotide
  Sense strand starting at position 1265 of SEQ ID NO: 1881467
guguucuuagaucaagcca

SEQ ID NO: 2046713 - RNA, 19 nt, Artificial Sequence
  Description of Artificial Sequence: Synthetic oligonucleotide
  Antisense strand to SEQ ID NO: 2046712
uggcuugaucuaagaacac

SEQ ID NO: 2046714 - RNA, 19 nt, Artificial Sequence
  Description of Artificial Sequence: Synthetic oligonucleotide
  Sense strand starting at position 1836 of SEQ ID NO: 1881467
gauuaucuuucccugcgua

SEQ ID NO: 2046715 - RNA, 19 nt, Artificial Sequence
  Description of Artificial Sequence: Synthetic oligonucleotide
  Antisense strand to SEQ ID NO: 2046714
uacgcagggaaagauaauc

SEQ ID NO: 2046716 - RNA, 19 nt, Artificial Sequence
  Description of Artificial Sequence: Synthetic oligonucleotide
  Sense strand starting at position 1837 of SEQ ID NO: 1881467
auuaucuuucccugcguau

SEQ ID NO: 2046717 - RNA, 19 nt, Artificial Sequence
  Description of Artificial Sequence: Synthetic oligonucleotide
  Antisense strand to SEQ ID NO: 2046716
auacgcagggaaagauaau

SEQ ID NO: 2046718 - RNA, 19 nt, Artificial Sequence
  Description of Artificial Sequence: Synthetic oligonucleotide
  Sense strand starting at position 2184 of SEQ ID NO: 1881467
cacacuguugugggugaua

SEQ ID NO: 2046719 - RNA, 19 nt, Artificial Sequence
  Description of Artificial Sequence: Synthetic oligonucleotide
  Antisense strand to SEQ ID NO: 2046718
uaucacccacaacagugug

SEQ ID NO: 2046720 - RNA, 19 nt, Artificial Sequence
  Description of Artificial Sequence: Synthetic oligonucleotide
  Sense strand starting at position 2186 of SEQ ID NO: 1881467
cacuguugugggugauaga

SEQ ID NO: 2046721 - RNA, 19 nt, Artificial Sequence
  Description of Artificial Sequence: Synthetic oligonucleotide
  Antisense strand to SEQ ID NO: 2046720
ucuaucacccacaacagug

SEQ ID NO: 2046722 - RNA, 19 nt, Artificial Sequence
  Description of Artificial Sequence: Synthetic oligonucleotide
  Sense strand starting at position 2187 of SEQ ID NO: 1881467
acuguugugggugauagau

SEQ ID NO: 2046723 - RNA, 19 nt, Artificial Sequence
  Description of Artificial Sequence: Synthetic oligonucleotide
  Antisense strand to SEQ ID NO: 2046722
aucuaucacccacaacagu

SEQ ID NO: 2046724 - RNA, 19 nt, Artificial Sequence
  Description of Artificial Sequence: Synthetic oligonucleotide
  Sense strand starting at position 2199 of SEQ ID NO: 1881467
gauagauaauaggcucagu

SEQ ID NO: 2046725 - RNA, 19 nt, Artificial Sequence
  Description of Artificial Sequence: Synthetic oligonucleotide
  Antisense strand to SEQ ID NO: 2046724
acugagccuauuaucuauc

SEQ ID NO: 2046726 - RNA, 19 nt, Artificial Sequence
  Description of Artificial Sequence: Synthetic oligonucleotide
  Sense strand starting at position 2204 of SEQ ID NO: 1881467
auaauaggcucaguacaau

SEQ ID NO: 2046727 - RNA, 19 nt, Artificial Sequence
  Description of Artificial Sequence: Synthetic oligonucleotide
  Antisense strand to SEQ ID NO: 2046726
auuguacugagccuauuau

SEQ ID NO: 2046728 - RNA, 19 nt, Artificial Sequence
  Description of Artificial Sequence: Synthetic oligonucleotide
  Sense strand starting at position 2297 of SEQ ID NO: 1881467
augcauuauucucuguaag

SEQ ID NO: 2046729 - RNA, 19 nt, Artificial Sequence
  Description of Artificial Sequence: Synthetic oligonucleotide
  Antisense strand to SEQ ID NO: 2046728
cuuacagagaauaaugcau

SEQ ID NO: 2046730 - RNA, 19 nt, Artificial Sequence
  Description of Artificial Sequence: Synthetic oligonucleotide
  Sense strand starting at position 2298 of SEQ ID NO: 1881467
ugcauuauucucuguaaga

SEQ ID NO: 2046731 - RNA, 19 nt, Artificial Sequence
  Description of Artificial Sequence: Synthetic oligonucleotide
  Antisense strand to SEQ ID NO: 2046730
ucuuacagagaauaaugca

SEQ ID NO: 2046732 - RNA, 19 nt, Artificial Sequence
  Description of Artificial Sequence: Synthetic oligonucleotide
  Sense strand starting at position 2299 of SEQ ID NO: 1881467
gcauuauucucuguaagac

SEQ ID NO: 2046733 - RNA, 19 nt, Artificial Sequence
  Description of Artificial Sequence: Synthetic oligonucleotide
  Antisense strand to SEQ ID NO: 2046732
gucuuacagagaauaaugc

SEQ ID NO: 2046734 - RNA, 19 nt, Artificial Sequence
  Description of Artificial Sequence: Synthetic oligonucleotide
  Sense strand starting at position 2451 of SEQ ID NO: 1881467
gaaagaaauuguguugagu

SEQ ID NO: 2046735 - RNA, 19 nt, Artificial Sequence
  Description of Artificial Sequence: Synthetic oligonucleotide
  Antisense strand to SEQ ID NO: 2046734
acucaacacaauuucuuuc

SEQ ID NO: 2046736 - RNA, 19 nt, Artificial Sequence
  Description of Artificial Sequence: Synthetic oligonucleotide
  Sense strand starting at position 2459 of SEQ ID NO: 1881467
uuguguugagugagugguu

SEQ ID NO: 2046737 - RNA, 19 nt, Artificial Sequence
  Description of Artificial Sequence: Synthetic oligonucleotide
  Antisense strand to SEQ ID NO: 2046736
aaccacucacucaacacaa

SEQ ID NO: 2046738 - RNA, 19 nt, Artificial Sequence
  Description of Artificial Sequence: Synthetic oligonucleotide
  Sense strand starting at position 2460 of SEQ ID NO: 1881467
uguguugagugagugguuu

SEQ ID NO: 2046739 - RNA, 19 nt, Artificial Sequence
  Description of Artificial Sequence: Synthetic oligonucleotide
  Antisense strand to SEQ ID NO: 2046738
aaaccacucacucaacaca

SEQ ID NO: 2046740 - RNA, 19 nt, Artificial Sequence
  Description of Artificial Sequence: Synthetic oligonucleotide
  Sense strand starting at position 2546 of SEQ ID NO: 1881467
ggucuauugcaguguuaau

SEQ ID NO: 2046741 - RNA, 19 nt, Artificial Sequence
  Description of Artificial Sequence: Synthetic oligonucleotide
  Antisense strand to SEQ ID NO: 2046740
auuaacacugcaauagacc

SEQ ID NO: 2046742 - RNA, 19 nt, Artificial Sequence
  Description of Artificial Sequence: Synthetic oligonucleotide
  Sense strand starting at position 2557 of SEQ ID NO: 1881467
guguuaauuuacugauaca

SEQ ID NO: 2046743 - RNA, 19 nt, Artificial Sequence
  Description of Artificial Sequence: Synthetic oligonucleotide
  Antisense strand to SEQ ID NO: 2046742
uguaucaguaaauuaacac

SEQ ID NO: 2046744 - RNA, 19 nt, Artificial Sequence
  Description of Artificial Sequence: Synthetic oligonucleotide
  Sense strand starting at position 2693 of SEQ ID NO: 1881467
ucauuaugguccucuuuau

SEQ ID NO: 2046745 - RNA, 19 nt, Artificial Sequence
  Description of Artificial Sequence: Synthetic oligonucleotide
  Antisense strand to SEQ ID NO: 2046744
auaaagaggaccauaauga

SEQ ID NO: 2046746 - RNA, 19 nt, Artificial Sequence
  Description of Artificial Sequence: Synthetic oligonucleotide
  Sense strand starting at position 3070 of SEQ ID NO: 1881467
gggacuuugcauugaguau

SEQ ID NO: 2046747 - RNA, 19 nt, Artificial Sequence
  Description of Artificial Sequence: Synthetic oligonucleotide
  Antisense strand to SEQ ID NO: 2046746
auacucaaugcaaaguccc

SEQ ID NO: 2046748 - RNA, 19 nt, Artificial Sequence
  Description of Artificial Sequence: Synthetic oligonucleotide
  Sense strand starting at position 3071 of SEQ ID NO: 1881467
ggacuuugcauugaguaua

SEQ ID NO: 2046749 - RNA, 19 nt, Artificial Sequence
  Description of Artificial Sequence: Synthetic oligonucleotide
  Antisense strand to SEQ ID NO: 2046748
uauacucaaugcaaagucc

SEQ ID NO: 2046750 - RNA, 19 nt, Artificial Sequence
  Description of Artificial Sequence: Synthetic oligonucleotide
  Sense strand starting at position 3211 of SEQ ID NO: 1881467
acuugagacuuauauuguu

SEQ ID NO: 2046751 - RNA, 19 nt, Artificial Sequence
  Description of Artificial Sequence: Synthetic oligonucleotide
  Antisense strand to SEQ ID NO: 2046750
aacaauauaagucucaagu

SEQ ID NO: 2046752 - RNA, 19 nt, Artificial Sequence
  Description of Artificial Sequence: Synthetic oligonucleotide
  Sense strand starting at position 3735 of SEQ ID NO: 1881467
uggaauguauauuccacau

SEQ ID NO: 2046753 - RNA, 19 nt, Artificial Sequence
  Description of Artificial Sequence: Synthetic oligonucleotide
  Antisense strand to SEQ ID NO: 2046752
auguggaauauacauucca

SEQ ID NO: 2046754 - RNA, 19 nt, Artificial Sequence
  Description of Artificial Sequence: Synthetic oligonucleotide
  Sense strand starting at position 3832 of SEQ ID NO: 1881467
uggcauagucuuuacuacu

SEQ ID NO: 2046755 - RNA, 19 nt, Artificial Sequence
  Description of Artificial Sequence: Synthetic oligonucleotide
  Antisense strand to SEQ ID NO: 2046754
aguaguaaagacuaugcca

SEQ ID NO: 2046756 - RNA, 19 nt, Artificial Sequence
  Description of Artificial Sequence: Synthetic oligonucleotide
  Sense strand starting at position 3838 of SEQ ID NO: 1881467
agucuuuacuacuuggaau

SEQ ID NO: 2046757 - RNA, 19 nt, Artificial Sequence
  Description of Artificial Sequence: Synthetic oligonucleotide
  Antisense strand to SEQ ID NO: 2046756
auuccaaguaguaaagacu

SEQ ID NO: 2046758 - RNA, 19 nt, Artificial Sequence
  Description of Artificial Sequence: Synthetic oligonucleotide
  Sense strand starting at position 3850 of SEQ ID NO: 1881467
uuggaauugugcccuauug

SEQ ID NO: 2046759 - RNA, 19 nt, Artificial Sequence
  Description of Artificial Sequence: Synthetic oligonucleotide
  Antisense strand to SEQ ID NO: 2046758
caauagggcacaauuccaa

SEQ ID NO: 2046760 - RNA, 19 nt, Artificial Sequence
  Description of Artificial Sequence: Synthetic oligonucleotide
  Sense strand starting at position 3852 of SEQ ID NO: 1881467
ggaauugugcccuauugca

SEQ ID NO: 2046761 - RNA, 19 nt, Artificial Sequence
  Description of Artificial Sequence: Synthetic oligonucleotide
  Antisense strand to SEQ ID NO: 2046760
ugcaauagggcacaauucc

SEQ ID NO: 2046762 - RNA, 19 nt, Artificial Sequence
  Description of Artificial Sequence: Synthetic oligonucleotide
  Sense strand starting at position 3876 of SEQ ID NO: 1881467
gguauuuguuuagagauaa

SEQ ID NO: 2046763 - RNA, 19 nt, Artificial Sequence
  Description of Artificial Sequence: Synthetic oligonucleotide
  Antisense strand to SEQ ID NO: 2046762
uuaucucuaaacaaauacc

SEQ ID NO: 2046764 - RNA, 19 nt, Artificial Sequence
  Description of Artificial Sequence: Synthetic oligonucleotide
  Sense strand starting at position 3891 of SEQ ID NO: 1881467
auaagcaacugaugauuaa

SEQ ID NO: 2046765 - RNA, 19 nt, Artificial Sequence
  Description of Artificial Sequence: Synthetic oligonucleotide
  Antisense strand to SEQ ID NO: 2046764
uuaaucaucaguugcuuau

SEQ ID NO: 2046766 - RNA, 19 nt, Artificial Sequence
  Description of Artificial Sequence: Synthetic oligonucleotide
  Sense strand starting at position 99 of SEQ ID NO: 1881468
ugucuuuaagaagguaaca

SEQ ID NO: 2046767 - RNA, 19 nt, Artificial Sequence
  Description of Artificial Sequence: Synthetic oligonucleotide
  Antisense strand to SEQ ID NO: 2046766
uguuaccuucuuaaagaca

SEQ ID NO: 2046768 - RNA, 19 nt, Artificial Sequence
  Description of Artificial Sequence: Synthetic oligonucleotide
  Sense strand starting at position 150 of SEQ ID NO: 1881468
uggucaccaugaucuagaa

SEQ ID NO: 2046769 - RNA, 19 nt, Artificial Sequence
  Description of Artificial Sequence: Synthetic oligonucleotide
  Antisense strand to SEQ ID NO: 2046768
uucuagaucauggugacca

SEQ ID NO: 2046770 - RNA, 19 nt, Artificial Sequence
  Description of Artificial Sequence: Synthetic oligonucleotide
  Sense strand starting at position 166 of SEQ ID NO: 1881468
gaauucuggcccgauaaca

SEQ ID NO: 2046771 - RNA, 19 nt, Artificial Sequence
  Description of Artificial Sequence: Synthetic oligonucleotide
  Antisense strand to SEQ ID NO: 2046770
uguuaucgggccagaauuc

SEQ ID NO: 2046772 - RNA, 19 nt, Artificial Sequence
  Description of Artificial Sequence: Synthetic oligonucleotide
  Sense strand starting at position 242 of SEQ ID NO: 1881468
ggacucagccuccacuuaa

SEQ ID NO: 2046773 - RNA, 19 nt, Artificial Sequence
  Description of Artificial Sequence: Synthetic oligonucleotide
  Antisense strand to SEQ ID NO: 2046772
uuaaguggaggcugagucc

SEQ ID NO: 2046774 - RNA, 19 nt, Artificial Sequence
  Description of Artificial Sequence: Synthetic oligonucleotide
  Sense strand starting at position 303 of SEQ ID NO: 1881468
accaaagaaucagaaagaa

SEQ ID NO: 2046775 - RNA, 19 nt, Artificial Sequence
  Description of Artificial Sequence: Synthetic oligonucleotide
  Antisense strand to SEQ ID NO: 2046774
uucuuucugauucuuuggu

SEQ ID NO: 2046776 - RNA, 19 nt, Artificial Sequence
  Description of Artificial Sequence: Synthetic oligonucleotide
  Sense strand starting at position 318 of SEQ ID NO: 1881468
agaauuauuggcuguaaug

SEQ ID NO: 2046777 - RNA, 19 nt, Artificial Sequence
  Description of Artificial Sequence: Synthetic oligonucleotide
  Antisense strand to SEQ ID NO: 2046776
cauuacagccaauaauucu

SEQ ID NO: 2046778 - RNA, 19 nt, Artificial Sequence
  Description of Artificial Sequence: Synthetic oligonucleotide
  Sense strand starting at position 366 of SEQ ID NO: 1881468
agaauauauggccagcuga

SEQ ID NO: 2046779 - RNA, 19 nt, Artificial Sequence
  Description of Artificial Sequence: Synthetic oligonucleotide
  Antisense strand to SEQ ID NO: 2046778
ucagcuggccauauauucu

SEQ ID NO: 2046780 - RNA, 19 nt, Artificial Sequence
  Description of Artificial Sequence: Synthetic oligonucleotide
  Sense strand starting at position 522 of SEQ ID NO: 1881468
cuagguucuguagacacaa

SEQ ID NO: 2046781 - RNA, 19 nt, Artificial Sequence
  Description of Artificial Sequence: Synthetic oligonucleotide
  Antisense strand to SEQ ID NO: 2046780
uugugucuacagaaccuag

SEQ ID NO: 2046782 - RNA, 19 nt, Artificial Sequence
  Description of Artificial Sequence: Synthetic oligonucleotide
  Sense strand starting at position 557 of SEQ ID NO: 1881468
ugucaaagggcuuagaauc

SEQ ID NO: 2046783 - RNA, 19 nt, Artificial Sequence
  Description of Artificial Sequence: Synthetic oligonucleotide
  Antisense strand to SEQ ID NO: 2046782
gauucuaagcccuuugaca

SEQ ID NO: 2046784 - RNA, 19 nt, Artificial Sequence
  Description of Artificial Sequence: Synthetic oligonucleotide
  Sense strand starting at position 585 of SEQ ID NO: 1881468
ugagguugaaagcauuauu

SEQ ID NO: 2046785 - RNA, 19 nt, Artificial Sequence
  Description of Artificial Sequence: Synthetic oligonucleotide
  Antisense strand to SEQ ID NO: 2046784
aauaaugcuuucaaccuca

SEQ ID NO: 2046786 - RNA, 19 nt, Artificial Sequence
  Description of Artificial Sequence: Synthetic oligonucleotide
  Sense strand starting at position 588 of SEQ ID NO: 1881468
gguugaaagcauuauucuc

SEQ ID NO: 2046787 - RNA, 19 nt, Artificial Sequence
  Description of Artificial Sequence: Synthetic oligonucleotide
  Antisense strand to SEQ ID NO: 2046786
gagaauaaugcuuucaacc

SEQ ID NO: 2046788 - RNA, 19 nt, Artificial Sequence
  Description of Artificial Sequence: Synthetic oligonucleotide
  Sense strand starting at position 626 of SEQ ID NO: 1881468
cugcaacuacgagaaguuu

SEQ ID NO: 2046789 - RNA, 19 nt, Artificial Sequence
  Description of Artificial Sequence: Synthetic oligonucleotide
  Antisense strand to SEQ ID NO: 2046788
aaacuucucguaguugcag

SEQ ID NO: 2046790 - RNA, 19 nt, Artificial Sequence
  Description of Artificial Sequence: Synthetic oligonucleotide
  Sense strand starting at position 689 of SEQ ID NO: 1881468
aaguguuucugacucaaag

SEQ ID NO: 2046791 - RNA, 19 nt, Artificial Sequence
  Description of Artificial Sequence: Synthetic oligonucleotide
  Antisense strand to SEQ ID NO: 2046790
cuuugagucagaaacacuu

SEQ ID NO: 2046792 - RNA, 19 nt, Artificial Sequence
  Description of Artificial Sequence: Synthetic oligonucleotide
  Sense strand starting at position 691 of SEQ ID NO: 1881468
guguuucugacucaaagag

SEQ ID NO: 2046793 - RNA, 19 nt, Artificial Sequence
  Description of Artificial Sequence: Synthetic oligonucleotide
  Antisense strand to SEQ ID NO: 2046792
cucuuugagucagaaacac

SEQ ID NO: 2046794 - RNA, 19 nt, Artificial Sequence
  Description of Artificial Sequence: Synthetic oligonucleotide
  Sense strand starting at position 725 of SEQ ID NO: 1881468
gucuuaccgguugagaauc

SEQ ID NO: 2046795 - RNA, 19 nt, Artificial Sequence
  Description of Artificial Sequence: Synthetic oligonucleotide
  Antisense strand to SEQ ID NO: 2046794
gauucucaaccgguaagac

SEQ ID NO: 2046796 - RNA, 19 nt, Artificial Sequence
  Description of Artificial Sequence: Synthetic oligonucleotide
  Sense strand starting at position 733 of SEQ ID NO: 1881468
gguugagaaucacuuacga

SEQ ID NO: 2046797 - RNA, 19 nt, Artificial Sequence
  Description of Artificial Sequence: Synthetic oligonucleotide
  Antisense strand to SEQ ID NO: 2046796
ucguaagugauucucaacc

SEQ ID NO: 2046798 - RNA, 19 nt, Artificial Sequence
  Description of Artificial Sequence: Synthetic oligonucleotide
  Sense strand starting at position 872 of SEQ ID NO: 1881468
ggugaaauuuguuaagaac

SEQ ID NO: 2046799 - RNA, 19 nt, Artificial Sequence
  Description of Artificial Sequence: Synthetic oligonucleotide
  Antisense strand to SEQ ID NO: 2046798
guucuuaacaaauuucacc

SEQ ID NO: 2046800 - RNA, 19 nt, Artificial Sequence
  Description of Artificial Sequence: Synthetic oligonucleotide
  Sense strand starting at position 1078 of SEQ ID NO: 1881468
uuugccaauccucagagau

SEQ ID NO: 2046801 - RNA, 19 nt, Artificial Sequence
  Description of Artificial Sequence: Synthetic oligonucleotide
  Antisense strand to SEQ ID NO: 2046800
aucucugaggauuggcaaa

SEQ ID NO: 2046802 - RNA, 19 nt, Artificial Sequence
  Description of Artificial Sequence: Synthetic oligonucleotide
  Sense strand starting at position 1224 of SEQ ID NO: 1881468
agggcugcugaauauaaau

SEQ ID NO: 2046803 - RNA, 19 nt, Artificial Sequence
  Description of Artificial Sequence: Synthetic oligonucleotide
  Antisense strand to SEQ ID NO: 2046802
auuuauauucagcagcccu

SEQ ID NO: 2046804 - RNA, 19 nt, Artificial Sequence
  Description of Artificial Sequence: Synthetic oligonucleotide
  Sense strand starting at position 2070 of SEQ ID NO: 1881468
ucuucuugccuggaagauc

SEQ ID NO: 2046805 - RNA, 19 nt, Artificial Sequence
  Description of Artificial Sequence: Synthetic oligonucleotide
  Antisense strand to SEQ ID NO: 2046804
gaucuuccaggcaagaaga

SEQ ID NO: 2046806 - RNA, 19 nt, Artificial Sequence
  Description of Artificial Sequence: Synthetic oligonucleotide
  Sense strand starting at position 2159 of SEQ ID NO: 1881468
auucuuuaggcuuaugaga

SEQ ID NO: 2046807 - RNA, 19 nt, Artificial Sequence
  Description of Artificial Sequence: Synthetic oligonucleotide
  Antisense strand to SEQ ID NO: 2046806
ucucauaagccuaaagaau

SEQ ID NO: 2046808 - RNA, 19 nt, Artificial Sequence
  Description of Artificial Sequence: Synthetic oligonucleotide
  Sense strand starting at position 2475 of SEQ ID NO: 1881468
cuuugagcuggguaucaca

SEQ ID NO: 2046809 - RNA, 19 nt, Artificial Sequence
  Description of Artificial Sequence: Synthetic oligonucleotide
  Antisense strand to SEQ ID NO: 2046808
ugugauacccagcucaaag

SEQ ID NO: 2046810 - RNA, 19 nt, Artificial Sequence
  Description of Artificial Sequence: Synthetic oligonucleotide
  Sense strand starting at position 2482 of SEQ ID NO: 1881468
cuggguaucacagauguuu

SEQ ID NO: 2046811 - RNA, 19 nt, Artificial Sequence
  Description of Artificial Sequence: Synthetic oligonucleotide
  Antisense strand to SEQ ID NO: 2046810
aaacaucugugauacccag

SEQ ID NO: 2046812 - RNA, 19 nt, Artificial Sequence
  Description of Artificial Sequence: Synthetic oligonucleotide
  Sense strand starting at position 2484 of SEQ ID NO: 1881468
ggguaucacagauguuuau

SEQ ID NO: 2046813 - RNA, 19 nt, Artificial Sequence
  Description of Artificial Sequence: Synthetic oligonucleotide
  Antisense strand to SEQ ID NO: 2046812
auaaacaucugugauaccc

SEQ ID NO: 2046814 - RNA, 19 nt, Artificial Sequence
  Description of Artificial Sequence: Synthetic oligonucleotide
  Sense strand starting at position 2514 of SEQ ID NO: 1881468
aaggaauugggcuguggaa

SEQ ID NO: 2046815 - RNA, 19 nt, Artificial Sequence
  Description of Artificial Sequence: Synthetic oligonucleotide
  Antisense strand to SEQ ID NO: 2046814
uuccacagcccaauuccuu

SEQ ID NO: 2046816 - RNA, 19 nt, Artificial Sequence
  Description of Artificial Sequence: Synthetic oligonucleotide
  Sense strand starting at position 2516 of SEQ ID NO: 1881468
ggaauugggcuguggaaau

SEQ ID NO: 2046817 - RNA, 19 nt, Artificial Sequence
  Description of Artificial Sequence: Synthetic oligonucleotide
  Antisense strand to SEQ ID NO: 2046816
auuuccacagcccaauucc

SEQ ID NO: 2046818 - RNA, 19 nt, Artificial Sequence
  Description of Artificial Sequence: Synthetic oligonucleotide
  Sense strand starting at position 2523 of SEQ ID NO: 1881468
ggcuguggaaauuauugua

SEQ ID NO: 2046819 - RNA, 19 nt, Artificial Sequence
  Description of Artificial Sequence: Synthetic oligonucleotide
  Antisense strand to SEQ ID NO: 2046818
uacaauaauuuccacagcc

SEQ ID NO: 2046820 - RNA, 19 nt, Artificial Sequence
  Description of Artificial Sequence: Synthetic oligonucleotide
  Sense strand starting at position 2573 of SEQ ID NO: 1881468
guguguugugucuucacca

SEQ ID NO: 2046821 - RNA, 19 nt, Artificial Sequence
  Description of Artificial Sequence: Synthetic oligonucleotide
  Antisense strand to SEQ ID NO: 2046820
uggugaagacacaacacac

SEQ ID NO: 2046822 - RNA, 19 nt, Artificial Sequence
  Description of Artificial Sequence: Synthetic oligonucleotide
  Sense strand starting at position 2680 of SEQ ID NO: 1881468
ucuguuucuguggaaacua

SEQ ID NO: 2046823 - RNA, 19 nt, Artificial Sequence
  Description of Artificial Sequence: Synthetic oligonucleotide
  Antisense strand to SEQ ID NO: 2046822
uaguuuccacagaaacaga

SEQ ID NO: 2046824 - RNA, 19 nt, Artificial Sequence
  Description of Artificial Sequence: Synthetic oligonucleotide
  Sense strand starting at position 2727 of SEQ ID NO: 1881468
ccucaaacucguuauauga

SEQ ID NO: 2046825 - RNA, 19 nt, Artificial Sequence
  Description of Artificial Sequence: Synthetic oligonucleotide
  Antisense strand to SEQ ID NO: 2046824
ucauauaacgaguuugagg

SEQ ID NO: 2046826 - RNA, 19 nt, Artificial Sequence
  Description of Artificial Sequence: Synthetic oligonucleotide
  Sense strand starting at position 2803 of SEQ ID NO: 1881468
gcauccuuuagugaagagu

SEQ ID NO: 2046827 - RNA, 19 nt, Artificial Sequence
  Description of Artificial Sequence: Synthetic oligonucleotide
  Antisense strand to SEQ ID NO: 2046826
acucuucacuaaaggaugc

SEQ ID NO: 2046828 - RNA, 19 nt, Artificial Sequence
  Description of Artificial Sequence: Synthetic oligonucleotide
  Sense strand starting at position 2827 of SEQ ID NO: 1881468
guuacauucucguugauuu

SEQ ID NO: 2046829 - RNA, 19 nt, Artificial Sequence
  Description of Artificial Sequence: Synthetic oligonucleotide
  Antisense strand to SEQ ID NO: 2046828
aaaucaacgagaauguaac

SEQ ID NO: 2046830 - RNA, 19 nt, Artificial Sequence
  Description of Artificial Sequence: Synthetic oligonucleotide
  Sense strand starting at position 2828 of SEQ ID NO: 1881468
uuacauucucguugauuua

SEQ ID NO: 2046831 - RNA, 19 nt, Artificial Sequence
  Description of Artificial Sequence: Synthetic oligonucleotide
  Antisense strand to SEQ ID NO: 2046830
uaaaucaacgagaauguaa

SEQ ID NO: 2046832 - RNA, 19 nt, Artificial Sequence
  Description of Artificial Sequence: Synthetic oligonucleotide
  Sense strand starting at position 2884 of SEQ ID NO: 1881468
acagguuuauuaguacuau

SEQ ID NO: 2046833 - RNA, 19 nt, Artificial Sequence
  Description of Artificial Sequence: Synthetic oligonucleotide
  Antisense strand to SEQ ID NO: 2046832
auaguacuaauaaaccugu

SEQ ID NO: 2046834 - RNA, 19 nt, Artificial Sequence
  Description of Artificial Sequence: Synthetic oligonucleotide
  Sense strand starting at position 3086 of SEQ ID NO: 1881468
guaggcuaugcauagaauu

SEQ ID NO: 2046835 - RNA, 19 nt, Artificial Sequence
  Description of Artificial Sequence: Synthetic oligonucleotide
  Antisense strand to SEQ ID NO: 2046834
aauucuaugcauagccuac

SEQ ID NO: 2046836 - RNA, 19 nt, Artificial Sequence
  Description of Artificial Sequence: Synthetic oligonucleotide
  Sense strand starting at position 3382 of SEQ ID NO: 1881468
gcuacauagguguaaaccu

SEQ ID NO: 2046837 - RNA, 19 nt, Artificial Sequence
  Description of Artificial Sequence: Synthetic oligonucleotide
  Antisense strand to SEQ ID NO: 2046836
agguuuacaccuauguagc

SEQ ID NO: 2046838 - RNA, 19 nt, Artificial Sequence
  Description of Artificial Sequence: Synthetic oligonucleotide
  Sense strand starting at position 3934 of SEQ ID NO: 1881468
uguuauuauagaugagagc

SEQ ID NO: 2046839 - RNA, 19 nt, Artificial Sequence
  Description of Artificial Sequence: Synthetic oligonucleotide
  Antisense strand to SEQ ID NO: 2046838
gcucucaucuauaauaaca

SEQ ID NO: 2046840 - RNA, 19 nt, Artificial Sequence
  Description of Artificial Sequence: Synthetic oligonucleotide
  Sense strand starting at position 3935 of SEQ ID NO: 1881468
guuauuauagaugagagcu

SEQ ID NO: 2046841 - RNA, 19 nt, Artificial Sequence
  Description of Artificial Sequence: Synthetic oligonucleotide
  Antisense strand to SEQ ID NO: 2046840
agcucucaucuauaauaac

SEQ ID NO: 2046842 - RNA, 19 nt, Artificial Sequence
  Description of Artificial Sequence: Synthetic oligonucleotide
  Sense strand starting at position 3974 of SEQ ID NO: 1881468
augaacuuccagugggaua

SEQ ID NO: 2046843 - RNA, 19 nt, Artificial Sequence
  Description of Artificial Sequence: Synthetic oligonucleotide
  Antisense strand to SEQ ID NO: 2046842
uaucccacuggaaguucau

SEQ ID NO: 2046844 - RNA, 19 nt, Artificial Sequence
  Description of Artificial Sequence: Synthetic oligonucleotide
  Sense strand starting at position 3975 of SEQ ID NO: 1881468
ugaacuuccagugggauaa

SEQ ID NO: 2046845 - RNA, 19 nt, Artificial Sequence
  Description of Artificial Sequence: Synthetic oligonucleotide
  Antisense strand to SEQ ID NO: 2046844
uuaucccacuggaaguuca

SEQ ID NO: 2046846 - RNA, 19 nt, Artificial Sequence
  Description of Artificial Sequence: Synthetic oligonucleotide
  Sense strand starting at position 26 of SEQ ID NO: 1881469
aagaguuuauaggcucaag

SEQ ID NO: 2046847 - RNA, 19 nt, Artificial Sequence
  Description of Artificial Sequence: Synthetic oligonucleotide
  Antisense strand to SEQ ID NO: 2046846
cuugagccuauaaacucuu

SEQ ID NO: 2046848 - RNA, 19 nt, Artificial Sequence
  Description of Artificial Sequence: Synthetic oligonucleotide
  Sense strand starting at position 62 of SEQ ID NO: 1881469
aaguguuggguuuaggaga

SEQ ID NO: 2046849 - RNA, 19 nt, Artificial Sequence
  Description of Artificial Sequence: Synthetic oligonucleotide
  Antisense strand to SEQ ID NO: 2046848
ucuccuaaacccaacacuu

SEQ ID NO: 2046850 - RNA, 19 nt, Artificial Sequence
  Description of Artificial Sequence: Synthetic oligonucleotide
  Sense strand starting at position 102 of SEQ ID NO: 1881469
cugucuuuccaauggaaca

SEQ ID NO: 2046851 - RNA, 19 nt, Artificial Sequence
  Description of Artificial Sequence: Synthetic oligonucleotide
  Antisense strand to SEQ ID NO: 2046850
uguuccauuggaaagacag

SEQ ID NO: 2046852 - RNA, 19 nt, Artificial Sequence
  Description of Artificial Sequence: Synthetic oligonucleotide
  Sense strand starting at position 339 of SEQ ID NO: 1881469
gaaagucuugaucacagcu

SEQ ID NO: 2046853 - RNA, 19 nt, Artificial Sequence
  Description of Artificial Sequence: Synthetic oligonucleotide
  Antisense strand to SEQ ID NO: 2046852
agcugugaucaagacuuuc

SEQ ID NO: 2046854 - RNA, 19 nt, Artificial Sequence
  Description of Artificial Sequence: Synthetic oligonucleotide
  Sense strand starting at position 433 of SEQ ID NO: 1881469
agaaauuaguagucaaagc

SEQ ID NO: 2046855 - RNA, 19 nt, Artificial Sequence
  Description of Artificial Sequence: Synthetic oligonucleotide
  Antisense strand to SEQ ID NO: 2046854
gcuuugacuacuaauuucu

SEQ ID NO: 2046856 - RNA, 19 nt, Artificial Sequence
  Description of Artificial Sequence: Synthetic oligonucleotide
  Sense strand starting at position 518 of SEQ ID NO: 1881469
uccuuuacucuuggagaaa

SEQ ID NO: 2046857 - RNA, 19 nt, Artificial Sequence
  Description of Artificial Sequence: Synthetic oligonucleotide
  Antisense strand to SEQ ID NO: 2046856
uuucuccaagaguaaagga

SEQ ID NO: 2046858 - RNA, 19 nt, Artificial Sequence
  Description of Artificial Sequence: Synthetic oligonucleotide
  Sense strand starting at position 583 of SEQ ID NO: 1881469
aguggacuuggcuggaaga

SEQ ID NO: 2046859 - RNA, 19 nt, Artificial Sequence
  Description of Artificial Sequence: Synthetic oligonucleotide
  Antisense strand to SEQ ID NO: 2046858
ucuuccagccaaguccacu

SEQ ID NO: 2046860 - RNA, 19 nt, Artificial Sequence
  Description of Artificial Sequence: Synthetic oligonucleotide
  Sense strand starting at position 584 of SEQ ID NO: 1881469
guggacuuggcuggaagaa

SEQ ID NO: 2046861 - RNA, 19 nt, Artificial Sequence
  Description of Artificial Sequence: Synthetic oligonucleotide
  Antisense strand to SEQ ID NO: 2046860
uucuuccagccaaguccac

SEQ ID NO: 2046862 - RNA, 19 nt, Artificial Sequence
  Description of Artificial Sequence: Synthetic oligonucleotide
  Sense strand starting at position 785 of SEQ ID NO: 1881469
gggugugaaucggcuauuu

SEQ ID NO: 2046863 - RNA, 19 nt, Artificial Sequence
  Description of Artificial Sequence: Synthetic oligonucleotide
  Antisense strand to SEQ ID NO: 2046862
aaauagccgauucacaccc

SEQ ID NO: 2046864 - RNA, 19 nt, Artificial Sequence
  Description of Artificial Sequence: Synthetic oligonucleotide
  Sense strand starting at position 787 of SEQ ID NO: 1881469
gugugaaucggcuauuuca

SEQ ID NO: 2046865 - RNA, 19 nt, Artificial Sequence
  Description of Artificial Sequence: Synthetic oligonucleotide
  Antisense strand to SEQ ID NO: 2046864
ugaaauagccgauucacac

SEQ ID NO: 2046866 - RNA, 19 nt, Artificial Sequence
  Description of Artificial Sequence: Synthetic oligonucleotide
  Sense strand starting at position 838 of SEQ ID NO: 1881469
gucacauuccuggagcuau

SEQ ID NO: 2046867 - RNA, 19 nt, Artificial Sequence
  Description of Artificial Sequence: Synthetic oligonucleotide
  Antisense strand to SEQ ID NO: 2046866
auagcuccaggaaugugac

SEQ ID NO: 2046868 - RNA, 19 nt, Artificial Sequence
  Description of Artificial Sequence: Synthetic oligonucleotide
  Sense strand starting at position 889 of SEQ ID NO: 1881469
ggacccugccuggaaacuu

SEQ ID NO: 2046869 - RNA, 19 nt, Artificial Sequence
  Description of Artificial Sequence: Synthetic oligonucleotide
  Antisense strand to SEQ ID NO: 2046868
aaguuuccaggcagggucc

SEQ ID NO: 2046870 - RNA, 19 nt, Artificial Sequence
  Description of Artificial Sequence: Synthetic oligonucleotide
  Sense strand starting at position 990 of SEQ ID NO: 1881469
gguggaauuuaggaagaau

SEQ ID NO: 2046871 - RNA, 19 nt, Artificial Sequence
  Description of Artificial Sequence: Synthetic oligonucleotide
  Antisense strand to SEQ ID NO: 2046870
auucuuccuaaauuccacc

SEQ ID NO: 2046872 - RNA, 19 nt, Artificial Sequence
  Description of Artificial Sequence: Synthetic oligonucleotide
  Sense strand starting at position 1225 of SEQ ID NO: 1881469
cccuguaaucgccucgcua

SEQ ID NO: 2046873 - RNA, 19 nt, Artificial Sequence
  Description of Artificial Sequence: Synthetic oligonucleotide
  Antisense strand to SEQ ID NO: 2046872
uagcgaggcgauuacaggg

SEQ ID NO: 2046874 - RNA, 19 nt, Artificial Sequence
  Description of Artificial Sequence: Synthetic oligonucleotide
  Sense strand starting at position 1226 of SEQ ID NO: 1881469
ccuguaaucgccucgcuau

SEQ ID NO: 2046875 - RNA, 19 nt, Artificial Sequence
  Description of Artificial Sequence: Synthetic oligonucleotide
  Antisense strand to SEQ ID NO: 2046874
auagcgaggcgauuacagg

SEQ ID NO: 2046876 - RNA, 19 nt, Artificial Sequence
  Description of Artificial Sequence: Synthetic oligonucleotide
  Sense strand starting at position 1578 of SEQ ID NO: 1881469
agccuuugggcgaggugua

SEQ ID NO: 2046877 - RNA, 19 nt, Artificial Sequence
  Description of Artificial Sequence: Synthetic oligonucleotide
  Antisense strand to SEQ ID NO: 2046876
uacaccucgcccaaaggcu

SEQ ID NO: 2046878 - RNA, 19 nt, Artificial Sequence
  Description of Artificial Sequence: Synthetic oligonucleotide
  Sense strand starting at position 1994 of SEQ ID NO: 1881469
agauaaugaucucuaagug

SEQ ID NO: 2046879 - RNA, 19 nt, Artificial Sequence
  Description of Artificial Sequence: Synthetic oligonucleotide
  Antisense strand to SEQ ID NO: 2046878
cacuuagagaucauuaucu

SEQ ID NO: 2046880 - RNA, 19 nt, Artificial Sequence
  Description of Artificial Sequence: Synthetic oligonucleotide
  Sense strand starting at position 1998 of SEQ ID NO: 1881469
aaugaucucuaaguggagu

SEQ ID NO: 2046881 - RNA, 19 nt, Artificial Sequence
  Description of Artificial Sequence: Synthetic oligonucleotide
  Antisense strand to SEQ ID NO: 2046880
acuccacuuagagaucauu

SEQ ID NO: 2046882 - RNA, 19 nt, Artificial Sequence
  Description of Artificial Sequence: Synthetic oligonucleotide
  Sense strand starting at position 2006 of SEQ ID NO: 1881469
cuaaguggagucuggaaau

SEQ ID NO: 2046883 - RNA, 19 nt, Artificial Sequence
  Description of Artificial Sequence: Synthetic oligonucleotide
  Antisense strand to SEQ ID NO: 2046882
auuuccagacuccacuuag

SEQ ID NO: 2046884 - RNA, 19 nt, Artificial Sequence
  Description of Artificial Sequence: Synthetic oligonucleotide
  Sense strand starting at position 2187 of SEQ ID NO: 1881469
auguuucuguaauuggaca

SEQ ID NO: 2046885 - RNA, 19 nt, Artificial Sequence
  Description of Artificial Sequence: Synthetic oligonucleotide
  Antisense strand to SEQ ID NO: 2046884
uguccaauuacagaaacau

SEQ ID NO: 2046886 - RNA, 19 nt, Artificial Sequence
  Description of Artificial Sequence: Synthetic oligonucleotide
  Sense strand starting at position 2192 of SEQ ID NO: 1881469
ucuguaauuggacaagguu

SEQ ID NO: 2046887 - RNA, 19 nt, Artificial Sequence
  Description of Artificial Sequence: Synthetic oligonucleotide
  Antisense strand to SEQ ID NO: 2046886
aaccuuguccaauuacaga

SEQ ID NO: 2046888 - RNA, 19 nt, Artificial Sequence
  Description of Artificial Sequence: Synthetic oligonucleotide
  Sense strand starting at position 2195 of SEQ ID NO: 1881469
guaauuggacaagguuaua

SEQ ID NO: 2046889 - RNA, 19 nt, Artificial Sequence
  Description of Artificial Sequence: Synthetic oligonucleotide
  Antisense strand to SEQ ID NO: 2046888
uauaaccuuguccaauuac

SEQ ID NO: 2046890 - RNA, 19 nt, Artificial Sequence
  Description of Artificial Sequence: Synthetic oligonucleotide
  Sense strand starting at position 2362 of SEQ ID NO: 1881469
uugagaggaugaguuguaa

SEQ ID NO: 2046891 - RNA, 19 nt, Artificial Sequence
  Description of Artificial Sequence: Synthetic oligonucleotide
  Antisense strand to SEQ ID NO: 2046890
uuacaacucauccucucaa

SEQ ID NO: 2046892 - RNA, 19 nt, Artificial Sequence
  Description of Artificial Sequence: Synthetic oligonucleotide
  Sense strand starting at position 2375 of SEQ ID NO: 1881469
uuguaauccuggcucauuu

SEQ ID NO: 2046893 - RNA, 19 nt, Artificial Sequence
  Description of Artificial Sequence: Synthetic oligonucleotide
  Antisense strand to SEQ ID NO: 2046892
aaaugagccaggauuacaa

SEQ ID NO: 2046894 - RNA, 19 nt, Artificial Sequence
  Description of Artificial Sequence: Synthetic oligonucleotide
  Sense strand starting at position 2478 of SEQ ID NO: 1881469
auggguuauugaccuaguu

SEQ ID NO: 2046895 - RNA, 19 nt, Artificial Sequence
  Description of Artificial Sequence: Synthetic oligonucleotide
  Antisense strand to SEQ ID NO: 2046894
aacuaggucaauaacccau

SEQ ID NO: 2046896 - RNA, 19 nt, Artificial Sequence
  Description of Artificial Sequence: Synthetic oligonucleotide
  Sense strand starting at position 2480 of SEQ ID NO: 1881469
ggguuauugaccuaguucu

SEQ ID NO: 2046897 - RNA, 19 nt, Artificial Sequence
  Description of Artificial Sequence: Synthetic oligonucleotide
  Antisense strand to SEQ ID NO: 2046896
agaacuaggucaauaaccc

SEQ ID NO: 2046898 - RNA, 19 nt, Artificial Sequence
  Description of Artificial Sequence: Synthetic oligonucleotide
  Sense strand starting at position 2626 of SEQ ID NO: 1881469
uggauaugauuacuuaccu

SEQ ID NO: 2046899 - RNA, 19 nt, Artificial Sequence
  Description of Artificial Sequence: Synthetic oligonucleotide
  Antisense strand to SEQ ID NO: 2046898
agguaaguaaucauaucca

SEQ ID NO: 2046900 - RNA, 19 nt, Artificial Sequence
  Description of Artificial Sequence: Synthetic oligonucleotide
  Sense strand starting at position 2627 of SEQ ID NO: 1881469
ggauaugauuacuuaccuu

SEQ ID NO: 2046901 - RNA, 19 nt, Artificial Sequence
  Description of Artificial Sequence: Synthetic oligonucleotide
  Antisense strand to SEQ ID NO: 2046900
aagguaaguaaucauaucc

SEQ ID NO: 2046902 - RNA, 19 nt, Artificial Sequence
  Description of Artificial Sequence: Synthetic oligonucleotide
  Sense strand starting at position 2645 of SEQ ID NO: 1881469
ugaggaacauugcuaucua

SEQ ID NO: 2046903 - RNA, 19 nt, Artificial Sequence
  Description of Artificial Sequence: Synthetic oligonucleotide
  Antisense strand to SEQ ID NO: 2046902
uagauagcaauguuccuca

SEQ ID NO: 2046904 - RNA, 19 nt, Artificial Sequence
  Description of Artificial Sequence: Synthetic oligonucleotide
  Sense strand starting at position 2705 of SEQ ID NO: 1881469
agcagaaugcauggauaaa

SEQ ID NO: 2046905 - RNA, 19 nt, Artificial Sequence
  Description of Artificial Sequence: Synthetic oligonucleotide
  Antisense strand to SEQ ID NO: 2046904
uuuauccaugcauucugcu

SEQ ID NO: 2046906 - RNA, 19 nt, Artificial Sequence
  Description of Artificial Sequence: Synthetic oligonucleotide
  Sense strand starting at position 2774 of SEQ ID NO: 1881469
cacguaauggaagagguau

SEQ ID NO: 2046907 - RNA, 19 nt, Artificial Sequence
  Description of Artificial Sequence: Synthetic oligonucleotide
  Antisense strand to SEQ ID NO: 2046906
auaccucuuccauuacgug

SEQ ID NO: 2046908 - RNA, 19 nt, Artificial Sequence
  Description of Artificial Sequence: Synthetic oligonucleotide
  Sense strand starting at position 2832 of SEQ ID NO: 1881469
ggaauacaguuauucuuau

SEQ ID NO: 2046909 - RNA, 19 nt, Artificial Sequence
  Description of Artificial Sequence: Synthetic oligonucleotide
  Antisense strand to SEQ ID NO: 2046908
auaagaauaacuguauucc

SEQ ID NO: 2046910 - RNA, 19 nt, Artificial Sequence
  Description of Artificial Sequence: Synthetic oligonucleotide
  Sense strand starting at position 3038 of SEQ ID NO: 1881469
agguauaucccugaagcuc

SEQ ID NO: 2046911 - RNA, 19 nt, Artificial Sequence
  Description of Artificial Sequence: Synthetic oligonucleotide
  Antisense strand to SEQ ID NO: 2046910
gagcuucagggauauaccu

SEQ ID NO: 2046912 - RNA, 19 nt, Artificial Sequence
  Description of Artificial Sequence: Synthetic oligonucleotide
  Sense strand starting at position 3175 of SEQ ID NO: 1881469
guggaaggaucacuuuauc

SEQ ID NO: 2046913 - RNA, 19 nt, Artificial Sequence
  Description of Artificial Sequence: Synthetic oligonucleotide
  Antisense strand to SEQ ID NO: 2046912
gauaaagugauccuuccac

SEQ ID NO: 2046914 - RNA, 19 nt, Artificial Sequence
  Description of Artificial Sequence: Synthetic oligonucleotide
  Sense strand starting at position 3181 of SEQ ID NO: 1881469
ggaucacuuuauccuggga

SEQ ID NO: 2046915 - RNA, 19 nt, Artificial Sequence
  Description of Artificial Sequence: Synthetic oligonucleotide
  Antisense strand to SEQ ID NO: 2046914
ucccaggauaaagugaucc

SEQ ID NO: 2046916 - RNA, 19 nt, Artificial Sequence
  Description of Artificial Sequence: Synthetic oligonucleotide
  Sense strand starting at position 3184 of SEQ ID NO: 1881469
ucacuuuauccugggaggu

SEQ ID NO: 2046917 - RNA, 19 nt, Artificial Sequence
  Description of Artificial Sequence: Synthetic oligonucleotide
  Antisense strand to SEQ ID NO: 2046916
accucccaggauaaaguga

SEQ ID NO: 2046918 - RNA, 19 nt, Artificial Sequence
  Description of Artificial Sequence: Synthetic oligonucleotide
  Sense strand starting at position 3185 of SEQ ID NO: 1881469
cacuuuauccugggagguu

SEQ ID NO: 2046919 - RNA, 19 nt, Artificial Sequence
  Description of Artificial Sequence: Synthetic oligonucleotide
  Antisense strand to SEQ ID NO: 2046918
aaccucccaggauaaagug

SEQ ID NO: 2046920 - RNA, 19 nt, Artificial Sequence
  Description of Artificial Sequence: Synthetic oligonucleotide
  Sense strand starting at position 3685 of SEQ ID NO: 1881469
gucaguuaaccacauuguu

SEQ ID NO: 2046921 - RNA, 19 nt, Artificial Sequence
  Description of Artificial Sequence: Synthetic oligonucleotide
  Antisense strand to SEQ ID NO: 2046920
aacaaugugguuaacugac

SEQ ID NO: 2046922 - RNA, 19 nt, Artificial Sequence
  Description of Artificial Sequence: Synthetic oligonucleotide
  Sense strand starting at position 3698 of SEQ ID NO: 1881469
auuguuucucaguauccaa

SEQ ID NO: 2046923 - RNA, 19 nt, Artificial Sequence
  Description of Artificial Sequence: Synthetic oligonucleotide
  Antisense strand to SEQ ID NO: 2046922
uuggauacugagaaacaau

SEQ ID NO: 2046924 - RNA, 19 nt, Artificial Sequence
  Description of Artificial Sequence: Synthetic oligonucleotide
  Sense strand starting at position 3731 of SEQ ID NO: 1881469
gcuugagaaagauggugau

SEQ ID NO: 2046925 - RNA, 19 nt, Artificial Sequence
  Description of Artificial Sequence: Synthetic oligonucleotide
  Antisense strand to SEQ ID NO: 2046924
aucaccaucuuucucaagc

SEQ ID NO: 2046926 - RNA, 19 nt, Artificial Sequence
  Description of Artificial Sequence: Synthetic oligonucleotide
  Sense strand starting at position 106 of SEQ ID NO: 1881470
ggagguaauuuggaacaau

SEQ ID NO: 2046927 - RNA, 19 nt, Artificial Sequence
  Description of Artificial Sequence: Synthetic oligonucleotide
  Antisense strand to SEQ ID NO: 2046926
auuguuccaaauuaccucc

SEQ ID NO: 2046928 - RNA, 19 nt, Artificial Sequence
  Description of Artificial Sequence: Synthetic oligonucleotide
  Sense strand starting at position 381 of SEQ ID NO: 1881470
gcacauaucccaggaggca

SEQ ID NO: 2046929 - RNA, 19 nt, Artificial Sequence
  Description of Artificial Sequence: Synthetic oligonucleotide
  Antisense strand to SEQ ID NO: 2046928
ugccuccugggauaugugc

SEQ ID NO: 2046930 - RNA, 19 nt, Artificial Sequence
  Description of Artificial Sequence: Synthetic oligonucleotide
  Sense strand starting at position 410 of SEQ ID NO: 1881470
cagugucugcaccaaugaa
